United States Patent Application Publication US 2018/0126003 A1 - sequence listing, part 171

SEQ ID NO: 301011 - DNA, 6368 bp, Artificial Sequence
  derived and/or modified sequence
gcgcttccggtgcgacgctgtctctccatgccaggactgagttgtgggggagggaggcggttagcgggctttagcgccttttctggcggcggtagatttgaagcgcttcaaaggaccggacccagagaagaggaaaactctaccggtgcaggagcacagggatcagttgtccttgtttttttttggtcttttcttcatttgaagattaagtattggagccatgggaataaaggttcaacgtcctcgatgtttttttgacattgccattaacaatcaacctgctggaagagttgtctttgaattattttctgatgtgtgccccaaaacatgcgagaactttcgttgtctttgtacaggtgaaaaggggaccgggaaatcaactcagaaaccattacattataagagttgtctctttcacagagttgtcaaggattttatggttcaaggtggtgacttcagtgaaggaaatggacgaggaggggaatctatctatggaggattttttgaagacgagagtttcgctgttaaacacaacaaagaatttctcttgtcaatggccaacagagggaaggatacaaatggttcacagttcttcataacaacgaaaccaactcctcatttagatgggcatcatgttgtttttggacaagtaatctctggtcaagaagttgtaagagagattgaaaaccagaaaacagatgcagctagcaaaccgtttgcggaggtacggatactcagttgtggagagctgattcccaaatctaaagttaagaaagaagaaaagaaaaggcataaatcatcatcatcttcctcctcctcatctagtgactcagatagctcaagtgattctcagtcctcttctgattcctctgattccgaaagtgctactgaagagaaatcaaagaaaagaaaaaagaaacatcggaaaaattcccgaaaacacaagaaagaaaagaaaaagcgaaagaaaagcaagaagagtgcatctagtgagagtgaagctgaaaatcttgaagcacaaccccagtctactgtccgtccagaagagatccctcctatacctgaaaatagattcctaatgagaaaaagtcctcctaaagctgatgagaaggaaaggaaaaacagagagagagaaagggaaagagagtgtaatccacctaactcccagcctgcttcataccagagacgacttttagttactagatctggcaggaaaattaaaggaagaggaccaaggcgttatcgaactccttccagatccagatcaagggatcgtttcagacgtagtgagactcctccacattggaggcaagagatgcagagagctcaaagaatgagggtatcaagtggtgaaagatggatcaagggggataagagtgagttgaatgaaataaaagaaaatcagagaagtccagttagagtaaaagagagaaaaataacagatcacaggaatgtatctgagagtccaaacagaaaaaatgaaaaggagaagaaagttaaagaccataaatctaacagcaaagagagagacatcagaagaaattcagaaaaagatgacaagtataaaaacaaagtgaagaaaagggccaaatctaaaagtaggagtaagagcaaagagaaatcaaagagtaaagaaagagattcaaaacataatagaaatgaagaaaagaggatgaggtcaaggagtaaaggaagggatcatgaaaatgttaaagaaaaagaaaagcagtctgattctaaaggaaaagatcaggaaaggagtagaagtaaagagaagtctaaacagttagaatcaaagagtaatgagcatgatcacagtaaaagtaaggaaaaggatagacgcgcacaatccaggagtagagaatgtgatataactaaaggtaaacacagttataatagcagaacaagagaacgaagcagaagtagggacagaagcagaagagtgcgatcaagaacccatgacagagatcgcagcagaagcaaggagtaccatagatacagagaacaggaatacaggagaagaggacggtcacgaagccgagagagaagaacaccaccaggaagatcaagaagtaaagataggaggagaaggaggagagactcacggagctcagagagagaagaaagtcaaagcagaaacaaagacaaatacagaaaccaagagagtaagagctcacacagaaaagaaaattctgagagtgagaaaagaatgtactctaaaagtcgtgatcataatagctcaaataacagcagggaaaaaaaggctgatagagatcaaagtcccttctcaaaaataaaacaaagcagtcaggacaatgaattaaagtcctccatgttgaaaaataaggaggatgagaagatcagatcctcagtggaaaaagaaaaccaaaaatcaaaaggtcaagaaaatgaccatgtacatgaaaaaaataaaaaatttgatcatgaatcaagccctggaacagatgaagacaaaagcggatgagtgagttatataaacttacttccattctgtttcggattttaagtttgagagacttgctaatgaatctcctttatgttgttttccttttcattgtttttggattgttttatgtttgtccttttttttcttaatgtggatttcattgagttgattttttgataatctgcaatctggataatttgtactgctaaagttttaataaactcgacatgagaaaaacactttggtgtagtactgtgtgctgtgtttaactattttatgtatgcattactgtgttgcaacaattagccaatagcatcctaatttgtttagtcagccatttggaatggttgcaatgcattgttgcaaaagcttgtgtttctcatgattaaagtaactttagaagccactagaagacatcttgtatagattttctgattgcgttataaatagaggtttgcagcggtttcttttaattacacagaagcagggtcctaataacctgagatcttaaatcatcacttttgattttatagtaatttgtgctttaaaatagatgtatttatattgcacttcatactctattctttatagttcgagccatagcttgtttcctattaatgcttttcctgtctagttgtgttttacttaactgcctataaaaatcgtaagagtaatttttttcagttgatgtactgattgagcttgagttgctgttatacagcatttgacaggaactataccttggaaaatcagattgtgattctcagttctgtgttgcttttggtttgaagagttttgggaacgttttaattattaattacccttctctaaactttaaaaaaaaaaaagcttttctcattaaaacataccatttgtgcaggtccttaagctatacagattctaaaaattgttagtattgagacattaacttctaagatttctcttttttggcctccaacctatatagaattgagtgttaactctgcatggattttgtttgttttaattgaactgacttctctaactctcatagctgtgagttccaaatggcaagaaaatgcatcttttctatatatgtatcacgataggctatagcatgtttatgactctggtttctttctcttcaggtggttttataccattactgttaatgttattttaacttggcatgtataacattgccatatagagtagagtagaaagttgcaaattttgatagtttacagagttaaacactaaacatatccaaagtccatttagagttttgggtgttgtattttgccatttttgtgatgtgtggccttttattctgtaatctcttctaaataaaacattgaacatccagcaaacataaaacctgcctcatttgaaaaggaatttcaaaattccaattaataggattctctagagagttttgtactttaatatttgtcagtgtagtgtcaactctgttaccaaggtagcttcttggtaaatccagtagctactcaatgctatttgtactgaataaagcaattattaacatgatacttcccactattgattaatgcaatattgatatatttggcgttgtggtagctgttgcagaatgaatagtgtaatgaccataagattgcttggaaaattgtaatacagatatccacaatgaattctttccaaaatttttttttccgatgataaaagtagtagatgtttattataaaatccaaggtgattgattccttagagactgaccacaaacccacattagggataattgagtctgagtgcccaagctatataacgttatgtagtttaagcaagttattgtttgtcttaatttcagttaactgcattttaaaattgttgttataaactatttgagctttaagaaaggtgctatttaagaaaggatttctaataacagttaaatattttttttaagtccatgctaagtaaaaattcttacatgttgtctgatcccagagctttatctactaaaaattatacataaggatttccaaatcttagagtttcaaaaagtaaccatagggaaaaaaattgtagtaatttctataggcaatattctgtttgggttatcaaaagagcaactccatgctccgcattatttatagtccttattttaaagttttattagctctctttacagaacagatgtgaaggagttgagaggacaatcaactagattttatttttagaatataaagaacatttttaaaatgattaaacagcattaactgtacctcaggatctgcgcatgcatctgaatagcacacggctcaaatggtcctttccttttgttacatttagtagttgtgccatctttagtttttgctttgaacattgttttcctaaaagtcaactattactttcccatcaagttggttttatagttatgtctaaatttatggttcatgtcaaagtatttttgacttaatatccttttaaaaatatttaaactgatttattgctcaattggtgatagctgagaaaattttttcaatatgtagaattttcatggttattttgtatgaattatttttctgggtaagccatctgccacagaaattgacactatggtgagattaatgttaatgaaatgagcagtagagaagctactggattgctttaaaacattctttgattaaattactacatagttggtaagttcatagttttaagttacttaattgaagccctcagaagttgcaaagaatttatctgataaatctgcctttgcacaaatgtgatactgatgcatggacggctttgcggaatgacctttgatatttgtgcctagtggaaggtatggagctaaacaattaaagaactcttcattatggataggcacatattggatctctggtattttgggtagtggtattaacttgacaattctaatttattttagttagtatatgtagcaagttagtatgtttgttagtagtttattgtacttcattccagttggtaatatagttttcatcacactaaactttttatactaaatttctgtagaagcttgttgggtttgccttcaccagaaggtactttaaatacctaccatagctgatttgttataaagaaacaaaatgggtgttcttctgtttccttttgattatgtttactgtaattatttcattttggatttatacatttacaattgaataaggattataggttgataagctgtttattgtgaaaagatgtgttttgttacaaatacttgttttaaaaattaataagcccccaggaagtacagcattgactggcacaactgcccatagtgagcttcccaactaactgccttcagtggattcgggcaagtgcaaagtctttggcctattgtgtgacaaagaggtatatattaaaggaaaagaaaaatgacatgaataagaaaattccgtcaacaaggttggagtagggagttgttgaggggtttagtttgttttaaaaggtatgtgagggagtggtggggtggatttgtgtttctgactttttttctttaagcaaattccatatgttaccaaaagcacatgctgtatattttcttccccttttgtgtgtatatagtattttgaaagataaatgaattgggtatttgtatgtgggatgtacaaaattgtggccgctctctttgtggaaggaaaaaacataaatgaagttaatgcacttcttttcctagcccaaaagtcactgtgattatatttttttaatgaagtttagaaaaaaagctgttgtcttctcaattgtaaaattagtttcaaaatgctgcttctcttatcattagtctagtaattgttgaacttttctgcaaactgcattttacaaaattgaaacttggaagctgtattaacttttatagttaaacattgtattaaataaactatactataataaa

SEQ ID NO: 301012 - DNA, 2498 bp, Artificial Sequence
  derived and/or modified sequence
tagatttgaagcgcttcaaaggaccggacccagagaagaggaaaactctaccggtgcaggtaagtggagcacagggatcagttgtccttgtttttttttggtcttttcttcatttgaagattaagtattggagccatgggaataaaggttcaacgtcctcgatgtttttttgacattgccattaacaatcaacctgctggaagagttgtctttgaattattttctgatgtgtgccccaaaacatgcgagaactttcgttgtctttgtacaggtgaaaaggggaccgggaaatcaactcagaaaccattacattataagagttgtctctttcacagagttgtcaaggattttatggttcaaggtggtgacttcagtgaaggaaatggacgaggaggggaatctatctatggaggattttttgaagacgagagtttcgctgttaaacacaacaaagaatttctcttgtcaatggccaacagagggaaggatacaaatggttcacagttcttcataacaacgaaaccaactcctcatttagatgggcatcatgttgtttttggacaagtaatctctggtcaagaagttgtaagagagattgaaaaccagaaaacagatgcagctagcaaaccgtttgcggaggtacggatactcagttgtggagagctgattcccaaatctaaagttaagaaagaagaaaagaaaaggcataaatcatcatcatcttcctcctcctcatctagtgactcagatagctcaagtgattctcagtcctcttctgattcctctgattccgaaagtgctactgaagagaaatcaaagaaaagaaaaaagaaacatcggaaaaattcccgaaaacacaagaaagaaaagaaaaagcgaaagaaaagcaagaagagtgcatctagtgagagtgaagctgaaaatcttgaagcacaaccccagtctactgtccgtccagaagagatccctcctatacctgaaaatagattcctaatgagaaaaagtcctcctaaagctgatgagaaggaaaggaaaaacagagagagagaaagggaaagagagtgtaatccacctaactcccagcctgcttcataccagagacgacttttagttactagatctggcaggaaaattaaaggaagaggaccaaggcgttatcgaactccttccagatccagatcaagggatcgtttcagacgtagtgagactcctccacattggaggcaagagatgcagagagctcaaagaatgagggtatcaagtggtgaaagatggatcaagggggataagagtgagttgaatgaaataaaagaaaatcagagaagtccagttagagtaaaagagagaaaaataacagatcacaggaatgtatctgagagtccaaacagaaaaaatgaaaaggagaagaaagttaaagaccataaatctaacagcaaagagagagacatcagaagaaattcagaaaaagatgacaagtataaaaacaaagtgaagaaaagggccaaatctaaaagtaggagtaagagcaaagagaaatcaaagagtaaagaaagagattcaaaacataatagaaatgaagaaaagaggatgaggtcaaggagtaaaggaagggatcatgaaaatgttaaagaaaaagaaaagcagtctgattctaaaggaaaagatcaggaaaggagtagaagtaaagagaagtctaaacagttagaatcaaagagtaatgagcatgatcacagtaaaagtaaggaaaaggatagacgcgcacaatccaggagtagagaatgtgatataactaaaggtaaacacagttataatagcagaacaagagaacgaagcagaagtagggacagaagcagaagagtgcgatcaagaacccatgacagagatcgcagcagaagcaaggagtaccatagatacagagaacaggaatacaggagaagaggacggtcacgaagccgagagagaagaacaccaccaggaagatcaagaagtaaagataggaggagaaggaggagagactcacggagctcagagagagaagaaagtcaaagcagaaacaaagacaaatacagaaaccaagagagtaagagctcacacagaaaagaaaattctgagagtgagaaaagaatgtactctaaaagtcgtgatcataatagctcaaataacagcagggaaaaaaaggctgatagagatcaaagtcccttctcaaaaataaaacaaagcagtcaggacaatgaattaaagtcctccatgttgaaaaataaggaggatgagaagatcagatcctcagtggaaaaagaaaaccaaaaatcaaaaggtcaagaaaatgaccatgtacatgaaaaaaataaaaaatttgatcatgaatcaagccctggaacagatgaagacaaaagcggatgagtgagttatataaacttacttccattctgtttcggattttaagtttgagagacttgctaatgaatctcctttatgttgttttccttttcattgttttt

SEQ ID NO: 301013 - DNA, 2265 bp, Artificial Sequence
  derived and/or modified sequence
atgggaatcaaggttcagcgcccaaggtgtttcttcgatattgctatcaacaatcagcctgccggaagagtggtgtttgaactcttctccgatgtgtgccccaagacctgtgaaaatttcaggtgtctgtgcactggtgagaagggaaccggcaaatcaacccagaaaccactacactataaaagttgtttatttcaccgggttgttaaagattttatggtacaggggggtgatttctcggaagggaatggtagaggcggtgaatcaatttatgggggattcttcgaggatgaatcttttgccgtaaaacacaataaggaatttttattgagcatggccaacagagggaaagatacgaatggctcacagttttttataacgacgaagccaactccacacctagacgggcaccatgtggttttcgggcaagtgatctcaggccaggaggtggtccgtgaaatcgagaatcagaaaaccgacgccgcaagcaagcctttcgcagaagtcagaatcctgtcttgtggagagctcatccctaagtctaaggtcaagaaggaggagaagaagcggcacaaatcttcttcctcatcatctagcagctcttccgattccgacagcagtagcgattctcaatcttcgtccgatagtagtgacagcgagagtgcaacagaggagaagtccaagaaacgaaaaaagaagcatagaaagaattcgcgcaagcataagaaagaaaagaagaagaggaagaagagcaaaaagagtgcgagtagcgagtcggaagctgaaaacctggaggcccagcctcagtctacggtcagaccggaagaaatacccccaattcccgagaataggtttcttatgcgtaagtcacctcccaaggcagatgaaaaggagcgtaaaaatagggaaagagagagggagcgcgaatgcaacccacccaactctcagccagcgagctatcagaggagactcctagttacacgctcgggtagaaaaatcaaagggaggggccctcgcagatatagaacgcctagccggtcacggtcaagagacagattcaggcgcagtgagactcctccccactggagacaggagatgcagcgggctcagaggatgcgcgtaagttctggagagaggtggattaaaggggacaaaagcgagcttaacgaaatcaaggagaatcaacgcagcccagtacgcgttaaggaacgaaagattaccgatcatagaaacgtcagcgaaagcccaaaccggaagaatgaaaaggaaaagaaagtcaaagaccacaagtctaacagcaaagagcgcgacatccgaaggaattccgagaaggatgataagtacaaaaacaaggtaaaaaagcgagccaagtcgaagtcacggtccaagagtaaagaaaagagcaagtctaaggagagagacagtaagcataataggaacgaagagaaacgaatgagatctagaagcaagggtagagaccatgaaaatgtcaaagagaaagagaaacagagtgatagcaagggaaaggatcaagaaagatctagatcaaaggagaagtccaagcaactcgagtcaaagtccaacgaacatgatcacagcaagtcgaaagagaaggacaggagggcccaaagcagaagccgggagtgcgatattacaaaaggaaagcactcctataacagtaggacccgggagaggtctcgctccagagatcggagccgcagagtgcgttctaggacccatgatcgggaccgcagccggtccaaggagtaccatcgctacagagagcaggaatatcgacgaagaggcagatcaaggtcccgtgagaggcggacaccccctgggagaagcaggtctaaggatcggcgtcggaggcgacgggatagcagatcaagcgagcgcgaggagtcccagtctcgaaacaaggacaagtacaggaatcaggagtctaagtccagtcataggaaggagaactccgaatccgagaaaagaatgtattctaaatcccgcgatcacaacagctccaacaattccagggagaagaaggcagatcgagatcaaagccccttcagtaagattaagcagagttcccaggataatgagttgaaatcaagtatgttgaaaaataaagaagatgaaaagatccgatcttccgtcgagaaagaaaaccaaaaatccaagggacaagagaatgatcacgtgcatgaaaagaacaaaaaattcgaccacgaaagcagccccggaaccgatgaggataagtctggctag

SEQ ID NO: 301014 - DNA, 2265 bp, Artificial Sequence
  derived and/or modified sequence
atgggaatcaaggtgcaacggcctcgctgttttttcgacatagccattaacaatcagcctgcaggaagagtagtttttgaactgttttccgacgtatgtcccaagacatgtgagaactttcgatgtctctgcacaggtgaaaaaggcactgggaagtccactcagaagcctctgcactacaaaagctgtctatttcatcgggtagtgaaagatttcatggtgcaaggtggcgacttttccgaaggcaacggacgcggaggtgaaagtatctatgggggattctttgaggacgagtcttttgcagtgaagcacaacaaggagttcctgttgtcaatggcgaatcgcggaaaagacacaaacggttctcagttctttattacaaccaaacccactccgcaccttgacggacaccacgtagtgttcgggcaggtgatttccggacaggaggttgtgcgcgaaatcgagaatcagaaaacggatgccgctagcaaacctttcgctgaggtccgcatcttatcatgcggtgagctcatccctaagagcaaagtaaagaaggaagagaagaaacgacacaagtcaagctcttcttcaagttcctccagctcagatagtgactcttcgtctgacagtcagtcttctagcgactcctccgatagcgaaagtgctacggaagaaaaaagcaagaagcgcaagaagaagcaccgcaagaatagtcggaaacataaaaaagaaaagaagaagcgaaaaaaaagcaagaagagcgcctccagcgagtcagaagccgaaaatctagaggcccagccacagtcgaccgtgagaccagaggaaatcccgccaattcccgagaacagatttttgatgcggaagagtccccctaaggccgatgagaaagaaaggaaaaaccgggaaagagagcgcgagcgagagtgtaaccccccaaacagccagcccgcatcttaccagagaagattgttggtgactcgatctggtagaaaaataaaaggcaggggtccaagacgttatcgaactccttctaggagccgtagtcgagatcggttcagaagatcagagacgcccccacattggcggcaggaaatgcaaagggcacaaagaatgagagttagctcaggcgagagatggatcaaaggtgacaaaagtgaactgaacgagattaaggaaaaccaaagatcaccagtaagagttaaagaaagaaaaattaccgatcatcggaacgtctccgagagtccaaaccggaagaatgagaaagaaaaaaaggtgaaggatcataagtcaaacagcaaagagcgcgacatacggagaaattcggagaaggacgataaatataaaaacaaagttaagaagcgcgctaagtcaaaatcacgctccaagtccaaagagaagtccaaaagtaaagaaagagactccaaacacaaccggaatgaagagaagaggatgaggtctcgtagtaaaggaagagaccacgagaacgtgaaggagaaagagaagcaatctgactcgaaaggaaaagaccaggaaaggagccgaagcaaagaaaaaagcaaacagcttgagtctaaatccaacgaacacgatcattccaagagcaaggaaaaggaccgccgagcccaatctaggagtcgggaatgtgacataactaagggcaagcattcttacaacagtagaacaagggagcggagtcgtagcagagatcgatcacggagagtaagaagtcggacacatgaccgggatcgcagtaggtctaaagagtatcatcgctatcgagagcaggaatatcgcaggcggggtcggagcagatccagagagagacgcacgccccctggccgatccaggagcaaggacaggcgcaggaggagaagggactcccgctcatccgaacgggaggaatctcagtctcgtaataaagataagtaccgcaatcaagaatccaaatcctcccacaggaaggagaacagtgagagcgaaaaacgaatgtactctaagagtagagaccataattcatccaataacagtcgagagaagaaagcagatcgggaccagagccccttcagcaagatcaagcagtcctcccaggacaatgagctaaaaagctccatgcttaagaataaagaggatgagaagattagatcctcagtcgaaaaagaaaatcagaaatccaagggtcaagagaacgaccacgtgcatgagaagaataaaaaatttgaccatgagagcagcccaggtaccgacgaggacaagtccggatag

SEQ ID NO: 301015 - DNA, 2265 bp, Artificial Sequence
  derived and/or modified sequence
atgggcatcaaggtgcagagacccagatgcttcttcgacatcgccatcaacaaccagcccgccggcagagtggtgttcgagctgttcagcgacgtgtgccccaagacctgcgagaacttcagatgcctgtgcaccggcgagaagggcaccggcaagagcacccagaagcccctgcactacaagagctgcctgttccacagagtggtgaaggacttcatggtgcagggcggcgacttcagcgagggcaacggcagaggcggcgagagcatctacggcggcttcttcgaggacgagagcttcgccgtgaagcacaacaaggagttcctgctgagcatggccaacagaggcaaggacaccaacggcagccagttcttcatcaccaccaagcccaccccccacctggacggccaccacgtggtgttcggccaggtgatcagcggccaggaggtggtgagagagatcgagaaccagaagaccgacgccgccagcaagcccttcgccgaggtgagaatcctgagctgcggcgagctgatccccaagagcaaggtgaagaaggaggagaagaagagacacaagagcagcagcagcagcagcagcagcagcagcgacagcgacagcagcagcgacagccagagcagcagcgacagcagcgacagcgagagcgccaccgaggagaagagcaagaagagaaagaagaagcacagaaagaacagcagaaagcacaagaaggagaagaagaagagaaagaagagcaagaagagcgccagcagcgagagcgaggccgagaacctggaggcccagccccagagcaccgtgagacccgaggagatcccccccatccccgagaacagattcctgatgagaaagagcccccccaaggccgacgagaaggagagaaagaacagagagagagagagagagagagagtgcaacccccccaacagccagcccgccagctaccagagaagactgctggtgaccagaagcggcagaaagatcaagggcagaggccccagaagatacagaacccccagcagaagcagaagcagagacagattcagaagaagcgagacccccccccactggagacaggagatgcagagagcccagagaatgagagtgagcagcggcgagagatggatcaagggcgacaagagcgagctgaacgagatcaaggagaaccagagaagccccgtgagagtgaaggagagaaagatcaccgaccacagaaacgtgagcgagagccccaacagaaagaacgagaaggagaagaaggtgaaggaccacaagagcaacagcaaggagagagacatcagaagaaacagcgagaaggacgacaagtacaagaacaaggtgaagaagagagccaagagcaagagcagaagcaagagcaaggagaagagcaagagcaaggagagagacagcaagcacaacagaaacgaggagaagagaatgagaagcagaagcaagggcagagaccacgagaacgtgaaggagaaggagaagcagagcgacagcaagggcaaggaccaggagagaagcagaagcaaggagaagagcaagcagctggagagcaagagcaacgagcacgaccacagcaagagcaaggagaaggacagaagagcccagagcagaagcagagagtgcgacatcaccaagggcaagcacagctacaacagcagaaccagagagagaagcagaagcagagacagaagcagaagagtgagaagcagaacccacgacagagacagaagcagaagcaaggagtaccacagatacagagagcaggagtacagaagaagaggcagaagcagaagcagagagagaagaaccccccccggcagaagcagaagcaaggacagaagaagaagaagaagagacagcagaagcagcgagagagaggagagccagagcagaaacaaggacaagtacagaaaccaggagagcaagagcagccacagaaaggagaacagcgagagcgagaagagaatgtacagcaagagcagagaccacaacagcagcaacaacagcagagagaagaaggccgacagagaccagagccccttcagcaagatcaagcagagcagccaggacaacgagctgaagagcagcatgctgaagaacaaggaggacgagaagatcagaagcagcgtggagaaggagaaccagaagagcaagggccaggagaacgaccacgtgcacgagaagaacaagaagttcgaccacgagagcagccccggcaccgacgaggacaagagcggctag

SEQ ID NO: 301016 - protein, 234 aa, Artificial Sequence
  derived and/or modified sequence
MPCGLSALIMCPKGMVAVVVAVDDGDSQALAGNKILVKQSPMLVAYDNAVNLSCKYSYNLFSREFRASLHKGLDSAVEVCVVYGNYSQQLQVYSKTGFNCDGKLGNESVTFYLQNLYVNQTDIYFCKIEVMYPPPYLDNEKSNGTIIHVKGKHLCPSPLFPGPSKPFWVLVVVGGVLACYSLLVTVAFIIFWVRSKRSRLLHSDYMNMTPRRPGPTRKHYQPYAPPRDFAAYRS

SEQ ID NO: 301017 - DNA, 705 bp, Artificial Sequence
  derived and/or modified sequence
atgccttgtggcctgtccgcactcataatgtgtccaaagggtatggtggcagttgtggtggcagttgacgatggtgatagccaggcattagccgggaataagatactcgtgaagcaatctcctatgcttgtggcatacgataatgccgttaatctcagctgcaagtacagctacaatctgttttctagagagtttcgtgcaagcctgcacaagggcttggactcggccgtagaggtgtgcgtcgtttatgggaactatagtcaacagttacaggtttacagcaaaacagggtttaattgcgacggcaagttgggaaacgaatctgttactttttatctgcagaacctgtacgtaaaccagacggatatctacttctgcaaaatcgaagttatgtacccccccccatatttggataacgagaaatccaacggtacaatcattcatgtgaagggcaaacacctctgtcctagccctttgtttcccggaccatctaaaccgttttgggtactggtggtggtcggcggcgtgctggcctgttatagtttgctggtcactgtggcctttatcatcttttgggtcagatctaagaggagcaggcttctgcatagcgattacatgaatatgactccgcgaaggcctggacccacacggaagcactaccagccatatgctcccccccgagatttcgccgcgtatcgtagctag

SEQ ID NO: 301018 - DNA, 705 bp, Artificial Sequence
  derived and/or modified sequence
atgccctgtggcctgagcgccctgatcatgtgccccaagggcatggtggccgtggtggtggccgtggatgatggagacagccaggccctggccggcaacaagatcctggtgaagcagagccccatgctggtggcctatgacaatgctgtgaacctgagctgcaagtacagctacaacctcttcagccgggagttccgggccagcctgcacaagggcctggacagcgctgtggaggtgtgtgtggtgtatggcaactacagccagcagctgcaggtgtacagcaagacaggcttcaactgtgatggcaagctgggcaatgaatctgtgaccttctacctgcagaacctgtatgtgaaccagacagacatctacttctgcaagattgaggtgatgtaccccccaccctacctggacaatgagaagagcaatggcaccatcatccacgtgaagggcaagcacctgtgccccagccccctcttccctggccccagcaagcccttctgggtgctggtggtggtgggcggcgtgctggcctgctacagcctgctggtgacagtggccttcatcatcttctgggtgcgcagcaagaggagccggctgctgcacagcgactacatgaacatgaccccaagaagacctggccccaccaggaagcactaccagccctatgccccaccccgggactttgctgcctaccgctcctag

SEQ ID NO: 301019 - DNA, 705 bp, Artificial Sequence
  derived and/or modified sequence
atgccctgcggcctgagcgccctgatcatgtgccccaagggcatggtggccgtcgtggtggctgtggacgacggtgacagtcaggcattagccggaaacaaaattctcgtgaagcagtcaccgatgttggttgcctacgataatgccgtgaatctttcttgcaaatacagctacaatctctttagcagggagttcagagcctccctgcacaaggggctagactcagcagtagaggtgtgcgtggtgtatggcaattattcccagcaactccaagtctattctaaaactggctttaactgtgacgggaagctcggcaacgaatcagtcaccttttaccttcagaacttgtacgtgaaccagacagacatttacttttgcaaaattgaagtgatgtatccgccgccttacctggataatgagaaatctaatgggacaattatccatgtgaaaggtaaacacctgtgcccatcacctctgttcccagggccatcgaaacctttttgggtgctcgtcgttgtcgggggtgtgcttgcttgctattctttattggtcaccgtcgctttcatcatcttctgggttcggtccaaaagatcacggctgctgcattcagattacatgaacatgacacccagaaggcctggacctactaggaagcactatcagccatatgccccacctcgcgattttgctgcttataggagttag

SEQ ID NO: 301020 - DNA, 705 bp, Artificial Sequence
  derived and/or modified sequence
atgccgtgcgggcttagcgccctgataatgtgcccaaagggaatggttgccgtggtcgttgcggtggacgacggagattcgcaggctctggccggtaacaaaatcctcgtcaaacagtccccaatgcttgtggcttatgacaatgccgtgaacctctcctgtaagtactcatataacttgttttcgcgggaatttcgggcttctctccataagggactggatagcgcagtggaggtgtgtgtggtgtacggaaactactcccagcagctgcaggtttattctaaaactggctttaactgtgacggcaagttaggtaatgaatcggtgacattctacttgcaaaatctatatgtcaatcagactgatatctatttctgcaagattgaagtaatgtatcctccaccctacctggataacgagaagtccaatggcactataatccacgtcaagggcaagcacctgtgcccctcccctctgtttcctggcccttccaaacctttttgggtgcttgtagtcgtcgggggtgtactggcgtgctattccctcctggtcacagttgcattcattattttctgggtgcggagcaaaagatctcgcctgctccacagcgattacatgaacatgacccctcgtaggcccggtcccacccgaaaacactatcagccttatgctccgccacgggactttgccgcttaccggtcttag

SEQ ID NO: 301021 - DNA, 705 bp, Artificial Sequence
  derived and/or modified sequence
atgccttgtggtttgagtgccttgatcatgtgccctaaggggatggtggcggtggtggtggccgtggatgacggagactctcaggccttggcaggaaacaagattttggtgaagcagtcgcccatgcttgtagcgtacgacaatgcggtcaaccttagctgcaagtattcctacaatctcttctcaagggagttccgggcatcccttcacaaaggactggatagtgctgtggaagtctgtgttgtatatgggaattactcccagcagcttcaggtttactcaaaaacggggttcaactgtgatgggaaattgggcaatgaatcagtgacattctacctccagaatttgtatgttaaccaaacagatatttacttctgcaaaattgaagttatgtatcctcctccttacctagacaatgagaagagcaatggaaccattatccatgtgaaagggaaacacctttgtccaagtcccctatttcccggaccttctaagcccttttgggtgctggtggtggttggtggagtcctggcttgctatagcttgctagtaacagtggcctttattattttctgggtgaggagtaagaggagcaggctcctgcacagtgactacatgaacatgactccccgccgccccgggcccacccgcaagcattaccagccctatgccccaccacgcgacttcgcagcctatcgctcctga

SEQ ID NO: 301022 - DNA, 705 bp, Artificial Sequence
  derived and/or modified sequence
atgccctgcggcctgagcgccctgatcatgtgccccaagggcatggtggccgtggtggtggccgtggacgacggcgacagccaggccctggccggcaacaagatcctggtgaagcagagccccatgctggtggcctacgacaacgccgtgaacctgagctgcaagtacagctacaacctgttcagcagagagttcagagccagcctgcacaagggcctggacagcgccgtggaggtgtgcgtggtgtacggcaactacagccagcagctgcaggtgtacagcaagaccggcttcaactgcgacggcaagctgggcaacgagagcgtgaccttctacctgcagaacctgtacgtgaaccagaccgacatctacttctgcaagatcgaggtgatgtacccccccccctacctggacaacgagaagagcaacggcaccatcatccacgtgaagggcaagcacctgtgccccagccccctgttccccggccccagcaagcccttctgggtgctggtggtggtgggcggcgtgctggcctgctacagcctgctggtgaccgtggccttcatcatcttctgggtgagaagcaagagaagcagactgctgcacagcgactacatgaacatgacccccagaagacccggccccaccagaaagcactaccagccctacgccccccccagagacttcgccgcctacagaagctag

SEQ ID NO: 301023 - protein, 136 aa, Artificial Sequence
  derived and/or modified sequence
MLRLLLALNLFPSIQVTGNKILVKQSPMLVAYDNAVNLSYNEKSNGTIIHVKGKHLCPSPLFPGPSKPFWVLVVVGGVLACYSLLVTVAFIIFWVRSKRSRLLHSDYMNMTPRRPGPTRKHYQPYAPPRDFAAYRS

SEQ ID NO: 301024 - DNA, 411 bp, Artificial Sequence
  derived and/or modified sequence
atgctgagactgcttctggccctaaatctcttccccagtatacaggtgacagggaacaaaattcttgtgaaacagtcgcctatgctcgttgcatacgataatgccgtaaacctgtcgtacaatgaaaaatccaatgggaccatcatccacgtaaagggaaagcatctttgcccttctccactgtttccaggcccctccaaaccattctgggtgctcgtggtggtcggtggggttttggcctgctacagcttgctggttacagtggcattcatcatcttctgggttaggagcaagagaagccggctgctccactcagactacatgaacatgacacctagaaggccaggcccaaccagaaaacactatcaaccgtacgccccgccccgcgattttgcagcttaccgctcttag

SEQ ID NO: 301025 - DNA, 411 bp, Artificial Sequence
  derived and/or modified sequence
atgctgcggctgctgctggccctgaacctcttccccagcatccaggtgactggaaacaagatcctggtgaagcagagccccatgctggtggcctatgacaatgctgtgaacctgagctacaatgagaagagcaatggcaccatcatccacgtgaagggcaagcacctgtgccccagccccctcttccctggccccagcaagcccttctgggtgctggtggtggtgggcggcgtgctggcctgctacagcctgctggtgacagtggccttcatcatcttctgggtgcgcagcaagaggagccggctgctgcacagcgactacatgaacatgaccccaagaagacctggccccaccaggaagcactaccagccctatgccccaccccgggactttgctgcctaccgctcctag

SEQ ID NO: 301026 - DNA, 411 bp, Artificial Sequence
  derived and/or modified sequence
atgctgcggctgctgctggccctgaacctgttccccagcatccaggtgacaggaaacaaaatcttagtcaaacagagccctatgttggttgcttacgataatgctgtgaacctcagctacaacgaaaagtctaatgggaccatcattcacgttaagggcaagcacctctgccctagcccgctgtttcctggcccctcaaagccgttctgggtgctggtcgtcgttggaggcgtccttgcttgttactctcttctggtgactgtagcgttcattatcttttgggttcgatctaaacgctcccgcctgctgcactccgattatatgaacatgacacctagacggccaggccccacaagaaagcattaccagccctacgcccccccccgggacttcgccgcctacagatcctag

SEQ ID NO: 301027 - DNA, 411 bp, Artificial Sequence
  derived and/or modified sequence
atgctgcgtcttctgctggccctgaacctcttccctagcattcaagtaacaggtaacaaaattctcgtgaagcagagccccatgctggtggcttatgataacgcagttaacctgagctataacgaaaaatccaacggcacgataatccacgtgaaaggaaagcatttgtgccccagcccactgttccccggtccctccaagccattctgggtacttgttgtggtgggtggagtactcgcctgctacagtctgttggttacggtggcattcataattttctgggtaaggagtaagcgttctaggctgttgcacagtgattacatgaacatgacaccgagacgtcccggacctacaaggaagcattatcagccttatgctcctccccgagatttcgcggcataccggtcttag

SEQ ID NO: 301028 - DNA, 3555 bp, Artificial Sequence
  derived and/or modified sequence
taaagtcatcaaaacaacgttatatcctgtgtgaaatgctgcagtcaggatgccttgtggtttgagtgccttgatcatgtgccctaaggggatggtggcggtggtggtggccgtggatgacggagactctcaggccttggcaggtgcgtctttcagttcccctcacacttcgggttcctcggggaggaggggctggaaccctagcccatcgtcaggacaaagatgctcaggctgctcttggctctcaacttattcccttcaattcaagtaacaggaaacaagattttggtgaagcagtcgcccatgcttgtagcgtacgacaatgcggtcaaccttagctacaatgagaagagcaatggaaccattatccatgtgaaagggaaacacctttgtccaagtcccctatttcccggaccttctaagcccttttgggtgctggtggtggttggtggagtcctggcttgctatagcttgctagtaacagtggcctttattattttctgggtgaggagtaagaggagcaggctcctgcacagtgactacatgaacatgactccccgccgccccgggcccacccgcaagcattaccagccctatgccccaccacgcgacttcgcagcctatcgctcctgacacggacgcctatccagaagccagccggctggcagcccccatctgctcaatatcactgctctggataggaaatgaccgccatctccagccggccacctcaggcccctgttgggccaccaatgccaatttttctcgagtgactagaccaaatatcaagatcattttgagactctgaaatgaagtaaaagagatttcctgtgacaggccaagtcttacagtgccatggcccacattccaacttaccatgtacttagtgacttgactgagaagttagggtagaaaacaaaaagggagtggattctgggagcctcttccctttctcactcacctgcacatctcagtcaagcaaagtgtggtatccacagacattttagttgcagaagaaaggctaggaaatcattccttttggttaaatgggtgtttaatcttttggttagtgggttaaacggggtaagttagagtagggggagggataggaagacatatttaaaaaccattaaaacactgtctcccactcatgaaatgagccacgtagttcctatttaatgctgttttcctttagtttagaaatacatagacattgtcttttatgaattctgatcatatttagtcattttgaccaaatgagggatttggtcaaatgagggattccctcaaagcaatatcaggtaaaccaagttgctttcctcactccctgtcatgagacttcagtgttaatgttcacaatatactttcgaaagaataaaatagttctcctacatgaagaaagaatatgtcaggaaataaggtcactttatgtcaaaattatttgagtactatgggacctggcgcagtggctcatgcttgtaatcccagcactttgggaggccgaggtgggcagatcacttgagatcaggaccagcctggtcaagatggtgaaactccgtctgtactaaaaatacaaaatttagcttggcctggtggcaggcacctgtaatcccagctgcccaagaggctgaggcatgagaatcgcttgaacctggcaggcggaggttgcagtgagccgagatagtgccacagctctccagcctgggcgacagagtgagactccatctcaaacaacaacaacaacaacaacaacaacaacaaaccacaaaattatttgagtactgtgaaggattatttgtctaacagttcattccaatcagaccaggtaggagctttcctgtttcatatgtttcagggttgcacagttggtctctttaatgtcggtgtggagatccaaagtgggttgtggaaagagcgtccataggagaagtgagaatactgtgaaaaagggatgttagcattcattagagtatgaggatgagtcccaagaaggttctttggaaggaggacgaatagaatggagtaatgaaattcttgccatgtgctgaggagatagccagcattaggtgacaatcttccagaagtggtcaggcagaaggtgccctggtgagagctcctttacagggactttatgtggtttagggctcagagctccaaaactctgggctcagctgctcctgtaccttggaggtccattcacatgggaaagtattttggaatgtgtcttttgaagagagcatcagagttcttaagggactgggtaaggcctgaccctgaaatgaccatggatatttttctacctacagtttgagtcaactagaatatgcctggggaccttgaagaatggcccttcagtggccctcaccatttgttcatgcttcagttaattcaggtgttgaaggagcttaggttttagaggcacgtagacttggttcaagtctcgttagtagttgaatagcctcaggcaagtcactgcccacctaagatgatggttcttcaactataaaatggagataatggttacaaatgtctcttcctatagtataatctccataagggcatggcccaagtctgtctttgactctgcctatccctgacatttagtagcatgcccgacatacaatgttagctattggtattattgccatatagataaattatgtataaaaattaaactgggcaatagcctaagaaggggggaatattgtaacacaaatttaaacccactacgcagggatgaggtgctataatatgaggaccttttaacttccatcattttcctgtttcttgaaatagtttatcttgtaatgaaatataaggcacctcccacttttatgtatagaaagaggtcttttaatttttttttaatgtgagaaggaagggaggagtaggaatcttgagattccagatcgaaaatactgtactttggttgatttttaagtgggcttccattccatggatttaatcagtcccaagaagatcaaactcagcagtacttgggtgctgaagaactgttggatttaccctggcacgtgtgccacttgccagcttcttgggcacacagagttcttcaatccaagttatcagattgtatttgaaaatgacagagctggagagttttttgaaatggcagtggcaaataaataaatacttttttttaaatggaaagacttgatctatggtaataaatgattttgttttctgactggaaaaataggcctactaaagatgaatcacacttgagatgtttcttactcactctgcacagaaacaaagaagaaatgttatacagggaagtccgttttcactattagtatgaaccaagaaatggttcaaaaacagtggtaggagcaatgctttcatagtttcagatatggtagttatgaagaaaacaatgtcatttgctgctattattgtaagagtcttataattaatggtactcctataatttttgattgtgagctcacctatttgggttaagcatgccaatttaaagagaccaagtgtatgtacattatgttctacatattcagtgataaaattactaaactacta

SEQ ID NO: 301029 - DNA, 411 bp, Artificial Sequence
  derived and/or modified sequence
atgctgagactgctgctggccctgaacctgttccccagcatccaggtgaccggcaacaagatcctggtgaagcagagccccatgctggtggcctacgacaacgccgtgaacctgagctacaacgagaagagcaacggcaccatcatccacgtgaagggcaagcacctgtgccccagccccctgttccccggccccagcaagcccttctgggtgctggtggtggtgggcggcgtgctggcctgctacagcctgctggtgaccgtggccttcatcatcttctgggtgagaagcaagagaagcagactgctgcacagcgactacatgaacatgacccccagaagacccggccccaccagaaagcactaccagccctacgccccccccagagacttcgccgcctacagaagctag

SEQ ID NO: 301030 - protein, 1279 aa, Artificial Sequence
  derived and/or modified sequence
MLQALQLRTGFFCFRVLVALSPCALHDSGRLTTGSFNVVRDEEEEIKLEINMLKKYSHHRNIATYYGAFIKKSPPGHDDQLWLVMEFCGAGSITDLVKNTKGNTLKEDWIAYISREILRGLAHLHIHHVIHRDIKGQNVLLTENAEVKLVDFGVSAQLDRTVGRRNTFIGTPYWMAPEVIACDENPDATYDYRSDLWSCGITAIEMAEGAPPLCDMHPMRALFLIPRNPPPRLKSKKWSKKFFSFIEGCLVKNYMQRPSTEQLLKHPFIRDQPNERQVRIQLKDHIDRTRKKRGEKDETEYEYSGSEEEEEEVPEQEGEPSSIVNVPGESTLRRDFLRLQQENKERSEALRRQQLLQEQQLREQEEYKRQLLAERQKRIEQQKEQRRRLEEQQRREREARRQQEREQRRREQEEKRRLEELERRRKEEEERRRAEEEKRRVEREQEYIRRQLEEEQRHLEVLQQQLLQEQAMLLHDHRRPHPQHSQQPPPPQQERSKPSFHAPEPKAHYEPADRAREVQWSHLASLKNNVSPVSRSHSFSDPSPKFAHHHLRSQDPCPPSRSEVLSQSSDSKSEAPDPTQKAWSRSDSDEVPPRVPVRTTSRSPVLSRRDSPLQGSGQQNSQAGQRNSTSSIEPRLLWERVEKLVPRPGSGSSSGSSNSGSQPGSHPGSQSGSGERFRVRSSSKSEGSPSQRLENAVKKPEDKKEVFRPLKPAVRIDLTALAKELRAVEDVRPPHKVTDYSSSSEESGTTDEEDDDVEQEGADESTSGPEDTRAASSLNLSNGETESVKTMIVHDDVESEPAMTPSKEGTLIVRQSTVDQKRASHHESNGFAGRIHLLPDLLQQSHSSSTSSTSSSPSSSQPTPTMSPQTPQDKLTANETQSASSTLQKHKSSSSFTPFIDPRLLQISPSSGTTVTSVVGFSCDGMRPEAIRQDPTRKGSVVNVNPTNTRPQSDTPEIRKYKKRFNSEILCAALWGVNLLVGTESGLMLLDRSGQGKVYPLINRRRFQQMDVLEGLNVLVTISGKKDKLRVYYLSWLRNKILHNDPEVEKKQGWTTVGDLEGCVHYKVVKYERIKFLVIALKSSVEVYAWAPKPYHKFMAFKSFGELVHKPLLVDLTVEEGQRLKVIYGSCAGFHAVDVDSGSVYDIYLPTHIQCSIKPHAIIILPNTDGMELLVCYEDEGVYVNTYGRITKDVVLQWGEMPTSVAYIRSNQTMGWGEKAIEIRSVETGHLDGVFMHKRAQRLKFLCERNDKVFFASVRSGGSSQVYFMTLGRTSLLSW

SEQ ID NO: 301031 - DNA, 3840 bp, Artificial Sequence
  derived and/or modified sequence
atgctgcaggccctgcagctgagaaccggcttcttctgcttcagagtgctggtggccctgagcccctgcgccctgcacgacagcggcagactgaccaccggcagcttcaacgtggtgagagacgaggaggaggagatcaagctggagatcaacatgctgaagaagtacagccaccacagaaacatcgccacctactacggcgccttcatcaagaagagcccccccggccacgacgaccagctgtggctggtgatggagttctgcggcgccggcagcatcaccgacctggtgaagaacaccaagggcaacaccctgaaggaggactggatcgcctacatcagcagagagatcctgagaggcctggcccacctgcacatccaccacgtgatccacagagacatcaagggccagaacgtgctgctgaccgagaacgccgaggtgaagctggtggacttcggcgtgagcgcccagctggacagaaccgtgggcagaagaaacaccttcatcggcaccccctactggatggcccccgaggtgatcgcctgcgacgagaaccccgacgccacctacgactacagaagcgacctgtggagctgcggcatcaccgccatcgagatggccgagggcgccccccccctgtgcgacatgcaccccatgagagccctgttcctgatccccagaaaccccccccccagactgaagagcaagaagtggagcaagaagttcttcagcttcatcgagggctgcctggtgaagaactacatgcagagacccagcaccgagcagctgctgaagcaccccttcatcagagaccagcccaacgagagacaggtgagaatccagctgaaggaccacatcgacagaaccagaaagaagagaggcgagaaggacgagaccgagtacgagtacagcggcagcgaggaggaggaggaggaggtgcccgagcaggagggcgagcccagcagcatcgtgaacgtgcccggcgagagcaccctgagaagagacttcctgagactgcagcaggagaacaaggagagaagcgaggccctgagaagacagcagctgctgcaggagcagcagctgagagagcaggaggagtacaagagacagctgctggccgagagacagaagagaatcgagcagcagaaggagcagagaagaagactggaggagcagcagagaagagagagagaggccagaagacagcaggagagagagcagagaagaagagagcaggaggagaagagaagactggaggagctggagagaagaagaaaggaggaggaggagagaagaagagccgaggaggagaagagaagagtggagagagagcaggagtacatcagaagacagctggaggaggagcagagacacctggaggtgctgcagcagcagctgctgcaggagcaggccatgctgctgcacgaccacagaagaccccacccccagcacagccagcagcccccccccccccagcaggagagaagcaagcccagcttccacgcccccgagcccaaggcccactacgagcccgccgacagagccagagaggtgcagtggagccacctggccagcctgaagaacaacgtgagccccgtgagcagaagccacagcttcagcgaccccagccccaagttcgcccaccaccacctgagaagccaggacccctgcccccccagcagaagcgaggtgctgagccagagcagcgacagcaagagcgaggcccccgaccccacccagaaggcctggagcagaagcgacagcgacgaggtgccccccagagtgcccgtgagaaccaccagcagaagccccgtgctgagcagaagagacagccccctgcagggcagcggccagcagaacagccaggccggccagagaaacagcaccagcagcatcgagcccagactgctgtgggagagagtggagaagctggtgcccagacccggcagcggcagcagcagcggcagcagcaacagcggcagccagcccggcagccaccccggcagccagagcggcagcggcgagagattcagagtgagaagcagcagcaagagcgagggcagccccagccagagactggagaacgccgtgaagaagcccgaggacaagaaggaggtgttcagacccctgaagcccgccgtgagaatcgacctgaccgccctggccaaggagctgagagccgtggaggacgtgagacccccccacaaggtgaccgactacagcagcagcagcgaggagagcggcaccaccgacgaggaggacgacgacgtggagcaggagggcgccgacgagagcaccagcggccccgaggacaccagagccgccagcagcctgaacctgagcaacggcgagaccgagagcgtgaagaccatgatcgtgcacgacgacgtggagagcgagcccgccatgacccccagcaaggagggcaccctgatcgtgagacagagcaccgtggaccagaagagagccagccaccacgagagcaacggcttcgccggcagaatccacctgctgcccgacctgctgcagcagagccacagcagcagcaccagcagcaccagcagcagccccagcagcagccagcccacccccaccatgagcccccagaccccccaggacaagctgaccgccaacgagacccagagcgccagcagcaccctgcagaagcacaagagcagcagcagcttcacccccttcatcgaccccagactgctgcagatcagccccagcagcggcaccaccgtgaccagcgtggtgggcttcagctgcgacggcatgagacccgaggccatcagacaggaccccaccagaaagggcagcgtggtgaacgtgaaccccaccaacaccagaccccagagcgacacccccgagatcagaaagtacaagaagagattcaacagcgagatcctgtgcgccgccctgtggggcgtgaacctgctggtgggcaccgagagcggcctgatgctgctggacagaagcggccagggcaaggtgtaccccctgatcaacagaagaagattccagcagatggacgtgctggagggcctgaacgtgctggtgaccatcagcggcaagaaggacaagctgagagtgtactacctgagctggctgagaaacaagatcctgcacaacgaccccgaggtggagaagaagcagggctggaccaccgtgggcgacctggagggctgcgtgcactacaaggtggtgaagtacgagagaatcaagttcctggtgatcgccctgaagagcagcgtggaggtgtacgcctgggcccccaagccctaccacaagttcatggccttcaagagcttcggcgagctggtgcacaagcccctgctggtggacctgaccgtggaggagggccagagactgaaggtgatctacggcagctgcgccggcttccacgccgtggacgtggacagcggcagcgtgtacgacatctacctgcccacccacatccagtgcagcatcaagccccacgccatcatcatcctgcccaacaccgacggcatggagctgctggtgtgctacgaggacgagggcgtgtacgtgaacacctacggcagaatcaccaaggacgtggtgctgcagtggggcgagatgcccaccagcgtggcctacatcagaagcaaccagaccatgggctggggcgagaaggccatcgagatcagaagcgtggagaccggccacctggacggcgtgttcatgcacaagagagcccagagactgaagttcctgtgcgagagaaacgacaaggtgttcttcgccagcgtgagaagcggcggcagcagccaggtgtacttcatgaccctgggcagaaccagcctgctgagctggtag

SEQ ID NO: 301032 - DNA, 3919 bp, Artificial Sequence
  derived and/or modified sequence
atgctacaggccttacagcttcgtactggcttcttctgttttagggtgttggtggcactttctccctgtgctttgcatgactctggcagacttaccacaggatcattcaacgttgtcagggatgaagaggaagaaatcaaactggagataaatatgctaaagaaatactctcatcacagaaacattgcaacatattatggtgctttcatcaaaaagagccctccaggacatgatgaccaactctggcttgttatggagttctgtggggctgggtccattacagaccttgtgaagaacaccaaagggaacacactcaaagaagactggatcgcttacatctccagagaaatcctgaggggactggcacatcttcacattcatcatgtgattcaccgggatatcaagggccagaatgtgttgctgactgagaatgcagaggtgaaacttgttgactttggtgtgagtgctcagctggacaggactgtggggcggagaaatacgttcataggcactccctactggatggctcctgaggtcatcgcctgtgatgagaacccagatgccacctatgattacagaagtgatctttggtcttgtggcattacagccattgagatggcagaaggtgctccccctctctgtgacatgcatccaatgagagcactgtttctcattcccagaaaccctcctccccggctgaagtcaaaaaaatggtcgaagaagttttttagttttatagaagggtgcctggtgaagaattacatgcagcggccctctacagagcagcttttgaaacatccttttataagggatcagccaaatgaaaggcaagttagaatccagcttaaggatcatatagatcgtaccaggaagaagagaggcgagaaagatgaaactgagtatgagtacagtgggagtgaggaagaagaggaggaagtgcctgaacaggaaggagagccaagttccattgtgaacgtgcctggtgagtctactcttcgccgagatttcctgagactgcagcaggagaacaaggaacgttccgaggctcttcggagacaacagttactacaggagcaacagctccgggagcaggaagaatataaaaggcaactgctggcagagagacagaagcggattgagcagcagaaagaacagaggcgacggctagaagagcaacaaaggagagagcgggaagctagaaggcagcaggaacgtgaacagcgaaggagagaacaagaagaaaagaggcgtctagaggagttggagagaaggcgcaaagaagaagaggagaggagacgggcagaagaagaaaagaggagagttgaaagagaacaggagtatatcaggcgacagctagaagaggagcagcggcacttggaagtccttcagcagcagctgctccaggagcaggccatgttactgcatgaccataggaggccgcacccgcagcactcgcagcagccgccaccaccgcagcaggaaaggagcaagccaagcttccatgctcccgagcccaaagcccactacgagcctgctgaccgagcgcgagaggtacagtggtcccacctggcatctctcaagaacaatgtttcccctgtctcgcgatcccattccttcagtgacccttctcccaaatttgcacaccaccatcttcgttctcaggacccatgtccaccttcccgcagtgaggtgctcagtcagagctctgactctaagtcagaggcgcctgaccctacccaaaaggcttggtctagatcagacagtgacgaggtgcctccaagggttcctgtgagaacaacatctcgctcccctgttctgtcccgtcgagattccccactgcagggcagtgggcagcagaatagccaggcaggacagagaaactccaccagcagtattgagcccaggcttctgtgggagagagtggagaagctggtgcccagacctggcagtggcagctcctcagggtccagcaactcaggatcccagcccgggtctcaccctgggtctcagagtggctccggggaacgcttcagagtgagatcatcatccaagtctgaaggctctccatctcagcgcctggaaaatgcagtgaaaaaacctgaagataaaaaggaagttttcagacccctcaagcctgctgtaaggattgatctgaccgcactggccaaagagcttcgagcagtggaagatgtacggccacctcacaaagtaacggactactcctcatccagtgaggagtcggggacgacggatgaggaggacgacgatgtggagcaggaaggggctgacgagtccacctcaggaccagaggacaccagagcagcgtcatctctgaatttgagcaatggtgaaacggaatctgtgaaaaccatgattgtccatgatgatgtagaaagtgagccggccatgaccccatccaaggagggcactctaatcgtccgccagagtacagttgaccaaaagcgtgccagccatcatgagagcaatggctttgccggtcgcattcacctcttgccagatctcttacagcaaagccattcctcctccacttcctccacctcctcctccccatcctccagccagccgacacccaccatgtccccacagacaccccaggacaagctcactgctaatgagactcagtccgctagtagcacactccagaaacacaaatcttcctcctcctttacaccttttatagaccccagattactacagatttctccatctagcggaacaacagtgacatctgtggtgggattttcctgtgatgggatgagaccagaagccataaggcaagatcctacccggaaaggctcagtggtcaatgtgaatcctaccaacactaggccacagagtgacaccccggagattcgtaaatacaagaagaggtttaactctgagattctgtgtgctgccttatggggagtgaatttgctagtgggtacagagagtggcctgatgctgctggacagaagtggccaagggaaggtctatcctcttatcaaccgaagacgatttcaacaaatggacgtacttgagggcttgaatgtcttggtgacaatatctggcaaaaaggataagttacgtgtctactatttgtcctggttaagaaataaaatacttcacaatgatccagaagttgagaagaagcagggatggacaaccgtaggggatttggaaggatgtgtacattataaagttgtaaaatatgaaagaatcaaatttctggtgattgctttgaagagttctgtggaagtctatgcgtgggcaccaaagccatatcacaaatttatggcctttaagtcatttggagaattggtacataagccattactggtggatctcactgttgaggaaggccagaggttgaaagtgatctatggatcctgtgctggattccatgctgttgatgtggattcaggatcagtctatgacatttatctaccaacacatatccagtgtagcatcaaaccccatgcaatcatcatcctccccaatacagatggaatggagcttctggtgtgctatgaagatgagggggtttatgtaaacacatatggaaggatcaccaaggatgtagttctacagtggggagagatgcctacatcagtagcatatattcgatccaatcagacaatgggctggggagagaaggccatagagatccgatctgtggaaactggtcacttggatggtgtgttcatgcacaaaagggctcaaagactaaaattcttgtgtgaacgcaatgacaaggtgttctttgcctctgttcggtctggtggcagcagtcaggtttatttcatgaccttaggcaggacttctcttctgagctggtagaagcagtgtgatccagggattactggcctccagagtcttcaagatcctgagaacttggaattccttgtaactggagctc

SEQ ID NO: 301033 - DNA, 3840 bp, Artificial Sequence
  derived and/or modified sequence
atgctgcaggccctgcagctgagaactgggttcttttgttttcgggtcctggtggccctttccccctgtgccctgcacgattctggaaggctgactacaggctcgtttaacgttgtgcgagatgaagaagaggaaattaaactagaaatcaatatgctaaagaagtactctcaccaccgcaacattgccacctattacggcgcattcatcaaaaaatctccaccaggtcatgacgatcaactgtggttagtgatggagttctgcggagcgggatcgatcactgacctagttaagaacactaagggaaacaccctcaaggaagattggatagcctatatcagcagagagatccttcgcggtctggcgcatctccacatccatcacgtgattcacagagacatcaagggacagaacgttctcctgacggagaatgcggaagtgaagctcgttgactttggcgtgagcgcacagctggatcgcacagttggtagacggaatacttttatcggtacaccgtactggatggctcctgaggtcatagcatgtgacgagaaccctgacgcgacctacgactatcggagtgatctctggagttgtggcatcaccgccatcgaaatggccgaaggtgctccccccctctgtgatatgcaccccatgcgggccctgttccttatccctcgaaaccctccgcccaggctaaaaagtaagaagtggagcaagaaatttttctctttcattgagggctgcctggttaaaaattacatgcagcgccccagtaccgaacagttgttgaagcaccccttcatccgcgatcagccaaatgagcggcaagtacgtattcagcttaaagaccatattgatcgaactaggaagaagaggggcgagaaagacgaaaccgagtacgaatacagcggcagcgaagaggaagaagaggaggtcccagaacaggaaggggagccttcgtccattgtgaatgtacccggagagagcaccctgcgccgggatttcttgagactccagcaggagaataaggagaggtcggaggcattacggcggcagcaactgctccaggaacagcagttgcgggagcaagaggaatacaaaagacagctgctagccgaaagacaaaaacgtattgaacagcaaaaggagcagcggcggagactcgaggaacagcagcgaagggagcgagaagcccgtaggcagcaagaaagggaacaaagacggagagagcaggaagaaaaacggaggcttgaagagcttgaacggagaaggaaggaggaagaggagcggagaagagctgaggaggaaaagcgcagggtagaaagggagcaggagtatatcaggcgtcaactcgaggaagaacagagacatttggaagtgctgcaacagcagctgctgcaagaacaggccatgctacttcacgatcataggaggccacaccctcaacattcccagcagcccccccctccacaacaggagcgctctaaacccagctttcatgctcctgagccaaaggcacactacgaacccgccgatcgcgcaagagaggtacagtggtcacacctggcatccctcaagaacaacgtatccccagtgagccggtcacattccttttcagatcccagtcctaaattcgcccaccatcatctcagaagccaggatccctgtcccccaagcagatccgaggtgctctcacagagctccgactcaaaatcggaagcccctgatcccacccagaaggcatggtctaggtctgattctgacgaggttccgccccgagtccccgtgcgcaccacgagcaggtctcctgtgttgtctcgaagagacagccctcttcagggatccggacaacaaaatagccaagccggacagcgcaacagcacttcttcaatagaaccacgtttactatgggaacgcgtagaaaagctggtgccaagacccggctcaggatcgtcttctgggtcatccaattcaggtagtcagcctggctcccatccaggctcccaatccggcagtggcgagaggttcagagtccgctccagcagcaaatccgaagggagccccagtcaaaggcttgagaacgcagtgaaaaagcccgaggataagaaagaagtcttcaggccactgaagcccgcagtgcgtattgacctgacagctctggctaaggaactgagggccgttgaggatgtgcgcccacctcacaaggttaccgactactccagctcttcagaggagagtggcacgaccgatgaggaggatgacgatgtggagcaagagggcgccgacgagtctactagcggcccggaggatacccgcgcagcatccagcctaaacctgtcaaacggggagaccgagtccgtgaagacaatgattgtacacgacgatgtagagagcgagcccgctatgaccccctcaaaagaaggaactcttatcgtaagacagtccactgttgatcagaagagggcctcccaccacgagagcaatggctttgccgggcggattcacctactgccggatctgctgcagcagtcccattccagcagcacatcatccactagttcatcacccagtagctcccagcccacacctaccatgtccccacagacacctcaggataagctgacagccaatgaaacgcaatcagcttcatctacacttcagaagcacaagagttctagctcctttacccccttcatagatcctcgcttactgcagatctctccctcctcaggaacgacagtgacatcagtagttggattttcatgcgacgggatgagaccagaagcaattcggcaagacccaacacgtaagggttccgtagtgaatgtgaatccaaccaacactagaccccagagtgacacgccagaaatccgcaaatataagaagagatttaactccgaaatattatgtgccgctttgtggggtgtgaacctgctcgtgggcacggagtctgggttgatgttgttagacagaagtggccagggcaaggtgtacccacttatcaataggagacgctttcagcagatggatgtgttggagggtctgaacgtgttagtgacgatctccggcaagaaagataagctgcgagtctattacctgtcttggcttcgcaacaagatcttacacaacgaccctgaagttgagaagaaacaaggatggaccactgtaggtgatcttgagggctgcgttcactataaggtggtgaaatacgagaggattaagttcctggtcattgctttgaaaagcagtgttgaagtttatgcatgggcccccaagccgtatcataaatttatggcgtttaagagcttcggagagctcgtccacaagccacttcttgtagatctgactgtcgaggaagggcagaggctgaaggtgatttatggaagttgtgccgggtttcacgccgtggatgttgactcagggtccgtgtatgacatctacctgcctacccatatccagtgctccatcaaacctcacgccataataattctgccaaacaccgacggaatggaacttctagtctgttatgaggacgagggtgtatatgtgaacacgtacggcagaataaccaaggatgtggtgttgcaatggggggagatgcccaccagcgtggcgtatatccgctctaaccagaccatgggatggggagagaaggcaatcgagattaggagtgtcgagactggtcatttagatggtgtatttatgcacaagagggcacagcgcctgaagtttctgtgcgagaggaacgacaaggtcttcttcgcttctgtgaggagcggtggatcttctcaagtttacttcatgacgcttggtcgtacctccctgttgtcttggtag

SEQ ID NO: 301034 - DNA, 3840 bp, Artificial Sequence
  derived and/or modified sequence
atgctgcaggccctgcagctgaggacaggcttcttctgcttccgggtgctggtggccctgagcccctgtgccctgcatgacagcggccgcctgaccaccggcagcttcaacgtggtgagagatgaggaggaggagatcaagctggagatcaacatgctgaagaagtacagccaccacaggaacatcgccacctactacggggccttcatcaagaagagccccccaggccatgatgaccagctgtggctggtgatggagttctgtggggccggcagcatcacagacctggtgaagaacaccaagggcaacaccctgaaggaggactggatcgcctacatcagccgggagatcctgcggggcctggcccacctgcacatccaccacgtgatccaccgggacatcaagggccagaatgtgctgctgacagaaaatgctgaggtgaagctggtggactttggagtgtctgcccagctggacagaacagtgggcagaagaaacaccttcatcggcaccccctactggatggcccctgaggtgattgcctgtgatgagaacccagatgccacctatgactacagaagtgacctgtggagctgtggcatcacagccatcgagatggccgagggcgccccacccctgtgtgacatgcaccccatgagggccctcttcctgatccccagaaatcctccaccccggctgaagagcaagaagtggagcaagaagttcttctccttcatcgagggctgcctggtgaagaactacatgcagaggcccagcacagagcagctgctgaagcaccccttcatccgggaccagcccaatgaaaggcaggtgcgcatccagctgaaggaccacatcgacaggaccaggaagaagagaggagagaaggatgaaacagaatatgagtacagcggcagcgaggaggaggaggaggaggtgcctgagcaggagggggagcccagcagcatcgtgaatgtgcctggagagagcaccctgcggcgggacttcctgcggctgcagcaggagaacaaggagaggtctgaggccctgcggcggcagcagctgctgcaggagcagcagctgcgggagcaggaggagtacaagaggcagctgctggccgagcggcagaagagaattgagcagcagaaggagcagaggcggcggctggaggagcagcagaggcgggagcgggaggcccggcggcagcaggagcgggagcagaggagaagagagcaggaggagaagaggcggctggaggagctggagaggaggaggaaggaggaggaggagcggcggcgggcagaggaggagaagagaagagtggagcgggagcaggagtacatccggcggcagctggaggaggagcagaggcacctggaggtgctgcagcagcagctgctgcaggagcaggccatgctgctgcatgaccaccggcggccccacccccagcacagccagcagcccccaccaccccagcaggagaggagcaagcccagcttccacgcccctgagcccaaggcccactatgagcctgctgaccgggcccgggaggtgcagtggagccacctggccagcctgaagaacaacgtgtcccctgtgagccgcagccacagcttcagtgaccccagccccaagtttgcccaccaccacctgcggagccaggacccctgcccccccagccgctctgaggtgctgagccagagcagtgacagcaagtctgaggccccagaccccacccagaaggcctggagcagaagtgacagtgatgaggtgcccccccgggtgcctgtgaggaccaccagccgcagccctgtgctgagccggcgggacagccccctgcagggcagcggccagcagaacagccaggccggccagaggaacagcaccagcagcattgagccccggctgctgtgggagcgggtggagaagctggtgccccggcccggcagcggcagcagcagcggcagcagcaacagcggcagccagcccggcagccaccctggcagccagagcggcagcggggagcgcttccgggtgcgcagcagcagcaagtctgagggcagccccagccagaggctggagaatgctgtgaagaagccagaggacaagaaggaggtgttccggcccctgaagccagctgtgagaattgacctgacagccctggccaaggagctgcgggctgtggaggatgtgcggcccccccacaaggtgacagactacagcagcagcagcgaggagagcggcaccacagatgaagaagatgatgatgtggagcaggagggcgcagatgagagcaccagcggccctgaggacacccgggccgccagcagcctgaacctgagcaatggagaaacagaatctgtgaagaccatgattgtgcatgatgatgtggagagcgagcccgccatgacccccagcaaggagggcaccctcatcgtgcggcagagcacagtggaccagaagagggccagccaccacgagagcaatggatttgctggccgcatccacctgctgcctgacctgctgcagcagagccacagcagcagcaccagcagcaccagcagcagccccagcagcagccagcccacccccaccatgagcccccagaccccccaggacaagctgacagccaatgagacccagagcgccagcagcaccctgcagaagcacaagagcagcagcagcttcacccccttcatcgacccccggctgctgcagatcagccccagcagcggcaccaccgtgacctctgtggtgggcttcagctgtgatggcatgaggcctgaggccatccggcaggaccccaccaggaagggctctgtggtgaatgtgaaccccaccaacacccggccccagagcgacaccccagagatcaggaagtacaagaagcgcttcaacagcgagatcctgtgtgccgccctgtggggcgtgaacctgctggtgggcacagaaagtggcctgatgctgctggacagaagtggccagggcaaggtgtaccccctcatcaacagaagacgcttccagcagatggatgtgctggagggcctgaatgtgctggtgaccatcagcggcaagaaggacaagctgcgggtgtactacctgtcctggctgaggaacaagatcctgcacaatgaccctgaggtggagaagaagcagggctggaccaccgtgggggacctggagggctgtgtgcactacaaggtggtgaagtatgagcgcatcaagttcctggtgattgccctgaagagctctgtggaggtgtatgcctgggcccccaagccctaccacaagttcatggccttcaagagctttggagagctggtgcacaagcccctgctggtggacctgactgtggaggagggccagaggctgaaggtgatctacggcagctgtgccggcttccacgctgtggatgtggacagcggctctgtgtatgacatctacctgcccacccacatccagtgcagcatcaagccccacgccatcatcatcctgcccaacacagatggcatggagctgctggtgtgctatgaagatgaaggagtgtatgtgaacacctacggccgcatcaccaaggatgtggtgctgcagtggggcgagatgcccacctctgtggcctacatccgcagcaaccagaccatgggctggggcgagaaggccatcgagatccgctctgtggagaccggccacctggatggagtcttcatgcacaagagggcccagaggctgaagttcctgtgtgaaagaaatgacaaggtgttctttgcctctgtgcgcagcggcggcagcagccaggtgtacttcatgaccctgggccgcaccagcctgctgtcctggtag

SEQ ID NO: 301035 - DNA, 3840 bp, Artificial Sequence
  derived and/or modified sequence
atgctgcaggccctgcagctgcggaccggcttcttctgcttccgggtgttggttgccttgagtccatgcgccctgcacgattccggtcggcttaccacaggctcattcaacgttgtcagagatgaggaagaagaaatcaagctggaaattaatatgttgaagaagtattctcatcaccggaacattgcaacctactatggtgcgtttattaagaaaagcccaccaggtcacgatgatcagttgtggctggtaatggaattctgtggtgcaggcagcataaccgatctggtgaaaaatactaaggggaacaccctgaaggaggactggatagcctatatatctcgagagatcctgcgtggtttagcccacctccacatccaccatgtgatccacagggacatcaaggggcagaacgtcctgctcaccgagaacgctgaggtgaagctagttgacttcggtgtgtcagcccaattggaccggactgtcggacggcggaataccttcattggtactccctactggatggcaccagaagtcatcgcctgcgatgaaaaccccgacgccacatatgactacaggtctgatctgtggtcctgcggtataaccgcaatagagatggccgagggggcccctcctctgtgcgatatgcacccaatgcgagctctattccttattccaagaaacccccccccaagactcaagtctaagaaatggtccaagaagttcttttccttcatcgaagggtgcctggtgaaaaattatatgcagagaccttcaactgaacagttactgaaacacccttttatccgcgatcagccaaacgagcgccaggtccggattcaactcaaagatcacatcgaccgtacacggaagaagcgaggcgagaaggacgagaccgaatacgagtattccggatcggaagaggaggaagaagaggtgccagaacaggagggagagccctccagcattgtgaatgttccaggcgaatcaacgttgcgcagagacttccttcgcctccaacaagaaaacaaagaacgaagtgaagctttacgcagacagcagctgctccaggaacagcagttgagagaacaggaggagtataagcgccaactgttggctgaaagacagaaacgcatagaacagcagaaagagcaacgtcggcgactggaagaacaacagaggcgggagcgggaagctcgacgccaacaagagagggagcagaggagacgggagcaagaggagaagcgccgccttgaagaacttgagcgccgtaggaaggaagaggaggagcgccggagagcagaggaggaaaaaaggcgggtggagcgggagcaggaatacatacggcgtcagcttgaggaggagcaacggcatctggaggtcctacagcaacagctgttgcaggaacaggccatgctgcttcacgaccacagaaggccacatccccagcactcccagcaaccacccccccctcagcaggagagatctaagccttccttccatgccccagaacctaaagcccactatgagcccgctgatagggcacgggaagtccagtggtcccacctggcctcattgaagaacaatgtcagccccgtgtcccggtcacactcctttagcgatccctcaccaaaattcgcgcaccaccatttaaggtctcaggatccttgccctccgtctagatcagaggtgctctctcaaagttcagactcgaaaagcgaggcacccgaccccactcagaaggcatggtctagaagcgacagcgacgaagtgccaccgcgcgtccccgtgcgaacaaccagccgaagtcctgtcctgagtcgacgtgactcgcctctgcagggtagcggacagcagaactcccaagccggccagagaaatagcacatctagtatagaaccacggctgttatgggaaagagtcgagaagctcgtaccaaggcccgggtccgggtctagctctggctcatctaatagtgggagccagccaggatctcaccctggctcccagtcgggttctggagagaggtttcgtgtgcggagttcttctaagagcgaggggtcaccttcccaacgactggaaaacgctgtgaaaaaacccgaagacaagaaagaagtttttcggccactgaagccggccgtcaggattgaccttacagcactggccaaggagcttagggcagtggaggacgtaaggcctccacacaaggtgacagattattcttctagctcagaagagtctggaaccacggacgaagaggatgatgatgtggaacaggaaggggccgacgagtcgaccagcggcccagaagatactagggcagctagcagtctcaacctgtccaacggagaaacagagagcgtgaaaacaatgatcgttcacgacgatgtagaatctgagcccgcaatgaccccctctaaggaggggacccttattgtacggcagtctaccgtggatcagaagagagcatctcaccatgaatcgaatggtttcgcaggaagaatccacttacttccagatctgctacagcaaagtcatagtagctcaaccagctcaacatcctcaagccccagtagctctcagcctacgcccactatgtcgcctcagaccccacaggacaaactgactgcaaatgagacccagtctgccagcagtactctgcagaaacacaagagcagcagctctttcaccccattcatcgaccctagactgcttcagatatctccctcaagcggcaccaccgtgacatcggtggtcggcttctcctgcgacggaatgcgccctgaggctattaggcaggatcctactaggaaaggatcggtcgtcaacgtcaacccaacaaataccaggcctcagtctgacacaccagagattcgaaagtataaaaaacgatttaacagcgagatcctttgtgctgccctctggggggtgaacctcctcgtcgggaccgagtcggggctcatgctgttagacaggagtgggcagggcaaggtgtacccgcttattaacagaaggagatttcagcagatggacgtgctcgaagggttaaacgtgctcgtgacaattagcgggaaaaaggataagcttcgggtgtactatctcagctggctgagaaacaaaatcctccacaatgaccccgaagttgaaaaaaaacagggctggaccacagtaggcgatctggagggatgcgtacactacaaggtcgtcaaatacgagcggatcaagttcctcgtgattgctctcaaatcctcagtggaggtgtatgcctgggctcccaagccttaccacaaatttatggcctttaagtccttcggtgaactggtccataagcctctgctggtggatctcaccgtagaggagggacagagactgaaagttatatacggttcttgcgccggattccatgcagtggacgtagacagtggcagtgtgtacgacatttacttgcctactcacatccaatgctcaatcaagccccacgccatcattatcctgcccaacacagatggcatggagcttctcgtgtgctacgaggacgagggggtttacgttaacacttatgggaggatcactaaagatgtggtgctgcagtggggcgagatgcctacatctgtcgcgtatatcagatcaaaccagactatgggatggggagaaaaggcaattgagattcgctcggttgaaaccgggcatctggacggcgtcttcatgcacaagcgcgcccagcggttgaaattcctctgcgagcgcaacgacaaagtcttctttgctagcgtgcgctcgggcggatcaagtcaggtctactttatgacgttggggaggactagcctgctatcatggtag

SEQ ID NO: 301036 - DNA, 3840 bp, Artificial Sequence
  derived and/or modified sequence
atgttgcaggctctccaactgcggaccggcttcttttgtttccgagtcctggtggccttaagcccctgcgccctccacgactcaggacgcctgaccaccggctcatttaacgtggtgcgagacgaagaagaagaaataaaactggaaataaacatgttgaagaagtacagccatcaccgcaacattgctacctattacggggcattcatcaaaaagagcccccctggccacgatgaccagctctggctcgttatggaattttgcggcgctggttcaatcaccgacctggtgaagaataccaaggggaataccttgaaagaggactggatagcttatatttctagagaaatcctgcgtggcttagcccacctacacatacaccacgtgatccatagagacattaagggacaaaacgtgctcctgaccgaaaatgctgaggtaaaattggtcgactttggggtgagtgcccaactggaccgcactgtgggcagacgtaataccttcatcggcactccatactggatggccccagaagtgatcgcctgtgatgagaatccagatgccacctacgactacaggtcggacctgtggtcttgcggcatcacagcaatcgagatggccgaaggcgctccccctctgtgtgatatgcatccaatgagggccctgttccttattcccaggaatcctcccccacggctgaagtctaagaagtggtccaagaaattcttctctttcatcgaggggtgtctcgttaagaattatatgcagcgaccttctaccgagcagctgttaaagcacccattcattagagaccagcccaatgagaggcaggtgcggattcagctcaaagatcacatagacagaacccgaaagaagagaggggagaaagatgagaccgagtatgagtactccggcagtgaggaggaggaagaagaggtgcctgagcaggaaggagaaccttcctcaatcgtcaatgtgcctggtgaatccaccctgaggcgcgactttcttcgcttacagcaagaaaataaggaacgcagtgaagcattgcgtaggcagcagctcctgcaggagcaacagctcagagaacaggaggaatataaaagacagctcttggcagaaagacagaagagaattgaacaacagaaagagcagcgcagaaggctggaagaacagcagcgcagagaacgcgaagctcggaggcagcaagagcgtgagcagcgcaggagggagcaggaggaaaagcgcagactcgaggagctggaaagaagaagaaaagaggaggaggagaggcgacgtgctgaagaggagaagaggcgcgtggaacgagagcaggaatacattcggaggcagttggaagaagaacaacgccacttagaggtactgcagcagcagctcctgcaggaacaggcaatgttgctacacgaccaccggaggccgcacccccaacattctcaacaacctcctcctcctcagcaggagcgctcaaaacccagctttcatgcaccagagcccaaggcccactatgagcccgctgatagagcgcgtgaggtgcaatggtcgcatctggcctcactcaaaaacaatgtttcccccgtgagcaggtcacactcattctccgacccttcccccaaattcgcgcaccatcatctgcgcagccaagacccttgccctccgtccaggtccgaggttctgtcacaatcctctgacagtaagtcagaagccccagatccaacacagaaagcctggagtcgttctgactccgatgaggttcctcctagggtgccggttcgaactacttcacgcagtcccgttctgtcacggagggatagccctttgcagggctcaggacagcagaattctcaggctggccagcggaactctaccagctctattgagcccagactcctgtgggagcgggtcgagaagttggtgccacgtcccggatctggatcttcaagcggctcctcaaatagcggctcacagccaggcagccatcccggatcacagagcgggtcaggagaacgattccgtgtgaggtccagctccaagtctgaggggtcccctagccagcgccttgaaaacgccgtcaagaaaccagaggataagaaagaggtgttcagaccccttaaaccagcggtgcgaatagacctgaccgccctggccaaggaactgcgagccgtggaggacgttcggcctccgcacaaagtgactgactactcctcttctagcgaggaaagcgggactactgatgaagaagacgacgacgtggagcaggagggcgctgacgagagcacatctgggcctgaggacactagagcagcctcctcgcttaatctctccaatggagagactgaatccgtcaagactatgatcgttcatgacgatgtggagtctgaaccagccatgactccctccaaggaaggtaccttgatagtccgtcagtccacagtcgatcagaagagagcatcgcaccacgagagcaacggcttcgctgggaggattcacctgttgcccgacctgctgcagcagtcccatagctcatctacctcttctaccagttcatctccgtcttcatcccagcccaccccaacaatgagcccgcaaacacctcaggataaattgacggctaacgaaacccaatccgcttcaagtactctgcagaaacataagagctcatcgtccttcacgccattcatagaccctcgcctgttgcagatctctccatccagtggcaccaccgtaacatctgtagtgggcttcagctgtgatggaatgagacccgaggctatccggcaggatcctacccgtaaaggcagcgtcgtgaatgtgaatcctaccaatactcggcctcaatctgatacccctgagatacgtaaatacaaaaaaagatttaacagtgagatcctgtgcgcggcactgtggggcgtgaacttattggtgggtactgagtcagggttgatgctgctcgacagaagtggtcagggaaaggtttacccactgataaaccggagacgctttcagcagatggacgttcttgagggacttaacgtgctggtgactatctcaggcaagaaagacaagctgcgggtctattacctctcctggcttcgcaataagattcttcataacgatcccgaagttgagaaaaagcagggatggaccactgtcggagacctcgaaggatgcgtgcattacaaagtggtgaaatacgagcgcatcaagttcctggtgattgccctgaagtcatctgtggaggtgtacgcctgggccccaaaaccctatcacaagtttatggccttcaaatcattcggcgaactggttcacaagcccttattagtggatctgacagttgaggagggccagcgtcttaaagtcatatacggctcatgcgctggatttcacgcggtggatgtggacagtgggtcagtgtatgatatttatcttcccacacatattcaatgctctattaaaccccacgccattatcatcctgcccaacaccgacggaatggagctgcttgtgtgctatgaggatgaaggcgtgtatgttaatacttacggcaggatcactaaagacgtggtgttgcagtggggcgaaatgccaactagcgtcgcgtacataagatcaaaccagacgatggggtggggtgaaaaggccattgaaattcggagcgttgagacgggccatctagacggcgtgtttatgcacaagcgtgcccagcgcctcaaattcctctgcgaaaggaatgataaagtatttttcgctagcgtgcgttctggaggcagctctcaggtgtatttcatgactctgggtaggacgtcactactgtcttggtag

SEQ ID NO: 301037 - protein, 102 aa, Artificial Sequence
  derived and/or modified sequence
MANDSPAKSLVDIDLSSLRDPAGIFELVEVVGNGTYGQVYKGRHVKTGQLAAIKVMDVTEDEEEEIKLEINMLKKYSHHRNIATYYGAFIKKSPPGHDDQLW

SEQ ID NO: 301038 - DNA, 309 bp, Artificial Sequence
  derived and/or modified sequence
atggccaacgacagccccgccaagagcctggtggacatcgacctgagcagcctgagagaccccgccggcatcttcgagctggtggaggtggtgggcaacggcacctacggccaggtgtacaagggcagacacgtgaagaccggccagctggccgccatcaaggtgatggacgtgaccgaggacgaggaggaggagatcaagctggagatcaacatgctgaagaagtacagccaccacagaaacatcgccacctactacggcgccttcatcaagaagagcccccccggccacgacgaccagctgtggtag

SEQ ID NO: 301039 - DNA, 309 bp, Artificial Sequence
  derived and/or modified sequence
atggccaatgactcacctgctaagtcactcgttgatatcgacctgagcagtttacgggacccagccggtatctttgagctggtcgaggtggtggggaatggaacatacgggcaagtttacaagggccgacacgtgaagaccgggcagctcgccgccatcaaagtgatggatgtcaccgaggacgaagaagaggagataaaactggagattaacatgctaaaaaaatatagtcatcatcgaaatatcgcaacctactatggggccttcatcaaaaaatcaccgccaggccacgacgaccagctatggtag

SEQ ID NO: 301040 - DNA, 309 bp, Artificial Sequence
  derived and/or modified sequence
atggccaatgacagccctgccaagagcctggtggacatcgacctgagcagcctgcgggaccctgctggcatctttgagctggtggaggtggtgggcaatggcacctacggccaggtgtacaagggccgccacgtgaagacaggccagctggccgccatcaaggtgatggatgtgacagaagatgaggaggaggagatcaagctggagatcaacatgctgaagaagtacagccaccacaggaacatcgccacctactacggggccttcatcaagaagagccccccaggccatgatgaccagctgtggtag

SEQ ID NO: 301041 - DNA, 309 bp, Artificial Sequence
  derived and/or modified sequence
atggccaacgacagccccgccaagagcctggtggacatcgacctgtcctccctcagagatcccgctgggattttcgagctggtagaagttgtggggaatgggacctacgggcaggtgtataaagggagacatgtgaagacaggccagcttgcagcgatcaaagtgatggacgtgacggaggatgaggaggaggagatcaaactggagatcaatatgctgaaaaagtacagtcaccacaggaatatcgccacatactacggggccttcatcaaaaagtcccctcctggacacgacgatcagctatggtag

SEQ ID NO: 301042 - DNA, 309 bp, Artificial Sequence
  derived and/or modified sequence
atggctaatgacagtcctgccaaatccttagtcgacatcgatctgtcttctctgcgggatccagctggcatttttgagcttgtcgaggtggtcggtaatggtacctacggacaggtgtacaaaggccgacacgtgaagaccgggcagctcgccgctatcaaggtgatggacgtgacagaagacgaagaggaggagatcaaactggaaataaacatgttgaaaaaatactcccaccaccgaaacattgctacatattacggcgctttcattaaaaagagccctcccggtcacgatgaccagctgtggtag

SEQ ID NO: 301043 - DNA, 526 bp, Artificial Sequence
  derived and/or modified sequence
aaacacagtgctcacctaccgagcgcagccaggagcgcagcgccagacaattacaggagctgttttggatatggccgggcagcccagcgatgctcagcgaatcccacaactacaaccacaaccgtaccacacatttagcctgcaaaagcagagaaaggaaaagaaaaccgtgcagggaagccggaaacgagggacttaagggtctcctctctaggggaaaatggcgaacgactcccctgcaaaaagtctggtggacatcgacctctcctccctgcgggatcctgctgggatttttgagctggtggaagtggttggaaatggcacctatggacaagtctataagggtcgacatgttaaaacgggtcagttggcagccatcaaagttatggatgtcactgaggatgaagaggaagaaatcaaactggagataaatatgctaaagaaatactctcatcacagaaacattgcaacatattatggtgctttcatcaaaaagagccctccaggacatgatgaccaactctgg

SEQ ID NO: 301044 - DNA, 90 bp, Artificial Sequence
  derived and/or modified sequence
atgagcagccagagccaccccgacggcctgagcggcagagaccagcccgtggagctgctgaaccccgccagagtgaaccacatgccctag

SEQ ID NO: 301045 - DNA, 90 bp, Artificial Sequence
  derived and/or modified sequence
atgagttcacaaagccacccagacggactctctggccgagaccagcctgttgaactgctcaacccggctcgagtgaaccacatgccatag

SEQ ID NO: 301046 - DNA, 90 bp, Artificial Sequence
  derived and/or modified sequence
atgagcagccagagccacccagatggcctgagcggccgggaccagcctgtggagctgctgaacccagcccgggtgaaccacatgccctag

SEQ ID NO: 301047 - DNA, 90 bp, Artificial Sequence
  derived and/or modified sequence
atgagcagccagagccaccccgacggcctgagcggccgggaccagccagttgaactcttgaaccccgcgcgggtgaaccacatgccatag

SEQ ID NO: 301048 - DNA, 90 bp, Artificial Sequence
  derived and/or modified sequence
atgtcttctcagagccacccagacggcttgagcggccgtgatcagcccgtggaattgctgaacccagccagagtgaatcacatgccttag

SEQ ID NO: 301049 - protein, 737 aa, Artificial Sequence
  derived and/or modified sequence
MDVATALPLQVAPSAVPMDLRLDHQFSLPVAEPALREQQLQQELLALKQKQQIQRQILIAEFQRQHEQLSRQHEAQLHEHIKQQQEMLAMKHQQELLEHQRKLERHRQEQELEKQHREQKLQQLKNKEKGKESAVASTEVKMKLQEFVLNKKKALAHRNLNHCISSDPRYWYGKTQHSSLDQSSPPQSGVSTSYNHPVLGMYDAKDDFPLRKTASEPNLKLRSRLKQKVAERRSSPLLRRKDGPVVTALKKRPLDVTDSACSSAPGSGPSSPNNSSGSVSAENGIAPAVPSIPAETSLAHRLVAREGSAAPLPLYTSPSLPNITLGLPATGPSAGTAGQQDAERLTLPALQQRLSLFPGTHLTPYLSTSPLERDGGAAHSPLLQHMVLLEQPPAQAPLVTDWYLSGLGALPLHAQSLVGADRVSPSIHKLRQHRPLGRTQSAPLPQNAQALQHLVIQQQHQQFLEKHKQQFQQQQLQMNKIIPKPSEPARQPESHPEETEEELREHQALLDEPYLDRLPGQKEAHAQAGVQVKQEPIESDEEEAEPPREVEPGQRQPSEQELLFRQQALLLEQQRIHQLRNYQASMEAAGIPVSFGGHRPLSRAQSSPASATFPVSVQEPPTKPRFTTGLVYDTLMLKHQCTCGSSSSHPEHAGRIQSIWSRLQETGLRGKCECIRGRKATLEELQTVHSEAHTLLYGTNPLNRQKLDSKKLLGSLASVFVRLPCGGVGVSVPLMCK

SEQ ID NO: 301050 - protein, 646 aa, Artificial Sequence
  derived and/or modified sequence
MLAMKHQQELLEHQRKLERHRQEQELEKQHREQKLQQLKNKEKGKESAVASTEVKMKLQEFVLNKKKALAHRNLNHCISSDPRYWYGKTQHSSLDQSSPPQSGVSTSYNHPVLGMYDAKDDFPLRKTASEPNLKLRSRLKQKVAERRSSPLLRRKDGPVVTALKKRPLDVTDSACSSAPGSGPSSPNNSSGSVSAENGIAPAVPSIPAETSLAHRLVAREGSAAPLPLYTSPSLPNITLGLPATGPSAGTAGQQDAERLTLPALQQRLSLFPGTHLTPYLSTSPLERDGGAAHSPLLQHMVLLEQPPAQAPLVTGLGALPLHAQSLVGADRVSPSIHKLRQHRPLGRTQSAPLPQNAQALQHLVIQQQHQQFLEKHKQQFQQQQLQMNKIIPKPSEPARQPESHPEETEEELREHQALLDEPYLDRLPGQKEAHAQAGVQVKQEPIESDEEEAEPPREVEPGQRQPSEQELLFRQQALLLEQQRIHQLRNYQASMEAAGIPVSFGGHRPLSRAQSSPASATFPVSVQEPPTKPRFTTGLVYDTLMLKHQCTCGSSSSHPEHAGRIQSIWSRLQETGLRGKCECIRGRKATLEELQTVHSEAHTLLYGTNPLNRQKLDSKKLLGSLASVFVRLPCGGVGVSVPLMCK

SEQ ID NO: 301051 - DNA, 267 bp, Artificial Sequence
  derived and/or modified sequence
atgcccggcgtggtgagcgccgccggcacccaggtgagaagactggacgaggtgcccgccagcctgagactgcagcaccacctgcagctgagagagggcctggccgtgcccctgccccccctggtgatccagagccccgccgcccaccacgtggccggcggcagcttcagcgacttcaccctggacatcgccctgggcgccagaagaatcagactggccctggtgagacaggtgacccaggacggccccgtggccttcctggcctag

SEQ ID NO: 301052 - DNA, 267 bp, Artificial Sequence
  derived and/or modified sequence
atgcccggcgtggtgagcgccgccggcacccaggtgcggcggctggatgaggttccagctagcctccggctccagcaccatctgcagctcagggaagggctagcagtgccactccctccactggttattcagtctccagccgctcatcacgtcgctggcggatctttctccgatttcaccctggacattgctctgggcgcaagaaggattaggctcgccctcgtcagacaggttactcaggacggacccgtggcgttcctggcttag

SEQ ID NO: 301053 - protein, 972 aa, Artificial Sequence
  derived and/or modified sequence
MLAMKHQQELLEHQRKLERHRQEQELEKQHREQKLQQLKNKEKGKESAVASTEVKMKLQEFVLNKKKALAHRNLNHCISSDPRYWYGKTQHSSLDQSSPPQSGVSTSYNHPVLGMYDAKDDFPLRKTASEPNLKLRSRLKQKVAERRSSPLLRRKDGPVVTALKKRPLDVTDSACSSAPGSGPSSPNNSSGSVSAENGIAPAVPSIPAETSLAHRLVAREGSAAPLPLYTSPSLPNITLGLPATGPSAGTAGQQDAERLTLPALQQRLSLFPGTHLTPYLSTSPLERDGGAAHSPLLQHMVLLEQPPAQAPLVTDWYLSGLGALPLHAQSLVGADRVSPSIHKLRQHRPLGRTQSAPLPQNAQALQHLVIQQQHQQFLEKHKQQFQQQQLQMNKIIPKPSEPARQPESHPEETEEELREHQALLDEPYLDRLPGQKEAHAQAGVQVKQEPIESDEEEAEPPREVEPGQRQPSEQELLFRQQALLLEQQRIHQLRNYQASMEAAGIPVSFGGHRPLSRAQSSPASATFPVSVQEPPTKPRFTTGLVYDTLMLKHQCTCGSSSSHPEHAGRIQSIWSRLQETGLRGKCECIRGRKATLEELQTVHSEAHTLLYGTNPLNRQKLDSKKLLGSLASVFVRLPCGGVGVDSDTIWNEVHSAGAARLAVGCVVELVFKVATGELKNGFAVVRPPGHHAEESTPMGFCYFNSVAVAAKLLQQRLSVSKILIVDWDVHHGNGTQQAFYSDPSVLYMSLHRYDDGNFFPGSGAPDEVGTGPGVGFNVNMAFTGGLDPPMGDAEYLAAFRTVVMPIASEFAPDVVLVSSGFDAVEGHPTPLGGYNLSARCFGYLTKQLMGLAGGRIVLALEGGHDLTAICDASEACVSALLGNELDPLPEKVLQQRPNANAVRSMEKVMEIHSKYWRCLQRTTSTAGRSLIEAQTCENEEAETVTAMASLSVGVKPAEKRPDEEPMEEEPPL

SEQ ID NO: 301054 - DNA, 2919 bp, Artificial Sequence
  derived and/or modified sequence
atgctggccatgaagcaccagcaggagctgctggagcaccagagaaagctggagagacacagacaggagcaggagctggagaagcagcacagagagcagaagctgcagcagctgaagaacaaggagaagggcaaggagagcgccgtggccagcaccgaggtgaagatgaagctgcaggagttcgtgctgaacaagaagaaggccctggcccacagaaacctgaaccactgcatcagcagcgaccccagatactggtacggcaagacccagcacagcagcctggaccagagcagccccccccagagcggcgtgagcaccagctacaaccaccccgtgctgggcatgtacgacgccaaggacgacttccccctgagaaagaccgccagcgagcccaacctgaagctgagaagcagactgaagcagaaggtggccgagagaagaagcagccccctgctgagaagaaaggacggccccgtggtgaccgccctgaagaagagacccctggacgtgaccgacagcgcctgcagcagcgcccccggcagcggccccagcagccccaacaacagcagcggcagcgtgagcgccgagaacggcatcgcccccgccgtgcccagcatccccgccgagaccagcctggcccacagactggtggccagagagggcagcgccgcccccctgcccctgtacaccagccccagcctgcccaacatcaccctgggcctgcccgccaccggccccagcgccggcaccgccggccagcaggacgccgagagactgaccctgcccgccctgcagcagagactgagcctgttccccggcacccacctgaccccctacctgagcaccagccccctggagagagacggcggcgccgcccacagccccctgctgcagcacatggtgctgctggagcagccccccgcccaggcccccctggtgaccgactggtacctgagcggcctgggcgccctgcccctgcacgcccagagcctggtgggcgccgacagagtgagccccagcatccacaagctgagacagcacagacccctgggcagaacccagagcgcccccctgccccagaacgcccaggccctgcagcacctggtgatccagcagcagcaccagcagttcctggagaagcacaagcagcagttccagcagcagcagctgcagatgaacaagatcatccccaagcccagcgagcccgccagacagcccgagagccaccccgaggagaccgaggaggagctgagagagcaccaggccctgctggacgagccctacctggacagactgcccggccagaaggaggcccacgcccaggccggcgtgcaggtgaagcaggagcccatcgagagcgacgaggaggaggccgagccccccagagaggtggagcccggccagagacagcccagcgagcaggagctgctgttcagacagcaggccctgctgctggagcagcagagaatccaccagctgagaaactaccaggccagcatggaggccgccggcatccccgtgagcttcggcggccacagacccctgagcagagcccagagcagccccgccagcgccaccttccccgtgagcgtgcaggagccccccaccaagcccagattcaccaccggcctggtgtacgacaccctgatgctgaagcaccagtgcacctgcggcagcagcagcagccaccccgagcacgccggcagaatccagagcatctggagcagactgcaggagaccggcctgagaggcaagtgcgagtgcatcagaggcagaaaggccaccctggaggagctgcagaccgtgcacagcgaggcccacaccctgctgtacggcaccaaccccctgaacagacagaagctggacagcaagaagctgctgggcagcctggccagcgtgttcgtgagactgccctgcggcggcgtgggcgtggacagcgacaccatctggaacgaggtgcacagcgccggcgccgccagactggccgtgggctgcgtggtggagctggtgttcaaggtggccaccggcgagctgaagaacggcttcgccgtggtgagaccccccggccaccacgccgaggagagcacccccatgggcttctgctacttcaacagcgtggccgtggccgccaagctgctgcagcagagactgagcgtgagcaagatcctgatcgtggactgggacgtgcaccacggcaacggcacccagcaggccttctacagcgaccccagcgtgctgtacatgagcctgcacagatacgacgacggcaacttcttccccggcagcggcgcccccgacgaggtgggcaccggccccggcgtgggcttcaacgtgaacatggccttcaccggcggcctggacccccccatgggcgacgccgagtacctggccgccttcagaaccgtggtgatgcccatcgccagcgagttcgcccccgacgtggtgctggtgagcagcggcttcgacgccgtggagggccaccccacccccctgggcggctacaacctgagcgccagatgcttcggctacctgaccaagcagctgatgggcctggccggcggcagaatcgtgctggccctggagggcggccacgacctgaccgccatctgcgacgccagcgaggcctgcgtgagcgccctgctgggcaacgagctggaccccctgcccgagaaggtgctgcagcagagacccaacgccaacgccgtgagaagcatggagaaggtgatggagatccacagcaagtactggagatgcctgcagagaaccaccagcaccgccggcagaagcctgatcgaggcccagacctgcgagaacgaggaggccgagaccgtgaccgccatggccagcctgagcgtgggcgtgaagcccgccgagaagagacccgacgaggagcccatggaggaggagccccccctgtag

SEQ ID NO: 301055 - DNA, 2214 bp, Artificial Sequence
  derived and/or modified sequence
atggacgtggccaccgccctgcccctgcaggtggcccccagcgccgtgcccatggacctgagactggaccaccagttcagcctgcccgtggccgagcccgccctgagagagcagcagctgcagcaggagctgctggccctgaagcagaagcagcagatccagagacagatcctgatcgccgagttccagagacagcacgagcagctgagcagacagcacgaggcccagctgcacgagcacatcaagcagcagcaggagatgctggccatgaagcaccagcaggagctgctggagcaccagagaaagctggagagacacagacaggagcaggagctggagaagcagcacagagagcagaagctgcagcagctgaagaacaaggagaagggcaaggagagcgccgtggccagcaccgaggtgaagatgaagctgcaggagttcgtgctgaacaagaagaaggccctggcccacagaaacctgaaccactgcatcagcagcgaccccagatactggtacggcaagacccagcacagcagcctggaccagagcagccccccccagagcggcgtgagcaccagctacaaccaccccgtgctgggcatgtacgacgccaaggacgacttccccctgagaaagaccgccagcgagcccaacctgaagctgagaagcagactgaagcagaaggtggccgagagaagaagcagccccctgctgagaagaaaggacggccccgtggtgaccgccctgaagaagagacccctggacgtgaccgacagcgcctgcagcagcgcccccggcagcggccccagcagccccaacaacagcagcggcagcgtgagcgccgagaacggcatcgcccccgccgtgcccagcatccccgccgagaccagcctggcccacagactggtggccagagagggcagcgccgcccccctgcccctgtacaccagccccagcctgcccaacatcaccctgggcctgcccgccaccggccccagcgccggcaccgccggccagcaggacgccgagagactgaccctgcccgccctgcagcagagactgagcctgttccccggcacccacctgaccccctacctgagcaccagccccctggagagagacggcggcgccgcccacagccccctgctgcagcacatggtgctgctggagcagccccccgcccaggcccccctggtgaccgactggtacctgagcggcctgggcgccctgcccctgcacgcccagagcctggtgggcgccgacagagtgagccccagcatccacaagctgagacagcacagacccctgggcagaacccagagcgcccccctgccccagaacgcccaggccctgcagcacctggtgatccagcagcagcaccagcagttcctggagaagcacaagcagcagttccagcagcagcagctgcagatgaacaagatcatccccaagcccagcgagcccgccagacagcccgagagccaccccgaggagaccgaggaggagctgagagagcaccaggccctgctggacgagccctacctggacagactgcccggccagaaggaggcccacgcccaggccggcgtgcaggtgaagcaggagcccatcgagagcgacgaggaggaggccgagccccccagagaggtggagcccggccagagacagcccagcgagcaggagctgctgttcagacagcaggccctgctgctggagcagcagagaatccaccagctgagaaactaccaggccagcatggaggccgccggcatccccgtgagcttcggcggccacagacccctgagcagagcccagagcagccccgccagcgccaccttccccgtgagcgtgcaggagccccccaccaagcccagattcaccaccggcctggtgtacgacaccctgatgctgaagcaccagtgcacctgcggcagcagcagcagccaccccgagcacgccggcagaatccagagcatctggagcagactgcaggagaccggcctgagaggcaagtgcgagtgcatcagaggcagaaaggccaccctggaggagctgcagaccgtgcacagcgaggcccacaccctgctgtacggcaccaaccccctgaacagacagaagctggacagcaagaagctgctgggcagcctggccagcgtgttcgtgagactgccctgcggcggcgtgggcgtgagcgtgcccctgatgtgcaagtag

SEQ ID NO: 301056 - DNA, 2919 bp, Artificial Sequence
  derived and/or modified sequence
atgctagcaatgaagcatcaacaggagctgttagaacaccaacgcaaactagaaaggcataggcaggagcaagagcttgaaaagcaacaccgcgaacaaaagctgcaacagcttaagaacaaggaaaagggtaaagagtcggccgtggcctctacagaggtgaagatgaaactacaagaatttgtcctgaacaaaaaaaaggccctcgcacaccgaaacctgaatcattgtatttcctccgatccacgttactggtacggtaagactcagcattctagtctcgatcagagctcccctccccagtccggcgtttctactagttataaccacccggtgttgggaatgtacgacgccaaggatgatttccctttgcggaaaactgccagtgagcctaatttgaaactcaggtcgcgcttgaagcagaaagtggcagagagaaggagctctccactgttaaggcgaaaggatgggcctgtggtgaccgcactgaagaaacgacccttggacgtcacagacagtgcttgcagttctgcaccgggaagcggaccgtcctcccctaacaatagttcgggtagcgtgagcgccgagaacggtatagcacctgctgtgccctctattccagccgaaacatccctcgctcatcggctggtagccagggagggtagcgccgcccccctgcctctatacacttcgcccagcctccctaacatcaccctgggactgccggccacgggccccagcgccggcactgccgggcagcaggacgctgaaaggctgacattgcccgcactgcagcaaagactgtctctgttccccggaacacacctcaccccttacctgagcacatcaccactcgagcgggacggaggagccgcccacagtcctttgcttcagcacatggtcctgttggaacagcctcctgcacaggcgccacttgtgacagactggtatttgtccggattaggagctctgccattgcacgcccaatctttggttggcgctgacagagtctccccttccatccacaagctgcggcaacatagaccccttggccggacccagtcagccccccttcctcagaacgctcaggccctgcagcacctggtgatccagcagcaacaccagcaattcctggagaaacataaacaacagttccagcagcagcagctgcagatgaataagattattccaaagccctctgagcccgcaagacagccagaaagccaccccgaggagactgaggaggaactgcgggaacatcaggcattactggacgagccatatcttgacagattgcccggccaaaaggaggcccacgcgcaggccggggtgcaagtcaagcaggaacccattgaaagcgacgaggaggaggcagagccaccacgcgaggtcgaaccgggccaacgccaacccagtgagcaagagctgctgttccgacagcaggctctgttgctggaacaacagcgcattcaccagctccgcaactatcaggctagcatggaggcagcgggaatccccgtgtcctttggtgggcacaggccactatcccgtgcccagtcttcccccgccagcgctacgttccctgtcagcgtacaagaaccaccgacaaagccccgattcaccactggattagtctatgacaccctgatgctcaagcaccaatgtacttgcggatcttcatcaagccacccagaacatgctggccgaattcagtccatttggagcagattacaagagactggccttagaggcaagtgcgaatgcatacggggtcgcaaggcgacactagaggagcttcagacagtacattccgaggcccataccctgctctacggaaccaacccgctaaacagacaaaaactggactcgaagaaactgctgggatcgctggcatccgtctttgtgagattgccatgtgggggtgtcggtgtggactcagatacaatctggaacgaggtgcactcagccggcgcagctagactggccgtgggttgtgtcgtcgagctggtctttaaggtagctacaggagagctgaaaaatggattcgctgtggtgcgtccacctggacaccatgccgaagagagtacccccatgggtttctgttattttaacagcgtcgccgtagccgctaagttgctacaacaacggctgtcagtgtctaagattctcatcgtggattgggatgtacatcatggcaatgggacacagcaggccttttattcggacccgtcggtgctttatatgtctctgcacaggtatgacgatgggaatttttttccagggagcggcgctcccgatgaagtggggaccggtccaggcgtgggctttaacgttaacatggcatttactggtggtctggaccctcctatgggcgacgccgaatatctggcagcctttcgcaccgtggtgatgccaatcgccagcgaatttgcccctgacgtggtgctagtctcttcggggtttgatgctgtggagggtcaccctacaccactcgggggctacaatctgtcagcccgttgcttcggctatctcaccaagcagctcatgggtttggccggtggccgaatcgtcctggccctggagggcggacacgaccttacagccatctgcgacgcatcagaagcttgcgtctctgccctcctgggcaatgagttagacccactgcccgaaaaagtgctccagcagagacctaatgccaatgccgtgcgttctatggaaaaagtgatggaaatccacagcaagtattggaggtgtttacagaggaccacatcaaccgctggccgatccctgatagaggctcagacttgcgagaacgaagaagccgagacagtcactgccatggcctcactctctgtaggtgtgaagccggctgagaaaaggcctgacgaagagcctatggaggaggagcctcccttatag

SEQ ID NO: 301057 - DNA, 2214 bp, Artificial Sequence
  derived and/or modified sequence
atggacgtcgcaacagcgctgcctctccaggtggctccttccgccgtcccaatggacctccggctcgaccaccagttcagcctgcctgtggccgagcccgcactgcgagagcagcaactgcagcaggaactcctcgccctgaaacagaagcagcagatccagcggcagattctcatcgcggagttccagcgacagcacgagcaactgtctcgacagcacgaggcgcagctccatgaacacattaaacaacaacaggagatgttagcaatgaagcatcagcaggagctgttggagcaccaacgaaagctggagcgccacaggcaggagcaagagctagagaagcagcatcgggaacagaagctgcaacagttgaagaataaggaaaagggcaaggagagcgcggtggcctcaacggaggttaagatgaagctccaggagtttgtccttaataaaaagaaagccctggcccaccgaaatttgaatcactgtatctcctccgaccccaggtactggtatggcaagacacaacatagcagcttggaccagagctcacctccacagagtggcgtgagcaccagctacaatcacccagtgctagggatgtacgatgcgaaagacgacttcccgcttagaaaaacagcttcagaacccaacctcaagctgcggagtaggctgaagcaaaaggttgccgaacgtagatcatcgcccctcctcagacgcaaagacggtccagtggtgactgctctgaagaaacgacctcttgacgtgaccgactccgcttgcagtagcgcccccgggagcggcccaagtagtcccaataattcgtctggcagtgtttctgcagagaatggaatcgcccctgctgtccctagtattcctgccgaaacaagcctggcgcataggctcgtcgcccgagagggcagtgcggcccccctgcctttatacacctctccttccttgcccaacatcaccctgggcctgccagctacgggaccaagcgcaggaactgctggccagcaggacgccgaacgcttgaccctgcctgccctgcagcagcgtctatccctgttcccaggcacacatttaaccccttacctgagtacctctccccttgaacgagacggaggagccgcccactcacctcttttgcagcacatggtcctcctcgaacagccacccgctcaggcgcctctcgtgaccgattggtacctgtcagggttgggcgcactgcctctccatgcccagagccttgttggagcagatcgcgtgtctccatccatccacaagcttaggcaacatcggcccctgggtaggacacaaagcgctccgctcccacaaaacgcacaggccctgcagcatctggttattcaacaacagcatcagcagttcctcgagaaacataaacagcagttccagcaacagcagttgcagatgaacaagatcatacctaagccaagcgagcccgcacgacagccagagagccaccccgaggagacagaggaggagctccgcgaacaccaggcactcctggacgaaccatatctcgaccggctcccgggtcagaaggaggcccacgctcaggcaggggtgcaagtgaaacaagagcctatcgagagcgatgaagaggaggccgagcccccacgggaagttgagccgggacagagacagccatccgagcaggagctcctgttccgccagcaagctctgctgcttgaacaacagcgcatacaccagctgagaaactaccaggcgagcatggaggctgccggcattccggtctccttcggtgggcacaggccccttagccgcgcccagtcctcccctgcctcagctacgttccccgtaagtgttcaggaaccgcccaccaaaccacgctttaccaccggacttgtctatgacacactgatgctgaaacaccagtgtacctgcggcagcagcagttcccatccagagcacgccggtaggatccagagtatttggagccgtctgcaggagacgggcctgcggggaaaatgcgagtgtatcaggggcaggaaagcgacccttgaagaactccagacagtacattctgaggcacacaccctgctgtacggcactaatccactaaatcgccaaaagctggactcaaaaaaattgttaggaagcttggctagtgtattcgtgcggctcccctgcggtggagttggggtcagcgtcccactgatgtgcaaatag

SEQ ID NO: 301058 - DNA, 3745 bp, Artificial Sequence
  derived and/or modified sequence
ccgcctggctcgacgctggagtggggagaagcatcatggttcaacgttcatctgcagaagccagcggacgcctctgttcaacttgtgggttacctggctcatgagaccttgccggcgaggctcggcgcttgaacgtctgtgacccagccctcaccgtcccggtacttgtatgtgttggtgggagtttggagctcgttggagctatcgtttccgtggaaattttgagccatttcgaatcacttaaaggagtggacattgctagcaatgagctcccaaagccatccagatggactttctggccgagaccagccagtggagctgctgaatcctgcccgcgtgaaccacatgcccagcacgaggcgcagctccacgagcacatcaagcaacaacaggagatgctggccatgaagcaccagcaggagctgctggaacaccagcggaagctggagaggcaccgccaggagcaggagctggagaagcagcaccgggagcagaagctgcagcagctcaagaacaaggagaagggcaaagagagtgccgtggccagcacagaagtgaagatgaagttacaagaatttgtcctcaataaaaagaaggcgctggcccaccggaatctgaaccactgcatttccagcgaccctcgctactggtacgggaaaacgcagcacagttcccttgaccagagttctccaccccagagcggagtgtcgacctcctataaccacccggtcctgggaatgtacgacgccaaagatgacttccctcttaggaaaacagcttctgaaccgaatctgaaattacggtccaggctaaagcagaaagtggccgaaagacggagcagccccctgttacgcaggaaagacgggccagtggtcactgctctaaaaaagcgtccgttggatgtcacagactccgcgtgcagcagcgccccaggctccggacccagctcacccaacaacagctccgggagcgtcagcgcggagaacggtatcgcgcccgccgtccccagcatcccggcggagacgagtttggcgcacagacttgtggcacgagaaggctcggccgctccacttcccctctacacatcgccatccttgcccaacatcacgctgggcctgcctgccaccggcccctctgcgggcacggcgggccagcaggacgccgagagactcacccttcccgccctccagcagaggctctcccttttccccggcacccacctcactccctacctgagcacctcgcccttggagcgggacggaggggcagcgcacagccctcttctgcagcacatggtcttactggagcagccgccggcacaagcacccctcgtcacagactggtatctttcaggcctgggagcactgcccctccacgcacagtccttggttggtgcagaccgggtgtccccctccatccacaagctgcggcagcaccgcccactggggcggacccagtcggccccgctgccccagaacgcccaggctctgcagcacctggtcatccagcagcagcatcagcagtttctggagaaacacaagcagcagttccagcagcagcaactgcagatgaacaagatcatccccaagccaagcgagccagcccggcagccggagagccacccggaggagacggaggaggagctccgtgagcaccaggctctgctggacgagccctacctggaccggctgccggggcagaaggaggcgcacgcacaggccggcgtgcaggtgaagcaggagcccattgagagcgatgaggaagaggcagagcccccacgggaggtggagccgggccagcgccagcccagtgagcaggagctgctcttcagacagcaagccctcctgctggagcagcagcggatccaccagctgaggaactaccaggcgtccatggaggccgccggcatccccgtgtccttcggcggccacaggcctctgtcccgggcgcagtcctcacccgcgtctgccaccttccccgtgtctgtgcaggagccccccaccaagccgaggttcacgacaggcctcgtgtatgacacgctgatgctgaagcaccagtgcacctgcgggagtagcagcagccaccccgagcacgccgggaggatccagagcatctggtcccgcctgcaggagacgggcctccggggcaaatgcgagtgcatccgcggacgcaaggccaccctggaggagctacagacggtgcactcggaagcccacaccctcctgtatggcacgaaccccctcaaccggcagaaactggacagtaagaaacttctaggctcgctcgcctccgtgttcgtccggctcccttgcggtggtgttggggtggacagtgacaccatatggaacgaggtgcactcggcgggggcagcccgcctggctgtgggctgcgtggtagagctggtcttcaaggtggccacaggggagctgaagaatggctttgctgtggtccgcccccctggacaccatgcggaggagagcacgcccatgggcttttgctacttcaactccgtggccgtggcagccaagcttctgcagcagaggttgagcgtgagcaagatcctcatcgtggactgggacgtgcaccatggaaacgggacccagcaggctttctacagcgaccccagcgtcctgtacatgtccctccaccgctacgacgatgggaacttcttcccaggcagcggggctcctgatgaggtgggcacagggcccggcgtgggtttcaacgtcaacatggctttcaccggcggcctggacccccccatgggagacgctgagtacttggcggccttcagaacggtggtcatgccgatcgccagcgagtttgccccggatgtggtgctggtgtcatcaggcttcgatgccgtggagggccaccccacccctcttgggggctacaacctctccgccagatgcttcgggtacctgacgaagcagctgatgggcctggctggcggccggattgtcctggccctcgagggaggccacgacctgaccgccatttgcgacgcctcggaagcatgtgtttctgccttgctgggaaacgagcttgatcctctcccagaaaaggttttacagcaaagacccaatgcaaacgctgtccgttccatggagaaagtcatggagatccacagcaagtactggcgctgcctgcagcgcacaacctccacagcggggcgttctctgatcgaggctcagacttgcgagaacgaagaagccgagacggtcaccgccatggcctcgctgtccgtgggcgtgaagcccgccgaaaagagaccagatgaggagcccatggaagaggagccgcccctgtagcactccctcgaagctgctgttctcttgtctgtctgtctctgtcttgaagctcagccaagaaactttcccgtgtcacgcctgcgtcccaccgtggggctctcttggagcacccagggacacccagcgtgcaacagccacgggaagcctttctgccgcccaggcccacaggtctcgagacgcacatgcacgcctgggcgtggcagcctcacagggaacacgggacagacgccggcgacgcgcagacacacggacacgcggaagccaagcacactctggcgggtcccgcaagggacgccgtggaagaaaggagcctgtggcaacaggcggccgagctgccgaattcagttgacacgaggcacagaaaacaaatatcaaagatctaataatacaaaacaaacttgattaaaactggtgcttaaagtttattaccc

SEQ ID NO: 301059 - DNA, 2775 bp, Artificial Sequence
  derived and/or modified sequence
agttttcggcagagtcgcgtgtctgagaagtgacgctgggatgtccctgggctgtgccaggagcagtgctggctcagatggatgtggccacggcgctgcctctgcaagtggccccctcggcagtgcccatggacctgcgcctggaccaccagttctcactgcctgtggcagagccggccctgcgggagcagcagctgcagcaggagctcctggcgctcaagcagaagcagcagatccagaggcagatcctcatcgctgagttccagaggcagcacgagcagctctcccggcagcacgaggcgcagctccacgagcacatcaagcaacaacaggagatgctggccatgaagcaccagcaggagctgctggaacaccagcggaagctggagaggcaccgccaggagcaggagctggagaagcagcaccgggagcagaagctgcagcagctcaagaacaaggagaagggcaaagagagtgccgtggccagcacagaagtgaagatgaagttacaagaatttgtcctcaataaaaagaaggcgctggcccaccggaatctgaaccactgcatttccagcgaccctcgctactggtacgggaaaacgcagcacagttcccttgaccagagttctccaccccagagcggagtgtcgacctcctataaccacccggtcctgggaatgtacgacgccaaagatgacttccctcttaggaaaacagcttctgaaccgaatctgaaattacggtccaggctaaagcagaaagtggccgaaagacggagcagccccctgttacgcaggaaagacgggccagtggtcactgctctaaaaaagcgtccgttggatgtcacagactccgcgtgcagcagcgccccaggctccggacccagctcacccaacaacagctccgggagcgtcagcgcggagaacggtatcgcgcccgccgtccccagcatcccggcggagacgagtttggcgcacagacttgtggcacgagaaggctcggccgctccacttcccctctacacatcgccatccttgcccaacatcacgctgggcctgcctgccaccggcccctctgcgggcacggcgggccagcaggacgccgagagactcacccttcccgccctccagcagaggctctcccttttccccggcacccacctcactccctacctgagcacctcgcccttggagcgggacggaggggcagcgcacagccctcttctgcagcacatggtcttactggagcagccgccggcacaagcacccctcgtcacagactggtatctttcaggcctgggagcactgcccctccacgcacagtccttggttggtgcagaccgggtgtccccctccatccacaagctgcggcagcaccgcccactggggcggacccagtcggccccgctgccccagaacgcccaggctctgcagcacctggtcatccagcagcagcatcagcagtttctggagaaacacaagcagcagttccagcagcagcaactgcagatgaacaagatcatccccaagccaagcgagccagcccggcagccggagagccacccggaggagacggaggaggagctccgtgagcaccaggctctgctggacgagccctacctggaccggctgccggggcagaaggaggcgcacgcacaggccggcgtgcaggtgaagcaggagcccattgagagcgatgaggaagaggcagagcccccacgggaggtggagccgggccagcgccagcccagtgagcaggagctgctcttcagacagcaagccctcctgctggagcagcagcggatccaccagctgaggaactaccaggcgtccatggaggccgccggcatccccgtgtccttcggcggccacaggcctctgtcccgggcgcagtcctcacccgcgtctgccaccttccccgtgtctgtgcaggagccccccaccaagccgaggttcacgacaggcctcgtgtatgacacgctgatgctgaagcaccagtgcacctgcgggagtagcagcagccaccccgagcacgccgggaggatccagagcatctggtcccgcctgcaggagacgggcctccggggcaaatgcgagtgcatccgcggacgcaaggccaccctggaggagctacagacggtgcactcggaagcccacaccctcctgtatggcacgaaccccctcaaccggcagaaactggacagtaagaaacttctaggctcgctcgcctccgtgttcgtccggctcccttgcggtggtgttggggtaagtgttcctttaatgtgtaaataatgtcctgtttcttctcgagtcccagtggtcacagaaatcgcagccttgcttccctcaaagtgaataattgctgccaggtgttttccatacgcaggggctgcccatgtgcggcttcaaaggccgtgtgagccgagagcgttttgatcgccgactcgggcacctttctctggggaaggttgtctggcgcaggtggctggggctctggggtgcagtggctctcgctttaagaaacaggatcctgtatgcagccagcatctcatccccttcgaagtctgtggcagtaatctgctcacatcaggccacgagtatggtgcgggtaggatgcgtgcttctgtattctgtacctagtttccacccgaagctacaggtggggctcccagtgcagtgaccgtgatactcatgggccacgtggagtctgtagggctactcgctgggctgtgctggcttctgtgagctgatgatatggacctggcctgggcatatg

SEQ ID NO: 301060 - DNA, 2919 bp, Artificial Sequence
  derived and/or modified sequence
atgctggccatgaagcaccagcaggagctgctggagcaccagaggaagctggagcggcaccggcaggagcaggagctggagaagcagcaccgggagcagaagctgcagcagctgaagaacaaggagaagggcaaggagagcgctgtggccagcacagaggtgaagatgaagctgcaggagtttgtgctgaacaagaagaaggccctggcccacaggaacctgaaccactgcatcagcagtgacccccgctactggtacggcaagacccagcacagcagcctggaccagagcagccccccccagagcggcgtgtccaccagctacaaccaccctgtgctgggcatgtatgatgccaaggatgacttccccctgaggaagacagccagcgagcccaacctgaagctgcggagccggctgaagcagaaggtggccgagcggcgcagcagccccctgctgcggaggaaggatggccctgtggtgacagccctgaagaagaggcccctggatgtgacagattctgcctgcagcagcgcccctggcagcggccccagcagccccaacaacagcagcggctctgtgtctgcagaaaatggaattgccccagctgtgcccagcatcccagctgagaccagcctggcccaccggctggtggcccgggagggcagcgctgcccccctgcccctgtacaccagccccagcctgcccaacatcaccctgggcctgcctgccaccggccccagcgctggaacagctggccagcaggatgctgagcggctgaccctgcctgccctgcagcagaggctgagcctcttccctggcacccacctgaccccctacctgagcaccagccccctggagagagatggaggagctgcccacagccccctgctgcagcacatggtgctgctggagcagcccccagcccaggcccccctggtgacagactggtacctgagcggcctgggcgccctgcccctgcacgcccagagcctggtgggcgctgacagagtgagccccagcatccacaagctgcggcagcaccggcccctgggccgcacccagagcgcccccctgccccagaatgcccaggccctgcagcacctggtgatccagcagcagcaccagcagttcctggagaagcacaagcagcagttccagcagcagcagctgcagatgaacaagatcatccccaagcccagcgagcccgcccggcagcctgagagccaccctgaggagacagaggaggagctgcgggagcaccaggccctgctggatgagccctacctggaccggctgcccggccagaaggaggcccacgcccaggccggcgtgcaggtgaagcaggagcccattgaaagtgatgaggaggaggccgagcccccccgggaggtggagcccggccagaggcagcccagcgagcaggagctgctcttccggcagcaggccctgctgctggagcagcagaggatccaccagctgaggaactaccaggcctccatggaggccgccggcatccctgtgtcctttggaggccaccggcccctgagccgggcccagagcagccctgccagcgccaccttccctgtgtctgtgcaggagccccccaccaagccccgcttcaccaccggcctggtgtatgacaccctgatgctgaagcaccagtgcacctgtggcagcagcagcagccaccctgagcacgccggccgcatccagagcatctggagccggctgcaggagaccggcctgcggggcaaatgtgagtgcatccggggcaggaaggccaccctggaggagctgcagacagtgcacagcgaggcccacaccctgctgtatggcaccaaccccctgaaccggcagaagctggacagcaagaagctgctgggcagcctggcctctgtgtttgtgcggctgccctgtggcggcgtgggcgtggacagcgacaccatctggaatgaggtgcacagcgctggggccgcccggctggccgtgggctgtgtggtggagctggtgttcaaggtggccactggagagctgaagaatggatttgctgtggtgcggcccccaggccaccacgccgaggagagcacccccatgggcttctgctacttcaacagcgtggccgtggccgccaagctgctgcagcagaggctgtctgtgtccaagatcctgattgtggactgggatgtgcaccacggcaatggcacccagcaggccttctacagcgaccccagcgtgctgtacatgagcctgcacagatatgatgatggcaacttcttccctggcagcggggccccagatgaggtgggcaccggccctggggtgggcttcaacgtgaacatggccttcaccggcggcctggacccccccatgggagatgctgagtacctggccgccttcagaacagtggtgatgcccatcgccagcgagtttgccccagatgtggtgctggtgagcagcggctttgatgctgtggagggccaccccacccccctgggcggctacaacctgagcgcccgctgcttcggctacctgaccaagcagctgatgggcctggccggcggccgcatcgtgctggccctggagggcggccatgacctgacagccatctgtgatgccagcgaggcctgtgtgtctgccctgctgggcaatgagctggaccccctgcctgagaaggtgctgcagcagaggcccaatgccaatgctgtgcgctccatggagaaggtgatggagatccacagcaagtactggcgctgcctgcagaggaccaccagcacagctggccgcagcctgattgaggcccagacctgtgaaaatgaggaggccgagaccgtgacagccatggccagcctgtctgtgggcgtgaagccagctgagaagaggccagatgaggagcccatggaggaggagccccccctgtag

SEQ ID NO: 301061 - DNA, 2214 bp, Artificial Sequence
  derived and/or modified sequence
atggatgtggccacagccctgcccctgcaggtggcccccagcgctgtgcccatggacctgcggctggaccaccagttcagcctgcctgtggccgagcccgccctgcgggagcagcagctgcagcaggagctgctggccctgaagcagaagcagcagatccagaggcagatcctgattgctgagttccagaggcagcacgagcagctgagccggcagcacgaggcccagctgcacgagcacatcaagcagcagcaggagatgctggccatgaagcaccagcaggagctgctggagcaccagaggaagctggagcggcaccggcaggagcaggagctggagaagcagcaccgggagcagaagctgcagcagctgaagaacaaggagaagggcaaggagagcgctgtggccagcacagaggtgaagatgaagctgcaggagtttgtgctgaacaagaagaaggccctggcccacaggaacctgaaccactgcatcagcagtgacccccgctactggtacggcaagacccagcacagcagcctggaccagagcagccccccccagagcggcgtgtccaccagctacaaccaccctgtgctgggcatgtatgatgccaaggatgacttccccctgaggaagacagccagcgagcccaacctgaagctgcggagccggctgaagcagaaggtggccgagcggcgcagcagccccctgctgcggaggaaggatggccctgtggtgacagccctgaagaagaggcccctggatgtgacagattctgcctgcagcagcgcccctggcagcggccccagcagccccaacaacagcagcggctctgtgtctgcagaaaatggaattgccccagctgtgcccagcatcccagctgagaccagcctggcccaccggctggtggcccgggagggcagcgctgcccccctgcccctgtacaccagccccagcctgcccaacatcaccctgggcctgcctgccaccggccccagcgctggaacagctggccagcaggatgctgagcggctgaccctgcctgccctgcagcagaggctgagcctcttccctggcacccacctgaccccctacctgagcaccagccccctggagagagatggaggagctgcccacagccccctgctgcagcacatggtgctgctggagcagcccccagcccaggcccccctggtgacagactggtacctgagcggcctgggcgccctgcccctgcacgcccagagcctggtgggcgctgacagagtgagccccagcatccacaagctgcggcagcaccggcccctgggccgcacccagagcgcccccctgccccagaatgcccaggccctgcagcacctggtgatccagcagcagcaccagcagttcctggagaagcacaagcagcagttccagcagcagcagctgcagatgaacaagatcatccccaagcccagcgagcccgcccggcagcctgagagccaccctgaggagacagaggaggagctgcgggagcaccaggccctgctggatgagccctacctggaccggctgcccggccagaaggaggcccacgcccaggccggcgtgcaggtgaagcaggagcccattgaaagtgatgaggaggaggccgagcccccccgggaggtggagcccggccagaggcagcccagcgagcaggagctgctcttccggcagcaggccctgctgctggagcagcagaggatccaccagctgaggaactaccaggcctccatggaggccgccggcatccctgtgtcctttggaggccaccggcccctgagccgggcccagagcagccctgccagcgccaccttccctgtgtctgtgcaggagccccccaccaagccccgcttcaccaccggcctggtgtatgacaccctgatgctgaagcaccagtgcacctgtggcagcagcagcagccaccctgagcacgccggccgcatccagagcatctggagccggctgcaggagaccggcctgcggggcaaatgtgagtgcatccggggcaggaaggccaccctggaggagctgcagacagtgcacagcgaggcccacaccctgctgtatggcaccaaccccctgaaccggcagaagctggacagcaagaagctgctgggcagcctggcctctgtgtttgtgcggctgccctgtggcggcgtgggcgtgtctgtgcccctgatgtgcaagtag

SEQ ID NO: 301062 - DNA, 2919 bp, Artificial Sequence
  derived and/or modified sequence
atgctggccatgaagcaccagcaggagctgctggagcaccagcggaagctcgagcggcaccggcaagaacaagagctggagaaacagcaccgggagcagaagttacagcagctgaagaataaggagaagggcaaagaaagtgccgtggccagcacagaggtcaaaatgaagttgcaagaatttgtccttaataaaaagaaggctctagcgcaccggaacctaaatcactgcatttcctcagatccccgctactggtacggcaaaacccagcactccagcctggatcagagcagtccaccacagagcggggtctcaaccagctacaaccatccggtcctcggcatgtatgacgccaaagatgactttccacttcgcaagaccgcctctgaacccaatctgaagttaagaagccgcttgaagcagaaggttgcagagagacgttcatctccgttgctgaggcgtaaggatggtcctgtagtgacagccttgaaaaagagaccccttgacgttacggactccgcttgtagttctgctcccgggtccgggccatcttcccctaacaatagctcaggctcagtctccgccgaaaatgggattgcaccagcagtccctagcatcccggcagaaacatctctggcacacaggctggttgcgcgtgaggggtccgccgccccacttcctttatacacctcaccgagtctcccaaacattaccctggggctgccagctactggacctagcgccggtactgccgggcagcaggatgcagagcgacttacccttcctgccctacagcagcgtctgtccctgtttcctggtactcatctgactccttaccttagtactagcccacttgaacgcgatggaggcgctgctcacagtccgttgctacagcacatggtcttactggagcaacctcctgcacaggctcctctggtgaccgattggtatcttagcggcctgggcgcactgcctctccatgcgcagtctctggtgggcgccgatagggtgagcccctcaatccacaaactgaggcagcacagacccctggggagaacacagagtgcccctcttcctcagaacgcacaggccctccagcatctcgttattcaacagcaacaccagcaattcttggaaaaacataagcagcagtttcagcagcagcagctgcaaatgaataagattatccctaagccatcagaaccagctcggcaacccgaatcccacccggaggagaccgaagaggagctgagagaacaccaggctcttcttgatgagccatacttggaccggctgcccggacaaaaagaggctcacgcccaggccggtgtgcaggtgaaacaagagccaattgagagcgatgaggaggaagccgaacccccgcgggaggtcgaacctggacagcggcaacctagtgaacaagagcttttatttagacaacaggcattactgctcgagcagcagcgtatccatcaactgcgtaactaccaggcgtctatggaggccgccgggatccccgtcagctttggcggccatcgcccgctcagcagggcacagagctcgccggcttccgccacgttccccgtgtctgtgcaagagccaccgaccaagccaaggtttacaaccgggctcgtatatgatacactaatgctgaagcatcaatgcacatgcggaagctcctcctcacaccccgaacacgctgggaggattcaaagtatttggtcccggcttcaggagactggactcagaggtaagtgtgagtgtataaggggacgtaaagccacgctggaagagctgcagactgtgcacagcgaggcacacacccttctttacgggactaatccgttgaacagacaaaagctagacagcaagaaactgctaggaagtctggcctccgtgttcgtgcgactcccgtgcgggggggtgggcgtggattccgatacaatatggaacgaagtgcattctgcaggggccgcaagacttgctgtaggatgtgtcgttgaactggtgttcaaagtggctactggagaacttaagaacggcttcgcagtggtcaggcctccggggcatcacgccgaggagtcaactcctatgggtttctgctattttaacagtgtcgcagttgccgcgaaactgttacagcagagactctcagtttcaaaaatcctgatagtcgactgggatgtacaccacgggaacggaacccagcaggcgttttactcagaccctagtgttctgtacatgagcctgcacaggtacgacgatgggaatttctttcctggttcgggcgccccagatgaagtaggcaccggacccggagtcggtttcaatgttaacatggctttcacaggcggactggatccacctatgggggacgccgaatacctggctgcttttcggactgtggttatgcccatcgcctctgagttcgctccagacgtggtactggtaagctcgggattcgacgctgtagaaggccaccctacaccactcggggggtataacctgtctgctcgttgctttggctatcttacgaagcagctcatgggactcgctggcggccgtatagttctggcgctcgaaggaggccacgatctgacagccatctgcgatgcgtccgaagcctgtgtgtctgccctactgggcaacgaactggaccctctgcctgagaaggtgctgcaacagagacccaacgccaacgctgtaagaagtatggagaaagtgatggagatacactctaagtactggaggtgcctgcagcggactacctctaccgcaggacgttctcttatcgaagcgcagacatgcgagaatgaggaggctgagaccgtcaccgcaatggcaagcctttccgtaggagtgaagcctgccgagaaacgtcccgatgaggagcccatggaggaggagcctcctttgtag

SEQ ID NO: 301063 - DNA, 2214 bp, Artificial Sequence
  derived and/or modified sequence
atggacgtggccaccgccctgcccctgcaggtggcccccagcgccgtcccaatggacctgcggcttgatcaccagttttctctccccgtagcggagcccgcccttcgggagcagcagctccagcaggaactgctagctttgaagcagaaacagcagatccagcggcaaatcctcatcgccgagttccagcgccagcatgagcaactttccagacaacacgaagcccagttgcacgagcacatcaaacagcagcaagaaatgttggccatgaagcaccagcaggagctactggaacatcagagaaagttggaaaggcatcggcaggaacaggagctagaaaaacaacatcgcgagcagaaactgcaacagctcaaaaacaaggagaagggtaaggaatccgcagtggcctctacggaggtcaagatgaagttacaggagttcgtgttaaacaagaaaaaggcactggcccaccgcaacctaaaccattgtatcagttcagatccacgctactggtacggtaagacacagcatagcagtctggatcagtcctcacccccacaatcaggtgtttccacttcctacaaccaccccgtgctgggtatgtatgatgctaaagacgatttccctctcagaaagaccgccagtgagccaaatttgaagctcaggagtcggctgaagcagaaagtggcggaaagacgctcctcccccttgctccgccggaaggacgggcctgtggtgactgcactgaaaaaaaggcccctcgatgttaccgattcagcctgctcctctgcaccaggtagcggcccctcatcacccaataacagctcagggagcgtctctgctgagaacggcattgctcctgccgtgccctccatccctgccgagacatctttggcccacaggcttgtcgcccgggagggctccgctgctcctctccccctttacaccagtccttcccttcccaacatcacgctgggactgcctgccaccggtccctcagcaggcaccgcaggccagcaggacgctgagagactcaccctgcctgccttacaacagagactgtctttgtttccaggtactcacctcaccccctacctgagcactagccccctagagagagacgggggtgcagcccactcccctctgctgcagcacatggtgctgctcgaacaaccccccgcccaggcacctcttgtcactgattggtatctgtctggtcttggagcactacccctgcacgcccaatctcttgtcggagcagacagagtttcccctagcattcacaagttacgccagcaccgaccgctcggcagaactcagtctgcgcctctgccccagaatgcgcaagcattgcagcatctagtcatccagcagcagcaccaacagttcctggaaaagcacaagcaacagttccagcaacagcagttacagatgaacaagatcattcctaaaccctctgagccagcccgccaacccgagtctcatcccgaggaaaccgaagaagagttacgggagcaccaagccctgctggacgaaccttacctcgatcggctgcccggtcaaaaggaagcccacgcccaagcaggggtacaggtcaagcaggaacctatcgagtccgacgaggaggaggctgaaccccctcgcgaggtggaacctgggcagcgccagccatctgagcaggagctactctttagacagcaggctcttctacttgagcaacagagaatccatcagctgcgtaactaccaagctagcatggaagcggccgggattcctgtctcgttcggcggacataggcctctgtccagggcccagagctcccctgccagtgctacgttcccagtgtccgtgcaggaaccaccaactaaaccacggtttactaccggcctcgtgtatgacacactcatgctgaaacaccagtgtacttgtggctcctcttccagccatccagagcatgctggtaggatacagagtatctggagcaggctgcaggaaactggtcttcgcggtaaatgtgagtgcattcggggacgcaaggccactctggaagagctgcagacagtccacagtgaagcgcatacactcttgtacggtaccaatcctctcaatcgccagaaacttgactccaaaaaacttcttgggagtctcgctagcgtgttcgttcgcctcccctgcgggggcgtcggggtttcggtacccctgatgtgcaagtag

SEQ ID NO: 301064 - DNA, 2919 bp, Artificial Sequence
  derived and/or modified sequence
atgctggcaatgaagcaccaacaggaattgctggaacatcagcgaaagctggaaaggcaccgtcaagagcaagaattggagaaacagcacagggagcaaaagctccagcagctcaaaaacaaggaaaaaggtaaagagtctgcagtggcaagtaccgaggttaaaatgaagcttcaggagtttgttcttaataaaaagaaagcactggctcacaggaatctaaatcactgtatctcgtccgacccaaggtattggtacggaaaaacccagcactccagcctagaccagagctcgccgcctcaatctggcgtgtctacttcttataatcaccccgttctgggcatgtacgatgccaaggacgacttcccattgcgcaagacagcctccgagccaaacctaaaactccgctctagattaaaacaaaaagtggccgagcggaggtcgtccccactgcttcggaggaaggatgggccagtagtgaccgcactgaagaaacgcccattggatgttaccgatagtgcatgtagctccgcgccaggaagcggtccctcctcgccaaataattctagtggcagcgtgtctgctgagaacggaatcgcccctgccgttccatcaatcccagcagaaacctcccttgcgcaccggctcgttgctcgagagggaagcgctgcacctttgcccttgtacacaagcccctctttgcccaacataacgctcggactccctgccacaggaccatcggccggtacagccggtcagcaggatgccgaaaggttgactctccccgcactccagcagcggcttagtttgtttccaggcacccacctgactccttacttgagtacaagtccgctcgagcgcgacggaggagctgcccattcacctctgttgcagcacatggtgctgctcgagcagcctccagctcaggctccgctcgtgacggattggtatttgagcggcttgggagccctcccgctgcacgcccagtccttggtgggcgcagacagggtttctccgtctattcataagctgcggcagcatagacccctgggacgaacacaatccgcacctcttccccagaacgctcaggccttgcagcacctggtcattcagcaacagcaccaacagtttctggagaagcataagcagcagttccagcagcaacagctgcagatgaataagattatcccaaagcctagcgaacctgctcggcagcccgaaagccaccccgaggaaactgaggaggaactgcgggagcatcaggctctcctggacgaaccttatctcgacaggttgcccggacagaaggaagcacatgcgcaggccggagttcaagttaagcaggaacccatagaaagcgatgaagaggaagctgagcctccacgtgaagtcgagcccggtcagcgacaaccctcagagcaggagctgttgtttcgccaacaggcactgctgttggagcagcaaaggatccatcagctgcgtaactatcaagcctcaatggaagctgctggcatcccagttagtttcggcggacaccggccactgtctcgggcacagtcgagtccagctagcgctacgtttccagtgagtgtgcaggaaccccctacaaagccccgttttactaccggtttagtgtacgacacactcatgctgaagcatcaatgcacttgtggatcgtcatcctcacaccctgagcacgctggaagaatccagtcaatatggtcacggctgcaggaaaccggcttgagaggcaagtgcgagtgtattcgcggtagaaaggcgaccttggaggagctccagactgtacatagtgaggcacacacattgctgtacggcacaaacccactgaacagacaaaagctggatagcaagaaacttctagggtccttggccagtgtatttgtccgactgccttgcggaggagtcggtgtggatagtgacactatttggaacgaggtccacagtgcaggcgctgccaggctagccgttggatgtgtggttgaactggtgtttaaggtcgccacgggggagttaaaaaacggcttcgccgtggtgcgccctccaggtcaccacgcggaagagtcaacccctatgggtttttgctactttaattccgtcgctgtggcagctaaactcttgcaacaacgcctgagcgttagtaagatcctgatcgtcgactgggatgtccaccacggtaacggaacacagcaggcattctactctgaccccagtgttctgtacatgtctttacatagatacgacgacggcaacttctttcccggtagtggggctcccgatgaggtaggcactggcccaggcgtgggttttaacgtgaacatggcattcacaggtggccttgaccctcccatgggcgatgccgaatacctggctgcctttaggaccgtagtgatgccaattgcctccgagtttgcgccagatgtggtgctggtgagctcaggcttcgacgcagtcgagggacatccaactccactgggtggctacaacctgagtgcaaggtgcttcgggtacttgacgaaacagcttatggggctggcgggaggtagaatagtattggctcttgaaggcggtcacgaccttactgctatctgcgacgcttctgaggcttgcgtctctgccttgctcggaaatgagcttgatcccctgcccgagaaggtcctgcagcagaggccgaacgccaatgcggtgaggtccatggagaaggtgatggagatacattctaaatactggcgttgtttacagaggactaccagcaccgccggtcgatctctcatcgaggcccaaacatgtgaaaatgaagaggcagaaacagtgactgctatggcgtccctttctgttggagtcaaacccgcagagaaacgccctgatgaagagccaatggaagaagagcctccactctag

SEQ ID NO: 301065 - DNA, 2214 bp, Artificial Sequence
  derived and/or modified sequence
atggacgttgccaccgctctgcccctccaagtcgccccttccgccgtccccatggacctgaggctggatcaccaattttctcttcccgtggcagagcctgctttgcgcgaacagcaattgcagcaggagttattggcactgaaacaaaaacagcagatccaaagacaaatcctcattgcggaatttcagcggcagcatgaacagctgtcaagacagcacgaggcccagctgcacgagcatatcaagcagcaacaagaaatgctcgccatgaagcaccaacaggagcttttggagcatcagaggaaacttgagaggcacagacaggagcaagagttggagaagcagcatagggagcagaaactccagcaattgaagaataaggagaagggcaaggagagtgccgtggcatcaacggaagtgaagatgaaactccaggaatttgtgctgaacaagaagaaagccctggcccatcgcaacctgaatcactgtattagttcggatccaaggtattggtatggaaaaactcagcatagttcgctcgaccaaagttctccgccacagtccggagtttccaccagttacaaccaccccgttttaggcatgtatgatgccaaggacgatttcccattgaggaaaactgcctccgaacctaacctgaaactgagatcccgtctgaagcagaaggtggctgagcgaaggtcatcacccctcctgaggcggaaggacggtcctgtggtgactgccctcaagaaaagacccttagatgtcactgattccgcctgttcttctgcacctggtagtggacctagtagccctaacaattcgtcaggctctgtcagtgcggagaatgggatcgccccagccgtgccaagcattcctgcagaaacctctctggcacataggctcgtcgcccgagaggggagcgcagcccctttgccactctataccagccctagtctgccgaatattaccctgggcctccctgccacaggtccttcagccggaactgccggacagcaagacgcagaaagactgaccctgccagctctccaacagaggctgagcctctttcctggaacgcatctgacgccatatctaagtactagtcccctagagcgggacggcggagcagcccactccccactgttacagcacatggtccttctggaacagcctcccgctcaggcaccactcgtgaccgattggtatttgagcggtttgggcgcactgccgctgcatgcccaatcgctagtcggggcagaccgtgtgagtccgtcaatccataaacttcgccagcataggcccctgggcagaacccagagtgccccactgccccaaaatgcccaggcactacagcacctagtgatacagcagcagcaccagcagttcctcgaaaagcataaacaacagtttcagcaacagcaactgcagatgaacaaaattataccgaagccctcagagccagcgaggcaacccgagtcccaccctgaagagaccgaagaggaattgagggagcaccaggccctcctagatgagccctatctagaccggctgcccggacagaaggaagcccacgctcaggcaggagtgcaggtgaagcaggagccaatagagtcggatgaagaagaggcggagcctcccagagaggtggagcctggacagcgtcagcccagtgaacaagagctactctttcggcagcaagcgctgctgcttgagcagcagcgaatccaccagttgcggaattatcaagcttccatggaagccgctggcatacctgtgagcttcggcggtcacagacccctgtctagagcacagagcagccccgctagcgccaccttcccagtatcagtccaggagcccccaacgaagcctcggttcaccaccggattggtgtacgacactttaatgcttaaacatcagtgcacatgcggctcatcaagctcccacccggaacatgccggacgcatacaatccatatggtcacggctgcaggagaccggattacgcggtaagtgcgaatgcattagaggcagaaaagccacgctcgaggaattacaaactgtacattcggaggcccataccctgttgtacggaacaaatcctctaaatcgacagaaactggacagcaagaaattgctgggaagcttagcgtccgtgttcgtgagattgccttgtggcggagttggggtctctgtgcctctgatgtgcaagtag

SEQ ID NO: 301066 - DNA, 613 bp, Artificial Sequence
  derived and/or modified sequence
ctcaggaacagccttctcctgcctcctctgcacctggacaactcaactcctgccaagatgtcctgccagcagaaccagcagcagtgccaacccccacccaagtgtccctcacccaagtgtcccccaaagagcccagtacagtgtctgcctccagcttcctctggctgtgccccaagctctgggggctgtggccctagctccgagggcggctgcttcctgaaccaccacaggcgccaccaccgatgccggcgccagaggcccaactcctgtgacaggggcagtggtcagcaaggcgggggctctggctgcggccatggctctggaggctgctgctgacctggatcctgatgctgagacaagcgattttggaggaaacaagaatcccaagggcccaggaaaaccccatcttgatgcatgagttcccagataccctcttctggctttcacaggctgagctaggggttttcctgtggaaggtctgagctctccccagaaggcacttcctgtctgatgtccaggatgtcacatgttcccttacccctgtacctgtgaaggattggcagtgcttgtgcctgacctcatcaaaaaataaagctccttgtcctcattacca

SEQ ID NO: 301067 - protein, 56 aa, Artificial Sequence
  derived and/or modified sequence
  misc_feature (1)..(1): Xaa can be any naturally occurring amino acid
XKSHVYFFRAESKYTFERWMEVIQGASSSAGRAPSIVQDGPQPSSGLEGMVRGKEE

SEQ ID NO: 301068 - DNA, 171 bp, Artificial Sequence
  derived and/or modified sequence
tgaaagagccacgtgtacttcttcagagccgagagcaagtacaccttcgagagatggatggaggtgatccagggcgccagcagcagcgccggcagagcccccagcatcgtgcaggacggcccccagcccagcagcggcctggagggcatggtgagaggcaaggaggagtag

SEQ ID NO: 301069 - DNA, 550 bp, Artificial Sequence
  derived and/or modified sequence
tcaaatcccacgtctacttcttccgggctgagagcaagtacacatttgaaaggtggatggaggtgatccagggggccagcagctcagccgggagggccccaagcatcgtgcaggatggcccccaaccctcctcagggctggaggggatggtcagggggaaggaggaatgacgctcaacctgcccagagcagggtccctgccgaggactggcctagagcaagcactggaaaagaggccctgccatacaccctgcgtacccactgccaggaccctctcagacaagcgtggcacagccatgctgaccttccatctggtgaaccaagtggcagccccaggggcctgccctgcaggtcacagctaaacaagtctggcagaagccacgcttgttccccatgtacctctagagaagcagaaaccaaagtccccctgtgccctgggagggtggggccgtctaatttattactgcccagcattccttccaacgggaagtagatgggcgactgctttgttcacacacatttgattaaaaataaacaaacagcatctcccc

SEQ ID NO: 301070 - DNA, 171 bp, Artificial Sequence
  derived and/or modified sequence
tgaaagtcacatgtgtacttttttcgagctgagagtaagtatacctttgaacgatggatggaggttatccagggggcaagttcctccgccggccgggctccaagcatagttcaggatggaccacaaccaagctcgggtcttgagggaatggttagagggaaggaagagtag

SEQ ID NO: 301071 - DNA, 171 bp, Artificial Sequence
  derived and/or modified sequence
tgaaaaagccacgtgtacttcttccgggcagagagcaagtacacctttgagcgctggatggaggtgatccagggcgccagcagcagcgctggccgggcccccagcatcgtgcaggacggcccccagcccagcagcggcctggagggcatggtgcggggcaaggaggagtag

SEQ ID NO: 301072 - DNA, 171 bp, Artificial Sequence
  derived and/or modified sequence
tgaaagagccacgtgtacttcttccgggccgagagcaagtacaccttcgagcgatggatggaagtgatccaaggggcctcttcctcagccggccgcgcaccctcaatagttcaggatggcccacagccttctagtggcctcgaagggatggttaggggcaaggaggaatag

SEQ ID NO: 301073 - DNA, 171 bp, Artificial Sequence
  derived and/or modified sequence
tagaagtcacatgtctatttttttagagctgagagtaagtacacctttgaacggtggatggaggtaatccaaggtgcttcctcatctgccggtcgggctccatctatcgtgcaagatggccctcagccctcttccgggctcgaaggcatggtaagggggaaggaggagtag

SEQ ID NO: 301074 - protein, 882 aa, Artificial Sequence
  derived and/or modified sequence
MPRVKPKLEKQLQKDKEKVEEFKSIPAKSNNIINETTTRNNALEKEKEKEEKKLKEVMDSLKQETQGLQKEKESREKELMGFSKSVNEARSKMDVAQSELDIYLSRHNTAVSQLTKAKEALIAASETLKERKAAIRDIEGKLPQTEQELKEKEKELQKLTQEETNFKSLVHDLFQKVEEAKSSLAMNRSRGKVLDAIIQEKKSGRIPGIYGRLGDLGAIDEKYDVAISSCCHALDYIVVDSIDIAQECVNFLKRQNIGVATFIGLDKMAVWAKKMTEIQTPENTPRLFDLVKVKDEKIRQAFYFALRDTLVADNLDQATRVAYQKDRRWRVVTLQGQIIEQSGTMTGGGSKVMKGRMGSSLVIEISEEEVNKMESQLQNDSKKAMQIQEQKVQLEERVVKLRHSEREMRNTLEKFTASIQRLIEQEEYLNVQVKELEANVLATAPDKKKQKLLEENVSAFKTEYDAVAEKAGKVEAEVKRLHNTIVEINNHKLKAQQDKLDKINKQLDECASAITKAQVAIKTADRNLQKAQDSVLRTEKEIKDTEKEVDDLTAELKSLEDKAAEVVKNTNAAEESLPEIQKEHRNLLQELKVIQENEHALQKDALSIKLKLEQIDGHIAEHNSKIKYWHKEISKISLHPIEDNPIEEISVLSPEDLEAIKNPDSITNQIALLEARCHEMKPNLGAIAEYKKKEELYLQRVAELDKITYERDSFRQAYEDLRKQRLNEFMAGFYIITNKLKENYQMLTLGGDAELELVDSLDPFSEGIMFSVRPPKKSWKKIFNLSGGEKTLSSLALVFALHHYKPTPLYFMDEIDAALDFKNVSIVAFYIYEQTKNAQFIIISLRNNMFEISDRLIGIYKTYNITKSVAVNPKEIASKGLC

SEQ ID NO: 301075 - protein, 836 aa, Artificial Sequence
  derived and/or modified sequence
MHSQLRILDEEHPKGKYHHGLSALKPIRTTSKHQHPVDNAGLFSCMTFSWLSSLARVAHKKGELSMEDVWSLSKHESSDVNCRRLERLWQEELNEVGPDAASLRRVVWIFCRTRLILSIVCLMITQLAGFSGPAFMVKHLLEYTQATESNLQYSLLLVLGLLLTEIVRSWSLALTWALNYRTGVRLRGAILTMAFKKILKLKNIKEKSLGELINICSNDGQRMFEAAAVGSLLAGGPVVAILGMIYNVIILGPTGFLGSAVFILFYPAMMFASRLTAYFRRKCVAATDERVQKMNEVLTYIKFIKMYAWVKAFSQSVQKIREEERRILEKAGYFQSITVGVAPIVVVIASVVTFSVHMTLGFDLTAAQAFTVVTVFNSMTFALKVTPFSVKSLSEASVAVDRFKSLFLMEEVHMIKNKPASPHIKIEMKNATLAWDSSHSSIQNSPKLTPKMKKDKRASRGKKEKVRQLQRTEHQAVLAEQKGHLLLDSDERPSPEEEEGKHIHLGHLRLQRTLHSIDLEIQEGKLVGICGSVGSGKTSLISAILGQMTLLEGSIAISGTFAYVAQQAWILNATLRDNILFGKEYDEERYNSVLNSCCLRPDLAILPSSDLTEIGERGANLSGGQRQRISLARALYSDRSIYILDDPLSALDAHVGNHIFNSAIRKHLKSKTVLFVTHQLQYLVDCDEVIFMKEGCITERGTHEELMNLNGDYATIFNNLLLGETPPVEINSKKETSGSQKKSQDKGPKTGSVKKEKAVKPEEGQLVQLEEKGQGSVPWSVYGHPGCWGPLGIPGYYGPFHAECRQHRLQHLVVELLDQARKREHHCDSRERDLGE

SEQ ID NO: 301076 - DNA, 294 bp, Artificial Sequence
  derived and/or modified sequence
atgcagcccgaggagggcaccggctggctgctggagctgctgagcgaggtgcagctgcagcagtacttcctgagactgagagacgacctgaacgtgaccagactgagccacttcgagtacgtgaagaacgaggacctggagaagatcggcatgggcagacccggccagagaagactgtgggaggccgtgaagagaagaaaggccctgtgcaagagaaagagctggatgagcaaggtgttcagcggcaagagactggaggccgagttccccccccaccacagccagagcacctag

SEQ ID NO: 301077 - DNA, 294 bp, Artificial Sequence
  derived and/or modified sequence
atgcaacctgaggaggggacaggatggctcctggagctgctgtctgaggtccagttacagcagtatttcctgaggttgagagatgacttaaacgtaacgcgactgtcacatttcgagtacgttaagaatgaagacctcgagaagataggaatgggcagacctgggcagcggcgcttatgggaggccgtcaagagaagaaaggccctgtgcaagaggaaatcttggatgagcaaggtgttttcgggcaaaaggctggaagcagagttccccccgcatcactcacagagtacttag

SEQ ID NO: 301078 - DNA, 294 bp, Artificial Sequence
  derived and/or modified sequence
atgcagcctgaggagggcaccggctggctgctggagctgctgtctgaggtgcagctgcagcagtacttcctgcggctgagagatgacctgaatgtgacccggctgagccactttgaatatgtgaagaatgaagacctggagaagattggcatgggccggcccggccagaggcggctgtgggaggccgtgaagaggaggaaggccctgtgcaagaggaagtcctggatgagcaaggtgttttctgggaagaggctggaggccgagttccccccccaccacagccagagcacctag

SEQ ID NO: 301079 - DNA, 294 bp, Artificial Sequence
  derived and/or modified sequence
atgcagcccgaggagggcaccggctggctgctggagctgctgagcgaagtccagcttcaacagtactttctcagactgagagatgacctgaatgtcactagactgtctcatttcgagtacgtgaagaacgaagatcttgaaaaaatcggaatgggtagacctggacagcggagactctgggaagcagtgaaacgtcggaaagcactatgtaagaggaagagttggatgtcaaaggtgttcagcgggaaacgtctggaagcagaatttccaccgcatcattcacagagcacctag

SEQ ID NO: 301080 - DNA, 294 bp, Artificial Sequence
  derived and/or modified sequence
atgcagcccgaagagggcactggatggttactggagctcctgtctgaagtgcaactgcaacagtactttctgaggctccgggacgatcttaacgttacaagactatctcattttgagtatgtgaaaaatgaggacctggagaaaattgggatgggtagacctggacagaggcgcctgtgggaagccgtcaagaggcggaaagctctgtgcaagaggaagagctggatgtcaaaagtattttccggaaagaggttggaggcggagtttccacctcatcattctcaatctacctag

SEQ ID NO: 301081 - DNA, 580 bp, Artificial Sequence
  derived and/or modified sequence
gtcgggctgttttcctgggcgaggagaaagggggccgggccgggccgggcgcggtggctcacgcctgtcatctcagcactttgggaggccgaggcgggcagatcacctgagacgaggacgctgagctggattactgggccagttacaggtcttgttcttactggacatccaagcatcccggagttccttcccgtcctcccacatgcatcccctgtgcagagctgcgctgttgctgggtcagggagcatggagtgcacagctgaacagagaggctgggaggcggcagaatgcagccagaggagggcacaggctggctgctggagctgctgtccgaggtgcagctgcaacagtacttcctgcggctccgagatgacctcaacgtcacccgcctgtcccactttgagtacgtcaagaatgaggacctggagaagatcggcatgggtcggcctggccagcggcggctgtgggaggctgtgaagaggaggaaggccttgtgcaaacgcaagtcgtggatgagtaaggtgttcagtggaaagcgactggaggctgagttcccacctcatcactctcagagcacctt

SEQ ID NO: 301082 - protein, 382 aa, Artificial Sequence
  derived and/or modified sequence
MAAARLARAAPAAAGAALHAAGGRLPLPGGGGHHLLGHSQGGMYPAGFVYIFMGLYYATSRGTDIRMAQNIFAVLYLATLLLVFLIYHQTCKVPPFVFFFMCCASYRVHSIFVLRLFNDPVAMVLLFLSINLLLAQRWGWGCCFFSLAVSVKMNVLLFAPGLLFLLLTQFGFRGALPKLGICAGLQVVLGLPFLLENPSGYLSRSFDLGRQFLFHWTVNWRFLPEALFLHRAFHLALLTAHLTLLLLFALCRWHRTGESILSLLRDPSKRKVPPQPLTPNQIVSTLFTSNFIGICFSRSLHYQFYVWYFHTLPYLLWAMPARWLTHLLRLLVLGLIELSWNTYPSTSCSSAALHICHAVILLQLWLGPQPFPKSTQHSKKAH

SEQ ID NO: 301083 - protein, 998 aa, Artificial Sequence
  derived and/or modified sequence
MKLMTALVNVALNLSIHQDNTQRQYEAERNKMIGKRANERLELLLQKRKELQENQDEIENMMNSIFKGIFVHRYRDAIAEIRAICIEEIGVWMKMYSDAFLNDSYLKYVGWTLHDRQGEVRLKCLKALQSLYTNRELFPKLELFTNRFKDRIVSMTLDKEYDVAVEAIRLVTLILHGSEEALSNEDCENVYHLVYSAHRPVAVAAGEFLHKKLFSRHDPQAEEALAKRRGRNSPNGNLIRMLVLFFLESELHEHAAYLVDSLWESSQELLKDWECMTELLLEEPVQGEEAMSDRQESALIELMVCTIRQAAEAHPPVGRGTGKRVLTAKERKTQIDDRNKLTEHFIITLPMLLSKYSADAEKVANLLQIPQYFDLEIYSTGRMEKHLDALLKQIKFVVEKHVESDVLEACSKTYSILCSEEYTIQNRVDIARSQLIDEFVDRFNHSVEDLLQEGEEADDDDIYNVLSTLKRLTSFHNAHDLTKWDLFGNCYRLLKTGIEHGAMPEQIVVQALQCSHYSILWQLVKITDGSPSKEDLLVLRKTVKSFLAVCQQCLSNVNTPVKEQAFMLLCDLLMIFSHQLMTGGREGLQPLVFNPDTGLQSELLSFVMDHVFIDQDEENQSMEGDEEDEANKIEALHKRRNLLAAFSKLIIYDIVDMHAAADIFKHYMKLFNELVQEQGPNLDRTSAHVSGIKELARRFALTFGLDQIKTREAVATLHKDGIEFAFKYQNQKGQEYPPPNLAFLEVLSEFSSKLLRQDKKTVHSYLEKFLTEQMMERREDVWLPLISYRNSLVTGGEDDRMSVNSGSSSSKTSSVRNKKGRPPLHKKRVEDESLDNTWLNRTDTMIQTPGPLPAPQLTSTVLRENSRPMGDQIQEPESEHGSEPDFLHNPQMQISWLGQPKLEDLNRKDRTGMNYMKVRTGVRHAVRGLMEEDAEPIFEDVMMSSRSQLEDMNEEFEDTMVIDLPPSRNRRERAELRPDFFDSAAIIEDDSGFGMPMF

SEQ ID NO: 301084 - protein, 842 aa, Artificial Sequence
  derived and/or modified sequence
MTLDKEYDVAVEAIRLVTLILQLFSRHDPQAEEALAKRRGRNSPNGNLIRMLVLFFLESELHEHAAYLVDSLWESSQELLKDWECMTELLLEEPVQGEEAMSDRQESALIELMVCTIRQAAEAHPPVGRGTGKRVLTAKERKTQIDDRNKLTEHFIITLPMLLSKYSADAEKVANLLQIPQYFDLEIYSTGRMEKHLDALLKQIKFVVEKHVESDVLEACSKTYSILCSEEYTIQNRVDIARSQLIDEFVDRFNHSVEDLLQEGEEADDDDIYNVLSTLKRLTSFHNAHDLTKWDLFGNCYRLLKTGIEHGAMPEQIVVQALQCSHYSILWQLVKITDGSPSKEDLLVLRKTVKSFLAVCQQCLSNVNTPVKEQAFMLLCDLLMIFSHQLMTGGREGLQPLVFNPDTGLQSELLSFVMDHVFIDQDEENQSMEGDEEDEANKIEALHKRRNLLAAFSKLIIYDIVDMHAAADIFKHYMKYYNDYGDIIKETLSKTRQIDKIQCAKTLILSLQQLFNELVQEQGPNLDRTSAHVSGIKELARRFALTFGLDQIKTREAVATLHKDGIEFAFKYQNQKGQEYPPPNLAFLEVLSEFSSKLLRQDKKTVHSYLEKFLTEQMMERREDVWLPLISYRNSLVTGGEDDRMSVNSGSSSSKTSSVRNKKGRPPLHKKRVEDESLDNTWLNRTDTMIQTPGPLPAPQLTSTVLRENSRPMGDQIQEPESEHGSEPDFLHNPQMQISWLGQPKLEDLNRKDRTGMNYMKVRTGVRHAVRGLMEEDAEPIFEDVMMSSRSQLEDMNEEFEDTMVIDLPPSRNRRERAELRPDFFDSAAIIEDDSGFGMPMF

SEQ ID NO: 301085 - DNA, 273 bp, Artificial Sequence
  derived and/or modified sequence
atgagaggctacctggtggccatcttcctgagcgccgtgttcctgtactacgtgctgcactgcatcctgtggggcaccaacgtgtactgggtggcccccgtggagatgaagagaagaaacaagatccagccctgcctgagcaagcccgccttcgccagcctgctgagccagagcagcgcctacatcctgagaaagggcatcgaggagctgaaccagaccagcatcctgttcacccaggtgagcagcgtgagccccttcagcgtgtgcggctag

SEQ ID NO: 301086 - DNA, 273 bp, Artificial Sequence
  derived and/or modified sequence
atgagagggtacctggtggctattttcctgagcgctgtcttcctgtactacgttctgcattgtattctttggggaacaaacgtttactgggtagctccagtggagatgaaacggcgcaacaaaatacagccttgtctgtccaagcctgcctttgcaagtctcctgtctcaatcctctgcatatattctgagaaagggtatagaggaactgaatcaaaccagcattctgttcacacaagtgagcagcgtgagtcctttttctgtgtgcggctag

SEQ ID NO: 301087 - DNA, 273 bp, Artificial Sequence
  derived and/or modified sequence
atgagggggtacttggtcgcaatcttcttgagcgcagtgttcttgtattacgttctccactgcatcctatggggtacgaatgtgtactgggttgcccccgttgagatgaaaaggagaaataaaatacaaccttgtctgtcgaagcctgcattcgcatctctcctgagtcagagctcggcttacatattacggaagggcatcgaggaactgaaccagacttctatcctgttcacccaggtctcctctgtgtccccctttagcgtgtgcggctag

SEQ ID NO: 301088 - DNA, 273 bp, Artificial Sequence
  derived and/or modified sequence
atgaggggctacctggtggccatcttcctgtctgctgtgttcctgtactacgtgctgcactgcatcctgtggggcaccaacgtgtactgggtggcccctgtggagatgaagagaagaaacaagatccagccctgcctgagcaagccagcctttgccagcctgctgagccagagcagcgcctacatcctgaggaaaggaattgaggagctgaaccagaccagcatcctcttcacccaggtgtcctctgtgagccccttctctgtgtgtggctag

SEQ ID NO: 301089 - DNA, 273 bp, Artificial Sequence
  derived and/or modified sequence
atgcggggctacctggtggccatcttcctgagcgccgtgttcctgtactacgtgctacattgtattctatgggggaccaacgtctactgggtggctccagttgagatgaagcgtcgcaataaaatacagccttgtttgagcaagcccgcgttcgcttccttgctttcacagtcctcagcttacatcctgcggaagggaatcgaggagttgaaccagactagtatcctgtttacccaggtgagctctgtgtctcccttttccgtctgtgggtag

SEQ ID NO: 301090 - DNA, 273 bp, Artificial Sequence
  derived and/or modified sequence
atgcggggctacctggtggccatcttcctgagcgccgtgttcctgtactacgtcctgcactgtatcctctggggtacaaatgtctattgggttgcacctgtagagatgaagaggaggaataagatacagccttgtctgagtaagccagcgttcgcgtccctgctatctcagtcgagtgcctatattctgcgaaaggggatcgaagaactgaaccagacgtccattttgttcacgcaggtgagctcagtctccccattttcggtctgtggctag

SEQ ID NO: 301091 - DNA, 273 bp, Artificial Sequence
  derived and/or modified sequence
atgcgcggatatctcgtcgctatttttctttcagcagtatttctgtactacgtgctgcattgcatcctgtgggggactaacgtctattgggtggcacctgttgaaatgaaaagacgcaacaagatccaaccatgtctctctaaacccgcatttgctagccttctctcccagtcatcggcttacatcttgagaaaaggtatagaggagctgaatcaaacgtctatccttttcactcaggtgtcttcagtcagcccgttcagcgtctgcgggtag

SEQ ID NO: 301092 - DNA, 273 bp, Artificial Sequence
  derived and/or modified sequence
atgcggggttatctcgtcgcaatcttcctctccgcagtcttcttatattatgttctgcattgcattctgtggggaacaaatgtttattgggtagcccctgtcgagatgaagagaagaaacaaaatccagccatgcttaagtaagccagccttcgctagcctgctcagtcaatctagcgcttatatccttcggaagggaatagaggaattaaatcaaacatctatcctgttcacccaagtctcctcggtgtctcccttttcagtctgtggctag

SEQ ID NO: 301093 - DNA, 156 bp, Artificial Sequence
  derived and/or modified sequence
atggctaggtaccggtgctgcagaagtcagtcccgcagtcggtactaccgtcagaggcagcgaagtcgtagaaggagaaggcgctcatgccagacaagaaggcgggcgatgcgttgctgtaggcctcgctaccgccccaggtgtcggagacactag

SEQ ID NO: 301094 - protein, 168 aa, Artificial Sequence
  derived and/or modified sequence
MKIAVIGQSLFGQEVYCHLRKEGHEVVGVFTVPDKDGKADPLGLEAEKDGVPVFKYSRWRAKGQALPDVVAKYQALGAELNVLPFCSQFIPMEIISAPRHGSIIYHPSLLPRHRGASAINWTLIHGDKKGGFSIFWADDGLDTGDLLLQKECEVLPDDTVSTLYNRFL

SEQ ID NO: 301095 - DNA, 507 bp, Artificial Sequence
  derived and/or modified sequence
atgaagatagccgttataggccagagtctgtttggtcaggaggtctactgccatctgaggaaagagggccatgaggtcgttggtgtatttaccgtccctgacaaggacggtaaggccgatcctctgggcctggaagccgagaaagacggtgtacccgtatttaaatatagcagatggcgcgcaaaaggacaagccttgccagatgtggttgccaagtaccaggccctcggagccgaactgaacgtcctgccattttgttcacaattcattcctatggagataatttcagccccgcgccatggctctattatataccatccttccctcctgccacgtcacaggggcgctagtgctatcaactggaccctcattcatggggacaagaagggaggatttagcatcttctgggccgacgacggactggacacgggagacctgctcctgcagaaggagtgtgaggtccttcccgacgacacagtgtcaactctgtacaacagattcctgtag

SEQ ID NO: 301096 - DNA, 474 bp, Artificial Sequence
  derived and/or modified sequence
atgaaaatagcagtaatcgggcagagcctgttcggccaggaagtgtattgtcacctgcggaaggagggccacgaagtcgtgggagtgtttacagtaccggacaaggacgggaaagctgatcctctggggctggaggctgagaaagacggagtccccgtattcaaatactccaggtggagggccaaagggcaggccctacctgacgtagttgcaaaataccaggcccttggggccgagctcaatgtgctcccgttctgcagtcagtttatacccatggaaattatcagcgcgccaagacacggaagcattatataccaccctagtctgctgcctaggcatcgcggagcatccgccattaattggaccctcatacatggagataagaaagggggtttctcgatcttctgggcagacgatgggctggacaccggggatctcctgctgcagaaagagtgtgaggtcttgccggactag

SEQ ID NO: 301097 - DNA, 534 bp, Artificial Sequence
  derived and/or modified sequence
atgaagattgccgtcatcggacaatccctcttcggtcaggaggtctattgccatctcagaaaggagggccatgaggtggtgggagtattcacagtccccgataaggatgggaaagccgaccctttgggcctggaagctgagaaggacggagtccccgtgttcaaatattcacgatggcgcgcaaaaggccaggccctgcccgacgttgtggccaagtaccaggctctgggtgcagaactgaatgttctacccttctgtagtcaattcatcccaatggaaatcatctccgcaccacggcatgggtccatcatttaccacccttctctgctccctagacaccgtggcgcatccgcaatcaactggacacttatccatggggacaagaaggggggattctctatattctgggccgacgacggacttgacaccggtgacctcctactgcaaaaggaatgcgaagttctgcccgatgacacagtatctaccctgtataaccgcttcctgttcccggagggaattaagggaatggtctag

SEQ ID NO: 301098 - DNA, 507 bp, Artificial Sequence
  derived and/or modified sequence
atgaagattgctgtgattggccagagcctgtttggccaggaggtgtactgccacctgaggaaggagggccacgaggtggtgggcgtcttcaccgtgcctgacaaggatggcaaggctgaccccctgggcctggaggccgagaaggatggagtgcctgtgttcaagtacagccgctggagggccaagggccaggccctgcctgatgtggtggccaagtaccaggccctgggcgctgagctgaatgtgctgcccttctgcagccagttcatccccatggagatcatcagcgcccccaggcatggcagcatcatctaccaccccagcctgctgcccaggcacagaggagccagcgccatcaactggaccctcatccatggagacaagaagggcggcttcagcatcttctgggcagatgatggcctggacacaggagacctgctgctgcagaaggaatgtgaggtgctgcctgatgacacagtgtccaccctgtacaaccgcttcctgtag

SEQ ID NO: 301099 - DNA, 474 bp, Artificial Sequence
  derived and/or modified sequence
atgaagattgctgtgattggccagagcctgtttggccaggaggtgtactgccacctgaggaaggagggccacgaggtggtgggcgtcttcaccgtgcctgacaaggatggcaaggctgaccccctgggcctggaggccgagaaggatggagtgcctgtgttcaagtacagccgctggagggccaagggccaggccctgcctgatgtggtggccaagtaccaggccctgggcgctgagctgaatgtgctgcccttctgcagccagttcatccccatggagatcatcagcgcccccaggcatggcagcatcatctaccaccccagcctgctgcccaggcacagaggagccagcgccatcaactggaccctcatccatggagacaagaagggcggcttcagcatcttctgggcagatgatggcctggacacaggagacctgctgctgcagaaggaatgtgaggtgctgcctgactag

SEQ ID NO: 301100 - DNA, 534 bp, Artificial Sequence
  derived and/or modified sequence
atgaagattgctgtgattggccagagcctgtttggccaggaggtgtactgccacctgaggaaggagggccacgaggtggtgggcgtcttcaccgtgcctgacaaggatggcaaggctgaccccctgggcctggaggccgagaaggatggagtgcctgtgttcaagtacagccgctggagggccaagggccaggccctgcctgatgtggtggccaagtaccaggccctgggcgctgagctgaatgtgctgcccttctgcagccagttcatccccatggagatcatcagcgcccccaggcatggcagcatcatctaccaccccagcctgctgcccaggcacagaggagccagcgccatcaactggaccctcatccatggagacaagaagggcggcttcagcatcttctgggcagatgatggcctggacacaggagacctgctgctgcagaaggaatgtgaggtgctgcctgatgacacagtgtccaccctgtacaaccgcttcctgtttcctgagggcatcaagggcatggtgtag

SEQ ID NO: 301101 - DNA, 1020 bp, Artificial Sequence
  derived and/or modified sequence
acagtaagtcttcttgacctaagcgggaaagagcgcaggcccctgcggggttggcttttacatggcatttatagacccgcccggagagggtgcgctgcgctcccgccatagtcccaccaccggtgagcgccgcccccactcggctgactctccgcccgccccgcgcccctcccctcacgggctctggccttaaccagagctcgcggactggcggggacaggtcccacctcctggctcccaggacgggtctgcaccaacctcagtttcggggctgcggctcacagaagtctaacctgcccgggacgcccgcaccaactcctgcgcgcggtgagtttctgggctctcgagagcgctggactcccggcggaaaggaggctgccccggctgcagctccgggggctccgggggctccaggggctccaggactcggttctcaccgcaagggctcctgcggggcccatcaacttcgccgctgggacgccgggctcggggtccttccaaccctcctgctaccatgaagattgcagtgattggacagagcctgtttggccaggaagtttactgccacctgaggaaggagggccacgaagtggtgggtgtgttcactgttccagacaaggatggaaaggccgaccccctgggtctggaagctgagaaggatggagtgccggtattcaagtactcccggtggcgtgcaaaaggacaggctttgcctgatgtggtggcaaaataccaggctttgggggccgagctcaacgtcctgcccttctgcagccaattcatccccatggagataatcagtgccccccggcatggctccatcatctatcacccgtcactgctccctaggcaccgaggggcctcggccatcaactggaccctcattcacggagataagaaaggggggttttccatcttctgggcggatgatggtctggacaccggagacctgctgctgcagaaggagtgtgaggtgctcccggacgacaccgtgagcacgctgtacaaccgcttcctctt

SEQ ID NO: 301102 - DNA, 689 bp, Artificial Sequence
  derived and/or modified sequence
ctttcgctctgctgtgtccgtagcacatggcaggtacttggcccatcaagagtgagagagggtgagcgagtgagtgagtcaccggcttggcgagggtctcctctgacccacttagccttgccagcgctcagaactgccagccctgctgggtgcttgggacttttcaaagccctgggaattctccaagggtccacagtccttccaaccctcctgctaccatgaagattgcagtgattggacagagcctgtttggccaggaagtttactgccacctgaggaaggagggccacgaagtggtgggtgtgttcactgttccagacaaggatggaaaggccgaccccctgggtctggaagctgagaaggatggagtgccggtattcaagtactcccggtggcgtgcaaaaggacaggctttgcctgatgtggtggcaaaataccaggctttgggggccgagctcaacgtcctgcccttctgcagccaattcatccccatggagataatcagtgccccccggcatggctccatcatctatcacccgtcactgctccctaggcaccgaggggcctcggccatcaactggaccctcattcacggagataagaaaggggggttttccatcttctgggcggatgatggtctggacaccggagacctgctgctgcagaaggagtgtgaggtgctcccggac

SEQ ID NO: 301103 - DNA, 615 bp, Artificial Sequence
  derived and/or modified sequence
atatctgatatgtgataccatatgggagcaggctctgaaagaacactacaagtagagaggtccttccaaccctcctgctaccatgaagattgcagtgattggacagagcctgtttggccaggaagtttactgccacctgaggaaggagggccacgaagtggtgggtgtgttcactgttccagacaaggatggaaaggccgaccccctgggtctggaagctgagaaggatggagtgccggtattcaagtactcccggtggcgtgcaaaaggacaggctttgcctgatgtggtggcaaaataccaggctttgggggccgagctcaacgtcctgcccttctgcagccaattcatccccatggagataatcagtgccccccggcatggctccatcatctatcacccgtcactgctccctaggcaccgaggggcctcggccatcaactggaccctcattcacggagataagaaaggggggttttccatcttctgggcggatgatggtctggacaccggagacctgctgctgcagaaggagtgtgaggtgctcccggacgacaccgtgagcacgctgtacaaccgcttcctcttccctgaaggcatcaaagggatggtgca

SEQ ID NO: 301104 - DNA, 583 bp, Artificial Sequence
  derived and/or modified sequence
gttctgtacctcacttctgatttctgcaagtcacttcctttttttttttgtctataaatttgttctgtccacgaggcaaccctggagtctctctgaatctgctgtgattctgagggctgcccaatttgtgaatcgttcattgctcaattaaacttttttaaatttaatttggctgaagtttttcttttaacatggtgtcagaagcgggatccaaagtacagcttctagcgacccccaggagtactgagtgaacaagcaaggtccttccaaccctcctgctaccatgaagattgcagtgattggacagagcctgtttggccaggaagtttactgccacctgaggaaggagggccacgaagtggtgggtgtgttcactgttccagacaaggatggaaaggccgaccccctgggtctggaagctgagaaggatggagtgccggtattcaagtactcccggtggcgtgcaaaaggacaggctttgcctgatgtggtggcaaaataccaggctttgggggccgagctcaacgtcctgcccttctgcagccaattcatccccatggagataatcagtgccccccggcat

SEQ ID NO: 301105 - DNA, 507 bp, Artificial Sequence
  derived and/or modified sequence
atgaagatcgccgtgatcggccagagcctgttcggccaggaggtgtactgtcatttgcgaaaggaaggccacgaagtggtgggtgtgtttacagttccagacaaagatggtaaggccgacccattagggttggaagccgagaaagacggggttcccgtgttcaagtactctcgatggcgagctaagggccaagctctccctgatgtggtggctaagtatcaggcactgggcgcagagttaaatgttttacctttctgcagccaatttatccccatggagataatcagcgccccccgtcacggatccataatctatcatccaagcctgctaccacgccatcgaggagctagcgccatcaactggacgctgatacacggcgataaaaagggtggtttttccatattttgggccgacgatggactggacacgggggacctgctgttacaaaaggaatgtgaggtactgcccgatgacaccgttagcactctctacaataggttcctgtag

SEQ ID NO: 301106 - DNA, 474 bp, Artificial Sequence
  derived and/or modified sequence
atgaagatcgccgtgatcggccagagcctgttcggccaggaggtgtactgccatctgaggaaagagggtcatgaagttgtgggcgttttcacggtgcccgacaaggacgggaaagccgaccctctcggcctggaagctgagaaggacggggttcctgtgttcaaatattcacgatggcgtgctaaaggccaggcccttcccgatgtcgtagcaaaataccaagccctgggggctgaactcaatgtcctgcccttttgtagtcaattcattcccatggaaatcatcagcgccccaagacacggaagtataatttatcatccctccctccttccccgacatagaggcgcatcggccatcaattggacactgatccatggtgacaagaagggaggattctccattttctgggccgatgatggcctggataccggagatttgctactgcagaaggaatgtgaggtgctgccagattag

SEQ ID NO: 301107 - DNA, 534 bp, Artificial Sequence
  derived and/or modified sequence
atgaagatcgccgtgatcggccagagcctgttcggccaggaggtgtattgtcaccttaggaaggaaggtcatgaggtggtcggcgtctttacagtccccgacaaggacgggaaagccgaccctctgggactggaggccgagaaagacggggtccccgtctttaagtactcccgatggcgagcaaaggggcaggccctccccgatgtggtggcaaaatatcaggccctcggcgcggaattaaacgtcctgccattttgcagtcagtttattccaatggaaattatctccgccccgcggcatggaagtatcatctaccaccctagcttgctccctagacataggggcgcgtcagctatcaattggacccttatccatggggacaagaagggaggattcagcatattttgggccgacgacggtctcgacaccggcgacctgttgctgcagaaggagtgtgaagtcctccccgatgacacagtttctactctttataaccgattcctctttcctgaagggattaagggaatggtgtag

SEQ ID NO: 301108 - DNA, 507 bp, Artificial Sequence
  derived and/or modified sequence
atgaagattgccgtgattgggcaatcactttttggacaggaggtatactgtcacttaaggaaagagggccatgaggtggtgggcgtctttaccgtccctgataaagacggtaaggccgacccattgggactggaggcggagaaagatggagtgcctgtgttcaagtatagtcgctggagggcaaaaggtcaggccctaccagatgtggtggcaaagtaccaagccctgggagccgagctcaacgtgctccccttctgttcccagtttatccccatggagatcatctcggccccaagacatgggtctattatttaccatcccagcctgctccccagacacagaggtgcttctgcaatcaactggactcttatccatggtgataagaagggaggcttctcgatcttttgggcagatgacggcctggacacaggcgatctccttttgcagaaagaatgtgaggtcctgcccgatgacaccgtaagcaccctgtacaatcggttcctttag

SEQ ID NO: 301109 - DNA, 474 bp, Artificial Sequence
  derived and/or modified sequence
atgaagatagcagtcatcggtcagagcctcttcggacaagaggtttactgccacctgcgcaaggaggggcatgaagtcgtgggagtgttcactgtacctgacaaggacgggaaggcagaccctctgggtctggaggcagagaaggacggggtgccagtgttcaaatattcaaggtggagggccaaaggtcaggcactgcccgatgtcgtggctaaatatcaggccttaggggctgaactcaatgtgctacctttctgctcacagtttattcccatggagatcatctcagctcctagacatggctctatcatctatcaccctagtcttttgcctagacacaggggcgcaagcgccattaattggaccctgatccacggagacaagaagggtggtttttcaatcttttgggctgacgatggccttgatactggggacctcctgctgcaaaaggagtgtgaagtactgccagactag

SEQ ID NO: 301110 - DNA, 534 bp, Artificial Sequence
  derived and/or modified sequence
atgaagattgccgtgatcggccaatccctgttcggccaggaggtgtattgccacctgagaaaagaagggcatgaggtcgtgggagtcttcaccgtgcctgacaaagacggaaaagctgaccccttgggcctcgaagctgagaaggatggcgtgccagtgttcaagtattcccggtggagggccaaaggccaggccctcccagacgtggtggctaaataccaagctctgggggctgagctaaacgtccttccattctgttcccaattcatcccaatggaaattatctctgcaccacggcacggatctattatctatcatccaagtctgctgcccagacataggggcgcttcagcaattaactggaccctcatccatggagacaagaaggggggtttctctatcttttgggccgacgacgggctggatacaggcgaccttttgttgcagaaggaatgcgaggttttacctgatgatacagtttcaacgctgtacaaccgctttctgttcccagagggcatcaaggggatggtgtag

SEQ ID NO: 301111 - DNA, 507 bp, Artificial Sequence
  derived and/or modified sequence
atgaagatcgccgtgatcggccagagcctgttcggccaggaggtgtactgccacctgagaaaggagggccacgaggtggtgggcgtgttcaccgtgcccgacaaggacggcaaggccgaccccctgggcctggaggccgagaaggacggcgtgcccgtgttcaagtacagcagatggagagccaagggccaggccctgcccgacgtggtggccaagtaccaggccctgggcgccgagctgaacgtgctgcccttctgcagccagttcatccccatggagatcatcagcgcccccagacacggcagcatcatctaccaccccagcctgctgcccagacacagaggcgccagcgccatcaactggaccctgatccacggcgacaagaagggcggcttcagcatcttctgggccgacgacggcctggacaccggcgacctgctgctgcagaaggagtgcgaggtgctgcccgacgacaccgtgagcaccctgtacaacagattcctgtag

SEQ ID NO: 301112 - DNA, 474 bp, Artificial Sequence
  derived and/or modified sequence
atgaagatcgccgtgatcggccagagcctgttcggccaggaggtgtactgccacctgagaaaggagggccacgaggtggtgggcgtgttcaccgtgcccgacaaggacggcaaggccgaccccctgggcctggaggccgagaaggacggcgtgcccgtgttcaagtacagcagatggagagccaagggccaggccctgcccgacgtggtggccaagtaccaggccctgggcgccgagctgaacgtgctgcccttctgcagccagttcatccccatggagatcatcagcgcccccagacacggcagcatcatctaccaccccagcctgctgcccagacacagaggcgccagcgccatcaactggaccctgatccacggcgacaagaagggcggcttcagcatcttctgggccgacgacggcctggacaccggcgacctgctgctgcagaaggagtgcgaggtgctgcccgactag

SEQ ID NO: 301113 - DNA, 534 bp, Artificial Sequence
  derived and/or modified sequence
atgaagatcgccgtgatcggccagagcctgttcggccaggaggtgtactgccacctgagaaaggagggccacgaggtggtgggcgtgttcaccgtgcccgacaaggacggcaaggccgaccccctgggcctggaggccgagaaggacggcgtgcccgtgttcaagtacagcagatggagagccaagggccaggccctgcccgacgtggtggccaagtaccaggccctgggcgccgagctgaacgtgctgcccttctgcagccagttcatccccatggagatcatcagcgcccccagacacggcagcatcatctaccaccccagcctgctgcccagacacagaggcgccagcgccatcaactggaccctgatccacggcgacaagaagggcggcttcagcatcttctgggccgacgacggcctggacaccggcgacctgctgctgcagaaggagtgcgaggtgctgcccgacgacaccgtgagcaccctgtacaacagattcctgttccccgagggcatcaagggcatggtgtag

SEQ ID NO: 301114 - DNA, 294 bp, Artificial Sequence
  derived and/or modified sequence
atgaaggcccagaccgccctgagcttcttcctgatcctgatcaccagcctgagcggcagccagggcatcttccccctggccttcttcatctacgtgcccatgaacgagcagatcgtgatcggcagactggacgaggacatcatcctgcccagcagcttcgagagaggcagcgaggtggtgatccactggaagtaccaggacagctacaaggtgcacagctactacaagggcagcgaccacctggagagccaggaccccagatacgccaacagaaccagcctgttctacaactag

SEQ ID NO: 301115 - DNA, 438 bp, Artificial Sequence
  derived and/or modified sequence
atgaaggcccagaccgccctgagcttcttcctgatcctgatcaccagcctgagcggcagccagggcatcttccccctggccttcttcatctacgtgcccatgaacgagcagatcgtgatcggcagactggacgaggacatcatcctgcccagcagcttcgagagaggcagcgaggtggtgatccactggaagtaccaggacagctacaaggtgcacagctactacaagggcagcgaccacctggagagccaggaccccagatacgccaacagaaccagcctgttctacaacgagatccagaacggcaacgccagcctgttcttcagaagagtgagcctgctggacgagggcatctacacctgctacgtgggcaccgccatccaggtgatcaccaacaaggtggtgctgaaggtgggcgtgttcctgacccccgtgtag

SEQ ID NO: 301116 - DNA, 411 bp, Artificial Sequence
  derived and/or modified sequence
atgaaggcccagaccgccctgagcttcttcctgatcctgatcaccagcctgagcggcagccagggcatcttccccctggccttcttcatctacgtgcccatgaacgagcagatcgtgatcggcagactggacgaggacatcatcctgcccagcagcttcgagagaggcagcgaggtggtgatccactggaagtaccaggacagctacaaggtgcacagctactacaagggcagcgaccacctggagagccaggaccccagatacgccaacagaaccagcctgttctacaacgagatccagaacggcaacgccagcctgttcttcagaagagtgagcctgctggacgagggcatctacacctgctacgtgggcaccgccatccaggtgatcaccaacaaggtggtgctgtag

SEQ ID NO: 301117 - DNA, 294 bp, Artificial Sequence
  derived and/or modified sequence
atgaaggctcagaccgcactttcatttttcctgatcctgataacctctttgagcggttcccagggaatctttccactcgcctttttcatctatgtacccatgaacgagcagatcgtgatcggcaggttggacgaagatatcattctaccttcttctttcgagagaggcagcgaggtcgtgattcactggaaatatcaggatagctacaaggtgcactcttactacaagggctcagaccacctggagagccaggacccccgttacgccaatagaactagcctgttctacaattag

SEQ ID NO: 301118 - DNA, 438 bp, Artificial Sequence
  derived and/or modified sequence
atgaaagcccagactgccctctcatttttcctaatattgattacatcactgtccgggagccagggtatcttccccctggctttctttatatacgtgcctatgaacgagcagatagtaattggacggctggacgaggacattatccttcccagttctttcgaacgcgggagtgaagtggtaatacactggaagtatcaggattcttacaaggtacattcctactacaaggggagtgaccatctggagtcccaggatccccgctacgccaacagaaccagtctgttctacaacgagatacagaatgggaatgcctccctgttttttagacgcgtttcactgctggacgaagggatatacacttgttatgtgggcaccgccattcaggtcattaccaataaagtcgtcctgaaagtgggagtgttcctgacgccagtatag

SEQ ID NO: 301119 - DNA, 411 bp, Artificial Sequence
  derived and/or modified sequence
atgaaggctcagactgccctgtcttttttcttgatactcattactagtctctcaggctcacaaggcattttcccgctggcgttttttatttatgtgcctatgaatgagcaaatagtgattggcagactggatgaggacatcatcctgccatcatctttcgaacgagggtccgaagtagtgattcactggaagtatcaagacagctataaagtgcacagttactataaaggcagcgatcatctggagagccaggatccccggtatgccaaccggacgtcactcttttataacgaaatccagaatggcaacgcaagcctcttcttccggcgggtgagccttctggacgaaggaatctacacatgttacgtggggacagccatacaggttatcactaacaaggtggtgttatag

SEQ ID NO: 301120 - DNA, 585 bp, Artificial Sequence
  derived and/or modified sequence
ttcttatggactacttagcatttgactagacggtatgaatttctaagtaagctactcaggaggctgaggcaggagaatcgcttgaacccgggaggcggaggttacagtgagccttttcctagttttactgttggaagcctaactcacaggagagattatgcaatacagtcctgaagtcaagggaggagagcatgtaggagaatactaaccctgcacagattgtgatggtgatgtggaatatactaaagcctagaacgcacctcctctgcatgactaatatgttctgcacaagacatgaaggcacagacagcactgtctttcttcctcattctcataacatctctgagtggatctcaaggcatattccctttggctttcttcatttatgttcctatgaatgaacaaatcgtcattggaagacttgatgaagatataattctcccttcttcatttgagaggggatccgaagtcgtaatacactggaagtatcaagatagctataaggttcacagttactacaaaggcagtgaccatttggaaagccaagatcccagatatgcaaacaggacatcccttttctataat

SEQ ID NO: 301121 - DNA, 594 bp, Artificial Sequence
  derived and/or modified sequence
gtttattcttatggactacttagcatttgactagacggtatgaatttctaagtaagcatgtaggagaatactaaccctgcacagattgtgatggtgatgtggaatatactaaagcctagaacgcacctcctctgcatgactaatatgttctgcacaagacatgaaggcacagacagcactgtctttcttcctcattctcataacatctctgagtggatctcaaggcatattccctttggctttcttcatttatgttcctatgaatgaacaaatcgtcattggaagacttgatgaagatataattctcccttcttcatttgagaggggatccgaagtcgtaatacactggaagtatcaagatagctataaggttcacagttactacaaaggcagtgaccatttggaaagccaagatcccagatatgcaaacaggacatcccttttctataatgagattcaaaatgggaatgcgtcgctatttttcagaagagtaagccttctggacgaaggaatttacacctgctatgtaggaacagcaattcaagtgattacaaacaaagtggtgctaaaggtgggagtttttctcacacccgt

SEQ ID NO: 301122 - DNA, 573 bp, Artificial Sequence
  derived and/or modified sequence
attcttatggactacttagcatttgactagacggtatgaatttctaagtaagcacatatagaactggatgcccttgtggtacatctcaaggctgatttgaaagcttgagagaccatcaagaattggatttggggaagagcatgactaatatgttctgcacaagacatgaaggcacagacagcactgtctttcttcctcattctcataacatctctgagtggatctcaaggcatattccctttggctttcttcatttatgttcctatgaatgaacaaatcgtcattggaagacttgatgaagatataattctcccttcttcatttgagaggggatccgaagtcgtaatacactggaagtatcaagatagctataaggttcacagttactacaaaggcagtgaccatttggaaagccaagatcccagatatgcaaacaggacatcccttttctataatgagattcaaaatgggaatgcgtcgctatttttcagaagagtaagccttctggacgaaggaatttacacctgctatgtaggaacagcaattcaagtgattacaaacaaagtggtgcta

SEQ ID NO: 301123 - DNA, 294 bp, Artificial Sequence
  derived and/or modified sequence
atgaaggcccagacagccctgtccttcttcctgatcctgatcaccagcctgagcggcagccagggcatcttccccctggccttcttcatctacgtgcccatgaatgagcagatcgtcatcggccgcctggatgaggacatcatcctgcccagcagctttgagcggggcagcgaggtggtgatccactggaagtaccaggacagctacaaggtgcacagctactacaagggcagtgaccacctggagagccaggaccccaggtatgccaacagaaccagcctcttctacaactag

SEQ ID NO: 301124 - DNA, 438 bp, Artificial Sequence
  derived and/or modified sequence
atgaaggcccagacagccctgtccttcttcctgatcctgatcaccagcctgagcggcagccagggcatcttccccctggccttcttcatctacgtgcccatgaatgagcagatcgtcatcggccgcctggatgaggacatcatcctgcccagcagctttgagcggggcagcgaggtggtgatccactggaagtaccaggacagctacaaggtgcacagctactacaagggcagtgaccacctggagagccaggaccccaggtatgccaacagaaccagcctcttctacaatgagatccagaatggaaatgccagcctcttcttcagaagagtgtccctgctggatgagggcatctacacctgctacgtgggcacagccatccaggtgatcaccaacaaggtggtgctgaaggtgggcgtcttcctgacccctgtgtag

SEQ ID NO: 301125 - DNA, 411 bp, Artificial Sequence
  derived and/or modified sequence
atgaaggcccagacagccctgtccttcttcctgatcctgatcaccagcctgagcggcagccagggcatcttccccctggccttcttcatctacgtgcccatgaatgagcagatcgtcatcggccgcctggatgaggacatcatcctgcccagcagctttgagcggggcagcgaggtggtgatccactggaagtaccaggacagctacaaggtgcacagctactacaagggcagtgaccacctggagagccaggaccccaggtatgccaacagaaccagcctcttctacaatgagatccagaatggaaatgccagcctcttcttcagaagagtgtccctgctggatgagggcatctacacctgctacgtgggcacagccatccaggtgatcaccaacaaggtggtgctgtag

SEQ ID NO: 301126 - DNA, 294 bp, Artificial Sequence
  derived and/or modified sequence
atgaaggcccagaccgccctgagcttcttcctgatcctgatcacctccctgtcggggtcccaggggatctttccactggctttctttatatacgttccgatgaatgaacaaattgtgatcggaagacttgacgaggatatcatcctgcccagcagtttcgagcggggatcagaagtggtcattcactggaagtaccaggacagctacaaagtccactcctactacaagggctctgatcacctggaatcacaggacccccggtatgccaacaggacatccctcttttacaattag

SEQ ID NO: 301127 - DNA, 438 bp, Artificial Sequence
  derived and/or modified sequence
atgaaggcccagaccgccctgagcttcttcctgatcctgatcaccagtctgagcggctcccaagggatatttcccctcgccttttttatttacgtccccatgaacgaacagattgttatagggagacttgacgaagacattatactaccatcttcttttgagagaggttcagaagtggtgattcactggaaatatcaggactcgtataaagttcactcctattataaggggtcagaccacctcgagagccaggatccacgctatgcaaatcgaacctccctgttctacaatgagattcaaaacggcaacgcgagcttattttttagaagagtgtccctgctcgacgaagggatttatacctgctatgtgggtaccgccattcaagtcatcaccaacaaagtagtgctgaaggtaggggtgttcttaacccctgtatag

SEQ ID NO: 301128 - DNA, 411 bp, Artificial Sequence
  derived and/or modified sequence
atgaaggcccagaccgccctgagcttcttcctgatcctgatcacctctctctctgggtcacagggaatatttcccctggctttcttcatttatgtccctatgaatgagcagattgtgattggtagactggacgaggacatcattctgcctagcagcttcgagcgcggtagtgaggtggttatccattggaaataccaggattcatataaggttcactcatattataaagggtctgatcacctcgaatcccaggacccccggtatgctaaccgcacatcactgttctacaacgaaatccagaacggcaacgctagtctgtttttccgaagggtcagcctactggacgaagggatatacacttgttacgtgggcactgctattcaggtgatcacaaacaaggttgtcctttag

SEQ ID NO: 301129 - DNA, 294 bp, Artificial Sequence
  derived and/or modified sequence
atgaaggcccagaccgctctgtctttctttttgatcttaatcactagcctgtctggcagccagggtatctttccattggcctttttcatttatgtgcccatgaatgagcagattgtcattggcaggttagacgaagatatcattctaccttctagttttgaaagaggctcagaggtggtgatccattggaagtaccaagactcgtacaaagtccactcatactacaaaggatctgatcatcttgagtcacaggatcctaggtatgccaaccgcacttcacttttctacaactag

SEQ ID NO: 301130 - DNA, 438 bp, Artificial Sequence
  derived and/or modified sequence
atgaaggctcagaccgccttgtctttcttcctgatccttatcacgtcactcagcgggagtcagggcatttttcccctggcattcttcatttacgtaccaatgaatgaacagatagtgattggacgcctggacgaggacataatcctccccagttcctttgaacgcggtagcgaggtggtgatccattggaagtaccaggatagctacaaggtgcattcttactacaagggatctgaccaccttgaatctcaggacccccgttacgctaacagaaccagtttgttctacaatgagatccagaacggcaacgcgagtctcttcttcagaagagtgtctctcctcgacgagggcatctacacctgttacgttggcactgcaattcaggtcattactaacaaggttgttctcaaggttggggtctttttgaccccagtctag

SEQ ID NO: 301131 - DNA, 411 bp, Artificial Sequence
  derived and/or modified sequence
atgaaagctcaaaccgcgctgtctttcttcctcatcctgatcacctcattatcggggtcccaggggatctttcccctagcattctttatctacgtgcctatgaatgagcaaatcgtcatcggaagacttgacgaagacataattcttccaagttcatttgagcgaggtagcgaggttgtgattcactggaagtaccaggacagttataaggtgcactcctattataaaggaagcgatcacctggaaagccaggaccctcggtatgccaatcgcacctcgctgttctacaatgaaattcagaatggtaatgcatccctctttttcagaagggtgtcacttctggacgaggggatatacacctgctacgttggcactgcaatacaggtgatcacgaacaaagtggttctgtag

SEQ ID NO: 301132 - protein, 893 aa, Artificial Sequence
  derived and/or modified sequence
MVVDEQQRLTAQLTLQRQKIQELTTNAKETHTKLALAEARVQEEEQKATRLEKELQTQTTKFHQDQDTIMAKLTNEDSQNRQLQQKLAALSRQIDELEETNRSLRKAEEELQDIKEKISKGEYGNAGIMAEVEELRKRVLDMEGKDEELIKMEEQCRDLNKRLERETLQSKDFKLEVEKLSKRIMALEKLEDAFNKSKQECYSLKCNLEKERMTTKQLSQELESLKVRIKELEAIESRLEKTEFTLKEDLTKLKTLTVMFVDERKTMSEKLKKTEDKLQAASSQLQVEQNKVTTVTEKLIEETKRALKSKTDVEEKMYSVTKERDDLKNKLKAEEEKGNDLLSRVNMLKNRLQSLEAIEKDFLKNKLNQDSGKSTTALHQENNKIKELSQEVERLKLKLKDMKAIEDDLMKTEDEYETLERRYANERDKAQFLSKELEHVKMELAKYKLAEKTETSHEQWLFKRLQEEEAKSGHLSREVDALKEKIHEYMATEDLICHLQGDHSVLQKKLNQQENRNRDLGREIENLTKELERYRHFSKSLRPSLNGRRISDPQVFSKEVQTEAVDNEPPDYKSLIPLERAVINGQLYEESENQDEDPNDEGSVLSFKCSQSTPCPVNRKLWIPWMKSKEGHLQNGKMQTKPNANFVQPGDLVLSHTPGQPLHIKVTPDHVQNTATLEITSPTTESPHSYTSTAVIPNCGTPKQRITILQNASITPVKSKTSTEDLMNLEQGMSPITMATFARAQTPESCGSLTPERTMSPIQVLAVTGSASSPEQGRSPEPTEISAKHAIFRVSPDRQSSWQFQRSNSNSSSVITTEDNKIHIHLGSPYMQAVASPVRPASPSAPLQDNRTQGLINGALNKTTNKVTSSITITPTATPLPRQSQITVSNIYN

SEQ ID NO: 301133 - protein, 879 aa, Artificial Sequence
  derived and/or modified sequence
MVVDEQQRLTAQLTLQRQKIQELTTNAKETHTKLALAEARVQEEEQKATRLEKELQTQTTKFHQDQDTIMAKLTNEDSQNRQLQQKLAALSRQIDELEETNRSLRKAEEELQDIKEKISKGEYGNAGIMAEVEELIKMEEQCRDLNKRLERETLQSKDFKLEVEKLSKRIMALEKLEDAFNKSKQECYSLKCNLEKERMTTKQLSQELESLKVRIKELEAIESRLEKTEFTLKEDLTKLKTLTVMFVDERKTMSEKLKKTEDKLQAASSQLQVEQNKVTTVTEKLIEETKRALKSKTDVEEKMYSVTKERDDLKNKLKAEEEKGNDLLSRVNMLKNRLQSLEAIEKDFLKNKLNQDSGKSTTALHQENNKIKELSQEVERLKLKLKDMKAIEDDLMKTEDEYETLERRYANERDKAQFLSKELEHVKMELAKYKLAEKTETSHEQWLFKRLQEEEAKSGHLSREVDALKEKIHEYMATEDLICHLQGDHSVLQKKLNQQENRNRDLGREIENLTKELERYRHFSKSLRPSLNGRRISDPQVFSKEVQTEAVDNEPPDYKSLIPLERAVINGQLYEESENQDEDPNDEGSVLSFKCSQSTPCPVNRKLWIPWMKSKEGHLQNGKMQTKPNANFVQPGDLVLSHTPGQPLHIKVTPDHVQNTATLEITSPTTESPHSYTSTAVIPNCGTPKQRITILQNASITPVKSKTSTEDLMNLEQGMSPITMATFARAQTPESCGSLTPERTMSPIQVLAVTGSASSPEQGRSPEPTEISAKHAIFRVSPDRQSSWQFQRSNSNSSSVITTEDNKIHIHLGSPYMQAVASPVRPASPSAPLQDNRTQGLINGALNKTTNKVTSSITITPTATPLPRQSQITVSNIYN

SEQ ID NO: 301134 - protein, 837 aa, Artificial Sequence
  derived and/or modified sequence
MVVDEQQRLTAQLTLQRQKIQELTTNAKETHTKLALAEARVQEEEQKATRLEKELQTQTTKFHQDQDTIMAKLTNEDSQNRQLQQKLAALSRQIDELEETNRSLRKAEEELQDIKEKISKGEYGNAGIMAEVEELRKRVLDMEGKDEELIKMEEQCRDLNKRLERETLQSKDFKLEVEKLSKRIMALEKLEDAFNKSKQECYSLKCNLEKERMTTKQLSQELESLKVRIKELEAIESRLEKTEFTLKEDLTKLKTLTVMFVDERKTMSEKLKKTEDKLQAASSQLQVEQNKVTTVTEKLIEETKRALKSKTDVEEKMYSVTKERDDLKNKLKAEEEKGNDLLSRVNMLKNRLQSLEAIEKDFLKNKLNQDSGKSTTALHQENNKIKELSQEVERLKLKLKDMKAIEDDLMKTEDEYETLERRYANERDKAQFLSKELEHVKMELAKYKLAEKTETSHEQWLFKRLQEEEAKSGHLSREVDALKEKIHEYMATEDLICHLQGDHSVLQKKLNQQENRNRDLGREIENLTKELERYRHFSKSLRPSLNGRRISDPQVFSKEVQTEAVDNEPPDYKSLIPLERAVINGQLYEESENQDEDPNDEGSVLSFKCSQSTPCPVNRKLWIPWMKSKEGHLQNGKMQTKPNANFVQPGDLVLSHTPGQPLHIKVTPDHVQNTATLEITSPTTESPHSYTSTAVIPNCGTPKQRITILQNASITPVKSKTSTEDLMNLEQGMSPITMATFARAQTPESCGSLTPERTMSPIQVLAVTGSASSPEQGRSPEPTEISAKHAIFRVSPDRQSSWQFQRSNSNSSSVITTEDNKIHIHLGSPYMQAVASP

SEQ ID NO: 301135 - protein, 721 aa, Artificial Sequence
  derived and/or modified sequence
MAAFGLLSYEQRPLKRPRLGPPDVYPQDPKQKEDELTAVNVKQGFNNQPAFTGDEHGSARNIVINPSKIGAYFSSILAEKLKLNTFQDTGKKKPQVNAKDNYWLVTARSQSAIHSWFSDLAGNKPLSILAKKVPILSKKEDVFAYLAKYSVPMVRATWLIKMTCAYYSAISEAKIKKRQAPDPNLEWTQISTRYLREQLAKISDFYHMASSTGDGPVPVPPEVEQAMKQWEYNEKLAFHMFQEGMLEKHEYLTWILDVLEKIRPMDDDLLKLLLPLMLQYSDEFVQSAYLSRRLAYFCARRLSLLLSDSPNLLAAHSPHMMIGPNNSSIGAPSPGPPGPGMSPVQLAFSDFLSCAQHGPLVYGLSCMLQTVTLCCPSALVWNYSTNENKSANPGSPLDLLQVAPSSLPMPGGNTAFNQQVRARIYEVEQQIKQRGRAVEVRWSFDKCQESTAGVTISRVLHTLEVLDRHCFDRTDSSNSMETLYHKIFWANQNKDNQEVAPNDEAVVTLLCEWAVSCKRSGKHRAMAVAKLLEKRQAEIEAERCGESEVLDEKESISSSSLAGSSLPVFQNVLLRFLDTQAPSLSDPNSECEKVEFVNLVLLFCEFIRHDVFSHDAYMCTLISRGDLSVTASTRPRSPVGENADEHYSKDHDVKMEIFSPMPGESCENANTSLGRRMSVNCEKLVKREKPRELIFPSNYDLLRHLQYATHFPIPLVSHCFS

SEQ ID NO: 301136 - DNA, 2271 bp, Artificial Sequence
  derived and/or modified sequence
atggcggcctttggccttctcagttacgagcaacgacccctgaagagacctcgtctgggtcctcctgacgtgtacccgcaggacccaaagcagaaggaagacgagctcaccgctgtgaatgtcaaacaggggttcaataatcagcccgcttttactggagatgagcatggctccgcaagaaacatcgtgatcaacccatccaagatcggcgcatacttcagcagtatcttagctgagaaactaaagcttaacacgtttcaggacaccggaaaaaagaagccacaggtgaatgcaaaagacaactattggctggtgactgccagatcccagtctgctatccactcctggtttagcgacctcgccggcaataaaccactctcaatacttgcaaaaaaggtgccaatcctgtccaagaaggaggacgtctttgcctacctggcgaagtacagtgtgccaatggttcgtgcgacatggttaatcaaaatgacatgtgcatattatagcgccatcagtgaagctaagatcaagaagagacaggctcccgatcccaatttagaatggactcagatttctactcgctatctgcgtgagcaactggccaaaattagtgacttctaccatatggcctcgtcaaccggagacggccccgtccccgtgccccctgaggtcgagcaagctatgaagcaatgggagtacaatgagaaactcgcttttcacatgttccaggagggcatgttggaaaagcatgaataccttacttggatactcgacgtacttgagaagatccgacctatggacgatgaccttttaaagctgctgctccctctgatgttacagtattccgacgagttcgttcaatcagcttatctgtctcgtcggctggcttacttttgcgcccgaaggctgagcttgttactctcagatagtccaaacctgctggctgctcatagtccccacatgatgattggcccgaataattctagcatcggagcacccagccctggtcctccaggtcccggtatgagcccagtgcagctggctttctcagattttctttcctgcgcccaacacgggcccctggtttatgggctatcgtgtatgctgcaaactgtgacgctttgttgtccttccgcccttgtctggaactactccacaaacgagaataaatctgctaatccgggtagccctcttgacctgcttcaggtggccccgagctccttgcccatgcccggcggcaatactgcctttaatcagcaggtgcgcgcccgcatatacgaggtggaacagcaaatcaagcagcgtgggcgggctgtggaggtgaggtggagctttgataagtgtcaagagagcacagcaggagtaaccatttcccgagtcctccacactctagaagtgctggaccggcactgttttgatagaaccgattccagtaattctatggagactttgtatcacaagatattttgggccaaccagaacaaggataaccaggaggtggcaccgaacgacgaggcagtcgtgactttgctgtgcgaatgggccgtgtcctgcaagcgttccgggaagcacagagcgatggccgtagcaaagctgctagagaagcgacaggccgaaatcgaggccgagagatgtggcgagtctgaggtgttggacgaaaaagagagtattagttccagctccttagccgggtctagccttccagtcttccagaacgtgctcctgagattccttgacacacaggcgccaagcctgtcagatcccaactcggagtgtgaaaaggtggaattcgtgaatctcgtgctcctgttttgtgaattcatacgccacgatgtgtttagtcacgatgcttatatgtgtacactgattagccggggcgatctaagtgtcaccgcttcgactagaccccgcagcccggtgggcgaaaacgcagacgagcactactctaaggatcacgatgtgaaaatggaggaacaatctatcatggcccatatggggatcgactctggtacgactaacatattcgatgaagttgataagtcggactttaagactgattttggttctgagttcccgattttctcccccatgcctggagagtcatgcgagaatgcaaatacatcgctgggccgaaggatgtcagttaactgcgagaagctagttaaacgcgagaaaccccgtgaattaatcttcccctccaattatgacctgctcaggcacctgcagtacgctacgcacttccccatccctctggtgagtcattgttttagctag

SEQ ID NO: 301137 - DNA, 2271 bp, Artificial Sequence
  derived and/or modified sequence
atggccgccttcggcctgctgtcctatgagcagaggcccctgaagaggccccggctgggccccccagatgtgtacccccaggaccccaagcagaaggaggatgagctgacagctgtgaatgtgaagcagggcttcaacaaccagcctgccttcaccggagatgagcacggcagcgccaggaacatcgtcatcaaccccagcaagattggagcctacttcagcagcatcctggccgagaagctgaagctgaacaccttccaggacaccgggaagaagaagccccaggtgaatgccaaggacaactactggctggtgacagcccggagccagagcgccatccacagctggttcagtgacctggccggcaacaagcccctgagcatcctggccaagaaggtgcccatcctgagcaagaaggaggatgtgtttgcctacctggccaagtacagcgtgcccatggtgcgggccacctggctgatcaagatgacctgtgcctactacagcgccatcagcgaggccaagatcaagaagaggcaggccccagaccccaacctggagtggacccagatcagcacccgctacctgcgggagcagctggccaagatcagtgacttctaccacatggccagcagcactggagatggccctgtgcctgtgcccccagaggtggagcaggccatgaagcagtgggagtacaatgagaagctggccttccacatgttccaggagggcatgctggagaagcatgagtacctgacctggatcctggatgtgctggagaagatccggcccatggatgatgacctgctgaagctgctgctgcccctgatgctgcagtacagtgatgaatttgtgcagagcgcctacctgagccggcggctggcctacttctgtgcccggcggctgagcctgctgctgagtgacagccccaacctgctggccgcccacagcccccacatgatgattggccccaacaacagcagcattggagcccccagccctggccccccaggccctggcatgagccctgtgcagctggccttcagtgacttcctgagctgtgcccagcacggccccctggtgtatggcctgagctgcatgctgcagacagtgaccctgtgctgccccagcgccctggtgtggaactacagcaccaatgaaaacaagagcgccaaccctggcagccccctggacctgctgcaggtggcccccagcagcctgcccatgcctgggggcaacacagccttcaaccagcaggtgcgggcccgcatctatgaggtggagcagcagatcaagcagaggggccgggctgtggaggtgcgctggagctttgacaagtgccaggagagcacagctggggtgaccatcagccgggtgctgcacaccctggaggtgctggacagacactgctttgacagaacagacagcagcaacagcatggagaccctgtaccacaagatcttctgggccaaccagaacaaggacaaccaggaggtggccccaaatgatgaagctgtggtgaccctgctgtgtgagtgggccgtgtcctgcaagaggtctgggaagcaccgggccatggctgtggccaagctgctggagaagaggcaggccgagattgaagctgagcgctgtggggagagcgaggtgctggatgagaaggagagcatcagcagcagcagcctggccggcagcagcctgcctgtgttccagaatgtgctgctgcgcttcctggacacccaggcccccagcctgagtgaccccaacagtgaatgtgagaaggtggagtttgtgaacctggtgctgctcttctgtgagttcatcagacatgatgtgttcagccatgatgcctacatgtgcaccctcatcagcagaggagacctgtctgtgacagccagcacccggcccaggagccctgtgggagaaaatgctgatgagcactacagcaaggaccatgatgtgaagatggaggagcagagcatcatggcccacatgggcatcgacagcggcaccaccaacatctttgatgaggtggacaagagtgacttcaagacagactttggcagcgagttccccatcttcagccccatgcctggagagagctgtgaaaatgccaacaccagcctgggccgcaggatgtctgtgaactgtgagaagctggtgaagcgggagaagccccgggagctgatcttccccagcaactatgacctgctgcggcacctgcagtatgccacccacttccccatccccctggtgagccactgcttctcctag

SEQ ID NO: 301138 - DNA, 2862 bp, Artificial Sequence
  derived and/or modified sequence
gtccgctccacagcttcttcccgggaggggagggccaccctcgccttgggcgagcacttcagccaccagcctaggcgccaagaaaagtttttttttttttttttccagtgccccacccccacccccatcctgcgcccagctggggtgggtttgggtccattggtgaaaaaagtcacacgttcccatcagctgctcctccccctggagacaaggtaggggggagcagaggaggcaggcgccgcggaggaccctggccgacctctagtccctccgccgccgccaccggagcggtgcgtcccggggctcgagcgcagccgagtacccgccgaaggctgtccccatcagtgcgtgtctgctgccgggcagcggcagcatccaacctgctttattcctcctgcctgcagcgccacagcgagcgagcgagcgaggagggggagagagggagtctgtctgcaaagtgctgctccctggtgctcagaggcggctgctccagctccaactctcattcatttcgccggttaacatgagagatcatggccgccttcgggcttctcagctatgagcagagaccgctgaagcgcccccggctcgggccgcccgacgtctacccacaggaccccaagcagaaggaggatgaacttactgctgtgaatgtaaagcaaggcttcaataatcagccagccttcactggagatgaacatggctcagccagaaatattgtaattaacccatcaaagattggagcttattttagcagcatattagctgagaaactgaagcttaacactttccaggacacgggaaagaagaaaccacaagttaatgctaaagataattattggctggttactgctcgatcccagagtgcaattcatagttggttttctgacttagcaggaaataagccactttctattttggcaaaaaaggttcctatccttagtaaaaaagaggatgtttttgcatatttagctaaatattctgtgccaatggttcgagcaacgtggctgatcaagatgacttgtgcctattattctgctatatctgaagctaaaattaagaaacgtcaggctcctgatccgaatttggagtggacacagatatctaccagatatcttcgagagcagttggccaagatttctgacttttaccacatggcctccagcacgggcgatggccctgtccctgtgccaccagaggtggagcaagccatgaagcaatgggaatacaacgaaaagctagcatttcacatgttccaggaaggaatgttagaaaaacacgaatatttgacatggatcctggatgttttagaaaagatcagaccaatggatgatgatcttcttaaactcttgctaccactaatgctgcagtattcagatgagtttgttcagtcggcctacctgtctcgtcgtcttgcctacttttgtgcccggcgtctttccttgctgctgagcgatagccccaacctccttgctgcccactcaccccacatgatgataggaccaaacaactcgagtatcggggcccccagccctggcccccccggccctggcatgagccccgtgcagctggccttctcagattttctttcctgtgcacagcatggtcccctggtttatggacttagttgtatgttgcagactgtcactctctgttgcccaagtgccttggtgtggaattattccacaaatgaaaataagagcgcaaacccaggctcacccctggatctgctgcaggtggccccgtccagcctccccatgccgggtgggaacacggctttcaatcagcaggttcgggcaaggatttatgaagtagaacaacagataaaacaaagaggccgtgcagtggaagttcggtggtcatttgacaagtgccaagaatccacagcaggggtgactattagtcgggttttgcacacgttggaagttttggatcgtcactgttttgaccgaactgattccagcaattccatggagacactttatcataagattttctgggcaaaccaaaacaaagataaccaagaggttgcgcccaacgatgaagctgtggtgacgctgttatgtgaatgggccgtgagctgcaaacggtctggcaagcacagggccatggctgtggcaaaactcctggagaagaggcaagcagaaattgaggcagagagatgtggtgaatcagaagtcttagatgagaaggagtctatttcttcatcctctcttgctggatccagtttgcctgttttccagaatgtgctgttaaggtttttagatacacaggccccctctttgtcggacccaaacagtgaatgtgaaaaggtggaatttgtgaacctggtgctgctcttctgcgagttcatccgccatgatgtcttctcccatgacgcatacatgtgtaccctcatatctcgaggagatttgtcagtcactgcctcaactcggccgcggtcaccagtaggggaaaatgcagatgaacactattcaaaggaccatgatgtgaaaatggaggaacagagtattatggcgcatatgggcattgactcaggaaccactaacatttttgatgaagtagacaagagtgactttaaaactgactttggttcggaatttccaattttttctcctatgcctggagaatcctgtgagaatgccaacacttcgttgggcagaagaatgtcagttaattgtgagaagttggtgaagagggaaaagccaagggaattaatttttccatctaattatgacctccttcgccacttacagtatgcaacacattttcctatacctctggtaagtcattgcttcagttaatctataccctgattattttattataagatcaataactgttgaacgtcagattattcaa

SEQ ID NO: 301139 - DNA, 2271 bp, Artificial Sequence
  derived and/or modified sequence
atggccgccttcggcctgctgagctacgagcagcggcccctgaagagacctaggctgggaccgcctgacgtttacccccaggatcctaagcagaaggaagatgagctgacagctgtgaatgtgaaacagggcttcaataaccaaccagcgtttacgggggacgagcatggcagcgcgcggaatattgtgatcaacccaagtaaaattggggcttacttcagtagcattctggctgagaagctgaaactaaatacctttcaagacaccgggaagaagaaaccccaggtaaacgctaaagacaactactggctggtgaccgcccgcagccaatccgccattcatagctggttcagcgacctggctgggaataagcccttatccatcctggccaaaaaagtacccatcctgtccaagaaagaggacgtgttcgcctacttagctaaatattccgtccccatggttagggcgacatggctgataaaaatgacatgcgcgtactacagtgcaatatctgaagcgaagatcaagaagcgtcaggcacctgacccaaatttagagtggacgcagatttctacaaggtaccttagggaacaactcgccaagatctcagacttctatcatatggcatccagcacaggagatggtcctgtacctgtgccccctgaggtcgaacaagcaatgaaacagtgggaatacaatgaaaaattagcttttcatatgttccaggagggcatgctcgaaaagcatgagtatctcacctggatcctggacgtgttggaaaagataaggcccatggatgatgatcttctgaaactgctcctcccattaatgttacagtacagcgacgaattcgttcagagtgcatatctgagccgacggctagcttatttttgtgctaggcgcctgtctctgttactctctgatagcccaaacctgcttgcggctcactctccccacatgatgatcggtccgaataacagttccattggggcaccatcccctggcccccctgggccagggatgtcacccgttcaactagcctttagcgactttctcagctgtgctcagcatggaccactggtgtacggtctatcatgtatgttacagacagtcacactgtgttgccctagcgcattggtatggaactattcgacgaatgagaacaaatcagccaatcccggctcccctcttgatttgctgcaggtagcccccagcagtctcccaatgccaggcggtaatactgctttcaatcaacaggtacgggcgaggatctacgaggtggaacagcaaatcaaacagcgcggccgggcggtcgaagtcaggtggtcattcgataaatgtcaggagagcaccgcaggcgtgacaatatcgcgcgttctgcacacgctagaggtgttagacagacactgttttgaccgaacagactcctctaactctatggagactctatatcataaaatattctgggcaaaccaaaataaggacaaccaagaagtagccccaaatgatgaggctgttgtaacccttttgtgtgagtgggctgtcagctgtaagcgctctggcaagcatcgagccatggctgtggcaaagttgctggaaaagcgccaggctgagattgaggccgagcggtgcggggaatctgaggtccttgacgagaaggagagtatatcctcttcttcgcttgcaggctcaagcttgccggtcttccaaaacgtgctccttaggtttcttgacactcaggcaccttccttgtccgatcctaactccgagtgtgagaaggttgaattcgttaacctggtgttgctcttttgcgagttcataaggcacgatgtgttctcccatgatgcgtatatgtgcaccctgatctctcgcggagatctgagcgtgaccgcgtcgacacgcccccggagtcccgtgggagaaaacgctgacgagcactattctaaagatcatgacgtaaagatggaggagcagtccattatggctcatatgggaattgactctggaaccacaaacatttttgatgaagtcgataaaagtgacttcaagactgacttcggtagcgagttccctatttttagccccatgccaggtgagagctgtgaaaacgccaacacaagtctgggtaggagaatgagcgtcaactgtgagaagctggtcaagcgggagaaaccccgcgagctgatctttccatcgaactacgaccttctgaggcacctgcagtatgctactcattttccgatcccgctggtttctcattgcttctcttag

SEQ ID NO: 301140 - DNA, 2271 bp, Artificial Sequence
  derived and/or modified sequence
atggccgcttttggactattatcctatgaacagagacctcttaagcggccacgactgggccctccggatgtgtatccccaggatccaaaacagaaagaggatgagttgaccgctgtgaatgttaaacagggtttcaacaaccaacccgctttcacgggggatgagcatggcagcgcccgaaatatcgtgatcaaccctagtaaaataggagcctatttttcctcgatactggcagagaagctgaagctgaacacctttcaagatacaggaaagaaaaagccccaggtaaacgccaaagataactactggctggttaccgcgcgttcccaaagtgctattcactcatggtttagcgaccttgccggaaacaagcccctgtccattttagccaaaaaagtgcccatcttgtcaaagaaagaggacgtctttgcctacctggctaagtactccgtgcccatggtccgagcgacgtggctaattaagatgacctgcgcctactactcagctataagtgaggcgaagatcaagaagaggcaggccccagaccccaatctggaatggactcagatctctaccagatatctacgtgagcagctcgccaaaatctccgatttctaccatatggcgtccagcacaggcgatggtcccgtaccagtcccccctgaggtagaacaggcaatgaaacagtgggaatataacgagaaactggcctttcatatgttccaggagggtatgctggaaaaacatgagtatctgacatggattcttgacgtcctcgagaagatccgccctatggatgacgatttgttgaagttactactgcctcttatgctgcaatattccgacgagtttgttcagtctgcatacctcagtcggagattggcatatttttgtgctcgcaggctatctttactcctgagcgatagccctaacctgctggccgctcattctccgcacatgatgattggaccaaacaatagcagcatcggagcaccttccccaggcccacctggcccaggtatgtcaccagtgcaactagctttttccgactttctttcctgcgcccagcacggtcctctcgtgtacggtctttcttgtatgctccagaccgtgacattatgttgtccttccgctctggtctggaactatagtacgaacgaaaacaaaagtgccaaccccggaagccccctggacttgttacaggtcgcccctagttctcttccaatgcccggagggaataccgctttcaatcagcaggtgagggctcggatctacgaggtcgagcagcagattaaacagagaggtcgggcagtcgaagtgagatggagtttcgacaaatgtcaggagagcacagcgggtgtcactataagtcgtgtgctgcacacccttgaagtcctcgaccgacactgtttcgaccggacagactccagcaactccatggagaccctctaccataagattttttgggcaaatcaaaataaggataatcaggaggtggcccctaacgacgaagccgtggttacgcttctttgtgaatgggccgtcagctgtaagcgttccggtaaacaccgagccatggcagtggccaagttgctggagaagcgccaggcggaaatcgaagccgagagatgcggagaatcggaggtgcttgatgaaaaggaaagcatctcctccagttccttagcgggaagctcactgcctgttttccagaacgtcctgctgaggtttttagatacacaggcacctagtctgtcggatcctaacagcgaatgcgagaaagtcgagttcgtcaacttggtgctgttattctgtgaatttattagacacgacgttttctcccacgatgcttacatgtgcacactgatttcccggggtgatctgtccgtaactgcctcaaccagacctagatctccagtaggcgaaaatgccgacgaacactactctaaggaccatgatgttaagatggaagagcagagtatcatggctcacatgggcatagattctggaaccacgaacatcttcgacgaagtcgacaagtcagacttcaaaacagacttcgggagcgaattcccgattttttcccccatgcccggagaatcctgcgaaaatgcaaatacctcgctcggacgcaggatgtccgtcaactgcgaaaaactggtaaagagagaaaagccgcgagagctcatctttccatctaactacgacctgctaaggcacctccagtacgcaacacacttccccatccctctggtgtctcactgcttctcctag

SEQ ID NO: 301141 - DNA, 2271 bp, Artificial Sequence
  derived and/or modified sequence
atggccgccttcggcctgctgagctacgagcagagacccctgaagagacccagactgggcccccccgacgtgtacccccaggaccccaagcagaaggaggacgagctgaccgccgtgaacgtgaagcagggcttcaacaaccagcccgccttcaccggcgacgagcacggcagcgccagaaacatcgtgatcaaccccagcaagatcggcgcctacttcagcagcatcctggccgagaagctgaagctgaacaccttccaggacaccggcaagaagaagccccaggtgaacgccaaggacaactactggctggtgaccgccagaagccagagcgccatccacagctggttcagcgacctggccggcaacaagcccctgagcatcctggccaagaaggtgcccatcctgagcaagaaggaggacgtgttcgcctacctggccaagtacagcgtgcccatggtgagagccacctggctgatcaagatgacctgcgcctactacagcgccatcagcgaggccaagatcaagaagagacaggcccccgaccccaacctggagtggacccagatcagcaccagatacctgagagagcagctggccaagatcagcgacttctaccacatggccagcagcaccggcgacggccccgtgcccgtgccccccgaggtggagcaggccatgaagcagtgggagtacaacgagaagctggccttccacatgttccaggagggcatgctggagaagcacgagtacctgacctggatcctggacgtgctggagaagatcagacccatggacgacgacctgctgaagctgctgctgcccctgatgctgcagtacagcgacgagttcgtgcagagcgcctacctgagcagaagactggcctacttctgcgccagaagactgagcctgctgctgagcgacagccccaacctgctggccgcccacagcccccacatgatgatcggccccaacaacagcagcatcggcgcccccagccccggcccccccggccccggcatgagccccgtgcagctggccttcagcgacttcctgagctgcgcccagcacggccccctggtgtacggcctgagctgcatgctgcagaccgtgaccctgtgctgccccagcgccctggtgtggaactacagcaccaacgagaacaagagcgccaaccccggcagccccctggacctgctgcaggtggcccccagcagcctgcccatgcccggcggcaacaccgccttcaaccagcaggtgagagccagaatctacgaggtggagcagcagatcaagcagagaggcagagccgtggaggtgagatggagcttcgacaagtgccaggagagcaccgccggcgtgaccatcagcagagtgctgcacaccctggaggtgctggacagacactgcttcgacagaaccgacagcagcaacagcatggagaccctgtaccacaagatcttctgggccaaccagaacaaggacaaccaggaggtggcccccaacgacgaggccgtggtgaccctgctgtgcgagtgggccgtgagctgcaagagaagcggcaagcacagagccatggccgtggccaagctgctggagaagagacaggccgagatcgaggccgagagatgcggcgagagcgaggtgctggacgagaaggagagcatcagcagcagcagcctggccggcagcagcctgcccgtgttccagaacgtgctgctgagattcctggacacccaggcccccagcctgagcgaccccaacagcgagtgcgagaaggtggagttcgtgaacctggtgctgctgttctgcgagttcatcagacacgacgtgttcagccacgacgcctacatgtgcaccctgatcagcagaggcgacctgagcgtgaccgccagcaccagacccagaagccccgtgggcgagaacgccgacgagcactacagcaaggaccacgacgtgaagatggaggagcagagcatcatggcccacatgggcatcgacagcggcaccaccaacatcttcgacgaggtggacaagagcgacttcaagaccgacttcggcagcgagttccccatcttcagccccatgcccggcgagagctgcgagaacgccaacaccagcctgggcagaagaatgagcgtgaactgcgagaagctggtgaagagagagaagcccagagagctgatcttccccagcaactacgacctgctgagacacctgcagtacgccacccacttccccatccccctggtgagccactgcttcagctag

SEQ ID NO: 301142 - protein, 126 aa, Artificial Sequence
  derived and/or modified sequence
MRKRLLFPALVTLLISTLTFPPGFGQFMAGQLSQKETLVTLFDNRTWVRQGLVEELEPPSTSQAWNPPRANVFLTLVIFILMKHLGVWWVKAWLPGSQMEFIRTAAPTGLCLGATLWSGQLRWQER

SEQ ID NO: 301143 - DNA, 381 bp, Artificial Sequence
  derived and/or modified sequence
atgagaaaacgcttgctgttccccgcccttgtgaccttgctgatatctacattgactttccctcctggattcggccagtttatggccgggcagttgagtcagaaagaaactctcgtaacactcttcgacaaccgaacgtgggtccgccagggcctggtagaagagctggagccaccatccacatcgcaggcgtggaaccctccaagagccaacgtgttcttgaccctggtcatcttcattctgatgaaacatttgggcgtttggtgggtaaaggcttggcttcctgggtcgcagatggagtttattaggacagccgcgccaaccggattgtgtctgggggccaccttgtggtctggacaattgcggtggcaggagcgctag

SEQ ID NO: 301144 - DNA, 381 bp, Artificial Sequence
  derived and/or modified sequence
atgaggaagaggctgctcttccctgccctggtgaccctgctgatcagcaccctgaccttccccccaggcttcggccagttcatggccggccagctgagccagaaggagaccctggtgaccctgtttgacaacagaacctgggtgcggcagggcctggtggaggagctggagccccccagcaccagccaggcctggaaccccccccgggccaacgtgttcctgaccctggtgatcttcatcctgatgaagcacctgggcgtgtggtgggtgaaggcctggctgcccggcagccagatggagttcatcagaacagctgcccccaccggcctgtgcctgggcgccaccctgtggagcggccagctgcgctggcaggagaggtag

SEQ ID NO: 301145 - DNA, 381 bp, Artificial Sequence
  derived and/or modified sequence
atgcggaagcggctgctgttccccgccctggtgaccctgctgatcagtactctgaccttcccccccggcttcgggcagttcatggctgggcagcttagtcagaaggagacattagttaccctgttcgacaacaggacgtgggtccggcagggccttgtcgaagagctcgagccaccctccacatctcaagcgtggaatccacccagggccaatgttttccttaccttggtgatcttcattctcatgaaacatttgggagtttggtgggtgaaggcatggttgcccggatcgcagatggagttcatccgaacggcggcgcctacaggtttatgtctgggagcaacactgtggtctggccagctgcggtggcaggagaggtag

SEQ ID NO: 301146 - DNA, 381 bp, Artificial Sequence
  derived and/or modified sequence
atgcgtaagcggctgctcttccccgcattggttacgttactcatcagtaccctcacatttcctccagggttcggtcaatttatggccggacagctctctcagaaggaaacactcgtaaccctgttcgacaaccggacctgggttcgtcaagggctggtggaagagctagaaccaccctccactagtcaggcttggaatcctcccagggctaatgtatttctgacacttgtcatcttcattctgatgaaacatctgggcgtatggtgggttaaggcatggctgccaggcagccaaatggaatttattaggaccgctgcccctactggtctgtgcctgggtgctactctctggagcggacagctgcgatggcaagagaggtag

SEQ ID NO: 301147 - DNA, 381 bp, Artificial Sequence
  derived and/or modified sequence
atgagaaagagactgctgttccccgccctggtgaccctgctgatcagcaccctgaccttcccccccggcttcggccagttcatggccggccagctgagccagaaggagaccctggtgaccctgttcgacaacagaacctgggtgagacagggcctggtggaggagctggagccccccagcaccagccaggcctggaacccccccagagccaacgtgttcctgaccctggtgatcttcatcctgatgaagcacctgggcgtgtggtgggtgaaggcctggctgcccggcagccagatggagttcatcagaaccgccgcccccaccggcctgtgcctgggcgccaccctgtggagcggccagctgagatggcaggagagatag

SEQ ID NO: 301148 - protein, 415 aa, Artificial Sequence
  derived and/or modified sequence
MEQIWLLLLLTIRVLPGSAQFNGYNCDANLHSRFPAERDISVYCGVQAITMKINFCTVLFSGYSETDLALNGRHGDSHCRGFINNNTFPAVVIFIINLSTLEGCGNNLVVSTIPGVSAYGNATSVQVGNISGYIDTPDPPTIISYLPGLLYKFSCSYPLEYLVNNTQLASSSAAISVRENNGTFVSTLNLLLYNDSTYNQQLIIPSIGLPLKTKVFAAVQATNLDGRWNVLMDYCYTTPSGNPNDDIRYDLFLSCDKDPQTTVIENGRSQRGRFSFEVFRFVKHKNQKMSTVFLHCVTKLCRADDCPFLMPICSHRERRDAGRRTTWSPQSSSGSAVLSAGPIITRSDETPTNNSQLGSPSMPPFQLNAITSALISGMVILGVTSFSLLLCSLALLHRKGPTSLVLNGIRNPVFD

SEQ ID NO: 301149 - DNA, 1248 bp, Artificial Sequence
  derived and/or modified sequence
atggagcagatctggctgctgctgctgctgaccatcagagtgctgcccggcagcgcccagttcaacggctacaactgcgacgccaacctgcacagcagattccccgccgagagagacatcagcgtgtactgcggcgtgcaggccatcaccatgaagatcaacttctgcaccgtgctgttcagcggctacagcgagaccgacctggccctgaacggcagacacggcgacagccactgcagaggcttcatcaacaacaacaccttccccgccgtggtgatcttcatcatcaacctgagcaccctggagggctgcggcaacaacctggtggtgagcaccatccccggcgtgagcgcctacggcaacgccaccagcgtgcaggtgggcaacatcagcggctacatcgacacccccgacccccccaccatcatcagctacctgcccggcctgctgtacaagttcagctgcagctaccccctggagtacctggtgaacaacacccagctggccagcagcagcgccgccatcagcgtgagagagaacaacggcaccttcgtgagcaccctgaacctgctgctgtacaacgacagcacctacaaccagcagctgatcatccccagcatcggcctgcccctgaagaccaaggtgttcgccgccgtgcaggccaccaacctggacggcagatggaacgtgctgatggactactgctacaccacccccagcggcaaccccaacgacgacatcagatacgacctgttcctgagctgcgacaaggacccccagaccaccgtgatcgagaacggcagaagccagagaggcagattcagcttcgaggtgttcagattcgtgaagcacaagaaccagaagatgagcaccgtgttcctgcactgcgtgaccaagctgtgcagagccgacgactgccccttcctgatgcccatctgcagccacagagagagaagagacgccggcagaagaaccacctggagcccccagagcagcagcggcagcgccgtgctgagcgccggccccatcatcaccagaagcgacgagacccccaccaacaacagccagctgggcagccccagcatgccccccttccagctgaacgccatcaccagcgccctgatcagcggcatggtgatcctgggcgtgaccagcttcagcctgctgctgtgcagcctggccctgctgcacagaaagggccccaccagcctggtgctgaacggcatcagaaaccccgtgttcgactag

SEQ ID NO: 301150 - DNA, 1248 bp, Artificial Sequence
  derived and/or modified sequence
atggagcagatctggctcctgctcttgctcaccataagggtcctgcctggcagcgcccagttcaatggatataactgcgacgccaaccttcacagtcgctttcctgcagaaagagatatctctgtgtattgtggagtgcaggcgattacaatgaagattaacttctgtaccgtgttattttctggctatagtgaaaccgacctggccctgaacgggcggcacggcgattcccattgtcgcggttttataaacaataacacattccccgcagtcgtcattttcattattaatttgtccactcttgaggggtgtgggaataatctggtcgtcagcaccatacctggagtgagcgcttatgggaacgctacctcagtgcaagtaggtaacatctctggatatatagatacccccgaccctcctactatcataagttatctgccaggtcttctgtataaattctcatgctcatatccactggaatacttggtgaacaacacccaactggcaagtagttcagctgctatcagcgtcagggagaataacggaacattcgtttccaccctgaacctgttactttacaatgactctacgtacaatcagcagctgatcatcccgtcaataggcctgccacttaaaaccaaggtgttcgctgctgtccaggctaccaacttagatggccgctggaacgtgttgatggattactgctatactactcctagcggtaatcccaatgacgacatccgctatgatctttttctaagctgcgataaagacccacagaccaccgtgattgagaacggaagaagtcaacgggggcggttcagctttgaggtgttccgcttcgttaagcataagaaccagaagatgagcactgtgtttctgcactgtgtgacaaaactttgcagggctgatgattgccctttccttatgccgatttgttcccaccgagaaagacgtgatgccggccggagaacaacctggtccccacagtcatcgagtggtagcgctgttctctcggccggccccatcatcactcggtccgatgagacccccaccaacaacagccagttagggtccccgtcaatgcccccctttcaactaaacgcgatcacttctgcgctgataagtggcatggtgatactcggagtgacctcctttagcctgctgttatgttcgcttgcactgctgcaccgcaagggtccaacgtccctcgttctgaacggcatacgcaatcctgtcttcgattag

SEQ ID NO: 301151 - DNA, 1248 bp, Artificial Sequence
  derived and/or modified sequence
atggaacagatctggctgctgctgctgctcactataagggtattacctggatcagctcagttcaacggctacaactgtgacgctaacctgcattcaaggttccctgccgaacgtgacatttctgtctactgtggcgtccaggcaattacaatgaaaatcaatttctgcactgtccttttcagcgggtattccgaaactgatcttgctctgaatgggcgacacggggattctcattgtcgcggattcatcaataacaatactttcccggccgtagttattttcatcatcaacctgtccacgttagaaggctgcggaaataatctggtggtttctaccattcctggtgttagcgcttacggcaacgcaaccagtgtgcaggtaggtaacatctcaggctacattgatacccccgacccccctactattattagctatctgccaggtcttctatacaaattttcttgttcttatccgttggagtatctggttaataatactcaactggcctcaagctccgcagccatctcagtgcgggaaaacaacggtacctttgtgagcaccctaaaccttctactgtacaatgattccacctacaaccagcagctgatcattccttctattggattgccgctgaagaccaaagtatttgcagcggtccaggccacaaacttggacgggaggtggaatgtgctgatggattactgttataccactcctagtggcaaccccaatgacgatatccggtacgatttattcctatcttgtgataaagacccccagaccaccgtcatcgaaaacggaaggtcccagcgcggaaggttctcatttgaggtgtttagatttgtgaagcacaagaatcaaaaaatgtctaccgtgtttctgcattgcgtaactaaactgtgtcgcgccgacgattgtccattcctgatgcctatttgctcccacagagagcgccgagacgccggccgtcgtacgacctggagtcctcagagctcgtccggttccgccgtgctcagcgcaggccctattattacaaggagtgacgagaccccaaccaataactcacaactaggttctccctccatgccaccatttcagttgaacgcaattacttccgctctgatctcagggatggtcattttgggggtcactagtttctcattgctgctgtgctcactggccctcctacacagaaagggcccgaccagcctggtgttgaatggtattcgcaaccccgtgtttgattag

SEQ ID NO: 301152 - DNA, 1248 bp, Artificial Sequence
  derived and/or modified sequence
atggagcagatctggctgctgctgctgctgaccatccgggtgctgcccggcagcgcccagttcaacggctacaactgtgatgccaacctgcacagccgcttccctgctgagcgggacatctctgtgtactgcggcgtgcaggccatcaccatgaagatcaacttctgcaccgtgctcttcagcggctacagcgagacagacctggccctgaatggccgccacggggacagccactgccggggcttcatcaacaacaacaccttccctgctgtggtgatcttcatcatcaacctgagcaccctggagggctgcggcaacaacctggtggtgtccaccatccctggggtgtctgcctatggaaatgccacctctgtgcaggtgggcaacatcagcggctacatcgacaccccagacccccccaccatcatctcctacctgcccggcctgctgtacaagttcagctgcagctaccccctggagtacctggtgaacaacacccagctggccagcagcagcgctgccatctctgtgagagaaaataatggcacctttgtgtccaccctgaacctgctgctgtacaatgacagcacctacaaccagcagctgatcatccccagcatcggcctgcccctgaagaccaaggtgtttgctgctgtgcaggccaccaacctggatggccgctggaatgtgctgatggactactgctacaccacccccagcggcaaccccaatgatgacatccgctatgacctcttcctgagctgtgacaaggacccccagaccaccgtgattgaaaatggccgcagccagaggggccgcttctcctttgaggtgttccgctttgtgaagcacaagaaccagaagatgagcacagtgttcctgcactgtgtgaccaagctgtgcagagcagatgactgccccttcctgatgcccatctgcagccaccgggagaggagagatgctggaagaaggaccacctggagcccccagagcagcagcggcagcgctgtgctgtctgctggccccatcatcaccaggagtgatgagacccccaccaacaacagccagctgggcagccccagcatgccacccttccagctgaatgccatcaccagcgccctgatcagcggcatggtgatcctgggcgtgaccagcttcagcctgctgctgtgcagcctggccctgctgcacaggaagggccccaccagcctggtgctgaatggcatccggaaccctgtgtttgattag

SEQ ID NO: 301153 - DNA, 1248 bp, Artificial Sequence
  derived and/or modified sequence
atggagcagatctggctgctgctgctgctgaccatccgggtgctgccagggagcgcccagtttaacggttacaattgcgatgcgaacctacacagccgctttcctgccgaaagagatatcagcgtttactgtggagtgcaagctatcacaatgaaaataaatttttgtaccgtgcttttttctggctattccgaaacagatctggcccttaacggaagacatggagactcccactgccggggcttcatcaacaacaacacctttcctgccgtcgtaatattcattatcaacctgtccactctggaaggctgtgggaacaatctggtggtcagcactattccaggcgtgagcgcctatggcaacgctacgagcgtacaggtgggcaatatatccgggtatatcgacacacccgaccccccaacaatcatctcgtacctgcccggactgctctacaaattctcatgcagctacccccttgagtatcttgtcaataacacacagctcgctagcagctccgctgccatatcagtccgggaaaacaacggcacattcgtgtcgacactaaacctgctgctgtacaacgatagcacatataatcagcaactgatcataccatcgatcggattgcccctgaagacaaaggtgtttgcagccgtacaagcgacaaatctggatggacgatggaatgtcttgatggactattgttacaccaccccctccggcaatcctaatgacgatatacgttacgatttatttctgagctgcgataaagacccccaaacaactgtgatcgaaaatggccgatcacagcgaggaagattctcatttgaagtttttcggtttgtgaagcataagaaccagaaaatgagtaccgtgtttctacactgtgttacgaaactctgtagggctgacgattgtccctttttgatgccaatttgcagccatagagagagacgcgatgccggacgtagaacgacatggtcaccccagtcctcctccgggtctgcggtactgagcgccggcccgatcattacacgatctgacgagacacctacgaacaactcacaactgggcagtcctagcatgccacctttccagctgaatgctatcacatccgccttaatcagcggaatggtgattctgggagtcaccagctttagcctgctcctttgcagccttgcactcctccaccggaaagggccaacaagcttggtgctcaatggtatccggaaccctgtgtttgattag

SEQ ID NO: 301154 - DNA, 1248 bp, Artificial Sequence
  derived and/or modified sequence
atggagcagatctggctgctgctgctgctgaccatccgggtgctgccaggctcagcgcagttcaacggttataattgtgacgcgaacctccattcaaggttccccgccgagagagacatttccgtctactgtggcgtgcaggctattacaatgaagatcaatttctgcaccgtgttgttttctggatatagcgagactgatctggccctcaatggcaggcacggtgatagccattgcaggggattcatcaacaacaacacgtttcccgcggtggtgattttcatcatcaacctgtctactcttgagggttgcggtaacaatctcgtggtctccaccatccctggcgtcagtgcatatggcaatgccacctccgtccaggtggggaacattagtggctatattgatacacctgacccaccaacaattatctcatacctgcctgggctactgtacaagttttcgtgcagctatcctctcgagtatcttgtcaacaatacgcaactcgcctcaagtagcgccgctattagcgttagggagaataacggaaccttcgtaagcaccctaaatctgctactgtacaatgacagcacctacaatcaacagctgattattccctcaataggtcttccgctgaaaacgaaagtgtttgccgctgttcaggctaccaatctcgacggtaggtggaacgtgctgatggattattgttacaccacaccgtcaggcaaccccaacgatgacattcgctacgacctcttcctctcatgtgacaaagatccccagacgactgtgatcgagaacggcaggtcgcagcgaggaaggttcagcttcgaggtctttaggttcgtgaaacacaaaaatcagaaaatgagtacagtctttcttcactgtgtgactaaactgtgtagggctgatgactgccctttcctgatgccaatttgttcacatcgcgagagacgcgacgcagggcggagaacaacttggtctccccagtccagcagcggttctgcggtgctgtctgcaggccccattatcactcgcagcgacgagacacccaccaacaattcccagctgggatcaccatccatgcccccttttcaactgaacgcaattaccagtgccctcattagtggcatggttatcctaggagtaacatccttcagcctgctcttatgcagtctcgcactattgcaccgtaaagggcccactagtcttgtcctgaacggcatcagaaacccagtttttgattag

SEQ ID NO: 301155 - DNA, 1248 bp, Artificial Sequence
  derived and/or modified sequence
atggagcagatatggctgctgctgctacttacgatacgcgtcctgcccggaagtgctcagttcaacggatacaactgcgatgccaatctgcattccagattcccagccgaacgtgatatctctgtctactgtggagtacaagctataactatgaagattaatttttgcactgtgctgttcagcggctactccgagaccgacctggctctgaatggtcgtcatggtgattctcactgccggggattcattaacaacaacacctttcccgctgtggtgatctttatcatcaatctgtccactttggaggggtgtggcaacaatctggttgtttctacaataccaggcgtttccgcttatggaaatgccacttcagtgcaggtcggcaacatcagcggctacatcgacacccccgacccgcctacaatcatttcctatctacctggtcttctttacaaattttcttgttcgtatccactggagtatctggtgaacaatactcagctagcctcttctagcgcggctattagcgtgcgtgagaataatggaactttcgtttcaactctgaacctgttgttatataatgactcaacctacaaccaacagcttatcatcccctccattggtctcccactgaaaaccaaagttttcgctgcagtccaagcgaccaatctggatgggagatggaatgttttaatggactattgttataccaccccctcaggcaacccaaacgacgacattagatacgatctgtttctcagttgtgataaggatcctcagactacagtcatcgagaacggtcggtctcaaaggggacgcttttccttcgaagtgtttagattcgtaaaacacaaaaaccagaaaatgtcaactgtgtttctgcactgcgtgactaaactctgtagggcggacgactgcccattcctcatgcccatctgcagtcatagggaaagacgcgatgcaggacggaggacaacgtggtccccacagtccagtagcggatccgcggtgctctctgccggaccaatcattactcgaagtgacgaaaccccaaccaataactcccagttaggcagcccctctatgcccccatttcagttaaacgctattacaagcgccctgattagtgggatggtgatcctcggcgtgacaagtttctccctgctgctgtgctccctcgccctgctgcatcgcaagggacccacatctttggtactgaatgggatccgcaaccctgtcttcgattag

SEQ ID NO: 301156 - DNA, 1248 bp, Artificial Sequence
  derived and/or modified sequence
atggagcagatttggctactgctactgcttacaatcagggtgctgcccggttctgctcaatttaacggctataattgtgacgcgaacctgcattcccggtttccagcagagagagacatctccgtgtattgcggggttcaggcaattacgatgaagatcaatttctgtactgttttgttttcaggctatagtgaaaccgatctcgccctgaacggcaggcatggggatagccattgtcgcggattcataaataataacacctttccagctgttgtgattttcattatcaatctgtcgacacttgaagggtgtggaaacaatctggttgtttcgactattcccggtgtcagcgcctatggtaacgccacctctgtccaggtcggcaacatcagcggctacatagacacccctgaccctcctactattataagctatttacccggactgctttataagttttcttgctcctaccctctggagtatctggtgaataatacccagctggcctcttcttctgcggctatctcagtccgggaaaataacggaacctttgtcagcaccctgaatttgttgctctataatgattccacctacaaccagcaactgataatcccctccataggcctgccacttaagacaaaagtgttcgcagcagtgcaggccaccaatttggacggaaggtggaacgttctcatggattactgctacacgacccccagcgggaaccccaatgacgacatcaggtacgacttatttctttcttgtgataaggacccccagacaacagtcatcgagaatgggagatcccagagaggccgattctcttttgaggtgttccgcttcgttaagcacaaaaaccaaaagatgagtaccgtgtttctgcattgcgtgacaaagctttgtcgggctgatgactgcccatttctgatgccaatttgctcacatagagaaagaagagatgcagggcgaagaactacttggtccccacagtctagctccggcagtgctgtcctctccgcaggtcctatcattacccgctcagacgagacacctaccaacaactcccagctcggctctccttccatgccacctttccagctaaacgcaatcacctccgcgctcatctcgggtatggtcatcttgggggttacatccttctccctgttgctgtgtagtctggccctactgcaccgaaaggggcctacgagtctggtcctcaacggcatcaggaaccccgtattcgactag

SEQ ID NO: 301157 - DNA, 159 bp, Artificial Sequence
  derived and/or modified sequence
atgaagctgtgcgtgaccgtgctgagcctgctggtgctggtggccgcgttctgcagtttagctctctctgcacccaactctaaacccaaggaagcttccaaatccgctctcacccccgtctcccctggctcacgctcaacatgcatgacctggaactag

SEQ ID NO: 301158 - DNA, 573 bp, Artificial Sequence
  derived and/or modified sequence
atgtggccccccagatgcaaggaccccggcagacagagcgccgagatcctgcagatcatccagctggacctggacctgaagttcaagaccaacatcagagagctgttcgaggagttcgacagcttcctgcccggcgccatcatcggcatcgccagagagatgcagcccgtgtacagacacaccttctggcagttcagacacgagaacccccagaccagagtgggcggccccccccccgagggcctgcccggcttcaacagcggcgtgatgctgctgaacctggaggccatgagacagagccccctgtacagcagactgctggagcccgcccaggtgcagcagctggccgacaagtaccacttcagaggccacctgggcgaccaggacttcttcaccatgatcggcatggagcaccccaagctgttccacgtgctggactgcacctggaacagacagctgtgcacctggtggagagaccacggctacagcgacgtgttcgaggcctacttcagatgcgagggccacgtgaagatctaccacggcaactgcaacacccccatccccgaggactag

SEQ ID NO: 301159 - DNA, 564 bp, Artificial Sequence
  derived and/or modified sequence
atgaacggcatgagcgtgctgatgaaggagaccctgaagagcagcgtgacccccagcccctacgaggagaccggcgagagacagcccagcgtgaactgggccgtgagcccccaccagacccagaaccagtgggccagatggagctggaccagccagcccctggagctgcacaccttctggcagttcagacacgagaacccccagaccagagtgggcggccccccccccgagggcctgcccggcttcaacagcggcgtgatgctgctgaacctggaggccatgagacagagccccctgtacagcagactgctggagcccgcccaggtgcagcagctggccgacaagtaccacttcagaggccacctgggcgaccaggacttcttcaccatgatcggcatggagcaccccaagctgttccacgtgctggactgcacctggaacagacagctgtgcacctggtggagagaccacggctacagcgacgtgttcgaggcctacttcagatgcgagggccacgtgaagatctaccacggcaactgcaacacccccatccccgaggactag

SEQ ID NO: 301160 - DNA, 573 bp, Artificial Sequence
  derived and/or modified sequence
atgtggccccctcgttgcaaagaccccgggcggcagtccgctgaaatcctgcagattatccagctggacctcgaccttaagttcaagaccaacatcagggagctttttgaggaattcgattcgtttttacccggcgccatcatcggtatcgctagagaaatgcagcctgtatatcgccacaccttctggcagttccggcatgagaacccccagacccgggtaggcgggcccccacccgagggattacccgggtttaacagtggcgtgatgctactgaacttggaagctatgcgccagtccccactgtattccagattgctggagccggcacaagtgcaacagctggcagacaaataccacttccgaggccacttgggggaccaagacttcttcactatgatcggtatggaacacccaaagctgttccatgtgctcgattgtacctggaatcgacagctgtgcacatggtggagggaccacggatactctgacgtctttgaggcctatttccggtgcgaaggccacgtgaaaatataccacggaaattgcaatacccccattccagaggattag

SEQ ID NO: 301161 - DNA, 564 bp, Artificial Sequence
  derived and/or modified sequence
atgaatggtatgagcgtgttgatgaaagaaacactgaaatcatctgtcaccccttccccttatgaggaaaccggggagaggcagccaagtgtgaactgggctgtgtctccccatcagactcagaatcagtgggcaagatggagctggactagccagccactcgaacttcataccttttggcaattccggcatgagaacccacagacaagggttgggggcccaccccccgagggtttgccagggttcaactctggggtgatgctgctgaacctcgaagccatgaggcagagccctctctacagccggctgctagagccagcccaggtgcagcagttagccgataagtaccacttcagaggtcacctgggagatcaggacttctttacgatgatcgggatggaacatcctaagctgtttcacgtgctggattgcacatggaacagacagctgtgcacctggtggagagaccatggctactctgacgtctttgaggcctacttccgttgtgaaggccacgtgaaaatataccacggcaattgcaatacgccaattcctgaggactag

SEQ ID NO: 301162 - DNA, 573 bp, Artificial Sequence
  derived and/or modified sequence
atgtggccaccgagatgcaaggacccaggacggcagtcggccgagattcttcagatcatacaactggacctagatctgaagtttaaaacaaatattagagagctcttcgaggaatttgattcctttttgccaggagcaattattggaattgcacgggaaatgcagcccgtgtacagacacaccttctggcagttccgccacgaaaacccccagaccagggtcggtggcccccctcccgagggacttccaggatttaacagcggagtgatgcttctcaacctcgaagccatgaggcagtcaccattgtactctaggctcctcgagcccgctcaggtacagcagcttgccgacaaataccatttcaggggtcacttaggcgatcaggatttcttcaccatgataggcatggagcatcctaagctgtttcacgtactcgactgcacttggaaccgacagctgtgcacctggtggagagaccatggctattccgatgtgttcgaagcctatttcagatgcgaaggacacgtcaagatctaccacgggaactgcaacacgcctatcccagaagactag

SEQ ID NO: 301163 - DNA, 573 bp, Artificial Sequence
  derived and/or modified sequence
atgtggcccccacgctgcaaggaccccggccggcagagcgctgagatcctgcagatcatccagctggacctggacctgaagttcaagaccaacatccgggagctgtttgaggagtttgacagcttcctgcccggggccatcatcggcatcgcccgggagatgcagcctgtgtaccgccacaccttctggcagttcagacatgagaacccccagaccagggtgggcggccccccacctgagggcctgcccggcttcaacagcggcgtgatgctgctgaacctggaggccatgaggcagagccccctgtacagccggctgctggagcccgcccaggtgcagcagctggccgacaagtaccacttccggggccacctgggggaccaggacttcttcaccatgattggcatggagcaccccaagctgttccacgtgctggactgcacctggaaccggcagctgtgcacctggtggagggaccacggctacagtgatgtgtttgaggcctacttccgctgtgagggccacgtgaagatctaccacggcaactgcaacacccccatcccagaagattag

SEQ ID NO: 301164 - DNA, 564 bp, Artificial Sequence
  derived and/or modified sequence
atgaatggcatgtctgtgctgatgaaggagaccctgaagagctctgtgacccccagcccctatgaggagaccggggagcggcagcccagcgtgaactgggccgtgagcccccaccagacccagaaccagtgggcccgctggagctggaccagccagcccctggagctgcacaccttctggcagttcagacatgagaacccccagaccagggtgggcggccccccacctgagggcctgcccggcttcaacagcggcgtgatgctgctgaacctggaggccatgaggcagagccccctgtacagccggctgctggagcccgcccaggtgcagcagctggccgacaagtaccacttccggggccacctgggggaccaggacttcttcaccatgattggcatggagcaccccaagctgttccacgtgctggactgcacctggaaccggcagctgtgcacctggtggagggaccacggctacagtgatgtgtttgaggcctacttccgctgtgagggccacgtgaagatctaccacggcaactgcaacacccccatccctgaggactag

SEQ ID NO: 301165 - DNA, 573 bp, Artificial Sequence
  derived and/or modified sequence
atgtggcccccccggtgcaaggaccccggccggcagagcgccgagatattgcaaataatccagcttgatctcgaccttaagttcaaaacaaatataagggagttattcgaggagttcgattctttcctaccgggtgctatcatcggtatagcccgtgaaatgcaacctgtgtaccgccacactttctggcaatttcgtcatgaaaacccacaaacaagggtgggcggaccccctccggagggcctgcctggctttaattcgggcgtgatgctccttaatcttgaagccatgagacagtctcctttgtacagtcgcttattggagcccgcgcaggtgcagcagttagccgataagtatcattttcgcggacatctcggagaccaggacttttttactatgatcgggatggaacaccccaagctctttcatgtgttggactgcacctggaatcgacagttgtgtacatggtggagggatcatggatacagtgacgtgttcgaagcctactttaggtgcgaggggcacgtcaagatctatcatgggaactgcaacacacccattcctgaagactag

SEQ ID NO: 301166 - DNA, 564 bp, Artificial Sequence
  derived and/or modified sequence
atgaacggcatgagcgtgctgatgaaggagaccctgaagagcagcgtgacaccatccccatacgaggaaactggagaacggcagccttctgttaactgggcagtctctccacaccaaacccagaatcaatgggcgcggtggtcatggacctcgcagcctctcgagctccataccttttggcagtttcgccacgaaaacccgcaaacccgggtgggcgggcccccccctgaggggctccctggattcaactcgggagtgatgcttctgaaccttgaggcaatgcgacaatctcccctctacagcaggttgctcgaaccagcacaagtgcagcaactggctgataaatatcacttccgcggacacttgggggaccaggattttttcacaatgattggcatggaacaccctaagttgttccacgtactcgattgcacctggaaccgacaattgtgcacatggtggagggaccatgggtattctgacgtctttgaggcctacttcagatgtgaaggccatgtcaagatttaccacggcaattgtaacacccccattcctgaggactag

SEQ ID NO: 301167 - DNA, 573 bp, Artificial Sequence
  derived and/or modified sequence
atgtggcccccccggtgcaaggaccccggccggcagagcgccgagatcctgcagattattcaactcgaccttgatctgaaatttaaaaccaacatccgggagctattcgaagagtttgactccttcctgccaggagcgattatcggcattgcacgggaaatgcagcccgtatatcgccataccttttggcagtttagacacgagaatccccaaacccgggtaggagggccacctcctgaaggtctgcctggctttaattcaggagtcatgctcctgaatctagaggcaatgagacagagccctttgtattcaagattactggagcccgcacaagttcaacagttagctgacaaatatcactttcgggggcatctcggtgatcaggattttttcaccatgattggcatggaacatcccaagctctttcatgttttagattgtacatggaatagacagctgtgtacatggtggcgagatcatggttactcagacgtgtttgaagcatacttcaggtgtgagggacacgtaaagatttaccacggaaattgcaacacccccatccccgaagattag

SEQ ID NO: 301168 - DNA, 573 bp, Artificial Sequence
  derived and/or modified sequence
atgtggccacctagatgcaaagatccaggacgacaatctgcagaaatcttgcagatcattcagctcgatctggacctcaaatttaaaactaatatacgcgaactgtttgaagaattcgactcgtttttacccggtgccatcatcggcattgcacgggaaatgcagccagtctaccgccacactttctggcagttcaggcacgaaaatccgcagacccgtgtgggcggtccccctcccgagggactgcctggattcaatagcggcgtaatgctgttaaatttggaagcaatgcggcagtcacccctctactctagactccttgagccggcacaggttcagcagctggccgacaagtaccatttccgcggacatctgggggaccaagacttttttaccatgatcgggatggagcacccaaaattattccacgtactcgattgtacctggaaccggcagctgtgcacatggtggcgcgaccatggctatagcgatgtgtttgaggcttacttccgctgcgaaggacacgtgaagatttatcacggtaactgcaatacacccatccccgaagattag

SEQ ID NO: 301169 - DNA, 564 bp, Artificial Sequence
  derived and/or modified sequence
atgaacggcatgagtgtgctcatgaaggagacactaaaaagctcagtcaccccttctccttacgaggagacaggagagagacagccgtcggtcaattgggctgtctctcctcatcagacacagaatcaatgggcaagatggtcctggacttcccagcctttagaactacacacattctggcagtttcggcatgagaacccgcagaccagagtggggggtccccctcccgaagggctacccggattcaatagcggagtgatgttgctgaatttggaggcaatgcgccagagcccattgtactctcgccttctggagcccgctcaggtccagcagctagcagataaataccactttcgagggcatttaggcgaccaggacttctttactatgatcggtatggagcaccctaaacttttccacgtgctggattgtacctggaacaggcagctgtgtacatggtggagagaccacggatacagcgatgtgttcgaagcatacttcaggtgcgaaggccacgtgaaaatatatcacggaaactgtaatacaccaattcctgaggattag

SEQ ID NO: 301170 - DNA, 573 bp, Artificial Sequence
  derived and/or modified sequence
atgtggccccctcggtgtaaggacccagggagacagagcgcagaaatcttacagatcattcagctggacctagacctcaagttcaagacaaacatcagggaactctttgaggaatttgatagctttcttccaggtgccatcattgggatcgccagagagatgcagccagtgtacagacacaccttttggcagttcagacatgagaatccacagactcgagtgggagggcctccgccagaagggctccccggattcaatagtggagtgatgctactgaatttggaggccatgcggcagtcaccgctgtactcacggctgctagagcctgcgcaggtgcagcagttggccgataaatatcactttcggggacacctgggggatcaggattttttcacaatgattggcatggagcaccccaagttatttcacgttctggactgtacctggaacaggcaactttgcacgtggtggcgggaccatggatatagcgacgtcttcgaagcttatttccgctgcgagggacacgtgaaaatctatcatggaaactgtaatactcccatccccgaagattag

SEQ ID NO: 301171 - DNA, 1687 bp, Artificial Sequence
  derived and/or modified sequence
atgtggccacctcgctgcaaggatccaggaaggcagagtgcggagatcctgcagatcattcagctggacctagacctgaagtttaagaccaacatccgggagttgtttgaggaatttgacagtttcctgccaggcgccatcatcggcatagcccgggagatgcagccagtttacaggcacacattctggcagttccgccatgagaacccccagacccgggttgggggcccgccccccgaggggctgccgggcttcaacagcggggtgatgttgctgaacctggaggccatgcgccagtccccgctctacagccgcctgctggagccggcgcaggtgcagcagctggccgacaagtaccacttccgcggccacctcggggaccaggacttcttcaccatgatcggcatggagcaccccaagctcttccatgtgctggactgtacctggaaccggcagctgtgcacctggtggagggaccatggctacagtgacgtcttcgaggcctatttcaggtgtgagggccacgtcaagatctaccacgggaactgcaacactcccatcccggaggactaggcgctccccgtgccttgcccccggggcctccagatctgggggaaggacagggttccttgggacagacccaagggcagtgtctgacccgctagagagacaccgcagggaagtcctgtgattaaggtgctgagacctcctgccgggcaggtcactgtgctgaggccacccgccaaggactggcctgtgcactgctggtgcttgggaccttattcctccagggagcaggcgacacaaaggacacgcatgtccagtgggctgggaagcaagcacttgaagagaaggaaggggagaaagggtcccccttgctgtctgcctctgaggaatggaaatcctttagacccggccttttttggaccaatataaatttaatttaaattgacagccttccatttttcgagaaagtacaaacagaactgctttagcacccatcgagccccaaacgggtaaggtaagccaaggttttaatgaccagcccagtatctaagcttccaaacgaatgccagcccatcacatactcaccctgggaggctgctgcacgcgcattctcctgatgctcacgtcacttggtgtaggtttcaggatcgcctctttgaggaaggacttcaggaccaactggggcctgcataagaaaacttatctcattattagagtactcacagcttgtatctcccagctacatcctagaaccccattgtcctttattccaccaaaccagctccaggtgaccagactctactcagaaagcaaattcgtcatcaaagaacagagactggccaccacaaggacatgcaggagaactgtcgggaccaggaagactcattccaaaaagcccaggccgggcacagtcgtcaagcctgtaatcccaacactttgggagaccgaggtgggggtatcgattgagcctcggaggtcgagatcagcctgggaaacacagggaggcccccatcgctacaaaatattttaaaaattagccaggtgtggtggcttgtgcttgttgtcccggctacttgggaggctgaagtgggagggtggcttgagtccaggagttcactgcactgagctgtgatcacaccactgcactccagcctggacgacagagtgagacgtccatctc

SEQ ID NO: 301172 - DNA, 564 bp, Artificial Sequence
  derived and/or modified sequence
atgaatgggatgagtgtcctgatgaaagagaccctgaagagctctgtcaccccttcaccatatgaggagactggggaaaggcagccatctgtgaactgggcagtgagtcctcaccagacacagaatcagtgggcacgttggtcttggacttcccagcctctagaactgcacacattctggcagttccgccatgagaacccccagacccgggttgggggcccgccccccgaggggctgccgggcttcaacagcggggtgatgttgctgaacctggaggccatgcgccagtccccgctctacagccgcctgctggagccggcgcaggtgcagcagctggccgacaagtaccacttccgcggccacctcggggaccaggacttcttcaccatgatcggcatggagcaccccaagctcttccatgtgctggactgtacctggaaccggcagctgtgcacctggtggagggaccatggctacagtgacgtcttcgaggcctatttcaggtgtgagggccacgtcaagatctaccacgggaactgcaacactcccatcccggaggactag

SEQ ID NO: 301173 - DNA, 2149 bp, Artificial Sequence
  derived and/or modified sequence
aattgaagtagtcacttctttcagaatgctaagttccctggaatattttcccagcctactgtgtctatgatagactcaaatattggaagttttaccggctgtgtgtggggtggggaaggaattctgttggttctccggtgagtcctgaagagaccttgtttctggagccaggaagaggagcatagaaagaaaaaggaacaggaaattgttcaaaagaagttcatgaaatgagaaaagcagcaggaaacagctcgggaatcggcgaggctgcagccgaaggaagacatcttccttttaagcagtgactcgggaatcgaggccacttccatcctgtaacgacgccatctggagcatgtggcttccaggggagcagtggctgaggccctgcagtggcttctcactgctacagtccagagttgcacacagcacttctgctcatagtccatcagccaggagctagtcatgtggccacctcgctgcaaggatccaggaaggcagagtgcggagatcctgcagatcattcagctggacctagacctgaagtttaagaccaacatccgggagttgtttgaggaatttgacagtttcctgccaggcgccatcatcggcatagcccgggagatgcagccagtttacaggcacacattctggcagttccgccatgagaacccccagacccgggttgggggcccgccccccgaggggctgccgggcttcaacagcggggtgatgttgctgaacctggaggccatgcgccagtccccgctctacagccgcctgctggagccggcgcaggtgcagcagctggccgacaagtaccacttccgcggccacctcggggaccaggacttcttcaccatgatcggcatggagcaccccaagctcttccatgtgctggactgtacctggaaccggcagctgtgcacctggtggagggaccatggctacagtgacgtcttcgaggcctatttcaggtgtgagggccacgtcaagatctaccacgggaactgcaacactcccatcccggaggactaggcgctccccgtgccttgcccccggggcctccagatctgggggaaggacagggttccttgggacagacccaagggcagtgtctgacccgctagagagacaccgcagggaagtcctgtgattaaggtgctgagacctcctgccgggcaggtcactgtgctgaggccacccgccaaggactggcctgtgcactgctggtgcttgggaccttattcctccagggagcaggcgacacaaaggacacgcatgtccagtgggctgggaagcaagcacttgaagagaaggaaggggagaaagggtcccccttgctgtctgcctctgaggaatggaaatcctttagacccggccttttttggaccaatataaatttaatttaaattgacagccttccatttttcgagaaagtacaaacagaactgctttagcacccatcgagccccaaacgggtaaggtaagccaaggttttaatgaccagcccagtatctaagcttccaaacgaatgccagcccatcacatactcaccctgggaggctgctgcacgcgcattctcctgatgctcacgtcacttggtgtaggtttcaggatcgcctctttgaggaaggacttcaggaccaactggggcctgcataagaaaacttatctcattattagagtactcacagcttgtatctcccagctacatcctagaaccccattgtcctttattccaccaaaccagctccaggtgaccagactctactcagaaagcaaattcgtcatcaaagaacagagactggccaccacaaggacatgcaggagaactgtcgggaccaggaagactcattccaaaaagcccaggccgggcacagtcgtcaagcctgtaatcccaacactttgggagaccgaggtgggggtatcgattgagcctcggaggtcgagatcagcctgggaaacacagggaggcccccatcgctacaaaatattttaaaaattagccaggtgtggtggcttgtgcttgttgtcccggctacttgggaggctgaagtgggagggtggcttgagtccaggagttcactgcactgagctgtgatcacaccactgcactccagcctggacgacagagtgagacgtccatctc

SEQ ID NO: 301174 - DNA, 312 bp, Artificial Sequence
  derived and/or modified sequence
atggcccagaccgacaagcccacctgcatcccccccgagctgcccaagatgctgaaggagttcgccaaggccgccatcagagcccagccccaggacctgatccagtggggcgccgactacttcgaggccctgagcagaggcgagaccccccccgtgagagagagaagcgagagagtggccctgtgcaactgggccgagctgacccccgagctgctgaagatcctgcacagccaggtggccggcagactgatcatcagagccgaggagctggcccagatgtggaaggtggtgaacctgcccaccgacctgtag

SEQ ID NO: 301175 - DNA, 393 bp, Artificial Sequence
  derived and/or modified sequence
atggcccagaccgacaagcccacctgcatcccccccgagctgcccaagatgctgaaggagttcgccaaggccgccatcagagcccagccccaggacctgatccagtggggcgccgactacttcgaggccctgagcagaggcgagaccccccccgtgagagagagaagcgagagagtggccctgtgcaactgggccgagctgacccccgagctgctgaagatcctgcacagccaggtggccggcagactgatcatcagagccgaggagctggcccagatgtggaaggtggtgaacctgcccaccgacctgttcaacagcgtgatgaacgtgggcagattcaccgaggagatcgagtggctgaagttcctggccctggcctgcagcgccctgtag

SEQ ID NO: 301176 - DNA, 312 bp, Artificial Sequence
  derived and/or modified sequence
atggctcagaccgataaacccacctgcatccccccggaactgcctaaaatgcttaaagagttcgccaaggcagctattcgtgcacaaccccaggatttaatccagtggggtgccgactatttcgaggcactgagcaggggcgagaccccccccgtgagggagcgaagcgagcgggtcgcgctgtgcaactgggccgagctcacacctgagctcctcaaaattctccactctcaggtcgctggaaggctgataatcagagcggaggaactcgcccagatgtggaaggtcgttaacctcccaactgatctatag

SEQ ID NO: 301177 - DNA, 393 bp, Artificial Sequence
  derived and/or modified sequence
atggcacagacggacaagcctacctgcatccctccagagctgccgaaaatgctgaaggagttcgccaaggcagccatcagggctcaaccccaagatttgatccagtggggcgccgactattttgaggccttatcgagaggtgagactccacccgtgcgagagaggagtgagagggtagctctctgcaactgggccgaactgaccccggagctgctgaagatcctgcattctcaggtagccgggaggttaatcattcgcgctgaggagttggcgcagatgtggaaagtggttaacctacccaccgacctctttaacagcgtgatgaacgtgggacggtttacagaggaaatcgagtggctgaagttccttgctctggcctgctccgccctctag

SEQ ID NO: 301178 - DNA, 312 bp, Artificial Sequence
  derived and/or modified sequence
atggcccagacagacaagcccacctgcatccccccagagctgcccaagatgctgaaggagtttgccaaggccgccatccgggcccagccccaggacctgatccagtggggcgctgactactttgaggccctgagcagaggagagaccccacctgtgcgggagaggtctgagcgggtggccctgtgcaactgggccgagctgaccccagagctgctgaagatcctgcacagccaggtggccggccgcctcatcatccgggcagaggagctggcccagatgtggaaggtggtgaacctgcccacagacctgtag

SEQ ID NO: 301179 - DNA, 393 bp, Artificial Sequence
  derived and/or modified sequence
atggcccagacagacaagcccacctgcatccccccagagctgcccaagatgctgaaggagtttgccaaggccgccatccgggcccagccccaggacctgatccagtggggcgctgactactttgaggccctgagcagaggagagaccccacctgtgcgggagaggtctgagcgggtggccctgtgcaactgggccgagctgaccccagagctgctgaagatcctgcacagccaggtggccggccgcctcatcatccgggcagaggagctggcccagatgtggaaggtggtgaacctgcccacagacctcttcaacagcgtgatgaatgtgggccgcttcacagaggagattgagtggctgaagttcctggccctggcctgcagcgccctgtag

SEQ ID NO: 301180 - DNA, 312 bp, Artificial Sequence
  derived and/or modified sequence
atggcccagaccgacaagcccacctgcatcccccccgagctgcccaagatgctaaaggaattcgcaaaagcggcaatcagggctcagcctcaggaccttatccaatggggagccgattacttcgaagcattatctaggggtgagaccccccctgtgagagaaaggtctgagagagtggccctttgcaactgggcagagttgacccctgaactgttgaaaatactacatagtcaggtggccggacggttaatcattcgggccgaagagctggcccaaatgtggaaagttgttaacttgcctaccgacctgtag

SEQ ID NO: 301181 - DNA, 393 bp, Artificial Sequence
  derived and/or modified sequence
atggcccagaccgacaagcccacctgcatcccccccgagctgcccaagatgctcaaagagtttgcgaaggccgccattagggcacagccacaagacctgatccagtggggagccgattactttgaggcactcagcagaggtgagacccctcctgtgcgggaaaggagcgagagagtcgcactctgtaactgggctgaacttactccagagttattgaaaatcttgcactcacaggtggctggtcggctcattatacgcgcagaggagctggcccagatgtggaaagtagtcaatcttccaacagatctctttaacagcgtcatgaacgttggccgcttcaccgaggagatcgaatggctcaagttcctggccctggcttgttccgcactttag

SEQ ID NO: 301182 - DNA, 312 bp, Artificial Sequence
  derived and/or modified sequence
atggcccagacagataaacctacatgcatcccacctgagctcccaaagatgcttaaagaatttgcgaaggcagcaattagagcgcagcctcaggatctaatccagtggggcgctgattacttcgaggcactgagccgcggagagaccccacccgtgcgggagagaagcgaacgagttgcattatgcaattgggccgaattgacccctgaactcctgaaaatcctgcatagtcaggttgccggaaggctgatcatccgcgcagaagagctggcgcagatgtggaaggtggttaatctccctactgatctgtag

SEQ ID NO: 301183 - DNA, 393 bp, Artificial Sequence
  derived and/or modified sequence
atggcacagacagataaaccaacctgtatccccccagaactgcctaaaatgttgaaagagttcgcaaaggccgctatacgcgcacagccacaagaccttatccagtggggcgctgactattttgaggccctgtctaggggggagaccccacctgtccgggaaagaagtgagcgtgttgccctatgcaattgggccgagctgactccagaactgctgaaaatactgcattcccaggtggccggacgccttattatccgagccgaggaactggcccagatgtggaaagtcgtcaatctgcccactgatttgttcaactctgtgatgaacgtgggtcgctttaccgaggagattgaatggcttaagttcttggcattggcgtgcagcgcactttag

SEQ ID NO: 301184 - DNA, 755 bp, Artificial Sequence
  derived and/or modified sequence
acgctaacggcggtcgtgccccgccgctgctgtcacccccggccgctgctgccctccccgccgaggttctactgctctccttcttaagaagggtgggaggcactcggtctctccccacacctctcgcctgaggccaggcgccaggtgtcgcctgaagccagacagccggtttgggagcgagcctgagggcaaggggaaggcaaggggatcttcaagagaatgtgactgtgggggattatggctttctggccaatttgttacctattgaacactaagttccaggcactgggctaggcactgggatggtgtggtgagcaaaaactgaccagtcctgccgtggagtttgctgggggagacacatgttactcaaagaatcacactaaggatagcaatttatctcaaagcttcaagttcctgccatctacatgtgcccaggtcaaccaatcaatggctcagacagataagccaacatgcatcccgccggagctgccgaaaatgctgaaggagtttgccaaagccgccattcgggcgcagccgcaggacctcatccagtggggggccgattattttgaggccctgtcccgtggagagacgcctccggtgagagagcggtctgagcgagtcgctttgtgtaactgggcagagctaacacctgagctgttaaagatcctgcattctcaggttgctggcagactgatcatccgtgcagaggagctggcccagatgtggaaagtggtgaatctcccaacagatct

SEQ ID NO: 301185 - DNA, 769 bp, Artificial Sequence
  derived and/or modified sequence
aggcggagcgctaacgtctaacgctaacggcggtcgtgccccgccgctgctgtcacccccggccgctgctgccctccccgccgaggttctactgctctccttcttaagaagggtgggaggcactcggtctctccccacacctctcgcctgaggccaggcgccaggtgtcgcctgaagccagacagccggtttgggagcgagcctgagttccaggcactgggctaggcactgggatggtgtggtgagcaaaaactgaccagtcctgccgtggagtttgctgggggagacacatgttactcaaagaatcacactaaggatagcaatttatctcaaagcttcaagttcctgccatctacatgtgcccaggtcaaccaatcaatggctcagacagataagccaacatgcatcccgccggagctgccgaaaatgctgaaggagtttgccaaagccgccattcgggcgcagccgcaggacctcatccagtggggggccgattattttgaggccctgtcccgtggagagacgcctccggtgagagagcggtctgagcgagtcgctttgtgtaactgggcagagctaacacctgagctgttaaagatcctgcattctcaggttgctggcagactgatcatccgtgcagaggagctggcccagatgtggaaagtggtgaatctcccaacagatctgtttaatagtgtgatgaatgtgggtcgcttcacggaggagatcgagtggctgaagtttttagcccttgcttgcagcgctctgg

SEQ ID NO: 301186 - protein, 425 aa, Artificial Sequence
  derived and/or modified sequence
MKHTAFLDEFTNWSRINPNKARIPMAGDTQGVVGTVSKPCFTAYEMKIGAITFQVATGDIATEQVDVIVNSTARTFNRKSGVSRAILEGAGQAVESECAVLAAQPHRDFIITPGGCLKCKIIIHVPGGKDVRKTVTSVLEECEQRKYTSVSLPAIGTGNAGKNPITVADNIIDAIVDFSSQHSTPSLKTVKVVIFQPELLNIFYDSMKKRDLSASLNFQSTFSMTTCNLPEHWTDMNHQLFCMVQLEPGQSEYNTIKDKFTRTCSSYAIEKIERIQNAFLWQSYQVKKRQMDIKNDHKNNERLLFHGTDADSVPYVNQHGFNRSCAGKNAVSYGKGTYFAVDASYSAKDTYSKPDSNGRKHMYVVRVLTGVFTKGRAGLVTPPPKNPHNPTDLFDSVTNNTRSPKLFVVFFDNQAYPEYLITFTA

SEQ ID NO: 301187 - DNA, 1278 bp, Artificial Sequence
  derived and/or modified sequence
atgaaacataccgccttcttggacgagttcactaattggtctcggatcaatcccaataaagccaggatccccatggccggtgatacccagggggtggtaggcacagtctctaagccatgcttcaccgcctacgaaatgaaaattggtgccattactttccaagtggcgactggcgatattgccacagagcaggtggacgtcatcgtaaattccactgccagaacatttaaccggaagtctggtgtgtctagggcaattctcgaaggggctggtcaggccgtggaaagcgaatgcgccgtgctggcagcgcaacctcatcgggactttattatcacaccaggtggatgccttaagtgcaagatcattattcacgttccaggtggtaaggacgtgaggaagacggtgacaagtgtcttggaggaatgcgagcagaggaagtatacttcagtgtccctccctgctatcggaaccggcaacgccggaaagaatccaataacagttgcagataacataatcgacgcaattgtggatttctccagtcagcatagcaccccatcactaaaaaccgtgaaagttgttatctttcagcccgaactgttgaacatcttttatgattctatgaagaagcgcgacctttccgcgagcttgaactttcagtcaacgttttccatgacgacctgcaatctgcctgagcactggaccgatatgaatcaccaactgttctgcatggtgcagctggagcctggtcagagtgaatacaataccataaaggataagttcaccaggacatgtagctcctatgctattgagaaaatcgaaagaatacagaacgccttcctgtggcagtcgtaccaggtgaagaagcgtcagatggacatcaagaatgaccacaagaacaacgaaagactcctcttccacgggaccgacgcagactccgtcccctacgttaaccagcatgggttcaataggtcttgcgccggaaaaaacgccgtaagctatggtaaagggacatattttgccgtggatgcctcctacagcgcaaaagacacctatagtaaaccagattcaaatgggcgaaaacatatgtatgttgtgcgagttctgactggagtctttacaaagggtcgtgcgggattggtcacacccccacctaagaacccccacaatcccaccgatctgtttgattctgtaactaataacacaagatcacctaagcttttcgtagtgttcttcgataaccaggcctatcctgaatacttgattacgttcacagcctag

SEQ ID NO: 301188 - DNA, 1278 bp, Artificial Sequence
  derived and/or modified sequence
atgaagcacacagccttcctggatgagttcaccaactggagccgcatcaaccccaacaaggcccgcatccccatggccggggacacccagggcgtggtgggcaccgtgtccaagccctgcttcaccgcctatgagatgaagatcggggccatcaccttccaggtggccactggagacatcgccacagagcaggtggatgtgattgtgaacagcacagcccggaccttcaacaggaagagcggcgtgtcccgggccatcctggagggcgccggccaggccgtggagagtgaatgtgctgtgctggccgcccagccccaccgggacttcatcatcaccccaggcggctgcctgaagtgcaagatcatcatccacgtgcctgggggcaaggatgtgaggaagacagtgacctctgtgctggaggagtgtgagcagaggaagtacacctctgtgtccctgcctgccatcggcactggaaatgctgggaagaaccccatcaccgtggccgacaacatcattgatgccatcgtggacttcagcagccagcacagcacccccagcctgaagacagtgaaggtggtgatcttccagcctgagctgctgaacatcttctatgacagcatgaagaagagggacctgagcgccagcctgaacttccagagcaccttctccatgaccacctgcaacctgcctgagcactggacagacatgaaccaccagctgttctgcatggtgcagctggagcccggccagagcgagtacaacaccatcaaggacaagttcaccaggacctgcagcagctatgccatcgagaagattgaaagaatccagaatgccttcctgtggcagagctaccaggtgaagaagaggcagatggacatcaagaatgaccacaagaacaatgaaaggctgctcttccacggcacagatgctgacagcgtgccctacgtgaaccagcacggcttcaacagaagctgtgccggcaagaatgctgtgtcctatggcaagggcacctactttgctgtggatgccagctacagcgccaaggacacctacagcaagccagacagcaatggaaggaagcacatgtatgtggtgcgggtgctgactggagtcttcaccaagggccgggccggcctggtgaccccaccacccaagaacccccacaaccccacagacctgtttgacagcgtgaccaacaacaccaggagccccaagctgtttgtggtgttctttgacaaccaggcctacccagagtacctgatcaccttcaccgcctag

SEQ ID NO: 301189 - DNA, 1278 bp, Artificial Sequence
  derived and/or modified sequence
atgaagcacaccgccttcctggacgagttcaccaactggagccggatcaacccgaacaaggcccggatccccatggcaggagacacccaaggagtggtgggaactgtctctaaaccctgttttactgcctacgagatgaagatcggcgcaattacctttcaagtggccacaggagatattgctaccgagcaggtggacgtgatcgtgaacagcactgctcgaaccttcaatcgaaagtccggtgtgagccgcgctatactcgagggggccggacaggctgtggagagcgaatgtgcagtgctcgcagctcagccgcacagggatttcatcatcacgcctggcggctgccttaagtgtaaaatcatcatccacgtaccagggggaaaggacgtacgtaagactgtgacatcggtactggaagaatgcgaacaaagaaagtacacctccgtttcactcccagccattgggaccggtaatgccgggaagaatcctatcactgttgctgacaatataattgacgccatcgttgacttctctagccagcattccacacctagtcttaagacagtgaaggttgtcatattccagccagagctgcttaatatcttttatgatagcatgaagaagagggatctttcagcctcccttaacttccagagcacattttctatgaccacgtgtaatctgccagagcactggaccgatatgaaccatcagctcttctgcatggtgcaattagagccgggccaaagcgaatataacacgatcaaagataaattcacaagaacctgttcctcttacgccattgagaaaatcgagcgcattcaaaatgctttcctctggcagagctatcaggttaagaagagacagatggatattaagaacgatcataaaaacaatgaacgccttttgttccacggaaccgacgctgactccgtgccctatgttaaccagcacggatttaatcgatcttgcgcaggtaaaaacgcagtgtcatatggaaaggggacttacttcgctgtcgatgccagctattccgcaaaagatacatatagcaagcctgacagcaatgggcggaaacacatgtatgtcgtgagggtccttactggagtttttacaaaggggcgggcaggactcgtaactcccccacccaagaatccacataatccaaccgacctcttcgatagcgtcaccaataatacaagatcacctaagctattcgtggtgtttttcgataatcaagcttaccctgagtatttgattacctttactgcctag

SEQ ID NO: 301190 - DNA, 1867 bp, Artificial Sequence
  derived and/or modified sequence
atgaagcatactgcatttttagatgaattcactaactggtcaagaataaatcccaacaaggccaggattcccatggcaggagatacccaaggtgtggtcgggactgtctctaagccttgtttcacagcatatgaaatgaaaatcggtgcaattacttttcaggttgctactggagatatagccactgaacaggtagatgttattgtaaactcaacagcaaggacatttaatcggaaatcaggtgtgtcaagagctattttagaaggtgctggacaagctgtggaaagtgaatgtgctgtactagctgcacagcctcacagagattttataattacaccaggtggatgcttaaagtgcaaaataataattcatgttcctgggggaaaagatgtcaggaaaacggtcaccagtgttctagaagagtgtgaacagaggaagtacacatcggtttcccttccagccattggaacaggaaatgccggaaaaaaccctatcacagttgctgataacataatcgatgctattgtagacttctcatcacaacattccaccccatcattaaaaacagttaaagttgtcatttttcaacctgagctgctaaatatattctacgacagcatgaaaaaaagagacctctctgcatcactgaactttcagtccacattctccatgactacatgtaatcttcctgaacactggactgacatgaatcatcagctgttttgcatggtccagctagagccaggacaatcagaatataataccataaaggacaagttcacccgaacttgttcttcctacgcaatagagaagattgagaggatacagaatgcatttctctggcagagctaccaggtaaagaaaaggcaaatggatatcaagaatgaccataagaataatgagagactcctcttccatgggacagatgcagactcagtgccatatgtcaatcagcacggctttaatagaagttgtgctgggaaaaatgctgtatcctatggaaaaggaacctattttgctgtggatgccagttattctgccaaggacacctactccaagccagacagcaatgggagaaagcacatgtacgttgtgcgagtacttactggagtcttcacaaagggacgtgcaggattagtcacccctccacccaagaatcctcacaatcccacagatctctttgactcagtgacaaacaatacacgatctccaaagctatttgtggtattctttgataatcaggcttacccagaatatctcataactttcacggcttaaaaatatttttatcatcaaagagatgatttaagtcatctgtaagaacaacatgcaatctttgtctttgcttctggcctgtgtaagcagatgaaagtttcccttttaggtgccaaaatgctgaaaattacctttttaaagtgctctattgctgcgatttgtagcatacctttttttctcagcaaattgatgggtggaagctgagaaatgtatggtaaatgtcacagagctacaaccattcacagacaccaaatctctaggagaataaaaagcacattattctttttctatcagaaaaaaacaagatgcatcaccttaaaaccaagatgacattgttcttcttggaacatgttaagacatcgaatggtggcgggttaaactgtactgcttaagtggagcggctaccgttatgcatctatcacagttggggattttgccttattaaggaaaacttgtcaatagttcagctgaaatgactgaatcacagaatattaactctgttatggaacaaatcataacagattttacctgtttacatttcaggtaaaaatgtatcgcattgttatctaatattaaaaaattacccccaatt

SEQ ID NO: 301191 - DNA, 1278 bp, Artificial Sequence
  derived and/or modified sequence
atgaagcatacagccttcctggatgaatttacgaactggagtaggatcaatcccaataaagcacggatccctatggccggagacacgcagggagtggtggggacagtgtccaagccatgcttcactgcctacgagatgaaaatcggggctatcaccttccaggtggcgaccggcgatatcgccacagagcaggtggatgtgattgtgaatagtaccgcgcgtaccttcaatcggaagagtggcgttagccgagctattctcgaaggagcaggccaggccgtcgaatcagagtgtgctgtgctcgcggctcagccacatcgcgactttatcatcacccccggaggttgtttgaagtgtaaaattataattcacgtgcctggcggtaaagacgtccggaagacagtgaccagcgtgctcgaggaatgcgagcaacgaaagtacacatctgtatcgctacccgctattggaaccggcaatgccggaaagaatccgattactgtggcagacaacattatcgacgcaattgtcgacttctcgtcccagcactcaacaccttcccttaaaacagtcaaagtagtcatttttcaaccagagttgctgaacatcttctatgactccatgaagaagagggatttgtctgcttcgctgaacttccagtctaccttttccatgacgacttgcaatctacccgagcactggaccgatatgaaccaccagctcttttgtatggtgcaactcgagcctggccaatccgaatacaacaccattaaggataagtttacaaggacctgttctagctacgctatagaaaaaatcgagaggatccaaaatgcctttctgtggcagtcataccaggtgaaaaagagacagatggatatcaagaatgaccacaagaacaacgaaagactgctgtttcacggaacagatgccgactcagtaccctatgtcaatcagcatgggtttaataggtcatgcgccggaaaaaacgcggtgagctacggtaagggcacctacttcgctgttgatgcttcctattcggccaaagacacgtacagcaagcctgactcgaatgggagaaagcatatgtacgtggtcagggtgctcactggggtgttcactaagggtagggcgggactggtgacaccacctccaaagaatccacacaatcccaccgatctgtttgacagtgttacaaataacaccagaagtcccaaactgttcgtggtattcttcgacaatcaggcatatccagaataccttataaccttcaccgcctag

SEQ ID NO: 301192 - DNA, 1278 bp, Artificial Sequence
  derived and/or modified sequence
atgaagcacaccgccttcctggacgagttcaccaactggagcagaatcaaccccaacaaggccagaatccccatggccggcgacacccagggcgtggtgggcaccgtgagcaagccctgcttcaccgcctacgagatgaagatcggcgccatcaccttccaggtggccaccggcgacatcgccaccgagcaggtggacgtgatcgtgaacagcaccgccagaaccttcaacagaaagagcggcgtgagcagagccatcctggagggcgccggccaggccgtggagagcgagtgcgccgtgctggccgcccagccccacagagacttcatcatcacccccggcggctgcctgaagtgcaagatcatcatccacgtgcccggcggcaaggacgtgagaaagaccgtgaccagcgtgctggaggagtgcgagcagagaaagtacaccagcgtgagcctgcccgccatcggcaccggcaacgccggcaagaaccccatcaccgtggccgacaacatcatcgacgccatcgtggacttcagcagccagcacagcacccccagcctgaagaccgtgaaggtggtgatcttccagcccgagctgctgaacatcttctacgacagcatgaagaagagagacctgagcgccagcctgaacttccagagcaccttcagcatgaccacctgcaacctgcccgagcactggaccgacatgaaccaccagctgttctgcatggtgcagctggagcccggccagagcgagtacaacaccatcaaggacaagttcaccagaacctgcagcagctacgccatcgagaagatcgagagaatccagaacgccttcctgtggcagagctaccaggtgaagaagagacagatggacatcaagaacgaccacaagaacaacgagagactgctgttccacggcaccgacgccgacagcgtgccctacgtgaaccagcacggcttcaacagaagctgcgccggcaagaacgccgtgagctacggcaagggcacctacttcgccgtggacgccagctacagcgccaaggacacctacagcaagcccgacagcaacggcagaaagcacatgtacgtggtgagagtgctgaccggcgtgttcaccaagggcagagccggcctggtgacccccccccccaagaacccccacaaccccaccgacctgttcgacagcgtgaccaacaacaccagaagccccaagctgttcgtggtgttcttcgacaaccaggcctaccccgagtacctgatcaccttcaccgcctag

SEQ ID NO: 301193 - DNA, 3103 bp, Artificial Sequence
  derived and/or modified sequence
attcatcaaaagaggctttcgctcccggactcccctgggcctcgagcagaaagcgtctcggccacggagatacagaaccgggagccttcaaggtcctccgccactctcagcaagccctgctctcgatggagaggagatcgctgggtgatggatgtgggcttccagggaaggtgctcgcgctggtcccgagccctccggggaagatattcgagcgcggagcgtaagcgcagggcacgccagccccgggagccgcgggagcaggcgccgcgcgtctctgcaccaccgggccgcctcccagccttctttccccagtttgccctcctgccgcagtccgggccgagattaattctctgcacttgtgagtgggcacacacaagttctccgggcacgatcctttcatctatttccctgggggagtccacctttttaacgattaacctcctagctaccgcgggcaaggtggcaggatgcgagtggggcggggaggggcgtttcacacgttcagaggcaccaaaattagctgccagtgctaaaaggctttgctttcttcggtttttgacaaataaatggggtgggatgcttgcttggccgcccgctgccccagcccgagccctgggctcacttagcagcctgatgccgagtttcagacgcagtcctgctgcgcttacacccgggcttcttcgcccccttgccaaagtctgcagcccgatggatgctgggcgcgggctttccctgagcgctttaacgcagcttaggctaaagccccagagctcccaccttctacctcctgtttatccgcccgcccctctaccaccgccaaaggacgtgccccttcagtagagtcggggatcccagccccagagcgggggagggcgcctccctatcccctcctccccgtccccgcctcggctcggggttttactgcagcagccggaggtgacagcgacgcctcagccgcctctgttgctctcggagccccggcttcccctgcaccgggaaagcgccccctctcgagaggctggtccctggagaactgcgaacgagctgcagaaaaccagattttaaaatgtagaagtcgttgggctgcattcctccgaggaccagtctgatcgcccaggactaagagtggcagcgtatgagaagttgggaccatagagcaagggggggaggggagtgttgcagcaggcattctcttctggaaggagtcgctgggagcagtgcggttggacacaagtttgcgtaggagtgttttccttttgtcaataattaatcaccggaattagccaggtagaatttgagttttagcaagagtcctgagggcggggccgaacacctaactccgggaggctcccaggcgcccggcgcagtgggaagctcgcagcagctggggaggagccaaagcctcggcgctcacctaagccgcagggagatacacccaactgggagatgaggaaacagcaacccagagaggagaactaacccacacaggatcatttcgtgaaggagcaaggctgaagaaccagacctggactttcttaggacaaacttactgcagcttgaaggagccaaccatggatttgaggcgtgtgaaggaatatttctcctggctctactatcaataccaaatcattagctgctgtgctgttttagagccctgggagcgatctatgtttaacaccatcttactaaccattattgctatggtggtatacactgcctatgtctttattccaatccacattcgcctggcttgggaatttttctcaaaaatatgtggatatcacagtacaatttctaattgatcctgttcacattcagtgaaatggcattgcatatttatatgttgcttacagcttattgatttaggtaactattgtgtcttccttcactatctgacctgaaaagcactctcttctctatgcactcttatattctgcctttctgcctggagtttgaaatacatgtctctttagtttcttttgcacatgctacattgtgctttagaccggagataatacagtgactttacctcacaaatcatattctgtcaacacaaatctatgaatttagtttatttaaaatcagaacaatttcctacaaaatttttctggaaaatagactcctaacagacctaccagaatcatgcttaaagtgctcccttgacacttattctatactaaaggataaattttaaaaaatctttataggctactgtcagaagtatcctatccttgtttacgatgtataaaaagatgtgaataaattatatggaccccctaagtcttattttctagtaaactgatgatactggaaattcttttacttcaaatgcaaaagaataagctggaggcaattatttcctttcatacagagttcatgaattgttttaaatgcttcttaaagtctggctttataaccgtttaaaatcaacaatgttgattttagataaccaagtaagtattataatacaaaataattttaagtgtaagaaactaaagtataatcaaagtaaattcagttattgtatttgtggtgttgccttgccttgcatgatgctgggggaaaaagagaaaagaaatggttttctttttgtactttcattcagtgtagagggaaaaaagcatgtattgggccaccggaagacaagctaataaataggctggaagtaatattctaccagcaggaactcaacagctccagttaaatgctttgatatagtggctcctttgcagagccaaaacaagatttattaaatttccttcaaactgtttatctttaaaacaaatataaggttttaattatactgctgaagcaaatgtgaatgccaaagactacgttttgcagttttgctttcctcccaataaatattaatgtatgtaattctagagggtaaaaatgtaaataggtttggacaatatttgcacccttgtttgtgttatgaaaaaaatttttccaaggtgagctagagagaaagatgtttggcatgccaaattaacttgcatgtttgttaaaaaaacaaacacatgttttgaagagaaaccagatctgaacatgtatttgttgagttttgcaaaataaaattaattttgtaagtaaatatcta

SEQ ID NO: 301194 - DNA, 111 bp, Artificial Sequence
  derived and/or modified sequence
atgcccgtgcgcaagcaggatacacagagggctctgcatcttctcgaagagtaccgtagcaagctcagccagaccgaagacagacagctgcgcagttcgattgagcgttag

SEQ ID NO: 301195 - DNA, 111 bp, Artificial Sequence
  derived and/or modified sequence
atgcctgtgaggaagcaggacacccagagggccctgcacctgctggaggagtaccgcagcaagctgagccagacagaggaccggcagctgcggagcagcattgaaagatag

SEQ ID NO: 301196 - DNA, 111 bp, Artificial Sequence
  derived and/or modified sequence
atgcccgtgcggaagcaggacacccagcgggccctgcacctgctggaggaataccgatcaaaactgtctcagactgaagatcgccagctgagatcttccatcgaacggtag

SEQ ID NO: 301197 - DNA, 111 bp, Artificial Sequence
  derived and/or modified sequence
atgccagtgcggaagcaggacacccaacgtgccttacatctattggaggagtataggtccaaactcagccagactgaagaccgtcagctaagaagcagtattgagcggtag

SEQ ID NO: 301198 - DNA, 111 bp, Artificial Sequence
  derived and/or modified sequence
atgcccgtgagaaagcaggacacccagagagccctgcacctgctggaggagtacagaagcaagctgagccagaccgaggacagacagctgagaagcagcatcgagagatag

SEQ ID NO: 301199 - protein, 208 aa, Artificial Sequence
  derived and/or modified sequence
MPVRKQDTQRALHLLEEYRSKLSQTEDRQLRSSIERVINIFQSNLFQALIDIQEFYEVTLLDNPKCIDRSKPSEPIQPVNTWEISSLPSSTVTSETLPSSLSPSVEKYRYQDEDTPPQEHISPQITNEVIGPELVHVSEKNLSEIENVHGFVSHSHISPIKPTEAVLPSPPTVPVIPVLPVPAENTVILPTIPQANPPPVLVNTDSLE

SEQ ID NO: 301200 - protein, 917 aa, Artificial Sequence
  derived and/or modified sequence
MPVRKQDTQRALHLLEEYRSKLSQTEDRQLRSSIERVINIFQSNLFQALIDIQEFYEVTLLDNPKCIDRSKPSEPIQPVNTWEISSLPSSTVTSETLPSSLSPSVEKYRYQDEDTPPQEHISPQITNEVIGPELVHVSEKNLSEIENVHGFVSHSHISPIKPTEAVLPSPPTVPVIPVLPVPAENTVILPTIPQANPPPVLVNTDSLETPTYVNGTDADYEYEEITLERGNSGLGFSIAGGTDNPHIGDDSSIFITKIITGGAAAQDGRLRVNDCILRVNEVDVRDVTHSKAVEALKEAGSIVRLYVKRRKPVSEKIMEIKLIKGPKGLGFSIAGGVGNQHIPGDNSIYVTKIIEGGAAHKDGKLQIGDKLLAVNNVCLEEVTHEEAVTALKNTSDFVYLKVAKPTSMYMNDGYAPPDITNSSSQPVDNHVSPSSFLGQTPASPARYSPVSKAVLGDDEITREPRKVVLHRGSTGLGFNIVGGEDGEGIFISFILAGGPADLSGELRKGDRIISVNSVDLRAASHEQAAAALKNAGQAVTIVAQYRPEEYSRFEAKIHDLREQMMNSSISSGSGSLRTSQKRSLYVRALFDYDKTKDSGLPSQGLNFKFGDILHVINASDDEWWQARQVTPDGESDEVGVIPSKRRVEKKERARLKTVKFNSKTRDKGEIPDDMGSKGLKHVTSNASDSESSYLILITDEYGCSKGRGQEEYVLSYEPVNQQEVNYTRPVIILGPMKDRINDDLISEFPDKFGSCVPHTTRPKRDYEVDGRDYHFVTSREQMEKDIQEHKFIEAGQYNNHLYGTSVQSVREVAEKGKHCILDVSGNAIKRLQIAQLYPISIFIKPKSMENIMEMNKRLTEEQARKTFERAMKLEQEFTEHFTAIVQGDTLEDIYNQVKQIIEEQSGSYIWVPAKEKL

SEQ ID NO: 301201 - DNA, 2754 bp, Artificial Sequence
  derived and/or modified sequence
atgcccgtgaggaagcaggacactcaacgagcacttcacctcctggaagagtaccgatcaaaactgtcacagacggaagacagacagctcagaagttctatcgaacgtgtcattaacatattccagtccaacctctttcaggctcttatcgacatccaggaattctatgaagtcaccttgcttgataatcccaagtgtatcgacagatctaagccaagtgagccaatccagcctgttaacacatgggagatatccagcttgccctctagtactgtgacatcagagacgctgccgtcttccctctcaccctccgtcgaaaagtataggtaccaggatgaagacacccccccacaggagcacatctctccacagattacaaacgaagtaatagggcccgaattggtccacgtctccgagaagaatctctctgagatagaaaacgtgcacggatttgtgtcgcatagtcatatcagcccaatcaagccaaccgaggccgtgctgccatccccgccaacagtgcccgtgatccctgtactgcccgttccggctgaaaacactgtgatactgccaactatacctcaggcgaaccctcctcctgtcctggtaaatactgactcgctggaaactccaacctacgtgaatggaacagatgccgattatgagtacgaggaaattactctggaacggggaaattcgggtctgggattctccatcgccgggggaaccgacaacccacacataggcgacgactcttccatttttattactaaaatcatcaccggcggggcggcagcccaagatggtcggctacgtgtgaatgactgcatccttcgggtaaatgaggttgatgtgagggacgtcacgcactccaaggctgttgaagcactaaaagaagccggctcaatcgtcagactgtacgttaagcgccgcaagccagtgtctgagaagatcatggagatcaagctgattaagggtccgaagggattgggatttagcatagcaggaggagttggcaaccagcacatccccggcgacaatagtatttatgtcactaaaataatcgagggtggcgctgcacacaaggatggaaagcttcagattggcgataaacttcttgccgttaacaatgtttgcctcgaggaggttacacatgaagaggcagtcaccgctctgaagaataccagcgatttcgtttacctcaaggtggccaaacctacttctatgtatatgaatgatgggtacgccccacctgatataaccaacagttctagccaaccggtggataaccatgtgagccctagcagtttcctggggcagactcctgctagcccagcccggtactcccccgttagcaaggccgtgttaggcgacgacgagatcaccagagaacctaggaaggtggtgttacatcggggcagcacaggactgggctttaacatcgtgggcggtgaggatggcgaggggattttcatctcttttattttggccggaggtcccgctgatctctctggagaactcaggaaaggcgacagaatcatttcagtcaacagcgtggacttaagagccgctagccacgagcaggcagccgcggcactgaagaacgcaggccaggcagttactatcgtggctcagtatcgtcctgaggagtacagcagatttgaggccaagatccacgatcttagagaacaaatgatgaatagcagcattagttccggctctggctcgctaaggacctcacagaaaagaagcttgtatgtccgagcattgttcgactatgacaaaactaaggatagcgggctgccgagccaaggtctgaacttcaagttcggggatatcctccacgttataaacgcctcagacgatgagtggtggcaagccaggcaggtgacccccgatggggagagcgacgaagtgggggtgataccatctaaaaggcgcgtggagaagaaggagagagcacgactcaaaactgtgaaatttaatagcaaaactcgcgacaagggcgagatccccgatgacatggggagcaagggcctcaagcatgtgacgtccaacgctagtgactcggagagctcctacctcatacttattacggatgagtatggttgctccaaagggagggggcaggaggagtacgtgctgagctacgaacctgtgaaccagcaggaagtgaattatacaaggcccgtcataatcctggggccgatgaaggacagaatcaacgatgatctcatctctgagtttcctgacaagtttggatcctgtgtgccccataccacccgcccgaagcgagactacgaggttgatgggcgcgactatcactttgtcacctcacgcgagcagatggagaaagatatccaggaacataagttcattgaggccgggcaatacaacaaccatctttatggcacttcagtacagagcgtaagggaggtggctgaaaaaggaaaacactgtatcctcgatgttagcggcaacgctattaaacggcttcagattgcacagctttacccaattagtatttttattaaacccaaaagcatggaaaatatcatggaaatgaataagcgactcacagaggagcaagcccggaaaacattcgagagagcgatgaaacttgaacaggagttcaccgagcattttacagctatcgtgcagggtgataccctggaagatatctataatcaggtaaagcagatcatcgaagaacagtccggaagctatatttgggtgcccgccaaggagaagctatag

SEQ ID NO: 301202 - DNA, 2754 bp, Artificial Sequence
  derived and/or modified sequence
atgcctgtgaggaagcaggacacccagagggccctgcacctgctggaggagtaccgcagcaagctgagccagacagaggaccggcagctgcggagcagcattgaaagagtcatcaacatcttccagagcaacctcttccaggccctgattgacatccaggagttctatgaggtgaccctgctggacaaccccaagtgcatcgacaggagcaagcccagcgagcccatccagcctgtgaacacctgggagatcagcagcctgcccagcagcacagtgaccagcgagaccctgcccagcagcctgagccccagcgtggagaagtaccgctaccaggatgaggacaccccaccccaggagcacatcagcccccagatcaccaatgaagtcatcggccctgagctggtgcacgtgtctgagaagaacctgtctgaaattgaaaatgtgcacggctttgtgagccacagccacatcagccccatcaagcccacagaagctgtgctgcccagcccccccaccgtgcctgtgattcctgtgctgcctgtgcctgctgagaacacagtcatcctgcccaccatcccccaggccaaccccccacctgtgctggtgaacacagacagcctggagacccccacctacgtgaatggaacagatgctgactatgaatatgaggagatcaccctggagcggggcaacagcggcctgggcttcagcattgctgggggcacagacaacccccacatcggagatgacagcagcatcttcatcaccaagatcatcaccggcggggccgccgcccaggacggccgcctgcgggtgaatgactgcatcctgcgggtgaatgaggtggatgtgagagatgtgacccacagcaaggctgtggaggccctgaaggaggccggcagcatcgtgcggctgtatgtgaagaggaggaagcctgtgtctgagaagatcatggagatcaagctgatcaagggccccaagggcctgggcttcagcattgctgggggcgtgggcaaccagcacatccctggggacaacagcatctacgtgaccaagatcatcgagggcggggccgcccacaaggatggcaagctgcagattggagacaagctgctggccgtgaacaacgtgtgcctggaggaggtgacccatgaggaggccgtgacagccctgaagaacaccagtgactttgtgtacctgaaggtggccaagcccacctccatgtacatgaatgatggctacgcccccccagacatcaccaacagcagcagccagcctgtggacaaccacgtgagccccagcagcttcctgggccagaccccagccagccctgcccgctacagccctgtgtccaaggctgtgctgggagatgatgagatcacccgggagcccaggaaggtggtgctgcaccggggcagcacaggcctgggcttcaacatcgtgggcggggaggatggagagggcatcttcatctccttcatcctggccggcggccctgctgacctgtctggagagctgaggaagggggaccgcatcatctctgtgaacagcgtggacctgcgggccgccagccatgagcaggccgccgccgccctgaagaatgccggccaggccgtgaccatcgtggcccagtacagacctgaggagtacagcagatttgaggccaagatccatgacctgcgggagcagatgatgaacagcagcatcagcagcggcagcggcagcctgcggaccagccagaagaggagcctgtatgtgcgggccctgtttgattatgacaagaccaaggacagcggcctgcccagccagggcctgaacttcaagtttggagacatcctgcacgtgatcaatgccagtgatgatgagtggtggcaggcccggcaggtgaccccagatggagagagtgatgaggtgggcgtcatccccagcaagagaagagtggagaagaaggagcgggcccggctgaagacagtgaagttcaacagcaagacccgggacaagggggagatcccagatgacatgggcagcaagggcctgaagcacgtgaccagcaatgccagtgacagcgagagcagctacctgatcctgatcacagatgaatatggctgcagcaagggccggggccaggaggagtatgtgctgtcctatgagcctgtgaaccagcaggaggtgaactacaccaggcctgtgatcatcctgggccccatgaaggaccgcatcaatgatgacctgatcagcgagttcccagacaagtttggcagctgtgtgccccacaccacccggcccaagagggactatgaggtggatggccgggactaccactttgtgaccagccgggagcagatggagaaggacatccaggagcacaagttcatcgaggccggccagtacaacaaccacctgtatggcacctctgtgcagagcgtgcgggaggtggccgagaagggcaagcactgcatcctggatgtgtctggaaatgccatcaagaggctgcagatcgcccagctgtaccccatcagcatcttcatcaagcccaagtccatggagaacatcatggagatgaacaagaggctgacagaggagcaggccaggaagacctttgagcgggccatgaagctggagcaggagttcacagagcacttcaccgccatcgtgcagggcgacaccctggaggacatctacaaccaggtgaagcagatcatcgaggagcagagcggcagctacatctgggtgcctgccaaggagaagctgtag

SEQ ID NO: 301203 - DNA, 2754 bp, Artificial Sequence
  derived and/or modified sequence
atgcccgtgcggaagcaggacacccagcgggccctgcacctgctggaagagtaccgctccaagctgagccaaacggaagatagacagctccgatcctctatcgaacgcgtaatcaatatctttcagagtaacttgtttcaagcactcattgatatccaggagttctatgaggtcactctgctggataatcccaagtgcatcgataggtctaagccctccgagccgatacaacctgtgaacacatgggagatctccagcctcccctcttctaccgtgacctcagaaacacttccttcatctcttagcccttcagtcgaaaagtaccgataccaggacgaggacacaccaccccaggaacatataagcccacagattacgaatgaggtgatcggtccagaactggttcacgtgtctgagaagaacctgtccgagatagagaatgtccatgggtttgtgtcccattcccacattagtccaataaagccgaccgaggcagtcctcccctctccacctacggtccccgttataccagtcttgcccgtgcccgccgaaaatactgtcatcctcccaaccatcccccaggcaaaccccccgcccgtgctggtcaacaccgattccttggagacacctacttacgtgaatggaaccgatgccgactatgaatatgaggagatcacactggagagggggaacagcgggctcggctttagcatcgctggcggaacggacaacccccacattggagatgattctagtattttcataacaaagattataactggcggcgccgcggcccaggacggcagactgcgcgtaaatgattgcatcctgcgggtaaacgaagtggacgtacgcgacgtcacacacagcaaggcggtggaggctcttaaggaggctggaagcattgtgcggttgtatgtgaaaagacgaaaaccggtgagcgagaagatcatggagatcaagcttataaaaggaccgaaaggcctcggtttttcaatcgcggggggcgtggggaatcagcacatacctggagacaatagcatctatgtcacaaaaataatagagggaggagctgcccataaggacggcaagctgcagattggagacaagctcctggcagtgaacaatgtgtgcctcgaggaggttacacatgaggaagccgtgacggccttaaagaacacatccgactttgtatacctcaaagtagctaagcctacttctatgtacatgaatgatgggtatgcaccaccagatataacgaatagctcctcccagcccgtggataaccatgtgtctccatccagctttcttggccagacgcccgcaagccccgcccgatacagccccgtctctaaggcagtgctcggggacgacgaaattacccgtgagccgaggaaagtggtgctccatagaggtagcacaggtctgggatttaatatcgtgggaggggaggacggagagggcatattcattagttttattctagccggaggtcccgcagacctgtctggagaactgcggaagggggatcggatcattagcgtgaactctgtggacctgagggcggcttctcatgaacaggcagcagctgccttgaagaacgccggccaagccgtaacaatcgtggctcagtatcgccctgaggaatactcaaggttcgaagctaagatacatgatctgagagagcagatgatgaatagttcaatatcaagcgggagtggttccttgagaacatctcagaaaaggagcttatatgtgagagcccttttcgactacgataagacaaaggacagcggacttccttctcagggattgaactttaagtttggtgacattttacatgtaataaacgcatcggacgatgagtggtggcaggccagacaagtaacccctgacggcgagagcgacgaggtgggagtcattccttctaaacgtagggtagagaaaaaggaaagagcaagactgaaaaccgtgaagtttaactccaagacacgggataaaggcgagataccagatgatatgggttccaaaggcctgaaacacgtgacaagtaatgcgagcgactcagagagcagttatctcatcctaatcacagacgagtacggttgttccaaaggtagaggacaggaggagtatgtgttatcatatgagcccgtgaaccagcaagaggtgaattacacgagaccagttatcattctcggccctatgaaagaccgcattaatgacgatctgatctctgagttccccgacaagtttggcagctgcgtgccccacaccacacgacccaagagagactatgaggtggacgggcgcgattatcatttcgtgacttctagagaacaaatggaaaaggacattcaggagcataagtttatcgaagctggccagtacaataaccatctctatggaacgtcagtgcagtcagttcgtgaagttgcggaaaagggtaaacattgtattctggacgtttctggtaatgcgatcaagcgactgcagatagcgcagctctaccctatatccatttttatcaagcctaagtctatggagaacataatggagatgaacaagaggctgactgaagagcaggcacgtaagaccttcgagagagccatgaaactcgaacaggagttcaccgagcacttcaccgcaatagtgcaaggagatacactcgaggatatttataaccaggtgaaacagattatcgaagagcaatctggttcatatatatgggtcccagccaaggagaagctgtag

SEQ ID NO: 301204 - DNA, 2754 bp, Artificial Sequence
  derived and/or modified sequence
atgcccgtgcggaagcaggatacacagagagcgctgcacctgcttgaagaatacagatccaaactgagccaaaccgaggatcggcaactgcggtcatccattgaacgtgtcattaatatatttcagtccaatctctttcaggccctaatcgacattcaagaattttatgaagtgactctcctggacaaccctaagtgtatcgacaggagcaaaccctccgaaccgattcaacctgtgaacacttgggagataagctccctgccgtcatcaaccgttacaagcgagaccctgcccagctcacttagtccctccgtcgagaagtacagataccaagatgaggacacccctccgcaggaacacatatcccctcaaataaccaatgaagttatcggccctgagttagtccacgtgtcagaaaaaaacctctccgagattgagaacgtgcatggctttgtctcacacagccacattagtccaattaagccgaccgaggctgtgctgcccagcccaccgactgtgcccgtgattcctgtcctcccagtgcctgcagagaacactgtgatcttgcccactatcccccaggccaatccgccaccagtcttggttaacactgatagcctggagactccaacttatgtgaacggaacggacgccgattacgaatacgaggagataacactagagcgcggaaattccggactgggcttctcaatagcaggcggaacagataatcctcatatcggagacgactctagcatctttataaccaagatcattaccgggggtgcagcggctcaagacgggaggctcagggtcaatgactgtatcctgcgggtcaacgaggtggacgtccgagacgtgactcactcaaaagcggtggaagcgctgaaagaagccggaagtatagtgcggttgtacgtaaagagaagaaaaccagtctccgagaaaatcatggagatcaagcttatcaagggtcccaagggactagggttttccattgccggaggggtagggaaccaacacatccctggcgacaactctatctacgttaccaagatcatcgagggaggtgccgcacataaagatgggaagctacagattggtgataagctcctcgctgtgaataatgtatgcctcgaggaggtcacacacgaagaggcagtcaccgccttgaagaatacttccgattttgtatacttgaaagtggctaagccaacaagcatgtatatgaacgacggttacgcccctcccgacatcacgaactctagcagtcaacccgtggacaatcacgtgtctccgtcatctttcttagggcagacccctgccagtcccgctcgttattcccccgtctcaaaggcagttcttggtgatgacgaaataacgcgagagcctagaaaagtggtactgcatagaggatctaccgggctcggctttaacatcgttggcggagaggacggagagggaattttcatttcatttatactggcgggaggaccagccgatctctccggggaactcaggaagggggacagaatcataagcgtcaatagtgtggacttaagagctgccagccacgagcaggctgccgcagcactcaagaacgcagggcaggcagttaccatcgtcgcccagtatcgccctgaagagtattccagatttgaggccaaaatccatgacttgcgtgaacagatgatgaactcttccatcagtagcggcagtggttctctgcggacaagccagaaaagatctttatacgtgcgtgccctattcgattatgacaagacgaaggattcaggcctgccaagtcaaggactgaatttcaagttcggggacatcctccatgtgatcaatgcctcggatgacgagtggtggcaggcccgacaagtgacccctgatggggaatcagatgaggtgggagtgatcccctccaagagaagggttgagaaaaaagagagagcaagattaaagacggtgaagtttaactcaaaaacgcgcgacaagggagagattcccgacgatatgggctctaagggtctgaaacatgtgacaagcaatgcctctgattccgaaagctcttatctaatcctaatcaccgatgagtatggttgctccaagggtcgtggtcaggaagagtacgtgctctcgtacgaaccagtgaaccagcaggaggttaattatactcgacccgtcatcattctgggaccgatgaaggatcgaatcaatgacgaccttatctctgaatttcctgataagtttgggtcctgcgtgcctcacaccactagacctaagcgggattatgaggtggatggtagagactaccatttcgtgacttctcgtgagcaaatggaaaaggacattcaggagcacaagtttattgaggctggccagtataataatcatctgtatgggacctcagtgcagagcgtgcgggaagtggcagaaaagggcaagcattgcatcttagatgtgtctgggaacgcaatcaagcgccttcagatagcacagctctacccaatatccatatttatcaagcctaaatctatggagaatatcatggagatgaataaaaggttgaccgaggaacaggccaggaaaaccttcgagcgtgctatgaaactcgaacaggaatttactgagcatttcaccgccatcgtacagggggacacactggaagacatttacaatcaagtaaagcaaatcatcgaggaacagtcagggtcttacatctgggtgccagctaaggaaaaactgtag

SEQ ID NO: 301205 - DNA, 2754 bp, Artificial Sequence
  derived and/or modified sequence
atgcccgtgagaaagcaggacacccagagagccctgcacctgctggaggagtacagaagcaagctgagccagaccgaggacagacagctgagaagcagcatcgagagagtgatcaacatcttccagagcaacctgttccaggccctgatcgacatccaggagttctacgaggtgaccctgctggacaaccccaagtgcatcgacagaagcaagcccagcgagcccatccagcccgtgaacacctgggagatcagcagcctgcccagcagcaccgtgaccagcgagaccctgcccagcagcctgagccccagcgtggagaagtacagataccaggacgaggacacccccccccaggagcacatcagcccccagatcaccaacgaggtgatcggccccgagctggtgcacgtgagcgagaagaacctgagcgagatcgagaacgtgcacggcttcgtgagccacagccacatcagccccatcaagcccaccgaggccgtgctgcccagcccccccaccgtgcccgtgatccccgtgctgcccgtgcccgccgagaacaccgtgatcctgcccaccatcccccaggccaaccccccccccgtgctggtgaacaccgacagcctggagacccccacctacgtgaacggcaccgacgccgactacgagtacgaggagatcaccctggagagaggcaacagcggcctgggcttcagcatcgccggcggcaccgacaacccccacatcggcgacgacagcagcatcttcatcaccaagatcatcaccggcggcgccgccgcccaggacggcagactgagagtgaacgactgcatcctgagagtgaacgaggtggacgtgagagacgtgacccacagcaaggccgtggaggccctgaaggaggccggcagcatcgtgagactgtacgtgaagagaagaaagcccgtgagcgagaagatcatggagatcaagctgatcaagggccccaagggcctgggcttcagcatcgccggcggcgtgggcaaccagcacatccccggcgacaacagcatctacgtgaccaagatcatcgagggcggcgccgcccacaaggacggcaagctgcagatcggcgacaagctgctggccgtgaacaacgtgtgcctggaggaggtgacccacgaggaggccgtgaccgccctgaagaacaccagcgacttcgtgtacctgaaggtggccaagcccaccagcatgtacatgaacgacggctacgccccccccgacatcaccaacagcagcagccagcccgtggacaaccacgtgagccccagcagcttcctgggccagacccccgccagccccgccagatacagccccgtgagcaaggccgtgctgggcgacgacgagatcaccagagagcccagaaaggtggtgctgcacagaggcagcaccggcctgggcttcaacatcgtgggcggcgaggacggcgagggcatcttcatcagcttcatcctggccggcggccccgccgacctgagcggcgagctgagaaagggcgacagaatcatcagcgtgaacagcgtggacctgagagccgccagccacgagcaggccgccgccgccctgaagaacgccggccaggccgtgaccatcgtggcccagtacagacccgaggagtacagcagattcgaggccaagatccacgacctgagagagcagatgatgaacagcagcatcagcagcggcagcggcagcctgagaaccagccagaagagaagcctgtacgtgagagccctgttcgactacgacaagaccaaggacagcggcctgcccagccagggcctgaacttcaagttcggcgacatcctgcacgtgatcaacgccagcgacgacgagtggtggcaggccagacaggtgacccccgacggcgagagcgacgaggtgggcgtgatccccagcaagagaagagtggagaagaaggagagagccagactgaagaccgtgaagttcaacagcaagaccagagacaagggcgagatccccgacgacatgggcagcaagggcctgaagcacgtgaccagcaacgccagcgacagcgagagcagctacctgatcctgatcaccgacgagtacggctgcagcaagggcagaggccaggaggagtacgtgctgagctacgagcccgtgaaccagcaggaggtgaactacaccagacccgtgatcatcctgggccccatgaaggacagaatcaacgacgacctgatcagcgagttccccgacaagttcggcagctgcgtgccccacaccaccagacccaagagagactacgaggtggacggcagagactaccacttcgtgaccagcagagagcagatggagaaggacatccaggagcacaagttcatcgaggccggccagtacaacaaccacctgtacggcaccagcgtgcagagcgtgagagaggtggccgagaagggcaagcactgcatcctggacgtgagcggcaacgccatcaagagactgcagatcgcccagctgtaccccatcagcatcttcatcaagcccaagagcatggagaacatcatggagatgaacaagagactgaccgaggagcaggccagaaagaccttcgagagagccatgaagctggagcaggagttcaccgagcacttcaccgccatcgtgcagggcgacaccctggaggacatctacaaccaggtgaagcagatcatcgaggagcagagcggcagctacatctgggtgcccgccaaggagaagctgtag

SEQ ID NO: 301206 - DNA, 5007 bp, Artificial Sequence
  derived and/or modified sequence
gttggaaacggcactgctgagtgaggttgaggggtgtctcggtatgtgcgccttggatctggtgtaggcgaggtcacgcctctcttcagacagcccgagccttcccggcctggcgcgtttagttcggaactgcgggacgcgccggtgggctagggcaaggtgtgtgccctcttcctgattctggagaaaaatgccggtccggaagcaagatacccagagagcattgcaccttttggaggaatatcgttcaaaactaagccaaactgaagacagacagctcagaagttccatagaacgggttattaacatatttcagagcaacctctttcaggctttaatagatattcaagaattttatgaagtgaccttactggataatccaaaatgtatagatcgttcaaagccgtctgaaccaattcaacctgtgaatacttgggagatttccagccttccaagctctactgtgacttcagagacactgccaagcagccttagccctagtgtagagaaatacaggtatcaggatgaagatacacctcctcaagagcatatttccccacaaatcacaaatgaagtgataggtccagaattggttcatgtctcagagaagaacttatcagagattgagaatgtccatggatttgtttctcattctcatatttcaccaataaagccaacagaagctgttcttccctctcctcccactgtccctgtgatccctgtcctgccagtccctgctgagaatactgtcatcctacccaccataccacaggcaaatcctcccccagtactggtcaacacagatagcttggaaacaccaacttacgttaatggcacagatgcagattatgaatatgaagaaatcacacttgaaaggggaaattcagggcttggtttcagcattgcaggaggtacggacaacccacacattggagatgactcaagtattttcattaccaaaattatcacagggggagcagccgcccaagatggaagattgcgggtcaatgactgtatattacgagtaaatgaagtagatgttcgtgatgtaacacatagcaaagcagttgaagcgttgaaagaagcagggtctattgtacgcttgtatgtaaaaagaaggaaaccagtgtcagaaaaaataatggaaataaagctcattaaaggtcctaaaggtcttgggtttagcattgctggaggtgttggaaatcagcatattcctggggataatagcatctatgtaaccaaaataattgaaggaggtgcagcacataaggatggcaaacttcagattggagataaacttttagcagtgaataacgtatgtttagaagaagttactcatgaagaagcagtaactgccttaaagaacacatctgattttgtttatttgaaagtggcaaaacccacaagtatgtatatgaatgatggctatgcaccacctgatatcaccaactcttcttctcagcctgttgataaccatgttagcccatcttccttcttgggccagacaccagcatctccagccagatactccccagtttctaaagcagtacttggagatgatgaaattacaagggaacctagaaaagttgttcttcatcgtggctcaacgggccttggtttcaacattgtaggaggagaagatggagaaggaatatttatttcctttatcttagccggaggacctgctgatctaagtggagagctcagaaaaggagatcgtattatatcggtaaacagtgttgacctcagagctgctagtcatgagcaggcagcagctgcattgaaaaatgctggccaggctgtcacaattgttgcacaatatcgacctgaagaatacagtcgttttgaagctaaaatacatgatttacgggagcagatgatgaatagtagtattagttcagggtcaggttctcttcgaactagccagaagcgatccctctatgtcagagccctttttgattatgacaagactaaagacagtgggcttcccagtcagggactgaacttcaaatttggagatatcctccatgttattaatgcttctgatgatgaatggtggcaagccaggcaggttacaccagatggtgagagcgatgaggtcggagtgattcccagtaaacgcagagttgagaagaaagaacgagcccgattaaaaacagtgaaattcaattctaaaacgagagataaaggggagatccctgacgacatgggatcaaaaggcctgaagcatgtaacttctaatgccagcgatagtgaaagtagttacctaatcttgattacagatgagtatggctgctcaaaaggtcgtggtcaagaagaatacgtcttatcttatgaaccagtgaatcaacaagaagttaattatactcgaccagtgatcatattgggacctatgaaagacaggataaatgatgacttgatctcagaatttcctgacaaatttggatcctgtgttcctcatacaactagaccaaaacgagattatgaggtagatggaagagattatcattttgtgacttcaagagagcagatggaaaaagatatccaggaacataaattcattgaagctggccagtataacaatcatctatatggaacaagtgttcagtctgtacgagaagtagcagaaaagggcaaacactgtatccttgatgtgtctggaaatgccataaagagattacagattgcacagctttaccctatctccatttttattaaacccaaatccatggaaaatatcatggaaatgaataagcgtctaacagaagaacaagccagaaaaacatttgagagagccatgaaactggaacaggagtttactgaacatttcacagctattgtacagggggatacgctggaagacatttacaaccaagtgaaacagatcatagaagaacaatctggttcttacatctgggttccggcaaaagaaaagctatgaaaactcatgtttctctgtttctcttttccacaattccattttctttggcatctctttgccctttcctctggagtctttcttgagtactgatttcatgttgaattgtatcccacacatcatggtctgcagcttctttttcacatgtagtgtctccttcaagttacatcgtgtgtattatttaatgtcactattggttagtggccatttttcagaactgaagatggaatggcctgaccagctattaagaacgtggggagacgcagaaattgtggtaaaattccttaatgtttaagggaaagtaactttaagagatttttggaaaagctttatatacattcttttcaaatttcagtacaaatgaaaaagtggttttaatcagtgatttagtagactttgagcaactgtgcacgcttcagtttaatagcatggtttggccagtgtattactctcaagtccttttctcaatcaacttctatcatcaaagcaattgtttcattatagataaataaggacattttttaatttaaaaattcatgtctgagttgactttcataagggatttcattttttcctcaacattcttaaagccttttagtatttgacggttcttttttcccaggacatttgctaggaataacaacgtttcaatgtttttaatctacttgagcaacactatcgtgtcttacaaaagttgttcatatgtaaatgatcatcacatttcgtgaattgaggccatgttcaggtgctaaggaagttcgccttttacacagaagattgagaaaatttcctagatataaatacagataaatcagacgttacagtggtgacgtagtaaccatcatggcaatggaaaggagtccaattcatagcctaaaacttcaaatgtattcttaggagtcagattttactgaatattttacccacaatagctgcctattttgttataataaaatatatataaatatatatataaaactttctttaaactgtaactatgggaattattttctttacatagttgcgcacacacacaaacatatatatatatttaaaatatattttgtttcttttgccacctactcctaactttttgtttggtttttaaattaaatattaattgaatagacttatcttccttaatcatgtgaactgaaaatgggggcatggtggtcatgaggaggaaacatttagggaaattagattataagtaaaagtgtgggcatattctcctcttttctacaaaggttttcaaatggttcctgaggttttttgttgttgtccgtgttgttactgttgttcttgtcatcaggtttgattttggtccttgccctttccttctagttctccttttattaataggaaggcaggcaaaagccccatttatgtgtgtgttttcccctcagacagctttcatccactgctctgcactagaattgcacaaatcttcatggtgagcaattttaagaaatgttagtgaaaggtagaaattatttcacaaatcagtttctctggtccttcatattaataataatatttggcttcccattgctctttggagttgtttattaaatatgtgtttttgacaacctcctcattagtttcttaaatgagtactggtttgtaaagaattatcaacattatccattccatttatgaagaagaggagaacagctaataaactgtattgtaaaatccatatgttaagtgtgtcttgaattttgaaagaaaaaatatattttgcaagctaacattttcttgaaacaatttgaggcatcatgtaacttataaccgaatccaagagccgttaggcagcagagtgtgttaccacattgaaatacacagtgctgctgttagactaaatgtcgtaggttgttaaccacatagaaacacactagtatgaagaaaactgttgtaaaatctcaagagcttcagaaactgccttacaagaccgcagcataagctattttgaagtatttaccaaatagtcacatgttgtaaaatatcaagtggttataaaaggatgccatttatatattaaaatttacataacattgttttctgga

SEQ ID NO: 301207 - protein, 370 aa, Artificial Sequence
  derived and/or modified sequence
MPVRKQDTQRALHLLEEYRSKLSQTEDRQLRSSIERVINIFQSNLFQALIDIQEFYEVTLLDNPKCIDRSKPSEPIQPVNTWEISSLPSSTVTSETLPSSLSPSVEKYRYQDEDTPPQEHISPQITNEVIGPELVHVSEKNLSEIENVHGFVSHSHISPIKVNGTDADYEYEEITLERGNSGLGFSIAGGTDNPHIGDDSSIFITKIITGGAAAQDGRLRVNDCILRVNEVDVRDVTHSKAVEALKEAGSIVRLYVKRRKPVSEKIMEIKLIKGPKGLGFSIAGGVGNQHIPGDNSIYVTKIIEGGAAHKDGKLQIGDKLLAVNNVCLEEVTHEEAVTALKNTSDFVYLKVAKPTSMYMNDGYAPPDITN

SEQ ID NO: 301208 - protein, 871 aa, Artificial Sequence
  derived and/or modified sequence
MPVRKQDTQRALHLLEEYRSKLSQTEDRQLRSSIERVINIFQSNLFQALIDIQEFYEVTLLDNPKCIDRSKPSEPIQPVNTWEISSLPSSTVTSETLPSSLSPSVEKYRYQDEDTPPQEHISPQITNEVIGPELVHVSEKNLSEIENVHGFVSHSHISPIKANPPPVLVNTDSLETPTYVNGTDADYEYEEITLERGNSGLGFSIAGGTDNPHIGDDSSIFITKIITGGAAAQDGRLRVNDCILRVNEVDVRDVTHSKAVEALKEAGSIVRLYVKRRKPVSEKIMEIKLIKGPKGLGFSIAGGVGNQHIPGDNSIYVTKIIEGGAAHKDGKLQIGDKLLAVNNVCLEEVTHEEAVTALKNTSDFVYLKVAKPTSMYMNDGYAPPDITNSSSQPVDNHVSPSSFLGQTPASPARYSPVSKAVLGDDEITREPRKVVLHRGSTGLGFNIVGGEDGEGIFISFILAGGPADLSGELRKGDRIISVNSVDLRAASHEQAAAALKNAGQAVTIVAQYRPEEYSRFEAKIHDLREQMMNSSISSGSGSLRTSQKRSLYVRALFDYDKTKDSGLPSQGLNFKFGDILHVINASDDEWWQARQVTPDGESDEVGVIPSKRRVEKKERARLKTVKFNSKTRDKGEIPDDMGSKGLKHVTSNASDSESSYRGQEEYVLSYEPVNQQEVNYTRPVIILGPMKDRINDDLISEFPDKFGSCVPHTTRPKRDYEVDGRDYHFVTSREQMEKDIQEHKFIEAGQYNNHLYGTSVQSVREVAEKGKHCILDVSGNAIKRLQIAQLYPISIFIKPKSMENIMEMNKRLTEEQARKTFERAMKLEQEFTEHFTAIVQGDTLEDIYNQVKQIIEEQSGSYIWVPAKEKL

SEQ ID NO: 301209 - DNA, 2616 bp, Artificial Sequence
  derived and/or modified sequence
atgcccgtgcgaaagcaggacacacaaagagccctccatctcttagaagagtatcgatccaaattgagtcagaccgaggaccgacagctaaggtcttccatagagcgagttatcaatatctttcagtctaacctattccaggctcttatagacatccaggaattctatgaagttaccctgctcgataaccccaagtgcattgatcggtcaaagccttcggagccaattcaacccgttaatacctgggagatttcctctctcccaagttccaccgtaacgagcgagacactcccatcctctctctctccaagcgtcgagaagtatagatatcaggatgaagacactcccccacaggagcacatttccccccagattactaacgaggtcattgggcctgagctcgtgcacgtgagcgagaagaatctcagtgagatagaaaatgtccacgggttcgtcagccactcacatatcagcccaatcaaagcaaatcctccaccagtgctggttaacacagactccttagagaccccaacgtacgtcaacggtactgacgcagactacgaatatgaggaaatcacccttgaacggggaaacagtgggttaggcttctcgatcgcagggggtacagacaacccacatattggggatgatagttcaatatttatcaccaaaattatcacagggggcgccgcagcccaagacggccgccttcgggtcaacgactgcattctgcgagttaacgaggtggacgtaagggacgtgacccactctaaggccgttgaggccctcaaggaggccgggtcaattgtgagactttatgtcaaaagacggaagccagtgtccgagaagattatggaaataaaacttataaagggaccaaaaggcctgggtttttccattgccggcggcgttggaaaccaacacataccaggcgataacagtatttatgtgaccaaaatcattgaagggggcgcagcacacaaagatggcaaattacagataggcgacaaactactggctgtgaataatgtatgtctggaggaggtgacccatgaggaggccgtgactgctttgaagaacacatccgacttcgtctatctgaaagttgccaagcctaccagtatgtacatgaacgacgggtatgcccctcctgacattacgaacagttcaagtcagcccgtggataatcatgtgagtccaagctcattcttgggacagaccccagctagcccagccagatattccccggtgagtaaagccgtgctaggagatgatgagatcacccgggagcctaggaaagttgtgttacaccgcggttctactgggcttggcttcaacattgtcgggggtgaggacggggagggcatctttatctcctttattctggccgggggaccggctgatctgagcggtgagctcagaaagggcgaccgcatcatctctgttaactcagtggatctccgcgctgcttcacatgaacaagctgcagcagcgctcaagaacgcaggccaggccgtgaccatcgtggcacagtataggccagaggagtattcccgattcgaggctaagatacatgatctgcgcgaacaaatgatgaactcctcgatatcgagcgggagcggtagtttgcgaacaagccagaaaaggtcgttgtacgtacgggccttattcgactacgataaaaccaaggattccggcctgccaagccagggccttaattttaaatttggggacatcctacacgtcatcaatgcttcagacgatgagtggtggcaggcgcgccaagtgaccccagacggagagagcgatgaggtgggagtgatccctagtaaacggcgcgtggagaagaaggaaagagcccggttgaagacagtgaagttcaacagcaaaacccgcgataagggtgagattccagacgacatgggctccaaagggctgaagcatgttactagcaacgctagcgatagcgaatcatcctataggggccaggaagaatacgtgctcagttacgagccggtcaaccagcaggaagtgaattatacaagacctgttatcattctgggacctatgaaagacagaattaacgatgatctgatcagcgagtttcccgacaaatttggcagctgtgttccccatacaactcgccctaaacgcgattatgaggtggacggtagagattaccattttgtaacatcccgtgaacaaatggaaaaagacattcaagaacataaattcattgaggccgggcaatacaataatcacctgtatgggacttccgtgcaatctgtgcgtgaggtggcagagaagggtaaacactgtattctggacgtgtcgggcaatgccattaagcggctgcagatcgctcagctgtatcctatcagcatatttatcaaacccaagtccatggaaaatataatggaaatgaataaacgcctgaccgaggaacaggcgcgcaaaacattcgagcgggccatgaagctggagcaggaatttacagaacactttactgctatagtgcagggggatacattggaagacatttataatcaggtcaaacagattatcgaagagcagagtggcagctacatctgggtccctgctaaagagaagctttag

SEQ ID NO: 301210 - DNA, 2616 bp, Artificial Sequence
  derived and/or modified sequence
atgcctgtgaggaagcaggacacccagagggccctgcacctgctggaggagtaccgcagcaagctgagccagacagaggaccggcagctgcggagcagcattgaaagagtcatcaacatcttccagagcaacctcttccaggccctgattgacatccaggagttctatgaggtgaccctgctggacaaccccaagtgcatcgacaggagcaagcccagcgagcccatccagcctgtgaacacctgggagatcagcagcctgcccagcagcacagtgaccagcgagaccctgcccagcagcctgagccccagcgtggagaagtaccgctaccaggatgaggacaccccaccccaggagcacatcagcccccagatcaccaatgaagtcatcggccctgagctggtgcacgtgtctgagaagaacctgtctgaaattgaaaatgtgcacggctttgtgagccacagccacatcagccccatcaaggccaaccccccacctgtgctggtgaacacagacagcctggagacccccacctacgtgaatggaacagatgctgactatgaatatgaggagatcaccctggagcggggcaacagcggcctgggcttcagcattgctgggggcacagacaacccccacatcggagatgacagcagcatcttcatcaccaagatcatcactggaggagctgctgcccaggacggccgcctgcgggtgaatgactgcatcctgcgggtgaatgaggtggatgtgagagatgtgacccacagcaaggctgtggaggccctgaaggaggccggcagcatcgtgcggctgtatgtgaagaggaggaagcctgtgtctgagaagatcatggagatcaagctgatcaagggccccaagggcctgggcttcagcattgctggaggagtgggcaaccagcacatccctggggacaacagcatctacgtgaccaagatcattgaaggaggagctgcccacaaggatggcaagctgcagatcggggacaagctgctggccgtgaacaacgtgtgcctggaggaggtgacccatgaggaggccgtgacagccctgaagaacaccagtgactttgtgtacctgaaggtggccaagcccacctccatgtacatgaatgatggctacgcccccccagacatcaccaacagcagcagccagcctgtggacaaccacgtgagccccagcagcttcctgggccagaccccagccagccctgcccgctacagccctgtgtccaaggctgtgctgggagatgatgagatcacccgggagcccaggaaggtggtgctgcaccggggcagcacaggcctgggcttcaacatcgtgggcggagaagatggagagggcatcttcatctccttcatcctggccggcggccctgctgacctgagcggggagctgaggaaaggagaccgcatcatctctgtgaacagcgtggacctgcgggccgccagccatgagcaggccgctgctgccctgaagaatgccggccaggccgtgaccatcgtggcccagtacagacctgaggagtacagcagatttgaggccaagatccatgacctgcgggagcagatgatgaacagcagcatcagcagcggcagcggcagcctgcggaccagccagaagaggagcctgtatgtgcgggccctgtttgattatgacaagaccaaggacagcggcctgcccagccagggcctgaacttcaagtttggagacatcctgcacgtgatcaatgccagtgatgatgagtggtggcaggcccggcaggtgaccccagatggagagagtgatgaggtgggcgtcatccccagcaagagaagagtggagaagaaggagcgggcccggctgaagacagtgaagttcaacagcaagacccgggacaagggggagatcccagatgacatgggcagcaagggcctgaagcacgtgaccagcaatgccagtgacagcgagagcagctaccggggccaggaggagtatgtgctgtcctatgagcctgtgaaccagcaggaggtgaactacaccaggcctgtgatcatcctgggccccatgaaggaccgcatcaatgatgacctgatcagcgagttcccagacaagtttggcagctgtgtgccccacaccacccggcccaagagggactatgaggtggatggccgggactaccactttgtgaccagccgggagcagatggagaaggacatccaggagcacaagttcatcgaggccggccagtacaacaaccacctgtatggcacctctgtgcagagcgtgcgggaggtggccgagaagggcaagcactgcatcctggatgtgtctggaaatgccatcaagaggctgcagatcgcccagctgtaccccatcagcatcttcatcaagcccaagtccatggagaacatcatggagatgaacaagaggctgacagaggagcaggccaggaagacctttgagcgggccatgaagctggagcaggagttcacagagcacttcaccgccatcgtgcagggcgacaccctggaggacatctacaaccaggtgaagcagatcatcgaggagcagagcggcagctacatctgggtgcctgccaaggagaagctgtag

SEQ ID NO: 301211 - DNA, 2616 bp, Artificial Sequence
  derived and/or modified sequence
atgcccgtgcggaagcaggacacccagcgggccctgcacctgctggaggagtacaggtctaagctgtcccagactgaggataggcaactgcggagtagcatagaaagagttatcaatatctttcagtccaatttgttccaagcccttatcgatatccaggaattttacgaagtaaccctcctcgataacccaaaatgcattgatcggtcaaagcccagcgaacctatccaacctgtgaacacatgggagatatcatctctcccttcctctactgtcacctccgagacactgccgtcaagcctgtcaccatctgtagagaagtataggtatcaggatgaagacacccctccgcaggagcatatctctccccagatcaccaacgaggtcattggaccggagcttgtacacgtatccgaaaaaaatttatccgagatcgagaatgtgcacgggttcgtctctcactctcatattagccctattaaagccaatccccctcctgtgctcgtcaacacagactcgctcgagactccaacatatgtgaatggcactgatgccgattacgagtacgaggagattacgctggaacgcggtaattctggcctgggcttttccatcgccggaggaacggacaatccgcatatcggcgatgatagctccattttcatcactaaaattattacaggtggggctgcagcccaagacggtaggctgagggtgaacgattgtatcttaagggtgaacgaagtggacgtgcgcgacgttacccactccaaagcggtggaggctctaaaggaagccggatcaatcgtgaggttgtatgttaaacgtcgcaagccggtcagcgagaagattatggaaatcaaattgattaaaggccctaagggacttgggttctccatcgccggcggggttggcaaccagcatattccaggtgataactctatctacgtgaccaaaattatcgaaggcggggctgcgcacaaggatggaaaacttcagatcggcgacaaacttcttgctgtgaacaatgtttgtctggaggaagtgactcacgaggaggccgtaacagccctcaaaaatacgtccgacttcgtctacctgaaggtcgccaagcctacgagcatgtacatgaatgatggatatgcccccccagacatcacaaacagcagctctcagccagtcgataatcatgtttcgccctcgtcattcctgggccagacgcccgccagccccgctagatactcacctgtgtccaaggccgtactgggggacgatgaaattacacgcgaacctcgtaaggtggtgctgcatcgaggctccactggactgggtttcaacatcgtgggaggcgaagacggcgaggggatctttatttccttcattctggccgggggaccagccgacttgagtggagaactgaggaagggggaccgcatcatatctgttaattcagtcgatttacgtgctgctagtcacgaacaggcagctgccgccttaaagaacgccggacaggcagtgaccatagtagctcagtaccgacctgaggagtacagtcggttcgaggctaaaattcacgacctgagggaacagatgatgaactcgagcatcagtagcggctctgggtcactgcgtacgtcacagaagcggagcctatacgttagagcgctgtttgattatgataagacaaaggattccgggctgccgagtcaaggacttaattttaaatttggagatatccttcatgtcatcaacgcttctgacgatgagtggtggcaggcccggcaggtaacaccggacggagagagcgacgaggtcggtgtcatcccctcgaaaaggcgagtcgagaagaaagagcgcgctcggctgaagacagtcaaatttaactccaagacccgggacaaaggcgagattcccgacgacatggggagcaagggcctgaaacacgtcacgtccaacgcgtcagacagtgaatcctcttaccgcggccaggaagaatatgtcctatcctacgagcccgtcaatcaacaggaagtcaattatactcgcccagtgattattttaggacctatgaaggatagaatcaacgatgacctgatatccgaatttcccgacaaattcggaagttgcgttccacacaccacgcgtcctaagcgagattatgaagttgacggacgcgattatcatttcgtgacctctcgggagcagatggaaaaagatatacaggagcataaatttattgaagcaggtcagtacaacaaccacctgtacggcacaagcgtgcagtcggtcagggaggtggcagagaaggggaaacactgtattctcgatgtatccggaaatgcaattaagcgccttcagatcgctcagctgtaccccatttcaatatttatcaagccgaaatctatggagaacatcatggagatgaataagcggcttactgaggagcaagctcgcaagactttcgagcgggctatgaagcttgaacaagagtttactgaacactttactgccatagtgcaaggagacacactggaggatatttacaaccaggtgaagcagataatagaggagcagtctggaagttatatttgggtgccggctaaagaaaaactgtag

SEQ ID NO: 301212 - DNA, 2616 bp, Artificial Sequence
  derived and/or modified sequence
atgcctgttcgcaagcaagacacacagagagctctgcatctgcttgaagaatatcgcagcaagctctcgcagactgaagaccggcagctcagatcttccatcgaacgggtcatcaatatcttccaaagcaacctttttcaggctctgatcgacattcaggaattctatgaagtgacactactggacaatccgaaatgtatagaccgcagcaagccttctgagccgatccagcctgtcaatacctgggagataagcagcctgcccagtagcacagtcaccagtgaaaccctgccatcatcccttagccccagtgtcgagaaatataggtatcaagatgaagacaccccccctcaagagcatatcagcccgcagatcacaaacgaagtgatagggccagaactggtacacgtgagtgagaaaaacctcagtgaaatcgaaaacgtacacgggttcgtttcgcacagtcatatctctcccattaaagccaatccgcctccggttttggtaaataccgactccctcgagacacctacgtatgttaatggtaccgatgccgactatgaatacgaagagataactctcgagaggggcaatagtggacttggcttctcaatcgctggcggaaccgataacccgcatatcggcgacgattctagtatctttatcaccaagatcattacagggggtgccgcagcgcaggacgggcgactgagggttaacgactgcatacttagggtgaacgaagtggacgttagagatgtgactcattctaaggcagtcgaagccctcaaagaagcaggctccattgtccggttgtatgtgaagcggaggaagccagtatccgaaaagattatggagatcaagctgatcaagggtcccaagggtctgggtttcagcatagccggaggagtggggaatcagcacattcctggggacaattctatctatgtgaccaaaatcatagagggaggagcagctcataaggatggaaaactgcagattggcgacaaactgctcgcagtaaacaatgtgtgtcttgaagaggtgacccacgaagaggcagtcaccgcattgaaaaacacaagcgatttcgtctatctgaaggtggccaaaccgaccagtatgtacatgaacgacgggtatgcccctccagacataaccaactctagtagccagcccgttgataaccacgtatcaccgtcctcattcctgggtcagacaccagcaagccccgcacgatacagcccagtgtcaaaggctgtcctcggcgatgatgagatcacgagagagcctcgtaaggtggtgctacaccgtggatctacgggcttaggcttcaatatcgtgggaggggaggacggagagggcatattcatcagttttatactggctgggggaccagctgatctgagtggcgaactgagaaaaggagacagaattataagtgtgaattccgtcgatctcagggctgctagccatgagcaggctgcagcagcactcaaaaatgccggacaggcggtgactattgtagctcagtacagacccgaagaatatagtcgctttgaggcaaaaatccacgacctacgggaacaaatgatgaactcctcaatctcttcaggttcagggtctctgaggacttcccaaaagagatctctctacgtcagggcactcttcgattatgacaagactaaggacagtggccttcccagccaggggctgaacttcaagttcggtgatatcctccatgtcattaatgcctctgacgacgagtggtggcaggcgagacaagtcacacccgatggcgagtccgatgaggtgggggtgattccttcaaagcgtcgcgtcgagaagaaagagagggctaggcttaaaactgtcaagtttaacagtaagaccagggacaaaggggagatcccggatgacatgggaagcaaaggcctgaagcatgtgactagtaacgctagcgactccgaatccagctaccgcggacaggaggagtacgtgctgtcttatgaacctgtgaaccaacaggaagtgaactatacccgccctgtcataatcctgggcccaatgaaggataggattaacgatgacctgatatcggagttccccgacaaattcggcagctgtgtaccccacaccacgaggcctaagagagattatgaggtggacggcagggattaccatttcgtcactagcagagaacagatggagaaagatatccaagaacataagtttatagaggccggacagtacaacaatcatttgtatgggacgtctgtacagagcgtgcgggaggtggccgagaaaggaaagcattgcattctggacgtgagcggcaatgctatcaagaggttgcagattgcgcagctgtatcctatttccatctttatcaagccaaagtctatggaaaacatcatggagatgaataagagactcacggaggaacaagcccgtaagacttttgagcgggctatgaagttagagcaagagttcacggagcactttacagccattgttcaaggtgataccctcgaggatatatataatcaggtcaagcaaatcattgaagagcagtctggctcttacatttgggtgcctgccaaagagaaactttag

SEQ ID NO: 301213 - DNA, 2616 bp, Artificial Sequence
  derived and/or modified sequence
atgcccgtgagaaagcaggacacccagagagccctgcacctgctggaggagtacagaagcaagctgagccagaccgaggacagacagctgagaagcagcatcgagagagtgatcaacatcttccagagcaacctgttccaggccctgatcgacatccaggagttctacgaggtgaccctgctggacaaccccaagtgcatcgacagaagcaagcccagcgagcccatccagcccgtgaacacctgggagatcagcagcctgcccagcagcaccgtgaccagcgagaccctgcccagcagcctgagccccagcgtggagaagtacagataccaggacgaggacacccccccccaggagcacatcagcccccagatcaccaacgaggtgatcggccccgagctggtgcacgtgagcgagaagaacctgagcgagatcgagaacgtgcacggcttcgtgagccacagccacatcagccccatcaaggccaaccccccccccgtgctggtgaacaccgacagcctggagacccccacctacgtgaacggcaccgacgccgactacgagtacgaggagatcaccctggagagaggcaacagcggcctgggcttcagcatcgccggcggcaccgacaacccccacatcggcgacgacagcagcatcttcatcaccaagatcatcaccggcggcgccgccgcccaggacggcagactgagagtgaacgactgcatcctgagagtgaacgaggtggacgtgagagacgtgacccacagcaaggccgtggaggccctgaaggaggccggcagcatcgtgagactgtacgtgaagagaagaaagcccgtgagcgagaagatcatggagatcaagctgatcaagggccccaagggcctgggcttcagcatcgccggcggcgtgggcaaccagcacatccccggcgacaacagcatctacgtgaccaagatcatcgagggcggcgccgcccacaaggacggcaagctgcagatcggcgacaagctgctggccgtgaacaacgtgtgcctggaggaggtgacccacgaggaggccgtgaccgccctgaagaacaccagcgacttcgtgtacctgaaggtggccaagcccaccagcatgtacatgaacgacggctacgccccccccgacatcaccaacagcagcagccagcccgtggacaaccacgtgagccccagcagcttcctgggccagacccccgccagccccgccagatacagccccgtgagcaaggccgtgctgggcgacgacgagatcaccagagagcccagaaaggtggtgctgcacagaggcagcaccggcctgggcttcaacatcgtgggcggcgaggacggcgagggcatcttcatcagcttcatcctggccggcggccccgccgacctgagcggcgagctgagaaagggcgacagaatcatcagcgtgaacagcgtggacctgagagccgccagccacgagcaggccgccgccgccctgaagaacgccggccaggccgtgaccatcgtggcccagtacagacccgaggagtacagcagattcgaggccaagatccacgacctgagagagcagatgatgaacagcagcatcagcagcggcagcggcagcctgagaaccagccagaagagaagcctgtacgtgagagccctgttcgactacgacaagaccaaggacagcggcctgcccagccagggcctgaacttcaagttcggcgacatcctgcacgtgatcaacgccagcgacgacgagtggtggcaggccagacaggtgacccccgacggcgagagcgacgaggtgggcgtgatccccagcaagagaagagtggagaagaaggagagagccagactgaagaccgtgaagttcaacagcaagaccagagacaagggcgagatccccgacgacatgggcagcaagggcctgaagcacgtgaccagcaacgccagcgacagcgagagcagctacagaggccaggaggagtacgtgctgagctacgagcccgtgaaccagcaggaggtgaactacaccagacccgtgatcatcctgggccccatgaaggacagaatcaacgacgacctgatcagcgagttccccgacaagttcggcagctgcgtgccccacaccaccagacccaagagagactacgaggtggacggcagagactaccacttcgtgaccagcagagagcagatggagaaggacatccaggagcacaagttcatcgaggccggccagtacaacaaccacctgtacggcaccagcgtgcagagcgtgagagaggtggccgagaagggcaagcactgcatcctggacgtgagcggcaacgccatcaagagactgcagatcgcccagctgtaccccatcagcatcttcatcaagcccaagagcatggagaacatcatggagatgaacaagagactgaccgaggagcaggccagaaagaccttcgagagagccatgaagctggagcaggagttcaccgagcacttcaccgccatcgtgcagggcgacaccctggaggacatctacaaccaggtgaagcagatcatcgaggagcagagcggcagctacatctgggtgcccgccaaggagaagctgtag

SEQ ID NO: 301214 - DNA, 2690 bp, Artificial Sequence
  derived and/or modified sequence
ggcggaaagtttcgggggagagcggttgggggcgcggaaggaggtgtgtgccctcttcctgattctggagaaaaatgccggtccggaagcaagatacccagagagcattgcaccttttggaggaatatcgttcaaaactaagccaaactgaagacagacagctcagaagttccatagaacgggttattaacatatttcagagcaacctctttcaggctttaatagatattcaagaattttatgaagtgaccttactggataatccaaaatgtatagatcgttcaaagccgtctgaaccaattcaacctgtgaatacttgggagatttccagccttccaagctctactgtgacttcagagacactgccaagcagccttagccctagtgtagagaaatacaggtatcaggatgaagatacacctcctcaagagcatatttccccacaaatcacaaatgaagtgataggtccagaattggttcatgtctcagagaagaacttatcagagattgagaatgtccatggatttgtttctcattctcatatttcaccaataaaggcaaatcctcccccagtactggtcaacacagatagcttggaaacaccaacttacgttaatggcacagatgcagattatgaatatgaagaaatcacacttgaaaggggaaattcagggcttggtttcagcattgcaggaggtacggacaacccacacattggagatgactcaagtattttcattaccaaaattatcacagggggagcagccgcccaagatggaagattgcgggtcaatgactgtatattacgagtaaatgaagtagatgttcgtgatgtaacacatagcaaagcagttgaagcgttgaaagaagcagggtctattgtacgcttgtatgtaaaaagaaggaaaccagtgtcagaaaaaataatggaaataaagctcattaaaggtcctaaaggtcttgggtttagcattgctggaggtgttggaaatcagcatattcctggggataatagcatctatgtaaccaaaataattgaaggaggtgcagcacataaggatggcaaacttcagattggagataaacttttagcagtgaataacgtatgtttagaagaagttactcatgaagaagcagtaactgccttaaagaacacatctgattttgtttatttgaaagtggcaaaacccacaagtatgtatatgaatgatggctatgcaccacctgatatcaccaactcttcttctcagcctgttgataaccatgttagcccatcttccttcttgggccagacaccagcatctccagccagatactccccagtttctaaagcagtacttggagatgatgaaattacaagggaacctagaaaagttgttcttcatcgtggctcaacgggccttggtttcaacattgtaggaggagaagatggagaaggaatatttatttcctttatcttagccggaggacctgctgatctaagtggagagctcagaaaaggagatcgtattatatcggtaaacagtgttgacctcagagctgctagtcatgagcaggcagcagctgcattgaaaaatgctggccaggctgtcacaattgttgcacaatatcgacctgaagaatacagtcgttttgaagctaaaatacatgatttacgggagcagatgatgaatagtagtattagttcagggtcaggttctcttcgaactagccagaagcgatccctctatgtcagagccctttttgattatgacaagactaaagacagtgggcttcccagtcagggactgaacttcaaatttggagatatcctccatgttattaatgcttctgatgatgaatggtggcaagccaggcaggttacaccagatggtgagagcgatgaggtcggagtgattcccagtaaacgcagagttgagaagaaagaacgagcccgattaaaaacagtgaaattcaattctaaaacgagagataaaggggagatccctgacgacatgggatcaaaaggcctgaagcatgtaacttctaatgccagcgatagtgaaagtagttaccgtggtcaagaagaatacgtcttatcttatgaaccagtgaatcaacaagaagttaattatactcgaccagtgatcatattgggacctatgaaagacaggataaatgatgacttgatctcagaatttcctgacaaatttggatcctgtgttcctcatacaactagaccaaaacgagattatgaggtagatggaagagattatcattttgtgacttcaagagagcagatggaaaaagatatccaggaacataaattcattgaagctggccagtataacaatcatctatatggaacaagtgttcagtctgtacgagaagtagcagaaaagggcaaacactgtatccttgatgtgtctggaaatgccataaagagattacagattgcacagctttaccctatctccatttttattaaacccaaatccatggaaaatatcatggaaatgaataagcgtctaacagaagaacaagccagaaaaacatttgagagagccatgaaactggaacaggagtttactgaacatttcacagctattgtacagggggatacgctggaagacatttacaaccaagtgaaacagatcatagaagaacaatctggttcttacatctgggttccggcaaaagaaaagctatga

SEQ ID NO: 301215 - protein, 853 aa, Artificial Sequence
  derived and/or modified sequence
MPVRKQDTQRALHLLEEYRSKLSQTEDRQLRSSIERVINIFQSNLFQALIDIQEFYEVTLLDNPKCIDRSKPSEPIQPVNTWEISSLPSSTVTSETLPSSLSPSVEKYRYQDEDTPPQEHISPQITNEVIGPELVHVSEKNLSEIENVHGFVSHSHISPIKVNGTDADYEYEEITLERGNSGLGFSIAGGTDNPHIGDDSSIFITKIITGGAAAQDGRLRVNDCILRVNEVDVRDVTHSKAVEALKEAGSIVRLYVKRRKPVSEKIMEIKLIKGPKGLGFSIAGGVGNQHIPGDNSIYVTKIIEGGAAHKDGKLQIGDKLLAVNNVCLEEVTHEEAVTALKNTSDFVYLKVAKPTSMYMNDGYAPPDITNSSSQPVDNHVSPSSFLGQTPASPARYSPVSKAVLGDDEITREPRKVVLHRGSTGLGFNIVGGEDGEGIFISFILAGGPADLSGELRKGDRIISVNSVDLRAASHEQAAAALKNAGQAVTIVAQYRPEEYSRFEAKIHDLREQMMNSSISSGSGSLRTSQKRSLYVRALFDYDKTKDSGLPSQGLNFKFGDILHVINASDDEWWQARQVTPDGESDEVGVIPSKRRVEKKERARLKTVKFNSKTRDKGEIPDDMGSKGLKHVTSNASDSESSYRGQEEYVLSYEPVNQQEVNYTRPVIILGPMKDRINDDLISEFPDKFGSCVPHTTRPKRDYEVDGRDYHFVTSREQMEKDIQEHKFIEAGQYNNHLYGTSVQSVREVAEKGKHCILDVSGNAIKRLQIAQLYPISIFIKPKSMENIMEMNKRLTEEQARKTFERAMKLEQEFTEHFTAIVQGDTLEDIYNQVKQIIEEQSGSYIWVPAKEKL

SEQ ID NO: 301216 - DNA, 2562 bp, Artificial Sequence
  derived and/or modified sequence
atgccagttcgtaagcaggacactcagagagcactgcatcttctagaagaataccgatcaaagctctcacagactgaggacagacagctgaggagttccattgaacgggtaattaatatcttccaatccaaccttttccaagctttaatagatattcaagagttttatgaagtgacactcctcgataaccccaagtgcatagatcgctccaaaccgtctgaacccatccagccagtgaatacgtgggaaataagctcgctaccatcctccaccgtaacttcggaaacgctgccaagctcattgagcccatccgtggagaagtatcggtatcaggacgaggacaccccccctcaagagcacatctccccccaaatcaccaacgaggtgatcggccccgagctggtccatgtgtccgaaaaaaatctgtcggaaattgaaaatgtgcacggcttcgtctcccattcacacatcagccctatcaaggtgaacggcaccgatgcagactatgaatatgaagagataacgctcgagagagggaattctggactgggatttagtattgcagggggaactgataaccctcacatcggagatgactcctctatcttcataaccaaaatcattacgggaggagccgccgcgcaggatgggaggctccgcgtgaacgattgcatccttcgggttaacgaagttgacgtccgggacgttacacatagcaaggccgtggaggctttgaaggaagcagggtctatcgtgagactgtacgtgaagagacggaagcctgtatctgaaaagatcatggaaatcaagctcattaaggggcccaaagggttagggttctccattgccggtggggtgggtaatcagcacatacccggagataattctatctatgtcactaagataatcgaaggtggagccgcgcacaaggatggtaaattgcaaataggcgacaagttgcttgccgtgaataatgtgtgtcttgaggaggtcactcacgaggaagccgtaaccgcactcaaaaatacttcagatttcgtgtatcttaaggtggccaagccaacgtctatgtacatgaacgacggatatgccccacctgacatcacaaattcttcatcccagcccgtggacaatcacgtgtctccctcgtccttcctagggcaaacccctgcatcgccagcgcgatactcacccgtgtcgaaggccgtgcttggggatgatgagattacgagggagccccgaaaggtggttctccatagagggtccaccggcctcggtttcaacattgtcgggggagaggatggagaaggcatttttattagtttcatcttagccggcggtcctgccgatctgtcaggcgaactgagaaaaggcgatagaatcatcagcgtgaactctgtggatctgcgtgcagcaagtcacgaacaggccgcagccgcgctcaaaaatgccggccaggccgtgacaattgtcgcccaatataggcctgaagaatattcccggtttgaggcaaagatacacgatctgagagagcagatgatgaactcttctatttcatctggtagcggatcactgcgtaccagccagaagcggtctctctatgtccgtgctttgttcgactatgacaagactaaagatagtggcctgccctcccagggcctgaattttaagttcggcgatattcttcacgttataaatgctagcgacgacgaatggtggcaggcaaggcaagtgacacctgacggtgagagtgacgaggtcggagtcatcccctcaaagcgaagggttgagaagaaggagcgtgcacggctcaagaccgtgaagtttaacagtaagacacgggacaagggagagatccctgacgacatgggaagcaaaggccttaagcatgtgaccagcaacgccagtgattctgagtcttcctacaggggccaggaagaatacgtcctgtcttacgagcctgttaatcagcaagaagtgaactacacccgtcctgtcattatacttggcccaatgaaggaccgcataaacgatgatctgatctcggagtttcctgataagttcggcagctgtgtgccccacacaactagaccgaagcgcgattacgaagtggacggtagggactaccattttgttaccagtagggaacagatggagaaagacattcaggagcacaagttcatcgaggccgggcaatataataatcacctttatggaactagcgttcagtcggtccgggaggtggcggagaagggcaaacactgtatcttggacgtgagtgggaatgcgataaaaagactccaaatcgcccaactgtacccaatttcgatcttcattaaacctaagtcaatggagaatattatggaaatgaataaacggctgaccgaggaacaggcacggaagaccttcgaacgagctatgaaactggaacaggagtttacagagcattttaccgcgatcgtccagggagatacactcgaggacatttacaaccaggtgaaacagatcatcgaggaacaatctggaagctacatttgggttcccgctaaagaaaaactctag

SEQ ID NO: 301217 - DNA, 2562 bp, Artificial Sequence
  derived and/or modified sequence
atgcccgtgcgtaaacaggacacccagagagccctacacctgctggaggaataccggagcaagttgagccagactgaagacaggcaactgagatcctccatagagcgagtcatcaacatcttccagtcgaacttattccaagccctcatcgatatccaggaattttacgaggtgacattactcgacaatcccaagtgcatcgatcggtcaaagccctcagagccgatccaacctgtcaatacatgggaaataagctcgctgccctcttccaccgtgactagtgaaacactgcccagctctctctccccgtccgtggagaagtaccgataccaggacgaagacacacctccacaagaacacatcagtcctcaaattaccaacgaagtcattggcccagagcttgtgcacgtcagcgagaaaaacctgtcagagatcgaaaatgttcatggttttgtctctcatagtcacatttccccaataaaagtgaacggtaccgatgccgattacgagtacgaagaaatcacgttggaacggggaaacagtgggctcggcttctccatcgccgggggcactgacaatcctcacattggagatgattcttcaatcttcattactaagattataaccggcggcgcagcggcacaagacggtagacttcgtgttaacgattgcattctgagagtcaatgaggtagacgtgagggacgtgacacactccaaagcagtggaggccctaaaggaggccggctcgattgtcaggctgtacgtaaagcgccggaaacccgtaagcgaaaagatcatggaaataaagttaatcaaaggtccaaagggcctgggtttctccatcgcaggcggagttgggaaccaacatatcccaggtgacaacagtatctacgtgaccaagattatcgagggcggagctgcgcacaaagatggcaaattgcagattggggacaaactgctggccgtgaacaacgtgtgtcttgaagaagtgacccatgaagaagctgttacggctctgaagaatacctcagactttgtgtacttgaaagtcgctaagccaactagcatgtatatgaacgatggctatgctccgcctgatatcacaaatagttctagtcagcccgtggacaaccacgttagcccttcttcatttctcggacagacaccagcttctcccgctcgatactcccctgtgtccaaggctgtcttgggggacgacgagatcactagggagccccgaaaggtggtccttcaccgtggtagcaccggcctggggttcaacattgtggggggcgaagatggtgaggggatatttatcagctttatccttgctggtgggcccgccgacctgtctggagaacttaggaagggggaccggattattagcgtgaactctgtggacctgagggccgcctcccacgagcaggctgccgcggccctgaagaacgccggccaggctgtgaccatcgtagcccagtaccgccccgaggagtatagcaggttcgaagcaaagatccatgatttacgtgagcagatgatgaactcttcgatatcctccggaagcggctcactgcgaaccagccaaaagcgtagcctgtacgtgagagcccttttcgactacgataaaacaaaggattcaggactaccaagtcagggtctgaacttcaaattcggagacatcctccacgtaatcaacgccagcgatgatgagtggtggcaggctcggcaagtcaccccggatggcgaatctgacgaagtgggagtcattccaagcaaacggagagtggagaaaaaggaacgcgcccggctgaagactgtgaagttcaattctaagacaagagataagggtgagatcccagacgatatgggctctaaaggtcttaaacacgttacttccaatgcgagcgattccgaaagttcttatcggggtcaagaagaatatgtgctgagctatgaacctgtcaaccagcaagaggtcaattatacccgccccgtgatcatcctgggccccatgaaagataggataaacgatgacctcatcagtgaattcccagataagtttggcagctgtgtgcctcataccacacggccaaagcgtgattacgaggttgatggcagggactaccactttgtgacaagcagggagcagatggagaaagatattcaggaacataagttcatagaggcaggccagtataataatcacctgtacgggacatccgttcaaagcgtccgcgaggtagcagagaaggggaagcactgcatactggatgtgtcaggcaatgctattaaaaggctgcaaattgcccagctgtatcctattagtatttttatcaaacctaagagtatggagaacattatggagatgaataagcgtctgacggaggaacaggcccgcaagaccttcgagagagctatgaagctggagcaagagtttaccgagcacttcacggcaatcgtgcaaggggacacactggaggatatttataaccaggttaaacagattatcgaggagcagagtggaagctacatctgggtccccgcaaaggagaagctttag

SEQ ID NO: 301218 - DNA, 2562 bp, Artificial Sequence
  derived and/or modified sequence
atgcctgtgaggaagcaggacacccagagggccctgcacctgctggaggagtaccgcagcaagctgagccagacagaggaccggcagctgcggagcagcattgaaagagtcatcaacatcttccagagcaacctcttccaggccctgattgacatccaggagttctatgaggtgaccctgctggacaaccccaagtgcatcgacaggagcaagcccagcgagcccatccagcctgtgaacacctgggagatcagcagcctgcccagcagcacagtgaccagcgagaccctgcccagcagcctgagccccagcgtggagaagtaccgctaccaggatgaggacaccccaccccaggagcacatcagcccccagatcaccaatgaagtcatcggccctgagctggtgcacgtgtctgagaagaacctgtctgaaattgaaaatgtgcacggctttgtgagccacagccacatcagccccatcaaggtgaatggaacagatgctgactatgaatatgaggagatcaccctggagcggggcaacagcggcctgggcttcagcattgctgggggcacagacaacccccacatcggagatgacagcagcatcttcatcaccaagatcatcactggaggagctgctgcccaggacggccgcctgcgggtgaatgactgcatcctgcgggtgaatgaggtggatgtgagagatgtgacccacagcaaggctgtggaggccctgaaggaggccggcagcatcgtgcggctgtatgtgaagaggaggaagcctgtgtctgagaagatcatggagatcaagctgatcaagggccccaagggcctgggcttcagcattgctggaggagtgggcaaccagcacatccctggggacaacagcatctacgtgaccaagatcattgaaggaggagctgcccacaaggatggcaagctgcagatcggggacaagctgctggccgtgaacaacgtgtgcctggaggaggtgacccatgaggaggccgtgacagccctgaagaacaccagtgactttgtgtacctgaaggtggccaagcccacctccatgtacatgaatgatggctacgcccccccagacatcaccaacagcagcagccagcctgtggacaaccacgtgagccccagcagcttcctgggccagaccccagccagccctgcccgctacagccctgtgtccaaggctgtgctgggagatgatgagatcacccgggagcccaggaaggtggtgctgcaccggggcagcacaggcctgggcttcaacatcgtgggcggagaagatggagagggcatcttcatctccttcatcctggccggcggccctgctgacctgagcggggagctgaggaaaggagaccgcatcatctctgtgaacagcgtggacctgcgggccgccagccatgagcaggccgctgctgccctgaagaatgccggccaggccgtgaccatcgtggcccagtacagacctgaggagtacagcagatttgaggccaagatccatgacctgcgggagcagatgatgaacagcagcatcagcagcggcagcggcagcctgcggaccagccagaagaggagcctgtatgtgcgggccctgtttgattatgacaagaccaaggacagcggcctgcccagccagggcctgaacttcaagtttggagacatcctgcacgtgatcaatgccagtgatgatgagtggtggcaggcccggcaggtgaccccagatggagagagtgatgaggtgggcgtcatccccagcaagagaagagtggagaagaaggagcgggcccggctgaagacagtgaagttcaacagcaagacccgggacaagggggagatcccagatgacatgggcagcaagggcctgaagcacgtgaccagcaatgccagtgacagcgagagcagctaccggggccaggaggagtatgtgctgtcctatgagcctgtgaaccagcaggaggtgaactacaccaggcctgtgatcatcctgggccccatgaaggaccgcatcaatgatgacctgatcagcgagttcccagacaagtttggcagctgtgtgccccacaccacccggcccaagagggactatgaggtggatggccgggactaccactttgtgaccagccgggagcagatggagaaggacatccaggagcacaagttcatcgaggccggccagtacaacaaccacctgtatggcacctctgtgcagagcgtgcgggaggtggccgagaagggcaagcactgcatcctggatgtgtctggaaatgccatcaagaggctgcagatcgcccagctgtaccccatcagcatcttcatcaagcccaagtccatggagaacatcatggagatgaacaagaggctgacagaggagcaggccaggaagacctttgagcgggccatgaagctggagcaggagttcacagagcacttcaccgccatcgtgcagggcgacaccctggaggacatctacaaccaggtgaagcagatcatcgaggagcagagcggcagctacatctgggtgcctgccaaggagaagctgtag

SEQ ID NO: 301219 - DNA, 2562 bp, Artificial Sequence
  derived and/or modified sequence
atgcccgtgcggaagcaggacacccagcgggccctgcacctgctggaggaatataggagtaaactgtctcaaacagaggaccggcagctgagatctagcattgagagggtcatcaatatatttcagtccaacctgttccaggctctcatcgacattcaggaattttacgaagtgacacttctagataatccaaagtgtatcgatcgcagcaaaccttcggagcctatacagccggtgaacacctgggaaatctccagcctgccctcttcgactgttacttccgagaccctccctagctccctctcaccttctgtggagaagtacagataccaggatgaggataccccacctcaggaacacataagccctcagattaccaacgaggtcatcggaccagaactggttcatgtatcggaaaaaaacctttctgagatagaaaacgtgcatgggtttgtgtcccatagccatatctctcccatcaaagtgaacgggacagacgcagattatgaatacgaggagatcacactggagagagggaacagtgggctgggcttctctattgccggagggacagacaatccacacataggcgacgactcatcaatttttatcaccaaaataataaccggcggggctgcggcccaggacgggcgcctgcgagtcaacgattgcatcctccgagtgaacgaagtggacgtgcgcgacgtcacccattcaaaggcagtggaagccctgaaggaggccggcagcatcgtgcgtctgtacgtcaaacgccgcaaacccgtaagcgagaaaatcatggagattaagctcattaaagggccaaaggggctcgggttttctatcgctgggggcgtgggcaaccagcacattccaggggacaacagcatttacgtgacaaagattattgaaggcggtgccgcacataaggacggcaagctgcagatcggggacaagttgctcgccgtcaataatgtgtgtctcgaagaagtgacccacgaggaggccgtgacagctctcaagaacacctccgatttcgtgtacctgaaagtcgccaagcctacatctatgtacatgaacgacggctacgctcccccggatatcactaatagctcttctcagccagtagataatcacgtctcaccttccagctttctgggacaaactcccgcatcccctgctcgctacagcccggtgagcaaagccgtgctgggggacgacgaaattacccgggaaccacgtaaagtggtgctgcatagagggtcaacgggcctcggcttcaacatcgtggggggcgaggatggcgaggggatcttcatcagctttatcttggctgggggcccagcagacctatccggtgagctcagaaaaggggacagaatcattagcgtgaattcggtggacctaagagcggctagccacgagcaagccgcagccgcactgaaaaatgcagggcaagctgtcaccatcgttgcccaatatagaccagaagagtactcacggttcgaggctaaaattcacgacctgcgggaacaaatgatgaattcttctatttctagcggttccggctctttgaggacctcacagaagcgatcgctgtacgtcagggcccttttcgattatgataagactaaggactcgggcctgccctctcagggtctaaattttaaattcggagacatcctgcacgtgattaacgcttcggacgacgagtggtggcaagctagacaggtgactcccgatggtgaatcagatgaggtgggcgtaataccctctaaacggcgggtggagaagaaggaaagagcccgcctgaaaaccgtcaaatttaactccaagactagggataagggggaaatacctgatgacatgggtagtaaagggctgaaacacgtgacctctaatgcgtctgattcagagtccagctacagagggcaggaagagtacgtgctatcatacgagcctgtcaaccagcaggaagtcaattacactcgcccagtgatcatcctgggacctatgaaggatcgtattaacgacgatttaatctcggagttcccagacaaatttggttcctgtgtgccccataccactcggcccaagagagattatgaggtggatggacgtgactaccacttcgtgacgtctagggagcagatggagaaggacattcaggaacacaagttcatcgaagcagggcagtacaacaaccacctttacgggaccagcgtccagtctgttagagaggtagctgaaaagggcaagcactgcattttggacgtcagcggtaacgctatcaagcggttgcagatcgcccaactatatccaatctccatcttcatcaagcctaagtccatggaaaacatcatggagatgaataaacgacttacagaagagcaggcccgtaagacgtttgagagagccatgaagttggaacaggaatttactgagcattttactgcaatcgttcagggcgacactcttgaggacatctacaaccaggtgaagcagatcattgaagagcagtctggaagttacatttgggtaccagctaaagagaagctgtag

SEQ ID NO: 301220 - DNA, 2562 bp, Artificial Sequence
  derived and/or modified sequence
atgcccgtgcggaagcaggacacccagcgggccctgcacctgctggaagaataccgctccaagcttagccagacagaggacaggcagctacgatcatctatcgagcgcgtgataaacatctttcagagcaacctgttccaggccctgatcgacattcaggagttttacgaggttactcttctcgataatccgaagtgtatcgaccgttcaaagccatctgaacccatccagcccgtaaatacatgggagatctcgagcctgccttctagcacggttacatctgagaccctcccgtcaagcctgtccccaagcgtcgagaagtacaggtaccaggacgaagataccccgcctcaagaacatatcagtcctcaaatcacgaacgaagtaatcggccctgagctcgtacatgtaagcgaaaaaaaccttagcgagatagaaaacgtacacgggttcgtgtcccacagccacatctctcctatcaaagtgaacggcacagatgcggattacgagtatgaggagatcacgctggagaggggaaacagtggtctgggattcagtatagccggcggtacagacaatcctcacatcggcgatgatagctccatttttattactaagatcattactgggggagcagccgcccaagacggtagactccgggtgaatgattgcatcctgcgagtgaatgaagtggacgtgcgcgacgtgacccattcaaaggcagttgaggcgctgaaagaggccggttctattgtgcggctgtatgttaaacggcgcaagccggtgtccgagaagattatggagatcaagttaattaaaggccctaaaggtttgggattttccatcgcgggcggcgtcggcaaccaacacatccctggggataatagcatttatgtgactaagataatcgagggtggagccgcccacaaagacggcaaactgcagatcggcgataaacttcttgcagtgaacaatgtttgtctggaggaagtcacgcacgaggaggctgtgaccgccctgaaaaatacgagtgactttgtgtacctgaaggttgccaagccaacctccatgtacatgaacgacggctatgcacctcccgacatcaccaatagttcctcccaaccagtcgataaccacgtgagcccatcctctttcctcgggcagactcctgcgtctcccgcccgctattcaccagtgagcaaggcagttctgggagacgatgaaatcacgagggagcctcggaaggtggtcctgcaccgcgggagtacgggccttggcttcaatattgtaggcggggaggacggtgagggcatttttatcagtttcatcctggctggaggtcccgccgatctctctggagagctgagaaagggggatcgcatcatcagcgtgaactctgtggacttgcgtgctgcttctcacgagcaggcagcagcagctctgaagaacgccggacaggccgtcaccattgtggcccaataccgacccgaagaatactccaggttcgaggcaaaaatccatgacctgcgcgagcagatgatgaacagctcaatctctagtggctcgggaagcttaaggactagtcaaaagaggtctctctacgtgagggctctatttgactatgataagactaaggacagtggactgcctagccaaggactgaattttaagttcggggatatactccacgtgatcaatgcatctgatgatgagtggtggcaggcaagacaggtgacaccggacggcgaaagcgacgaggtaggagtgatcccttcaaaaagacgtgtagaaaagaaggaacgagctcgcctgaagaccgtgaagttcaattcgaagacccgtgacaaaggggagataccagacgacatgggctccaaagggctcaagcacgtaacaagcaatgcatctgattctgaaagttcctaccgaggacaggaggagtatgtgctttcctacgagccggtaaatcaacaggaagtgaactatactagaccagtaattatactgggtccaatgaaggatagaatcaacgatgatctaatttccgaattcccggacaagttcgggagctgcgtgccccataccacccgacctaagcgcgactacgaggtggatgggcgggattatcattttgtgacaagccgagaacaaatggaaaaggatatccaggagcacaaattcatcgaggccgggcagtataataaccacctgtatggcacatccgttcagtctgtgagggaagtggccgagaaaggcaaacactgtattcttgatgtatcaggcaatgcaattaagcggctccaaattgcgcagttgtaccccatctccatctttatcaagcctaaatccatggagaatataatggagatgaacaagcggctgactgaggaacaggcaagaaaaaccttcgaacgggccatgaagctcgagcaggagttcaccgagcactttactgcaatagtgcagggagatactttagaggatatatacaaccaggtgaagcagattattgaagagcaatccggcagttacatatgggtcccagccaaggaaaagctgtag

SEQ ID NO: 301221 - DNA, 2562 bp, Artificial Sequence
  derived and/or modified sequence
atgccagttcgcaaacaagatacccagagagcgctgcacctgctggaggagtacaggtccaaactgagccagacggaggacaggcagttgagaagctccatagaacgagttataaatatatttcagtcaaacctgttccaggctctcattgatatacaggagttctatgaggtcaccctgctggacaatcctaaatgcattgatcggtccaaaccaagtgaaccgatacagcctgtcaacacttgggaaatatccagcttaccatcatctactgtgaccagcgaaaccctccctagctctctgagcccgagcgtggagaagtacagatatcaggacgaagatactccccctcaagaacatatctcaccgcagattacaaatgaagtgatcgggcctgaactggtgcatgtttctgaaaagaacctttccgaaattgagaacgtgcatggatttgtatcccatagccacatctccccaatcaaagtgaacggcaccgacgccgactatgagtatgaggagattacactggagcgtggtaattctggcttaggcttctccatagcgggtgggaccgacaacccccacatcggtgacgactcctcgatattcatcaccaagattattaccggaggggcagcggctcaagatgggagactcagggtcaacgattgtatcctgcgggtcaatgaagttgatgttagggacgtcacacattctaaagctgtggaagctctgaaagaagccggttccatcgtgagactttacgttaagaggaggaaaccagtgagcgagaaaatcatggaaatcaagttaattaaaggacctaaaggattgggattcagtattgcagggggtgtgggcaatcagcatattcctggagacaacagtatctacgtaactaaaatcatagaaggcggtgctgcgcataaggacggaaagctccagattggcgacaaactgttggcagttaacaatgtatgtctggaggaggtgacccatgaggaggctgttactgccttaaaaaacacttccgactttgtgtatttgaaagtcgcaaagccaacctccatgtatatgaatgatggatatgcgcctccagacatcacaaacagttcttcccaacctgtagacaatcacgtttccccctcatctttcttgggccagacacccgcttcccccgctcgatatagtcctgtctccaaagcagtgctcggagacgacgagataaccagggagccaagaaaggtggtgctccacagaggatccacaggtctggggttcaatattgttggcggagaagatggggagggcatcttcatcagcttcattcttgctggcggtcccgctgatctgtctggggagctgagaaagggcgatcgaattattagtgtgaattctgtggatcttagagctgccagccacgaacaggccgcagcggcactcaagaacgcaggccaggccgtcacaattgttgcccagtacagacccgaagaatactcccgatttgaggcaaagatccacgacctcagggagcagatgatgaatagcagcatttcaagtggctctggtagtcttcggacctctcagaaaagatccctttacgtacgggctctgttcgattacgacaagaccaaggactcagggctgccctcgcaggggctcaattttaaatttggcgatattctgcatgtgattaacgccagtgacgacgaatggtggcaggctaggcaggttactccagatggggagagcgacgaggtcggagtgatcccctcgaaaagaagggtggaaaagaaagaacgggcaaggcttaagacagtgaaattcaattctaagacgagagacaagggagagatccccgatgatatgggtagcaaaggcctgaagcacgtgacttctaatgccagcgattccgagtcgagctaccgaggacaggaagagtacgttttgtcttacgaacccgtgaaccagcaggaggtgaactatacacgccctgtgattatcctgggcccaatgaaggacaggataaatgacgacctaatttccgagttcccggacaagtttggatcctgcgtcccacacactactaggcccaaaagggattacgaagtcgacggacgggattatcattttgtgacatcacgggagcaaatggagaaggacattcaggagcataaatttattgaggcgggtcaatataataatcatttatacggaactagtgtacagtctgtccgtgaagtggctgaaaaaggcaaacattgtatactagatgtgagtggcaacgcgattaagcggttacaaatagcacagctgtatcctataagcatctttataaaaccgaagagcatggagaatatcatggaaatgaacaagcgactgaccgaagaacaggccaggaaaacatttgagcgtgccatgaaactggaacaggagttcaccgaacactttacagccattgtgcagggtgacaccttggaagatatctacaaccaggtcaaacagatcattgaggagcaaagtggcagctacatctgggtgccggcaaaagagaagctgtag

SEQ ID NO: 301222 - DNA, 2562 bp, Artificial Sequence
  derived and/or modified sequence
atgcctgtgcgcaaacaggacactcagcgagcactgcacttactggaggaataccggtccaagctctcacaaacagaggatcggcagctccgatcctctatcgagcgggtcataaacattttccagtctaacctattccaggctttaattgacatccaggaattctacgaagtgactctgttggataatccaaagtgcatcgatcgcagtaagccctcagagccaattcagccagtgaatacgtgggaaatatcatccctgcctagtagtaccgttactagtgagacgctgcccagttccctcagtcccagcgtggagaagtatcgttaccaggacgaagatacaccgccacaggagcatatttcaccccagataactaacgaagtcataggaccggaacttgtgcacgttagcgagaagaacctttctgagatcgaaaatgtgcatggctttgtatcgcacagccacatttcccctatcaaagtcaacgggacagacgctgactatgagtatgaggagattacactggaaaggggtaatagtgggctgggattcagcattgcaggaggtaccgacaacccgcacattggggatgactcttctatcttcatcactaaaatcattaccggtggtgccgctgcgcaggatgggagactgcgcgttaacgactgcatcttgagggtaaatgaggtggatgtgagggacgtgactcatagtaaagccgtcgaggcactcaaagaagccggaagcatcgtgcgcctgtatgtgaaacgacgcaagcctgtgtcagaaaaaatcatggaaatcaaactgattaaggggcctaaaggacttggtttcagcatcgccggaggtgttgggaatcagcatatcccgggagataactctatatacgtcaccaaaattatagagggtggagctgcccacaaagacggcaagctgcagatcggggataaactgcttgccgtcaacaacgtttgtttagaggaagtgacgcacgaagaggctgtaactgctctgaaaaacaccagtgactttgtgtacctcaaggtcgccaagcccacttccatgtacatgaatgacggctatgcgcctccggacatcacaaatagctcttctcagcctgtcgacaatcatgtgagcccatctagtttcttgggacagactcctgccagtcccgctcgttattctccggtgagcaaagccgtgctcggtgacgacgagatcacgcgcgaaccacgcaaagtggtgctgcatcgagggtccacggggctggggttcaacatcgtgggtggcgaggatggcgaagggatctttatcagtttcattttagcaggagggcctgccgaccttagtggagaactgagaaaaggggaccgcatcatcagtgtgaactccgtggatctgcgggcagctagccacgagcaggctgccgcagccttaaaaaacgccggtcaggcagttaccatcgttgcccagtacaggccagaggagtactccaggttcgaggctaagatccatgaccttcgtgagcaaatgatgaattcctccatttcttcgggcagtgggtctcttcgcacatctcagaagcgttccctctacgtccgggcactgttcgactatgataaaactaaggatagcggtctcccaagccaagggctgaacttcaaattcggagacatcctgcacgtgatcaacgcctccgatgatgaatggtggcaggctagacaagtgacacccgacggggagtctgatgaggtcggagtgatccccagcaagaggcgggtcgaaaagaaggaacgtgctcggctgaagaccgttaaatttaattccaagacacgggataaaggcgaaattccagacgacatgggttccaaaggtctaaaacatgtgacctccaacgccagcgattctgaatcatcttacagaggacaggaggaatacgtcctctcgtatgaacccgtgaaccaacaggaagtgaattacacccggccagttattatacttggcccaatgaaggatcggatcaacgacgatctcatatccgagtttccagataagttcggctcctgcgtaccacataccacccgccctaaacgggattatgaggtggacggccgagactatcacttcgtcactagccgagagcagatggagaaggatatccaagaacacaagtttattgaagccggacagtacaacaatcatttgtacggcactagcgtgcagtcagtccgggaggtcgcagagaaaggcaaacactgtatcctggatgtgtccgggaacgccattaaacgactccagattgcccagctgtatcccattagcatctttataaaacccaagtctatggagaacataatggaaatgaataagcgactgaccgaagagcaggccaggaagacctttgagcgcgcaatgaagctggagcaggaatttaccgaacactttactgctatcgtgcagggcgacacactggaggacatttataaccaggtgaagcagatcatcgaggagcagtctgggtcatacatctgggtgcccgcaaaggagaagctgtag

SEQ ID NO: 301223 - DNA, 2562 bp, Artificial Sequence
  derived and/or modified sequence
atgcccgtgagaaagcaggacacccagagagccctgcacctgctggaggagtacagaagcaagctgagccagaccgaggacagacagctgagaagcagcatcgagagagtgatcaacatcttccagagcaacctgttccaggccctgatcgacatccaggagttctacgaggtgaccctgctggacaaccccaagtgcatcgacagaagcaagcccagcgagcccatccagcccgtgaacacctgggagatcagcagcctgcccagcagcaccgtgaccagcgagaccctgcccagcagcctgagccccagcgtggagaagtacagataccaggacgaggacacccccccccaggagcacatcagcccccagatcaccaacgaggtgatcggccccgagctggtgcacgtgagcgagaagaacctgagcgagatcgagaacgtgcacggcttcgtgagccacagccacatcagccccatcaaggtgaacggcaccgacgccgactacgagtacgaggagatcaccctggagagaggcaacagcggcctgggcttcagcatcgccggcggcaccgacaacccccacatcggcgacgacagcagcatcttcatcaccaagatcatcaccggcggcgccgccgcccaggacggcagactgagagtgaacgactgcatcctgagagtgaacgaggtggacgtgagagacgtgacccacagcaaggccgtggaggccctgaaggaggccggcagcatcgtgagactgtacgtgaagagaagaaagcccgtgagcgagaagatcatggagatcaagctgatcaagggccccaagggcctgggcttcagcatcgccggcggcgtgggcaaccagcacatccccggcgacaacagcatctacgtgaccaagatcatcgagggcggcgccgcccacaaggacggcaagctgcagatcggcgacaagctgctggccgtgaacaacgtgtgcctggaggaggtgacccacgaggaggccgtgaccgccctgaagaacaccagcgacttcgtgtacctgaaggtggccaagcccaccagcatgtacatgaacgacggctacgccccccccgacatcaccaacagcagcagccagcccgtggacaaccacgtgagccccagcagcttcctgggccagacccccgccagccccgccagatacagccccgtgagcaaggccgtgctgggcgacgacgagatcaccagagagcccagaaaggtggtgctgcacagaggcagcaccggcctgggcttcaacatcgtgggcggcgaggacggcgagggcatcttcatcagcttcatcctggccggcggccccgccgacctgagcggcgagctgagaaagggcgacagaatcatcagcgtgaacagcgtggacctgagagccgccagccacgagcaggccgccgccgccctgaagaacgccggccaggccgtgaccatcgtggcccagtacagacccgaggagtacagcagattcgaggccaagatccacgacctgagagagcagatgatgaacagcagcatcagcagcggcagcggcagcctgagaaccagccagaagagaagcctgtacgtgagagccctgttcgactacgacaagaccaaggacagcggcctgcccagccagggcctgaacttcaagttcggcgacatcctgcacgtgatcaacgccagcgacgacgagtggtggcaggccagacaggtgacccccgacggcgagagcgacgaggtgggcgtgatccccagcaagagaagagtggagaagaaggagagagccagactgaagaccgtgaagttcaacagcaagaccagagacaagggcgagatccccgacgacatgggcagcaagggcctgaagcacgtgaccagcaacgccagcgacagcgagagcagctacagaggccaggaggagtacgtgctgagctacgagcccgtgaaccagcaggaggtgaactacaccagacccgtgatcatcctgggccccatgaaggacagaatcaacgacgacctgatcagcgagttccccgacaagttcggcagctgcgtgccccacaccaccagacccaagagagactacgaggtggacggcagagactaccacttcgtgaccagcagagagcagatggagaaggacatccaggagcacaagttcatcgaggccggccagtacaacaaccacctgtacggcaccagcgtgcagagcgtgagagaggtggccgagaagggcaagcactgcatcctggacgtgagcggcaacgccatcaagagactgcagatcgcccagctgtaccccatcagcatcttcatcaagcccaagagcatggagaacatcatggagatgaacaagagactgaccgaggagcaggccagaaagaccttcgagagagccatgaagctggagcaggagttcaccgagcacttcaccgccatcgtgcagggcgacaccctggaggacatctacaaccaggtgaagcagatcatcgaggagcagagcggcagctacatctgggtgcccgccaaggagaagctgtag

SEQ ID NO: 301224 - DNA, 4815 bp, Artificial Sequence
  derived and/or modified sequence
gttggaaacggcactgctgagtgaggttgaggggtgtctcggtatgtgcgccttggatctggtgtaggcgaggtcacgcctctcttcagacagcccgagccttcccggcctggcgcgtttagttcggaactgcgggacgcgccggtgggctagggcaaggtgtgtgccctcttcctgattctggagaaaaatgccggtccggaagcaagatacccagagagcattgcaccttttggaggaatatcgttcaaaactaagccaaactgaagacagacagctcagaagttccatagaacgggttattaacatatttcagagcaacctctttcaggctttaatagatattcaagaattttatgaagtgaccttactggataatccaaaatgtatagatcgttcaaagccgtctgaaccaattcaacctgtgaatacttgggagatttccagccttccaagctctactgtgacttcagagacactgccaagcagccttagccctagtgtagagaaatacaggtatcaggatgaagatacacctcctcaagagcatatttccccacaaatcacaaatgaagtgataggtccagaattggttcatgtctcagagaagaacttatcagagattgagaatgtccatggatttgtttctcattctcatatttcaccaataaaggttaatggcacagatgcagattatgaatatgaagaaatcacacttgaaaggggaaattcagggcttggtttcagcattgcaggaggtacggacaacccacacattggagatgactcaagtattttcattaccaaaattatcacagggggagcagccgcccaagatggaagattgcgggtcaatgactgtatattacgagtaaatgaagtagatgttcgtgatgtaacacatagcaaagcagttgaagcgttgaaagaagcagggtctattgtacgcttgtatgtaaaaagaaggaaaccagtgtcagaaaaaataatggaaataaagctcattaaaggtcctaaaggtcttgggtttagcattgctggaggtgttggaaatcagcatattcctggggataatagcatctatgtaaccaaaataattgaaggaggtgcagcacataaggatggcaaacttcagattggagataaacttttagcagtgaataacgtatgtttagaagaagttactcatgaagaagcagtaactgccttaaagaacacatctgattttgtttatttgaaagtggcaaaacccacaagtatgtatatgaatgatggctatgcaccacctgatatcaccaactcttcttctcagcctgttgataaccatgttagcccatcttccttcttgggccagacaccagcatctccagccagatactccccagtttctaaagcagtacttggagatgatgaaattacaagggaacctagaaaagttgttcttcatcgtggctcaacgggccttggtttcaacattgtaggaggagaagatggagaaggaatatttatttcctttatcttagccggaggacctgctgatctaagtggagagctcagaaaaggagatcgtattatatcggtaaacagtgttgacctcagagctgctagtcatgagcaggcagcagctgcattgaaaaatgctggccaggctgtcacaattgttgcacaatatcgacctgaagaatacagtcgttttgaagctaaaatacatgatttacgggagcagatgatgaatagtagtattagttcagggtcaggttctcttcgaactagccagaagcgatccctctatgtcagagccctttttgattatgacaagactaaagacagtgggcttcccagtcagggactgaacttcaaatttggagatatcctccatgttattaatgcttctgatgatgaatggtggcaagccaggcaggttacaccagatggtgagagcgatgaggtcggagtgattcccagtaaacgcagagttgagaagaaagaacgagcccgattaaaaacagtgaaattcaattctaaaacgagagataaaggggagatccctgacgacatgggatcaaaaggcctgaagcatgtaacttctaatgccagcgatagtgaaagtagttaccgtggtcaagaagaatacgtcttatcttatgaaccagtgaatcaacaagaagttaattatactcgaccagtgatcatattgggacctatgaaagacaggataaatgatgacttgatctcagaatttcctgacaaatttggatcctgtgttcctcatacaactagaccaaaacgagattatgaggtagatggaagagattatcattttgtgacttcaagagagcagatggaaaaagatatccaggaacataaattcattgaagctggccagtataacaatcatctatatggaacaagtgttcagtctgtacgagaagtagcagaaaagggcaaacactgtatccttgatgtgtctggaaatgccataaagagattacagattgcacagctttaccctatctccatttttattaaacccaaatccatggaaaatatcatggaaatgaataagcgtctaacagaagaacaagccagaaaaacatttgagagagccatgaaactggaacaggagtttactgaacatttcacagctattgtacagggggatacgctggaagacatttacaaccaagtgaaacagatcatagaagaacaatctggttcttacatctgggttccggcaaaagaaaagctatgaaaactcatgtttctctgtttctcttttccacaattccattttctttggcatctctttgccctttcctctggagtctttcttgagtactgatttcatgttgaattgtatcccacacatcatggtctgcagcttctttttcacatgtagtgtctccttcaagttacatcgtgtgtattatttaatgtcactattggttagtggccatttttcagaactgaagatggaatggcctgaccagctattaagaacgtggggagacgcagaaattgtggtaaaattccttaatgtttaagggaaagtaactttaagagatttttggaaaagctttatatacattcttttcaaatttcagtacaaatgaaaaagtggttttaatcagtgatttagtagactttgagcaactgtgcacgcttcagtttaatagcatggtttggccagtgtattactctcaagtccttttctcaatcaacttctatcatcaaagcaattgtttcattatagataaataaggacattttttaatttaaaaattcatgtctgagttgactttcataagggatttcattttttcctcaacattcttaaagccttttagtatttgacggttcttttttcccaggacatttgctaggaataacaacgtttcaatgtttttaatctacttgagcaacactatcgtgtcttacaaaagttgttcatatgtaaatgatcatcacatttcgtgaattgaggccatgttcaggtgctaaggaagttcgccttttacacagaagattgagaaaatttcctagatataaatacagataaatcagacgttacagtggtgacgtagtaaccatcatggcaatggaaaggagtccaattcatagcctaaaacttcaaatgtattcttaggagtcagattttactgaatattttacccacaatagctgcctattttgttataataaaatatatataaatatatatataaaactttctttaaactgtaactatgggaattattttctttacatagttgcgcacacacacaaacatatatatatatttaaaatatattttgtttcttttgccacctactcctaactttttgtttggtttttaaattaaatattaattgaatagacttatcttccttaatcatgtgaactgaaaatgggggcatggtggtcatgaggaggaaacatttagggaaattagattataagtaaaagtgtgggcatattctcctcttttctacaaaggttttcaaatggttcctgaggttttttgttgttgtccgtgttgttactgttgttcttgtcatcaggtttgattttggtccttgccctttccttctagttctccttttattaataggaaggcaggcaaaagccccatttatgtgtgtgttttcccctcagacagctttcatccactgctctgcactagaattgcacaaatcttcatggtgagcaattttaagaaatgttagtgaaaggtagaaattatttcacaaatcagtttctctggtccttcatattaataataatatttggcttcccattgctctttggagttgtttattaaatatgtgtttttgacaacctcctcattagtttcttaaatgagtactggtttgtaaagaattatcaacattatccattccatttatgaagaagaggagaacagctaataaactgtattgtaaaatccatatgttaagtgtgtcttgaattttgaaagaaaaaatatattttgcaagctaacattttcttgaaacaatttgaggcatcatgtaacttataaccgaatccaagagccgttaggcagcagagtgtgttaccacattgaaatacacagtgctgctgttagactaaatgtcgtaggttgttaaccacatagaaacacactagtatgaagaaaactgttgtaaaatctcaagagcttcagaaactgccttacaagaccgcagcataagctattttgaagtatttaccaaatagtcacatgttgtaaaatatcaagtggttataaaaggatgccatttatatattaaaatttacataacattgttttctgga

SEQ ID NO: 301225 - DNA, 2854 bp, Artificial Sequence
  derived and/or modified sequence
atgccggtccggaagcaagatacccagagagcattgcaccttttggaggaatatcgttcaaaactaagccaaactgaagacagacagctcagaagttccatagaacgggttattaacatatttcagagcaacctctttcaggctttaatagatattcaagaattttatgaagtgaccttactggataatccaaaatgtatagatcgttcaaagccgtctgaaccaattcaacctgtgaatacttgggagatttccagccttccaagctctactgtgacttcagagacactgccaagcagccttagccctagtgtagagaaatacaggtatcaggatgaagatacacctcctcaagagcatatttccccacaaatcacaaatgaagtgataggtccagaattggttcatgtctcagagaagaacttatcagagattgagaatgtccatggatttgtttctcattctcatatttcaccaataaaggttaatggcacagatgcagattatgaatatgaagaaatcacacttgaaaggggaaattcagggcttggtttcagcattgcaggaggtacggacaacccacacattggagatgactcaagtattttcattaccaaaattatcacagggggagcagccgcccaagatggaagattgcgggtcaatgactgtatattacgagtaaatgaagtagatgttcgtgatgtaacacatagcaaagcagttgaagcgttgaaagaagcagggtctattgtacgcttgtatgtaaaaagaaggaaaccagtgtcagaaaaaataatggaaataaagctcattaaaggtcctaaaggtcttgggtttagcattgctggaggtgttggaaatcagcatattcctggggataatagcatctatgtaaccaaaataattgaaggaggtgcagcacataaggatggcaaacttcagattggagataaacttttagcagtgaataacgtatgtttagaagaagttactcatgaagaagcagtaactgccttaaagaacacatctgattttgtttatttgaaagtggcaaaacccacaagtatgtatatgaatgatggctatgcaccacctgatatcaccaactcttcttctcagcctgttgataaccatgttagcccatcttccttcttgggccagacaccagcatctccagccagatactccccagtttctaaagcagtacttggagatgatgaaattacaagggaacctagaaaagttgttcttcatcgtggctcaacgggccttggtttcaacattgtaggaggagaagatggagaaggaatatttatttcctttatcttagccggaggacctgctgatctaagtggagagctcagaaaaggagatcgtattatatcggtaaacagtgttgacctcagagctgctagtcatgagcaggcagcagctgcattgaaaaatgctggccaggctgtcacaattgttgcacaatatcgacctgaagaatacagtcgttttgaagctaaaatacatgatttacgggagcagatgatgaatagtagtattagttcagggtcaggttctcttcgaactagccagaagcgatccctctatgtcagagccctttttgattatgacaagactaaagacagtgggcttcccagtcagggactgaacttcaaatttggagatatcctccatgttattaatgcttctgatgatgaatggtggcaagccaggcaggttacaccagatggtgagagcgatgaggtcggagtgattcccagtaaacgcagagttgagaagaaagaacgagcccgattaaaaacagtgaaattcaattctaaaacgagagataaaggggagatccctgacgacatgggatcaaaaggcctgaagcatgtaacttctaatgccagcgatagtgaaagtagttaccgtggtcaagaagaatacgtcttatcttatgaaccagtgaatcaacaagaagttaattatactcgaccagtgatcatattgggacctatgaaagacaggataaatgatgacttgatctcagaatttcctgacaaatttggatcctgtgttcctcatacaactagaccaaaacgagattatgaggtagatggaagagattatcattttgtgacttcaagagagcagatggaaaaagatatccaggaacataaattcattgaagctggccagtataacaatcatctatatggaacaagtgttcagtctgtacgagaagtagcagaaaagggcaaacactgtatccttgatgtgtctggaaatgccataaagagattacagattgcacagctttaccctatctccatttttattaaacccaaatccatggaaaatatcatggaaatgaataagcgtctaacagaagaacaagccagaaaaacatttgagagagccatgaaactggaacaggagtttactgaacatttcacagctattgtacagggggatacgctggaagacatttacaaccaagtgaaacagatcatagaagaacaatctggttcttacatctgggttccggcaaaagaaaagctatgaaaactcatgtttctctgtttctcttttccacaattccattttctttggcatctctttgccctttcctctggagtctttcttgagtactgatttcatgttgaattgtatcccacacatcatggtctgcagcttctttttcacatgtagtgtctccttcaagttacatcgtgtgtattatttaatgtcactattggttagtggccatttttcagaactgaagatggaatggcctgaccagctattaagaacgtggggagacgcagaaattgtggtaaaattccttaatgtttaa

SEQ ID NO: 301226 - DNA, 627 bp, Artificial Sequence
  derived and/or modified sequence
atgcccgtgcgcaaacaagacacgcagagagccttgcacctcctggaggagtaccgctctaagctcagccagacagaggaccggcagcttcggagctctattgagcgggtgatcaacatcttccagtccaacctgtttcaggccctgattgatatccaagagttttacgaagtcacactgctcgataaccccaagtgcattgaccggtccaaaccgagtgaacctatacagcccgtgaacacctgggaaattagctccctaccctctagcacggtgacgtcagaaaccctgccgagttctttatcaccctctgtcgagaagtaccggtaccaagacgaagacactcccccacaggaacacattagtccacaaatcaccaatgaggtgattggcccagagctcgtccacgtgtccgaaaagaatctctcagagattgagaacgtgcatgggtttgtaagtcacagtcatatctctccgatcaaacccaccgaggctgttttgcctagtcccccgaccgtgcccgtgattcctgtgctgcccgtccctgctgagaatactgtgattttgccaactattccccaagctaaccctcctcctgtcttggtgaatactgatagtttagaatag

SEQ ID NO: 301227 - DNA, 627 bp, Artificial Sequence
  derived and/or modified sequence
atgcctgtgaggaagcaggacacccagagggccctgcacctgctggaggagtaccgcagcaagctgagccagacagaggaccggcagctgcggagcagcattgaaagagtcatcaacatcttccagagcaacctcttccaggccctgattgacatccaggagttctatgaggtgaccctgctggacaaccccaagtgcatcgacaggagcaagcccagcgagcccatccagcctgtgaacacctgggagatcagcagcctgcccagcagcacagtgaccagcgagaccctgcccagcagcctgagccccagcgtggagaagtaccgctaccaggatgaggacaccccaccccaggagcacatcagcccccagatcaccaatgaagtcatcggccctgagctggtgcacgtgtctgagaagaacctgtctgaaattgaaaatgtgcacggctttgtgagccacagccacatcagccccatcaagcccacagaagctgtgctgcccagcccccccaccgtgcctgtgattcctgtgctgcctgtgcctgctgagaacacagtcatcctgcccaccatcccccaggccaaccccccacctgtgctggtgaacacagacagcctggagtag

SEQ ID NO: 301228 - DNA, 627 bp, Artificial Sequence
  derived and/or modified sequence
atgcccgtgcggaagcaggacacccagcgggccctgcacctgctggaagagtatagaagcaagctctcccagactgaagatagacaactgagatcaagcattgagcgggtcatcaacatttttcagagcaatttatttcaggcccttattgatatacaggagttttatgaggtgacactcctcgacaatcccaagtgcatagacaggagtaagcccagcgagcctatacaaccagtaaatacatgggagatctcttcgttgcccagcagcacggtgactagcgagactttaccttcttcactgtccccctctgttgagaaatacaggtatcaggatgaggacacacctccccaggagcatatttctccccagataacaaacgaggtgataggccccgaactggtgcatgtttcagaaaagaacctctcagagatagagaatgtgcacgggttcgtcagccactcacatattagtccaatcaaacctacagaggctgtgctcccaagtccacctacagtccctgtcatccccgtgctgcccgtgcccgctgagaacacggtcattttgcctaccatcccacaggctaatccgcctcctgtgctagtcaacacagattctctggaatag

SEQ ID NO: 301229 - DNA, 627 bp, Artificial Sequence
  derived and/or modified sequence
atgccagtgaggaaacaggatacccagcgcgcattacacttgctcgaagaataccgctcaaaactttcccaaacagaggatcgccaattacgatcttctatcgagcgggtcattaatatattccaaagtaacctgtttcaggcgctcattgacatccaggagttctacgaggtcactttgttggacaacccgaagtgtatcgacaggtccaagccttcagaacccatccagcccgtgaacacctgggaaatatctagcctcccctcatcaactgtcactagcgaaaccctgccgagcagcctgtctccgagcgtagaaaagtaccgctaccaggacgaagatacccccccacaggagcacattagcccacagattactaacgaagtcatcggtccggaacttgtgcacgtgtctgaaaaaaacttaagcgagattgaaaatgtgcacggatttgtcagtcattctcacattagcccaataaagcctaccgaagcagtgctgccatcacctcccacagtgcctgttatccccgtgttgcctgtacccgcagagaatacagttatactccccactattcctcaggcgaaccctcctccagtgctcgtcaataccgactccctcgaatag

SEQ ID NO: 301230 - DNA, 627 bp, Artificial Sequence
  derived and/or modified sequence
atgcccgtgagaaagcaggacacccagagagccctgcacctgctggaggagtacagaagcaagctgagccagaccgaggacagacagctgagaagcagcatcgagagagtgatcaacatcttccagagcaacctgttccaggccctgatcgacatccaggagttctacgaggtgaccctgctggacaaccccaagtgcatcgacagaagcaagcccagcgagcccatccagcccgtgaacacctgggagatcagcagcctgcccagcagcaccgtgaccagcgagaccctgcccagcagcctgagccccagcgtggagaagtacagataccaggacgaggacacccccccccaggagcacatcagcccccagatcaccaacgaggtgatcggccccgagctggtgcacgtgagcgagaagaacctgagcgagatcgagaacgtgcacggcttcgtgagccacagccacatcagccccatcaagcccaccgaggccgtgctgcccagcccccccaccgtgcccgtgatccccgtgctgcccgtgcccgccgagaacaccgtgatcctgcccaccatcccccaggccaaccccccccccgtgctggtgaacaccgacagcctggagtag

SEQ ID NO: 301231 - DNA, 716 bp, Artificial Sequence
  derived and/or modified sequence
gcggccgctgccctgtccggcccccgctggagcagcccggaggcagcgagcaaggagaaaggtgtgtgccctcttcctgattctggagaaaaatgccggtccggaagcaagatacccagagagcattgcaccttttggaggaatatcgttcaaaactaagccaaactgaagacagacagctcagaagttccatagaacgggttattaacatatttcagagcaacctctttcaggctttaatagatattcaagaattttatgaagtgaccttactggataatccaaaatgtatagatcgttcaaagccgtctgaaccaattcaacctgtgaatacttgggagatttccagccttccaagctctactgtgacttcagagacactgccaagcagccttagccctagtgtagagaaatacaggtatcaggatgaagatacacctcctcaagagcatatttccccacaaatcacaaatgaagtgataggtccagaattggttcatgtctcagagaagaacttatcagagattgagaatgtccatggatttgtttctcattctcatatttcaccaataaagccaacagaagctgttcttccctctcctcccactgtccctgtgatccctgtcctgccagtccctgctgagaatactgtcatcctacccaccataccacaggcaaatcctcccccagtactggtcaacacagatagcttggaa

SEQ ID NO: 301232 - protein, 106 aa, Artificial Sequence
  derived and/or modified sequence
MPVRKQDTQRALHLLEEYRSKLSQTEDRQLRSSIERVINIFQSNLFQALIDIQEFYEVTLLDNPKCIDRSKPSEPIQPVNTWEISSLPSSTVTSETLPSSLSPSVE

SEQ ID NO: 301233 - protein, 154 aa, Artificial Sequence
  derived and/or modified sequence
MPVRKQDTQRALHLLEEYRSKLSQTEDRQLRSSIERVINIFQSNLFQALIDIQEFYEVTLLDNPKCIDRSKPSEPIQPVNTWEISSLPSSTVTSETLPSSLSPSVEKYRYQDEDTPPQEHISPQITNEVIGPELVHVSEKNLSEIENVHGFVSH

SEQ ID NO: 301234 - protein, 36 aa, Artificial Sequence
  derived and/or modified sequence
MPVRKQDTQRALHLLEEYRSKLSQTEDRQLRSSIER

SEQ ID NO: 301235 - protein, 123 aa, Artificial Sequence
  derived and/or modified sequence
MPVRKQDTQRALHLLEEYRSKLSQTEDRQLRSSIERVINIFQSNLFQALIDIQEFYEVTLLDNPKCIDRSKPSEPIQPVNTWEISSLPSSTVTSETLPSSLSPSVEKYRYQDEDTPPQEHISP

SEQ ID NO: 301236 - DNA, 321 bp, Artificial Sequence
  derived and/or modified sequence
atgcccgtgaggaaacaggacacacagcgtgcactgcacctcctggaggaatatcggtccaaactttctcagacggaggaccggcaactacgcagtagcattgaaagggttatcaatatttttcagtcaaatctgttccaggccctcattgacatccaggaattttacgaggttacgcttctggacaatcctaagtgcatagaccgatctaagccctcagagccaattcagccagtgaatacctgggaaatcagctcactgccctcaagtacagtaacctctgaaactttaccatccagcctgagccctagtgtggagtag

SEQ ID NO: 301237 - DNA, 1113 bp, Artificial Sequence
  derived and/or modified sequence
atgcctgttcgcaaacaagatacccagcgtgcactgcacttgctcgaagaatacaggtctaaactgagccagacagaagataggcagttgaggtcaagtatcgaacgagtgatcaacatctttcagtcaaatttgttccaggctctgattgacattcaggaattttacgaagtgactttgcttgacaaccccaaatgcatcgaccggagtaaaccctctgaacccatccaaccggtgaacacttgggaaattagctctctacctagcagcacggttacaagcgagaccctgccttcctccttgtctccaagcgtggagaagtatcgataccaggacgaagatactcctccacaggaacatatttctccacagatcacgaacgaggtgattgggcctgagctcgttcatgtttcagagaagaatttaagtgagattgaaaacgttcacggctttgtctcacactctcatatttctccaataaaggtgaacggcacagatgcagattacgagtatgaagagatcaccttggagcgtggcaattctggactggggtttagcatcgccggcgggaccgataatccacatatcggtgatgacagctcgatatttatcactaaaattattactggcggcgcagcagctcaagatggcagactgcgcgtcaacgattgtatcttgcgcgtgaacgaggtggatgtgcgcgacgttactcactctaaagctgtagaagctctcaaggaggccggaagcatcgtgagactctacgtcaagcggagaaaacccgtgtcagaaaaaattatggagatcaagttaataaaaggccctaaaggactgggcttctccatcgccggtggcgttgggaaccagcacataccaggtgataatagcatatacgtcacaaagatcatcgaaggtggcgctgcccataaagacggcaagctacagataggggacaaacttttagcagtcaacaacgtttgcctcgaggaggtgacacatgaagaagctgtgaccgccctcaagaataccagtgatttcgtgtacttaaaagtggctaagccgacttcgatgtatatgaacgatggttacgcaccaccggacatcacgaactag

SEQ ID NO: 301238 - DNA, 465 bp, Artificial Sequence
  derived and/or modified sequence
atgcctgtgaggaaacaggatactcaaagggctttgcacctgctggaagaatatcgcagcaaactgtctcagacagaagaccgacagcttaggagctcaatcgagagagttataaatattttccagtctaatttattccaggcactcatcgatatccaggagttttacgaggtgacactccttgacaaccccaagtgtatagacagatctaaaccaagcgaaccaattcagcccgtcaacacctgggaaatcagttcgctaccctcttccacagtcacgtctgaaacgctcccttcatcactatcccccagcgtggaaaagtaccgttatcaggacgaggacacacccccacaggagcacatctcgccccagattaccaacgaggttatcggccccgagctcgtgcatgtgagcgagaagaatttgagcgagattgaaaatgtgcatggattcgtgtcacattag

SEQ ID NO: 301239 - DNA, 372 bp, Artificial Sequence
  derived and/or modified sequence
atgccagtacggaagcaggacacacagagagcgctgcatctcctagaggaataccggagtaagttgtctcagactgaggatagacagctgaggtccagtattgagagagtaattaatatcttccagtctaatctattccaggcccttattgacatacaagagttctatgaggtgaccctgctggacaaccctaaatgcattgatcggagcaaaccctcagaacctatccagcccgttaatacgtgggagattagttcactcccatcatcaactgtgacttcagagacactcccgagttcgctgtcccccagtgtggagaaatatagatatcaagatgaagacacaccccctcaagaacacatatcaccttag

SEQ ID NO: 301240 - DNA, 321 bp, Artificial Sequence
  derived and/or modified sequence
atgcctgtgaggaagcaggacacccagagggccctgcacctgctggaggagtaccgcagcaagctgagccagacagaggaccggcagctgcggagcagcattgaaagagtcatcaacatcttccagagcaacctcttccaggccctgattgacatccaggagttctatgaggtgaccctgctggacaaccccaagtgcatcgacaggagcaagcccagcgagcccatccagcctgtgaacacctgggagatcagcagcctgcccagcagcacagtgaccagcgagaccctgcccagcagcctgagccccagcgtggagtag

SEQ ID NO: 301241 - DNA, 1113 bp, Artificial Sequence
  derived and/or modified sequence
atgcctgtgaggaagcaggacacccagagggccctgcacctgctggaggagtaccgcagcaagctgagccagacagaggaccggcagctgcggagcagcattgaaagagtcatcaacatcttccagagcaacctcttccaggccctgattgacatccaggagttctatgaggtgaccctgctggacaaccccaagtgcatcgacaggagcaagcccagcgagcccatccagcctgtgaacacctgggagatcagcagcctgcccagcagcacagtgaccagcgagaccctgcccagcagcctgagccccagcgtggagaagtaccgctaccaggatgaggacaccccaccccaggagcacatcagcccccagatcaccaatgaagtcatcggccctgagctggtgcacgtgtctgagaagaacctgtctgaaattgaaaatgtgcacggctttgtgagccacagccacatcagccccatcaaggtgaatggaacagatgctgactatgaatatgaggagatcaccctggagcggggcaacagcggcctgggcttcagcattgctgggggcacagacaacccccacatcggagatgacagcagcatcttcatcaccaagatcatcactggaggagctgctgcccaggacggccgcctgcgggtgaatgactgcatcctgcgggtgaatgaggtggatgtgagagatgtgacccacagcaaggctgtggaggccctgaaggaggccggcagcatcgtgcggctgtatgtgaagaggaggaagcctgtgtctgagaagatcatggagatcaagctgatcaagggccccaagggcctgggcttcagcattgctggaggagtgggcaaccagcacatccctggggacaacagcatctacgtgaccaagatcattgaaggaggagctgcccacaaggatggcaagctgcagatcggggacaagctgctggccgtgaacaacgtgtgcctggaggaggtgacccatgaggaggccgtgacagccctgaagaacaccagtgactttgtgtacctgaaggtggccaagcccacctccatgtacatgaatgatggctacgcccccccagacatcaccaactag

SEQ ID NO: 301242 - DNA, 465 bp, Artificial Sequence
  derived and/or modified sequence
atgcctgtgaggaagcaggacacccagagggccctgcacctgctggaggagtaccgcagcaagctgagccagacagaggaccggcagctgcggagcagcattgaaagagtcatcaacatcttccagagcaacctcttccaggccctgattgacatccaggagttctatgaggtgaccctgctggacaaccccaagtgcatcgacaggagcaagcccagcgagcccatccagcctgtgaacacctgggagatcagcagcctgcccagcagcacagtgaccagcgagaccctgcccagcagcctgagccccagcgtggagaagtaccgctaccaggatgaggacaccccaccccaggagcacatcagcccccagatcaccaatgaagtcatcggccctgagctggtgcacgtgtctgagaagaacctgtctgaaattgaaaatgtgcacggctttgtgagccactag

SEQ ID NO: 301243 - DNA, 372 bp, Artificial Sequence
  derived and/or modified sequence
atgcctgtgaggaagcaggacacccagagggccctgcacctgctggaggagtaccgcagcaagctgagccagacagaggaccggcagctgcggagcagcattgaaagagtcatcaacatcttccagagcaacctcttccaggccctgattgacatccaggagttctatgaggtgaccctgctggacaaccccaagtgcatcgacaggagcaagcccagcgagcccatccagcctgtgaacacctgggagatcagcagcctgcccagcagcacagtgaccagcgagaccctgcccagcagcctgagccccagcgtggagaagtaccgctaccaggatgaggacaccccaccccaggagcacatcagcccctag

SEQ ID NO: 301244 - DNA, 321 bp, Artificial Sequence
  derived and/or modified sequence
atgcccgtgcggaagcaggacacccagcgggccctgcacctgctggaggaatatcgttccaagctgtctcagacagaagaccgacagctgcgctcttcgattgaacgagtgatcaacatattccagagtaatttgtttcaggcccttatcgatatccaggagttctatgaggtgactctcctcgataatccaaagtgtattgacagaagcaagccttctgagcctatccagcccgtgaacacttgggagattagcagtctgccctctagcaccgtaacatcagaaacactgccttcatctctgtcaccaagcgtggagtag

SEQ ID NO: 301245 - DNA, 1113 bp, Artificial Sequence
  derived and/or modified sequence
atgcccgtgcggaagcaggacacccagcgggccctgcacctgctggaagagtaccggagcaaactaagccagacagaggaccggcagttgcgcagttccatcgagcgtgtaatcaatattttccagtcaaacttattccaggccctgatcgatatccaggaattctacgaggtgactttgctggacaaccctaagtgcatagacagaagcaaaccttctgagccaatccagccagtcaacacctgggaaatatcatcgttaccctcctctacggtcacttccgaaacgttacccagcagcctgagcccctccgtggaaaagtacagatatcaagacgaggacacgcccccgcaggaacacatctctcctcaaattactaacgaggttataggcccggagctggtgcacgtctccgaaaaaaatctgtcagagatcgagaacgtccacggctttgtcagccattctcacatcagcccaattaaagtgaacggtacggatgctgattacgagtatgaggagattacactcgaacgaggaaactcgggcctggggttcagcattgcgggtggtaccgacaatccgcacataggagatgattcttcaatcttcattacaaagattattactggtggcgcagcagcccaagatggccggctcagggtcaacgattgtatactgagggtgaacgaagtagacgtccgcgatgtcacacacagtaaagctgtcgaggccctgaaagaggctggttctatcgttcgcctgtacgtcaagagacgaaagcccgttagcgagaagatcatggaaatcaaactcatcaagggccctaaggggctgggattttccatagcagggggagttggaaaccagcatataccaggtgataacagtatttatgtgactaagatcatagagggcggagcagcccacaaggatggaaagctgcagattggcgacaaactgctggccgtaaacaacgtttgcttggaagaggtgacacacgaagaagccgtcaccgcgttaaagaacacctccgactttgtgtacctcaaagtagccaagccaacaagcatgtacatgaacgacggctatgctcctccagacatcaccaactag

SEQ ID NO: 301246 - DNA, 465 bp, Artificial Sequence
  derived and/or modified sequence
atgcccgtgcggaagcaggacacccagcgggccctgcacctgctggaggaatacagatctaaactgtcccaaactgaggacagacaactcaggtcttcaatcgagcgcgtcatcaatatttttcagagcaatctcttccaagcccttatcgacattcaagaattctacgaggtcactctgctggataacccaaagtgcattgaccggtccaagccttcagagcccattcagcctgtgaacacatgggaaatcagtagtctccctagcagcacagtgacatccgagaccttaccctcgagcctatccccatccgttgagaagtatcgctaccaagacgaggatacccccccgcaagagcacatctccccccagatcaccaacgaagtgatcggcccagagctcgtccatgttagcgaaaaaaatctttccgaaattgagaatgtccacggattcgtgtctcactag

SEQ ID NO: 301247 - DNA, 372 bp, Artificial Sequence
  derived and/or modified sequence
atgcccgtgcggaagcaggacacccagcgggccctgcacctgctggaagagtacaggtctaaactttcccagacagaagatcgacaactacgctctagtattgaacgcgtaatcaatatctttcagagcaacttatttcaggctctcattgacatccaggagttctatgaggtgactttgctcgacaacccaaaatgtatcgaccggagcaagcctagtgagccgatccagcctgttaatacttgggagatatcctctctgccatcgtcaaccgtgacatcagagaccttgcccagttcattgagccctagtgtggagaagtatcggtatcaggacgaggatactccaccgcaggagcacatttctccttag

SEQ ID NO: 301248 - DNA, 321 bp, Artificial Sequence
  derived and/or modified sequence
atgccggtccggaaacaggacacccagcgggcactgcatctgctcgaggaatatagaagtaaacttagtcagacggaagaccgccagctgcggtcgtccattgagcgggtgatcaacatcttccagtctaatttattccaggccctaattgatattcaggaattctacgaggtgaccctgctggataatccaaagtgcatcgaccggagcaaaccatccgaaccaatacaaccagttaacacatgggaaattagttccctgcctagctccaccgttacgtccgaaaccttgccatcttcgctatcaccctccgtggaatag

SEQ ID NO: 301249 - DNA, 1113 bp, Artificial Sequence
  derived and/or modified sequence
atgccagtaagaaagcaggatacacagcgcgctctccatctcttggaggagtataggtccaagctgtcccaaactgaggataggcagctgagaagttccatagagagagtgattaacatcttccagtccaacctgttccaggctttgattgacatccaagaattttacgaggtgacattgttggacaatcccaagtgcattgataggagcaaacctagtgagccgattcagcccgtaaacacatgggagatatccagcctcccgtcctctacggtgaccagcgagaccttgccttcctctctgagccctagcgtcgagaaatataggtaccaggatgaggataccccgccacaggagcacatctctccgcagattacaaatgaggtgatcggaccagagctcgtgcatgtgtcagaaaagaaccttagcgaaattgagaacgtacacgggttcgtcagtcattcccatatcagccctataaaagtgaacggcaccgatgcagactacgagtatgaagaaatcactctcgaaagagggaatagtgggttggggttttccattgcaggtggcaccgataacccacacattggggacgactctagcatcttcatcacaaagattatcaccgggggtgcagcagcccaggacggcaggctgagagttaacgattgtattttgcgggtgaatgaagttgacgtcagagatgtgactcacagcaaagccgtggaggccctgaaggaggccggtagtattgtcagactctacgtaaagcgcaggaagcccgtgagcgagaagatcatggaaattaaactcatcaagggacctaagggcctggggttttcaatcgccggaggcgtgggtaaccagcatatccccggagacaacagcatctatgtgacaaagattatcgagggaggggctgcccataaggatggcaagctgcaaatcggagataaattgctcgcggtgaataacgtctgtctcgaagaggtgacccacgaggaggccgtcactgcactcaaaaatacttctgactttgtatacctcaaagtggcgaaacctacttctatgtatatgaatgatggctatgccccaccagacattacaaattag

SEQ ID NO: 301250 - DNA, 465 bp, Artificial Sequence
  derived and/or modified sequence
atgcccgtgcggaagcaggacacccagcgggctctgcacctcctggaggagtacagatccaaactgagtcaaaccgaggaccggcagctgagaagttcaatcgaacgcgtcatcaatatttttcagtctaacctctttcaggcgctcatagacatccaagaattctacgaggtgaccctgctggataatcccaagtgcatagaccgatctaaaccttcagagcccatacagccagtgaatacatgggagatctcctccctacctagtagcacagtcacatctgagacactcccctcgagcctgagtccttcagtggagaaataccggtatcaggacgaagacacaccacctcaagagcacatatccccacaaatcaccaacgaggtgattgggccagagctggtgcatgtttcagagaaaaacctgtcagaaattgaaaatgtgcatgggttcgtctcacactag

SEQ ID NO: 301251 - DNA, 372 bp, Artificial Sequence
  derived and/or modified sequence
atgcccgttcgtaagcaggacacccaacgggcactacatctactggaagagtaccgttcgaagttgtcccagactgaggaccggcagttgaggagctccatcgaacgggtgattaacatctttcagtctaacctgtttcaagcccttatcgacatccaggagttctacgaggttactctcctcgataatccgaaatgcatcgacaggtctaaaccttcagaacccatacaacctgtgaatacttgggagattagctccctgccctcttcaacggtcaccagcgagacgctcccaagttcactttccccaagcgtagagaagtaccgttatcaagatgaggacaccccaccccaggagcacatatccccttag

SEQ ID NO: 301252 - DNA, 321 bp, Artificial Sequence
  derived and/or modified sequence
atgcccgtgagaaagcaggacacccagagagccctgcacctgctggaggagtacagaagcaagctgagccagaccgaggacagacagctgagaagcagcatcgagagagtgatcaacatcttccagagcaacctgttccaggccctgatcgacatccaggagttctacgaggtgaccctgctggacaaccccaagtgcatcgacagaagcaagcccagcgagcccatccagcccgtgaacacctgggagatcagcagcctgcccagcagcaccgtgaccagcgagaccctgcccagcagcctgagccccagcgtggagtag

SEQ ID NO: 301253 - DNA, 1113 bp, Artificial Sequence
  derived and/or modified sequence
atgcccgtgagaaagcaggacacccagagagccctgcacctgctggaggagtacagaagcaagctgagccagaccgaggacagacagctgagaagcagcatcgagagagtgatcaacatcttccagagcaacctgttccaggccctgatcgacatccaggagttctacgaggtgaccctgctggacaaccccaagtgcatcgacagaagcaagcccagcgagcccatccagcccgtgaacacctgggagatcagcagcctgcccagcagcaccgtgaccagcgagaccctgcccagcagcctgagccccagcgtggagaagtacagataccaggacgaggacacccccccccaggagcacatcagcccccagatcaccaacgaggtgatcggccccgagctggtgcacgtgagcgagaagaacctgagcgagatcgagaacgtgcacggcttcgtgagccacagccacatcagccccatcaaggtgaacggcaccgacgccgactacgagtacgaggagatcaccctggagagaggcaacagcggcctgggcttcagcatcgccggcggcaccgacaacccccacatcggcgacgacagcagcatcttcatcaccaagatcatcaccggcggcgccgccgcccaggacggcagactgagagtgaacgactgcatcctgagagtgaacgaggtggacgtgagagacgtgacccacagcaaggccgtggaggccctgaaggaggccggcagcatcgtgagactgtacgtgaagagaagaaagcccgtgagcgagaagatcatggagatcaagctgatcaagggccccaagggcctgggcttcagcatcgccggcggcgtgggcaaccagcacatccccggcgacaacagcatctacgtgaccaagatcatcgagggcggcgccgcccacaaggacggcaagctgcagatcggcgacaagctgctggccgtgaacaacgtgtgcctggaggaggtgacccacgaggaggccgtgaccgccctgaagaacaccagcgacttcgtgtacctgaaggtggccaagcccaccagcatgtacatgaacgacggctacgccccccccgacatcaccaactag

SEQ ID NO: 301254 - DNA, 465 bp, Artificial Sequence
  derived and/or modified sequence
atgcccgtgagaaagcaggacacccagagagccctgcacctgctggaggagtacagaagcaagctgagccagaccgaggacagacagctgagaagcagcatcgagagagtgatcaacatcttccagagcaacctgttccaggccctgatcgacatccaggagttctacgaggtgaccctgctggacaaccccaagtgcatcgacagaagcaagcccagcgagcccatccagcccgtgaacacctgggagatcagcagcctgcccagcagcaccgtgaccagcgagaccctgcccagcagcctgagccccagcgtggagaagtacagataccaggacgaggacacccccccccaggagcacatcagcccccagatcaccaacgaggtgatcggccccgagctggtgcacgtgagcgagaagaacctgagcgagatcgagaacgtgcacggcttcgtgagccactag

SEQ ID NO: 301255 - DNA, 372 bp, Artificial Sequence
  derived and/or modified sequence
atgcccgtgagaaagcaggacacccagagagccctgcacctgctggaggagtacagaagcaagctgagccagaccgaggacagacagctgagaagcagcatcgagagagtgatcaacatcttccagagcaacctgttccaggccctgatcgacatccaggagttctacgaggtgaccctgctggacaaccccaagtgcatcgacagaagcaagcccagcgagcccatccagcccgtgaacacctgggagatcagcagcctgcccagcagcaccgtgaccagcgagaccctgcccagcagcctgagccccagcgtggagaagtacagataccaggacgaggacacccccccccaggagcacatcagcccctag

SEQ ID NO: 301256 - DNA, 711 bp, Artificial Sequence
  derived and/or modified sequence
ctggctcaggggccaagggtcggagcgcttcacccgcccgtacccagtagcaggtggggagtgtggatacttgtgcgggggaagaggcggcctcaggtctaggctctttggggaggggacgctttcgaggagagtttggaagccgacttctgtctgttcttaatttggaggggtacccactccaaggaaaagctttccacgttgacagacaactgctgcgttttgagactctttctttgacttggtaaaactttggaacgtggggttttcaaataggctgcgagggttttctatttcgataggggaaaatgctagtttaacatgattctatcctttttcctttccgttgtgtgttttaaaggtgtgtgccctcttcctgattctggagaaaaatgccggtccggaagcaagatacccagagagcattgcaccttttggaggaatatcgttcaaaactaagccaaactgaagacagacagctcagaagttccatagaacgggttattaacatatttcagagcaacctctttcaggctttaatagatattcaagaattttatgaagtgaccttactggataatccaaaatgtatagatcgttcaaagccgtctgaaccaattcaacctgtgaatacttgggagatttccagccttccaagctctactgtgacttcagagacactgccaagcagccttagccctagtgtagaga

SEQ ID NO: 301257 - DNA, 1771 bp, Artificial Sequence
  derived and/or modified sequence
gttggaaacggcactgctgagtgaggttgaggggtgtctcggtatgtgcgccttggatctggtgtaggcgaggtcacgcctctcttcagacagcccgagccttcccggcctggcgcgtttagttcggaactgcgggacgcgccggtgggctagggcaaggtgtgtgccctcttcctgattctggagaaaaatgccggtccggaagcaagatacccagagagcattgcaccttttggaggaatatcgttcaaaactaagccaaactgaagacagacagctcagaagttccatagaacgggttattaacatatttcagagcaacctctttcaggctttaatagatattcaagaattttatgaagtgaccttactggataatccaaaatgtatagatcgttcaaagccgtctgaaccaattcaacctgtgaatacttgggagatttccagccttccaagctctactgtgacttcagagacactgccaagcagccttagccctagtgtagagaaatacaggtatcaggatgaagatacacctcctcaagagcatatttccccacaaatcacaaatgaagtgataggtccagaattggttcatgtctcagagaagaacttatcagagattgagaatgtccatggatttgtttctcattctcatatttcaccaataaaggttaatggcacagatgcagattatgaatatgaagaaatcacacttgaaaggggaaattcagggcttggtttcagcattgcaggaggtacggacaacccacacattggagatgactcaagtattttcattaccaaaattatcacagggggagcagccgcccaagatggaagattgcgggtcaatgactgtatattacgagtaaatgaagtagatgttcgtgatgtaacacatagcaaagcagttgaagcgttgaaagaagcagggtctattgtacgcttgtatgtaaaaagaaggaaaccagtgtcagaaaaaataatggaaataaagctcattaaaggtcctaaaggtcttgggtttagcattgctggaggtgttggaaatcagcatattcctggggataatagcatctatgtaaccaaaataattgaaggaggtgcagcacataaggatggcaaacttcagattggagataaacttttagcagtgaataacgtatgtttagaagaagttactcatgaagaagcagtaactgccttaaagaacacatctgattttgtttatttgaaagtggcaaaacccacaagtatgtatatgaatgatggctatgcaccacctgatatcaccaactaatacagtcgttttgaagctaaaatacatgatttacgggagcagatgatgaatagtagtattagttcagggtcaggttctcttcgaactagccagaagcgatccctctatgtcagagccctttttgattatgacaagactaaagacagtgggcttcccagtcagggactgaacttcaaatttggagatatcctccatgttattaatgcttctgatgatgaatggtggcaagccaggcaggttacaccagatggtgagagcgatgaggtcggagtgattcccagtaaacgcagcagtcattcaatgacaagcgtaaaaagaacctcttttcccgaaaattccccttctacaagaacaaggaccagagtgagcaggaaacaagtgatgctgaccgagatccctgacgacatgggatcaaaaggcctgaagcatgtaacttctaatgccagcgatagtgaaagtagttaccgt

SEQ ID NO: 301258 - DNA, 582 bp, Artificial Sequence
  derived and/or modified sequence
ggtggggatctacccccggggtcgccaggcgctgtctctgccgcggagttggaaacggcactgctgagtgaggttgaggggtgtctcggtgtgtgccctcttcctgattctggagaaaaatgccggtccggaagcaagatacccagagagcattgcaccttttggaggaatatcgttcaaaactaagccaaactgaagacagacagctcagaagttccatagaacgggttattaacatatttcagagcaacctctttcaggctttaatagatattcaagaattttatgaagtgaccttactggataatccaaaatgtatagatcgttcaaagccgtctgaaccaattcaacctgtgaatacttgggagatttccagccttccaagctctactgtgacttcagagacactgccaagcagccttagccctagtgtagagaaatacaggtatcaggatgaagatacacctcctcaagagcatatttccccacaaatcacaaatgaagtgataggtccagaattggttcatgtctcagagaagaacttatcagagattgagaatgtccatggatttgtttctcatt

SEQ ID NO: 301259 - DNA, 309 bp, Artificial Sequence
  derived and/or modified sequence
tgcgggggaagaggcggcctcaggtctaggctctttggggaggggacgctttcgaggagagtttggaagccgacttctgtctgttcttaatttggaggggtacccactccaaggaaaagctttccacgttgacagacaactgctgcgttttgagactctttctttgacttggtgtgtgccctcttcctgattctggagaaaaatgccggtccggaagcaagatacccagagagcattgcaccttttggaggaatatcgttcaaaactaagccaaactgaagacagacagctcagaagttccatagaacg

SEQ ID NO: 301260 - DNA, 543 bp, Artificial Sequence
  derived and/or modified sequence
agcaaggagaaaggcaagcgagaggagggggcccgagcagggcgggcggccagtcccgctggtcccctctcagcgctctgcggccgctgctggctcaggggccaagggtcggagcgcttcacccgcccgtacccagtagcaggtgtgtgccctcttcctgattctggagaaaaatgccggtccggaagcaagatacccagagagcattgcaccttttggaggaatatcgttcaaaactaagccaaactgaagacagacagctcagaagttccatagaacgggttattaacatatttcagagcaacctctttcaggctttaatagatattcaagaattttatgaagtgaccttactggataatccaaaatgtatagatcgttcaaagccgtctgaaccaattcaacctgtgaatacttgggagatttccagccttccaagctctactgtgacttcagagacactgccaagcagccttagccctagtgtagagaaatacaggtatcaggatgaagatacacctcctcaagagcatatttccccac

SEQ ID NO: 301261 - DNA, 195 bp, Artificial Sequence
  derived and/or modified sequence
ccaaggcgctggagtctccaggtgtatcccaccgcccctaagaggcagcggccttccagaatgggtcacgacgataatggaagcttcgtcgagaagaaacgcggtaagtgcggagagaagaaagaacgctctgattgctattatgtgtgtgtggagcgcagccgacaccggaggttgcactttgtgctctattag

SEQ ID NO: 301262 - DNA, 2151 bp, Artificial Sequence
  derived and/or modified sequence
atgggtgagaccaaaattatatatcacctggatgggcaggagacaccctaccttgttaaactgcccctgcctgcagagagagttaccttggccgacttcaaaggcgtgttgcagcggcccagctataaatttttctttaagagtatggatgatgatttcggcgtcgttaaggaggagataagcgatgacaatgccaaactgccctgcttcaacgggcgggtggtgtcatggctggtgtctgcggaggggtctcatcccgatccagccccattctgcgctgacaatccaagcgagttgccccctccaatggagagaacgggtgggatcggcgactcacgccctcctagcttccatccccacgctggagggggatctcaagagaatctggacaacgacactgagactgattctcttgtatcagcacagcgggagagaccacggagacgggatggtcctgaacacgccaccagacttaatggcaccgcaaaaggagaacgtaggagggaacccggtggttacgacagttcttcaacgctgatgagcagtgagctggagaccacttcattttttgatagcgatgaagacgactcaacatctcggtttagttcttccaccgaacagagtagcgctagccgcctgatgcgcagacacaaacggagacggaggaaacagaaagtgagtcggattgagagatcgtccagcttttccagtatcactgactctaccatgtcccttaacatcattacagtcacgctcaatatggaaaagtacaactttctcgggattagcattgtcgggcagtctaatgagaggggagatggcggcatttacatcggatctatcatgaaggggggagctgtggccgctgacggtcgtattgagcctggagacatgctgttgcaggtgaatgagatcaatttcgagaacatgtcaaacgacgatgctgtaagagtgcttcgcgaaatcgttcacaagccaggccctattactctaaccgtggccaagtgctgggacccctctcctcgaggatgcttcacattgccccgctccgaacccatcagacctattgatccagctgcctgggtgtcccacactgcagccatgactggtacgttccccgcatatgggatgagtccttcactttccacaataacaagcactagcagcagcataaccagcagcatccccgatactgagcgcctggacgactttcacttaagcattcacagtgatatggctgcgatcgtgaaggcaatggcatcgcccgaatccgggttggaggtgagggatcgtatgtggttgaaaataaccattcctaatgcgttcatcggctcggatgtggtggactggctctaccacaacgtcgaaggcttcaccgatcggagggaagctaggaaatacgcgagcaatttgctgaaagctggttttataaggcatacagtgaacaagattaccttctccgagcagtgttattatattttcggcgacctttgtgggaacatggccaacttaagtcttcacgaccacgatggtagttcaggtgccagcgatcaggataccctggcaccactgccacaccccggggcagccccatggcctatggcattcccgtaccagtacccaccccccccgcatccctataatccccacccagggtttccagaactgggatactcttacggtggaggctcagctagttcacaacattcagagggcagtagatctagcggctccaacaggagcggcagtgatagaagaaaagaaaaagaccctaaagccggcgacagcaagagcggaggctctgggtctgagtcagaccatacaacccgtagtagtctgcggggacctcgcgagagagcgcctagcgagaggagtgggcctgcggcgtccgagcattcccaccgttcgcaccactctctggcctcttcattaaggagtcaccatacccatccatcctacggccctccaggcgtacccccactttatgggccccctatgcttatgatgcctcccccccccgcggctatggggccacccggagcccccccagggcgggatctggcttctgtgccacccgagctgactgcatcacgtcagtcattcagaatggcgatgggcaaccccagcgaattcttcgtagatgttatgtag

SEQ ID NO: 301263 - DNA, 2172 bp, Artificial Sequence
  derived and/or modified sequence
atgggggagactaagatcatttatcacctggacgggcaggagaccccttacctcgtcaagctgcccttaccggccgaacgagtaacactggctgattttaagggagtcctgcagcggccaagctacaaattcttcttcaaatctatggacgatgatttcggcgtggtcaaagaggagatttcagacgacaacgcaaagctgccatgttttaatgggcgggtggtttcttggcttgtgagtgctgagggctcccatccggatccagctcctttctgcgctgataaccccagcgaattgcctcctccaatggaacgtactggagggatcggagactcccgtccccccagctttcaccctcacgcaggggggggctcacaggagaacctggacaacgatacagaaactgatagtctggtgtcagcacaaagggagagacctcgcaggcgagatggacctgaacacgccacgcgactaaatggaacagccaagggggagaggcgccgcgagcctggagggtatgactccagttccacattgatgtcaagcgagctggaaacgacatctttttttgattccgatgaggatgacagtacttcccgcttttcttcttccacagaacagtcttctgcgtcccgcctgatgcgaaggcataaacggcgaaggcgaaagcaaaaggtctcacgtattgaaaggagcagtagctttagctccatcacagatagtaccatgagcttgaacatcatcacagtcacactcaacatggaaaagtataactttttaggtatctccatcgtgggccaatcaaatgaaagaggcgacggcgggatctatatcggctccatcatgaagggcggggccgttgccgccgacggccgtatcgaacctggagacatgctcctgcaggtgaacgaaattaactttgagaacatgagtaatgatgacgccgtacgggtgcttcgcgagatcgttcataagccaggcccaataaccctgacagtggccaagtgttgggacccttcccccagaggttgttttactctgccgaggagcgagcccatccgcccaatagatccggctgcctgggtcagccacaccgctgctatgacaggcaccttcccagcctacggcatgtcaccgtctctgagcacgattaccagcacaagcagctccataacttccagtatcccagacaccgaacgcctggacgatttccacctttccatacactctgacatggccgcaattgttaaagcgatggcgagtccagaatcgggtttggaggtgcgcgatcggatgtggcttaagatcactataccgaatgcttttatagggtccgatgttgtggattggctgtaccacaatgtggaggggtttaccgatcgtcgggaggccaggaagtacgccagcaacctgctcaaagcgggtttcatcaggcacaccgttaataaaatcacattttccgagcagtgctattacatttttggtgacctttgcggcaatatggctaacctatcattacacgaccacgacgggtcctcaggcgcctccgatcaggataccctggcccctttgccgcatcccggtgcggccccttggccaatggctttcccataccaataccctccccctccccatccatacaacccacaccccgggtttccagaactggggtattcatacgggggcggcagcgctagctcacagcattctgagggttctaggtcctccggttcaaataggtccggtagcgatcgtaggaaggagaaggacccgaaagctggggacagtaagtccggcggttccggttccgagtccgatcataccaccaggtccagtctacgcggacccagagagagagcgccatcggaaaggtctggaccagcggcttccgagcatagccatcgcagtcatcatagccttgcctcctctctccgcagccatcatactcatccctcgtacgggccacccggggtgccgccgctgtatggaccacctatgctcatgatgccccccccacctgcagccatgggtcccccgggtgcccccccaggtcgggatcttgcgtctgtgccgcctgaactcaccgccagcagacagagcttccgcatggccatgggtaatccttctgagtttttcgtcgacgttatggtgttacggggatggggcgcctag

SEQ ID NO: 301264 - DNA, 2100 bp, Artificial Sequence
  derived and/or modified sequence
atgggggaaacaaaaatcatttaccatctagacggccaagaaacaccctatctggtgaaacttccattgcctgctgaacgggtcaccttagcggattttaagggcgtcctccagagacctagctacaagtttttcttcaagtcgatggacgacgattttggtgtcgtgaaggaggaaatctctgacgacaatgccaagctcccatgcttcaacggccgggtggtgtcctggctcgtgtccgcagaaggaagccacccggaccccgctcctttttgcgcggataaccctagtgaactgcccccaccaatggagcgcacaggaggaatcggcgactctcgacccccctcgttccatccccacgcgggcggcggcagccaggaaaatctggacaacgacacggaaacagacagtctagtgtctgcccagcgcgaaaggcctagaaggcgcgatggcccagagcatgccaccaggttaaatggcacagcaaagggcgaacggcggagagaacctggcggatacgactccagttccaccctcatgtctagtgaacttgagaccacatccttttttgactctgatgaagacgacagcacatcacgtttttcaagtagcacagaacagagctcagcttcaagattgatgagacgccataagcggcggcggcgaaagcagaaggtgtcacggattgaaaggagctcatctttttctagcattaccgactccaccatgtcattgaatattattacagtaactctgaacatggagaagtataattttcttggtattagcattgtaggccagtcgaacgaaaggggcgatggcgggatctacattggcagcatcatgaagggtggtgccgtggccgcagacggtcgaatcgaaccaggagacatgctgctgcaagtgaacgaaattaatttcgagaatatgtcgaacgacgatgctgtccgcgtgctccgggagatcgtacacaaaccaggccccattactctgactgtcgcgaagtgctgggatccctcaccaaggggctgtttcacgctgccccggaccatgaccggtaccttccccgcatacggaatgagcccttcactgagcaccattacctcgacctcaagctcaattaccagtagtattcccgataccgagcggctggatgacttccacctctctattcatagcgacatggcggccattgtgaaggccatggccagccctgagagcggattggaagtgagagacaggatgtggctcaaaattacaataccaaatgccttcatcggaagtgatgtggtcgattggctatatcacaacgtcgaaggtttcactgaccgtcgggaggcacgtaagtacgcctccaacctcctgaaggccggctttatccgccacacagtgaataagatcacattcagtgagcagtgttattatatttttggcgacctgtgtgggaatatggccaacctatcattgcacgatcacgatggatcgtcgggagcttcagatcaagacacccttgcccctttgcctcatcctggcgctgcaccgtggcctatggctttcccgtatcagtaccctcccccaccccatccttataatccacatcccggcttcccagagctgggatactcctacggaggaggttccgccagttctcagcactccgagggaagtcggtcctccgggagcaatcggtccggctccgatcgccggaaggaaaaagatccgaaagccggagatagcaaatcaggcggctccggatcagaaagtgaccacaccactcgttcaagtctgaggggcccaagagagagagccccatccgagagaagtgggcctgcagcatcggagcattcacacagatcccaccattcactggccagttccctaagaagccatcacacccacccttcatacggcccaccaggggtaccgccactttacgggccgcccatgttaatgatgcctccccctccagccgccatggggccacctggtgcccctcctgggagagacctcgctagtgtcccgcctgaactgaccgcatcccgccaatcgtttcgaatggccatgggtaatccctccgagtttttcgtcgatgttatgtag

SEQ ID NO: 301265 - DNA, 2151 bp, Artificial Sequence
  derived and/or modified sequence
atgggagagaccaagatcatctaccacctggatggccaggagaccccctacctggtgaagctgcccctgcctgctgagcgggtgaccctggccgacttcaagggcgtgctgcagaggcccagctacaagttcttcttcaagtccatggatgatgactttggagtggtgaaggaggagatcagtgatgacaatgccaagctgccctgcttcaacggccgggtggtgtcctggctggtgtctgctgagggcagccacccagaccctgcccccttctgtgccgacaaccccagcgagctgcccccacccatggagaggactggaggcattggagacagccggccccccagcttccacccccatgctgggggcggcagccaggagaacctggacaatgacacagaaacagacagcctggtgtctgcccagcgggagcggcccaggagaagagatggccctgagcacgccacccggctgaatggaacagccaagggggagaggagaagagagcccggcggctatgacagcagcagcaccctgatgagcagcgagctggagaccaccagcttctttgacagtgatgaagatgacagcaccagccgcttcagcagcagcacagagcagagcagcgccagccggctgatgagaagacacaagagaagaagaaggaagcagaaggtgtccagaattgaaagaagcagcagcttcagcagcatcacagacagcaccatgagcctgaacatcatcaccgtgaccctgaacatggagaagtacaacttcctgggcatcagcatcgtgggccagagcaatgaaagaggagatggcggcatctacatcggcagcatcatgaagggcggcgctgtggccgcagatggaagaattgagcccggggacatgctgctgcaggtgaatgagatcaactttgagaacatgagcaatgatgatgctgtgcgggtgctgcgggagatcgtgcacaagccaggccccatcaccctgactgtggccaagtgctgggaccccagcccccggggctgcttcaccctgcccaggtctgagcccatccggcccatcgaccctgctgcctgggtgagccacacagctgccatgacaggcaccttccctgcctacggcatgagccccagcctgagcaccatcaccagcaccagcagcagcatcaccagcagcatcccagacacagagcggctggatgacttccacctgagcatccacagcgacatggccgccatcgtgaaggccatggccagccctgagagcggcctggaggtgcgggacaggatgtggctgaagatcaccatccccaatgccttcatcggcagtgatgtggtggactggctgtaccacaacgtggagggcttcacagacagaagagaggccaggaaatatgccagcaacctgctgaaggccggcttcatccgccacacagtgaacaagatcaccttcagcgagcagtgctactacatctttggagacctgtgtggcaacatggccaacctgagcctgcatgaccatgatggcagcagcggggccagtgaccaggacaccctggcccccctgccccaccctggagctgccccctggcccatggccttcccctaccagtacccacctccaccccacccctacaacccccaccctggcttccctgagctgggctacagctatggaggcggcagcgccagcagccagcacagcgagggcagccgcagcagcggcagcaacagaagtggcagtgacaggaggaaggagaaggaccccaaggccggggacagcaagagcggcggcagcggcagcgagagtgaccacaccaccaggagcagcctgcggggcccccgggagcgggcccccagcgagaggagcggccctgctgccagcgagcacagccacaggagccaccacagcctggccagcagcctgcggagccaccacacccaccccagctatggccccccaggagtgccccccctgtatggcccccccatgctgatgatgcctcctcctcctgctgccatgggccccccaggggcccctcctggccgggacctggcctctgtgcccccagagctgacagccagccggcagagcttcaggatggccatgggcaaccccagcgagttctttgtggatgtgatgtag

SEQ ID NO: 301266 - DNA, 2172 bp, Artificial Sequence
  derived and/or modified sequence
atgggagagaccaagatcatctaccacctggatggccaggagaccccctacctggtgaagctgcccctgcctgctgagcgggtgaccctggccgacttcaagggcgtgctgcagaggcccagctacaagttcttcttcaagtccatggatgatgactttggagtggtgaaggaggagatcagtgatgacaatgccaagctgccctgcttcaacggccgggtggtgtcctggctggtgtctgctgagggcagccacccagaccctgcccccttctgtgccgacaaccccagcgagctgcccccacccatggagaggactggaggcattggagacagccggccccccagcttccacccccatgctgggggcggcagccaggagaacctggacaatgacacagaaacagacagcctggtgtctgcccagcgggagcggcccaggagaagagatggccctgagcacgccacccggctgaatggaacagccaagggggagaggagaagagagcccggcggctatgacagcagcagcaccctgatgagcagcgagctggagaccaccagcttctttgacagtgatgaagatgacagcaccagccgcttcagcagcagcacagagcagagcagcgccagccggctgatgagaagacacaagagaagaagaaggaagcagaaggtgtccagaattgaaagaagcagcagcttcagcagcatcacagacagcaccatgagcctgaacatcatcaccgtgaccctgaacatggagaagtacaacttcctgggcatcagcatcgtgggccagagcaatgaaagaggagatggcggcatctacatcggcagcatcatgaagggcggcgctgtggccgcagatggaagaattgagcccggggacatgctgctgcaggtgaatgagatcaactttgagaacatgagcaatgatgatgctgtgcgggtgctgcgggagatcgtgcacaagccaggccccatcaccctgactgtggccaagtgctgggaccccagcccccggggctgcttcaccctgcccaggtctgagcccatccggcccatcgaccctgctgcctgggtgagccacacagctgccatgacaggcaccttccctgcctacggcatgagccccagcctgagcaccatcaccagcaccagcagcagcatcaccagcagcatcccagacacagagcggctggatgacttccacctgagcatccacagcgacatggccgccatcgtgaaggccatggccagccctgagagcggcctggaggtgcgggacaggatgtggctgaagatcaccatccccaatgccttcatcggcagtgatgtggtggactggctgtaccacaacgtggagggcttcacagacagaagagaggccaggaaatatgccagcaacctgctgaaggccggcttcatccgccacacagtgaacaagatcaccttcagcgagcagtgctactacatctttggagacctgtgtggcaacatggccaacctgagcctgcatgaccatgatggcagcagcggggccagtgaccaggacaccctggcccccctgccccaccctggagctgccccctggcccatggccttcccctaccagtacccacctccaccccacccctacaacccccaccctggcttccctgagctgggctacagctatggaggcggcagcgccagcagccagcacagcgagggcagccgcagcagcggcagcaacagaagtggcagtgacaggaggaaggagaaggaccccaaggccggggacagcaagagcggcggcagcggcagcgagagtgaccacaccaccaggagcagcctgcggggcccccgggagcgggcccccagcgagaggagcggccctgctgccagcgagcacagccacaggagccaccacagcctggccagcagcctgcggagccaccacacccaccccagctatggccccccaggagtgccccccctgtatggcccccccatgctgatgatgcctcctcctcctgctgccatgggccccccaggggcccctcctggccgggacctggcctctgtgcccccagagctgacagccagccggcagagcttcaggatggccatgggcaaccccagcgagttctttgtggatgtgatggtgctgcggggctggggcgcctag

SEQ ID NO: 301267 - DNA, 2100 bp, Artificial Sequence
  derived and/or modified sequence
atgggagagaccaagatcatctaccacctggatggccaggagaccccctacctggtgaagctgcccctgcctgctgagcgggtgaccctggccgacttcaagggcgtgctgcagaggcccagctacaagttcttcttcaagtccatggatgatgactttggagtggtgaaggaggagatcagtgatgacaatgccaagctgccctgcttcaacggccgggtggtgtcctggctggtgtctgctgagggcagccacccagaccctgcccccttctgtgccgacaaccccagcgagctgcccccacccatggagaggactggaggcattggagacagccggccccccagcttccacccccatgctgggggcggcagccaggagaacctggacaatgacacagaaacagacagcctggtgtctgcccagcgggagcggcccaggagaagagatggccctgagcacgccacccggctgaatggaacagccaagggggagaggagaagagagcccggcggctatgacagcagcagcaccctgatgagcagcgagctggagaccaccagcttctttgacagtgatgaagatgacagcaccagccgcttcagcagcagcacagagcagagcagcgccagccggctgatgagaagacacaagagaagaagaaggaagcagaaggtgtccagaattgaaagaagcagcagcttcagcagcatcacagacagcaccatgagcctgaacatcatcaccgtgaccctgaacatggagaagtacaacttcctgggcatcagcatcgtgggccagagcaatgaaagaggagatggcggcatctacatcggcagcatcatgaagggcggcgctgtggccgcagatggaagaattgagcccggggacatgctgctgcaggtgaatgagatcaactttgagaacatgagcaatgatgatgctgtgcgggtgctgcgggagatcgtgcacaagccaggccccatcaccctgactgtggccaagtgctgggaccccagcccccggggctgcttcaccctgcccaggaccatgacaggcaccttccctgcctacggcatgagccccagcctgagcaccatcaccagcaccagcagcagcatcaccagcagcatcccagacacagagcggctggatgacttccacctgagcatccacagcgacatggccgccatcgtgaaggccatggccagccctgagagcggcctggaggtgcgggacaggatgtggctgaagatcaccatccccaatgccttcatcggcagtgatgtggtggactggctgtaccacaacgtggagggcttcacagaccggcgggaggccaggaaatatgccagcaacctgctgaaggccggcttcatccgccacacagtgaacaagatcaccttcagcgagcagtgctactacatctttggagacctgtgtggcaacatggccaacctgagcctgcatgaccatgatggcagcagcggggccagtgaccaggacaccctggcccccctgccccaccctggggccgccccctggcccatggccttcccctaccagtacccacctccaccccacccctacaacccccaccctggcttccctgagctgggctacagctatggaggcggcagcgccagcagccagcacagcgagggcagccgcagcagcggcagcaacagaagtggcagtgacaggaggaaggagaaggaccccaaggccggggacagcaagagcggcggcagcggcagcgagagtgaccacaccaccaggagcagcctgcggggcccccgggagcgggcccccagcgagaggagcggccctgctgccagcgagcacagccacaggagccaccacagcctggccagcagcctgcggagccaccacacccaccccagctatggccccccaggagtgccccccctgtatggcccccccatgctgatgatgcctcctcctcctgctgccatgggccccccaggggcccctcctggccgggacctggcctctgtgcccccagagctgacagccagccggcagagcttcaggatggccatgggcaaccccagcgagttctttgtggatgtgatgtag

SEQ ID NO: 301268 - DNA, 2151 bp, Artificial Sequence
  derived and/or modified sequence
atgggcgagaccaagatcatctaccacctggacggccaggagaccccctacctggtgaagctgcctttacctgccgagagagtaacactggccgatttcaagggagtgctgcaacggccaagttacaagttctttttcaagtcaatggatgacgacttcggcgtcgttaaagaagaaataagtgacgacaatgctaagcttccgtgtttcaatggccgggtggttagttggcttgtgagcgcagagggttcgcaccccgatcctgctcctttctgcgctgacaatccttcagagctgccacccccaatggagcgcacgggaggcatcggcgacagcagaccccccagcttccacccacacgcaggcggcgggtctcaggagaatttggataatgatacagagactgacagtcttgtatccgctcagagggagcgaccccggcgccgagatggaccagagcatgccacccggcttaatggaactgcaaagggggaaaggcggcgcgagcccggcggttatgacagttcctccacactcatgtcatcggagttggaaacaacgtcattttttgattctgatgaagacgactccacctcccggttcagctccagcacggagcagtcttcagcctcacgcttgatgcgcaggcacaaaaggagacgccgcaagcagaaggtgagccggattgagagatcctcttcgttctccagtatcactgactctactatgagtttgaacatcataaccgtcacactcaacatggaaaagtacaactttcttggtatctcaatcgtgggccagtcaaacgagaggggggacggagggatttacattgggagcataatgaagggcggggccgtggccgcagacggccgtatcgaaccgggggacatgctcttgcaggtcaatgagatcaacttcgagaacatgtcaaatgatgatgccgtaagagttctgcgagaaatcgtacataagcctggcccaattacgctgaccgtggcaaagtgctgggacccaagtccacgaggttgcttcacgctgccgcgaagcgaaccaattagaccaattgaccctgccgcttgggtctctcataccgcagccatgaccgggacattccctgcttatggcatgagcccttctctgtcgactattacctcaacatccagcagcatcacgtcttcaatccccgacactgagcgtcttgatgacttccatctgtcaatccactcggacatggccgccatcgttaaggctatggcctcaccagaatccggcctcgaggttcgcgaccgcatgtggctaaaaataacaattcctaatgcgtttatcggaagcgacgtcgttgactggctgtaccataatgtagaaggatttactgatcgacgtgaggccaggaaatatgccagcaaccttctaaaggctgggtttatccgtcacaccgtcaacaaaatcacgttcagcgagcagtgctattacatatttggggatctttgtggaaacatggccaatttgtcactgcacgatcatgatgggtcctccggtgcttcagatcaggacacactggctccactcccccacccaggggccgccccatggcctatggcatttccatatcagtatccaccccctccacacccctacaatcctcatcccggattcccagaactaggctatagctacgggggcggctctgcatcatctcagcactctgaaggctctagaagttccgggtcgaatcggtctggatcagaccgaagaaaggagaaagacccgaaagcaggcgactcaaaatccgggggttccggttccgagtctgatcacacaacacgctccagcttgcgtggccctagggagcgggcccctagcgagcgtagtgggcccgccgccagtgagcatagccatcgcagccatcattcactagcctccagtctgcgcagtcaccacacccacccttcatacgggccaccgggagtccctcccttgtacggtccacctatgcttatgatgccacctcccccggccgctatgggacctccaggggctccccccgggcgcgatttagcaagcgtacctcccgagctgacagcttcacgccagagtttccgcatggccatgggaaacccctcagagttctttgtggatgtgatgtag

SEQ ID NO: 301269 - DNA, 2172 bp, Artificial Sequence
  derived and/or modified sequence
atgggcgagaccaagatcatctaccacctggacggccaggagaccccctacctggtaaagctccccctgcccgcagaaagagtcaccctggctgacttcaaaggcgtcctgcaaagaccctcttacaaatttttcttcaagagtatggatgacgattttggcgtggtgaaagaggaaatctccgatgataacgctaagctgccttgtttcaacggccgggtcgttagttggctggtgagtgcggaggggtcacatcccgaccccgcccctttctgcgctgataatccgtccgagttgcctcctccaatggagaggacaggaggaatcggtgacagccggcccccctccttccatccccacgcagggggcggatcacaagaaaacctggacaatgatactgaaaccgattcacttgtatcggcccagagggaacgcccgcggcgacgggacgggcccgagcacgcaacgaggctcaacggaacagccaagggagagaggaggcgcgaacccggtggctatgacagtagtagtaccctgatgagttctgaattggagacaacctctttttttgactcagatgaagacgattccacgtctagattcagcagttctactgaacaatctagcgcatcgcggcttatgcgcaggcataaaaggaggcgtagaaagcagaaagttagtaggatcgagagatcgtcctccttcagctctataaccgattcaacaatgagcctcaacattattactgttaccctgaatatggaaaagtataactttttgggaattagcattgttggtcaatccaacgaaaggggagacggcggaatctacatcggctctattatgaagggtggggctgtcgctgccgatgggcgaatcgagccaggcgatatgttgttacaagtaaacgagatcaactttgagaacatgagtaatgatgacgcagtccgtgttctgcgcgagattgtccacaaacccggcccaattacgttgacagttgcgaagtgttgggacccgtcacctaggggctgttttaccctcccacgatccgaacctatacggcctatagatccagccgcttgggtcagccatactgccgccatgaccgggacttttccggcatatggcatgagcccttccctcagcaccatcacatcaacctcaagtagtatcacgtcctctatccctgatacagagagactcgacgattttcacctctctatacactcggacatggccgccatcgttaaggccatggcatctcccgaatcgggactggaagtgcgagaccgtatgtggctgaaaatcactattcctaacgccttcatcgggagtgatgtggtcgactggttgtaccataatgtggaagggtttactgaccgccgcgaagcacgcaaatacgcctcaaacctgctgaaagccggtttcattaggcacactgtgaataagatcacgttcagtgagcaatgttactatatctttggcgatctgtgtggaaatatggcgaatttgtctctgcacgatcacgacgggtcatctggcgcctcggatcaggatacccttgcacccctgccgcacccaggcgctgctccatggcccatggcatttccctatcagtatccccctcctccccacccgtataacccgcaccccgggttccccgaattgggatactcatacggtggcggtagtgcgagcagtcagcattcagaaggctcgcggagtagcggctcaaacaggagcgggtcggaccgcagaaaggaaaaggacccaaaggctggggactctaaatcaggaggcagtggatctgaatcagaccatacaaccagaagctcattgcggggacctagggagagggctccatccgagcgatcgggtcccgcggcctccgagcatagccatcgatcccaccacagcctcgctagctcactcaggagtcaccacacccatccctcttatggcccccccggtgtgccaccgctctatggtcctcctatgctaatgatgccccctccccccgcggccatgggccccccaggggcccctccaggacgggacctggcgagtgtgccgccagagctgactgcttccaggcagagctttcgtatggcaatgggtaatccgtccgaattcttcgttgacgtcatggtcctccggggctggggggcgtag

SEQ ID NO: 301270 - DNA, 2100 bp, Artificial Sequence
  derived and/or modified sequence
atgggcgagaccaagatcatctaccacctggacggccaggagaccccttatctcgtaaaacttccgctgccggcggaacgtgtgactctggctgacttcaagggcgtactgcagaggcccagctacaagtttttcttcaaatccatggatgatgacttcggtgttgtgaaggaggagatctcagacgataatgctaaactgccgtgcttcaacggtagggtggttagctggctggtttctgccgaaggatcccaccccgatccggcccctttttgtgccgataatccttcagagctgcctccccctatggaaagaacgggaggaattggcgacagccgtccgccaagcttccacccccacgcaggaggcggatcacaggagaacctggataatgacaccgagaccgactccctggtttcagctcagagggaacgaccaaggcgaagggatgggccagagcatgccacccgactgaacgggacagctaaaggagaaaggcgcagggagcccggagggtatgacagttctagtacgctcatgtccagcgagctggaaaccacatcattttttgactctgatgaagacgacagtacatcccggttttcttcgtcaaccgagcagagttcggcctctcggttaatgcgcagacacaaacgccggcgacgcaaacagaaagtctcacgaatcgaaagaagctcctcgtttagttctatcactgactcaaccatgagcttgaacattatcacagtgactttgaacatggagaagtacaatttcctcggaatcagtattgtggggcagtccaacgagcgaggtgatgggggaatctatatcgggagtataatgaaaggaggtgctgtggccgcagacggtcggatagaacctggagatatgctcttacaggtgaatgagattaattttgagaatatgagcaacgatgacgcagttcgggtgctgcgcgagattgttcacaaacctggcccgataacgctcaccgtggccaagtgttgggacccatcccctagggggtgtttcaccctgccgcgtacaatgactggcacctttcctgcctacggaatgagtccttccctgtccacaataacgtcaacatcatcatcaatcactagctccattcctgacactgaacggctcgacgactttcacctctcaatccacagcgatatggccgcaatcgtgaaggcgatggccagcccggagtcgggacttgaggtgcgggacagaatgtggttgaaaatcacaattcccaacgcgtttattggttccgatgtagtggactggctgtaccacaatgtagaaggtttcaccgaccgcagagaagctaggaaatacgcctcaaaccttttaaaggccggtttcataagacacactgtgaacaagataacgtttagcgagcaatgctactacatcttcggtgacttgtgcggtaatatggctaacctttccttacatgaccacgacggatcatcaggggcttccgaccaggatacgctggctccccttcctcacccaggcgccgctccttggcctatggcgtttccataccagtatccgcccccaccacatccctataatccccatccaggttttcccgaattagggtacagctacggcgggggctcagcgtcatcccagcattcggaagggtctcgctctagtgggagcaaccgtagcgggagtgaccgtcggaaagagaaggatcctaaggcaggcgattctaaatccggaggctctgggagtgagtcagaccacacaacccgttcgagcttgaggggtcctcgagaaagagccccatcggaacggtctggtcccgctgctagtgaacactctcaccggtcacaccactctctggcctcatctctacgctcgcaccacactcacccctcatacggcccccccggcgtcccccctttgtatggacccccaatgttaatgatgcctcctccaccagctgccatgggcccgccgggtgccccacccgggagagatttagcaagtgtcccaccggaactcacagcctcgcgccagtcttttaggatggccatggggaatccatctgagtttttcgttgatgtgatgtag

SEQ ID NO: 301271 - DNA, 2151 bp, Artificial Sequence
  derived and/or modified sequence
atgggcgagacaaaaatcatttatcaccttgacggtcaggagacaccctatctcgtgaagttgcccttgcctgccgagcgggtgacattggccgactttaaaggggtgctgcaaagaccaagttataaattcttcttcaaaagcatggatgacgattttggcgtcgtgaaggaggaaattagcgatgacaacgcaaagcttccatgttttaatggtagggtagtatcttggctcgtatctgccgagggcagccaccccgaccccgcacctttttgcgccgacaaccccagcgagctaccccctcccatggagagaacaggaggcattggggattctcgacccccttcattccaccctcatgctggcggtggcagccaagagaacctggacaacgacacggagaccgactccctcgtgtccgcccaacgtgagaggccccgacgtcgggatggcccagaacacgccactcgcctcaacggcactgcaaaaggagagagacgcagggagccagggggttacgacagctctagcacactgatgtctagcgaactggagacaacatccttcttcgattccgatgaggacgattcaacctcccgcttttcatccagtacagagcagtctagcgccagtagacttatgcgacgccacaagagacggcgaaggaagcagaaggtgtcacggatcgagcgaagtagcagcttttcctctatcaccgactcgactatgtctttgaacatcatcacagttactctaaatatggagaagtataactttttgggcatctctatcgttggtcagagcaacgagaggggtgatggaggaatatacattggtagtataatgaaagggggtgccgtggccgcagatggaagaatagagcccggagacatgttgttacaggtaaacgagattaactttgagaatatgtccaacgatgacgcagtccgggtgctacgcgagattgtgcacaagccgggtccgatcaccctgacagtcgccaaatgttgggacccttccccaagaggctgttttacgcttccccgaagcgaaccgatacggcctatcgatcctgctgcttgggttagccatactgctgccatgacgggtacgttcccagcctatggaatgtctccgtcattgtctactatcaccagtacatcaagctcaattacgagtagcattccggataccgaacgactcgatgatttccacctttcaatccatagcgacatggcggctattgtgaaggccatggccagcccagagtccggtctggaggtcagggacaggatgtggctgaagattactattccaaacgctttcattggatccgacgtagtggattggctgtaccataacgtggagggtttcactgaccgacgcgaggccagaaaatacgcctctaacctactaaaggccggattcatcagacatacagtgaacaagatcaccttctcagagcaatgctactacattttcggcgatctgtgcggaaatatggcaaacctgtcattgcacgatcatgatggtagtagtggcgcaagcgatcaggataccctcgccccattgccgcaccccggtgctgcaccctggcccatggcttttccctatcagtacccacctccccctcacccatacaatccccacccaggctttcccgaactcggttactcctatggagggggttctgctagttctcagcatagcgagggctcacgctccagcggatctaaccgttccggaagcgatcggagaaaggagaaagatcccaaagcgggagatagtaagtccggaggcagcggatccgagtcagaccacaccactcggtcttcgcttcgcggaccaagagaaagagcaccaagtgaacgttcaggacccgctgcatccgaacactctcatcggtcccatcacagcctagcaagcagtttgcgtagtcatcacacccacccctcttacggtccaccaggagtgccacctctctatggcccaccgatgctgatgatgcccccacctcctgccgctatgggaccacctggagcccctcctgggagagacctggctagcgtaccaccagagctgaccgcaagtcgtcaatcttttaggatggcgatgggaaacccatcggagttctttgtggatgtgatgtag

SEQ ID NO: 301272 - DNA, 2172 bp, Artificial Sequence
  derived and/or modified sequence
atgggtgaaacaaagatcatatatcacttggatggacaagagaccccgtacctcgtgaaattaccactgcccgcagagcgggtcactctggctgatttcaaaggggttcttcaacgaccatcttacaaatttttttttaagagtatggatgatgacttcggagtggtgaaggaagaaatcagtgatgacaatgccaagctcccctgttttaatgggagggtggtgagctggctggtatctgcagagggttcgcaccccgaccccgcaccgttttgtgcagataacccctccgagctgccaccccctatggaacgaaccggtggcatcggcgattcaagacctccctcatttcatccccacgccggaggaggtagtcaggagaacctagataacgataccgagacagattctttggtaagtgctcagcgggaacggccacgtcggagagatgggcctgagcatgccacgcggttgaatgggaccgccaagggggagcggagacgtgaaccaggcggatacgactcaagttccaccttgatgtcctcagagctggaaaccaccagcttttttgacagtgacgaggacgactccaccagtcgcttctcctccagcactgagcagtctagtgcaagtcgcctgatgcggagacataagcggaggcggagaaagcaaaaagtgagccgaattgaacgcagtagcagtttttcctccatcaccgactctaccatgagccttaatataattacagtaactttaaatatggagaagtacaattttttgggcatctctatcgtgggacagagcaacgagagaggggatggaggcatttatattggctctattatgaaaggcggagccgtcgctgccgatggcagaatagagcccggagacatgctactccaagttaacgagattaactttgagaatatgagcaacgatgatgccgtgagagttctaagagagattgtgcacaagccaggtcccataacccttactgtggctaagtgttgggaccctagccctcggggatgcttcacactgccgcgatcagagcccatacgaccaatcgatcctgcggcatgggtgtcccacaccgccgctatgactggtaccttcccagcctatgggatgagcccctccctgtcaaccattacatctacgtcatccagtattacaagctccattcccgatactgaacgccttgacgacttccacttatcaatccactccgatatggccgctatcgtgaaggccatggcgtctcccgagtctgggcttgaggtgagggatcgcatgtggctaaaaataaccattcccaacgcatttatcggctctgacgtggtcgactggctctatcataatgtggagggattcaccgacagaagagaggcgaggaagtatgcgtccaatctgctcaaagccggattcatcagacacaccgtgaataaaatcaccttctccgaacagtgctattacattttcggggacctgtgtggcaatatggccaatctgtctctacatgaccacgacggctcatcaggtgcctccgaccaggacactcttgcacccctcccacaccctggtgctgctccttggccaatggcttttccctatcagtatcctccccctccccatccttacaacccgcaccctggcttcccagaactggggtatagctacgggggtgggtccgccagcagccagcacagcgaaggctcccgctcgagcgggagcaaccggtccgggtcggaccgaaggaaggaaaaagatccgaaggccggagactcgaagagcggaggatctggttccgagtctgatcatacaacccgtagcagcttacgcggtcctagggaaagggccccttcagaacggtcggggccagcagcatccgagcattcgcatcggagccaccactcactggccagcagtcttcgctcccaccacactcatccatcatacggcccaccaggggtcccgccactctacggcccacctatgcttatgatgccccctcctcctgcagccatggggcctcctggagcgccaccaggacgggatctcgctagcgtcccccctgagctcacggcctcaaggcagtccttccgaatggccatggggaatccctcagagttttttgtcgatgtgatggtactcagagggtggggggcttag

SEQ ID NO: 301273 - DNA, 2100 bp, Artificial Sequence
  derived and/or modified sequence
atgggagagactaagattatctatcatctggatggccaagagactccatacctggtgaaactgcccctgccagccgagagagtgacactggcagactttaagggggttctgcagcgcccttcctataaattctttttcaaaagtatggacgatgacttcggtgtggtgaaggaggaaattagcgacgataatgccaaacttccctgttttaatggcagagttgtaagctggttagtctcagctgaaggctctcaccccgacccagcgccattttgcgctgacaacccgtcagagctgcccccacctatggagagaacaggcggaatcggagactcccggccaccatccttccacccccatgctgggggaggcagccaggaaaatttggataatgacaccgagacagattctctcgtcagcgctcagcgggagagacctagaagaagagatgggccagagcatgctacaagactcaatggtacagcaaagggggagcggcgtagagagcccggtggatacgacagttcctcaacgctcatgagctcagaactcgagacaactagtttctttgattccgacgaggatgacagcacctcgagattttcctcctcaaccgagcagtccagcgccagtagactgatgagaaggcacaagcggagacggaggaagcaaaaggtgagccggattgagcgtagcagctcattcagctccatcaccgatagcacaatgtccctgaatatcattactgtgacccttaacatggagaagtataattttcttggcatctcaatcgtcggacagtctaacgagaggggcgatggagggatctatatcggctccataatgaagggaggagccgtcgccgcagatggccgaatcgaaccgggtgacatgctgctgcaagtaaatgaaatcaatttcgaaaatatgtctaacgacgacgccgtccgcgtgttacgagagattgtccacaagccaggccctattaccctcaccgtagctaagtgctgggacccctcccccagaggctgcttcactttgcctaggaccatgactggtaccttccccgcatatggaatgagtcccagtttgagtacgatcacatctacgtcatcatcgatcacatcctccatccccgacacggagagactcgatgattttcacctatctatccattcagacatggcagcaatcgtgaaggcgatggcctctcctgagagcgggctcgaggtgcgagatcgtatgtggctgaaaattacgatcccaaacgcctttatcggctctgatgtggtcgactggctgtaccacaatgtagagggcttcactgaccgtcgcgaggccagaaaatacgcaagcaacctacttaaagccggattcataagacataccgtcaataaaatcaccttctcagagcagtgttactacatattcggtgacctctgcggcaatatggccaatctgtctctacatgatcacgacggaagttcaggcgctagtgaccaagatacattagctccattgccacacccaggagctgccccttggcccatggcattcccataccagtacccgcctccccctcacccttacaacccacatcctgggtttccagagctaggctacagctacggcggaggcagcgcttctagccaacacagcgagggtagccggagctctggttcgaacaggtctggttctgatagaagaaaggagaaagacccaaaggccggtgattccaagtccgggggttccgggtctgagtctgaccataccacccgctcatccctgcgcggacccagagaacgggcacccagtgagcggagtggaccagcagcctccgaacactcccatcgctctcaccattcactggccagcagcctgagatctcatcacacccatccctcatacggcccaccaggagttcctccactgtatggccctcccatgctgatgatgccccctccacctgccgctatgggacctcccggtgcacctccaggcagagacctggcctccgtccctcctgagctgaccgctagtcggcagagtttccgcatggctatgggcaacccttccgagttctttgtagacgtaatgtag

SEQ ID NO: 301274 - DNA, 2151 bp, Artificial Sequence
  derived and/or modified sequence
atgggcgagaccaagatcatctaccacctggacggccaggagaccccctacctggtgaagctgcccctgcccgccgagagagtgaccctggccgacttcaagggcgtgctgcagagacccagctacaagttcttcttcaagagcatggacgacgacttcggcgtggtgaaggaggagatcagcgacgacaacgccaagctgccctgcttcaacggcagagtggtgagctggctggtgagcgccgagggcagccaccccgaccccgcccccttctgcgccgacaaccccagcgagctgcccccccccatggagagaaccggcggcatcggcgacagcagaccccccagcttccacccccacgccggcggcggcagccaggagaacctggacaacgacaccgagaccgacagcctggtgagcgcccagagagagagacccagaagaagagacggccccgagcacgccaccagactgaacggcaccgccaagggcgagagaagaagagagcccggcggctacgacagcagcagcaccctgatgagcagcgagctggagaccaccagcttcttcgacagcgacgaggacgacagcaccagcagattcagcagcagcaccgagcagagcagcgccagcagactgatgagaagacacaagagaagaagaagaaagcagaaggtgagcagaatcgagagaagcagcagcttcagcagcatcaccgacagcaccatgagcctgaacatcatcaccgtgaccctgaacatggagaagtacaacttcctgggcatcagcatcgtgggccagagcaacgagagaggcgacggcggcatctacatcggcagcatcatgaagggcggcgccgtggccgccgacggcagaatcgagcccggcgacatgctgctgcaggtgaacgagatcaacttcgagaacatgagcaacgacgacgccgtgagagtgctgagagagatcgtgcacaagcccggccccatcaccctgaccgtggccaagtgctgggaccccagccccagaggctgcttcaccctgcccagaagcgagcccatcagacccatcgaccccgccgcctgggtgagccacaccgccgccatgaccggcaccttccccgcctacggcatgagccccagcctgagcaccatcaccagcaccagcagcagcatcaccagcagcatccccgacaccgagagactggacgacttccacctgagcatccacagcgacatggccgccatcgtgaaggccatggccagccccgagagcggcctggaggtgagagacagaatgtggctgaagatcaccatccccaacgccttcatcggcagcgacgtggtggactggctgtaccacaacgtggagggcttcaccgacagaagagaggccagaaagtacgccagcaacctgctgaaggccggcttcatcagacacaccgtgaacaagatcaccttcagcgagcagtgctactacatcttcggcgacctgtgcggcaacatggccaacctgagcctgcacgaccacgacggcagcagcggcgccagcgaccaggacaccctggcccccctgccccaccccggcgccgccccctggcccatggccttcccctaccagtaccccccccccccccacccctacaacccccaccccggcttccccgagctgggctacagctacggcggcggcagcgccagcagccagcacagcgagggcagcagaagcagcggcagcaacagaagcggcagcgacagaagaaaggagaaggaccccaaggccggcgacagcaagagcggcggcagcggcagcgagagcgaccacaccaccagaagcagcctgagaggccccagagagagagcccccagcgagagaagcggccccgccgccagcgagcacagccacagaagccaccacagcctggccagcagcctgagaagccaccacacccaccccagctacggcccccccggcgtgccccccctgtacggcccccccatgctgatgatgccccccccccccgccgccatgggcccccccggcgccccccccggcagagacctggccagcgtgccccccgagctgaccgccagcagacagagcttcagaatggccatgggcaaccccagcgagttcttcgtggacgtgatgtag

SEQ ID NO: 301275 - DNA, 2172 bp, Artificial Sequence
  derived and/or modified sequence
atgggcgagaccaagatcatctaccacctggacggccaggagaccccctacctggtgaagctgcccctgcccgccgagagagtgaccctggccgacttcaagggcgtgctgcagagacccagctacaagttcttcttcaagagcatggacgacgacttcggcgtggtgaaggaggagatcagcgacgacaacgccaagctgccctgcttcaacggcagagtggtgagctggctggtgagcgccgagggcagccaccccgaccccgcccccttctgcgccgacaaccccagcgagctgcccccccccatggagagaaccggcggcatcggcgacagcagaccccccagcttccacccccacgccggcggcggcagccaggagaacctggacaacgacaccgagaccgacagcctggtgagcgcccagagagagagacccagaagaagagacggccccgagcacgccaccagactgaacggcaccgccaagggcgagagaagaagagagcccggcggctacgacagcagcagcaccctgatgagcagcgagctggagaccaccagcttcttcgacagcgacgaggacgacagcaccagcagattcagcagcagcaccgagcagagcagcgccagcagactgatgagaagacacaagagaagaagaagaaagcagaaggtgagcagaatcgagagaagcagcagcttcagcagcatcaccgacagcaccatgagcctgaacatcatcaccgtgaccctgaacatggagaagtacaacttcctgggcatcagcatcgtgggccagagcaacgagagaggcgacggcggcatctacatcggcagcatcatgaagggcggcgccgtggccgccgacggcagaatcgagcccggcgacatgctgctgcaggtgaacgagatcaacttcgagaacatgagcaacgacgacgccgtgagagtgctgagagagatcgtgcacaagcccggccccatcaccctgaccgtggccaagtgctgggaccccagccccagaggctgcttcaccctgcccagaagcgagcccatcagacccatcgaccccgccgcctgggtgagccacaccgccgccatgaccggcaccttccccgcctacggcatgagccccagcctgagcaccatcaccagcaccagcagcagcatcaccagcagcatccccgacaccgagagactggacgacttccacctgagcatccacagcgacatggccgccatcgtgaaggccatggccagccccgagagcggcctggaggtgagagacagaatgtggctgaagatcaccatccccaacgccttcatcggcagcgacgtggtggactggctgtaccacaacgtggagggcttcaccgacagaagagaggccagaaagtacgccagcaacctgctgaaggccggcttcatcagacacaccgtgaacaagatcaccttcagcgagcagtgctactacatcttcggcgacctgtgcggcaacatggccaacctgagcctgcacgaccacgacggcagcagcggcgccagcgaccaggacaccctggcccccctgccccaccccggcgccgccccctggcccatggccttcccctaccagtaccccccccccccccacccctacaacccccaccccggcttccccgagctgggctacagctacggcggcggcagcgccagcagccagcacagcgagggcagcagaagcagcggcagcaacagaagcggcagcgacagaagaaaggagaaggaccccaaggccggcgacagcaagagcggcggcagcggcagcgagagcgaccacaccaccagaagcagcctgagaggccccagagagagagcccccagcgagagaagcggccccgccgccagcgagcacagccacagaagccaccacagcctggccagcagcctgagaagccaccacacccaccccagctacggcccccccggcgtgccccccctgtacggcccccccatgctgatgatgccccccccccccgccgccatgggcccccccggcgccccccccggcagagacctggccagcgtgccccccgagctgaccgccagcagacagagcttcagaatggccatgggcaaccccagcgagttcttcgtggacgtgatggtgctgagaggctggggcgcctag

SEQ ID NO: 301276 - DNA, 2100 bp, Artificial Sequence
  derived and/or modified sequence
atgggcgagaccaagatcatctaccacctggacggccaggagaccccctacctggtgaagctgcccctgcccgccgagagagtgaccctggccgacttcaagggcgtgctgcagagacccagctacaagttcttcttcaagagcatggacgacgacttcggcgtggtgaaggaggagatcagcgacgacaacgccaagctgccctgcttcaacggcagagtggtgagctggctggtgagcgccgagggcagccaccccgaccccgcccccttctgcgccgacaaccccagcgagctgcccccccccatggagagaaccggcggcatcggcgacagcagaccccccagcttccacccccacgccggcggcggcagccaggagaacctggacaacgacaccgagaccgacagcctggtgagcgcccagagagagagacccagaagaagagacggccccgagcacgccaccagactgaacggcaccgccaagggcgagagaagaagagagcccggcggctacgacagcagcagcaccctgatgagcagcgagctggagaccaccagcttcttcgacagcgacgaggacgacagcaccagcagattcagcagcagcaccgagcagagcagcgccagcagactgatgagaagacacaagagaagaagaagaaagcagaaggtgagcagaatcgagagaagcagcagcttcagcagcatcaccgacagcaccatgagcctgaacatcatcaccgtgaccctgaacatggagaagtacaacttcctgggcatcagcatcgtgggccagagcaacgagagaggcgacggcggcatctacatcggcagcatcatgaagggcggcgccgtggccgccgacggcagaatcgagcccggcgacatgctgctgcaggtgaacgagatcaacttcgagaacatgagcaacgacgacgccgtgagagtgctgagagagatcgtgcacaagcccggccccatcaccctgaccgtggccaagtgctgggaccccagccccagaggctgcttcaccctgcccagaaccatgaccggcaccttccccgcctacggcatgagccccagcctgagcaccatcaccagcaccagcagcagcatcaccagcagcatccccgacaccgagagactggacgacttccacctgagcatccacagcgacatggccgccatcgtgaaggccatggccagccccgagagcggcctggaggtgagagacagaatgtggctgaagatcaccatccccaacgccttcatcggcagcgacgtggtggactggctgtaccacaacgtggagggcttcaccgacagaagagaggccagaaagtacgccagcaacctgctgaaggccggcttcatcagacacaccgtgaacaagatcaccttcagcgagcagtgctactacatcttcggcgacctgtgcggcaacatggccaacctgagcctgcacgaccacgacggcagcagcggcgccagcgaccaggacaccctggcccccctgccccaccccggcgccgccccctggcccatggccttcccctaccagtaccccccccccccccacccctacaacccccaccccggcttccccgagctgggctacagctacggcggcggcagcgccagcagccagcacagcgagggcagcagaagcagcggcagcaacagaagcggcagcgacagaagaaaggagaaggaccccaaggccggcgacagcaagagcggcggcagcggcagcgagagcgaccacaccaccagaagcagcctgagaggccccagagagagagcccccagcgagagaagcggccccgccgccagcgagcacagccacagaagccaccacagcctggccagcagcctgagaagccaccacacccaccccagctacggcccccccggcgtgccccccctgtacggcccccccatgctgatgatgccccccccccccgccgccatgggcccccccggcgccccccccggcagagacctggccagcgtgccccccgagctgaccgccagcagacagagcttcagaatggccatgggcaaccccagcgagttcttcgtggacgtgatgtag

SEQ ID NO: 301277 - DNA, 5254 bp, Artificial Sequence
  derived and/or modified sequence
gccgcggccaccggaagagtcgcggtcgccagtccagtcgggagagtggggagcggaagcggcggccgcggcggcggcgggcggcgctgggacccggtagcggccggagaacaagggagctggcgccgccagcagccgccgagctgggttgagccgctgggccgcgccgcgcgccgccgccgtctgggaggctcggcccggccgcccgagcaggccgcgcgcgggccgccgggcccgaggccagagccatgggcgagaccaagatcatctaccacttggatgggcaggagacgccgtaccttgtgaagctgcccctgcccgccgagcgcgtcaccttggcggactttaagggcgttttgcagcgacccagctataagttcttcttcaagtctatggacgacgatttcggagtggtgaaggaggagatctcggatgacaatgccaagctaccatgcttcaatggccgggtggtgtcctggctggtgtcagctgagggctcacacccagacccagcccccttctgtgctgataacccatcggagctgccaccacctatggagcgcacgggaggcatcggggactcccgacccccatccttccaccctcatgctggtgggggcagccaggagaacctggacaatgacacagagacggactctttggtgtctgcccagcgagagcggccacgccggagggatggcccagagcatgcaacccggctaaatggaactgcgaagggggaacggcggcgagaaccagggggttatgatagctcatccacccttatgagcagtgagctggagaccaccagcttctttgactcagatgaggatgactccaccagcaggttcagcagctccacagaacagagcagtgcctcacgcctgatgagaagacacaagcggcggcggcggaagcagaaggtttctcggattgagcggtcctcgtccttcagcagcatcacggactccaccatgtcactcaacatcatcacggtcactctcaacatggaaaaatataacttcttgggcatctccattgtgggccaaagcaacgagcgtggtgacggcggcatctacattggctctatcatgaagggtggggccgtggctgctgatggacgcatcgagccaggagatatgttgttacaggtaaacgagatcaactttgagaacatgagtaatgacgatgcagtccgggtactgcgggagattgtgcacaaaccggggcccatcaccctgactgtagccaagtgctgggacccaagtccacgtggttgcttcacattgcccaggagcgagcccatccggcccattgaccctgcggcctgggtctcccacactgcagccatgaccggcaccttccctgcatacggcatgagcccctccctgagcaccatcacctccaccagctcctccatcaccagttccatccctgacacagagcgcctagacgacttccacttgtccatccacagtgacatggctgccatcgtaaaagccatggcctcccctgaatcagggttggaggtccgtgaccgcatgtggctcaagattaccatccctaatgctttcatcggctcagatgtggtggactggctgtaccacaatgtggaaggcttcacggaccggagggaggcccgcaagtatgccagcaacctgctgaaagctggcttcatccgccataccgtcaacaagatcaccttctccgagcagtgctactacatcttcggtgacctctgcggcaacatggccaacctgtctctccacgatcacgatggctccagtggcgcctctgaccaggacacactggcccctttgccgcacccgggggccgccccttggcccatggctttcccgtaccagtacccgccacccccgcacccatacaacccgcacccgggcttcccggagctgggctacagctacggcgggggcagcgccagcagtcagcacagcgaaggcagtcggagcagtggctccaaccgtagcggcagcgatcggaggaaggagaaggacccgaaggccggggactccaagtccgggggcagcggcagcgaatcggaccacaccacacgcagcagcctgcgggggccgcgggagcgggcgcccagcgagcgctcagggccggcggccagcgagcacagccaccgcagccaccattccctggccagcagccttcgcagccaccacacacacccgagctacggtcctcccggagtgccccctctctacggcccccccatgctgatgatgcccccgccgcccgcggccatggggcccccaggagcccctccgggccgcgacctggcctcagtgcccccggaactgaccgccagcagacagtccttccgcatggccatgggaaaccccagtgagttctttgtggatgtgatgtgagcagggcccctcccccagctccattccgctcccaccccagccggctgcgttcctctctccatccgtccgtcttttttactttgtctggtacctgaaagggaaataaaaggaactaaatccaggtgcgctaactgctcgcagggtgctgcgagggtggggtgcacctaccgattggctctgcagccccctaacctgcctctggccccagttcgtttcctctgcccactaatccctgcgcaggacttcccaggaccccttttgtctctgggaccagacttgttggtgctaccccttactcccctctgcaacccccattttgggagttgaccccagcaatgaccttggtggcacgctcactccctcattctctcgtttcccctttagctccctttcaccatttattcagctacatcatccctctattaaccccaccccatcaggcacgtgtgcaaacctcttgactttaccccacattactgaaaccaaaatatatttgcttcatctgcccctactaaccatccccctgcctgctgcctcagtcctgcaacctaaagctgtagtcgcctccaatagccatccatgccatccctgcctgtgcctagatcagaggcccagagggccccctcagttgcctgagcagctggtggcttccagggagcatctctgctctacccctgccccatgcctgccctgcgtgctggttccttcagacccctaaccctactaaccagcaggctcatctcacctccaggcctgaaacatttcttttctttcttttttcctcccccaatttaccctgggcctggagcagccaagaatttcgggctgtttgactttctgtgagcccccagcgaggggaggcccagcctccgaggagaccaggaaccctgcttcagcagcccctcagggcttcccaaggatgtccagcccccacacccacacgttaacataatgagtcactaggcttctggggagggcccaacttcacccatgcatgagagactctcctcctttccagagagaatcggatcgcaccacgtgtggcagcctgcggcggggggaggggggcctctttagctctctttatctttctctctcactcatgtatgcatacatgcacagagatgcatacacaggtgcctatgcaagttcatttaagcctcagggctggtccctgcccaaagggctggaccctcctaatcctctcctaggttgtggggctggtcccctgacacccttctccccttcctggtagaccttaaacctcgcacacatgtccccagcattttctcacctggataaagcccataagctgggtctcaggctgggctcagcaaaggactcgccttgcaaccgacaggccattcccacccccacacacaacctcccctgttttcacattcaccatggcatcccagagcaaggacacaggagcccacaggccagttgaggttgggcaaggagacttccaggacttccagacagagtaccaggttttatttttcaccttattctctactttaaacaaatcataactttctctttaagcctctgctataaattctcctggctctcctgggcttccatattttgggggctggggtgtcaaaagtgagatgaagttcttagctccaggttttggggtaaaccaaggtaggaacattttggcatttatttcaattaacaatacttccttggacgggtgcggtggctcacgtctgtaatcccagcactttgggaggctgagacaggtggatcacttgaggtcgggagttcgagaccagcctggccaacatagcaaaaccctgtctctactaaaaatacaaaaattagatgggtgttttggcacctgcctgtaatctcagctactcaggaggctgaggcacaagaatcgcttgaatccaggaagcaagcggaggttgcagtgagttgagatcgcactccagcctgggtgacagagtgagattctgtctcaaaagcaaactaacaaagaaaaacaatacttcctggggttttggtgtgcagagggctttgttggaagtgtgactcaatcttgcctgccttctgggagctctagaattgttcccaacccagtccatggcttctagccaccactacagggctgtttcatgtacttctctctctgactctgtcttgtccgactctcttgagaatttctcaacgattgctcatgcctgtcagtatcagtgcttccatcgttccatctttgattcacttctctttcctttctatttactcccaaaatggagtcattcatcctgatgtcctcaattgctgctgatatgctggtgattcccaaatacatagctccaacccccaacttcccccagactttagatctgtattggtattacctactggacatctctatggacagttccgtatagactcaactcatctgcccaaccaagtatgttcctcctgaattcctctcctggttacttcatcacaatctacataggctcaccagctagaaacatttatgagcttacattccttcttcccatatcttatcagcatatcatatccatttcactccaacactctgtcttgaatttggccctccctctcccctctctactttaattcattggagcatgggatttggagttaggtggttttgggtttgaattccagctctactatttttggttgtgtgatagagttatttaacctctctgagcctcagttccctcgtatgtaaaatgatgataataatacctacctcacagggttgttgtgaggatttaaattagatattgtacgaaaagtgcctagcacagtgcctggcacacagtagagtaggtgctcaataaatggtagctattattatt

SEQ ID NO: 301278 - DNA, 2309 bp, Artificial Sequence
  derived and/or modified sequence
gaacaagggagctggcgccgccagcagccgccgagctgggttgagccgctgggccgcgccgcgcgccgccgccgtctgggaggctcggcccggccgcccgagcaggccgcgcgcgggccgccgggcccgaggccagagccatgggcgagaccaagatcatctaccacttggatgggcaggagacgccgtaccttgtgaagctgcccctgcccgccgagcgcgtcaccttggcggactttaagggcgttttgcagcgacccagctataagttcttcttcaagtctatggacgacgatttcggagtggtgaaggaggagatctcggatgacaatgccaagctaccatgcttcaatggccgggtggtgtcctggctggtgtcagctgagggctcacacccagacccagcccccttctgtgctgataacccatcggagctgccaccacctatggagcgcacgggaggcatcggggactcccgacccccatccttccaccctcatgctggtgggggcagccaggagaacctggacaatgacacagagacggactctttggtgtctgcccagcgagagcggccacgccggagggatggcccagagcatgcaacccggctaaatggaactgcgaagggggaacggcggcgagaaccagggggttatgatagctcatccacccttatgagcagtgagctggagaccaccagcttctttgactcagatgaggatgactccaccagcaggttcagcagctccacagaacagagcagtgcctcacgcctgatgagaagacacaagcggcggcggcggaagcagaaggtttctcggattgagcggtcctcgtccttcagcagcatcacggactccaccatgtcactcaacatcatcacggtcactctcaacatggaaaaatataacttcttgggcatctccattgtgggccaaagcaacgagcgtggtgacggcggcatctacattggctctatcatgaagggtggggccgtggctgctgatggacgcatcgagccaggagatatgttgttacaggtaaacgagatcaactttgagaacatgagtaatgacgatgcagtccgggtactgcgggagattgtgcacaaaccggggcccatcaccctgactgtagccaagtgctgggacccaagtccacgtggttgcttcacattgcccaggagcgagcccatccggcccattgaccctgcggcctgggtctcccacactgcagccatgaccggcaccttccctgcatacggcatgagcccctccctgagcaccatcacctccaccagctcctccatcaccagttccatccctgacacagagcgcctagacgacttccacttgtccatccacagtgacatggctgccatcgtaaaagccatggcctcccctgaatcagggttggaggtccgtgaccgcatgtggctcaagattaccatccctaatgctttcatcggctcagatgtggtggactggctgtaccacaatgtggaaggcttcacggaccggagggaggcccgcaagtatgccagcaacctgctgaaagctggcttcatccgccataccgtcaacaagatcaccttctccgagcagtgctactacatcttcggtgacctctgcggcaacatggccaacctgtctctccacgatcacgatggctccagtggcgcctctgaccaggacacactggcccctttgccgcacccgggggccgccccttggcccatggctttcccgtaccagtacccgccacccccgcacccatacaacccgcacccgggcttcccggagctgggctacagctacggcgggggcagcgccagcagtcagcacagcgaaggcagtcggagcagtggctccaaccgtagcggcagcgatcggaggaaggagaaggacccgaaggccggggactccaagtccgggggcagcggcagcgaatcggaccacaccacacgcagcagcctgcgggggccgcgggagcgggcgcccagcgagcgctcagggccggcggccagcgagcacagccaccgcagccaccattccctggccagcagccttcgcagccaccacacacacccgagctacggtcctcccggagtgccccctctctacggcccccccatgctgatgatgcccccgccgcccgcggccatggggcccccaggagcccctccgggccgcgacctggcctcagtgcccccggaactgaccgccagcagacagtccttccgcatggccatgggaaaccccagtgagttctttgtggatgtgatggtgctgcgagggtggggtgca

SEQ ID NO: 301279 - DNA, 2294 bp, Artificial Sequence
  derived and/or modified sequence
gccgccgccgtctgggaggctcggcccggccgcccgagcaggccgcgcgcgggccgccgggcccgaggccagagccatgggcgagaccaagatcatctaccacttggatgggcaggagacgccgtaccttgtgaagctgcccctgcccgccgagcgcgtcaccttggcggactttaagggcgttttgcagcgacccagctataagttcttcttcaagtctatggacgacgatttcggagtggtgaaggaggagatctcggatgacaatgccaagctaccatgcttcaatggccgggtggtgtcctggctggtgtcagctgagggctcacacccagacccagcccccttctgtgctgataacccatcggagctgccaccacctatggagcgcacgggaggcatcggggactcccgacccccatccttccaccctcatgctggtgggggcagccaggagaacctggacaatgacacagagacggactctttggtgtctgcccagcgagagcggccacgccggagggatggcccagagcatgcaacccggctaaatggaactgcgaagggggaacggcggcgagaaccagggggttatgatagctcatccacccttatgagcagtgagctggagaccaccagcttctttgactcagatgaggatgactccaccagcaggttcagcagctccacagaacagagcagtgcctcacgcctgatgagaagacacaagcggcggcggcggaagcagaaggtttctcggattgagcggtcctcgtccttcagcagcatcacggactccaccatgtcactcaacatcatcacggtcactctcaacatggaaaaatataacttcttgggcatctccattgtgggccaaagcaacgagcgtggtgacggcggcatctacattggctctatcatgaagggtggggccgtggctgctgatggacgcatcgagccaggagatatgttgttacaggtaaacgagatcaactttgagaacatgagtaatgacgatgcagtccgggtactgcgggagattgtgcacaaaccggggcccatcaccctgactgtagccaagtgctgggacccaagtccacgtggttgcttcacattgcccaggaccatgaccggcaccttccctgcatacggcatgagcccctccctgagcaccatcacctccaccagctcctccatcaccagttccatccctgacacagagcgcctagacgacttccacttgtccatccacagtgacatggctgccatcgtaaaagccatggcctcccctgaatcagggttggaggtccgtgaccgcatgtggctcaagattaccatccctaatgctttcatcggctcagatgtggtggactggctgtaccacaatgtggaaggcttcacggaccggagggaggcccgcaagtatgccagcaacctgctgaaagctggcttcatccgccataccgtcaacaagatcaccttctccgagcagtgctactacatcttcggtgacctctgcggcaacatggccaacctgtctctccacgatcacgatggctccagtggcgcctctgaccaggacacactggcccctttgccgcacccgggggccgccccttggcccatggctttcccgtaccagtacccgccacccccgcacccatacaacccgcacccgggcttcccggagctgggctacagctacggcgggggcagcgccagcagtcagcacagcgaaggcagtcggagcagtggctccaaccgtagcggcagcgatcggaggaaggagaaggacccgaaggccggggactccaagtccgggggcagcggcagcgaatcggaccacaccacacgcagcagcctgcgggggccgcgggagcgggcgcccagcgagcgctcagggccggcggccagcgagcacagccaccgcagccaccattccctggccagcagccttcgcagccaccacacacacccgagctacggtcctcccggagtgccccctctctacggcccccccatgctgatgatgcccccgccgcccgcggccatggggcccccaggagcccctccgggccgcgacctggcctcagtgcccccggaactgaccgccagcagacagtccttccgcatggccatgggaaaccccagtgagttctttgtggatgtgatgtgagcagggcccctcccccagctccattccgctcccaccccagccggctgcgttcctctctccatccgtccgtcttttttactttgtctggtacctgaaagggaaataaaaggaactaaat

SEQ ID NO: 301280 - DNA, 57 bp, Artificial Sequence
  derived and/or modified sequence
atggccgagaacagcgtgctgaccagcaccaccggcagaaccagcctggccgactag

SEQ ID NO: 301281 - DNA, 57 bp, Artificial Sequence
  derived and/or modified sequence
atggcggagaatagcgtattaacctctacaaccgggcgaacctcattagctgactag

SEQ ID NO: 301282 - DNA, 57 bp, Artificial Sequence
  derived and/or modified sequence
atggctgaaaattctgtgctgaccagcaccactggaagaaccagcctggccgactag

SEQ ID NO: 301283 - DNA, 57 bp, Artificial Sequence
  derived and/or modified sequence
atggccgagaacagcgtgctgaccagcaccaccggccggaccagcctggccgactag

SEQ ID NO: 301284 - DNA, 57 bp, Artificial Sequence
  derived and/or modified sequence
atggctgaaaacagcgtgctcacatccacaacagggcgtacaagcctggccgattag

SEQ ID NO: 301285 - protein, 159 aa, Artificial Sequence
  derived and/or modified sequence
MAENSVLTSTTGRTSLADSSIFDSKVTEISKENLLIGSTSYVEEEMPQIETRVILVQEAGKQEELIKALKDIKVGFVKMESVEEFEGLDSPEFENVFVVTDFQDSVFNDLYKADCRVIGPPVVLNCSQKGEPLPFSCRPLYCTSMMNLVLCFTGFRKKE

SEQ ID NO: 301286 - protein, 927 aa, Artificial Sequence
  derived and/or modified sequence
MAENSVLTSTTGRTSLADSSIFDSKVTEISKENLLIGSTSYVEEEMPQIETRVILVQEAGKQEELIKALKDIKVGFVKMESVEEFEGLDSPEFENVFVVTDFQDSVFNDLYKADCRVIGPPVVLNCSQKGEPLPFSCRPLYCTSMMNLVLCFTGFRKKEELVRLVTLVHHMGGVIRKDFNSKVTHLVANCTQGEKFRVAVSLGTPIMKPEWIYKAWERRNEQDFYAAVDDFRNEFKVPPFQDCILSFLGFSDEEKTNMEEMTEMQGGKYLPLGDERCTHLVVEENIVKDLPFEPSKKLYVVKQEWFWGSIQMDARAGETMYLYEKANTPELKKSVSMLSLNTPNSNRKRRRLKETLAQLSRETDVSPFPPRKRPSAEHSLSIGSLLDISNTPESSINYGDTPKSCTKSSKSSTPVPSKQSARWQVAKELYQTESNYVNILATIIQLFQVPLEEEGQRGGPILAPEEIKTIFGSIPDIFDVHTKIKDDLEDLIVNWDESKSIGDIFLKYSKDLVKTYPPFVNFFEMSKETIIKCEKQKPRFHAFLKINQAKPECGRQSLVELLIRPVQRLPSVALLLNDLKKHTADENPDKSTLEKAIGSLKEVMTHINEDKRKTEAQKQIFDVVYEVDGCPANLLSSHRSLVQRVETISLGEHPCDRGEQVTLFLFNDCLEIARKRHKVIGTFRSPHGQTRPPASLKHIHLMPLSQIKKVLDIRETEDCHNAFALLVRPPTEQANVLLSFQMTSDELPKENWLKMLCRHVANTICKADAENLIYTADPESFEVNTKDMDSTLSRASRAIKKTSKKVTRAFSFSKTPKRALRRALMTSHGSVEGRSPSSNDKHVMSRLSSTSSLAITHSVSTSNVIGFTKHVYVQRLNSTGGRSQYSWFQSVRHSAFRASFSEILEGNTDFSNFKKVLSKSSLTFVKN

SEQ ID NO: 301287 - DNA, 2784 bp, Artificial Sequence
  derived and/or modified sequence
atggccgagaacagcgtgctgaccagcaccaccggcagaaccagcctggccgacagcagcatcttcgacagcaaggtgaccgagatcagcaaggagaacctgctgatcggcagcaccagctacgtggaggaggagatgccccagatcgagaccagagtgatcctggtgcaggaggccggcaagcaggaggagctgatcaaggccctgaaggacatcaaggtgggcttcgtgaagatggagagcgtggaggagttcgagggcctggacagccccgagttcgagaacgtgttcgtggtgaccgacttccaggacagcgtgttcaacgacctgtacaaggccgactgcagagtgatcggcccccccgtggtgctgaactgcagccagaagggcgagcccctgcccttcagctgcagacccctgtactgcaccagcatgatgaacctggtgctgtgcttcaccggcttcagaaagaaggaggagctggtgagactggtgaccctggtgcaccacatgggcggcgtgatcagaaaggacttcaacagcaaggtgacccacctggtggccaactgcacccagggcgagaagttcagagtggccgtgagcctgggcacccccatcatgaagcccgagtggatctacaaggcctgggagagaagaaacgagcaggacttctacgccgccgtggacgacttcagaaacgagttcaaggtgccccccttccaggactgcatcctgagcttcctgggcttcagcgacgaggagaagaccaacatggaggagatgaccgagatgcagggcggcaagtacctgcccctgggcgacgagagatgcacccacctggtggtggaggagaacatcgtgaaggacctgcccttcgagcccagcaagaagctgtacgtggtgaagcaggagtggttctggggcagcatccagatggacgccagagccggcgagaccatgtacctgtacgagaaggccaacacccccgagctgaagaagagcgtgagcatgctgagcctgaacacccccaacagcaacagaaagagaagaagactgaaggagaccctggcccagctgagcagagagaccgacgtgagccccttcccccccagaaagagacccagcgccgagcacagcctgagcatcggcagcctgctggacatcagcaacacccccgagagcagcatcaactacggcgacacccccaagagctgcaccaagagcagcaagagcagcacccccgtgcccagcaagcagagcgccagatggcaggtggccaaggagctgtaccagaccgagagcaactacgtgaacatcctggccaccatcatccagctgttccaggtgcccctggaggaggagggccagagaggcggccccatcctggcccccgaggagatcaagaccatcttcggcagcatccccgacatcttcgacgtgcacaccaagatcaaggacgacctggaggacctgatcgtgaactgggacgagagcaagagcatcggcgacatcttcctgaagtacagcaaggacctggtgaagacctacccccccttcgtgaacttcttcgagatgagcaaggagaccatcatcaagtgcgagaagcagaagcccagattccacgccttcctgaagatcaaccaggccaagcccgagtgcggcagacagagcctggtggagctgctgatcagacccgtgcagagactgcccagcgtggccctgctgctgaacgacctgaagaagcacaccgccgacgagaaccccgacaagagcaccctggagaaggccatcggcagcctgaaggaggtgatgacccacatcaacgaggacaagagaaagaccgaggcccagaagcagatcttcgacgtggtgtacgaggtggacggctgccccgccaacctgctgagcagccacagaagcctggtgcagagagtggagaccatcagcctgggcgagcacccctgcgacagaggcgagcaggtgaccctgttcctgttcaacgactgcctggagatcgccagaaagagacacaaggtgatcggcaccttcagaagcccccacggccagaccagaccccccgccagcctgaagcacatccacctgatgcccctgagccagatcaagaaggtgctggacatcagagagaccgaggactgccacaacgccttcgccctgctggtgagaccccccaccgagcaggccaacgtgctgctgagcttccagatgaccagcgacgagctgcccaaggagaactggctgaagatgctgtgcagacacgtggccaacaccatctgcaaggccgacgccgagaacctgatctacaccgccgaccccgagagcttcgaggtgaacaccaaggacatggacagcaccctgagcagagccagcagagccatcaagaagaccagcaagaaggtgaccagagccttcagcttcagcaagacccccaagagagccctgagaagagccctgatgaccagccacggcagcgtggagggcagaagccccagcagcaacgacaagcacgtgatgagcagactgagcagcaccagcagcctggccatcacccacagcgtgagcaccagcaacgtgatcggcttcaccaagcacgtgtacgtgcagagactgaacagcaccggcggcagaagccagtacagctggttccagagcgtgagacacagcgccttcagagccagcttcagcgagatcctggagggcaacaccgacttcagcaacttcaagaaggtgctgagcaagagcagcctgaccttcgtgaagaactag

SEQ ID NO: 301288 - DNA, 2941 bp, Artificial Sequence
  derived and/or modified sequence
gccaatcggcatggctcttagagagagcagcttagtttttgaatcggttgtggcggccgccggcgaggaatggcggtatttgtgagaggagtcggcgtttgaagaggtggaactcctagggcttttttgagagtgctgatttagaagaatacaaatcatggctgaaaatagtgtattaacatccactactgggaggactagcttggcagactcttccatttttgattctaaagttactgagatttccaaggaaaacttacttattggatctacttcatatgtagaagaagagatgcctcagattgaaacaagagtgatattggttcaagaagctggaaaacaagaagaacttataaaagccttaaaggacattaaagtgggctttgtaaagatggagtcagtggaagaatttgaaggtttggattctccggaatttgaaaatgtatttgtagtcacggactttcaggattctgtctttaatgacctctacaaggctgattgtagagttattggaccaccagttgtattaaattgttcacaaaaaggagagcctttgccattttcatgtcgcccgttgtattgtacaagtatgatgaatctagtactatgctttactggatttaggaaaaaagaagaactagtcaggttggtgacattggtccatcacatgggtggagttattcgaaaagactttaattcaaaagttacacatttggtggcaaattgtacacaaggagaaaaattcagggttgctgtgagtctaggtactccaattatgaagccagaatggatttataaagcttgggaaaggcggaatgaacaggatttctatgcagcagttgatgactttagaaatgaatttaaagttcctccatttcaagattgtattttaagtttcctgggattttcagatgaagagaaaaccaatatggaagaaatgactgaaatgcaaggaggtaaatatttaccgcttggagatgaaagatgcactcaccttgtagttgaagagaatatagtaaaagatcttccctttgaaccttcaaagaaactttatgttgtcaagcaagagtggttctggggaagcattcaaatggatgcccgagctggagaaactatgtatttatatgaaaaggcaaatactcctgagctcaagaaatcagtgtcaatgctttctctaaatacccctaacagcaatcgcaaacgacgtcgtttaaaagaaacacttgctcagctttcaagagagacagacgtgtcaccatttccaccccgtaagcgcccatcagctgagcattccctttccatagggtcactcctagatatctccaacacaccagagtctagcattaactatggagacaccccaaagtcttgtactaagtcttctaaaagctccactccagttccttcaaagcagtcagcaaggtggcaagttgcaaaagagctttatcaaactgaaagtaattatgttaatatattggcaacaattattcagttatttcaagtaccattggaagaggaaggacaacgtggtggacctatccttgcaccagaggagattaagactatttttggtagcatcccagatatctttgatgtacacactaagataaaggatgatcttgaagaccttatagttaattgggatgagagcaaaagcattggtgacatttttctgaaatattcaaaagatttggtaaaaacctaccctccctttgtaaacttctttgaaatgagcaaggaaacaattattaaatgtgaaaaacagaaaccaagatttcatgcttttctcaagataaaccaagcaaaaccagaatgtggacggcagagccttgttgaacttcttatccgaccagtacagaggttacccagtgttgcattacttttaaatgatcttaagaagcatacagctgatgaaaatccagacaaaagcactttagaaaaagctattggatcactgaaggaagtaatgacgcatattaatgaggataagagaaaaacagaagctcaaaagcaaatttttgatgttgtttatgaagtagatggatgcccagctaatcttttatcttctcaccgaagcttagtacagcgggttgaaacaatttctctaggtgagcacccctgtgacagaggagaacaagtaactctcttcctcttcaatgattgcctagagatagcaagaaaacggcacaaggttattggcacttttaggagtcctcatggccaaacccgacccccagcttctcttaagcatattcacctaatgcctctttctcagattaagaaggtattggacataagagagacagaagattgccataatgcttttgccttgcttgtgaggccaccaacagagcaggcaaatgtgctactcagtttccagatgacatcagatgaacttccaaaagaaaactggctaaagatgctgtgtcgacatgtagctaacaccatttgtaaagcagatgctgagaatcttatttatactgctgatccagaatcctttgaagtaaatacaaaagatatggacagtacattgagtagagcatcaagagcaataaaaaagacttcaaaaaaggttacaagagcattctctttctccaaaactccaaaaagagctcttcgaagggctcttatgacatcccacggctcagtggagggaagaagtccttccagcaatgataagcatgtaatgagtcgtctttctagcacatcatcattagcaattacccattctgtttccacaagcaatgtaattggatttactaagcatgtttatgttcagcgcctaaactctactggtgggcgctctcagtactcctggtttcaatctgtacgtcattctgctttccgagctagtttttcagagatactagaaggaaatactgatttttcaaatttcaaaaaagttctttccaagtcatctttgacatttgtgaagaattag

SEQ ID NO: 301289 - DNA, 2784 bp, Artificial Sequence
  derived and/or modified sequence
atggccgagaactccgttctgacatccacgacaggccggacatccctcgcagactcctcaatcttcgattctaaggtaactgaaattagtaaggaaaatctcctgatcggctccacctcttacgtggaagaagaaatgcctcagatagaaactcgggtgattctggtccaggaggcggggaagcaggaggaacttataaaagccctcaaggacataaaagtgggcttcgtaaagatggaatcagtggaggagttcgaggggcttgatagccctgaattcgagaatgtgtttgtggtgactgatttccaggatagcgtgtttaacgacctgtacaaagctgactgcagggtcatcggtccacccgtcgtgctgaattgctcacagaagggtgaaccactgccatttagctgcaggccgctgtactgtactagcatgatgaatctggtgctatgcttcaccgggttccggaagaaagaagaattagtgcgtctggtaaccctggtgcatcatatgggcggcgtcatcaggaaggactttaattcaaaagtgacacacttagttgccaactgtacccagggcgagaaattcagagtggctgtgtcactgggtactccaatcatgaagccggagtggatttataaagcgtgggaaagacgtaatgaacaggatttttacgctgccgtcgatgacttccggaacgagtttaaagtgccgcctttccaagactgcattctgtccttcctgggattcagcgatgaagagaagacaaacatggaagagatgaccgagatgcagggcggaaagtacctcccgttgggcgatgagcggtgtacccacctggtggtggaagaaaatattgtgaaagatctgccatttgaaccgagcaagaaactgtacgtggtcaagcaagagtggttctggggcagcatccaaatggacgcacgcgcaggggaaaccatgtatctttacgagaaggccaataccccggagcttaagaagtctgtaagtatgctttctctcaatactcctaacagtaatcgaaagcgccggagactgaaggaaacgctggcgcaactttccagagaaactgacgttagccccttccccccacgcaaaaggcccagtgccgagcattcgctctcaattggctccctgctggacatttcgaatactccagagtctagcatcaattatggtgatactcccaaaagctgcacaaaatccagcaagagctcaacccccgtaccgtccaaacaatccgcgagatggcaagtcgcaaaggagctctaccagactgaaagtaactacgtaaatatattggctacaattatccagctgtttcaggtcccactggaagaggagggacagcgggggggacctatactcgctccagaggagatcaaaacaattttcggaagcattcctgacatatttgacgtgcataccaagatcaaagacgacctggaggacctgatcgtgaattgggacgaaagcaagagcattggcgatatctttctcaaatattcgaaagacttggtcaaaacatatcccccctttgtgaacttctttgaaatgtctaaagaaaccataattaaatgcgaaaaacaaaagccccgttttcatgccttcctgaagatcaaccaggccaagcctgagtgcgggagacagtcgctagtggagcttctgatccggcccgttcagcgcctgccatctgtagccctgctacttaatgatctgaagaaacacactgccgacgaaaaccctgacaaatccaccttagaaaaggcaattggctcgctaaaggaggtgatgacccatataaatgaagataaaagaaagacagaagcccaaaaacaaattttcgatgtggtatacgaagtggatgggtgtccggccaatttactatcttctcatcgatccctcgtgcagagggtcgagacaatatcattaggcgagcatccctgtgatagaggagagcaggtgaccttgttcctctttaatgattgtctggagatcgctcggaaacggcataaggtaatcggtacctttcgctctcctcacggtcaaaccagaccccccgcctctcttaaacacatccacctgatgccactttcacagatcaaaaaggtactggacattcgcgaaaccgaagactgccacaacgcattcgcccttttggtaagacctccaacagagcaggctaatgtgctgctgtcgttccaaatgacatcggatgagctgcctaaggaaaactggctgaagatgctctgcagacatgtggcaaatacgatatgtaaggcggatgcagaaaacctgatatatactgccgaccctgagagtttcgaagtcaacacaaaggatatggattctaccctgagtcgggcctctcgcgcaatcaagaagactagcaagaaagttacacgggcctttagcttctcaaagacaccaaaacgagcgcttcgccgggcccttatgacctcccacggcagcgtcgaaggccggtcccctagctccaatgacaaacacgtgatgagccgactgtcttctacttcgagtctggctattacacattccgtcagtacttccaacgttatcggattcacaaagcacgtgtacgtgcagcgcctcaacagtacaggcggacgttctcaatattcttggtttcagagtgtgcggcatagtgcttttcgagcctccttctccgaaatattggagggtaacacagatttttcaaatttcaaaaaggtcctctcaaagtcaagtttgaccttcgtgaagaattag

SEQ ID NO: 301290 - DNA, 2784 bp, Artificial Sequence
  derived and/or modified sequence
atggctgaaaattctgtgctgaccagcaccactggaagaaccagcctggccgacagcagcatctttgacagcaaggtgacagagatcagcaaggagaacctgctgattggcagcaccagctatgtggaggaggagatgccccagatcgagaccagggtcatcctggtgcaggaggccggcaagcaggaggagctgatcaaggccctgaaggacatcaaggtgggctttgtgaagatggagagcgtggaggagtttgagggcctggacagccctgagtttgaaaatgtgtttgtggtgacagacttccaggacagcgtcttcaatgacctgtacaaggctgactgcagggtcatcggcccccctgtggtgctgaactgcagccagaagggggagcccctgcccttcagctgccggcccctgtactgcacctccatgatgaacctggtgctgtgcttcaccggcttcaggaagaaggaggagctggtgcggctggtgaccctggtgcaccacatgggcggcgtcatcaggaaggacttcaacagcaaggtgacccacctggtggccaactgcacccagggcgagaagttccgggtggccgtgtccctgggcacccccatcatgaagccagagtggatctacaaggcctgggagaggagaaatgagcaggacttctacgccgctgtggatgacttcagaaatgagttcaaggtgccccccttccaggactgcatcctgtccttcctgggcttcagtgatgaggagaagaccaacatggaggagatgacagagatgcagggcggcaagtacctgcccctgggagatgagcgctgcacccacctggtggtggaggagaacatcgtgaaggacctgccctttgagcccagcaagaagctgtatgtggtgaagcaggagtggttctggggcagcatccagatggatgcccgggccggggagaccatgtacctgtatgagaaggccaacaccccagagctgaagaagtctgtgtccatgctgagcctgaacacccccaacagcaacaggaagagaagaaggctgaaggagaccctggcccagctgagccgggagacagatgtgagccccttcccccccaggaagaggccttctgctgagcacagcctgagcatcggcagcctgctggacatcagcaacaccccagagagcagcatcaactacggggacacccccaagagctgcaccaagagcagcaagagcagcacccctgtgcccagcaagcagagcgcccgctggcaggtggccaaggagctgtaccagacagagagcaactacgtgaacatcctggccaccatcatccagctgttccaggtgcccctggaggaggagggccagaggggcggccccatcctggcccctgaggagatcaagaccatcttcggcagcatcccagacatctttgatgtgcacaccaagatcaaggatgacctggaggacctgattgtgaactgggatgagagcaagagcattggagacatcttcctgaagtacagcaaggacctggtgaagacctaccccccatttgtgaacttctttgagatgagcaaggagaccatcatcaagtgtgagaagcagaagccccgcttccacgccttcctgaagatcaaccaggccaagccagaatgtggccggcagagcctggtggagctgctgatccggcctgtgcagaggctgcccagcgtggccctgctgctgaatgacctgaagaagcacacagcagatgagaacccagacaagagcaccctggagaaggccatcggcagcctgaaggaggtgatgacccacatcaatgaagacaagaggaagacagaggcccagaagcagatctttgatgtggtgtatgaggtggatggctgcccagccaacctgctgagcagccacaggagcctggtgcagagggtggagaccatcagcctgggggagcacccctgtgacagaggagagcaggtgaccctcttcctgttcaatgactgcctggagatcgccaggaagaggcacaaggtgattggcaccttccgcagcccccacggccagacccggcccccagccagcctgaagcacatccacctgatgcccctgagccagatcaagaaggtgctggacatccgggagacagaggactgccacaatgcctttgccctgctggtgcggcccccaacagagcaggccaacgtgctgctgtccttccagatgaccagtgatgagctgcccaaggagaactggctgaagatgctgtgcagacatgtggccaacaccatctgcaaggcagatgctgagaacctgatctacacagctgaccctgagagctttgaggtgaacaccaaggacatggacagcaccctgagccgggccagccgggccatcaagaagaccagcaagaaggtgacccgggccttctccttcagcaagacccccaagagggccctgcggcgggccctgatgaccagccacggctctgtggagggccgcagccccagcagcaatgacaagcacgtgatgagccggctgagcagcaccagcagcctggccatcacccacagcgtgtccaccagcaatgtgattggcttcaccaagcacgtgtatgtgcagaggctgaacagcactggaggccgcagccagtacagctggttccagagcgtgcgccacagcgccttccgggccagcttcagcgagatcctggagggcaacacagacttcagcaacttcaagaaggtgctgagcaagagcagcctgacctttgtgaagaactag

SEQ ID NO: 301291 - DNA, 2784 bp, Artificial Sequence
  derived and/or modified sequence
atggccgagaacagcgtgctgaccagcaccaccggccggaccagcctggccgactccagcatttttgactctaaagtcaccgaaatctccaaagaaaatctcttgatcggcagtacgtcatatgtggaagaggagatgccccaaatcgaaacccgagtcatcctcgtccaggaagcagggaagcaagaggagttgattaaagccctgaaggatattaaagttggattcgtgaaaatggaatctgtggaagagttcgagggactggattcccctgaattcgaaaatgtgttcgtggtgacagacttccaagactctgttttcaacgatctgtacaaggccgattgcagagtgatcggtcccccagtcgttcttaactgcagccagaaaggcgagcccttgccattttcctgcagaccattgtattgtacgtccatgatgaatctggtcctgtgtttcactggttttcggaagaaagaggaacttgtgcgactggtcacactggtgcatcacatgggcggcgtaatacggaaagatttcaactctaaggtcacccatctggtcgcgaactgcacccagggcgaaaagttcagagtggcagtgtctctggggacccccatcatgaaacctgagtggatttataaagcttgggagaggcggaatgaacaggacttctacgccgccgtcgacgacttccgaaatgagtttaaagtgcctccatttcaggactgtattctcagtttcctcggcttcagcgatgaagaaaaaaccaatatggaggaaatgaccgagatgcagggaggaaaatatctgcccctcggcgacgaaagatgtacacacctcgtggttgaggaaaacattgtaaaggatcttccgttcgagcccagtaagaagctttacgttgtgaaacaggagtggttctggggatctattcaaatggatgctcgcgctggcgagacaatgtatctctacgagaaggccaacacacctgagctgaagaagtcagtgtccatgctcagcctgaatacacctaattccaatagaaagcgacgcaggcttaaggaaaccttggcccagctcagccgcgaaacagacgtctcgcccttcccaccaagaaaacgcccttcggcagagcatagcctgtctatcggatcactcctggacatcagcaacactcccgagtctagtattaactacggcgacacccctaaaagttgcacgaagagttcaaagagcagtactccagtcccttctaagcagagcgctcggtggcaagtcgccaaggaactgtatcagacagagtccaattatgtaaacatcctggcgaccattatccagttgttccaagtgccccttgaggaagaaggccagagaggcggaccaatcttggctccagaggagattaagactatctttgggagcataccagacatttttgatgtccacaccaagatcaaggacgacctggaggacctgattgtgaattgggacgaatccaaaagtatcggagacattttcctcaagtattctaaagacctggtgaaaacgtaccccccatttgtcaacttttttgaaatgtctaaggaaaccattatcaaatgcgagaaacaaaagcccagattccatgccttcctgaaaattaatcaggccaagccggaatgcggacgccagtctctggtggagctcctgatcaggcccgtgcagcgtctgccttctgtagccctgttgttgaatgatctgaagaagcacaccgcggatgaaaaccccgacaagtctaccctggagaaagctattggaagtttaaaagaggtcatgacacatatcaatgaggataaaagaaagactgaggctcaaaagcaaatattcgacgttgtctacgaagtcgacggttgtccagcgaaccttctaagcagtcatcgatcattggtccagcgggtggagacaatctctttaggcgagcatccctgtgaccgcggggagcaggttactctgttcctgttcaatgattgccttgagatcgctaggaagaggcataaggtaataggcacattcaggtcccctcatggccagactaggccgccagcctccctgaagcacatccacttaatgcctctgtcacagatcaaaaaagtgctagacattagggaaacagaggactgtcataatgcttttgccctcctggtcaggccccccacggaacaggccaatgtgctactgtcattccagatgacctcagatgagctccctaaggagaactggctcaaaatgctatgtagacatgtggcaaacacaatctgcaaagcggatgctgaaaatctgatttatactgctgacccggagtcctttgaggtgaacactaaggacatggatagcactctgtcaagggcctcccgcgccattaagaaaacatcaaagaaggtgaccagagccttttcgtttagcaaaactcccaagcgcgccctgcggagggccctgatgacctcccatggcagcgttgaaggccgcagcccctccagtaacgataagcatgtgatgtctaggctctcgagcacttcttctctcgccattacccattccgtgtcaacctcaaatgtgattggcttcacaaaacatgtttacgtgcagagactgaattccactggcggacggagtcagtattcctggttccagtccgtgcggcacagcgctttccgcgcatcgttctctgaaatcttggagggcaatactgattttagcaacttcaagaaagttttgtccaagtcgagcttgacctttgttaagaactag

SEQ ID NO: 301292 - DNA, 2784 bp, Artificial Sequence
  derived and/or modified sequence
atggccgaaaactccgtgctgacgagcactaccggaagaacctctcttgctgatagctccatcttcgacagtaaggtaactgagatttcgaaggagaatctgctgattggctcgacaagctacgtggaagaagaaatgccacaaatcgaaaccagggtcatactagtgcaggaagctgggaaacaagaagagctcatcaaggctctcaaagacatcaaggtcggcttcgtaaaaatggagtcagtagaggaatttgagggcctggactcccccgaattcgaaaatgtgttcgtggtgaccgactttcaggacagcgtgttcaatgatctgtacaaagccgactgtagggtcattggcccaccagttgtcctgaattgcagtcagaaaggggaacccttgcctttcagctgtcgcccactgtactgtacctctatgatgaatctcgtgctttgcttcacagggttccggaaaaaagaggagctggtccgccttgtgacactggtccaccacatgggaggagtgatccggaaggactttaactcgaaggtgacacatcttgtggcaaactgcacccaaggggagaaatttcgcgtcgcggtgtctcttggaacccctatcatgaagcctgaatggatttacaaagcatgggagcgtagaaatgaacaggatttctacgctgccgtggacgactttagaaacgagttcaaggtgccccctttccaggactgcattctgagctttctaggattctctgatgaagaaaagaccaacatggaggagatgactgagatgcagggagggaagtacctgcctttgggtgacgaaaggtgcacgcatctcgtggtcgaggagaacattgttaaggaccttccattcgagccatcaaagaagctgtacgtggtgaaacaggaatggttctgggggtccattcaaatggatgcacgtgccggtgagacaatgtatttgtatgaaaaagcaaatacgcccgaacttaagaagagcgtgtctatgctctctcttaacacccccaacagtaatcgtaagagacgccgtctgaaggagacattagcccagttaagccgggagaccgacgtatcccctttcccgccacgcaagcggccatccgctgaacattccctgagcataggaagcttgttggacattagcaatactcccgagagcagcataaattatggcgacactcctaaatcttgcacaaaatcatctaagtcttccacgccagtgccatccaaacagtcagcacggtggcaggtggccaaggagctttaccagacagagagtaactacgtgaacattcttgctacgataattcaactctttcaggtaccactggaagaggagggccagcgaggcggaccaattctggctccggaggagatcaagacgatctttggcagtatccctgacatctttgacgttcacactaagatcaaggacgacttagaggacctgatcgtgaattgggacgaatctaagtccattggcgacatattccttaaatactccaaggatcttgtcaaaacataccccccattcgttaacttctttgagatgagcaaggagaccatcatcaaatgcgaaaagcagaaacctaggtttcacgcgttcttgaagattaatcaagccaagcccgagtgtggcaggcagtccctcgtggagctgctaatacgcccagttcaacgccttccgtctgttgcacttttgttgaatgatttgaaaaagcacacagccgacgaaaacccagacaagtctacgctcgagaaagccatcgggtcattgaaggaggtcatgacacacatcaatgaggataagcggaagacagaggctcagaagcaaatctttgacgtggtttatgaggttgacgggtgtcctgctaacctgctcagtagccacaggagcctcgtccagcgggtcgaaactatatctctcggggaacatccctgcgatcgcggagagcaggttacactttttctgttcaatgattgtttggagattgcaaggaaacgtcacaaagtgattggtacattcagatccccacatggccaaacacggccacccgcaagcctgaaacacattcatctgatgccgctgtcacagatcaagaaagtcctcgacattcgtgagacagaagattgtcacaacgctttcgccctgctggtgaggcctcctaccgagcaggctaacgtcttactttccttccaaatgacatccgatgagttacctaaagaaaactggctgaaaatgctgtgcagacacgtggccaacacaatttgtaaagcagatgcggagaatctgatttacacggcggatcccgagtccttcgaggtaaatacgaaggacatggactcaaccctctcacgcgcttcccgcgcaatcaaaaagacctccaagaaagtcacgcgcgcattcagttttagtaagacacctaaaagggcacttcgtagggcattgatgacctcacacgggtcagtagagggcaggtccccaagctccaatgataagcatgtcatgtcaaggttaagctccacctcaagccttgcaatcactcactccgtgagcacctccaatgtgataggattcactaagcacgtgtacgttcagaggcttaactcaacgggtggcaggtcacaatactcgtggtttcagtccgtgcgacactcagcctttcgggcttctttttctgaaatcctcgagggtaacacagatttttcaaatttcaagaaggttctatccaagagctctctgacttttgttaaaaattag

SEQ ID NO: 301293 - protein, 187 aa, Artificial Sequence
  derived and/or modified sequence
MERSAFMELDAGSRLVMHLREWPALLVSSTGWTEFEQLTLDGHNLPSLVCVITGSVDLGVCLHMSSSGLDLPMKVVDMFGCCLPVCAVNFKCLHELVKHEENGLVFEDSEELAALQMLFSNFPDPAGKLNQFWKNLRESQQLRWDESWVQTVLPLVMDIQLLGQRLKPRDPCCPSRSFFSESQGKPF

SEQ ID NO: 301294 - protein, 325 aa, Artificial Sequence
  derived and/or modified sequence
MEETKEAMSEMLRHPRISGKPILVLANKQDKEGALGEADVIECLSLEKLVNEHKCLCQIEPCSAISGYGKKIDKSIKKGLYWLLHVIARDFDALNERIQKETTEQRALEEQEKQERAERVRKLREERKQNEQEQAELDGTSGLAELDPEPTNPFQPIASVIIENEGKLEREKKNQKMEKDSDGCHLKHKMEHEQIETQGQVNHNGQKNNEFGLVENYKEALTQQLKNEDETDRPSLESANGKKKTKKLRMKRNHRVEPLNIDDCAPESPTPPPPPPPVGWGTPKVTRLPKLEPLGETHHNDFYRKPLPPLAVPQRPNSDAHDVIS

SEQ ID NO: 301295 - protein, 149 aa, Artificial Sequence
  derived and/or modified sequence
MEKDSDGCHLKHKMEHEQIETQGQVNHNGQKNNEFGLVENYKEALTQQLKNEDETDRPSLESANGKKKTKKLRMKRNHRVEPLNIDDCAPESPTPPPPPPPVGWGTPKVTRLPKLEPLGETHHNDFYRKPLPPLAVPQRPNSDAHDVIS

SEQ ID NO: 301296 - DNA, 3906 bp, Artificial Sequence
  derived and/or modified sequence
agcacgtcgacgcggggcttttctttagccgggtcccgctaactcggctacggtgtatctgcgtctttggtcaggttgttccttggctaagagggcagtcgtcgcggacccacgcggttagcaaggcttagtgctcgggccggccgccttcacttccctcccggcttttcctcccgacttatccactttaggggcgtctcggagtgccggaggcccccggggaagagcggggtgccggtgtccgctccgggctcggatgggaagtggtgggaggagcgacccgggatgttcagtctgatggccagttgctgcggctggttcaagcggtggcgggagcctgtcagaataccctgaagatgtagctcctactgttggattttcaaaaattaaccttagacaaggaaagtttgaagtcaccatctttgacttgggaggtggaataagaattcggggaatctggaagaattactatgctgaatcctatggggtaatatttgttgtggattccagtgatgaagagagaatggaagagacaaaagaggctatgtcagaaatgctaagacatcctaggatatcgggaaagcctatattggtgttggcaaataaacaagataaagaaggagctttaggagaagctgatgtcattgaatgtctatctctggaaaaattggtcaatgagcacaagtgcctgtgtcagatagaaccatgttcagcaatctcggggtatggaaagaaaattgacaagtccattaaaaaaggcctttattggctgctacatgttattgcaagagactttgatgccttaaatgaacgcatccaaaaagagacaacagagcagcgtgctcttgaggaacaagagaaacaagaaagagctgaacgagtgcgaaaattacgagaagaaagaaaacaaaatgaacaggagcaggctgaactcgatggaaccagtggtctggctgagttggacccagaaccaacgaatcctttccagccaatagcatctgtaatcattgagaatgaaggaaaacttgaaagagagaaaaaaaaccaaaaaatggagaaagacagtgatggctgccacctgaaacataaaatggagcatgagcaaatagagacacaaggccaggttaatcacaatggccaaaaaaataatgaatttggactagtagaaaattataaggaggcattaacacagcagttaaagaatgaagatgagacagaccggccatcattggaatcagctaatggtaaaaagaaaactaagaaactaagaatgaaaaggaaccaccgggtagaaccacttaatatagatgactgtgctcctgagagtccaacgccacccccaccccctcctcctgttggctggggaacccctaaagtcactagacttccaaaacttgagcctcttggtgaaacacatcataatgatttctataggaagccactgcctcccctggctgtgccacagcgacctaacagtgatgctcatgatgtgatctcataaacaagacgtatggaggagttctcttaatatcagcaaggtgaactgggacattcttctttctcagaagaagaaacatcttgtaaattgatgactggggcaagataaccataataattttagtgagaagattaatactcaaggacctgacttgataattacttatttgtgtttttcatggttaaaaaaataaaagaagcacaatgaccagtacatgaaatcagcatttggaccaaattagcaagatttactgttgactctggtttatacatccccactcatgagcatacttctgaaggaaaactttacaaaaagagccaatggactcagcactttctttactatttgttcaatagcctatatttctagatattaaatattttttgtaagatatatgcacatagaagggggacttctaggaatttataaccaaaattttaaaactatttttatatttttttaaatctttaaaaattttaattactgtgatattgattatacaccttttttatagatgatttgtttaaattatatctggaaaatagagttgatttactttcagacatgaactatacaaacaggatatatttatatggcttgaggtatgttttgtaatagcgttgttctttaagtgtacatcgtaatttgacctaatttaaaaataatatattttcgaagtagtagattctcagatctttattctaacaattacatgatttgaaaacagtactcaatgagactggaaataccttttgtacctaaatgttttttaaattaatcaaaatacattctgtgagatactattaaaagtctcagtaaagtcctattttaaaggttagacactttcagagatcaaggtgctccctatactcccttgttccatcagaagctgcagtgactcttttaggtgattctaattctttcatgccttgaaattaaactatgaaattaaaggcagaaaaactggaaaacctactgcaggtccagagacttctgttttacaactgggaaacagcttgtgtactaaagtaatgagaataaaaatgttggcccaaaattacttttataaataaataattccaaaataatttcttaatttaaaatgatagcacttctcttgcacttaagaatggcatccataagattctgtatttggcatttagactaacttctagatgtatatttttaataatagattcataatgttacatttaattgaaaacaaacctttatatccaatgaaaatagtataaacagaatgatttttataccaccttgttaagattggtgcttttggtaacttgtactgacacaacagacatgtgctagtatctgataacattaagtacattttatgtcgtttaatataattatttactttaaaaattgtacttcagaacatcagattttattcacattttttaactcactgaactttaataatcaggtcacctgtactctagtcagcactgtatatattcttggagtttgtacatgggacttagcaaccacactgagtgaggtaaaagcatttgatttcagatctaaaattcgtaacaacctaaatttgagaggtggctgaaatgtgatgaaaagcaatacgaaaagacaatgtaaactttgaaaaggattttagagggaaaattgcatagctttttgtaacatttacttaattttaaaactaaactcatacttttgctatctttttaatatttatctcgtttgggagtatacgtgtttttaaaatttgtgttttctatctgtttactatagtgtagctactggcttcatttaataaaaataaatgattttgaaattaaatataatatagaattcacattttatatagctctctcaaaaattaatttttattccttaagcattttaaaaacattttaaaaaatgttttgtaaatccaggtgtattttaacaattaaatgcctattttgttatatgttatacttttattcttaattctgaattttgacattttcacacaataaaaataatttatatcaatattctgtttctcttttcaattggtagatttaaatgatttcctttgggtaataaaataggtaaagattttaaaatatgattattgaaaaacagtttaaatcagtagattaaaataatgcatttttttgatactttacacacaaaacttttttctctctgcaagtttttatgtatgtgggaaagaatttgtgattttaaatgcagctacaaatagcatttcaccatatgatgttagaggatttgatgtctgtcttgcgttaaagctgttggtcaacagatatgtttttatgtatttaaaagaggctcttgtgtgcctttatgtgtaaaatgcatattacgtagtatacatgatattgtatgtaactgacttcaaatataaaactatgcat

SEQ ID NO: 301297 - DNA, 1638 bp, Artificial Sequence
  derived and/or modified sequence
atgcaccaagtctccgcaaccatgaggagcattaccctttcatggcctcagcctgagcaacctaacggaattattctggattacgaaatccggtattacgaaaaagaacacaacgaattcaacagctccatggccagaagtcagacgaacaccgcgcgcattgacggacttcgccctggcatggtttacgtcgtgcaggtgcgcgcccgcactgtcgcaggttacggaaagtttagcggtaagatgtgctttcaaacattaacagatgatgactacaagtcggaactgagggagcaattgccactgatcgccggcagcgccgccgccggtgtggtcttcgtggtgtctctggtggccatatccattgtttgctcgcgcaaacgggcctattcaaaggaagccgtatactccgacaaacttcagcactactctacaggaagagggagtccaggcatgaaaatctacatcgatccatttacgtatgaggaccccaatgaagctgtgcgcgagttcgctaaggagatcgacgtgtctttcgtgaagattgaggaagttataggagccggggaattcggcgaggtgtacaagggcagactgaagctccctggcaagcgagagatctatgtcgcaatcaaaactctaaaagcagggtatagtgaaaaacaacggagggattttctcagcgaagcttcaataatgggccagtttgatcacccaaatattatccggttagagggggtggtgactaagtctcgaccagtgatgatcatcaccgaattcatggagaatggtgccctagatagttttcttcggcagaacgatgggcaattcaccgtgattcagcttgtgggaatgctgagaggtatagccgccgggatgaaatacttggctgagatgaactacgtacatcgagacctcgctgctagaaatattttagtgaatagtaatttggtttgcaaggtatccgatttcggtctctctagatacttgcaggatgacaccagtgatccaacctatacgagttcgctcgggggaaagatcccagttagatggacagccccagaagcgattgcttataggaagttcacgagtgcctctgatgtttggtcatacggtattgttatgtgggaggtcatgtcctttggcgaaagaccctattgggacatgagcaaccaagacgtcattaacgctatcgagcaggattaccgccttcctcccccgatggactgccctgcagcactccaccagcttatgctggactgctggcagaaagatcggaatagcagaccccgcttcgccgagattgtgaatacactggacaagatgatccggaatcctgctagtttgaaaacagtcgccactataactgcagtcccaagtcagccccttctggatcgctctatacccgacttcactgcattcactacagtggacgattggctgagcgcaataaagatggtgcagtatagagactctttcctcacagctggtttcacttccttgcaactggtcacccagatgacatcagaggacctcctgcgtataggaatcactttagccggccaccagaagaaaatccttaatagcatccacagcatgagagtgcagatcagccagtccccgacggctatggcttag

SEQ ID NO: 301298 - DNA, 1638 bp, Artificial Sequence
  derived and/or modified sequence
atgcaccaggtgtctgccaccatgaggagcatcaccctgtcctggccccagcctgagcagcccaacggcatcatcctggactatgagatccgctactatgagaaggagcacaatgagttcaacagctccatggcccggagccagaccaacacagccagaattgatggcctgcggcccggcatggtgtatgtggtgcaggtgcgggccaggacagtggccggctacggcaagttcagcggcaagatgtgcttccagaccctgacagatgatgactacaagtctgagctgcgggagcagctgcccctgattgctggcagcgctgctgctggggtggtgtttgtggtgtccctggtggccatcagcatcgtgtgcagcaggaagagggcctacagcaaggaggccgtgtacagcgacaagctgcagcactacagcacaggccggggcagccctggcatgaagatctacatcgaccccttcacctatgaggaccccaatgaagctgtgcgggagtttgccaaggagattgatgtgtcctttgtgaagattgaggaggtgattggagctggggagtttggagaggtgtacaagggccgcctgaagctgcccgggaagcgggagatctacgtggccatcaagaccctgaaggccggctacagcgagaagcagaggcgggacttcctgtctgaggccagcatcatgggccagtttgaccaccccaacatcatccggctggagggcgtggtgaccaagagcaggcctgtgatgatcatcacagagttcatggagaatggagccctggacagcttcctgcggcagaatgatggccagttcaccgtcatccagctggtgggcatgctgcggggcattgctgctggcatgaagtacctggccgagatgaactacgtgcaccgggacctggccgccaggaacatcctggtgaacagcaacctggtgtgcaaggtgtctgactttggcctgagccgctacctgcaggatgacaccagtgaccccacctacaccagcagcctgggcggcaagatccctgtgcgctggacagcccctgaggccatcgcctacaggaagttcaccagcgccagtgatgtgtggagctatggaattgtgatgtgggaggtgatgagctttggagagcggccctactgggacatgagcaaccaggatgtgatcaatgccatcgagcaggactaccgcctgcccccacccatggactgcccagctgccctgcaccagctgatgctggactgctggcagaaggacaggaacagccggcccaggtttgctgagatcgtgaacaccctggacaagatgatccggaacccagccagcctgaagacagtggccaccatcacagctgtgcccagccagcccctgctggacaggagcatcccagacttcaccgccttcaccaccgtggatgactggctgagcgccatcaagatggtgcagtacagagacagcttcctgacagctggcttcaccagcctgcagctggtgacccagatgaccagcgaggacctgctgagaattggcatcaccctggccggccaccagaagaagatcctgaacagcatccacagcatgagggtgcagatcagccagagccccacagccatggcctag

SEQ ID NO: 301299 - DNA, 1638 bp, Artificial Sequence
  derived and/or modified sequence
atgcaccaggtgagcgccaccatgcggagcatcaccctgagctggccgcaacctgaacaaccaaacgggatcatacttgactacgaaattcgatattatgaaaaggagcacaacgagttcaacagctccatggcccggtcccagactaacaccgcccgcattgatggccttagaccgggtatggtttatgtagtgcaggtccgggcaaggaccgtcgcaggatacggcaagttttcagggaagatgtgttttcagacgctcaccgatgatgattacaagtccgaactgcgggaacagctccctcttatcgccggctctgctgccgctggtgtggtgttcgtggtgtcattggtggcgatttccatagtgtgcagcagaaagcgagcatactccaaggaggcagtctattctgacaaactgcaacactattccacaggccgtgggtctccaggcatgaaaatctacatcgatcctttcacctatgaggaccccaacgaagctgttcgtgagttcgctaaagagattgacgtttcatttgtgaagattgaagaggtcattggcgcgggcgaattcggcgaagtgtacaaagggaggctgaaattgcccgggaagcgtgaaatctacgtggccatcaaaaccctgaaagccgggtatagtgagaagcaacggagggacttcctgtcggaggccagcataatggggcagtttgaccatcctaacattattagacttgagggcgtagtcactaaatcacgtcctgttatgatcattacagagttcatggagaatggagcacttgactcttttctgaggcagaatgacggtcagttcactgtgattcagctggtgggaatgctgagaggtatcgctgcaggaatgaagtatcttgccgagatgaattacgtgcacagggatctggccgctagaaacatcctagtgaattctaatctggtgtgtaaagtatccgactttgggcttagtcgctatctgcaagatgacacaagtgaccccacgtacactagctccctgggcgggaaaattcccgtgcgttggacagcgcccgaggcaatcgcttaccgcaagtttacatccgcctcagacgtgtggagctacggcatcgtgatgtgggaggtgatgagcttcggtgagcggccttattgggatatgagtaatcaggatgtgattaacgccatcgagcaagactatagattgccacctccaatggattgtcccgcagcactgcaccagttgatgcttgactgctggcagaaggaccggaatagtcgtcccagatttgctgagatcgttaataccctcgacaaaatgattcggaaccctgccagcctcaagacagttgcgaccatcacagctgtccctagccagcccctactcgaccgtagtatacctgatttcacggcatttaccactgtggatgattggctgtccgcgatcaagatggtgcaatacagagatagctttctgacagctgggttcacctccttgcagcttgtcacacaaatgacctccgaagacctgctccgcatcggcatcaccctggctggtcaccaaaagaaaattctcaatagtattcactcaatgcgagtccaaattagtcagtcccctacagcaatggcatag

SEQ ID NO: 301300 - DNA, 1638 bp, Artificial Sequence
  derived and/or modified sequence
atgcaccaagtgagtgctaccatgcgttccatcacactgagttggccacaaccagaacagccaaatggcattatcctggactacgagatccgctactacgagaaggaacacaacgagtttaatagctccatggcacggtctcaaacaaatacagccaggatcgatggtctgcgcccaggtatggtgtacgtggtgcaggtgagagccagaacagtcgccggttacgggaagttttctggcaagatgtgctttcagacactgaccgatgacgattataagtcagaactgcgcgaacagctgcctctgattgctggcagcgcagcggctggagtcgttttcgtggtctccctggtggctatatccatcgtatgttccaggaagagggcatactctaaggaagccgtttattccgacaaactgcagcactattccacagggcgagggagccccggaatgaaaatttacattgacccgtttacgtacgaggatccaaacgaagctgtccgagaattcgcaaaagagatcgatgtaagctttgtcaaaatcgaagaggtgatcggtgccggtgaattcggtgaggtgtacaaggggaggcttaaactgccaggcaaacgtgagatctacgttgccatcaagaccctcaaagcgggatactctgagaagcagaggagggactttctgagcgaggccagcattatggggcagttcgaccatcccaatattatcagactggaaggcgttgtgaccaagtcacggcctgtgatgatcatcactgagttcatggagaatggggctctggattccttcttgcgccaaaatgacggacagttcaccgtaatccagttggtcggaatgttacggggaattgccgctggaatgaaatacctcgcagagatgaactatgttcatcgggacctggccgctcgcaacatcctagttaattcgaacttggtctgcaaagtctccgattttggcctctcccgctatctccaggacgataccagcgaccctacctacacatcctcgctcggcggtaagatccctgtgcgctggaccgctccagaagccatcgcctacaggaagttcacgtccgccagtgacgtgtggagctatggaatcgtgatgtgggaggtcatgagctttggtgaaagaccatattgggatatgtctaatcaggacgttatcaatgctatcgagcaggactaccgcctgcccccaccaatggactgtcccgctgctctgcatcagctcatgctggactgttggcaaaaggacaggaactcccgccctcggttcgccgagatcgtaaatactcttgataagatgatccggaaccctgccagtctgaaaaccgtagcaaccattaccgccgtaccttcccaacccctactcgatcgatccatccctgactttactgcgttcacaaccgtagacgactggctatctgcaatcaaaatggtccaatatcgagattcttttttgactgcaggattcacatctctgcagctggtcactcaaatgactagcgaggacttactgcgcatcggtattactctcgctggccaccagaagaagatccttaattccattcactccatgagggttcagatctctcagtcacctaccgccatggcgtag

SEQ ID NO: 301301 - DNA, 1638 bp, Artificial Sequence
  derived and/or modified sequence
atgcaccaggtgagcgccaccatgagaagcatcaccctgagctggccccagcccgagcagcccaacggcatcatcctggactacgagatcagatactacgagaaggagcacaacgagttcaacagcagcatggccagaagccagaccaacaccgccagaatcgacggcctgagacccggcatggtgtacgtggtgcaggtgagagccagaaccgtggccggctacggcaagttcagcggcaagatgtgcttccagaccctgaccgacgacgactacaagagcgagctgagagagcagctgcccctgatcgccggcagcgccgccgccggcgtggtgttcgtggtgagcctggtggccatcagcatcgtgtgcagcagaaagagagcctacagcaaggaggccgtgtacagcgacaagctgcagcactacagcaccggcagaggcagccccggcatgaagatctacatcgaccccttcacctacgaggaccccaacgaggccgtgagagagttcgccaaggagatcgacgtgagcttcgtgaagatcgaggaggtgatcggcgccggcgagttcggcgaggtgtacaagggcagactgaagctgcccggcaagagagagatctacgtggccatcaagaccctgaaggccggctacagcgagaagcagagaagagacttcctgagcgaggccagcatcatgggccagttcgaccaccccaacatcatcagactggagggcgtggtgaccaagagcagacccgtgatgatcatcaccgagttcatggagaacggcgccctggacagcttcctgagacagaacgacggccagttcaccgtgatccagctggtgggcatgctgagaggcatcgccgccggcatgaagtacctggccgagatgaactacgtgcacagagacctggccgccagaaacatcctggtgaacagcaacctggtgtgcaaggtgagcgacttcggcctgagcagatacctgcaggacgacaccagcgaccccacctacaccagcagcctgggcggcaagatccccgtgagatggaccgcccccgaggccatcgcctacagaaagttcaccagcgccagcgacgtgtggagctacggcatcgtgatgtgggaggtgatgagcttcggcgagagaccctactgggacatgagcaaccaggacgtgatcaacgccatcgagcaggactacagactgcccccccccatggactgccccgccgccctgcaccagctgatgctggactgctggcagaaggacagaaacagcagacccagattcgccgagatcgtgaacaccctggacaagatgatcagaaaccccgccagcctgaagaccgtggccaccatcaccgccgtgcccagccagcccctgctggacagaagcatccccgacttcaccgccttcaccaccgtggacgactggctgagcgccatcaagatggtgcagtacagagacagcttcctgaccgccggcttcaccagcctgcagctggtgacccagatgaccagcgaggacctgctgagaatcggcatcaccctggccggccaccagaagaagatcctgaacagcatccacagcatgagagtgcagatcagccagagccccaccgccatggcctag

SEQ ID NO: 301302 - DNA, 2786 bp, Artificial Sequence
  derived and/or modified sequence
actcccaccatccccctctaacagcacggagtcagtttccaggcagtgggcaaggagggctaagaacttgccccaggctacctgcctcccagctgaaaagggctttagttcttcccctgcctgtggagtctgcatgccagattcgcaccctcccctgagttctggccaggaggcttctgaacaagttcatattgttacaaagttcagctggagacttccttctccctgtggcattttcccagtgcctctggctgccctcctgagggatccctgtggtgccaggcaggaatttcctgcttggggaacccagtgggctcccagagcctttctcgcagcttcctctacccctgtatttcgctcggctctctaaattgactcagctccagcttgccctgcagggacattcaaggccagccaggaagctgaaggctgctcccactgcccctccaacagccgctcccctgcagaggcgtctcccatctgcacctgtcggaccggttattaccgagcggactttgaccctccagaagtggcatgcactagcgtcccatcaggtccccgcaatgttatctccatcgtcaatgagacgtccatcattctggagtggcaccctccaagggagacaggtgggcgggatgatgtgacctacaacatcatctgcaaaaagtgccgggcagaccgccggagctgctcccgctgtgacgacaatgtggagtttgtgcccaggcagctgggcctgacggagtgccgcgtctccatcagcagcctgtgggcccacaccccctacacctttgacatccaggccatcaatggagtctccagcaagagtcccttccccccacagcacgtctctgtcaacatcaccacaaaccaagccgccccctccaccgttcccatcatgcaccaagtcagtgccactatgaggagcatcaccttgtcatggccacagccggagcagcccaatggcatcatcctggactatgagatccggtactatgagaaggaacacaatgagttcaactcctccatggccaggagtcagaccaacacagcaaggattgatgggctgcggcctggcatggtatatgtggtacaggtgcgtgcccgcactgttgctggctacggcaagttcagtggcaagatgtgcttccagactctgactgacgatgattacaagtcagagctgagggagcagctgcccctgattgctggctcggcagcggccggggtcgtgttcgttgtgtccttggtggccatctctatcgtctgtagcaggaaacgggcttatagcaaagaggctgtgtacagcgataagctccagcattacagcacaggccgaggctccccagggatgaagatctacattgaccccttcacttacgaggatcccaacgaagctgtccgggagtttgccaaggagattgatgtatcttttgtgaaaattgaagaggtcatcggagcaggggagtttggagaagtgtacaaggggcgtttgaaactgccaggcaagagggaaatctacgtggccatcaagaccctgaaggcagggtactcggagaagcagcgtcgggactttctgagtgaggcgagcatcatgggccagttcgaccatcctaacatcattcgcctggagggtgtggtcaccaagagtcggcctgtcatgatcatcacagagttcatggagaatggtgcattggattctttcctcaggcaaaatgacgggcagttcaccgtgatccagcttgtgggtatgctcaggggcatcgctgctggcatgaagtacctggctgagatgaattatgtgcatcgggacctggctgctaggaacattctggtcaacagtaacctggtgtgcaaggtgtccgactttggcctctcccgctacctccaggatgacacctcagatcccacctacaccagctccttgggagggaagatccctgtgagatggacagctccagaggccatcgcctaccgcaagttcacttcagccagcgacgtttggagctatgggatcgtcatgtgggaagtcatgtcatttggagagagaccctattgggatatgtccaaccaagatgtcatcaatgccatcgagcaggactaccggctgcccccacccatggactgtccagctgctctacaccagctcatgctggactgttggcagaaggaccggaacagccggccccggtttgcggagattgtcaacaccctagataagatgatccggaacccggcaagtctcaagactgtggcaaccatcaccgccgtgccttcccagcccctgctcgaccgctccatcccagacttcacggcctttaccaccgtggatgactggctcagcgccatcaaaatggtccagtacagggacagcttcctcactgctggcttcacctccctccagctggtcacccagatgacatcagaagacctcctgagaataggcatcaccttggcaggccatcagaagaagatcctgaacagcattcattctatgagggtccagataagtcagtcaccaacggcaatggcatgagaactcttgtttcttggggaaggagaggagggaaaaggaccagggtcaagggggaccagaggttgaccactgtggaatgtactggagagactggcttctcagctgaggaatgcatttccatcagtgaagaatcaaccggacctgttgctagcaggcaatctccatttctcagtgacagaagcatgtttgagatgccgtgggaaaccaaatatataataataaaaatataaaaaggtgatgttcaacagaa

SEQ ID NO: 301303 - protein, 1052 aa, Artificial Sequence
  derived and/or modified sequence
MKSEDYPHETMAPDIHEERQYRCEDCDQLFESKAELADHQKFPCSTPHSAFSMVEEDFQQKLESENDLQEIHTIQECKECDQVFPDLQSLEKHMLSHTEEREYKCDQCPKAFNWKSNLIRHQMSHDSGKHYECENCAKQVFTDPSNLQRHIRSQHVGARAHACPECGKTFATSSGLKQHKHIHSSVKPFICEVCHKSYTQFSNLCRHKRMHADCRTQIKCKDCGQMFSTTSSLNKHRRFCEGKNHFAAGGFFGQGISLPGTPAMDKTSMVNMSHANPGLADYFGANRHPAGLTFPTAPGFSFSFPGLFPSGLYHRPPLIPASSPVKGLSSTEQTNKSQSPLMTHPQILPATQDILKALSKHPSVGDNKPVELQPERSSEERPFEKISDQSESSDLDDVSTPSGSDLETTSGSDLESDIESDKEKFKENGKMFKDKVSPLQNLASINNKKEYSNHSIFSPSLEEQTAVSGAVNDSIKAIASIAEKYFGSTGLVGLQDKKVGALPYPSMFPLPFFPAFSQSMYPFPDRDLRSLPLKMEPQSPGEVKKLQKGSSESPFDLTTKRKDEKPLTPVPSKPPVTPATSQDQPLDLSMGSRSRASGTKLTEPRKNHVFGGKKGSNVESRPASDGSLQHARPTPFFMDPIYRVEKRKLTDPLEALKEKYLRPSPGFLFHPQFQLPDQRTWMSAIENMAEKLESFSALKPEASELLQSVPSMFNFRAPPNALPENLLRKGKERYTCRYCGKIFPRSANLTRHLRTHTGEQPYRCKYCDRSFSISSNLQRHVRNIHNKEKPFKCHLCDRCFGQQTNLDRHLKKHENGNMSGTATSSPHSELESTGAILDDKEDAYFTEIRNFIGNSNHGSQSPRNVEERMNGSHFKDEKALVTSQNSDLLDDEEVEDEVLLDEEDEDNDITGKTGKEPVTSNLHEGNPEDDYEETSALEMSCKTSPVRYKEEEYKSGLSALDHIRHFTDSLKMRKMEDNQYSEAELSSFSTSHVPEELKQPLHRKSKSQAYAMMLSLSDKESLHSTSHSSSNVWHSMARAAAESSAIQSISHV

SEQ ID NO: 301304 - DNA, 379 bp, Artificial Sequence
  derived and/or modified sequence
agagcattcaaaaaagtctccatgcctcagtgtattaatctagaaaaggagagcagcaacataatggcaggctgaccacctaggaatagcatgagaacacgaagatcttagacgaattttacaatgtgaagttctgcatagatgccagtcaaccagatgttggaagctggctcaagtacattagattcgctggctgttatgatcagcacaaccttgttgcatgccagataaatgatcagatattctatagagtagttgcagacattgcgccgggagaggagcttctgctgttcatgaagagcgaagactatccccatgaaactatggcgccggatatccacgaagaacggcaatatcgctgcgaagactgtgaccagct

SEQ ID NO: 301305 - protein, 863 aa, Artificial Sequence
  derived and/or modified sequence
MALPRCTWPNYVWRAVMACLVHRGLGAPLTLCMLGCLLQAGHVLSQKLDDVDPLVATNFGKIRGIKKELNNEILGPVIQFLGVPYAAPPTGERRFQPPEPPSPWSDIRNATQFAPVCPQNIIDGRLPEVMLPVWFTNNLDVVSSYVQDQSEDCLYLNIYVPTEDVKRISKECARKPGKKICRKGGPLTKKQTDDLGDNDGAEDEDIRDSGGPKPVMVYIHGGSYMEGTGNLYDGSVLASYGNVIVITVNYRLGVLGFLSTGDQAAKGNYGLLDLIQALRWTSENIGFFGGDPLRITVFGSGAGGSCVNLLTLSHYSEGNRWSNSTKGLFQRAIAQSGTALSSWAVSFQPAKYARMLATKVGCNVSDTVELVECLQKKPYKELVDQDIQPARYHIAFGPVIDGDVIPDDPQILMEQGEFLNYDIMLGVNQGEGLKFVENIVDSDDGISASDFDFAVSNFVDNLYGYPEGKDVLRETIKFMYTDWADRHNPETRRKTLLALFTDHQWVAPAVATADLHSNFGSPTYFYAFYHHCQTDQVPAWADAAHGDEVPYVLGIPMIGPTELFPCNFSKNDVMLSAVVMTYWTNFAKTGDPNQPVPQDTKFIHTKPNRFEEVAWTRYSQKDQLYLHIGLKPRVKEHYRANKVNLWLELVPHLHNLNDISQYTSTTTKVPSTDITFRPTRKNSVPVTSAFPTAKQDDPKQQPSPFSVDQRDYSTELSVTIAVGASLLFLNILAFAALYYKKDKRRHDVHRRCSPQRTTTNDLTHAQEEEIMSLQMKHTDLDHECESIHPHEVVLRTACPPDYTLAMRRSPDDVPLMTPNTITMIPNTIPGIQPLHTFNTFTGGQNNTLPHPHPHPHSHSTTRV

SEQ ID NO: 301306 - DNA, 2592 bp, Artificial Sequence
  derived and/or modified sequence
atggctttacccaggtgcacgtggcccaactacgtgtggagggctgtgatggcttgcttagtgcacagaggcctgggggccccgctaactctctgcatgcttggctgtctgttgcaagcaggacacgtgctctcccagaagctggacgatgtggatcccctggtcgccaccaattttgggaagatcagagggatcaaaaaggaactgaataacgagattctgggtcccgtcatacaatttctcggggttccttacgccgcaccacctacaggcgagagacgtttccagcccccagaacccccaagcccttggagcgacatccgaaacgctacccagttcgccccagtttgccctcaaaacataatcgatggaaggctcccagaggtgatgttgccagtttggttcaccaataatcttgacgtggtttcatcttacgtgcaagaccagagtgaagactgtctgtacctgaatatctatgtgccgactgaagacgtaaagcggatctctaaggaatgtgcacgcaaacctggcaaaaagatctgtcggaagggcggaccactaacgaagaaacagacagacgaccttggggataacgacggagctgaggatgaggatatacgagactctggaggacccaaacccgttatggtgtatatccatggaggctcatatatggaaggaacagggaacctgtacgacggctctgttttggcaagctatgggaatgtgattgttattaccgtgaattaccgcctgggcgtcctgggttttcttagcacgggcgatcaggccgctaaaggcaattacggattactggaccttatccaggccctgcgttggaccagtgagaacatcgggtttttcggcggcgacccactccgcataaccgtcttcggtagcggcgccgggggcagctgtgtgaatttgctcacactgtctcactatagtgaaggcaatcggtggagcaactccacaaagggtctcttccaacgagccattgctcaatccggaacagctctgtccagctgggcagttagttttcagccagctaaatacgcccgcatgctggccacaaaggtcggctgcaatgtatccgacacggttgagctggttgagtgcctacaaaaaaagccctacaaagagttagtcgaccaagacatacagcctgctcgctatcatatagccttcggtccagttattgatggcgatgttattccggacgacccccaaatcttgatggaacagggcgaatttttgaactacgatataatgctcggcgttaatcagggagagggtctcaaatttgtggaaaacatcgtggattcagatgatggaatttctgctagtgattttgatttcgctgtgagtaatttcgtggacaacctgtatgggtatccggagggaaaggatgtacttcgggaaaccataaaatttatgtatactgactgggccgaccgccataatcccgagacacgaaggaagactctgctggccctgttcactgaccaccaatgggtggcccccgctgtggcaaccgctgacctgcacagcaatttcggttccccaacctacttctatgctttctatcatcattgtcaaactgaccaagtgcccgcatgggctgatgccgcacatggtgatgaggtcccttacgtgcttggcatacctatgattgggcctaccgagctctttccctgtaatttttcaaagaatgacgtgatgctgtctgcggtggtgatgacatactggacaaatttcgccaagactggtgaccccaatcagcccgttccacaggacaccaagttcattcacacaaaacctaaccggtttgaagaagtggcctggacgcggtattcccaaaaggatcagctatacctgcatatcgggctcaagccacgtgtaaaggaacactatcgagcaaataaagtcaacctgtggctggagcttgtgccacacctgcataacctgaacgatattagccagtacacctctaccactactaaagtgccctccaccgacattactttcagacctacccggaaaaactccgtccccgtcacgtcagccttccccacagcaaagcaggacgaccctaagcaacagccctcacccttctcggtggaccagagggactactcaaccgagcttagcgtgactatcgcggtgggcgccagccttcttttcctgaatattctggcattcgcggcgttgtattacaaaaaggataagaggcgtcacgacgtccaccgacggtgcagtcctcaacggaccaccaccaatgaccttactcatgcccaggaggaagaaattatgagtctgcaaatgaaacacactgaccttgaccacgaatgtgagtccatccatccgcatgaagtggtcttgcgcactgcatgtccacccgactatacgttggcaatgcgaagatccccagacgacgtgcctttgatgaccccaaataccataacgatgatcccaaacacaatccccggtatccaacctttgcatacgtttaacactttcactggcggacagaacaataccttaccccatccccatccacacccccactctcatagcacgacacgagtgtag

SEQ ID NO: 301307 - DNA, 33 bp, Artificial Sequence
  derived and/or modified sequence
atggctctcccacgatgcacttggccaaattag

SEQ ID NO: 301308 - DNA, 42 bp, Artificial Sequence
  derived and/or modified sequence
atggcactgcctaggtgtacctggcccaattacgtatggtag

SEQ ID NO: 301309 - DNA, 2592 bp, Artificial Sequence
  derived and/or modified sequence
atggccctgccccgctgcacctggcccaactacgtgtggagggctgtgatggcctgcctggtgcaccggggcctgggcgcccccctgaccctgtgcatgctgggctgcctgctgcaggccggccacgtgctgagccagaagctggatgatgtggaccccctggtggccaccaactttgggaagatccggggcatcaagaaggagctgaacaatgagatcctgggccctgtgatccagttcctgggcgtgccctatgctgccccacccaccggggagcggcgcttccagcccccagagccccccagcccctggagcgacatcagaaatgccacccagtttgcccctgtgtgcccccagaacatcattgatggccgcctgcctgaggtgatgctgcctgtgtggttcaccaacaacctggatgtggtgagcagctatgtgcaggaccagagcgaggactgcctgtacctgaacatctacgtgcccacagaagatgtgaagaggatcagcaaagaatgtgccaggaagccaggcaagaagatctgcaggaaaggaggccccctgaccaagaagcagacagatgacctgggggacaatgatggagcagaagatgaggacatccgggacagcggcggccccaagcctgtgatggtgtacatccacggcggcagctacatggagggcaccggcaacctgtatgatggctctgtgctggccagctatggaaatgtcatcgtcatcaccgtgaactaccgcctgggcgtgctgggcttcctgagcactggagaccaggccgccaagggcaactacggcctgctggacctgatccaggccctgcgctggaccagtgaaaatattggcttcttcggcggggaccccctgcgcatcaccgtgtttggcagcggggccggcggcagctgtgtgaacctgctgaccctgagccactacagcgagggcaaccgctggagcaacagcaccaagggcctcttccagagggccatcgcccagagcggcacagccctgagctcctgggccgtgtccttccagcctgccaagtatgccaggatgctggccaccaaggtgggctgcaatgtgtctgacacagtggagctggtggagtgcctgcagaagaagccctacaaggagctggtggaccaggacatccagcctgcccgctaccacatcgccttcggccctgtgattgatggagatgtgatcccagatgacccccagatcctgatggagcagggcgagttcctgaactatgacatcatgctgggcgtgaaccagggcgagggcctgaagtttgtggagaacatcgtggacagtgatgatggcatcagcgccagtgactttgattttgctgtgagcaactttgtggacaacctgtatggctacccagagggcaaggatgtgctgcgggagaccatcaagttcatgtacacagactgggccgacagacacaaccctgagaccaggaggaagaccctgctggccctcttcacagaccaccagtgggtggccccagctgtggccacagctgacctgcacagcaactttggcagccccacctacttctacgccttctaccaccactgccagacagaccaggtgcctgcctgggcagatgctgcccatggagatgaggtgccctacgtgctgggcatccccatgattggccccacagagctgttcccctgcaacttcagcaagaatgatgtgatgctgtctgctgtggtgatgacctactggaccaactttgccaagacaggagaccccaaccagcctgtgccccaggacaccaagttcatccacaccaagcccaacagatttgaggaggtggcctggacccgctacagccagaaggaccagctgtacctgcacatcggcctgaagccccgggtgaaggagcactaccgggccaacaaggtgaacctgtggctggagctggtgccccacctgcacaacctgaatgacatcagccagtacaccagcaccaccaccaaggtgcccagcacagacatcaccttccggcccaccaggaagaacagcgtgcctgtgaccagcgccttccccacagccaagcaggatgaccccaagcagcagcccagccccttctctgtggaccagagggactacagcacagagctgtctgtgaccatcgctgtgggcgccagcctgctcttcctgaacatcctggcctttgctgccctgtactacaagaaggacaagagaagacatgatgtgcaccggcgctgcagcccccagaggaccaccaccaatgacctgacccacgcccaggaggaggagatcatgagcctgcagatgaagcacacagacctggaccatgaatgtgagagcatccacccccatgaggtggtgctgaggacagcctgccccccagactacaccctggccatgagaagaagcccagatgatgtgcccctgatgacccccaacaccatcaccatgatccccaacaccatccctggcatccagcccctgcacaccttcaacaccttcaccggcggccagaacaacaccctgccccacccccacccccacccccacagccacagcaccaccagggtgtag

SEQ ID NO: 301310 - DNA, 33 bp, Artificial Sequence
  derived and/or modified sequence
atggccctgccccgctgcacctggcccaactag

SEQ ID NO: 301311 - DNA, 42 bp, Artificial Sequence
  derived and/or modified sequence
atggccctgccccgctgcacctggcccaactacgtgtggtag

SEQ ID NO: 301312 - DNA, 2592 bp, Artificial Sequence
  derived and/or modified sequence
atggccctgccccggtgcacctggcccaactacgtgtggcgggccgttatggcatgtcttgtccacagggggctaggagctcctctgacactttgtatgctgggatgcctgctccaagccgggcacgtgctgtcccagaaactcgatgacgtggaccccctcgtggctaccaactttggcaagattcgagggataaagaaggagcttaataatgagatcctcgggcccgtgattcagttcctgggagtgccttatgccgccccccccacaggagaacggagattccagcctcctgagcctccctccccttggtctgatatccgcaacgctacccagtttgctcccgtgtgtccgcagaacatcatagatgggcgactccctgaagttatgttgcctgtgtggttcacaaacaatctggacgtggtgtctagttacgtgcaggaccagtccgaggattgtctgtatctcaatatttacgtgcctacggaggatgtaaagcggatatcaaaagaatgtgcaagaaagcccgggaagaagatatgccggaaaggtgggcccttaacgaaaaagcagacggacgacctcggagataatgatggcgctgaagacgaggacattcgcgacagtggtggaccaaaacctgtgatggtctatatccacggcggatcatacatggagggcaccggaaatttatatgacggatcggtgcttgcctcttatggcaacgtaatagtaatcaccgtcaactaccggcttggggtgctgggctttctgtctacaggcgatcaggcagccaaaggcaattatggactgcttgatcttattcaagccctgcgctggacttcggaaaacattggatttttcggcggagatccgctcagaattacggtattcggcagcggggccggagggagctgtgtgaacctgctgacactgtctcactactcagaaggaaaccggtggtccaattccacaaaaggtttatttcagcgggccattgctcagtccggcacggccctgagttcatgggctgtgtcattccaaccagccaaatacgctaggatgttagccaccaaggtgggctgcaacgtgtcagacacagtggagctggtagaatgtcttcagaagaagccatacaaggagctggtagatcaggatatccagccagccagataccacattgcgtttggccccgttatcgatggagacgtaatacccgatgaccctcaaatcctaatggagcagggagaatttctgaattacgacattatgctaggtgtcaatcagggagaaggactaaagtttgtggagaatattgttgattccgacgacggcatatcagcgtcagatttcgacttcgccgtgtctaatttcgttgacaatttatacgggtatccagagggaaaggatgtgctacgggaaaccattaaatttatgtacacagactgggccgatcggcataaccccgagacgcggaggaagacactcctagctctcttcacggaccaccagtgggtcgctcccgcagtcgccacggcagacctgcacagcaattttgggagcccaacctacttctacgcattttaccaccattgccaaactgaccaggtccccgcatgggctgatgcggcgcacggggacgaagtgccttacgtgctgggcattccgatgatcggccctactgaactgttcccttgcaactttagtaagaacgacgtcatgttgagtgccgttgtgatgacttattggacaaattttgcaaaaactggtgatccaaatcagccagtgccccaagatacaaagtttatccataccaaaccaaaccgcttcgaagaagtcgcctggactcggtatagtcagaaagaccagctgtacttacacatcggcctgaaaccccgcgtaaaggagcattatagggctaacaaggtcaacctatggctggagctggtaccacaccttcacaacttgaatgacattagtcagtatacgtccacgaccacaaaggtgccctccactgacatcacattcagacccacacggaagaattcagtacccgtgacttcagcctttccaacagctaagcaggatgaccctaaacagcagccaagtccattctctgtggatcagcgagattactccaccgaactgagtgtgactatcgctgttggcgcctccttgctctttctcaacattcttgcattcgccgcactgtattataaaaaagacaagaggcgccacgatgttcaccgaagatgctcgccccagagaacaacaacgaatgatctcactcatgcacaggaggaagagatcatgtctttacagatgaaacatacagatctggaccatgagtgtgagtccattcatccacatgaagtggtgctgcgtacggcatgtccccccgattatactctcgcaatgaggcgatcaccagacgatgtgccattgatgacacccaacactatcaccatgatccctaacaccattcccgggatacagccgctgcacactttcaatacattcactggagggcagaataacactctcccccatcctcacccccaccctcattcgcattctacaacaagagtgtag

SEQ ID NO: 301313 - DNA, 33 bp, Artificial Sequence
  derived and/or modified sequence
atggccctgccccggtgcacctggcccaactag

SEQ ID NO: 301314 - DNA, 42 bp, Artificial Sequence
  derived and/or modified sequence
atggccctgccccggtgcacctggcccaactacgtgtggtag

SEQ ID NO: 301315 - DNA, 2592 bp, Artificial Sequence
  derived and/or modified sequence
atggcactgcccagatgcacgtggccaaattatgtttggagagcagtgatggcatgcttggtacaccggggattgggtgccccattgactctctgtatgttgggatgtttgcttcaggctggccatgtgctatcacaaaaattggatgatgtggacccactggtggctaccaactttggaaagataagagggattaagaaggaactcaataatgaaattttggggcctgttattcaatttcttggggttccatatgcagccccaccaacaggggaacgtcgttttcagcctccagaaccaccatctccctggtcagatatcagaaatgccactcaatttgctcctgtgtgtccccagaatatcattgatggcagattgccagaagtcatgcttcctgtgtggtttactaataacttggatgtggtttcatcatatgtgcaagaccagagcgaagactgcctatatttaaatatatatgtcccgactgaggatgtaaaaagaatatccaaggaatgtgccagaaagcccggcaagaaaatatgtagaaaaggaggtccccttacaaagaaacagacagatgatttaggtgataatgacggtgctgaagatgaagatattcgggacagtgggggtcccaaaccagtgatggtgtatatccatggtggctcatatatggaaggtactggaaatttatatgatggaagtgtcttggcaagttatggcaatgtgatcgtcatcacagtcaactatcgacttggagtactcggtttcttgagtacaggcgatcaggctgcaaaggggaactatggactccttgatctcatacaagctttaagatggactagtgaaaacattggattctttggtggtgaccccttaagaatcactgtttttggatctggtgctgggggttcatgtgtcaacctgctgactttatcccattattctgaaggtaaccgttggagcaattcaaccaaaggactttttcaacgagcaatagctcaaagtggaacagccctttccagctgggctgttagttttcaacctgcaaaatatgctagaatgttggccacaaaagttggttgcaatgtttcagatacagtagagttagtggaatgcctacagaagaagccttacaaagaacttgttgaccaagatattcaaccagctcgataccacatagcctttggacctgtgattgatggtgatgtaataccagacgacccccagatattgatggagcaaggagagtttctcaactatgatataatgttaggagtgaaccaaggggaagggttaaaatttgttgaaaatatagtagatagcgatgatggtatatcagctagtgattttgactttgctgtttcaaattttgttgataatttatatggatatcctgaaggcaaagatgttttgagagaaaccattaagttcatgtatactgactgggctgaccgtcataaccctgaaaccagaagaaagacattactggctttgtttacggaccatcagtgggtggcaccagctgtagccacagcggatcttcactcaaactttggttcacctacgtacttctatgccttttaccatcattgccaaacagatcaggttccagcttgggctgatgcagcccacggagacgaggttccctatgtactgggaatccccatgattggccctacagagttatttccttgcaatttctccaaaaatgatgtgatgctgagtgcagttgtaatgacatactggacaaattttgctaaaactggtgacccaaatcaaccagtccctcaagacacgaaattcattcataccaaacccaaccgttttgaagaagtagcatggaccagatattcccagaaagaccaactttatctccatattggattaaaaccaagagttaaagaacattacagagccaataaggtgaacctctggttggagttggtacctcatctgcataatctcaatgacatttctcagtatacctctacaacaactaaagtgccatcaactgacatcactttcagacctacgagaaaaaattctgtacctgtcacgtcagcctttcccactgccaagcaggatgatcccaaacaacaaccaagtccattttcagtggatcaaagggactactcaacagagctgagtgtcactattgcagttggagcatcactgctgtttctgaacatcttggcctttgcagccctgtactacaaaaaggataagaggagacatgatgttcacaggagatgcagccctcagcgcactactaccaatgatctaacccatgcacaagaagaggaaatcatgtccctccaaatgaagcacactgatttggatcatgaatgtgagtccattcatccacatgaggtggttcttcggaccgcctgtcccccagattacacactagctatgaggaggtcacctgatgatgttcccttaatgacacccaacaccattacaatgattcccaacactataccagggattcagcccttacacacattcaatacatttactggaggacagaacaatactctgccccatccccatccccacccccattcacattcaacaaccagggtatag

SEQ ID NO: 301316 - DNA, 2592 bp, Artificial Sequence
  derived and/or modified sequence
atggctctccctagatgcacctggccgaattacgtttggagggcagttatggcctgtctggtacaccgaggcctgggagcacccctgaccctttgcatgctgggctgtcttcttcaagccggtcatgtgctcagccaaaagctggatgatgtcgacccccttgttgccaccaatttcggaaagatccgcggtatcaagaaagaattgaataacgaaatccttggaccggtaattcagttcttgggggtcccatatgccgcaccaccgacgggcgagcgccgatttcaaccgcctgagccaccttctccatggagtgacataaggaatgcgacccaattcgccccagtgtgccctcagaatatcatcgatggccgtctgccagaggtgatgctgccggtgtggtttacaaataacctcgatgtagtttccagctatgttcaggatcagtcagaggattgtctctatctcaacatttatgttccgaccgaggatgtaaaaaggatctccaaagaatgtgccaggaagccaggtaaaaagatatgtagaaagggcggacccctgaccaagaagcagactgacgatctcggggacaacgacggagccgaggatgaagatattagggatagtgggggtcccaaacctgtcatggtgtacatccacggcggaagctatatggaggggacagggaatttgtatgatggcagcgttctggcctcctatggcaatgtaatcgtaataacggttaattatcggttgggagtactcggatttcttagcaccggcgaccaggctgctaagggaaactatgggctactcgacctgatccaggcgctgaggtggacttccgaaaacatcgggttctttggaggcgaccccttgagaatcactgtcttcggcagcggggcaggcggttcatgtgtaaacctgctgactctttcccattactcagagggaaaccgttggtccaactctaccaagggcctctttcagagagcgattgctcagtccggaacagccctcagctcctgggcagtgtctttccagcccgcaaaatatgcccgaatgctcgctaccaaagtgggttgcaatgtgagcgataccgtggagctggttgagtgtctccagaagaagccctataaagagctggttgaccaggatattcagcctgcgagatatcacatcgccttcggacccgtcattgatggtgatgttataccagacgacccacagatactgatggagcaaggcgaatttctgaattacgatataatgctgggcgtgaaccaaggagagggacttaaattcgtcgagaacattgtggattccgacgacggaatttctgcctccgattttgactttgctgtgtcaaacttcgtggataatctgtatggttacccggaaggtaaagacgtgctgcgggaaactattaagtttatgtacacagattgggcggatagacataatcccgagaccagaagaaagaccctcctggcactgttcacagatcaccaatgggtggcaccagcagtggccactgccgatctccattctaactttggctcgcctacatatttttacgctttctaccaccattgtcagacagatcaagtgccggcatgggctgatgccgctcatggcgatgaggtgccctacgtgttggggatccctatgattgggcctactgaactgttcccatgtaacttctcaaaaaacgatgtgatgctctcagcagtggtcatgacttattggacaaactttgccaaaaccggggacccgaaccagcccgtaccgcaagacactaaatttatccataccaagccaaacagatttgaggaagtcgcatggacgcgctactcccagaaggatcagctgtatcttcatattggtctcaagcccagagttaaggagcactaccgcgctaataaggttaatctgtggctggaactggtaccccatttgcacaaccttaatgacattagccagtacacttctaccaccacaaaggtcccttctacagatattacatttagaccaacgcgaaaaaatagtgtgccagtgacttcggctttcccaaccgcaaaacaagatgatccaaagcagcagccttcacccttttccgtcgaccagcgtgactactcaactgagctgagtgtgactattgcagtcggtgcttccctcctgttcctgaatattttggcctttgccgctctgtactacaagaaggacaagcggaggcatgatgtgcacaggcggtgctctcctcagaggactaccacgaacgacctgacacatgctcaggaagaggagatcatgtctcttcagatgaagcataccgatcttgaccatgagtgcgagagcattcatcctcacgaggtggttttacggaccgcatgtcctcccgactataccttggcgatgcggagatcgcctgacgacgtccctttgatgacacccaacacgatcactatgatcccaaacacaattcccggaatccagcctctccatacgtttaacacttttacgggtgggcagaacaatacactgccccaccctcatcctcacccgcactcccactcaaccactcgtgtatag

SEQ ID NO: 301317 - DNA, 33 bp, Artificial Sequence
  derived and/or modified sequence
atggccctcccgagatgcacctggccaaactag

SEQ ID NO: 301318 - DNA, 42 bp, Artificial Sequence
  derived and/or modified sequence
atggcactccccaggtgtacttggccaaactacgtttggtag

SEQ ID NO: 301319 - DNA, 2592 bp, Artificial Sequence
  derived and/or modified sequence
atggccctgcccagatgcacctggcccaactacgtgtggagagccgtgatggcctgcctggtgcacagaggcctgggcgcccccctgaccctgtgcatgctgggctgcctgctgcaggccggccacgtgctgagccagaagctggacgacgtggaccccctggtggccaccaacttcggcaagatcagaggcatcaagaaggagctgaacaacgagatcctgggccccgtgatccagttcctgggcgtgccctacgccgccccccccaccggcgagagaagattccagccccccgagccccccagcccctggagcgacatcagaaacgccacccagttcgcccccgtgtgcccccagaacatcatcgacggcagactgcccgaggtgatgctgcccgtgtggttcaccaacaacctggacgtggtgagcagctacgtgcaggaccagagcgaggactgcctgtacctgaacatctacgtgcccaccgaggacgtgaagagaatcagcaaggagtgcgccagaaagcccggcaagaagatctgcagaaagggcggccccctgaccaagaagcagaccgacgacctgggcgacaacgacggcgccgaggacgaggacatcagagacagcggcggccccaagcccgtgatggtgtacatccacggcggcagctacatggagggcaccggcaacctgtacgacggcagcgtgctggccagctacggcaacgtgatcgtgatcaccgtgaactacagactgggcgtgctgggcttcctgagcaccggcgaccaggccgccaagggcaactacggcctgctggacctgatccaggccctgagatggaccagcgagaacatcggcttcttcggcggcgaccccctgagaatcaccgtgttcggcagcggcgccggcggcagctgcgtgaacctgctgaccctgagccactacagcgagggcaacagatggagcaacagcaccaagggcctgttccagagagccatcgcccagagcggcaccgccctgagcagctgggccgtgagcttccagcccgccaagtacgccagaatgctggccaccaaggtgggctgcaacgtgagcgacaccgtggagctggtggagtgcctgcagaagaagccctacaaggagctggtggaccaggacatccagcccgccagataccacatcgccttcggccccgtgatcgacggcgacgtgatccccgacgacccccagatcctgatggagcagggcgagttcctgaactacgacatcatgctgggcgtgaaccagggcgagggcctgaagttcgtggagaacatcgtggacagcgacgacggcatcagcgccagcgacttcgacttcgccgtgagcaacttcgtggacaacctgtacggctaccccgagggcaaggacgtgctgagagagaccatcaagttcatgtacaccgactgggccgacagacacaaccccgagaccagaagaaagaccctgctggccctgttcaccgaccaccagtgggtggcccccgccgtggccaccgccgacctgcacagcaacttcggcagccccacctacttctacgccttctaccaccactgccagaccgaccaggtgcccgcctgggccgacgccgcccacggcgacgaggtgccctacgtgctgggcatccccatgatcggccccaccgagctgttcccctgcaacttcagcaagaacgacgtgatgctgagcgccgtggtgatgacctactggaccaacttcgccaagaccggcgaccccaaccagcccgtgccccaggacaccaagttcatccacaccaagcccaacagattcgaggaggtggcctggaccagatacagccagaaggaccagctgtacctgcacatcggcctgaagcccagagtgaaggagcactacagagccaacaaggtgaacctgtggctggagctggtgccccacctgcacaacctgaacgacatcagccagtacaccagcaccaccaccaaggtgcccagcaccgacatcaccttcagacccaccagaaagaacagcgtgcccgtgaccagcgccttccccaccgccaagcaggacgaccccaagcagcagcccagccccttcagcgtggaccagagagactacagcaccgagctgagcgtgaccatcgccgtgggcgccagcctgctgttcctgaacatcctggccttcgccgccctgtactacaagaaggacaagagaagacacgacgtgcacagaagatgcagcccccagagaaccaccaccaacgacctgacccacgcccaggaggaggagatcatgagcctgcagatgaagcacaccgacctggaccacgagtgcgagagcatccacccccacgaggtggtgctgagaaccgcctgcccccccgactacaccctggccatgagaagaagccccgacgacgtgcccctgatgacccccaacaccatcaccatgatccccaacaccatccccggcatccagcccctgcacaccttcaacaccttcaccggcggccagaacaacaccctgccccacccccacccccacccccacagccacagcaccaccagagtgtag

SEQ ID NO: 301320 - DNA, 33 bp, Artificial Sequence
  derived and/or modified sequence
atggccctgcccagatgcacctggcccaactag

SEQ ID NO: 301321 - DNA, 42 bp, Artificial Sequence
  derived and/or modified sequence
atggccctgcccagatgcacctggcccaactacgtgtggtag

SEQ ID NO: 301322 - DNA, 6128 bp, Artificial Sequence
  derived and/or modified sequence
tggaaaaaaggaactgtgtgcagtaccgcaggcattttctggtggacaacagtgtgtttcatgttgaaagatgcatgagtgtgatgcagtccgggacacagatgatcaagctgaaacgtggaaccaaagggcttgtccgcctcttttacctggatgagcaccggacacgcctccgatggcgaccctctaggaagagtgagaaggcaaaaatacttattgattccatttacaaagtgactgagggccggcagtctgaaatattccacagacaagctgaggggaacttcgaccccagctgctgcttcaccatctaccatggcaaccacatggagtccctggacctcatcacctccaaccccgaggaggcccgcacctggatcacaggcctcaagtacctgatggctggcatcagtgatgaagactcccttgccaaaaggcagaggacccatgaccaatgggtgaagcagacctttgaggaagctgataagaatggtgacggcttgctgaatattgaagagatacatcagctgatgcataaactgaatgttaatctgccccgaagaaaagtcagacaaatgtttcaggaagccgacacagatgagaatcagggaactttgacatttgaagagttctgtgttttttacaaaatgatgtctttgagacgagacctttatttgttacttttgagctacagtgacaagaaagatcacctaactgtggaagaactggctcagtttttgaaggtggagcaaaagatgaataatgtgacaacggactattgtcttgacatcataaagaagtttgaagtttcagaagaaaataaggtgaaaaatgttcttggcatagaaggcttcacgaacttcatgcgtagtcctgcctgtgacatatttaacccattgcaccatgaagtgtaccaagacatggatcagcccctctgcaactactacattgcttcctctcacaatacatacctgactggagaccagctcctttctcagtccaaagtggatatgtatgcacgggtgctgcaagagggctgtcgctgtgtggaagttgactgttgggatggcccagatggagagccagtagtacatcatggttacactctcacttcaaaaattctcttcagagatgttgtggagaccatcaacaagcatgcctttgtgaagaatgagtttcctgttatattgtctatcgagaatcactgcagtatccagcagcaaaggaagattgctcagtacctgaaaggaatattcggagacaaactggacctgtcatctgttgatacaggggagtgcaagcagcttccaagccctcaaagtttgaaaggcaaaattctagtgaagggtaagaagttgccttatcaccttggggatgatgcagaggaaggggaagtttctgatgaggacagtgcagatgaaattgaagacgagtgcaaattcaagctccattatagtaatgggaccactgagcatcaggtggaatctttcataaggaaaaaactggagtcactgttaaaagaatctcaaattcgagataaagaagatcctgatagtttcacagtgcgggcactactgaaggccacgcatgaaggcttaaatgcacacctgaagcagagtccagatgtaaaggaaagtggaaagaaatcacatggacgatccctcatgaccaactttggaaaacataagaaaactacaaaatcacggtctaaatcttacagtactgatgatgaggaagacacacagcagagtactggcaaggagggtggccagctgtacagattgggtcgccgaaggaaaaccatgaagctctgccgagaactctctgatttggttgtgtacacaaactccgtggccgctcaggacattgtggatgacggaaccacaggaaatgtgttatcattcagtgaaacaagagcacatcaggttgttcagcaaaaatcagagcagttcatgatttataatcaaaagcaactcacgaggatttacccctctgcctaccgcattgattccagtaacttcaaccctctcccctactggaacgcaggctgccagctagtggcactgaattatcaatctgaaggacgaatgatgcagttaaaccgagccaaattcaaggcaaatggcaattgtggctatgtcctcaaaccccagcaaatgtgcaaaggtactttcaaccctttctctggtgaccctcttcctgccaaccccaaaaagcagctcatcctgaaagttatcagtggacagcaactccccaaacctccagactccatgtttggagatcgaggcgagatcattgacccttttgttgaagttgaaattattggattgccagtagattgttgtaaagatcaaacccgtgtggtagatgacaatggatttaaccctgtgtgggaagaaacactgacatttacagtacacatgccagaaatagctttggttcggttccttgtgtgggatcacgatcccattggacgagactttgttggacaaagaactgtgaccttcagcagcttagtgcctggctaccggcatgtctatttggaaggactgacagaagcatccatatttgtacacataaccatcaatgaaatctatggaaagaacagacaactccagggtctgaagggactgttcaataagaatcctaggcacagttcttcagaaaacaattcccattatgtacggaagcgatccattggagatagaattctgcgacgcacagctagcgccccagccaaaggcaggaaaaagagcaaaatgggcttccaagaaatggtggagataaaggattctgtgtccgaggccacaagagatcaagatggcgtgctgaggaggaccacacgcagtttgcaagcacgccctgtctctatgcctgttgacagaaaccttctgggagctttgtcgctgcctgtatctgaaacagcaaaagacattgaaggaaaagaaaactctctagcagaagataaagatggcagaagaaaagggaaagcaagtataaaagatccacattttctaaatttcaacaaaaagttatcatcctcctccagtgctctgctccacaaagataccagccaaggggacaccattgtatctactgcccacatgtcagtcacaggagaacagctgggcatgtcaagtcctaggggtgggagaaccacatcaaatgccacaagcaattgccaggaaaacccctgtcccagcaagtctctctccccaaagcagcatttggctcccgatcctgtagttaaccccacacaagatctgcatggtgtgaaaatcaaggaaaagggtaatcctgaggactttgtggaagggaaaagcatcttgtcaggaagcgtcctttctcatagcaacctagaaattaagaacctggaaggtaataggggtaagggccgagctgcaacatccttttctttgtcagacgtctccatgctctgttctgacatacctgacctacattcaactgcaattctgcaggagagtgtaatttcccatcttattgacaatgtcactttaacaaatgagaatgagccgggcagttccatctcagccctgattggccagtttgatgagaccaacaatcaggctctcacagttgtttctcatcttcataataccagtgtgatgtcaggccattgtcccttgcctagcctgggcctaaaaatgcccatcaagcatggtttttgcaagggaaaatccaagtcttccttcctgtgctcatctccggagctgatagcactctcgagttctgagaccaccaaacatgcaacgaacacagtttatgaaactacctgcactcccatctctaaaaccaaaccagatgatgacctttctagtaaggccaagacagcggccttagaaagcaacctgcctggatcccctaatacttctcgtggctggttaccaaaaagtcctaccaagggagaagactgggaaacactgaagagctgcagccctgcctcttcccctgatttgaccctggaggatgtaatagctgatcccactctctgtttcaattctggggagagcagccttgtggaaattgatggagaatcagaaaatctttctctaacaacctgtgaatataggagagagggcacaagtcaacttgcttctcctttaaaactcaagtacaatcagggtgtggtagaacactttcaaagaggtttgagaaacggctactgtaaagagaccctccgcccttctgtccctgaaatattcaacaatattcaagatgtcaaaactcaaagtatttcttatctagcctatcagggtgctggctttgtgcataatcatttctcagattcagatgcaaaaatgttccagacctgtgtgccccagcaatctagtgctcaagatatgcatgtccctgtacccaagcagttggcacatcttcctttgcctgctctgaaactgcctagtccttgcaaatccaaaagtctgggggacttaacatcagaggacattgcctgcaattttgagagcaagtaccagtgtattagtaagagttttgttacaactggcattagagacaagaagggcgtgactgtgaagacaaagtcgttagagcctatagatgccctgaccgagcagcttcggaagcttgtgtcctttgaccaggaagacaactgccaagtgctatattcaaagcaggatgccaatcagctcccccgggcactggtcaggaagttgtcatccagaagtcagagcagagtgcgcaatattgctagtcgtgccaaggagaaacaggaagccaacaagcagaaagttccaaaccccagcaatggggcaggagtggttcttagaaacaaaccctcagcacccacccctgcagtgaatcgccactccaccggctcctacatcgcaggctacctgaagaacacgaaagggggtggccttgaaggccggggcatcccagagggggcatgcacggctcttcactatggccacgttgaccagttttgttcagataattctgttttgcagactgagccaagcagtgatgataaaccagaaatttattttcttttgagactgtgaattatttaaaactgcattcttaaggttttcaaggtattctgtagaatgtcagagttttcagtaaataagttccttggctttggaatgattttcaaatgtatttttaaacttgtatttgggtctccctttgacttcatgtgttctccctgttaatgcgtttgtatatagatttggtgacatttcccatgtacctattatgatctttctcccttgagttgttgtaaactgtatcagtatgaaatatgtgcatgccctagatgtgaaactcctcagcagctcgggttataatgtgtgtgtgtttcaccaagatgtcctttactgtgtcctcagattgcagtcacaaatgtagtcatttttactctctaactgttgagttgattaagagactttgcaaacgacaaagggatgaattccttactttaatctgttatcatttttcctatgtttccctctttgttcagaagcccagatgcatttttataactcagttttaaaaactttaaaatagttaccttgccttttaggatgttcttatcccacccataatgagagttgaaaggggatggatagctgctccccatgcccttcccactttttggaataggccgtgagggtgtgaggaagaaggctgtcttttgtacataaggacaaaattgtttgttttacataaattttgttacatatttttgctaatggctttgtatgtaacaagaagcgagttgccaaactacctgttgtacttttgaattttctgattgaattacagactgcgaacaacggctttcagaatgagggacttccatcagactctaatgataatagtagcacaaattgaaaacttccccaaagctttcacagaatattttctcataataaaatccaagtgaacagataattagaagaaacccttttccttcagggaaccaagcaactctattttagtactgacatgcattattttcactgtgaattcacttttttattgcatgttcagatgtccctctttgttttttttttttgtaacattaactgcaatgatgttcttcctggaattcatgaaaatataattaaaacacatttttaaac

SEQ ID NO: 301323 - DNA, 6413 bp, Artificial Sequence
  derived and/or modified sequence
gagaaagcaggttgtggcggcggcgccctgctcttccccgctcgtctggggcttctgctggctagtggggagaagtgctcttctaggggggcttttctggcccttggcaggggtttggagttggagtcacaggggccaataactcatcaccccagcacttcggaggtggctccttgtgccacggactccgaggagtccttcagctactgaacactcaaagctgaggagggcaatttggttttgatgctgtgccagaaatcttctgacaatgagttactggaacttggaaaaaaggaactgtgtgcagtaccgcaggcattttctggtggacaacagtgtgtttcatgttgaaagatgcatgagtgtgatgcagtccgggacacagatgatcaagctgaaacgtggaaccaaagggcttgtccgcctcttttacctggatgagcaccggacacgcctccgatggcgaccctctaggaagagtgagaaggcaaaaatacttattgattccatttacaaagtgactgagggccggcagtctgaaatattccacagacaagctgaggggaacttcgaccccagctgctgcttcaccatctaccatggcaaccacatggagtccctggacctcatcacctccaaccccgaggaggcccgcacctggatcacaggcctcaagtacctgatggctggcatcagtgatgaagactcccttgccaaaaggcagaggacccatgaccaatgggtgaagcagacctttgaggaagctgataagaatggtgacggcttgctgaatattgaagagatacatcagctgatgcataaactgaatgttaatctgccccgaagaaaagtcagacaaatgtttcaggaagccgacacagatgagaatcagggaactttgacatttgaagagttctgtgttttttacaaaatgatgtctttgagacgagacctttatttgttacttttgagctacagtgacaagaaagatcacctaactgtggaagaactggctcagtttttgaaggtggagcaaaagatgaataatgtgacaacggactattgtcttgacatcataaagaagtttgaagtttcagaagaaaataaggtgaaaaatgttcttggcatagaaggcttcacgaacttcatgcgtagtcctgcctgtgacatatttaacccattgcaccatgaagtgtaccaagacatggatcagcccctctgcaactactacattgcttcctctcacaatacatacctgactggagaccagctcctttctcagtccaaagtggatatgtatgcacgggtgctgcaagagggctgtcgctgtgtggaagttgactgttgggatggcccagatggagagccagtagtacatcatggttacactctcacttcaaaaattctcttcagagatgttgtggagaccatcaacaagcatgcctttgtgaagaatgagtttcctgttatattgtctatcgagaatcactgcagtatccagcagcaaaggaagattgctcagtacctgaaaggaatattcggagacaaactggacctgtcatctgttgatacaggggagtgcaagcagcttccaagccctcaaagtttgaaaggcaaaattctagtgaagggtaagaagttgccttatcaccttggggatgatgcagaggaaggggaagtttctgatgaggacagtgcagatgaaattgaagacgagtgcaaattcaagctccattatagtaatgggaccactgagcatcaggtggaatctttcataaggaaaaaactggagtcactgttaaaagaatctcaaattcgagataaagaagatcctgatagtttcacagtgcgggcactactgaaggccacgcatgaaggcttaaatgcacacctgaagcagagtccagatgtaaaggaaagtggaaagaaatcacatggacgatccctcatgaccaactttggaaaacataagaaaactacaaaatcacggtctaaatcttacagtactgatgatgaggaagacacacagcagagtactggcaaggagggtggccagctgtacagattgggtcgccgaaggaaaaccatgaagctctgccgagaactctctgatttggttgtgtacacaaactccgtggccgctcaggacattgtggatgacggaaccacaggaaatgtgttatcattcagtgaaacaagagcacatcaggttgttcagcaaaaatcagagcagttcatgatttataatcaaaagcaactcacgaggatttacccctctgcctaccgcattgattccagtaacttcaaccctctcccctactggaacgcaggctgccagctagtggcactgaattatcaatctgaaggacgaatgatgcagttaaaccgagccaaattcaaggcaaatggcaattgtggctatgtcctcaaaccccagcaaatgtgcaaaggtactttcaaccctttctctggtgaccctcttcctgccaaccccaaaaagcagctcatcctgaaagttatcagtggacagcaactccccaaacctccagactccatgtttggagatcgaggcgagatcattgacccttttgttgaagttgaaattattggattgccagtagattgttgtaaagatcaaacccgtgtggtagatgacaatggatttaaccctgtgtgggaagaaacactgacatttacagtacacatgccagaaatagctttggttcggttccttgtgtgggatcacgatcccattggacgagactttgttggacaaagaactgtgaccttcagcagcttagtgcctggctaccggcatgtctatttggaaggactgacagaagcatccatatttgtacacataaccatcaatgaaatctatggaaagaacagacaactccagggtctgaagggactgttcaataagaatcctaggcacagttcttcagaaaacaattcccattatgtacggaagcgatccattggagatagaattctgcgacgcacagctagcgccccagccaaaggcaggaaaaagagcaaaatgggcttccaagaaatggtggagataaaggattctgtgtccgaggccacaagagatcaagatggcgtgctgaggaggaccacacgcagtttgcaagcacgccctgtctctatgcctgttgacagaaaccttctgggagctttgtcgctgcctgtatctgaaacagcaaaagacattgaaggaaaagaaaactctctagcagaagataaagatggcagaagaaaagggaaagcaagtataaaagatccacattttctaaatttcaacaaaaagttatcatcctcctccagtgctctgctccacaaagataccagccaaggggacaccattgtatctactgcccacatgtcagtcacaggagaacagctgggcatgtcaagtcctaggggtgggagaaccacatcaaatgccacaagcaattgccaggaaaacccctgtcccagcaagtctctctccccaaagcagcatttggctcccgatcctgtagttaaccccacacaagatctgcatggtgtgaaaatcaaggaaaagggtaatcctgaggactttgtggaagggaaaagcatcttgtcaggaagcgtcctttctcatagcaacctagaaattaagaacctggaaggtaataggggtaagggccgagctgcaacatccttttctttgtcagacgtctccatgctctgttctgacatacctgacctacattcaactgcaattctgcaggagagtgtaatttcccatcttattgacaatgtcactttaacaaatgagaatgagccgggcagttccatctcagccctgattggccagtttgatgagaccaacaatcaggctctcacagttgtttctcatcttcataataccagtgtgatgtcaggccattgtcccttgcctagcctgggcctaaaaatgcccatcaagcatggtttttgcaagggaaaatccaagtcttccttcctgtgctcatctccggagctgatagcactctcgagttctgagaccaccaaacatgcaacgaacacagtttatgaaactacctgcactcccatctctaaaaccaaaccagatgatgacctttctagtaaggccaagacagcggccttagaaagcaacctgcctggatcccctaatacttctcgtggctggttaccaaaaagtcctaccaagggagaagactgggaaacactgaagagctgcagccctgcctcttcccctgatttgaccctggaggatgtaatagctgatcccactctctgtttcaattctggggagagcagccttgtggaaattgatggagaatcagaaaatctttctctaacaacctgtgaatataggagagagggcacaagtcaacttgcttctcctttaaaactcaagtacaatcagggtgtggtagaacactttcaaagaggtttgagaaacggctactgtaaagagaccctccgcccttctgtccctgaaatattcaacaatattcaagatgtcaaaactcaaagtatttcttatctagcctatcagggtgctggctttgtgcataatcatttctcagattcagatgcaaaaatgttccagacctgtgtgccccagcaatctagtgctcaagatatgcatgtccctgtacccaagcagttggcacatcttcctttgcctgctctgaaactgcctagtccttgcaaatccaaaagtctgggggacttaacatcagaggacattgcctgcaattttgagagcaagtaccagtgtattagtaagagttttgttacaactggcattagagacaagaagggcgtgactgtgaagacaaagtcgttagagcctatagatgccctgaccgagcagcttcggaagcttgtgtcctttgaccaggaagacaactgccaagtgctatattcaaagcaggatgccaatcagctcccccgggcactggtcaggaagttgtcatccagaagtcagagcagagtgcgcaatattgctagtcgtgccaaggagaaacaggaagccaacaagcagaaagttccaaaccccagcaatggggcaggagtggttcttagaaacaaaccctcagcacccacccctgcagtgaatcgccactccaccggctcctacatcgcaggctacctgaagaacacgaaagggggtggccttgaaggccggggcatcccagagggggcatgcacggctcttcactatggccacgttgaccagttttgttcagataattctgttttgcagactgagccaagcagtgatgataaaccagaaatttattttcttttgagactgtgaattatttaaaactgcattcttaaggttttcaaggtattctgtagaatgtcagagttttcagtaaataagttccttggctttggaatgattttcaaatgtatttttaaacttgtatttgggtctccctttgacttcatgtgttctccctgttaatgcgtttgtatatagatttggtgacatttcccatgtacctattatgatctttctcccttgagttgttgtaaactgtatcagtatgaaatatgtgcatgccctagatgtgaaactcctcagcagctcgggttataatgtgtgtgtgtttcaccaagatgtcctttactgtgtcctcagattgcagtcacaaatgtagtcatttttactctctaactgttgagttgattaagagactttgcaaacgacaaagggatgaattccttactttaatctgttatcatttttcctatgtttccctctttgttcagaagcccagatgcatttttataactcagttttaaaaactttaaaatagttaccttgccttttaggatgttcttatcccacccataatgagagttgaaaggggatggatagctgctccccatgcccttcccactttttggaataggccgtgagggtgtgaggaagaaggctgtcttttgtacataaggacaaaattgtttgttttacataaattttgttacatatttttgctaatggctttgtatgtaacaagaagcgagttgccaaactacctgttgtacttttgaattttctgattgaattacagactgcgaacaacggctttcagaatgagggacttccatcagactctaatgataatagtagcacaaattgaaaacttccccaaagctttcacagaatattttctcataataaaatccaagtgaacagataattagaagaaacccttttccttcagggaaccaagcaactctattttagtactgacatgcattattttcactgtgaattcacttttttattgcatgttcagatgtccctctttgttttttttttttgtaacattaactgcaatgatgttcttcctggaattcatgaaaatataattaaaacacatttttaaaca

SEQ ID NO: 301324 - protein, 653 aa, Artificial Sequence
  derived and/or modified sequence
MEPSGSEQLFEDPDPGGKSQDAEARKQTESEQKLSKMTHNALENINVIGQGLKHLFQHQRRRSSVSPHDVQQIQADPEPEMDLESQNACAEIDGVPTHPTALNRVLQQIRVPPKMKRGTSLHSRRGKPEAPKGSPQINRKSGQEMTAVMQSGRPRSSSTTDAPTSSAMMEIACAAAAAAAACLPGEEGTAERIERLEVSSLAQTSSAVASSTDGSIHTDSVDGTPDPQRTKAAIAHLQQKILKLTEQIKIAQTARDDNVAEYLKLANSADKQQAARIKQVFEKKNQKSAQTILQLQKKLEHYHRKLREVEQNGIPRQPKDVFRDMHQGLKDVGAKVTGFSEGVVDSVKGGFSSFSQATHSAAGAVVSKPREIASLIRNKFGSADNIPNLKDSLEEGQVDDAGKALGVISNFQSSPKYGSEEDCSSATSGSVGANSTTGGIAVGASSSKTNTLDMQSSGFDALLHEIQEIRETQARLEESFETLKEHYQRDYSLIMQTLQEERYRCERLEEQLNDLTELHQNEILNLKQELASMEEKIAYQSYERARDIQEALEACQTRISKMELQQQQQQVVQLEGLENATARNLLGKLINILLAVMAVLLVFVSTVANCVVPLMKTRNRTFSTLFLVVFIAFLWKHWDALFSYVERFFSSPR

SEQ ID NO: 301325 - protein, 329 aa, Artificial Sequence
  derived and/or modified sequence
MHQGLKDVGAKVTGFSEGVVDSVKGGFSSFSQATHSAAGAVVSKPREIASLIRNKFGSADNIPNLKDSLEEGQVDDAGKALGVISNFQSSPKYGSEEDCSSATSGSVGANSTTGGIAVGASSSKTNTLDMQSSGFDALLHEIQEIRETQARLEESFETLKEHYQRDYSLIMQTLQEERYRCERLEEQLNDLTELHQNEILNLKQELASMEEKIAYQSYERARDIQEALEACQTRISKMELQQQQQQVVQLEGLENATARNLLGKLINILLAVMAVLLVFVSTVANCVVPLMKTRNRTFSTLFLVVFIAFLWKHWDALFSYVERFFSSPR

SEQ ID NO: 301326 - DNA, 1962 bp, Artificial Sequence
  derived and/or modified sequence
atggagcccagcggcagcgagcagctgttcgaggaccccgaccccggcggcaagagccaggacgccgaggccagaaagcagaccgagagcgagcagaagctgagcaagatgacccacaacgccctggagaacatcaacgtgatcggccagggcctgaagcacctgttccagcaccagagaagaagaagcagcgtgagcccccacgacgtgcagcagatccaggccgaccccgagcccgagatggacctggagagccagaacgcctgcgccgagatcgacggcgtgcccacccaccccaccgccctgaacagagtgctgcagcagatcagagtgccccccaagatgaagagaggcaccagcctgcacagcagaagaggcaagcccgaggcccccaagggcagcccccagatcaacagaaagagcggccaggagatgaccgccgtgatgcagagcggcagacccagaagcagcagcaccaccgacgcccccaccagcagcgccatgatggagatcgcctgcgccgccgccgccgccgccgccgcctgcctgcccggcgaggagggcaccgccgagagaatcgagagactggaggtgagcagcctggcccagaccagcagcgccgtggccagcagcaccgacggcagcatccacaccgacagcgtggacggcacccccgacccccagagaaccaaggccgccatcgcccacctgcagcagaagatcctgaagctgaccgagcagatcaagatcgcccagaccgccagagacgacaacgtggccgagtacctgaagctggccaacagcgccgacaagcagcaggccgccagaatcaagcaggtgttcgagaagaagaaccagaagagcgcccagaccatcctgcagctgcagaagaagctggagcactaccacagaaagctgagagaggtggagcagaacggcatccccagacagcccaaggacgtgttcagagacatgcaccagggcctgaaggacgtgggcgccaaggtgaccggcttcagcgagggcgtggtggacagcgtgaagggcggcttcagcagcttcagccaggccacccacagcgccgccggcgccgtggtgagcaagcccagagagatcgccagcctgatcagaaacaagttcggcagcgccgacaacatccccaacctgaaggacagcctggaggagggccaggtggacgacgccggcaaggccctgggcgtgatcagcaacttccagagcagccccaagtacggcagcgaggaggactgcagcagcgccaccagcggcagcgtgggcgccaacagcaccaccggcggcatcgccgtgggcgccagcagcagcaagaccaacaccctggacatgcagagcagcggcttcgacgccctgctgcacgagatccaggagatcagagagacccaggccagactggaggagagcttcgagaccctgaaggagcactaccagagagactacagcctgatcatgcagaccctgcaggaggagagatacagatgcgagagactggaggagcagctgaacgacctgaccgagctgcaccagaacgagatcctgaacctgaagcaggagctggccagcatggaggagaagatcgcctaccagagctacgagagagccagagacatccaggaggccctggaggcctgccagaccagaatcagcaagatggagctgcagcagcagcagcagcaggtggtgcagctggagggcctggagaacgccaccgccagaaacctgctgggcaagctgatcaacatcctgctggccgtgatggccgtgctgctggtgttcgtgagcaccgtggccaactgcgtggtgcccctgatgaagaccagaaacagaaccttcagcaccctgttcctggtggtgttcatcgccttcctgtggaagcactgggacgccctgttcagctacgtggagagattcttcagcagccccagatag

SEQ ID NO: 301327 - DNA, 1962 bp, Artificial Sequence
  derived and/or modified sequence
atggagcccagtggcagcgagcagctcttcgaggaccccgatccgggcgggaagtcccaagacgccgaagcccgaaagcaaactgagagtgagcagaagttgagcaagatgacccataatgcgctagaaaacattaacgttataggacagggcctgaaacacctcttccaacaccaacgcagaaggtcaagcgtgagccctcacgatgtccagcagatacaggcagatcccgaaccagagatggacctcgaatctcagaatgcctgcgcagagattgacggtgtccccactcaccctactgctcttaatcgggtcctccagcagatcagagtgccccccaagatgaaacgcggcacatcattgcatagccggcgaggaaaacctgaggcacccaagggttcccctcagataaaccgcaagtctggccaggaaatgacagcagtcatgcaatctggccgcccgagatcatccagcactacagatgccccaacatctagcgcaatgatggagatcgcttgcgctgcagccgccgcagcagctgcatgcctgccaggcgaggaaggcactgcagaaaggatcgaacggctcgaggtgtcctctctggcccagaccagcagtgctgtggcaagctctactgatggaagcatccacaccgattccgtcgacggcacacccgacccccaaaggacgaaagctgccatcgcccacctccagcagaagatcctaaaactgactgagcagattaagattgcgcagactgctagggacgacaacgtggctgaatacctgaagttggcaaacagcgccgataaacagcaggcggccagaattaagcaagtattcgaaaaaaaaaatcagaaatctgcacaaactattctgcagcttcagaagaaactcgaacattaccatcggaagctaagggaagtggagcagaacggcattccgaggcagccaaaagacgtattcagagatatgcaccagggcctgaaggatgtgggcgccaaagtcaccggcttcagcgagggagtggtggatagtgtgaagggagggttttcatctttttctcaggctacccatagtgcagcaggcgctgtcgtgtcaaagcctcgcgagatagccagtctcatcaggaacaagttcggatccgccgataatattccaaacctgaaggattcgcttgaagagggtcaggttgacgacgccggaaaggcgttgggagtgattagcaattttcagtctagccctaagtacggctcggaagaggactgctcgagtgccaccagcggatcggtgggtgctaacagcactactggagggattgctgtgggtgcaagttccagcaagacaaatacgctggacatgcagagcagtggctttgacgccctgttacatgagattcaggagattcgagagactcaggcgcgtctcgaggaatcctttgaaactctgaaggagcactatcagcgggattacagtttaataatgcagaccttgcaggaagagcgatacaggtgtgaacggctcgaggagcagctgaacgaccttaccgaattacaccaaaatgagatactgaacctgaagcaggaactcgcttctatggaggagaaaatagcctaccagagctacgagagagccagggacatccaggaggctctggaggcttgccagacccggatttccaagatggaactacaacagcagcagcagcaggtcgtacagcttgagggtctggaaaatgcgaccgcacgaaatctcttgggtaagctcataaatatcctgctagctgtgatggcggtgctactcgtctttgtttctaccgtggccaactgtgtagtaccactgatgaaaactaggaacaggacattctctaccctgttcctggtggtatttatagcattcctatggaagcattgggatgccttattcagctacgtcgagaggttcttctcctctccacgttag

SEQ ID NO: 301328 - DNA, 1962 bp, Artificial Sequence
  derived and/or modified sequence
atggagcccagcggcagcgagcagctgtttgaagatcctgaccccggcggcaagagccaggatgctgaggccaggaagcagacagagagcgagcagaagctgagcaagatgacccacaatgccctggagaacatcaacgtcatcggccagggcctgaagcacctgttccagcaccagaggagaagaagctctgtgagcccccatgatgtgcagcagatccaggccgaccctgagcctgagatggacctggagagccagaatgcctgtgccgagattgatggagtgcccacccaccccacagccctgaacagagtgctgcagcagatccgggtgccccccaagatgaagaggggcaccagcctgcacagccggcggggcaagccagaggcccccaagggcagcccccagatcaacaggaagagcggccaggagatgacagctgtgatgcagagcggccggcccaggagcagcagcaccacagatgcccccaccagcagcgccatgatggagatcgcctgtgccgctgctgctgctgctgctgcctgcctgcccggggaggagggcacagctgagagaattgagcggctggaggtgagcagcctggcccagaccagcagcgctgtggccagcagcacagatggcagcatccacacagacagcgtggatggcaccccagacccccagaggaccaaggccgccatcgcccacctgcagcagaagatcctgaagctgacagagcagatcaagatcgcccagacagccagagatgacaacgtggccgagtacctgaagctggccaacagcgctgacaagcagcaggccgcccgcatcaagcaggtgtttgagaagaagaaccagaagagcgcccagaccatcctgcagctgcagaagaagctggagcactaccacaggaagctgcgggaggtggagcagaatggcatcccccggcagcccaaggatgtgttccgggacatgcaccagggcctgaaggatgtgggcgccaaggtgacaggcttcagcgagggcgtggtggacagcgtgaagggcggcttcagcagcttcagccaggccacccacagcgctgctggagctgtggtgtccaagccccgggagatcgccagcctcatccggaacaagtttggcagcgctgacaacatccccaacctgaaggacagcctggaggagggccaggtggatgatgctgggaaggccctgggcgtcatcagcaacttccagagcagccccaagtatggcagcgaggaggactgcagcagcgccaccagcggctctgtgggcgccaacagcaccactggaggcattgctgtgggcgccagcagcagcaagaccaacaccctggacatgcagagcagcggctttgatgccctgctgcacgagatccaggagatccgggagacccaggcccggctggaggagagctttgagaccctgaaggagcactaccagagggactacagcctcatcatgcagaccctgcaggaggagcgctaccgctgtgagcggctggaggagcagctgaatgacctgacagagctgcaccagaatgagatcctgaacctgaagcaggagctggcctccatggaggagaagatcgcctaccagagctatgaaagagcccgggacatccaggaggccctggaggcctgccagacccgcatcagcaagatggagctgcagcagcagcagcagcaggtggtgcagctggagggcctggagaatgccacagccaggaacctgctgggcaagctgatcaacatcctgctggccgtgatggctgtgctgctggtgtttgtgtccacagtggccaactgtgtggtgcccctgatgaagaccaggaacagaaccttcagcaccctcttcctggtggtgttcatcgccttcctgtggaagcactgggatgccctcttctcctatgtggagcgcttcttcagcagccccaggtag

SEQ ID NO: 301329 - DNA, 1962 bp, Artificial Sequence
  derived and/or modified sequence
atggagcccagcggcagcgagcagctgttcgaggaccccgaccccggaggcaagtctcaggatgccgaggcccggaaacagacagaaagcgaacagaaactctccaagatgactcataatgcactagagaatatcaatgtcatcggacaaggcctgaagcatctctttcaacaccaaagacggcgatcttccgtttcaccgcacgacgtgcagcaaatccaggctgatcccgagcctgaaatggacctggagtcccagaacgcctgtgctgaaattgatggcgtgcctactcacccgactgcgctgaatcgcgtcttacagcagattcgagtcccccctaagatgaagcgaggcacatccctgcattcacgccgaggcaaacccgaagcaccaaaaggttcgcctcagattaatcgtaaatcgggccaggagatgaccgccgtgatgcaatccggcagacctagatcaagctcaaccactgacgccccaacttcttcggccatgatggaaattgcttgtgccgcagcagctgccgctgcagcgtgcttacctggtgaagagggtacagccgagcgaatcgagaggctcgaggtgtcatcccttgctcagacatcaagtgcagtcgccagtagcacggatgggagtatccacacagatagcgtggacggcaccccagatcctcagcggacaaaagccgcaattgcacacctgcaacaaaagatccttaagttgacagagcaaattaaaatcgcacaaaccgctcgagacgataatgtggcagaataccttaagttggcaaattccgcagacaagcaacaggctgctagaataaaacaagtgttcgaaaaaaagaatcagaaaagtgcgcagacaatcttgcaattacaaaaaaagcttgagcactaccaccgcaaattaagggaggtagagcagaacgggatcccccggcagcccaaagatgtcttcagggacatgcatcagggcctgaaagatgtaggggccaaggtcaccggattttctgaaggggtggtagattctgtgaaaggaggcttcagttcttttagtcaagcaacccactccgccgccggtgccgtagtttccaagccgagagaaatagcttcgcttattcgtaataagtttgggtccgccgataacattcctaatcttaaagacagcctggaggagggtcaggtcgatgatgccggtaaggcgctgggcgttatctccaacttccaatcaagtcccaagtatgggtctgaggaggattgttccagtgctacgtcaggcagcgtaggcgcgaatagtacaacaggtggtattgcagttggtgcatcttcctctaagacaaatacgctggacatgcaaagctccggcttcgacgctctccttcatgaaattcaggaaattagagagacccaggccaggctggaagaatcgtttgagacactgaaggaacactatcaacgcgactacagtctgataatgcagacccttcaggaggaacgatatcgctgtgagcggctcgaggagcaactgaacgatcttaccgagctgcatcaaaacgagattcttaacctaaagcaggagctcgcatctatggaggaaaaaattgcataccagtcatacgaaagggctcgggatattcaagaagcattggaagcttgccagactcggataagtaaaatggagctccaacagcagcaacaacaggtcgttcagctggaggggctagagaacgctacagcccgcaaccttctgggaaagttgatcaatatactgctggcggtgatggccgtgctgctggtgtttgtgagcaccgtagccaactgcgtggtccctttaatgaaaacacgcaacagaaccttcagcactttgttcctggtggtctttattgcgttcctgtggaaacactgggatgccctttttagctatgttgaacggttcttttcctctccaaggtag

SEQ ID NO: 301330 - DNA, 1962 bp, Artificial Sequence
  derived and/or modified sequence
atggagccatctggaagcgaacagcttttcgaggaccccgatccagggggaaaaagccaggacgctgaagccagaaaacagaccgagtcagagcagaagttatctaagatgactcacaatgctcttgagaatatcaatgtgatcggacagggactaaagcatctcttccaacaccagaggcgacgcagctccgtctcaccacacgatgtgcagcagatacaggccgacccagaaccagaaatggatctcgagagccagaacgcatgtgcagaaatcgatggggtgccaacccatcctaccgccctgaatcgtgtgcttcagcaaatcagagttccgcctaagatgaaacgaggcactagcctgcactctcggaggggcaagcccgaagcccctaaaggctccccccaaataaatcgcaaatccggacaggagatgactgcggtgatgcaatctggacgcccacgatctagttcaacaaccgatgcccctacttcctcagcaatgatggagatcgcctgcgccgctgcggctgcagccgcagcttgtttgcctggcgaggagggaactgccgagcgtattgagcgtctcgaagtgagttccctagcgcaaacaagctctgccgtggcctcttcaacagacggcagcatccatacggactctgtggacggaactcctgaccctcagagaaccaaagccgcaatcgcacatctccagcagaagatcctgaagctcaccgagcagatcaaaatcgcacaaactgccagggatgataacgtggctgaatatctgaagctagctaactctgctgataagcagcaggccgcacgtatcaaacaggtcttcgaaaaaaaaaatcaaaaaagcgcccagaccattctgcagcttcagaagaaacttgaacactaccacagaaaactgcgagaggtcgaacagaacggcatcccgaggcaacccaaggacgtgttcagagacatgcatcaggggctcaaggacgtgggcgctaaggtcacgggcttctcagagggtgtggtagattccgtcaagggaggattcagttccttctcccaggctacccatagcgcggctggtgcagttgtaagtaagccgagagagattgcttcactgataaggaacaagtttggatcagccgataacatccccaatcttaaagattctctggaggagggccaggttgacgatgcaggcaaagcactgggtgtgataagtaactttcaatcatctcccaagtatggctcagaagaggattgctccagtgctacctctgggtcggtgggggctaactccacgactggtgggatcgctgtcggcgcttcaagctccaagaccaatactcttgacatgcaatcaagcggatttgacgcactgttgcacgagattcaggaaattagggagactcaagcacgcctggaagagagttttgaaacactgaaggaacactaccagagggactatagcttgattatgcagacactacaagaagagaggtatcgatgtgagaggcttgaggagcaacttaatgacttaaccgagctgcaccaaaacgaaatcctcaatcttaagcaggaacttgcatccatggaagagaagattgcttatcagagttacgagagggcacgagacatccaggaggcactcgaggcttgtcagacccgaattagcaaaatggaactgcagcaacaacaacaacaggtcgttcagttagaaggactagaaaatgctaccgcaaggaacctgttggggaaactgatcaacatcctactggccgttatggccgttcttctggtctttgtcagcacagtagccaactgcgttgtgccgctgatgaagacacgcaataggaccttctccacactgtttttagtggtatttatcgcgttcctgtggaagcactgggacgcgcttttttcctacgtcgaaaggtttttttcttcccctcgctag

SEQ ID NO: 301331 - DNA, 5992 bp, Artificial Sequence
  derived and/or modified sequence
gacacagtgtccatcctcccagattggatctctttttcatatggatcttctgtttctatgtctttttaaaaaataactttttgggaaaccttttggattacaactgttcatcctcacctatgcaaagaaagggaagctattgctgggattttgaggagcttttcctaaaaggattgtacaccttagaagtgcttaaggaagagtgatgaagataggcatgaagccttcgtctcacagctgcatgcgtagtcactgttgaagcaaatgcctacctaatttgacactcttggtgtgtttaaaaaatttttttgagtttgcaaataagcatattaagtctactgatggagccttcgggcagtgaacagttatttgaggaccctgatcctggaggcaaatcccaagatgcagaggccagaaagcagacagaatcagaacaaaaattgtctaaaatgacccacaatgctttggagaacattaacgtgattggccaaggcttgaagcatctcttccagcaccagcgcaggaggtcatcagtgtctccacatgatgtgcagcaaattcaggcagatccagaacctgaaatggatctggaaagccagaacgcatgtgctgagattgatggtgtccccacccaccccacagctctgaatcgtgtcctgcagcagattcgagtgccacccaagatgaagagagggacaagcttgcatagtaggcggggcaagccagaggccccaaagggaagtccccaaatcaacaggaagtctggtcaggagatgacagctgttatgcagtcaggccgacccaggtcttcatccacaactgatgcacctaccagctctgctatgatggaaatagcttgtgctgctgctgctgctgctgctgcatgtctaccaggagaggagggaactgcggagcggatcgaacggttggaagtaagcagccttgcccaaacatccagtgcagtggcctccagtaccgatggcagcatccacacagactctgtggatggaacaccagaccctcagcgcacaaaggctgccattgctcacctgcagcagaagatcctgaagctcacagaacaaatcaagattgcacaaacagcccgggacgacaacgttgctgaatacttgaagcttgccaacagtgcagacaaacagcaggctgcccgcatcaagcaagtctttgagaagaagaaccagaaatctgcccaaactatcctccagctgcaaaagaaacttgagcactaccacaggaagctcagagaggtagagcagaatgggatcccccggcagccaaaggatgtcttcagggacatgcaccagggtctgaaggatgtaggagcaaaggtgactggcttcagtgaaggtgtggtggatagtgtcaaaggtgggttttccagcttctcccaggccacccattcagcagcaggcgctgtagtctcaaagcccagagagattgcctcactcattcggaacaaatttggcagtgcagacaacatccccaacctgaaggactctttagaggaagggcaagtggatgatgcggggaaggctttgggagtgatttcaaactttcagtctagcccaaaatatggtagtgaagaagattgttctagtgccacttcaggctcagtgggagccaacagcaccacagggggcatcgctgtaggagcatccagctccaaaacaaacaccctggacatgcagagctcaggatttgatgcactactacatgagatccaggagatccgggaaacccaggccagactagaggaatcctttgagactctcaaggaacattatcagagggactattccttaataatgcagaccttacaggaggagcgatatagatgtgaacgattggaagaacagctaaatgacctaacagagctccaccagaatgaaatcttgaacttgaagcaggaactggcaagcatggaagaaaaaatcgcgtatcagtcctatgaacgggcccgggacatccaggaggccctggaggcatgccagacgcgcatctccaagatggagctgcagcagcagcagcagcaggtggtgcagctagaagggctggagaatgccactgcccggaaccttctgggcaaactcatcaacatcctcctggctgtcatggcagtccttttggtctttgtctccactgtagccaactgtgtggtccccctcatgaagactcgcaacaggacgttcagcactttattccttgtggtttttattgcctttctctggaagcactgggacgccctcttcagctatgtggaacggttcttttcatcccctagatgatgctggcacagaaggcattgttccctaccctctggcgagtgcatgcagcagagagttagacagcaacttacctactctgaagttttctacaacaaaaaaagagttgagtgaatctgtttacatttagaataatgtttttttcttcaagagacgcaattgcaatagtattttttagattttatccaagaagttttttgggcgaaaatcttggatcatttttatgtagcatgattttccttgggatgcaaatcttaaaacagtcctttaatatgaaccaacaatctggagcacaccgaagggcaatctaaattgtggcttgaaggactgcactaaaacccactaaaaagatgcgaaaacctgatgagggcaaaccagttaaacctaacaccctgccttgtctgggctcatcacctctccctatcccagactaactttactgtgaaatcctaccacattccatgtctgaatttttggattcggggtggattttcgttgtccgtggaagaacacatggatctctctggctttctcacccaagttggccacttacgctaatcctggaagtatgatcacttttgaacctgccccttaaccttgacgaggatacaaaagtgaaagcatcatcccccaaaggatcactgcacagtcctactacagtatttttaagtagccctctaaatacttaattttaagcaaaatcccttggccgcacttttaaggtttttttatatgtgtatagttaccaacctaaaaataaaaaatccgaacagcatacttgaagaatgtaatactcaaactctcagtgcttccttatggtttctaataggattttttattattgttattattattattgggtttttttggacagggttgggagggtcttttatttttcctttgaaataaagaagtgatgtttttaaatgaagaaatgtgtggatatttaagtgtgctgctccctcttgtcttgaaacagtttgagtaagaaagtcttgctgtaaatgctgccctctgccgcctttgttttgagatgcagtttaaactccctctggctgctgctgctgctttttggtgtcccgacatacctacgcccccgttttatgggtttggcttagttgaagaggaaagggttgtgcaaggagagcaggaggctgtttccaaaaaccagtgtagtaggatagggattttttttttttttttttgccccaagaaaacgttcacccagtgatcttgggctggggttgtctttaggaaaagttgagactataagagtcataaataagtccttgtgtttccttaatttattttgttaacacccctaattacaaccaaagtgatgatgtggagtcttctgtcttcattttggccccagcattcttaatttcaaagctttattctgtctgcctaagagaatcaaccaaaggtgattctcctaaagagcagtgaaggaaatgtcaggttagcaggacccaagttttgggtgtgaaatgttgccagcttcctataatgtaaacggacttgttaacctaacctaattatgctcagtggacttctatagatggttttgaaaaatgaactgagctgccttcccccgtcgcataaccagttccatcatcctggtggaacttgaacatttagagtttatctagagagcttggttaatctttccatattatttgtagtattggtcacaaatgctgttccctcttagcctcattctgtgcaaccaagtgcatataagatgccctgaaaagagtaacaaagtatgctttgcctgtttccacttaccaggaaattccttcagaactagattagcattgccctgcctgtctgaaaggacagtttacctaatggtgccagcctccttttgctttggcaagctggatttctcagagccagcatgttgtttccataactactttgatattttaactcaggtactccagtcttcaccccaacctcagctgattgtagtacacctgctagctctgttgccccctcaaaactgcacccagagcagggccacaagggtgctttttttctttaaaaaaaaaaaaattagaaccaattcatgttcatgccaaaaacaaattgtccccaagcctatatgtattaaaatgttaactttgcctaaaaatattgcagtgactttttaggcaggagtgccaaaggacactatgaactttttgaactgacagtttctcctaactttctgctttagcgtaattgctcagagtagagagcccccacaaagttatttaaaagatgccctagcagcaatccaccagtttttctaagctagaacctttgagtcccccaaactgcctgaagacttaagttttgtgggcactggaagtcactttgatagatggattgaaactgttcctatttgccctgggacggtttctatctatcaaaggaaggttttcacctgtagaaagccccctgcctccagccaaatagtcccatgctgactttctatcttcctttctcaaactgtcttaggaaggaccttcagtgcagatcaggtgcagtaatggctttcttgtcccttaattattcaccagacccagaagttgtacgcatttaatgctgtttgtaaccatgcatctgttttcattctttgctgtaccttttgctgcccatcctgttacttttgagtttctttcattgtggttgttcttgggttcttttgtcttgtcagagctcttctataacctcgctctaatggcttaacagttgttctgggtggaaacgtcccctcatttgaatgctcctctaaaaaaaaaagaaaagaaaactgtattcattccctttaaaatgaaacattcctggtttatttgtccatgcctctagcctgggtgagtgaagctggctgtgttggcctgggtgattgttcaggttgtagaatgcgcattttacattgtttatgataattgaagggtacttctgtctgctccaatttccattccttggtatactcagtatgtcctagtaaggaaggctttccactctactggctccttaagaagcaaaagtaggttaaattttatacttcactgactagggtcttctctctcccctgttctgaatggagtaaaagtctgatgccaagacaaatattgggagcgagccttcctcactagccatgtccaaataatgagcgtattttcatgtggtcttcactgcatttggttttgtttctgatttcatgttcctttgaggtacagtcagatgaaaatgctgagttctgagagagttccaatgaggagctgcctttcagctttggaaaatatgcaactaaaacaaaaccaaacattattgtaatctgacacaggcaaaattatggttcccacaccccaaccccaaatgaaacctgggattttgaatgtggctctaagagttaacattgctgtctgtatgtcgtgtatgctaggtgatatcctcagtagggattgactactagactgtgtgttttatcaaagtgtgtaagaataaaaactcacttgcacgaattgaaacgtaaagaaatgacacttgtgaacgtgtgaacgttaacactgtagttgatagatcttaagctgctaattgttgagagagatttaaatttatgttctgtctggtcgctgcagattctcagcagcacttttactgtatatagaaattgaaataaagacctcagctattaa

SEQ ID NO: 301332 - DNA, 5484 bp, Artificial Sequence
  derived and/or modified sequence
ggcggccgcagtggaaggagcaggcgcttgagctcgagcgacggcgctggcggagacgccggctgctcctcccctccccgccgcttttcctaaaaggattgtacaccttagaagtgcttaaggaagagtgatgaagctctgaatcgtgtcctgcagcagattcgagtgccacccaagatgaagagagggacaagcttgcatagtaggcggggcaagccagaggccccaaagggaagtccccaaatcaacaggaagtctggtcaggagatgacagctgttatgcagtcaggccgacccaggtcttcatccacaactgatgcacctaccagctctgctatgatggaaatagcttgtgctgctgctgctgctgctgctgcatgtctaccaggagaggagggaactgcggagcggatcgaacggttggaagtaagcagccttgcccaaacatccagtgcagtggcctccagtaccgatggcagcatccacacagactctgtggatggaacaccagaccctcagcgcacaaaggctgccattgctcacctgcagcagaagatcctgaagctcacagaacaaatcaagattgcacaaacagcccgggacgacaacgttgctgaatacttgaagcttgccaacagtgcagacaaacagcaggctgcccgcatcaagcaagtctttgagaagaagaaccagaaatctgcccaaactatcctccagctgcaaaagaaacttgagcactaccacaggaagctcagagaggtagagcagaatgggatcccccggcagccaaaggatgtcttcagggacatgcaccagggtctgaaggatgtaggagcaaaggtgactggcttcagtgaaggtgtggtggatagtgtcaaaggtgggttttccagcttctcccaggccacccattcagcagcaggcgctgtagtctcaaagcccagagagattgcctcactcattcggaacaaatttggcagtgcagacaacatccccaacctgaaggactctttagaggaagggcaagtggatgatgcggggaaggctttgggagtgatttcaaactttcagtctagcccaaaatatggtagtgaagaagattgttctagtgccacttcaggctcagtgggagccaacagcaccacagggggcatcgctgtaggagcatccagctccaaaacaaacaccctggacatgcagagctcaggatttgatgcactactacatgagatccaggagatccgggaaacccaggccagactagaggaatcctttgagactctcaaggaacattatcagagggactattccttaataatgcagaccttacaggaggagcgatatagatgtgaacgattggaagaacagctaaatgacctaacagagctccaccagaatgaaatcttgaacttgaagcaggaactggcaagcatggaagaaaaaatcgcgtatcagtcctatgaacgggcccgggacatccaggaggccctggaggcatgccagacgcgcatctccaagatggagctgcagcagcagcagcagcaggtggtgcagctagaagggctggagaatgccactgcccggaaccttctgggcaaactcatcaacatcctcctggctgtcatggcagtccttttggtctttgtctccactgtagccaactgtgtggtccccctcatgaagactcgcaacaggacgttcagcactttattccttgtggtttttattgcctttctctggaagcactgggacgccctcttcagctatgtggaacggttcttttcatcccctagatgatgctggcacagaaggcattgttccctaccctctggcgagtgcatgcagcagagagttagacagcaacttacctactctgaagttttctacaacaaaaaaagagttgagtgaatctgtttacatttagaataatgtttttttcttcaagagacgcaattgcaatagtattttttagattttatccaagaagttttttgggcgaaaatcttggatcatttttatgtagcatgattttccttgggatgcaaatcttaaaacagtcctttaatatgaaccaacaatctggagcacaccgaagggcaatctaaattgtggcttgaaggactgcactaaaacccactaaaaagatgcgaaaacctgatgagggcaaaccagttaaacctaacaccctgccttgtctgggctcatcacctctccctatcccagactaactttactgtgaaatcctaccacattccatgtctgaatttttggattcggggtggattttcgttgtccgtggaagaacacatggatctctctggctttctcacccaagttggccacttacgctaatcctggaagtatgatcacttttgaacctgccccttaaccttgacgaggatacaaaagtgaaagcatcatcccccaaaggatcactgcacagtcctactacagtatttttaagtagccctctaaatacttaattttaagcaaaatcccttggccgcacttttaaggtttttttatatgtgtatagttaccaacctaaaaataaaaaatccgaacagcatacttgaagaatgtaatactcaaactctcagtgcttccttatggtttctaataggattttttattattgttattattattattgggtttttttggacagggttgggagggtcttttatttttcctttgaaataaagaagtgatgtttttaaatgaagaaatgtgtggatatttaagtgtgctgctccctcttgtcttgaaacagtttgagtaagaaagtcttgctgtaaatgctgccctctgccgcctttgttttgagatgcagtttaaactccctctggctgctgctgctgctttttggtgtcccgacatacctacgcccccgttttatgggtttggcttagttgaagaggaaagggttgtgcaaggagagcaggaggctgtttccaaaaaccagtgtagtaggatagggattttttttttttttttttgccccaagaaaacgttcacccagtgatcttgggctggggttgtctttaggaaaagttgagactataagagtcataaataagtccttgtgtttccttaatttattttgttaacacccctaattacaaccaaagtgatgatgtggagtcttctgtcttcattttggccccagcattcttaatttcaaagctttattctgtctgcctaagagaatcaaccaaaggtgattctcctaaagagcagtgaaggaaatgtcaggttagcaggacccaagttttgggtgtgaaatgttgccagcttcctataatgtaaacggacttgttaacctaacctaattatgctcagtggacttctatagatggttttgaaaaatgaactgagctgccttcccccgtcgcataaccagttccatcatcctggtggaacttgaacatttagagtttatctagagagcttggttaatctttccatattatttgtagtattggtcacaaatgctgttccctcttagcctcattctgtgcaaccaagtgcatataagatgccctgaaaagagtaacaaagtatgctttgcctgtttccacttaccaggaaattccttcagaactagattagcattgccctgcctgtctgaaaggacagtttacctaatggtgccagcctccttttgctttggcaagctggatttctcagagccagcatgttgtttccataactactttgatattttaactcaggtactccagtcttcaccccaacctcagctgattgtagtacacctgctagctctgttgccccctcaaaactgcacccagagcagggccacaagggtgctttttttctttaaaaaaaaaaaaattagaaccaattcatgttcatgccaaaaacaaattgtccccaagcctatatgtattaaaatgttaactttgcctaaaaatattgcagtgactttttaggcaggagtgccaaaggacactatgaactttttgaactgacagtttctcctaactttctgctttagcgtaattgctcagagtagagagcccccacaaagttatttaaaagatgccctagcagcaatccaccagtttttctaagctagaacctttgagtcccccaaactgcctgaagacttaagttttgtgggcactggaagtcactttgatagatggattgaaactgttcctatttgccctgggacggtttctatctatcaaaggaaggttttcacctgtagaaagccccctgcctccagccaaatagtcccatgctgactttctatcttcctttctcaaactgtcttaggaaggaccttcagtgcagatcaggtgcagtaatggctttcttgtcccttaattattcaccagacccagaagttgtacgcatttaatgctgtttgtaaccatgcatctgttttcattctttgctgtaccttttgctgcccatcctgttacttttgagtttctttcattgtggttgttcttgggttcttttgtcttgtcagagctcttctataacctcgctctaatggcttaacagttgttctgggtggaaacgtcccctcatttgaatgctcctctaaaaaaaaaagaaaagaaaactgtattcattccctttaaaatgaaacattcctggtttatttgtccatgcctctagcctgggtgagtgaagctggctgtgttggcctgggtgattgttcaggttgtagaatgcgcattttacattgtttatgataattgaagggtacttctgtctgctccaatttccattccttggtatactcagtatgtcctagtaaggaaggctttccactctactggctccttaagaagcaaaagtaggttaaattttatacttcactgactagggtcttctctctcccctgttctgaatggagtaaaagtctgatgccaagacaaatattgggagcgagccttcctcactagccatgtccaaataatgagcgtattttcatgtggtcttcactgcatttggttttgtttctgatttcatgttcctttgaggtacagtcagatgaaaatgctgagttctgagagagttccaatgaggagctgcctttcagctttggaaaatatgcaactaaaacaaaaccaaacattattgtaatctgacacaggcaaaattatggttcccacaccccaaccccaaatgaaacctgggattttgaatgtggctctaagagttaacattgctgtctgtatgtcgtgtatgctaggtgatatcctcagtagggattgactactagactgtgtgttttatcaaagtgtgtaagaataaaaactcacttgcacgaattgaaacgtaaagaaatgacacttgtgaacgtgtgaacgttaacactgtagttgatagatcttaagctgctaattgttgagagagatttaaatttatgttctgtctggtcgctgcagattctcagcagcacttttactgtatatagaaattgaaataaagacctcagctatt

SEQ ID NO: 301333 - DNA, 88 bp, Artificial Sequence
  derived and/or modified sequence
agcaacttcagcaaagtctcaggatacaaaatcaatgtgcaaaaatcacaagcattcctatacaccaacaacagacaaacagagagcc

SEQ ID NO: 301334 - protein, 539 aa, Artificial Sequence
  derived and/or modified sequence
MKRGTSLHSRRGKPEAPKGSPQINRKSGQEMTAVMQSGRPRSSSTTDAPTSSAMMEIACAAAAAAAACLPGEEGTAERIERLEVSSLAQTSSAVASSTDGSIHTDSVDGTPDPQRTKAAIAHLQQKILKLTEQIKIAQTARDDNVAEYLKLANSADKQQAARIKQVFEKKNQKSAQTILQLQKKLEHYHRKLREVEQNGIPRQPKDVFRDMHQGLKDVGAKVTGFSEGVVDSVKGGFSSFSQATHSAAGAVVSKPREIASLIRNKFGSADNIPNLKDSLEEGQVDDAGKALGVISNFQSSPKYGSEEDCSSATSGSVGANSTTGGIAVGASSSKTNTLDMQSSGFDALLHEIQEIRETQARLEESFETLKEHYQRDYSLIMQTLQEERYRCERLEEQLNDLTELHQNEILNLKQELASMEEKIAYQSYERARDIQEALEACQTRISKMELQQQQQQVVQLEGLENATARNLLGKLINILLAVMAVLLVFVSTVANCVVPLMKTRNRTFSTLFLVVFIAFLWKHWDALFSYVERFFSSPR

SEQ ID NO: 301335 - DNA, 1620 bp, Artificial Sequence
  derived and/or modified sequence
atgaagagaggcaccagcctgcacagcagaagaggcaagcccgaggcccccaagggcagcccccagatcaacagaaagagcggccaggagatgaccgccgtgatgcagagcggcagacccagaagcagcagcaccaccgacgcccccaccagcagcgccatgatggagatcgcctgcgccgccgccgccgccgccgccgcctgcctgcccggcgaggagggcaccgccgagagaatcgagagactggaggtgagcagcctggcccagaccagcagcgccgtggccagcagcaccgacggcagcatccacaccgacagcgtggacggcacccccgacccccagagaaccaaggccgccatcgcccacctgcagcagaagatcctgaagctgaccgagcagatcaagatcgcccagaccgccagagacgacaacgtggccgagtacctgaagctggccaacagcgccgacaagcagcaggccgccagaatcaagcaggtgttcgagaagaagaaccagaagagcgcccagaccatcctgcagctgcagaagaagctggagcactaccacagaaagctgagagaggtggagcagaacggcatccccagacagcccaaggacgtgttcagagacatgcaccagggcctgaaggacgtgggcgccaaggtgaccggcttcagcgagggcgtggtggacagcgtgaagggcggcttcagcagcttcagccaggccacccacagcgccgccggcgccgtggtgagcaagcccagagagatcgccagcctgatcagaaacaagttcggcagcgccgacaacatccccaacctgaaggacagcctggaggagggccaggtggacgacgccggcaaggccctgggcgtgatcagcaacttccagagcagccccaagtacggcagcgaggaggactgcagcagcgccaccagcggcagcgtgggcgccaacagcaccaccggcggcatcgccgtgggcgccagcagcagcaagaccaacaccctggacatgcagagcagcggcttcgacgccctgctgcacgagatccaggagatcagagagacccaggccagactggaggagagcttcgagaccctgaaggagcactaccagagagactacagcctgatcatgcagaccctgcaggaggagagatacagatgcgagagactggaggagcagctgaacgacctgaccgagctgcaccagaacgagatcctgaacctgaagcaggagctggccagcatggaggagaagatcgcctaccagagctacgagagagccagagacatccaggaggccctggaggcctgccagaccagaatcagcaagatggagctgcagcagcagcagcagcaggtggtgcagctggagggcctggagaacgccaccgccagaaacctgctgggcaagctgatcaacatcctgctggccgtgatggccgtgctgctggtgttcgtgagcaccgtggccaactgcgtggtgcccctgatgaagaccagaaacagaaccttcagcaccctgttcctggtggtgttcatcgccttcctgtggaagcactgggacgccctgttcagctacgtggagagattcttcagcagccccagatag

SEQ ID NO: 301336 - DNA, 1620 bp, Artificial Sequence
  derived and/or modified sequence
atgaaacgaggtacatccctccacagtcgaagggggaagcccgaagctccaaagggaagcccccagattaaccgcaaatctgggcaggagatgactgcagtgatgcaaagcggacgcccacggtcatccagtactactgatgctcccaccagctcggccatgatggaaattgcatgcgcggctgccgccgctgccgcagcatgcttgcccggtgaggaaggcacagccgaaaggatagagcgtttagaggtaagcagtttagcccaaacgtctagcgccgtggcttcaagcaccgacggatcgatccacacagattccgtggacggaactccggatccccagagaacaaaagctgctattgcgcacctccagcagaagattttaaaactcacagaacagatcaagattgcacaaacggccagagatgataatgtggccgagtacctgaaactggcgaattccgctgataagcagcaggctgctcggattaagcaggtctttgagaagaagaatcagaagtccgcacaaacaattctgcagttgcagaaaaagctcgagcattatcaccgcaaattgagagaggtggaacagaatggcattcctcgacagccaaaagatgtcttcagggacatgcatcagggtttaaaggacgtgggcgcaaaagtgaccggattctccgagggggttgttgactctgtgaagggtggcttcagtagcttttcacaagccactcatagcgccgccggagcagtcgtgagtaagcccagagagattgcatcgctgatccggaacaagttcggttctgcagataatataccgaaccttaaggactccctcgaagaaggtcaggtggatgacgctggcaaggcattaggagtgatttccaacttccagagttctcccaagtatggatccgaagaagactgctcttcagccacctctggttctgtgggagcaaacagcactaccggagggattgctgttggggcttcatcatccaagactaacacgcttgatatgcagagtagtggtttcgacgccttgctgcacgagattcaggaaataagagaaacacaggcccgcctggaggagagctttgagacccttaaggagcactaccaaagggattactccttgataatgcagaccctccaggaggaacggtacagatgtgagaggcttgaggagcagttgaacgatttaactgagctgcaccagaatgaaatactgaacctgaaacaggaactggcaagcatggaagagaaaatcgcatatcagagctacgagcgcgcccgcgacatccaagaggcgctggaagcctgtcagacacggatctccaagatggagctccagcagcagcagcaacaggttgtacagcttgagggattggagaatgcgacagcccgaaacctattggggaaactgatcaatatccttttagccgtgatggccgtcctgttagtctttgtgtccacagtagctaactgcgtggttcccttgatgaagacaaggaacagaactttttctacattattcctggtggtgtttatagcttttctctggaaacactgggacgcgctgtttagttacgttgagcggttcttcagttcgccgcggtag

SEQ ID NO: 301337 - DNA, 1620 bp, Artificial Sequence
  derived and/or modified sequence
atgaagaggggcaccagcctgcacagccggcggggcaagccagaggcccccaagggcagcccccagatcaacaggaagagcggccaggagatgacagctgtgatgcagagcggccggcccaggagcagcagcaccacagatgcccccaccagcagcgccatgatggagatcgcctgtgccgctgctgctgctgctgctgcctgcctgcccggggaggagggcacagctgagagaattgagcggctggaggtgagcagcctggcccagaccagcagcgctgtggccagcagcacagatggcagcatccacacagacagcgtggatggcaccccagacccccagaggaccaaggccgccatcgcccacctgcagcagaagatcctgaagctgacagagcagatcaagatcgcccagacagccagagatgacaacgtggccgagtacctgaagctggccaacagcgctgacaagcagcaggccgcccgcatcaagcaggtgtttgagaagaagaaccagaagagcgcccagaccatcctgcagctgcagaagaagctggagcactaccacaggaagctgcgggaggtggagcagaatggcatcccccggcagcccaaggatgtgttccgggacatgcaccagggcctgaaggatgtgggcgccaaggtgacaggcttcagcgagggcgtggtggacagcgtgaagggcggcttcagcagcttcagccaggccacccacagcgctgctggagctgtggtgtccaagccccgggagatcgccagcctcatccggaacaagtttggcagcgctgacaacatccccaacctgaaggacagcctggaggagggccaggtggatgatgctgggaaggccctgggcgtcatcagcaacttccagagcagccccaagtatggcagcgaggaggactgcagcagcgccaccagcggctctgtgggcgccaacagcaccactggaggcattgctgtgggcgccagcagcagcaagaccaacaccctggacatgcagagcagcggctttgatgccctgctgcacgagatccaggagatccgggagacccaggcccggctggaggagagctttgagaccctgaaggagcactaccagagggactacagcctcatcatgcagaccctgcaggaggagcgctaccgctgtgagcggctggaggagcagctgaatgacctgacagagctgcaccagaatgagatcctgaacctgaagcaggagctggcctccatggaggagaagatcgcctaccagagctatgaaagagcccgggacatccaggaggccctggaggcctgccagacccgcatcagcaagatggagctgcagcagcagcagcagcaggtggtgcagctggagggcctggagaatgccacagccaggaacctgctgggcaagctgatcaacatcctgctggccgtgatggctgtgctgctggtgtttgtgtccacagtggccaactgtgtggtgcccctgatgaagaccaggaacagaaccttcagcaccctcttcctggtggtgttcatcgccttcctgtggaagcactgggatgccctcttctcctatgtggagcgcttcttcagcagccccaggtag

SEQ ID NO: 301338 - DNA, 1620 bp, Artificial Sequence
  derived and/or modified sequence
atgaagcggggcaccagcctgcacagccggcggggcaagcccgaggcccccaaagggtctcctcaaatcaataggaagtctgggcaggagatgacagctgtgatgcaatctggccgccccagatcctccagtacgacagacgctcccacttcatccgcgatgatggagatagcctgtgctgccgccgcagcagcagccgcctgcctccccggtgaggaaggcacggcagagcgaatagaaagactggaagtgagcagcctggcccagaccagttctgcggtggcatcatctactgatggctccatccataccgactctgtggatggaacccctgacccccagcgaaccaaagcagccatcgcgcacctacagcagaagatccttaaactgacagaacaaattaagattgctcagaccgctagggatgacaacgtcgcggagtatttaaagttggccaatagcgccgataaacagcaggcggcacggattaagcaggtgtttgagaaaaagaaccagaagtcggcccagactatcctacagctgcaaaaaaagctggaacactatcaccgcaaactgagggaggtcgaacaaaatggaatccctcggcagccaaaggatgtttttcgtgatatgcaccaaggccttaaagacgtgggggctaaagtgaccggattctcagaaggtgtagtcgattccgttaagggtgggttcagcagctttagccaagccactcatagtgctgctggcgccgtggtgtcgaagcccagggagattgccagtctcattaggaacaaatttggctcagctgacaacataccaaacttgaaggatagcctggaagaaggacaggtggatgatgccggaaaggccctgggtgtcatttccaattttcagtcttctcccaagtatggttctgaagaggactgttcttccgctaccagtggctccgttggcgccaatagcacaacaggcggaattgcagtgggggccagctcctctaagacaaacacactggacatgcagagcagcggttttgatgctttactgcacgaaattcaagagatccgcgaaacacaggcaagactagaagagagcttcgagaccctgaaggagcattatcagagagattactccctgatcatgcagaccctacaggaagagcggtatcgttgcgagcgcttagaggagcagttgaacgatctgactgaactgcatcagaacgagatcttgaatctgaaacaagaactcgccagtatggaagaaaaaattgcttatcagagttacgagcgggctcgggatattcaggaggcccttgaagcctgccagacacggatctcaaagatggaactccaacagcagcagcagcaggtagttcagctggagggtttggaaaatgccacagcgaggaaccttctggggaagctaatcaacattctcctcgccgtgatggctgtgctgctcgtgtttgtgtcaactgtggccaactgtgtggtgcccctgatgaaaaccagaaaccggaccttcagtacacttttcctcgtcgtgttcatcgccttcctttggaagcactgggatgccttattttcttacgtggagcgcttcttttcatcccctcgctag

SEQ ID NO: 301339 - DNA, 1620 bp, Artificial Sequence
  derived and/or modified sequence
atgaagagggggacctccttgcattcccgacgaggcaaaccagaggctccaaaaggatctccccaaataaaccgcaaatccggccaggagatgaccgcggtaatgcagagtgggcgaccccgatcgagtagcactacagatgcgcctacaagctccgcaatgatggaaattgcgtgtgctgccgcagcggctgctgctgcttgtttgccaggagaagaggggaccgccgagaggatcgagcgcctggaggtttctagcctggcacaaacaagctctgctgttgctagctcgacagacgggtcaatccatacagacagcgttgacggaaccccagatccccagcgcacaaaggcagcgatcgcccacctgcagcagaagatcctgaagctgaccgaacagatcaagatcgcccagactgcccgagacgataacgtggccgagtatctgaagctggccaattccgccgacaaacagcaggcggcaaggattaaacaggtcttcgaaaaaaagaatcagaagtcagcccagactatcctgcagttgcaaaagaagctcgagcactatcaccgaaagctgagggaggttgagcaaaatggtattccgagacaacccaaggacgtctttagggatatgcaccagggattgaaagacgttggggctaaagtaacagggttttctgaaggcgtggtggatagcgtgaagggaggtttctctagcttttctcaagccacacatagtgccgcaggcgctgtggtatctaaacctcgagagatcgcgtctttgatacggaataagttcgggtctgctgataacattcccaaccttaaagactctctcgaagaggggcaggtcgacgacgccggaaaagctcttggcgtcatctcgaactttcagagctccccaaagtacgggagtgaagaggattgtagctcggcgacatccggttcagtgggggcaaattctaccacaggcggaattgccgtcggcgctagtagctccaagacaaataccctagacatgcagtcttctggatttgatgcgctgttacatgaaatacaggagattagggaaactcaggccagactggaggagagttttgaaaccctgaaggagcactaccaacgggactattccttgatcatgcagaccctgcaggaggagagatacagatgcgaaaggcttgaggagcagctgaatgacctcaccgagctccatcagaatgagatattgaatctgaaacaggaactggccagcatggaggagaagatcgcctaccagtcatatgaaagggccagagacattcaagaggcactcgaagcatgccagactcgaatcagcaagatggaactgcagcaacagcaacagcaggtggtccagttagagggactggaaaacgctacggctagaaatctgctaggcaagctcattaacatactgcttgccgtgatggcagtgcttcttgtgttcgtctcaaccgtcgctaattgtgttgtgcccctaatgaagacccgaaacaggaccttcagcacactttttctggtagtgtttatagcctttctgtggaagcattgggatgcactgttctcatacgtagaacgattcttctcgagtcctagatag

SEQ ID NO: 301340 - protein, 474 aa, Artificial Sequence
  derived and/or modified sequence
MVQRFSLRRQLSKIERLEVSSLAQTSSAVASSTDGSIHTDSVDGTPDPQRTKAAIAHLQQKILKLTEQIKIAQTARDDNVAEYLKLANSADKQQAARIKQVFEKKNQKSAQTILQLQKKLEHYHRKLREVEQNGIPRQPKDVFRDMHQGLKDVGAKVTGFSEGVVDSVKGGFSSFSQATHSAAGAVVSKPREIASLIRNKFGSADNIPNLKDSLEEGQVDDAGKALGVISNFQSSPKYGSEEDCSSATSGSVGANSTTGGIAVGASSSKTNTLDMQSSGFDALLHEIQEIRETQARLEESFETLKEHYQRDYSLIMQTLQEERYRCERLEEQLNDLTELHQNEILNLKQELASMEEKIAYQSYERARDIQEALEACQTRISKMELQQQQQQVVQLEGLENATARNLLGKLINILLAVMAVLLVFVSTVANCVVPLMKTRNRTFSTLFLVVFIAFLWKHWDALFSYVERFFSSPR

SEQ ID NO: 301341 - DNA, 1425 bp, Artificial Sequence
  derived and/or modified sequence
atggtgcagagattcagcctgagaagacagctgagcaagatcgagagactggaggtgagcagcctggcccagaccagcagcgccgtggccagcagcaccgacggcagcatccacaccgacagcgtggacggcacccccgacccccagagaaccaaggccgccatcgcccacctgcagcagaagatcctgaagctgaccgagcagatcaagatcgcccagaccgccagagacgacaacgtggccgagtacctgaagctggccaacagcgccgacaagcagcaggccgccagaatcaagcaggtgttcgagaagaagaaccagaagagcgcccagaccatcctgcagctgcagaagaagctggagcactaccacagaaagctgagagaggtggagcagaacggcatccccagacagcccaaggacgtgttcagagacatgcaccagggcctgaaggacgtgggcgccaaggtgaccggcttcagcgagggcgtggtggacagcgtgaagggcggcttcagcagcttcagccaggccacccacagcgccgccggcgccgtggtgagcaagcccagagagatcgccagcctgatcagaaacaagttcggcagcgccgacaacatccccaacctgaaggacagcctggaggagggccaggtggacgacgccggcaaggccctgggcgtgatcagcaacttccagagcagccccaagtacggcagcgaggaggactgcagcagcgccaccagcggcagcgtgggcgccaacagcaccaccggcggcatcgccgtgggcgccagcagcagcaagaccaacaccctggacatgcagagcagcggcttcgacgccctgctgcacgagatccaggagatcagagagacccaggccagactggaggagagcttcgagaccctgaaggagcactaccagagagactacagcctgatcatgcagaccctgcaggaggagagatacagatgcgagagactggaggagcagctgaacgacctgaccgagctgcaccagaacgagatcctgaacctgaagcaggagctggccagcatggaggagaagatcgcctaccagagctacgagagagccagagacatccaggaggccctggaggcctgccagaccagaatcagcaagatggagctgcagcagcagcagcagcaggtggtgcagctggagggcctggagaacgccaccgccagaaacctgctgggcaagctgatcaacatcctgctggccgtgatggccgtgctgctggtgttcgtgagcaccgtggccaactgcgtggtgcccctgatgaagaccagaaacagaaccttcagcaccctgttcctggtggtgttcatcgccttcctgtggaagcactgggacgccctgttcagctacgtggagagattcttcagcagccccagatag

SEQ ID NO: 301342 - DNA, 1425 bp, Artificial Sequence
  derived and/or modified sequence
atggtacaacgattttctttgaggcgacaattaagcaaaatcgaacggcttgaggtgtccagcttggctcagacaagctcggcagttgcatcgtccacagacggttccatacatacagattcagttgatggaacccctgaccctcagcgtacaaaggctgcgatcgctcacttgcagcaaaagattctcaagttgaccgagcagatcaagatcgcacaaacggctcgagacgataatgtcgcggaatatctgaagttggctaactcagcggacaagcagcaggctgcacggattaaacaggtcttcgaaaagaagaatcagaagagcgcccagaccatcctgcagctgcaaaagaagctcgaacattatcacagaaagcttcgagaggtggagcaaaatggtattccccgacagcctaaggatgtttttagagatatgcaccagggtttgaaggatgtcggggccaaggttacagggttttccgagggtgtggtggattcagtcaaggggggattctctagtttcagccaggctacccatagtgctgctggggccgtcgtcagcaaacctagggaaatcgctagccttattaggaacaaatttggcagcgctgacaatattcctaacttaaaggactcactcgaagaaggacaggtcgacgacgctgggaaagcgcttggagttatctcaaacttccaatcctcacccaaatacggaagtgaggaagattgctcctccgcaacaagcggaagcgtgggggccaattcaactaccggagggatagcggtcggagcatcctcctccaagaccaatacgctggacatgcagtcctccggttttgacgcactccttcatgaaatccaggagatacgggagacccaagcaaggctggaagagagttttgaaactctaaaggagcattaccaacgagactattccttgatcatgcaaaccctgcaagaggagaggtatagatgtgaacggcttgaggagcaactcaatgatctgactgagctccaccaaaacgagatcctaaacctcaagcaggagctggcttcaatggaagaaaagatcgcctatcagtcatacgaacgggcccgggacattcaggaggcactggaggcctgtcagacacggattagcaagatggaactacagcagcagcagcagcaggtggtgcaactggaggggctagaaaacgcaacagccagaaatctgctaggaaagctcatcaacatcttgctggccgtgatggctgttttattagtcttcgtctccaccgtggccaattgtgttgtacccctcatgaagactcgaaatagaacgttttccactttatttctggtcgtatttattgcattcttgtggaagcattgggacgcgctgttttcttacgtagagagatttttctctagcccccggtag

SEQ ID NO: 301343 - DNA, 1425 bp, Artificial Sequence
  derived and/or modified sequence
atggtgcagcgcttcagcctgcggcggcagctgagcaagattgaaaggctggaggtgagcagcctggcccagaccagcagcgctgtggccagcagcacagatggcagcatccacacagattctgtggatggcaccccagacccccagaggaccaaggccgccatcgcccacctgcagcagaagatcctgaagctgacagagcagatcaagatcgcccagacagccagagatgacaacgtggccgagtacctgaagctggccaacagcgctgacaagcagcaggccgcccgcatcaagcaggtgtttgagaagaagaaccagaagagcgcccagaccatcctgcagctgcagaagaagctggagcactaccacaggaagctgcgggaggtggagcagaatggcatcccccggcagcccaaggatgtgttccgggacatgcaccagggcctgaaggatgtgggcgccaaggtgacaggcttcagcgagggcgtggtggacagcgtgaagggcggcttcagcagcttcagccaggccacccacagcgctgctggagctgtggtgtccaagccccgggagatcgccagcctcatccggaacaagtttggatctgctgacaacatccccaacctgaaggacagcctggaggagggccaggtggatgatgctgggaaggccctgggcgtcatcagcaacttccagagcagccccaagtatggcagcgaggaggactgcagcagcgccaccagcggctctgtgggcgccaacagcaccaccggcggcattgctgtgggcgccagcagcagcaagaccaacaccctggacatgcagagcagcggctttgatgccctgctgcacgagatccaggagatccgggagacccaggcccggctggaggagagctttgagaccctgaaggagcactaccagagggactacagcctcatcatgcagaccctgcaggaggagcgctaccgctgtgagcggctggaggagcagctgaatgacctgacagagctgcaccagaatgagatcctgaacctgaagcaggagctggcctccatggaggagaagatcgcctaccagagctatgagcgggcccgggacatccaggaggccctggaggcctgccagacccgcatcagcaagatggagctgcagcagcagcagcagcaggtggtgcagctggagggcctggagaatgccacagccaggaacctgctgggcaagctgatcaacatcctgctggccgtgatggctgtgctgctggtgtttgtgtccacagtggccaactgtgtggtgcccctgatgaagaccaggaacagaaccttcagcaccctcttcctggtggtgttcatcgccttcctgtggaagcactgggatgccctcttctcctatgtggagcgcttcttcagcagccccaggtag

SEQ ID NO: 301344 - DNA, 1425 bp, Artificial Sequence
  derived and/or modified sequence
atggtgcagcggttcagcctgcggcggcagctgagcaagatcgagcggctcgaagtgtcaagtttggcccaaacctcaagcgcggtggccagcagcacagacgggtccattcacacggattctgtggatggaactcccgatccccagaggaccaaggccgccatcgctcatctgcagcaaaagattctgaaactcaccgaacagattaagatcgcccagaccgcccgcgatgacaacgtcgcggaatatctcaagctggcaaatagcgcagacaagcaacaagcggctaggattaagcaggtctttgagaagaaaaaccagaaatcggctcaaaccatattgcaactgcaaaagaaactcgagcattaccaccggaagctgcgcgaggtggagcagaatggaatccctaggcagcctaaagatgtgtttcgggacatgcaccagggtcttaaggatgtgggtgctaaagttacgggattcagcgaaggggtcgttgacagcgtgaaaggcggattcagttctttcagccaggccactcatagcgctgccggagcggtggtcagcaagccacgggaaattgcctccttgattagaaataagtttggcagcgccgacaatatcccgaacctgaaggacagtctcgaggaaggacaggtggacgacgctggcaaagctctcggtgtgatcagtaatttccagagctccccgaaatacgggtcagaagaggattgcagtagtgccaccagtggctctgtcggtgccaacagtaccactggcggaatcgcagtcggcgcttcctctagcaagaccaataccctcgatatgcagagttctggttttgacgcactattacacgaaatacaagaaattcgagaaactcaggcgagacttgaagagtcttttgaaaccttgaaagaacactatcagcgcgattattctctcataatgcagactcttcaggaggagcgctataggtgcgagcgcctggaagagcagttgaatgatctaaccgagctccaccagaatgagatcctgaacctgaagcaggagctcgcctcgatggaggagaagatcgcttaccagtcttatgagcgggccagggatatacaggaagccctcgaggcctgtcagacgcgtatttcaaagatggagctgcagcagcagcaacagcaagttgtgcaactggaaggcttagaaaatgccacagcaagaaacttacttggaaaactcatcaacatcctactcgccgtgatggctgtcctactggttttcgttagcaccgtggctaattgcgtggttccattgatgaagactcggaacagaacattctcaaccctgttcttggtcgtcttcattgctttcctatggaaacattgggacgcactgtttagctatgtggagcgatttttctctagccctaggtag

SEQ ID NO: 301345 - DNA, 1425 bp, Artificial Sequence
  derived and/or modified sequence
atggtccagcgcttctctttacgtaggcaattgtctaagattgagcgcttggaggtgagctctctcgcccagacaagctccgccgtggcttctagcaccgatggcagcatccatacagactcggttgacgggaccccagacccccagcggaccaaggctgctatcgcccatttacaacaaaagatcttaaagctgaccgagcagattaagattgcgcagacagcacgagacgataatgtcgccgagtaccttaaactggctaatagcgcggataaacagcaggccgcacgcattaaacaggtgtttgaaaagaagaatcagaagagtgcacagaccattctgcaactgcaaaagaaactcgagcactaccatcgcaagctcagggaagtcgagcaaaatggtatcccgagacagcctaaggacgtttttcgagacatgcaccaagggcttaaagacgtgggtgcaaaggtcaccggattttcggaaggggtggtggacagtgttaaaggtggcttcagctccttctctcaagccacgcattctgccgctggggctgtagtttctaagccgagagagatcgcttccctgatcagaaataaattcggctctgctgacaacatacccaacctgaaagatagtctggaagagggccaggtggacgacgccggtaaggcccttggagtgatatcaaattttcagtcatcaccaaaatacggttccgaagaagactgcagctccgccacaagcggcagcgtgggcgcaaactcaacaacaggcggtatcgccgtgggcgcttcttccagtaagacaaacacattggacatgcagtcttccggcttcgatgctttgttacacgagatccaggaaattagagaaacacaggctagactggaggaatccttcgagacactgaaggagcattaccagcgagattacagtctcataatgcagactctgcaagaagagagatataggtgcgagaggctggaagaacagctgaacgacctcacagaattgcatcagaacgagattctcaacttaaagcaggagctggcgtcaatggaggagaagatcgcataccagtcctacgaaagggctcgggatatccaggaggccctagaagcctgccaaacgagaataagcaaaatggagctgcagcagcagcaacagcaggtggtgcagcttgagggtctggagaacgccacagcccgtaatcttttgggcaagctcatcaacatacttctcgctgtgatggcagtcctccttgtctttgttagcaccgtggccaactgcgtcgtcccactcatgaagacccgaaatcggaccttttccactctatttctggtagtttttattgcctttctgtggaagcactgggacgccctctttagctacgtggagaggttttttagctccccgcgttag

SEQ ID NO: 301346 - DNA, 1785 bp, Artificial Sequence
  derived and/or modified sequence
gttatttaaaaaacccttcgtggattgctttgtctgaagatcctctgggtgatcatggttcagcgctttagcctcaggaggcagctatccaagatcgaacggttggaagtaagcagccttgcccaaacatccagtgcagtggcctccagtaccgatggcagcatccacacagactctgtggatggaacaccagaccctcagcgcacaaaggctgccattgctcacctgcagcagaagatcctgaagctcacagaacaaatcaagattgcacaaacagcccgggacgacaacgttgctgaatacttgaagcttgccaacagtgcagacaaacagcaggctgcccgcatcaagcaagtctttgagaagaagaaccagaaatctgcccaaactatcctccagctgcaaaagaaacttgagcactaccacaggaagctcagagaggtagagcagaatgggatcccccggcagccaaaggatgtcttcagggacatgcaccagggtctgaaggatgtaggagcaaaggtgactggcttcagtgaaggtgtggtggatagtgtcaaaggtgggttttccagcttctcccaggccacccattcagcagcaggcgctgtagtctcaaagcccagagagattgcctcactcattcggaacaaatttggcagtgcagacaacatccccaacctgaaggactctttagaggaagggcaagtggatgatgcggggaaggctttgggagtgatttcaaactttcagtctagcccaaaatatggtagtgaagaagattgttctagtgccacttcaggctcagtgggagccaacagcaccacagggggcatcgctgtaggagcatccagctccaaaacaaacaccctggacatgcagagctcaggatttgatgcactactacatgagatccaggagatccgggaaacccaggccagactagaggaatcctttgagactctcaaggaacattatcagagggactattccttaataatgcagaccttacaggaggagcgatatagatgtgaacgattggaagaacagctaaatgacctaacagagctccaccagaatgaaatcttgaacttgaagcaggaactggcaagcatggaagaaaaaatcgcgtatcagtcctatgaacgggcccgggacatccaggaggccctggaggcatgccagacgcgcatctccaagatggagctgcagcagcagcagcagcaggtggtgcagctagaagggctggagaatgccactgcccggaaccttctgggcaaactcatcaacatcctcctggctgtcatggcagtccttttggtctttgtctccactgtagccaactgtgtggtccccctcatgaagactcgcaacaggacgttcagcactttattccttgtggtttttattgcctttctctggaagcactgggacgccctcttcagctatgtggaacggttcttttcatcccctagatgatgctggcacagaaggcattgttccctaccctctggcgagtgcatgcagcagagagttagacagcaacttacctactctgaagttttctacaacaaaaaaagagttgagtgaatctgtttacatttagaataatgtttttttcttcaagagacgcaattgcaatagtattttttagattttatccaagaagttttttgggcgaaaatcttggatcatttttatgtagcatgattttccttgggatgcaaatcttaaaacagtcctttaatatgaaccaacaatctggagcacaccgaagggcaatct

SEQ ID NO: 301347 - DNA, 990 bp, Artificial Sequence
  derived and/or modified sequence
atgcaccagggcctgaaggacgtgggcgccaaggtgaccggcttcagcgagggcgtggtggacagcgtgaagggcggcttcagcagcttcagccaggccacccacagcgccgccggcgccgtggtgagcaagcccagagagatcgccagcctgatcagaaacaagttcggcagcgccgacaacatccccaacctgaaggacagcctggaggagggccaggtggacgacgccggcaaggccctgggcgtgatcagcaacttccagagcagccccaagtacggcagcgaggaggactgcagcagcgccaccagcggcagcgtgggcgccaacagcaccaccggcggcatcgccgtgggcgccagcagcagcaagaccaacaccctggacatgcagagcagcggcttcgacgccctgctgcacgagatccaggagatcagagagacccaggccagactggaggagagcttcgagaccctgaaggagcactaccagagagactacagcctgatcatgcagaccctgcaggaggagagatacagatgcgagagactggaggagcagctgaacgacctgaccgagctgcaccagaacgagatcctgaacctgaagcaggagctggccagcatggaggagaagatcgcctaccagagctacgagagagccagagacatccaggaggccctggaggcctgccagaccagaatcagcaagatggagctgcagcagcagcagcagcaggtggtgcagctggagggcctggagaacgccaccgccagaaacctgctgggcaagctgatcaacatcctgctggccgtgatggccgtgctgctggtgttcgtgagcaccgtggccaactgcgtggtgcccctgatgaagaccagaaacagaaccttcagcaccctgttcctggtggtgttcatcgccttcctgtggaagcactgggacgccctgttcagctacgtggagagattcttcagcagccccagatag

SEQ ID NO: 301348 - DNA, 990 bp, Artificial Sequence
  derived and/or modified sequence
atgcatcaggggctaaaggacgttggagcaaaggtgacggggttctccgagggagtggtggactctgtcaagggcgggtttagtagtttttctcaggccacacactccgcagcaggtgcggtggtgagcaaaccaagggagattgcctcccttattcgcaacaagttcggatcagctgataacattccaaatcttaaggattcattagaagaagggcaggtcgatgatgctgggaaggcccttggcgtaatttccaactttcagagctctccaaagtacggaagcgaagaggactgcagctcagctaccagtggttcagttggcgccaatagtactactgggggcatcgcggtgggagccagtagcagtaagacaaatacacttgacatgcagtccagtgggtttgacgcactgcttcatgagatccaggaaatcagagagactcaggcacgcctggaggagagtttcgaaactctaaaagaacactatcagcgagactactccctgattatgcaaacactgcaggaggagaggtataggtgtgaaagactggaagagcagctgaatgacttaaccgaactgcaccagaacgaaattttaaatctgaaacaagaattggcgagtatggaggagaaaattgcctatcagagttatgaacgggcgagagatatccaggaggccctggaggcgtgtcagaccagaatatcgaaaatggaactgcaacagcagcagcagcaggtggtccagctcgaaggcttagagaacgcaaccgcccggaatctcttagggaagctcattaacatattgctagcggtcatggctgtacttctggtatttgtgtccactgttgccaactgcgtagtgccactgatgaagacacgaaaccgcacattctctacactgtttcttgtcgtcttcattgctttcctatggaagcattgggacgcccttttctcctatgtggagcgcttctttagcagcccaaggtag

SEQ ID NO: 301349 - DNA, 990 bp, Artificial Sequence
  derived and/or modified sequence
atgcaccagggcctgaaggatgtgggcgccaaggtgacaggcttcagcgagggcgtggtggacagcgtgaagggcggcttcagcagcttcagccaggccacccacagcgctgctggagctgtggtgtccaagccccgggagatcgccagcctcatccggaacaagtttggcagcgctgacaacatccccaacctgaaggacagcctggaggagggccaggtggatgatgctgggaaggccctgggcgtcatcagcaacttccagagcagccccaagtatggcagcgaggaggactgcagcagcgccaccagcggctctgtgggcgccaacagcaccactggaggcattgctgtgggcgccagcagcagcaagaccaacaccctggacatgcagagcagcggctttgatgccctgctgcacgagatccaggagatccgggagacccaggcccggctggaggagagctttgagaccctgaaggagcactaccagagggactacagcctcatcatgcagaccctgcaggaggagcgctaccgctgtgagcggctggaggagcagctgaatgacctgacagagctgcaccagaatgagatcctgaacctgaagcaggagctggcctccatggaggagaagatcgcctaccagagctatgaaagagcccgggacatccaggaggccctggaggcctgccagacccgcatcagcaagatggagctgcagcagcagcagcagcaggtggtgcagctggagggcctggagaatgccacagccaggaacctgctgggcaagctgatcaacatcctgctggccgtgatggctgtgctgctggtgtttgtgtccacagtggccaactgtgtggtgcccctgatgaagaccaggaacagaaccttcagcaccctcttcctggtggtgttcatcgccttcctgtggaagcactgggatgccctcttctcctatgtggagcgcttcttcagcagccccaggtag

SEQ ID NO: 301350 - DNA, 990 bp, Artificial Sequence
  derived and/or modified sequence
atgcaccagggcctgaaggacgtgggcgccaaggtgaccggcttcagtgagggtgtagtcgacagcgtcaaaggtggattctcatctttttctcaggcgacccattccgccgccggtgccgttgtgtctaagccacgagaaatcgccagcctgatcaggaacaagtttgggtcggccgacaatattcctaatctgaaggactccctggaggagggccaagtggacgacgcaggcaaggctctgggcgtgatttcaaacttccagtcgagtccgaagtacggctcagaggaagattgttcgtccgctacctccgggtccgtgggcgctaatagtacaaccgggggaattgcggtgggcgcctcctcctccaagaccaacactcttgacatgcagtcgagcggcttcgacgccttactgcatgaaattcaggaaattcgagaaacgcaagcaaggttggaagagtcttttgagacattaaaggaacattaccaacgcgactattctttgattatgcagaccttgcaggaggagcggtatcgctgcgagaggctggaggagcagcttaatgatctcacggagttacatcaaaacgagatacttaatttgaaacaggagctggcctccatggaagagaagattgcctatcagtcctatgaacgcgcgagggatattcaggaggccctggaggcgtgtcaaactagaatttccaagatggaattgcagcagcagcagcaacaggttgtgcagttggagggtttggagaatgccacagcaagaaatctcctggggaaactcattaacatcctcctcgcagtgatggccgtattattggtgttcgtgtctactgttgcaaactgtgttgtacctttaatgaaaacaagaaatcggaccttctcgaccctctttctagttgtgtttatagccttcctctggaagcattgggatgcactgttctcctacgtagagaggttttttagcagcccccgatag

SEQ ID NO: 301351 - DNA, 990 bp, Artificial Sequence
  derived and/or modified sequence
atgcatcagggcctcaaagatgttggtgctaaagtcacgggttttagtgaaggggtggtggatagtgtgaaggggggattttctagtttcagtcaggccacgcattcagccgctggggctgtggtgtctaagccacgggagatcgccagcttgatccgaaacaagtttgggagcgctgataacatccccaatcttaaggacagcctggaggagggccaggtagacgacgccggtaaggcgttaggggttatatccaacttccaatcctcacccaaatatggtagcgaagaggattgttcttccgctacttctggaagcgttggagcaaattcgactactggaggtatagcagtcggggcatcaagctctaaaacaaataccctcgacatgcaatcctccgggtttgacgctctgctccacgagattcaggagatcagggaaactcaggcaaggctggaagagagtttcgagacactaaaggagcactatcaaagggattactcactcattatgcagacacttcaagaagaacgctaccgatgtgagcgattggaggaacagctgaacgacctgaccgaattacaccagaacgagatcttaaacctcaagcaagagctggctagtatggaagaaaaaattgcctatcagtcttatgaacgcgcaagagatatccaggaggccctggaggcctgccagaccagaatcagtaaaatggagctccagcagcagcagcagcaagtagtccagctggaggggttagagaacgcaacggccagaaatctgctgggaaaacttataaatattcttctggccgttatggcagtacttctcgtttttgtgagcacagtagcgaattgcgtggtccctctaatgaagacaaggaatcggaccttttcaacactcttcctggtagtatttattgcatttttgtggaagcactgggatgctttgttctcatatgtggagcggttcttcagttcaccacggtag

SEQ ID NO: 301352 - DNA, 519 bp, Artificial Sequence
  derived and/or modified sequence
atgcacgtggagctgagacacctgtgcgacgacttcatcaacggcaacaagaagaagtgggacatcctgggcaagagcctggagttccacagacagctggacaaggccaaggcccagaaggtgctgcagagactggacgacgtgcaggagatcttccacaagagacaggtgagcctgatgaagctggccgccaagcagaccagacccgtgcagcccgtggccccccaccccgagagcagccccaagtgggtgagcagcaagaccagccagcccagcaccagcgtgcccctggccagacccctgagaaccagcgaggagccctacaccgagaccgagctgaacagcagaggcaaggaggacgacgagaccaagttcgaggtgaagagcgaggagatcttcgagagccaccacgagagaggcaaccccgagctggagcagcaggccagactgggcgacctgagccccagaagcgtgatcaccgtgtgcgtgtgcgagatgctgaccctgggcgtgcagtag

SEQ ID NO: 301353 - DNA, 519 bp, Artificial Sequence
  derived and/or modified sequence
atgcacgttgaactccgccacctgtgtgacgacttcattaacggaaataagaaaaagtgggatatcctaggtaaaagtctggaattccacagacagctggacaaggcaaaggcccagaaagtgctgcagagacttgacgatgtccaggagatcttccacaagaggcaagtttccctcatgaagttggccgccaagcagacgagaccggtccagcccgttgccccccatccggagtcttccccaaaatgggtcagctctaagacctctcagcccagtacttcagtgcccctggcgaggccattacggacctctgaggaaccatataccgaaaccgaactgaactcacgcgggaaggaggatgacgagaccaaattcgaggttaaatccgaggaaatcttcgaaagccaccatgaacgcggaaaccccgaactcgagcagcaagctagactgggagatcttagcccacggtcagtcattaccgtatgcgtttgtgagatgctaacccttggagtgcagtag

SEQ ID NO: 301354 - DNA, 519 bp, Artificial Sequence
  derived and/or modified sequence
atgcacgtggagctgcggcacctgtgtgatgacttcatcaatggaaacaagaagaagtgggacatcctgggcaagagcctggagttccaccggcagctggacaaggccaaggcccagaaggtgctgcagaggctggatgatgtgcaggagatcttccacaagaggcaggtgtccctgatgaagctggccgccaagcagaccaggcctgtgcagcctgtggccccccaccctgagagcagccccaagtgggtgagcagcaagaccagccagcccagcacctctgtgcccctggcccggcccctgcggaccagcgaggagccctacacagaaacagagctgaacagccggggcaaggaggatgatgagaccaagtttgaggtgaagtctgaggagatctttgagagccaccacgagcggggcaaccctgagctggagcagcaggcccggctgggggacctgagccccaggagcgtcatcaccgtgtgtgtgtgtgagatgctgaccctgggcgtgcagtag

SEQ ID NO: 301355 - DNA, 519 bp, Artificial Sequence
  derived and/or modified sequence
atgcacgtggagctgcggcacctgtgcgacgacttcatcaacggcaacaaaaaaaaatgggacatccttggaaagtcgctggagtttcaccggcagttggataaagccaaagcccagaaagtgctccagagattagacgatgtccaggagatttttcataaacgccaagtttccttgatgaagctagctgccaagcagacaaggcccgtgcagccagtcgcacctcaccccgagagctctccaaaatgggtgtccagcaagactagccaacccagtaccagtgtgcccttggcacggcccctgcgcacatctgaggaaccttatacggagactgaactcaactcccgaggcaaggaagacgacgaaaccaaattcgaagtgaagtcagaagaaatctttgagtcccatcacgaacggggcaaccccgagttggagcagcaggcaaggctgggtgatttgtcgccccggtctgtcatcactgtgtgcgtctgtgagatgctgacattaggggtccagtag

SEQ ID NO: 301356 - DNA, 519 bp, Artificial Sequence
  derived and/or modified sequence
atgcacgtcgaactacgtcacttatgcgacgattttattaatggcaataaaaaaaaatgggacattctcggcaagagtcttgaattccatagacagctcgataaggcgaaagcccagaaagtgctccaacgcctcgatgatgtccaggaaatcttccacaagagacaagtgtcactgatgaagctggcggcaaaacagacaagacctgttcaaccagtggcccctcaccccgaatcttcaccaaaatgggtcagcagcaaaacttcacagccttccaccagcgtgccgctggcacggccactcagaacttccgaggagccctacacggagactgaactcaactctagaggcaaagaggatgatgaaacaaagttcgaggtaaaatccgaggagatcttcgaatcccaccacgagagaggtaaccccgagttggagcaacaggcccgtctgggagacctgtcccctcggagtgtgattactgtgtgcgtttgcgaaatgctgaccctaggcgtccagtag

SEQ ID NO: 301357 - DNA, 5358 bp, Artificial Sequence
  derived and/or modified sequence
atggcacctagggccgccggcggtgcaccactttccgctcgcgcggccgcagcttctccaccccccttccagacaccgccaagatgtccggtcccactccttctcttgcttctcctcggagcggctagagccggcgctctggaaattcagcggagattcccctcaccaacgcctactaacaacttcgccttggatggggccgctgggacagtttatcttgcggccgtaaatcggctgtatcaacttagtggcgcaaatctatccctggaagctgaagcggccgttggcccggttcctgactccccgctgtgccatgccccacaacttccacaggcctcttgcgaacacccaaggaggctgacagacaactataacaagatcctgcagctggaccctggtcagggactcgtcgtggtttgtgggtctatatatcagggcttttgtcagctgaggagaagggggaacattagcgcagtggccgtccgttttcccccggcggcgccacctgctgagcccgtaacggtgtttccttcaatgttgaacgtcgccgcaaatcaccccaatgctagcacagttggattggttttaccgcctgcagcaggcgccggagggtcaaggctgctggtgggggccacttatacaggctacggcagtagctttttcccacgcaaccggtctctcgaggaccaccggttcgagaataccccagaaattgccattcgtagcctggatacgcgcggggacctggctaagctatttacgttcgacctgaatccatcagacgacaacattttaaagatcaagcagggcgccaaggagcagcataaactaggattcgtaagcgcatttctgcatccatctgacccaccaccgggagcccaaagctatgcttatctcgctctgaattccgaagctcgcgccggagacaaagaaagtcaggcccgcagcctgctggctagaatctgtctacctcacggagctggaggggatgccaaaaagcttaccgagtcttacatacaactgggattacagtgcgccggtggggctggcaggggagacctgtacagtcgactagtaagtgtgtttccggcacgtgagcggctcttcgctgtgttcgaaaggccccaggggtctcccgccgctagagccgcccctgccgccctatgcgctttccggttcgcagatgtgcgcgccgcgatccgggccgcccggactgcttgctttgttgagcccgcccccgacgttgtagctgttctggattccgtggtccaagggacaggccctgcgtgtgaacggaagttgaacatccaactgcagcccgagcaactcgactgtggcgcagcacacctgcagcaccctctgtcaattttgcagccccttaaggccacacctgttttccgggccccaggattaacgtcggtggcagtggcctctgtcaacaattacacagcagtcttcctgggcaccgtcaatgggcgactgcttaaaatcaacttaaatgagtctatgcaggtggtgtccaggcgggtggtcacagtggcctacggcgagcccgtccaccatgtgatgcagtttgatcctgcagactccggatacttgtacctgatgactagccaccagatggcgagggtgaaggttgccgcttgtaatgtccatagtacctgtggtgattgcgtaggtgccgctgatgcctactgcgggtggtgcgctctcgaaacccggtgtactttacagcaggactgcactaattcttcacagcagcatttttggacgtccgcatctgaaggcccctctcggtgtccagccatgactgtgttgcctagcgagatcgacgtgaggcaggaatacccggggatgattttgcaaatttctgggtctttgccatctctgtcaggtatggaaatggcttgtgactacggaaacaatatccgcactgtggcccgcgtgccgggtccggccttcggacaccagattgcttattgtaacttgttgccgcgtgaccagttccctccttttccccccaatcaagaccatgtaacggtagaaatgagcgtcagagttaacggccgcaatatcgttaaggccaattttacaatatacgactgtagtcgaacagctcaggtgtatccccacacggcctgcacatcttgcctgtccgctcagtggccttgcttctggtgcagccagcagcattcatgcgtgtccaaccagtcaagatgtgaagcctcccctaatcctaccagtccacaagattgcccaagaaccctgctgtcccctctggcccccgtgccgaccggcggatcccagaatatcctggtcccactggcaaacacggctttttttcaaggtgccgccctggagtgcagtttcgggcttgaggagattttcgaggcggtctgggtgaacgagtctgttgtcaggtgtgatcaggtggtgctgcacacaacacgcaagagtcaggtgtttccgctctcgctgcaattgaaaggacggcccgctcggtttctggacagcccagagccaatgaccgtgatggtctataattgtgcaatgggatctccagattgcagccagtgtttgggccgcgaagacctgggccacttgtgcatgtggtcagatggatgcaggctcaggggtcccttacagcccatggctggcacctgccccgcacctgaaatccatgctattgaacccctgagtggacccctggacggagggacactactgactattaggggccgtaacctaggccgcaggctgtccgatgtcgcacacggcgtgtggatagggggcgttgcctgcgagcctttgcctgacagatacaccgtgagtgaggaaatcgtctgtgtcaccggaccagctcccggcccactatcgggggtggttacggtaaacgcctccaaagagggcaaatcaagggatagattttcgtatgtactaccattggtacattctttggagcccacgatgggcccaaaggccggaggcactagaattaccatccatgggaacgaccttcatgtggggagtgaactgcaagtgctggttaatgacacagatccctgcacagagctcatgcgaaccgacacatccatcgcatgcactatgccggagggagcattgccagcacccgtgcctgtctgcgtgcggttcgaaaggaggggatgcgtccacggtaacttgacattttggtatatgcagaatccggtaatcacagcgatcagccctaggagatctcctgtctcagggggcaggaccataacagtcgcaggcgagcggtttcatatggtacagaacgtctctatggcagtgcaccacattggccgcgagcccacgttatgcaaggtcctgaattccaccctgatcacctgtccgtcccccggcgccctcagcaatgcttcagcaccagtggatttcttcataaacgggagagcttacgcggatgaggttgctgttgccgaagagctgctggatccagaggaagctcaacggggctcaaggttccgcctggattatctccccaacccacaatttagcacagctaaaagggaaaagtggatcaagcaccatcccggcgaaccactcacgttggttatccacaaagagcaggacagcctggggctccagtcccatgagtacagagttaaaatcggtcaggtttcttgtgacattcagatcgtcagcgatcgaatcattcactgctctgtgaatgagtcattgggcgccgcggtgggccagctcccaattaccatccaggttggcaactttaatcagacaatagctacgctgcagctgggcggctcagagacagcgatcatcgtgagcattgttatatgctccgtgctgcttctgttatccgtggtggcccttttcgtattttgcactaaatcccggagggcagagagatactggcagaaaactctgctgcagatggaggagatggaatcccagatccgggaggagatccggaaaggattcgccgaactccagaccgacatgacggatctgaccaaagagttaaatcgctcacagggcataccctttctggaatataagcatttcgtaactcgcacgttcttccccaaatgcagctccctgtacgaagagaggtacgttctgcctagccaaacgctgaattcacaaggatcaagtcaggctcaggagacgcaccctcttctgggggaatggaaaattccagagtcctgcagacccaacatggaggaagggattagcctattctctagcctgctcaataacaaacattttctgatcgtgtttgttcatgccctggaacagcagaaggattttgctgtccgcgatcgctgctccttggccagcctgctaaccattgctctccacggaaagctggagtattatacttccatcatgaaagagttattagtggatctaatagatgctagcgctgccaaaaatcccaaactcatgttgcggaggacagagagcgtggtggaaaagatgctgacaaattggatgagcatatgtatgtattcctgtttgcgagagaccgtaggtgaacctttcttcctcctgctgtgcgcgatcaaacagcaaatcaataagggatccattgacgccatcactggaaaagcccggtacacccttagcgaggaatggcttctacgagaaaacattgaggccaagccgagaaacttgaacgtctcgtttcagggatgtggcatggactctttgtccgtgagagctatggatacagacacattgactcaggttaaagagaagattttagaggccttttgtaaaaacgtgccgtactcacagtggcctagagcagaagacgtggacctggagtggttcgcctcttctacccagtcctatatcctgcgcgacttagatgacaccagcgttgtggaagacggacggaaaaaactgaacaccctggctcattacaaaatccctgagggggcctccctggcaatgagtttaatagataagaaggataatacacttggaagagtcaaagacctagacaccgagaagtatttccacctcgtgcttcctacagatgaacttgctgagccaaagaaatctcatcgtcaatcccacagaaagaaggtgttgcctgagatctatcttaccaggctcctcagtacaaaaggtacactgcagaagtttctcgatgacctgtttaaggctatactgtccattcgtgaggacaagcctcccctcgccgtgaagtattttttcgattttctggaagagcaggctgagaagagaggaataagcgacccagacacactgcacatctggaagactaatcgctggaggccatcatcacccgtcctgggtgagcaccccgaggagccacccgtttgcctgtag

SEQ ID NO: 301358 - DNA, 5358 bp, Artificial Sequence
  derived and/or modified sequence
atggcccccagggctgctgggggcgcccccctgagcgcccgggctgctgctgccagccccccacccttccagaccccaccccgctgccctgtgcccctgctgctgctgctgctgctgggcgccgcccgggccggggccctggagatccagaggcgcttccccagccccacccccaccaacaactttgccctggatggagctgctggcaccgtgtacctggccgctgtgaacagactctaccagctgagcggggccaacctgagcctggaggccgaggccgctgtgggccctgtgcctgacagccccctgtgccacgccccccagctgccccaggccagctgtgagcacccccggcggctgacagacaactacaacaagatcctgcagctggaccccggccagggcctggtggtggtgtgtggcagcatctaccagggcttctgccagctgcggcggcggggcaacatctctgctgtggccgtgcgcttccccccagctgcccccccagctgagcctgtgaccgtcttccccagcatgctgaatgtggccgccaaccaccccaatgccagcacagtgggcctggtgctgcccccagctgctggggccggcggcagccggctgctggtgggcgccacctacacaggctacggcagcagcttcttccccaggaacagaagcctggaggaccacagatttgagaacaccccagagatcgccatccgcagcctggacaccaggggggacctggccaagctgttcacctttgacctgaaccccagtgatgacaacatcctgaagatcaagcagggcgccaaggagcagcacaagctgggctttgtgtctgccttcctgcaccccagcgaccccccacctggggcccagagctatgcctacctggccctgaacagcgaggcccgggccggggacaaggagagccaggcccggagcctgctggcccgcatctgcctgccccatggagctggaggagatgccaagaagctgacagagagctacatccagctgggcctgcagtgtgccggcggggccggccgcggggacctgtacagccggctggtgtctgtgtttcctgcccgggagcggctgtttgctgtgtttgagcggccccagggcagccctgctgcccgggccgccccagctgccctgtgtgccttccgctttgctgatgtgcgggccgccatccgggccgccaggacagcctgctttgtggagcccgccccagatgtggtggccgtgctggacagcgtggtgcagggcaccggccctgcctgtgagaggaagctgaacatccagctgcagcctgagcagctggactgtggggccgcccacctgcagcaccccctgagcatcctgcagcccctgaaggccacccctgtgttccgggcccctggcctgacctctgtggccgtggcctctgtgaacaactacacagctgtgttcctgggcaccgtgaatggccgcctgctgaagatcaacctgaatgaatccatgcaggtggtgtcccggcgggtggtgacagtggcctatggagagcctgtgcaccacgtgatgcagtttgatcctgctgacagcggctacctgtacctgatgaccagccaccagatggcccgggtgaaggtggccgcctgcaatgtgcacagcacctgtggggactgtgtgggcgctgctgatgcctactgcggctggtgtgccctggagacccgctgcaccctgcagcaggactgcaccaacagcagccagcagcacttctggaccagcgccagcgagggccccagccgctgcccagccatgacagtgctgcccagcgagattgatgtgcggcaggagtacccaggcatgatcctgcagatcagcggcagcctgcccagcctgagcggcatggagatggcctgtgactatggcaacaacatcagaacagtggcccgggtgcccggccctgccttcggccaccagatcgcctactgcaacctgctgccccgggaccagttcccccccttcccccccaaccaggaccacgtgacagtggagatgtctgtgcgggtgaatggaagaaacatcgtgaaggccaacttcaccatctatgactgcagcaggacagcccaggtgtacccccacacagcctgcaccagctgcctgagcgcccagtggccctgcttctggtgcagccagcagcacagctgtgtgagcaaccagagccgctgtgaggccagccccaaccccaccagcccccaggactgccccaggaccctgctgagccccctggcccctgtgcccactggaggcagccagaacatcctggtgcccctggccaacacagccttcttccagggcgccgccctggagtgcagctttggcctggaggagatctttgaggccgtgtgggtgaatgaatctgtggtgcgctgtgaccaggtggtgctgcacaccaccaggaagagccaggtgttccccctgagcctgcagctgaagggccggcctgcccgcttcctggacagccctgagcccatgacagtgatggtgtacaactgtgccatgggcagcccagactgcagccagtgcctgggccgggaggacctgggccacctgtgcatgtggagcgatggctgccgcctgcggggccccctgcagcccatggccggcacctgcccagcccctgagatccacgccatcgagcccctgagcggccccctggatggcggcaccctgctgaccatccggggcaggaacctgggccggcggctgagtgatgtggcccatggagtgtggattggaggagtggcctgtgagcccctgcctgaccgctacacagtgtctgaggagatcgtgtgtgtgactggacctgcccctggccccctgtctggagtggtgacagtgaatgccagcaaggagggcaagagccgggaccgcttctcctatgtgctgcccctggtgcacagcctggagcccaccatgggccccaaggccggcggcacccgcatcaccatccacggcaatgacctgcacgtgggcagcgagctgcaggtgctggtgaatgacacagacccctgcacagagctgatgaggacagacaccagcatcgcctgcaccatgcctgagggcgccctgcctgcccctgtgcctgtgtgtgtgcgctttgaaagaagaggctgtgtgcacggcaacctgaccttctggtacatgcagaaccctgtgatcacagccatcagccccaggaggagccctgtgtctgggggccgcaccatcaccgtggccggggagcgcttccacatggtgcagaatgtgtccatggctgtgcaccacatcggccgggagcccaccctgtgcaaggtgctgaacagcaccctcatcacctgccccagccctggggccctgagcaatgccagcgcccctgtggacttcttcatcaatggccgggcctatgcagatgaggtggccgtggccgaggagctgctggaccctgaggaggcccagaggggcagccgcttccggctggactacctgcccaacccccagttcagcacagccaagcgggagaagtggatcaagcaccaccctggagagcccctgaccctggtgatccacaaggagcaggacagcctgggcctgcagagccatgagtacagagtgaagattggccaggtgtcctgtgacatccagatcgtgtctgaccgcatcatccactgcagcgtgaatgaaagcctgggcgctgctgtgggccagctgcccatcaccatccaggtgggcaacttcaaccagaccatcgccaccctgcagctgggcggcagcgagacagccatcatcgtgtccatcgtcatctgcagcgtgctgctgctgctgtctgtggtggccctgtttgtgttctgcaccaagagccggcgggcagagcgctactggcagaagaccctgctgcagatggaggagatggagagccagatccgggaggagatcaggaagggctttgctgagctgcagacagacatgacagacctgaccaaggagctgaacagaagccagggcatccccttcctggagtacaagcactttgtgaccaggaccttcttccccaagtgcagcagcctgtatgaggagagatatgtgctgcccagccagaccctgaacagccagggcagcagccaggcccaggagacccaccccctgctgggggagtggaagatccctgagagctgccggcccaacatggaggagggcatcagcctcttcagcagcctgctgaacaacaagcacttcctgattgtgtttgtgcacgccctggagcagcagaaggactttgctgtgcgggaccgctgcagcctggccagcctgctgaccatcgccctgcacggcaagctggagtactacaccagcatcatgaaggagctgctggtggacctgattgatgccagcgctgccaagaaccccaagctgatgctgcggaggacagagagcgtggtggagaagatgctgaccaactggatgagcatctgcatgtacagctgcctgcgggagaccgtgggggagcccttcttcctgctgctgtgtgccatcaagcagcagatcaacaagggcagcattgatgccatcaccgggaaggcccgctacaccctgtctgaggagtggctgctgagagaaaatattgaggccaagcccaggaacctgaatgtgtccttccagggctgcggcatggacagcctgtctgtgcgggccatggacacagacaccctgacccaggtgaaggagaagatcctggaggccttctgcaagaatgtgccctacagccagtggcccagggcagaagatgtggacctggagtggtttgccagcagcacccagagctacatcctgcgggacctggatgacacctctgtggtggaggatggcaggaagaagctgaacaccctggcccactacaagatccctgagggcgccagcctggccatgagcctgattgacaagaaggacaacaccctgggccgggtgaaggacctggacacagagaagtacttccacctggtgctgcccacagatgagctggccgagcccaagaagagccaccggcagagccacaggaagaaggtgctgcctgagatctacctgacccggctgctgagcaccaagggcaccctgcagaagttcctggatgacctcttcaaggccatcctgagcatccgggaggacaagccacccctggccgtgaagtacttctttgacttcctggaggagcaggccgagaagaggggcatcagtgaccctgacaccctgcacatctggaagaccaaccgctggaggcccagcagccctgtgctgggggagcaccctgaggagccccctgtgtgcctgtag

SEQ ID NO: 301359 - DNA, 5358 bp, Artificial Sequence
  derived and/or modified sequence
atggccccccgggccgccggcggcgcccccctgagcgcccgggccgccgccgcctcacctcccccttttcaaacacccccaaggtgccctgtgcccctgctgctattgttgctcctgggagccgccagggccggggctttggagatccagcggaggtttccttcacccacaccgacaaacaatttcgccttagacggggctgctggcacagtgtacctggccgccgtcaatcgactctatcaacttagcggagctaatctatcccttgaggccgaagccgccgtggggcctgtaccagatagccccctgtgtcatgctccccagctgccacaagctagctgtgaacatccgaggcggttgaccgataattataacaagatcttacagctggaccccgggcagggcctcgtggttgtatgtggcagtatttaccagggcttttgccagctcaggaggagaggtaatatatcagccgtggccgtgaggttccccccagcggccccgcctgcggagcccgtcactgtgttcccttcaatgctcaacgtggccgccaaccaccctaatgcgtccacagtgggccttgtgttacccccagccgccggggccggcggctccagattactggtaggagcaacctatacgggatatggaagctccttctttcccagaaaccggtctttggaggaccacagatttgaaaatactcccgagattgctattcggagcctcgatacccggggcgatctggcaaagctgtttacttttgatctgaacccttctgacgacaacatcctcaagatcaaacagggagccaaggaacagcacaaattgggcttcgtttccgctttcttgcatccaagcgacccacctccgggtgcccagtcttacgcttacctggctctcaattccgaagcaagggcaggggataaagagtctcaagcccggtcactgctagcaagaatctgtctgccgcatggggctggcggcgatgctaaaaagctaactgaaagttatatccaactcgggctgcagtgtgccgggggcgccggtcgcggtgacctctattccaggctggtgtcagtcttccctgctagggagcgcctttttgcagtatttgaacgccctcagggttctcctgctgccagggcagccccagccgccctctgcgcattccggtttgcagatgtcagagccgctattagagcagcccggactgcttgcttcgtggagcctgccccagacgtggtggccgttctcgacagcgttgttcagggcacaggccccgcgtgcgaaagaaaactgaacatccagctgcagccagagcagttggactgtggggcagcccacctgcagcatcccctgagcattctgcagcccctcaaggcaactccagtgttcagggcgcctggactgacctcagtggcagtggccagcgtgaacaattatacagccgtgttcctgggtactgtgaacggacgactgctcaagataaatctcaatgaatcaatgcaggtcgtgagcaggagggtggtaactgttgcatacggagaaccagttcatcatgttatgcaattcgatcccgccgattctggctatctgtatctcatgacaagtcatcagatggcacgtgtgaaggtggccgcctgtaacgtacatagcacttgtggtgattgtgtcggcgccgcagatgcgtactgtggatggtgtgctctggagacgaggtgcacactgcaacaggattgcactaatagctcccagcaacatttttggacctcagcatctgaaggtccatcaagatgccctgccatgaccgtcctgcctagtgagatcgacgtgcggcaggagtaccctggtatgatcctgcaaatcagcggatccttgccaagcctgtccgggatggagatggcatgcgattacgggaacaatattaggaccgtggcaagagtccctggccctgccttcggccaccaaatcgcctactgcaacctgttgcctcgcgaccaatttccgcccttccctccaaaccaggatcatgtgaccgtggagatgagtgtccgggtgaatggcagaaatatcgtgaaagccaactttaccatctacgattgtagccggactgcccaggtctacccacataccgcatgtacatcatgcctgagcgcacaatggccatgcttttggtgttcgcagcagcactcatgcgtgagcaaccagtccaggtgcgaggccagccccaacccaacttcgccacaggactgcccaagaaccctgctgagccctctggcacccgttcccactgggggctcccagaacattctggtgccactggcgaatacagccttcttccagggtgctgcactcgaatgctcctttggcctggaggagatattcgaggctgtgtgggttaatgagtcagtagtcaggtgtgaccaagtggttcttcataccacacggaaaagccaggtgttccctctaagcctacaactgaaggggaggcccgctaggttccttgatagtccagaaccaatgacagtaatggtgtacaactgtgcaatggggtccccagactgcagccagtgtctcggacgtgaggatttagggcatctgtgtatgtggtcagatggatgtcggctgagaggacccctgcagcccatggcaggaacgtgccctgcccccgaaattcatgctattgagcccctgagcggacccctagatggcggcacactcctaacaatccgaggcagaaaccttggacggcggctgtccgatgtggcccacggtgtctggatagggggagttgcatgcgagccactgccagatcggtatacagtctcagaggagattgtttgcgtaacaggaccagccccgggacctcttagcggagtagtcaccgtgaatgcgagcaaggagggcaagtcccgagaccgctttagctacgtgctgccattagtgcacagccttgagcccaccatggggccaaaggcgggcggtacccggataacgatccacggtaatgacctccatgtaggctccgagttgcaagtattggtaaacgataccgatccttgtactgagctgatgcggactgatacatcaattgcatgcactatgccagagggtgccctgcctgcccccgtccctgtgtgtgttcgtttcgagcgacgcggatgtgtacacggcaatctgaccttctggtacatgcagaatccagtgatcactgctatcagtccaaggcggtccccagtgtctggaggcaggactatcacagttgctggtgaaagattccacatggtgcagaatgtgtcaatggcggtccatcacatcgggagagagccgaccctctgcaaggtgctgaacagtacactaattacctgtccaagtcccggcgctttgtcgaatgcttcggctcctgttgacttcttcattaatggcagggcttacgccgatgaagtagcggtggcagaggaactgctcgaccccgaagaggcacagcgggggagcaggttcagactagactatcttcccaacccccagttcagtactgctaagcgcgagaaatggataaaacaccaccctggcgaaccgctaactctggtgatacataaagagcaggactcactgggcctgcagtcccatgaatacagagtgaaaattggacaggtctcttgtgacatccagatcgttagtgaccgtataatccattgttccgtcaacgagagtctgggtgctgcagtgggacagctacctataacaattcaggtaggcaatttcaaccagacaatcgccacgctgcagctcggcggatcagagactgcaataatcgttagcattgtgatatgtagcgtgctcttgctgcttagtgtcgttgccctttttgtcttttgtaccaagagccgacgcgccgagagatattggcagaagacgctgctgcagatggaagagatggaatcccagatccgcgaggagatcagaaagggtttcgcagagctacagactgacatgaccgacctgactaaggaattgaatcgcagccagggcattccctttctggaatataaacactttgtaacgcgaacattcttcccaaaatgcagttccctgtacgaggaaaggtacgtgctccctagccagacattgaactcccaaggttcttcccaggcacaagagacgcaccctctattgggcgaatggaaaattcccgaatcttgtaggcccaatatggaggaggggatttcactgtttagcagcctgcttaacaacaagcactttctcattgtctttgtgcacgcgctcgaacagcagaaagacttcgccgtgagagacaggtgtagcctagccagccttctcacaatcgccttacatggcaaacttgaatattatacatctataatgaaggagttgctggtggaccttattgatgctagcgcggctaagaaccctaaactcatgctgcgccgcaccgagtccgttgttgaaaaaatgttgactaactggatgtctatttgtatgtatagttgcctgcgagagactgtcggagagccattttttctcttgctgtgcgcgatcaaacagcagatcaataagggatctatagacgctattacagggaaggcgaggtacaccctcagcgaagaatggttactccgtgagaatattgaggctaagcccagaaatctgaatgtgtcctttcaggggtgcggaatggactctctgagtgtgcgggcgatggacacagacactctcacccaagtaaaggaaaagatcctcgaggccttttgcaagaacgtgccgtacagtcagtggccccgcgcagaagatgttgaccttgaatggttcgcctcttcaacacaatcctatattctccgtgatttggatgacactagcgtcgttgaggacgggcgcaagaagctgaataccctggcacactataaaatccccgaaggggccagcctggccatgagtctgatcgacaagaaagataataccctcggcagggtgaaagacctggatacagagaagtactttcaccttgttctacctactgatgagttggctgaaccaaagaagtcccacaggcaatctcacagaaaaaaagtcctacctgagatttacctgactcgcctcctctccacaaagggtacgctgcagaagttcctggacgacctgttcaaagcaatcttgagcattagagaagacaagccccctctggctgtaaagtacttcttcgacttcctggaagagcaggccgagaagcggggaataagcgaccccgatacactacacatctggaagactaatagatggcgcccttcaagccctgttttgggggagcaccctgaggagccccctgtttgtctgtag

SEQ ID NO: 301360 - DNA, 7101 bp, Artificial Sequence
  derived and/or modified sequence
ccgggctgcgcggcgaggctgacccgggcccgggcgccggggtcgggggcggctggcgcgggcaggaagcgcatcgcggcccgggcccgccccccgcctcccgccgcctccgggctcccggctcccggccgcgcctcgccccatgcactcgccgcgccgcgcagcccgcgcacgcccggatggctcctcgcgccgcgggcggcgcaccccttagcgcccgggccgccgccgccagccccccgccgttccagacgccgccgcggtgcccggtgccgctgctgttgctgctgctcctgggggcggcgcgggccggcgccctggagatccagcgtcggttcccctcgcccacgcccaccaacaacttcgccctggacggcgcggcggggaccgtgtacctggcggccgtcaaccgcctctatcagctgtcgggcgccaacctgagcctggaggccgaggcggccgtgggcccggtgcccgacagcccgctgtgtcacgctccgcagctgccgcaggcctcgtgcgagcacccgcggcgcctcacggacaactacaacaagatcctgcagctggaccccggccagggcctggtagtcgtgtgcgggtccatctaccagggcttctgccagctgcggcgccggggcaacatctcggccgtggccgtgcgcttcccgcccgccgcgccgcccgccgagcccgtcacggtgttccccagcatgctgaacgtggcggccaaccacccgaacgcgtccaccgtggggctagttctgcctcccgccgcgggcgcggggggcagccgcctgctcgtgggcgccacgtacaccggttacggcagctccttcttcccgcgcaaccgcagcctggaggaccaccgcttcgagaacacgcccgagatcgccatccgctccctggacacgcgcggcgacctggccaagctcttcaccttcgacctcaacccctccgacgacaacatcctcaagatcaagcagggcgccaaggagcagcacaagctgggcttcgtgagcgccttcctgcacccgtccgacccgccgccgggtgcacagtcctacgcgtacctggcgctcaacagcgaggcgcgcgcgggcgacaaggagagccaggcgcggagcctgctggcgcgcatctgcctgccccacggcgccggcggcgacgccaagaagctcaccgagtcctacatccagttgggcttgcagtgcgcgggcggcgcgggccgcggcgacctctacagccgcctggtgtcggtcttcccagcccgggagcggctctttgctgtcttcgagcggccccaggggtcccccgcggcccgcgctgctccggccgcactctgcgccttccgcttcgccgacgtgcgagccgccatccgagctgcgcgcaccgcctgcttcgtggaaccggcgcccgacgtggtggcggtgctcgacagcgtggtgcagggcacgggaccggcctgtgagcgcaagctcaacatccagctccagccagagcagctggactgtggagctgctcacctgcagcacccgctgtccatcctgcagcccctgaaggccacgcccgtgttccgcgccccgggcctcacctccgtggccgtggccagcgtcaacaactacacagcggtcttcctgggcacggtcaacgggaggcttctcaagatcaacctgaacgagagcatgcaggtggtgagcaggcgggtggtgactgtggcctatggggagcccgtgcaccatgtcatgcagtttgacccagcagactccggttacctttacctgatgacgtcccaccagatggccagggtgaaggtcgccgcctgcaacgtgcactccacctgtggggactgcgtgggtgcggcggacgcctactgcggctggtgtgccctggagacgcggtgcaccttgcagcaggactgcaccaattccagccagcagcatttctggaccagtgccagcgagggccccagccgctgtcctgccatgaccgtcctgccttccgagatcgatgtgcgccaggagtacccaggcatgatcctgcagatctcgggcagcctgcccagcctcagtggcatggagatggcctgtgactatgggaacaacatccgcactgtggctcgggtcccaggccctgcctttggtcaccagattgcctactgcaacctcctgccgagggaccagtttccgcccttcccccccaaccaggaccacgtgactgttgagatgtctgtgagggtcaatgggcggaacatcgtcaaggccaatttcaccatctacgactgcagccgcactgcacaagtgtacccccacacagcctgtaccagctgcctgtcggcacagtggccctgtttctggtgcagccagcagcactcctgtgtttccaaccagtctcggtgcgaggcctcaccaaaccccacgagccctcaggactgcccccggaccctgctctcacccctggcacccgtgcctacgggtggctcccagaacatcctggtgcctctggccaacactgcctttttccagggtgcagccctggagtgtagttttgggctggaggagatcttcgaggctgtgtgggtgaatgagtctgttgtacgctgtgaccaggtggtgctgcacacgacccggaagagccaggtgttcccgctcagcctccaactaaaggggcggccagcccgattcctggacagccctgagcccatgacagtcatggtctataactgtgccatgggcagccccgactgttcccagtgcctgggccgcgaagacctgggtcacctgtgcatgtggagtgatggctgccgcctgcgggggcctctgcagcccatggctggcacctgccccgcccccgagatccacgcgattgagcccctgagtggcccgttggacggtgggaccctgctgaccatccgaggaaggaacctgggccggcggctcagtgacgtggcccacggcgtgtggattggtggtgtggcctgtgagccactgcctgacagatacacggtgtcggaggagatcgtgtgtgtcacagggccagccccaggaccactctcaggtgtggtgaccgtgaacgcctctaaggagggcaagtcccgggaccgcttctcctacgtgctgcccctggtccactccctggagcctaccatgggccccaaggccgggggcaccaggatcaccatccatgggaatgacctccatgtaggctccgagctccaggtcctggtgaacgacacagacccctgcacggagctgatgcgcacagataccagcatcgcctgcaccatgcctgagggggccctgccggctccggtgcctgtgtgtgtgcgcttcgagcgtcggggctgcgtgcacggcaacctcaccttctggtacatgcagaacccggtcatcacggccatcagtccccgccgcagccctgtcagtggcggcaggaccatcacagtggctggtgagcgtttccacatggtgcagaatgtgtccatggccgtccaccacattggccgggagcccacgctctgcaaggttctcaactccaccctcatcacctgcccgtcccccggggccctgagcaacgcatcagcgccagtggacttcttcatcaatgggcgggcctacgcagacgaggtggctgtggctgaggagctactggaccccgaggaggcacagcggggcagcaggttccgcctggactacctccccaacccacagttctctacggccaagagggagaagtggatcaagcaccaccccggggagcctctcaccctcgttatccacaaggagcaggacagcctggggctccagagtcacgagtaccgggtcaagataggccaagtaagctgcgacatccagattgtctctgacagaatcatccactgctcggtcaacgagtccctgggcgcggccgtggggcagctgcccatcacaatccaggtagggaacttcaaccagaccatcgccacactgcagctggggggcagcgagacggccatcatcgtgtccatcgtcatctgcagcgtcctgctgctgctctccgtggtggccctgttcgtcttctgtaccaagagccgacgtgctgagcgttactggcagaagacgctgctgcagatggaggagatggaatctcagatccgagaggaaatccgcaaaggcttcgctgagctgcagacagacatgacagatctcaccaaggagctgaaccgcagccagggcatccccttcctggagtataagcacttcgtgacccgcaccttcttccccaagtgttcctccctttatgaagagcgttacgtgctgccctcccagaccctcaactcccagggcagctcccaggcacaggaaacccacccactgctgggagagtggaagattcctgagagctgccggcccaacatggaagagggaattagcttgttctcctcactactcaacaacaagcacttcctcatcgtctttgtccacgcgctggagcagcagaaggactttgcggtgcgcgacaggtgcagcctggcctcgctgctgaccatcgcgctgcacggcaagctggagtactacaccagcatcatgaaggagctgctggtggacctcattgacgcctcggccgccaagaaccccaagctcatgctgcggcgcacagagtctgtggtggagaagatgctcaccaactggatgtccatctgcatgtacagctgtctgcgggagacggtgggggagccattcttcctgctgctgtgtgccatcaagcagcaaatcaacaagggctccatcgacgccatcacaggcaaggcccgctacacactcagtgaggagtggctgctgcgggagaacatcgaggccaagccccggaacctgaacgtgtccttccagggctgtggcatggactcgctgagcgtgcgggccatggacaccgacacgctgacacaggtcaaggagaagatcctggaggccttctgcaagaatgtgccctactcccagtggccgcgtgcagaggacgtcgaccttgagtggttcgcctccagcacacagagctacatccttcgggacctggacgacacctcagtggtggaagacggccgcaagaagcttaacacgctggcccattacaagatccctgaaggtgcctccctggccatgagtctcatagacaagaaggacaacacactgggccgagtgaaagacttggacacagagaagtatttccatttggtgctgcctacggacgagctggcggagcccaagaagtctcaccggcagagccatcgcaagaaggtgctcccggaaatctacctgacccgcctgctctccaccaagggcacgttgcagaagtttctggatgacctgttcaaggccattctgagtatccgtgaagacaagcccccactggctgtcaagtactttttcgacttcctggaggagcaggctgagaagaggggaatctccgaccccgacaccctacacatctggaagaccaacaggtggcggccttcctctccggttctgggtgaacatcctgaagaacccccagtttgtctttgacatcgacaagacagaccacatcgacgcctgcctttcagtcatcgcgcaggccttcatcgacgcctgctccatctctgacctgcagctgggcaaggattcgccaaccaacaagctcctctacgccaaggagattcctgagtaccggaagatcgtgcagcgctactacaagcagatccaggacatgacgccgctcagcgagcaagagatgaatgcccatctggccgaggagtcgaggaaataccagaatgagttcaacaccaatgtggccatggcagagatttataagtacgccaagaggtatcggccgcagatcatggccgcgctggaggccaaccccacggcccggaggacacaactgcagcacaagtttgagcaggtggtggctttgatggaggacaacatctacgagtgctacagtgaggcctgagacacatggagagttggtcaggctgctgctgggagaaatggacgcccactgggcctcaacttgatcttctaccccgtgcctgtgactcagactgggaaatactgagcagagacggctggggcgggggcaggaggaggggctgctctctgagacaggggcgcccccgccttgacccctgggcacctccatcccctcccacctgtccccagatcagtctctgggatggaggccagagagctggtcaggctcccccatctgcccagcacggcctgcactgtgcccacccacttgctccacaacgtccagttggtcctgctgccaagagccccgtgcatccaggcggccaagcacaaactgggggagaggaggccgccagcccggaggctgcagcccagaaactctacctcatccacactggtgcagggagccctccttgaactgacctttgattggtttctgcttcaactaccaaaatgttatctccacttccccctcacccgtagaggatcctggccacagacagtttcaagtagtgtcagatttttgttgcttgggcggctgttggtagagtgggcagtgcccgcgccatggggtgctctgtgggcttctccaggagcagggagggtggaggggagggatggggggcacaggagctgggagccccgtctccaggaaaaggagaggggttaagatgcaccgaggctgtagctgggctacttgatcttgctgaaagtgtttctaaagatagcaccacttttttttttaaagcttttatatattaaaaaacgtatcatgcaccaactgtgaatagctgccgcttgcgcagaggacccggggaggggtcccgagaggctccccatgcaacactggaaatgactgttccagagagcgggcagacctggcagagcgcccctggcgcctgagactaccacccactccgttcctgccagaaacgaccctctgtggccgatgggccatgcgggcccctcgcagccaactcagccagtgttgggactggctcagagcccatgggggctggaggggggcagctgggactctggaatcttctttataataaaagccttacggacaaacctactgtgggctccagcctttgtcctgagatagccaagcggg

SEQ ID NO: 301361 - DNA, 5357 bp, Artificial Sequence
  derived and/or modified sequence
atggccccaagagccgctggaggcgcaccactgtcggcccgagccgcagcagcctccccacctcccttccagactccgcctcgatgtccggtaccactcttgctgcttctgctgcttggagccgcacgggcaggagcacttgaaatccagaggcggttccccagtccaaccccgaccaataatttcgcactcgacggagctgccggtacagtctatctcgctgctgttaatagactctaccaattgtctggcgcaaacctgtcattggaggccgaagcagccgtaggaccagtgcctgatagccctctctgccacgccccacagctgcctcaggcttcctgcgagcaccctaggcgtctgacagataactacaacaaaatacttcaactggaccctggccagggcctcgtggttgtctgcggaagcatctaccagggattctgtcagctgcgtaggcgaggcaatatctccgctgtagccgttcgcttccccccagctgctccgcctgctgagcccgtgactgtgtttccaagtatgctgaacgtggcagccaaccacccaaatgcgtctactgtcggattagtgttgcctcctgctgccggtgctgggggaagcagactcctggtgggggcaacgtatacggggtatgggtcatcctttttccccagaaaccggtcattggaagatcatcgattcgaaaatacgcccgaaatcgccatccgaagcttggataccaggggtgatctggctaaactgtttacgttcgacctcaatccatcagatgataacatactgaagattaagcagggcgcaaaggagcaacacaagttgggattcgtatcagcattcctgcatccttcggatccacctccaggcgcacaaagttatgcttatcttgccctgaacagtgaggcacgggctggtgacaaagaaagccaagctagatctttgctggcccgaatctgtcttccgcatggcgctgggggagacgccaaaaaactaacagagagctatatccagctggggctccagtgtgctgggggtgccggacgaggggacctgtactctcgactggtaagtgtgtttcccgcacgagaaagattgttcgcagtgttcgagaggcctcagggaagcccagccgcacgagccgcacctgccgcattatgcgctttcaggtttgcggacgtacgggctgcaatcagagctgcgagaacggcttgctttgttgagccagctccagacgttgtcgctgttttagatagcgtcgtacaaggtaccggcccagcttgcgagagaaaactcaatatccagctccagccggagcagctggactgtggcgctgcccacttgcagcacccactgtctattctccagccattgaaagctacaccggtctttagagcccctggcctgacctcggtggccgtcgcttccgttaacaactatactgccgtcttcctcggcacggtgaatgggcgtttgctgaaaatcaacctgaacgagtctatgcaggtggtgagtagacgtgtggtaacagttgcgtacggagagcccgtgcaccacgtcatgcagtttgacccagcagattctggctacctctaccttatgacctcccatcagatggcaagggtcaaggtggccgcttgcaatgttcattctacgtgtggtgactgcgtgggggcagcggatgcctattgcggctggtgcgctctggagactagatgcactctccaacaggactgcaccaactctagccaacagcatttttggacaagtgccagcgaggggccaagcagatgcccggcaatgaccgtgcttccatccgaaatcgacgttaggcaggagtatcccggaatgattttacaaatttccggaagtctcccgtccctaagcggaatggaaatggcatgcgactacggcaataatatacgtacggtcgccagggtcccaggccctgccttcggtcaccaaatagcctattgtaatctgttgccgagggaccagtttcctccattccccccaaaccaggatcacgtcactgtggaaatgagtgtccgcgtgaatgggcgaaatattgtaaaggccaattttacaatatacgattgctctcggaccgcccaagtataccctcacactgcatgtacatcgtgcctctctgctcaatggccttgtttttggtgtagccagcaacactcctgcgtctccaatcagagtaggtgcgaggcgtccccgaatcctacatccccccaagactgtcccaggaccttattgtcaccgctcgcaccagtgccaactggcggttcccagaacattctggtgcctctggctaacactgccttctttcagggcgctgccctcgagtgcagctttgggctggaggagatcttcgaggccgtctgggtaaatgagtcagttgtgcggtgtgaccaggtagtccttcacacgactaggaagtcccaggtctttcccttgtcattgcagctgaagggacgccctgcacggttcttggattcaccagaacccatgactgtgatggtctacaactgcgccatgggcagcccggactgcagccagtgtctagggagagaggacctgggacacctttgcatgtggtctgacggctgccgactgcgcggaccattacagcccatggccggtacctgccctgcaccagaaatccacgccatcgagccgttaagcggaccactggacggaggcaccctgctgaccattcgcggtcgcaatctcggcagacggcttagcgacgtggcccatggcgtgtggattggaggcgtggcttgcgaaccactgcctgacaggtataccgtgtccgaagaaattgtatgtgtgacgggccctgcacccggtcccctctccggtgtggttacggtaaatgctagtaaggaaggcaaaagccgggaccgcttcagttacgtgctgcctttggtgcatagcttggagccgacgatgggaccaaaggccggaggaacacgcatcaccatccacggcaatgatctgcatgtgggttcggagctgcaagtgcttgttaacgacacggacccttgtaccgagctcatgagaacggacaccagcatcgcctgcactatgcctgagggcgcactgccagcccctgtgcccgtgtgcgtgcgatttgaacgtcgagggtgcgtccacggcaatttgacattctggtacatgcagaatcccgtcattacagccatttcgcccagaagatcgcctgtgtccggcggtcggacgataactgtcgcgggtgaacggttccatatggttcagaacgtgagtatggctgtgcatcatatcgggagagagcctacactctgcaaagtcctgaactccacactgattacttgccccagtccaggcgctttgtccaatgcctccgccccagtggactttttcatcaatgggcgagcttacgctgatgaggttgctgttgcagaagagttactcgacccagaggaagcccagcgcggatctcgcttccgattagattatcttcccaacccacagttctcaactgctaagcgcgagaagtggataaagcaccatcctggagagccgttgactcttgtgatccacaaggaacaagattctctgggtctgcagagtcatgagtatagagtaaagatcggacaagtgtcatgcgatattcagatcgtgagtgacagaataatccactgttctgtaaatgagagcttgggcgctgctgttggacagctgcctatcacgatccaggtcggtaacttcaatcaaaccatcgctactttacagttaggaggatccgaaacagcaattattgtttccattgtgatatgcagcgttcttctcctgctcagcgtcgtggcactgtttgtcttttgtacaaagagcagacgggctgaacggtactggcagaagaccctgctgcaaatggaggagatggagtctcagattcgtgaggagattcgaaaagggtttgccgagctccaaaccgatatgacggatctcaccaaggagctcaaccgtagccaggggatcccctttcttgaatacaaacatttcgtgacacgtaccttttttccaaagtgcagtagcctgtatgaggagagatatgtgctgccgtcacagaccttgaattcccaagggtcttcgcaggcacaagagactcaccctctgctgggagagtggaagatccccgagtcctgccgaccgaacatggaggagggaatatccctgttttccagcctgttgaacaataaacattttctcatcgttttcgtgcacgcgctggagcaacagaaggactttgccgtccgagatcgatgttcgctggcctcgcttttgaccatcgccttgcacggcaaactggaatattacaccagcattatgaaagagctactagttgatttaattgacgcctctgcggcaaagaacccaaaattaatgctgcggcgtacagagtctgttgtggagaagatgttaaccaactggatgtccatttgtatgtattcctgtcttagggagaccgttggagagccctttttcctgcttctatgtgcgattaaacagcagatcaataagggtagcattgatgccatcactggcaaggcacgatacaccctgtctgaggagtggttgctccgagagaatattgaagcaaagccaaggaatctcaatgtatcctttcaggggtgcgggatggactccttatcggtgcgcgcaatggacaccgataccctgacacaagttaaggaaaagatactggaggctttttgtaagaatgtcccttactcccagtggccacgtgctgaagatgtggacctcgagtggtttgcatccagcactcagtcctacattttacgggacctggatgatacgtctgtggttgaagacgggaggaaaaagttgaatacccttgctcactacaagatccccgaaggcgcatcgctggcgatgtcccttatcgataaaaaggataacactctcggtcgggtcaaagatttggacaccgaaaaatattttcacctcgttttgcccactgacgagctggcagaaccaaaaaagagccatcgccagtcccacaggaagaaagttctgccagagatctacctgactcggctgctcagcactaaggggactctgcagaaattcttggatgacttatttaaggctatacttagcatacgagaggataaacctcccctggcagtgaagtacttttttgattttctggaagagcaggccgaaaagcggggaatctccgaccctgacaccctccacatttggaaaacaaataggtggagaccaagcagtcccgtcctcggagaacaccccgaggagcctccggtgtgcttata

SEQ ID NO: 301362 - DNA, 5358 bp, Artificial Sequence
  derived and/or modified sequence
atggcccccagagccgccggcggcgcccccctgagcgccagagccgccgccgccagccccccccccttccagaccccccccagatgccccgtgcccctgctgctgctgctgctgctgggcgccgccagagccggcgccctggagatccagagaagattccccagccccacccccaccaacaacttcgccctggacggcgccgccggcaccgtgtacctggccgccgtgaacagactgtaccagctgagcggcgccaacctgagcctggaggccgaggccgccgtgggccccgtgcccgacagccccctgtgccacgccccccagctgccccaggccagctgcgagcaccccagaagactgaccgacaactacaacaagatcctgcagctggaccccggccagggcctggtggtggtgtgcggcagcatctaccagggcttctgccagctgagaagaagaggcaacatcagcgccgtggccgtgagattcccccccgccgccccccccgccgagcccgtgaccgtgttccccagcatgctgaacgtggccgccaaccaccccaacgccagcaccgtgggcctggtgctgccccccgccgccggcgccggcggcagcagactgctggtgggcgccacctacaccggctacggcagcagcttcttccccagaaacagaagcctggaggaccacagattcgagaacacccccgagatcgccatcagaagcctggacaccagaggcgacctggccaagctgttcaccttcgacctgaaccccagcgacgacaacatcctgaagatcaagcagggcgccaaggagcagcacaagctgggcttcgtgagcgccttcctgcaccccagcgaccccccccccggcgcccagagctacgcctacctggccctgaacagcgaggccagagccggcgacaaggagagccaggccagaagcctgctggccagaatctgcctgccccacggcgccggcggcgacgccaagaagctgaccgagagctacatccagctgggcctgcagtgcgccggcggcgccggcagaggcgacctgtacagcagactggtgagcgtgttccccgccagagagagactgttcgccgtgttcgagagaccccagggcagccccgccgccagagccgcccccgccgccctgtgcgccttcagattcgccgacgtgagagccgccatcagagccgccagaaccgcctgcttcgtggagcccgcccccgacgtggtggccgtgctggacagcgtggtgcagggcaccggccccgcctgcgagagaaagctgaacatccagctgcagcccgagcagctggactgcggcgccgcccacctgcagcaccccctgagcatcctgcagcccctgaaggccacccccgtgttcagagcccccggcctgaccagcgtggccgtggccagcgtgaacaactacaccgccgtgttcctgggcaccgtgaacggcagactgctgaagatcaacctgaacgagagcatgcaggtggtgagcagaagagtggtgaccgtggcctacggcgagcccgtgcaccacgtgatgcagttcgaccccgccgacagcggctacctgtacctgatgaccagccaccagatggccagagtgaaggtggccgcctgcaacgtgcacagcacctgcggcgactgcgtgggcgccgccgacgcctactgcggctggtgcgccctggagaccagatgcaccctgcagcaggactgcaccaacagcagccagcagcacttctggaccagcgccagcgagggccccagcagatgccccgccatgaccgtgctgcccagcgagatcgacgtgagacaggagtaccccggcatgatcctgcagatcagcggcagcctgcccagcctgagcggcatggagatggcctgcgactacggcaacaacatcagaaccgtggccagagtgcccggccccgccttcggccaccagatcgcctactgcaacctgctgcccagagaccagttcccccccttcccccccaaccaggaccacgtgaccgtggagatgagcgtgagagtgaacggcagaaacatcgtgaaggccaacttcaccatctacgactgcagcagaaccgcccaggtgtacccccacaccgcctgcaccagctgcctgagcgcccagtggccctgcttctggtgcagccagcagcacagctgcgtgagcaaccagagcagatgcgaggccagccccaaccccaccagcccccaggactgccccagaaccctgctgagccccctggcccccgtgcccaccggcggcagccagaacatcctggtgcccctggccaacaccgccttcttccagggcgccgccctggagtgcagcttcggcctggaggagatcttcgaggccgtgtgggtgaacgagagcgtggtgagatgcgaccaggtggtgctgcacaccaccagaaagagccaggtgttccccctgagcctgcagctgaagggcagacccgccagattcctggacagccccgagcccatgaccgtgatggtgtacaactgcgccatgggcagccccgactgcagccagtgcctgggcagagaggacctgggccacctgtgcatgtggagcgacggctgcagactgagaggccccctgcagcccatggccggcacctgccccgcccccgagatccacgccatcgagcccctgagcggccccctggacggcggcaccctgctgaccatcagaggcagaaacctgggcagaagactgagcgacgtggcccacggcgtgtggatcggcggcgtggcctgcgagcccctgcccgacagatacaccgtgagcgaggagatcgtgtgcgtgaccggccccgcccccggccccctgagcggcgtggtgaccgtgaacgccagcaaggagggcaagagcagagacagattcagctacgtgctgcccctggtgcacagcctggagcccaccatgggccccaaggccggcggcaccagaatcaccatccacggcaacgacctgcacgtgggcagcgagctgcaggtgctggtgaacgacaccgacccctgcaccgagctgatgagaaccgacaccagcatcgcctgcaccatgcccgagggcgccctgcccgcccccgtgcccgtgtgcgtgagattcgagagaagaggctgcgtgcacggcaacctgaccttctggtacatgcagaaccccgtgatcaccgccatcagccccagaagaagccccgtgagcggcggcagaaccatcaccgtggccggcgagagattccacatggtgcagaacgtgagcatggccgtgcaccacatcggcagagagcccaccctgtgcaaggtgctgaacagcaccctgatcacctgccccagccccggcgccctgagcaacgccagcgcccccgtggacttcttcatcaacggcagagcctacgccgacgaggtggccgtggccgaggagctgctggaccccgaggaggcccagagaggcagcagattcagactggactacctgcccaacccccagttcagcaccgccaagagagagaagtggatcaagcaccaccccggcgagcccctgaccctggtgatccacaaggagcaggacagcctgggcctgcagagccacgagtacagagtgaagatcggccaggtgagctgcgacatccagatcgtgagcgacagaatcatccactgcagcgtgaacgagagcctgggcgccgccgtgggccagctgcccatcaccatccaggtgggcaacttcaaccagaccatcgccaccctgcagctgggcggcagcgagaccgccatcatcgtgagcatcgtgatctgcagcgtgctgctgctgctgagcgtggtggccctgttcgtgttctgcaccaagagcagaagagccgagagatactggcagaagaccctgctgcagatggaggagatggagagccagatcagagaggagatcagaaagggcttcgccgagctgcagaccgacatgaccgacctgaccaaggagctgaacagaagccagggcatccccttcctggagtacaagcacttcgtgaccagaaccttcttccccaagtgcagcagcctgtacgaggagagatacgtgctgcccagccagaccctgaacagccagggcagcagccaggcccaggagacccaccccctgctgggcgagtggaagatccccgagagctgcagacccaacatggaggagggcatcagcctgttcagcagcctgctgaacaacaagcacttcctgatcgtgttcgtgcacgccctggagcagcagaaggacttcgccgtgagagacagatgcagcctggccagcctgctgaccatcgccctgcacggcaagctggagtactacaccagcatcatgaaggagctgctggtggacctgatcgacgccagcgccgccaagaaccccaagctgatgctgagaagaaccgagagcgtggtggagaagatgctgaccaactggatgagcatctgcatgtacagctgcctgagagagaccgtgggcgagcccttcttcctgctgctgtgcgccatcaagcagcagatcaacaagggcagcatcgacgccatcaccggcaaggccagatacaccctgagcgaggagtggctgctgagagagaacatcgaggccaagcccagaaacctgaacgtgagcttccagggctgcggcatggacagcctgagcgtgagagccatggacaccgacaccctgacccaggtgaaggagaagatcctggaggccttctgcaagaacgtgccctacagccagtggcccagagccgaggacgtggacctggagtggttcgccagcagcacccagagctacatcctgagagacctggacgacaccagcgtggtggaggacggcagaaagaagctgaacaccctggcccactacaagatccccgagggcgccagcctggccatgagcctgatcgacaagaaggacaacaccctgggcagagtgaaggacctggacaccgagaagtacttccacctggtgctgcccaccgacgagctggccgagcccaagaagagccacagacagagccacagaaagaaggtgctgcccgagatctacctgaccagactgctgagcaccaagggcaccctgcagaagttcctggacgacctgttcaaggccatcctgagcatcagagaggacaagccccccctggccgtgaagtacttcttcgacttcctggaggagcaggccgagaagagaggcatcagcgaccccgacaccctgcacatctggaagaccaacagatggagacccagcagccccgtgctgggcgagcaccccgaggagccccccgtgtgcctgtag

SEQ ID NO: 301363 - protein, 104 aa, Artificial Sequence
  derived and/or modified sequence
MYFVFIQLLSSGSAWFAIILMVVTCLFLDIIKKVFDRHLHPTSTEKAQMYSNTVALSDEFIALQPLSRARNQLSKLRWKKIRVQSAQHMNLLKASTEGRTVGTC

SEQ ID NO: 301364 - DNA, 315 bp, Artificial Sequence
  derived and/or modified sequence
atgtattttgtcttcatccaactgttaagcagtggatcagcgtggttcgcaatcatccttatggtagtgacctgtctctttctggacattatcaaaaaagtcttcgacaggcacctgcatccaaccagcactgaaaaagcacagatgtattccaatacagttgctctatccgacgagtttatcgcgctgcagcccctgtcaagggcccggaaccagctatctaagttacgttggaagaagatccgggtgcagagtgcacaacacatgaatctgttaaaagcatctactgagggacggactgttggtacttgttag

SEQ ID NO: 301365 - DNA, 315 bp, Artificial Sequence
  derived and/or modified sequence
atgtactttgtgttcatccagctgctgagcagcggcagcgcctggtttgccatcatcctgatggtggtgacctgcctcttcctggacatcatcaagaaggtgtttgacagacacctgcaccccaccagcacagagaaggcccagatgtacagcaacacagtggccctgagtgatgagttcatcgccctgcagcccctgagccgggccaggaaccagctgagcaagctgcgctggaagaagatccgggtgcagagcgcccagcacatgaacctgctgaaggccagcacagagggccgcacagtgggcacctgctag

SEQ ID NO: 301366 - DNA, 315 bp, Artificial Sequence
  derived and/or modified sequence
atgtacttcgtgttcatccagctgctgagcagcggcagcgcctggttcgctataattctgatggtggttacgtgcctgttcctagacatcatcaagaaggtctttgatcgccatttacatcctacgtctacggagaaagcccaaatgtattcaaataccgtggccttgtcagacgaattcatcgcattgcaacccttgagcagagctcgcaatcagctgagcaagttgagatggaaaaagatccgcgtgcagagcgctcagcacatgaacctgctcaaggccagcactgagggccgcacagttggaacttgctag

SEQ ID NO: 301367 - DNA, 315 bp, Artificial Sequence
  derived and/or modified sequence
atgtattttgtttttatccagctgctgagctcaggatctgcttggtttgctattattctcatggtcgtgacctgtcttttccttgacattatcaaaaaggtgtttgaccgtcatctgcaccctacgtcaaccgagaaggcgcagatgtactctaatactgtggccctgtcagacgaattcatagcactgcagcctctgagtagggcaaggaaccaattgagcaaactcaggtggaaaaagataagggtgcaaagcgcgcagcacatgaacctcttaaaggcctctaccgaaggacgcacagtggggacttgctag

SEQ ID NO: 301368 - DNA, 2218 bp, Artificial Sequence
  derived and/or modified sequence
taatggcatgaaataccaagaaattaatggtagacttgtacccgaaggaccaacaccagactcttcagaaggaaacttatcttatcttagtagtttatcccatcttaacaacttatcccatcttacaaccagttcctctttcagaaccagtcctgaaaatgaaactgaactaattaaagaacatgatctcttctttaaagcagtcagtctctgtcacactgtacagattagcaatgttcaaactgactgcactggtgatggtccctggcaatccaacctggcaccatcgcagttggagtactatgcatcttcaccagatgaaaaggctctagtagaagctgctgcaaggattggtattgtgtttattggcaattctgaagaaactatggaggttaaaactcttggaaaactggaacggtacaaactgcttcatattctggaatttgattcagatcgtaggagaatgagtgtaattgttcaggcaccttcaggtgagaagttattatttgctaaaggagctgagtcatcaattctccctaaatgtataggtggagaaatagaaaaaaccagaattcatgtagatgaatttgctttgaaagggctaagaactctgtgtatagcatatagaaaatttacatcaaaagagtatgaggaaatagataaacgcatatttgaagccaggactgccttgcagcagcgggaagagaaattggcagctgttttccagttcatagagaaagacctgatattacttggagccacagcagtagaagacagactacaagataaagttcgagaaactattgaagcattgagaatggctggtatcaaagtatgggtacttactggggataaacatgaaacagctgttagtgtgagtttatcatgtggccattttcatagaaccatgaacatccttgaacttataaaccagaaatcagacagcgagtgtgctgaacaattgaggcagcttgccagaagaattacagaggatcatgtgattcagcatgggctggtagtggatgggaccagcctatctcttgcactcagggagcatgaaaaactatttatggaagtttgcagaaattgttcagctgtattatgctgtcgtatggctccactgcagaaagcaaaagtaataagactaataaaaatatcacctgagaaacctataacattggctgttggtgatggtgctaatgacgtaagcatgatacaagaagcccatgttggcataggaatcatgggtaaagaaggaagacaggctgcaagaaacagtgactatgcaatagccagatttaagttcctctccaaattgctttttgttcatggtcatttttattatattagaatagctacccttgtacagtattttttttataagaatgtgtgctttatcacaccccagtttttatatcagttctactgtttgttttctcagcaaacattgtatgacagcgtgtacctgactttatacaatatttgttttacttccctacctattctgatatatagtcttttggaacagcatgtagaccctcatgtgttacaaaataagcccaccctttatcgagacattagtaaaaaccgcctcttaagtattaaaacatttctttattggaccatcctgggcttcagtcatgcctttattttcttttttggatcctatttactaatagggaaagatacatctctgcttggaaatggccagatgtttggaaactggacatttggcactttggtcttcacagtcatggttattacagtcacagtaaagatggctctggaaactcatttttggacttggatcaaccatctcgttacctggggatctattatattttattttgtattttccttgttttatggagggattctctggccatttttgggctcccagaatatgtattttgtgtttattcagctcctgtcaagtggttctgcttggtttgccataatcctcatggttgttacatgtctatttcttgatatcataaagaaggtctttgaccgacacctccaccctacaagtactgaaaaggcacagatgtactccaacacagttgctttaagtgacgagttcatcgcactgcagccattgtcgagggcaaggaatcagctgagcaaacttagatggaagaagataagggttcagtcagctcagcatatgaatttgctgaaagccagcacagaggggaggacagtaggcacctgctag

SEQ ID NO: 301369 - DNA, 315 bp, Artificial Sequence
  derived and/or modified sequence
atgtacttcgtgttcatccagctgctgagcagcggcagcgcctggttcgccatcatcctgatggtggtgacctgcctgttcctggacatcatcaagaaggtgttcgacagacacctgcaccccaccagcaccgagaaggcccagatgtacagcaacaccgtggccctgagcgacgagttcatcgccctgcagcccctgagcagagccagaaaccagctgagcaagctgagatggaagaagatcagagtgcagagcgcccagcacatgaacctgctgaaggccagcaccgagggcagaaccgtgggcacctgctag

SEQ ID NO: 301370 - protein, 1195 aa, Artificial Sequence
  derived and/or modified sequence
MTVMSLSRDLKDDFHSDTVLSILNEQRIRGILCDVTIIVEDTKFKAHSNVLAASSLYFKNIFWSHTICISSHVLELDDLKAEVFTEILNYIYSSTVVVKRQETVTDLAAAGKKLGISFLEDLTDRNFSNSPGPYVFCITEKGVVKEEKNEKRHEEPAITNGPRITNAFSIIETENSNNMFSPLDLRASFKKVSDSMRTASLCLERTDVCHEAEPVRTLAEHSYAVSSVAEAYRSQPVREHDGSSPGNTGKENCEALAAKPKTCRKPKTFSIPQDSDSATENIPPPPVSNLEVNQERSPQPAAVLTRSKSPNNEGDVHFSREDENQSSDVPGPPAAEVPPLVYNCSCCSKAFDSSTLLSAHMQLHKPTQEPLVCKYCNKQFTTLNRLDRHEQICMRSSHMPIPGGNQRFLENYPTIGQNGGSFTGPEPLLSENRIGEFSSTGSTLPDTDHMVKFVNGQMLYSCVVCKRSYVTLSSLRRHANVHSWRRTYPCHYCNKVFALAEYRTRHEIWHTGERRYQCIFCLETFMTYYILKNHQKSFHAIDHRLSISKKTANGGLKPSVYPYKLYRLLPMKCKRAPYKSYRNSSYENARENSQMNESAPGTYVVQNPHSSELPTLNFQDTVNTLTNSPAIPLETSACQDIPTSANVQNAEGTKWGEEALKMDLDNNFYSTEVSVSSTENAVSSDLRAGDVPVLSLSNSSENAASVISYSGSAPSVIVHSSQFSSVIMHSNAIAAMTSSNHRAFSDPAVSQSLKDDSKPEPDKVGRFASRPKSIKEKKKTTSHTRGEIPEESNYVADPGGSLSKTTNIAEETSKIETYIAKPALPGTSTNSNVAPLCQITVKIGNEAIVKRHILGSKLFYKRGRRPKYQMQEEPLPQGNDPEPSGDSPLGLCQSECMEMSEVFDDASDQDSTDKPWRPYYNYKPKKKSRQLKKMRKVNWRKEHGNRSPSHKCKYPAELDCAVGKAPQDKPFEEEETKEMPKLQCELCDGDKAVGAGNQGRPHRHLTSRPYACELCAKQFQSPSTLKMHMRCHTGEKPYQCKTCGRCFSVQGNLQKHERIHLGLKEFVCQYCNKAFTLNETLKIHERIHTGEKRYHCQFCFQRFLYLSTKRNHEQRHIREHNGKGYACFQCPKICKTAAALGMHQKKHLFKSPSQQEKIGDVCHENSNPLENQHFIGSEDNDQKDNIQTGVENVVL

SEQ ID NO: 301371 - protein, 771 aa, Artificial Sequence
  derived and/or modified sequence
MTVMSLSRDLKDDFHSDTVLSILNEQRIRGILCDVTIIVEDTKFKAHSNVLAASSLYFKNIFWSHTICISSHVLELDDLKAEVFTEILNYIYSSTVVVKRQETVTDLAAAGKKLGISFLEDLTDRNFSNSPGPYVFCITEKGVVKEEKNEKRHEEPAITNGPRITNAFSIIETENSNNMFSPLDLRASFKKVSDSMRTASLCLERTDVCHEAEPVRTLAEHSYAVSSVAEAYRSQPVREHDGSSPGNTGKENCEALAAKPKTCRKPKTFSIPQDSDSATENIPPPPVSNLEVNQERSPQPAAVLTRSKSPNNEGDVHFSREDENQSSDVPGPPAAEVPPLVYNCSCCSKAFDSSTLLSAHMQLHKPTQEPLVCKYCNKQFTTLNRLDRHEQICMRSSHMPIPGGNQRFLENYPTIGQNGGSFTGPEPLLSENRIGEFSSTGSTLPDTDHMVKFVNGQMLYSCVVCKRSYVTLSSLRRHANVHSWRRTYPCHYCNKVFALAEYRTRHEIWHTGERRYQCIFCLETFMTYYILKNHQKSFHAIDHRLSISKKTANGGLKPSVYPYKLYRLLPMKCKRAPYKSYRNSSYENARENSQMNESAPGTYVVQNPHSSELPTLNFQDTVNTLTNSPAIPLETSACQDIPTSANVQNAEGTKWGEEALKMDLDNNFYSTEVSVSSTENAVSSDLRAGDVPVLSLSNSSENAASVISYSGSAPSVIVHSSQFSSVIMHSNAIAAMTSSNHRAFSDPAVSQSLKDDSKPEPDKVGRFASRP

SEQ ID NO: 301372 - protein, 146 aa, Artificial Sequence
  derived and/or modified sequence
MTVMSLSRDLKDDFHSDTVLSILNEQRIRGILCDVTIIVEDTKFKAHSNVLAASSLYFKNIFWSHTICISSHVLELDDLKAEVFTEILNYIYSSTVVVKRQETVTDLAAAGKKLGISFLEDLTDRNFSNSPGPYVFCITEKGVVKE

SEQ ID NO: 301373 - protein, 210 aa, Artificial Sequence
  derived and/or modified sequence
MTVMSLSRDLKDDFHSDTVLSILNEQRIRGILCDVTIIVEDTKFKAHSNVLAASSLYFKNIFWSHTICISSHVLELDDLKAEVFTEILNYIYSSTVVVKRQETVTDLAAAGKKLGISFLEDLTDRNFSNSPGPYVFCITEKGVVKEEKNEKRHEEPAITNGPRITNAFSIIETENSNNMFSPLDLRASFKKVSDSMRTASLCLERTDVCH

SEQ ID NO: 301374 - DNA, 81 bp, Artificial Sequence
  derived and/or modified sequence
taattgattcgaatggaatggaatagaatggaattgaatggaatggaccataatggattggactttaatagaaagggcatg

SEQ ID NO: 301375 - DNA, 105 bp, Artificial Sequence
  derived and/or modified sequence
atgaccgtgatgagcctgagcagagacctgaaggacgacttccacagcgacaccgtgctgagcatcctgaacgagcagagaatcagaggcatcctgtgcgactag

SEQ ID NO: 301376 - DNA, 285 bp, Artificial Sequence
  derived and/or modified sequence
atgaccgtgatgagcctgagcagagacctgaaggacgacttccacagcgacaccgtgctgagcatcctgaacgagcagagaatcagaggcatcctgtgcgacgtgaccatcatcgtggaggacaccaagttcaaggcccacagcaacgtgctggccgccagcagcctgtacttcaagaacatcttctggagccacaccatctgcatcagcagccacgtgctggagctggacgacctgaaggccgaggtgttcaccgagatcctgaactacatctacagcagctag

SEQ ID NO: 301377 - DNA, 213 bp, Artificial Sequence
  derived and/or modified sequence
atgaccgtgatgagcctgagcagagacctgaaggacgacttccacagcgacaccgtgctgagcatcctgaacgagcagagaatcagaggcatcctgtgcgacgtgaccatcatcgtggaggacaccaagttcaaggcccacagcaacgtgctggccgccagcagcctgtacttcaagaacatcttctggagccacaccatctgcatcagctag

SEQ ID NO: 301378 - DNA, 105 bp, Artificial Sequence
  derived and/or modified sequence
atgaccgttatgtccctctctagagaccttaaggacgactttcattcagacacggtgctcagcatcttgaacgaacagcggatcagaggcattctgtgcgactag

SEQ ID NO: 301379 - DNA, 285 bp, Artificial Sequence
  derived and/or modified sequence
atgacagtgatgtccctcagccgagacctcaaggacgattttcattccgataccgtgctctccatcctgaacgaacagcggattcgcggcattctctgcgacgtcacaataattgtcgaagatacgaaatttaaggctcacagtaacgtgctagcagcctcctctttatatttcaaaaacattttctggtcacatactatttgtatttctagtcacgtgttggaacttgatgacttgaaggcggaggtgtttactgagattctaaactacatttattcaagctag

SEQ ID NO: 301380 - DNA, 213 bp, Artificial Sequence
  derived and/or modified sequence
atgaccgttatgagcctcagcagggatctcaaagatgacttccactcggacactgtgctgagtatcctcaatgagcagcgcattcgcggaattctctgcgacgtcacaatcatagtcgaggatacgaaattcaaggcccactcaaatgtgctggcagcaagcagcctgtatttcaagaacatattttggagccatacaatatgcatctcatag

SEQ ID NO: 301381 - DNA, 105 bp, Artificial Sequence
  derived and/or modified sequence
atgacagtgatgagcctgagccgggacctgaaggatgacttccacagcgacacagtgctgagcatcctgaatgagcagaggatccggggcatcctgtgtgactag

SEQ ID NO: 301382 - DNA, 285 bp, Artificial Sequence
  derived and/or modified sequence
atgacagtgatgagcctgagccgggacctgaaggatgacttccacagcgacacagtgctgagcatcctgaatgagcagaggatccggggcatcctgtgtgatgtgaccatcatcgtggaggacaccaagttcaaggcccacagcaatgtgctggccgccagcagcctgtacttcaagaacatcttctggagccacaccatctgcatcagcagccacgtgctggagctggatgacctgaaggccgaggtgttcacagagatcctgaactacatctacagcagctag

SEQ ID NO: 301383 - DNA, 213 bp, Artificial Sequence
  derived and/or modified sequence
atgacagtgatgagcctgagccgggacctgaaggatgacttccacagcgacacagtgctgagcatcctgaatgagcagaggatccggggcatcctgtgtgatgtgaccatcatcgtggaggacaccaagttcaaggcccacagcaatgtgctggccgccagcagcctgtacttcaagaacatcttctggagccacaccatctgcatctcctag

SEQ ID NO: 301384 - DNA, 105 bp, Artificial Sequence
  derived and/or modified sequence
atgaccgtgatgagcctgagccgggacctgaaggacgacttccactcagacacagtcctctcaatcctgaatgaacagaggattcgggggatcctgtgcgattag

SEQ ID NO: 301385 - DNA, 285 bp, Artificial Sequence
  derived and/or modified sequence
atgaccgtgatgagcctgagccgggacctgaaggacgacttccactcagacacggtcttaagtattctgaatgaacagagaattcgggggatactgtgcgatgtgaccattattgttgaagatactaagtttaaggcacactccaacgttcttgccgccagcagtctgtacttcaaaaacatcttctggagtcatacgatttgcatcagcagccacgtgttggaactggatgacttgaaggcagaagttttcacagagattcttaactacatctactcaagctag

SEQ ID NO: 301386 - DNA, 213 bp, Artificial Sequence
  derived and/or modified sequence
atgaccgtgatgagcctgagccgggacctgaaggacgacttccactcagatacagtgctcagtattcttaacgaacagcgcattagaggaattctgtgtgacgtaaccatcatagttgaggatactaaatttaaagcccatagtaatgttcttgccgccagcagcttgtatttcaagaacattttctggagtcatacgatttgcatcagctag

SEQ ID NO: 301387 - DNA, 105 bp, Artificial Sequence
  derived and/or modified sequence
atgaccgtcatgtctctatcacgcgatctcaaggatgatttccatagtgacaccgtcctgtctatcctaaatgagcaacgaatccggggaatcctatgcgattag

SEQ ID NO: 301388 - DNA, 285 bp, Artificial Sequence
  derived and/or modified sequence
atgacggtgatgtccttaagcagggacctgaaggatgactttcacagtgatacggtcctgtcaattcttaacgagcagcggatacgcggaatcctgtgcgacgtaaccatcatcgtcgaggacaccaagttcaaagcgcacagcaatgtcctcgccgcatcctccttgtacttcaagaacatcttctggagtcacactatttgtatctcgagtcacgttctggagctcgacgacttaaaggctgaagtgtttaccgaaatccttaattacatctactcaagctag

SEQ ID NO: 301389 - DNA, 213 bp, Artificial Sequence
  derived and/or modified sequence
atgacagtcatgtctctcagccgggacctcaaagatgatttccactccgacaccgtgttgagcattctgaacgagcagcgcatcaggggaatcctgtgcgatgtcacaatcatcgtggaggataccaagttcaaggcacatagtaatgtcttagctgccagctccctgtatttcaagaacatcttctggagtcatactatttgcatttcatag

SEQ ID NO: 301390 - DNA, 859 bp, Artificial Sequence
  derived and/or modified sequence
aggctgcccagaggggctccagcataagcaggagacatggagactcttgcctccatcatggaggaggttcacaccagaagccagctctgcccttggagactctcttcccccagtgctcccctgaagcttcacactcaccagtctcatgctgcaccctgaccggcaggtccctagcatgagccccataatccctggggactgcattatcacagaccagtaataagaagatgacagtcatgtccctttccagggacctcaaggacgactttcacagtgacacggtactctccatcttaaatgagcagcgcattcggggcattttatgcgatgtcactatcattgtggaagataccaaatttaaagcccatagcaatgttctggcagcttcaagcctgtattttaaaaatatcttttggagccatacaatctgtatttccagccacgtcctggagctggacgatctcaaagctgaagtgtttactgaaatacttaattatatctacagttccacagtcgttgtcaagagacaggaaacagtcactgatctcgcagctgcaggaaaaaagctgggaatatcgttcttggaagaccttactgatcgcaacttctcaaattccccgggtccctatgtattctgtattactgaaaagggagtggttaaagaagaaaaaaatgaaaaaaggcatgaagaaccagccatcactaatgggccaaggatcacaaatgcattttccatcatcgaaacagaaaatagtaataacatgttttccccgctggacttgagggcaagtttcaaaaaggtctccgactccatgagaacagctagcctttgcctggagaggacggacgtctgccacga

SEQ ID NO: 301391 - protein, 134 aa, Artificial Sequence
  derived and/or modified sequence
MEISKKIKTQWTSLGLEDVQFVNYSVLLDLPGPSPSTVTLSSSGQCFHPNGQPCSEEARKDSSQDLLYSYAAYSAKGTLKAEVIDVSYGMADDLKRIRKIKNVTNQIALLKLGKLPLLYKMKVLDKADQTSPLY

SEQ ID NO: 301392 - DNA, 716 bp, Artificial Sequence
  derived and/or modified sequence
acctcagggtcattagaaagccaccacagatctaggcatctaagcaggaataggagaggaaaggcaactgtagccacattaatcacttttatcaggaagataaatgcttttcccgaatctttcaacaggctttcattttacattgggcatatttttgtcatatagccttccctagctgcaagggaggcttttcaaacttctttatggaattcagcaagaaagtaaagaggataaaatgaagcacactggatgaatggtgtggcttgatgaaattaagaaatttggtacaactatataaaaatgaagatgacatggaaatttcaaagaagattaagactcagtggacctctttgggcctagaagatgtacagtttgtaaattactctgtgctgcttgatctgccaggcccttctcccagcactgtgactctgagcagcagtggtcaatgctttcatcctaatggccagccttgcagtgaagaagccagaaaagatagcagccaagacctgctctattcatatgcagcctattctgccaaaggaactctcaaggctgaagtcatcgatgtgagttatggaatggcagatgatttaaaaaggattaggaaaataaaaaacgtaacaaatcagatcgcactcctgaaattaggaaaattgccactgctttataagatgaaagttttagacaaagccgatcaaacctcacctctctattag

SEQ ID NO: 301393 - DNA, 405 bp, Artificial Sequence
  derived and/or modified sequence
atggagattagtaagaaaattaaaacccagtggacaagcctggggttagaggatgtgcagtttgtgaattattctgttttattagacttgccaggcccttctccaagcaccgttacccttagtagctccgggcagtgcttccatcccaacggtcagccctgttccgaagaagcgcggaaggattcctcccaggacctattgtatagctacgctgcatatagtgcgaaaggcacattgaaggccgaggtcatagacgttagctacggcatggccgatgacttgaagcggattagaaaaataaaaaacgtaacaaaccagatcgctttgcttaaattagggaagctacctctgctctacaagatgaaagtcctcgataaagctgaccaaacgagccccttgtattag

SEQ ID NO: 301394 - DNA, 405 bp, Artificial Sequence
  derived and/or modified sequence
atggagatcagcaagaagatcaagacccagtggaccagcctgggcctggaggatgtgcagtttgtgaactacagcgtgctgctggacctgcccggccccagccccagcacagtgaccctgagcagcagcggccagtgcttccaccccaacggccagccctgcagcgaggaggccaggaaggacagcagccaggacctgctgtacagctatgctgcctacagcgccaagggcaccctgaaggccgaggtgattgatgtgtcctatggcatggctgatgacctgaagaggatcaggaagatcaagaatgtgaccaaccagatcgccctgctgaagctgggcaagctgcccctgctgtacaagatgaaggtgctggacaaggctgaccagaccagccccctgtactag

SEQ ID NO: 301395 - DNA, 405 bp, Artificial Sequence
  derived and/or modified sequence
atggagatcagcaagaagatcaagacccagtggaccagcctgggccttgaggatgtccagtttgtcaactatagtgtgctacttgaccttcctggaccatcaccgtccaccgttactttgtcatccagcggccagtgcttccacccaaatggccagccctgtagtgaggaagctagaaaggactcttcccaggatcttctctattcgtatgctgcttatagcgctaagggtactctgaaagctgaagtcattgatgtgagctacggcatggccgatgacctaaaaaggatcagaaaaattaaaaatgtgaccaatcaaattgctctgctaaaacttggcaagctgccgctgctctacaaaatgaaggtcctggacaaggccgaccaaacgtcacctctctactag

SEQ ID NO: 301396 - DNA, 405 bp, Artificial Sequence
  derived and/or modified sequence
atggagatctctaagaaaatcaaaacacagtggacatccctgggcctggaggatgtacagtttgtgaactactcagtgctgctcgacttgcctgggccaagtcctagcacagtgacactgagctccagtggccagtgtttccatccaaacggacaaccatgtagcgaggaggcccgaaaggatagctcccaggacctgttgtattcttacgctgcctacagcgctaagggcactctgaaggcagaagtcattgacgtctcctacggcatggcagatgatctgaagcgtattcgaaaaattaagaatgtcactaatcagatcgcactactgaaactgggtaaactgcctcttctgtacaagatgaaagtgctcgacaaagctgaccaaaccagtcctctgtattag

SEQ ID NO: 301397 - DNA, 405 bp, Artificial Sequence
  derived and/or modified sequence
atggagatcagcaagaagatcaagacccagtggaccagcctgggcctggaggacgtgcagttcgtgaactacagcgtgctgctggacctgcccggccccagccccagcaccgtgaccctgagcagcagcggccagtgcttccaccccaacggccagccctgcagcgaggaggccagaaaggacagcagccaggacctgctgtacagctacgccgcctacagcgccaagggcaccctgaaggccgaggtgatcgacgtgagctacggcatggccgacgacctgaagagaatcagaaagatcaagaacgtgaccaaccagatcgccctgctgaagctgggcaagctgcccctgctgtacaagatgaaggtgctggacaaggccgaccagaccagccccctgtactag

SEQ ID NO: 301398 - DNA, 1332 bp, Artificial Sequence
  derived and/or modified sequence
aaccagtaccccccccccatgctggaggacgcctgcagactgatcaacctgggcggcgagaacatccagaacgacggcttccagttcgtgaccgagctgcaggaggacttcctgggcggcaacggcttcatcggccaggagctgaacagcggcagagagagccccttcgtgaagaccgaggacaacggcagcgactacctggtgtacctgcccagccagatgttcgagccccagaagctgatgatcaactacgagaaggaccagaagagcgccgagatcgccagcctgaccagcggccacgagaactacggcagaaaggaggagcccgaccacacctacgagcccggcgacgtgagcctgcaggagtactacatggacgtggccttcctgatcgacgccagccagagagtgggcagcgacgagttcaaggaggtgaaggccttcatcaccagcgtgctggactacttccacatcgcccccacccccctgaccagcaccctgggcgacagagtggccgtgctgagctacagcccccccggctacatgcccaacaccgaggagtgccccgtgtacctggagttcgacctggtgacctacaacagcatccaccagatgaagcaccacctgcaggacagccagcagctgaacggcgacgtgttcatcggccacgccctgcagtggaccatcgacaacgtgttcgtgggcacccccaacctgagaaagaacaaggtgatcttcgtgatcagcgccggcgagaccaacagcctggacaaggacgtgctgagaaacgtgagcctgagagccaagtgccagggctacagcatcttcgtgttcagcttcggccccaagcacaacgacaaggagctggaggagctggccagccaccccctggaccaccacctggtgcagctgggcagaacccacaagcccgactggaactacatcatcaagttcgtgaagcccttcgtgcacctgatcagaagagccatcaacaagtaccccaccgaggacatgaaggccacctgcgtgaacatgaccagccccaaccccgagaacggcggcaccgagaacaccgtgctgctgctgcccggcatctacgagatcaagaccgagaacggcgacctgttcgacgagttcgacagccaggcccagcacctgctggtgctgggcaacaaccacagcagcggcagcgagaccgccaccgacctgatgcagaagctgtacctgctgttcagcaccgagaagctggccatgaaggacaaggagaaggcccacctggaggagatcagcgccctggtggtggacaagcagcaggagaaggaggacctgtag

SEQ ID NO: 301399 - DNA, 1332 bp, Artificial Sequence
  derived and/or modified sequence
aaccagtatccacccccaatgctggaggacgcatgtcgtttgattaacttaggcggggagaacattcagaatgacggatttcagtttgtgactgagctgcaggaggacttcctcggcggcaacggctttattggacaagagctgaattccggacgtgagagccctttcgtgaagacagaagacaacggcagcgactatctcgtttatctgccatctcagatgttcgaacctcagaaactgatgatcaactatgagaaggatcagaaatcagctgaaatcgcctcactgacaagcggacatgagaactacggacgaaaggaggaacctgaccatacttacgagcccggcgatgtatcgctgcaggagtactatatggatgttgcctttctaattgacgcttcgcagagagtcgggagcgatgaattcaaggaggtaaaggctttcataacctctgtgctagattattttcacattgctccaacacccctcacttcaaccctgggagacagagtcgcggtgctttcatactcccctccaggatatatgccgaacaccgaagagtgtcccgtgtacctcgagtttgacctggtgacctataactcaattcaccagatgaagcatcacctgcaggattcacagcagctaaatggggatgtgtttattggacacgcgctgcaatggacaattgataatgtgtttgttgggacccccaatctgcgcaagaacaaagtgatctttgtgattagcgccggcgaaacaaacagcctggataaggatgttttaaggaacgtgtctctgcgcgcaaaatgccaggggtactctatcttcgttttttcattcggtcctaagcacaatgacaaagagctcgaagagcttgccagtcacccactggaccatcacctggtgcagttgggtcgtacgcacaaaccagactggaattacataatcaagttcgtcaagccattcgtacacctgattcgcagagctatcaataagtaccccacggaagatatgaaagccacatgtgttaatatgacctcaccgaaccctgagaacggaggtaccgagaacactgtcctcctccttcctggtatttatgagatcaagacagagaacggagatctctttgacgagtttgactcgcaggcccagcatctgcttgttctgggcaacaaccacagtagcggtagcgaaactgccactgatctgatgcagaagctgtacttgttgttcagcaccgaaaaattagcaatgaaggataaagaaaaagcccacctcgaagagatatctgctttggtagtggataagcagcaggagaaagaggatctctag

SEQ ID NO: 301400 - DNA, 1332 bp, Artificial Sequence
  derived and/or modified sequence
aaccagtaccccccacccatgctggaggatgcctgccgcctcatcaacctgggcggggagaacatccagaatgatggcttccagtttgtgacagagctgcaggaggacttcctgggcggcaatggcttcatcggccaggagctgaacagcggccgggagagcccctttgtgaagacagaggacaatggaagtgactacctggtgtacctgcccagccagatgtttgagccccagaagctgatgatcaactatgagaaggaccagaagtctgctgagatcgccagcctgaccagcggccatgaaaattatggcaggaaggaggagccagaccacacctatgagcctggagatgtgtccctgcaggagtactacatggatgtggccttcctgattgatgccagccagagggtgggcagtgatgagttcaaggaggtgaaggccttcatcacctctgtgctggactacttccacatcgcccccacccccctgaccagcaccctgggggacagagtggccgtgctgagctacagccccccaggctacatgcccaacacagaagaatgtcctgtgtacctggagtttgacctggtgacctacaacagcatccaccagatgaagcaccacctgcaggacagccagcagctgaatggagatgtgttcatcggccacgccctgcagtggaccatcgacaacgtgtttgtgggcacccccaacctgaggaagaacaaggtgatcttcgtcatctctgctggggagaccaacagcctggacaaggatgtgctgagaaatgtgtccctgcgggccaagtgccagggctacagcatctttgtgttctcctttggccccaagcacaatgacaaggagctggaggagctggccagccaccccctggaccaccacctggtgcagctgggccgcacccacaagccagactggaactacatcatcaagtttgtgaagccctttgtgcacctgatcagaagagccatcaacaagtaccccacagaggacatgaaggccacctgtgtgaacatgaccagccccaacccagaaaatggaggaacagagaacacagtgctgctgctgcccggcatctatgagatcaagacagaaaatggagacctgtttgatgaatttgacagccaggcccagcacctgctggtgctgggcaacaaccacagcagcggcagcgagacagccacagacctgatgcagaagctgtacctgctcttcagcacagagaagctggccatgaaggacaaggagaaggcccacctggaggagatcagcgccctggtggtggacaagcagcaggagaaggaggacctgtag

SEQ ID NO: 301401 - DNA, 1780 bp, Artificial Sequence
  derived and/or modified sequence
aatcagtacccaccaccgatgcttgaggatgcctgtagactcatcaatttaggaggagagaatattcaaaatgatggtttccaatttgttactgagctacaagaggattttttgggaggtaatggcttcattggccaagaattaaattctgggagagaatcaccttttgtaaagacggaagacaatggaagtgactatttggtttaccttccaagccaaatgtttgagccacaaaaattaatgatcaattatgaaaaagatcaaaaatctgcagaaattgcaagtctcacttctggacatgaaaattatggcagaaaagaagaaccagatcatacttatgaacctggagatgtctctcttcaagaatattacatggatgtggctttcctcatagatgcttcccaaagagtaggaagtgatgagtttaaggaagtaaaagcttttataacctcagtgcttgattactttcacattgcccccactccactgacctccaccttaggagacagggttgctgtcctgagctactctcctccaggctatatgcctaacactgaagaatgccctgtctacctggaatttgatttggttacttataacagtatacaccaaatgaaacatcatctccaagactctcaacagctcaatggagatgtttttattggccatgccttgcagtggacaattgacaatgtctttgtaggaacccccaatctgaggaaaaacaaagttatctttgtaatatctgctggcgaaaccaactctttagacaaagacgtcttaaggaatgtgtctctgagagccaagtgtcaaggctactccatatttgtgttttcctttggccctaaacacaatgacaaagaattagaagaattagccagccaccctctggatcatcacttggtccaacttggccgaacccacaagccagattggaactatatcatcaagtttgtcaagccatttgtccatttaatcagacgtgccatcaacaaatatcccaccgaagatatgaaagccacatgtgttaacatgacctctcccaacccagagaacggtggcacagaaaacactgtattacttcttcctgggatatatgaaataaagacagaaaatggtgatctgtttgatgaatttgattcccaggcacaacatctccttgtattagggaacaatcatagtagtggttctgagacagctactgatttgatgcagaagttatatctgctcttttcaactgagaaactggcaatgaaagacaaggaaaaagcacatttagaagaaatttcagctctagtggttgataaacagcaagaaaaagaagatctctagccagcagcttgggttagttatatttggccagccctgctccctgaagccaatctgagtctcttcagaaaatatcagcttgtctttttcttgcactcatgaaagcttaatgactgagaatcactgagttgtactttgtctttttgcagataaggaaatggaagctacagacatctgaagcatcttacctaagaattcagtaattaatccaatactttcgtcatagtgattcatactctatgtttatagaacgtaagtttaccttaaagttaggccatgaaacagaaataatacaatctatctctgagttgttgaaaagttgaagatgatgcatataaagctcaaagtacacactatgcgtggaatataatcaactagtattatccctatttgaattatctaagtttgatcatctatttgacaattaaaaatataaatccattatatcaaa

SEQ ID NO: 301402 - DNA, 1332 bp, Artificial Sequence
  derived and/or modified sequence
aaccagtaccccccccccatgctggaggacgcctgccggctgatcaatctaggcggggaaaacattcagaatgacggttttcaattcgtgaccgagttacaggaagactttctgggcgggaacggattcatcgggcaggaattaaactcaggccgggaatcaccttttgtgaagactgaggataatgggtccgattacctcgtgtacctcccctcccagatgttcgaacctcagaagctgatgatcaactatgagaaggaccaaaagagcgcagagatcgctagtctgaccagtggccacgaaaactatggtcgtaaggaggaaccagaccacacgtacgagcccggcgacgtctcactccaggagtattatatggacgtcgccttcctgatagacgcctcccaacgcgtgggcagtgatgagtttaaagaggtgaaggcattcataacgtccgtgttggattatttccatatcgcacctaccccactgaccagcaccctgggtgaccgagtggccgtgctgtcttacagtcctccaggatatatgcctaacaccgaagagtgtcctgtgtatctcgagtttgaccttgtcacttataacagcatccatcagatgaagcatcatcttcaggatagccagcagctgaacggagacgtctttataggtcatgccctgcaatggactatcgataatgtcttcgtcgggacccctaatttacgcaagaacaaagtgattttcgtcattagcgcgggggagactaattctctagacaaggatgttttacgtaacgtgtctttacgggctaagtgtcagggttatagtatttttgtattctcatttgggcccaagcataacgacaaggagctggaggagcttgcttcccatcctctggatcaccacctggttcagctaggtaggacacacaagcctgactggaattacataatcaaattcgtcaagccgttcgtgcatcttatccgaagggccatcaataagtatccgacagaagatatgaaggctacctgcgtgaacatgacaagccccaaccctgaaaacggcggaacggaaaatacagttctgctcctgcctgggatctacgaaatcaagaccgaaaacggagatctcttcgacgaatttgattcccaggcgcagcatctgctggtcttaggcaacaaccattcctctgggtctgagaccgcaactgaccttatgcagaagctgtacctgctgttcagcactgagaagttagccatgaaggataaggagaaagcccatttagaggagatcagcgcattggtcgtggacaaacagcaggagaaagaggacctctag

SEQ ID NO: 301403 - DNA, 1332 bp, Artificial Sequence
  derived and/or modified sequence
aatcagtacccacctcccatgttggaggacgcttgtcgcctcatcaatttaggcggagaaaatattcaaaacgacggcttccagttcgtgacagagctccaggaggacttcctcggcggaaacgggtttattgggcaggagttgaactcgggccgagaaagccccttcgtaaagaccgaagataatggctccgattacttggtgtacctaccatcacagatgttcgagccgcaaaagctgatgattaattacgaaaaggatcagaagtctgcagagatcgcctcattgacaagcgggcacgagaattatggcagaaaggaggagccagatcatacatacgaaccaggcgacgtctctttgcaggaatattacatggatgtggcctttctgattgatgcttcacagagggtcggatctgatgaattcaaggaagtaaaggcgttcatcacgagtgtgctggactactttcatatcgccccaaccccactgacttctaccctcggggaccgcgtggcggtgctctcttattccccaccgggatatatgcctaacaccgaggagtgtccagtctacctcgagttcgatctagtgacttacaactcgatccaccaaatgaagcatcatctgcaggattcccagcagctcaatggcgatgtgtttattggccacgcactgcagtggaccatagacaacgtttttgtcggcacccccaacctgaggaagaacaaagttatattcgtcatcagcgctggcgaaactaatagcctcgacaaagacgtgctcaggaacgtgagcctgcgcgcaaagtgccagggctatagcatcttcgtgttctccttcggaccaaagcataatgacaaagaactggaggaattagcctcacacccattagatcaccacctagtgcagctcggcagaacccacaagccggattggaactatattatcaagttcgtgaagccttttgttcacctgatcagacgcgctattaacaaatatcctacagaggacatgaaggcaacatgtgtaaatatgacctctcctaacccagagaatggcggtaccgagaacacggtcctgctccttcccggaatctatgaaataaaaacagagaatggcgacctgtttgatgagttcgattctcaggcccagcatctgctggtgttggggaataaccattccagcggaagtgagactgcgacggatctgatgcaaaagttatacctcctgtttagtacggagaagctggctatgaaggacaaggagaaggctcacttggaagaaatcagcgctcttgttgtcgacaagcagcaagagaaggaggatctgtag

SEQ ID NO: 301404 - DNA, 1332 bp, Artificial Sequence
  derived and/or modified sequence
aaccaatatccacctcctatgctggaggatgcctgcagactcattaacctgggaggcgaaaacatacagaacgacggttttcaatttgtgaccgaactgcaggaagactttttaggggggaatgggtttattggacaagaattgaactcaggcagagagtctccattcgtgaagaccgaagataacggatcagactatttggtgtacctgccttcacaaatgttcgaaccacagaaactgatgataaattacgagaaagatcagaagtctgccgagattgcttcacttactagtggccacgaaaattatggccgaaaggaggagcccgaccatacatacgagcccggggatgtttcattgcaggaatactacatggacgtggcgtttcttatcgacgcttctcagcgagtcggctcagatgaatttaaggaggttaaagccttcattactagtgttttggactactttcacatagcccccacccctctgacctctaccctgggggaccgagtggctgtcttgagttactctccacccggatatatgcccaacaccgaagagtgccctgtgtacctggagttcgaccttgttacctacaattctatccatcaaatgaagcatcaccttcaggatagccaacaactcaatggcgacgtcttcatagggcacgccctccagtggaccatcgataatgtatttgtgggcactccaaacctaagaaaaaacaaagtcattttcgtgatctccgccggcgagacaaactccttggacaaagacgtgctgaggaacgtgtccctacgagctaagtgtcaggggtattccatttttgtgttctcattcggccctaagcacaatgacaaggagttagaagaattggcctcccacccgttagatcatcatctggtgcaacttggccggactcacaagccagactggaactacatcattaaatttgttaagccctttgtgcatctgatacgccgcgccataaacaaataccccacagaagatatgaaggccacttgcgtgaatatgacttccccgaatcccgagaacggtgggaccgagaataccgtcctgcttttacccggcatatatgaaattaagacagagaacggcgacctctttgacgaatttgactctcaagcacagcatctgttggttttaggaaataatcattcatcaggctccgagaccgccactgacctgatgcaaaagttgtacctgctgtttagcacagaaaagctggctatgaaagacaaagaaaaagcccacctggaagaaatctctgctcttgtggtcgataaacaacaggagaaggaagatttatag

SEQ ID NO: 301405 - DNA, 1332 bp, Artificial Sequence
  derived and/or modified sequence
aaccaatatccacctcctatgctggaggatgcctgcagactcattaacctgggaggcgaaaacatacagaacgacggttttcaatttgtgaccgaactgcaggaagactttttaggggggaatgggtttattggacaagaattgaactcaggcagagagtctccattcgtgaagaccgaagataacggatcagactatttggtgtacctgccttcacaaatgttcgaaccacagaaactgatgataaattacgagaaagatcagaagtctgccgagattgcttcacttactagtggccacgaaaattatggtaggaaagaagaaccagaccacacatacgagcccggtgatgtgtccctacaggagtattacatggacgtggccttcctgattgacgcgagccagagagtgggtagcgacgaatttaaggaggtcaaagcttttattacctctgtgctcgactactttcacattgcgccaacacctctaactagcacccttggagaccgagtagccgttctttcgtacagtcccccaggatacatgcctaatactgaagaatgccccgtgtacttggagttcgatttagtaacatacaactccatacatcaaatgaagcaccacttacaggactcgcagcagctcaacggtgacgtgttcatcggccacgcactccagtggactatcgataatgtctttgtggggacacctaatctcagaaaaaataaagttatattcgtgatctccgccggtgaaacaaattccttggataaggacgtgctgcgcaacgtgtcccttcgcgctaagtgccagggttatagtatctttgtcttctcattcggaccaaagcacaacgataaagaactggaagaactggcctcacaccccctagaccaccatctggtgcaacttggccggactcacaagccagactggaactacatcattaaatttgttaagccctttgtgcatctgatacgccgcgccataaacaaataccccacagaagatatgaaggccacttgcgtgaatatgacttccccgaatcccgagaacggtgggaccgagaataccgtcctgcttttacccggcatatatgaaattaagacagagaacggcgacctctttgacgaatttgactctcaagcacagcatctgttggttttaggaaataatcattcatcaggctccgagaccgccaccgacttaatgcagaaattatacttactattcagtacagagaaacttgcgatgaaagataaagaaaaggctcacttagaagaaatctccgcactggttgtagataagcagcaggaaaaagaggacctgtag

SEQ ID NO: 301406 - RNA, 1332 nt, Artificial Sequence
  derived and/or modified sequence
aaccaauauccaccuccuaugcuggaggaugccugcagacucauuaaccugggaggcgaaaacauacagaacgacgguuuucaauuugugaccgaacugcaggaagacuuuuuaggggggaauggguuuauuggacaagaauugaacucaggcagagagucuccauucgugaagaccgaagauaacggaucagacuauuugguguaccugccuucacaaauguucgaaccacagaaacugaugauaaauuacgagaaagaucagaagucugccgagauugcuucacuuacuaguggccacgaaaauuauggccgaaaggaggagcccgaccauacauacgagcccggggauguuucauugcaggaauacuacauggacguggcguuucuuaucgacgcuucucagcgagucggcucagaugaauuuaaggagguuaaagccuucauuacuaguguuuuggacuacuuucacauagcccccaccccucugaccucuacccugggggaccgaguggcugucuugaguuacucuccacccggauauaugcccaacaccgaagagugcccuguguaccuggaguucgaccuuguuaccuacaauucuauccaucaaaugaagcaucaccuucaggauagccaacaacucaauggcgacgucuucauagggcacgcccuccaguggaccaucgauaauguauuugugggcacuccaaaccuaagaaaaaacaaagucauuuucgugaucuccgccggcgagacaaacuccuuggacaaagacgugcugaggaacgugucccuacgagcuaagugucagggguauuccauuuuuguguucucauucggcccuaagcacaaugacaaggaguuagaagaauuggccucccacccguuagaucaucaucuggugcaacuuggccggacucacaagccagacuggaacuacaucauuaaauuuguuaagcccuuugugcaucugauacgccgcgccauaaacaaauaccccacagaagauaugaaggccacuugcgugaauaugacuuccccgaaucccgagaacggugggaccgagaauaccguccugcuuuuacccggcauauaugaaauuaagacagagaacggcgaccucuuugacgaauuugacucucaagcacagcaucuguugguuuuaggaaauaaucauucaucaggcuccgagaccgccacugaccugaugcaaaaguuguaccugcuguuuagcacagaaaagcuggcuaugaaagacaaagaaaaagcccaccuggaagaaaucucugcucuuguggucgauaaacaacaggagaaggaagauuuauag

SEQ ID NO: 301407 - RNA, 1332 nt, Artificial Sequence
  derived and/or modified sequence
aaccaauauccaccuccuaugcuggaggaugccugcagacucauuaaccugggaggcgaaaacauacagaacgacgguuuucaauuugugaccgaacugcaggaagacuuuuuaggggggaauggguuuauuggacaagaauugaacucaggcagagagucuccauucgugaagaccgaagauaacggaucagacuauuugguguaccugccuucacaaauguucgaaccacagaaacugaugauaaauuacgagaaagaucagaagucugccgagauugcuucacuuacuaguggccacgaaaauuaugguaggaaagaagaaccagaccacacauacgagcccggugaugugucccuacaggaguauuacauggacguggccuuccugauugacgcgagccagagaguggguagcgacgaauuuaaggaggucaaagcuuuuauuaccucugugcucgacuacuuucacauugcgccaacaccucuaacuagcacccuuggagaccgaguagccguucuuucguacagucccccaggauacaugccuaauacugaagaaugccccguguacuuggaguucgauuuaguaacauacaacuccauacaucaaaugaagcaccacuuacaggacucgcagcagcucaacggugacguguucaucggccacgcacuccaguggacuaucgauaaugucuuuguggggacaccuaaucucagaaaaaauaaaguuauauucgugaucuccgccggugaaacaaauuccuuggauaaggacgugcugcgcaacgugucccuucgcgcuaagugccaggguuauaguaucuuugucuucucauucggaccaaagcacaacgauaaagaacuggaagaacuggccucacacccccuagaccaccaucuggugcaacuuggccggacucacaagccagacuggaacuacaucauuaaauuuguuaagcccuuugugcaucugauacgccgcgccauaaacaaauaccccacagaagauaugaaggccacuugcgugaauaugacuuccccgaaucccgagaacggugggaccgagaauaccguccugcuuuuacccggcauauaugaaauuaagacagagaacggcgaccucuuugacgaauuugacucucaagcacagcaucuguugguuuuaggaaauaaucauucaucaggcuccgagaccgccaccgacuuaaugcagaaauuauacuuacuauucaguacagagaaacuugcgaugaaagauaaagaaaaggcucacuuagaagaaaucuccgcacugguuguagauaagcagcaggaaaaagaggaccuguag

SEQ ID NO: 301408 - DNA, 450 bp, Artificial Sequence
  derived and/or modified sequence
atttagtatacagaggaggacacaaacatgagaagattaaggtagagagtgaaatatggtcaggacaaatgtgaatttagagcctgagtgatggtttagtggatttatgtcctcacttgtcactaatgaaaaggaccttacaggttatataattaaagctctgttgacattggctcttgaaggcaaacttcataatgaggggaagagtcaagttttgtgtaacctgaagcatatacagtctcctgcaaatgataagaggcttgaggatacttcccaggaactcctgcctttttggaggtgactctgtcagttaaagtgtgaatgaagagtggagcataaaagtccattgccagcacttgagtaaagataaagagtaggagaatcaaagctgttgtataattagttctcttctcatccacacccataaaccagttcaagaaagggatgaag

SEQ ID NO: 301409 - DNA, 3737 bp, Artificial Sequence
  derived and/or modified sequence
atgccaaaagttttgtgcaaagattccgagaggctgagtccttcacacaactttctgaagaaatccagatggcagttgtatggtgcaggaaaaaaactcaaggctcaggccatttttctgggtaacaaacttcttaaaagcaaccggcttaaacatctggaagctcaaggtactagtttgccaaagaaactagagtgcataaaaacgtctatttgcaaccaccttcttcgtggctcaggtatcaaaacttcaaagcatcatctgagacagagaagatcacagaataaatttttacggagacaaaggaaaccacagagaaagttgcagtcgactcttttaagggaaattcagcagttctctcaagggactcggaagagtgctacagataccagtgctaagtggagactctcacactgtactgtgcatagaactgatctctaccctaacagtaagcagctcttgaatagtggagtttcaatgcctgtcatacaaactaaggagaaaatgattcatgaaaatcttagaggcatccatgaaaatgaaactgattcgtggacggtgatgcaaataaataaaaacagtacatcaggaaccattaaggagacagatgacattgatgatatttttgctttaatgggagtttagatgttcgttcatatgtgagacttttaagtgattaacaaggctagttcagtgttctaagtagaactgctaagatctggaagtaccacctggactcacagaggagctgctttagtgcagcattgcacaggagttcatttcagttcagtctacatttaaagtagcattgtgtcatttcatcaacaagtatttcttttttggcttcaactacatgtcaggtgttaatatgaaaaatctgccacagcctacccttgagaagcagatgtaattccttgagtgaggctagtaagtctctgaaaaactgaataattttatgacttactaggcaatttaataatcgtttgcaaaaaccattgtgtcttgaggtaaatgaggagcgggggtgggagatagcaaggaaacacctgaaaggtcaatttggtcttattggctccattatacataggtccgcctctgaatactaaagtttgtagctcctgacatttatgttttcttgtttatatgttggaattgatcaacaaggtttgccactgcttgtattaccagggactggttacaaccattatttctcttcatttgcttggcttatctcatattaaagtgagtttggagttctccaaaacgttttaattttatttatttgggtaccagtgattgattccaaataaacctttttacaaaaaggcaataaggtggtttatggttacatatgaaatataataggataacaggtagatgagaaagtaaaatgaaaaaatgaggttaggagatacaaagtagacccaggaatgaggctagaacatttataatttggtgttgatgctgtcatctgataggggatgttgctcgtactgttgctctgaggggagtacatcttgagtattttcaaataatgatgtgaagtttgaggtaggtatctttccaatgttctaactttactagaattaggttattaagcttctctagtgcccttaacttttgttacatagagatttaaagaaaaagaaagtagtaccttagtatgtaccgcatccttcttttcctcagccaccctatcataacagaagttatttcccttccattctttatttggctttgttctttccctgtctgccttctccattttctcagttatctctaccagtggttctcaaactttagactttttgagaatcacctggtgggttgctaaaagatgcagattagccctttcccagagactgataaacaggggccagaaacctgcatttttaacatggagcccaagtgattttgatccaggtggcccccaaatccagttatataaacactactttagcttctctcctgaagccttaagtaaactggtttaattcttaatctgtagtcagttttcatattccttttggctttctaccaagtggtagtatccatttagtgccttaaaatacagacaataccaaggagatttcattctagacaagtctagaaatggccattaacttctaagtgtccttgtgttcaatgaatatcctttacctattgggaaatagaaggtaaattagtaagagaactggtgtatagctttgtggaccatagggcttatttgctgagagttgtctatattcatgcacccagtcccctaagtagcctcttttaatacttcatttagctgattcagaaaaaaactccctgggaattaggagatttaaggttcagtcttgcttctcctacttgtggcttcactgagctagtcagtttcctcaggcttaggtttctggatttgaagtggaattttttcaagaatgaaacttttatagctgaaataaactttggagcttatctttcattggaaaaaccagggtggttcagtgagttaaggacaatatagcatggactgggctgccagtctagcatttgtttccaaattcattcatgttcttttggagtatcttcatctcctctcattttcccatcttctgccctttactattctgggaaaatggcaaaaaagcttcacatgtgtccacaaaatgacaatttgtatgtttataaggaattcagtattctgtatcagttactttttccaaataaatccaaatatttaacatttaaaaaaatgcaatctaaagtataccaaactgtaacttacctagtaaatgagattagaaactattgtcagggtcatcgtagtgaattattattattattattttttgagacagagtcttgtgctgttgcccaggctggagcacagtggtatgatctcagttcactgcaccctccacctcctgggctcaagctattctcccacctcagccgcctgagtagctgacactataggcaccaccatgccctggctaattttttaaaaactttgtgtagagatagggtttcaccatgttgcttaggctggtctcaaactcctggactcaagggatccacccactttggtctcccaaagtgctgggattacccacatcctagtaccaactttatcacttctgatggcattaggacacacaggccatttataagagcagtgtttgagacctcctgtgtgtcacttccaatcctcttggccttcatactaaagtcactgctgtggcaaccagtttcaagcagggctgaaccttgcctcttgctctggggatgtctcacttcctgcccctgggcttctcaccagctacaggaactgcctagcacttgggtatgtacaacctggaagaggtgtggggccaccccatcccctcctcaaagaaattcacaggcacagtatgaggctaaagtaacttccatcttggatgctaatctaccatgttgacttctgataaccagttcctggaatgccctctaagatttctacttttatctattaaaagaacacacacacacacacacactgtaaatcctggccttaagcaagttataggctaagttgtaaacagcattcttgcctttccctgaggaggtgacttcagtgtctcacatgttccttcatgtacccccttttctctatggcatataagccctgggtcggggggtaactgtggggatcactgcctgagacatggcttctgtgcataagtccctattaaatgtttctttctgacaaa

SEQ ID NO: 301410 - DNA, 645 bp, Artificial Sequence
  derived and/or modified sequence
atgcccaaggtgctgtgcaaggacagcgagagactgagccccagccacaacttcctgaagaagagcagatggcagctgtacggcgccggcaagaagctgaaggcccaggccatcttcctgggcaacaagctgctgaagagcaacagactgaagcacctggaggcccagggcaccagcctgcccaagaagctggagtgcatcaagaccagcatctgcaaccacctgctgagaggcagcggcatcaagaccagcaagcaccacctgagacagagaagaagccagaacaagttcctgagaagacagagaaagccccagagaaagctgcagagcaccctgctgagagagatccagcagttcagccagggcaccagaaagagcgccaccgacaccagcgccaagtggagactgagccactgcaccgtgcacagaaccgacctgtaccccaacagcaagcagctgctgaacagcggcgtgagcatgcccgtgatccagaccaaggagaagatgatccacgagaacctgagaggcatccacgagaacgagaccgacagctggaccgtgatgcagatcaacaagaacagcaccagcggcaccatcaaggagaccgacgacatcgacgacatcttcgccctgatgggcgtgtag

SEQ ID NO: 301411 - DNA, 645 bp, Artificial Sequence
  derived and/or modified sequence
atgcccaaggtgctctgtaaggacagcgagcggttgtcaccatcccataatttccttaaaaagtctagatggcagctctatggagctggtaagaagcttaaggcccaggccatttttttgggtaacaaactcctcaagagcaacagactgaagcacctggaggcccaaggcacatccctgcccaagaaattggagtgcattaaaacgagtatctgcaaccatctgctcagaggatctggaattaaaactagcaagcaccacctcaggcaacgacgctcccagaataaatttctcagaagacagcgaaagcctcaaagaaaactccagtcaacactgcttagggaaatacaacagttcagccagggaactagaaagagcgctacggacacatctgccaaatggcgtcttagccactgcaccgtccatcggacagacctctatcccaacagtaagcaactgctcaacagcggggtctcgatgcccgtgattcagactaaagagaaaatgatccatgagaacttgcggggcatccacgaaaacgagactgatagctggaccgtgatgcagatcaacaagaattcaacatcaggaaccattaaggaaacagatgacatagacgatatattcgccttaatgggcgtatag

SEQ ID NO: 301412 - DNA, 645 bp, Artificial Sequence
  derived and/or modified sequence
atgcccaaggtgctgtgcaaggacagcgagcggctgagccccagccacaacttcctgaagaagagccgctggcagctgtatggagctgggaagaagctgaaggcccaggccatcttcctgggcaacaagctgctgaagagcaaccggctgaagcacctggaggcccagggcaccagcctgcccaagaagctggagtgcatcaagaccagcatctgcaaccacctgctgcggggcagcggcatcaagaccagcaagcaccacctgcggcagaggaggagccagaacaagttcctgcggcggcagaggaagccccagaggaagctgcagagcaccctgctgcgggagatccagcagttcagccagggcaccaggaagagcgccacagacaccagcgccaagtggaggctgagccactgcaccgtgcacaggacagacctgtaccccaacagcaagcagctgctgaacagcggcgtgtccatgcctgtgatccagaccaaggagaagatgattcatgagaacctgcggggcatccatgaaaatgaaacagacagctggacagtgatgcagatcaacaagaacagcaccagcggcaccatcaaggagacagatgacattgatgacatctttgccctgatgggcgtgtag

SEQ ID NO: 301413 - DNA, 645 bp, Artificial Sequence
  derived and/or modified sequence
atgcccaaggtgctgtgcaaggacagcgagcggctgagccccagccacaattttttaaaaaagagcagatggcaattgtatggagcaggcaaaaaactaaaggcccaggccatattcttgggcaacaagcttctaaaatctaatcgactgaagcacctggaagctcaagggacaagcctgcccaaaaagcttgagtgtataaagacctctatatgtaatcacctgcttcgtggcagcggcattaagacaagcaagcatcacctccgtcagagacggtctcagaataagtttctgcgccgtcagagaaaaccacaaaggaaactacagtccactctgctgcgggaaattcagcaatttagccaaggcaccagaaagtctgcaacggatacttccgccaaatggcgtcttagccattgtaccgttcacaggactgatctgtatcccaacagcaagcagctcctgaatagcggggtgtccatgccagttattcagacgaaagagaagatgatccacgagaatctgagaggcatccacgagaatgagactgacagttggacagtgatgcagattaacaagaactctacctcaggcactatcaaagaaactgacgacattgatgacatatttgcgttgatgggcgtttag

SEQ ID NO: 301414 - DNA, 645 bp, Artificial Sequence
  derived and/or modified sequence
atgcctaaggtgttgtgcaaagacagtgagcgtttgtctcccagccataatttcctgaaaaagtcacgctggcagctttacggggctggaaagaaacttaaggcgcaggccatattcctggggaacaaactgctcaagagcaacagactaaagcacctggaggcacaaggaacctcacttccaaaaaagttagagtgcataaagacgagcatctgtaaccacctgctccggggatcaggaattaaaactagtaagcaccacctgcgccagcgcagatcacagaacaaatttctgaggcgccagagaaagccccaaagaaaactccaatcgaccctcttaagggagatccagcagttttcccagggcacacggaaaagtgccacagatacatcagcaaaatggcgattgtctcactgcacggtgcatagaaccgatttgtaccccaactcaaagcagctcctcaattcaggagtgtctatgccagtgattcagacaaaagaaaaaatgatccacgagaatctgcgcggaattcatgagaacgagaccgatagctggaccgtcatgcaaattaataagaattctaccagcggtacaattaaagagactgacgacatagatgacatcttcgcgttgatgggcgtctag

SEQ ID NO: 301415 - DNA, 588 bp, Artificial Sequence
  derived and/or modified sequence
atgaacagcgtctttcggcagccaggctctaacttctcatttcccatatatcagcctagtgcaagcgtgacccatggtttgagttttttttgtgaagtctcgcctcaaatgctaactccacaggattatagggggaaacagcagggacaccgcggatgcccgggttgtatggtggccatggatacatggcctgccgtacttcccgaactcccgggattctggggggagggctcagggggtcaggcgtggggtgcaagaggggagccccttctgcagaaggccaactgccttctcgaggcagtcaggctatttcttaattacagacctcttggcgctgaaggtggggagctgaccttcgggaagcgcctgctcgttcctacagcagtctcctgcgcttatgattgcgtgtcttcttccgcttttctaggaatccaattactcggcgaccctactcgctctccagggcactgttatcgtcaggactttaatggcacgcttcggttaagagaaggcaagggcctggtccagtctcatacagggaccttgtgggcaggaccactgcaggagggcacacagggtcaaacctag

SEQ ID NO: 301416 - protein, 1029 aa, Artificial Sequence
  derived and/or modified sequence
MPPTKSVSEPVPFETEAPSMTIVPTTDIEPVTVRTEATVTTLAPKTSQRTRTRRPRPKHKTTPRPETLQTKLDFGPITPGTSSAPTTTTKRTRRPHPKPKTTPHPEVPQTKLVPATILEPVLRTEASGTTAVPATIFEPVSPIKEAPGTTFVPVTDLEPVTFRTEIPATTLATKTSKRTRPPRPRPKTTPSPQAPETKPVPATVLEPVTLRPEASTTLASKTSQRTRRPRLRTKTTPRPEAPESKPVPTAELKPVTLRTETWVTTQAPKTSQRTRRPRPKTKTTPSPEVPQTKLVPSTDLEPGTLRTEAPKTMVVTTVLEPDTFRTKFPETTLAPKTQRTRRPRPRPKTTSSPEVPQNKSVSVTGFEPVVHSTDAPGTTFALTELQTLILKPVTSPSLEMTESQPVSDVLESVTLSTESPKETIAPAKTDYVYPTAKAPLWPEEPKTEVVESITYVSEPPETTLETSPLPSQSITLPSPDEPQTEPAPKQTPRAPPKPKTSPRPRIPQTQPVPKVPQRVTAKPKTSPSPEVSYTTPAPKDVLLPHKPYPEVSQSEPAPLETRGIPFIPMISPSPSQEELQTTLEETDQSTQEPFTTKIPRTTELAKTTQAPHRFYTTVRPRTSDKPHIRPGVKQAPRPSGADRNVSVDSTHPTKKPGTRRPPLPPRPTHPRRKPLPPNNVTGKPGSAGIISSGPITTPPLRSTPRPTGTPLERIETDIKQPTVPASGEELENITDFSSSPTRETDPLGKPRFKGPHVRYIQKPDNSPCSITDSVKRFPKEEATEGNATSPPQNPPTNLTVVTVEGCPSFVILDWEKPLNDTVTEYEVISRENGSFSGKNKSIQMTNQTFSTVENLKPNTSYEFQVKPKNPLGEGPVSNTVAFSTESADPRVSEPVSAGRDAIWTERPFNSDSYSECKGKQYVKRTWYKKFVGVQLCNSLRYKIYLSDSLTGKFYNIGDQRGHGEDHCQFVDSFLDGRTGQQLTSDQLPIKEGYFRAVRQEPVQFGEIGGHTQINYVQWYECGTTIPGKW

SEQ ID NO: 301417 - DNA, 3090 bp, Artificial Sequence
  derived and/or modified sequence
atgccaccaacaaaatctgtgtctgagccagtaccattcgaaaccgaggcccctagtatgaccatcgtccccacaaccgacatcgaacctgtcacagtaagaacagaggccaccgtcactactctcgctccaaagacgtctcagcgaactagaacccggagaccaaggcccaaacacaaaaccaccccgcgaccagagaccttacagacaaagctggacttcggtcctattacgccgggaacctcctccgcacccacgactactactaagagaacccgccgacctcatcctaagcctaagacaacaccccatcctgaagttccccaaacaaagctggtgcccgctacaattctggaacccgtgctcaggaccgaggcctcgggcaccacagccgtcccagccacgatttttgagcctgtttcccccattaaggaggcacctgggaccaccttcgtccctgtcaccgatctggaacccgttacatttcgcacagaaatcccagcaacgacgctcgcaacaaagaccagcaaacggacgagacctccgaggccccgaccgaaaacaactcctagtccgcaggcacctgaaaccaagccagtccctgccaccgtgcttgaaccagtaaccctaagacccgaggcttctaccacattagcgagcaaaaccagccaacgaacccgcagacctcggctcagaactaagacgacgcccaggcctgaggccccagaaagtaaacccgtccctactgccgagttgaagccggtgacgctgaggacagaaacttgggttaccacccaggcaccaaaaaccagccagcggaccaggcgacctaggcctaagacgaaaaccactcccagccccgaagtgccccagacaaagctggtcccctcaaccgatctggagccaggaacactgcgtactgaggcacctaaaactatggtagtcaccacagtgctcgaaccagatacattccggactaagtttccggagactacccttgctcctaagacccagcggacgagacgccctaggccacgtcccaagacgacttctagccctgaggtgccgcaaaacaagagtgtgtcagtgactggttttgagccggtagtccactcaaccgatgcaccgggaactactttcgcactcacagagctgcagacactgatcttgaagccggtgacatccccatcactggagatgaccgagagtcagcccgtgagcgatgtgctggagtccgtcaccttgtccaccgaatcacctaaggagacaattgcaccagccaagacagattacgtttacccaactgcgaaggccccactgtggccggaggaaccaaaaacagaggtcgtcgaatctataacttacgtgtccgaacccccagagactaccttggagacctcgcctctgccatctcagtccatcacactgcctagccccgatgagccccagacagagcccgcaccgaaacagaccccacgtgctccccctaagccaaaaacttcacccagacctaggattccgcagacccagcctgtaccaaaagtgccccagcgcgttaccgcaaagcccaagacttcaccaagccccgaggtcagttacaccacgcctgcacctaaagacgtcctccttccccacaagccctatcctgaggtttcacagagtgaacctgccccactcgaaacccggggtatcccgtttatcccgatgatcagtccctctccaagccaggaggaacttcagaccacgttggaagaaaccgaccagagcacccaggaaccattcacaaccaaaatacctcgaactacagaactggctaagacgactcaggcaccacataggttttataccacagtgcgcccacgcacatcagacaagccacacatccgtccaggcgtgaagcaagcgccaagacccagcggcgctgatcggaacgtctcggtggacagtacccacccgacaaaaaaaccgggaaccagacgaccgccactccccccacggcctactcaccctcgtagaaagcccttacctcctaataacgttaccgggaaacctggatccgcagggatcataagctcaggcccaatcactacacccccactaagatctacccctaggcccactgggacaccccttgaacgaattgaaaccgacatcaagcaacctaccgtccctgcgtctggagaggagctggagaatattacggacttctctagttcccccacccgcgaaaccgaccctctcggaaaaccgaggtttaagggtccccacgtgcgctacattcagaaaccggataattctccctgttcgataacagactctgtaaagcggttcccaaaagaggaagcgactgaaggaaatgccacctctcctccacagaacccccctaccaacctcactgtcgttactgtcgagggctgtccatccttcgtgatcctggattgggagaaacccctgaatgacacagtgaccgaatatgaggtgatatccagagagaatggatccttttcgggcaaaaacaagtcgatccagatgaccaatcagacatttagcaccgtcgagaacttgaaaccaaatacatcttatgagttccaggtaaagcctaagaatcctcttggggaaggacccgtgtccaatacggtggcctttagcactgagtctgccgaccccagggtgtctgaacctgtgtccgcagggagagacgcaatatggaccgagagacccttcaactccgatagctatagtgaatgtaagggaaaacagtatgtaaaaaggacctggtataagaagtttgtgggcgtacaactatgtaactccctgagatacaagatctatctctcggactctctgacgggcaagttctacaacatcggcgatcagcgcggacatggagaagaccactgccagttcgtggatagtttcctggatgggaggactggtcagcaactcacctccgatcagctgccaattaaagagggctatttcagggctgtgcggcaagaacccgtccagttcggcgagatagggggtcacacccagattaactatgtgcagtggtatgaatgtggtactactatccccggaaaatggtag

SEQ ID NO: 301418 - DNA, 3090 bp, Artificial Sequence
  derived and/or modified sequence
atgcccccgacaaagagtgtgtctgagcctgtcccttttgaaacagaagcaccatccatgacaatagttcccactacagacattgaacccgtgactgttagaacagaggccacagtgactacactggctccaaagaccagccagcgcaccaggactagacgtcctaggccaaaacataaaacaactccaagacctgaaacactgcaaactaaactggatttcgggcccatcactcccgggactagtagcgctcccacgacaaccactaagcggactcggcgcccccaccctaaacccaaaactacaccccatcctgaagtaccgcagaccaagctcgtccctgccacgatcctggagcccgtgcttcgcaccgaagcttccgggactactgccgtgcctgctactatcttcgagcccgtaagtcctattaaggaagcccctgggactacgtttgttccagtaacagacctcgaacctgtaacgtttagaactgaaattcccgccacaacacttgcaactaagacatccaaaaggacaagacctccccggcctaggccaaaaacaacgccctctcctcaagctcctgagaccaagcccgttcctgctacagtccttgagcccgtcactcttcggcccgaggcgagtacaacactggcatcaaaaacaagtcagcgcacacgacgaccgcgacttaggacgaaaactacaccgcgcccagaggctcctgagagcaaaccagttcctacagctgaactcaagccagtgactcttcggactgagacatgggtgaccacacaggcccctaagacttcacagagaacaaggcggccccgtccgaagacaaaaactaccccttctccagaggtgcctcaaacaaagcttgttccaagcaccgatttagaacccggaacccttcggacagaagcgccaaaaactatggttgtgactaccgtgttagaaccagatacattccgcaccaagttccccgaaaccaccctcgccccaaagactcagcgaaccagaagaccaagaccaaggcctaaaaccacttcctccccagaggttcctcaaaataaatctgtgagtgtgacgggatttgagcccgttgttcatagcacagacgcacccgggaccacctttgctttaacagaattgcagactcttattctcaagcccgtgacaagtcccagcctcgaaatgactgagagccagccggttagcgatgtattggaaagtgtaacactctctaccgagagccctaaggagaccatcgcccctgccaaaacggattatgtttaccctaccgccaaggctcccttgtggccggaggagcctaaaaccgaagttgtggaatcaatcacgtacgtgtcagaacctcccgagactacactcgagacaagtccgctcccgagccagtctatcactctgccctcccctgatgagccacagaccgagcccgccccaaaacagacgccaagggctccgccaaagcccaaaacaagtcccagaccacggattccccaaacacagcccgttccaaaggtcccacagcgagtgaccgccaaacccaagacctccccctctcccgaagtgtcttacacaacaccagctccgaaagacgtactcctgccgcataagccatatccagaggtctcgcagtccgagcccgctccactggaaactagagggattccttttatccctatgatttcacccagccccagccaggaggaactacagaccactctcgaggaaaccgatcagtctacacaggaacccttcacaactaagattccacgcacaaccgagctggctaagaccacccaagcccctcacaggttctatactaccgtcagaccaagaacttctgataaaccacacattagacctggagtgaaacaggccccacgtccctcaggagcagacagaaatgtgtccgttgatagcacgcatccaactaagaaacccggcacaaggagacccccactacctcctcgccccacacatccccggcgcaagcctctgccccctaacaacgttacaggtaagcccggcagcgcaggcatcataagcagcggccccataacgaccccacctctgagatccactcctcgccccactggaacgcctctcgagcggattgaaaccgacataaaacagcctacagtgcccgcttcaggcgaagaactagagaatattaccgacttttcctcaagccctaccagagagacagacccactaggaaaaccacgctttaaaggcccgcatgttcgctatattcagaaaccggataattccccatgtagcattactgatagcgttaaacgattccctaaggaggaggcaactgaaggaaacgccacctcccccccccagaaccccccaactaatcttacagtcgtaacagtggaaggatgtccctccttcgtgatcctggattgggagaagcctctgaatgatacggtgacagaatacgaggtgatatctcgggagaatggctcattttcaggcaagaataagagcatccagatgacgaaccaaacgttcagcacggtggaaaatctaaagcctaacacatcatacgagttccaagtcaaaccaaagaacccattgggcgagggacctgtgagtaacactgtggccttctccactgaatccgctgatcctagagtgagcgagccagttagcgcagggcgcgacgccatctggactgagcgtcctttcaacagtgacagttacagcgagtgcaaaggaaagcagtacgtgaaaagaacttggtacaagaaattcgtcggggttcagctgtgtaactccctcagatacaagatttatttgagcgattcattgacggggaagttttataacattggagatcagcggggccacggcgaagatcattgccagttcgtggactcgttccttgacggcagaactgggcaacagctaacaagcgaccagctgcctattaaagagggttatttccgcgccgtgaggcaggagcccgtgcagtttggcgagattggcggacatactcagatcaactacgtacaatggtatgagtgcggcacgacaattccaggaaagtggtag

SEQ ID NO: 301419 - DNA, 3090 bp, Artificial Sequence
  derived and/or modified sequence
atgccaccaacaaaatccgtttcagagcctgtaccttttgaaaccgaagctcccagcatgactatagtgcccaccacagacatcgagccagtgacagttcgcacagaggcaaccgtcacgactttagcgcctaagactagccaaagaactagaacaagaagacctcgcccaaagcataagactaccccaaggcctgagaccctccagaccaaacttgacttcggccccatcacaccaggcacctcaagcgctcccacgaccactaccaaacgcaccagacgcccacacccaaagcctaaaaccaccccccatcctgaagtcccccagacgaagctagtgccagcgactatcctggagcccgtcttacgtaccgaagccagtggtacaacagccgtgcctgctaccatttttgaacccgtcagccccatcaaggaagcaccagggactacattcgtaccagtgaccgacctggagcctgtgacctttagaaccgaaatcccagcgacaacacttgcaacaaaaactagcaaaaggacccgtcctccccgacccagacccaagacaaccccctctcctcaggccccagagactaaacctgtacctgcaacagtcctagagcccgtgacgttgcgtccagaagcaagtactacactggcatccaagacctcccagcggaccagaagacccagactcagaacaaagactacaccacggcccgaggctcccgaatctaaaccagttccaacagctgaacttaagcctgtgactttacgtaccgaaacctgggtcacgactcaagccccaaagacatcacagcgcacacgccgccctaggccaaagaccaaaacaacaccgtcaccagaagtcccccagacaaaactggtgccttctaccgacttagaacccggaacccttcggacagaagcgccaaaaactatggttgtgactaccgtgttagaaccagatacattccgcaccaagttccccgaaaccaccctcgccccaaagactcagcgaaccagaagaccaagaccaaggcctaaaaccacttcctccccagaggttcctcaaaataaatctgtgagtgtgacgggatttgagcccgttgttcatagcacagacgcacccgggaccacctttgctttaacagaattgcagactcttattctcaagcccgtgacaagtcccagcctcgaaatgaccgaatcacagccagtgtcagacgtgctcgaatcagttacacttagtacagagagtcctaaggaaactatcgctcccgcgaagacagactacgtgtatcctactgctaaagcccctctctggccagaggaaccgaaaactgaagtcgtggaatcaattacatatgtgagcgaaccccctgagactacacttgagactagcccactgcccagccagtctatcactctaccttcaccagacgaaccccagacagaacccgcccccaaacaaactcccagagctcctccaaaacccaagactagccctcggcccagaatccctcaaacccagccagtccctaaggttccccagagagtaacggcaaaacccaagacaagtccaagcccagaagtgagctacacgacccccgctcccaaagacgttctactcccccacaagccatatcccgaggtgagccaatccgaaccagcaccactggagacaagaggtatcccattcattcctatgataagcccgtccccaagtcaggaggaattacaaacaaccctggaagagaccgaccaaagcacacaggagcccttcacgacaaagataccccgaaccacagaactggccaaaactacacaggcacctcaccgattttatactacagtcagacctcgcacctcagacaaaccccacatcagaccaggagtgaagcaagctccacgtccatcgggggcggaccgaaacgtgtcagtagactcaacccaccctacaaagaagccgggtactcgccgaccacctctgccgcccagacccacacacccaagacggaaacccctgccgccgaacaacgtaaccgggaaacctgggtccgcaggcataatctcttccggtccaattacaacccccccactgagatccactcctcgccccactggaacgcctctcgagcggattgaaaccgacataaaacagcctacagtgcccgcttcaggcgaagaactagagaatattaccgacttttcctcaagccctaccagagagacagacccactaggaaaaccacgctttaaaggcccgcatgttcgctatattcagaaaccggataattccccatgtagcattactgatagcgttaaacgattccctaaggaggaggcaactgaaggaaacgccacctcccccccccagaaccccccaactaatcttacagtcgttaccgttgaaggatgcccatcattcgtgatactagactgggagaagcctctgaacgacactgtaacagagtatgaagtgattagtagggaaaatggttcttttagcggcaaaaataagagcattcaaatgactaatcaaactttcagcacggtggaaaatctcaagccaaacacatcctacgaattccaggtcaagccaaaaaatcccttaggcgaagggcctgtcagcaacacagtggcgttttcaaccgagtctgccgaccctagagtatctgaacctgtatcagccggtcgtgacgctatttggacagagaggcctttcaattccgattcatatagcgagtgtaagggaaaacagtacgtgaagagaacatggtataaaaaatttgtaggagtccagctttgtaactccctgcgttacaaaatctacctgagcgatagtctgacgggaaaattctacaatattggagaccagcgaggacacggcgaagatcactgtcagtttgtcgacagctttctcgacggacggactgggcagcagctaacctccgatcagctccccataaaagaaggctactttagagcggtgcggcaagaacccgttcagtttggcgagatcggcggtcatactcagattaattacgttcaatggtacgaatgcgggacaactatcccaggtaaatggtag

SEQ ID NO: 301420 - DNA, 3090 bp, Artificial Sequence
  derived and/or modified sequence
atgccccccaccaagagcgtgagcgagcccgtgcccttcgagaccgaggcccccagcatgaccatcgtgcccaccaccgacatcgagcccgtgaccgtgagaaccgaggccaccgtgaccaccctggcccccaagaccagccagagaaccagaaccagaagacccagacccaagcacaagaccacccccagacccgagaccctgcagaccaagctggacttcggccccatcacccccggcaccagcagcgcccccaccaccaccaccaagagaaccagaagaccccaccccaagcccaagaccaccccccaccccgaggtgccccagaccaagctggtgcccgccaccatcctggagcccgtgctgagaaccgaggccagcggcaccaccgccgtgcccgccaccatcttcgagcccgtgagccccatcaaggaggcccccggcaccaccttcgtgcccgtgaccgacctggagcccgtgaccttcagaaccgagatccccgccaccaccctggccaccaagaccagcaagagaaccagaccccccagacccagacccaagaccacccccagcccccaggcccccgagaccaagcccgtgcccgccaccgtgctggagcccgtgaccctgagacccgaggccagcaccaccctggccagcaagaccagccagagaaccagaagacccagactgagaaccaagaccacccccagacccgaggcccccgagagcaagcccgtgcccaccgccgagctgaagcccgtgaccctgagaaccgagacctgggtgaccacccaggcccccaagaccagccagagaaccagaagacccagacccaagaccaagaccacccccagccccgaggtgccccagaccaagctggtgcccagcaccgacctggagcccggcaccctgagaaccgaggcccccaagaccatggtggtgaccaccgtgctggagcccgacaccttcagaaccaagttccccgagaccaccctggcccccaagacccagagaaccagaagacccagacccagacccaagaccaccagcagccccgaggtgccccagaacaagagcgtgagcgtgaccggcttcgagcccgtggtgcacagcaccgacgcccccggcaccaccttcgccctgaccgagctgcagaccctgatcctgaagcccgtgaccagccccagcctggagatgaccgagagccagcccgtgagcgacgtgctggagagcgtgaccctgagcaccgagagccccaaggagaccatcgcccccgccaagaccgactacgtgtaccccaccgccaaggcccccctgtggcccgaggagcccaagaccgaggtggtggagagcatcacctacgtgagcgagccccccgagaccaccctggagaccagccccctgcccagccagagcatcaccctgcccagccccgacgagccccagaccgagcccgcccccaagcagacccccagagccccccccaagcccaagaccagccccagacccagaatcccccagacccagcccgtgcccaaggtgccccagagagtgaccgccaagcccaagaccagccccagccccgaggtgagctacaccacccccgcccccaaggacgtgctgctgccccacaagccctaccccgaggtgagccagagcgagcccgcccccctggagaccagaggcatccccttcatccccatgatcagccccagccccagccaggaggagctgcagaccaccctggaggagaccgaccagagcacccaggagcccttcaccaccaagatccccagaaccaccgagctggccaagaccacccaggccccccacagattctacaccaccgtgagacccagaaccagcgacaagccccacatcagacccggcgtgaagcaggcccccagacccagcggcgccgacagaaacgtgagcgtggacagcacccaccccaccaagaagcccggcaccagaagaccccccctgccccccagacccacccaccccagaagaaagcccctgccccccaacaacgtgaccggcaagcccggcagcgccggcatcatcagcagcggccccatcaccaccccccccctgagaagcacccccagacccaccggcacccccctggagagaatcgagaccgacatcaagcagcccaccgtgcccgccagcggcgaggagctggagaacatcaccgacttcagcagcagccccaccagagagaccgaccccctgggcaagcccagattcaagggcccccacgtgagatacatccagaagcccgacaacagcccctgcagcatcaccgacagcgtgaagagattccccaaggaggaggccaccgagggcaacgccaccagccccccccagaacccccccaccaacctgaccgtggtgaccgtggagggctgccccagcttcgtgatcctggactgggagaagcccctgaacgacaccgtgaccgagtacgaggtgatcagcagagagaacggcagcttcagcggcaagaacaagagcatccagatgaccaaccagaccttcagcaccgtggagaacctgaagcccaacaccagctacgagttccaggtgaagcccaagaaccccctgggcgagggccccgtgagcaacaccgtggccttcagcaccgagagcgccgaccccagagtgagcgagcccgtgagcgccggcagagacgccatctggaccgagagacccttcaacagcgacagctacagcgagtgcaagggcaagcagtacgtgaagagaacctggtacaagaagttcgtgggcgtgcagctgtgcaacagcctgagatacaagatctacctgagcgacagcctgaccggcaagttctacaacatcggcgaccagagaggccacggcgaggaccactgccagttcgtggacagcttcctggacggcagaaccggccagcagctgaccagcgaccagctgcccatcaaggagggctacttcagagccgtgagacaggagcccgtgcagttcggcgagatcggcggccacacccagatcaactacgtgcagtggtacgagtgcggcaccaccatccccggcaagtggtag

SEQ ID NO: 301421 - DNA, 3090 bp, Artificial Sequence
  derived and/or modified sequence
atgccgccgaccaagtccgtttccgagcctgtccccttcgaaactgaagcgccaagtatgacaatagttcctactactgacatcgagcccgtgaccgtcagaactgaggcaaccgttactaccttggcacctaagacttcgcagagaaccagaactcgcagacccagacccaaacacaagaccacaccccggcctgagaccctgcaaaccaagcttgatttcgggcctatcaccccggggactagctcagcccctactaccactacaaagagaaccagacgcccgcatcctaagcctaagacgaccccccaccctgaggtacctcagaccaaactggttcctgctactattctcgaaccagtgctgcgaaccgaggccagcggcaccaccgccgtgcccgcaaccatcttcgagccggtctcccctattaaggaggcccccggaaccacttttgttccggtcacagatcttgaacctgtcactttccgtactgagatccccgccaccactctcgccaccaagacgtcaaagcgcacccgtccgcctcgcccgagacccaaaaccaccccatcgcctcaggctccagagacaaagccagtacccgccacagtcctggaacctgtgaccctgaggcctgaggccagcactacattggcctcgaagacaagtcagcggaccaggcggccgcgtttgcgtactaagacgaccccccggccagaggctcccgaatccaaacccgtccctacagcggaactgaaacctgtgacgctgaggactgaaacctgggtcacaacacaggctcccaagacaagccagaggacacggagacctcgcccgaaaacaaagaccacaccgtcccctgaggtgccacagacaaagctcgtacccagtacagatctggaaccggggacgctccggactgaggccccaaagactatggttgtcacaaccgtattggagcctgatactttcaggacaaaattccctgagacaacactcgcgccaaaaacacagagaacccgacgaccacgtccacgacctaagaccacttcctcacctgaagtaccgcagaataaatcagtttcagttaccggcttcgaaccggtggttcactccactgatgctccaggcactaccttcgctcttaccgaactacagaccctcattctgaagcccgtgacctcgcccagtttggagatgacagaatctcagcccgtctctgacgtcctcgaatccgtgacactcagcactgagagtcctaaggagaccatcgctcccgccaagactgattatgtatacccaaccgccaaagcaccactctggcccgaagaaccaaaaacggaggtggtcgagagtatcacgtacgtgtcagagccgcccgaaaccaccttggagaccagcccacttccttcccagagcatcacattaccctcaccggatgagcctcaaacggagcccgccccaaagcagacacccagagcaccacctaaaccaaagacctccccacgcccccgcatacctcagacccagccggtgccaaaagttccccagcgagtcacagcgaagcctaagacctcccctagccccgaggtcagctatacaacacccgccccaaaggacgtactgttgcctcacaagccgtaccccgaagttagccagagtgaacctgcgcccctggaaacccgcggaattcccttcattcctatgataagcccctctcccagccaggaagagctacagactactctggaggagaccgatcaatctacccaagagccttttacaaccaaaataccccgcacaactgaacttgcgaagaccacacaggcacctcaccggttctataccacagtgcggccccggacaagcgacaagccccacatcaggcccggggtcaaacaggcacccaggccaagtggtgccgataggaacgtgtctgtggattctactcaccctacaaagaagccaggtaccagacgccctccgctcccaccacggcctactcatccgcgccggaagccccttccgcccaataatgtgactggaaagccgggatctgccggaattatctcctctggaccaattacaactccccctctgagatcaactcccagacccacaggaacacccctggaaagaattgagaccgacattaagcagcccacggtgcctgcctcgggcgaggaactggaaaatattacagactttagtagctctcctactagagagacagacccccttggcaagcctcggttcaaaggcccacacgttagatatatccaaaaaccagataattccccttgcagcatcacagactccgttaagagattcccaaaggaggaagccactgagggtaatgcaacctcgcctcctcagaatcctcctacgaaccttaccgtcgtgacagtcgaaggctgccctagtttcgtcatcttggattgggagaaaccattaaatgacaccgtgaccgagtacgaggtgatatctcgtgagaacggaagtttctctggaaagaataagtctatccagatgactaatcagacgttctccaccgtcgagaatctgaaaccaaacacttcatatgaatttcaggtgaagcccaagaaccctctcggggagggccccgtctctaacaccgtggccttttccaccgaaagcgccgacccacgtgtgagtgagccagtttccgctggaagggatgcaatctggacagaacgccctttcaactctgattcttacagtgaatgcaaaggcaagcaatatgtaaaacgaacctggtataagaagttcgtcggtgtgcagctctgtaattccctgaggtacaagatatatctgagtgacagtctaaccggtaagttttacaatattggtgatcagagaggtcacggagaggatcattgccagtttgtggacagttttctggacggcaggacagggcagcaactgacatccgaccagcttccaatcaaggaggggtatttccgcgctgtgaggcaggagcccgtgcagttcggagagattggcggccatacacagattaactatgtccagtggtatgagtgtggcaccacaatccctgggaagtggtag

SEQ ID NO: 301422 - DNA, 3090 bp, Artificial Sequence
  derived and/or modified sequence
atgccacccaccaagtctgtgtctgagcctgtgccctttgaaacagaggcccccagcatgaccatcgtgcccaccacagacatcgagcctgtgacagtgaggacagaggccaccgtgaccaccctggcccccaagaccagccagaggaccaggacccggcggccccggcccaagcacaagaccacccccaggcctgagaccctgcagaccaagctggactttggccccatcaccccaggcaccagcagcgcccccaccaccaccaccaagaggacccggcggccccaccccaagcccaagaccaccccccaccctgaggtgccccagaccaagctggtgcctgccaccatcctggagcctgtgctgaggacagaggccagcggcaccacagctgtgcctgccaccatctttgagcctgtgagccccatcaaggaggcccctggcaccacctttgtgcctgtgacagacctggagcctgtgaccttcagaacagagatcccagccaccaccctggccaccaagaccagcaagaggaccaggcctccccggccccggcccaagaccacccccagcccccaggcccctgagaccaagcctgtgcctgccaccgtgctggagcctgtgaccctgcggcctgaggccagcaccaccctggccagcaagaccagccagaggacccggcggccccggctgcggaccaagaccacccccaggcctgaggcccctgagagcaagcctgtgcccacagctgagctgaagcctgtgaccctgaggacagagacctgggtgaccacccaggcccccaagaccagccagaggacccggcggccccggcccaagaccaagaccacccccagccctgaggtgccccagaccaagctggtgcccagcacagacctggagcccggcaccctgaggacagaggcccccaagaccatggtggtgaccaccgtgctggagccagacaccttccgcaccaagtttcctgagaccaccctggcccccaagacccagaggacccggcggccccggccccggcccaagaccaccagcagccctgaggtgccccagaacaagtctgtgtctgtgacaggctttgagcctgtggtgcacagcacagatgcccctggcaccacctttgccctgacagagctgcagaccctcatcctgaagcctgtgaccagccccagcctggagatgacagagagccagcctgtgtctgatgtgctggagagcgtgaccctgagcacagagagccccaaggagaccatcgccccagccaagacagattatgtgtaccccacagccaaggcccccctgtggccagaggagcccaagacagaggtggtggagagcatcacctacgtgtctgagcccccagagaccaccctggagaccagccccctgcccagccagagcatcaccctgcccagcccagatgagccccagacagagcccgcccccaagcagaccccccgggccccacccaagcccaagaccagcccccggccccgcatcccccagacccagcctgtgcccaaggtgccccagagggtgacagccaagcccaagaccagccccagccctgaggtgtcctacaccaccccagcccccaaggatgtgctgctgccccacaagccctacccagaggtgtcccagagcgagcccgcccccctggagacccggggcatccccttcatccccatgatcagccccagccccagccaggaggagctgcagaccaccctggaggagacagaccagagcacccaggagcccttcaccaccaagatccccaggaccacagagctggccaagaccacccaggccccccaccgcttctacaccaccgtgcggcccaggaccagtgacaagccccacatccggcctggggtgaagcaggccccccggcccagcggggctgacagaaatgtgtctgtggacagcacccaccccaccaagaagccaggcaccaggaggcctcccctgcccccccggcccacccaccccaggaggaagcccctgccccccaacaacgtgacaggcaagccaggcagcgctggcatcatcagcagcggccccatcaccaccccacccctgcggagcaccccccggcccaccggcacccccctggagcgcatcgagacagacatcaagcagcccaccgtgcctgccagcggggaggagctggagaacatcacagacttcagcagcagccccacccgggagacagaccccctgggcaagccccgcttcaagggcccccacgtgcgctacatccagaagccagacaacagcccctgcagcatcacagattctgtgaagcgcttccccaaggaggaggccacagagggcaatgccaccagccccccccagaacccccccaccaacctgactgtggtgacagtggagggctgccccagctttgtgatcctggactgggagaagcccctgaatgacacagtgacagaatatgaagtcatcagcagagaaaatggcagcttcagcggcaagaacaagagcatccagatgaccaaccagaccttcagcacagtggagaacctgaagcccaacaccagctatgagttccaggtgaagcccaagaaccccctgggggagggccctgtgagcaacacagtggccttcagcacagagagcgctgacccccgggtgtctgagcctgtgtctgctggaagagatgccatctggacagagcggcccttcaacagcgacagctacagtgaatgtaaaggcaagcagtatgtgaagaggacctggtacaagaagtttgtgggcgtgcagctgtgcaacagcctgcgctacaagatctacctgagtgacagcctgaccgggaagttctacaacatcggggaccagaggggccacggggaggaccactgccagtttgtggacagcttcctggatggccgcacaggccagcagctgaccagtgaccagctgcccatcaaggagggctacttccgggctgtgcggcaggagcctgtgcagtttggagaaattggaggccacacccagatcaactacgtgcagtggtatgaatgtggcaccaccatccctgggaagtggtag

SEQ ID NO: 301423 - DNA, 3090 bp, Artificial Sequence
  derived and/or modified sequence
atgccccccaccaagagcgtgagcgagcccgtgcccttcgagaccgaggccccatcgatgacaatcgtgccgaccacagacatcgaacccgtcacggtgcggaccgaagccacggtcaccacgctggccccaaagacctcccagcgcacgcgtaccaggaggccccgccccaagcacaagacaaccccacggcccgaaactctgcaaaccaaattggactttggacctatcactcccgggacttcatccgcaccaacaactacgacaaaacggacacgtagaccacacccaaagcctaagaccacccctcatccagaggttcctcagaccaaactggttcccgccaccattctggaacccgtgcttcgcactgaggccagcgggaccactgccgtccccgccacaatttttgaacctgtgtcgcctatcaaagaagcaccgggcaccacttttgtgcccgtcactgacctcgaacctgtcacctttagaaccgaaattccagccacaaccctcgcaacgaaaacttctaagcggactaggccacccagaccacggccaaagacaactccatcaccccaggctccagagactaagccggtccctgcaacagttcttgagcccgttacgctgagaccagaagcctctaccaccctggcttctaaaacctcacagagaacgcggaggcctcgcctgagaaccaagaccacaccgcgaccagaggcgcccgaaagtaaaccagtgccaaccgccgaactgaagccagttaccctcagaacagaaacttgggttacaacacaggcacctaagacatcccagcgcacccgacgaccccggccaaagaccaagaccacaccttcgcctgaggttccacagactaagctagtaccatccaccgacctggagcctggtactctgcggacagaggccccaaagaccatggttgtcacaactgtgctagaaccagacacctttcgcactaaattcccagaaaccactttagctcctaaaacccaacgcacacgccgtcccaggcccaggccaaaaacaactagctccccagaagtgccacagaataagagtgtaagtgttacagggtttgagccagtggtgcattcaactgacgccccaggtacaactttcgccttaactgaactgcaaacgcttatcctgaagcccgtgacctcccccagtttagaaatgacagagtctcaaccagtctcagacgttcttgaatccgtcacactcagcaccgaaagccctaaagagactatcgcccctgccaaaactgattatgtttacccaacagctaaggcgcccttatggccagaggaaccgaagaccgaagttgtggagagcataacctacgtgtcagagccaccagagacaaccctggagactagtcctctgccctcacagtcgattacattgcctagcccagatgaaccgcagacggagcccgcaccaaaacaaaccccacgtgcaccccctaagcccaagacttccccaaggccacgaatacctcagacacaaccagtgcccaaggtgccacagagagtaaccgctaagccaaagactagtcctagtccagaggtatcctatacaaccccagcgccaaaagatgtcttgctgccccacaaaccataccccgaggtgtcacagagtgaaccagcccccctagaaacccgcggcatcccctttatccccatgattagcccatccccttcgcaggaagaactccaaaccaccctagaggaaaccgatcaaagtacacaggagccttttacaaccaaaattccccggactacagagctggcaaaaactactcaagcccctcatagattttatactacggttcgccctcgaacgtccgacaagcctcacatccgcccaggagtgaagcaagccccgaggccatcgggtgctgatcgcaacgtgagtgtggattcaacccaccctactaagaagcccggaactcgccgccctcccttacccccccggcctacccacccccggcggaagcccctaccacccaacaatgtcaccggcaaaccgggaagcgctggaattatttcgtccgggccaatcactactccaccactaaggtcgacaccgagacccactggcacgccgctggaacgcatagaaactgacatcaagcagccaaccgtgccagcttctggggaggagcttgaaaacattaccgatttttccagctctccaacgcgcgagaccgacccgctggggaaacctcggttcaagggccctcacgtcagatacatccagaagcccgataacagcccctgtagcatcaccgacagtgtgaaacgtttcccgaaggaggaagctacagaaggaaacgccacatcacctccccagaatcctcctaccaatttgaccgtagtgacagtggagggatgtccctctttcgttatcttggattgggaaaaaccgcttaatgacactgtgacagaatacgaagtcatatcccgagaaaacggctcgtttagcggtaaaaataaatcaatccagatgacgaatcagacttttagcacggtggaaaacctgaaacctaacacgtcatatgagtttcaggttaagccaaaaaatcctctcggcgaaggaccggtgtctaatactgttgccttctcaactgagagtgccgatcctcgagtatcagaaccggtatcagcaggtcgtgacgctatatggaccgaaaggccctttaattctgactcctattcggagtgcaagggaaagcaatatgtaaagcgcacctggtacaagaagtttgtaggcgtacagctgtgtaacagcctgcgctacaaaatttatctgagtgactctctgaccggcaagttctacaatatcggcgaccagcgcgggcacggcgaagatcattgccaattcgtggattcgttcctcgacggccgcaccggccaacagctgacctccgaccagttgcctatcaaagaaggatactttcgcgctgtgaggcaggagccggtccagttcggcgaaatcgggggccacacccagatcaattatgtccagtggtacgagtgtggaaccactattcccggcaagtggtag

SEQ ID NO: 301424 - DNA, 3650 bp, Artificial Sequence
  derived and/or modified sequence
ttatttctctgaaacctaaaatccctctcagcccagaagtgacacacaccaaacctgccccagaacctcagactctactgccatcacagtcaacaataggacctgaaacaccaggaaccaaaccttcaacaacattagctctggaacctgccacgatacaaccggagcccttggtgcccacaactgcctcaaaaccatctgagagacctaaaaccacacacagaccagatgcacctcaaattcagcctggttcaaaaccaccaaaacaattacttcctaaaccccaaaccacagcagaaccagacatgccaccaactaaatccgtctctgagcctgttccatttgaaactgaagctccctcaatgaccatagttcccaccacagacattgagcctgtaactgtgagaactgaggctacagtgacaacattagctccaaaaacatcgcaacgaacaagaacacgtcgtccacgtcccaaacataaaaccacgccacgcccagagacactgcagaccaaactagactttggacctattactcctgggacatcttcagctccaacaacaacaacaaaaagaacccgtcgtccacatcccaaacctaaaaccacgccccatccagaagtacctcaaactaaactggttcctgccacaatcctcgaaccagttcttagaactgaggcttcagggacaacagcagttcctgctacaatctttgaaccagtttctcctataaaagaggctccagggacaacattcgttcctgttacagacctcgagcctgttacttttagaactgagatccctgcaacaaccttagctaccaaaacatcaaaaagaacccgccctccacgtcccagacctaaaactacaccgagccctcaggcacctgagaccaaacctgttcctgctacagtcctagaacctgtcactcttagacctgaggcctcaacaacattagcttccaaaacatcacaacggacacgtcgtccacgtctcagaacaaaaaccacaccacgtcctgaagcacctgaatccaaaccagttcctactgcggagctcaaacctgttacactcagaactgagacttgggtgacaacacaagctcctaaaacatcacaacgaactcgtcgtccacgtcccaaaactaaaaccacaccaagtcctgaggttcctcaaaccaaactggttccttctacagatcttgaacctggtactctcagaactgaagctccaaaaaccatggttgttactacagtccttgaacctgacacttttagaaccaagtttccagaaacaacgttagctcctaaaacacaacggacacgtcgtccccgtcccagacccaaaactacatcaagtcctgaagtacctcagaacaaatcggtttctgttacaggctttgaacctgttgttcatagtactgatgctccaggaacaacatttgctctgactgaactgcaaactcttattttgaaaccagtgacatcaccaagcctagaaatgacagaaagtcaacctgtttctgatgttctggaatcggttacacttagtactgagtcaccaaaggagaccatagcaccagccaaaacagactatgtatatcccactgccaaagcaccactctggccagaggagccaaagactgaagttgtggaatctattacatatgtatctgaaccacctgagaccacactagaaacgtcgcctctgccttctcaatctataaccctacccagcccagatgagcctcagactgaacctgctcccaagcagacaccacgtgctcctcctaagccaaaaacatcaccacgcccaagaatcccacaaacacaaccagttcctaaggtgccccagcgtgttactgcaaaaccaaaaacgtcaccaagtccagaagtgtcatacaccacacctgctccaaaagatgtgctccttcctcataaaccataccctgaggtctctcagagcgaacctgctcctctagagacacgaggcatcccttttatacccatgatttccccaagtcctagtcaagaggaactacagaccactctggaagaaacagaccaatccacccaagaacctttcacaactaagattccacgaacaactgaactagcaaagacaactcaggcgccacacagattttatactactgtgaggcccagaacatctgacaagccacacatcagacctggggtcaagcaagcacccaggccatcaggtgctgatagaaatgtatcagtggactctacccaccccactaaaaagccagggactcgccgcccacccttgccacccagacctacacacccacgaagaaaacctttaccaccaaataatgtcactggaaagccaggaagtgcaggaatcatttcatcaggcccaataactacaccacccctgaggtcaacacccaggcctactggaactcccttggagagaatagagacagatataaagcaaccaacagttcctgcctctggagaagaactggaaaatataactgactttagctcaagcccaacaagagaaactgatcctcttgggaagccaagattcaaaggacctcatgtgcgatacatccaaaagcctgacaacagtccctgctccattactgactctgtcaaacggttccccaaagaggaggccacagaggggaatgccaccagcccaccacagaacccacccaccaacctcactgtggtcaccgtggaagggtgcccctcatttgtcatcttggactgggaaaagccactaaatgacactgtcactgaatatgaagttatatccagagaaaatgggtcattcagtgggaagaacaagtccattcaaatgacaaatcagacattttccacagtagaaaatctgaaaccaaacacgagttatgaattccaggtgaaacccaaaaacccgcttggtgaaggcccggtcagcaacacagtggcattcagtactgaatcagcggacccaagagtgagtgagccagtttctgcaggaagagatgccatctggactgaaagaccctttaattcagactcttactcagagtgtaagggcaaacaatatgtcaaaaggacatggtataaaaaatttgtaggagtgcagctgtgcaactctctcagatacaagatttacttgagcgactccctcacaggaaaattttataacataggtgatcagaggggccatggagaagatcactgccagtttgtggattcatttttagatggacgcactgggcagcaactcacttctgaccagttaccaatcaaagaaggttatttcagagcagttcgccaggaacctgtccaatttggagaaataggtggtcacacccaaatcaattatgttcagtggtatgaatgtgggactacaattcctggaaaatggtagatgctgcacaaagttaccttctgtttcatcattgcaaacaaaaatcattgaaaatactatgccgcattcatttaaagctattttgtttactatgtataaaagtctacaatctaattaatagcaatactagatgtttattattagaaaagattgctgagagtatttatcaggttttacaaagtcattttaagaaagcaagatactgatgttaacagaataacatttttggggaagctggctccctattcatggtat

SEQ ID NO: 301425 - RNA, 3090 nt, Artificial Sequence
  derived and/or modified sequence
augcccccgacaaagagugugucugagccugucccuuuugaaacagaagcaccauccaugacaauaguucccacuacagacauugaacccgugacuguuagaacagaggccacagugacuacacuggcuccaaagaccagccagcgcaccaggacuagacguccuaggccaaaacauaaaacaacuccaagaccugaaacacugcaaacuaaacuggauuucgggcccaucacucccgggacuaguagcgcucccacgacaaccacuaagcggacucggcgcccccacccuaaacccaaaacuacaccccauccugaaguaccgcagaccaagcucgucccugccacgauccuggagcccgugcuucgcaccgaagcuuccgggacuacugccgugccugcuacuaucuucgagcccguaaguccuauuaaggaagccccugggacuacguuuguuccaguaacagaccucgaaccuguaacguuuagaacugaaauucccgccacaacacuugcaacuaagacauccaaaaggacaagaccuccccggccuaggccaaaaacaacgcccucuccucaagcuccugagaccaagcccguuccugcuacaguccuugagcccgucacucuucggcccgaggcgaguacaacacuggcaucaaaaacaagucagcgcacacgacgaccgcgacuuaggacgaaaacuacaccgcgcccagaggcuccugagagcaaaccaguuccuacagcugaacucaagccagugacucuucggacugagacaugggugaccacacaggccccuaagacuucacagagaacaaggcggccccguccgaagacaaaaacuaccccuucuccagaggugccucaaacaaagcuuguuccaagcaccgauuuagaacccggaacccuucggacagaagcgccaaaaacuaugguugugacuaccguguuagaaccagauacauuccgcaccaaguuccccgaaaccacccucgccccaaagacucagcgaaccagaagaccaagaccaaggccuaaaaccacuuccuccccagagguuccucaaaauaaaucugugagugugacgggauuugagcccguuguucauagcacagacgcacccgggaccaccuuugcuuuaacagaauugcagacucuuauucucaagcccgugacaagucccagccucgaaaugacugagagccagccgguuagcgauguauuggaaaguguaacacucucuaccgagagcccuaaggagaccaucgccccugccaaaacggauuauguuuacccuaccgccaaggcucccuuguggccggaggagccuaaaaccgaaguuguggaaucaaucacguacgugucagaaccucccgagacuacacucgagacaaguccgcucccgagccagucuaucacucugcccuccccugaugagccacagaccgagcccgccccaaaacagacgccaagggcuccgccaaagcccaaaacaagucccagaccacggauuccccaaacacagcccguuccaaaggucccacagcgagugaccgccaaacccaagaccucccccucucccgaagugucuuacacaacaccagcuccgaaagacguacuccugccgcauaagccauauccagaggucucgcaguccgagcccgcuccacuggaaacuagagggauuccuuuuaucccuaugauuucacccagccccagccaggaggaacuacagaccacucucgaggaaaccgaucagucuacacaggaacccuucacaacuaagauuccacgcacaaccgagcuggcuaagaccacccaagccccucacagguucuauacuaccgucagaccaagaacuucugauaaaccacacauuagaccuggagugaaacaggccccacgucccucaggagcagacagaaauguguccguugauagcacgcauccaacuaagaaacccggcacaaggagacccccacuaccuccucgccccacacauccccggcgcaagccucugcccccuaacaacguuacagguaagcccggcagcgcaggcaucauaagcagcggccccauaacgaccccaccucugagauccacuccucgccccacuggaacgccucucgagcggauugaaaccgacauaaaacagccuacagugcccgcuucaggcgaagaacuagagaauauuaccgacuuuuccucaagcccuaccagagagacagacccacuaggaaaaccacgcuuuaaaggcccgcauguucgcuauauucagaaaccggauaauuccccauguagcauuacugauagcguuaaacgauucccuaaggaggaggcaacugaaggaaacgccaccucccccccccagaaccccccaacuaaucuuacagucguaacaguggaaggaugucccuccuucgugauccuggauugggagaagccucugaaugauacggugacagaauacgaggugauaucucgggagaauggcucauuuucaggcaagaauaagagcauccagaugacgaaccaaacguucagcacgguggaaaaucuaaagccuaacacaucauacgaguuccaagucaaaccaaagaacccauugggcgagggaccugugaguaacacuguggccuucuccacugaauccgcugauccuagagugagcgagccaguuagcgcagggcgcgacgccaucuggacugagcguccuuucaacagugacaguuacagcgagugcaaaggaaagcaguacgugaaaagaacuugguacaagaaauucgucgggguucagcuguguaacucccucagauacaagauuuauuugagcgauucauugacggggaaguuuuauaacauuggagaucagcggggccacggcgaagaucauugccaguucguggacucguuccuugacggcagaacugggcaacagcuaacaagcgaccagcugccuauuaaagaggguuauuuccgcgccgugaggcaggagcccgugcaguuuggcgagauuggcggacauacucagaucaacuacguacaaugguaugagugcggcacgacaauuccaggaaagugguag

SEQ ID NO: 301426 - RNA, 3090 nt, Artificial Sequence
  derived and/or modified sequence
augccaccaacaaaauccguuucagagccuguaccuuuugaaaccgaagcucccagcaugacuauagugcccaccacagacaucgagccagugacaguucgcacagaggcaaccgucacgacuuuagcgccuaagacuagccaaagaacuagaacaagaagaccucgcccaaagcauaagacuaccccaaggccugagacccuccagaccaaacuugacuucggccccaucacaccaggcaccucaagcgcucccacgaccacuaccaaacgcaccagacgcccacacccaaagccuaaaaccaccccccauccugaagucccccagacgaagcuagugccagcgacuauccuggagcccgucuuacguaccgaagccagugguacaacagccgugccugcuaccauuuuugaacccgucagccccaucaaggaagcaccagggacuacauucguaccagugaccgaccuggagccugugaccuuuagaaccgaaaucccagcgacaacacuugcaacaaaaacuagcaaaaggacccguccuccccgacccagacccaagacaacccccucuccucaggccccagagacuaaaccuguaccugcaacaguccuagagcccgugacguugcguccagaagcaaguacuacacuggcauccaagaccucccagcggaccagaagacccagacucagaacaaagacuacaccacggcccgaggcucccgaaucuaaaccaguuccaacagcugaacuuaagccugugacuuuacguaccgaaaccugggucacgacucaagccccaaagacaucacagcgcacacgccgcccuaggccaaagaccaaaacaacaccgucaccagaagucccccagacaaaacuggugccuucuaccgacuuagaacccggaacccuucggacagaagcgccaaaaacuaugguugugacuaccguguuagaaccagauacauuccgcaccaaguuccccgaaaccacccucgccccaaagacucagcgaaccagaagaccaagaccaaggccuaaaaccacuuccuccccagagguuccucaaaauaaaucugugagugugacgggauuugagcccguuguucauagcacagacgcacccgggaccaccuuugcuuuaacagaauugcagacucuuauucucaagcccgugacaagucccagccucgaaaugaccgaaucacagccagugucagacgugcucgaaucaguuacacuuaguacagagaguccuaaggaaacuaucgcucccgcgaagacagacuacguguauccuacugcuaaagccccucucuggccagaggaaccgaaaacugaagucguggaaucaauuacauaugugagcgaacccccugagacuacacuugagacuagcccacugcccagccagucuaucacucuaccuucaccagacgaaccccagacagaacccgcccccaaacaaacucccagagcuccuccaaaacccaagacuagcccucggcccagaaucccucaaacccagccagucccuaagguuccccagagaguaacggcaaaacccaagacaaguccaagcccagaagugagcuacacgacccccgcucccaaagacguucuacucccccacaagccauaucccgaggugagccaauccgaaccagcaccacuggagacaagagguaucccauucauuccuaugauaagcccguccccaagucaggaggaauuacaaacaacccuggaagagaccgaccaaagcacacaggagcccuucacgacaaagauaccccgaaccacagaacuggccaaaacuacacaggcaccucaccgauuuuauacuacagucagaccucgcaccucagacaaaccccacaucagaccaggagugaagcaagcuccacguccaucgggggcggaccgaaacgugucaguagacucaacccacccuacaaagaagccggguacucgccgaccaccucugccgcccagacccacacacccaagacggaaaccccugccgccgaacaacguaaccgggaaaccuggguccgcaggcauaaucucuuccgguccaauuacaacccccccacugagauccacuccucgccccacuggaacgccucucgagcggauugaaaccgacauaaaacagccuacagugcccgcuucaggcgaagaacuagagaauauuaccgacuuuuccucaagcccuaccagagagacagacccacuaggaaaaccacgcuuuaaaggcccgcauguucgcuauauucagaaaccggauaauuccccauguagcauuacugauagcguuaaacgauucccuaaggaggaggcaacugaaggaaacgccaccucccccccccagaaccccccaacuaaucuuacagucguuaccguugaaggaugcccaucauucgugauacuagacugggagaagccucugaacgacacuguaacagaguaugaagugauuaguagggaaaaugguucuuuuagcggcaaaaauaagagcauucaaaugacuaaucaaacuuucagcacgguggaaaaucucaagccaaacacauccuacgaauuccaggucaagccaaaaaaucccuuaggcgaagggccugucagcaacacaguggcguuuucaaccgagucugccgacccuagaguaucugaaccuguaucagccggucgugacgcuauuuggacagagaggccuuucaauuccgauucauauagcgaguguaagggaaaacaguacgugaagagaacaugguauaaaaaauuuguaggaguccagcuuuguaacucccugcguuacaaaaucuaccugagcgauagucugacgggaaaauucuacaauauuggagaccagcgaggacacggcgaagaucacugucaguuugucgacagcuuucucgacggacggacugggcagcagcuaaccuccgaucagcuccccauaaaagaaggcuacuuuagagcggugcggcaagaacccguucaguuuggcgagaucggcggucauacucagauuaauuacguucaaugguacgaaugcgggacaacuaucccagguaaaugguag

SEQ ID NO: 301427 - DNA, 4635 bp, Artificial Sequence
  derived and/or modified sequence
atggcagcaatgtatcaccaaaccagtacttccctcttcccgctgaagggaaattcacagaagctatagttgatgcagagccgaaatatctgatagttgtgcgacctgctccacctccaagtcaaaagaagtcatgttcaggtaaaactcgttctcgcaaacctctgcagctggtggttggcactctgacaccgagctcggtcttcctgtcctggggtttcctcatcaacccacaccatgactggacattgccaagtcactgtcccaatgacagattttatacaattcgctatcgagaaaaggataaagaaaagaagtggatttttcaaatctgtccagccactgaaacaattgtggaaaacctaaagcccaacacagtttatgaatttggagtgaaagacaatgtggaaggtggaatttggagtaagattttcaatcacaagactgttgttggaagtaaaaaagtaaatgggaaaatccaaagtacctatgaccaagaccacacagtgccagcatatgtcccaaggaaactaatcccaataacaatcatcaagcaagtgattcagaatgttacccacacctagtccagaagtgcccaagtccaaacccgctctggaacctgccacgatacaaccggagcccttggtgcccacaactgcctcaaaaccatctgagagacctaaaaccacacacagaccagatgcacctcaaattcagcctgtctctgagcctgttccatttgaaactgaagctccctcaatgaccatagttcccaccacagacattgagcctgtaactgtgagaactgaggctacagtgacaacattagctccaaaaacatcgcaacgaacaagaacacgtcgtccacgtcccaaacataaaaccacgccacgcccagagacactgcagaccaaactagactttggacctattactcctgggacatcttcagctccaacaacaacaacaaaaagaacccgtcgtccacatcccaaacctaaaaccacgccccatccagaagtacctcaaactaaactggttcctgctacaatctttgaaccagtttctcctataaaagaggctccagggacaacattcgttcctgttacagacctcgagcctgttacttttagaactgagatccctgcaacaaccttagctaccaaaacatcaaaaagaacccgccctccacgtcccagacctaaaactacaccgagccctcaggcacctgagaccaaacctgttcctgctacagtcctagaacctgtcactcttagacctgaggcctcaacaacattagcttccaaaacatcacaacggacacgtcgtccacgtctcagaacaaaaaccacaccacgtcctgaagcacctgaatccaaaccagttcctactgcggagctcaaacctgttacactcagaactgagacttgggtgacaacacaagctcctaaaacatcacaacgaactcgtcgtccacgtcccaaaactaaaaccacaccaagtcctgaggttcctcaaaccaaactggtttctgatgttctggaatcggttacacttagtactgagtcaccaaaggagaccatagcaccagccaaaacagactatgtatatcccactgccaaagcaccactctggccagaggagccaaagactgaagttgtggaatctattacatatgtatctgaaccacctgagaccacactagaaacgtcgcctctgccttctcaatctataaccctacccagcccagatgagcctcagactgaacctgctcccaagcagacaccacgtgctcctcctaagccaaaaacatcaccacgcccaagaatcccacaaacacaaccagttcctaaggtgccccagcgtgttactgcaaaaccaaaaacgtcaccaagtccagaagtgtcatacaccacacctgctccaaaagatgtgctccttcctcataaaccataccctgaggtctctcagagcgaacctgctcctctagagacacgaggcatcccttttatacccatgatttccccaagtcctagtcaagaggaactacagaccactctggaagaaacagaccaatccacccaagaacctttcacaactaagattccacgaacaactgaactagcaaagacaactcaggcgccacacagattttatactactgtgaggcccagaacatctgacaagccacacatcagacctgttctgaataggacaactacaagacctactaggcccaaacccagtgggatgcccagtgggaatggagtgggaacaggggtcaagcaagcacccaggccatcaggtgctgatagaaatgtatcagtggactctacccaccccactaaaaagccagggactcgccgcccacccttgccacccagacctacacacccacgaagaaaacctttaccaccaaataatgtcactggaaagccaggaagtgcaggaatcatttcatcaggcccaataactacaccacccctgaggtcaacacccaggcctactggaactcccttggagagaatagagacagatataaagcaaccaacagttcctgcctctggagaagaactggaaaatataactgactttagctcaagcccaacaagagaaactgatcctcttgggaagccaagattcaaaggacctcatgtgcgatacatccaaaagcctgacaacagtccctgctccattactgactctgtcaaacggttccccaaagaggaggccacagaggggaatgccaccagcccaccacagaacccacccaccaacctcactgtggtcaccgtggaagggtgcccctcatttgtcatcttggactgggaaaagccactaaatgacactgtcactgaatatgaagttatatccagagaaaatgggtcattcagtgggaagaacaagtccattcaaatgacaaatcagacattttccacagtagaaaatctgaaaccaaacacgagttatgaattccaggtgaaacccaaaaacccgcttggtgaaggcccggtcagcaacacagtggcattcagtactgaatcagcggacccaagagtgagtgagccagtttctgcaggaagagatgccatctggactgaaagaccctttaattcagactcttactcagagtgtaagggcaaacaatatgtcaaaaggacatggtataaaaaatttgtaggagtgcagctgtgcaactctctcagatacaagatttacttgagcgactccctcacaggaaaattttataacataggtgatcagaggggccatggagaagatcactgccagtttgtggattcatttttagatggacgcactgggcagcaactcacttctgaccagttaccaatcaaagaaggttatttcagagcagttcgccaggaacctgtccaatttggagaaataggtggtcacacccaaatcaattatgttcagtggtatgaatgtgggactacaattcctggaaaatggtagatgctgcacaaagttaccttctgtttcatcattgcaaacaaaaatcattgaaaatactatgccgcattcatttaaagctattttgtttactatgtataaaagtctacaatctaattaatagcaatactagatgtttattattagaaaagattgctgagagtatttatcaggttttacaaagtcattttaagaaagcaagatactgatgttaacagaataacatttttggggaagctggctccctattcatggtattttaagagatcatttgtatattatttatcacactgttgtaatgatgttttgagatacttttataacaaaattaacatcaaaaaggtatatactttttaaaaaaaatttacttttattgatgtgtactcttcctattgatgagttaattccataaatctctacttagtttaacttattggatcaaattatcttcagcatgtatatctggggaaaaaaggtccgaattttcacatttatatttaaacttcaattttttatatttaaacttcaattttttagcaacagctgaatagctttgcggaggagtttaatagttacacattcatgctaatatacatttcctttaaacatccacaaattcttaaaaagattgaatcagtaaatttcatttcagctaaaaatggagtctaatatattgtttcaaaagatacatttttacccaccataaatgttacaatatctgaatatgctttgtcaaactatccctttatgcaatcgtcttcatattgtttttatgattctaatcaagctgtatgtagagactgaatgtgaagtcaagtctgagcacaaaaagataatgcacgatgagattgcctaccattttataggatatttactatgtatttatacgttaagacctctatgaatgaatgtatcagagaatgtctttgtaactgtttaattcaatctgtaataaaaatctaactaactaactcatttatttctattaaaaaggtattgtcctttaggcggggaatgggaatccttgctgcactgttgcagtcattctgaaaggacctttccctgtacttacctttcaacatgcttcaatcttatcaacgctacattttgtatttttcaaacaagtataaattctgcaataaagagatgtagttttttttt

SEQ ID NO: 301428 - protein, 487 aa, Artificial Sequence
  derived and/or modified sequence
MAEGWRWCFVRRTPGLLRGPLLPRSFSGNPRALAGPIIVEPHVTAVWGKNVSLKCLIEVNETITQISWEKIHGKSSQTVAVHHPQYGFSVQGEYQGRVLFKNYSLNDATITLHNIGFSDSGKYICKAVTFPLGNAQSSTTVTVLVEPTVSLIKGPDSLIDGGNETVAAICIAATGKPVAHIDWEGDLGEMESTTTSFPNETATIISQYKLFPTRFARGRRITCVVKHPALEKDIRYSFILDIQYAPEVSVTGYDGNWFVGRKGVNLKCNADANPPPFKSVWSRLDGQWPDGLLASDNTLHFVHPLTFNYSGVYICKVTNSLGQRSDQKVIYISDVPFKQTSSIAVAGAVIGAVLALFIIAIFVTVLLTPRKKRPSYLDKVIDLPPTHKPPPLYEERSPPLPQKDLFQPEHLPLQTQFKEREVGNLQHSNGLNSRSFDYEDENPVGEDGIQQMYPLYNQMCYQDRSPGKHHQNNDPKRVYIDPREHYV

SEQ ID NO: 301429 - DNA, 1299 bp, Artificial Sequence
  derived and/or modified sequence
ctcgggcggtcacctgggcacgggcgctgcaggtgtcggggcctcaaccttgcggagccgacagccatcgatcctcgggtggcctcgaggtggtggcagggccgccccctgcagtccggagacgaacgcacggaccgggcctccggaggcaggttcggctggaaggaaccgctctcgcttcgtcctacacttgcgcaaatgtctccggcttgctccacttatcgggctcaccaaatacagctgcagtatgaattccatcttctacacaacagtaaaccagaatgttcatgttcacagcgttcatctcccatcctgttgtctaacgcacatggtttttttaaacttttctaagattgcatgagattctgcaacacaactgattataaaaacacttgaagtttttacctttttttttactttccaactctcgtgaatgtacagaggactttccagaagctacatgatgtgtgatatttcagctgatgaaatgtagatgtataggtaatcggtcagagtggtgggagaaactgttgggaaaggagcaggccttctgaaaggtcggaaggcttcaggggagaataagctgaacgcagctgttctctgaccttgaggcagagggcaaggagtaggtacaaggacgtgtaggagaatttatcttaaataggcttgttcacttgtgttgtccagaaacgacttttgatcatcagcgcgcatgactgctccctgaaaggaagaacaataatgttaattacccgcagactgtgtttgctccaggctttcggcattatgtctgtactgaataaaagcaagcagctccagctgttcgaggctgctctcttcttcagccattagtgccgggcagcccactagctgctgttacactgcatatctgtgtctgagtactcctttcttcagttgcttggccagggtctgtgggacagacccagcagctggtgccctgtgtgaggaacgctgcaatggatcgcgacggaaccctcgaaaacgaagagcttactcacatagcatattggtatatcaaaatgaaatgcaaggaaccaaaaataacataattgaaggcagtaaaagtgaaattaaataggaagatcatcagtcaaggaagacccactggagaggacagaaaatgaagcagtgttttatcatgtgtatttcagcaggtcttcttgaaatttaactaaaaatatgactgctctctcttcagagaactgctcttttcagtaccagttacgtcaaacaaaccagcccctagatgttaactatctgctattcttgatcatactt

SEQ ID NO: 301430 - DNA, 417 bp, Artificial Sequence
  derived and/or modified sequence
atggagcggttcctgaacagcaaggcccggcggctgggcagctgcagtcacccagcgttctatctcctgtgcgtaccagatgaagatacctcttgttcaacaatttacctccctctcaagagacgagccgatcccgaccagctgttttccgacctgcttggaggcacccagcgcctgtggtcaaataggttcggcaacgaggagagcttccctggcagggtgcgggccctggtggatacattctgttggatcgcacgcgcgccacccctaggaaatccccttagactggaagagcggatcgcctggcgcattcagagacttaaatccggtcagacagccctcatcgagaaaaaaaagcaaaaaattgaggaagatgtgcggcatcagtgtcagcaaacaacgtgcgaccgctgttag

SEQ ID NO: 301431 - DNA, 666 bp, Artificial Sequence
  derived and/or modified sequence
atggccgccgccggccccctgtgcaccgagcgggtgagcgtgctgagtcagcctaacagcggcgttgaagatcctacccccgctggcggtaggggccaggggcgtaggagagggagagaagaacttgagtcaatcggggccgggccaggagcatctgttcgaatcctcccagcccttcgtccaggcctggggggggtgtggggcgcaggggcagcttctctggttttccaggcaggcccaggctccagttggctgggctggcccgatcttgacctggctttatataggggctgggcctgtcgctcggaggggactgctaatgtggccttccctggcaccgccagtccgggcttttcacgggcccggcagaccagggacctccgtaaaccagccttgaagacgcctagccatactgctagtcagctggccgccgaggccgggaacccctcggggggctgcccttctatgcgctgccagaggcgagtcggcgctctggtccctacctggaagggcggctggcgtgacggctggtccggctctgggggaagagccaaagagcgaattctggctttttcattccctgccggaggtggaataagaggagagagagtgcaagcggcaagcaacacaaggatctgggaggagccaggtagcacccctaattag

SEQ ID NO: 301432 - protein, 82 aa, Artificial Sequence
  derived and/or modified sequence
MIPVLTSKKASELPVSEVASILQADLQNGLNKCEVSHRRAFHGWNEFDISEDEPLWKKYISQFKNPLIMLLLASAVISVLMH

SEQ ID NO: 301433 - DNA, 168 bp, Artificial Sequence
  derived and/or modified sequence
atgaagatgagcttcgagcggtgcaccgcccggaacaagatgttcgtgaattctgcttttacaaaggtcgataactactgtacattcctgatggaaaaggtcctgtttaaagtgctctttctggtggagtattaccagaaagggaagaagaacgatctcaacttctag

SEQ ID NO: 301434 - DNA, 363 bp, Artificial Sequence
  derived and/or modified sequence
atgaaggtcgcaagattccagaagatccccaatggggagaatgaaacaatgatccctgttttgactagcaagaaggcatcagaacttcccgtctccgaagttgcctctattctccaagccgacttacagaacggcctcaataaatgtgaggtctcgcaccgcagagcgtttcatggatggaatgagtttgacatatctgaagacgagccactctggaaaaagtatatttcacagttcaagaacccattgattatgctcctgctcgcctccgctgtcatcagtgtgttaatgcatcaatttgacgatgccgtgtcaatcactgtggctatcttaatcgtagtgactgtcgcattcgtccagtag

SEQ ID NO: 301435 - DNA, 249 bp, Artificial Sequence
  derived and/or modified sequence
atgattcccgtgctgacctcaaagaaggccagtgaacttcccgtctccgaagttgcatccattctgcaggctgaccttcagaacggccttaataagtgtgaggtgtcgcaccggcgcgcttttcacggatggaacgaattcgacatctccgaggatgagcccctctggaagaaatatatcagccagtttaagaaccctctcatcatgctcctcctggcttccgccgtgatatcagtgctgatgcactag

SEQ ID NO: 301436 - DNA, 309 bp, Artificial Sequence
  derived and/or modified sequence
atgaaagtcgcaagattccagaagatccctaacggggagaacgagacaatgattcctgtgctcacaagcaagaaggcaagtgagctccccgtcagtgaggtcgccagcatactgcaagcagacttgcagaacggcctgaataagtgcgaagtcagccataggcgcgctttccacggctggaacgagtttgacatttccgaggatgaacccttgtggaagaaatatatttcccagtttaaaaaccctctcattatgcttctgctggcttccgcagtgatctccgtactgatgcaccaattcgatgattag

SEQ ID NO: 301437 - DNA, 363 bp, Artificial Sequence
  derived and/or modified sequence
atgaaggtggcccgcttccagaagatccccaatggagaaaatgagaccatgatccctgtgctgaccagcaagaaggccagcgagctgcctgtgtctgaggtggccagcatcctgcaggccgacctgcagaatggcctgaacaagtgtgaggtgagccaccggcgggccttccacggctggaatgaatttgacatcagtgaagatgagcccctgtggaagaagtacatcagccagttcaagaaccccctcatcatgctgctgctggccagcgctgtgatctctgtgctgatgcaccagtttgatgatgctgtgtccatcaccgtggccatcctgattgtggtgacagtggcctttgtgcagtag

SEQ ID NO: 301438 - DNA, 249 bp, Artificial Sequence
  derived and/or modified sequence
atgatccctgtgctgaccagcaagaaggccagcgagctgcctgtgtctgaggtggccagcatcctgcaggccgacctgcagaatggcctgaacaagtgtgaggtgagccaccggcgggccttccacggctggaatgaatttgacatcagtgaagatgagcccctgtggaagaagtacatcagccagttcaagaaccccctcatcatgctgctgctggccagcgctgtgatctctgtgctgatgcactag

SEQ ID NO: 301439 - DNA, 309 bp, Artificial Sequence
  derived and/or modified sequence
atgaaggtggcccgcttccagaagatccccaatggagaaaatgagaccatgatccctgtgctgaccagcaagaaggccagcgagctgcctgtgtctgaggtggccagcatcctgcaggccgacctgcagaatggcctgaacaagtgtgaggtgagccaccggcgggccttccacggctggaatgaatttgacatcagtgaagatgagcccctgtggaagaagtacatcagccagttcaagaaccccctcatcatgctgctgctggccagcgctgtgatctctgtgctgatgcaccagtttgatgactag

SEQ ID NO: 301440 - DNA, 363 bp, Artificial Sequence
  derived and/or modified sequence
atgaaggtggcccggttccagaagatccccaacggcgagaacgagacgatgattccagtactgacctctaaaaaggcctccgagctgcctgtttctgaggtcgctagtatcctccaggctgacctgcagaatggcttgaacaaatgtgaggtgagccacagaagagcctttcatggctggaacgagtttgatataagtgaagacgaacctctgtggaagaagtatatcagtcaattcaagaacccccttatcatgctcctgctcgcctctgccgttattagcgtgctgatgcaccagtttgacgatgcggtcagtattactgtggcaatcctgatcgttgtgaccgtcgcatttgttcagtag

SEQ ID NO: 301441 - DNA, 249 bp, Artificial Sequence
  derived and/or modified sequence
atgatccccgtgctgaccagcaagaaggccagcgagctgcccgtgtccgaggtcgcgtctatacttcaggctgatttacagaatgggttgaataaatgtgaggtctctcaccgaagggcattccatggttggaatgaatttgatataagcgaggatgagccgctctggaaaaaatatatctcccagttcaagaacccactgattatgctcctactggcctcagcagtaataagtgtgctgatgcattag

SEQ ID NO: 301442 - DNA, 309 bp, Artificial Sequence
  derived and/or modified sequence
atgaaggtggcccggttccagaagatccccaacggcgagaacgagacaatgattcctgtcttgaccagcaagaaagcatctgaacttcctgtgtccgaggtggcctccatcctacaagctgacctacagaatggcttaaacaagtgcgaagtgagtcaccggcgggcttttcatggatggaatgaatttgacatcagcgaagatgagccgctatggaagaagtacatctcccagtttaagaacccgttaatcatgctcctcctcgcgtccgccgtgatttccgtactgatgcatcagtttgacgactag

SEQ ID NO: 301443 - DNA, 363 bp, Artificial Sequence
  derived and/or modified sequence
atgaaagtggcgcgatttcagaagatccctaatggtgagaacgagacgatgatccctgttctaacatccaaaaaagcctccgagcttccggtgtccgaagtggcctctatccttcaagcagatctccagaacggcctgaacaagtgtgaagtgtcacaccggagggcttttcacggatggaacgaatttgacatctccgaggatgagcccctatggaagaagtacatcagccagttcaaaaatcccctcattatgctgctattagcctctgccgtgatctcagtactcatgcaccagttcgatgatgcagtgagtattaccgtggctattttgattgtagtgactgtggcttttgtacagtag

SEQ ID NO: 301444 - DNA, 249 bp, Artificial Sequence
  derived and/or modified sequence
atgatcccagtgctaaccagtaagaaagcttcagaattgccagtttcagaagtcgccagcattctgcaggctgacttgcagaacggtctgaataagtgtgaggtatctcatagacgcgcattccatggctggaacgagtttgacatttcagaggatgagcccttgtggaagaaatatatcagccagtttaagaatccgcttataatgctactactggctagcgcagtaatatcagtgctgatgcactag

SEQ ID NO: 301445 - DNA, 309 bp, Artificial Sequence
  derived and/or modified sequence
atgaaagttgcaagattccagaaaataccaaacggcgagaatgagaccatgattccagtgttgacgtccaaaaaggcctctgagctgccggtttctgaagtcgcaagcattttgcaagccgacctccagaacggactgaacaagtgtgaggtctcacaccgtcgcgcttttcatggttggaacgagtttgacatcagcgaagatgaacccctatggaaaaagtacatcagccagtttaaaaatcccctaatcatgcttctgctggcttcggccgttatctcggtgctgatgcatcagttcgacgactag

SEQ ID NO: 301446 - DNA, 556 bp, Artificial Sequence
  derived and/or modified sequence
ctccctcccgctcgcttcttctcacgccgggagcaggctcccgcctcgcaccgctgccccgcgagcagctcctcttctcccgaggcgcgcggggcgcccccgcgagccccgcggctgagaccccgcagcctggaggagggctgtccggggctttggactttgtagccatcaacccgagtgcagtttcgatggaaaatgaaggttgcacgttttcaaaaaatacctaatggtgaaaatgagacaatgattcctgtattgacatcaaaaaaagcaagtgaattaccagtcagtgaagttgcaagcattctccaagctgatcttcagaatggtctaaacaaatgtgaagttagtcataggcgagcctttcatggctggaatgagtttgatattagtgaagatgagccactgtggaagaagtatatttctcagtttaaaaatccccttattatgctgcttctggcttctgcagtcatcagtgttttaatgcatcagtttgatgatgccgtcagtatcactgtggcaatacttatcgttgttacagttgcctttgttcagg

SEQ ID NO: 301447 - DNA, 540 bp, Artificial Sequence
  derived and/or modified sequence
gactgactaagaggagtagttaaaatggagaaagcttagctgtactttgtcttgcatgttaaacgtaatgagtttagaggattatgattatttgtaatcatcaggatctgctagacaggacatctgttttactttttactcttatgttggtggagaaatagcgtgcttttcattcaatgtgaaaattttgtgttctagctgggcaccgatggcttagtttttgaaatgtaatttcttgagaagtagcatgtggttgcacgttttcaaaaaatacctaatggtgaaaatgagacaatgattcctgtattgacatcaaaaaaagcaagtgaattaccagtcagtgaagttgcaagcattctccaagctgatcttcagaatggtctaaacaaatgtgaagttagtcataggcgagcctttcatggctggaatgagtttgatattagtgaagatgagccactgtggaagaagtatatttctcagtttaaaaatccccttattatgctgcttctggcttctgcagtcatcagtgttttaatgcat

SEQ ID NO: 301448 - DNA, 559 bp, Artificial Sequence
  derived and/or modified sequence
aggttctgaaggaaggggaggttcgggtatcccctggatgggggggcatctctagggcgccgccccgctggcatgctgctgctaggggtggtgggagcagccgtgggacgcgtggccgggagcgggggtgacagcctgggattccgggggcttctcttccttgtcctcctcctctcctctctattcccagtgtggccgtggctgacactaaagactttgtagccatcaacccgagtgcagtttcgatggaaaatgaaggttgcacgttttcaaaaaatacctaatggtgaaaatgagacaatgattcctgtattgacatcaaaaaaagcaagtgaattaccagtcagtgaagttgcaagcattctccaagctgatcttcagaatggtctaaacaaatgtgaagttagtcataggcgagcctttcatggctggaatgagtttgatattagtgaagatgagccactgtggaagaagtatatttctcagtttaaaaatccccttattatgctgcttctggcttctgcagtcatcagtgttttaatgcatcagtttgatgatg

SEQ ID NO: 301449 - DNA, 363 bp, Artificial Sequence
  derived and/or modified sequence
atgaaggtggccagattccagaagatccccaacggcgagaacgagaccatgatccccgtgctgaccagcaagaaggccagcgagctgcccgtgagcgaggtggccagcatcctgcaggccgacctgcagaacggcctgaacaagtgcgaggtgagccacagaagagccttccacggctggaacgagttcgacatcagcgaggacgagcccctgtggaagaagtacatcagccagttcaagaaccccctgatcatgctgctgctggccagcgccgtgatcagcgtgctgatgcaccagttcgacgacgccgtgagcatcaccgtggccatcctgatcgtggtgaccgtggccttcgtgcagtag

SEQ ID NO: 301450 - DNA, 249 bp, Artificial Sequence
  derived and/or modified sequence
atgatccccgtgctgaccagcaagaaggccagcgagctgcccgtgagcgaggtggccagcatcctgcaggccgacctgcagaacggcctgaacaagtgcgaggtgagccacagaagagccttccacggctggaacgagttcgacatcagcgaggacgagcccctgtggaagaagtacatcagccagttcaagaaccccctgatcatgctgctgctggccagcgccgtgatcagcgtgctgatgcactag

SEQ ID NO: 301451 - DNA, 309 bp, Artificial Sequence
  derived and/or modified sequence
atgaaggtggccagattccagaagatccccaacggcgagaacgagaccatgatccccgtgctgaccagcaagaaggccagcgagctgcccgtgagcgaggtggccagcatcctgcaggccgacctgcagaacggcctgaacaagtgcgaggtgagccacagaagagccttccacggctggaacgagttcgacatcagcgaggacgagcccctgtggaagaagtacatcagccagttcaagaaccccctgatcatgctgctgctggccagcgccgtgatcagcgtgctgatgcaccagttcgacgactag

SEQ ID NO: 301452 - DNA, 543 bp, Artificial Sequence
  derived and/or modified sequence
atgcccagacagctgagcgccgccgccgccctgttcgccagcctggccgtgatcctgcacgacggcagccagatgagagccaaggccttccccgagaccagagactacagccagcccaccgccgccgccaccgtgcaggacatcaagaagcccgtgcagcagcccgccaagcaggccccccaccagaccctggccgccagattcatggacggccacatcaccttccagaccgccgccaccgtgaagatccccaccaccacccccgccaccaccaagaacaccgccaccaccagccccatcacctacaccctggtgaccacccaggccacccccaacaacagccacaccgccccccccgtgaccgaggtgaccgtgggccccagcctggccccctacagcctgccccccaccatcaccccccccgcccacaccaccggcaccagcagcagcaccgtgagccacaccaccggcaacaccacccagcccagcaaccagaccaccctgcccgccaccctgagcatcgccctgcacaagagcacctag

SEQ ID NO: 301453 - DNA, 543 bp, Artificial Sequence
  derived and/or modified sequence
atgccaaggcaactgtcagctgctgcggcactgttcgcaagtctggccgttattctccatgacggctcacagatgagggcgaaggccttcccggaaaccagagactactcccagccaactgctgcagcaaccgtccaagacattaagaagcctgtgcaacagcccgcaaagcaggccccccatcagacactggccgccaggttcatggatggtcatatcaccttccaaaccgcagccaccgttaaaatccccactacaaccccggctactacaaagaataccgccactaccagtccaatcacatacacactggttaccacacaggctacacccaacaacagtcacaccgccccacccgtcaccgaggtcaccgtgggtcccagcctggcgccttacagcctgcccccaactatcacacctcctgcccataccaccggcaccagttcatctacggtctcccacactactgggaacacgacacagccttctaatcaaaccacactccctgccactctgagcatcgccctgcacaaatccacatag

SEQ ID NO: 301454 - DNA, 835 bp, Artificial Sequence
  derived and/or modified sequence
ggagtcggcagcgcgagctcccagccagacctagcgcctctgggctgtgctcctgttgcttcccgcaaaccgcggtcctggcgaggcctgggcgtggagcgcggctgccgcagactccctgggaagacatggagtcagggtgcttaggggtttttaggctcctgctcgcctagtggctggctttctcccggctgagaagcgtctctgggttcccagaaaggtaggtttctctggcaccgattcggggcctgcccggacttcgccgcacgctgcagaacctcgcccagcgcccaccatgccccggcagctcagcgcggcggccgcgctcttcgcgtccctggccgtaattttgcacgatggcagtcaaatgagagcaaaagcatttccagaaaccagagattattctcaacctactgcagcagcaacagtacaggacataaaaaaacctgtccagcaaccagctaagcaagcacctcaccaaactttagcagcaagattcatggatggtcatatcacctttcaaacagcggccacagtaaaaattccaacaactaccccagcgactacaaaaaacactgcaaccaccagcccaattacctacaccctggtcacaacccaggccacacccaacaactcacacacagctcctccagttactgaagttacagtcggccctagcttagccccttattcactgccacccaccatcaccccaccagctcatacaactggaaccagttcatcaaccgtcagccacacaactgggaacaccactcaacccagtaaccagaccacccttccagcaactttatcgatagcactgcacaaaagcaca

SEQ ID NO: 301455 - DNA, 543 bp, Artificial Sequence
  derived and/or modified sequence
atgccccggcagctgtctgctgctgctgccctgtttgccagcctggccgtcatcctgcatgatggcagccagatgagggccaaggccttccctgagacccgggactacagccagcccacagctgctgccaccgtgcaggacatcaagaagcctgtgcagcagcctgccaagcaggccccccaccagaccctggccgcccgcttcatggatggccacatcaccttccagacagctgccaccgtgaagatccccaccaccaccccagccaccaccaagaacacagccaccaccagccccatcacctacaccctggtgaccacccaggccacccccaacaacagccacacagcccctcctgtgacagaggtgacagtgggccccagcctggccccctacagcctgccccccaccatcaccccaccagcccacaccaccggcaccagcagcagcacagtgagccacaccaccggcaacaccacccagcccagcaaccagaccaccctgcctgccaccctgagcatcgccctgcacaagagcacctag

SEQ ID NO: 301456 - DNA, 543 bp, Artificial Sequence
  derived and/or modified sequence
atgccccggcagctgagcgccgccgccgccctgttcgccagcctggccgtcattttgcacgacgggtctcagatgcgtgctaaagcgtttcccgagactcgggattacagccagcctacagctgctgctaccgttcaggacattaagaagccggtgcaacagccagccaagcaagccccccaccagacactggctgctaggttcatggacggacatattactttccagacggcagccaccgttaagattcccacgacaacaccagccaccacaaagaacacggccaccacctctcccataacctatactcttgtcacaacccaggccactcccaacaactctcacacagcccctcccgtcactgaggtgacggttggccccagcctggctccttacagcctgccccccaccatcacgccacccgcccataccacaggtacaagctctagcacagtttcgcacactacaggtaataccacccaaccctcaaatcagaccactcttcctgccacactctccatcgcccttcacaagtctacctag

SEQ ID NO: 301457 - DNA, 543 bp, Artificial Sequence
  derived and/or modified sequence
atgccacgacagctgagtgccgctgccgctctcttcgcctcacttgctgtcatactgcacgacggtagtcagatgcgggctaaagcctttccagaaaccagagattactctcaacccaccgccgcagcaactgtacaggatattaaaaagcctgtgcagcaacctgcaaagcaggcgccacatcagaccctcgccgcacggtttatggacgggcacatcacttttcagactgctgcgaccgttaagataccaactacaacccccgctactacaaaaaacaccgctacaacgagccccattacttacactctcgtcactacacaggccactcccaataattcacacacggcccctcctgtgactgaggtcaccgtggggccatcgctggcgccttatagtctcccccctactattaccccacccgcacacaccacgggtacaagttccagtaccgtgtcccacaccacaggaaataccacacaaccctcaaatcagactacactgcctgccacactctctattgcattgcacaaatccacgtag

SEQ ID NO: 301458 - protein, 41 aa, Artificial Sequence
  derived and/or modified sequence
MLSRLSGLANVVLHELSGDDDTDQNMRAPLDPELHQESDME

SEQ ID NO: 301459 - DNA, 280 bp, Artificial Sequence
  derived and/or modified sequence
ggtctttagggcggagatcacagaatcattggagatattaatgcaaacggaggcctgtccaataatcctgctaatgctaatgggttactggaaagatgagaagagaggaaagatcccaacgatcccgtcaacacgaaaatcccaggaatcagagaaatgctgagccgattatcaggattagcaaatgttgttttgcatgaattatcaggagatgatgacactgatcagaatatgagggctcccctagaccctgaattacaccaagaatctgacatggaat

SEQ ID NO: 301460 - protein, 1129 aa, Artificial Sequence
  derived and/or modified sequence
MAGIFKEFFFSTEDLPEVILTLSLISSIGAFLNRHLEDFPIPVPVILFLLGCSFEVLSFTSSQVQRYANAIQWMSPDLFFRIFTPVVFFTTAFDMDTYMLQKLFWQILLISIPGFLVNYILVLWHLASVNQLLLKPTQWLLFSAILVSSDPMLTAAAIRDLGLSRSLISLINGESLMTSVISLITFTSIMDFDQRLQSKRNHTLAEEIVGGICSYIIASFLFGILSSKLIQFWMSTVFGDDVNHISLIFSILYLIFYICELVGMSGIFTLAIVGLLLNSTSFKAAIEETLLLEFLTLLLISPVLSRVGHEFSWRWIFIMVCSEMKGMPNINMALLLAYSDLYFGSDKEKSQILFHGVLVCLITLVVNRFILPVAVTILGLRDATSTKYKSVCCTFQHFQELTKSAASALKFDKDLANADWNMIEKAITLENPYMLNEEETTEHQKVKCPHCNKEIDEIFNTEAMELANRRLLSAQIASYQRQYRNEILSQSAVQVLVGAAESFGEKKGKCMSLDTIKNYSESQKTVTFARKLLLNWVYNTRKEKEGPSKYFFFRICHTIVFTEEFEHVGYLVILMNIFPFIISWISQLNVIYHSELKHTNYCFLTLYILEALLKIAAMRKDFFSHAWNIFELAITLIGILHVILIEIDTIKYIFNETEVIVFIKVVQFFRILRIFKLIAPKLLQIIDKRMSHQKTFWYGILKGYVQGEADIMTIIDQITSSKQIKQMLLKQVIRNMEHAIKELGYLEYDHPEIAVTVKTKEEINVMLNMATEILKAFGLKGIISKTEGAGINKLIMAKKKEVLDSQSIIRPLTVEEVLYHIPWLDKNKDYINFIQEKAKVVTFDCGNDIFEEGDEPKGIYIIISGMVKLEKSKPGLGIDQMVESKEKDFPIIDTDYMLSGEIIGEINCLTNEPMKYSATCKTVVETCFIPKTHLYDAFEQCSPLIKQKMWLKLGLAITARKIREHLSYEDWNYNMQLKLSNIYVVDIPMSTKTDIYDENLIYVILIHGAVEDCLLRKTYRAPFLIPITCHQIQSIEDFTKVVIIQTPINMKTFRRNIRKFVPKHKSYLTPGLIGSVGTLEEGIQEERNVKEDGAHSAATARSPQPCSLLGTKFNCKESPRINLRKVRKE

SEQ ID NO: 301461 - DNA, 3390 bp, Artificial Sequence
  derived and/or modified sequence
atggccggcatcttcaaggagttcttcttcagcaccgaggacctgcccgaggtgatcctgaccctgagcctgatcagcagcatcggcgccttcctgaacagacacctggaggacttccccatccccgtgcccgtgatcctgttcctgctgggctgcagcttcgaggtgctgagcttcaccagcagccaggtgcagagatacgccaacgccatccagtggatgagccccgacctgttcttcagaatcttcacccccgtggtgttcttcaccaccgccttcgacatggacacctacatgctgcagaagctgttctggcagatcctgctgatcagcatccccggcttcctggtgaactacatcctggtgctgtggcacctggccagcgtgaaccagctgctgctgaagcccacccagtggctgctgttcagcgccatcctggtgagcagcgaccccatgctgaccgccgccgccatcagagacctgggcctgagcagaagcctgatcagcctgatcaacggcgagagcctgatgaccagcgtgatcagcctgatcaccttcaccagcatcatggacttcgaccagagactgcagagcaagagaaaccacaccctggccgaggagatcgtgggcggcatctgcagctacatcatcgccagcttcctgttcggcatcctgagcagcaagctgatccagttctggatgagcaccgtgttcggcgacgacgtgaaccacatcagcctgatcttcagcatcctgtacctgatcttctacatctgcgagctggtgggcatgagcggcatcttcaccctggccatcgtgggcctgctgctgaacagcaccagcttcaaggccgccatcgaggagaccctgctgctggagttcctgaccctgctgctgatcagccccgtgctgagcagagtgggccacgagttcagctggagatggatcttcatcatggtgtgcagcgagatgaagggcatgcccaacatcaacatggccctgctgctggcctacagcgacctgtacttcggcagcgacaaggagaagagccagatcctgttccacggcgtgctggtgtgcctgatcaccctggtggtgaacagattcatcctgcccgtggccgtgaccatcctgggcctgagagacgccaccagcaccaagtacaagagcgtgtgctgcaccttccagcacttccaggagctgaccaagagcgccgccagcgccctgaagttcgacaaggacctggccaacgccgactggaacatgatcgagaaggccatcaccctggagaacccctacatgctgaacgaggaggagaccaccgagcaccagaaggtgaagtgcccccactgcaacaaggagatcgacgagatcttcaacaccgaggccatggagctggccaacagaagactgctgagcgcccagatcgccagctaccagagacagtacagaaacgagatcctgagccagagcgccgtgcaggtgctggtgggcgccgccgagagcttcggcgagaagaagggcaagtgcatgagcctggacaccatcaagaactacagcgagagccagaagaccgtgaccttcgccagaaagctgctgctgaactgggtgtacaacaccagaaaggagaaggagggccccagcaagtacttcttcttcagaatctgccacaccatcgtgttcaccgaggagttcgagcacgtgggctacctggtgatcctgatgaacatcttccccttcatcatcagctggatcagccagctgaacgtgatctaccacagcgagctgaagcacaccaactactgcttcctgaccctgtacatcctggaggccctgctgaagatcgccgccatgagaaaggacttcttcagccacgcctggaacatcttcgagctggccatcaccctgatcggcatcctgcacgtgatcctgatcgagatcgacaccatcaagtacatcttcaacgagaccgaggtgatcgtgttcatcaaggtggtgcagttcttcagaatcctgagaatcttcaagctgatcgcccccaagctgctgcagatcatcgacaagagaatgagccaccagaagaccttctggtacggcatcctgaagggctacgtgcagggcgaggccgacatcatgaccatcatcgaccagatcaccagcagcaagcagatcaagcagatgctgctgaagcaggtgatcagaaacatggagcacgccatcaaggagctgggctacctggagtacgaccaccccgagatcgccgtgaccgtgaagaccaaggaggagatcaacgtgatgctgaacatggccaccgagatcctgaaggccttcggcctgaagggcatcatcagcaagaccgagggcgccggcatcaacaagctgatcatggccaagaagaaggaggtgctggacagccagagcatcatcagacccctgaccgtggaggaggtgctgtaccacatcccctggctggacaagaacaaggactacatcaacttcatccaggagaaggccaaggtggtgaccttcgactgcggcaacgacatcttcgaggagggcgacgagcccaagggcatctacatcatcatcagcggcatggtgaagctggagaagagcaagcccggcctgggcatcgaccagatggtggagagcaaggagaaggacttccccatcatcgacaccgactacatgctgagcggcgagatcatcggcgagatcaactgcctgaccaacgagcccatgaagtacagcgccacctgcaagaccgtggtggagacctgcttcatccccaagacccacctgtacgacgccttcgagcagtgcagccccctgatcaagcagaagatgtggctgaagctgggcctggccatcaccgccagaaagatcagagagcacctgagctacgaggactggaactacaacatgcagctgaagctgagcaacatctacgtggtggacatccccatgagcaccaagaccgacatctacgacgagaacctgatctacgtgatcctgatccacggcgccgtggaggactgcctgctgagaaagacctacagagcccccttcctgatccccatcacctgccaccagatccagagcatcgaggacttcaccaaggtggtgatcatccagacccccatcaacatgaagaccttcagaagaaacatcagaaagttcgtgcccaagcacaagagctacctgacccccggcctgatcggcagcgtgggcaccctggaggagggcatccaggaggagagaaacgtgaaggaggacggcgcccacagcgccgccaccgccagaagcccccagccctgcagcctgctgggcaccaagttcaactgcaaggagagccccagaatcaacctgagaaaggtgagaaaggagtag

SEQ ID NO: 301462 - DNA, 3390 bp, Artificial Sequence
  derived and/or modified sequence
atggcggggatcttcaaggagttttttttctccactgaggacctgcctgaagtcatattaactttatccctgattagtagtatcggcgcattcctaaatagacatctggaggattttcctattcccgtgccagtcatcctctttttgctgggctgttctttcgaagttctttctttcacctcttcccaagtgcaaaggtatgctaacgcaatacaatggatgtctcctgatttgttcttcaggatctttacaccagtggtatttttcactaccgcattcgatatggacacctatatgctgcagaaacttttttggcagatcctgctgatttctatccccggttttctggtgaattatatcctggtcctgtggcacttggcctcggtcaatcagctgttgttgaagccaacgcagtggctactctttagtgcaatcttggtgtcatctgaccctatgctgacagcagccgcaatccgggacctagggctgtctcggagcttgattagcctgatcaacggtgagtcactcatgacatcggtcatatccctgattacattcactagcatcatggacttcgaccagcgcctgcagtctaagaggaaccacaccctggcggaagaaatcgtgggagggatctgctcttatattatcgcctcttttctcttcggtatcttgtcaagcaaactcattcagttttggatgtcaacagtgttcggtgatgacgttaatcatatcagtctcattttctcaatcctatatttgatcttctacatctgcgagctggtcgggatgtccgggatttttactttagcaatcgttggcctcctgttgaacagcaccagcttcaaagctgccatagaggagacccttcttctggaattcttgacactcctgctgatctctcctgtcctttcccgggttggtcacgagttctcttggcggtggatcttcataatggtgtgctcagagatgaaaggtatgcctaacattaacatggctctgctccttgcatatagtgatctgtacttcggttctgataaggagaagtcacagatcttgttccacggagtgcttgtgtgtctgatcaccctagtggttaacagattcatactcccagtagcagtgaccatcctcggactgagggatgctacctctactaagtataaaagcgtgtgctgcacgtttcagcactttcaggagctaacaaaatctgccgctagtgcactaaagtttgataaggacctcgctaacgcagattggaacatgatcgaaaaggccattacgttggaaaacccatacatgctgaacgaggaagagaccaccgagcaccagaaagtgaaatgcccccactgtaataaagaaattgacgaaatctttaataccgaagccatggaactcgccaataggcggttactgtctgcccagatcgccagctatcagagacagtatcggaacgagattctctcccagtctgccgtgcaggtcttagtgggcgccgcagagagcttcggggagaaaaaaggaaagtgtatgagcctcgataccattaaaaattattccgagagtcagaaaaccgttacattcgctaggaaactgctgcttaactgggtgtacaatacacggaaggaaaaggagggaccatctaaatatttcttcttccgcatttgccacactatagtgttcaccgaggagttcgagcatgtggggtacttggtgatccttatgaatatctttcctttcattatctcttggatcagccagctcaacgtgatctatcattccgagctgaagcacactaattattgcttcctgactttatatatattggaggcccttctgaaaatcgccgctatgcgcaaagacttcttttcacacgcttggaacatcttcgagcttgcaatcactcttatcggaattctgcatgtcatccttatcgagatcgacacaataaagtacattttcaacgagacagaagttatcgtttttattaaagtggtgcagttcttccggatccttcgtatttttaagttgattgcgcctaaacttctgcagattattgataaaagaatgagccatcagaaaacattctggtatggcatcttgaaggggtacgttcaaggggaagctgacatcatgactatcattgatcaaattacatcatccaaacagatcaagcagatgctgctaaagcaggtgataagaaacatggagcatgccataaaggagctgggatatctggaatacgaccatccagaaatcgccgttaccgtgaagacgaaagaggaaatcaatgtcatgctgaacatggcaacagagatattgaaagccttcggactcaagggtataatctccaagactgagggagcaggtatcaataagctcatcatggctaaaaagaaggaagtcctcgattctcagagtattataagaccattaaccgtggaggaagtgctctaccatattccttggctcgataagaataaggattatattaattttatacaggaaaaggccaaggtggttacctttgattgcggtaatgatatttttgaggagggcgacgagcccaagggaatttatattatcattagtggcatggtcaaactggaaaagtccaaacccggcctcggaattgaccagatggtggagtctaaagaaaaggacttcccgatcattgacacggattacatgcttagtggcgaaataataggcgagattaattgtctcacgaatgaacccatgaaatattccgcaacatgtaagacggtcgtagagacctgtttcattcctaagacgcacctgtacgacgcgtttgagcagtgctcccccctcattaaacagaagatgtggctcaaactgggactggccattacagcaaggaagatccgggagcatttgtcatacgaagactggaactataatatgcaactgaaactctccaacatatatgtggtggatatcccgatgagcaccaagactgatatctatgatgaaaacttaatatatgtgatcctcatccatggtgccgtggaggactgcttactccgcaaaacctatagggctccgttcctaattcccatcacatgccatcagattcagtcaatcgaagactttacaaaggtggtgatcatacagacacccattaacatgaagacttttagaagaaacattaggaagttcgtgccaaaacacaaatcatatctcactcctggcctaattggcagcgtgggcactctagaggaagggattcaggaagaaagaaacgtgaaagaagacggagcacactccgcagcaaccgcaaggtcgcctcagccttgctctcttctgggaaccaagttcaactgtaaagaatcaccccgaatcaaccttaggaaagttcgaaaggaatag

SEQ ID NO: 301463 - DNA, 3390 bp, Artificial Sequence
  derived and/or modified sequence
atggccggcatcttcaaggagttcttcttcagcacagaggacctgcctgaggtgatcctgaccctgagcctcatcagcagcatcggggccttcctgaacagacacctggaggacttccccatccctgtgcctgtgatcctcttcctgctgggctgcagctttgaggtgctgtccttcaccagcagccaggtgcagagatatgccaatgccatccagtggatgagcccagacctcttcttccgcatcttcacccctgtggtgttcttcaccacagcctttgacatggacacctacatgctgcagaagctgttctggcagatcctgctgatcagcatccctggcttcctggtgaactacatcctggtgctgtggcacctggcctctgtgaaccagctgctgctgaagcccacccagtggctgctcttcagcgccatcctggtgtccagtgaccccatgctgacagctgctgccatccgggacctgggcctgagccgcagcctcatcagcctcatcaacggggagagcctgatgaccagcgtcatcagcctcatcaccttcaccagcatcatggactttgaccagaggctgcagagcaagaggaaccacaccctggccgaggagatcgtgggcggcatctgcagctacatcatcgccagcttcctgtttggcatcctgagcagcaagctgatccagttctggatgagcacagtgtttggagatgatgtgaaccacatcagcctcatcttcagcatcctgtacctgatcttctacatctgtgagctggtgggcatgagcggcatcttcaccctggccatcgtgggcctgctgctgaacagcaccagcttcaaggccgccatcgaggagaccctgctgctggagttcctgaccctgctgctgatcagccctgtgctgagccgggtgggccacgagttctcctggcgctggatcttcatcatggtgtgcagcgagatgaagggcatgcccaacatcaacatggccctgctgctggcctacagcgacctgtactttggaagtgacaaggagaagagccagatcctcttccatggagtgctggtgtgcctgatcaccctggtggtgaaccgcttcatcctgcctgtggccgtgaccatcctgggcctgagagatgccaccagcaccaagtacaagtctgtgtgctgcaccttccagcacttccaggagctgaccaagtctgctgccagcgccctgaagtttgacaaggacctggccaatgctgactggaacatgattgagaaggccatcaccctggagaacccctacatgctgaatgaggaggagaccacagagcaccagaaggtgaagtgcccccactgcaacaaggagattgatgagatcttcaacacagaggccatggagctggccaacagaaggctgctgagcgcccagatcgccagctaccagaggcagtacagaaatgagatcctgagccagagcgctgtgcaggtgctggtgggcgctgctgagagctttggagagaagaagggcaagtgcatgagcctggacaccatcaagaactacagcgagagccagaagacagtgacctttgccaggaagctgctgctgaactgggtgtacaacaccaggaaggagaaggagggccccagcaagtacttcttcttccgcatctgccacaccatcgtgttcacagaggagtttgaacatgtgggctacctggtgatcctgatgaacatcttccccttcatcatctcctggatcagccagctgaatgtcatctaccacagcgagctgaagcacaccaactactgcttcctgaccctgtacatcctggaggccctgctgaagattgctgccatgaggaaggacttcttcagccacgcctggaacatctttgagctggccatcaccctgattggcatcctgcacgtgatcctgattgaaattgacaccatcaagtacatcttcaatgaaacagaggtgattgtgttcatcaaggtggtgcagttcttccgcatcctgcgcatcttcaagctgattgcccccaagctgctgcagatcatcgacaagaggatgagccaccagaagaccttctggtacggcatcctgaagggctacgtgcagggcgaggccgacatcatgaccatcatcgaccagatcaccagcagcaagcagatcaagcagatgctgctgaagcaggtgatccggaacatggagcacgccatcaaggagctgggctacctggagtatgaccaccctgagattgctgtgacagtgaagaccaaggaggagatcaacgtgatgctgaacatggccacagagatcctgaaggccttcggcctgaagggcatcatcagcaagacagagggcgccggcatcaacaagctgatcatggccaagaagaaggaggtgctggacagccagagcatcatccggcccctgactgtggaggaggtgctgtaccacatcccctggctggacaagaacaaggactacatcaacttcatccaggagaaggccaaggtggtgacctttgactgtggaaatgacatctttgaggagggagatgagcccaagggcatctacatcatcatcagcggcatggtgaagctggagaagagcaagccaggcctgggcatcgaccagatggtggagagcaaggagaaggacttccccatcatcgacacagactacatgctgtctggagagatcattggagagatcaactgcctgaccaatgagcccatgaagtacagcgccacctgcaagacagtggtggagacctgcttcatccccaagacccacctgtatgatgcctttgagcagtgcagccccctcatcaagcagaagatgtggctgaagctgggcctggccatcacagccaggaagatccgggagcacctgtcctatgaggactggaactacaacatgcagctgaagctgagcaacatctacgtggtggacatccccatgagcaccaagacagacatctatgatgagaacctgatctacgtgatcctgattcatggagctgtggaggactgcctgctgaggaagacctaccgggcccccttcctgatccccatcacctgccaccagatccagagcattgaggacttcaccaaggtggtgatcatccagacccccatcaacatgaagaccttcagaagaaacatcaggaagtttgtgcccaagcacaagagctacctgaccccaggcctgattggctctgtgggcaccctggaggagggcatccaggaggagagaaatgtgaaggaggatggagcccacagcgctgccacagcccggagcccccagccctgcagcctgctgggcaccaagttcaactgcaaggagagcccccgcatcaacctgaggaaggtgaggaaggagtag

SEQ ID NO: 301464 - DNA, 3390 bp, Artificial Sequence
  derived and/or modified sequence
atggccggcatcttcaaggagttcttcttcagcaccgaggacctgccagaggtgatcctgacactgtcgctcatctcctctattggcgcctttctcaatcgccatctcgaggattttcccatccccgtacccgtgattctgttccttctgggttgcagctttgaagtgctttcttttacctcaagccaggtacagcggtatgcaaacgctatccagtggatgagtccggaccttttctttagaattttcacaccagtggtgttcttcacaacagctttcgatatggatacatacatgttgcagaagttattctggcaaatcctgctgataagtattcctggctttctcgttaattatatcttagtcctgtggcacctggcctcagtaaatcagttgctgctgaaaccaacccagtggttactgttttcagcaatcctcgtgagctctgatcctatgttgacagcggccgcaattcgggacttaggactcagcagatccctgataagtctgattaacggagaaagtctcatgactagcgtgatcagcctcataacgttcacaagtatcatggacttcgaccagcggttgcaaagcaagcgaaaccatacactggccgaggaaattgttggcggcatctgtagttacattattgcgtcatttctatttggcatcctcagttcgaagctgattcagttctggatgtccactgtgttcggcgatgatgtaaatcatattagcctgatttttagtatcctttacctgattttctacatttgcgagctcgtggggatgagcggcatattcacccttgcaattgtgggtctgctgctgaattccacctcctttaaagcagctattgaggagacccttctcctggaattcctgaccctgttgctcatttcgccagtgctatctagggtcggacatgagtttagttggcgctggatcttcattatggtttgctctgagatgaaagggatgcctaacattaatatggccttgctgctggcatacagtgatctttattttgggagcgataaggagaagtcccagattctctttcatggagtactagtatgcctaatcacacttgtcgtgaaccgctttatcttgcctgttgcggttaccatccttggcctgcgagacgccaccagcactaaatataagagcgtatgttgtacgttccaacactttcaagaactcactaaaagtgcagctagcgctctcaaattcgacaaggatctggcgaatgccgactggaatatgattgagaaggctattactcttgagaatccttatatgttaaatgaagaagagacaactgaacaccagaaagtgaaatgccctcattgtaacaaggaaattgatgagatattcaacacagaagcaatggaattggccaaccgcagactgctgagtgcacagatcgccagctatcaacgtcaatatagaaatgagatcctgagtcagagcgccgtgcaagtactggtcggagccgccgagagtttcggcgaaaaaaaaggaaagtgcatgtccctcgatacaatcaagaattatagtgaaagccagaagactgttacctttgcgaggaaattactgctaaactgggtgtataacaccagaaaggaaaaagaaggcccatctaaatattttttcttccgcatctgccacacaatcgtatttaccgaggaatttgagcatgtggggtatctggtcatccttatgaatatttttccatttattattagctggattagtcagctgaatgtgatataccactctgagttaaaacataccaattattgctttctgaccctgtatatactcgaagccttgcttaagattgctgcaatgaggaaagactttttttcccatgcctggaacattttcgaacttgccattacactcatcggtatcctccatgtaattctgatcgagattgacactattaagtacattttcaacgagactgaagtgatagtgtttatcaaggtagtccaattctttcggatcctgcgcatctttaagctgattgctcctaagttgctgcagattattgacaagcggatgtcacaccagaagacattttggtatggtatcctgaagggatatgtgcagggcgaagctgacatcatgactatcattgatcagataacaagctcaaagcagatcaaacagatgttactgaaacaggtcatccgaaatatggaacatgctatcaaagagctgggctacctagaatatgaccaccccgagatcgcggtgaccgttaaaaccaaggaagaaatcaacgtgatgttaaatatggccaccgagatccttaaagcttttggcctcaaaggcattatcagtaaaaccgagggagctggcattaataaactcataatggctaaaaagaaggaggtgttggactcacaatctatcatccggccactcaccgtcgaagaggtgctctatcacatcccatggctggataagaacaaggactatattaactttatccaggaaaaggccaaagttgtgacatttgactgtggcaatgatatctttgaagagggcgatgagcccaagggcatctacattatcatctcagggatggtcaagctggagaagagtaagccgggcctcggtattgatcaaatggtggagtccaaagagaaagattttccgattatcgataccgactatatgctatctggggaaatcatcggcgagatcaactgcttgaccaacgaaccaatgaaatactcagctacatgcaagacagttgttgagacgtgctttattccaaagacccacctatacgacgcattcgaacagtgcagtcccctgatcaaacagaaaatgtggttgaaactgggactggctatcaccgcccgaaaaattagggaacatctctcttacgaagactggaactacaatatgcaattaaagctgagtaatatctatgtagtggatattccaatgtccactaaaaccgacatttacgatgaaaacctcatatacgtgattcttatacacggcgctgtggaagactgcctgctccggaagacttatagagccccattcttgattcctatcacttgtcaccagatccagtctatcgaggactttaccaaggtagttatcattcaaaccccaatcaatatgaagactttcagacgaaacatccgaaagtttgtccccaaacataagtcctacctgactcccgggctgattgggagcgtgggaactctagaagaaggtatccaagaggaacggaatgtcaaagaggacggagcgcacagcgcagcaacagccaggtctccccagccctgctctctcttaggtaccaaattcaattgtaaggaatccccacgcatcaacctccgaaaggtgaggaaagagtag

SEQ ID NO: 301465 - DNA, 3390 bp, Artificial Sequence
  derived and/or modified sequence
atggccggaatctttaaggagttcttcttttccaccgaagacctaccagaagtcatcctgacactttctctcatttccagcatcggtgccttccttaacaggcatcttgaagactttcccattccggtaccagtgattctttttctgcttgggtgcagttttgaggtgctttcattcactagttcacaggtacagcggtacgctaatgccatccaatggatgtccccagatctctttttccggatttttacccccgtggtattctttacaactgcattcgacatggatacatacatgcttcagaagctcttctggcagattctcctcattagcatacccggtttcctggtgaactacatccttgtactatggcaccttgcaagcgtcaatcagttgctgctgaaaccgacacagtggctgctgttttctgctattctcgtttcctcggatccgatgttaaccgccgcagcaattcgagatctggggctgagccggtcactgatctccctaatcaacggcgaatctttgatgacctccgttatttcactgatcacctttacgtctattatggatttcgatcagagactccaaagcaaaagaaatcacacccttgctgaggaaattgtagggggaatttgtagctacatcatcgccagctttctttttggaattttgtcctctaaactcatacaattttggatgagtacggtctttggagacgacgtgaaccatattagtctgatcttcagcattctgtatctgattttttacatctgtgagttggtgggaatgtcgggaatcttcaccctggcaattgttgggctgctcctaaacagcacatccttcaaggcagccatcgaagaaactctgttgctggagttcctcaccctgttgctgatttcacctgtgctctctcgcgtgggccatgagttctcctggcgatggatattcataatggtgtgctccgagatgaagggtatgccaaacatcaacatggccctcttgctggcgtacagtgatctttattttggatctgataaggagaagtcccagattttgtttcacggagtgctggtctgtctgatcaccttggtggtcaatcgatttattctgcccgtcgctgtcacgatcctggggctccgcgacgccacaagcacaaaatacaagagtgtgtgctgcaccttccagcattttcaggaactgacaaagagcgcggcaagcgcacttaaatttgacaaggatctggctaacgcggactggaatatgatcgaaaaagcaattaccctggagaatccatatatgctgaatgaagaagagacgaccgagcatcagaaagtgaaatgtccgcattgcaacaaagagatcgatgaaatctttaataccgaggccatggagctcgccaatagaagactcttatcggcacagatagcatcctatcaacgacagtatcggaacgagattttaagccagtctgcggtccaagtcctcgtcggggctgccgagagcttcggcgaaaagaagggtaaatgtatgtctctcgacacaataaagaactactccgaaagtcaaaaaacagtgaccttcgcacggaaactcctgctaaattgggtatacaacacgaggaaggagaaggagggcccttctaaatacttcttcttccgcatctgtcacacaatcgtgtttaccgaggaattcgaacatgttggatatctggtgattttgatgaatatctttccttttatcatctcttggattagccagttgaacgttatctaccatagcgagctgaaacataccaactattgctttctaacgctatatattttggaagccctcctaaaaattgctgctatgagaaaagatttcttcagccatgcttggaatatttttgaacttgccatcacactgatcggaatcttgcatgtaatcctgatcgagatagacaccatcaaatacatattcaacgagaccgaagttattgtttttatcaaagtggtccagttttttagaattcttaggatcttcaagttgatcgcaccaaaacttctccaaatcattgacaagcgtatgtcccaccaaaagacattttggtacggtatccttaaaggctatgttcaaggggaagccgatattatgactataatcgaccaaatcaccagcagcaagcagatcaagcagatgctcctgaaacaggtgattaggaatatggagcacgccataaaggaactcggctaccttgagtacgaccatcccgaaatcgctgtgactgtgaagactaaggaagagatcaacgttatgctcaacatggccaccgaaattttgaaggcattcggccttaagggtatcataagcaagaccgagggggcaggcataaataagcttatcatggcgaagaagaaggaggtattagattcacaaagcattatacgcccactcaccgtagaggaagtcctgtatcacatcccgtggctcgacaagaataaagattatatcaatttcatccaggaaaaggctaaagtagtgacctttgactgcggtaatgacatttttgaagagggagatgagcctaagggaatttacatcattatttcgggcatggtgaagctggagaagtctaaacctggcctcggcatagaccagatggtggaatctaaggaaaaggacttccccatcatagacacagactatatgctctccggagagattatcggggagatcaattgtctgaccaatgagcccatgaagtactcagcgacgtgtaagaccgtggtggaaacctgctttattcccaaaactcatctgtacgatgcgtttgaacagtgctctcctttaatcaagcagaagatgtggcttaaactgggattagctataactgccaggaagattcgagaacatctcagttacgaggactggaattataatatgcagctgaaactatccaacatctatgttgtagatatccccatgtccactaagaccgatatctacgacgaaaaccttatatatgtaatccttatccacggtgcagtagaggattgtttgcttcgcaagacatatcgagccccttttctgatccccatcacctgccatcagatccagtccatcgaggacttcaccaaggtagtgatcatccaaactccaatcaatatgaagacgttcagacggaacattcgcaaattcgttcccaagcacaagtcatacttgacccccggtctgataggctctgtcgggactctggaagaaggcattcaggaagaaaggaatgtaaaagaggacggagcacacagtgcggctactgctcggagcccccagccatgcagcctgttgggcacaaaatttaactgtaaagaatcaccacgaatcaatctgcgaaaggttcgcaaggagtag

SEQ ID NO: 301466 - DNA, 3979 bp, Artificial Sequence
  derived and/or modified sequence
agactaggggcgagtttggagcaagtaactgtcagtgaggttgcagttggtctgggctgtttggctgtgagcgaaatagctgccccccacttctcacttgcacaccacgggatactcctcctgaggctccggatgattcagatggactgtgaaaaacaacaagatggatgatcatatggagattgcttctaacataaatctgcataaaaatttttctgaaacatggctggaatatttaaggagttttttttcagtactgaggacctccctgaagtcattctaacattgtctttgatcagctccattggagcatttttgaaccggcacttggaagactttccaattcctgtccctgtgatattatttttacttggatgcagttttgaagtattaagctttacatcttcacaggtccaaagatacgcaaacgccatacaatggatgagtccagacttattttttcgtatatttacaccagtagttttctttactactgcatttgacatggatacgtacatgcttcaaaagttattttggcagatacttttaatttcaattcccggctttttggttaattatatcttagttctttggcatctggcatctgtaaatcaattacttttgaagcctacccaatggttattattttcagctatccttgtgagttcagatcccatgctaaccgcagctgctataagagaccttgggctttctagaagcctcatcagtttaattaatggagaaagtctgatgacctctgttatatcattaattacatttactagtattatggattttgaccaaagactacaaagtaaaagaaaccataccttagctgaagagatcgtgggtggaatttgttcatatattatagcaagtttcttgtttggaattctaagttcaaaactgattcaattttggatgtcaactgtttttggtgatgatgtcaatcatataagtctcatcttttcaattctgtatctcatcttttatatttgtgagttagttggaatgtcaggaatatttactctggccattgtgggacttcttttaaattctacaagttttaaagcagcaattgaagaaacacttcttcttgaatttctgacccttcttttaataagccctgttttgtctcgagttggtcatgagttcagttggcgctggatattcataatggtctgtagtgaaatgaaggggatgcctaatataaacatggcccttctgcttgcctactctgatctttattttggatctgacaaagaaaaatctcaaatattatttcatggagtgttagtatgcctaataacccttgttgtcaatagatttattttgccagtggcagttactatactaggtcttcgtgatgccacatcaacaaaatataaatcggtttgttgcacatttcaacactttcaagagctaaccaagtctgcagcctctgcccttaaatttgacaaagatcttgctaatgctgattggaacatgattgagaaagcaattacacttgaaaacccatacatgttgaacgaagaagaaacaacagaacatcagaaggtgaaatgtccacactgtaacaaggaaatagatgagatctttaacactgaagcaatggagctggccaacaggcgtctcttgtcagcacaaatagcaagctaccagagacaatacaggaatgagattctgtcccagagtgctgtccaggtgttggttggtgcagcagaaagttttggtgagaagaagggaaaatgtatgagtcttgatacaataaagaattattctgaaagccaaaaaacagttacctttgctagaaaactactacttaattgggtgtataataccagaaaggaaaaagagggcccatcaaaatacttcttttttcgtatatgccatacaatagtatttactgaggaatttgaacatgttggataccttgtgatattaatgaatatatttccctttataatctcttggatatcccagttaaatgtaatctaccacagcgaattaaaacacactaactactgttttcttacactttatattctagaggcactacttaagatagcagcaatgaggaaggactttttttcacatgcctggaacatattcgagttagcaattacattaattggcatcttacatgtaatacttattgaaatagacaccattaagtatatttttaatgagactgaagtaatagtctttataaaagttgttcaattttttcgtatactacgcattttcaagctcatagcaccaaagttgctgcaaataatagataaaagaatgagtcatcagaagaccttttggtatggaatactaaaaggctatgtccaaggcgaagcagacataatgaccataattgatcagattacaagttctaaacagattaaacagatgttattaaagcaagtgataaggaatatggaacatgctataaaagagctaggctacttagagtatgatcacccagaaattgctgtcactgtgaaaacaaaggaagaaattaatgttatgctcaatatggctacagaaattcttaaggcttttggcttaaaaggaattattagtaaaactgaaggtgctggaattaataagttaatcatggccaaaaagaaagaggtgcttgattctcaatctattatcaggcctcttactgttgaagaagttctatatcatattccgtggctagataaaaacaaagattatataaacttcattcaggaaaaagccaaagttgtaacatttgattgtggaaatgatatatttgaagaaggtgatgagcccaaaggaatctatatcattatttcaggcatggtaaagcttgaaaaatcaaagccaggtttagggattgatcaaatggtggagtcaaaggagaaagattttccgataattgacacagactatatgctcagtggagaaataataggagagataaactgcttaactaatgaacctatgaaatattctgccacctgcaaaactgtagtggagacatgttttattcccaaaactcacttgtatgatgcttttgagcaatgctctcctctcattaaacaaaaaatgtggctaaaacttggactcgctattacagccagaaaaatcagagaacacttatcttatgaggattggaactacaatatgcaactaaagctctctaatatttatgtagtagatataccaatgagtaccaaaactgatatttatgatgaaaatctaatctatgttatcctcatacatggagctgtagaagattgtctgttacgaaaaacttatagagcacctttcttaattcctataacatgccatcagatacaaagtattgaagatttcacaaaagtagtgattattcaaactccgattaacatgaaaacattcagaaggaatattagaaagtttgttcctaaacataaaagttatcttacaccaggattaataggttcagttggaacattggaagaaggcattcaagaagaaagaaatgttaaggaggatggagcacacagtgccgccactgccaggagtccccagccttgctccctgctggggacaaagttcaactgtaaggagtcccctagaataaacctaaggaaagtcaggaaagagtaagactgttaagaagaccgaagcatgtattaatgctgtggctatgagaggcctcctgctgcagaaacacacttccctacatcaagaaggagtaacttcaggttggatcctgtgtggatgatcttggtgctaagcagaaaagaaatttggaccttgaaaccagcagttcaacatatatactttttgcaaaatttccttgatttaaaatatttgttattttaaatatacaaaacattttagaaaatcttagagtaaattttagtcttaaagccagaaaataagtttatagccatctagatattttgcatattgctcttacagcaataatggtttggttcactttatgaaaaataaaatgtattaaaatata

SEQ ID NO: 301467 - protein, 488 aa, Artificial Sequence
  derived and/or modified sequence
MDGSITVTLAAHQAIGLKGIILAGTEEQKAKYLPKLASGEHIAAFCLTEPASGSDAASIRSRATLSEDKKHYILNGSKVWITNGGLANIFTVFAKTEVVDSDGSVKDKITAFIVERDFGGVTNGKPEDKLGIRGSNTCEVHFENTKIPVENILGEVGDGFKVAMNILNSGRFSMGSVVAGLLKRLIEMTAEYACTRKQFNKRLSEFGLIQEKFALMAQKAYVMESMTYLTAGMLDQPGFPDCSIEAAMVKVFSSEAAWQCVSEALQILGGLGYTRDYPYERILRDTRILLIFEGTNEILRMYIALTGLQHAGRILTTRIHELKQAKVSTVMDTVGRRLRDSLGRTVDLGLTGNHGVVHPSLADSANKFEENTYCFGRTVETLLLRFGKTIMEEQLVLKRVANILINLYGMTAVLSRASRSIRIGLRNHDHEVLLANTFCVEAYLQNLFSLSQLDKYAPENLDEQIKKVSQQILEKRAYICAHPLDRTC

SEQ ID NO: 301468 - protein, 416 aa, Artificial Sequence
  derived and/or modified sequence
MVDHLLPVDENFSSPKCPVGYLGDRLVGRRAYHMLPSPVSEDDSDASSPCSCSSPDSQALCSCYGGGLGTESQDSILDFLLSQATLGSGGGSGSSIGASSGPVAWGPWRRAAAPVKGEHFCLPEFPLGDPDDVPRPFQPTLEEIEEFLEENMEPGVKEVPEGNSKDLDACSQLSAGPHKSHLHPGSSGRERCSPPPGGASAGGAQGPGGGPTPDGPIPVLLQIQPVPVKQESGTGPASPGQAPENVKVAQLLVNIQGQTFALVPQVVPSSNLNLPSKFVRIAPVPIAAKPVGSGPLGPGPAGLLMGQKFPKNPAAELIKMHKCTFPGCSKMYTKSSHLKAHLRRHTGEKPFACTWPGCGWRFSRSDELSRHRRSHSGVKPYQCPVCEKKFARSDHLSKHIKVHRFPRSSRSVRSVN

SEQ ID NO: 301469 - DNA, 2539 bp, Artificial Sequence
  derived and/or modified sequence
cgacccgcgggccggcgggcgatcgagccagcgcaggacccgcggctcggcccccggccgccgccggaccgagagtctagccgccgcccccagcccagcccgcccggccgcaggaccgccggggcctggccgccggtccggcgtgcgccaagttcagccgccaccggcacggccaggccagcatggtggaccacttacttccagtggacgagaacttctcgtcgccaaaatgcccagttgggtatctgggtgataggctggttggccggcgggcatatcacatgctgccctcacccgtctctgaagatgacagcgatgcctccagcccctgctcctgttccagtcccgactctcaagccctctgctcctgctatggtggaggcctgggcaccgagagccaggacagcatcttggacttcctattgtcccaggccacgctgggcagtggcgggggcagcggcagtagcattggggccagcagtggccccgtggcctgggggccctggcgaagggcagcggcccctgtgaagggggagcatttctgcttgcccgagtttcctttgggtgatcctgatgacgtcccacggcccttccagcctaccctggaggagattgaagagtttctggaggagaacatggagcctggagtcaaggaggtccctgagggcaacagcaaggacttggatgcctgcagccagctctcagctgggccacacaagagccacctccatcctgggtccagcgggagagagcgctgttcccctccaccaggtggtgccagtgcaggaggtgcccagggcccaggtgggggccccacgcctgatggccccatcccagtgttgctgcagatccagcccgtgcctgtgaagcaggaatcgggcacagggcctgcctcccctgggcaagccccagagaatgtcaaggttgcccagctcctggtcaacatccaggggcagaccttcgcactcgtgccccaggtggtaccctcctccaacttgaacctgccctccaagtttgtgcgcattgcccctgtgcccattgccgccaagcctgttggatcgggacccctggggcctggccctgccggtctcctcatgggccagaagttccccaagaacccagccgcagaactcatcaaaatgcacaaatgtactttccctggctgcagcaagatgtacaccaaaagcagccacctcaaggcccacctgcgccggcacacgggtgagaagcccttcgcctgcacctggccaggctgcggctggaggttctcgcgctctgacgagctgtcgcggcacaggcgctcgcactcaggtgtgaagccgtaccagtgtcctgtgtgcgagaagaagttcgcgcggagcgaccacctctccaagcacatcaaggtgcaccgcttcccgcggagcagccgctccgtgcgctccgtgaactgaaagcgccctgaaccccagcctgtccgtcaccccggatccccaccccatccccatttttttaagcaataatttatttgcctcctccagagggacatggcaatgttaccagcccaccttctgaagcctgggaggtgtgaacccagggcccgccaaccgctgcctttctcgggagtacttagagcctcgaacccgcgtccctgggggctgggccccaggcgcacggggctggaggcaggccttcgtgccttcgtgccttcgtgccttcccgcggtggccaggcctctgctgcagccgctggttgcaggcagagttttggggacctggcccttctcccactgggctcccccatcctgggccaaggccagaactttagtgctaggggaagatgaaatgtgcagttttgaaatgttgggtttccagagagagtcatgctggaggagaaggaagtaggccagaagtccagggctgcactgtggtgtgagggtggctttgtctaagatgcctgctcagcatgatcaccagagggtgtgggcaggtccctggagccgggggggggggggggggggggggggggcaggaccgggccgctgggccctcatgtgggagagaggtgaaaagcgtcccccactagggggctggcagtgcatgtgcttgagttaaatgtgcagggcagacagagccagaagggcctgtacccaggggctcgtcccctcctccggtttcccagacaaatccagacaccagcctttagggtggccttgggaggagagggccaggctgtcctgggtgtgagagaactagatagagcctcccaaccctgatttagaaatgcattccttattttgtctagaaattaataaatgaactagcttgttttgacaggtttatttcacatcctatgaatgtatgtaaataaactgtacataggtccatccacataaaatatcttttaataacatatcaacatttgtgtaaatttgaaatttaaaaaaatctatgaagctggtgtacatatgttacaattacgtatattttctttggtccttcataaaaatatatttactttgccaataaaaagaaaaagaactcacaaaaaaaaaaaaaaa

SEQ ID NO: 301470 - DNA, 2574 bp, Artificial Sequence
  derived and/or modified sequence
ggggagtgagtgcccagcgagctgcgggcgggctagtgctccgccgcagcgacccgcgggccggcgggcgatcgagccagcgcaggacccgcggctcggcccccggccgccgccggaccgagagtctagccgccgcccccagcccagcccgcccggccgcaggaccgccggggcctggccgccggtccggcgtgcgccaagttcagccgccaccggcacggccaggccagcatggtggaccacttacttccagtggacgagaacttctcgtcgccaaaatgcccagttgggtatctgggtgataggctggttggccggcgggcatatcacatgctgccctcacccgtctctgaagatgacagcgatgcctccagcccctgctcctgttccagtcccgactctcaagccctctgctcctgctatggtggaggcctgggcaccgagagccaggacagcatcttggacttcctattgtcccaggccacgctgggcagtggcgggggcagcggcagtagcattggggccagcagtggccccgtggcctgggggccctggcgaagggcagcggcccctgtgaagggggagcatttctgcttgcccgagtttcctttgggtgatcctgatgacgtcccacggcccttccagcctaccctggaggagattgaagagtttctggaggagaacatggagcctggagtcaaggaggtccctgagggcaacagcaaggacttggatgcctgcagccagctctcagctgggccacacaagagccacctccatcctgggtccagcgggagagagcgctgttcccctccaccaggtggtgccagtgcaggaggtgcccagggcccaggtgggggccccacgcctgatggccccatcccagtgttgctgcagatccagcccgtgcctgtgaagcaggaatcgggcacagggcctgcctcccctgggcaagccccagagaatgtcaaggttgcccagctcctggtcaacatccaggggcagaccttcgcactcgtgccccaggtggtaccctcctccaacttgaacctgccctccaagtttgtgcgcattgcccctgtgcccattgccgccaagcctgttggatcgggacccctggggcctggccctgccggtctcctcatgggccagaagttccccaagaacccagccgcagaactcatcaaaatgcacaaatgtactttccctggctgcagcaagatgtacaccaaaagcagccacctcaaggcccacctgcgccggcacacgggtgagaagcccttcgcctgcacctggccaggctgcggctggaggttctcgcgctctgacgagctgtcgcggcacaggcgctcgcactcaggtgtgaagccgtaccagtgtcctgtgtgcgagaagaagttcgcgcggagcgaccacctctccaagcacatcaaggtgcaccgcttcccgcggagcagccgctccgtgcgctccgtgaactgaaagcgccctgaaccccagcctgtccgtcaccccggatccccaccccatccccatttttttaagcaataatttatttgcctcctccagagggacatggcaatgttaccagcccaccttctgaagcctgggaggtgtgaacccagggcccgccaaccgctgcctttctcgggagtacttagagcctcgaacccgcgtccctgggggctgggccccaggcgcacggggctggaggcaggccttcgtgccttcgtgccttcgtgccttcccgcggtggccaggcctctgctgcagccgctggttgcaggcagagttttggggacctggcccttctcccactgggctcccccatcctgggccaaggccagaactttagtgctaggggaagatgaaatgtgcagttttgaaatgttgggtttccagagagagtcatgctggaggagaaggaagtaggccagaagtccagggctgcactgtggtgtgagggtggctttgtctaagatgcctgctcagcatgatcaccagagggtgtgggcaggtccctggagccgggggggggggggggggggggggggggcaggaccgggccgctgggccctcatgtgggagagaggtgaaaagcgtcccccactagggggctggcagtgcatgtgcttgagttaaatgtgcagggcagacagagccagaagggcctgtacccaggggctcgtcccctcctccggtttcccagacaaatccagacaccagcctttagggtggccttgggaggagagggccaggctgtcctgggtgtgagagaactagatagagcctcccaaccctgatttagaaatgcattccttattttgtctagaaattaataaatgaactagcttgttttgacaggtttatttcacatcctatgaatgtatgtaaataaactgtacataggtccatccacataaaatatcttttaataacatatcaacatttgtgtaaatttgaaatttaaaaaaatctatgaagctggtgtacatatgttacaattacgtatattttctttggtccttcataaaaatatatttactttgccaataaaaagaaaaagaactcaca

SEQ ID NO: 301471 - protein, 817 aa, Artificial Sequence
  derived and/or modified sequence
MDKENSDVSAAPADLKISNISVQVVSAQKKLPPGRRPPQRPIGKAKPKKQSKKKVPFWNVQNKIILFTVFLFILAVIAWTLLWLYISKTESKDAFYFAGMFRITNIEFLPEYRQKESREFLSVSRTVQQVINLVYTTSAFSKFYEQSVVADVSSNNKGGLLVHFWIVFVMPRAKGHIFCEDCVAAILKDSIQTSIINRTSVGSLQGLAVDMDSVVLNDKGCSQYFYAEHLSLHYPLEISAASGRLMCHFKLVAIVGYLIRLSIKSIQIEADNCVTDSLTIYDSLLPIRSSILYRICEPTRTLMSFVSTNNLMLVTFKSPHIRRLSGIRAYFEVIPEQKCENTVLVKDITGFEGKISSPYYPSYYPPKCKCTWKFQTSLSTLGIALKFYNYSITKKSMKGCEHGWWEINEHMYCGSYMDHQTIFRVPSPLVHIQLQCSSRLSDKPLLAEYGSYNISQPCPVGSFRCSSGLCVPQAQRCDGVNDCFDESDELFCVSPQPACNTSSFRQHGPLICDGFRDCENGRDEQNCTQSIPCNNRTFKCGNDICFRKQNAKCDGTVDCPDGSDEEGCTCSRSSSALHRIIGGTDTLEGGWPWQVSLHFVGSAYCGASVISREWLLSAAHCFHGNRLSDPTPWTAHLGMYVQGNAKFVSPVRRIVVHEYYNSQTFDYDIALLQLSIAWPETLKQLIQPICIPPTGQRVRSGEKCWVTGWGRRHEADNKGSLVLQQAEVELIDQTLCVSTYGIITSRMLCAGIMSGKRDACKGDSGGPLSCRRKSDGKWILTGIVSWGHGSGRPNFPGVYTRVSNFVPWIHKYVPSLL

SEQ ID NO: 301472 - protein, 831 aa, Artificial Sequence
  derived and/or modified sequence
MDKENSDVSAAPADLKISNISVQVVSAQKKLPPGRRPPQRPIGKAKPKKQSKKKVPFWNVQNKIILFTVFLFILAVIAWTLLWLYISKTESKDAFYFAGMFRITNIEFLPEYRQKESREFLSVSRTVQQVINLVYTTSAFSKFYEQSVVADVSSNNKGGLLVHFWIVFVMPRAKGHIFCEDCVAAILKDSIQTSIINRTSVGSLQGLAVDMDSVVNAAGLRSDYSSTIGSADKGCSQYFYAEHLSLHYPLEISAASGRLMCHFKLVAIVGYLIRLSIKSIQIEADNCVTDSLTIYDSLLPIRSSILYRICEPTRTLMSFVSTNNLMLVTFKSPHIRRLSGIRAYFEVIPEQKCENTVLVKDITGFEGKISSPYYPSYYPPKCKCTWKFQTSLSTLGIALKFYNYSITKKSMKGCEHGWWEINEHMYCGSYMDHQTIFRVPSPLVHIQLQCSSRLSDKPLLAEYGSYNISQPCPVGSFRCSSGLCVPQAQRCDGVNDCFDESDELFCVSPQPACNTSSFRQHGPLICDGFRDCENGRDEQNCTQSIPCNNRTFKCGNDICFRKQNAKCDGTVDCPDGSDEEGCTCSRSSSALHRIIGGTDTLEGGWPWQVSLHFVGSAYCGASVISREWLLSAAHCFHGNRLSDPTPWTAHLGMYVQGNAKFVSPVRRIVVHEYYNSQTFDYDIALLQLSIAWPETLKQLIQPICIPPTGQRVRSGEKCWVTGWGRRHEADNKGSLVLQQAEVELIDQTLCVSTYGIITSRMLCAGIMSGKRDACKGDSGGPLSCRRKSDGKWILTGIVSWGHGSGRPNFPGVYTRVSNFVPWIHKYVPSLL

SEQ ID NO: 301473 - protein, 843 aa, Artificial Sequence
  derived and/or modified sequence
MDKENSDVSAAPADLKISNISVQVVSAQKKLPVRRPPLPGRRLPLPGRRPPQRPIGKAKPKKQSKKKVPFWNVQNKIILFTVFLFILAVIAWTLLWLYISKTESKDAFYFAGMFRITNIEFLPEYRQKESREFLSVSRTVQQVINLVYTTSAFSKFYEQSVVADVSSNNKGGLLVHFWIVFVMPRAKGHIFCEDCVAAILKDSIQTSIINRTSVGSLQGLAVDMDSVVLNAGLRSDYSSTIGSDKGCSQYFYAEHLSLHYPLEISAASGRLMCHFKLVAIVGYLIRLSIKSIQIEADNCVTDSLTIYDSLLPIRSSILYRICEPTRTLMSFVSTNNLMLVTFKSPHIRRLSGIRAYFEVIPEQKCENTVLVKDITGFEGKISSPYYPSYYPPKCKCTWKFQTSLSTLGIALKFYNYSITKKSMKGCEHGWWEINEHMYCGSYMDHQTIFRVPSPLVHIQLQCSSRLSDKPLLAEYGSYNISQPCPVGSFRCSSGLCVPQAQRCDGVNDCFDESDELFCVSPQPACNTSSFRQHGPLICDGFRDCENGRDEQNCTQSIPCNNRTFKCGNDICFRKQNAKCDGTVDCPDGSDEEGCTCSRSSSALHRIIGGTDTLEGGWPWQVSLHFVGSAYCGASVISREWLLSAAHCFHGNRLSDPTPWTAHLGMYVQGNAKFVSPVRRIVVHEYYNSQTFDYDIALLQLSIAWPETLKQLIQPICIPPTGQRVRSGEKCWVTGWGRRHEADNKGSLVLQQAEVELIDQTLCVSTYGIITSRMLCAGIMSGKRDACKGDSGGPLSCRRKSDGKWILTGIVSWGHGSGRPNFPGVYTRVSNFVPWIHKYVPSLL

SEQ ID NO: 301474 - DNA, 2454 bp, Artificial Sequence
  derived and/or modified sequence
atggacaaggagaacagcgacgtgagcgccgcccccgccgacctgaagatcagcaacatcagcgtgcaggtggtgagcgcccagaagaagctgccccccggcagaagacccccccagagacccatcggcaaggccaagcccaagaagcagagcaagaagaaggtgcccttctggaacgtgcagaacaagatcatcctgttcaccgtgttcctgttcatcctggccgtgatcgcctggaccctgctgtggctgtacatcagcaagaccgagagcaaggacgccttctacttcgccggcatgttcagaatcaccaacatcgagttcctgcccgagtacagacagaaggagagcagagagttcctgagcgtgagcagaaccgtgcagcaggtgatcaacctggtgtacaccaccagcgccttcagcaagttctacgagcagagcgtggtggccgacgtgagcagcaacaacaagggcggcctgctggtgcacttctggatcgtgttcgtgatgcccagagccaagggccacatcttctgcgaggactgcgtggccgccatcctgaaggacagcatccagaccagcatcatcaacagaaccagcgtgggcagcctgcagggcctggccgtggacatggacagcgtggtgctgaacgacaagggctgcagccagtacttctacgccgagcacctgagcctgcactaccccctggagatcagcgccgccagcggcagactgatgtgccacttcaagctggtggccatcgtgggctacctgatcagactgagcatcaagagcatccagatcgaggccgacaactgcgtgaccgacagcctgaccatctacgacagcctgctgcccatcagaagcagcatcctgtacagaatctgcgagcccaccagaaccctgatgagcttcgtgagcaccaacaacctgatgctggtgaccttcaagagcccccacatcagaagactgagcggcatcagagcctacttcgaggtgatccccgagcagaagtgcgagaacaccgtgctggtgaaggacatcaccggcttcgagggcaagatcagcagcccctactaccccagctactacccccccaagtgcaagtgcacctggaagttccagaccagcctgagcaccctgggcatcgccctgaagttctacaactacagcatcaccaagaagagcatgaagggctgcgagcacggctggtgggagatcaacgagcacatgtactgcggcagctacatggaccaccagaccatcttcagagtgcccagccccctggtgcacatccagctgcagtgcagcagcagactgagcgacaagcccctgctggccgagtacggcagctacaacatcagccagccctgccccgtgggcagcttcagatgcagcagcggcctgtgcgtgccccaggcccagagatgcgacggcgtgaacgactgcttcgacgagagcgacgagctgttctgcgtgagcccccagcccgcctgcaacaccagcagcttcagacagcacggccccctgatctgcgacggcttcagagactgcgagaacggcagagacgagcagaactgcacccagagcatcccctgcaacaacagaaccttcaagtgcggcaacgacatctgcttcagaaagcagaacgccaagtgcgacggcaccgtggactgccccgacggcagcgacgaggagggctgcacctgcagcagaagcagcagcgccctgcacagaatcatcggcggcaccgacaccctggagggcggctggccctggcaggtgagcctgcacttcgtgggcagcgcctactgcggcgccagcgtgatcagcagagagtggctgctgagcgccgcccactgcttccacggcaacagactgagcgaccccaccccctggaccgcccacctgggcatgtacgtgcagggcaacgccaagttcgtgagccccgtgagaagaatcgtggtgcacgagtactacaacagccagaccttcgactacgacatcgccctgctgcagctgagcatcgcctggcccgagaccctgaagcagctgatccagcccatctgcatcccccccaccggccagagagtgagaagcggcgagaagtgctgggtgaccggctggggcagaagacacgaggccgacaacaagggcagcctggtgctgcagcaggccgaggtggagctgatcgaccagaccctgtgcgtgagcacctacggcatcatcaccagcagaatgctgtgcgccggcatcatgagcggcaagagagacgcctgcaagggcgacagcggcggccccctgagctgcagaagaaagagcgacggcaagtggatcctgaccggcatcgtgagctggggccacggcagcggcagacccaacttccccggcgtgtacaccagagtgagcaacttcgtgccctggatccacaagtacgtgcccagcctgctgtag

SEQ ID NO: 301475 - DNA, 2496 bp, Artificial Sequence
  derived and/or modified sequence
atggacaaggagaacagcgacgtgagcgccgcccccgccgacctgaagatcagcaacatcagcgtgcaggtggtgagcgcccagaagaagctgccccccggcagaagacccccccagagacccatcggcaaggccaagcccaagaagcagagcaagaagaaggtgcccttctggaacgtgcagaacaagatcatcctgttcaccgtgttcctgttcatcctggccgtgatcgcctggaccctgctgtggctgtacatcagcaagaccgagagcaaggacgccttctacttcgccggcatgttcagaatcaccaacatcgagttcctgcccgagtacagacagaaggagagcagagagttcctgagcgtgagcagaaccgtgcagcaggtgatcaacctggtgtacaccaccagcgccttcagcaagttctacgagcagagcgtggtggccgacgtgagcagcaacaacaagggcggcctgctggtgcacttctggatcgtgttcgtgatgcccagagccaagggccacatcttctgcgaggactgcgtggccgccatcctgaaggacagcatccagaccagcatcatcaacagaaccagcgtgggcagcctgcagggcctggccgtggacatggacagcgtggtgaacgccgccggcctgagaagcgactacagcagcaccatcggcagcgccgacaagggctgcagccagtacttctacgccgagcacctgagcctgcactaccccctggagatcagcgccgccagcggcagactgatgtgccacttcaagctggtggccatcgtgggctacctgatcagactgagcatcaagagcatccagatcgaggccgacaactgcgtgaccgacagcctgaccatctacgacagcctgctgcccatcagaagcagcatcctgtacagaatctgcgagcccaccagaaccctgatgagcttcgtgagcaccaacaacctgatgctggtgaccttcaagagcccccacatcagaagactgagcggcatcagagcctacttcgaggtgatccccgagcagaagtgcgagaacaccgtgctggtgaaggacatcaccggcttcgagggcaagatcagcagcccctactaccccagctactacccccccaagtgcaagtgcacctggaagttccagaccagcctgagcaccctgggcatcgccctgaagttctacaactacagcatcaccaagaagagcatgaagggctgcgagcacggctggtgggagatcaacgagcacatgtactgcggcagctacatggaccaccagaccatcttcagagtgcccagccccctggtgcacatccagctgcagtgcagcagcagactgagcgacaagcccctgctggccgagtacggcagctacaacatcagccagccctgccccgtgggcagcttcagatgcagcagcggcctgtgcgtgccccaggcccagagatgcgacggcgtgaacgactgcttcgacgagagcgacgagctgttctgcgtgagcccccagcccgcctgcaacaccagcagcttcagacagcacggccccctgatctgcgacggcttcagagactgcgagaacggcagagacgagcagaactgcacccagagcatcccctgcaacaacagaaccttcaagtgcggcaacgacatctgcttcagaaagcagaacgccaagtgcgacggcaccgtggactgccccgacggcagcgacgaggagggctgcacctgcagcagaagcagcagcgccctgcacagaatcatcggcggcaccgacaccctggagggcggctggccctggcaggtgagcctgcacttcgtgggcagcgcctactgcggcgccagcgtgatcagcagagagtggctgctgagcgccgcccactgcttccacggcaacagactgagcgaccccaccccctggaccgcccacctgggcatgtacgtgcagggcaacgccaagttcgtgagccccgtgagaagaatcgtggtgcacgagtactacaacagccagaccttcgactacgacatcgccctgctgcagctgagcatcgcctggcccgagaccctgaagcagctgatccagcccatctgcatcccccccaccggccagagagtgagaagcggcgagaagtgctgggtgaccggctggggcagaagacacgaggccgacaacaagggcagcctggtgctgcagcaggccgaggtggagctgatcgaccagaccctgtgcgtgagcacctacggcatcatcaccagcagaatgctgtgcgccggcatcatgagcggcaagagagacgcctgcaagggcgacagcggcggccccctgagctgcagaagaaagagcgacggcaagtggatcctgaccggcatcgtgagctggggccacggcagcggcagacccaacttccccggcgtgtacaccagagtgagcaacttcgtgccctggatccacaagtacgtgcccagcctgctgtag

SEQ ID NO: 301476 - DNA, 2532 bp, Artificial Sequence
  derived and/or modified sequence
atggacaaggagaacagcgacgtgagcgccgcccccgccgacctgaagatcagcaacatcagcgtgcaggtggtgagcgcccagaagaagctgcccgtgagaagaccccccctgcccggcagaagactgcccctgcccggcagaagacccccccagagacccatcggcaaggccaagcccaagaagcagagcaagaagaaggtgcccttctggaacgtgcagaacaagatcatcctgttcaccgtgttcctgttcatcctggccgtgatcgcctggaccctgctgtggctgtacatcagcaagaccgagagcaaggacgccttctacttcgccggcatgttcagaatcaccaacatcgagttcctgcccgagtacagacagaaggagagcagagagttcctgagcgtgagcagaaccgtgcagcaggtgatcaacctggtgtacaccaccagcgccttcagcaagttctacgagcagagcgtggtggccgacgtgagcagcaacaacaagggcggcctgctggtgcacttctggatcgtgttcgtgatgcccagagccaagggccacatcttctgcgaggactgcgtggccgccatcctgaaggacagcatccagaccagcatcatcaacagaaccagcgtgggcagcctgcagggcctggccgtggacatggacagcgtggtgctgaacgccggcctgagaagcgactacagcagcaccatcggcagcgacaagggctgcagccagtacttctacgccgagcacctgagcctgcactaccccctggagatcagcgccgccagcggcagactgatgtgccacttcaagctggtggccatcgtgggctacctgatcagactgagcatcaagagcatccagatcgaggccgacaactgcgtgaccgacagcctgaccatctacgacagcctgctgcccatcagaagcagcatcctgtacagaatctgcgagcccaccagaaccctgatgagcttcgtgagcaccaacaacctgatgctggtgaccttcaagagcccccacatcagaagactgagcggcatcagagcctacttcgaggtgatccccgagcagaagtgcgagaacaccgtgctggtgaaggacatcaccggcttcgagggcaagatcagcagcccctactaccccagctactacccccccaagtgcaagtgcacctggaagttccagaccagcctgagcaccctgggcatcgccctgaagttctacaactacagcatcaccaagaagagcatgaagggctgcgagcacggctggtgggagatcaacgagcacatgtactgcggcagctacatggaccaccagaccatcttcagagtgcccagccccctggtgcacatccagctgcagtgcagcagcagactgagcgacaagcccctgctggccgagtacggcagctacaacatcagccagccctgccccgtgggcagcttcagatgcagcagcggcctgtgcgtgccccaggcccagagatgcgacggcgtgaacgactgcttcgacgagagcgacgagctgttctgcgtgagcccccagcccgcctgcaacaccagcagcttcagacagcacggccccctgatctgcgacggcttcagagactgcgagaacggcagagacgagcagaactgcacccagagcatcccctgcaacaacagaaccttcaagtgcggcaacgacatctgcttcagaaagcagaacgccaagtgcgacggcaccgtggactgccccgacggcagcgacgaggagggctgcacctgcagcagaagcagcagcgccctgcacagaatcatcggcggcaccgacaccctggagggcggctggccctggcaggtgagcctgcacttcgtgggcagcgcctactgcggcgccagcgtgatcagcagagagtggctgctgagcgccgcccactgcttccacggcaacagactgagcgaccccaccccctggaccgcccacctgggcatgtacgtgcagggcaacgccaagttcgtgagccccgtgagaagaatcgtggtgcacgagtactacaacagccagaccttcgactacgacatcgccctgctgcagctgagcatcgcctggcccgagaccctgaagcagctgatccagcccatctgcatcccccccaccggccagagagtgagaagcggcgagaagtgctgggtgaccggctggggcagaagacacgaggccgacaacaagggcagcctggtgctgcagcaggccgaggtggagctgatcgaccagaccctgtgcgtgagcacctacggcatcatcaccagcagaatgctgtgcgccggcatcatgagcggcaagagagacgcctgcaagggcgacagcggcggccccctgagctgcagaagaaagagcgacggcaagtggatcctgaccggcatcgtgagctggggccacggcagcggcagacccaacttccccggcgtgtacaccagagtgagcaacttcgtgccctggatccacaagtacgtgcccagcctgctgtag

SEQ ID NO: 301477 - DNA, 2454 bp, Artificial Sequence
  derived and/or modified sequence
atggacaaagaaaactccgatgtctcagctgctcccgccgaccttaaaatttcaaacatttccgtgcaagtggtctcagcacaaaagaaacttccacccggcaggcgacccccgcaaagaccaatcggtaaagccaaacctaagaagcagtccaaaaagaaagtacccttctggaatgtgcaaaacaagatcatcctgttcacggtttttttgtttatcctggctgttatcgcctggaccttgttgtggctgtatatcagcaaaaccgagtcaaaggacgcattttactttgccggcatgttccgcatcaccaatatagaatttttgcccgagtataggcagaaagaatctagagaatttctatctgttagtaggacagtgcagcaggtaattaacctggtgtacactacgagcgccttttccaaattttacgaacaaagtgtggtggcggatgtttctagcaataacaaaggaggtcttctggtgcacttctggattgtgtttgtgatgcctagggctaaggggcatatcttttgcgaagattgtgttgcggctatcctcaaagacagcatccagacatccattataaaccggacgtctgtcggctccctccagggcctcgccgtcgacatggactccgtggttcttaacgacaagggctgcagccagtacttctacgcagagcacctttcattgcattacccgctagaaatatcagcagcaagcggaagacttatgtgccacttcaagctcgtggcaatcgttggctacctcattagattatccattaaaagtatccagattgaagcagataactgtgtcactgattccctaacgatatatgacagtctgctgcctattcggagctccatcctttaccgtatatgcgagcctacgcgcactctgatgtcgtttgtgtcaacgaacaacctgatgctggtaaccttcaagtccccgcatatacgtcggctctcgggcattcgcgcttatttcgaggtcattccagagcagaaatgcgaaaatacggtgcttgtgaaagatataaccggcttcgagggaaaaatctcaagcccttattacccttcctactatcctcccaaatgcaaatgtacatggaagtttcaaacgagtcttagcactctggggatcgctctgaagttctataactactccattacaaaaaaaagtatgaagggttgtgagcacgggtggtgggagatcaacgagcatatgtattgcggcagctacatggatcaccagaccatctttagagttccttccccgctcgttcacattcagcttcagtgtagctctcggctcagtgacaaacccctgctcgctgagtatgggagctacaacatcagccaaccttgtcccgtaggatcttttcggtgttcatccggattgtgtgttccacaggctcagcgatgcgatggagtgaatgattgttttgacgagtccgacgagttgttctgcgtctctccccagcccgcctgcaacacatccagcttccggcagcatgggccactaatctgcgatggatttcgggactgtgaaaacgggcgggacgagcagaattgcactcaatcaattccctgcaacaatcgcaccttcaaatgtggcaatgacatttgctttaggaaacagaacgcaaaatgtgatgggaccgtggattgtccagacgggtccgacgaagagggatgtacctgctcccgctccagctccgccctacaccgaattatcgggggcacagacactctggaaggggggtggccctggcaagtgtcgttacatttcgtgggaagtgcctattgtggtgcttcagtcatttcgcgcgagtggctgctctccgctgcacactgttttcatgggaataggctgtcagatcccacaccgtggacagcgcatctgggaatgtatgttcagggcaacgcaaaattcgtgtccccggttagacgcatcgtggttcacgaatactacaattcgcaaacctttgattatgacatcgctctgctacagctgtcgattgcgtggccggagaccttgaaacagctgatccaaccgatttgtataccacccaccgggcagcgggtaaggtccggcgaaaagtgttgggtaaccgggtggggaagacgccatgaagcggacaataaaggctccttagtgctccagcaggctgaagtggagctgatcgatcagaccctttgtgtgagcacttacggtataatcacaagccggatgttgtgtgctgggatcatgtccggtaagcgggatgcctgtaagggagactctggggggcctctgtcttgccgacggaaatcagacggtaagtggatcttaaccggaatcgtttcatggggccatgggagtggacgtccaaattttccgggagtgtacacccgggtatccaacttcgtgccgtggatacataaatacgttccctcattactgtag

SEQ ID NO: 301478 - DNA, 2496 bp, Artificial Sequence
  derived and/or modified sequence
atggacaaggagaattccgatgtctcggccgcccctgcagatctgaagatcagcaacatatccgtgcaggtggtgtctgcacagaaaaagctcccccctggccgccgaccaccacaacgcccaattgggaaagcgaagccaaagaagcagtccaagaaaaaagtgcccttttggaatgtccagaacaagatcattctgttcacagtgttcctgtttattctcgccgtgattgcctggaccttattatggctgtatatatctaagacagagagcaaagatgccttttacttcgctggcatgtttagaattaccaacattgagtttctgcctgagtatagacagaaggagtcgcgcgagtttctgtccgtgagcagaactgtccaacaggttatcaatctggtctatacaacctccgcatttagcaagttttatgagcaaagcgtggtggctgacgtgtcttctaacaataaagggggactgctggtgcacttttggattgtgttcgtgatgccacgggccaaggggcacattttctgtgaagactgtgtcgccgcaatcctcaaagactccattcaaacatccataatcaatcggacaagtgtaggcagccttcagggactggccgtggatatggacagtgtggtcaacgccgccggcctgcgttccgactattcctcgaccattggcagtgccgacaaggggtgtagccagtacttctacgcagaacacctatctcttcactacccattggagattagtgccgcatccgggaggctgatgtgtcattttaaactcgtggctatcgtcggctacctgatacgcctgagcattaagtccattcagattgaggccgacaattgcgtgaccgattcactcactatttatgactccctcttacccattagatcgtcaattctgtaccgcatctgcgagccgaccaggacacttatgagctttgtgagcaccaacaacctaatgctggtgacattcaaatcacctcacattcgcagactcagcggcattagggcatactttgaagtgatcccagaacagaaatgcgagaacactgtcctagtgaaggatatcacggggttcgaaggtaaaatatcatccccctattatccaagctattaccctcctaaatgtaagtgcacgtggaagtttcagacgagcctctcaacactcggcattgctttaaagttttacaactattctatcacaaaaaagtccatgaagggctgcgagcatgggtggtgggagattaacgagcatatgtattgcggaagctacatggaccaccaaacaatctttagggttccctctccactggtgcatatccagctgcagtgcagtagtcggctgtccgacaaacctttgctggcggagtacggctcctacaatatttctcagccatgccctgtgggctcatttcggtgctcctccggcctgtgtgttcctcaggcccagaggtgcgatggcgtcaacgattgtttcgatgagagtgatgagctcttttgtgtgtcccctcagcctgcctgcaatacctcatcttttcgtcagcatgggccgctgatatgcgatggttttcgggattgcgagaatggcagggacgaacagaactgtacgcagtccatcccgtgtaacaatagaacgtttaagtgcgggaacgatatttgctttcggaagcaaaacgctaagtgcgacggtacagtggattgtcccgatggatcagatgaagagggctgcacatgctctcgttcttcatccgcactgcatcgtattatcgggggcaccgacactctggaaggcggatggccctggcaggtttcactgcattttgtaggctccgcttactgtggagccagcgtgatctcacgcgaatggctgctgtctgccgctcactgctttcacgggaacaggttgtcagatcccacaccatggacagctcacctcgggatgtacgtccagggtaatgcgaagttcgtttcaccagtacgaaggatagtggtgcacgaatattataattcccagacatttgattacgacatcgccttgctgcagctgagcatagcctggcccgagactctgaagcagctgattcaacccatctgcatacctcctaccggacagagagtgagaagcggcgaaaaatgttgggtcacaggatgggggcggagacacgaggccgacaacaaaggatctctcgtgctgcaacaagcagaggtggaattgattgaccaaactctgtgtgtttccacatatgggatcatcacgtctcggatgctgtgtgccgggattatgtcaggcaagcgcgatgcctgcaaaggggactcaggtggccccctgtcctgcaggagaaaatcggacggtaagtggatattgactggcatcgtgagttgggggcacggtagtggcagacctaattttcccggtgtgtacacccgagtctcaaacttcgtgccctggatccataagtatgttcccagcttgttgtag

SEQ ID NO: 301479 - DNA, 2532 bp, Artificial Sequence
  derived and/or modified sequence
atggataaggaaaactctgacgtgagcgcggctccagccgatcttaaaatctcaaatatcagcgttcaagttgtgtccgcccaaaaaaaactccctgtcagacggcctcctctcccaggaaggcggctgcccttgccggggcgcaggcctccgcagaggccaatcgggaaagccaaacctaagaagcagtctaagaagaaagtacctttctggaatgtccagaacaaaataatattattcaccgtgttcctatttattctggctgtgatcgcttggacgcttctttggctgtacatatcaaagacagagagcaaggacgcgttctacttcgcggggatgttccgcatcactaacatcgaattcctgcctgaataccgccaaaaagagagcagagagttcctgagcgtgtccagaactgtgcagcaagtgattaacttggtgtacacgacttcagccttctcaaagttttacgaacaatccgtggtcgccgatgtgagttctaataacaagggcggactgctggttcatttctggatcgtctttgtgatgccccgcgctaaggggcacatattctgcgaagactgtgtcgctgctatcctgaaagatagtatccaaacaagcatcattaatagaacctccgtcggatcactccagggcttggcggtagatatggacagcgtcgtgctgaacgctggactgagaagcgactactctagcactattggatccgataaaggctgttcacaatatttctacgctgagcatctgagtctgcattatcctctggagatctccgccgcttctgggcggctgatgtgccacttcaaactcgtagctatcgtgggatacctcattagactctctattaagagcatacagatagaagctgataactgtgtaacagactccctgaccatttacgattccctcttacctatccgcagctctattctctatagaatctgcgaacctactcgcaccctgatgtcttttgtgtctactaacaatctgatgctggtcacgttcaagtcccctcacatacgccgcctcagtggtatacgggcttactttgaggtgatcccagagcagaagtgcgaaaatactgtcttggtgaaggacattaccggttttgagggaaaaattagctctccctactatccctcttattaccctcctaagtgcaagtgcacatggaagtttcagacctccctcagcaccctgggtatcgccttgaagttctataactactccataaccaaaaagagcatgaaaggatgcgagcatggctggtgggagatcaatgaacatatgtattgcggaagctacatggaccaccaaaccatcttccgcgttccctctcccctggtgcatatacagctccaatgctctagtaggctatctgataaacccctactggctgagtatggttcgtacaatatcagccagccatgccctgttggtagtttcagatgttctagcggcttatgcgttccacaggctcagcgctgcgatggcgttaatgattgcttcgacgagagcgacgagctcttctgtgtcagcccccagcctgcctgtaatacgtcctccttccgccaacatggccccctgatttgcgatgggtttcgtgactgcgagaatggtcgggacgaacagaattgtacccaaagcatcccatgtaacaataggaccttcaaatgcgggaatgacatttgttttcggaaacagaacgcgaagtgtgatggcacagtggactgccccgacggtagcgacgaggaggggtgcacctgtagtagatccagctcagccttgcatagaataatcggaggaacagataccctcgagggggggtggccttggcaagtcagcttacacttcgtcgggtccgcgtactgtggcgcaagcgtgatttccagggagtggttattgtccgctgcccattgcttccacggtaaccgactcagcgatccaaccccatggacagcccatttaggtatgtacgtccagggcaatgctaagtttgtcagtcccgtcagacggatcgtggttcacgagtactacaactctcagacattcgactatgacattgcgcttctacagctcagtattgcctggcctgagaccctaaaacaactgatccagccaatttgcataccaccaacaggacagagggttagaagcggggagaagtgttgggtgactgggtggggccggcgacatgaggccgataacaaagggagcctggtactacaacaggctgaagttgaactgatcgatcagaccctgtgcgtctcaacatatgggatcatcacatcccggatgttatgcgcagggattatgtcaggcaagcgggacgcatgcaaaggcgacagcggcgggcctcttagttgcaggcgaaagagcgacggcaaatggatattgaccggcattgtctcttgggggcacggatcggggaggccaaatttcccaggcgtttacactagggtgagcaactttgtgccttggattcataagtacgttcctagcctcctttag

SEQ ID NO: 301480 - DNA, 2454 bp, Artificial Sequence
  derived and/or modified sequence
atggacaaggagaacagtgatgtgtctgctgccccagctgacctgaagatcagcaacatctctgtgcaggtggtgtctgcccagaagaagctgcccccaggaagaagaccaccccagaggcccatcggcaaggccaagcccaagaagcagagcaagaagaaggtgcccttctggaatgtgcagaacaagatcatcctcttcaccgtcttcctgttcatcctggccgtgattgcctggaccctgctgtggctgtacatcagcaagacagagagcaaggatgccttctactttgctggcatgttccgcatcaccaacatcgagttcctgcctgagtaccggcagaaggagagccgggagttcctgtctgtgtccaggacagtgcagcaggtgatcaacctggtgtacaccaccagcgccttcagcaagttctatgagcagagcgtggtggctgatgtgagcagcaacaacaagggcggcctgctggtgcacttctggatcgtgtttgtgatgccccgggccaagggccacatcttctgtgaggactgtgtggccgccatcctgaaggacagcatccagaccagcatcatcaacagaacatctgtgggcagcctgcagggcctggccgtggacatggattctgtggtgctgaatgacaagggctgcagccagtacttctatgcagagcacctgagcctgcactaccccctggagatctctgctgccagcggccgcctgatgtgccacttcaagctggtggccatcgtgggctacctgatccggctgagcatcaagagcatccagatcgaggccgacaactgtgtgacagacagcctgaccatctatgacagcctgctgcccatccgcagcagcatcctgtaccgcatctgtgagcccaccaggaccctgatgagctttgtgtccaccaacaacctgatgctggtgaccttcaagagcccccacatccggcggctgagcggcatccgggcctactttgaagtcatccctgagcagaagtgtgagaacacagtgctggtgaaggacatcactggatttgagggcaagatcagcagcccctactaccccagctactacccacccaagtgcaagtgcacctggaagttccagaccagcctgagcaccctgggcatcgccctgaagttctacaactacagcatcaccaagaagtccatgaagggctgtgagcacggctggtgggagatcaatgagcacatgtactgcggcagctacatggaccaccagaccatcttccgggtgcccagccccctggtgcacatccagctgcagtgcagcagccggctgagtgacaagcccctgctggccgagtatggcagctacaacatcagccagccctgccctgtgggcagcttccgctgcagcagcggcctgtgtgtgccccaggcccagagatgtgatggagtgaatgactgctttgatgaaagtgatgagctgttctgtgtgagcccccagcctgcctgcaacaccagcagcttccggcagcacggccccctcatctgtgatggcttccgggactgtgaaaatggaagagatgagcagaactgcacccagagcatcccctgcaacaacagaaccttcaagtgtggaaatgacatctgcttcaggaagcagaatgccaagtgtgatggcaccgtggactgcccagatggcagtgatgaggagggctgcacctgcagccgcagcagcagcgccctgcaccgcatcattggaggaacagacaccctggagggcggctggccctggcaggtgtccctgcactttgtgggcagcgcctactgtggggccagcgtcatcagccgggagtggctgctgtctgctgcccactgcttccacggcaaccggctgagtgaccccaccccctggacagcccacctgggcatgtatgtgcagggcaatgccaagtttgtgtcccctgtgcggcgcatcgtggtgcatgagtactacaacagccagacctttgattatgacatcgccctgctgcagctgagcatcgcctggccagagaccctgaagcagctgatccagcccatctgcatcccccccaccggccagagggtgcgcagcggggagaagtgctgggtgacaggctggggcagaagacatgaagctgacaacaagggcagcctggtgctgcagcaggccgaggtggagctgattgaccagaccctgtgtgtgtccacctacggcatcatcaccagcaggatgctgtgtgccggcatcatgtctgggaagagagatgcctgcaagggggacagcggcggccccctgagctgcaggaggaagagtgatggcaagtggatcctgactggaattgtgtcctggggccacggcagcggccggcccaacttccctggggtgtacaccagggtgagcaactttgtgccctggatccacaagtatgtgcccagcctgctgtag

SEQ ID NO: 301481 - DNA, 2496 bp, Artificial Sequence
  derived and/or modified sequence
atggacaaggagaacagtgatgtgtctgctgccccagctgacctgaagatcagcaacatctctgtgcaggtggtgtctgcccagaagaagctgcccccaggaagaagaccaccccagaggcccatcggcaaggccaagcccaagaagcagagcaagaagaaggtgcccttctggaatgtgcagaacaagatcatcctcttcaccgtcttcctgttcatcctggccgtgattgcctggaccctgctgtggctgtacatcagcaagacagagagcaaggatgccttctactttgctggcatgttccgcatcaccaacatcgagttcctgcctgagtaccggcagaaggagagccgggagttcctgtctgtgtccaggacagtgcagcaggtgatcaacctggtgtacaccaccagcgccttcagcaagttctatgagcagagcgtggtggctgatgtgagcagcaacaacaagggcggcctgctggtgcacttctggatcgtgtttgtgatgccccgggccaagggccacatcttctgtgaggactgtgtggccgccatcctgaaggacagcatccagaccagcatcatcaacagaacatctgtgggcagcctgcagggcctggccgtggacatggattctgtggtgaatgctgctggcctgcggagtgactacagcagcaccatcggcagcgctgacaagggctgcagccagtacttctatgcagagcacctgagcctgcactaccccctggagatctctgctgccagcggccgcctgatgtgccacttcaagctggtggccatcgtgggctacctgatccggctgagcatcaagagcatccagatcgaggccgacaactgtgtgacagacagcctgaccatctatgacagcctgctgcccatccgcagcagcatcctgtaccgcatctgtgagcccaccaggaccctgatgagctttgtgtccaccaacaacctgatgctggtgaccttcaagagcccccacatccggcggctgagcggcatccgggcctactttgaagtcatccctgagcagaagtgtgagaacacagtgctggtgaaggacatcactggatttgagggcaagatcagcagcccctactaccccagctactacccacccaagtgcaagtgcacctggaagttccagaccagcctgagcaccctgggcatcgccctgaagttctacaactacagcatcaccaagaagtccatgaagggctgtgagcacggctggtgggagatcaatgagcacatgtactgcggcagctacatggaccaccagaccatcttccgggtgcccagccccctggtgcacatccagctgcagtgcagcagccggctgagtgacaagcccctgctggccgagtatggcagctacaacatcagccagccctgccctgtgggcagcttccgctgcagcagcggcctgtgtgtgccccaggcccagagatgtgatggagtgaatgactgctttgatgaaagtgatgagctgttctgtgtgagcccccagcctgcctgcaacaccagcagcttccggcagcacggccccctcatctgtgatggcttccgggactgtgaaaatggaagagatgagcagaactgcacccagagcatcccctgcaacaacagaaccttcaagtgtggaaatgacatctgcttcaggaagcagaatgccaagtgtgatggcaccgtggactgcccagatggcagtgatgaggagggctgcacctgcagccgcagcagcagcgccctgcaccgcatcattggaggaacagacaccctggagggcggctggccctggcaggtgtccctgcactttgtgggcagcgcctactgtggggccagcgtcatcagccgggagtggctgctgtctgctgcccactgcttccacggcaaccggctgagtgaccccaccccctggacagcccacctgggcatgtatgtgcagggcaatgccaagtttgtgtcccctgtgcggcgcatcgtggtgcatgagtactacaacagccagacctttgattatgacatcgccctgctgcagctgagcatcgcctggccagagaccctgaagcagctgatccagcccatctgcatcccccccaccggccagagggtgcgcagcggggagaagtgctgggtgacaggctggggcagaagacatgaagctgacaacaagggcagcctggtgctgcagcaggccgaggtggagctgattgaccagaccctgtgtgtgtccacctacggcatcatcaccagcaggatgctgtgtgccggcatcatgtctgggaagagagatgcctgcaagggggacagcggcggccccctgagctgcaggaggaagagtgatggcaagtggatcctgactggaattgtgtcctggggccacggcagcggccggcccaacttccctggggtgtacaccagggtgagcaactttgtgccctggatccacaagtatgtgcccagcctgctgtag

SEQ ID NO: 301482 - DNA, 2532 bp, Artificial Sequence
  derived and/or modified sequence
atggacaaggagaacagtgatgtgtctgctgccccagctgacctgaagatcagcaacatctctgtgcaggtggtgtctgcccagaagaagctgcctgtgcggcggccccccctgcctggaagaaggctgcccctgcccggccggcggcccccccagaggcccatcggcaaggccaagcccaagaagcagagcaagaagaaggtgcccttctggaatgtgcagaacaagatcatcctcttcaccgtcttcctgttcatcctggccgtcatcgcctggaccctgctgtggctgtacatcagcaagacagagagcaaggatgccttctactttgctggcatgttccgcatcaccaacatcgagttcctgcctgagtaccggcagaaggagagccgggagttcctgtctgtgtccaggacagtgcagcaggtgatcaacctggtgtacaccaccagcgccttcagcaagttctatgagcagagcgtggtggctgatgtgagcagcaacaacaagggcggcctgctggtgcacttctggatcgtgtttgtgatgccccgggccaagggccacatcttctgtgaggactgtgtggccgccatcctgaaggacagcatccagaccagcatcatcaacagaacatctgtgggcagcctgcagggcctggccgtggacatggacagcgtggtgctgaatgccggcctgcggagtgactacagcagcaccatcggcagtgacaagggctgcagccagtacttctatgcagagcacctgagcctgcactaccccctggagatctctgctgccagcggccgcctgatgtgccacttcaagctggtggccatcgtgggctacctgatccggctgagcatcaagagcatccagatcgaggccgacaactgtgtgacagacagcctgaccatctatgacagcctgctgcccatccgcagcagcatcctgtaccgcatctgtgagcccaccaggaccctgatgagctttgtgtccaccaacaacctgatgctggtgaccttcaagagcccccacatccggcggctgagcggcatccgggcctactttgaagtcatccctgagcagaagtgtgagaacacagtgctggtgaaggacatcactggatttgagggcaagatcagcagcccctactaccccagctactacccacccaagtgcaagtgcacctggaagttccagaccagcctgagcaccctgggcatcgccctgaagttctacaactacagcatcaccaagaagtccatgaagggctgtgagcacggctggtgggagatcaatgagcacatgtactgcggcagctacatggaccaccagaccatcttccgggtgcccagccccctggtgcacatccagctgcagtgcagcagccggctgagtgacaagcccctgctggccgagtatggcagctacaacatcagccagccctgccctgtgggcagcttccgctgcagcagcggcctgtgtgtgccccaggcccagagatgtgatggagtgaatgactgctttgatgaaagtgatgagctgttctgtgtgagcccccagcctgcctgcaacaccagcagcttccggcagcacggccccctcatctgtgatggcttccgggactgtgaaaatggaagagatgagcagaactgcacccagagcatcccctgcaacaacagaaccttcaagtgtggaaatgacatctgcttcaggaagcagaatgccaagtgtgatggcaccgtggactgcccagatggcagtgatgaggagggctgcacctgcagccgcagcagcagcgccctgcaccgcatcattggaggaacagacaccctggagggcggctggccctggcaggtgtccctgcactttgtgggcagcgcctactgtggggccagcgtcatcagccgggagtggctgctgtctgctgcccactgcttccacggcaaccggctgagtgaccccaccccctggacagcccacctgggcatgtatgtgcagggcaatgccaagtttgtgtcccctgtgcggcgcatcgtggtgcatgagtactacaacagccagacctttgattatgacatcgccctgctgcagctgagcatcgcctggccagagaccctgaagcagctgatccagcccatctgcatcccccccaccggccagagggtgcgcagcggggagaagtgctgggtgacaggctggggcagaagacatgaagctgacaacaagggcagcctggtgctgcagcaggccgaggtggagctgattgaccagaccctgtgtgtgtccacctacggcatcatcaccagcaggatgctgtgtgccggcatcatgtctgggaagagagatgcctgcaagggggacagcggcggccccctgagctgcaggaggaagagtgatggcaagtggatcctgactggaattgtgtcctggggccacggcagcggccggcccaacttccctggggtgtacaccagggtgagcaactttgtgccctggatccacaagtatgtgcccagcctgctgtag

SEQ ID NO: 301483 - DNA, 2454 bp, Artificial Sequence
  derived and/or modified sequence
atggacaaggagaacagcgacgtgagcgccgcccccgccgacctgaaaatctccaacatcagtgtgcaggtcgtcagcgcccaaaaaaaacttccacccggtcgccgccccccccagcgacctatcggcaaggccaagcctaaaaaacaatctaaaaaaaaagtgcccttctggaacgttcagaacaagattattctgtttacagtgttcctgttcattctggccgtgatagcttggacactgctctggttatatattagtaagaccgaaagcaaggatgctttttactttgcaggcatgttcaggattacaaatatcgaatttttacccgagtacaggcagaaggagagcagggagtttctatcagtgagtaggacagtccaacaggttatcaacctcgtctacaccacatcggccttttcaaagttctacgagcaaagcgtggtcgccgatgtgagttcgaataataagggaggtttattggtgcacttttggattgtttttgtgatgccccgggccaaaggtcacatcttctgcgaggactgcgtggctgccatactgaaggatagcattcagacatctatcattaatcgaacctccgtgggcagcctacagggcttagccgtggacatggactccgtggtactcaacgacaaagggtgttcgcagtacttttacgccgagcacctgagcttgcactatccattggaaatctcagctgctagcggccgcctcatgtgtcactttaagctggtcgctattgtggggtacctcatcaggctctcaataaagtcgatacagattgaagccgataactgcgtcactgattcactcactatttacgactccctgctgccaattcgttccagtattctctaccgtatttgcgaacccactaggaccctgatgtcattcgtatcaacaaataatctgatgttggtgacgttcaagagcccccacataagacgtctttcagggattcgcgcttactttgaagtcataccggagcaaaagtgtgaaaacaccgtgctcgtcaaagacattactgggtttgagggtaagatttcttctccctactatccttcatattatccgcccaaatgtaaatgtacctggaagtttcaaactagcctctcaacccttgggatcgctcttaagttttataattattctatcacgaaaaagagtatgaaaggatgtgagcatggatggtgggagatcaatgagcacatgtattgcgggagttacatggatcaccaaactatctttcgagttccatcccccctggtgcatatccagctccagtgcagtagtcggctcagtgacaagcccctgcttgcagaatacggtagctacaacatttcacagccgtgccccgtgggcagtttccggtgtagcagtggcctgtgcgtcccacaggcacaaagatgtgatggcgtcaacgattgtttcgatgagtccgatgagctgttctgtgtgagtccccaacccgcatgtaacacttcctccttccgccaacacggccccctgatttgtgacggttttcgcgactgcgagaacggccgcgacgaacagaactgcacccagtccattccgtgtaataaccgcactttcaagtgtgggaacgacatctgttttaggaagcagaacgcgaagtgcgatgggaccgtggattgccctgatgggagcgacgaagagggttgtacctgttcacggtcttcctccgcgctgcatcgtatcatcggcggaactgacaccctagagggaggatggccttggcaggtgtcacttcactttgtgggctctgcctactgtggggcgagcgtgatttcacgcgagtggctgctcagcgcagcacattgctttcacggtaaccggttgtcggacccaactccttggactgctcacttaggaatgtacgtccagggaaatgcaaaattcgtaagccctgtgaggcggattgttgtgcacgagtactacaatagccagacattcgattacgatatagctcttctacagttgagtattgcatggcccgaaaccctgaaacagctcatccagcctatctgtatcccacccaccggacagagggtgcggtcaggcgagaaatgctgggttacgggctggggccgccgccatgaggccgacaacaaaggatcacttgtcctgcagcaagcagaggtcgagctgatagatcaaacgctttgcgtttcgacctacggcattattaccagtcggatgctgtgtgccggaataatgagtgggaagcgtgatgcctgcaagggagatagcggagggcccctgtcttgtaggagaaagtccgacgggaagtggattctcactggaatagtcagttgggggcacgggtcagggaggcccaactttccaggggtctataccagggtcagcaactttgtgccctggatccacaagtacgtgccctctctactgtag

SEQ ID NO: 301484 - DNA, 2496 bp, Artificial Sequence
  derived and/or modified sequence
atggacaaggagaacagcgacgtgagcgccgcccccgccgacctgaagatctccaatatcagtgtgcaagttgtcagcgcccagaagaagttgcctcccgggcggagacccccacaaaggccgataggcaaggctaaacctaaaaagcagtccaagaagaaggtgcctttctggaacgtgcagaacaagatcatcctgtttacagtgttcctattcattctggctgtgatagcttggacactgctgtggctatacatctccaagactgaatctaaggatgccttctattttgccggcatgtttcggatcacaaatattgagttccttcctgaataccgccagaaggagtctagggaatttctgtccgtaagccgcacagtgcagcaggtcatcaatcttgtatacaccacctcagcattctcaaaattttacgagcaaagcgtcgtggccgacgtgtctagcaataacaaggggggcctgcttgtacacttctggatcgtgtttgtaatgcccagagccaaaggacacatattctgtgaagattgtgtggccgcaatcctgaaagatagtatccagacctccatcatcaatcgcacatctgtgggctccctccagggactcgccgtggatatggactccgtggttaacgccgcaggcctacgcagcgactactcgagcacaataggcagcgccgacaaagggtgttcacagtacttctatgcggagcacctgagcctccattacccactggagatcagcgccgctagcggaaggctgatgtgccatttcaaattagtggctattgtggggtacctcatccgtctttcaattaagagtatccagattgaagctgacaactgtgtgacggattcgctcacaatttacgactctctgctcccaattcggtcaagcattctgtaccgaatctgtgaacccaccaggacactgatgtcttttgtcagtacgaacaatctaatgctggtaacattcaaatcacctcatatacgtcgtctgtccggaattagggcatattttgaggtgattccggagcagaaatgcgaaaacaccgtcctggtgaaggacataactggatttgaaggcaaaatctcaagcccctattaccccagctattacccgcctaagtgcaagtgtacatggaaatttcagacgtccttaagcacgctgggcatcgctctgaagttttataattattctattacaaagaaatcgatgaagggctgcgagcatggttggtgggagattaacgagcatatgtactgcggcagctacatggatcaccagaccattttccgggtgccctccccgttggttcatatccagttacaatgctcttctcggctgtcggacaagccattactggctgaatatgggtcctacaacatcagccagccgtgccccgtgggatctttccgctgctcctccggattgtgtgtaccacaggcacaacgatgcgacggggtaaacgattgctttgatgagtccgacgaattgttttgcgttagtccacaaccggcctgcaacacatctagctttaggcagcatggaccactaatctgcgatggcttcagggactgcgaaaacggccgggacgagcagaattgcacccagagtatcccctgcaataaccgaacattcaagtgtggtaacgacatatgtttccgcaagcaaaacgctaagtgtgatgggaccgttgactgtccagatgggtccgacgaggaagggtgtacctgtagtagatcctcaagcgctctccaccgaataattggggggactgatacactcgaaggtgggtggccttggcaggtgtccctacacttcgtagggagcgcctactgcggtgcctcggtgatttcccgagagtggctgttgtccgctgcacattgcttccacggaaaccggttgtccgacccgactccctggactgctcaccttggtatgtacgtccagggcaatgccaagttcgttagccctgtgcggaggatcgtcgtgcacgagtattacaacagtcagacatttgactacgatatcgcactgttacagttgagtatcgcttggcccgaaacattgaaacagttgatccaaccaatatgtatccctcccacaggtcaaagagtgcggtcaggtgaaaaatgctgggttacaggatggggccgaagacacgaggctgataacaaaggttcgcttgtgctgcaacaggctgaggtggaactcatcgaccaaaccctttgtgtctcgacatacgggattataactagccgcatgctttgcgccgggatcatgtctggcaagagagatgcctgcaagggggatagtgggggccccttgtcgtgccgcagaaagagcgacgggaagtggattctaacagggatcgtgtcctggggccatggttctgggcgcccaaacttccctggagtatacaccagagtgtcgaacttcgtaccttggattcataagtacgtgccatccttattgtag

SEQ ID NO: 301485 - DNA, 2532 bp, Artificial Sequence
  derived and/or modified sequence
atggacaaggagaacagcgacgtgagcgccgcccccgccgacctgaaaatcagcaatatttccgttcaggttgtgagtgctcagaaaaagctgcccgtgcggcggcctccgctgccaggccgccggttacccctgcctgggaggaggcccccccagcggccgattggtaaggcaaagccaaaaaaacaatctaagaaaaaggtccctttctggaatgttcagaataagattatcctttttacagtgtttctattcattctggcagtgattgcatggactctcctgtggctctacattagcaaaaccgaaagcaaagacgcattttattttgctggcatgttcaggatcacaaatattgagttcctcccagagtacagacagaaagagtcaagagagtttctgtccgtttcaaggacagtgcagcaggtgattaatctggtctataccacgagcgcattttccaagttctacgaacagagtgtcgttgcagatgtgagcagtaacaacaaagggggcctgctggtgcatttttggatcgtcttcgttatgcctcgcgctaaggggcatatcttttgcgaggattgcgtggctgccatcctcaaggatagtatccagacatctataatcaaccggacctcagtaggatcactccaaggtctcgccgttgacatggattctgtggtcctgaatgcggggttgcgctcagactacagtagtaccattggctcagacaaaggctgctcccagtatttctacgctgaacacctgtctctgcactaccctcttgaaatttcagctgcgagtggccggctgatgtgtcattttaagttggtggctatcgttggatatttaatccggctgagcatcaaaagtatccagatcgaggccgacaactgtgtgacagacagcctcaccatctacgatagcctgttaccaatcagatcttcgattctgtatcgaatctgcgagccgacgcgtacgcttatgtcattcgtttcaaccaacaacctgatgttggttactttcaagtcacctcatatccgcagactgagcggaatcagagcctattttgaggtaatacccgaacagaaatgtgagaacacagtactcgtgaaggatatcacaggattcgagggtaaaatttcaagtccctattaccctagctattaccccccaaaatgtaaatgcacctggaagttccagacaagtctcagtacgctgggtatcgcactgaagttttataattacagcataactaagaaatcaatgaaaggctgtgagcacggatggtgggagatcaacgagcatatgtactgcggaagctatatggatcaccagactatctttcgagttccgagccctctcgtccatatccagctccagtgttcatcacggttgagcgacaaacctcttctggcggaatacggtagctataatatctcccaaccttgcccagttggaagctttcgctgtagttccgggttgtgtgttcctcaggcacaacgatgtgacggtgtgaatgactgcttcgatgagtcagacgagctcttctgtgtgtccccgcaacccgcctgcaacaccagctcgtttagacagcacggccccctgatttgcgacgggttcagagactgtgagaatggaagggatgagcagaactgcacccagtctatcccatgcaataaccggacattcaaatgcggaaacgacatatgttttcgcaaacaaaatgcgaagtgtgatggaacggtggactgccctgatggctccgatgaggaggggtgcacatgcagccgcagcagtagtgcacttcatagaatcataggtgggaccgatacccttgaaggtgggtggccctggcaggtctccctccattttgtcggaagcgcctattgcggtgcttccgtcattagccgagagtggctattatctgcggcgcattgtttccacgggaatcgtctgagtgatccaactccttggaccgctcatctcggcatgtacgtacagggcaacgctaagttcgtgtccccggtcaggcggatcgtggtacacgagtactataattcacagacttttgattacgatatcgctctgctgcagctctctattgcatggcccgagaccctgaaacagctcatccaaccaatttgcatcccaccgactggccagagggtccgatccggggagaagtgttgggttaccggttgggggcgcaggcacgaagccgacaacaagggaagcttagtgctgcagcaggccgaagtcgagctgatcgaccagactttgtgcgtgtccacctatggaattatcactagccgcatgctgtgcgccgggattatgagtggaaagagagatgcgtgtaagggcgactccggaggtcccttgtcttgccgccgcaaatcagatgggaagtggattctgacaggaatcgtgagctggggacacgggtcaggacgcccaaattttcccggtgtgtatacacgggtcagtaacttcgtgccgtggatacacaagtatgtcccttccctactctag

SEQ ID NO: 301486 - DNA, 2454 bp, Artificial Sequence
  derived and/or modified sequence
atggataaggagaattccgacgtgtctgccgcacccgctgatctgaagatttctaacatcagcgttcaggtggtgagcgctcagaagaaacttccaccgggacgacgtccgccacagaggcctatcgggaaggcgaaaccaaagaagcagagcaagaagaaagtgcccttttggaatgtacaaaataagataatcttgtttacggtgttccttttcattctcgccgtcatagcctggacacttctatggctttacatctccaagaccgagagtaaggacgccttctacttcgccggaatgttcaggataaccaacatagaatttctgcctgagtacagacagaaagagtccagggagttccttagcgtgtccagaactgtgcagcaggtcatcaatcttgtttacacaaccagtgcattctctaagttctacgaacagagtgtggtagctgatgtaagtagtaataacaaggggggactgttggtccacttttggattgtatttgtgatgcctcgcgctaagggacacatattctgtgaagactgcgtggccgcaatcctgaaggacagcattcagacaagtataattaacaggacaagtgtcggctccttgcagggcctggccgtcgatatggactctgtcgtgttgaacgacaaaggttgttcacagtatttctacgccgaacacctctctctccactacccactggaaatttctgcagcttctggccgtctgatgtgtcactttaaattggtcgctatcgtcggttatctgatacgcctctcaattaagtccatacaaatcgaagccgacaactgtgtcaccgattctctgaccatctatgactccctactgccaatccgcagtagcatcctctaccgtatttgtgaacctacgagaacgctgatgtcctttgtatctacgaataatcttatgctggtaacatttaaatctcctcacattagacggctgagcggtattcgggcatatttcgaagtaattccagagcaaaaatgcgaaaatactgtgctggttaaagacattacaggctttgaaggcaaaatcagtagtccttactatcccagctattaccctccaaagtgcaagtgcacatggaagtttcaaaccagtctgtctactttagggattgccttgaagttctataattacagcatcacaaagaaatcaatgaaaggatgtgagcacggatggtgggagataaatgaacatatgtattgtggaagttacatggaccaccagacgatttttcgcgtcccatccccattagtgcacatccagttgcaatgtagctctcggctgtctgataagcctctcttggccgagtatggttcctacaatatttcccagccgtgccctgtagggtcatttaggtgttccagcggtctgtgtgtccctcaggctcaacggtgcgatggagttaatgattgcttcgacgagtccgatgagctgttctgcgtgtcgccccagccagcatgcaacactagttcattccgccaacacgggccactgatctgtgatggctttcgggactgcgaaaatggtcgagacgaacagaactgtacccaatccatcccctgtaacaatagaacgttcaaatgcggtaacgacatctgctttcggaagcaaaacgctaagtgtgatgggactgtggactgcccggatggctctgacgaggagggttgtacatgcagccgctcatcctcagccctccaccgcattattgggggtacagacacactggaaggcggatggccatggcaagtgagtcttcattttgttggctccgcttattgtggcgcaagcgtgatcagccgagaatggttgctcagtgcggcacactgtttccatggtaaccgtttgtcggatccaaccccctggacagcccatcttggaatgtatgtgcaaggaaatgctaagttcgttagcccagtgaggaggattgtggtgcacgaatactataatagtcagacatttgactacgacattgcgctgctgcaacttagcatcgcttggcccgagaccctgaaacagcttatacagcctatttgcataccccctacagggcagagagtcaggtctggcgagaagtgttgggtcacgggttggggcagaaggcacgaggcagataacaaagggtctctcgtgctgcaacaggctgaggtggagttgatcgaccagacgctatgcgtctccacctacgggatcattacttcacgcatgctgtgtgcaggcatcatgtcgggcaaaagggatgcctgtaagggggattcaggtggcccactcagttgccgacggaagtccgacggcaagtggatactcactggtattgtgtcatgggggcatggatcaggcaggccaaattttccaggggtgtatactcgcgtatccaatttcgtgccatggattcacaagtacgtgccaagccttctgtag

SEQ ID NO: 301487 - DNA, 2496 bp, Artificial Sequence
  derived and/or modified sequence
atggacaaggaaaatagcgatgtcagcgcagcccctgccgacctgaagataagcaacatctccgtacaagtcgtatcggcacaaaagaaactccctccagggcgtcggccaccccagcgacccattgggaaggccaagccaaaaaaacaaagcaaaaaaaaggtccccttttggaacgttcaaaacaagatcatcctgttcacagttttcctctttatcctcgcagttatcgcctggaccctgttgtggttgtacatatctaagacagagtcaaaggatgcgttttactttgccggaatgttcaggattacaaacatcgagtttctgccggagtaccggcagaaagagtccagggagttcctatctgtatctcgtacagtgcagcaagtgatcaatctagtgtacaccacctcagccttctctaagttttatgagcagtctgtcgtagccgacgtgagcagcaataacaagggtgggttacttgtacatttttggatagtctttgtcatgccacgggcaaagggacatattttttgcgaggactgtgtggcagcgatccttaaagattccatccagacttcaattatcaatcgaacttccgtcgggtccctgcaggggcttgcggtggatatggattcagtggtgaatgccgcaggactgcggtctgactattcctctaccataggcagcgctgacaagggctgctcccaatacttttacgcggagcacctgagtctgcactaccctctggaaatctcggcagccagtggacggctcatgtgtcacttcaagctggtggccatcgtggggtatttaatacgcctgtcgattaagtctatccagattgaagcagacaactgcgtcactgatagtctcactatctacgactcactgcttcccattcggagcagcattctgtacagaatctgcgaacccactcgcacccttatgtccttcgtatccacaaacaatctgatgttggtgacatttaagtccccacacattaggagactatcagggatccgcgcttattttgaagtgataccagaacaaaagtgtgagaataccgtgctggtgaaggacatcacgggttttgagggcaaaattagctcaccgtactacccgtcgtattatccacctaaatgtaagtgtacttggaaattccagacctcattgtctactctgggcattgcactgaagttttataactatagcatcacaaaaaagtctatgaagggatgcgagcatggttggtgggaaattaacgagcatatgtattgtgggagttacatggatcaccagacaatcttccgtgtgccctcccctcttgtacatatacaacttcagtgcagctccaggctgtctgataagcctctattggcagaatatgggagctataacatctctcagccctgtcctgtgggtagtttcaggtgcagcagcgggctgtgcgttccacaggctcaacgatgtgacggagtgaatgattgtttcgacgagtcagatgagcttttctgcgtatcgccgcagccagcatgtaacacatctagttttcgccaacacggcccacttatttgtgacggattccgggactgcgaaaatggcagagatgagcaaaactgcactcagagtattccgtgcaacaatcgcacatttaagtgtggcaatgatatttgcttccgcaaacaaaacgccaagtgcgatggtaccgtcgactgcccagatgggagcgatgaggaaggttgcacctgctctagaagcagctctgccctgcatcgcatcattgggggaacagatacactcgagggcggatggccatggcaagtcagtcttcatttcgtgggttcggcatactgcggagctagcgtcatatcacgggaatggctgctgtctgcggctcactgttttcatggcaatcggctgtccgacccgactccctggacagcccaccttgggatgtatgtacagggcaacgctaaatttgtaagtcccgtcaggaggatagtcgtccatgagtactacaattcccagaccttcgactatgacatcgccctgctgcaattaagcatcgcctggcccgaaaccctgaaacagcttatccagccaatatgcatccctccgaccggccagcgagtccgcagcggggaaaagtgctgggtaactggatggggaagaagacacgaggctgacaataagggatctcttgttctgcagcaagcagaggtagagctgatagatcagacactctgcgtgtcgacctatgggataataacaagtcgaatgctgtgtgccggaatcatgtccgggaagcgagatgcttgtaaaggcgactcggggggacccctctcctgccgtaggaagagtgatggcaagtggatcctgacaggaatcgtgagttggggccatggctcggggagacctaattttcccggagtctacacgagagtctccaacttcgtgccatggattcacaaatacgtaccctctctgctgtag

SEQ ID NO: 301488 - DNA, 2532 bp, Artificial Sequence
  derived and/or modified sequence
atggataaggagaatagcgatgtgagtgccgcacctgcggacctaaagatctctaacatcagcgtccaggtagtttccgctcagaaaaagctgcccgtgcggaggcctccactgccgggacgcagactgcctctgcctggaagacggccaccacagagacccatcggtaaagccaaacccaagaaacagtctaagaagaaggtgcctttctggaatgttcagaacaaaatcatcctgttcactgtatttctcttcattttggccgtgatcgcgtggactctgctatggctgtacatttcgaagacagaatcaaaggacgccttctactttgctggaatgtttagaataactaacattgagtttctgccagagtatcgacaaaaagagagccgggagttcttaagcgtgagtcggactgtccagcaggtcatcaatttggtatataccactagtgcattctccaagttctatgaacagtcggttgtcgcagatgtgtcaagtaacaataagggaggcttgttggtacatttttggatagtgttcgtcatgccccgagccaaaggccacattttctgtgaagattgtgtggctgctattctgaaagatagcattcagacctcgattatcaacaggaccagcgtgggatcacttcagggattggccgttgacatggatagcgtggtgctcaatgccggactgcgttccgattattccagcaccattggcagcgacaaggggtgtagccagtatttttacgcggagcacctctccctgcattaccccctcgagatttccgctgcaagcggcagactcatgtgtcacttcaaattggtcgccatcgtgggctatttaattcgcctgagtattaaatcaattcagattgaggcggataactgcgtgacagacagtctcacaatttacgacagtctgctgccgatacggtcctccatcctgtatagaatttgcgaacctacgcgcaccctgatgagttttgtgtcaacgaacaacctgatgttggtcacgtttaaaagccctcatatacgccgactgagcggtattagagcctattttgaagtcattcctgagcagaaatgtgagaatacagtgctcgtaaaagacatcactgggtttgagggcaaaatatcaagtccatactatcctagctactatccgccaaagtgtaaatgtacatggaaattccagaccagcctgagtacgttagggatcgcactgaagttctataattattctattaccaagaagtctatgaaagggtgtgagcacggatggtgggaaattaacgagcatatgtattgtgggagctacatggaccaccaaacaatattccgggttccatctccactcgtgcacattcagctgcaatgttcctcacgtctttcggacaagcctctgctcgcggagtacggctcatacaatatcagccaaccatgcccagtaggttcctttaggtgttcctctggactgtgcgtgccgcaagcgcagagatgtgatggagtgaatgactgcttcgatgagtctgacgagctgttttgcgtttcgcctcagccagcttgcaatacctctagcttccgccagcatggtccacttatctgcgatgggttccgggattgtgaaaatgggagggatgagcagaattgcactcagtccatcccctgtaacaatcgaacctttaagtgtggtaacgacatttgtttcagaaaacagaacgcgaagtgtgacggaacagtcgactgtccagatggttcagatgaggaaggttgtacctgctcccgaagtagctcagccctccatcgcatcatcggcggaaccgacactttggaaggcggatggccctggcaagtgtctctccattttgtggggtctgcttactgcggggcttcagtcatcagccgcgaatggttgttaagcgctgcacactgttttcacggtaaccgcctcagcgatccaacgccctggaccgcacatctggggatgtacgtgcaggggaacgccaagttcgtgagccccgtcaggagaatcgttgtacatgaatattacaacagtcagacttttgactatgatatagctttgctacaactgtctatcgcctggccggagacgttgaaacagctgatccagcctatttgtatcccccctaccggccagcgggtaagatcaggcgagaagtgctgggttacaggctggggtcgccgacacgaagccgataacaaaggcagcttagtcctgcagcaggccgaggtggagctcatcgaccaaactttgtgcgttagtacatatggcatcatcaccagccgtatgctttgtgccggaatcatgtccggcaagcgcgacgcgtgcaaaggagattccggtggacccctgtcctgtagaagaaagagcgacggaaagtggatcctgaccgggattgtgagttggggtcacggcagtggcaggcccaacttcccaggggtatacacccgcgtaagcaatttcgtcccatggatccataaatatgttccctctctcttatag

SEQ ID NO: 301489 - DNA, 2317 bp, Artificial Sequence
  derived and/or modified sequence
tcatctggctgctcatctgtatcctttataataaagaaggaatagtaaaacagaaagcaaagatgctttttactttgctgggatgtttcgcatcaccaacattgagtttcttcccgaataccgacaaaaggagtccagggaatttctttcagtgtcacggactgtgcagcaagtgataaacctggtttatacaacatctgccttctccaaattttatgagcagtctgttgttgcagatgtcagcaacaacaaaggcggcctccttgtccacttttggattgtttttgtcatgccacgtgccaaaggccacatcttctgtgaagactgtgttgccgccatcttgaaggactccatccagacaagcatcataaaccggacctctgtggggagcttgcagggactggctgtggacatggactctgtggtactaaatgacaaaggctgctctcagtacttctatgcagagcatctgtctctccactacccgctggagatttctgcagcctcagggaggctgatgtgtcacttcaagctggtggccatagtgggctacctgattcgtctctcaatcaagtccatccaaatcgaagccgacaactgtgtcactgactccctgaccatttacgactcccttttgcccatccggagcagcatcttgtacagaatttgtgaacccacaagaacattaatgtcatttgtttctacaaataatctcatgttggtgacatttaagtctcctcatatacggaggctctcaggaatccgggcatattttgaggtcattccagaacaaaagtgtgaaaacacagtgttggtcaaagacatcactggctttgaagggaaaatttcaagcccatattacccgagctactatcctccaaaatgcaagtgtacctggaaatttcagacttctctatcaactcttggcatagcactgaaattctataactattcaataaccaagaagagtatgaaaggctgtgagcatggatggtgggaaattaatgagcacatgtactgtggctcctacatggatcatcagacaatttttcgagtgcccagccctctggttcacattcagctccagtgcagttcaaggctttcagacaagccacttttggcagaatatggcagttacaacatcagtcaaccctgccctgttggatcttttagatgctcctccggtttatgtgtccctcaggcccagcgttgtgatggagtaaatgactgctttgatgaaagtgatgaactgttttgcgtgagccctcaacctgcctgcaataccagctccttcaggcagcatggccctctcatctgtgatggcttcagggactgtgagaatggccgggatgagcaaaactgcactcaaagtattccatgcaacaacagaacttttaagtgtggcaatgatatttgctttaggaaacaaaatgcaaaatgtgatgggacagtggattgtccagatggaagtgatgaagaaggctgcacctgcagcaggagttcctccgcccttcaccgcatcatcggaggcacagacaccctggaggggggttggccgtggcaggtcagcctccactttgttggatctgcctactgtggtgcctcagtcatctccagggagtggcttctttctgcagcccactgttttcatggaaacaggctgtcagatcccacaccatggactgcacacctcgggatgtatgttcaggggaatgccaagtttgtctccccggtgagaagaattgtggtccacgagtactataacagtcagacttttgattatgatattgctttgctacagctcagtattgcctggcctgagaccctgaaacagctcattcagccaatatgcattcctcccactggtcagagagttcgcagtggggagaagtgctgggtaactggctgggggcgaagacacgaagcagataataaaggctccctcgttctgcagcaagcggaggtagagctcattgatcaaacgctctgtgtttccacctacgggatcatcacttctcggatgctctgtgcaggcataatgtcaggcaagagagatgcctgcaaaggagattcgggtggacctttatcttgtcgaagaaaaagtgatggaaaatggattttgactggcattgttagctggggacatggaagtggacgaccaaactttcctggtgtttacacaagggtgtcaaactttgttccctggattcataaatatgtcccttctcttttgtaattgtaccagttgtatttttactgtgatttatgttaaaaatagatactttaaaatgatgcagtaattggctgggtgcgctgg

SEQ ID NO: 301490 - DNA, 2639 bp, Artificial Sequence
  derived and/or modified sequence
atggacaaagaaaacagcgatgtttcagccgcacctgctgacctgaaaatatccaatatctcagtccaagtggtcagtgcccaaaagaagctgccaccaggaagacgaccaccacaaagacccattggcaaagccaaacccaagaagcaatccaagaaaaaagttcccttttggaatgtacaaaataaaatcattctcttcacagtatttttattcatcctagcagtcatagcctggacacttctgtggctgtatatcagtaaaacagaaagcaaagatgctttttactttgctgggatgtttcgcatcaccaacattgagtttcttcccgaataccgacaaaaggagtccagggaatttctttcagtgtcacggactgtgcagcaagtgataaacctggtttatacaacatctgccttctccaaattttatgagcagtctgttgttgcagatgtcagcagcaacaacaaaggcggcctccttgtccacttttggattgtttttgtcatgccacgtgccaaaggccacatcttctgtgaagactgtgttgccgccatcttgaaggactccatccagacaagcatcataaaccggacctctgtggggagcttgcagggactggctgtggacatggactctgtggtactaaatgacaaaggctgctctcagtacttctatgcagagcatctgtctctccactacccgctggagatttctgcagcctcagggaggctgatgtgtcacttcaagctggtggccatagtgggctacctgattcgtctctcaatcaagtccatccaaatcgaagccgacaactgtgtcactgactccctgaccatttacgactcccttttgcccatccggagcagcatcttgtacagaatttgtgaacccacaagaacattaatgtcatttgtttctacaaataatctcatgttggtgacatttaagtctcctcatatacggaggctctcaggaatccgggcatattttgaggtcattccagaacaaaagtgtgaaaacacagtgttggtcaaagacatcactggctttgaagggaaaatttcaagcccatattacccgagctactatcctccaaaatgcaagtgtacctggaaatttcagacttctctatcaactcttggcatagcactgaaattctataactattcaataaccaagaagagtatgaaaggctgtgagcatggatggtgggaaattaatgagcacatgtactgtggctcctacatggatcatcagacaatttttcgagtgcccagccctctggttcacattcagctccagtgcagttcaaggctttcagacaagccacttttggcagaatatggcagttacaacatcagtcaaccctgccctgttggatcttttagatgctcctccggtttatgtgtccctcaggcccagcgttgtgatggagtaaatgactgctttgatgaaagtgatgaactgttttgcgtgagccctcaacctgcctgcaataccagctccttcaggcagcatggccctctcatctgtgatggcttcagggactgtgagaatggccgggatgagcaaaactgcactcaaagtattccatgcaacaacagaacttttaagtgtggcaatgatatttgctttaggaaacaaaatgcaaaatgtgatgggacagtggattgtccagatggaagtgatgaagaaggctgcacctgcagcaggagttcctccgcccttcaccgcatcatcggaggcacagacaccctggaggggggttggccgtggcaggtcagcctccactttgttggatctgcctactgtggtgcctcagtcatctccagggagtggcttctttctgcagcccactgttttcatggaaacaggctgtcagatcccacaccatggactgcacacctcgggatgtatgttcaggggaatgccaagtttgtctccccggtgagaagaattgtggtccacgagtactataacagtcagacttttgattatgatattgctttgctacagctcagtattgcctggcctgagaccctgaaacagctcattcagccaatatgcattcctcccactggtcagagagttcgcagtggggagaagtgctgggtaactggctgggggcgaagacacgaagcagataataaaggctccctcgttctgcagcaagcggaggtagagctcattgatcaaacgctctgtgtttccacctacgggatcatcacttctcggatgctctgtgcaggcataatgtcaggcaagagagatgcctgcaaaggagattcgggtggacctttatcttgtcgaagaaaaagtgatggaaaatggattttgactggcattgttagctggggacatggaagtggacgaccaaactttcctggtgtttacacaagggtgtcaaactttgttccctggattcataaatatgtcccttctcttttgtaattgtaccagttgtatttttactgtgatttatgttaaaaatagatactttaaaatgatgcagtaattggctgggtgcgctggctcacacctgtaatcccagcacgttgggaggccgaggcgggcagatcacgaggtcaggaggtcaagaccatcctggctaacatggtgaaaccctgtctctactg

SEQ ID NO: 301491 - DNA, 2681 bp, Artificial Sequence
  derived and/or modified sequence
atggacaaagaaaacagcgatgtttcagccgcacctgctgacctgaaaatatccaatatctcagtccaagtggtcagtgcccaaaagaagctgccaccaggaagacgaccaccacaaagacccattggcaaagccaaacccaagaagcaatccaagaaaaaagttcccttttggaatgtacaaaataaaatcattctcttcacagtatttttattcatcctagcagtcatagcctggacacttctgtggctgtatatcagtaaaacagaaagcaaagatgctttttactttgctgggatgtttcgcatcaccaacattgagtttcttcccgaataccgacaaaaggagtccagggaatttctttcagtgtcacggactgtgcagcaagtgataaacctggtttatacaacatctgccttctccaaattttatgagcagtctgttgttgcagatgtcagcagcaacaacaaaggcggcctccttgtccacttttggattgtttttgtcatgccacgtgccaaaggccacatcttctgtgaagactgtgttgccgccatcttgaaggactccatccagacaagcatcataaaccggacctctgtggggagcttgcagggactggctgtggacatggactctgtggtaaatgcagctgggcttcggtcggattactcgtcaaccataggatctgcagacaaaggctgctctcagtacttctatgcagagcatctgtctctccactacccgctggagatttctgcagcctcagggaggctgatgtgtcacttcaagctggtggccatagtgggctacctgattcgtctctcaatcaagtccatccaaatcgaagccgacaactgtgtcactgactccctgaccatttacgactcccttttgcccatccggagcagcatcttgtacagaatttgtgaacccacaagaacattaatgtcatttgtttctacaaataatctcatgttggtgacatttaagtctcctcatatacggaggctctcaggaatccgggcatattttgaggtcattccagaacaaaagtgtgaaaacacagtgttggtcaaagacatcactggctttgaagggaaaatttcaagcccatattacccgagctactatcctccaaaatgcaagtgtacctggaaatttcagacttctctatcaactcttggcatagcactgaaattctataactattcaataaccaagaagagtatgaaaggctgtgagcatggatggtgggaaattaatgagcacatgtactgtggctcctacatggatcatcagacaatttttcgagtgcccagccctctggttcacattcagctccagtgcagttcaaggctttcagacaagccacttttggcagaatatggcagttacaacatcagtcaaccctgccctgttggatcttttagatgctcctccggtttatgtgtccctcaggcccagcgttgtgatggagtaaatgactgctttgatgaaagtgatgaactgttttgcgtgagccctcaacctgcctgcaataccagctccttcaggcagcatggccctctcatctgtgatggcttcagggactgtgagaatggccgggatgagcaaaactgcactcaaagtattccatgcaacaacagaacttttaagtgtggcaatgatatttgctttaggaaacaaaatgcaaaatgtgatgggacagtggattgtccagatggaagtgatgaagaaggctgcacctgcagcaggagttcctccgcccttcaccgcatcatcggaggcacagacaccctggaggggggttggccgtggcaggtcagcctccactttgttggatctgcctactgtggtgcctcagtcatctccagggagtggcttctttctgcagcccactgttttcatggaaacaggctgtcagatcccacaccatggactgcacacctcgggatgtatgttcaggggaatgccaagtttgtctccccggtgagaagaattgtggtccacgagtactataacagtcagacttttgattatgatattgctttgctacagctcagtattgcctggcctgagaccctgaaacagctcattcagccaatatgcattcctcccactggtcagagagttcgcagtggggagaagtgctgggtaactggctgggggcgaagacacgaagcagataataaaggctccctcgttctgcagcaagcggaggtagagctcattgatcaaacgctctgtgtttccacctacgggatcatcacttctcggatgctctgtgcaggcataatgtcaggcaagagagatgcctgcaaaggagattcgggtggacctttatcttgtcgaagaaaaagtgatggaaaatggattttgactggcattgttagctggggacatggaagtggacgaccaaactttcctggtgtttacacaagggtgtcaaactttgttccctggattcataaatatgtcccttctcttttgtaattgtaccagttgtatttttactgtgatttatgttaaaaatagatactttaaaatgatgcagtaattggctgggtgcgctggctcacacctgtaatcccagcacgttgggaggccgaggcgggcagatcacgaggtcaggaggtcaagaccatcctggctaacatggtgaaaccctgtctctactg

SEQ ID NO: 301492 - DNA, 2616 bp, Artificial Sequence
  derived and/or modified sequence
ataatggacaaagaaaacagcgatgtttcagccgcacctgctgacctgaaaatatccaatatctcagtccaagtggtcagtgcccaaaagaagctgccagtgagacgaccaccgttgccagggagacgactaccattgccaggaagacgaccaccacaaagacccattggcaaagccaaacccaagaagcaatccaagaaaaaagttcccttttggaatgtacaaaataaaatcattctcttcacagtatttttattcatcctagcagtcatagcctggacacttctgtggctgtatatcagtaaaacagaaagcaaagatgctttttactttgctgggatgtttcgcatcaccaacattgagtttcttcccgaataccgacaaaaggagtccagggaatttctttcagtgtcacggactgtgcagcaagtgataaacctggtttatacaacatctgccttctccaaattttatgagcagtctgttgttgcagatgtcagcagcaacaacaaaggcggcctccttgtccacttttggattgtttttgtcatgccacgtgccaaaggccacatcttctgtgaagactgtgttgccgccatcttgaaggactccatccagacaagcatcataaaccggacctctgtggggagcttgcagggactggctgtggacatggactctgtggtactaaatgctgggcttcggtcggattactcgtcaaccataggatctgacaaaggctgctctcagtacttctatgcagagcatctgtctctccactacccgctggagatttctgcagcctcagggaggctgatgtgtcacttcaagctggtggccatagtgggctacctgattcgtctctcaatcaagtccatccaaatcgaagccgacaactgtgtcactgactccctgaccatttacgactcccttttgcccatccggagcagcatcttgtacagaatttgtgaacccacaagaacattaatgtcatttgtttctacaaataatctcatgttggtgacatttaagtctcctcatatacggaggctctcaggaatccgggcatattttgaggtcattccagaacaaaagtgtgaaaacacagtgttggtcaaagacatcactggctttgaagggaaaatttcaagcccatattacccgagctactatcctccaaaatgcaagtgtacctggaaatttcagacttctctatcaactcttggcatagcactgaaattctataactattcaataaccaagaagagtatgaaaggctgtgagcatggatggtgggaaattaatgagcacatgtactgtggctcctacatggatcatcagacaatttttcgagtgcccagccctctggttcacattcagctccagtgcagttcaaggctttcagacaagccacttttggcagaatatggcagttacaacatcagtcaaccctgccctgttggatcttttagatgctcctccggtttatgtgtccctcaggcccagcgttgtgatggagtaaatgactgctttgatgaaagtgatgaactgttttgcgtgagccctcaacctgcctgcaataccagctccttcaggcagcatggccctctcatctgtgatggcttcagggactgtgagaatggccgggatgagcaaaactgcactcaaagtattccatgcaacaacagaacttttaagtgtggcaatgatatttgctttaggaaacaaaatgcaaaatgtgatgggacagtggattgtccagatggaagtgatgaagaaggctgcacctgcagcaggagttcctccgcccttcaccgcatcatcggaggcacagacaccctggaggggggttggccgtggcaggtcagcctccactttgttggatctgcctactgtggtgcctcagtcatctccagggagtggcttctttctgcagcccactgttttcatggaaacaggctgtcagatcccacaccatggactgcacacctcgggatgtatgttcaggggaatgccaagtttgtctccccggtgagaagaattgtggtccacgagtactataacagtcagacttttgattatgatattgctttgctacagctcagtattgcctggcctgagaccctgaaacagctcattcagccaatatgcattcctcccactggtcagagagttcgcagtggggagaagtgctgggtaactggctgggggcgaagacacgaagcagataataaaggctccctcgttctgcagcaagcggaggtagagctcattgatcaaacgctctgtgtttccacctacgggatcatcacttctcggatgctctgtgcaggcataatgtcaggcaagagagatgcctgcaaaggagattcgggtggacctttatcttgtcgaagaaaaagtgatggaaaatggattttgactggcattgttagctggggacatggaagtggacgaccaaactttcctggtgtttacacaagggtgtcaaactttgttccctggattcataaatatgtcccttctcttttgtaattgtaccagttgtatttttactgtgatttatgttaaaaatagatactttaaaatgatgcagtaattggctgggtgcgctgg

SEQ ID NO: 301493 - DNA, 993 bp, Artificial Sequence
  derived and/or modified sequence
atgggcagcagaaagaaggagatcgccctgcaggtgaacatcagcacccaggagctgtgggaggagatgctgagcagcaagggcctgaccgtggtggacgtgtaccagggctggtgcggcccctgcaagcccgtggtgagcctgttccagaagatgagaatcgaggtgggcctggacctgctgcacttcgccctggccgaggccgacagactggacgtgctggagaagtacagaggcaagtgcgagcccaccttcctgttctacgccggcggcgagctggtggccgtggtgagaggcgccaacgcccccctgctgcagaagaccatcctggaccagctggaggccgagaagaaggtgctggccgagggcagagagagaaaggtgatcaaggacgaggccctgagcgacgaggacgagtgcgtgagccacggcaagaacaacggcgaggacgaggacatggtgagcagcgagagaacctgcaccctggccatcatcaagcccgacgccgtggcccacggcaagaccgacgagatcatcatgaagatccaggaggccggcttcgagatcctgaccaacgaggagagaaccatgaccgaggccgaggtgagactgttctaccagcacaaggccggcgaggaggccttcgagaagctggtgcaccacatgtgcagcggccccagccacctgctgatcctgaccagaaccgagggcttcgaggacgtggtgaccacctggagaaccgtgatgggccccagagaccccaacgtggccagaagagagcagcccgagagcctgagagcccagtacggcaccgagatgcccttcaacgccgtgcacggcagcagagacagagaggacgccgacagagagctggccctgctgttccccagcctgaagttcagcgacaaggacaccgaggccccccagggcggcgaggccgaggccaccgccggccccaccgaggccctgtgcttccccgaggacgtggactag

SEQ ID NO: 301494 - DNA, 609 bp, Artificial Sequence
  derived and/or modified sequence
atgggcagcagaaagaaggagatcgccctgcaggtgaacatcagcacccaggagctgtgggaggagatgctgagcagcaagggcctgaccgtggtggacgtgtaccagggctggtgcggcccctgcaagcccgtggtgagcctgttccagaagatgagaatcgaggtgggcctggacctgctgcacttcgccctggccgaggccgacagactggacgtgctggagaagtacagaggcaagtgcgagcccaccttcctgttctacgccggcggcgagctggtggccgtggtgagaggcgccaacgcccccctgctgcagaagaccatcctggaccagctggaggccgagaagaaggtgctggccgagggcagagagagaaaggtgatcaaggacgaggccctgagcgacgaggacgagtgcgtgagccacggcaagaacaacggcgaggacgaggacatggtgagcagcgagagaacctgcaccctggccatcatcaagcccgacgccgtggcccacggcaagaccgacgagatcatcatgaagatccaggaggccggcttcgagatcctgaccaacgaggagagaaccatgaccgaggccgaggtgtag

SEQ ID NO: 301495 - DNA, 993 bp, Artificial Sequence
  derived and/or modified sequence
atggggagccgtaaaaaagaaatagcactccaagtcaacatctctacccaggagctctgggaagagatgctgtccagcaaggggctaacagtagtcgacgtgtatcaaggctggtgcgggccatgcaaaccggtcgtgtccttatttcaaaagatgcggattgaagtcgggctcgatctcctgcacttcgccttagctgaagctgaccggctggatgtgctcgaaaaataccgaggaaagtgtgagcccaccttcttattctatgcagggggcgaactggtagctgtcgtaagaggagctaatgcccctctgctgcagaaaactatactggaccaactggaagctgagaagaaggtcctcgctgagggcagagaacggaaggtgatcaaggatgaggcactgtctgatgaggacgaatgtgtctcacacggcaagaataacggtgaggatgaagacatggtctcgagcgagaggacatgcactctggccatcataaagcctgatgccgtcgcacatggcaaaacagatgagataattatgaaaattcaagaggccggtttcgagatcttaaccaacgaggaacgcacgatgacagaagcagaggtccgacttttctatcagcataaagcgggagaagaagccttcgaaaagctcgtccatcatatgtgttcgggaccttctcacttgcttatcctgacccgtaccgaaggtttcgaggacgtggtgacaacatggcgcactgtgatggggcctagagacccaaacgtcgctagacgcgagcaacctgaatctctgcgggcgcagtacggaacagagatgccatttaatgccgttcacggtagcagagacagagaagatgccgacagagagctggcgcttctatttccttcactgaaattcagcgataaggacacggaagctcctcaggggggcgaagccgaggctaccgcgggacctacggaagcattgtgtttccctgaagatgtagactag

SEQ ID NO: 301496 - DNA, 609 bp, Artificial Sequence
  derived and/or modified sequence
atggggagccgcaaaaaggagatcgccttgcaggtgaacatctctacacaggagctgtgggaagaaatgctatcaagtaaaggcctcacagtagttgacgtatatcagggctggtgcggcccatgtaaacctgttgtcagcctctttcagaaaatgcgcatagaagtgggcctggacctactacattttgcacttgccgaagcagatcggctggacgtcctggaaaagtatcgggggaagtgcgagcccaccttcctgttttacgcaggcggggagctcgttgctgtggttaggggcgctaacgccccacttctccaaaaaaccattctcgatcagcttgaggccgagaaaaaagttttagctgaaggccgggaacggaaggttataaaggacgaagctctttcggacgaggatgaatgcgtcagccacggcaagaataatggagaggatgaagatatggtgagctcggaacgtacttgtactctggccatcatcaagccagatgcagttgcgcatggcaaaactgatgaaatcatcatgaagattcaagaagctggcttcgagatcctgaccaacgaagaacggacaatgaccgaagctgaggtttag

SEQ ID NO: 301497 - DNA, 993 bp, Artificial Sequence
  derived and/or modified sequence
atgggcagcaggaagaaggagatcgccctgcaggtgaacatcagcacccaggagctgtgggaggagatgctgagcagcaagggcctgactgtggtggatgtgtaccagggctggtgtggcccctgcaagcctgtggtgtccctcttccagaagatgagaattgaggtgggcctggacctgctgcactttgccctggccgaggccgaccggctggatgtgctggagaagtaccggggcaaatgtgagcccaccttcctgttctacgccggcggggagctggtggccgtggtgcggggggccaatgcccccctgctgcagaagaccatcctggaccagctggaggccgagaagaaggtgctggccgagggccgggagaggaaggtgatcaaggatgaggccctgagtgatgaagatgaatgtgtgagccacggcaagaacaatggagaagatgaggacatggtgagcagcgagaggacctgcaccctggccatcatcaagccagatgctgtggcccacggcaagacagatgagatcatcatgaagatccaggaggccggctttgagatcctgaccaatgaggagaggaccatgacagaggccgaggtgcggctcttctaccagcacaaggccggggaggaggcctttgagaagctggtgcaccacatgtgcagcggccccagccacctgctgatcctgaccaggacagagggctttgaagatgtggtgaccacctggaggacagtgatgggcccccgggaccccaacgtggcccggcgggagcagcctgagagcctgcgggcccagtatggaacagagatgcccttcaatgctgtgcacggcagccgggacagagaagatgctgaccgggagctggccctgctcttccccagcctgaagttcagtgacaaggacacagaggccccccagggcggggaggccgaggccacagctggccccacagaggccctgtgcttcccagaagatgtggactag

SEQ ID NO: 301498 - DNA, 609 bp, Artificial Sequence
  derived and/or modified sequence
atgggcagcaggaagaaggagatcgccctgcaggtgaacatcagcacccaggagctgtgggaggagatgctgagcagcaagggcctgactgtggtggatgtgtaccagggctggtgtggcccctgcaagcctgtggtgtccctcttccagaagatgagaattgaggtgggcctggacctgctgcactttgccctggccgaggccgaccggctggatgtgctggagaagtaccggggcaaatgtgagcccaccttcctgttctacgccggcggggagctggtggccgtggtgcggggggccaatgcccccctgctgcagaagaccatcctggaccagctggaggccgagaagaaggtgctggccgagggccgggagaggaaggtgatcaaggatgaggccctgagtgatgaagatgaatgtgtgagccacggcaagaacaatggagaagatgaggacatggtgagcagcgagaggacctgcaccctggccatcatcaagccagatgctgtggcccacggcaagacagatgagatcatcatgaagatccaggaggccggctttgagatcctgaccaatgaggagaggaccatgacagaggccgaggtgtag

SEQ ID NO: 301499 - DNA, 993 bp, Artificial Sequence
  derived and/or modified sequence
atgggcagccggaagaaggagatcgccctgcaggtgaacatcagcacgcaggagctttgggaggagatgctcagttccaaaggtttgactgtggtcgacgtgtaccaggggtggtgcggcccttgtaagcccgtagtttctctgtttcagaaaatgagaattgaggtcggtctcgacctgctacattttgcactggctgaagccgacaggctggatgtgctggagaagtataggggcaagtgtgagccgaccttcctgttctacgccggtggcgaattggtggccgtggttcggggagcgaacgcacccctgctgcagaaaactattctcgaccaacttgaagctgaaaaaaaagtactggccgagggccgagagcgcaaggtgatcaaagatgaggccctgtcagacgaggatgagtgtgtttctcacggtaagaataacggcgaggatgaagatatggtgtcttcagagaggacctgtacactggctatcattaagcctgatgccgtcgcccacgggaaaactgacgaaattataatgaaaattcaggaggcagggttcgagatactaacaaacgaggaacggactatgaccgaggcggaagtgcggttgttttatcaacataaagccggtgaggaggccttcgagaagctggttcatcacatgtgcagcggtccatcccatctgcttatcctgacccgtactgaggggtttgaggacgtggtgactacatggcgcactgtgatggggccacgagatcccaacgtcgcccgtcgtgagcagcctgagtcgctgagggcccagtacggtactgagatgccatttaatgccgtgcatgggtcccgggaccgcgaagatgcggaccgggagctggcactgctgtttccatctctgaagttctcagacaaggacactgaggcccctcagggtggtgaagctgaggctacagctggcccaacggaggcactgtgtttccccgaggatgttgattag

SEQ ID NO: 301500 - DNA, 609 bp, Artificial Sequence
  derived and/or modified sequence
atgggcagccggaagaaggagatcgccctgcaggtgaacatcagcacacaagagctgtgggaggagatgctctccagtaaaggactcactgtggtggatgtgtaccagggatggtgtggcccttgtaaacccgtggtcagtctatttcagaaaatgcggatcgaagtcggattggacttgctccattttgccctggccgaagccgacagattggacgtgctggaaaaataccgtgggaaatgtgaacccacttttctcttctatgctggcggtgagttagttgcggtcgtccggggcgctaatgcccctctcctgcagaaaactatcttagaccaactcgaggcagagaagaaggtgctggccgaaggcagggagagaaaagtcataaaagatgaggcactgtccgatgaagacgagtgtgtgtcccatggcaagaacaacggcgaagacgaagacatggtgtcttccgaacggacctgtactttggctatcatcaaaccagacgccgtggcgcatggcaagaccgacgagatcatcatgaagatccaagaagctggcttcgagattctgacgaatgaagaacggacaatgacagaagctgaagtgtag

SEQ ID NO: 301501 - DNA, 993 bp, Artificial Sequence
  derived and/or modified sequence
atgggttcaaggaaaaaggaaatcgcgctgcaggtgaacatatctacacaggagctgtgggaagagatgctgagcagcaaaggcttgacggtggttgatgtttaccagggctggtgtggaccctgcaagccggtagtctctctttttcagaagatgcggatagaggtggggttagacttgttacactttgcactagccgaggccgaccgcctcgacgttctggaaaagtatcgcggaaagtgtgaaccgacttttctgttttacgccggaggcgaactggtagcggtggttcggggtgcaaatgcacctttattgcaaaaaactattctggaccagttagaggccgaaaaaaaagtcttggctgaagggagggagaggaaggtaattaaagacgaggcactgtcagacgaagacgagtgtgtaagccacggcaagaacaacggcgaagacgaggacatggttagcagcgagcggacctgcacgctggctattatcaaacctgacgccgtggcccatggcaagacagacgaaattatcatgaagattcaagaggctgggtttgagatcctgaccaatgaggagaggaccatgactgaggcagaagtgagactattttatcaacataaggccggtgaagaggcctttgagaagcttgtccaccatatgtgctctggaccttcacacttattaatcctaacccggaccgagggcttcgaagacgtggtgacgacctggaggaccgtaatgggacctcgtgatcccaatgtagcacgcagagagcagcccgagagcctcagagcacagtatggcaccgaaatgcctttcaacgcagtccacggatctagagatcgagaagatgcagatcgggaacttgccttgcttttcccgagtctgaagttcagtgacaaagacacagaggctccccagggaggggaagccgaggccacagccggacctaccgaggcactgtgtttccccgaagacgtcgattag

SEQ ID NO: 301502 - DNA, 609 bp, Artificial Sequence
  derived and/or modified sequence
atgggtagcaggaagaaagaaatagcactgcaggtcaatatatcaacccaagaattgtgggaggagatgctcagctcaaaaggcctgacagtggtcgatgtataccaaggatggtgtggaccatgtaaaccagtggtgtccctgtttcagaagatgaggatagaggtggggcttgacctgttacactttgcacttgctgaggccgacaggttggacgtgctggaaaagtacagaggaaagtgcgaacccacttttctcttctatgctggtggggaattggttgctgtagttaggggagccaacgcccctctgttgcagaagacaatcctggaccagctggaggccgagaagaaggtgctcgccgaaggacgcgagcgaaaagtcattaaggacgaggccctgtccgatgaggatgagtgcgtttcacacggcaaaaataatggggaggatgaggacatggtttccagtgaaagaacttgtacgctggcgataattaaaccagatgccgttgcacacggcaaaacagatgagatcattatgaaaatccaggaggcaggcttcgaaatcctcactaacgaggagcgcaccatgactgaagctgaggtgtag

SEQ ID NO: 301503 - DNA, 886 bp, Artificial Sequence
  derived and/or modified sequence
aacagggcttcgtcttctttgcagagccatgggcagcaggaagaaggaaattgccctgcaggtcaacatcagcacccaagagctttgggaggaaatgctcagttccaaaggactaactgttgttgatgtctatcaaggctggtgtggcccctgcaaacctgtggtgagcctcttccagaagatgaggatcgaggtcggcctggaccttctgcactttgcattagcagaggcagatcgtcttgatgtcctcgaaaagtacagagggaagtgcgagccaacctttctgttttatgcaattaaagatgaggctctttctgatgaagatgaatgtgtttcccatggaaagaataatggtgaagatgaggacatggtttcatcagagaggacctgtaccttggccatcattaaaccagatgcagtggcccatggaaagactgatgagattatcatgaagattcaggaagctgggtttgaaattctaacaaatgaagagagaaccatgacagaggcagaagtgcgacttttctaccaacacaaagctggagaggaggcatttgagaagctggtacatcacatgtgcagtggaccaagccacctcctgatcctcaccaggactgagggcttcgaggacgtggtcactacctggcgaaccgtcatgggcccccgtgaccccaatgtggccaggagggagcagccagaaagtctccgagctcagtacggcacagaaatgcccttcaatgccgtccatggaagccgggacagagaagatgctgacagagaactggcattgctcttccccagtttgaaattttcagacaaagatacagaagcccctcagggtgagtccagtacacagccaaggttgaagatcactgacctagactaa

SEQ ID NO: 301504 - protein, 30 aa, Artificial Sequence
  derived and/or modified sequence
MGSRKKEIALQVNISTQELWEEMLSSKGLT

SEQ ID NO: 301505 - DNA, 93 bp, Artificial Sequence
  derived and/or modified sequence
atgggcagcagaaagaaggagatcgccctgcaggtgaacatcagcacccaggagctgtgggaggagatgctgagcagcaagggcctgacctag

SEQ ID NO: 301506 - DNA, 93 bp, Artificial Sequence
  derived and/or modified sequence
atgggaagccggaaaaaagagatagctttgcaggtgaatatatcgactcaggagctttgggaggagatgctgagttccaaaggcctaacctag

SEQ ID NO: 301507 - DNA, 93 bp, Artificial Sequence
  derived and/or modified sequence
atgggcagcaggaagaaggagatcgccctgcaggtgaacatcagcacccaggagctgtgggaggagatgctgagcagcaagggcctgacctag

SEQ ID NO: 301508 - DNA, 93 bp, Artificial Sequence
  derived and/or modified sequence
atgggcagccggaagaaggagatcgccctgcaggtgaacatcagcacccaggagttgtgggaagagatgctgtcatccaagggcttaacctag

SEQ ID NO: 301509 - DNA, 93 bp, Artificial Sequence
  derived and/or modified sequence
atgggcagccggaagaaggagatcgccctgcaagtgaacatttccacccaggaactctgggaggagatgctgtcttcgaagggactgacatag

SEQ ID NO: 301510 - DNA, 579 bp, Artificial Sequence
  derived and/or modified sequence
agactcggttggtgactccgggcgcgtcgaagatcttgtacctgtcgttcgcagtggctcactttcccagtaatccataagaacagcagggataacagggtcccatgtcgtttttttgtcagaattcctcgactggcgaccctgtgcccgacaggctgcaccgcgcccggcgcactgactccggcctctgcgcgcgccccctggccggctccggggtggggagggggcttcgcagatccccagaaaaccgcccggcgagccacgagcccgtggactgcaggctccgcttcctcgcggggtgttcactttgtatcagtgtgctgatttgccgccagttagaagcaccttaaaaaggggccgggggccgtaggaggggggcttgtctgaaggaggctctgggcttgctgatccacgcagcggtttgtcgcgaggctgcgggggaacggcccacggccgcggtaacagggcttcgtcttctttgcagagccatgggcagcaggaagaaggaaattgccctgcaggtcaacatcagcacccaagagctttgggaggaaatgctcagttccaaaggactaactg

SEQ ID NO: 301511 - DNA, 429 bp, Artificial Sequence
  derived and/or modified sequence
atggaaggccccgaccatggcaaagccctcttctcaactcccgccgcagtgcctgaactcaagctgctgtgtggcgccgacgttctgaaaacattccagaccccaaacctgtggaaagatgcacacatccaggaaattgtcgaaaagttcggactggtatgtgttgggagagtcggtcacgaccctaagggctacattgccgagagccccattctgcgaatgcaccaacataacatccatttggctaaagaacctgtccagaatgagatcagcgccacctacatcagacgggcccttggtcagggtcagagcgtgaaatatcttatccctgatgcggtgataacatatatcaaggaccacggcctgtacactaaagggtcgacttggaagggaaaatcaacacaatctactgaaggcaaaactagctag

SEQ ID NO: 301512 - DNA, 429 bp, Artificial Sequence
  derived and/or modified sequence
atggagggccctgaccacggcaaggccctcttcagcaccccagctgctgtgcctgagctgaagctgctgtgtggggctgatgtgctgaagaccttccagacccccaacctgtggaaggatgcccacatccaggagatcgtggagaagtttggcctggtgtgtgtgggccgggtgggccatgaccccaagggctacatcgccgagagccccatcctgaggatgcaccagcacaacatccacctggccaaggagcctgtgcagaatgagatcagcgccacctacatccggcgggccctgggccagggccagagcgtgaagtacctgatcccagatgctgtgatcacctacatcaaggaccacggcctgtacaccaagggcagcacctggaagggcaagagcacccagagcacagagggcaagaccagctag

SEQ ID NO: 301513 - DNA, 429 bp, Artificial Sequence
  derived and/or modified sequence
atggagggccccgaccacggcaaggccctgttcagcacccccgccgcagtcccagaattgaagcttctgtgcggagcagatgtactgaagacattccagacccctaatctgtggaaagatgcacacatacaagagattgtggaaaagtttggtctggtgtgcgtgggccgcgtgggtcacgatcctaagggctatattgctgagagccctattcttaggatgcaccaacataatattcatctggccaaggaaccagttcagaacgaaattagtgccacatacatccggcgggccttaggacagggccaatccgtgaaatatttaataccggacgccgttatcacctacatcaaggaccacggcttatacactaaggggtctacatggaaggggaaatctacacaatccacggaaggcaaaactagctag

SEQ ID NO: 301514 - DNA, 429 bp, Artificial Sequence
  derived and/or modified sequence
atggagggcccagatcacggcaaggccctgttcagtacccccgctgccgtaccagagcttaaactgctgtgcggggctgatgtgctcaagaccttccagactcctaatctttggaaggatgcacacatccaggagattgtggagaagtttggccttgtgtgcgtggggagagtaggacacgaccctaagggctatatcgcagagtccccaatcctcaggatgcaccagcataatatccatcttgcaaaagagccggttcagaacgaaatctccgccacctatatcaggagagccttgggtcaaggtcagtccgttaaatacctgattcccgatgcagtcattacttacatcaaggaccacggcctgtacactaagggaagcacctggaaaggcaagagtacccaaagtactgagggcaaaacctcgtag

SEQ ID NO: 301515 - DNA, 429 bp, Artificial Sequence
  derived and/or modified sequence
atggagggccccgaccacggcaaggccctgttcagcacccccgccgccgtgcccgagctgaagctgctgtgcggcgccgacgtgctgaagaccttccagacccccaacctgtggaaggacgcccacatccaggagatcgtggagaagttcggcctggtgtgcgtgggcagagtgggccacgaccccaagggctacatcgccgagagccccatcctgagaatgcaccagcacaacatccacctggccaaggagcccgtgcagaacgagatcagcgccacctacatcagaagagccctgggccagggccagagcgtgaagtacctgatccccgacgccgtgatcacctacatcaaggaccacggcctgtacaccaagggcagcacctggaagggcaagagcacccagagcaccgagggcaagaccagctag

SEQ ID NO: 301516 - protein, 388 aa, Artificial Sequence [sequence omitted]

SEQ ID NO: 301517 - DNA, 1167 bp, Artificial Sequence
  derived and/or modified sequence
atgctgctgaaggagaaggaggacagcctgatgacctgccagcagatctacaaggccctgcaggaggagctgaccgtgaaggagaagcaggaggaggacatcaagagaagaatcaacctggccgagaacgagctggagatcaccaagaccctgctgaaccagaccagagaggaggtgctgaccctgaagaacgagagagagctgatgctgatcagccaccagaagagcatcgagcagctgcaggagaccctgagacagaagctgctgagcgacgacaactggaaggagaagatcgaggccgagctggccaaggagagagcccagcacctggtggagttcgaggagcaggccctgctgttcaaggaggagaccaagctgcagctggacatcgagaaggagaagcaccaggacgtgatccagaagtacaagaaggagcaggaggagctgcagatgaagatcagcgacctgatcaccggcgccaccagagacctgagacaggaggtgaccaccctgaaggagaagctgcacaagagccacatcagatacaccgaggagagcaacagcaaggagaaggagatcgagaacctgaagaacctggtggccgagttcgagagcagactgaagaaggagatcgacagcaacgacagcgtgagcgagaacctgagaaaggagatggagcagaagagcgacgagctgaagagagtgatgctggcccagacccagctgatcgagcagttcaaccagagccaggaggagaacaccttcctgcaggagaccgtgagaagagagtgcgaggagagattcgagctgaccgaggccctgagccaggccagagagcagctgctggagctgagcaagctgagaggcagcctgcccttcagcccctgcagcctgagcaagggcagcctgaccagccccgccgccgccgtgagcaaccacggcgagagaagcctggccagactgaacagcgagaagggcatccagatccccaacctgagaggcgtgagcaagcccaccaccttccccaccagcgacaagcccaagagagtgagaagcggcgtgcccatcctgccccagccccacccccccagaggcggcgccagcagcgccaacgagaccagacagagactggccgccatcctgagaagaagaagaagccagcagtag

SEQ ID NO: 301518 - DNA, 1167 bp, Artificial Sequence
  derived and/or modified sequence
atgttgctaaaagaaaaggaggattctctaatgacgtgccagcagatttataaagcgttgcaggaggagctgaccgtcaaagagaaacaggaagaagatatcaagcggaggattaatctggctgaaaacgaactcgagatcacaaagacccttctgaaccagacgagagaggaggttctcactctgaagaatgaacgcgagctaatgctgatatcccatcagaaaagcatcgaacagctccaggaaacactgcgacagaaattgttatcagatgataattggaaagaaaagattgaggcagaattggctaaggaacgtgcacagcatctggtggaattcgaggaacaagccctgttgttcaaggaggagacaaaactgcagcttgacattgagaaggaaaaacatcaagacgtgatacaaaagtacaagaaggagcaagaggaattgcaaatgaagatctcagatctcattacaggcgctaccagagacctgcgtcaggaagtcaccacgctgaaggaaaaactacacaaaagtcacattcgctacactgaagagagcaacagcaaagagaaggaaatagaaaacttaaagaacctcgttgcagagttcgagagtcgtctgaaaaaagagattgacagcaacgattccgtaagcgaaaatcttcgcaaagagatggagcagaagtcagacgagctgaagcgcgtgatgttggctcagacccaattaatcgagcagttcaatcagagtcaggaagaaaatacctttctccaagagaccgtgaggcgcgaatgcgaagaaaggtttgagcttaccgaagcactttcacaggcccgagagcagttactggaactttctaagctgcgggggtccctccctttctcaccttgctccttatctaaagggtcactcacttcacccgccgcagctgtcagcaatcacggggaaaggtctctcgcacggcttaactccgagaaaggcatccaaatccctaatctgcggggagtgagcaaaccgacaaccttccccacgtcagataagccgaagcgcgtccgctctggtgtaccaatccttccccaacctcacccaccccgcgggggagcgtcctcagctaacgaaacacgccagcggttggctgccatcttacgcaggcgacgctcccaacagtag

SEQ ID NO: 301519 - DNA, 1167 bp, Artificial Sequence
  derived and/or modified sequence
atgctgctgaaggagaaggaggacagcctgatgacctgccagcagatctacaaggccctgcaggaggagctgactgtgaaggagaagcaggaggaggacatcaagaggcgcatcaacctggccgagaatgagctggagatcaccaagaccctgctgaaccagacccgggaggaggtgctgaccctgaagaatgaaagagagctgatgctgatcagccaccagaagagcattgagcagctgcaggagaccctgcggcagaagctgctgagtgatgacaactggaaggagaagattgaggccgagctggccaaggagcgggcccagcacctggtggagtttgaggagcaggccctgctcttcaaggaggagaccaagctgcagctggacatcgagaaggagaagcaccaggatgtgatccagaagtacaagaaggagcaggaggagctgcagatgaagatcagtgacctgatcaccggggccacccgggacctgcggcaggaggtgaccaccctgaaggagaagctgcacaagagccacatccgctacacagaggagagcaacagcaaggagaaggagattgagaacctgaagaacctggtggccgagtttgagagccggctgaagaaggagattgacagcaatgacagcgtgtctgagaacctgaggaaggagatggagcagaagagtgatgagctgaagagggtgatgctggcccagacccagctgattgagcagttcaaccagagccaggaggagaacaccttcctgcaggagaccgtgagaagagaatgtgaggagagatttgagctgacagaggccctgagccaggcccgggagcagctgctggagctgagcaagctgcggggcagcctgcccttcagcccctgcagcctgagcaagggcagcctgaccagccctgctgctgctgtgagcaaccacggggagaggagcctggcccggctgaacagcgagaagggcatccagatccccaacctgcggggcgtgtccaagcccaccaccttccccaccagtgacaagcccaagagggtgcgcagcggcgtgcccatcctgccccagccccaccccccccggggcggggccagcagcgccaatgagacccggcagaggctggccgccatcctgcggcggcggcgcagccagcagtag

SEQ ID NO: 301520 - DNA, 2881 bp, Artificial Sequence
  derived and/or modified sequence
agccgactggcggcgcggtcgcccgggagaccgggaaagccgtttcacacccgtcctagtcgaagtcgagatttcctttggcttcaaagctctctcaccatattttgggaagttatggatcatcacattcccatgcatgcgttgcctgaagaaatccaaaagatgttgcctgaagaaaaagtttgtaagtactgtggagtcagctatctaattcttcatgaatttaaggctatggaagaaaaagtgaaagcaatggaaaaagagatgaaattttatcaaggaagtgtagatcgtgaaaagagacttcaagaaaagctgcattctcttagccaagaacttgaacagtacaaaattgacaacaaatccaaaacagaaagaatttacgatgtaggcatgcagttaaaaagtcaacaaaatgaatttcagaaagtaaagaaacaactgagtcatttgcaagatgagctaaaaattaaatatagacaatcatacatcttcagtcaaagattgtcagagtacaaatatttctggaataagactctttcattacttacttttactaaaagggaactaaccagtattaaaaatgaagtatatgataattaccaaaactggacttcattgaaaggagcagtttttctacaaattaaatctataagtgaaacagccttgacagaaatagacatactgaataaaagtttgacagtatcccagagaaataaagtatgccttgaaaaggaaatgaaaaatctgaaattgttgtcagatgcagccatattgagatctcagcagattcggacatctagacaacaggaagtaaacttgcaaaccagatgctatgatttgcaaaaagaagtactagatttacaatgtctagtagaggcacttggattaaaacttcagaaggcggtgacagagatggacaactataaagaaatgcttatgtaagatggagaatattaaacaacttataacagtgctctgtagatgtgttacaaaatggcaagaattaggaagaaatgacaagaattataaagaccctgcctgggcaacacggagaaactttgtctccacaaaaaaatacaaaaattatccatgcgtgttggcacactcctgtagtcccagctactcgggaggctgaactgggaagatcacctaagcctagaaagttgaagctacagtgaaccatgatcatgccactacactccagcctgggcgacagagtgagaccctgtctcaaaatgaataaataagaataaatctaatgaagctgatgactgtcaaagagaacttaaaaaactgaagtttgaatccattatttctgagtcacagcatactatgctgcttaaggaaaaagaagactctttaatgacttgtcaacagatatataaagcattacaggaagagctgactgtgaaagaaaagcaagaagaagacataaagagaagaattaaccttgcagaaaatgaactggagataaccaaaactcttctgaatcagacaagggaagaggttttaacactgaaaaatgaaagggaattgatgctgatttcacatcagaaaagcatcgagcagctgcaagaaacccttagacagaagctgctgagtgatgataactggaaggagaagattgaagcagaacttgccaaggaaagggcccaacacttggttgaatttgaagagcaagctcttctctttaaggaagaaacaaaattgcaacttgatattgaaaaagaaaaacaccaagatgtaatccaaaagtataagaaagaacaagaggaactacaaatgaagatatctgacttaatcacaggcgctacaagagatctaaggcaggaagtgaccactcttaaagaaaaacttcacaaatcccatattcggtacactgaagaatctaattcaaaggaaaaagaaattgaaaatcttaaaaatttggttgcagaatttgaatctcgcttgaagaaggaaattgacagtaatgattcagtttcagaaaacttgaggaaggaaatggaacagaagtcggatgaactgaaaagagtaatgctggctcaaacacaactgatagagcaatttaaccagtcccaggaagagaatacttttcttcaggagacagtgcgtagagaatgtgaagaacgctttgaactgacagaggctttgagtcaagccagagaacagctcctggagctcagtaagcttcgtggaagtttaccattctcaccgtgttccctcagcaagggcagcctaacctcccctgctgcagcagtcagtaatcatggagagagaagccttgcaagactgaactctgaaaaaggaatccaaattcccaacctgcgcggggtgtcaaaacccaccactttcccaacctcagataagccgaagagggttagatcaggcgtgcccattctcccccagccacatcctcccaggggtggagcatcttcagcaaatgagactagacagagactggctgccattcttaggagaaggcggagtcagcaatgatccaaaatgaggagcaggaagctccctacagcgtgcacgctctttcagagagtgccaggaattcactgtaactgagaatgacaatgataaaattattttcacagatcaggaaggcatacctatagatgtatttaacaaaagactgtaaaaagctggaaaattgtgaagccttatttttcaagagggttttgatagagtaacagatcattaagttgttggtattccagaggtccgatttctatgtttatgttggaatgtgctctatgaatatagccttttagagatcacaggtaaaatttttcacccataacatcttttcaatttcttgcgccactacaagcagatatatttccacaaaaaaatagattgtttgagattt

SEQ ID NO: 301521 - DNA, 1167 bp, Artificial Sequence
  derived and/or modified sequence
atgctgctgaaggagaaggaggacagcctgatgacctgccagcagatctataaggcccttcaggaggagctcactgtcaaggaaaagcaagaagaggacatcaagcggcgtattaacctcgccgaaaatgagctggagattacaaaaactctgctcaaccagacccgggaggaagtccttactctcaaaaacgaacgcgaactcatgcttattagccatcaaaaatcaatcgagcagttgcaagagacgctgcgccagaaattgctcagtgacgataactggaaagagaaaattgaggcagagctggcaaaggaaagagcacagcacctggtggagttcgaggaacaggcactgctttttaaggaagagaccaagctgcaattagatatcgagaaagaaaagcaccaggacgtgatacagaagtataaaaaggagcaggaagaattgcagatgaaaatatccgacctgataactggtgccacccgcgacctgcgacaggaggtgactaccctcaaagaaaaactgcacaaatcccacattcggtatacagaggagtcaaacagtaaggaaaaggagatagagaacctgaaaaacctagtggcggaatttgaatcaaggttaaagaaagaaatcgactcgaacgattctgtgagtgagaatctccgcaaagaaatggaacaaaagtccgacgagcttaagagagtgatgctcgcccagacgcagctcattgagcagttcaatcagagtcaggaagaaaatacgtttctgcaggagactgtgaggagagagtgtgaggagaggtttgaattaacagaagcactctctcaggcacgcgaacagctattagaattgtctaaactgaggggttctcttccattctctccctgtagtctgtcgaaaggatctctgacgtctccagcagccgcggtgtctaatcacggagagcgctccttagcgcggcttaactctgagaagggtatacagattcccaatctacggggtgtgagcaagccaacaacatttcctactagtgataagccgaaacgagtcaggagcggcgtgcccatactgccacaacctcatcccccaaggggcggcgcatccagtgccaatgagacaaggcagcggctggctgccattctgaggaggcggcgatcccaacaatag

SEQ ID NO: 301522 - DNA, 1167 bp, Artificial Sequence
  derived and/or modified sequence
atgctcctgaaggaaaaagaggactccctcatgacatgtcagcagatctacaaagcgctccaggaggaactgaccgtaaaagagaagcaggaggaggacatcaaaagacggattaatctggcagagaacgaactcgagatcaccaagacccttctgaatcaaactcgcgaagaggttctgactctcaagaacgaacgggaacttatgttgatttcccatcaaaagagcattgagcaactgcaggagacactgagacaaaagttattgtctgatgacaactggaaggaaaagattgaagccgaactcgccaaagagagggcacagcacctcgttgagtttgaagagcaggctctattgttcaaagaggagacaaagctgcagttggacattgagaaggagaaacaccaggacgtgattcagaaatacaaaaaagagcaggaggagttgcaaatgaaaatttccgacctgataacgggggctacccgtgaccttcgccaagaggttacaaccctgaaggagaaacttcataagagccatatccgttatactgaagaatctaattctaaagaaaaggaaattgagaatcttaagaacttagtagcggagtttgaatctaggttaaagaaagagatcgactcgaacgattcagtgtccgagaacctccgcaaggaaatggagcagaagagcgacgagcttaagcgagtgatgctggcgcaaacgcagctgattgaacaattcaaccagtcacaggaggagaatacattcttgcaggagactgtccgtagggaatgtgaggaaaggtttgagttgacagaagccctgtcccaggccagagaacagcttcttgaactgtcgaaactgagggggagcttgcctttctcgccatgctcactgagcaaagggtccttaacctcccccgcagccgctgtcagcaatcatggagagcgctccctggccaggttgaactctgaaaaagggattcaaatcccgaacctccggggtgtatctaaacctacaacgttccccacttctgataaacctaagcgcgtgaggtccggggttccaatcctgcctcagccccacccccctaggggcggtgcttcgagtgcaaatgagactcggcagagattagccgcaatcctgcgacgtaggaggtcccagcagtag

SEQ ID NO: 301523 - protein, 132 aa, Artificial Sequence
  derived and/or modified sequence
MDHHIPMHALPEEIQKMLPEEKVCKYCGVSYLILHEFKAMEEKVKAMEKEMKFYQGSVDREKRLQEKLHSLSQELEQYKIDNKSKTERIYDVGMQLKSQQNEFQKVKKQLSHLQDELKIKYRQSYIFRLCFC

SEQ ID NO: 301524 - DNA, 621 bp, Artificial Sequence
  derived and/or modified sequence
tggcggcgcggtcgcccgggagaccgggaaagccgtttcacacccgtcctagtcgaagtcgagatttcctttggcttcaaagctctctcaccatattttgggaagttatggatcatcacattcccatgcatgcgttgcctgaagaaatccaaaagatgttgcctgaagaaaaagtttgtaagtactgtggagtcagctatctaattcttcatgaatttaaggctatggaagaaaaagtgaaagcaatggaaaaagagatgaaattttatcaaggaagtgtagatcgtgaaaagagacttcaagaaaagctgcattctcttagccaagaacttgaacagtacaaaattgacaacaaatccaaaacagaaagaatttacgatgtaggcatgcagttaaaaagtcaacaaaatgaatttcagaaagtaaagaaacaactgagtcatttgcaagatgagctaaaaattaaatatagacaatcatacatcttcagattgtgcttttgctgatgtctgtaagaactctgtctaagccggtcagaaggattttctcctgtattttcttctaagtgttttatagttttagctcttctttagatctatgatctatttcagctaacttctg

SEQ ID NO: 301525 - protein, 612 aa, Artificial Sequence
  derived and/or modified sequence
MSHPSWLPPKSTGEPLGHVPARMETTHSFGNPSISVSTQQPPKKFAPVVAPKPKYNPYKQPGGEGDFLPPPPPPLDDSSALPSISGNFPPPPPLDEEAFKVQGNPGGKTLEERRSSLDAEIDSLTSILADLECSSPYKPRPPQSSTGSTASPPVSTPVTGHKRMVIPNQPPLTATKKSTLKPQPAPQAGPIPVAPIGTLKPQPQPVPASYTTASTSSRPTFNVQVKSAQPSPHYMAAPSSGQIYGSGPQGYNTQPVPVSGQCPPPSTRGGMDYAYIPPPGLQPEPGYGYAPNQGRYYEGYYAAGPGYGGRNDSDPTYGQQGHPNTWKREPGYTPPGAGNQNPPGMYPVTGPKKTYITDPVSAPCAPPLQPKGGHSGQLGPSSVAPSFRPEDELEHLTKKMLYDMENPPADEYFGRCARCGENVVGEGTGCTAMDQVFHVDCFTCIICNNKLRGQPFYAVEKKAYCEPCYINTLEQCNVCSKPIMERILRATGKAYHPHCFTCVMCHRSLDGIPFTVDAGGLIHCIEDFHKKFAPRCSVCKEPIMPAPGQEETVRIVALDRDFHVHCYRCEDCGGLLSEGDNQGCYPLDGHILCKTCNSARIRVLTAKASTDL

SEQ ID NO: 301526 - DNA, 18278 bp, Artificial Sequence
  derived and/or modified sequence
gtcacttttatttgggggtgtggacagctgctttcccaggggagtacttcttacagtgggatttcaagacaagatcggcctgaagaaaaattatatttgtatattttttaaaaagtgggaactttgaggctcagagacagagcagaagacagaacctggtcttctgattccctgtgttctgcttttttcattgttccactggacgctcatcagagggaagatctttttcctcaattgattccaacaatgtctcacccatcttggctgccacccaaaagcactggtgagcccctcggccatgtgcctgcacggatggagaccacccattcctttgggaaccccagcatttcagtgtctacacaacagccacccaaaaagtttgccccggtagttgctccaaaacctaagtacaacccatacaaacaacctggaggtgagggtgattttcttccacccccacctccacctctagatgattccagtgcccttccatctatctctggaaactttcctcctccaccacctcttgatgaagaggctttcaaagtacaggggaatcccggaggcaagacacttgaggagaggcgctccagcctggacgctgagattgactccttgaccagcatcttggctgaccttgagtgcagctccccctataagcctcggcctccacagagctccactggttcaacagcctctcctccagtttcgaccccagtcacaggacacaagagaatggtcatcccgaaccaaccccctctaacagcaaccaagaagtctacattgaaaccacagcctgcaccccaggctggacccatccctgtggctccaatcggaacactcaaaccccagcctcagccagtcccagcctcctacaccacggcctccacttcttcaaggcctacctttaatgtgcaggtgaagtcagcccagcccagccctcattatatggctgccccttcatcaggacaaatttatggctcagggccccagggctataacactcagccagttcctgtctctgggcagtgtccacctccttcaacacggggaggcatggattatgcctacattccaccaccaggacttcagccggagcctgggtatgggtatgcccccaaccagggacgctattatgaaggctactatgcagcagggccaggctatgggggcagaaatgactctgaccctacctatggtcaacaaggtcacccaaatacctggaaacgggaaccagggtacactcctcctggagcagggaaccagaaccctcctgggatgtatccagtcactggtcccaagaagacctatatcacagatcctgtttcagccccctgtgcgccaccattgcagccaaagggtggccattcagggcaactggggccttcgtcagttgccccttcattccgcccagaggatgagcttgagcacctgaccaaaaagatgctgtatgacatggaaaatccacctgctgacgaatactttggccgctgtgctcgctgtggagaaaacgtagttggggaaggtacaggatgcactgccatggatcaggtcttccacgtggattgttttacctgcatcatctgcaacaacaagctccgagggcagccattctatgctgtggaaaagaaagcatactgcgagccctgctacattaatactctggagcagtgcaatgtgtgttccaagcccatcatggagcggattctccgagccaccgggaaggcctatcatcctcactgtttcacctgcgtgatgtgccaccgcagcctggatgggatcccattcactgtggatgctggcgggctcattcactgcattgaggacttccacaagaaatttgccccgcgatgttctgtgtgcaaggagcctattatgccagccccgggccaggaggagactgtccgtattgtggctttggatcgagatttccatgttcactgctaccgatgcgaggattgcggtggtctcctgtctgaaggagataaccaaggctgctaccccttggatgggcacatcctctgcaagacctgcaactctgcccgcatcagggtgttgaccgccaaggcgagcactgacctttagattcagtcacctgttcagccggcactgagaagaacgaacacaagaaaaagataagaaatactagagtaaaggccatcaaactacgcgatagtctctgttcttcatctgctattaaccttgccttagaaacacataaattatgagattttttttaaaagttgttaccaaatacacatttcacattgaatcatgtaggatcttgatgggcctttgttcccaaggacttccacatttttgcacagattatgctccatcccattcacttctgcattcctgtaacttttaatccctatgtttgtctcacttttcatctggttgaatggcttttcttagtgtggtatttgctgtcacatagtttttcctgggtgagtctgccaactcacaggtgcttttaggcttgaaatctccatcctatcatttccgttttgcctgtgactgtaaagagtagccattcttttcccatgtattgaagaggatattcttctcttgctttatactactcacgtccttggggagggaaatgcacaatttttttttgttaggctgtaaagaatttaagctgtaaattacataagttagaacaagcccaaatttaatttgcaaccatcagaattcagaatctatagtgaccagtgatcaaggctaattggaaaagagttatcggcccatagctaataagtagtgacagacaaccaagcttcaatatttttctaaagaaattacaggtgggatatgctagaaaaggcattttggggttatgtttaaaaaaacattattgtcccacaatattaccttaagatttttcttttccgcactacctgaacattgtaatacagacaaacttgatttcttctagaagataacattttcaatactgtcccacttctcatcttaaaaatattgtcatgtttattctaatatccaacacaactatcaaaattgcctttttctctagaggatgaaggctgtgaaaaaaccgttcaaattctcttctttttcttttttattaccaggtccattttgcctgacaattgcaaatcagagcatacaaaataaaactgtgcagttttgtttggtttactttcaaaagagtagaaagcttgaaaagattctgaaaccacagtttcattattctcataatccttctgcaactgaaattacatattgcaggagacattttcatatcatcaatgtgacatttacaccacactttcaaagacaatcactgaaacaaaaattgtctttatgagctaaaaatatgcagaatctctgcctagaatctttattcaaacttttattagccagtgaaacacttgcttgccaactgccaagccatacttattaagttcgaacatgtttcacttaaggagagacacctagcttagtcatggcaagttgccattttgtaaactaaggattttggactgagatttcttaaatctttcttcaaatctcccacaagtatatacttttaaattatggagtattttaagtctacaaaaaggtataaataataatataatgaattcctatatacctaatacccagtttaagacaccaaatataacaagtataattacatcctccaatgtaccgtttccttattccacagatatctttttcattattgtgaagtgatgttcagatttctagttttttttctagtttttaattttaacatcagaactgaaataaaaaattatggatacgtgttttgaattgcaaactattcctcaggaattccaattaaatttattttacttgaataggaatgatcataaaagtgattctttttttgtgactagaaattcttaagccgatggtcactatagctcatccttaatgtatggctcatttgcttttgtcactaaacggttttgtgttagaaccaccaaaattatagcttttaagagcttcctttgaccactgtctttttcttaccctagttctcttatctttgatcgtatatttctcataatgtgaaatatgatgagattcacttaggggcagcatgttagttttgggaggcaatgtcaactgtgtctctgaattcctgtcttccaaattgaagccagaccatgctgatgacctcaagtagcactgactatttgacaatagggctgataatgtaatcggcttgaattttgacttagtaactttttatgtaatactttcggagaaattctctttaggacaaagcagagagtccaatttattgagggatagattgtatctcttaaagtggtcatattattattaattttgccaaaagaagaagaatttattgaatatttatactataaaatgcagtaacattctacttgcttattacatttaaatccttgtgtaactgaatgtttacatgtcaagaggaaaagctgtaagaaaatgctgtcacagacccatccctgtggcatcgtcagcagaatactgcttgcttacaatctttattatgcattcttataacataacctcagagtatctttaccaaaggtttttaaagtaaatctctttttaagatagacttattcttttataataatgaatgtgcactcatacatatgtagaaacatttagatttagagttttttttttctttcacaaggtataataaggaaaggatcctacaatattttattctagggtttcttaaatatatgatttatattactgtcttttctattaatcatttgatttaaacaatgccaagtcactcttttttagttgcatgaaattttgcctgcaacagagagaaaaagattgtattactttaatgattataatcatactgtctgctgatataatatcataattgttgtggtttaaatacataaatagtagaaaaatcagagtctataacagaaagtttgtaaaaatatactgattttgaaaagtatcaggaatataaatatttggtaattctgtgtaacaagagagacatggaaaaggaaaaaaatccactatatcatgggctctgcagaacatatcaaaataggatttcttaaatttttcaacccccagaccatactgactcaacatggagtctcactggccaagaaaattgcctttaaaactcgaaaataaggccaggtgtggtgactcacacttgtaatcccagcaatttgggaggctgagacaggaggattgcctgaggccaggagtttgacaccagcctgggcaacatagtgagaccttgtctctacaaaaaataaaataaaataaaaaccaaattagccagacatggtggcatgcgcttgtttaaaaaaacaaataaataaataatcgactcaaaaataagtcatgtgtcccagcataaggcatcaggttgttagatgctggcatctctgcagctcaaagatgtgggttctttttcttgtcattaacacattgttatttctgtaggagcaacttctctgatcaaaattacttttctgggtatgtgctgattaagggggtggacttatcaacactataattgttccctatgaaagattccacagagatgtttatggtgaggtttaaaggatatgaaactctacatttaaacaagtattttatatttgggtacagaggaagaaagagagggctttttccatggggctatagtagagagttagtggaatatagacaggactctgaaaacacaacttccagccatttttttagttagtaaaaatcctattaatgtgaaccagccaggaataacagtgttatttctattggatatggtttgggcttctcttgtcaaatctgtgtcggctgccccctgatccttccattatcaagttttgaagggtgttggggaaattatggcagctgctagggagatcagggaaacactgatgtaacctcaaagcctctcaccattcctcttggcttggaaaggctttattttttcatatacatttctagaaatattgctattctaccttagtatttcacatttgtagttcaaacaagcgattgtccatctgttgcctagagctatagtacatgtgtgttatgaatgaaatatgacagcatgttccatacccctgctttagccatctgtgggaaaccagcaaactgaaaaagacacctctgcaaaatgtgcctcaagtccatttcttgggatcgctcgtttggtgcactctcgtgggagacaatcagagaacaacatatacttgtgccttattttcaaagaatctatttacactactatgaatattccactgaagagtcaatgatgtaaatgataaccaccaaatctcaaaaatatactcaccaaaaagtaaaaaagtaaaaaaaaaaaaaaaagaaagaaagaaaagaaagagagagaagtcaacttttcatcttaatatattctagtagtatttattttttccttgtcttggaagtatctcataggtctttaaatgagtaaaacatttttatgccagaaggtgatataatggatgttagtgttttttatttgattttacagtagttttagtcagataatgaggacagagacttcaacttgattctttaccaccattcagcatattttttaattgtcttcattgtatttgcttaatagtggtccagacaagttcaaaacttgttctcagtgaggcattaatatggtgcaaccatgaatatttcaggccaagttattcacttgacagataactagaatgaaacttttctcatgaggctgttgtttggttagcatagccttatttcaaaccttaaaaagttacctgactgaagctactatgacttggtaaggattcttcctctcttgctttcttcctcccttcctttcttcctcttccttcctcctcttcttattttctttcctactttccatcctacctattagtgttgctgtacttggattttttgtaaattaaatcaatgcattatgattttagggaattatgattatattcataaggggaaggctaccagaaaatatatgtggcatccataaaatcttcttttataggggcatattttttaggttgtatttattcgtaaagtgaaatgagataatagagtctttctgtttcatgttaatgaattttcatcagggactgaggtcatagattcttggaaaattcatttgtgactgatctagttttctcagctgtatgcaaagtaatctttcaaagactaggttaagattttttttttaagtctgaagcaatgtaaccccaaaaaattataattttaatgatggcattttattttattccattgcagcttgataactttccttatagcaaaggaataactattgtattttcagaattttaacacagattaacacttagcctgtaagactaataatatattgtaatagttgatactaaaatatttttcagcaggttggacagcaccagtttttcttagatcacagactacaggcagaatttcccttcaatccagaaaaaaggacactaatttccttttctatttaattttcctggcccttgtgcaaaaaattgtggactctatcttagttacaacatgcatgtcccttattttgtggagagctgtgtgaaagatgcgttttttttctttttttcttttttttttttttgagacggagtctggctctgtcacccaggctggagtgcaatggcacgatctcctctcactgcaagctccgcctcccaggttcacgccattctcctgtctcagcctcccgagtagctgggactacaggcgcctgccaccacgcccggctaatttttttgtatttttagtagagatggagtttcacagtgttagccaggatggcctcgatctcctgacctcgtgatccacccgcctcggcctcccaaagtgctgggattacaggcgtgagccaccgtgccccgcgtgtttttttctttagctgattgacaggtccccttcaaagttacaaaaaaaagtgctaatttttgctgttaaattctggttgttatttaattgacagaagtctcttgatgcacgaataaatatctctacatctagcctttgttaaaaataaaaattaatattctacaaacacctacatatactagagaggggtgaaacactgcagctaattcctttataatactttcagatgattgcattaagcctttcatgttatgtggcattgttaatttttcctagatacccatccacttaagggccagagaaatccttattcatttaactctggtgggcatttatgtaacatacccaaataaaaacgttattaaacagccacaatcgcattcagtcaacttggcactgaatgtagcttctaaaatcagttctctaccctacgaatggaatgttctaccaagaaagagaagcatcaccatgtcatcttgtgttctacaccactatagagagttacagttgcccccaaacacgaatgctattcccaaataaaatagaatcatgctttgggaggccaaggcgggccgatcacgaggtcaggagatcgagaccatcctggctaacacggtgaaaccccgtctctactaaaaaaaaaaaaaaatacaaaaaattagcctggctcagtggcgggcgcctgtagtcccagctactcaggaggctgaggcaggagaatggcgtgaacccgggaagcggagctttcagtgagccgagatagcgccactgcagtccggcctgggcgaaagagcgagactccgtctcaaaaaaaaaaaaaaaaaaataggatcatggcccttttaaagatctgaatcttctctgttattttcctgatgaatcaccatcccatatcttcttagtcctggccagtatgtagttgcgctcacatacgtctattctagctctgtagctccacaaaacaagtcttaagtccaaatctttgcctcttcatgtctgatatcaccaactcattcagcttttcttcacttattgacatagtgtcatgtcctatcactctctgctgcttctttaaacagtggacacaaacatattttctaattttcagtgtactcagtgaaacttggcagttcaccatgagtcaggctaggttgaaaggctttctttagggttgaaagtaaacgaaattggaatcacccaaagagaatttccccaaaaaacctcagacccagaagtgtaaaagctacagaaggatagaactcccatgtctacagacagttctgttactttttgttctgtactattttggatgttgccaaaatcaaattcatcctgaaaacaggaagcaagctaatgcatatgccatccatgagattcccacttctgggtcagttcatattccattcaaccttttccttttatccttgtcttcttcagaataagacatttttcctccatattttcatattaaatattaacactttataggttctactttaatatatggacactttacaggttatacataaatatttgctggttgattgatttcgagattcattcattctgtgctcaaatatttgtacctagagacgttacatgttagaaaaagtgagcagcttctttctctaatcatttaggagtccatatttttcttttctttttgttctcccaacatccttatctcttactcagctcttcaatttataattaccaaataatcactgttagagaatcagcccctaagtaactttgattctggccaactgtaataagatccaaccacttaaatctgtacttactcaataggaaggaatgtgacatcaggaagagtcattccagtgacattagtaagactttatggagtacataaaatttgataagaaatcttgagctgattctttgacttgatttagaagttgagaaaagagtatttaaggcacaacagggaaacatgggctatactcagagaagaccctctgcattggccaaaatatcatggattctggaaattccttcttaacagaaaaaaaaggcttccaaataatcaggctgaatgggaagaaaaaggcatagaggaagcctgaggaagtatttacttgcttttcccatctctttataattggaagagaagatgatctgccaaaatataacccagcatgcacagtatggacaggaagcagccctccatgaactttattatcacagaatatgagcattcttattgatccacagctacatcttctattcttgcagcaagggtacatgtcctttgaccctccacaaaagaacaagcaggacatctctattttcctattgagtctgagtccattattagaaaggacttcccagccatcttttctacttggtattaaaattcccttacagattcattgctaagtgccaattctttttttttcttttgagacggagtcttgctctgtcgcccaggctggagtgcagtggcgcaatctcggctcactgcaagctccgcttctcgggttcacgccattctcctgcctcagcctcccgagtagctgggactacagacgcccgccaccgcgcccagctaattttttttgtacttttagtagagacggggtttcaccgtggtctcgatctcctgacctcgtgatccgcccgcctcggcctcccaaagtgccaattctgactctacttaaacatcacctgtatcagggagctcattattccttgaggtcttacatttctttcagcacattttgttccaagctacacgactttaaaacagagccagcctttggggcatatgttctctttggtgccacacaaaacctgtagtacatgatacagtgttgcttcccccctccttttccttccatatatatttgttttgttttgggcattgcattacttttttgaatttttaagaatctctaaaattagtctgaaggatgttctgagggccagacattagaatttgtgagtttttttgttgctggttgtactttcctatttagaagacagaccgttctgacagttgttgtgtagcttcatgccttccccagtaactaacccatgaacagtacaccccttttatctgacttgttgataatgaccttaaaaatgttaggaaatgggccgggcgcggtggctcgtgcctgtaatccagcactttgggaggccgaggcgagcggatcatgaggtcaagagatcgagaccatcctggtcaacatggtgaaaccccgactctactaaaaaaaatacaaaaattagccgggcgtgttggcgggcgcctgtagtcccaactacttgggaggctgaggcaggagaatcacctgaacccaggaggcagaggttgcagtgagcagagattgcgccactgcactccagcctgggcgacagaacgagactccgtctcaaaaaaaaaaaaaaaaaaaaaaggttgggaaatattggtgtataatccccatgtctaacaaggaagaagtcaaaagcaaaagatagtggtattgccgaaaactcattatttctagttagttcatctgtggaaaaggatatcgttcttgaggagaggggttctattatgctatagttttctatggaaatgtacaaatgctttcctcattgctctggatgactatttagtttaaataatatacctttgtcatggggaagaccatgattgtggcttcttctaccccaactttgaatgagagagcactgtaagcagaaactgccatcagtctcctgggcaggacctggaggtaactttctgagctgtaaaatagtaattcctaagagagcttacaaactgcttccacacagaaaatagcgcagggaggacagttattagtacccctattctagaagagaaagctgaggctcaagccattaagtgacttgccaaaagctgtgacatagctgggaagtggcagatttggggatataaccaggtcttgcaagtccagtgctgtctccaaagtagccacgctcacagctgagaacaccttagaggacaatatcgacttcttacagactaccaagcccccagtcatccagggaaattcagagaccaattgactgccaggtggcaaatccacatgtgtactgcggtctttagagatcatttagagcttgcacacatctgtgtcttcttgtgggaaacctctaggtattctgtctgatcagcactgtgaggaagttggtgggaaaaggccactgataagaacaaacaatgggcagaaggaagcacattgcaataaatttccccagagagagttcctttacattccattcaccaaaaacctctctggaactgtcaggttcagaatatcaaccaagaccatatcatttagaattcattggcatgtagaggtgactcgattcctaaaagaagcctctctcccatgaaccacgatgtacgttccacagaggcagaaaccgccgtaggttagcaatgcattttagtctttctctccattcacatttactgagagcacaccacgtgcatgttgctgcaacaggcatttccgatagagccgatccatgagctaacaatgtctgaaaacaaatgttatggaactgttggcatttctgagatttggcctttgccatttgatagactttgcttcccaggatgctgtcattttgtgattttttataattacaaggaatttggtaccatgttgttttcaaaaaacctcctagaaagtctccatgtatgctctagaagttgctctacgtaacagttcagcaagcaagtgttccttctcttgagctgcgtccctcaggaagctgtacctttagggtgtgctttccactttttatttcctctcatttcactcctttcattgtttgctatatcctaaaatatgtgaagtgagagaaaaaatatcatttcttctcattaaatctcctgcattaaatctaagaatcctttaaaataatcacacctgataagtgttttatgcatttccctccctggagtgttatcatccatcaagccagtatcatcatccacctgcttattccttgggactaatgagagccaagttaaatagcaaatgacttctcaccccttcctagtcctcatgcctgaggaataagggcgacattaatgggagcgggagagtggtggctttggttgagatgcacgttcacagactagaaaagtgcctcacctccatggtgtatatgtgccaccttttcttaatccagtctatcattgttggacatttgggttggttccaagtctttgctattgtgaatagtgccgcaataaacataagtgtgcatgtgtctttatagcagcatgatttataatcctttgggtatatacccagtaatgggatggctgggtcaaatggtatttctagttctagatccctgaggaatctccacactgacttccacaatggttgaactagttcacagtcccaccaacagtgtaaaagtgttcttatttctccacatcctctccagcacctgttgtttcctgactttttaatgattgccattctaactggtgtgagatggtatctcatagtggttttgatttgcatttctctgatggccagtgatggtgagcattttttcatgtgtttcttggctgcataaatgtcttcttttgagaagtgtctgttcaatactatgcagccataaaaaatgatgagttcatgtcctttgtagggacatggatgaaattggaaatcatcattctcagtaaactatctcaaggacaaaaaaccaaacaccacatgttctcactcacaggtgggaattgaacaatgagaacacatggacacaggaaggggaacatcacactctggggactgttgtggggtggagggaggagggagggatagcattaggagatatacctaatgctaaatgacgagttaatgggtgcagcacaccagcatggcacatgtatacatatgtaactaacctgcacattgtgcacatgtaccctaaaacttaaagtataataataatgaaataaaattaaaaaaaaaaaagaaaagtgcctcacctccctgtgaggcttgatgaatattgtggccagtgagtggaaaatgattcttgtcgaatagacagagtattcccaccccaggaatggattaatagaagacacaatttgagcacttctcagaattatctagtatgcctgagtagagactcacatgggtggaatctgtgttgtctcatcagagggaataaaaagacaatgaggtggtaaatgtgaaaaaagcagccttttagaaaaacattattttcaaatacctttataaatcatctaatttatcttcacataatataaagaaaaaactaataaaaattttcgtatttcactttacataatatgttctcccatatttagggatcatacaattgtattgtcttcaaaacacacacacacacacatacacacacacacacacacacacacacaccccttccaagaaagctgatccttcagaaaataaatcttatttttaagcacttgggttttcaggccagaaaattaataaatcctaaacctgacccatttttgtaacagctaaaaaggagaagaaaaagctagttaaattttgtgtggatccatttatctcttaaaatatgccaaagcaatttgaggtgggggtggaaacaggtatttatctctcatgcgtgattctctctttatatttctatctgttgggaaaagggtaaagaactattcttggtcattattgatgtattgtgttgccactttgtatggtgcctgctgtgctttatcccgaggcatagcagtaatcgttactatcttgactctttccttcatcacaagagagtaaatatgaagtctgaatgtcgttcctcacccccaaattgtttaactctgcttccaaactagtttaagaaatgcaaaatgggaagagctagcttttcttagatacatttcttccttttttattctttcttgggagacgttaagtataaaagggaaaaagtcagttccttcttctctctctttctctttgggtgacagcaatgctcacttagtaattataaactggaaataggagagtagcttgagcaggttatgatatatctgcccaatgtgtttcattccttcaaacataaactttgagagtaaaagagatttttataatttaaatgccaacgacaggaatggcctcatgttttaactttcaaataataaatggggagttggtatttgggcagagtttgcattttactaatcctatatactttgagcttagtttttagaattgtgtcaaatacatcaacatatcaggattatagtgccaaaaatagttaaagtgccttggtcctccctctgtaggcagcaaattgaaactaacatgggaccatgccatccttctagcataatggagaagtctgaactgaggagtatctttgatgaaagacatttaggaccctagaaactaaatcttgtcaccaagactttatagtaaagtagtagcaaaattatttttaaaagactttcttccttttactacccatttcctctcttgggaaagctgatgagcaaattatccaagactcatttctttattaggcaaagtcagaatatttcccctctgaaaatctgaattatgccctcattctttttcaagaaatatctcaaagagcaaatagaattaaacatgacacttgattgtctgattatttggcatgtataaaattatcatgtggcttaatgtgccttaagtgaaaatttaaacttagacctgaaacctttacagttggatgtagcgttgagcttttgcatgttttctgtataataaaccacttttgttttgtttgttttgtcttttaacctacacctttatcattactctaacagatttagggcttctctttctctacagctaagtaagggaatatgtgcaattatgagacatacaaaaaaggaaagggaaaggactttctaagtagcaaatctgtgccatgaagtagatgtggcgtgaagatacagagcctgaggatagtaattttccctgagccacgcacacaggcttttatttcatgccttttctctttctgtgccgtcacctttgagaaaaacgattgcaccttctccaagtctgcctttttaacagctacagttaagttggcaagacttccccagctctgaatatagccatttgccgactccggcctctttgcgagactgactcaaatctgtgatcttctgttcagcatacacatcagcaaagtgagaagatgagcactaaatataggctctattaactttacttttagatttactgccttcaaaaagtgcctattctgagcaacataaacgttattccttacatatgtatgtacacacggtacccagagtcgtactgtgcagccttcaaaaacataccatcagaaagagtaggtgctgagataaggaaactttgccaaatgaaagaaagtcactcacttccaatatcccctctcaagcggctaccgtgaaacgggctgcaaacacattccctgagcatcccttgctgatacagcttctttatatttatatcctactggatggtagcatattgctaaggtttcctgtactctgcttcaagggaatgtaagctttatggcattgaaacatttagggaaaaaaaagatgtttaagagaattaatagagccgtagtctgtattaggatgtgtgtcatatgtgtgttctataaactaagcatcggtgggtttagagtgttaaagtgtcagcacattccttctccttttgtctctcaggctaacatgagagaaaatagaaaagtcttggctgtggggattggaagctcagggggccaaatgtccttgccagatccttagagcattactttgactcctaaaaatagtagtgtatgttatttgatggcttttgtttccatagttccatcactgacaaaactgtcaatactgttgatggagcagcagcatagcctagagtgatgcattcttacccagaggtggcaataggagagggtccatgtaaataggacgaggtagacagtgcatgattgtaggagaagggttgaagggaggacatgattccaaaaaagatcgttctcaatgtgtcgtctgactcaaccagctggcagattacacttgccaagtcgttccctttccttctaagtcagttggctccatattcacttgaatatgcctctgtttgggcaaagcaagatacctccacttaacctttatccaaggaagctcttggtgtcctcttggtcataaagttgtctcctacctaacccagttttaccaaatggaagtaaaaggggacaaactatggaagatggactccatgccattgcagtcagccaccattctcttttccatataaggagccccattacataagctacgggtgaggttggaacagctatgtttcataatttcaagagtgtgaccaccctgctctagtcatcatcattggatgaatccagttgactctttggcaaaagggtgatacttttcactaaaaatgcctactcttcctgttgatgttccttttctgtttttaccttgtccaatttccacactagtcattttttttattttttagaggatcagattttagcgctggaaaatgagttcaaaaatttcagtgtaatgtcataaggatgttgggatacagagattttttttttccttggaaacaaatggactgggaagaaacacagcatggctttgctctgagtttcaatctgatgattatgaccatggaagatagtcttatgtaaaggttaaatggtgtttacaagtggatagataaggcggagatggtgagaagccgggttttctctatgctaaatgtgtctactaagagcagcacttcctactagctaagcacaatcatagccccaccgtgatgagctgctagtctgaataacattccctgacttagggaaaggcacacaaaaacatataaagaatatgtctattttcatatgtgtgatactgacagagccatggtattcctaaaatataggtttctcttttttcttgtattcttagcaaattgcatttattcactacattacaaaccatcactgatgtatccaaaatagcacacatagttcagtatgaaaataagagaataaaatctgttataagcaagtgatttaggtattttcttttgtgtttatgcattatctgactatattaaaacctgtttttctatttaccttctatcagttttctctaccaattatgttttttcaatgctctataagaatgaatatggaaattatatttcttttttctgtaaaagagttgcaactactttattatatttagaaatccaataaacttcttattacattta

SEQ ID NO: 301527 - DNA, 502 bp, Artificial Sequence
  derived and/or modified sequence
actttttgtctgtgggttcgttcccgggtcccgcgcgagctttcccgggataagtagctttagcgatcgggagacagccgggcgctgcaaggtgggaactttgaggctcagagacagagcagaagacagaacctggtcttctgattccctgtgttctgcttttttcattgttccactggacgctcatcagagggaagatctttttcctcaattgattccaacaatgtctcacccatcttggctgccacccaaaagcactggtgagcccctcggccatgtgcctgcacggatggagaccacccattcctttgggaaccccagcatttcagtgtctacacaacagccacccaaaaagtttgccccggtagttgctccaaaacctaagtacaacccatacaaacaacctggaggtgagggtgattttcttccacccccacctccacctctagatgattccagtgcccttccatctatctctggaaactttcctcctccaccacct

SEQ ID NO: 301528 - DNA, 612 bp, Artificial Sequence
  derived and/or modified sequence
ggggaggaaggagggggaaaggcaccaaccagcagccgctccagccctgccgaagtttcactttttgtctgtgggttcgttcccgggtcccgcgcgagctttcccgggataagtagctttagcgatcgggagacagccgggcgctgcaagattccaacaatgtctcacccatcttggctgccacccaaaagcactggtgagcccctcggccatgtgcctgcacggatggagaccacccattcctttgggaaccccagcatttcagtgtctacacaacagccacccaaaaagtttgccccggtagttgctccaaaacctaagtacaacccatacaaacaacctggaggtgagggtgattttcttccacccccacctccacctctagatgattccagtgcccttccatctatctctggaaactttcctcctccaccacctcttgatgaagaggctttcaaagtacaggggaatcccggaggcaagacacttgaggagaggcgctccagcctggacgctgagattgactccttgaccagcatcttggctgaccttgagtgcagctccccctataagcctcggcctccacagagctccactggttcaacagcctct

SEQ ID NO: 301529 - DNA, 535 bp, Artificial Sequence
  derived and/or modified sequence
cccaccctgcccccacccttcccccttcattcctctgtcccttgttctggaagctgaggcgagaatgtctcagttctgttcccttcaggcttcgagaccaccgccttgctgtgtcccgtagtggactgagggcctgcaagagggagtgagggctagtggagggccagctgcctgtgggggctggacatcgtattccaacaatgtctcacccatcttggctgccacccaaaagcactggtgagcccctcggccatgtgcctgcacggatggagaccacccattcctttgggaaccccagcatttcagtgtctacacaacagccacccaaaaagtttgccccggtagttgctccaaaacctaagtacaacccatacaaacaacctggaggtgagggtgattttcttccacccccacctccacctctagatgattccagtgcccttccatctatctctggaaactttcctcctccaccacctcttgatgaagaggctttcaaagtacaggggaatcccggaggcaagacacttgagga

SEQ ID NO: 301530 - DNA, 386 bp, Artificial Sequence
  derived and/or modified sequence
aggaattgaagagaatcctgacaagtggcatgttgggaaaggcctgaaggaagccagaccagcttgctctcagagctccttgggtcccctgcggcccccaggtgatcttcagcaagacctgcattgcagttggctgaaccttgtgtcaaccatccattccaggagccagctatctgagattccaacaatgtctcacccatcttggctgccacccaaaagcactggtgagcccctcggccatgtgcctgcacggatggagaccacccattcctttgggaaccccagcatttcagtgtctacacaacagccacccaaaaagtttgccccggtagttgctccaaaacctaagtacaacccatacaaacaacctggaggtgagggtgatt

SEQ ID NO: 301531 - DNA, 521 bp, Artificial Sequence
  derived and/or modified sequence
gaggaaggagggggaaaggcaccaaccagcagccgctccagccctgccgaagtttcactttttgtctgtgggttcgttcccgggtcccgcgcgagctttcccgggataagtagctttagcgatcgggagacagccgggcgctgcaaggtgggaactttgaggctcagagacagagcagaagacagaacctggtcttctgattccctgtgttctgcttttttcattgttccactggacgctcatcagagggaagatctttttcctcaattgggacatggatgaacctggaaaccatcattctcagcaaactatcgcaaggacagaaaaccaaagaccgcatgttcttactcacagattccaacaatgtctcacccatcttggctgccacccaaaagcactggtgagcccctcggccatgtgcctgcacggatggagaccacccattcctttgggaaccccagcatttcagtgtctacacaacagccacccaaaaagtttgccccggtagttgctccaaaacc

SEQ ID NO: 301532 - DNA, 400 bp, Artificial Sequence
  derived and/or modified sequence
aatgtctcagttctgttcccttcaggcttcgagaccaccgccttgctgtgtcccgtagtggactgagggcctgcaagagggagtgagggctagtggagggccagctgcctgtgggggctggacatcgtgtgggaactttgaggctcagagacagagcagaagacagaacctggtcttctgattccctgtgttctgcttttttcattgttccactggacgctcatcagagggaagatctttttcctcaattgattccaacaatgtctcacccatcttggctgccacccaaaagcactggtgagcccctcggccatgtgcctgcacggatggagaccacccattcctttgggaaccccagcatttcagtgtctacacaacagccacccaaaaagtttgcccc

SEQ ID NO: 301533 - DNA, 343 bp, Artificial Sequence
  derived and/or modified sequence
gtgggttcgttcccgggtcccgcgcgagctttcccgggataagtagctttagcgatcgggagacagccgggcgctgcaagcattgcagttggctgaaccttgtgtcaaccatccattccaggagccagctatctgagattccaacaatgtctcacccatcttggctgccacccaaaagcactggtgagcccctcggccatgtgcctgcacggatggagaccacccattcctttgggaaccccagcatttcagtgtctacacaacagccacccaaaaagtttgccccggtagttgctccaaaacctaagtacaacccatacaaacaacctggaggtgagggtga

SEQ ID NO: 301534 - DNA, 479 bp, Artificial Sequence
  derived and/or modified sequence
gatgggtatttgctttcatttctaatgaaatttcaggcctctagggtaggatatcaaaattggtagatcatttgcaatttattttatcccaaacacctcactttacagtcagagaaactgaggcccagagaagtaaaatgagttgctcaaggtctcagagagcaagaaatagagatgggacttgagcacctagatctctggtattgctgtcctgtagttcatggagctggcagatggatacatctgtgacctgggatgatggagagactgctggacccttcagaggatctcatctcaagattccaacaatgtctcacccatcttggctgccacccaaaagcactggtgagcccctcggccatgtgcctgcacggatggagaccacccattcctttgggaaccccagcatttcagtgtctacacaacagccacccaaaaagtttgccccggtagttgctccaaaacctaagtacaaccca

SEQ ID NO: 301535 - DNA, 18221 bp, Artificial Sequence
  derived and/or modified sequence
gtgggaactttgaggctcagagacagagcagaagacagaacctggtcttctgattccctgtgttctgcttttttcattgttccactggacgctcatcagagggaagatctttttcctcaattgcattgcagttggctgaaccttgtgtcaaccatccattccaggagccagctatctgagattccaacaatgtctcacccatcttggctgccacccaaaagcactggtgagcccctcggccatgtgcctgcacggatggagaccacccattcctttgggaaccccagcatttcagtgtctacacaacagccacccaaaaagtttgccccggtagttgctccaaaacctaagtacaacccatacaaacaacctggaggtgagggtgattttcttccacccccacctccacctctagatgattccagtgcccttccatctatctctggaaactttcctcctccaccacctcttgatgaagaggctttcaaagtacaggggaatcccggaggcaagacacttgaggagaggcgctccagcctggacgctgagattgactccttgaccagcatcttggctgaccttgagtgcagctccccctataagcctcggcctccacagagctccactggttcaacagcctctcctccagtttcgaccccagtcacaggacacaagagaatggtcatcccgaaccaaccccctctaacagcaaccaagaagtctacattgaaaccacagcctgcaccccaggctggacccatccctgtggctccaatcggaacactcaaaccccagcctcagccagtcccagcctcctacaccacggcctccacttcttcaaggcctacctttaatgtgcaggtgaagtcagcccagcccagccctcattatatggctgccccttcatcaggacaaatttatggctcagggccccagggctataacactcagccagttcctgtctctgggcagtgtccacctccttcaacacggggaggcatggattatgcctacattccaccaccaggacttcagccggagcctgggtatgggtatgcccccaaccagggacgctattatgaaggctactatgcagcagggccaggctatgggggcagaaatgactctgaccctacctatggtcaacaaggtcacccaaatacctggaaacgggaaccagggtacactcctcctggagcagggaaccagaaccctcctgggatgtatccagtcactggtcccaagaagacctatatcacagatcctgtttcagccccctgtgcgccaccattgcagccaaagggtggccattcagggcaactggggccttcgtcagttgccccttcattccgcccagaggatgagcttgagcacctgaccaaaaagatgctgtatgacatggaaaatccacctgctgacgaatactttggccgctgtgctcgctgtggagaaaacgtagttggggaaggtacaggatgcactgccatggatcaggtcttccacgtggattgttttacctgcatcatctgcaacaacaagctccgagggcagccattctatgctgtggaaaagaaagcatactgcgagccctgctacattaatactctggagcagtgcaatgtgtgttccaagcccatcatggagcggattctccgagccaccgggaaggcctatcatcctcactgtttcacctgcgtgatgtgccaccgcagcctggatgggatcccattcactgtggatgctggcgggctcattcactgcattgaggacttccacaagaaatttgccccgcgatgttctgtgtgcaaggagcctattatgccagccccgggccaggaggagactgtccgtattgtggctttggatcgagatttccatgttcactgctaccgatgcgaggattgcggtggtctcctgtctgaaggagataaccaaggctgctaccccttggatgggcacatcctctgcaagacctgcaactctgcccgcatcagggtgttgaccgccaaggcgagcactgacctttagattcagtcacctgttcagccggcactgagaagaacgaacacaagaaaaagataagaaatactagagtaaaggccatcaaactacgcgatagtctctgttcttcatctgctattaaccttgccttagaaacacataaattatgagattttttttaaaagttgttaccaaatacacatttcacattgaatcatgtaggatcttgatgggcctttgttcccaaggacttccacatttttgcacagattatgctccatcccattcacttctgcattcctgtaacttttaatccctatgtttgtctcacttttcatctggttgaatggcttttcttagtgtggtatttgctgtcacatagtttttcctgggtgagtctgccaactcacaggtgcttttaggcttgaaatctccatcctatcatttccgttttgcctgtgactgtaaagagtagccattcttttcccatgtattgaagaggatattcttctcttgctttatactactcacgtccttggggagggaaatgcacaatttttttttgttaggctgtaaagaatttaagctgtaaattacataagttagaacaagcccaaatttaatttgcaaccatcagaattcagaatctatagtgaccagtgatcaaggctaattggaaaagagttatcggcccatagctaataagtagtgacagacaaccaagcttcaatatttttctaaagaaattacaggtgggatatgctagaaaaggcattttggggttatgtttaaaaaaacattattgtcccacaatattaccttaagatttttcttttccgcactacctgaacattgtaatacagacaaacttgatttcttctagaagataacattttcaatactgtcccacttctcatcttaaaaatattgtcatgtttattctaatatccaacacaactatcaaaattgcctttttctctagaggatgaaggctgtgaaaaaaccgttcaaattctcttctttttcttttttattaccaggtccattttgcctgacaattgcaaatcagagcatacaaaataaaactgtgcagttttgtttggtttactttcaaaagagtagaaagcttgaaaagattctgaaaccacagtttcattattctcataatccttctgcaactgaaattacatattgcaggagacattttcatatcatcaatgtgacatttacaccacactttcaaagacaatcactgaaacaaaaattgtctttatgagctaaaaatatgcagaatctctgcctagaatctttattcaaacttttattagccagtgaaacacttgcttgccaactgccaagccatacttattaagttcgaacatgtttcacttaaggagagacacctagcttagtcatggcaagttgccattttgtaaactaaggattttggactgagatttcttaaatctttcttcaaatctcccacaagtatatacttttaaattatggagtattttaagtctacaaaaaggtataaataataatataatgaattcctatatacctaatacccagtttaagacaccaaatataacaagtataattacatcctccaatgtaccgtttccttattccacagatatctttttcattattgtgaagtgatgttcagatttctagttttttttctagtttttaattttaacatcagaactgaaataaaaaattatggatacgtgttttgaattgcaaactattcctcaggaattccaattaaatttattttacttgaataggaatgatcataaaagtgattctttttttgtgactagaaattcttaagccgatggtcactatagctcatccttaatgtatggctcatttgcttttgtcactaaacggttttgtgttagaaccaccaaaattatagcttttaagagcttcctttgaccactgtctttttcttaccctagttctcttatctttgatcgtatatttctcataatgtgaaatatgatgagattcacttaggggcagcatgttagttttgggaggcaatgtcaactgtgtctctgaattcctgtcttccaaattgaagccagaccatgctgatgacctcaagtagcactgactatttgacaatagggctgataatgtaatcggcttgaattttgacttagtaactttttatgtaatactttcggagaaattctctttaggacaaagcagagagtccaatttattgagggatagattgtatctcttaaagtggtcatattattattaattttgccaaaagaagaagaatttattgaatatttatactataaaatgcagtaacattctacttgcttattacatttaaatccttgtgtaactgaatgtttacatgtcaagaggaaaagctgtaagaaaatgctgtcacagacccatccctgtggcatcgtcagcagaatactgcttgcttacaatctttattatgcattcttataacataacctcagagtatctttaccaaaggtttttaaagtaaatctctttttaagatagacttattcttttataataatgaatgtgcactcatacatatgtagaaacatttagatttagagttttttttttctttcacaaggtataataaggaaaggatcctacaatattttattctagggtttcttaaatatatgatttatattactgtcttttctattaatcatttgatttaaacaatgccaagtcactcttttttagttgcatgaaattttgcctgcaacagagagaaaaagattgtattactttaatgattataatcatactgtctgctgatataatatcataattgttgtggtttaaatacataaatagtagaaaaatcagagtctataacagaaagtttgtaaaaatatactgattttgaaaagtatcaggaatataaatatttggtaattctgtgtaacaagagagacatggaaaaggaaaaaaatccactatatcatgggctctgcagaacatatcaaaataggatttcttaaatttttcaacccccagaccatactgactcaacatggagtctcactggccaagaaaattgcctttaaaactcgaaaataaggccaggtgtggtgactcacacttgtaatcccagcaatttgggaggctgagacaggaggattgcctgaggccaggagtttgacaccagcctgggcaacatagtgagaccttgtctctacaaaaaataaaataaaataaaaaccaaattagccagacatggtggcatgcgcttgtttaaaaaaacaaataaataaataatcgactcaaaaataagtcatgtgtcccagcataaggcatcaggttgttagatgctggcatctctgcagctcaaagatgtgggttctttttcttgtcattaacacattgttatttctgtaggagcaacttctctgatcaaaattacttttctgggtatgtgctgattaagggggtggacttatcaacactataattgttccctatgaaagattccacagagatgtttatggtgaggtttaaaggatatgaaactctacatttaaacaagtattttatatttgggtacagaggaagaaagagagggctttttccatggggctatagtagagagttagtggaatatagacaggactctgaaaacacaacttccagccatttttttagttagtaaaaatcctattaatgtgaaccagccaggaataacagtgttatttctattggatatggtttgggcttctcttgtcaaatctgtgtcggctgccccctgatccttccattatcaagttttgaagggtgttggggaaattatggcagctgctagggagatcagggaaacactgatgtaacctcaaagcctctcaccattcctcttggcttggaaaggctttattttttcatatacatttctagaaatattgctattctaccttagtatttcacatttgtagttcaaacaagcgattgtccatctgttgcctagagctatagtacatgtgtgttatgaatgaaatatgacagcatgttccatacccctgctttagccatctgtgggaaaccagcaaactgaaaaagacacctctgcaaaatgtgcctcaagtccatttcttgggatcgctcgtttggtgcactctcgtgggagacaatcagagaacaacatatacttgtgccttattttcaaagaatctatttacactactatgaatattccactgaagagtcaatgatgtaaatgataaccaccaaatctcaaaaatatactcaccaaaaagtaaaaaagtaaaaaaaaaaaaaaaagaaagaaagaaaagaaagagagagaagtcaacttttcatcttaatatattctagtagtatttattttttccttgtcttggaagtatctcataggtctttaaatgagtaaaacatttttatgccagaaggtgatataatggatgttagtgttttttatttgattttacagtagttttagtcagataatgaggacagagacttcaacttgattctttaccaccattcagcatattttttaattgtcttcattgtatttgcttaatagtggtccagacaagttcaaaacttgttctcagtgaggcattaatatggtgcaaccatgaatatttcaggccaagttattcacttgacagataactagaatgaaacttttctcatgaggctgttgtttggttagcatagccttatttcaaaccttaaaaagttacctgactgaagctactatgacttggtaaggattcttcctctcttgctttcttcctcccttcctttcttcctcttccttcctcctcttcttattttctttcctactttccatcctacctattagtgttgctgtacttggattttttgtaaattaaatcaatgcattatgattttagggaattatgattatattcataaggggaaggctaccagaaaatatatgtggcatccataaaatcttcttttataggggcatattttttaggttgtatttattcgtaaagtgaaatgagataatagagtctttctgtttcatgttaatgaattttcatcagggactgaggtcatagattcttggaaaattcatttgtgactgatctagttttctcagctgtatgcaaagtaatctttcaaagactaggttaagattttttttttaagtctgaagcaatgtaaccccaaaaaattataattttaatgatggcattttattttattccattgcagcttgataactttccttatagcaaaggaataactattgtattttcagaattttaacacagattaacacttagcctgtaagactaataatatattgtaatagttgatactaaaatatttttcagcaggttggacagcaccagtttttcttagatcacagactacaggcagaatttcccttcaatccagaaaaaaggacactaatttccttttctatttaattttcctggcccttgtgcaaaaaattgtggactctatcttagttacaacatgcatgtcccttattttgtggagagctgtgtgaaagatgcgttttttttctttttttcttttttttttttttgagacggagtctggctctgtcacccaggctggagtgcaatggcacgatctcctctcactgcaagctccgcctcccaggttcacgccattctcctgtctcagcctcccgagtagctgggactacaggcgcctgccaccacgcccggctaatttttttgtatttttagtagagatggagtttcacagtgttagccaggatggcctcgatctcctgacctcgtgatccacccgcctcggcctcccaaagtgctgggattacaggcgtgagccaccgtgccccgcgtgtttttttctttagctgattgacaggtccccttcaaagttacaaaaaaaagtgctaatttttgctgttaaattctggttgttatttaattgacagaagtctcttgatgcacgaataaatatctctacatctagcctttgttaaaaataaaaattaatattctacaaacacctacatatactagagaggggtgaaacactgcagctaattcctttataatactttcagatgattgcattaagcctttcatgttatgtggcattgttaatttttcctagatacccatccacttaagggccagagaaatccttattcatttaactctggtgggcatttatgtaacatacccaaataaaaacgttattaaacagccacaatcgcattcagtcaacttggcactgaatgtagcttctaaaatcagttctctaccctacgaatggaatgttctaccaagaaagagaagcatcaccatgtcatcttgtgttctacaccactatagagagttacagttgcccccaaacacgaatgctattcccaaataaaatagaatcatgctttgggaggccaaggcgggccgatcacgaggtcaggagatcgagaccatcctggctaacacggtgaaaccccgtctctactaaaaaaaaaaaaaaatacaaaaaattagcctggctcagtggcgggcgcctgtagtcccagctactcaggaggctgaggcaggagaatggcgtgaacccgggaagcggagctttcagtgagccgagatagcgccactgcagtccggcctgggcgaaagagcgagactccgtctcaaaaaaaaaaaaaaaaaaataggatcatggcccttttaaagatctgaatcttctctgttattttcctgatgaatcaccatcccatatcttcttagtcctggccagtatgtagttgcgctcacatacgtctattctagctctgtagctccacaaaacaagtcttaagtccaaatctttgcctcttcatgtctgatatcaccaactcattcagcttttcttcacttattgacatagtgtcatgtcctatcactctctgctgcttctttaaacagtggacacaaacatattttctaattttcagtgtactcagtgaaacttggcagttcaccatgagtcaggctaggttgaaaggctttctttagggttgaaagtaaacgaaattggaatcacccaaagagaatttccccaaaaaacctcagacccagaagtgtaaaagctacagaaggatagaactcccatgtctacagacagttctgttactttttgttctgtactattttggatgttgccaaaatcaaattcatcctgaaaacaggaagcaagctaatgcatatgccatccatgagattcccacttctgggtcagttcatattccattcaaccttttccttttatccttgtcttcttcagaataagacatttttcctccatattttcatattaaatattaacactttataggttctactttaatatatggacactttacaggttatacataaatatttgctggttgattgatttcgagattcattcattctgtgctcaaatatttgtacctagagacgttacatgttagaaaaagtgagcagcttctttctctaatcatttaggagtccatatttttcttttctttttgttctcccaacatccttatctcttactcagctcttcaatttataattaccaaataatcactgttagagaatcagcccctaagtaactttgattctggccaactgtaataagatccaaccacttaaatctgtacttactcaataggaaggaatgtgacatcaggaagagtcattccagtgacattagtaagactttatggagtacataaaatttgataagaaatcttgagctgattctttgacttgatttagaagttgagaaaagagtatttaaggcacaacagggaaacatgggctatactcagagaagaccctctgcattggccaaaatatcatggattctggaaattccttcttaacagaaaaaaaaggcttccaaataatcaggctgaatgggaagaaaaaggcatagaggaagcctgaggaagtatttacttgcttttcccatctctttataattggaagagaagatgatctgccaaaatataacccagcatgcacagtatggacaggaagcagccctccatgaactttattatcacagaatatgagcattcttattgatccacagctacatcttctattcttgcagcaagggtacatgtcctttgaccctccacaaaagaacaagcaggacatctctattttcctattgagtctgagtccattattagaaaggacttcccagccatcttttctacttggtattaaaattcccttacagattcattgctaagtgccaattctttttttttcttttgagacggagtcttgctctgtcgcccaggctggagtgcagtggcgcaatctcggctcactgcaagctccgcttctcgggttcacgccattctcctgcctcagcctcccgagtagctgggactacagacgcccgccaccgcgcccagctaattttttttgtacttttagtagagacggggtttcaccgtggtctcgatctcctgacctcgtgatccgcccgcctcggcctcccaaagtgccaattctgactctacttaaacatcacctgtatcagggagctcattattccttgaggtcttacatttctttcagcacattttgttccaagctacacgactttaaaacagagccagcctttggggcatatgttctctttggtgccacacaaaacctgtagtacatgatacagtgttgcttcccccctccttttccttccatatatatttgttttgttttgggcattgcattacttttttgaatttttaagaatctctaaaattagtctgaaggatgttctgagggccagacattagaatttgtgagtttttttgttgctggttgtactttcctatttagaagacagaccgttctgacagttgttgtgtagcttcatgccttccccagtaactaacccatgaacagtacaccccttttatctgacttgttgataatgaccttaaaaatgttaggaaatgggccgggcgcggtggctcgtgcctgtaatccagcactttgggaggccgaggcgagcggatcatgaggtcaagagatcgagaccatcctggtcaacatggtgaaaccccgactctactaaaaaaaatacaaaaattagccgggcgtgttggcgggcgcctgtagtcccaactacttgggaggctgaggcaggagaatcacctgaacccaggaggcagaggttgcagtgagcagagattgcgccactgcactccagcctgggcgacagaacgagactccgtctcaaaaaaaaaaaaaaaaaaaaaaggttgggaaatattggtgtataatccccatgtctaacaaggaagaagtcaaaagcaaaagatagtggtattgccgaaaactcattatttctagttagttcatctgtggaaaaggatatcgttcttgaggagaggggttctattatgctatagttttctatggaaatgtacaaatgctttcctcattgctctggatgactatttagtttaaataatatacctttgtcatggggaagaccatgattgtggcttcttctaccccaactttgaatgagagagcactgtaagcagaaactgccatcagtctcctgggcaggacctggaggtaactttctgagctgtaaaatagtaattcctaagagagcttacaaactgcttccacacagaaaatagcgcagggaggacagttattagtacccctattctagaagagaaagctgaggctcaagccattaagtgacttgccaaaagctgtgacatagctgggaagtggcagatttggggatataaccaggtcttgcaagtccagtgctgtctccaaagtagccacgctcacagctgagaacaccttagaggacaatatcgacttcttacagactaccaagcccccagtcatccagggaaattcagagaccaattgactgccaggtggcaaatccacatgtgtactgcggtctttagagatcatttagagcttgcacacatctgtgtcttcttgtgggaaacctctaggtattctgtctgatcagcactgtgaggaagttggtgggaaaaggccactgataagaacaaacaatgggcagaaggaagcacattgcaataaatttccccagagagagttcctttacattccattcaccaaaaacctctctggaactgtcaggttcagaatatcaaccaagaccatatcatttagaattcattggcatgtagaggtgactcgattcctaaaagaagcctctctcccatgaaccacgatgtacgttccacagaggcagaaaccgccgtaggttagcaatgcattttagtctttctctccattcacatttactgagagcacaccacgtgcatgttgctgcaacaggcatttccgatagagccgatccatgagctaacaatgtctgaaaacaaatgttatggaactgttggcatttctgagatttggcctttgccatttgatagactttgcttcccaggatgctgtcattttgtgattttttataattacaaggaatttggtaccatgttgttttcaaaaaacctcctagaaagtctccatgtatgctctagaagttgctctacgtaacagttcagcaagcaagtgttccttctcttgagctgcgtccctcaggaagctgtacctttagggtgtgctttccactttttatttcctctcatttcactcctttcattgtttgctatatcctaaaatatgtgaagtgagagaaaaaatatcatttcttctcattaaatctcctgcattaaatctaagaatcctttaaaataatcacacctgataagtgttttatgcatttccctccctggagtgttatcatccatcaagccagtatcatcatccacctgcttattccttgggactaatgagagccaagttaaatagcaaatgacttctcaccccttcctagtcctcatgcctgaggaataagggcgacattaatgggagcgggagagtggtggctttggttgagatgcacgttcacagactagaaaagtgcctcacctccatggtgtatatgtgccaccttttcttaatccagtctatcattgttggacatttgggttggttccaagtctttgctattgtgaatagtgccgcaataaacataagtgtgcatgtgtctttatagcagcatgatttataatcctttgggtatatacccagtaatgggatggctgggtcaaatggtatttctagttctagatccctgaggaatctccacactgacttccacaatggttgaactagttcacagtcccaccaacagtgtaaaagtgttcttatttctccacatcctctccagcacctgttgtttcctgactttttaatgattgccattctaactggtgtgagatggtatctcatagtggttttgatttgcatttctctgatggccagtgatggtgagcattttttcatgtgtttcttggctgcataaatgtcttcttttgagaagtgtctgttcaatactatgcagccataaaaaatgatgagttcatgtcctttgtagggacatggatgaaattggaaatcatcattctcagtaaactatctcaaggacaaaaaaccaaacaccacatgttctcactcacaggtgggaattgaacaatgagaacacatggacacaggaaggggaacatcacactctggggactgttgtggggtggagggaggagggagggatagcattaggagatatacctaatgctaaatgacgagttaatgggtgcagcacaccagcatggcacatgtatacatatgtaactaacctgcacattgtgcacatgtaccctaaaacttaaagtataataataatgaaataaaattaaaaaaaaaaaagaaaagtgcctcacctccctgtgaggcttgatgaatattgtggccagtgagtggaaaatgattcttgtcgaatagacagagtattcccaccccaggaatggattaatagaagacacaatttgagcacttctcagaattatctagtatgcctgagtagagactcacatgggtggaatctgtgttgtctcatcagagggaataaaaagacaatgaggtggtaaatgtgaaaaaagcagccttttagaaaaacattattttcaaatacctttataaatcatctaatttatcttcacataatataaagaaaaaactaataaaaattttcgtatttcactttacataatatgttctcccatatttagggatcatacaattgtattgtcttcaaaacacacacacacacacatacacacacacacacacacacacacacaccccttccaagaaagctgatccttcagaaaataaatcttatttttaagcacttgggttttcaggccagaaaattaataaatcctaaacctgacccatttttgtaacagctaaaaaggagaagaaaaagctagttaaattttgtgtggatccatttatctcttaaaatatgccaaagcaatttgaggtgggggtggaaacaggtatttatctctcatgcgtgattctctctttatatttctatctgttgggaaaagggtaaagaactattcttggtcattattgatgtattgtgttgccactttgtatggtgcctgctgtgctttatcccgaggcatagcagtaatcgttactatcttgactctttccttcatcacaagagagtaaatatgaagtctgaatgtcgttcctcacccccaaattgtttaactctgcttccaaactagtttaagaaatgcaaaatgggaagagctagcttttcttagatacatttcttccttttttattctttcttgggagacgttaagtataaaagggaaaaagtcagttccttcttctctctctttctctttgggtgacagcaatgctcacttagtaattataaactggaaataggagagtagcttgagcaggttatgatatatctgcccaatgtgtttcattccttcaaacataaactttgagagtaaaagagatttttataatttaaatgccaacgacaggaatggcctcatgttttaactttcaaataataaatggggagttggtatttgggcagagtttgcattttactaatcctatatactttgagcttagtttttagaattgtgtcaaatacatcaacatatcaggattatagtgccaaaaatagttaaagtgccttggtcctccctctgtaggcagcaaattgaaactaacatgggaccatgccatccttctagcataatggagaagtctgaactgaggagtatctttgatgaaagacatttaggaccctagaaactaaatcttgtcaccaagactttatagtaaagtagtagcaaaattatttttaaaagactttcttccttttactacccatttcctctcttgggaaagctgatgagcaaattatccaagactcatttctttattaggcaaagtcagaatatttcccctctgaaaatctgaattatgccctcattctttttcaagaaatatctcaaagagcaaatagaattaaacatgacacttgattgtctgattatttggcatgtataaaattatcatgtggcttaatgtgccttaagtgaaaatttaaacttagacctgaaacctttacagttggatgtagcgttgagcttttgcatgttttctgtataataaaccacttttgttttgtttgttttgtcttttaacctacacctttatcattactctaacagatttagggcttctctttctctacagctaagtaagggaatatgtgcaattatgagacatacaaaaaaggaaagggaaaggactttctaagtagcaaatctgtgccatgaagtagatgtggcgtgaagatacagagcctgaggatagtaattttccctgagccacgcacacaggcttttatttcatgccttttctctttctgtgccgtcacctttgagaaaaacgattgcaccttctccaagtctgcctttttaacagctacagttaagttggcaagacttccccagctctgaatatagccatttgccgactccggcctctttgcgagactgactcaaatctgtgatcttctgttcagcatacacatcagcaaagtgagaagatgagcactaaatataggctctattaactttacttttagatttactgccttcaaaaagtgcctattctgagcaacataaacgttattccttacatatgtatgtacacacggtacccagagtcgtactgtgcagccttcaaaaacataccatcagaaagagtaggtgctgagataaggaaactttgccaaatgaaagaaagtcactcacttccaatatcccctctcaagcggctaccgtgaaacgggctgcaaacacattccctgagcatcccttgctgatacagcttctttatatttatatcctactggatggtagcatattgctaaggtttcctgtactctgcttcaagggaatgtaagctttatggcattgaaacatttagggaaaaaaaagatgtttaagagaattaatagagccgtagtctgtattaggatgtgtgtcatatgtgtgttctataaactaagcatcggtgggtttagagtgttaaagtgtcagcacattccttctccttttgtctctcaggctaacatgagagaaaatagaaaagtcttggctgtggggattggaagctcagggggccaaatgtccttgccagatccttagagcattactttgactcctaaaaatagtagtgtatgttatttgatggcttttgtttccatagttccatcactgacaaaactgtcaatactgttgatggagcagcagcatagcctagagtgatgcattcttacccagaggtggcaataggagagggtccatgtaaataggacgaggtagacagtgcatgattgtaggagaagggttgaagggaggacatgattccaaaaaagatcgttctcaatgtgtcgtctgactcaaccagctggcagattacacttgccaagtcgttccctttccttctaagtcagttggctccatattcacttgaatatgcctctgtttgggcaaagcaagatacctccacttaacctttatccaaggaagctcttggtgtcctcttggtcataaagttgtctcctacctaacccagttttaccaaatggaagtaaaaggggacaaactatggaagatggactccatgccattgcagtcagccaccattctcttttccatataaggagccccattacataagctacgggtgaggttggaacagctatgtttcataatttcaagagtgtgaccaccctgctctagtcatcatcattggatgaatccagttgactctttggcaaaagggtgatacttttcactaaaaatgcctactcttcctgttgatgttccttttctgtttttaccttgtccaatttccacactagtcattttttttattttttagaggatcagattttagcgctggaaaatgagttcaaaaatttcagtgtaatgtcataaggatgttgggatacagagattttttttttccttggaaacaaatggactgggaagaaacacagcatggctttgctctgagtttcaatctgatgattatgaccatggaagatagtcttatgtaaaggttaaatggtgtttacaagtggatagataaggcggagatggtgagaagccgggttttctctatgctaaatgtgtctactaagagcagcacttcctactagctaagcacaatcatagccccaccgtgatgagctgctagtctgaataacattccctgacttagggaaaggcacacaaaaacatataaagaatatgtctattttcatatgtgtgatactgacagagccatggtattcctaaaatataggtttctcttttttcttgtattcttagcaaattgcatttattcactacattacaaaccatcactgatgtatccaaaatagcacacatagttcagtatgaaaataagagaataaaatctgttataagcaagtgatttaggtattttcttttgtgtttatgcattatctgactatattaaaacctgtttttctatttaccttctatcagttttctctaccaattatgttttttcaatgctctataagaatgaatatggaaattatatttcttttttctgtaaaagagttgcaactactttattatatttagaaatccaataaacttcttattacattta

SEQ ID NO: 301536 - DNA, 282 bp, Artificial Sequence
  derived and/or modified sequence
atgagccaccctagttggttgccacctaaatccaccggagaacccctcgggcatgtgcccgctcgcatggaaactacgcatagcttcggcaaccccagcatctccgtatcaacccaacagccccccaaaaaatttgccccagtggtggccccaaagcctaaatacaatccatacaaacagccgggcggtgaaggagacttcctgccccctccacctccacccttggatgactcttccgcattgccctcaatcagcgggaactttcccccacctccgccatag

SEQ ID NO: 301537 - DNA, 456 bp, Artificial Sequence
  derived and/or modified sequence
atgtcccacccgagctggctgcctccaaaatctaccggcgaacccttgggccatgttcccgcccgcatggaaactactcattcatttggaaatccatccataagtgtctcaacccagcagcctcccaaaaagttcgccccagtagtggcacccaaacccaagtataatccatacaaacagccggggggcgaaggtgattttctgcccccaccgccacctcctctggatgattcgagcgcccttccgtctatatccggtaacttcccacccccaccccctctcgacgaggaggcttttaaggttcagggaaatcccgggggaaaaacgctcgaggagagaaggtcttctttagacgcagaaattgatagcctgacgtctatcttagcggacctggagtgctcctctccgtacaagccgcggcccccacagtcaagcaccggctccacagcttcttag

SEQ ID NO: 301538 - DNA, 336 bp, Artificial Sequence
  derived and/or modified sequence
atgagtcatcccagctggctcccgcccaagtccacaggtgagccactggggcacgtgcccgcccggatggaaaccacccactcctttgggaacccatcgattagcgtgagcactcaacaaccacccaagaagttcgcgcccgtcgtggcccctaagccaaagtataatccatataagcagccaggaggagagggggacttcctacctcccccaccccccccactggacgacagtagtgctctcccatcaatcagtgggaactttcctccacctcctccactggatgaggaagccttcaaagtccagggcaatccaggaggtaagactctagaatag

SEQ ID NO: 301539 - DNA, 201 bp, Artificial Sequence
  derived and/or modified sequence
atgagccatccaagctggcttcctccgaagagcaccggcgagcctctgggccacgtcccagcccggatggagaccacccacagctttgggaacccgagtatttcagtgtctacacaacagccaccgaagaagtttgcccctgtggtggcgccaaagccaaaatataacccctataagcagcctggcggcgagggagactag

SEQ ID NO: 301540 - DNA, 162 bp, Artificial Sequence
  derived and/or modified sequence
atgagccaccctagctggttgccgcccaaatccactggcgaacccctggggcatgtgccagcaaggatggaaacaactcacagcttcgggaacccatccatctctgtcagtacccagcaaccaccaaaaaaattcgctcccgtcgtggcacctaaaccctag

SEQ ID NO: 301541 - DNA, 144 bp, Artificial Sequence
  derived and/or modified sequence
atgtcccatccgtcatggctcccccccaaaagtactggggagccgctgggtcatgttcctgcgcggatggagaccacccactcctttggaaacccttctatttcagtgtcaactcagcaaccccccaagaaatttgccccatag

SEQ ID NO: 301542 - DNA, 1287 bp, Artificial Sequence
  derived and/or modified sequence
atgtctcacccatcctggctgccccccaaatcaactggcgaaccgctagggcatgtcccagcacgcatggaaacgacgcactcatttggaaacccaagtatatccgtaagcactcagcagccacctaaaaaattcgcacccgtggtggctccaaagcccaagtataacccctataagcagccagggggggagggagactttttgccaccccccccgccccccctggacgattccagcgctttacctagtatttcgggcaactttccgccgcctccccctctcgacgaggaggccttcaaggtccagggcaaccctggtggaaagacccttgaggaaagaaggtctagcctggatgctgagattgactccctgacgagcattttggccgatttggagtgcagctcaccgtacaaacctcggccgccacagtccagcactggcagcacggcctcaccgccagtaagcactcccgtcacaggccacaagcgcatggtgatccccaaccaacctccgctgacagctaccaaaaaaagcacacttaagcctcagcccgccccgcaggcaggtccgatacccgtggctcccatcggaacgctcaagccacagcctcaaccagttccggcctcctatacaaccgccagcacatcctcccgccccactttcaacgtgcaagtaaagtccgcccagccgtcacctcattacatggctgcccctagctccggacagatctatggctctgggccacaaggctacaatacacagccggtgccggtaagcggccaatgccctcccccgtccacgcgaggcgggatggactatgcatacattccaccgcccggtctccagccagagccaggctacggctacgcccctaatcaaggacgatactacgaaggatactatgcagctgggcctggctatgggggccgaaacgatagtgatccaacctacggccagcagggccatccaaacacgtggaagcgcgagccaggatataccccccctggtgcgggaaatcagaatcctcccggcatgtacccagtgaccgggcctaaaaaaacctatattaccgatccggtgtcagcgccttgtgcgccgccactccaacctaagggtggccacagtggccagctcggtccctcttctgttgccccaagctttcgcccagaggatgaactggagcatctgacgaaaaaaatgctgtacgacatggagaacccaccagcggacgaatatttcggcgagtgggggttggagctgactagtgaagtcactatactactgtag

SEQ ID NO: 301543 - DNA, 198 bp, Artificial Sequence
  derived and/or modified sequence
atgagccatccgtcatggttgcctccaaagagcacaggagaaccactcggacacgtccccgctagaatggagacgacacactccttcggcaacccttccatttccgtctctacacagcagccgcccaaaaaatttgcccctgtcgtggctccaaaaccaaaatataacccgtataagcagccaggcggcgaaggttag

SEQ ID NO: 301544 - DNA, 174 bp, Artificial Sequence
  derived and/or modified sequence
atgtctcatccctcttggctcccacctaagtccacgggtgaacctctcggacatgtacctgctcgcatggaaacaacacacagtttcggcaatcctagcatcagcgtgtctacccaacagcctcccaaaaagtttgctcctgtggtcgccccaaaacccaagtataacccttag

SEQ ID NO: 301545 - DNA, 282 bp, Artificial Sequence
  derived and/or modified sequence
atgagccaccccagctggctgccccccaagagcactggagagcccctgggccacgtgcctgccaggatggagaccacccacagctttggaaaccccagcatctctgtgtccacccagcagccccccaagaagtttgcccctgtggtggcccccaagcccaagtacaacccctacaagcagcctggaggagagggggacttcctgcccccacctcctccacccctggatgacagcagcgccctgcccagcatcagcggcaacttccccccacctccaccctag

SEQ ID NO: 301546 - DNA, 456 bp, Artificial Sequence
  derived and/or modified sequence
atgagccaccccagctggctgccccccaagagcactggagagcccctgggccacgtgcctgccaggatggagaccacccacagctttggaaaccccagcatctctgtgtccacccagcagccccccaagaagtttgcccctgtggtggcccccaagcccaagtacaacccctacaagcagcctggaggagagggggacttcctgcccccacctcctccacccctggatgacagcagcgccctgcccagcatcagcggcaacttccccccacctccacccctggatgaggaggccttcaaggtgcagggcaaccctgggggcaagaccctggaggagaggaggagcagcctggatgctgagattgacagcctgaccagcatcctggccgacctggagtgcagcagcccctacaagcccaggcctccccagagcagcacaggcagcacagccagctag

SEQ ID NO: 301547 - DNA, 336 bp, Artificial Sequence
  derived and/or modified sequence
atgagccaccccagctggctgccccccaagagcactggagagcccctgggccacgtgcctgccaggatggagaccacccacagctttggaaaccccagcatctctgtgtccacccagcagccccccaagaagtttgcccctgtggtggcccccaagcccaagtacaacccctacaagcagcctggaggagagggggacttcctgcccccacctcctccacccctggatgacagcagcgccctgcccagcatcagcggcaacttccccccacctccacccctggatgaggaggccttcaaggtgcagggcaaccctgggggcaagaccctggagtag

SEQ ID NO: 301548 - DNA, 201 bp, Artificial Sequence
  derived and/or modified sequence
atgagccaccccagctggctgccccccaagagcactggagagcccctgggccacgtgcctgccaggatggagaccacccacagctttggaaaccccagcatctctgtgtccacccagcagccccccaagaagtttgcccctgtggtggcccccaagcccaagtacaacccctacaagcagcctggaggagagggggactag

SEQ ID NO: 301549 - DNA, 162 bp, Artificial Sequence
  derived and/or modified sequence
atgagccaccccagctggctgccccccaagagcactggagagcccctgggccacgtgcctgccaggatggagaccacccacagctttggaaaccccagcatctctgtgtccacccagcagccccccaagaagtttgcccctgtggtggcccccaagccctag

SEQ ID NO: 301550 - DNA, 144 bp, Artificial Sequence
  derived and/or modified sequence
atgagccaccccagctggctgccccccaagagcactggagagcccctgggccacgtgcctgccaggatggagaccacccacagctttggaaaccccagcatctctgtgtccacccagcagccccccaagaagtttgccccctag

SEQ ID NO: 301551 - DNA, 1287 bp, Artificial Sequence
  derived and/or modified sequence
atgagccaccccagctggctgccccccaagagcactggagagcccctgggccacgtgcctgccaggatggagaccacccacagctttggaaaccccagcatctctgtgtccacccagcagccccccaagaagtttgcccctgtggtggcccccaagcccaagtacaacccctacaagcagcctggaggagagggggacttcctgcccccacctcctccacccctggatgacagcagcgccctgcccagcatcagcggcaacttccccccacctccacccctggatgaggaggccttcaaggtgcagggcaaccctgggggcaagaccctggaggagaggaggagcagcctggatgctgagattgacagcctgaccagcatcctggccgacctggagtgcagcagcccctacaagcccaggcctccccagagcagcacaggcagcacagccagcccccctgtgtccacccctgtgacaggccacaagaggatggtgatccccaaccagccccccctgacagccaccaagaagagcaccctgaagccccagcctgccccccaggccggccccatccctgtggcccccatcggcaccctgaagccccagccccagcctgtgcctgccagctacaccacagccagcaccagcagccggcccaccttcaacgtgcaggtgaagagcgcccagcccagcccccactacatggccgcccccagcagcggccagatctacggcagcggcccccagggctacaacacccagcctgtgcctgtgtctggccagtgccccccacccagcacccggggcggcatggactatgcctacatccccccacctggcctgcagcctgagcccggctacggctacgcccccaaccagggccgctactatgagggctactatgctgctggccctggctatggaggaagaaatgacagcgaccccacctacggccagcagggccaccccaacacctggaagcgggagcccggctacaccccacctggagctggcaaccagaaccccccaggcatgtaccctgtgacaggccccaagaagacctacatcacagatcctgtgtctgccccctgtgccccacccctgcagcccaagggcggccacagcggccagctgggccccagctctgtggcccccagcttccggccagaagatgagctggagcacctgaccaagaagatgctgtatgacatggagaaccccccagcagatgagtactttggagagtggggcctggagctgaccagcgaggtgaccatcctgctgtag

SEQ ID NO: 301552 - DNA, 198 bp, Artificial Sequence
  derived and/or modified sequence
atgagccaccccagctggctgccccccaagagcactggagagcccctgggccacgtgcctgccaggatggagaccacccacagctttggaaaccccagcatctctgtgtccacccagcagccccccaagaagtttgcccctgtggtggcccccaagcccaagtacaacccctacaagcagcctggaggagagggctag

SEQ ID NO: 301553 - DNA, 174 bp, Artificial Sequence
  derived and/or modified sequence
atgagccaccccagctggctgccccccaagagcactggagagcccctgggccacgtgcctgccaggatggagaccacccacagctttggaaaccccagcatctctgtgtccacccagcagccccccaagaagtttgcccctgtggtggcccccaagcccaagtacaacccctag

SEQ ID NO: 301554 - DNA, 5835 bp, Artificial Sequence
  derived and/or modified sequence
atttctcttccgagagcttcagtttcctcacgtgccaagcggacgggttggaagttggtctttgccagctctgacaccttcattgcagttggctgaaccttgtgtcaaccatccattccaggagccagctatctgagattccaacaatgtctcacccatcttggctgccacccaaaagcactggtgagcccctcggccatgtgcctgcacggatggagaccacccattcctttgggaaccccagcatttcagtgtctacacaacagccacccaaaaagtttgccccggtagttgctccaaaacctaagtacaacccatacaaacaacctggaggtgagggtgattttcttccacccccacctccacctctagatgattccagtgcccttccatctatctctggaaactttcctcctccaccacctcttgatgaagaggctttcaaagtacaggggaatcccggaggcaagacacttgaggagaggcgctccagcctggacgctgagattgactccttgaccagcatcttggctgaccttgagtgcagctccccctataagcctcggcctccacagagctccactggttcaacagcctctcctccagtttcgaccccagtcacaggacacaagagaatggtcatcccgaaccaaccccctctaacagcaaccaagaagtctacattgaaaccacagcctgcaccccaggctggacccatccctgtggctccaatcggaacactcaaaccccagcctcagccagtcccagcctcctacaccacggcctccacttcttcaaggcctacctttaatgtgcaggtgaagtcagcccagcccagccctcattatatggctgccccttcatcaggacaaatttatggctcagggccccagggctataacactcagccagttcctgtctctgggcagtgtccacctccttcaacacggggaggcatggattatgcctacattccaccaccaggacttcagccggagcctgggtatgggtatgcccccaaccagggacgctattatgaaggctactatgcagcagggccaggctatgggggcagaaatgactctgaccctacctatggtcaacaaggtcacccaaatacctggaaacgggaaccagggtacactcctcctggagcagggaaccagaaccctcctgggatgtatccagtcactggtcccaagaagacctatatcacagatcctgtttcagccccctgtgcgccaccattgcagccaaagggtggccattcagggcaactggggccttcgtcagttgccccttcattccgcccagaggatgagcttgagcacctgaccaaaaagatgctgtatgacatggaaaatccacctgctgacgaatactttggtgagtggggcctagagctgacttctgaagtaactatcttgctctgatttccttccttagtaattggaactattatcagctccactggtaaagtatttgagtccagatgcatgagagttgatatacatccccgcacaactaagtaattgtaggatttgcatttgcaagactgccatagatgtgatgtctacttagcttatactaaaatttcagtggtccttagagtttccttagatacaaattttattgttgagacttattttttaccagtctaggcaacatggggagaccctgtctccattaaaaatacaaaaattagctgagtgtggtggcatgtgcctgcagtcccagctactcagaaggctgaggctggagaatcacctgagcctgggaggtcgaggctgcagtgagctgtggctcagtgagctgtggttgtgccactgcactccagcctggacaacagagtgagaccctgtttttttgttttttgtttttgtttttgttttttgttttaaaaaagaagacattttttgacaacttattagcttcccattaggcagaaataggatttctgtgtatgttcccatttctcactggtctaaagattcaagtaaaaaatgtggaattggatattgtctgatatccaatttccagattgtactcttaatttttttttctatctcagttgaagaaatgatgttttctttgtagttttaattttcccctcttcaaacttgttaataactaggaatggttaatccttccaatccatgaatataatgcaaatttatgaattatatgccgattgtgaggttctgtggacgcataacctgtcctcagtgaggttaaaattgttcagaaagaggtaagacaagcatacaaataattactagtctaggtagaaagtgataaaagacatgagaaggcttaggtcaattgttgcaaattttatttttattttattttattttatttatttttgagacagagccttgctctgtcacccaggctagagtatactggcgtgatcttggctcactgcaacctccacctccggattttgagcaattctcctgcctcagcctcccgagtagctgggattacaggtgcccaccgccacacctggctagtttttgtatttttagtagagacgaggtttcgccatgttggccaggctggtcttgaactcctgacctcaggtgatccacccgcctcagcctcccaaagtgctgggattacaggtgtgagccactgcgcccggccagaagttttaaaagctccatttattaggagcatccggaatactttggtaaagaattggtggcacttgaatctgagccctttaaaccagtgcctttcacattttctgtggtagaagaccattttcctcccaatctgttggagaccagtatttttgttgagtcagttaaaattaattactagggaaataaaagacacaaaataaaatggaagatgaaattttatcattattagagttaactgttaacgaattactcttttaaatttttatactagtttctaaatattaatcctttgttcctgtatttatctcatccagggtgataagcatttcttagacacccatccatggaccactttttgagtggcactgctttaaggacaaatagagaaacgacatttggggaacagtattagtaaaggcacaaagatggggaaattgcacaggatttttgcttcttcaaatattttctattttcatgtcttttttgctcctatatgggaatatgtaatgacaggtcaactgaccacaccagtccaaaaacacacagtagatgaagtaggaggtattaggatatgaaaaccctggcttttatttgtgttggggtggcagtttagcttagctaaaagagcaaaaagagtgggaatgaaacatctggttgtggtctcttctctgtccctcgctggccaagcaatactggcatgtcacccatctgcctgagccccatttcccacctcactatatcaacggttggggcaaatgttctctagcatttctttcaacagtaataagttcaatgtacaaacatccttaatctaaagtataacaataaagctaaacataaattgatggagattaacaacaatgcatggagaacagtaaaacaaaacatagaaaatccacgaaggtttctagttacatcaaaatacacaaaaagtttattaatgctcttgtcattgccatgtgaggagggtttataatggggtctaaaatacattttttaaaagtgaaaaataaggtctctgtatttaggtcctattaaaaaggaaaagctgacttaccaagtatatatgcttcaaatatcatagcaacaaaatatattgccacaaaaaaaaaactgaacatagatgctaattgcatgaatgaatatatattgaacactctgggaaacagatataaattattacctttcccttcaagaactgtccaagctctactacttagtagcttagaaaacttgaacaagtattattccctctaaaccttcatttttgttttgttttatctgtaatatgggaataataactagcttatactgttgttttaagaaatggatgaaatatttatacaaagcacttagccaagttcttggcatgtagaatatgctcaatacaatactcaaggttctcccatgctcttggggcttatagtttatttaagacataagatatgctcgttaaaaatccattaataatgctcaatttaagtttaagttcctagcaacaatagaacgtatgtcactggtaagtaatcattgccaaatggggatgaataaccatttgagaatttggaaaaatggctaacttttattgagtgcttatgatatggcagcactatattttatttacattataggaattaactcatttcactcttataggaaaacataaccctgtgaaatagatactattatcattttcagattttgaaattaaggcacagaaatattaatttgcctaatgtcaacagctaatacattgcagaactgaattagaatgcagatctgtacatttacacaccacactgtaaaagatggggaaagctagccaggctacatatttagaagagtgtttatggtggagattagctttggacagatgggaaataagagatgagcattctcttctaggtacacagaattaacaaaatataagttgaggccaggattatttaaagaaaatttacgttatgtagaaaacaaaaaaaaaagtgcctatggtaatattcaggctgctctgctaggtggtggtgggggtagatgtgggtcttacctttgaagttcttatagtctaataggatatgtgtacagagttatggtgttataagcacaaggcagaaagtgacaagtgacttaatcaatgttcaccaagtgttctttgagaattcagaaaaaggaaagagaaaatcaagagagagaaatggaaaagtatttatggaatacttagcctttgagtaagtctttaaaattgtgctaattgagatttggaagtaggaagatagtagagaagtgaagtcatttctcatgaggggagtttttgacataacagggaataaaaccactggagtgaagtgtccacgtgagaagtagcaaatattgggaaataaggttcaagtagtaggttaggaccaatctagggaaggctgtcaatgtccggctaaaggctaagaacgttattgtctataatgagcccttgcacattgagatcacatgccatgagaactgctctgtggatagtggttaaaaacatgcactccagagccaggatgcacttcttaccagcaagatgaaatcaagaggcaaaggactagtgaaaagaactgtcctttattgttccgtgctttaaacatttctcaagcaccttctctgtgcctgctactgtgctgggtgttcaggacacccaaatgcagaggctctgccctcatggggctcacgggttcctaggaaggacaagagagtcacagatgtcaaggattttagtgcagatattagcactgtgttgggtgtgactgagctgctatgtgagagtccataagtctgcctgaggatgagcggaaagaatacatagcagtgtgtttgcatcagcagggcctgacccaagagcgataaagtcttctcttcctttctgtcagagttttacctttggcctattctggactgcaaatagcattgccaagcacttcccttaaataacttctcttttttgcaggactatcctctcagccctgccaaaaccccatcacctactctttctttactactttgcctatttaatgctggaatttttatttaaactgtagctgatttactgaaggtaattaagtgctttcatgctgtagatctcctgctagactacaggctgtacttgggagtgagagtgaacaaaatgtaaataaatgatgtcaacaga

SEQ ID NO: 301555 - DNA, 282 bp, Artificial Sequence
  derived and/or modified sequence
atgagccaccccagctggctgccccccaagagcaccggcgagccccttgggcacgtccctgctcgtatggaaaccactcactcttttggcaatccgagtataagcgtcagcacacaacagccaccaaaaaagtttgctcccgtggttgcccctaagcctaagtataacccatacaaacaaccgggaggggaaggggatttcttacccccaccccccccaccgctggatgatagctcggccctgccaagtatctccggtaacttcccccccccaccaccttag

SEQ ID NO: 301556 - DNA, 456 bp, Artificial Sequence
  derived and/or modified sequence
atgagccaccccagctggctgccccccaagagcaccggcgagccccttggacacgtgcccgccaggatggaaactactcacagctttggaaacccatcaatctctgtgtcaacacagcaaccccctaaaaaattcgcacccgttgtcgctcccaagcctaaatataatccgtacaagcagccgggcggagagggcgactttttaccccccccacccccccccctagacgattcctccgccctcccttccatttccgggaattttccccccccaccgcccctcgatgaggaggcattcaaggtacagggtaatcctgggggcaagacgttggaggagcggcggtcctctctggacgccgagattgactccctgaccagcattttggctgatctggagtgcagttctccatataaacctcggcccccgcaaagctccaccggatccactgcctcttag

SEQ ID NO: 301557 - DNA, 336 bp, Artificial Sequence
  derived and/or modified sequence
atgagccaccccagctggctgccccccaagagcaccggcgagcccctcggacacgtgcccgcgcgaatggaaaccacgcacagtttcggcaacccctcgatttcggtgtctacacagcaaccacccaagaagttcgcacccgtggtagctccaaaacccaaatataatccctataaacagcccggcggagagggagacttcctgccaccaccaccccctccgttggatgatagctcagcacttccctctatcagcggcaactttcctccccctccccccttggatgaggaagcattcaaagtgcaaggaaaccctgggggaaagacactggagtag

SEQ ID NO: 301558 - DNA, 201 bp, Artificial Sequence
  derived and/or modified sequence
atgagccaccccagctggctgccccccaagagcaccggcgagcccttgggccatgtccccgccaggatggagaccacacattcattcggaaatcccagcatcagcgtgtctacccaacagccgccgaaaaagtttgctcccgtcgttgcacccaaacccaaatataatccatataaacagcccgggggagagggcgactag

SEQ ID NO: 301559 - DNA, 162 bp, Artificial Sequence
  derived and/or modified sequence
atgagccaccccagctggctgccccccaagagcaccggcgagccccttggtcatgtccctgctaggatggagacaacccatagctttggaaatcccagcattagcgtatcaacccagcaacccccaaaaaagttcgcgccagtggtagcccccaaaccttag

SEQ ID NO: 301560 - DNA, 144 bp, Artificial Sequence
  derived and/or modified sequence
atgagccaccccagctggctgccccccaagagcaccggcgagcccttgggtcatgtacccgctagaatggaaaccactcacagtttcggcaatccctctatctccgtgagcacacagcagcctcccaaaaagttcgctccatag

SEQ ID NO: 301561 - DNA, 1287 bp, Artificial Sequence
  derived and/or modified sequence
atgagccaccccagctggctgccccccaagagcaccggcgagcccctgggccacgtacctgcccggatggagaccacccatagttttggcaatccgtccatctctgtgagcacccaacaaccaccaaagaagtttgctccagtggtggcacccaagccaaaatacaacccctacaagcagccagggggggagggggacttcttgccgccgcctcccccacctctagacgactcaagtgcgttaccaagtatctccggaaatttccccccacccccccctctcgacgaagaggcttttaaagtccagggcaaccccggaggaaagaccctggaagagaggcgaagctctctggatgccgaaatagacagtctcacaagcatcttagctgatctagagtgtagcagtccatacaaacccaggccaccgcagtcaagcaccggaagtactgctagtccacctgttagtacccctgtgaccggccacaaacggatggttatacccaaccagccgcccctaacagccacaaagaaatctactctcaagccgcaacctgcccctcaagcaggaccaattcctgtggcacctatagggaccctaaaaccgcaacctcagcccgttcctgcttcctacacaactgctagcactagctctcgccccacctttaatgtgcaagtgaaatccgcccaaccgagtcctcactacatggctgcaccatcttctgggcagatatacggatctggtccacagggctataacacacagcccgtgcctgtgtcaggacaatgcccaccaccaagcacccgcggagggatggattatgcttacatcccacctccaggcttgcagccggagcccggatacggttacgccccaaatcagggtaggtactacgagggctattacgcagcagggccaggctacggcggacggaatgactccgaccctacttacgggcaacagggccatcctaatacctggaaaagagagcctggatacacccctccaggcgcaggcaaccagaacccaccagggatgtaccccgtgactgggccaaagaagacctatattaccgatcctgtgtccgccccttgcgctccccccttacagcccaaaggcggccactcaggtcaactggggccgtcatccgtagctccttccttccgtcccgaggatgagttagaacacctgactaaaaagatgttgtacgatatggaaaacccccccgcggacgaatacttcggagaatggggcctggagctgacaagtgaagtcactatactgctctag

SEQ ID NO: 301562 - DNA, 198 bp, Artificial Sequence
  derived and/or modified sequence
atgagccaccccagctggctgccccccaagagcaccggcgagcccttgggtcacgtacctgctcggatggagaccacccatagctttgggaatccaagtatctcggtgtccactcagcagccgccgaagaaatttgcacctgtagtagctccaaaacctaagtataacccatacaagcagcccggaggcgaagggtag

SEQ ID NO: 301563 - DNA, 174 bp, Artificial Sequence
  derived and/or modified sequence
atgagccaccccagctggctgccccccaagagcaccggcgagccccttgggcatgttccggcaaggatggagaccactcacagcttcgggaatccctctataagcgtcagtacacaacaaccacccaaaaaattcgcacctgtggttgctcctaaaccgaaatataacccttag

SEQ ID NO: 301564 - DNA, 282 bp, Artificial Sequence
  derived and/or modified sequence
atgagccacccttcctggctgccacccaagtccaccggcgaacctttggggcacgtacccgctagaatggaaaccacccatagtttcgggaacccaagtatcagtgtgagcacacaacaaccgcctaagaagtttgccccagtcgtagcgcctaagccaaaatacaatccttacaagcagccgggtggggagggggattttctgcctccgccacctcccccattggatgattcgtctgcgctccccagcatctccgggaattttccacctcctcctccatag

SEQ ID NO: 301565 - DNA, 456 bp, Artificial Sequence
  derived and/or modified sequence
atgagccaccccagctggcttccaccaaagtctaccggagagcctctaggtcacgtccctgccagaatggagacaacacatagctttggcaatccctcaatctcggtgtctacacaacaaccacccaaaaaatttgctcctgttgtcgccccaaagcctaagtataatccttataaacagccaggaggcgagggagacttcctcccccctcctcccccacccctggacgactcatccgctctcccatctatttccgggaacttccctcctcctcctcccctcgacgaggaagccttcaaagtgcagggcaaccctggtgggaaaacactggaggaacgccgatcttccctggacgccgaaatcgattctctgacttctatcctggcagacctggaatgttctagtccttataaacctcgtcctccgcagtcgtccaccggtagcacagcatcctag

SEQ ID NO: 301566 - DNA, 336 bp, Artificial Sequence
  derived and/or modified sequence
atgtcccacccctcttggctccctccgaaatcaacaggcgagcctctgggacatgtgccagctcggatggagaccactcattcgtttggcaatccctccatctccgtgagtactcaacagccacccaaaaaattcgcacccgtcgtcgcccctaaacccaagtataatccctacaagcagcccggaggcgagggcgatttcttgcccccaccccctcccccactcgacgatagctctgctctgccgagcatctccggcaacttcccacctcccccacccttggacgaggaagcattcaaggtgcaggggaacccaggagggaaaacacttgaatag

SEQ ID NO: 301567 - DNA, 201 bp, Artificial Sequence
  derived and/or modified sequence
atgtcccatcccagttggctaccacctaagtctactggtgaacctctagggcatgtgccagccaggatggaaactactcacagttttggcaatccctccatttccgtgtcaactcaacagcccccaaagaagttcgctcctgtggtggctcctaaaccaaagtataatccttacaagcagccgggaggagagggcgactag

SEQ ID NO: 301568 - DNA, 162 bp, Artificial Sequence
  derived and/or modified sequence
atgtctcatccatcctggctgccccctaagtccacaggcgaacctctgggacacgtccccgcaagaatggagacaacccattccttcggaaacccgtccattagtgtaagtacccaacagccccctaaaaagtttgcccctgtcgtcgcccctaaaccctag

SEQ ID NO: 301569 - DNA, 144 bp, Artificial Sequence
  derived and/or modified sequence
atgtcccacccaagttggctaccgccaaagagtactggggaaccactcggccacgtcccagctaggatggaaactactcactcctttggcaatccttctatttcagtaagtacccagcaaccccctaagaaattcgccccatag

SEQ ID NO: 301570 - DNA, 1287 bp, Artificial Sequence
  derived and/or modified sequence
atgtctcatccgagctggctccctccaaagagcactggcgaaccactgggacacgtgccggcaagaatggagactacacactccttcggaaaccctagcataagtgtgagtacacaacagccacccaaaaaattcgcacctgtggtggctccaaagcctaagtataacccgtacaagcagcctgggggagagggcgactttctccctccccctcctccccctctggatgactcctcagcccttcctagcatctctggcaactttcccccacctccaccgctggatgaagaggctttcaaggtgcagggcaatccaggaggaaagaccctggaggagcgacggagtagccttgatgccgagattgacagcctcacaagtattctcgccgatctagagtgtagttcaccttataaaccacggccaccccaaagcagcacaggtagtaccgccagccccccagttagtacgccagtcactggccacaaacgcatggtcatccctaaccagcccccacttaccgccaccaagaaatccacgctgaagccccagccagcaccgcaggcgggtccgataccagtcgcccctatagggacactgaagccacaacctcagccagtgcccgcatcctatacaacggcctccactagctccagacctacattcaacgtgcaggtgaaatccgctcagccttccccacactatatggccgcaccatcatccggtcagatctatggttctggcccacaaggatacaacacacaacctgtgcctgtgtctggccagtgccctccaccctcgacaagggggggaatggattatgcatacatcccccctccgggtctacagcccgagccaggctatggctacgcaccaaatcagggacgttattatgaagggtactatgccgctggccctggatatggtggaagaaacgacagtgaccctacttacggccaacaggggcaccccaatacttggaagcgcgagccaggctataccccccctggggctggcaatcagaacccccctggcatgtatcccgttacgggtcccaagaagacctatataacagacccagtttcagccccttgtgcccctcccctgcaacccaagggcggacactcaggccaactaggtccctccagtgttgccccatcctttagaccggaggacgaacttgagcacttaaccaagaagatgctttacgacatggaaaatccacccgctgatgagtactttggagagtggggcctggagctgacgagcgaggttactatactgttgtag

SEQ ID NO: 301571 - DNA, 198 bp, Artificial Sequence
  derived and/or modified sequence
atgtctcatccgagctggctgcctcctaagtcaactggggagcccctgggacacgtgcctgccagaatggagaccacacactccttcggaaatcctagtatttccgtgtcaacccaacagcctccaaagaagttcgccccagtggtcgccccaaaacccaagtataacccctacaagcagccaggaggcgagggatag

SEQ ID NO: 301572 - DNA, 174 bp, Artificial Sequence
  derived and/or modified sequence
atgtctcatccaagttggctgcctccaaagtcaacgggagaacctctgggccatgtccctgcaaggatggagactacacattcgttcgggaacccctctatctctgtaagcacccaacagccaccaaagaaatttgctcctgtggtggcacccaaacccaagtacaatccgtag

SEQ ID NO: 301573 - DNA, 282 bp, Artificial Sequence
  derived and/or modified sequence
atgagccaccccagctggctgccccccaagagcaccggcgagcccctgggccacgtgcccgccagaatggagaccacccacagcttcggcaaccccagcatcagcgtgagcacccagcagccccccaagaagttcgcccccgtggtggcccccaagcccaagtacaacccctacaagcagcccggcggcgagggcgacttcctgccccccccccccccccccctggacgacagcagcgccctgcccagcatcagcggcaacttcccccccccccccccctag

SEQ ID NO: 301574 - DNA, 456 bp, Artificial Sequence
  derived and/or modified sequence
atgagccaccccagctggctgccccccaagagcaccggcgagcccctgggccacgtgcccgccagaatggagaccacccacagcttcggcaaccccagcatcagcgtgagcacccagcagccccccaagaagttcgcccccgtggtggcccccaagcccaagtacaacccctacaagcagcccggcggcgagggcgacttcctgccccccccccccccccccctggacgacagcagcgccctgcccagcatcagcggcaacttccccccccccccccccctggacgaggaggccttcaaggtgcagggcaaccccggcggcaagaccctggaggagagaagaagcagcctggacgccgagatcgacagcctgaccagcatcctggccgacctggagtgcagcagcccctacaagcccagacccccccagagcagcaccggcagcaccgccagctag

SEQ ID NO: 301575 - DNA, 336 bp, Artificial Sequence
  derived and/or modified sequence
atgagccaccccagctggctgccccccaagagcaccggcgagcccctgggccacgtgcccgccagaatggagaccacccacagcttcggcaaccccagcatcagcgtgagcacccagcagccccccaagaagttcgcccccgtggtggcccccaagcccaagtacaacccctacaagcagcccggcggcgagggcgacttcctgccccccccccccccccccctggacgacagcagcgccctgcccagcatcagcggcaacttccccccccccccccccctggacgaggaggccttcaaggtgcagggcaaccccggcggcaagaccctggagtag

SEQ ID NO: 301576 - DNA, 201 bp, Artificial Sequence
  derived and/or modified sequence
atgagccaccccagctggctgccccccaagagcaccggcgagcccctgggccacgtgcccgccagaatggagaccacccacagcttcggcaaccccagcatcagcgtgagcacccagcagccccccaagaagttcgcccccgtggtggcccccaagcccaagtacaacccctacaagcagcccggcggcgagggcgactag

SEQ ID NO: 301577 - DNA, 162 bp, Artificial Sequence
  derived and/or modified sequence
atgagccaccccagctggctgccccccaagagcaccggcgagcccctgggccacgtgcccgccagaatggagaccacccacagcttcggcaaccccagcatcagcgtgagcacccagcagccccccaagaagttcgcccccgtggtggcccccaagccctag

SEQ ID NO: 301578 - DNA, 144 bp, Artificial Sequence
  derived and/or modified sequence
atgagccaccccagctggctgccccccaagagcaccggcgagcccctgggccacgtgcccgccagaatggagaccacccacagcttcggcaaccccagcatcagcgtgagcacccagcagccccccaagaagttcgccccctag

SEQ ID NO: 301579 - DNA, 1287 bp, Artificial Sequence
  derived and/or modified sequence
atgagccaccccagctggctgccccccaagagcaccggcgagcccctgggccacgtgcccgccagaatggagaccacccacagcttcggcaaccccagcatcagcgtgagcacccagcagccccccaagaagttcgcccccgtggtggcccccaagcccaagtacaacccctacaagcagcccggcggcgagggcgacttcctgccccccccccccccccccctggacgacagcagcgccctgcccagcatcagcggcaacttccccccccccccccccctggacgaggaggccttcaaggtgcagggcaaccccggcggcaagaccctggaggagagaagaagcagcctggacgccgagatcgacagcctgaccagcatcctggccgacctggagtgcagcagcccctacaagcccagacccccccagagcagcaccggcagcaccgccagcccccccgtgagcacccccgtgaccggccacaagagaatggtgatccccaaccagccccccctgaccgccaccaagaagagcaccctgaagccccagcccgccccccaggccggccccatccccgtggcccccatcggcaccctgaagccccagccccagcccgtgcccgccagctacaccaccgccagcaccagcagcagacccaccttcaacgtgcaggtgaagagcgcccagcccagcccccactacatggccgcccccagcagcggccagatctacggcagcggcccccagggctacaacacccagcccgtgcccgtgagcggccagtgccccccccccagcaccagaggcggcatggactacgcctacatccccccccccggcctgcagcccgagcccggctacggctacgcccccaaccagggcagatactacgagggctactacgccgccggccccggctacggcggcagaaacgacagcgaccccacctacggccagcagggccaccccaacacctggaagagagagcccggctacaccccccccggcgccggcaaccagaacccccccggcatgtaccccgtgaccggccccaagaagacctacatcaccgaccccgtgagcgccccctgcgccccccccctgcagcccaagggcggccacagcggccagctgggccccagcagcgtggcccccagcttcagacccgaggacgagctggagcacctgaccaagaagatgctgtacgacatggagaacccccccgccgacgagtacttcggcgagtggggcctggagctgaccagcgaggtgaccatcctgctgtag

SEQ ID NO: 301580 - DNA, 198 bp, Artificial Sequence
  derived and/or modified sequence
atgagccaccccagctggctgccccccaagagcaccggcgagcccctgggccacgtgcccgccagaatggagaccacccacagcttcggcaaccccagcatcagcgtgagcacccagcagccccccaagaagttcgcccccgtggtggcccccaagcccaagtacaacccctacaagcagcccggcggcgagggctag

SEQ ID NO: 301581 - DNA, 174 bp, Artificial Sequence
  derived and/or modified sequence
atgagccaccccagctggctgccccccaagagcaccggcgagcccctgggccacgtgcccgccagaatggagaccacccacagcttcggcaaccccagcatcagcgtgagcacccagcagccccccaagaagttcgcccccgtggtggcccccaagcccaagtacaacccctag

SEQ ID NO: 301582 - DNA, 777 bp, Artificial Sequence
  derived and/or modified sequence
atgagacaaatgatcaggtctttctccgaacccttcgggagagatctgctgagtattagtgatgggcgtggccgagctcataacaggagagggcacaatgatggagaggactctttgactgcaacaagctgttcactggtcccattcggcgacttcggtggcatgcataccgacgtctcctctttccagactatggaccagatggtatcaaacatgcgcaactacatgcagaagctggagcgcaactttgggcagctcagcgttgatcccaatgggcattccttttgttcctcatccgtcatgacttactcaaagatcggcgatgaaccacctaaggttttccaagcgagtactcagacccggcgagcccccggcggtattaaggaaacccggaaggcaatgagagattctgatagcggtcttgaaaaaatggcgattggtcatcatattcatgacagggcccacgtgataaaaaaatccaagaataagaagacaggagatgaggaggtgaatcaggaattcataaatatgaacgagagtgatgctcacgctttcgatgaggagtggcaaagcgaggtattgaaatacaagccaggacgccataacctgggaaacactagaatgcgcagcgtgggacacgagaatccaggtagtcgcgaacttaaaagaagagaaaagccacagcagtctcccgcaatcgagcacgggcgcaggtctaatgtcttgggagataagctgcatatcaaaggcagctctgtgaaatctaataagaaatag

SEQ ID NO: 301583 - DNA, 777 bp, Artificial Sequence
  derived and/or modified sequence
atgcgacagatgatccgcagtttcagtgaaccttttggcagagaccttctctcaatctctgatggccgcggcagagcccacaataggagaggacacaatgatggcgaggatagccttaccgctacttcgtgtagtttggtccccttcggcgactttggaggaatgcatacagacgtctcctcctttcagactatggaccagatggtatccaatatgcggaattatatgcagaaactggaacgcaacttcggccaattatccgtcgatcctaatggccactcattttgctcatctagcgtgatgacctatagcaagatcggggatgaaccgcccaaagtctttcaagcttcgactcagacccgcagagcacctggtggaataaaggagacccggaaggctatgagggactctgacagtggactagagaagatggctataggtcaccacatccacgatcgcgctcacgttataaaaaaatccaagaacaaaaagacgggcgacgaggaagttaaccaggagttcattaacatgaatgagtccgacgcgcatgccttcgacgaagagtggcagtccgaagttctgaaatacaaaccaggtcgccataatttaggcaacactcgcatgagatctgttggccacgagaatccgggaagccgggaactaaagcgacgagagaagcctcagcagagtcctgcaattgagcacggaagacgcagtaatgtgctcggtgataaactccatattaagggatcctcagtgaagtctaacaagaaatag

SEQ ID NO: 301584 - DNA, 777 bp, Artificial Sequence
  derived and/or modified sequence
atgaggcagatgatccgctccttcagcgagcccttcggccgggacctgctgagcatcagtgatggccggggccgggcccacaacagaagaggccacaatgatggagaggacagcctgacagccaccagctgcagcctggtgccctttggagactttggaggcatgcacacagatgtgtcctccttccagaccatggaccagatggtgagcaacatgaggaactacatgcagaagctggagaggaactttggccagctgtctgtggaccccaacggccacagcttctgcagcagctctgtgatgacctacagcaagattggagatgagccccccaaggtgttccaggccagcacccagacccggcgggcccctgggggcatcaaggagaccaggaaggccatgagggacagcgacagcggcctggagaagatggccatcggccaccacatccatgaccgggcccacgtgatcaagaagagcaagaacaagaagacaggagatgaggaggtgaaccaggagttcatcaacatgaatgaaagtgatgcccacgcctttgatgaggagtggcagagcgaggtgctgaagtacaagccaggccgccacaacctgggcaacaccaggatgaggtctgtgggccacgagaaccctggcagccgggagctgaagagaagagagaagccccagcagagccctgccattgaacatggaagaagaagcaatgtgctgggggacaagctgcacatcaagggcagctctgtgaagagcaacaagaagtag

SEQ ID NO: 301585 - DNA, 777 bp, Artificial Sequence
  derived and/or modified sequence
atgcggcagatgatccggagcttcagcgagcccttcggccgggacctactgtccattagcgacgggcgaggcagagcgcacaataggcgtggacacaatgatggggaagactccctgaccgccacctcctgttctttagttccctttggagacttcggcggcatgcatactgatgtgagttctttccaaacaatggatcaaatggtcagtaatatgcgcaattacatgcagaagctcgagaggaatttcggacagctgagcgtcgatccaaatggacattccttctgctcaagctccgtgatgacctacagcaaaatcggagacgagccaccaaaagttttccaggcctctacccaaactaggagagctcctggggggataaaggagactaggaaagctatgagggactctgattccgggctagaaaagatggcaatcggccaccacattcatgatcgcgctcacgtgatcaagaagagtaaaaataagaaaaccggcgacgaggaggttaaccaagaattcatcaacatgaacgagtctgatgctcacgcgtttgacgaagaatggcaaagcgaagttctcaagtataagccaggacggcataatctaggcaacacacgaatgagatcagtcgggcacgagaatcccgggtctcgcgagctcaaacgccgtgaaaagcctcagcagtcaccggcgatcgaacacgggcggcgctccaacgtgctaggggacaagctgcacattaaggggtccagtgtcaagagcaacaagaagtag

SEQ ID NO: 301586 - DNA, 777 bp, Artificial Sequence
  derived and/or modified sequence
atgcggcagatgatccggagcttcagcgagcccttcggccgggacctactaagtatttcagacggcaggggtagggcacacaacagaaggggccacaacgatggggaggattcgcttaccgccacatcctgcagtctggtgccatttggcgactttggcggtatgcatactgatgtttccagtttccagacaatggaccagatggtgagcaatatgcgcaactatatgcagaagttggaaagaaacttcggccaactgagcgtcgatccaaatggccacagtttttgcagcagcagcgttatgacgtactctaagataggagacgagccacccaaggtcttccaggcttctacacagacccggagggccccgggtggtattaaggagacaagaaaggccatgcgggattcagacagcggtttagaaaagatggccatcgggcaccacattcacgaccgagcacacgtaattaagaaatccaaaaataagaagacaggagatgaagaagtgaatcaagaattcatcaatatgaatgagtctgacgcccacgccttcgatgaagaatggcaatccgaggtgctgaaatacaagcccggtagacacaacctgggcaatacccggatgcgctccgttggccatgagaatccgggcagcagggaactcaaaagaagagagaagcctcagcagagccccgccatcgaacacggccgaaggtccaatgtcttgggcgataagttgcatattaagggcagttcagtaaaatcgaataagaagtag

SEQ ID NO: 301587 - DNA, 777 bp, Artificial Sequence
  derived and/or modified sequence
atgagacagatgatccggtccttctctgaaccctttggcagagatctgctgagtatctccgacgggaggggccgtgcccataatcgaagaggtcataacgacggtgaggatagcctgaccgctaccagttgctctttagtgccatttggcgattttggaggaatgcataccgacgtctcatctttccagaccatggaccagatggttagcaacatgcgaaactatatgcagaagctcgaacggaatttcgggcagctctccgtcgacccaaatggtcattcgttttgtagctccagcgtgatgacttattctaagattggcgatgagccccctaaagtgtttcaagcttcaacccagaccagacgcgcacccggtggcattaaagagacacggaaagcaatgcgcgactcagatagcggtctggaaaaaatggccattgggcatcacattcacgacagggctcacgtaataaagaagtccaaaaacaagaagactggcgatgaagaggttaatcaggagtttatcaatatgaacgaaagcgacgcacatgcattcgacgaggagtggcagtctgaggtcctgaagtacaagcccggtcggcataacctgggaaatactcgcatgcgctcagtgggacatgagaaccccggatccagagagctgaagcggagagagaagccacagcaaagtcctgcaatcgaacacggtcggagatccaacgtcctgggggataagctgcacatcaagggatcctccgttaagtcaaataaaaaatag

SEQ ID NO: 301588 - DNA, 777 bp, Artificial Sequence
  derived and/or modified sequence
atgagacagatgattagatccttctcagagccatttggaagggacctcctcagcatctctgatgggagaggccgtgcacataaccgcagaggtcacaatgacggagaagactctctgacggcgacgtcttgttccctggtgccttttggtgactttggaggaatgcatacggacgtgagttcctttcagactatggaccagatggtgtccaatatgcggaactacatgcagaagctcgaacgaaatttcggacagctgagcgtcgaccccaacggacattctttttgcagcagttctgtaatgacttattcaaaaataggggatgagcctcccaaggtgtttcaagcatccacacagacaagacgagcacccggtggaatcaaagagacacggaaggctatgagggattccgatagcgggctagagaagatggcaattggtcaccacattcacgaccgagctcatgtgataaaaaaatccaagaataaaaagacaggagatgaagaggtgaaccaagagtttataaacatgaacgagagcgacgcccacgcattcgacgaagagtggcagtccgaggtgctcaaatacaaacctggcagacataacctcggaaacactaggatgcggtctgtgggccatgaaaatccaggcagcagggaactcaaaagacgagagaagccacaacagtcccctgcaattgagcatggacgcaggagcaatgtgttaggagacaaactccacataaaaggtagctccgtcaaatctaacaagaaatag

SEQ ID NO: 301589 - DNA, 777 bp, Artificial Sequence
  derived and/or modified sequence
atgagacagatgatcagaagcttcagcgagcccttcggcagagacctgctgagcatcagcgacggcagaggcagagcccacaacagaagaggccacaacgacggcgaggacagcctgaccgccaccagctgcagcctggtgcccttcggcgacttcggcggcatgcacaccgacgtgagcagcttccagaccatggaccagatggtgagcaacatgagaaactacatgcagaagctggagagaaacttcggccagctgagcgtggaccccaacggccacagcttctgcagcagcagcgtgatgacctacagcaagatcggcgacgagccccccaaggtgttccaggccagcacccagaccagaagagcccccggcggcatcaaggagaccagaaaggccatgagagacagcgacagcggcctggagaagatggccatcggccaccacatccacgacagagcccacgtgatcaagaagagcaagaacaagaagaccggcgacgaggaggtgaaccaggagttcatcaacatgaacgagagcgacgcccacgccttcgacgaggagtggcagagcgaggtgctgaagtacaagcccggcagacacaacctgggcaacaccagaatgagaagcgtgggccacgagaaccccggcagcagagagctgaagagaagagagaagccccagcagagccccgccatcgagcacggcagaagaagcaacgtgctgggcgacaagctgcacatcaagggcagcagcgtgaagagcaacaagaagtag

SEQ ID NO: 301590 - protein, 750 aa, Artificial Sequence
  derived and/or modified sequence
MGKSESQMDITDINTPKPKKKQRWTPLEISLSVLVLLLTIIAVTMIALYATYDDGICKSSDCIKSAARLIQNMDATTEPCTDFFKYACGGWLKRNVIPETSSRYGNFDILRDELEVVLKDVLQEPKTEDIVAVQKAKALYRSCINESAIDSRGGEPLLKLLPDIYGWPVATENWEQKYGASWTAEKAIAQLNSKYGKKVLINLFVGTDDKNSVNHVIHIDQPRLGLPSRDYYECTGIYKEACTAYVDFMISVARLIRQEERLPIDENQLALEMNKVMELEKEIANATAKPEDRNDPMLLYNKMTLAQIQNNFSLEINGKPFSWLNFTNEIMSTVNISITNEEDVVVYAPEYLTKLKPILTKYSARDLQNLMSWRFIMDLVSSLSRTYKESRNAFRKALYGTTSETATWRRCANYVNGNMENAVGRLYVEAAFAGESKHVVEDLIAQIREVFIQTLDDLTWMDAETKKRAEEKALAIKERIGYPDDIVSNDNKLNNEYLELNYKEDEYFENIIQNLKFSQSKQLKKLREKVDKDEWISGAAVVNAFYSSGRNQIVFPAGILQPPFFSAQQSNSLNYGGIGMVIGHEITHGFDDNGRNFNKDGDLVDWWTQQSASNFKEQSQCMVYQYGNFSWDLAGGQHLNGINTLGENIADNGGLGQAYRAYQNYIKKNGEEKLLPGLDLNHKQLFFLNFAQVWCGTYRPEYAVNSIKTDVHSPGNFRIIGTLQNSAEFSEAFHCRKNSYMNPEKKCRVW

SEQ ID NO: 301591 - protein, 161 aa, Artificial Sequence
  derived and/or modified sequence
MGKSESQMDITDINTPKPKKKQRWTPLEISLSVLVLLLTIIAVTMIALYATYDDGICKSSDCIKSAARLIQNMDATTEPCTDFFKYACGGWLKRNVIPETSSRYGNFDILRDELEVVLKDVLQEPKTEDIVAVQKAKALYRSCINESAIDSRGGEPLLKLL

SEQ ID NO: 301592 - protein, 93 aa, Artificial Sequence
  derived and/or modified sequence
MGKSESQMDITDINTPKPKKKQRWTPLEISLSVLVLLLTIIAVTMIALYATYDDGICKSSDCIKSAARLIQNMDATTEPCTDFFKYACGGWLK

SEQ ID NO: 301593 - protein, 233 aa, Artificial Sequence
  derived and/or modified sequence
MGKSESQMDITDINTPKPKKKQRWTPLEISLSVLVLLLTIIAVTMIALYATYDDGICKSSDCIKSAARLIQNMDATTEPCTDFFKYACGGWLKRNVIPETSSRYGNFDILRDELEVVLKDVLQEPKTEDIVAVQKAKALYRSCINESAIDSRGGEPLLKLLPDIYGWPVATENWEQKYGASWTAEKAIAQLNSKYGKKVLINLFVGTDDKNSVNHVIHIDQPRLGLPSRDYYE

SEQ ID NO: 301594 - protein, 119 aa, Artificial Sequence
  derived and/or modified sequence
MGKSESQMDITDINTPKPKKKQRWTPLEISLSVLVLLLTIIAVTMIALYATYDDGICKSSDCIKSAARLIQNMDATTEPCTDFFKYACGGWLKRNVIPETSSRYGNFDILRDELEVVLK

SEQ ID NO: 301595 - protein, 15 aa, Artificial Sequence
  derived and/or modified sequence
MGKSESQMDITDINT

SEQ ID NO: 301596 - DNA, 2253 bp, Artificial Sequence
  derived and/or modified sequence
atgggcaagagcgagagccagatggacatcaccgacatcaacacccccaagcccaagaagaagcagagatggacccccctggagatcagcctgagcgtgctggtgctgctgctgaccatcatcgccgtgaccatgatcgccctgtacgccacctacgacgacggcatctgcaagagcagcgactgcatcaagagcgccgccagactgatccagaacatggacgccaccaccgagccctgcaccgacttcttcaagtacgcctgcggcggctggctgaagagaaacgtgatccccgagaccagcagcagatacggcaacttcgacatcctgagagacgagctggaggtggtgctgaaggacgtgctgcaggagcccaagaccgaggacatcgtggccgtgcagaaggccaaggccctgtacagaagctgcatcaacgagagcgccatcgacagcagaggcggcgagcccctgctgaagctgctgcccgacatctacggctggcccgtggccaccgagaactgggagcagaagtacggcgccagctggaccgccgagaaggccatcgcccagctgaacagcaagtacggcaagaaggtgctgatcaacctgttcgtgggcaccgacgacaagaacagcgtgaaccacgtgatccacatcgaccagcccagactgggcctgcccagcagagactactacgagtgcaccggcatctacaaggaggcctgcaccgcctacgtggacttcatgatcagcgtggccagactgatcagacaggaggagagactgcccatcgacgagaaccagctggccctggagatgaacaaggtgatggagctggagaaggagatcgccaacgccaccgccaagcccgaggacagaaacgaccccatgctgctgtacaacaagatgaccctggcccagatccagaacaacttcagcctggagatcaacggcaagcccttcagctggctgaacttcaccaacgagatcatgagcaccgtgaacatcagcatcaccaacgaggaggacgtggtggtgtacgcccccgagtacctgaccaagctgaagcccatcctgaccaagtacagcgccagagacctgcagaacctgatgagctggagattcatcatggacctggtgagcagcctgagcagaacctacaaggagagcagaaacgccttcagaaaggccctgtacggcaccaccagcgagaccgccacctggagaagatgcgccaactacgtgaacggcaacatggagaacgccgtgggcagactgtacgtggaggccgccttcgccggcgagagcaagcacgtggtggaggacctgatcgcccagatcagagaggtgttcatccagaccctggacgacctgacctggatggacgccgagaccaagaagagagccgaggagaaggccctggccatcaaggagagaatcggctaccccgacgacatcgtgagcaacgacaacaagctgaacaacgagtacctggagctgaactacaaggaggacgagtacttcgagaacatcatccagaacctgaagttcagccagagcaagcagctgaagaagctgagagagaaggtggacaaggacgagtggatcagcggcgccgccgtggtgaacgccttctacagcagcggcagaaaccagatcgtgttccccgccggcatcctgcagccccccttcttcagcgcccagcagagcaacagcctgaactacggcggcatcggcatggtgatcggccacgagatcacccacggcttcgacgacaacggcagaaacttcaacaaggacggcgacctggtggactggtggacccagcagagcgccagcaacttcaaggagcagagccagtgcatggtgtaccagtacggcaacttcagctgggacctggccggcggccagcacctgaacggcatcaacaccctgggcgagaacatcgccgacaacggcggcctgggccaggcctacagagcctaccagaactacatcaagaagaacggcgaggagaagctgctgcccggcctggacctgaaccacaagcagctgttcttcctgaacttcgcccaggtgtggtgcggcacctacagacccgagtacgccgtgaacagcatcaagaccgacgtgcacagccccggcaacttcagaatcatcggcaccctgcagaacagcgccgagttcagcgaggccttccactgcagaaagaacagctacatgaaccccgagaagaagtgcagagtgtggtag

SEQ ID NO: 301597 - DNA, 486 bp, Artificial Sequence
  derived and/or modified sequence
atgggcaagagcgagagccagatggacatcaccgacatcaacacccccaagcccaagaagaagcagagatggacccccctggagatcagcctgagcgtgctggtgctgctgctgaccatcatcgccgtgaccatgatcgccctgtacgccacctacgacgacggcatctgcaagagcagcgactgcatcaagagcgccgccagactgatccagaacatggacgccaccaccgagccctgcaccgacttcttcaagtacgcctgcggcggctggctgaagagaaacgtgatccccgagaccagcagcagatacggcaacttcgacatcctgagagacgagctggaggtggtgctgaaggacgtgctgcaggagcccaagaccgaggacatcgtggccgtgcagaaggccaaggccctgtacagaagctgcatcaacgagagcgccatcgacagcagaggcggcgagcccctgctgaagctgctgtag

SEQ ID NO: 301598 - DNA, 282 bp, Artificial Sequence
  derived and/or modified sequence
atgggcaagagcgagagccagatggacatcaccgacatcaacacccccaagcccaagaagaagcagagatggacccccctggagatcagcctgagcgtgctggtgctgctgctgaccatcatcgccgtgaccatgatcgccctgtacgccacctacgacgacggcatctgcaagagcagcgactgcatcaagagcgccgccagactgatccagaacatggacgccaccaccgagccctgcaccgacttcttcaagtacgcctgcggcggctggctgaagtag

SEQ ID NO: 301599 - DNA, 702 bp, Artificial Sequence
  derived and/or modified sequence
atgggcaagagcgagagccagatggacatcaccgacatcaacacccccaagcccaagaagaagcagagatggacccccctggagatcagcctgagcgtgctggtgctgctgctgaccatcatcgccgtgaccatgatcgccctgtacgccacctacgacgacggcatctgcaagagcagcgactgcatcaagagcgccgccagactgatccagaacatggacgccaccaccgagccctgcaccgacttcttcaagtacgcctgcggcggctggctgaagagaaacgtgatccccgagaccagcagcagatacggcaacttcgacatcctgagagacgagctggaggtggtgctgaaggacgtgctgcaggagcccaagaccgaggacatcgtggccgtgcagaaggccaaggccctgtacagaagctgcatcaacgagagcgccatcgacagcagaggcggcgagcccctgctgaagctgctgcccgacatctacggctggcccgtggccaccgagaactgggagcagaagtacggcgccagctggaccgccgagaaggccatcgcccagctgaacagcaagtacggcaagaaggtgctgatcaacctgttcgtgggcaccgacgacaagaacagcgtgaaccacgtgatccacatcgaccagcccagactgggcctgcccagcagagactactacgagtag

SEQ ID NO: 301600 - DNA, 360 bp, Artificial Sequence
  derived and/or modified sequence
atgggcaagagcgagagccagatggacatcaccgacatcaacacccccaagcccaagaagaagcagagatggacccccctggagatcagcctgagcgtgctggtgctgctgctgaccatcatcgccgtgaccatgatcgccctgtacgccacctacgacgacggcatctgcaagagcagcgactgcatcaagagcgccgccagactgatccagaacatggacgccaccaccgagccctgcaccgacttcttcaagtacgcctgcggcggctggctgaagagaaacgtgatccccgagaccagcagcagatacggcaacttcgacatcctgagagacgagctggaggtggtgctgaagtag

SEQ ID NO: 301601 - DNA, 48 bp, Artificial Sequence
  derived and/or modified sequence
atgggcaagagcgagagccagatggacatcaccgacatcaacacctag

SEQ ID NO: 301602 - DNA, 2253 bp, Artificial Sequence
  derived and/or modified sequence
atgggcaaatccgaatcacagatggacattacggacattaatactccaaaacccaagaagaagcagcgctggactcctctggaaatatctctcagcgtgctcgtgctgcttctcacaataatcgccgtgactatgatcgctctctacgcaacatatgatgacgggatttgcaaatcgtccgattgcattaagtccgcagcacgcctgattcaaaacatggacgcaacaacggagccatgcaccgacttcttcaagtatgcctgtggaggttggcttaaacgaaatgtgataccggaaacaagctctcgctacggaaatttcgatatcttgcgcgacgaacttgaggtggtgttgaaggacgtcctccaagaacctaaaacagaggatattgtggctgttcagaaggctaaagccctctatcgtagctgcataaatgagtccgccatcgactcccggggcggtgagccacttctgaaacttttacctgacatctatgggtggccggttgccacagagaactgggagcaaaagtacggcgcatcctggacagcagaaaaagccatcgcgcagttgaattctaaatacggaaaaaaagtgctgatcaacttatttgtcggaactgacgataagaattctgttaatcatgtcattcacatagaccagccacggctgggtctgccatctagagactactatgaatgcacaggcatttataaggaggcctgtactgcctatgtggatttcatgatctccgttgccagactgattcgtcaggaggaacgtttgccgatcgacgaaaaccaactggccctcgagatgaacaaggtaatggaactcgagaaagaaatagcaaacgcaacagctaagcccgaggatagaaatgacccaatgctcctatataacaaaatgacactggcccagatccagaataacttctcactcgagatcaatggcaaacccttttcatggcttaacttcacaaacgaaatcatgtccaccgtgaatatctctatcactaatgaggaggacgtagtcgtctacgcacccgagtatttgacgaagctgaaaccaattttgacgaaatactcagccagagatctgcaaaatttgatgagttggcggtttattatggatctggtgagcagtctctcccgcacatataaagagtcgcggaatgcattcaggaaggctttatatgggacaacctcggaaaccgctacttggaggcggtgcgcaaactacgtgaacggtaacatggagaatgccgtggggaggctttatgtcgaggccgcattcgctggtgagagcaaacacgtggtggaggatctcattgcccaaattagggaggtgtttatccaaacgttggatgacctgacctggatggacgccgaaactaaaaaacgggcagaggaaaaggccctcgccattaaagagagaatcggatacccggacgacatcgtgtccaatgacaacaagctgaacaacgagtatctcgagctgaactataaagaggacgaatattttgaaaatattatccagaatctcaagttcagtcagtccaagcagttgaaaaaactgcgcgagaaagtcgataaagatgaatggatttccggcgctgcagtcgtgaatgctttttacagttccggccggaatcagatagtatttccggccggtattcttcagcctccattcttctcagctcagcaatccaacagccttaattacgggggcatcgggatggttataggtcatgagatcacccacggcttcgacgacaatggtagaaacttcaacaaagatggggaccttgtggactggtggacccagcagtctgcctccaacttcaaggagcagtcccagtgcatggtataccagtacggaaacttttcatgggacctcgcaggtggacaacatcttaacggaatcaacactctcggcgaaaacatcgccgacaatggggggctgggacaagcctacagggcataccagaactacatcaaaaaaaatggcgaggagaagttgctgccagggctagacctgaatcataagcagctgtttttcttaaattttgctcaagtttggtgcggcacataccgccctgaatatgcggtgaactcaatcaagaccgatgtgcattcaccaggtaattttaggattatcgggaccttgcagaattccgctgaattttcagaggctttccactgcagaaagaactcatatatgaacccagaaaagaagtgtagggtttggtag

SEQ ID NO: 301603 - DNA, 2253 bp, Artificial Sequence
  derived and/or modified sequence
atggggaaaagcgagtcccagatggacatcaccgatattaatactccgaaaccaaagaaaaagcagcgatggacacccttagaaatctctttgagtgtgctggtgctcttgctgaccataatcgccgtgacaatgatcgctctctacgctacttatgacgatgggatctgcaagagttccgactgtattaaaagcgccgcacgcctcatccagaacatggacgccaccacagagccctgtacagatttctttaaatacgcttgcggggggtggcttaaaaggaacgttatccccgagacgagtagtcgatacggtaattttgacatccttcgggacgagctggaggtagtgctcaaggacgtgctacaggagcccaaaactgaggatattgtcgcggtccagaaagccaaggccctgtacaggtcatgcatcaacgaatcagctatagattctagaggcggtgagcctcttctaaaacttctgccggacatctatggatggcctgtggccaccgaaaactgggaacaaaagtatggcgccagctggacagcagagaaggctatcgcccagttgaacagtaagtatggcaaaaaggttctgattaatctgtttgtcggaacagacgataaaaatagcgtgaaccacgttattcacatcgatcagccgcgcctgggcctcccgagtcgtgactattacgagtgtacaggtatctacaaagaggcctgtaccgcttatgtggacttcatgatatcagtggccaggctcattcggcaggaagagaggcttcctatcgatgagaatcagcttgccctggaaatgaacaaggtcatggaacttgaaaaggaaatagccaacgcgactgccaaaccggaggatagaaatgaccctatgctgctatacaacaaaatgaccttggcccagatacaaaacaacttctcattggaaattaacgggaagccgtttagctggctgaatttcacgaacgagatcatgtcaacagtgaatatttcaataaccaacgaggaggatgtagttgtgtacgctccagagtaccttaccaagctgaagccgattctgacaaagtactctgcacgggacctccagaatttaatgtcttggcggtttatcatggatttagtttcttccctgtcacgaacctataaggagtccaggaatgcatttcggaaggccctatacgggactacgtcggagaccgccacgtggcgacgctgcgctaactacgttaatgggaatatggaaaatgctgtaggtcgactttatgttgaagctgccttcgctggcgaatcaaagcatgtagtggaagacttaattgcccagatccgcgaagtgttcatacaaacgcttgacgatctaacatggatggatgctgaaaccaagaaaagggcggaggaaaaggcactggccataaaggagcgcatcgggtatcctgacgacattgtctctaatgacaacaaactcaacaacgaatacctggaactgaactataaggaggacgaatattttgagaacattatacagaatctgaagttctcgcagtcaaaacagctgaaaaagctgagagagaaagtggacaaagacgaatggatcagtggcgctgcagtggtgaatgccttctattctagcggccgaaatcagattgtcttcccggctgggatcctgcagccacccttctttagcgcacagcagtccaattcacttaattatggaggaatcggcatggttattggacatgagataacccatggattcgacgacaatgggcgtaactttaacaaggacggtgacctggtcgactggtggactcagcagagtgcgtccaattttaaggagcagtcccaatgcatggtgtatcagtacggaaactttagctgggacttagctggcggacagcacctcaacggaattaacactcttggtgaaaacatagcagataacggtggattgggacaagcatatcgagcctatcagaactacatcaaaaagaacggtgaggagaaactcctgccggggctggatcttaatcataagcagctgttctttctgaactttgcccaggtgtggtgtggaacctacaggcccgagtacgccgtgaacagcatcaaaaccgacgtgcactctccaggaaactttaggattataggcacattacagaacagtgcagagttctctgaggcctttcactgccggaaaaacagctacatgaatcccgaaaaaaagtgtagagtttggtag

SEQ ID NO: 301604 - DNA, 2253 bp, Artificial Sequence
  derived and/or modified sequence
atgggaaagagtgagtctcagatggatataaccgatatcaacacccctaaaccaaaaaaaaaacagcgatggacaccactggagatttcattaagtgtgttggtgctcctgctgactatcattgctgttacaatgatagcactgtacgctacttatgacgatggcatctgcaaaagtagcgattgtattaagagcgctgcgaggttgatacagaatatggatgcaactacggagccctgcactgatttctttaagtacgcgtgtgggggatggctgaagcggaacgttatcccagaaactagctcaagatatggcaactttgacattttacgagatgagctcgaagtcgtgctgaaggatgtgctgcaggaacccaagactgaggatatagtggccgtccagaaagccaaagccctgtatcgctcctgcatcaatgaatcagccattgactcccgcgggggggagccactgttgaagctactgccggacatttacggctggccagtggcgacagaaaattgggaacagaagtacggggcatcttggacagcggaaaaagccatcgcccagttgaactctaaatacgggaaaaaagtgctgatcaacttgttcgtcggcaccgacgataagaattccgtcaaccacgttatacacatcgatcaaccgaggcttggcctgcccagcagagattattatgagtgcaccggtatatataaagaagcatgtactgcctacgtggattttatgattagcgtagcccgcttgatcagacaagaagagcgcttacccatcgatgagaaccagctggccctggagatgaacaaggtcatggagctcgaaaaagagatagccaacgccacggccaagcctgaggaccggaatgatcccatgctgctttataataagatgaccttggctcaaattcaaaacaatttctccctggaaatcaatggcaaacccttctcatggcttaactttactaacgagatcatgagcactgtcaatataagcataactaacgaggaagatgtagtggtctacgcccccgagtacctgactaagctgaaaccaattttaacaaagtacagtgctagagacttacagaatctgatgagctggcgcttcattatggacctagtttcttctctttcaaggacttacaaagagagcagaaacgcattcaggaaggctctctatgggacaacatctgagactgcaacctggagacgctgcgccaattatgtgaacgggaatatggaaaacgccgtggggagattgtatgttgaggcggcttttgcgggcgagagcaaacatgttgtggaggacctgatcgcccaaattcgagaggtctttattcagacgttagacgacttgacttggatggacgcagaaactaagaaacgagctgaggagaaggcactggccatcaaagaacgcataggataccccgatgacatcgtgtccaacgataataagctaaataatgaatatcttgagctgaattataaagaggacgagtacttcgagaacataatccagaacctcaagtttagtcagtccaaacagctgaaaaaactgcgagagaaagtagataaagacgagtggattagcggagccgccgtggtcaacgcgttctattccagtggaaggaatcagattgtcttcccagctggcattcttcaaccaccattcttctcggcccagcagtccaatagtctcaattacggcggaatcggaatggtgattggccatgaaataactcacggtttcgacgataacggcaggaatttcaataaagacggcgatctggttgattggtggacccaacagtctgcaagcaactttaaagaacagtcgcagtgtatggtgtatcaatatggaaattttagttgggacctggcaggcggtcaacacctgaacggaatcaatactctgggcgagaacatcgccgacaacggcggcctggggcaagcttaccgtgcttatcagaactacattaagaagaacggtgaagagaagctgttgccggggttggaccttaatcataagcagctgttctttctgaactttgcccaggtgtggtgcggaacttatcgcccagagtacgcagtgaattctattaaaacagatgtgcactctcccggaaacttcagaataattggtaccctacagaatagcgctgaattttctgaagcgttccattgtaggaagaacagttacatgaaccccgaaaagaagtgtcgagtgtggtag

SEQ ID NO: 301605 - DNA, 486 bp, Artificial Sequence
  derived and/or modified sequence
atggggaaaagcgagtctcagatggacattactgatataaatacaccgaaacctaagaagaagcagcgctggactcctttggagatctccctctctgtgctggtcctacttctaactataatcgccgttaccatgattgctctctacgctacctacgatgatgggatctgcaaatcatcagactgcatcaagtctgccgcgcgcctcattcaaaatatggacgcaaccaccgagccctgtacagatttttttaagtacgcatgtggagggtggctgaaaagaaatgttattcctgaaacaagcagccgttatggaaacttcgatatcctgagggatgagcttgaggtcgtcctgaaggatgttctgcaagaacccaagacagaggacatcgttgccgtccagaaagccaaagccctgtaccgatcttgcattaatgaatctgctatagacagcagggggggagaacctttactgaaactgctgtag

SEQ ID NO: 301606 - DNA, 282 bp, Artificial Sequence
  derived and/or modified sequence
atggggaaatctgagagccagatggatataactgatattaatacccccaagcctaagaaaaaacagcgctggactcctctggagatcagtctctccgtacttgtccttttgctgaccatcatagctgtgaccatgatcgctctatacgccacttacgacgatgggatctgtaagtcctcagactgtatcaaatccgcagctaggctcatccaaaatatggatgccaccacagagccttgtacagacttttttaagtatgcatgtggaggctggctaaaatag

SEQ ID NO: 301607 - DNA, 702 bp, Artificial Sequence
  derived and/or modified sequence
atgggcaagtcagaatcccagatggacattaccgacatcaacacaccaaagcctaagaaaaagcagaggtggactcctctggagatttccctgagcgtgcttgtgctgctgcttactatcatcgctgtgaccatgatcgctctttacgccacctacgatgatggcatttgtaaatcctccgactgcattaagagcgccgctagactgatacaaaatatggacgcaaccaccgagccgtgcacagacttttttaagtacgcttgtgggggttggttgaagaggaatgtaatccctgaaaccagctcacgttatggtaatttcgatatcctaagggacgagctcgaggttgtattgaaagatgtcctgcaagagccgaagaccgaggatattgtagctgttcagaaggctaaagcactctataggtcttgcatcaatgaatcggccatcgactcgcgcgggggggagcctctgctcaaattactccccgacatttacggttggcctgtcgcaacagagaactgggagcaaaagtatggagcaagctggaccgccgaaaaggccatcgcacagctcaactccaaatatgggaagaaggtattgattaacttattcgtaggcactgacgacaagaacagcgtgaaccatgtgatacacattgatcaacctagattggggttgccttccagggactactacgagtag

SEQ ID NO: 301608 - DNA, 360 bp, Artificial Sequence
  derived and/or modified sequence
atggggaagagcgagtcccaaatggacattaccgatataaacaccccaaagccaaagaagaagcagcgctggaccccgctggaaatttcattgtccgttctcgtgctgctcctaaccattatcgccgttacaatgattgccctttatgctacatacgacgacggcatctgtaagagctctgactgcattaaaagtgccgccaggctgattcagaacatggacgccaccactgagccgtgcacagatttttttaagtatgcttgcggcggatggctgaaacgcaatgtgattcccgaaacatcgtctcggtacggcaactttgacattctgcgggacgagctggaggttgtactcaaatag

SEQ ID NO: 301609 - DNA, 2253 bp, Artificial Sequence
  derived and/or modified sequence
atgggaaagtctgaatcacagatggatatcacggacataaatacacccaagcccaaaaaaaagcaacgctggaccccactcgaaatctctttatccgtgctcgtcctgctgctcaccatcattgctgtcacaatgattgccctgtacgctacttatgatgacggcatctgcaagagctctgattgtatcaaatccgccgccaggttgatccagaatatggacgccactaccgagccatgcaccgatttctttaagtacgcttgtggcggctggctaaagcgaaatgtgatcccagagaccagttctagatatggcaattttgacatcctccgggatgaacttgaggtggttcttaaagacgttctgcaggaacccaaaacggaggacatcgtcgccgtgcagaaagctaaagctctctaccgttcatgcattaatgagtctgctattgacagccgcggcggggagcccctcctaaagcttttgccagacatctacggttggcctgttgcgactgaaaattgggagcaaaagtatggagcaagttggacagcggagaaagcaattgctcagctcaactcaaagtacggtaagaaggtcctcatcaacctcttcgtcggcaccgacgacaaaaatagcgtcaaccatgtgattcacatcgaccagccccgcttgggcctgccctccagagattactacgagtgtacggggatctataaggaggcttgtaccgcctacgtggactttatgatcagcgtagctcgcctgatcagacaggaagagaggctccccattgacgagaaccaattggcactggaaatgaacaaggtgatggaactcgagaaagagattgctaatgccaccgcaaagccagaggaccggaacgaccctatgctgctgtacaataaaatgaccctcgctcagattcaaaataatttctccctcgagatcaatggcaagccattctcctggttgaattttaccaatgagatcatgtccacagtgaacattagtatcactaacgaagaggacgtggtcgtgtatgcgccagagtatctgacaaaacttaaacctatcctaaccaagtactcggcacgggacctgcagaatcttatgtcttggaggttcattatggatcttgttagctccctgtctcgcacatacaaggaaagccgcaatgcgttcagaaaggccctgtacggaactacctccgagacagccacttggcgtagatgcgcaaactacgtaaatggtaatatggagaatgccgtgggacgattgtacgttgaagccgccttcgccggagaaagcaaacacgtggtggaagatttgattgcccagatacgcgaggtgtttatccaaactctggatgacctgacctggatggacgccgagacgaagaagcgagccgaggagaaggccctggccattaaggagcggatcggatatccggatgatatcgtaagtaacgacaacaaactgaacaacgagtacctagaattaaattataaggaggacgaatacttcgaaaatatcattcagaatctcaagttctctcagagcaagcagctgaaaaagttgcgggaaaaggttgacaaggatgagtggatatcgggcgcagccgtcgtgaacgcattctattccagcggcaggaaccaaatcgtgtttcccgcagggattctccagccccccttcttctctgcccagcagtccaattccctaaactacgggggaattgggatggtgattggccacgagattacccacggcttcgatgataacggcagaaattttaataaagatggcgacctagtcgactggtggactcagcagtcagcctctaactttaaggagcagtcccaatgcatggtgtaccagtacgggaacttcagctgggacttagccggaggccagcatctgaatggcatcaacaccctgggagagaacatagccgacaacggtggcctgggccaggcctatagagcctatcagaactacatcaagaagaacggtgaagagaagctactaccgggactggacctcaatcataagcaattgtttttcctgaacttcgctcaggtctggtgcgggacttaccgtcctgagtatgccgtgaattcaattaaaaccgacgtgcactcacccggaaatttccgcatcatcgggactctgcaaaattccgctgagttttccgaagctttccattgccgcaaaaattcatacatgaatccagagaagaagtgtagggtgtggtag

SEQ ID NO: 301610 - DNA, 2253 bp, Artificial Sequence
  derived and/or modified sequence
atgggaaagtccgaaagccagatggacattacggacatcaatacacccaagcctaagaaaaagcagaggtggaccccgcttgagattagcttaagcgtgctcgtgctgttgttaaccatcatcgccgtgaccatgatcgcgctgtacgcaacatacgacgacgggatttgcaaatctagcgattgtattaaatccgcagccagactcattcagaacatggacgctacaactgagccatgcacggactttttcaaatacgcttgtggggggtggctgaaacgaaatgtcatacctgagacttccagccgatatggaaactttgatatcctccgagacgagctcgaagtggtgctaaaagacgttctgcaggaacctaagactgaagacattgtggccgtccaaaaggcaaaggccctgtacaggtcttgtatcaacgaatcggcaattgattcaaggggtggcgagcctctcttaaagctgttgcccgacatctacggctggcctgttgctacagaaaattgggagcagaagtacggagcttcttggacagccgagaaggcaatcgctcagctcaacagcaaatatgggaaaaaagtgctgattaatctgtttgtgggaaccgacgacaaaaatagtgttaaccatgtgattcacattgatcagccaaggctggggctgcctagtcgggactattacgagtgcacaggcatctataaagaagcatgcacagcgtatgtggacttcatgatcagcgtagcaagacttatacgccaggaggagaggctgccaatcgatgagaaccaactggccctagagatgaataaggtgatggagctcgagaaggagatagccaacgcgactgcaaagcccgaagaccggaatgaccctatgctattatacaacaaaatgacgctggcccagatccagaataacttcagccttgagatcaatggtaagcccttctcctggctgaacttcaccaacgagattatgtctacggtgaacatcagtatcactaatgaagaggatgttgttgtctacgctccagaatacctgaccaagctaaagccaatactcacgaaatattctgctcgcgacctgcagaacctcatgtcttggcgattcataatggacctggttagctcgttgtcccggacctacaaagagtcccggaatgcttttaggaaagcactgtatggaaccaccagcgaaacagctacctggaggaggtgcgccaattacgttaatgggaacatggaaaacgcggtcggtcggctgtacgtcgaggccgcattcgcaggtgaaagcaaacacgtcgttgaggacctgatcgctcaaattcgcgaggtcttcatccagaccctggacgatctgacctggatggacgccgagaccaaaaagcgggcagaggagaaggccctcgctattaaagaacggatcggatatcccgatgatattgtgagcaatgacaacaagctcaacaatgaataccttgagcttaactataaggaagacgagtattttgagaatataatccagaacttgaaattcagtcagagtaagcagttaaagaaattacgcgaaaaggttgataaggacgagtggatctctggggctgcggtggtcaacgccttttatagcagcggcaggaatcagattgtgttccccgcagggatcctccagcctcccttcttctccgcccaacaaagcaatagtctaaattacggggggattgggatggtcatcggacatgagatcacacatgggtttgatgacaacggcagaaactttaacaaggatggggatcttgtggattggtggacacagcagtccgcgtccaactttaaggagcaaagccaatgtatggtataccagtacgggaacttttcctgggatctggccggcggacaacacttgaacggaataaacacccttggcgagaacatcgccgacaatggcggtcttggtcaagcataccgggcatatcagaattacatcaagaagaacggggaggagaaactccttccaggtctggacctgaaccacaagcagctgttctttctcaacttcgcacaggtgtggtgcggcacttaccggccagagtacgccgtgaatagtataaagactgatgtgcactccccgggcaactttagaattattggcactctgcagaatagcgctgagttctctgaggcctttcactgcaggaaaaattcctatatgaacccggaaaaaaagtgtcgcgtctggtag

SEQ ID NO: 301611 - DNA, 48 bp, Artificial Sequence
  derived and/or modified sequence
atggggaagagcgaaagccaaatggatattactgacataaatacatag

SEQ ID NO: 301612 - DNA, 2253 bp, Artificial Sequence
  derived and/or modified sequence
atgggcaagtctgagagccagatggacatcacagacatcaacacccccaagcccaagaagaagcagcgctggacccccctggagatcagcctgtctgtgctggtgctgctgctgaccatcatcgctgtgaccatgattgccctgtatgccacctatgatgatggcatctgcaagagcagtgactgcatcaagtctgctgcccggctcatccagaacatggatgccaccacagagccctgcacagacttcttcaagtatgcctgtggcggctggctgaagagaaatgtcatccctgagaccagcagccgctatggcaactttgacatcctgagagatgagctggaggtggtgctgaaggatgtgctgcaggagcccaagacagaggacatcgtggccgtgcagaaggccaaggccctgtaccgcagctgcatcaatgaaagtgccatcgacagcagaggaggagagcccctgctgaagctgctgcctgacatctacggctggcctgtggccacagagaactgggagcagaagtacggggcctcctggacagctgagaaggccatcgcccagctgaacagcaaatatggcaagaaggtgctgatcaacctgtttgtgggcacagatgacaagaacagcgtgaaccacgtgatccacatcgaccagccccggctgggcctgcccagccgggactactatgaatgtacaggcatctacaaggaggcctgcacagcctacgtggacttcatgatctctgtggcccggctcatccggcaggaggagcggctgcccattgatgagaaccagctggccctggagatgaacaaggtgatggagctggagaaggagatcgccaatgccacagccaagccagaagatagaaatgaccccatgctgctgtacaacaagatgaccctggcccagatccagaacaacttcagcctggagatcaatggcaagcccttctcctggctgaacttcaccaatgagatcatgagcacagtgaacatcagcatcaccaatgaggaggatgtggtggtgtatgcccctgagtacctgaccaagctgaagcccatcctgaccaagtacagcgcccgggacctgcagaacctgatgtcctggaggttcatcatggacctggtgagcagcctgagcaggacctacaaggagagcagaaatgccttcaggaaggccctgtatggcaccaccagcgagacagccacctggaggcgctgtgccaactacgtgaatggaaacatggagaatgctgtgggccgcctgtatgtggaggccgcctttgctggggagagcaagcacgtggtggaggacctgattgcccagatccgggaggtgttcatccagaccctggatgacctgacctggatggatgctgagaccaagaagagagctgaggagaaggccctggccatcaaggagcgcatcggctacccagatgacatcgtgtccaatgacaacaagctgaacaatgagtacctggagctgaactacaaggaggatgagtactttgagaacatcatccagaacctgaagttcagccagagcaagcagctgaagaagctgcgggagaaggtggacaaggatgagtggatctctggagctgctgtggtgaatgccttctacagcagcggcaggaaccagatcgtgtttcctgctggcatcctgcagccccccttcttcagcgcccagcagagcaacagcctgaactatggaggcatcggcatggtgattggccacgagatcacccacggctttgatgacaatggaagaaacttcaacaaggatggagacctggtggactggtggacccagcagagcgccagcaacttcaaggagcagagccagtgcatggtgtaccagtatggcaacttctcctgggacctggccggcggccagcacctgaatggcatcaacaccctgggagaaaatattgctgacaatggaggcctgggccaggcctaccgggcctaccagaactacatcaagaagaatggagaggagaagctgctgcccggcctggacctgaaccacaagcagctgttcttcctgaactttgcccaggtgtggtgtggcacctacagaccagaatatgctgtgaacagcatcaagacagatgtgcacagccctggcaacttccgcatcatcggcaccctgcagaacagcgctgagttcagcgaggccttccactgcaggaagaacagctacatgaaccctgagaagaagtgccgggtgtggtag

SEQ ID NO: 301613 - DNA, 486 bp, Artificial Sequence
  derived and/or modified sequence
atgggcaagtctgagagccagatggacatcacagacatcaacacccccaagcccaagaagaagcagcgctggacccccctggagatcagcctgtctgtgctggtgctgctgctgaccatcatcgctgtgaccatgattgccctgtatgccacctatgatgatggcatctgcaagagcagtgactgcatcaagtctgctgcccggctcatccagaacatggatgccaccacagagccctgcacagacttcttcaagtatgcctgtggcggctggctgaagagaaatgtcatccctgagaccagcagccgctatggcaactttgacatcctgagagatgagctggaggtggtgctgaaggatgtgctgcaggagcccaagacagaggacatcgtggccgtgcagaaggccaaggccctgtaccgcagctgcatcaatgaaagtgccatcgacagcagaggaggagagcccctgctgaagctgctgtag

SEQ ID NO: 301614 - DNA, 282 bp, Artificial Sequence
  derived and/or modified sequence
atgggcaagtctgagagccagatggacatcacagacatcaacacccccaagcccaagaagaagcagcgctggacccccctggagatcagcctgtctgtgctggtgctgctgctgaccatcatcgctgtgaccatgattgccctgtatgccacctatgatgatggcatctgcaagagcagtgactgcatcaagtctgctgcccggctcatccagaacatggatgccaccacagagccctgcacagacttcttcaagtatgcctgtggcggctggctgaagtag

SEQ ID NO: 301615 - DNA, 702 bp, Artificial Sequence
  derived and/or modified sequence
atgggcaagtctgagagccagatggacatcacagacatcaacacccccaagcccaagaagaagcagcgctggacccccctggagatcagcctgtctgtgctggtgctgctgctgaccatcatcgctgtgaccatgattgccctgtatgccacctatgatgatggcatctgcaagagcagtgactgcatcaagtctgctgcccggctcatccagaacatggatgccaccacagagccctgcacagacttcttcaagtatgcctgtggcggctggctgaagagaaatgtcatccctgagaccagcagccgctatggcaactttgacatcctgagagatgagctggaggtggtgctgaaggatgtgctgcaggagcccaagacagaggacatcgtggccgtgcagaaggccaaggccctgtaccgcagctgcatcaatgaaagtgccatcgacagcagaggaggagagcccctgctgaagctgctgcctgacatctacggctggcctgtggccacagagaactgggagcagaagtacggggcctcctggacagctgagaaggccatcgcccagctgaacagcaaatatggcaagaaggtgctgatcaacctgtttgtgggcacagatgacaagaacagcgtgaaccacgtgatccacatcgaccagccccggctgggcctgcccagccgggactactatgaatag

SEQ ID NO: 301616 - DNA, 360 bp, Artificial Sequence
  derived and/or modified sequence
atgggcaagtctgagagccagatggacatcacagacatcaacacccccaagcccaagaagaagcagcgctggacccccctggagatcagcctgtctgtgctggtgctgctgctgaccatcatcgctgtgaccatgattgccctgtatgccacctatgatgatggcatctgcaagagcagtgactgcatcaagtctgctgcccggctcatccagaacatggatgccaccacagagccctgcacagacttcttcaagtatgcctgtggcggctggctgaagagaaatgtcatccctgagaccagcagccgctatggcaactttgacatcctgagagatgagctggaggtggtgctgaagtag

SEQ ID NO: 301617 - DNA, 48 bp, Artificial Sequence
  derived and/or modified sequence
atgggcaagtctgagagccagatggacatcacagacatcaacacctag

SEQ ID NO: 301618 - DNA, 2360 bp, Artificial Sequence
  derived and/or modified sequence
tgggggctgggaatttgccattctgctgtacagacactgatttttttttcttctttttaaaaagcaagattttaggtgatgggcaagtcagaaagtcagatggatataactgatatcaacactccaaagccaaagaagaaacagcgatggactccactggagatcagcctctcggtccttgtcctgctcctcaccatcatagctgtgacaatgatcgcactctatgcaacctacgatgatggtatttgcaagtcatcagactgcataaaatcagctgctcgactgatccaaaacatggatgccaccactgagccttgtacagactttttcaaatatgcttgcggaggctggttgaaacgtaatgtcattcccgagaccagctcccgttacggcaactttgacattttaagagatgaactagaagtcgttttgaaagatgtccttcaagaacccaaaactgaagatatagtagcagtgcagaaagcaaaagcattgtacaggtcttgtataaatgaatctgctattgatagcagaggtggagaacctctactcaaactgttaccagacatatatgggtggccagtagcaacagaaaactgggagcaaaaatatggtgcttcttggacagctgaaaaagctattgcacaactgaattctaaatatgggaaaaaagtccttattaatttgtttgttggcactgatgataagaattctgtgaatcatgtaattcatattgaccaacctcgacttggcctcccttctagagattactatgaatgcactggaatctataaagaggcttgtacagcatatgtggattttatgatttctgtggccagattgattcgtcaggaagaaagattgcccatcgatgaaaaccagcttgctttggaaatgaataaagttatggaattggaaaaagaaattgccaatgctacggctaaacctgaagatcgaaatgatccaatgcttctgtataacaagatgacattggcccagatccaaaataacttttcactagagatcaatgggaagccattcagctggttgaatttcacaaatgaaatcatgtcaactgtgaatattagtattacaaatgaggaagatgtggttgtttatgctccagaatatttaaccaaacttaagcccattcttaccaaatattctgccagagatcttcaaaatttaatgtcctggagattcataatggatcttgtaagcagcctcagccgaacctacaaggagtccagaaatgctttccgcaaggccctttatggtacaacctcagaaacagcaacttggagacgttgtgcaaactatgtcaatgggaatatggaaaatgctgtggggaggctttatgtggaagcagcatttgctggagagagtaaacatgtggtcgaggatttgattgcacagatccgagaagtttttattcagactttagatgacctcacttggatggatgccgagacaaaaaagagagctgaagaaaaggccttagcaattaaagaaaggatcggctatcctgatgacattgtttcaaatgataacaaactgaataatgagtacctcgagttgaactacaaagaagatgaatacttcgagaacataattcaaaatttgaaattcagccaaagtaaacaactgaagaagctccgagaaaaggtggacaaagatgagtggataagtggagcagctgtagtcaatgcattttactcttcaggaagaaatcagatagtcttcccagccggcattctgcagccccccttctttagtgcccagcagtccaactcattgaactatgggggcatcggcatggtcataggacacgaaatcacccatggcttcgatgacaatggcagaaactttaacaaagatggagacctcgttgactggtggactcaacagtctgcaagtaactttaaggagcaatcccagtgcatggtgtatcagtatggaaacttttcctgggacctggcaggtggacagcaccttaatggaattaatacactgggagaaaacattgctgataatggaggtcttggtcaagcatacagagcctatcagaattatattaaaaagaatggcgaagaaaaattacttcctggacttgacctaaatcacaaacaactatttttcttgaactttgcacaggtgtggtgtggaacctataggccagagtatgcggttaactccattaaaacagatgtgcacagtccaggcaatttcaggattattgggactttgcagaactctgcagagttttcagaagcctttcactgccgcaagaattcatacatgaatccagaaaagaagtgccgggtttggtgatcttcaaaagaagcattgcagcccttggc

SEQ ID NO: 301619 - DNA, 5622 bp, Artificial Sequence
  derived and/or modified sequence
gagagcgccgagacgcgcggggcgcggagatgtgcaagtggcgaagcttgaccgagagcaggctggagcagccgcccaactcctggcgcgggatctgctgaggggtcacgattttaggtgatgggcaagtcagaaagtcagatggatataactgatatcaacactccaaagccaaagaagaaacagcgatggactccactggagatcagcctctcggtccttgtcctgctcctcaccatcatagctgtgacaatgatcgcactctatgcaacctacgatgatggtatttgcaagtcatcagactgcataaaatcagctgctcgactgatccaaaacatggatgccaccactgagccttgtacagactttttcaaatatgcttgcggaggctggttgaaacgtaatgtcattcccgagaccagctcccgttacggcaactttgacattttaagagatgaactagaagtcgttttgaaagatgtccttcaagaacccaaaactgaagatatagtagcagtgcagaaagcaaaagcattgtacaggtcttgtataaatgaatctgctattgatagcagaggtggagaacctctactcaaactgttaccagacatatatgggtggccagtagcaacagaaaactgggagcaaaaatatggtgcttcttggacagctgaaaaagctattgcacaactgaattctaaatatgggaaaaaagtccttattaatttgtttgttggcactgatgataagaattctgtgaatcatgtaattcatattgaccaacctcgacttggcctcccttctagagattactatgaatgcactggaatctataaagaggcttgtacagcatatgtggattttatgatttctgtggccagattgattcgtcaggaagaaagattgcccatcgatgaaaaccagcttgctttggaaatgaataaagttatggaattggaaaaagaaattgccaatgctacggctaaacctgaagatcgaaatgatccaatgcttctgtataacaagatgacattggcccagatccaaaataacttttcactagagatcaatgggaagccattcagctggttgaatttcacaaatgaaatcatgtcaactgtgaatattagtattacaaatgaggaagatgtggttgtttatgctccagaatatttaaccaaacttaagcccattcttaccaaatattctgccagagatcttcaaaatttaatgtcctggagattcataatggatcttgtaagcagcctcagccgaacctacaaggagtccagaaatgctttccgcaaggccctttatggtacaacctcagaaacagcaacttggagacgttgtgcaaactatgtcaatgggaatatggaaaatgctgtggggaggctttatgtggaagcagcatttgctggagagagtaaacatgtggtcgaggatttgattgcacagatccgagaagtttttattcagactttagatgacctcacttggatggatgccgagacaaaaaagagagctgaagaaaaggccttagcaattaaagaaaggatcggctatcctgatgacattgtttcaaatgataacaaactgaataatgagtacctcgagttgaactacaaagaagatgaatacttcgagaacataattcaaaatttgaaattcagccaaagtaaacaactgaagaagctccgagaaaaggtggacaaagatgagtggataagtggagcagctgtagtcaatgcattttactcttcaggaagaaatcagatagtcttcccagccggcattctgcagccccccttctttagtgcccagcagtccaactcattgaactatgggggcatcggcatggtcataggacacgaaatcacccatggcttcgatgacaatggcagaaactttaacaaagatggagacctcgttgactggtggactcaacagtctgcaagtaactttaaggagcaatcccagtgcatggtgtatcagtatggaaacttttcctgggacctggcaggtggacagcaccttaatggaattaatacactgggagaaaacattgctgataatggaggtcttggtcaagcatacagagcctatcagaattatattaaaaagaatggcgaagaaaaattacttcctggacttgacctaaatcacaaacaactatttttcttgaactttgcacaggtgtggtgtggaacctataggccagagtatgcggttaactccattaaaacagatgtgcacagtccaggcaatttcaggattattgggactttgcagaactctgcagagttttcagaagcctttcactgccgcaagaattcatacatgaatccagaaaagaagtgccgggtttggtgatcttcaaaagaagcattgcagcccttggctagacttgccaacaccacagaaatggggaattctctaatcgaaagaaaatgggccctaggggtcactgtactgacttgagggtgattaacagagagggcaccatcacaatacagataacattaggttgtcctagaaagggtgtggagggaggaagggggtctaaggtctatcaagtcaatcatttctcactgtgtacataatgcttaatttctaaagataatattactgtttatttctgtttctcatatggtctaccagtttgctgatgtccctagaaaacaatgcaaaacctttgaggtagaccaggatttctaatcaaaagggaaaagaagatgttgaagaatacagttaggcaccagaagaacagtaggtgacactatagtttaaaacacattgcctaactactagtttttacttttatttgcaacatttacagtccttcaaaatccttccaaagaattcttatacacattggggccttggagcttacatagttttaaactcatttttgccatacatcagttattcattctgtgatcatttattttaagcactcttaaagcaaaaaatgaatgtctaaaattgttttttgttgtacctgctttgactgatgctgagattcttcaggcttcctgcaattttctaagcaatttcttgctctatctctcaaaacttggtatttttcagagatttatataaatgtaaaaataataatttttatatttaattattaactacatttatgagtaactattattataggtaatcaatgaatattgaagtttcagcttaaaataaacagttgtgaaccaagatctataaagcgatatacagatgaaaatttgagactatttaaacttataaatcatattgatgaaaagatttaagcacaaactttagggtaaaaattgccattggacagttgtctagagatatatatacttgtggttttcaaattggactttcaaaattaaatctgtccctgagagtgtctctgataaaagggcaaatctgcacctatgtagctctgcatctcctgtcttttcaggtttgtcatcagatggaaatattttgataataaattgaaattgtgaactcattgctccctaagactgtgacaactgtctaactttagaagtgcatttctgaatagaaatgggaggcctctgatggaccttctagaattataagtcacaaagagttctggaaaagaactgtttactgcttgataggaattcatcttttgaggcttctgttcctctcttttcctgttgtattgactattttcgttcattacttgattaagattttacaaaagaggagcacttccaaaattcttatttttcctaacaaaagatgaaagcagggaatttctatctaaatgatgagtattagttccctgtctcttgaaaaatgcccatttgcctttaaaaaaaaaagttacagaaatactataacatatgtacataaattgcataaagcataagtatacagttcaataaacttaactttaactgaacaatggccctgtagccagcacctgtaagaaacagagcagtaccagcgctctaaaagcacctccttgtcactttattactcccagaacaacaactatcctgacttctaatatcattcactagctttgcctggttttgtcttttatgcagatagaatcaatcagtatgtattcttttgtgcctggcttctttctctcagccttacatttgtgagattcctctgtattgtgctgattgtggatcttttcattctcattgcagaataatgttctattgtgggacttattacaatttgttcatcctattgttgatgggcacttgagaactttccattttggcgctattacaaatagtgcaactatgaatgtactgcatgttaccatcttacttgagcctttaatggacttatttcttcaaatccttccaaaaattattataagcattgaaattatagtttcaagccaactgtggatacccttaccctttcctcctttatcacaaccaccgttacaagtatacttatatttccctaaaatacatttaaaacttacctaagtgacatttgtagttggagtaataggagcttccagctctaataaaacagctgtctctaacttattttatttccatcatgtcagagcaggtgaagagccagaagtgaagagtgactagtacaaattataaaaagccactagactcttcactgttagctttttaaaacattaggctcccatccctatggaggaacaactctccagtgcctggatcccctctgtctacaaatataagattttctgggcctaaaggatagatcaaagtcaaaaatagcaatgcctccctatccctcacacatccagacatcatgaattttacatggtactcttgttgagttctgtagagccttctgatgtctctaaagcactaccgattctttggagttgtcacatcagataagacatatctctaattccatccataaatccagttctactatggctgagttctggtcaaagaaagaaagtttagaagctgagacacaaagggttgggagctgatgaaactcacaaatgatggtaggaagaagctctcgacaatacccgttggcaaggagtctgcctccatgctgcagtgttcgagtggattgtaggtgcaagatggaaaggattgtaggtgcaagctgtccagagaaaagagtccttgttccagccctattctgccactcctgacagggtgaccttgggtatttgcaatattcctttgggcctctgcttctctcacctaaaaaaagagaattagattatattggtggttctcagcaagagaaggagtatgtgtccaatgctgccttcccatgaatctgtctcccagttatgaatcagtgggcaggataaactgaaaactcccatttacgtgtctgaatcgagtgagacaaaattttagtccaaataacaagtaccaaagttttatcaagtttgggtctgtgctgctgttactgttaaccatttaagtggggcaaaaccttgctaattttctcaaaagcatttatcattcttgttgccacagctggagctctcaaactaaaagacatttgttattttggaaagaagaaagactctattctcaaagtttcctaatcagaaatttttatcagtttccagtctcaaaaatacaaaataaaaacaaacgtttttaatactattgc

SEQ ID NO: 301620 - DNA, 3590 bp, Artificial Sequence
  derived and/or modified sequence
agagccagccgaggggagcggctgccgggaggtgcgctgagcagggtccgcagctaaggtccagcgcgatccgagcgcccaggaccctgcggccgtggaggaggcgtgccctgggaaggagccgctactgggacctgaagagtgaggggagggagaggggcccagagggtgacctggaggagggctctggaagtcacgtcagattttaggtgatgggcaagtcagaaagtcagatggatataactgatatcaacactccaaagccaaagaagaaacagcgatggactccactggagatcagcctctcggtccttgtcctgctcctcaccatcatagctgtgacaatgatcgcactctatgcaacctacgatgatggtatttgcaagtcatcagactgcataaaatcagctgctcgactgatccaaaacatggatgccaccactgagccttgtacagactttttcaaatatgcttgcggaggctggttgaaacgtaatgtcattcccgagaccagctcccgttacggcaactttgacattttaagagatgaactagaagtcgttttgaaagatgtccttcaagaacccaaaactgaagatatagtagcagtgcagaaagcaaaagcattgtacaggtcttgtataaatgaatctgctattgatagcagaggtggagaacctctactcaaactgttaccagacatatatgggtggccagtagcaacagaaaactgggagcaaaaatatggtgcttcttggacagctgaaaaagctattgcacaactgaattctaaatatgggaaaaaagtccttattaatttgtttgttggcactgatgataagaattctgtgaatcatgtaattcatattgaccaacctcgacttggcctcccttctagagattactatgaatgcactggaatctataaagaggcttgtacagcatatgtggattttatgatttctgtggccagattgattcgtcaggaagaaagattgcccatcgatgaaaaccagcttgctttggaaatgaataaagttatggaattggaaaaagaaattgccaatgctacggctaaacctgaagatcgaaatgatccaatgcttctgtataacaagatgacattggcccagatccaaaataacttttcactagagatcaatgggaagccattcagctggttgaatttcacaaatgaaatcatgtcaactgtgaatattagtattacaaatgaggaagatgtggttgtttatgctccagaatatttaaccaaacttaagcccattcttaccaaatattctgccagagatcttcaaaatttaatgtcctggagattcataatggatcttgtaagcagcctcagccgaacctacaaggagtccagaaatgctttccgcaaggccctttatggtacaacctcagaaacagcaacttggagacgttgtgcaaactatgtcaatgggaatatggaaaatgctgtggggaggctttatgtggaagcagcatttgctggagagagtaaacatgtggtcgaggatttgattgcacagatccgagaagtttttattcagactttagatgacctcacttggatggatgccgagacaaaaaagagagctgaagaaaaggccttagcaattaaagaaaggatcggctatcctgatgacattgtttcaaatgataacaaactgaataatgagtacctcgagttgaactacaaagaagatgaatacttcgagaacataattcaaaatttgaaattcagccaaagtaaacaactgaagaagctccgagaaaaggtggacaaagatgagtggataagtggagcagctgtagtcaatgcattttactcttcaggaagaaatcagatagtcttcccagccggcattctgcagccccccttctttagtgcccagcagtccaactcattgaactatgggggcatcggcatggtcataggacacgaaatcacccatggcttcgatgacaatggcagaaactttaacaaagatggagacctcgttgactggtggactcaacagtctgcaagtaactttaaggagcaatcccagtgcatggtgtatcagtatggaaacttttcctgggacctggcaggtggacagcaccttaatggaattaatacactgggagaaaacattgctgataatggaggtcttggtcaagcatacagagcctatcagaattatattaaaaagaatggcgaagaaaaattacttcctggacttgacctaaatcacaaacaactatttttcttgaactttgcacaggtgtggtgtggaacctataggccagagtatgcggttaactccattaaaacagatgtgcacagtccaggcaatttcaggattattgggactttgcagaactctgcagagttttcagaagcctttcactgccgcaagaattcatacatgaatccagaaaagaagtgccgggtttggtgatcttcaaaagaagcattgcagcccttggctagacttgccaacaccacagaaatggggaattctctaatcgaaagaaaatgggccctaggggtcactgtactgacttgagggtgattaacagagagggcaccatcacaatacagataacattaggttgtcctagaaagggtgtggagggaggaagggggtctaaggtctatcaagtcaatcatttctcactgtgtacataatgcttaatttctaaagataatattactgtttatttctgtttctcatatggtctaccagtttgctgatgtccctagaaaacaatgcaaaacctttgaggtagaccaggatttctaatcaaaagggaaaagaagatgttgaagaatacagttaggcaccagaagaacagtaggtgacactatagtttaaaacacattgcctaactactagtttttacttttatttgcaacatttacagtccttcaaaatccttccaaagaattcttatacacattggggccttggagcttacatagttttaaactcatttttgccatacatcagttattcattctgtgatcatttattttaagcactcttaaagcaaaaaatgaatgtctaaaattgttttttgttgtacctgctttgactgatgctgagattcttcaggcttcctgcaattttctaagcaatttcttgctctatctctcaaaacttggtatttttcagagatttatataaatgtaaaaataataatttttatatttaattattaactacatttatgagtaactattattataggtaatcaatgaatattgaagtttcagcttaaaataaacagttgtgaaccaagatctataaagcgatatacagatgaaaatttgagactatttaaacttataaatcatattgatgaaaagatttaagcacaaactttagggtaaaaattgccattggacagttgtctagagatatatatacttgtggttttcaaattggactttcaaaattaaatctgtccctgagagtgtctctgataaaagggcaaatctgcacctatgtagctctgcatctcctgtcttttcaggtttgtcatcagatggaaatattttgataataaattgaaattgtgaa

SEQ ID NO: 301621 - DNA, 593 bp, Artificial Sequence
  derived and/or modified sequence
aacaaaaaacaaaaggttgtgactgagacctgtcaaattcatttggctctatatactttgcattcagcaacaaaattttgacttctcaacagcaaaaatattttaggtgatgggcaagtcagaaagtcagatggatataactgatatcaacactccaaagccaaagaagaaacagcgatggactccactggagatcagcctctcggtccttgtcctgctcctcaccatcatagctgtgacaatgatcgcactctatgcaacctacgatgatggtatttgcaagtcatcagactgcataaaatcagctgctcgactgatccaaaacatggatgccaccactgagccttgtacagactttttcaaatatgcttgcggaggctggttgaaacgtaatgtcattcccgagaccagctcccgttacggcaactttgacattttaagagatgaactagaagtcgttttgaaagatgtccttcaagaacccaaaactgaagatatagtagcagtgcagaaagcaaaagcattgtacaggtcttgtataaatgaatctgctattgatagcagaggtggagaacctctactcaaactgttac

SEQ ID NO: 301622 - DNA, 892 bp, Artificial Sequence
  derived and/or modified sequence
tcaactggtataagaattgctgctttacattgctttgaaattaagcttacacttaaaatagtaatttattctgttggtaatattgtcgagctgaagtttgcaggttcttgttatcttagacctcctaattctctattctcgtctgtggcagtgtccacttttccgtttaaactttttatttaacacatcttcagttgaagtgaaatattttaagaatacaggtatgtttttgcgtaccctgctttatatgggactataagcctcaacttggtattttttttttttttgtattcttttgtttacttgtcccccttactcttctctatgggattgggtgtggttaagttggatattcaggtatttggggtttagtcatatgttccacagtgagattccagatactgtcccctgatgtcttaaagaaaaattgtgaaccttccagaattaactggaaatgaacgacaaagttaattaggagattaaacttgcatcatttctgcttttgctcaatgcttttgaaaaaaggctactaagagcaaaagacttcctttaagaatttacagggcatttacaagagggggagatggaggaagactttgcagattttaggtgatgggcaagtcagaaagtcagatggatataactgatatcaacactccaaagccaaagaagaaacagcgatggactccactggagatcagcctctcggtccttgtcctgctcctcaccatcatagctgtgacaatgatcgcactctatgcaacctacgatgatggtatttgcaagtcatcagactgcataaaatcagctgctcgactgatccaaaacatggatgccaccactgagccttgtacagactttttcaaatatgcttgcggaggctggttgaaac

SEQ ID NO: 301623 - DNA, 856 bp, Artificial Sequence
  derived and/or modified sequence
agcctggagcccgcgcgccttgggcggatgcacggactgagaggcgcttggctgggctctcagcccgccactgccacccggccccgtgcgctcattggtcgggatgtgtcggctcagcagcctccaacttctcccgaatcccactgattttaggtgatgggcaagtcagaaagtcagatggatataactgatatcaacactccaaagccaaagaagaaacagcgatggactccactggagatcagcctctcggtccttgtcctgctcctcaccatcatagctgtgacaatgatcgcactctatgcaacctacgatgatggtatttgcaagtcatcagactgcataaaatcagctgctcgactgatccaaaacatggatgccaccactgagccttgtacagactttttcaaatatgcttgcggaggctggttgaaacgtaatgtcattcccgagaccagctcccgttacggcaactttgacattttaagagatgaactagaagtcgttttgaaagatgtccttcaagaacccaaaactgaagatatagtagcagtgcagaaagcaaaagcattgtacaggtcttgtataaatgaatctgctattgatagcagaggtggagaacctctactcaaactgttaccagacatatatgggtggccagtagcaacagaaaactgggagcaaaaatatggtgcttcttggacagctgaaaaagctattgcacaactgaattctaaatatgggaaaaaagtccttattaatttgtttgttggcactgatgataagaattctgtgaatcatgtaattcatattgaccaacctcgacttggcctcccttctagagattactatgaat

SEQ ID NO: 301624 - DNA, 667 bp, Artificial Sequence
  derived and/or modified sequence
gtagagcagcactaaccaggggagtaatatggttggcacttcgtgtccagaactccgtatttcaggctgggaaacacctaattaatgtctgggaaacaagaagatgatttatcctgagtacctctgtcctcagcttctgcagacacagtttaaatatggaaactgtttctccttcttcctgtgcctcagtttccatagaacaaactgtaattgcatagcacagcttcaggaacctgcagatataagttaatgttataatgtgcagtgaagatgaaaactgcttagctaagtctaagtctattttaggtgatgggcaagtcagaaagtcagatggatataactgatatcaacactccaaagccaaagaagaaacagcgatggactccactggagatcagcctctcggtccttgtcctgctcctcaccatcatagctgtgacaatgatcgcactctatgcaacctacgatgatggtatttgcaagtcatcagactgcataaaatcagctgctcgactgatccaaaacatggatgccaccactgagccttgtacagactttttcaaatatgcttgcggaggctggttgaaacgtaatgtcattcccgagaccagctcccgttacggcaactttgacattttaagagatgaactagaagtcgttttgaaag

SEQ ID NO: 301625 - DNA, 2854 bp, Artificial Sequence
  derived and/or modified sequence
acattcctactgagtatgacgaatggttgttgatggttatcactggagattgaaaactgggattcctttttcaccaggaattggtgcctaccatggctggggatacacagtgatggatttgtgacttgctcctctgaaagctggcccaagggtgtacagcatatgaatgtgggggagtttacactacacacgctcttggctattttaggtgatgggcaagtcagaaagtcagatggatataactgatatcaacactccaaagccaaagaagaaacagcgatggactccactggagatcagcctctcggtccttgtcctgctcctcaccatcatagctgtgacaatgatcgcactctatgcaacctacgatgatggtatttgcaagtcatcagactgcataaaatcagctgctcgactgatccaaaacatggatgccaccactgagccttgtacagactttttcaaatatgcttgcggaggctggttgaaacgtaatgtcattcccgagaccagctcccgttacggcaactttgacattttaagagatgaactagaagtcgttttgaaagatgtccttcaagaacccaaaactgaagatatagtagcagtgcagaaagcaaaagcattgtacaggtcttgtataaatgaatctgctattgatagcagaggtggagaacctctactcaaactgttaccagacatatatgggtggccagtagcaacagaaaactgggagcaaaaatatggtgcttcttggacagctgaaaaagctattgcacaactgaattctaaatatgggaaaaaagtccttattaatttgtttgttggcactgatgataagaattctgtgaatcatgtaattcatattgaccaacctcgacttggcctcccttctagagattactatgaatgcactggaatctataaagaggcttgtacagcatatgtggattttatgatttctgtggccagattgattcgtcaggaagaaagattgcccatcgatgaaaaccagcttgctttggaaatgaataaagttatggaattggaaaaagaaattgccaatgctacggctaaacctgaagatcgaaatgatccaatgcttctgtataacaagatgacattggcccagatccaaaataacttttcactagagatcaatgggaagccattcagctggttgaatttcacaaatgaaatcatgtcaactgtgaatattagtattacaaatgaggaagatgtggttgtttatgctccagaatatttaaccaaacttaagcccattcttaccaaatattctgccagagatcttcaaaatttaatgtcctggagattcataatggatcttgtaagcagcctcagccgaacctacaaggagtccagaaatgctttccgcaaggccctttatggtacaacctcagaaacagcaacttggagacgttgtgcaaactatgtcaatgggaatatggaaaatgctgtggggaggctttatgtggaagcagcatttgctggagagagtaaacatgtggtcgaggatttgattgcacagatccgagaagtttttattcagactttagatgacctcacttggatggatgccgagacaaaaaagagagctgaagaaaaggccttagcaattaaagaaaggatcggctatcctgatgacattgtttcaaatgataacaaactgaataatgagtacctcgagttgaactacaaagaagatgaatacttcgagaacataattcaaaatttgaaattcagccaaagtaaacaactgaagaagctccgagaaaaggtggacaaagatgagtggataagtggagcagctgtagtcaatgcattttactcttcaggaagaaatcagatagtcttcccagccggcattctgcagccccccttctttagtgcccagcagtccaactcattgaactatgggggcatcggcatggtcataggacacgaaatcacccatggcttcgatgacaatggcagaaactttaacaaagatggagacctcgttgactggtggactcaacagtctgcaagtaactttaaggagcaatcccagtgcatggtgtatcagtatggaaacttttcctgggacctggcaggtggacagcaccttaatggaattaatacactgggagaaaacattgctgataatggaggtcttggtcaagcatacagagcctatcagaattatattaaaaagaatggcgaagaaaaattacttcctggacttgacctaaatcacaaacaactatttttcttgaactttgcacaggtgtggtgtggaacctataggccagagtatgcggttaactccattaaaacagatgtgcacagtccaggcaatttcaggattattgggactttgcagaactctgcagagttttcagaagcctttcactgccgcaagaattcatacatgaatccagaaaagaagtgccgggtttggtgatcttcaaaagaagcattgcagcccttggctagacttgccaacaccacagaaatggggaattctctaatcgaaagaaaatgggccctaggggtcactgtactgacttgagggtgattaacagagagggcaccatcacaatacagataacattaggttgtcctagaaagggtgtggagggaggaagggggtctaaggtctatcaagtcaatcatttctcactgtgtacataatgcttaatttctaaagataatattactgtttatttctgtttctcatatggtctaccagtttgctgatgtccctagaaaacaatgcaaaacctttgaggtagaccaggatttctaatcaaaagggaaaagaagatgttgaagaatacagttaggcaccaga

SEQ ID NO: 301626 - DNA, 2556 bp, Artificial Sequence
  derived and/or modified sequence
gcggctgccgggaggtgcgctgagcagggtccgcagctaaggtccagcgcgatccgagcgcccaggaccctgcggccgtggaggaggcgtgccctgggaaggagccgctactgggacctgaagaattttaggtgatgggcaagtcagaaagtcagatggatataactgatatcaacactccaaagccaaagaagaaacagcgatggactccactggagatcagcctctcggtccttgtcctgctcctcaccatcatagctgtgacaatgatcgcactctatgcaacctacgatgatggtatttgcaagtcatcagactgcataaaatcagctgctcgactgatccaaaacatggatgccaccactgagccttgtacagactttttcaaatatgcttgcggaggctggttgaaacgtaatgtcattcccgagaccagctcccgttacggcaactttgacattttaagagatgaactagaagtcgttttgaaagatgtccttcaagaacccaaaactgaagatatagtagcagtgcagaaagcaaaagcattgtacaggtcttgtataaatgaatctgctattgatagcagaggtggagaacctctactcaaactgttaccagacatatatgggtggccagtagcaacagaaaactgggagcaaaaatatggtgcttcttggacagctgaaaaagctattgcacaactgaattctaaatatgggaaaaaagtccttattaatttgtttgttggcactgatgataagaattctgtgaatcatgtaattcatattgaccaacctcgacttggcctcccttctagagattactatgaatgcactggaatctataaagaggcttgtacagcatatgtggattttatgatttctgtggccagattgattcgtcaggaagaaagattgcccatcgatgaaaaccagcttgctttggaaatgaataaagttatggaattggaaaaagaaattgccaatgctacggctaaacctgaagatcgaaatgatccaatgcttctgtataacaagatgacattggcccagatccaaaataacttttcactagagatcaatgggaagccattcagctggttgaatttcacaaatgaaatcatgtcaactgtgaatattagtattacaaatgaggaagatgtggttgtttatgctccagaatatttaaccaaacttaagcccattcttaccaaatattctgccagagatcttcaaaatttaatgtcctggagattcataatggatcttgtaagcagcctcagccgaacctacaaggagtccagaaatgctttccgcaaggccctttatggtacaacctcagaaacagcaacttggagacgttgtgcaaactatgtcaatgggaatatggaaaatgctgtggggaggctttatgtggaagcagcatttgctggagagagtaaacatgtggtcgaggatttgattgcacagatccgagaagtttttattcagactttagatgacctcacttggatggatgccgagacaaaaaagagagctgaagaaaaggccttagcaattaaagaaaggatcggctatcctgatgacattgtttcaaatgataacaaactgaataatgagtacctcgagttgaactacaaagaagatgaatacttcgagaacataattcaaaatttgaaattcagccaaagtaaacaactgaagaagctccgagaaaaggtggacaaagatgagtggataagtggagcagctgtagtcaatgcattttactcttcaggaagaaatcagatagtcttcccagccggcattctgcagccccccttctttagtgcccagcagtccaactcattgaactatgggggcatcggcatggtcataggacacgaaatcacccatggcttcgatgacaatggcagaaactttaacaaagatggagacctcgttgactggtggactcaacagtctgcaagtaactttaaggagcaatcccagtgcatggtgtatcagtatggaaacttttcctgggacctggcaggtggacagcaccttaatggaattaatacactgggagaaaacattgctgataatggaggtcttggtcaagcatacagagcctatcagaattatattaaaaagaatggcgaagaaaaattacttcctggacttgacctaaatcacaaacaactatttttcttgaactttgcacaggtgtggtgtggaacctataggccagagtatgcggttaactccattaaaacagatgtgcacagtccaggcaatttcaggattattgggactttgcagaactctgcagagttttcagaagcctttcactgccgcaagaattcatacatgaatccagaaaagaagtgccgggtttggtgatcttcaaaagaagcattgcagcccttggctagacttgccaacaccacagaaatggggaattctctaatcgaaagaaaatgggccctaggggtcactgtactgacttgagggtgattaacagagagggcaccatcacaatacagataacattaggttgtcctagaaaggg

SEQ ID NO: 301627 - DNA, 324 bp, Artificial Sequence
  derived and/or modified sequence
gaccattttcagaatgttgtctaaccagttaatagatactggtatcagtagtagtagtaattttgaactgtaaaaataaaggttgtttttatgactaaaataaactacttcatgtgttcattcgttttgctgtttatctatattaatatttcaaattattgcttagtcaaaacctcaaggtattagtcactggtttttgagcttataaaggaagccactggagcaagatataaaattaaccattgatgttagtccagagttcaaaaggattttaggtgatgggcaagtcagaaagtcagatggatataactgatatcaacactc

SEQ ID NO: 301628 - DNA, 2253 bp, Artificial Sequence
  derived and/or modified sequence
atgggcaagagcgagagccagatggacatcaccgacatcaacacccctaaacccaagaagaagcagcggtggacccccctagagattagcctctcagtcctcgtgctgctcctgacgattatcgcagtgactatgatcgcactgtatgctacgtacgacgatgggatctgcaagagtagcgactgcatcaagtctgcggcgagacttatacagaacatggacgccacgacggagccgtgcacagacttcttcaagtacgcctgcgggggctggctaaaacgcaacgtgatccccgaaacttccagtcgttatggcaatttcgacatactcagagatgagctggaggtcgtgctgaaggatgtgctacaggagccaaaaaccgaggatatagtcgctgtgcagaaggccaaagctttatacagatcttgcatcaacgagagcgcgatcgactcgcgcggcggcgaacccctccttaaattattgccagatatatatgggtggccagtcgcgacagaaaactgggagcaaaaatatggcgcatcatggactgccgagaaagctattgcacagctcaactccaaatacggcaagaaggtactcataaatctctttgtcggtaccgacgataagaattccgtgaaccacgttatccacatcgatcaaccccgcttgggcctcccctcaagagactactacgaatgtacaggcatctataaggaggcatgcacagcctacgttgattttatgatctccgtcgctaggctcattcgacaggaggagcggctgccaatcgatgagaatcaacttgcgcttgagatgaataaggtgatggaattagaaaaagaaatcgcgaatgctaccgcgaagcccgaagacaggaacgatcccatgctgctgtacaataaaatgaccctcgcccagatccagaataattttagcctggaaattaacgggaaaccatttagttggcttaactttacgaacgagataatgtccaccgttaacatctcaatcacaaatgaggaagacgttgtggtctatgcgcccgaatatctcactaaactgaagcctatccttacaaaatattctgcaagggacctgcagaacctgatgagctggcgattcatcatggacctcgtttcttcactaagcaggacgtataaagaatccagaaacgcatttcggaaagccctgtatgggaccacctctgagacagccacttggcgacgatgtgctaactatgttaacggcaatatggaaaacgcggtgggtaggctgtacgtggaagccgcctttgctggcgagtcaaagcatgtcgtggaggatcttatagcgcagatccgtgaggtgttcatccagaccttggacgacttgacctggatggatgctgaaactaagaagcgagcagaggagaaggccctggccatcaaagagcgaatcggctatccggacgatattgtttcaaatgacaacaaactcaacaatgaatacctggagcttaattacaaagaagatgagtattttgaaaatataattcagaacttgaaatttagccagagcaaacagttgaaaaaattgagagaaaaggttgacaaggatgagtggatttccggtgcggcagttgtgaacgccttttacagcagtggccggaaccaaatcgtttttcccgctggcattctgcagcctccatttttttctgcacagcagtcaaactcgctgaactatggcggtataggaatggtcatcggccatgaaattacacatggttttgacgacaacggccgcaatttcaataaagacggagatctcgtggattggtggacacagcagagcgcatctaactttaaagagcagtcccagtgcatggtttatcagtatggcaatttctcctgggacttggcaggcgggcagcatctgaatggaataaacaccctcggcgaaaatatcgctgacaatggcgggctcggccaagcctatcgtgcctaccagaattacatcaagaaaaacggagaggaaaagcttctgccaggactggatctgaatcacaagcaattgttcttccttaactttgctcaggtatggtgtggaacttatcgacctgagtatgccgttaatagcataaagactgacgtccattctcccgggaatttcaggatcattggcacgctccagaactcagccgagttctcagaggcttttcattgtagaaagaacagctacatgaacccagaaaagaaatgccgcgtctggtag

SEQ ID NO: 301629 - DNA, 2253 bp, Artificial Sequence
  derived and/or modified sequence
atgggcaagagcgagagccagatggacatcaccgacatcaacacccctaaacctaaaaaaaaacagaggtggactcctttggagatcagcctctctgttctcgtgctgcttcttactatcatcgctgtaacaatgattgccctctatgcgacctacgatgacggtatctgcaagtccagtgactgtatcaaatcggccgcgcgcttgatccagaatatggacgcaactacagagccctgcactgattttttcaaatatgcttgcggagggtggttaaaaaggaatgtcattcccgagactagcagccgatatggcaatttcgacattttacgtgatgagttagaggtggttctgaaggacgtcctccaggaaccaaaaactgaggatatcgtagctgtgcagaaggccaaggcactgtacagatcctgtatcaatgagtcagcaatagactctcggggcggggagccgctgctgaaactcttacctgacatctacggctggcccgtcgcgacggagaactgggaacagaaatatggagcctcatggacggcagagaaggcaatcgcccagctgaacagcaaatacggcaagaaggtgctgatcaatctcttcgttggaactgatgacaagaattcagtgaaccatgtgatacacatagaccagcctcgactgggactaccttctcgtgattactacgagtgcaccggaatctataaagaggcctgcaccgcttatgttgacttcatgataagcgttgctcgcctgattcggcaggaagagcgattgcccatcgatgaaaatcagctggcactcgaaatgaacaaggtaatggaactggagaaggaaatcgctaacgccacagccaagcccgaggatagaaacgacccaatgcttctgtataacaaaatgaccctagcccagattcagaacaatttctcactggagattaatggcaaacctttttcttggctgaattttacgaatgagattatgtctaccgtaaacatttcaatcacaaatgaagaggacgtggtggtgtacgcaccggagtacttaaccaagctcaaacccatccttactaagtactccgcccgcgatctgcagaatttaatgagttggagatttataatggacctcgtgagctccttgtcccgcacatacaaggagtcaaggaatgcattccgtaaagcactgtatggaacaacttccgagacagctacttggcgtaggtgtgctaactatgtgaatggtaatatggaaaacgctgtcggccgcctttacgtggaggcagctttcgccggcgaaagcaagcatgtggtcgaggacctgattgcccaaattcgcgaagtctttatccagacgctggacgacctcacctggatggacgccgagacaaagaaacgagccgaggagaaggctctcgccatcaaggagcggattgggtacccagacgacattgtgagcaatgacaataagttaaacaatgagtatctagagcttaactataaggaagacgagtacttcgagaacataattcaaaacctgaaattctctcaatcgaaacagcttaaaaagctgcgggaaaaggtggataaggacgaatggatctcgggtgctgcggtcgtgaatgccttctactcttcaggccggaaccagatagttttccccgccggcatcctgcaacccccatttttctccgcccagcagtcgaacagtttaaactatggtggcataggcatggtcattggccacgagataacccacggcttcgacgacaatggacgaaattttaacaaggacggagacctggtcgactggtggacccagcagagcgcatctaacttcaaagagcagtcccaatgtatggtttatcaatacgggaatttttcttgggaccttgcaggcggtcagcatctgaacggtatcaatactcttggggaaaacatagccgacaacggcgggttgggccaggcctatcgcgcctaccagaattatattaaaaaaaatggtgaggagaagttgctgccaggactcgacctgaatcacaagcaactgttcttcttgaactttgctcaggtttggtgtggtacttaccgccctgagtacgccgtgaatagcattaagaccgacgtccattctccgggcaatttccgcataattggcacccttcaaaactctgctgagttcagcgaagcattccattgccggaaaaactcatatatgaaccctgagaagaaatgtcgagtgtggtag

SEQ ID NO: 301630 - DNA, 2253 bp, Artificial Sequence
  derived and/or modified sequence
atgggcaagagcgagagccagatggacatcaccgacatcaacacccccaagcctaaaaagaaacagcggtggaccccactcgagatctccctctcggtcctggttctcctcctgaccatcatcgcagtgactatgattgctctctatgcaacctatgatgacggaatttgtaaaagtagcgattgcattaaaagcgccgcaagactcatccagaatatggacgcaactaccgagccctgtaccgacttctttaaatatgcctgcggcggttggctgaagcggaatgtcatccccgagacctcctctcgctacgggaactttgacattctgcgcgacgaactcgaggtggtgttgaaagatgtgctccaagagcctaagaccgaggatatcgttgctgtccagaaggcgaaggcactctacagatcctgcattaacgaatctgctatagattcccgcggtggagaaccattgctcaaattactgccagatatttatggctggcccgtggctactgagaattgggagcagaaatatggtgcaagttggaccgcggagaaggctatcgcacagctgaacagcaagtatggaaagaaggttctaatcaacctgtttgtcggaaccgacgataagaacagcgtaaatcacgtgatccacatcgatcagcccagactgggcttacccagtagagactactacgagtgcactggcatttacaaggaggcctgtaccgcatacgtcgattttatgatatccgtcgcaagactaattcgccaggaggagagactgcccattgatgaaaaccagctggccttggagatgaacaaagtaatggagctggagaaggagatcgcaaacgctactgcaaagcccgaggatagaaacgaccctatgctgttgtataacaagatgactctggctcaaattcagaacaatttctcactggaaattaatggcaagcctttttcatggctcaatttcacaaacgaaataatgtctaccgtgaacatcagcatcaccaacgaggaggacgtggtggtctacgcaccggagtacctaacaaagctgaaacccatcttgacaaagtatagtgcgagagatttgcaaaacctgatgagttggcgcttcatcatggaccttgtctcgtcactctctagaacttacaaagagtcacgcaacgcgtttcgaaaggccctctacggcaccactagcgaaacggcaacgtggaggcgctgcgcaaattacgttaacgggaatatggagaatgccgttggcagactgtacgtggaagcagcatttgctggggagtctaaacatgtggttgaagatctgattgctcagattcgggaggtgtttatccagactcttgatgatttgacgtggatggacgccgagacgaagaaacgagctgaggagaaagccttagcaataaaggaacgaatcgggtatcctgacgatatcgtgagcaacgataacaagttaaataatgagtacttagagctgaactacaaggaggatgagtacttcgagaacattatccagaatctgaagttctcccaaagtaagcagctaaaaaagctgagggaaaaggtggacaaagacgaatggatttccggcgctgccgtggttaatgcgttctactcttcaggaagaaaccagatagttttccccgccggtatactacagcccccattctttagcgctcaacaatccaattccctcaattatggggggatcgggatggtcatcggtcatgagataacccacggcttcgacgacaacggcaggaactttaataaagatggtgatctggttgactggtggacacaacagtctgcaagcaattttaaggaacaaagtcagtgcatggtttatcagtacgggaatttttcctgggaccttgccggcggacaacatcttaacggcattaataccctgggtgagaatatcgctgacaacggcggcctcgggcaggcctaccgcgcataccagaattatattaaaaaaaacggagaagaaaagttgctgccgggcctcgacctcaaccataagcagctgttctttctcaatttcgctcaggtgtggtgtgggacatataggcccgaatatgctgttaatagcattaagacagatgtccattcaccgggcaatttccgaatcatcggcacgctgcaaaacagcgcagagttctctgaggctttccattgccggaagaactcttacatgaacccagaaaaaaagtgtcgggtgtggtag

SEQ ID NO: 301631 - DNA, 486 bp, Artificial Sequence
  derived and/or modified sequence
atgggcaagagcgagagccagatggacatcaccgacatcaacaccccaaaacccaagaagaagcagcggtggaccccccttgagatctcactctctgttcttgtcctgttgctcaccattattgccgtgactatgattgcgttatatgcgacctacgatgacggtatctgtaaatcttctgactgcattaagtcggccgcccggctgatccagaatatggacgcaacaactgagccttgcaccgattttttcaagtatgcttgtggcggttggttgaaacgcaatgtcatccccgaaacatcttccaggtacggcaatttcgacatactccgggatgagttagaagtcgtgctgaaagacgtgctacaagaacctaaaacagaggacattgtggcagtgcaaaaggccaaggcgctctatcggtcctgtatcaacgaatctgcaattgatagcaggggaggagagcctttgcttaaactcctctag

SEQ ID NO: 301632 - DNA, 282 bp, Artificial Sequence
  derived and/or modified sequence
atgggcaagagcgagagccagatggacatcaccgacatcaacacccccaaaccaaaaaaaaaacagaggtggactcccctcgaaatttccctgagcgtccttgtcttactgcttacaattattgcagtcaccatgattgctctttacgccacatatgacgacggaatctgtaagtctagcgattgtatcaagagtgctgcccgactcattcagaacatggatgctaccaccgaaccctgcactgatttcttcaagtatgcatgtggtggttggttgaagtag

SEQ ID NO: 301633 - DNA, 702 bp, Artificial Sequence
  derived and/or modified sequence
atgggcaagagcgagagccagatggacatcaccgacatcaacaccccgaaaccaaagaagaaacaacgatggacacccctggaaatttctctgtccgtgctggttctgctgctgaccattattgctgtcacaatgatcgctttgtatgctacttacgacgatggaatttgcaagtcctcggactgcatcaaatctgccgccaggctgatccagaatatggacgctacaactgagccctgcactgacttcttcaagtacgcgtgcggaggctggctaaagagaaatgtgatacccgaaacttcttcaaggtacgggaattttgatattctcagggatgagctcgaagtggtcttaaaggatgtcctccaggaacctaaaaccgaagatatcgtggctgttcagaaagccaaggctctgtaccgctcctgtattaatgaatctgctattgacagccgcggtggggagccgctgctgaaactgctgcccgacatctacggatggcctgtggccacagaaaattgggagcagaagtatggcgcctcctggactgcggagaaggccatagctcaattaaatagcaagtatggcaagaaggtgttgatcaatctgttcgtgggcaccgatgacaagaacagcgttaatcatgttatccacattgaccagccccgactggggttaccaagcagggactattatgaatag

SEQ ID NO: 301634 - DNA, 360 bp, Artificial Sequence
  derived and/or modified sequence
atgggcaagagcgagagccagatggacatcaccgacatcaacacccccaagccaaaaaagaaacagcggtggactccactggaaataagcctgtccgtgctggtgctgctgctgacgataattgcagtgactatgattgcactatatgcaacgtatgacgacgggatatgtaaatcatccgactgtataaaatcggcagccagactgatacagaacatggacgccacaaccgagccctgtaccgatttctttaagtacgcttgcgggggttggctgaaacggaacgttatccctgagacttcttcccgatatggaaattttgatatcctgcgcgacgaattggaggttgttcttaaatag

SEQ ID NO: 301635 - DNA, 2253 bp, Artificial Sequence
  derived and/or modified sequence
atgggcaagagcgagagccagatggacatcaccgacatcaacacccctaagcccaagaaaaagcaacggtggacaccgctcgagatcagtctgtccgtgttagtactgctgcttaccatcattgcagttactatgatagccctctacgcaacgtacgacgacggcatctgcaagagcagcgactgcatcaagtccgccgcccgcttgatacagaacatggatgcaaccacagaaccctgcacggattttttcaaatatgcctgcggtggatggctaaaacggaacgtaattcccgagaccagtagcaggtatggcaattttgatatcctgcgagatgagctcgaagtggttctaaaggatgtgcttcaggaaccaaaaaccgaggatatcgtggccgtgcaaaaagcaaaggccctgtaccgaagctgtataaacgaatctgccatcgattctcgggggggagagcccctcctgaaactccttcctgacatctatggttggccagtggcaacagagaactgggaacaaaaatatggggcctcctggacagccgaaaaagcaatcgcccaactgaattcaaagtatggcaagaaggtgctgatcaatctcttcgtgggtactgatgacaagaactctgtgaatcacgtgatccacatcgatcagccacgacttggactgccatcacgtgactactacgagtgcactgggatctacaaggaagcctgtaccgcctacgtcgacttcatgatttccgtggcgcgattgatccggcaagaggagcgactgcctatcgacgagaaccaattggcactggagatgaataaggtgatggagctggagaaagaaatcgccaatgctaccgctaagccggaggataggaacgacccaatgctcctctataataaaatgaccctcgcccagattcagaacaatttctcacttgaaatcaatggaaaacctttcagctggctgaatttcacaaatgagatcatgagcacagtgaacatcagcattacaaacgaagaggatgtggtcgtttatgctcctgaatatttaacaaaactgaagcccatcctgacaaaatattccgcccgagacctacaaaatttaatgtcttggcgctttatcatggatctcgtgtcatccctttctcgcacctataaggagtctaggaacgcttttaggaaggccctgtacggcactacttccgagaccgcaacttggcggagatgtgccaactacgtcaacggtaatatggagaacgccgtaggtcggctatatgtggaggcggcattcgcaggtgaatccaagcacgtcgttgaagatcttattgctcagattagagaggtctttattcagacactcgacgatcttacctggatggatgccgagacgaaaaagagagccgaggagaaagctcttgccatcaaagagaggatcggttacccagacgatatagtatcaaatgacaataaactgaacaatgaatacctggagctcaactataaggaggatgagtactttgaaaacatcatccagaacttgaagttctctcagtccaagcagctcaagaagctccgagaaaaagtggataaggatgagtggatctccggcgcagccgttgtgaacgcattctatagctctgggagaaaccagatcgtttttcctgcagggatacttcagccgcccttcttttctgctcagcagagcaactcactcaactatggtgggatcggcatggttatcggccacgagattactcacggttttgatgataatgggagaaacttcaacaaagacggggacctggtggattggtggacccagcagtcggccagcaactttaaagagcaaagccagtgcatggtttaccaatatggaaacttcagctgggacctggccgggggccaacacttaaatggaatcaataccctgggcgagaacatagcagataacggaggtctcggacaggcttacagagcatatcagaattacattaagaagaatggggaggaaaagttgcttcctggactggacctcaaccacaaacagctgtttttcttgaattttgctcaagtctggtgtggcacctaccggcctgagtacgccgtgaattcaatcaagaccgacgtccactcacctggtaatttcaggattattggcactctgcagaattctgccgaattttcagaagcattccactgtcgcaagaactcctatatgaaccccgagaagaagtgtcgcgtgtggtag

SEQ ID NO: 301636 - DNA, 2253 bp, Artificial Sequence
  derived and/or modified sequence
atgggcaagagcgagagccagatggacatcaccgacatcaacacccccaagcccaaaaagaagcaaaggtggaccccacttgagatttctctctctgtgctggtgctgttgttaaccattattgctgtgacaatgatcgccctgtacgcaacctacgacgatggtatttgtaagtcttctgactgtatcaagtctgccgctcggctgattcaaaacatggacgctacaacagaaccatgtaccgacttttttaagtatgcctgtggtggctggctgaagcgcaacgtcatacctgagacctcttctagatatggcaacttcgatatcttaagggacgagcttgaagtggtacttaaggacgtgctgcaggaacctaaaactgaggacattgtggcagttcagaaagccaaggccctttataggagttgtataaacgagagtgctatagacagcaggggcggagagcccctcctgaagttgctccccgacatttacggctggcccgtggcaactgaaaattgggagcagaaatatggagcaagttggacagcagagaaggctattgcccagcttaactccaagtatggcaagaaagtgttgattaatttgtttgtgggaaccgacgataaaaattccgtgaatcatgtaatccacattgaccagccgcgcctgggactgcccagccgcgattactacgagtgcacgggaatctacaaggaggcttgcactgcctacgtcgatttcatgatatccgtcgcacggctcatacgtcaggaagagcgcctgcccatcgatgagaaccagctagctttggagatgaataaagtcatggaactggaaaaagagattgccaatgctactgcaaagccagaggaccgaaatgacccgatgcttctgtacaacaaaatgaccttagctcagatccagaacaactttagccttgagataaatggcaaaccattctcatggctgaacttcaccaatgagatcatgtctacagtaaatatcagtattacgaacgaggaagacgtggtggtctacgctcccgagtacttaactaaacttaaacctatcctcacgaagtacagcgcccgcgacttgcaaaatcttatgtcatggaggttcatcatggacttggtgtccagtctgtcccgtacatacaaggagagccgcaatgctttccggaaagccctttacggtacaacctcagagacagctacctggcgcaggtgtgccaattacgttaatggaaatatggagaacgctgtgggcaggctgtatgtagaggctgcttttgcaggagagtcaaaacatgtcgtggaggacctaatagcccagatccgggaagtttttatccaaacactggacgatctgacatggatggatgctgagaccaagaagagagccgaggagaaggcgctggctatcaaagagcgcattgggtatcctgatgatatcgtgagcaatgacaacaagttgaacaatgaatacctggagcttaattataaggaggacgaatactttgagaacatcattcagaatttgaagtttagccaaagcaagcagctgaagaaacttcgagagaaggtggataaggatgaatggatctcaggggccgcggtggtgaatgcattctactcctctgggcggaaccaaatcgtgttcccggccggcatattgcagcccccattcttcagtgcacagcagtctaacagcctaaactacggggggatcggcatggtgatcgggcacgaaatcacccacggtttcgacgacaatggaagaaactttaacaaggacggagacctggtagactggtggacccaacagtcagcctcgaatttcaaggaacagagccagtgcatggtgtaccagtatggcaacttctcctgggatttagctggtgggcagcaccttaatgggattaacacactgggcgaaaatatcgccgacaacgggggactgggacaggcctaccgagcttaccaaaattacattaaaaagaatggggaagaaaaactgcttccaggactcgacttgaaccataagcaactgttttttttaaattttgcccaggtgtggtgtggcacgtacagacccgagtacgcagtgaactccatcaagactgatgtgcattcccctggaaattttcgtattatcggcaccctgcagaatagcgctgaattcagcgaggctttccattgccggaaaaattcatatatgaatccggaaaagaagtgccgtgtatggtag

SEQ ID NO: 301637 - DNA, 2253 bp, Artificial Sequence
  derived and/or modified sequence
atgggtaaaagtgagtctcagatggacataacggacattaatacccctaaacctaaaaagaagcagcgctggacaccactcgaaataagcctcagtgtgctggtgctgctgctgaccatcattgccgtcactatgattgcattatacgccacatacgatgatggaatctgcaaaagttccgactgcatcaaaagcgcagcacggctcattcagaatatggacgccacgaccgaaccctgtaccgatttttttaagtacgcatgtgggggttggctcaagagaaatgtgatccctgaaaccagctcaaggtatggcaattttgatattctccgtgatgaacttgaggttgtgctgaaggatgtcctgcaggaacctaaaaccgaagacattgtggctgtacagaaggctaaggcgttataccggagctgcatcaatgaaagcgccatagacagcagaggcggtgaaccactgctgaagctgctccctgatatctacggttggcccgtggctacagaaaattgggagcagaaatatggtgcatcatggaccgcggagaaagcgattgcccaactcaacagcaaatacgggaagaaagttctcattaaccttttcgttggaacggatgacaaaaactcggtgaatcacgtaattcacatcgatcagccgagactgggtttaccgagccgggattactacgagtgcacgggcatttataaagaagcttgcaccgcttatgtcgacttcatgattagtgtcgcaaggctgattagacaggaggagcgcctgccgatcgacgaaaaccagctggcactagagatgaacaaagtaatggaacttgaaaaggaaattgctaatgccaccgcaaagccagaagataggaacgatcctatgctgctgtataataaaatgacattggctcaaatccagaacaatttcagtttggagattaatggaaaacctttttcatggctcaatttcaccaatgagatcatgtcaaccgtaaatatttctattaccaacgaggaagacgtcgtggtgtatgctcctgaatatttaactaagctgaagccaattcttacaaaatatagcgcgcgtgatttacagaatctaatgtcttggcgcttcattatggatctcgtgtcctcgctgagtcgcacgtacaaggagtctaggaacgcgtttaggaaagccctctatggcaccacatccgagaccgcaacctggaggaggtgcgccaactacgtcaacggcaacatggagaatgcggtgggcagactgtatgtcgaagctgccttcgccggagagtcgaagcatgtcgtcgaagatctgattgcccagatccgggaggtcttcattcagaccctcgatgatctgacatggatggatgcagagactaagaaaagggccgaggagaaagccctggctatcaaagaaaggataggctacccagacgatatagtctctaacgataacaagcttaataatgagtatctggagctaaattataaggaagatgagtactttgaaaacattattcagaatctaaagttttcccagagcaagcaactaaaaaaactgagggagaaagtggataaagacgagtggatttcgggagcagcagttgtgaacgccttctattcctccgggcgaaaccagattgtgtttccagccggaatattgcaacctccatttttcagcgcacagcagtcaaattctttgaactatggaggcatcgggatggtcatcggacacgaaatcacccacggcttcgacgataatggacgcaatttcaataaagatggagacctggtggactggtggactcagcagtctgcgagcaattttaaggaacagtctcagtgtatggtctaccaatatggaaatttctcatgggatctggcgggtggtcagcacttgaatgggattaacacactgggagaaaatatagccgacaacgggggactaggacaggcttaccgcgcttatcagaattatatcaaaaagaacggggaggagaagctcctacccggattggacctcaaccataagcagttattcttcctgaacttcgcccaggtctggtgcgggacctatcgaccagagtatgccgtgaattctatcaagactgatgtccactctcccggaaatttcagaatcattggcaccctccaaaattctgccgagttcagcgaagcatttcactgtcggaagaacagttatatgaatcctgagaaaaaatgtcgcgtctggtag

SEQ ID NO: 301638 - DNA, 2253 bp, Artificial Sequence
  derived and/or modified sequence
atgggtaaaagtgaatcccagatggacatcacggacattaacactccgaaacccaagaaaaagcagcgctggacacccttggaaatttcccttagcgtgctggtcttactattaacaattattgcggtgaccatgattgcattgtatgccacctacgatgacgggatctgcaagagctccgactgtataaagagcgccgcacgactgattcaaaacatggatgcaactactgaaccctgcacagatttcttcaaatacgcctgcggagggtggctgaaaagaaatgtcatccccgagacctcaagccggtatgggaactttgacatcttgcgagatgaattggaagtagtccttaaggacgtgctgcaggaaccaaagaccgaggatatcgttgcagtgcagaaggcaaaagcactgtacagaagctgtattaacgaatctgcaattgactccagaggtggggagccgctgctcaaacttttgccagacatctacggttggcctgtggctactgaaaactgggaacagaagtatggagcatcctggactgcggaaaaagccatcgcgcagcttaatagcaaatacggaaaaaaggtcttaataaatctttttgtgggaaccgacgataagaacagcgtgaatcacgtgatccacatagatcagccaagattgggcctgccgtcacgagactattatgaatgtacgggaatctacaaagaggcgtgcacagcatatgttgactttatgatcagcgtggccagactgattaggcaggaagaacggcttcccattgatgagaaccagcttgccttggagatgaataaagtcatggagcttgaaaaggagattgcaaacgctaccgcgaaaccagaagaccgcaacgatcctatgctcctctataataaaatgacgctagctcaaattcagaacaatttctccttggagatcaacggcaagccattcagctggttgaactttactaacgagattatgtctacagtgaatatttccataacaaacgaggaggacgtggtggtttacgcccctgaatatctcaccaaactaaagcctattctaacaaagtactctgcccgagatttgcagaacctgatgtcctggcgatttattatggatttggtaagcagtctgtctcgcacctacaaagagagtaggaacgcgtttcgtaaggcgctgtacggcacaacatctgagactgcaacatggcggcgatgcgctaactatgttaatggcaacatggagaacgctgtcggtagactgtacgtggaggccgcatttgcaggcgagtctaagcacgtcgtggaagacctgattgctcagattcgggaggttttcatccagaccttagatgacctaacttggatggatgccgaaaccaagaagcgggcagaagaaaaagccctcgccattaaagaacgaatcggctacccggatgacatcgtgtccaatgataataagcttaacaatgaatacctggagctgaactacaaggaagacgagtattttgagaacatcattcagaacctcaagttcagtcagagcaagcagttgaaaaaacttcgggaaaaggttgataaagatgaatggattagcggcgctgcggtcgttaacgcattctatagctccggtcgaaatcaaattgtgtttcccgcaggtatcttacagcctccctttttcagcgctcagcagtccaattcactaaattatggcggaattggaatggtgatcggacacgagattactcatggatttgatgacaatggacggaacttcaacaaagatggtgacctggtagactggtggacccagcaaagtgcaagtaatttcaaggaacagtcccagtgcatggtgtatcagtacggtaacttttcatgggatctggcaggcggtcagcatttaaatggcatcaataccttaggggagaacattgcagacaatggcggtctcgggcaggcgtacagggcctatcagaactatatcaagaagaatggcgaagaaaagctgttgccgggactcgatcttaatcataagcagttgttcttcttaaattttgctcaggtttggtgcggaacatacaggccagaatatgcagtgaactccatcaagactgacgtccactccccaggcaattttagaataattggaacgctgcaaaactcagcagaattctctgaggcatttcactgtagaaaaaattcgtacatgaatccggaaaaaaaatgccgagtatggtag

SEQ ID NO: 301639 - DNA, 2253 bp, Artificial Sequence
  derived and/or modified sequence
atgggaaagagtgagtctcagatggatataacagatataaatactcctaagccaaaaaaaaaacagcgttggacgccacttgaaatttccctgtcagttctggtactcctgctgacgattattgctgtaacaatgatagccttgtacgccacctatgacgacgggatctgcaaatctagcgactgtatcaaatccgccgctagactgatccagaacatggatgccacgacagaaccctgtacagacttcttcaaatatgcctgtggtgggtggctcaaacgtaacgttattcccgagactagtagtagatacgggaatttcgatatcctcagagacgagctggaggtcgtcctcaaggatgtgttacaggagcccaaaactgaggatatagtcgccgtccagaaggccaaggccctgtaccgcagctgtatcaacgagtctgcgatagacagcagaggcggagaaccactgctcaagctgctccccgatatatatggatggcccgtggctaccgagaactgggaacaaaagtatggcgctagctggacagccgagaaggccatcgcgcagttaaattctaagtacgggaagaaggtgctgatcaatcttttcgtcggaacagatgacaagaatagcgtgaaccacgtcatccacatagatcagcccagactgggtctgccatcacgtgattactatgagtgcactggtatttacaaagaggcatgtacagcatatgtggatttcatgattagtgtggcacgactcatcaggcaggaggagagactgcccatagatgagaaccagctggcactggaaatgaataaggttatggagcttgagaaagagattgccaacgcgacggccaagccagaagataggaacgaccctatgttgctctacaacaagatgacactagcacaaatccagaacaactttagcctagaaattaatggaaagccttttagttggctcaactttacaaacgagatcatgtccaccgttaatatctctattacaaacgaggaggatgttgtggtgtatgctccagagtaccttacaaaactcaaacctatcctcaccaagtactccgcacgagatctgcagaatctgatgtcgtggaggttcatcatggacttagtgtctagtctgtccaggacatataaagagtcccgcaatgctttccgaaaagccctgtacggtaccacttcagagacagcgacttggaggagatgtgccaattacgtaaacggcaatatggagaatgccgttggacgactctatgtggaggctgcctttgccggagagagcaagcatgtggtggaagacctgatcgcccagattcgcgaagtgttcattcagacattggatgacctgacctggatggatgccgagacaaagaaacgagccgaggagaaggcactggctattaaggaaagaatcgggtatcccgatgacatcgttagtaacgataataaactgaacaatgaatacttggaactcaactataaggaggacgaatattttgagaatattatccagaatctgaagtttagtcagtctaaacagctgaagaaactacgagagaaggtggataaggacgaatggatctccggggctgccgtagtcaacgctttctactcttccggcagaaaccagattgtgtttcctgctggaattcttcagcccccattcttttctgcgcagcagagcaactccctgaattatggcggtattggaatggttatcggccatgaaattactcacggcttcgatgataacggccgaaactttaataaagatggtgacctggttgactggtggacccaacaaagtgcttcaaactttaaggaacaatcacagtgtatggtgtaccagtatgggaactttagctgggacctcgccggtgggcagcacttgaatggtatcaacactctgggggaaaacattgcggacaacgggggtctggggcaagcttatcgggcttatcagaattacataaaaaagaatggagaggagaaacttctgcccggtcttgatctcaaccacaaacaactcttcttcttgaactttgctcaggtgtggtgcgggacatacaggcctgaatatgcagtgaattccatcaaaacggacgtccatagccctggaaactttaggataataggcacactgcagaactcagcagagttcagtgaagcctttcattgccgaaaaaacagttatatgaacccggagaaaaaatgtagggtatggtag

SEQ ID NO: 301640 - DNA, 486 bp, Artificial Sequence
  derived and/or modified sequence
atgggcaagtctgaatcgcaaatggacattaccgatattaatactcccaaacctaagaaaaagcagcggtggacaccactcgaaatctctttaagcgttcttgtacttttgcttacaattattgccgtgactatgatcgctctgtatgcaacgtacgacgatgggatctgtaagtcctctgactgtatcaaatctgccgcacgcctaatccagaacatggacgcaaccacagagccctgtactgacttctttaaatatgcgtgtggaggctggctgaaaaggaatgtaatccctgaaacctcatcaaggtacggaaacttcgacattctcagggacgaacttgaggtggtactgaaggacgtgctgcaagaaccaaaaaccgaggatatcgtggcggtgcagaaagctaaagcgttatatcgctcatgtatcaacgaatctgctatagactccagaggaggagaaccactgctgaaactgctgtag

SEQ ID NO: 301641 - DNA, 282 bp, Artificial Sequence
  derived and/or modified sequence
atggggaagagcgagtcgcaaatggatattaccgatataaacacgcctaaaccaaaaaaaaaacagaggtggacccccctagaaatcagtctgtccgtgttggtcctgttgttaacaattatcgccgtgaccatgatcgcgctctatgccacctacgacgacggcatctgtaagtctagcgattgtatcaagagtgcagcacggttaattcagaacatggatgccacaacagagccttgtacggacttctttaaatatgcatgtgggggatggctaaagtag

SEQ ID NO: 301642 - DNA, 702 bp, Artificial Sequence
  derived and/or modified sequence
atgggcaagtctgagtctcaaatggatattacggacataaacacaccaaagcctaagaagaaacagcggtggacacccctagagatttctttgagtgtcttagtgctcctccttaccattatcgctgttaccatgattgctctttacgctacgtacgatgacggaatttgcaagagcagtgattgtataaagtccgccgctagattgatccaaaacatggacgctactacggagccatgcaccgactttttcaaatatgcctgtgggggttggctgaagcgtaacgtcattcctgaaactagctccagatacgggaacttcgacatccttcgggatgaactggaggtagtactcaaagacgtgctccaagagcctaagacagaggatatcgtggccgtccagaaggcaaaagctctgtaccggtcctgcattaatgaaagcgcgatcgactctaggggcggagagcctctgctgaagttactgccggacatctatgggtggccagtggctacagaaaattgggaacagaaatatggcgcatcttggaccgccgaaaaagctattgcccagctcaactcgaagtacggaaaaaaggttctgattaaccttttcgtaggtacggacgacaagaactcagtcaatcacgtcatacatatagatcagcccagactgggtctaccttcacgtgactactatgagtag

SEQ ID NO: 301643 - DNA, 360 bp, Artificial Sequence
  derived and/or modified sequence
atgggaaaaagtgagagtcagatggacatcaccgacataaacacacccaaacccaagaaaaaacagcggtggacaccgctcgaaatttccctgagcgtgctggttctccttcttacaatcatcgctgtgaccatgattgccctgtatgctacctatgacgatgggatctgcaagtcaagtgattgtatcaaatcagccgcacgcctgattcagaacatggatgccaccaccgagccctgtaccgatttctttaaatatgcatgtggcggttggttgaaacgtaacgtcataccagagacaagctcccgatacggaaactttgatattctccgcgacgagcttgaagttgtcctgaaatag

SEQ ID NO: 301644 - DNA, 2253 bp, Artificial Sequence
  derived and/or modified sequence
atgggaaaaagcgagagtcagatggacataacagatattaatacaccgaaacctaaaaagaagcaacgctggactcctctggagatctccctcagtgttctggtgctcctgctgaccattatcgctgtgaccatgattgctttgtacgccacttacgacgacggcatctgtaaaagctccgactgcataaagagcgcagcacggttgattcagaatatggacgctaccaccgagccttgtaccgacttctttaagtacgcgtgtgggggttggctgaaacggaacgttatccctgagaccagtagtcggtacggcaacttcgatattcttcgagacgagctggaggtggtcctcaaggacgtactgcaggagcctaaaaccgaggacatcgtcgccgtgcagaaagctaaggccctgtatcgatcatgcattaacgagtccgctatagatagccgtgggggtgagcctctgctgaaactgctgccagacatttatgggtggccggtcgccaccgagaactgggaacagaagtacggcgctagctggacggctgaaaaagccattgcgcaacttaacagtaaatacgggaaaaaggttctgatcaacctatttgtgggaacagatgacaagaatagtgtaaatcatgtgattcacatcgatcagcctcgattgggactgccgagtagggattattatgagtgtacaggcatctataaagaggcatgtactgcatacgtggattttatgattagcgtggcccgtctgatccgccaagaggagcggctgcccatcgacgaaaatcagctggctctcgaaatgaacaaggtgatggagctggagaaagagatcgcgaacgctactgctaagcccgaggatcgcaatgacccaatgctgctgtacaacaagatgaccctagcacaaatccagaataatttttctctggagattaatggcaagcccttctcctggctcaactttactaatgaaattatgtctactgttaatatctcgattacgaatgaagaggacgttgtggtatatgcgccagagtacctgaccaagctgaaaccgatcttgaccaaatactcagctcgtgaccttcagaacctcatgagctggagattcatcatggacctcgtaagcagtctgtcccgcacctacaaggagagtcggaacgctttcaggaaggccctgtacggcactacatccgaaaccgcaacatggcgcaggtgtgccaactatgttaacggcaacatggagaatgctgtcgggcgactgtatgtggaggcggctttcgccggtgaaagcaaacatgtggtggaagatctgattgcccaaatccgtgaagtattcattcagactctggatgacctgacatggatggacgctgagacaaagaagcgtgccgaagagaaagcattggcaattaaggaacgcatcggctaccccgatgatattgtgagcaatgataacaaactaaacaacgagtacctggaacttaattataaagaggatgaatactttgaaaatatcatccagaacctcaagttttcacagtccaaacagctcaagaagcttcgggaaaaagtcgacaaggatgaatggatttccggtgccgctgtggttaacgcgttctacagctcagggcgaaatcagattgtctttccagcaggtatactgcaacccccattcttttctgcacaacagtcaaactccctgaattacggtggaatcggtatggttattggacacgaaatcacccacggcttcgacgacaacgggaggaactttaataaagacggagacctggtcgactggtggacccagcagtctgcaagcaacttcaaagagcaatcccagtgcatggtttatcagtacgggaatttttcctgggatctcgccggagggcagcacttgaatggaattaatacgctcggcgagaatattgctgacaacggaggccttggacaggcctaccgcgcataccaaaattacatcaaaaagaatggcgaagagaaactgctgcctggattggaccttaaccacaaacagctgttcttcctaaattttgcacaggtctggtgcggtacataccggccagagtatgccgtgaactctatcaagacagacgtgcattctcctggtaacttcaggattataggtaccctgcagaacagtgcagaattctccgaggctttccattgcagaaaaaacagttacatgaaccccgagaaaaagtgcagggtttggtag

SEQ ID NO: 301645 - DNA, 2253 bp, Artificial Sequence
  derived and/or modified sequence
atgggaaaatccgaatcccagatggacatcacagatataaatacccccaagcctaaaaagaaacagcggtggactccactcgaaatcagtctgtccgtcctcgtcctgctcctgaccatcatagctgtcaccatgatcgccctctacgccacctatgatgatggcatatgtaagtcgagcgattgtattaagtcagccgctagactcattcagaatatggacgcgacaaccgaaccttgcacagacttctttaagtatgcttgtggcggatggctgaagcgcaatgtgatccctgagacaagctccagatatggaaactttgatattctgcgagatgagctggaggtggttctgaaagatgtcctgcaggagcctaaaactgaggacattgtagcggtgcaaaaggccaaggcattataccgcagttgcatcaacgagtctgccatcgactccaggggcggagaaccattgctgaaactactgcccgacatctacggctggcccgtcgcgaccgagaactgggagcagaaatatggcgcatcatggactgctgaaaaggctatagcacagctcaactcaaagtacgggaagaaggtactaatcaaccttttcgtggggactgacgacaaaaatagcgtgaaccacgtgattcacatcgaccagccccgacttggactcccatctcgggattactatgagtgtaccggcatctacaaggaggcttgcacagcgtatgttgattttatgatcagcgttgctaggctgataaggcaggaggagagattacctatcgatgaaaaccaacttgccctcgaaatgaataaagttatggaactggaaaaagaaatcgccaatgctacggcgaagcctgaagatcgcaacgatccaatgctgctctataacaagatgaccttagcccaaatacagaacaacttttcactggaaatcaacggtaagccgttctcatggcttaacttcacaaacgagattatgtctaccgttaacatctctatcacgaacgaagaagacgtggtggtatacgcaccagaatatctgaccaagctgaagcctatcctgacaaagtatagcgcgagggatttacagaacttgatgagctggcgttttattatggatctggtgagcagcctttccaggacttacaaggaatctcgaaacgcttttagaaaagctctctacggcacgacgagcgaaacagccacttggcggagatgtgccaactacgttaacgggaatatggaaaacgcggtgggtcgattgtatgtagaggcagcttttgccggtgagtccaagcacgtagttgaggatctgatcgcacagatacgggaggtatttattcagactctggatgacctgacctggatggatgctgagacgaaaaaaagggctgaagaaaaggctcttgccatcaaggaacgtattggatatccagacgatattgtctctaatgataataagctcaataacgaatacttggaactgaattacaaggaggacgagtacttcgagaacatcatacagaatctgaagttctcgcaatctaaacagctaaaaaaattgagagagaaagtcgataaggacgagtggatttctggcgcagccgtcgtgaatgccttctattcgagcggacggaaccagattgtgttcccagccggaatcctccagccgccattcttttctgctcagcagtccaactcactgaactacggaggaatcggcatggtaattggccacgagatcacccatggctttgatgacaatggacgtaactttaataaggacggcgacttagtcgactggtggactcaacagtcagcaagcaactttaaggagcagtcacagtgcatggtgtatcaatacggcaatttttcctgggatcttgctggcggacagcacctgaacggcatcaacacattaggcgaaaacatcgcagataacggtggtctcggacaggcatatcgcgcatatcaaaactacatcaaaaagaatggtgaggagaaattgctgccaggattggatttaaatcataaacagctgtttttcctgaattttgcccaagtatggtgtggcacataccgccctgagtatgctgtcaattctatcaagacggatgttcacagccctggaaacttcaggattatcggcactctgcagaattccgcagaattcagtgaagcatttcactgccggaagaattcctacatgaacccggaaaagaagtgcagagtttggtag

SEQ ID NO: 301646 - DNA, 48 bp, Artificial Sequence
  derived and/or modified sequence
atggggaagtcagagagccagatggatatcaccgatattaatacttag

SEQ ID NO: 301647 - DNA, 201 bp, Artificial Sequence
  derived and/or modified sequence
ggttacctgtctgtcgaggaacgcccctgtcaaagcttatgtgacctacagcctgacttttgtctgaatgatgggaagtgcgacatcatgccagggcacggggctatctgctccggcagctcacggcagccagacagtctctcttcaattgaaaatgccgttaagtataaccccgtgtacgaaagtcaccgcgctggttag

SEQ ID NO: 301648 - DNA, 200 bp, Artificial Sequence
  derived and/or modified sequence
tggatacctgagtgtggaagaacggccctgtcagagtctctgtgacctacagcctgacttctgcttgaatgatggaaagtgtgacattatgcctgggcacggggccatttgtagtggctccagcaggcagcctgacagcctctcatctattgagaatgctgtgaagtacaaccccgtgtatgaaagtcacagggctggat

SEQ ID NO: 301649 - DNA, 201 bp, Artificial Sequence
  derived and/or modified sequence
ggctacctgtctgtggaggagcggccctgccagagcctgtgtgacctgcagcctgacttctgcctgaatgatggaaaatgtgacatcatgcctggccatggagccatctgcagcggcagcagccggcagcctgacagcctgagcagcattgaaaatgctgtgaagtacaaccctgtgtatgagagccacagagctggatag

SEQ ID NO: 301650 - DNA, 201 bp, Artificial Sequence
  derived and/or modified sequence
ggctacctgagcgtggaggagcggccctgccagagcctgtgcgaccttcagcccgacttctgcttaaatgacggaaagtgcgatatcatgccaggacacggcgctatatgttccggcagctcccggcagcctgatagcctcagctccatcgagaatgccgtgaagtataacccagtgtacgaatcccaccgcgctggctag

SEQ ID NO: 301651 - DNA, 201 bp, Artificial Sequence
  derived and/or modified sequence
ggctatctgagcgtggaggagcggccttgccaatctctttgtgatctgcagcctgatttctgcctaaacgacggtaagtgtgacataatgcctggacacggcgcaatttgttctggctcctcccgccaacccgatagcctgagctcaatagagaatgctgtgaagtataatcccgtctacgagtcccacagggctggttag

SEQ ID NO: 301652 - DNA, 201 bp, Artificial Sequence
  derived and/or modified sequence
ggctacctgagcgtggaggagagaccctgccagagcctgtgcgacctgcagcccgacttctgcctgaacgacggcaagtgcgacatcatgcccggccacggcgccatctgcagcggcagcagcagacagcccgacagcctgagcagcatcgagaacgccgtgaagtacaaccccgtgtacgagagccacagagccggctag

SEQ ID NO: 301653 - DNA, 118 bp, Artificial Sequence
  derived and/or modified sequence
gaatcgaatggaatcaacatcaaacggaaaaaaacggaattatcgaatggaatcgaaaagaatcatcgaacggactcgaatggaatcatctaatggaatggaatggaagaatccatgg

SEQ ID NO: 301654 - DNA, 136 bp, Artificial Sequence
  derived and/or modified sequence
tggaattatcgtcgaatagaatcgaatggtatcaacatcaaacggaaaaaaacggaattatcgaatggaatcgaagagaatcatcgaacggactcgaatggaatcatctaatggaatggaatggaataatccatgg

SEQ ID NO: 301655 - DNA, 105 bp, Artificial Sequence
  derived and/or modified sequence
actcgaatgcaatcaacatcaaacggaatcaaacggaattatcgaatggaatcgaagagaatcatcgaacggactcgaatggaatcatctaatggaatggaatgg

SEQ ID NO: 301656 - DNA, 102 bp, Artificial Sequence
  derived and/or modified sequence
atggaatcaacatcaaacggaatcacacggaattatcgaatggaatcgaaaagaatcatcgaacggactcgaatggaatcatctaatggaatggaatggaag

SEQ ID NO: 301657 - DNA, 103 bp, Artificial Sequence
  derived and/or modified sequence
aatggaatcaacatcaaacggaatcaaacggaattatcgaatggaatcgaagagaatcatcgaacggactcgaatggaatcatctaatggaatggaatggaag

SEQ ID NO: 301658 - protein, 583 aa, Artificial Sequence
  derived and/or modified sequence
MVMKEIPREESAEEKPLLTMTSQLVNEQQESRPLLSPSIDDFLCETKSEAIARPVTSNTAVLTTGLDLLDLSEPVSQTQTKAKKSEPSSKTSSLKKKADGSDLISTDAEQRGQPLRVPETSSLDLDIQTQLEKWDDVKFHGDRNTKGHPMAERKSSSSRTGSKELLWSSEHRSQPELSGGKSALNSESASELELVAPTQARLTKEHRWGSALLSRNHSLEEEFERAKAAVESDTEFWDKMQAEWEEMARRNWISENQEAQNQVTISASEKGYYFHTENPFKDWPGAFEEGLKRLKEGDLPVTILFMEAAILQDPGDAEAWQFLGITQAENENEQAAIVALQRCLELQPNNLKALMALAVSYTNTGHQQDACDALKNWIKQNPKYKYLVKSKKGSPGLTRRMSKSPVDSSVLEGVKELYLEAAHQNGDMIDPDLQTGLGVLFHLSGEFNRAIDAFNAALTVRPEDYSLWNRLGATLANGDRSEEAVEAYTRALEIQPGFIRSRYNLGISCINLGAYREAVSNFLTALSLQRKSRNQQQVPHPAISGNIWAALRIALSLMDQPELFQAANLGDLDVLLRAFNLDP

SEQ ID NO: 301659 - protein, 195 aa, Artificial Sequence
  derived and/or modified sequence
MWHMTRNWPLVGKTSLITRFMYDSFDNTYQATIGIDFLSKTMYLEDRTVRLQLWDTAGQERFRSLIPSYIRDSTVAVVVYDITNLNSFQQTSKWIDDVRTERGSDVIIMLVGNKTDLADKRQITIEEGEQRAKELSVMFIETSAKTGYNVKQLFRRVASALPGMENVQEKSKEGMIDIKLDKPQEPPASEGGCSC

SEQ ID NO: 301660 - DNA, 588 bp, Artificial Sequence
  derived and/or modified sequence
atgtggcacatgaccagaaactggcccctggtgggcaagaccagcctgatcaccagattcatgtacgacagcttcgacaacacctaccaggccaccatcggcatcgacttcctgagcaagaccatgtacctggaggacagaaccgtgagactgcagctgtgggacaccgccggccaggagagattcagaagcctgatccccagctacatcagagacagcaccgtggccgtggtggtgtacgacatcaccaacctgaacagcttccagcagaccagcaagtggatcgacgacgtgagaaccgagagaggcagcgacgtgatcatcatgctggtgggcaacaagaccgacctggccgacaagagacagatcaccatcgaggagggcgagcagagagccaaggagctgagcgtgatgttcatcgagaccagcgccaagaccggctacaacgtgaagcagctgttcagaagagtggccagcgccctgcccggcatggagaacgtgcaggagaagagcaaggagggcatgatcgacatcaagctggacaagccccaggagccccccgccagcgagggcggctgcagctgctag

SEQ ID NO: 301661 - DNA, 588 bp, Artificial Sequence
  derived and/or modified sequence
atgtggcacatgaccaggaattggccactcgtgggtaaaacatctctgatcacccggtttatgtacgattcttttgacaacacctaccaggcgacgatcggaatcgatttcctaagcaagacaatgtatcttgaagacaggaccgtgagactgcagttgtgggatactgctggccaagaacggtttagatctctgataccatcttacatccgagactccaccgtagcagtcgtggtttacgacattactaacttgaacagcttccaacagactagcaagtggatcgacgacgtgcgaacggagcggggctcggacgttatcatcatgctggttggcaataaaactgatctggcagataaacgccagattacaattgaggaaggagagcagagggcaaaagagctttctgtaatgtttatcgagacctctgcgaaaaccggctataatgttaaacagttgttccggagggtggcttccgccctccctggaatggagaatgtgcaggaaaagagcaaggaaggaatgattgatattaagttggacaagccgcaggaaccccctgcttcagagggaggctgctcctgttag

SEQ ID NO: 301662 - DNA, 588 bp, Artificial Sequence
  derived and/or modified sequence
atgtggcacatgaccaggaactggcccctggtgggcaagaccagcctcatcacccgcttcatgtatgacagctttgacaacacctaccaggccaccatcggcatcgacttcctgagcaagaccatgtacctggaggacagaacagtgcggctgcagctgtgggacacagctggccaggagcgcttccgcagcctcatccccagctacatccgggacagcacagtggccgtggtggtgtatgacatcaccaacctgaacagcttccagcagaccagcaagtggattgatgatgtgaggacagagcggggcagtgatgtgatcatcatgctggtgggcaacaagacagacctggccgacaagaggcagatcaccatcgaggagggggagcagagggccaaggagctgtctgtgatgttcatcgagaccagcgccaagacaggctacaacgtgaagcagctgttcagaagagtggccagcgccctgcccggcatggagaatgtgcaggagaagagcaaggagggcatgattgacatcaagctggacaagccccaggagcccccagccagcgagggcggctgcagctgctag

SEQ ID NO: 301663 - DNA, 588 bp, Artificial Sequence
  derived and/or modified sequence
atgtggcacatgacccggaactggcccctggtgggcaagaccagcctcattactaggttcatgtatgacagcttcgataacacttaccaagcaacgataggcatcgacttcctatcaaagaccatgtacctcgaggaccgcacggtgcggcttcagttgtgggataccgctggacaggagcggtttcgaagtttgatcccaagttacattcgagactctactgtggcagtcgtggtgtacgacatcacaaatctgaactcctttcagcagacttctaagtggatagacgacgtcaggacggaaagaggatccgatgtgataatcatgctggtggggaacaagaccgatttagccgacaaacggcagatcaccatcgaagaaggagagcagcgagccaaggagctttctgtgatgttcattgagacttctgctaagaccggatacaatgtgaaacagctgttccgccgagtggcttccgcgctccctggtatggaaaacgtacaggagaagtctaaagagggaatgatcgacatcaaactggataagcctcaggagcctcctgcctcggaagggggatgtagttgctag

SEQ ID NO: 301664 - DNA, 588 bp, Artificial Sequence
  derived and/or modified sequence
atgtggcatatgacccggaattggccactggtggggaaaacttccctgataacgcgttttatgtacgattctttcgataacacctaccaagctacaattggcattgatttcctgagcaaaacgatgtatctcgaggatcgaacagtgagactgcaactttgggacaccgcaggacaagagagatttcgtagtctgattccaagctacatacgcgattccacagtggcagtcgtggtttacgacatcactaacctcaattcattccagcagacatctaaatggatcgatgatgtacggaccgagcgtgggagcgacgtcattatcatgctggttgggaacaaaacagacctggcggataagcgccagatcactatcgaggagggggagcagcgggcaaaggaactgagtgtgatgtttattgagaccagcgccaagacgggctataatgtgaaacagctgttcaggagggtagcctctgctttgccagggatggagaacgtgcaggaaaagagcaaagagggcatgatcgacataaaactggacaaaccccaggagccacctgcaagtgaagggggttgttcgtgctag

SEQ ID NO: 301665 - DNA, 880 bp, Artificial Sequence
  derived and/or modified sequence
gagattttgggaatccactgagaaaattcaagttggtgttcttgggggagcagagcgtgccctgggttccctgactgctctggccttccatgggtgttctgcgggactgctggcagcccttccggactcctccctctctgctacctgctcaggttggatgtggcatatgaccagaaactggccattggtcgggaagacgtctctgattacgaggttcatgtacgacagcttcgacaacacataccaggcaaccattgggattgacttcttgtcaaaaaccatgtacttggaggaccgcacggtgcgactgcagctctgggacacagctggtcaggagaggttccgcagcctgatccccagctacatccgggactccacggtggctgtggtggtgtacgacatcacaaatctcaactccttccaacagacctctaagtggatcgacgacgtcaggacagagaggggcagtgatgttatcatcatgctggtgggcaacaagacggacctggctgataagaggcagataaccatcgaggagggggagcagcgcgccaaagaactgagcgtcatgttcattgagaccagtgcgaagactggctacaacgtgaagcagctttttcgacgtgtggcgtcggctctacccggaatggagaatgtccaggagaaaagcaaagaagggatgatcgacatcaagctggacaaaccccaggagcccccggccagcgagggcggctgctcctgctaatgcagagccgacctgtggcttcccatgacactccttgcttgttgtgttgcttcctattggctagcttcctaaggggggagggaaccgagttatcaagatgggaggatttttcttttctctctgtctttaggagta

SEQ ID NO: 301666 - protein, 702 aa, Artificial Sequence
  derived and/or modified sequence
  misc_feature (1)..(1): Xaa can be any naturally occurring amino acid
XVRAGLFHGTELLCKTIVSSEVSGKNDHIWNEPLEFDINICDLPRMARLCFAVYAVLDKVKTKKSTKTINPSKYQTIRKAGKVHYPVAWVNTMVFDFKGQLRTGDIILHSWSSFPDELEEMLNPMGTVQTNPYTENATALHVKFPENKKQPYYYPPFDKSRGGKKFLPVLKEILDRDPLSQLCENEMDLIWTLRQDCREIFPQSLPKLLLSIKWNKLEDVAQLQALLQIWPKLPPREALELLDFNYPDQYVREYAVGCLRQMSDEELSQYLLQLVQVLKYEPFLDCALSRFLLERALGNRRIGQFLFWHLRSEVHIPAVSVQFGVILEAYCRGSVGHMKVLSKQVEALNKLKTLNSLIKLNAVKLNRAKGKEAMHTCLKQSAYREALSDLQSPLNPCVILSELYVEKCKYMDSKMKPLWLVYNNKVFGEDSVGVIFKNGDDLRQDMLTLQMLRLMDLLWKEAGLDLRMLPYGCLATGDRSGLIEVVSTSETIADIQLNSSNVAAAAAFNKDALLNWLKEYNSGDDLDRAIEEFTLSCAGYCVASYVLGIGDRHSDNIMVKKTGQLFHIDFGHILGNFKSKFGIKRERVPFILTYDFIHVIQQGKTGNTEKFGRFRQCCEDAYLILRRHGNLFITLFALMLTAGLPELTSVKDIQYLKDSLALGKSEEEALKQFKQKFDEALRESWTTKVNWMAHTVRKDYRS

SEQ ID NO: 301667 - DNA, 2109 bp, Artificial Sequence
  derived and/or modified sequence
tgagtgagagccggcctgttccacggcaccgagctgctgtgcaagaccatcgtgagcagcgaggtgagcggcaagaacgaccacatctggaacgagcccctggagttcgacatcaacatctgcgacctgcccagaatggccagactgtgcttcgccgtgtacgccgtgctggacaaggtgaagaccaagaagagcaccaagaccatcaaccccagcaagtaccagaccatcagaaaggccggcaaggtgcactaccccgtggcctgggtgaacaccatggtgttcgacttcaagggccagctgagaaccggcgacatcatcctgcacagctggagcagcttccccgacgagctggaggagatgctgaaccccatgggcaccgtgcagaccaacccctacaccgagaacgccaccgccctgcacgtgaagttccccgagaacaagaagcagccctactactacccccccttcgacaagagcagaggcggcaagaagttcctgcccgtgctgaaggagatcctggacagagaccccctgagccagctgtgcgagaacgagatggacctgatctggaccctgagacaggactgcagagagatcttcccccagagcctgcccaagctgctgctgagcatcaagtggaacaagctggaggacgtggcccagctgcaggccctgctgcagatctggcccaagctgccccccagagaggccctggagctgctggacttcaactaccccgaccagtacgtgagagagtacgccgtgggctgcctgagacagatgagcgacgaggagctgagccagtacctgctgcagctggtgcaggtgctgaagtacgagcccttcctggactgcgccctgagcagattcctgctggagagagccctgggcaacagaagaatcggccagttcctgttctggcacctgagaagcgaggtgcacatccccgccgtgagcgtgcagttcggcgtgatcctggaggcctactgcagaggcagcgtgggccacatgaaggtgctgagcaagcaggtggaggccctgaacaagctgaagaccctgaacagcctgatcaagctgaacgccgtgaagctgaacagagccaagggcaaggaggccatgcacacctgcctgaagcagagcgcctacagagaggccctgagcgacctgcagagccccctgaacccctgcgtgatcctgagcgagctgtacgtggagaagtgcaagtacatggacagcaagatgaagcccctgtggctggtgtacaacaacaaggtgttcggcgaggacagcgtgggcgtgatcttcaagaacggcgacgacctgagacaggacatgctgaccctgcagatgctgagactgatggacctgctgtggaaggaggccggcctggacctgagaatgctgccctacggctgcctggccaccggcgacagaagcggcctgatcgaggtggtgagcaccagcgagaccatcgccgacatccagctgaacagcagcaacgtggccgccgccgccgccttcaacaaggacgccctgctgaactggctgaaggagtacaacagcggcgacgacctggacagagccatcgaggagttcaccctgagctgcgccggctactgcgtggccagctacgtgctgggcatcggcgacagacacagcgacaacatcatggtgaagaagaccggccagctgttccacatcgacttcggccacatcctgggcaacttcaagagcaagttcggcatcaagagagagagagtgcccttcatcctgacctacgacttcatccacgtgatccagcagggcaagaccggcaacaccgagaagttcggcagattcagacagtgctgcgaggacgcctacctgatcctgagaagacacggcaacctgttcatcaccctgttcgccctgatgctgaccgccggcctgcccgagctgaccagcgtgaaggacatccagtacctgaaggacagcctggccctgggcaagagcgaggaggaggccctgaagcagttcaagcagaagttcgacgaggccctgagagagagctggaccaccaaggtgaactggatggcccacaccgtgagaaaggactacagaagctag

SEQ ID NO: 301668 - DNA, 2109 bp, Artificial Sequence
  derived and/or modified sequence
tgagttcgcgcagggctcttccatggcaccgaactcttatgcaaaacgatcgtgtccagtgaggtttccggaaagaacgaccacatctggaacgagcctctggaattcgacattaatatctgcgacttgccccgtatggctcgtttgtgctttgccgtttatgctgtcctggacaaagtgaaaaccaagaaaagcaccaaaaccatcaacccaagcaagtatcagactattaggaaggcgggtaaagtccactacccagttgcctgggtaaacacaatggtgttcgattttaagggccaactgcggaccggcgatatcattctgcattcgtggagttctttccctgatgagctggaagagatgctgaaccctatgggcaccgttcagacgaacccatatactgagaacgctactgccttgcacgttaaatttcctgaaaataagaagcagccatattactatcccccattcgacaagagcagggggggcaagaagttcctgccggttctgaaagagatcctggaccgcgatcccctctcccagctgtgcgaaaacgagatggacctgatatggacattgcggcaagactgcagagagatttttccccagagcctgcccaagctgctgctgagcattaagtggaacaaactcgaagatgtcgcacaactgcaggcactgctgcagatttggcccaaattaccacctagagaagcactcgagctgttagactttaattatcctgatcaatatgtgcgtgagtacgccgtgggatgtcttcggcagatgtccgacgaggaactctcccagtatctgctgcaactcgtgcaggtcctgaaatacgagccttttctagactgtgcactgtccagatttctcctggagcgcgcactcggcaataggagaattggacagttcctgttttggcacctccgaagtgaggtgcatatccccgccgtcagtgtgcagtttggagtgattttggaagcctactgccgaggatctgttggacatatgaaagtcttaagtaagcaggtggaagccctcaacaaacttaagactctgaacagcctaatcaagttaaatgccgttaagctcaatcgtgcaaaaggcaaagaggccatgcatacatgccttaagcaatccgcctatcgcgaagcactctccgacctacagtctcctctgaatccctgcgtcattctgagcgaactgtatgtggaaaagtgtaagtatatggacagcaaaatgaaaccgttgtggttggtgtataataataaagtctttggagaggacagtgtgggagtcatctttaaaaacggcgatgacctaaggcaagacatgttaacactccagatgcttcgattgatggacctcctgtggaaagaggctggcttggaccttaggatgctgccctacgggtgcctggccactggagaccgcagtggcttgattgaggtcgtttcgacatcagagactatcgcagacatccagctcaactcatccaacgtggcggccgccgcggcatttaacaaggatgccctgctgaattggctaaaggagtacaattcaggcgacgatttagatagagctatagaagaattcacgctatcttgtgccggctactgcgttgcttcctacgtcttaggcatcggcgatagacactcagacaacattatggttaagaaaacaggacagcttttccatattgactttggtcatatactgggtaattttaagtcaaagttcggaattaagagggaacgtgttccattcattttaacgtatgacttcattcatgtgatccaacagggaaagaccgggaacacagaaaagtttggcagattcaggcagtgctgtgaagacgcatatctcattctgcgtcgccacggcaatctcttcattaccttgttcgctttgatgcttacagccgggctccctgagctcacatccgtgaaggacatccaatacctcaaggatagtctggcacttgggaagtccgaagaggaggccttgaagcagtttaagcagaagttcgatgaggcccttagagagtcctggacgactaaagtcaactggatggcccatacagttaggaaagattacagatcctag

SEQ ID NO: 301669 - DNA, 2109 bp, Artificial Sequence
  derived and/or modified sequence
tgagtgcgggccggcctcttccacggcacagagctgctgtgcaagaccatcgtgagcagcgaggtgtctgggaagaatgaccacatctggaatgagcccctggagtttgacatcaacatctgtgacctgcccaggatggcccggctgtgctttgctgtgtatgctgtgctggacaaggtgaagaccaagaagagcaccaagaccatcaaccccagcaagtaccagaccatcaggaaggccggcaaggtgcactaccctgtggcctgggtgaacaccatggtgtttgacttcaagggccagctgaggactggagacatcatcctgcacagctggagcagcttcccagatgagctggaggagatgctgaaccccatgggcaccgtgcagaccaacccctacacagaaaatgccacagccctgcacgtgaagtttcctgagaacaagaagcagccctactactaccccccatttgacaagagccggggcggcaagaagttcctgcctgtgctgaaggagatcctggaccgggaccccctgagccagctgtgtgaaaatgagatggacctgatctggaccctgcggcaggactgccgggagatcttcccccagagcctgcccaagctgctgctgagcatcaagtggaacaagctggaggatgtggcccagctgcaggccctgctgcagatctggcccaagctgcccccccgggaggccctggagctgctggacttcaactacccagaccagtatgtgcgggagtatgctgtgggctgcctgcggcagatgtctgatgaggagctgagccagtacctgctgcagctggtgcaggtgctgaagtatgagcccttcctggactgtgccctgagccgcttcctgctggagcgggccctgggcaacagacgcatcggccagttcctgttctggcacctgcggtctgaggtgcacatcccagctgtgtctgtgcagtttggagtcatcctggaggcctactgccggggctctgtgggccacatgaaggtgctgagcaagcaggtggaggccctgaacaagctgaagaccctgaacagcctcatcaagctgaatgctgtgaagctgaacagagccaagggcaaggaggccatgcacacctgcctgaagcagagcgcctaccgggaggccctgagtgacctgcagagccccctgaacccctgtgtgatcctgtctgagctgtatgtggagaagtgcaagtacatggacagcaagatgaagcccctgtggctggtgtacaacaacaaggtgtttggagaagattctgtgggcgtcatcttcaagaatggagatgacctgcggcaggacatgctgaccctgcagatgctgcggctgatggacctgctgtggaaggaggccggcctggacctgaggatgctgccctacggctgcctggccaccggggacaggagcggcctgattgaggtggtgtccaccagcgagaccatcgctgacatccagctgaacagcagcaatgtggccgctgctgctgccttcaacaaggatgccctgctgaactggctgaaggagtacaacagcggagatgacctggaccgggccatcgaggagttcaccctgagctgtgccggctactgtgtggccagctatgtgctgggcattggagacagacacagcgacaacatcatggtgaagaagacaggccagctgttccacatcgactttggccacatcctgggcaacttcaagagcaagtttggcatcaagcgggagcgggtgcccttcatcctgacctatgacttcatccacgtgatccagcagggcaagacaggcaacacagagaagtttggccgcttccggcagtgctgtgaagatgcctacctgatcctgcggcggcacggcaacctcttcatcaccctgtttgccctgatgctgacagctggcctgcctgagctgacctctgtgaaggacatccagtacctgaaggacagcctggccctgggcaagtctgaggaggaggccctgaagcagttcaagcagaagtttgatgaggccctgcgggagagctggaccaccaaggtgaactggatggcccacacagtgaggaaggactaccgctcctag

SEQ ID NO: 301670 - DNA, 2109 bp, Artificial Sequence
  derived and/or modified sequence
tgagtgcgggccggcctgttccacggcaccgagctgctgtgcaagaccattgtaagctcagaggtgtctggcaaaaatgaccacatttggaatgagccactggagttcgatattaacatctgcgatctaccccgcatggcacggctctgcttcgctgtgtatgcagtgctggataaagtaaaaacaaagaaatctacaaaaaccattaacccttctaaataccagacgatccgtaaggctggtaaggtccactacccggtggcatgggtgaacacaatggtgtttgacttcaagggccagctgcgaactggcgacatcattctacattcgtggtcctcattccccgacgaactggaggagatgcttaaccccatgggcaccgtccagactaatccctataccgagaacgctaccgcgttgcacgtgaaatttcccgagaataagaagcagccgtactattatcctccctttgacaaatcccggggaggtaagaagttcctccccgtgcttaaggagatcctggatagggaccccctttctcagctctgcgagaacgagatggatttgatatggacgctgcgccaggactgtagagagatattccctcaaagcctacctaagttactgctctctattaaatggaacaaactggaagatgtggctcagttacaggccctacttcaaatatggccaaagcttcctcctagggaggctctggagctgctggacttcaactaccccgatcagtacgtgagagaatatgcagtaggatgcctccgtcaaatgagcgacgaagaactctctcagtatctccttcagttagtacaggtcctgaaatacgaacccttcctggattgtgccctctctagattcctcctagagcgggcactggggaatcgtagaattggacagtttctcttctggcacttacgatctgaagtccatattcctgcggtgagcgtccaattcggcgtcatcctagaagcctactgcagaggttccgtgggccacatgaaagtgctgtcgaagcaggttgaggctctgaataagcttaagactctgaattccctgattaagctgaacgctgtaaaactgaaccgggcaaaaggaaaagaagccatgcatacgtgcctgaaacagagtgcttaccgggaggctctcagcgatctccagtctcccttgaatccttgcgtaattctgagcgagctgtacgttgagaagtgcaagtacatggatagtaagatgaagcccctttggctcgtatataataataaggtgtttggtgaggacagtgtgggtgtcatattcaagaacggcgatgatctgcgacaggacatgcttacgttgcaaatgctccgactcatggatctcctgtggaaggaggctgggctggacttgcggatgctaccttatggctgcttggctaccggtgaccggagtgggctgattgaagttgtaagcacaagcgaaacaatcgccgacatacaactgaacagcagtaatgtggctgccgccgctgcttttaataaagacgccctgctgaattggcttaaggagtacaattctggcgacgatttggacagggctattgaggaatttacattgtcttgcgcaggctattgcgtagcctcctacgtgctcggcattggagaccgccattccgataatattatggtgaagaagaccggccagcttttccatattgacttcggtcatatccttgggaattttaagagcaaattcggcattaaacgggaacgggtcccctttatccttacctatgactttatccatgttattcagcagggcaagaccggcaataccgagaaattcggcaggttccggcaatgctgcgaggacgcttaccttatcctcagaagacacggtaacctgtttattacactgttcgcactgatgctcaccgcgggccttcctgaattaacatcagtgaaggatattcaatacctgaaggactccctggctctgggtaagagtgaagaagaagccctgaagcagttcaaacaaaagttcgacgaggccttgcgcgagtcatggaccaccaaagtgaattggatggcgcacaccgttcgaaaggattatcgaagctag

SEQ ID NO: 301671 - DNA, 2109 bp, Artificial Sequence
  derived and/or modified sequence
taggtgagggccggactcttccatggcactgaactcttatgcaagaccatcgtatcttctgaagtgtcaggaaaaaatgaccatatctggaatgagccccttgaatttgacattaatatctgcgatctgccaaggatggcaaggctgtgcttcgctgtctatgctgtgctcgataaggtgaagacaaaaaaaagtactaagacgataaacccgtctaagtaccaaaccatcagaaaagccggaaaggtgcactacccagttgcgtgggtcaatacaatggtgttcgactttaaggggcagctgcgcactggggacattatcctgcacagctggtctagctttcccgacgaacttgaggagatgttgaacccaatggggaccgtccaaacaaatccctacacagaaaatgccaccgctctccacgtgaaattccccgagaacaaaaagcagccctattactatccccctttcgacaagtctcgcggtggcaaaaagtttctgcccgttttgaaggagatccttgacagagatcctcttagccaactgtgcgagaacgaaatggacttaatatggacacttagacaagattgtcgcgagatcttcccgcaatcgctgccaaaactactgctgagcatcaagtggaacaagttagaggatgtggcgcagctccaggccttgctccagatctggccaaagctccccccaagggaggccctggagcttctggatttcaattaccccgaccaatacgtcagggagtacgccgtagggtgcctgaggcagatgagtgatgaagagctgtcccagtacctgctccaactcgtgcaggttctgaagtatgagccctttttggactgtgccctgtccagattccttctggaacgcgcactcgggaacagacggatcggtcaatttctgttttggcacctgagatctgaagtgcatattccagctgtaagcgtgcagtttggggtcattctggaggcatattgtcgaggctctgttggccacatgaaagtcttgtccaagcaggtggaggcgctgaacaagttaaaaactctgaacagcctgatcaagctgaacgctgtcaagctcaaccgtgccaaaggaaaagaggcaatgcacacatgtctgaaacagagtgcctaccgcgaggcattgagcgacctccagtcccctctgaacccctgcgttattctctctgagctgtatgtggaaaagtgcaaatacatggacagcaaaatgaaacctctgtggttggtgtataataataaggtgttcggagaggattctgtgggggtgatctttaaaaatggcgacgacctgagacaggatatgctcacattacagatgctccgactgatggacctgctttggaaggaggccggactggatctaaggatgctaccttatggttgtctcgccacaggggaccgcagtgggttgatcgaagtggtctccaccagtgaaacaattgcagacattcagctgaatagttcgaacgttgcagctgccgcagcgtttaataaggacgccctgctgaactggctgaaagaatacaatagtggcgacgatctcgaccgagcgattgaggagttcaccctgagctgcgcagggtattgtgtcgcctcttacgttttggggatcggggacagacatagtgacaacataatggtgaaaaaaaccggacagctttttcatattgactttggacacatactcggaaacttcaagagtaaatttggcattaagagggagcgagtgccctttatcctgacttacgattttattcacgtgattcagcagggtaagacgggaaacaccgaaaagtttgggaggtttcgacagtgctgtgaagatgcgtatctgatcctgcgtcggcacggtaatctgtttattaccctctttgccctgatgctcaccgccggactgcccgagttgacatcagtgaaagacatccagtatctgaaagactcactggctctcggtaagtctgaagaagaagctttgaaacaattcaagcagaaatttgacgaggcactgagggagtcatggacgaccaaggtgaattggatggcacataccgtccgaaaggattacaggtcctag

SEQ ID NO: 301672 - DNA, 2347 bp, Artificial Sequence
  derived and/or modified sequence
atgtcagggctggtctttttcatggtactgagctcctgtgtaaaaccatcgtaagctcagaggtatcagggaaaaatgatcatatttggaatgaaccactggaatttgatattaatatttgtgacttaccaagaatggctcgattatgttttgctgtttatgcagttttggataaagtaaaaacgaagaaatcaacgaaaactattaatccctctaaatatcagaccatcaggaaagctggaaaagtgcattatcctgtagcgtgggtaaatacgatggtttttgactttaaaggacaattgagaactggagacataatattacacagctggtcttcatttcctgatgaactcgaagaaatgttgaatccaatgggaactgttcaaacaaatccatatactgaaaatgcaacagctttgcatgttaaatttccagagaataaaaaacaaccttattattaccctcccttcgataagagtcgaggtggaaaaaagtttcttcctgtattgaaagaaatcttggacagggatcccttgtctcaactgtgtgaaaatgaaatggatcttatttggactttgcgacaagactgccgagagattttcccacaatcactgccaaaattactgctgtcaatcaagtggaataaacttgaggatgttgctcagcttcaggcgctgcttcagatttggcctaaactgcccccccgggaggccctagagcttctggatttcaactatccagaccagtacgttcgagaatatgctgtaggctgcctgcgacagatgagtgatgaagaactttctcaatatcttttacaactggtgcaagtgttaaaatatgagccttttcttgattgtgccctctctagattcctattagaaagagcacttggtaatcggaggatagggcagtttctattttggcatcttaggtcagaagtgcacattcctgctgtctcagtacaatttggtgtcatccttgaagcatactgccggggaagtgtggggcacatgaaagtgctttctaagcaggttgaagcactcaataagttaaaaactttaaatagtttaatcaaactgaatgccgtgaagttaaacagagccaaagggaaggaggccatgcatacctgtttaaaacagagtgcttaccgggaagccctctctgacctgcagtcacccctgaacccatgtgttatcctctcagaactctatgttgaaaagtgcaaatacatggattccaaaatgaagcctttgtggctggtatacaataacaaggtatttggtgaggattcagttggagtgatttttaaaaatggtgatgatttacgacaggatatgttgacactccaaatgttgcgcttgatggatttactctggaaagaagctggtttggatcttcggatgttgccttatggctgtttagcaacaggagatcgctctggcctcattgaagttgtgagcacctctgaaacaattgctgacattcagctgaacagtagcaatgtggctgctgcagcagccttcaacaaagatgcccttctgaactggcttaaagaatacaactctggggatgacctggaccgagccattgaggaatttacactgtcctgtgctggctactgtgtagcttcttatgtccttgggattggtgacagacatagtgacaacatcatggtcaaaaaaactggccagctcttccacattgactttggacatattcttggaaatttcaaatctaagtttggcattaaaagggagcgagtgccttttattcttacctatgatttcatccatgtcattcaacaaggaaaaacaggaaatacagaaaagtttggccggttccgccagtgttgtgaggatgcatatctgattttacgacggcatgggaatctcttcatcactctctttgcgctgatgttgactgcagggcttcctgaactcacatcagtcaaagatatacagtatcttaaggactctcttgcattagggaagagtgaagaagaagcactcaaacagtttaagcaaaaatttgatgaggcgctcagggaaagctggactactaaagtgaactggatggcccacacagttcggaaagactacagatcttaacgatcagccttcgctcctaatgtatttgttggtttcatttcattttcattttgcacttgcactaaattgaacatgaccctgttagagatgttataaagggaatgaaatcctggaactcagagttaaattaagaacaaggcatcccacagaacctaatctgaacaatccccgatgattccctctgctttttgaatgcttccaagacttatcatgaaaactgtcaatggataatcatttcc

SEQ ID NO: 301673 - protein, 971 aa, Artificial Sequence
  derived and/or modified sequence
MSLKNEPRVNTSALQKIAADMSNIIENLDTRELHFEGEEVDYDVSPSDPKIQEVYIPFSAIYNTQGFKEPNIQTYLSGCPIKAQVLEVERFTSTTRVPSINLYTIELTHGEFKWQVKRKFKHFQEFHRELLKYKAFIRIPIPTRRHTFRRQNVREEPREMPSLPRSSENMIREEQFLGRRKQLEDYLTKILKMPMYRNYHATTEFLDISQLSFIHDLGPKGIEGMIMKRSGGHRIPGLNCCGQGRACYRWSKRWLIVKDSFLLYMKPDSGAIAFVLLVDKEFKIKVGKKETETKYGIRIDNLSRTLILKCNSYRHARWWGGAIEEFIQKHGTNFLKDHRFGSYAAIQENALAKWYVNAKGYFEDVANAMEEANEEIFITDWWLSPEIFLKRPVVEGNRWRLDCILKRKAQQGVRIFIMLYKEVELALGINSEYTKRTLMRLHPNIKVMRHPDHVSSTVYLWAHHEKLVIIDQSVAFVGGIDLAYGRWDDNEHRLTDVGSVKRVTSGPSLGSLPPAAMESMESLRLKDKNEPVQNLPIQKSIDDVDSKLKGIGKPRKFSKFSLYKQLHRHHLHDADSISSIDSTSSYFNHYRSHHNLIHGLKPHFKLFHPSSESEQGLTRPHADTGSIRSLQTGVGELHGETRFWHGKDYCNFVFKDWVQLDKPFADFIDRYSTPRMPWHDIASAVHGKAARDVARHFIQRWNFTKIMKSKYRSLSYPFLLPKSQTTAHELRYQVPGSVHANVQLLRSAADWSAGIKYHEESIHAAYVHVIENSRHYIYIENQFFISCADDKVVFNKIGDAIAQRILKAHRENQKYRVYVVIPLLPGFEGDISTGGGNALQAIMHFNYRTMCRGENSILGQLKAELGNQWINYISFCGLRTHAELEGNLVTELIYVHSKLLIADDNTVIIGSANINDRSMLGKRDSEMAVIVQDTETVPSVMDGKEYQAGRFARGLRLQCFRSKMTPGVEDP

SEQ ID NO: 301674 - DNA, 2916 bp, Artificial Sequence
  derived and/or modified sequence
atgagcctgaagaacgagcccagagtgaacaccagcgccctgcagaagatcgccgccgacatgagcaacatcatcgagaacctggacaccagagagctgcacttcgagggcgaggaggtggactacgacgtgagccccagcgaccccaagatccaggaggtgtacatccccttcagcgccatctacaacacccagggcttcaaggagcccaacatccagacctacctgagcggctgccccatcaaggcccaggtgctggaggtggagagattcaccagcaccaccagagtgcccagcatcaacctgtacaccatcgagctgacccacggcgagttcaagtggcaggtgaagagaaagttcaagcacttccaggagttccacagagagctgctgaagtacaaggccttcatcagaatccccatccccaccagaagacacaccttcagaagacagaacgtgagagaggagcccagagagatgcccagcctgcccagaagcagcgagaacatgatcagagaggagcagttcctgggcagaagaaagcagctggaggactacctgaccaagatcctgaagatgcccatgtacagaaactaccacgccaccaccgagttcctggacatcagccagctgagcttcatccacgacctgggccccaagggcatcgagggcatgatcatgaagagaagcggcggccacagaatccccggcctgaactgctgcggccagggcagagcctgctacagatggagcaagagatggctgatcgtgaaggacagcttcctgctgtacatgaagcccgacagcggcgccatcgccttcgtgctgctggtggacaaggagttcaagatcaaggtgggcaagaaggagaccgagaccaagtacggcatcagaatcgacaacctgagcagaaccctgatcctgaagtgcaacagctacagacacgccagatggtggggcggcgccatcgaggagttcatccagaagcacggcaccaacttcctgaaggaccacagattcggcagctacgccgccatccaggagaacgccctggccaagtggtacgtgaacgccaagggctacttcgaggacgtggccaacgccatggaggaggccaacgaggagatcttcatcaccgactggtggctgagccccgagatcttcctgaagagacccgtggtggagggcaacagatggagactggactgcatcctgaagagaaaggcccagcagggcgtgagaatcttcatcatgctgtacaaggaggtggagctggccctgggcatcaacagcgagtacaccaagagaaccctgatgagactgcaccccaacatcaaggtgatgagacaccccgaccacgtgagcagcaccgtgtacctgtgggcccaccacgagaagctggtgatcatcgaccagagcgtggccttcgtgggcggcatcgacctggcctacggcagatgggacgacaacgagcacagactgaccgacgtgggcagcgtgaagagagtgaccagcggccccagcctgggcagcctgccccccgccgccatggagagcatggagagcctgagactgaaggacaagaacgagcccgtgcagaacctgcccatccagaagagcatcgacgacgtggacagcaagctgaagggcatcggcaagcccagaaagttcagcaagttcagcctgtacaagcagctgcacagacaccacctgcacgacgccgacagcatcagcagcatcgacagcaccagcagctacttcaaccactacagaagccaccacaacctgatccacggcctgaagccccacttcaagctgttccaccccagcagcgagagcgagcagggcctgaccagaccccacgccgacaccggcagcatcagaagcctgcagaccggcgtgggcgagctgcacggcgagaccagattctggcacggcaaggactactgcaacttcgtgttcaaggactgggtgcagctggacaagcccttcgccgacttcatcgacagatacagcacccccagaatgccctggcacgacatcgccagcgccgtgcacggcaaggccgccagagacgtggccagacacttcatccagagatggaacttcaccaagatcatgaagagcaagtacagaagcctgagctaccccttcctgctgcccaagagccagaccaccgcccacgagctgagataccaggtgcccggcagcgtgcacgccaacgtgcagctgctgagaagcgccgccgactggagcgccggcatcaagtaccacgaggagagcatccacgccgcctacgtgcacgtgatcgagaacagcagacactacatctacatcgagaaccagttcttcatcagctgcgccgacgacaaggtggtgttcaacaagatcggcgacgccatcgcccagagaatcctgaaggcccacagagagaaccagaagtacagagtgtacgtggtgatccccctgctgcccggcttcgagggcgacatcagcaccggcggcggcaacgccctgcaggccatcatgcacttcaactacagaaccatgtgcagaggcgagaacagcatcctgggccagctgaaggccgagctgggcaaccagtggatcaactacatcagcttctgcggcctgagaacccacgccgagctggagggcaacctggtgaccgagctgatctacgtgcacagcaagctgctgatcgccgacgacaacaccgtgatcatcggcagcgccaacatcaacgacagaagcatgctgggcaagagagacagcgagatggccgtgatcgtgcaggacaccgagaccgtgcccagcgtgatggacggcaaggagtaccaggccggcagattcgccagaggcctgagactgcagtgcttcagaagcaagatgacccccggcgtggaggacccctag

SEQ ID NO: 301675 - DNA, 2916 bp, Artificial Sequence
  derived and/or modified sequence
atgagcttgaagaatgagcctcgcgttaacacaagtgcgcttcagaagatcgcggccgatatgagtaatattatagaaaacctggacactcgggagctccacttcgagggcgaagaagtggattacgatgtgagccccagtgaccccaagatccaggaggtgtatattcctttttcagctatatataatacacaggggttcaaagagcccaacatccagacgtacctgtctggctgtcccatcaaagcacaagtcctcgaagtggaacgtttcacctctaccacacgggttccatcaattaatctttacacaatcgagttaacccacggcgaattcaagtggcaagtgaagagaaagtttaaacacttccaggagtttcacagagagctgctgaaatacaaggcctttattcggattcccattcctacgcgtcggcataccttcagacgccagaacgtgcgcgaagagccacgcgagatgccaagtctgcccaggtcttctgaaaatatgattagagaggaacaatttctggggagacgcaagcagttagaagattatttaaccaaaatcttgaaaatgcccatgtataggaattatcacgccactaccgagttccttgacatatcacagctcagttttatccacgatctcggacccaagggaatagaggggatgattatgaaacgaagtggtggccaccgtattcctggcttgaactgttgtggacaggggagggcctgctataggtggtctaaacgctggctcatcgtgaaagactccttcctgctgtatatgaaaccagattcaggagccatagcgtttgtcttgctggtggacaaagagttcaaaatcaaagtcggcaagaaggagactgagacgaaatatggcattaggatcgataatctgtcccggacactgattctgaagtgcaactcttaccggcacgcccgctggtgggggggggccattgaggaattcatacaaaagcacggtacaaatttcttgaaggaccaccgcttcgggtcgtacgcggccatccaggaaaatgccctcgctaagtggtatgtgaatgcgaagggatattttgaggacgtggcgaacgcgatggaggaggccaacgaagagatcttcattacagactggtggttgtcccctgaaatatttctaaagagacccgtcgtcgaaggaaataggtggagactggactgtattctcaagagaaaggctcaacaaggtgtcagaatcttcatcatgctctacaaggaggtggaactcgctctgggcatcaatagtgagtacaccaagcgcactctgatgagactgcacccaaacattaaagtcatgcgtcacccagaccatgtgagcagcacagtttacctttgggcacatcacgagaagctggtgattattgaccagtcagtggctttcgtgggcggcattgacctcgcttatggccggtgggacgacaatgagcatcggctcactgatgttggatcagtaaagcgggttacgtcaggcccaagtcttggtagcctcccacccgccgccatggaaagcatggaatcacttagactaaaagacaagaatgagccagtgcagaacctccctatacaaaagagcatcgacgacgttgatagcaagttaaagggtatcggtaaacctcgaaagttcagcaagtttagcctgtataaacagctccatcgtcatcacctgcatgacgccgattctatctcctctattgactcgacttccagctacttcaaccattatcgaagtcaccacaatctgattcatgggctgaagccccactttaaactgttccatcccagctctgagtctgagcagggtctgacccggccacacgccgataccggcagcatccggagcttacaaactggcgtgggggagctgcatggcgagaccaggttttggcacggtaaggactattgtaactttgtgttcaaggattgggttcagctggacaagccctttgctgacttcatcgatcgctactcaacccccagaatgccttggcacgatatcgccagcgccgtgcatggcaaggcagcccgtgatgtggcacggcatttcattcagaggtggaactttacaaagatcatgaaaagcaaatatagatcactatcttatccattcctactgcctaaaagccagacaaccgcacatgagttgcgctaccaggtgccgggtagtgttcatgcgaacgtgcagctgctacgatctgcagctgactggagcgctggtatcaaataccacgaggagtctatccatgctgcctacgttcatgtgatcgaaaactcgcgccattatatctatattgaaaatcagttctttatttcgtgcgcagacgataaagtggtattcaataagatcggggacgctatcgcacagagaatcctgaaagctcacagagagaaccagaagtaccgcgtgtacgtagtgattcctctattacctggtttcgagggagatatctcaacaggtgggggaaatgccctgcaggctattatgcatttcaattacaggaccatgtgtcgaggggagaactcaatcctaggacaattgaaagccgaattaggaaaccaatggatcaactacatctctttttgcgggctccggacacacgccgagctcgagggaaacctggtgaccgagctcatctatgtccattcgaagctgctgatagcagatgacaacaccgtaattatcgggtcggccaatataaatgacagaagtatgctcggtaaaagagactctgagatggctgtgattgtgcaggacacagagaccgtgccatctgtcatggatggaaaggagtaccaggctggccgatttgccagaggactacggttgcagtgctttcgaagtaagatgacaccaggagtcgaagacccttag

SEQ ID NO: 301676 - DNA, 2916 bp, Artificial Sequence
  derived and/or modified sequence
atgagcctgaagaatgagccccgggtgaacaccagcgccctgcagaagattgctgctgacatgagcaacatcatcgagaacctggacacccgggagctgcactttgaaggagaggaggtggactatgatgtgagccccagcgaccccaagatccaggaggtgtacatccccttcagcgccatctacaacacccagggcttcaaggagcccaacatccagacctacctgagcggctgccccatcaaggcccaggtgctggaggtggagcgcttcaccagcaccaccagggtgcccagcatcaacctgtacaccatcgagctgacccatggagagttcaagtggcaggtgaagaggaagttcaagcacttccaggagttccaccgggagctgctgaagtacaaggccttcatccgcatccccatccccacccggcggcacaccttccggcggcagaatgtgcgggaggagccccgggagatgcccagcctgcccaggagcagcgagaacatgatccgggaggagcagttcctgggccgcaggaagcagctggaggactacctgaccaagatcctgaagatgcccatgtacagaaactaccacgccaccacagagttcctggacatcagccagctgtccttcatccatgacctgggccccaagggcatcgagggcatgatcatgaagaggtctgggggccaccgcatccctggcctgaactgctgcggccagggccgggcctgctaccgctggagcaagcgctggctgattgtgaaggacagcttcctgctgtacatgaagccagattctggggccatcgcctttgtgctgctggtggacaaggagttcaagatcaaggtgggcaagaaggagacagagaccaagtatggcatcagaattgacaacctgagcaggaccctcatcctgaagtgcaacagctacagacatgcccgctggtggggcggggccatcgaggagttcatccagaagcacggcaccaacttcctgaaggaccaccgcttcggcagctatgctgccatccaggagaatgccctggccaagtggtacgtgaatgccaagggctactttgaagatgtggccaatgccatggaggaggccaatgaggagatcttcatcacagactggtggctgagccctgagatcttcctgaagaggcctgtggtggagggcaaccgctggaggctggactgcatcctgaagaggaaggcccagcagggcgtgcgcatcttcatcatgctgtacaaggaggtggagctggccctgggcatcaacagcgagtacaccaagaggaccctgatgaggctgcaccccaacatcaaggtgatgaggcacccagaccacgtgagcagcacagtgtacctgtgggcccaccacgagaagctggtgatcatcgaccagagcgtggcctttgtgggcggcatcgacctggcctacggccgctgggatgacaatgagcaccggctgacagatgtgggctctgtgaagagggtgaccagcggccccagcctgggcagcctgcccccagctgccatggagagcatggagagcctgcggctgaaggacaagaatgaacctgtgcagaacctgcccatccagaagagcattgatgatgtggacagcaagctgaagggcatcggcaagcccaggaagttcagcaagttcagcctgtacaagcagctgcaccgccaccacctgcatgatgctgacagcatcagcagcattgacagcaccagcagctacttcaaccactaccgcagccaccacaacctgatccacggcctgaagccccacttcaagctgttccaccccagcagcgagagcgagcagggcctgacccggccccacgccgacaccggcagcatccgcagcctgcagacaggagtgggggagctgcacggggagacccgcttctggcacggcaaggactactgcaactttgtgttcaaggactgggtgcagctggacaagccctttgctgacttcatcgaccgctacagcacccccaggatgccctggcatgacatcgccagcgctgtgcacggcaaggccgccagagatgtggcccggcacttcatccagcgctggaacttcaccaagatcatgaagagcaagtaccgcagcctgagctaccccttcctgctgcccaagagccagaccacagcccacgagctgcgctaccaggtgcccggctctgtgcacgccaacgtgcagctgctgcggtctgctgctgactggagcgctggcatcaagtaccacgaggagagcatccacgccgcctacgtgcacgtgattgagaacagccgccactacatctacatcgagaaccagttcttcatcagctgtgctgatgacaaggtggtgttcaacaagattggagatgccatcgcccagaggatcctgaaggcccaccgggagaaccagaagtacagagtgtatgtggtgatccccctgctgcccggctttgaaggagacatcagcactggaggcggcaatgccctgcaggccatcatgcacttcaactaccgcaccatgtgccgcggggagaacagcatcctgggccagctgaaggccgagctgggcaaccagtggatcaactacatctccttctgtggcctgcggacccacgccgagctggagggcaacctggtgacagagctgatctacgtgcacagcaagctgctgattgctgatgacaacacagtcatcatcggcagcgccaacatcaatgaccgctccatgctgggcaagagggacagcgagatggccgtcatcgtgcaggacacagagaccgtgcccagcgtgatggatggcaaggagtaccaggccggccgctttgcccggggcctgcggctgcagtgcttccgcagcaagatgaccccaggagtggaggacccctag

SEQ ID NO: 301677 - DNA, 2916 bp, Artificial Sequence
  derived and/or modified sequence
atgagcctgaagaacgagccccgggtgaacaccagcgccctgcagaagatcgccgccgacatgtcaaatattatagagaacctcgatactcgcgagttgcacttcgaaggggaggaggtagactacgatgtgagcccatctgacccaaagattcaggaggtctatattcccttctccgccatttacaacacacaggggttcaaggagcccaatatccagacgtatttgtctggctgtccgattaaggcccaagtcctcgaagtggaaaggtttacatccacaacgcgggtgcccagtatcaacttatatacaattgaactgactcacggggaatttaaatggcaggtaaaaagaaagtttaagcacttccaggagttccatcgcgagctgctcaagtacaaagcgttcatccggattcccatcccaactagaaggcacactttcaggcgtcaaaacgtgcgcgaggagcccagagagatgcctagtctgcctcgctcaagcgagaacatgataagggaggagcaattcctaggacgtagaaaacagttggaggactacctgacaaagattctaaagatgccgatgtacagaaattaccacgccacgaccgagtttctggatatctcacagctctccttcatacatgacttgggaccgaagggcatagaggggatgattatgaagcggagtggcggccatagaatccccggacttaactgctgtggtcagggccgcgcttgctacagatggtcaaagagatggctgattgtgaaggactcgttcctcctttatatgaagcccgactctggcgcaatcgctttcgtattgctggtcgataaagagttcaagattaaagtgggcaaaaaagagaccgagactaaatatggcattcggatagataaccttagccggactctcatacttaagtgcaattcatatcggcacgctcgttggtggggcggcgccatcgaggagtttatccaaaagcatggcacgaatttcctcaaggatcatcggttcggctcgtacgcagctatccaggagaatgccctggccaagtggtacgtgaatgctaaggggtactttgaggatgtcgctaacgccatggaggaagctaacgaagaaatattcatcacagactggtggctgagccccgaaatcttcttgaagagacccgttgttgaggggaacagatggcggttagattgcattctgaaacgcaaggcacagcaaggagtccgcatctttatcatgctgtacaaggaagtcgaactcgccttgggtataaattccgagtacaccaagcggaccctgatgaggctccatcctaacattaaggtgatgaggcaccccgatcatgtttccagtaccgtgtacctgtgggcccaccatgaaaagcttgtcattatcgatcagtcagtggcattcgtcggagggattgaccttgcttatggccgctgggacgacaacgaacaccggctcacggatgtcgggagtgtgaaacgggtaactagtgggccttctttgggatcccttccccccgcggccatggaaagcatggagagtctcagattaaaagataaaaacgagccggtgcagaatctacccattcagaagtccatcgatgacgttgattccaaactgaagggcattggcaagcctcgaaagttcagtaagttctctctgtacaagcaacttcataggcatcatctgcacgatgctgattcaatttcaagcatcgactccaccagcagctattttaaccactatagatctcaccataacttaattcatggcctgaagccgcacttcaagctcttccacccctcttcggaaagcgagcagggattgacacgtccacatgccgatacgggaagcatcaggtcactgcagacgggcgttggcgagctgcacggtgaaacgcgcttctggcacggcaaggactactgcaactttgtatttaaagactgggtccagctagacaaaccattcgctgacttcatcgacaggtattcgacccccaggatgccgtggcatgatattgcgtcagctgtgcatggtaaggcagccagggacgtcgctagacacttcattcagagatggaatttcactaaaatcatgaagagcaagtaccgaagcctctcataccctttcctgctgccaaagagccaaaccacggctcacgagctgcgctaccaggtccctggctccgtccacgccaatgtgcagctgctccgatcggccgccgactggagtgctggaatcaaataccacgaggagtctattcatgcagcctacgtacacgtgatcgagaattccaggcactacatttacatagagaaccaattctttatctcttgtgccgacgataaagtggtctttaacaagataggcgatgcaatcgcccagaggatcttaaaagcacaccgtgaaaaccagaagtatcgcgtttacgttgtcatcccactactccccggattcgagggggatatttccactggcgggggaaatgccttacaggccattatgcattttaattaccggaccatgtgccgcggtgagaactcgattctcgggcagctgaaagcagaactagggaatcagtggattaactatatctctttttgtgggctgcgcacacacgccgagttggagggcaatcttgtaaccgaactcatatacgtccactcgaagttgttaatcgccgacgataatacggttattataggctctgctaacattaacgaccggagtatgctggggaagagagattcggaaatggccgtcattgtgcaggataccgagactgtaccatctgtcatggacggaaaagaatatcaggccggtcggtttgcccgagggcttcggttgcagtgttttagatctaagatgacacccggggtggaagacccctag

SEQ ID NO: 301678 - DNA, 2916 bp, Artificial Sequence
  derived and/or modified sequence
atgtctctcaaaaatgagccacgtgttaacactagcgctctccagaaaatcgcagctgatatgagtaacattattgagaatcttgatacaagagagttacatttcgaaggggaggaagtggactatgacgtcagccctagtgatccaaagatacaagaggtctatatccctttcagtgccatatacaacactcaggggtttaaggaaccaaatatccaaacttacctcagtggttgcccgattaaggctcaggttctggaggtggagagattcacatccaccacacgcgtaccttcaatcaatttgtacactatcgagttgacccacggcgagttcaaatggcaggttaaaaggaagttcaaacatttccaggagttccatagagagctcctgaaatataaggcattcatccgaatcccaataccaacaaggcggcacactttcaggcggcagaacgtgcgggaagagcccagagaaatgccaagcctcccacggagtagtgaaaacatgatccgagaagaacaatttttgggtcgccgtaaacaattggaagactacttgactaaaatcttaaaaatgcctatgtaccgaaactatcatgcaaccacagaatttttggatatctcccagctgtctttcatccatgacctggggccaaaagggattgaagggatgattatgaaacgtagcggcggtcatcggatcccagggctcaattgctgcgggcagggcagggcttgctaccggtggtccaaaagatggttaatcgttaaagactcatttctgctctacatgaagcccgatagtggcgctattgcctttgtgctcttggtggacaaggaatttaaaatcaaagtcggtaagaaggaaaccgaaacaaagtacggtattcgcatcgacaatctttctaggacactgatccttaagtgtaattcctaccgccatgccaggtggtggggaggagcaatcgaggaatttattcaaaagcacggcactaatttcctgaaggaccacagattcggatcttatgccgcaattcaggagaacgcactggccaaatggtacgtaaatgcgaaggggtactttgaggatgtggccaatgctatggaggaggcaaacgaagagatatttattaccgactggtggctatctcccgagatttttcttaagcggcctgtcgtggaaggaaaccgctggcgcctggattgtattctcaaacgaaaagcacagcaaggcgtgcgtatattcattatgttgtacaaggaggtggaactggccctaggcataaacagcgagtacacaaagcggacccttatgcggctgcacccgaacatcaaggtgatgagacacccggatcacgtatcctctaccgtgtacttgtgggctcatcacgaaaagctggtaattatagatcaatcagtcgcttttgtgggcggaatcgaccttgcctacggccgatgggatgataacgaacatcgcctaactgatgttggatctgtcaaacgggttaccagcggcccaagcttggggtctctgcccccagccgctatggagtctatggaatccctcagactgaaggataaaaacgaacccgtgcaaaatctgccaatccagaaaagtattgacgatgtagatagtaagctgaagggtatcggaaagccacgtaagtttagtaaattttctctgtacaagcaactccaccgtcaccacctccatgacgccgactctatcagcagcattgactcaacttcttcttacttcaaccactaccgcagccatcataatctcatccacggattgaagccccattttaagctctttcatccaagctccgagtcagagcaggggttaacgcggcctcatgctgatactggaagtattagatccctgcagaccggtgtcggagaactccatggcgaaactcgtttctggcacggtaaggattactgcaacttcgtattcaaggactgggtacagctggataaacctttcgcagatttcatcgacaggtactccacgcctcgcatgccctggcacgacattgccagcgcggttcacggcaaggctgctagggacgtagccaggcactttattcaacgctggaacttcaccaaaattatgaagagtaaatataggagtctgtcctacccgttccttctgccgaagtctcagactacggcccacgaacttagataccaggtgcctggatctgtgcacgctaatgtacagctgcttcggtcagcagctgattggtcagcagggattaagtatcacgaggagagcatacatgccgcttacgtgcacgtgatcgagaatagtcggcactatatttacattgagaatcaattctttattagctgcgccgacgacaaggttgtctttaataagatcggagacgccatcgcacagaggatcctgaaggcacaccgggagaatcagaagtatcgcgtctatgtagtgattcccctgctgcccggtttcgagggagatatctccacaggaggtgggaacgccttgcaggccatcatgcatttcaattataggacgatgtgcaggggagaaaactccatcctgggacaactgaaagccgaacttggcaatcagtggatcaactatattagtttctgtggcttgcgtacgcacgcggaactggaaggcaatctcgtaaccgaactgatctatgtgcacagcaaactccttattgctgacgacaacacagtaatcattggttcagcaaacatcaacgacagaagtatgctcgggaaaagagacagcgaaatggctgtgatcgtgcaggatactgaaacagtgcccagcgtaatggatggtaaagaatatcaagctgggcgatttgccaggggcctcagactgcaatgttttagatcaaagatgacacctggagtggaagatccctag

SEQ ID NO: 301679 - DNA, 3032 bp, Artificial Sequence
  derived and/or modified sequence
gctgagctccagctgtgccagaggcacccgagccctgagagtccgccgccaacgcgcaggtgctagcggccccttcgccctgcagcccctttgcttttactctgtccaaagttaacatgtcactgaaaaacgagccacgggtaaatacctctgcactgcagaaaattgctgctgacatgagtaatatcatagaaaatctggacacgcgggaactccactttgagggagaggaggtagactacgacgtgtctcccagcgatcccaagatacaagaagtgtatatccctttctctgctatttataacactcaaggatttaaggagcctaatatacagacgtatctctccggctgtccaataaaagcacaagttctggaagtggaacgcttcacatctacaacaagggtaccaagtattaatctttacactattgaattaacacatggggaatttaaatggcaagttaagaggaaattcaagcattttcaagaatttcacagagagctgctcaagtacaaagcctttatccgcatccccattcccactagaagacacacgtttaggaggcaaaacgtcagagaggagcctcgagagatgcccagtttgccccgttcatctgaaaacatgataagagaagaacaattccttggtagaagaaaacaactggaagattacttgacaaagatactaaaaatgcccatgtatagaaactatcatgccacaacagagtttcttgatataagccagctgtctttcatccatgatttgggaccaaagggcatagaaggtatgataatgaaaagatctggaggacacagaataccaggcttgaattgctgtggtcagggaagagcctgctacagatggtcaaaaagatggttaatagtgaaagattcctttttattgtatatgaaaccagacagcggtgccattgccttcgtcctgctggtagacaaagaattcaaaattaaggtggggaagaaggagacagaaacgaaatatggaatccgaattgataatctttcaaggacacttattttaaaatgcaacagctatagacatgctcggtggtggggaggggctatagaagaattcatccagaaacatggcaccaactttctcaaagatcatcgatttgggtcatatgctgctatccaagagaatgctttagctaaatggtatgttaatgccaaaggatattttgaagatgtggcaaatgcaatggaagaggcaaatgaagagatttttatcacagactggtggctgagtccagaaatcttcctgaaacgcccagtggttgagggaaatcgttggaggttggactgcattcttaaacgaaaagcacaacaaggagtgaggatcttcataatgctctacaaagaggtggaactcgctcttggcatcaatagtgaatacaccaagaggactttgatgcgtctacatcccaacataaaggtgatgagacacccggatcatgtgtcatccaccgtctatttgtgggctcaccatgagaagcttgtcatcattgaccaatcggtggcctttgtgggagggattgacctggcctatggaaggtgggacgacaatgagcacagactcacagacgtgggcagtgtgaagcgggtcacttcaggaccgtctctgggttccctcccacctgccgcaatggagtctatggaatccttaagactcaaagataaaaatgagcctgttcaaaacctacccatccagaagagtattgatgatgtggattcaaaactgaaaggaataggaaagccaagaaagttctccaaatttagtctctacaagcagctccacaggcaccacctgcacgacgcagatagcatcagcagcattgacagcacctccagttattttaatcactatagaagtcatcacaatttaatccatggtttaaaaccccacttcaaactctttcacccgtccagtgagtctgagcaaggactcactagacctcatgctgataccgggtccatccgtagtttacagacaggtgtgggagagctgcatggggaaaccagattctggcatggaaaggactactgcaatttcgtcttcaaagactgggttcaacttgataaaccttttgctgatttcattgacaggtactccacgccccggatgccctggcatgacattgcctctgcagtccacgggaaggcggctcgtgatgtggcacgtcacttcatccagcgctggaacttcacaaaaattatgaaatcaaaatatcggtccctttcttatccttttctgcttccaaagtctcaaacaacagcccatgagttgagatatcaagtgcctgggtctgtccatgctaacgtacagttgctccgctctgctgctgattggtctgctggtataaagtaccatgaagagtccatccacgccgcttacgtccatgtgatagagaacagcaggcactatatctatatcgaaaaccagtttttcataagctgtgctgatgacaaagttgtgttcaacaagataggcgatgccattgcccagaggatcctgaaagctcacagggaaaaccagaaataccgggtatatgtcgtgataccacttctgccagggttcgaaggagacatttcaaccggcggaggaaatgctctacaggcaatcatgcacttcaactacagaaccatgtgcagaggagaaaattccatccttggacagttaaaagcagagcttggtaatcagtggataaattacatatcattctgtggtcttagaacacatgcagagctcgaaggaaacctagtaactgagcttatctatgtccacagcaagttgttaattgctgatgataacactgttattattggctctgccaacataaatgaccgcagcatgctgggaaagcgtgacagtgaaatggctgtcattgtgcaagatacagagactgttccttcagtaatggatggaaaagagtaccaagctggccggtttgcccgaggacttcggctacagtgctttaggtctaaaatgactccaggtgtcgaagatccctga

SEQ ID NO: 301680 - protein, 597 aa, Artificial Sequence
  derived and/or modified sequence
MSLKNEPRVNTSALQKIAADMSNIIENLDTRELHFEGEEVDYDVSPSDPKIQEVYIPFSAIYNTQGFKEPNIQTYLSGCPIKAQVLEVERFTSTTRVPSINLYTIELTHGEFKWQVKRKFKHFQEFHRELLKYKAFIRIPIPTRRHTFRRQNVREEPREMPSLPRSSENMIREEQFLGRRKQLEDYLTKILKMPMYRNYHATTEFLDISQLSFIHDLGPKGIEGMIMKRSGGHRIPGLNCCGQGRACYRWSKRWLIVKDSFLLYMKPDSGAIAFVLLVDKEFKIKVGKKETETKYGIRIDNLSRTLILKCNSYRHARWWGGAIEEFIQKHGTNFLKDHRFGSYAAIQENALAKWYVNAKGYFEDVANAMEEANEEIFITDWWLSPEIFLKRPVVEGNRWRLDCILKRKAQQGVRIFIMLYKEVELALGINSEYTKRTLMRLHPNIKVMRHPDHVSSTVYLWAHHEKLVIIDQSVAFVGGIDLAYGRWDDNEHRLTDVGSVKRVTSGPSLGSLPIPGPSVVYRQVWESCMGKPDSGMERTTAISSSKTGFNLINLLLISLTGTPRPGCPGMTLPLQSTGRRLVMWHVTSSSAGTSQKL

SEQ ID NO: 301681 - protein, 142 aa, Artificial Sequence
  derived and/or modified sequence
MSLKNEPRVNTSALQKIAADMSNIIENLDTRELHFEGEEVDYDVSPSDPKIQEVYIPFSAIYNTQGFKEPNIQTYLSGCPIKAQVLEVERFTSTTRVPSINLYTIELTHGEFKWQVKRKFKHFQEFHRELLKYKAFIRIPIP

SEQ ID NO: 301682 - DNA, 429 bp, Artificial Sequence
  derived and/or modified sequence
atgagcctgaagaacgagcccagagtgaacaccagcgccctgcagaagatcgccgccgacatgagcaacatcatcgagaacctggacaccagagagctgcacttcgagggcgaggaggtggactacgacgtgagccccagcgaccccaagatccaggaggtgtacatccccttcagcgccatctacaacacccagggcttcaaggagcccaacatccagacctacctgagcggctgccccatcaaggcccaggtgctggaggtggagagattcaccagcaccaccagagtgcccagcatcaacctgtacaccatcgagctgacccacggcgagttcaagtggcaggtgaagagaaagttcaagcacttccaggagttccacagagagctgctgaagtacaaggccttcatcagaatccccatcccctag

SEQ ID NO: 301683 - DNA, 429 bp, Artificial Sequence
  derived and/or modified sequence
atgagcctgaaaaatgagccaagggtcaacacgtccgccctccagaaaatagctgctgacatgagtaacatcatagagaacctagataccagggagctgcattttgagggcgaggaagtcgactacgatgtctccccttcagatcccaaaattcaagaggtgtacattccctttagcgctatttataacactcaaggtttcaaggaaccgaatatacagacctacctttctgggtgcccaattaaagcccaggtgctcgaggtggaacggttcacatctaccaccagagtgccaagcatcaacctctacacaatcgaactgacacacggggagttcaaatggcaagtgaagaggaagtttaagcatttccaggaattccaccgagaactcctaaaatataaagcctttataaggatcccgatcccctag

SEQ ID NO: 301684 - DNA, 429 bp, Artificial Sequence
  derived and/or modified sequence
atgagcctgaagaatgagccccgggtgaacaccagcgccctgcagaagattgctgctgacatgagcaacatcatcgagaacctggacacccgggagctgcactttgaaggagaggaggtggactatgatgtgagccccagcgaccccaagatccaggaggtgtacatccccttcagcgccatctacaacacccagggcttcaaggagcccaacatccagacctacctgagcggctgccccatcaaggcccaggtgctggaggtggagcgcttcaccagcaccaccagggtgcccagcatcaacctgtacaccatcgagctgacccatggagagttcaagtggcaggtgaagaggaagttcaagcacttccaggagttccaccgggagctgctgaagtacaaggccttcatccgcatccccatcccctag

SEQ ID NO: 301685 - DNA, 429 bp, Artificial Sequence
  derived and/or modified sequence
atgagcctgaagaacgagccccgggtgaacaccagcgccctgcagaaaatcgccgcagatatgtccaacattatcgagaacctggatacacgagagctgcattttgagggcgaggaagtagattacgacgtttcgccatcggatcccaaaattcaggaggtctatattccgtttagcgccatctacaatacgcagggattcaaagagccgaacatacagacatacctgtctgggtgtcctattaaggcccaggtgctggaagtcgagcgttttaccagcacaactagagtaccatctatcaatctgtacacaatcgagttaacccatggagagtttaaatggcaggtgaaacgaaagtttaagcactttcaggagttccatcgtgaactcctcaagtacaaagctttcattaggatccctataccctag

SEQ ID NO: 301686 - DNA, 429 bp, Artificial Sequence
  derived and/or modified sequence
atgagcctgaagaacgagccaagagtcaatacgtctgccctgcaaaagatcgccgcagatatgtcaaacatcatcgagaatctcgatactcgggaactacactttgaaggcgaggaggtggattacgacgtgtccccatccgaccccaagatacaggaagtgtacatcccatttagtgctatttataacacacaaggattcaaagagccaaatattcagacctatctgtctggatgcccaataaaggcacaggtgctagaggtggagcggttcacctctacaactagggttccaagcatcaacctgtacaccattgaactcactcatggggagttcaaatggcaggtgaagcgaaagttcaaacactttcaagaattccacagagagcttctcaagtataaagcttttatccgtattcctattccatag

SEQ ID NO: 301687 - DNA, 621 bp, Artificial Sequence
  derived and/or modified sequence
agccaaaactgggcttgggaacaggaaggctttgcccgtttatttggattctcagggtagtcgattttgccacctcttggctatcagctgccttggagattggtttcatagtaaggattctttctttaaggtgatatggagcaactgctttcacaggggcaccagcccctttgcttttactctgtccaaagttaacatgtcactgaaaaacgagccacgggtaaatacctctgcactgcagaaaattgctgctgacatgagtaatatcatagaaaatctggacacgcgggaactccactttgagggagaggaggtagactacgacgtgtctcccagcgatcccaagatacaagaagtgtatatccctttctctgctatttataacactcaaggatttaaggagcctaatatacagacgtatctctccggctgtccaataaaagcacaagttctggaagtggaacgcttcacatctacaacaagggtaccaagtattaatctttacactattgaattaacacatggggaatttaaatggcaagttaagaggaaattcaagcattttcaagaatttcacagagagctgctcaagtacaaagcctttatccgcatccccattcc

SEQ ID NO: 301688 - DNA, 93 bp, Artificial Sequence
  derived and/or modified sequence
atgaaggccgtgatgattggcgcctgcttcctgatcgattttatgttctttgagtccaccggaagccaagagcagaagagcggcgtctggtag

SEQ ID NO: 301689 - DNA, 93 bp, Artificial Sequence
  derived and/or modified sequence
atgaaggctgtgatgattggagcctgcttcctgattgacttcatgttctttgagagcacaggcagccaggagcagaagtctggagtgtggtag

SEQ ID NO: 301690 - DNA, 93 bp, Artificial Sequence
  derived and/or modified sequence
atgaaggccgtgatgatcggcgcctgcttcctgatcgacttcatgttctttgaaagtacaggatctcaagagcagaaaagcggcgtctggtag

SEQ ID NO: 301691 - DNA, 1384 bp, Artificial Sequence
  derived and/or modified sequence
gccccggctctctggaccttgtctcgctcgggagcggaaacagcggcagccagagcataaaatacacaagaggatttttatggaatggctccttgttacaaggaccacataaacccattttgaattattcaaccattgctgaacttcttgaaactgttttaatcatggacaaacaaaactcacagatgaatgcttctcacccggaaacaaacttgccagttgggtatcctcctcagtatccaccgacagcattccaagatagatcagatactgattcatcagcaaattgaacttctggaagattaaatctcttgatgaacagtgtgtggttggcaaaatttccaagcactggactggaattttgagagaggcatttacagacgctgataactttggaatccagttccctttagaccttgatgttaaaatgaaagctgtaatgattggtgcctgtttcctcattgacttcatgttttttgaaagcactggcagccaggaacaaaaatcaggagtgtggtagtggattagtgaaagtctcctcaggaaatctgaagtctgtatattgattgagactatctaaactcatacctgtatgaattaagctgtaaggcctgtagctctggttgtatacttttgcttttcaaattatagtttatcttctgtataactgatttataaaggtttttgtacattttttaatactcattgtcaatttgagaaaaaggacatatgagtttttgcatttattaatgaaacttcctttgaaaaactgctttgaattatgatctctgattcattgtccattttactaccaaatattaactaaggccttattaatttttatataaattatatcttgtcctattaaatctagttacaatttatttcatgcataagagctaatgttattttgcaaatgccatatattcaaaaaagctcaaagataattttctttactattatgttcaaataatattcaatatgcatattatctttaaaaagttaaatgtttttttaatcttcaagaaatcatgctacacttaacttctcctagaagctaatctataccataatattttcatattcacaagatattaaattaccaattttcaaattattgttagtaaagaacaaaatgattctctcccaaagaaagacacattttaaatactccttcactctaaaactctggtattataacttttgaaagttaatatttctacatgaaatgtttagctcttacactctatccttcctagaaaatggtaattgagattactcagatattaattaaatacaatatcatatatatattcacagagtataaacctaaataatgatctattagattcaaatatttgaaataaaaacttgatttttttgt

SEQ ID NO: 301692 - DNA, 93 bp, Artificial Sequence
  derived and/or modified sequence
atgaaagcagtcatgatcggcgcttgcttcctgatagatttcatgttcttcgagagcaccggcagtcaagaacaaaagtctggggtgtggtag

SEQ ID NO: 301693 - DNA, 93 bp, Artificial Sequence
  derived and/or modified sequence
atgaaggccgtgatgatcggcgcctgcttcctgatcgacttcatgttcttcgagagcaccggcagccaggagcagaagagcggcgtgtggtag

SEQ ID NO: 301694 - protein, 1873 aa, Artificial Sequence
  derived and/or modified sequence
MWAEAGLPRAGGGSQPPFRTFSASDWGLTHLVVHEQTGEVYVGAVNRIYKLSGNLTLLRAHVTGPVEDNEKCYPPPSVQSCPHGLGSTDNVNKLLLLDYAANRLLACGSASQGICQFLRLDDLFKLGEPHHRKEHYLSSVQEAGSMAGVLIAGPPGQGQAKLFVGTPIDGKSEYFPTLSSRRLMANEEDADMFGFVYQDEFVSSQLKIPSDTLSKFPAFDIYYVYSFRSEQFVYYLTLQLDTQLTSPDAAGEHFFTSKIVRLCVDDPKFYSYVEFPIGCEQAGVEYRLVQDAYLSRPGRALAHQLGLAEDEDVLFTVFAQGQKNRVKPPKESALCLFTLRAIKEKIKERIQSCYRGEGKLSLPWLLNKELGCINSPLQIDDDFCGQDFNQPLGGTVTIEGTPLFVDKDDGLTAVAAYDYRGRTVVFAGTRSGRIRKILVDLSNPGGRPALAYESVVAQEGSPILRDLVLSPNHQYLYAMTEKQVTRVPVESCVQYTSCELCLGSRDPHCGWCVLHSICSRRDACERADEPQRFAADLLQCVQLTVQPRNVSVTMSQVPLVLQAWNVPDLSAGVNCSFEDFTESESVLEDGRIHCRSPSAREVAPITRGQGDQRVVKLYLKSKETGKKFASVDFVFYNCSVHQSCLSCVNGSFPCHWCKYRHVCTHNVADCAFLEGRVNVSEDCPQILPSTQIYVPVGVVKPITLAARNLPQPQSGQRGYECLFHIPGSPARVTALRFNSSSLQCQNSSYSYEGNDVSDLPVNLSVVWNGNFVIDNPQNIQAHLYKCPALRESCGLCLKADPRFECGWCVAERRCSLRHHCAADTPASWMHARHGSSRCTDPKILKLSPETGPRQGGTRLTITGENLGLRFEDVRLGVRVGKVLCSPVESEYISAEQIVCEIGDASSVRAHDALVEVCVRDCSPHYRALSPKRFTFVTPTFYRVSPSRGPLSGGTWIGIEGSHLNAGSDVAVSVGGRPCSFSWRNSREIRCLTPPGQSPGSAPIIININRAQLTNPEVKYNYTEDPTILRIDPEWSINSGGTLLTVTGTNLATVREPRIRAKYGGIERENGCLVYNDTTMVCRAPSVANPVRSPPELGERPDELGFVMDNVRSLLVLNSTSFLYYPDPVLEPLSPTGLLELKPSSPLILKGRNLLPPAPGNSRLNYTVLIGSTPCTLTVSETQLLCEAPNLTGQHKVTVRAGGFEFSPGTLQVYSDSLLTLPAIVGIGGGGGLLLLVIVAVLIAYKRKSRDADRTLKRLQLQMDNLESRVALECKEAFAELQTDIHELTNDLDGAGIPFLDYRTYAMRVLFPGIEDHPVLKEMEVQANVEKSLTLFGQLLTKKHFLLTFIRTLEAQRSFSMRDRGNVASLIMTALQGEMEYATGVLKQLLSDLIEKNLESKNHPKLLLRRTESVAEKMLTNWFTFLLYKFLKECAGEPLFMLYCAIKQQMEKGPIDAITGEARYSLSEDKLIRQQIDYKTLTLNCVNPENENAPEVPVKGLDCDTVTQAKEKLLDAAYKGVPYSQRPKAADMDLEWRQGRMARIILQDEDVTTKIDNDWKRLNTLAHYQVTDGSSVALVPKQTSAYNISNSSTFTKSLSRYESMLRTASSPDSLRSRTPMITPDLESGTKLWHLVKNHDHLDQREGDRGSKMVSEIYLTRLLATKGTLQKFVDDLFETIFSTAHRGSALPLAIKYMFDFLDEQADKHQIHDADVRHTWKSNCLPLRFWVNVIKNPQFVFDIHKNSITDACLSVVAQTFMDSCSTSEHKLGKDSPSNKLLYAKDIPNYKSWVERYYADIAKMPAISDQDMSAYLAEQSRLHLSQFNSMSALHEIYSYITKYKDEILAALEKDEQARRQRLRSKLEQVVDTMALSS

SEQ ID NO: 301695 - protein, 147 aa, Artificial Sequence
  derived and/or modified sequence
MKHLLMWSPVIAPGETVYYSVEYQGEYESLYTSHIWIPSSWCSLTEGPECDVTDDITATVPYNLRVRATLGSQTSAWSILKHPFNRNSTILTRPGMEITKDGFHLVIELEDLGPQFEFLVAYWRREPGAEERPFPWYWPCLPLLASC

SEQ ID NO: 301696 - protein, 128 aa, Artificial Sequence
  derived and/or modified sequence
MIFTQSSEKTAVSCLSQNDWKLDVATDNFFQNPELYIRESVKGSLDRKKLEQLYNRYKDPQDENKIGIDGIQQFCDDLALDPASISVLIIAWKFRAATQCEFSKQEFMDGMTELGCDSIEKLKAQIPK

SEQ ID NO: 301697 - protein, 1092 aa, Artificial Sequence
  derived and/or modified sequence
MPCGFSPSPVAHHLVPGPPDTPAQQLRCGWTVGGWLLSLVRGLLPCLPPGARTAEGPIMVLAGPLAVSLLLPSLTLLVSHLSSSQDVSSEPSSEQQLCALSKHPTVAFEDLQPWVSNFTYPGARDFSQLALDPSGNQLIVGARNYLFRLSLANVSLLQATEWASSEDTRRSCQSKGKTEEECQNYVRVLIVAGRKVFMCGTNAFSPMCTSRQVGNLSRTIEKINGVARCPYDPRHNSTAVISSQGELYAATVIDFSGRDPAIYRSLGSGPPLRTAQYNSKWLNEPNFVAAYDIGLFAYFFLRENAVEHDCGRTVYSRVARVCKNDVGGRFLLEDTWTTFMKARLNCSRPGEVPFYYNELQSAFHLPEQDLIYGVFTTNVNSIAASAVCAFNLSAISQAFNGPFRYQENPRAAWLPIANPIPNFQCGTLPETGPNENLTERSLQDAQRLFLMSEAVQPVTPEPCVTQDSVRFSHLVVDLVQAKDTLYHVLYIGTESGTILKALSTASRSLHGCYLEELHVLPPGRREPLRSLRILHSARALFVGLRDGVLRVPLERCAAYRSQGACLGARDPYCGWDGKQQRCSTLEDSSNMSLWTQNITACPVRNVTRDGGFGPWSPWQPCEHLDGDNSGSCLCRARSCDSPRPRCGGLDCLGPAIHIANCSRNGAWTPWSSWALCSTSCGIGFQVRQRSCSNPAPRHGGRICVGKSREERFCNENTPCPVPIFWASWGSWSKCSSNCGGGMQSRRRACENGNSCLGCGEFKTCNPEGCPEVRRNTPWTPWLPVNVTQGGARQEQRFRFTCRAPLADPHGLQFGRRRTETRTCPADGSGSCDTDALVEVLLRSGSTSPHTVSGGWAAWGPWSSCSRDCELGFRVRKRTCTNPEPRNGGLPCVGDAAEYQDCNPQACPVRGAWSCWTSWSPCSASCGGGHYQRTRSCTSPAPSPGEDICLGLHTEEALCATQACPGWSPWSEWSKCTDDGAQSRSRHCEELLPGSSACAGNSSQSRPCPYSEIPVILPASSMEEATDCAGKRNRTYLMLRSSQPSGTPLQSLDSFHILLQTAKLCWGPHCFEMGSISSTWWPRASPASWALGS

SEQ ID NO: 301698 - DNA, 3279 bp, Artificial Sequence
  derived and/or modified sequence
atgccctgcggcttcagccccagccccgtggcccaccacctggtgcccggcccccccgacacccccgcccagcagctgagatgcggctggaccgtgggcggctggctgctgagcctggtgagaggcctgctgccctgcctgccccccggcgccagaaccgccgagggccccatcatggtgctggccggccccctggccgtgagcctgctgctgcccagcctgaccctgctggtgagccacctgagcagcagccaggacgtgagcagcgagcccagcagcgagcagcagctgtgcgccctgagcaagcaccccaccgtggccttcgaggacctgcagccctgggtgagcaacttcacctaccccggcgccagagacttcagccagctggccctggaccccagcggcaaccagctgatcgtgggcgccagaaactacctgttcagactgagcctggccaacgtgagcctgctgcaggccaccgagtgggccagcagcgaggacaccagaagaagctgccagagcaagggcaagaccgaggaggagtgccagaactacgtgagagtgctgatcgtggccggcagaaaggtgttcatgtgcggcaccaacgccttcagccccatgtgcaccagcagacaggtgggcaacctgagcagaaccatcgagaagatcaacggcgtggccagatgcccctacgaccccagacacaacagcaccgccgtgatcagcagccagggcgagctgtacgccgccaccgtgatcgacttcagcggcagagaccccgccatctacagaagcctgggcagcggcccccccctgagaaccgcccagtacaacagcaagtggctgaacgagcccaacttcgtggccgcctacgacatcggcctgttcgcctacttcttcctgagagagaacgccgtggagcacgactgcggcagaaccgtgtacagcagagtggccagagtgtgcaagaacgacgtgggcggcagattcctgctggaggacacctggaccaccttcatgaaggccagactgaactgcagcagacccggcgaggtgcccttctactacaacgagctgcagagcgccttccacctgcccgagcaggacctgatctacggcgtgttcaccaccaacgtgaacagcatcgccgccagcgccgtgtgcgccttcaacctgagcgccatcagccaggccttcaacggccccttcagataccaggagaaccccagagccgcctggctgcccatcgccaaccccatccccaacttccagtgcggcaccctgcccgagaccggccccaacgagaacctgaccgagagaagcctgcaggacgcccagagactgttcctgatgagcgaggccgtgcagcccgtgacccccgagccctgcgtgacccaggacagcgtgagattcagccacctggtggtggacctggtgcaggccaaggacaccctgtaccacgtgctgtacatcggcaccgagagcggcaccatcctgaaggccctgagcaccgccagcagaagcctgcacggctgctacctggaggagctgcacgtgctgccccccggcagaagagagcccctgagaagcctgagaatcctgcacagcgccagagccctgttcgtgggcctgagagacggcgtgctgagagtgcccctggagagatgcgccgcctacagaagccagggcgcctgcctgggcgccagagacccctactgcggctgggacggcaagcagcagagatgcagcaccctggaggacagcagcaacatgagcctgtggacccagaacatcaccgcctgccccgtgagaaacgtgaccagagacggcggcttcggcccctggagcccctggcagccctgcgagcacctggacggcgacaacagcggcagctgcctgtgcagagccagaagctgcgacagccccagacccagatgcggcggcctggactgcctgggccccgccatccacatcgccaactgcagcagaaacggcgcctggaccccctggagcagctgggccctgtgcagcaccagctgcggcatcggcttccaggtgagacagagaagctgcagcaaccccgcccccagacacggcggcagaatctgcgtgggcaagagcagagaggagagattctgcaacgagaacaccccctgccccgtgcccatcttctgggccagctggggcagctggagcaagtgcagcagcaactgcggcggcggcatgcagagcagaagaagagcctgcgagaacggcaacagctgcctgggctgcggcgagttcaagacctgcaaccccgagggctgccccgaggtgagaagaaacaccccctggaccccctggctgcccgtgaacgtgacccagggcggcgccagacaggagcagagattcagattcacctgcagagcccccctggccgacccccacggcctgcagttcggcagaagaagaaccgagaccagaacctgccccgccgacggcagcggcagctgcgacaccgacgccctggtggaggtgctgctgagaagcggcagcaccagcccccacaccgtgagcggcggctgggccgcctggggcccctggagcagctgcagcagagactgcgagctgggcttcagagtgagaaagagaacctgcaccaaccccgagcccagaaacggcggcctgccctgcgtgggcgacgccgccgagtaccaggactgcaacccccaggcctgccccgtgagaggcgcctggagctgctggaccagctggagcccctgcagcgccagctgcggcggcggccactaccagagaaccagaagctgcaccagccccgcccccagccccggcgaggacatctgcctgggcctgcacaccgaggaggccctgtgcgccacccaggcctgccccggctggagcccctggagcgagtggagcaagtgcaccgacgacggcgcccagagcagaagcagacactgcgaggagctgctgcccggcagcagcgcctgcgccggcaacagcagccagagcagaccctgcccctacagcgagatccccgtgatcctgcccgccagcagcatggaggaggccaccgactgcgccggcaagagaaacagaacctacctgatgctgagaagcagccagcccagcggcacccccctgcagagcctggacagcttccacatcctgctgcagaccgccaagctgtgctggggcccccactgcttcgagatgggcagcatcagcagcacctggtggcccagagccagccccgccagctgggccctgggcagctag

SEQ ID NO: 301699 - DNA, 3279 bp, Artificial Sequence
  derived and/or modified sequence
atgccctgtggttttagcccctccccggtcgcacaccatttggtacctgggccacccgatacccctgcccaacagctgcgctgcggatggaccgtgggtgggtggctactgagcttagtgagaggcctcctcccctgtctccctccgggcgcacgcacagccgaaggacccatcatggtcttggccggccctctcgccgttagccttctgttgccatcccttactctcctcgtctcccacctttcctcctctcaagatgttagctcagagccaagctctgaacaacaactatgtgcactgagcaaacaccctaccgtggccttcgaggatttacagccgtgggtctccaacttcacctatccaggcgccagagacttctctcaacttgctctggatccatcggggaaccagttgattgtaggcgctcgaaattatctctttcggttgagtctggcgaatgtcagtttgttacaagccacggagtgggcatcctcggaggacacccggcgctcatgccagtctaaaggaaagacagaagaggaatgccaaaactatgtaagggtactaatcgttgccggaaggaaagtgtttatgtgcgggaccaatgcattcagtcctatgtgtacctcccgacaggttggaaatctttcccgcactatcgaaaagatcaacggggtcgcccgatgtccatacgatccaaggcataattccactgcagtgatatccagtcaaggcgagttatacgccgcgacggtgatcgacttcagcgggcgagacccagccatctaccggagtctgggaagtggcccaccattgcggaccgcccaatacaattctaaatggctgaacgaacctaatttcgtagctgcgtatgatatcggactgttcgcctacttctttctgcgggagaacgccgtggagcatgattgcggcagaaccgtgtactcacgggttgcccgcgtctgcaagaatgatgtgggaggaagatttttgctagaggacacatggacgaccttcatgaaggctcgtctgaattgctctcgccccggggaagtgcctttttattataatgaactacagtcagccttccacctccccgagcaagacctgatttatggcgtgttcactactaacgtgaactccatagctgcctcagccgtctgcgcgtttaatctgagcgccatcagccaggcatttaatgggccatttcggtatcaggaaaatcctagagctgcttggctccccattgccaaccccatccctaattttcagtgcggcacattaccggaaacagggccgaatgaaaatttgacggaacgatcccttcaggacgcacagaggctatttctgatgtccgaggcagtgcagcccgtaacccctgagccatgcgtaacccaggactccgtgaggtttagtcacctggttgtcgacctggtgcaggccaaagacacactgtaccacgttctctatattgggactgagagcggaactatcctgaaggcactgagcactgccagccgtagtctgcacggctgttacctcgaagagctgcatgtgctaccgccgggccgtagagaaccactgcggtccctgcggatcctgcactcagcccgcgctttgtttgtgggcctccgagatggcgtgcttcgagtgccgttagaaaggtgtgctgcctacaggagccaaggggcctgcctcggtgcccgggacccctactgcggctgggatggcaagcagcaaagatgttctaccctggaggattcctccaatatgtccctctggacccaaaatatcacggcctgtcctgtgagaaacgttacccgagacggaggctttggaccctggtctccatggcagccctgcgaacacttggacggcgataattcgggatcctgtttatgccgtgcgagaagctgtgatagccctaggcctcggtgtgggggcctcgattgccttggacctgccattcatatcgctaactgcagcaggaatggggcctggaccccctggagttcttgggctttatgctcgacttcatgtggtattgggttccaggtgagacaacggtcttgttccaatcccgccccgcggcacggggggcgtatatgcgtgggaaagtcaagagaggagcgcttctgtaatgaaaacactccttgtccagtccctattttttgggcgtcttggggtagctggtcgaagtgttctagcaattgtggagggggcatgcaatcacggaggcgagcatgcgagaatgggaatagttgtctcgggtgcggtgaatttaagacctgtaatcctgaaggatgccccgaggtcagaagaaacacgccatggacaccctggctgcccgtaaacgtgactcagggaggcgcaagacaggaacagcggtttaggtttacatgtcgagcacccttggccgaccctcacggcctgcaattcggaagaagaagaactgagacccgaacctgtccagctgatgggtctggttcctgcgacaccgacgctctggttgaggtcctgctgagatctggcagtacctcaccgcataccgtctcagggggctgggctgcgtgggggccgtggtcgtcatgttctagagattgtgagcttggcttccgggtgaggaaacgcacttgcactaacccagaaccaaggaacggcggactgccatgcgtgggcgacgccgctgagtaccaggattgtaatccccaggcctgtcccgtgagaggagcatggagctgctggacctcctggtccccttgcagtgcctcctgcggcggtggccactaccaaaggacacgctcttgcacgagccccgcacctagtcctggcgaagacatctgcttagggctgcacactgaggaggctttgtgtgccacgcaggcctgtccggggtggtcaccctggagcgaatggtctaagtgcactgatgacggggcccagagcaggtctagacactgcgaggagttgttgcctggtagtagcgcctgcgcggggaacagcagccagagccggccctgtccatacagcgagatccctgtaattttgccagcatcctcaatggaagaagccactgactgtgcaggcaagcggaacaggacctacttgatgctgcgctccagtcagccttccggtacacctctgcagtctctggactccttccacatcctacttcagactgctaagctttgttgggggccccactgttttgagatgggatcgatttcctcgacatggtggccacgcgcaagccccgcgtcctgggccctcgggtcttag

SEQ ID NO: 301700 - DNA, 3279 bp, Artificial Sequence
  derived and/or modified sequence
atgccctgtggcttcagccccagccctgtggcccaccacctggtgcccggccccccagacaccccagcccagcagctgcgctgtggctggacagtgggcggctggctgctgagcctggtgcggggcctgctgccctgcctgcccccaggggccaggacagctgagggccccatcatggtgctggccggccccctggccgtgtccctgctgctgcccagcctgaccctgctggtgagccacctgagcagcagccaggatgtgtcctctgagcccagcagcgagcagcagctgtgtgccctgagcaagcaccccaccgtggcctttgaggacctgcagccctgggtgagcaacttcacctacccaggggcccgggacttcagccagctggccctggaccccagcggcaaccagctgattgtgggcgccaggaactacctgttccggctgagcctggccaacgtgtccctgctgcaggccacagagtgggccagcagcgaggacaccaggaggagctgccagagcaagggcaagacagaggaggagtgccagaactacgtgcgggtgctgattgtggccggcaggaaggtgttcatgtgtggcaccaatgccttcagccccatgtgcaccagccggcaggtgggcaacctgagcaggaccatcgagaagatcaacggggtggcccgctgcccctatgaccccaggcacaacagcacagctgtgatcagcagccagggcgagctgtatgctgccaccgtgattgacttcagcggccgggaccctgccatctaccgcagcctgggcagcggcccccccctgaggacagcccagtacaacagcaagtggctgaatgagcccaactttgtggccgcctatgacatcggcctgtttgcctacttcttcctgagagaaaatgctgtggagcatgactgtggccgcacagtgtacagccgggtggcccgggtgtgcaagaatgatgtgggcggccgcttcctgctggaggacacctggaccaccttcatgaaggcccggctgaactgcagcaggcctggagaggtgcccttctactacaatgagctgcagagcgccttccacctgcctgagcaggacctgatctacggcgtcttcaccaccaacgtgaacagcattgctgccagcgctgtgtgtgccttcaacctgagcgccatcagccaggccttcaacggccccttccgctaccaggagaaccccagggctgcctggctgcccatcgccaaccccatccccaacttccagtgtggcaccctgcctgagaccggccccaatgaaaacctgacagagaggagcctgcaggatgcccagaggctcttcctgatgtctgaggccgtgcagcctgtgaccccagagccctgtgtgacccaggacagcgtgcgcttcagccacctggtggtggacctggtgcaggccaaggacaccctgtaccacgtgctgtacatcggcacagaaagtggcaccatcctgaaggccctgagcacagccagccgcagcctgcacggctgctacctggaggagctgcacgtgctgcccccaggccggcgggagcccctgcggagcctgcgcatcctgcacagcgcccgggccctgtttgtgggcctgagagatggagtgctgcgggtgcccctggagcgctgtgccgcctaccgcagccagggcgcctgcctgggcgcccgggacccctactgcggctgggatggcaagcagcagcgctgcagcaccctggaggacagcagcaacatgagcctgtggacccagaacatcacagcctgccctgtgagaaatgtgaccagagatggcggcttcggcccctggagcccctggcagccctgtgagcacctggatggagacaacagcggcagctgcctgtgccgggcccggagctgtgacagcccccggccccgctgtggcggcctggactgcctgggccctgccatccacatcgccaactgcagcagaaatggagcctggaccccctggagctcctgggccctgtgcagcaccagctgtggcatcggcttccaggtgcggcagaggagctgcagcaacccagcccccaggcatggaggccgcatctgtgtgggcaagagccgggaggagcgcttctgcaatgaaaacaccccctgccctgtgcccatcttctgggcctcctggggctcctggagcaagtgcagcagcaactgtggcggcggcatgcagagcagaagaagagcctgtgaaaatggaaacagctgcctgggctgtggggagttcaagacctgcaaccctgagggctgcccagaggtgagaagaaacaccccctggaccccctggctgcctgtgaatgtgacccagggcggggcccggcaggagcagcgcttccgcttcacctgccgggcccccctggccgacccccacggcctgcagtttggaagaagaagaacagagaccaggacctgcccagcagatggcagcggcagctgtgacacagatgccctggtggaggtgctgctgcggagcggcagcaccagcccccacacagtgtctgggggctgggccgcctggggcccctggagcagctgcagccgggactgtgagctgggcttccgggtgaggaagaggacctgcaccaaccctgagcccagaaatggaggcctgccctgtgtgggagatgctgctgagtaccaggactgcaacccccaggcctgccctgtgcggggggcctggagctgctggacctcctggagcccctgcagcgccagctgtggcggcggccactaccagaggaccaggagctgcaccagccctgcccccagccctggagaggacatctgcctgggcctgcacacagaggaggccctgtgtgccacccaggcctgccccggctggagcccctggagcgagtggagcaagtgcacagatgatggagcccagagccgcagccgccactgtgaggagctgctgcccggcagcagcgcctgtgccggcaacagcagccagagccggccctgcccctacagcgagatccctgtgatcctgcctgccagctccatggaggaggccacagactgtgccggcaagaggaacagaacctacctgatgctgcggagcagccagcccagcggcacccccctgcagagcctggacagcttccacatcctgctgcagacagccaagctgtgctggggcccccactgctttgagatgggcagcatcagcagcacctggtggccccgggccagccctgcctcctgggccctgggcagctag

SEQ ID NO: 301701 - DNA, 3279 bp, Artificial Sequence
  derived and/or modified sequence
atgccctgcggcttcagccccagccccgtggcccaccacctggtgcccgggccgccagacactccagctcagcaactgaggtgcgggtggacagtcggcggatggcttttgtcactagttagagggctcctcccctgcttgccgccgggtgcccggactgccgagggacccatcatggttctggctgggcctctggcagtaagcttattattgccttccctgacacttttggtgtcccaccttagctctagccaggacgtctcctcagagcccagtagtgaacagcagctgtgcgcccttagcaaacaccctactgtcgcttttgaagacctgcaaccctgggtgagtaatttcacctatccgggggcccgcgatttcagccagctcgctctggatccgtcagggaatcaactgatcgtgggggctcgcaattatctgttcagattatctttggctaacgtgagcttgttgcaggccacggagtgggcctcctcagaagatacgaggagaagctgtcagtcgaaggggaaaactgaggaagagtgtcagaactatgtgagagttttaatcgtggccggtcggaaggtgtttatgtgcggcactaatgccttcagccccatgtgtacttcaagacaggtgggcaacctatctcggaccattgagaagattaacggcgtagcccgctgcccttacgacccacgccacaactctactgccgtgatatcgtcccagggcgagttatatgcagctacagttatagacttctcagggagggacccagccatctaccgctcactcggctctggaccgcctctgaggacggctcagtacaactcaaagtggctgaacgaacctaattttgtagccgcgtatgatatcggactgttcgcatacttctttttgagagaaaatgcagtggagcacgattgtggacgcactgtctactctagggtcgcgagggtctgtaagaacgatgtcggtggtcgattcctgctggaagatacttggactaccttcatgaaagcaaggttgaactgttctcgccctggagaggtgccattttactacaacgaactccagagcgcttttcatctaccagaacaagacctaatctatggcgtttttaccaccaacgttaatagtatcgcggcaagtgctgtgtgcgcttttaacctatccgctatatctcaggcctttaacggtccatttcgctaccaggagaacccaagggccgcctggttgcctattgcaaatccaattcccaatttccagtgtggcaccctccccgagacaggccccaatgagaatctcaccgaacggagcctccaggacgcccagcgcctgttccttatgagtgaggccgtacagcccgtcacccctgagccctgcgtgacgcaggattcagtaagattctcacatctcgttgtggatctggtccaggctaaagataccctctaccatgtgttgtatattgggactgagagtggcacaattctgaaggctctgtctaccgcgagcagatccctgcatggatgctatctcgaggagctgcatgtgctccctcccggacgtcgcgagcctttgaggtccctgagaatccttcatagcgctcgagctctctttgtggggctgcgggatggtgtgctgcgggttcccctagaacggtgcgcagcataccggtctcagggcgcatgcttgggcgccagagatccctattgcggatgggatggcaagcagcagcgctgttctaccctcgaagacagctctaacatgtcactatggacacaaaatatcaccgcatgcccggtgagaaatgttacacgcgatgggggatttgggccatggtcaccctggcagccatgcgaacatttagacggggataacagcggctcttgtctgtgtagggcacgctcttgcgatagccctcggccccgctgcgggggactggattgcttgggacctgcaatacacatcgctaattgcagcaggaacggcgcctggaccccatggtcctcctgggccctgtgctccacctcctgcggtattgggttccaggtgcgacagagaagctgcagtaatcccgccccccggcatggcggtcggatctgcgtcgggaagtccagagaagagcgcttttgcaatgaaaatacaccatgtccagtgccgatcttttgggcttcatgggggagctggagtaaatgctcaagcaattgcgggggcggcatgcaatccagaagacgcgcttgtgagaatggtaatagctgcttgggctgcggagaatttaagacatgcaacccagaggggtgtccagaggtgagaagaaacacaccctggactccttggcttcctgtcaatgttactcaaggcggtgcccgccaggagcagcgcttccgattcacgtgtcgcgctcccctagcagatccgcacggtttacagttcggaaggaggcggaccgagactagaacatgtccagccgatggcagcgggtcctgtgacaccgacgcattggtggaggtgctgctccggtcaggctctacctcccctcacaccgtctctggcggttgggctgcatggggcccgtggtcttcttgtagcagggattgtgaactggggttcagagtccgcaagaggacctgcacaaatccagagccgcgcaatgggggtcttccttgtgtaggagatgcagcagagtatcaggactgtaaccctcaggcctgccctgtgcgcggcgcatggagttgttggacctcttggagtccttgttccgcatcatgtggtggaggtcattatcaaaggacaagaagctgcacttccccagctccttcgccgggcgaagacatctgcttaggtctgcatacggaagaggctttgtgtgcaacgcaagcctgtcctggatggagtccctggtctgagtggagtaagtgcacggacgacggggcccaaagtagatctcgccactgcgaggagctcctgcccgggtcttccgcctgtgccggcaacagttcccagagcagaccttgtccatactcagagattcccgtcattttgcccgcttcctccatggaggaggccaccgattgtgcgggcaaacggaaccgcacctatctgatgcttaggagctcccagccgtctgggacgcctcttcagtccctggatagcttccacattctcctccagaccgccaagctgtgctggggtccccattgtttcgaaatgggctccatttcgagcacatggtggccaagagcctctcccgccagctgggccctcggctcttag

SEQ ID NO: 301702 - DNA, 3279 bp, Artificial Sequence
  derived and/or modified sequence
atgccttgtggcttctctccaagtccagtcgcccatcatctggtgccagggccaccggataccccagctcaacaacttcggtgtggttggaccgttggtggatggctcttgagcctcgtgcgcggactgctgccatgtctgcctccaggcgcaaggaccgccgagggccctattatggttttggccggacccttagctgtatcgctgctgctgccctcactgacattgcttgtgtcgcacctctctagtagccaggatgtgtcctcagaacccagcagcgagcaacagctctgtgcactgtctaaacacccgacagttgctttcgaggacctccaaccctgggtgagcaacttcacgtatcccggagcccgtgacttctcccaactcgctttggatccatccggcaatcagctcattgtgggcgcacgaaactatttgttcaggttgtctctagctaacgtgtctctcctgcaagccacagagtgggcttctagcgaagatacacgtaggagctgtcagtccaagggcaagacggaagaagagtgccagaattatgtcagagtccttatcgtggccggtaggaaggtgttcatgtgtggaacgaatgcattcagccctatgtgcaccagtcggcaggtggggaatctgagcagaactatcgagaagatcaacggagtggctcgctgcccatatgatcccaggcacaactccactgcagtcattagtagtcaaggcgagctttacgctgccacagtgatcgacttctccgggcgagaccctgcgatttatcggtcactcggctccggtccacctctacggaccgcgcaatacaattccaaatggttaaacgagccaaatttcgtagcggcatacgacattggcctttttgcctacttcttcctcagagaaaatgctgtcgaacatgactgtggcagaactgtttacagtagagttgccagagtgtgtaagaatgatgtgggtgggcgattcctgctggaggatacctggaccacctttatgaaagcgcgactcaattgcagtaggcctggcgaggtgccattctattataacgagctgcagtccgcatttcacctcccggaacaagacttgatttacggtgtctttacgaccaatgtcaattcaatcgcggcttcagcagtgtgcgcctttaatctgtcggccattagccaggcttttaatgggcctttccgctaccaggaaaatcccagagccgcttggctgccaatagcaaaccccatccccaactttcagtgtggtacgctgccagagacaggacctaacgaaaacttgaccgaacgctcacttcaagacgcacagcgactctttctgatgtcagaagcggtccagccggtcactccagagccatgcgtgacccaggactctgtacgcttttctcatctggtggtcgacctagtgcaggcaaaagacaccctctatcatgtgttgtatataggtacagagagcggcactatactgaaggcgctgtccactgcctcccgatccctgcatggttgttacttggaggagctgcacgtgcttcctccaggcaggcgggagcccctgcgcagccttcgcattttgcacagcgccagggccctctttgtggggctacgcgacggtgtcttgcgtgttccactggaacgctgcgctgcttacagaagccagggtgcctgcttaggagccagggatccttattgtggatgggacggaaagcagcagcgatgttccacccttgaggattcctcaaatatgtcactgtggacccagaacatcaccgcatgtccagtccgtaacgtcaccagagatgggggtttcggtccgtggagcccatggcaaccatgtgagcacctagatggcgacaactcggggtcctgcctctgtcgggcacgaagctgtgattcccctagacccagatgcggtgggcttgattgcctcggcccagccatccatatcgccaattgctcgcgaaatggcgcttggacaccatggtcatcttgggccttgtgttcgacaagctgtgggattggatttcaagttcgacagcgctcttgtagcaatcccgctcctagacacggaggcagaatctgtgtgggcaaatctagagaagagcgcttctgtaatgagaataccccttgtcccgtcccaatcttttgggccagctggggctcctggtctaaatgttcgagtaactgcggaggcggaatgcagtctagacgcagggcttgtgagaacgggaattcgtgccttggatgtggagaattcaagacatgtaatccagaggggtgccccgaagtgcgaagaaataccccgtggacaccctggctaccggtaaacgtgacacaggggggagcacgccaggagcagagattccggtttacgtgccgtgccccactggcggatcctcacggacttcagtttggacgcaggcgtacggagactcgcacatgcccggcagacggatctggtagctgtgatactgacgctctggtcgaggtcttgttgaggtcaggctctactagcccccacaccgtatcaggcggatgggctgcgtggggaccttggtcatcctgcagtagggattgcgagctaggttttagggtcagaaagcgcacctgtaccaaccccgaacccagaaatggtgggctcccttgcgtgggagacgccgctgagtatcaggactgcaatccccaggcttgcccagtgagaggggcttggagctgttggacttcttggtccccctgcagtgcaagctgtgggggtgggcattaccagagaacccggtcctgtacctcacctgcacctagtccaggcgaagatatctgcctaggtctgcacaccgaagaagccctttgcgctacccaagcctgccctggatggtccccatggagtgagtggtctaagtgtaccgatgatggcgcacagagcaggtcaagacactgcgaggaactcctgccgggtagttccgcatgtgccggaaatagctctcagagtcgcccatgcccgtacagtgaaattccggtgatactgcccgctagttcgatggaggaggccacagactgtgcgggaaaacgaaacagaacttatctaatgctgcgaagctcgcagccttcagggacccctctgcagtcactggactccttccatatccttctccagacagccaagctctgctgggggccacactgttttgaaatgggcagtatcagctcaacttggtggcctagggctagcccagcatcatgggcactcgggtcatag

SEQ ID NO: 301703 - DNA, 4832 bp, Artificial Sequence
  derived and/or modified sequence
agttggagcgcgggggttggtgccagagcccagctccgccgagccgggcgggtcggcagcgcatccagcggctgctgggagcccgagcgcagcgggcgcgggcccgggtggggactgcaccggagcgctgagagctggaggccgttcctgcgcggccgccccattcccagaccggccgccagcccatctggttagctcccgccgctccgcgccgcccgggagtcgggagccgcggggaaccgggcacctgcacccgcctctgggagtgagtggttccagctggtgcctggcctgtgtctcttggatgccctgtggcttcagtccgtctcctgttgcccaccacctcgtccctgggccgcctgataccccagcccaacagctaaggtgtggatggacagtagggggctggcttctctcactggtcaggggtcttctcccctgtctgcctcccggagctaggactgcagaggggcctatcatggtgcttgcaggccccctggctgtctcgctgttgctgcccagcctcacactgctggtgtcccacctctccagctcccaggatgtctccagtgagcccagcagtgagcagcagctgtgcgcccttagcaagcaccccaccgtggcctttgaagacctgcagccgtgggtctctaacttcacctaccctggagcccgggatttctcccagctggctttggacccctccgggaaccagctcatcgtgggagccaggaactacctcttcagactcagccttgccaatgtctctcttcttcaggccacagagtgggcctccagtgaggacacgcgccgctcctgccaaagcaaagggaagactgaggaggagtgtcagaactacgtgcgagtcctgatcgtcgccggccggaaggtgttcatgtgtggaaccaatgccttttcccccatgtgcaccagcagacaggtggggaacctcagccggactattgagaagatcaatggtgtggcccgctgcccctatgacccacgccacaactccacagctgtcatctcctcccagggggagctctatgcagccacggtcatcgacttctcaggtcgggaccctgccatctaccgcagcctgggcagtgggccaccgcttcgcactgcccaatataactccaagtggcttaatgagccaaacttcgtggcagcctatgatattgggctgtttgcatacttcttcctgcgggagaacgcagtggagcacgactgtggacgcaccgtgtactctcgcgtggcccgcgtgtgcaagaatgacgtggggggccgattcctgctggaggacacatggaccacattcatgaaggcccggctcaactgctcccgcccgggcgaggtccccttctactataacgagctgcagagtgccttccacttgccggagcaggacctcatctatggagttttcacaaccaacgtaaacagcatcgcggcttctgctgtctgcgccttcaacctcagtgctatctcccaggctttcaatggcccatttcgctaccaggagaaccccagggctgcctggctccccatagccaaccccatccccaatttccagtgtggcaccctgcctgagaccggtcccaacgagaacctgacggagcgcagcctgcaggacgcgcagcgcctcttcctgatgagcgaggccgtgcagccggtgacacccgagccctgtgtcacccaggacagcgtgcgcttctcacacctcgtggtggacctggtgcaggctaaagacacgctctaccatgtactctacattggcaccgagtcgggcaccatcctgaaggcgctgtccacggcgagccgcagcctccacggctgctacctggaggagctgcacgtgctgccccccgggcgccgcgagcccctgcgcagcctgcgcatcctgcacagcgcccgcgcgctcttcgtggggctgagagacggcgtcctgcgggtcccactggagaggtgcgccgcctaccgcagccagggggcatgcctgggggcccgggacccgtactgtggctgggacgggaagcagcaacgttgcagcacactcgaggacagctccaacatgagcctctggacccagaacatcaccgcctgtcctgtgcggaatgtgacacgggatgggggcttcggcccatggtcaccatggcaaccatgtgagcacttggatggggacaactcaggctcttgcctgtgtcgagctcgatcctgtgattcccctcgaccccgctgtgggggccttgactgcctggggccagccatccacatcgccaactgctccaggaatggggcgtggaccccgtggtcatcgtgggcgctgtgcagcacgtcctgtggcatcggcttccaggtccgccagcgaagttgcagcaaccctgctccccgccacgggggccgcatctgcgtgggcaagagccgggaggaacggttctgtaatgagaacacgccttgcccggtgcccatcttctgggcttcctggggctcctggagcaagtgcagcagcaactgtggagggggcatgcagtcgcggcgtcgggcctgcgagaacggcaactcctgcctgggctgcggcgagttcaagacgtgcaaccccgagggctgccccgaagtgcggcgcaacaccccctggacgccgtggctgcccgtgaacgtgacgcagggcggggcacggcaggagcagcggttccgcttcacctgccgcgcgccccttgcagacccgcacggcctgcagttcggcaggagaaggaccgagacgaggacctgtcccgcggacggctccggctcctgcgacaccgacgccctggtggaggtcctcctgcgcagcgggagcacctccccgcacacggtgagcgggggctgggccgcctggggcccgtggtcgtcctgctcccgggactgcgagctgggcttccgcgtccgcaagagaacgtgcactaacccggagccccgcaacgggggcctgccctgcgtgggcgatgctgccgagtaccaggactgcaacccccaggcttgcccagttcggggtgcttggtcctgctggacctcatggtctccatgctcagcttcctgtggtgggggtcactatcaacgcacccgttcctgcaccagccccgcaccctccccaggtgaggacatctgtctcgggctgcacacggaggaggcactatgtgccacacaggcctgcccaggctggtcgccctggtctgagtggagtaagtgcactgacgacggagcccagagccgaagccggcactgtgaggagctcctcccagggtccagcgcctgtgctggaaacagcagccagagccgcccctgcccctacagcgagattcccgtcatcctgccagcctccagcatggaggaggccaccgactgtgcaggtaaaagaaaccggacctacctcatgctgcggtcctcccagccctccggcaccccactccaaagtctggactctttccacatcctgctccagacagccaagctttgttggggtccccactgctttgagatgggttcaatctcatccacttggtggccacgggcatctcctgcttcttgggctctgggctcctgaccctagcagtgtacctgtcttgccagcactgccagcgtcagtcccaggagtccacactggtccatcctgccacccccaaccatttgcactacaagggcggaggcaccccgaagaatgaaaagtacacacccatggaattcaagaccctgaacaagaataacttgatccctgatgacagagccaacttctacccattgcagcagaccaatgtgtacacgactacttactacccaagccccctgaacaaacacagcttccggcccgaggcctcacctggacaacggtgcttccccaacagctgataccgccgtcctggggacttgggcttcttgccttcataaggcacagagcagatggagatgggacagtggagccagtttggttttctccctctgcactaggccaagaacttgctgccttgcctgtggggggtcccatccggcttcagagagctctggctggcattgaccatgggggaaagggctggtttcaggctgacatatggccgcaggtccagttcagcccaggtctctcatggttatcttccaacccactgtcacgctgacactatgctgccatgcctgggctgtggacctactgggcatttgaggaattggagaatggagatggcaagagggcaggcttttaagtttgggttggagacaacttcctgtggcccccacaagctgagtctggccttctccagctggccccaaaaaaggcctttgctacatcctgattatctctgaaagtaatcaatcaagtggctccagtagctctggattttctgccagggctgggccattgtggtgctgccccagtatgacatgggaccaaggccagcgcaggttatccacctctgcctggaagtctatactctacccagggcatccctctggtcagaggcagtgagtactgggaactggaggctgacctgtgcttagaagtcctttaatctgggctggtacaggcctcagccttgccctcaatgcacgaaaggtggcccaggagagaggatcaatgccataggaggcagaagtctggcctctgtgcctctatggagactatcttccagttgctgctcaacagagttgttggctgagacctgcttgggagtctctgctggcccttcatctgttcaggaacacacacacacacacactcacacacgcacacacaatcacaatttgctacagcaacaaaaaagacattgggctgtggcattattaattaaagatgatatccagtc

SEQ ID NO: 301704 - DNA, 716 bp, Artificial Sequence
  derived and/or modified sequence
gcggccgccccattcccagaccggccgccagcccatctggttagctcccgccgctccgcgccgcccgggagtcgggagccgcggggaaccgggcacctgcacccgcctctgggagccagcttgggtccgggttgcactgggccctgccagggctgtggtcggcgcatctgggctgcagcggcgatggggacccgggacccaggcctggagaaggagacggacgagtgaggctgagggacggagggacagagtgagtggttccagctggtgcctggcctgtgtctcttggatgccctgtggcttcagtccgtctcctgttgcccaccacctcgtccctgggccgcctgataccccagcccaacagctaaggtgtggatggacagtagggggctggcttctctcactggtcaggggtcttctcccctgtctgcctcccggagctaggactgcagaggggcctatcatggtgcttgcaggccccctggctgtctcgctgttgctgcccagcctcacactgctggtgtcccacctctccagctcccaggatgtctccagtgagcccagcagtgagcagcagctgtgcgcccttagcaagcaccccaccgtggcctttgaagacctgcagccgtgggtctctaacttcacctaccctggagcccgggatttctcccagctggctttggacccctccgggaaccagctcatcgtgggagcca

SEQ ID NO: 301705 - DNA, 558 bp, Artificial Sequence
  derived and/or modified sequence
agacatccgtgttccctggctcaggggctcatcgtccttccttcctctgccaaggctgaggcgcagctggacaggggagcatccatcacactcctttcccgccagccagcagcggcagctctcctggcaggcaggggatcagctgtgcctctccttactccactgctcctcacccctggacccagggcccaccctccatctctccttgtctggtgctgcccacgtctgcctgcagaccacacctgtgagcacttgactaagtcttctgtgagtggttccagctggtgcctggcctgtgtctcttggatgccctgtggcttcagtccgtctcctgttgcccaccacctcgtccctgggccgcctgataccccagcccaacagctaaggtgtggatggacagtagggggctggcttctctcactggtcaggggtcttctcccctgtctgcctcccggagctaggactgcagaggggcctatcatggtgcttgcaggccccctggctgtctcgctgttgctgcccagcctcacactgctggtgtcccacctctccagctcc

SEQ ID NO: 301706 - protein, 2580 aa, Artificial Sequence
  derived and/or modified sequence
MGEHGLELASMIPALRELGSATPEEYNTVVQKPRQILCQFIDRILTDVNVVAVELVKKTDSQPTSVMLLDFIQHIMKSSPLMFVNVSGSHEAKGSCIEFSNWIITRLLRIAATPSCHLLHKKICEVICSLLFLFKSKSPAIFGVLTKELLQLFEDLVYLHRRNVMGHAVEWPVVMSRFLSQLDEHMGYLQSAPLQLMSMQNLEFIEVTLLMVLTRIIAIVFFRRQELLLWQIGCVLLEYGSPKIKSLAISFLTELFQLGGLPAQPASTFFSSFLELLKHLVEMDTDQLKLYEEPLSKLIKTLFPFEAEAYRNIEPVYLNMLLEKLCVMFEDGVLMRLKSDLLKAALCHLLQYFLKFVPAGYESALQVRKVYVRNICKALLDVLGIEVDAEYLLGPLYAALKMESMEIIEEIQCQTQQENLSSNSDGISPKRRRLSSSLNPSKRAPKQTEDRTFKDCQHKSKKKPSVVITWMSLDFYTKVLKSCRSLLESVQKLDLEATIDKVVKIYDALIYMQVNSSFEDHILEDLCGMLSLPWIYSHSDDGCLKLTTFAANLLTLSCRISDSYSPQAQSRCVFLLTLFPRRIFLEWRTAVYNWALQSSHEVIRASCVSGFFILLQQQNSCNRVPKILIDKVKDDSDIVKKEFASILGQLVCTLHGMFYLTSSLTEPFSEHGHVDLFCRNLKATSQHECSSSQLKASVCKPFLFLLKKKIPSPVKLAFIDNLHHLCKHLDFREDETDVKAVLGTLLNLMEDPDKDVRVAFSGNIKHILESLDSEDGFIKELFVLRMKEAYTHAQISRNNELKDTLILTTGDIGRAAKGDLVPFALLHLLHCLLSKSASVSGAAYTEIRALVAAKSVKLQSFFSQYKKPICQFLVESLHSSQMTALPNTPCQNADVRKQDVAHQREMALNTLSEIANVFDFPDLNRFLTRTLQVLLPDLAAKASPAASALIRTLGKQLNVNRREILINNFKYIFSHLVCSCSKDELERALHYLKNETEIELGSLLRQDFQGLHNELLLRIGEHYQQVFNGLSILASFASSDDPYQGPRDIISPELMADYLQPKLLGILAFFNMQLLSSSVGIEDKKMALNSLMSLMKLMGPKHVSSVRVKMMTTLRTGLRFKDDFPELCCRAWDCFVRCLDHACLGSLLSHVIVALLPLIHIQPKETAAIFHYLIIENRDAVQDFLHEIYFLPDHPELKKIKAVLQEYRKETSESTDLQTTLQLSMKAIQHENVDVRIHALTSLKETLYKNQEKLIKYATDSETVEPIISQLVTVLLKGCQDANSQARLLCGECLGELGAIDPGRLDFSTTETQGKDFTFVTGVEDSSFAYGLLMELTRAYLAYADNSRAQDSAAYAIQELLSIYDCREMETNGPGHQLWRRFPEHVREILEPHLNTRYKSSQKSTDWSGVKKPIYLSKLGSNFAEWSASWAGYLITKVRHDLASKIFTCCSIMMKHDFKVTIYLLPHILVYVLLGCNQEDQQEVYAEIMAVLKHDDQHTINTQDIASDLCQLSTQTVFSMLDHLTQWARHKFQALKAEKCPHSKSNRNKVDSMVSTVDYEDYQSVTRFLDLIPQDTLAVASFRSKAYTRAVMHFESFITEKKQNIQEHLGFLQKLYAAMHEPDGVAGVSAIRKAEPSLKEQILEHESLGLLRDATACYDRAIQLEPDQIIHYHGVVKSMLGLGQLSTVITQVNGVHANRSEWTDELNTYRVEAAWKLSQWDLVENYLAADGKSTTWSVRLGQLLLSAKKRDITAFYDSLKLVRAEQIVPLSAASFERGSYQRGYEYIVRLHMLCELEHSIKPLFQHSPGDSSQEDSLNWVARLEMTQNSYRAKEPILALRRALLSLNKRPDYNEMVGECWLQSARVARKAGHHQTAYNALLNAGESRLAELYVERAKWLWSKGDVHQALIVLQKGVELCFPENETPPEGKNMLIHGRAMLLVGRFMEETANFESNAIMKKYKDVTACLPEWEDGHFYLAKYYDKLMPMVTDNKMEKQGDLIRYIVLHFGRSLQYGNQFIYQSMPRMLTLWLDYGTKAYEWEKAGRSDRVQMRNDLGKINKVITEHTNYLAPYQFLTAFSQLISRICHSHDEVFVVLMEIIAKVFLAYPQQAMWMMTAVSKSSYPMRVNRCKEILNKAIHMKKSLEKFVGDATRLTDKLLELCNKPVDGSSSTLSMSTHFKMLKKLVEEATFSEILIPLQSVMIPTLPSILGTHANHASHEPFPGHWAYIAGFDDMVEILASLQKPKKISLKGSDGKFYIMMCKPKDDLRKDCRLMEFNSLINKCLRKDAESRRRELHIRTYAVIPLNDECGIIEWVNNTAGLRPILTKLYKEKGVYMTGKELRQCMLPKSAALSEKLKVFREFLLPRHPPIFHEWFLRTFPDPTSWYSSRSAYCRSTAVMSMVGYILGLGDRHGENILFDSLTGECVHVDFNCLFNKGETFEVPEIVPFRLTHNMVNGMGPMGTEGLFRRACEVTMRLMRDQREPLMSVLKTFLHDPLVEWSKPVKGHSKAPLNETGEVVNEKAKTHVLDIEQRLQGVIKTRNRVTGLPLSIEGHVHYLIQEATDENLLCQMYLGWTPYM

SEQ ID NO: 301707 - DNA, 7743 bp, Artificial Sequence
  derived and/or modified sequence
atgggggagcacggtctggagctcgcatctatgatacccgctttgagggagcttgggagtgcgacaccggaggaatacaatacagtcgtgcagaagccgagacagatactttgccagttcatagataggattctgacagacgtcaatgttgtcgcagtggagctcgttaagaaaacggacagccagccaacatcggtcatgttactcgatttcattcagcacataatgaaatcttccccactcatgtttgtaaacgtgagtggatcacatgaagctaaaggttcctgtattgaattttcaaattggattataacccgtctcctgcggattgcagccaccccctcctgccatctcttacacaaaaaaatttgcgaagtcatttgtagcctactattcctctttaagagtaagagtcccgccatctttggtgttctcaccaaggagctgctgcaattgttcgaagatctggtgtacctgcatcgaagaaacgtgatgggtcatgcagttgagtggcccgtcgtcatgagtaggttcctgtctcagctggatgagcacatgggctacctgcaatctgctccactacaactcatgtcaatgcagaacctcgagttcatcgaggtaacactcctcatggtgcttacaagaattattgctatcgtcttcttcagacggcaagagctgcttttgtggcagatcgggtgtgtgcttctggagtatggctctccaaagatcaagtctctcgccatctccttcttaacagagctgttccagcttgggggactccctgcacagcccgcatccaccttcttttcgagcttcctggagctgttaaagcatcttgttgagatggatacagaccagttgaaactatacgaagaaccactcagtaagctgataaaaacactgtttcccttcgaagcagaggcatacagaaacatcgagcccgtgtatttgaatatgctcctcgaaaagctgtgcgtgatgtttgaggatggtgttttaatgagacttaagtccgatttgttgaaggccgccctatgtcacctgctccagtacttcctgaaattcgtcccagcagggtatgaatcagcactgcaggtgagaaaggtctacgtccgaaatatttgtaaggccctcctggacgtgctcggcatcgaggtggatgccgagtaccttttgggcccactatatgccgcccttaaaatggagtcaatggagattatcgaggaaatccagtgccagactcagcaggagaacttgtcttcaaacagtgacgggattagccctaaaaggcggcgactctcctcctcgctgaatcccagcaagcgagctccaaaacagacggaagaccggacttttaaagattgtcagcacaagagtaaaaagaagcccagtgtggttataacgtggatgtctctcgacttctatacaaaggtcctgaaatcatgtcgatcgctgctcgagtcagttcaaaagttagacctcgaagccacgattgacaaggtcgtgaaaatctatgacgctctgatctacatgcaggtaaattctagtttcgaggaccacatcttagaagatttatgtggtatgctcagcctaccttggatttactctcactcagacgatggctgcctgaagctcactacctttgccgctaatctgctcacactgtcttgccgtatctcagacagttattcaccccaggcccagtcacgatgtgtctttctgcttacccttttcccacgacgcatattcttggaatggcgcactgccgtctataattgggctctgcagtcttcccacgaggtcatccgggctagctgtgtttctggtttcttcattctcctgcagcagcagaacagttgtaaccgcgtccccaagatattgattgataaagtgaaggacgacagtgacatcgtgaagaaggaattcgcaagcatcctgggccaattggtatgcacacttcatgggatgttttaccttacctcctctcttaccgaacccttttcagagcacggccacgttgatctgttttgtcgcaacttaaaagccacgtcacagcacgaatgttcatcttcccagctgaaggcgagtgtctgcaaacccttcctgtttttacttaagaaaaagatccctagccctgtgaagttagccttcattgataacctccaccatctttgtaagcacctcgacttccgcgaagatgagaccgacgtcaaggcagtgcttggcactctgctgaatctgatggaagaccccgacaaggatgtgcgtgtagcattttcagggaacatcaaacacatcctcgaatctctggattctgaagatggctttattaaggagctgttcgttctgcgtatgaaagaggcatacactcacgcccagatttctcgcaacaacgagctaaaggacacattgatcctcacaactggagacataggccgtgctgccaaaggagacctggtgccgttcgcgctgcttcacctgctacactgcctcttatcaaaatctgcgagtgtatctggagcggcctacacagaaatccgggctctggtcgcagccaagtccgtgaaattgcagagctttttttcacagtacaagaagcccatctgtcagttccttgtcgaatccttgcactcctctcagatgacggcgctgccgaataccccttgtcagaatgccgatgtacgcaaacaggacgtggcacaccagcgggagatggctcttaacaccctcagcgagatagcaaatgtcttcgactttcctgatttgaaccgttttctgacaagaacactgcaggttcttcttcctgatctggccgctaaagcttcccccgctgcctcagcgctgataaggactttgggtaagcagctgaatgtgaataggcgcgagattttgataaacaacttcaagtacattttttcccacttggtgtgtagctgctccaaagacgaactggaaagggcgttacattacttaaagaatgaaacagagatagaattaggctccctcttgaggcaagatttccagggactacacaacgagctgctgttgagaatcggggaacattaccagcaagtgttcaacgggctgagcatactcgcgtcatttgcctctagcgacgatccctaccaggggccaagggacattatttctcctgaactgatggccgattatcttcaacctaagttactgggcattctcgcattttttaacatgcagctgctctccagctccgtggggatcgaggacaagaagatggctctgaattcattaatgtccctaatgaaacttatgggccctaagcacgtctcctcagtgagggtgaagatgatgactacactacggaccgggctcaggtttaaggatgattttcctgaactgtgctgccgggcttgggattgtttcgtccggtgccttgatcatgcttgcttaggaagcttactctcacacgtaattgtcgccctgttaccccttattcacattcaacctaaagagacggcggccatcttccattacctgatcatcgaaaatagagatgccgtgcaggactttctccatgaaatctactttcttcccgaccatccggaactgaaaaagataaaggccgtcctccaagagtacagaaaagagaccagcgagagtacagacctgcagaccacactgcaactatctatgaaggccatacagcatgaaaatgtggatgtgcgcatccatgcactgacatctttaaaagagacactttacaaaaaccaagagaagcttattaagtacgcaacagatagtgagaccgtagaacctatcatcagtcagttggtgacagtgttgcttaaagggtgccaagatgccaacagccaagctagactgttgtgcggtgagtgtctaggagagctgggcgctatcgatcccggccgccttgatttcagtactactgagacacagggaaaggactttacctttgtaaccggggttgaggattctagttttgcctacggtctgcttatggaactgactcgggcgtatttggcgtatgctgacaacagccgcgctcaggattcggctgcttacgccattcaggagcttctgtcaatctatgattgtcgcgagatggaaactaatggccctgggcaccaattatggcggagatttccggagcacgtccgggaaattctggagccacatctgaatactcgttacaagtctagtcagaaaagtacggattggtcgggagtgaaaaaaccgatatatctgtccaaactgggatccaattttgctgaatggagtgcatcatgggccgggtacctcatcacaaaggtaaggcatgatctggcgtccaagatctttacttgctgctctattatgatgaaacatgacttcaaagtcaccatctacctgctcccgcacattctcgtctatgtactcctcggctgtaatcaggaggaccagcaggaggtgtacgccgaaatcatggccgtgctgaaacatgacgatcagcatactatcaacacccaagatatagctagcgatctctgccagctcagcacccagacagtgttcagcatgttagatcacctgactcagtgggcccggcataagtttcaggcgctgaaggcggagaagtgtccgcacagcaagtcaaacaggaacaaggtggattcaatggtttctacagtcgattacgaagactatcaatctgtgacccgctttctcgatctcattccacaggacaccctcgcggttgcgtcttttagaagcaaagcctatacaagagcagtgatgcacttcgaaagctttattactgaaaaaaagcagaatatacaagaacacctgggtttcctgcagaaactgtacgccgcaatgcacgagcctgacggagtcgcgggggtatctgccatcagaaaggccgagccatcactcaaagagcaaatcctggagcatgagtcgttggggctccttcgagacgccacagcttgttacgatcgggcaattcagctagagcctgaccaaattatccactaccacggcgtggttaaaagtatgttggggctggggcaactgagcacagtgatcacacaggtgaacggggtgcacgctaatcgaagtgagtggacagacgagttaaacacttatagggtggaggccgcttggaaactgtctcagtgggacttagtcgagaactacctggctgccgatggaaaaagcaccacctggagtgtacgcttgggacagctccttctgagtgcaaagaagagggacattacagcgttctatgattctctaaaactggtgcgcgccgaacagatcgtgccgctttcagccgctagtttcgagcggggttcctaccagcgtggttatgaatatatcgtgcgcttgcatatgctgtgcgaactcgagcactccattaagcccctatttcagcactctcctggcgatagctcacaagaagacagcctcaattgggtcgcccgccttgagatgactcagaacagttaccgagctaaggagccaatcttagccttacgccgcgcattgctatccctgaataagcgaccagattataacgaaatggtgggggagtgctggcttcaatcagcaagagtggctcgcaaagcagggcatcaccagaccgcttacaacgctttgctgaacgctggcgaatcacgactggcagaactctacgtggagcgcgccaagtggctgtggtccaagggagatgttcaccaggcgctcatcgtcctccagaagggcgtggaactctgctttcccgagaacgagacaccacccgaaggaaagaacatgcttattcacggccgggcgatgctgcttgtcggccgattcatggaggaaaccgccaacttcgagtccaatgcaatcatgaaaaaatataaggatgtgacggcttgtctgccagagtgggaggatggacatttttacctggccaaatactacgacaaactgatgcccatggttactgacaataaaatggaaaaacagggcgatcttattcggtatattgtcctgcacttcggacgctcactgcagtacggcaaccagttcatttatcagtccatgcctcgaatgctgactctctggctggactacggcactaaggcttacgagtgggaaaaggccggtcggagcgaccgggtacaaatgaggaatgatctcggaaaaatcaacaaagtgattactgagcacactaactacctggccccatatcaattcctgaccgcgttttctcagctgatatctcgcatttgtcactctcatgacgaagtttttgtcgtgctgatggagattattgctaaggtatttttggcttacccccagcaggcaatgtggatgatgaccgccgtcagcaagtcgtcttatcctatgcgagtgaacagatgcaaagaaattttgaataaggccatccatatgaaaaagagtttggagaagtttgtgggagatgctactcgattaacggataaacttcttgagctctgtaacaaacctgtggatggctcttcaagtactttgagcatgtcaactcacttcaagatgctgaaaaaactggtcgaggaagcaactttctcggaaatcctgatccctctgcaatcggtgatgatccccaccctgccgtccatattaggaacccatgcgaatcatgcatcacacgaaccatttcctggacactgggcatatatcgccggtttcgacgatatggtggaaatcctggcctcgcttcagaaaccaaaaaaaatttccctgaaaggatccgatgggaagttctatatcatgatgtgcaaaccaaaggatgacctccgaaaggattgtcgacttatggaatttaatagcctgattaacaagtgcctaagaaaggatgcggagtcgcgtcggcgcgaactgcacattagaacttatgctgtaattcccctgaatgacgagtgcggcatcatcgaatgggtcaacaatacagcagggcttcggcccatccttactaagctatataaggagaaaggcgtctacatgactggcaaggagctgaggcagtgtatgctaccaaagtccgccgccctgtctgaaaaattgaaagtctttagggagttcctgttgcctcgccacccccctatattccatgaatggttcctgcggacctttccagacccaacatcttggtattccagccgctcggcctactgccgcagtactgccgtgatgtcaatggtgggatacatcctgggactgggagatcggcacggagagaatatcctgtttgactcactcaccggggagtgtgttcacgtcgacttcaattgcctgttcaataagggggaaaccttcgaagtgccagaaattgtcccctttaggcttacacataatatggtgaatggaatgggcccgatgggaaccgagggcttgttccggcgtgcatgtgaagttactatgagactgatgagagatcagagggagcctctcatgagcgtgctgaagacttttctgcacgaccccttagtcgagtggtctaaacctgtgaagggccactctaaagctccgctgaacgaaactggcgaggtggttaatgagaaagctaagacccatgtgctggacatcgagcaacggctccagggcgtgattaagactcggaaccgggtgacaggtctcccgctgtctattgaaggacatgtgcattatctgatccaggaggctactgacgaaaatctgctgtgccagatgtacctcggatggactccgtatatgtag

SEQ ID NO: 301708 - DNA, 7743 bp, Artificial Sequence
  derived and/or modified sequence
atgggagagcacggcctggagctggcctccatgatcccagccctgcgggagctgggcagcgccaccccagaggagtacaacacagtggtgcagaagccccggcagatcctgtgccagttcatcgaccgcatcctgacagatgtgaatgtggtggccgtggagctggtgaagaagacagacagccagcccacctctgtgatgctgctggacttcatccagcacatcatgaagagcagccccctgatgtttgtgaatgtgtctggcagccatgaggccaagggcagctgcatcgagttcagcaactggatcatcacccggctgctgagaattgctgccacccccagctgccacctgctgcacaagaagatctgtgaggtgatctgcagcctgctcttcctgttcaagagcaagagccctgccatcttcggcgtgctgaccaaggagctgctgcagctgtttgaggacctggtgtacctgcacagaagaaatgtgatgggccatgctgtggagtggcctgtggtgatgagccgcttcctgagccagctggatgagcacatgggctacctgcagagcgcccccctgcagctgatgtccatgcagaacctggagttcatcgaggtgaccctgctgatggtgctgacccgcatcatcgccatcgtgttcttccggcggcaggagctgctgctgtggcagatcggctgtgtgctgctggagtatggcagccccaagatcaagagcctggccatctccttcctgacagagctgttccagctgggcggcctgcctgcccagcctgccagcaccttcttcagcagcttcctggagctgctgaagcacctggtggagatggacacagaccagctgaagctgtatgaggagcccctgagcaagctgatcaagaccctcttcccctttgaagctgaggcctacagaaatattgagcctgtgtacctgaacatgctgctggagaagctgtgtgtgatgtttgaagatggagtgctgatgaggctgaagagtgacctgctgaaggccgccctgtgccacctgctgcagtacttcctgaagtttgtgcctgctggctatgaaagtgccctgcaggtgaggaaggtgtatgtgaggaacatctgcaaggccctgctggatgtgctgggcatcgaggtggatgctgagtacctgctgggccccctgtatgctgccctgaagatggagagcatggagatcatcgaggagatccagtgccagacccagcaggagaacctgagcagcaacagtgatggcatcagccccaagagaagaaggctgagcagcagcctgaaccccagcaagagggcccccaagcagacagaggacaggaccttcaaggactgccagcacaagagcaagaagaagcccagcgtggtgatcacctggatgagcctggacttctacaccaaggtgctgaagagctgccgcagcctgctggagagcgtgcagaagctggacctggaggccaccatcgacaaggtggtgaagatctatgatgccctgatctacatgcaggtgaacagcagctttgaggaccacatcctggaggacctgtgtggcatgctgagcctgccctggatctacagccacagtgatgatggctgcctgaagctgaccacctttgctgccaacctgctgaccctgagctgccgcatcagtgacagctacagcccccaggcccagagccgctgtgtgttcctgctgaccctcttcccccggcgcatcttcctggagtggaggacagctgtgtacaactgggccctgcagagcagccatgaggtgatccgggccagctgtgtgtctggcttcttcatcctgctgcagcagcagaacagctgcaacagagtgcccaagatcctgattgacaaggtgaaggatgacagcgacatcgtgaagaaggagtttgccagcatcctgggccagctggtgtgcaccctgcacggcatgttctacctgaccagcagcctgacagagcccttcagcgagcacggccacgtggacctcttctgcaggaacctgaaggccaccagccagcacgagtgcagcagcagccagctgaaggcctctgtgtgcaagcccttcctgttcctgctgaagaagaagatccccagccctgtgaagctggccttcatcgacaacctgcaccacctgtgcaagcacctggacttcagagaagatgaaacagatgtgaaggctgtgctgggcaccctgctgaacctgatggaggaccctgacaaggatgtgcgggtggccttcagcggcaacatcaagcacatcctggagagcctggacagtgaagatggcttcatcaaggagctgtttgtgctgaggatgaaggaggcctacacccacgcccagatcagcagaaataatgagctgaaggacaccctcatcctgaccactggagacatcggccgggccgccaagggggacctggtgccctttgccctgctgcacctgctgcactgcctgctgagcaagagcgcctctgtgtctggggccgcctacacagagatccgggccctggtggccgccaagtctgtgaagctgcagagcttcttcagccagtacaagaagcccatctgccagttcctggtggagagcctgcacagcagccagatgacagccctgcccaacaccccctgccagaatgctgatgtgaggaagcaggatgtggcccaccagcgggagatggccctgaacaccctgtctgagatcgccaacgtgtttgacttcccagacctgaaccgcttcctgaccaggaccctgcaggtgctgctgcctgacctggccgccaaggccagccctgctgccagcgccctgatccgcaccctgggcaagcagctgaatgtgaacagaagagagatcctgatcaacaacttcaagtacatcttcagccacctggtgtgcagctgcagcaaggatgagctggagcgggccctgcactacctgaagaatgaaacagaaattgagctgggcagcctgctgcggcaggacttccagggcctgcacaatgagctgctgctgagaattggagagcactaccagcaggtgttcaacggcctgagcatcctggccagctttgccagcagtgatgacccctaccagggcccccgggacatcatcagccctgagctgatggctgactacctgcagcccaagctgctgggcatcctggccttcttcaacatgcagctgctgagcagctctgtgggcatcgaggacaagaagatggccctgaacagcctgatgagcctgatgaagctgatgggccccaagcacgtgtcctctgtgcgggtgaagatgatgaccaccctgaggacaggcctgcgcttcaaggatgacttccctgagctgtgctgccgggcctgggactgctttgtgcgctgcctggaccacgcctgcctgggcagcctgctgagccacgtgattgtggccctgctgcccctcatccacatccagcccaaggagacagctgccatcttccactacctgatcatcgagaacagagatgctgtgcaggacttcctgcacgagatctacttcctgcctgaccaccctgagctgaagaagatcaaggctgtgctgcaggagtacaggaaggagaccagcgagagcacagacctgcagaccaccctgcagctgtccatgaaggccatccagcatgaaaatgtggatgtgcgcatccacgccctgaccagcctgaaggagaccctgtacaagaaccaggagaagctgatcaagtatgccacagattctgaaacagtggagcccatcatcagccagctggtgacagtgctgctgaagggctgccaggatgccaacagccaggcccggctgctgtgtggggagtgcctgggggagctgggcgccatcgaccccggccgcctggacttcagcaccacagagacccagggcaaggacttcacctttgtgactggagtggaggacagcagctttgcctacggcctgctgatggagctgacccgggcctacctggcctatgctgacaacagccgggcccaggacagcgctgcctatgccatccaggagctgctgagcatctatgactgccgggagatggagaccaacggccctggccaccagctgtggaggcgcttccctgagcacgtgcgggagatcctggagccccacctgaacacccgctacaagagcagccagaagagcacagactggagcggcgtgaagaagcccatctacctgagcaagctgggcagcaactttgctgagtggagcgcctcctgggccggctacctgatcaccaaggtgagacatgacctggccagcaagatcttcacctgctgcagcatcatgatgaagcatgacttcaaggtgaccatctacctgctgccccacatcctggtgtatgtgctgctgggctgcaaccaggaggaccagcaggaggtgtatgcagagatcatggctgtgctgaagcatgatgaccagcacaccatcaacacccaggacatcgccagtgacctgtgccagctgagcacccagaccgtcttctccatgctggaccacctgacccagtgggcccggcacaagttccaggccctgaaggccgagaagtgcccccacagcaagagcaacagaaacaaggtggacagcatggtgtccacagtggactatgaggactaccagagcgtgacccgcttcctggacctgatcccccaggacaccctggccgtggccagcttccgcagcaaggcctacaccagggctgtgatgcactttgagagcttcatcacagagaagaagcagaacatccaggagcacctgggcttcctgcagaagctgtatgctgccatgcatgagccagatggagtggccggcgtgtctgccatcaggaaggccgagcccagcctgaaggagcagatcctggagcacgagagcctgggcctgctgagagatgccacagcctgctatgaccgggccatccagctggagccagaccagatcatccactaccatggagtggtgaagtccatgctgggcctgggccagctgagcaccgtcatcacccaggtgaatggagtgcacgccaacagaagtgagtggacagatgagctgaacacctacagagtggaggccgcctggaagctgagccagtgggacctggtggagaactacctggccgcagatggcaagagcaccacctggagcgtgcggctgggccagctgctgctgagcgccaagaagagggacatcacagccttctatgacagcctgaagctggtgcgggcagagcagatcgtgcccctgtctgctgccagctttgagcggggcagctaccagaggggctatgagtacatcgtgcggctgcacatgctgtgtgagctggagcacagcatcaagcccctcttccagcacagccctggggacagcagccaggaggacagcctgaactgggtggcccggctggagatgacccagaacagctaccgggccaaggagcccatcctggccctgcggcgggccctgctgagcctgaacaagaggccagactacaatgagatggtgggggagtgctggctgcagagcgcccgggtggccaggaaggccggccaccaccagacagcctacaatgccctgctgaatgctggggagagccggctggccgagctgtatgtggagcgggccaagtggctgtggagcaaaggagatgtgcaccaggccctgattgtgctgcagaagggcgtggagctgtgcttcccagaaaatgagaccccacctgagggcaagaacatgctgattcatggccgggccatgctgctggtgggccgcttcatggaggagacagccaactttgagagcaatgccatcatgaagaagtacaaggatgtgacagcctgcctgcctgagtgggaggatggccacttctacctggccaagtactatgacaagctgatgcccatggtgacagacaacaagatggagaagcagggcgacctgatccgctacatcgtgctgcacttcggccgcagcctgcagtatggcaaccagttcatctaccagagcatgcccaggatgctgaccctgtggctggactatggcaccaaggcctatgagtgggagaaggccggccgcagtgacagagtgcagatgagaaatgacctgggcaagatcaacaaggtgatcacagagcacaccaactacctggccccctaccagttcctgacagccttcagccagctgatcagccgcatctgccacagccatgatgaggtgtttgtggtgctgatggagatcatcgccaaggtgttcctggcctacccccagcaggccatgtggatgatgacagctgtgtccaagagcagctaccccatgagggtgaaccgctgcaaggagatcctgaacaaggccatccacatgaagaagagcctggagaagtttgtgggagatgccacccggctgacagacaagctgctggagctgtgcaacaagcctgtggatggcagcagcagcaccctgtccatgagcacccacttcaagatgctgaagaagctggtggaggaggccaccttcagcgagatcctgatccccctgcagagcgtgatgatccccaccctgcccagcatcctgggcacccacgccaaccacgccagccatgagcccttccctggccactgggcctacatcgccggctttgatgacatggtggagatcctggccagcctgcagaagcccaagaagatcagcctgaagggcagtgatggcaagttctacatcatgatgtgcaagcccaaggatgacctgaggaaggactgccgcctgatggagttcaacagcctcatcaacaagtgcctgaggaaggatgctgagagcagaagaagagagctgcacatccgcacctacgccgtcatccccctgaatgatgaatgtggcatcatcgagtgggtgaacaacacagctggcctgcggcccatcctgaccaagctgtacaaggagaagggcgtgtacatgaccgggaaggagctgcggcagtgcatgctgcccaagtctgctgccctgtctgagaagctgaaggtgttccgggagttcctgctgcccaggcacccccccatcttccacgagtggttcctgcggaccttcccagaccccacctcctggtacagcagccgcagcgcctactgccgcagcacagctgtgatgtccatggtgggctacatcctgggcctgggggacagacatggagagaacatcctgtttgacagcctgactggagaatgtgtgcacgtggacttcaactgcctcttcaacaagggggagacctttgaggtgcctgagatcgtgcccttccggctgacccacaacatggtgaatggcatgggccccatgggcacagagggcctcttcagaagagcctgtgaggtgaccatgaggctgatgagggaccagcgggagcccctgatgtctgtgctgaagaccttcctgcatgaccccctggtggagtggagcaagcctgtgaagggccacagcaaggcccccctgaatgagaccggggaggtggtgaatgagaaggccaagacccacgtgctggacatcgagcagaggctgcagggcgtcatcaagaccaggaacagagtgacaggcctgcccctgagcattgagggccacgtgcactacctgatccaggaggccacagatgagaacctgctgtgccagatgtacctgggctggaccccctacatgtag

SEQ ID NO: 301709 - DNA, 7743 bp, Artificial Sequence
  derived and/or modified sequence
atgggcgagcacggcctggagctggccagcatgatccccgccctgcgagaactgggctccgcgacccccgaggaatacaatacggtggtgcaaaagccacggcagatcttatgtcaatttatcgaccgcatcctgacagatgtgaatgtggtggcggtcgaactggtgaagaagaccgacagccagccaacgagcgtgatgctcctggatttcattcagcacattatgaagtcttccccccttatgttcgtgaatgtcagtgggtcacacgaggcgaaggggagttgtatcgaattcagtaattggatcatcaccaggttgcttcgcatcgcagctacgcctagttgccaccttctgcataagaagatatgtgaagtcatttgtagtctcctattcttgtttaaaagcaagtctccggcaatctttggcgtgctgactaaggagctcctgcagctgtttgaggacttggtctatttgcataggcggaatgtaatgggacatgcggtcgagtggccagtggtaatgtctaggtttctgtcccaactggacgaacatatgggataccttcaatccgcaccgcttcagctcatgtccatgcagaacttagagtttattgaggtgaccttgctgatggtccttacaaggatcatcgcaatagtgttcttccggagacaggagctcttgttgtggcagattggttgcgtgctgttggaatatggcagccctaaaatcaagagcctggcaatatcgtttctcacagagctttttcagctaggggggctccccgctcagccagcttctactttttttagctcttttctagagctgttaaagcacttggtcgagatggacactgatcagttaaagctctacgaagagcctctctccaagctgatcaagacgctgttcccctttgaagccgaggcatatcgcaatattgagccagtgtatctgaacatgctcttggagaagctttgcgtcatgtttgaagatggcgtcctgatgcgcctgaaatctgaccttctgaaggccgctctttgtcacctcctccagtactttctgaaatttgtgcctgcagggtatgagtcagcactacaggtcagaaaagtgtacgttagaaatatctgcaaggctctgctcgacgtattggggatcgaggtggatgccgagtacctgctcggtccactgtacgcagcccttaagatggagagcatggaaatcattgaagagatccaatgtcaaactcaacaggagaatctttctagcaactccgatgggatcagccccaagaggcgaaggctctcatcgtcactcaacccatccaagcgggcaccaaagcagaccgaggatcgtaccttcaaagactgtcagcacaagtccaagaagaagccctcagttgtgattacctggatgtcattggatttttacacaaaagtgttgaagtcatgcagatctctcctggagtctgtccagaagttagatctggaggccaccatcgataaggtcgtgaaaatctacgacgcactgatatacatgcaagtgaactctagcttcgaagatcatatcttggaagacctgtgtgggatgctgtcactgccatggatttattctcattccgacgatggttgtctgaaactcaccacattcgctgccaacctgctaaccctgtcatgccggataagcgatagctattcccctcaggcacaaagccggtgtgtgttccttctgacccttttccctaggcggatttttctggagtggagaactgctgtgtacaattgggccctgcaatcgtcccacgaggtcattagagcttcgtgcgtgagcggattctttatcctgcttcaacagcagaacagctgtaaccgcgtccccaagatcctgattgataaggtcaaggatgatagcgatatcgttaagaaggaatttgcctcaatactcggtcagcttgtatgcacactccatggtatgttttacttaacttcaagccttacggagcctttctcagaacatggccatgtggatcttttctgccggaacctgaaagctacctcccaacacgagtgttcctcatctcaactcaaagctagtgtgtgcaaaccattcctgttcctgctcaagaaaaagattcctagtcctgtgaaactcgccttcatcgataacctccaccacctgtgtaagcatctagacttccgagaggacgagacagacgtgaaagccgtcctgggaacactgcttaacctgatggaggaccccgataaagacgttcgagtggcattcagcgggaacattaagcacattttggagagtttagactccgaggacggattcatcaaagagctgtttgtgctgcgtatgaaagaggcttatacgcatgcccagatatctcggaataatgaactcaaggataccttgattctcacaactggcgacattggtagggccgccaaaggtgatttagttcctttcgccctgctgcacctcctgcactgcctgctctcaaagtctgcatccgtgtctggggctgcctatactgagattcgagccctggtcgccgccaaatctgtgaaactgcaaagctttttttctcagtacaagaagccaatctgccagtttctggttgaaagtctgcacagctcacagatgaccgccctgccaaatacaccgtgccaaaatgcagatgttagaaaacaagacgtggctcatcagagggagatggctctaaataccttgtccgagatcgccaatgtctttgacttcccagacctcaaccggtttctgacgagaacactccaagtgctgctcccagaccttgcagccaaggctagtcccgccgcaagtgcccttatacgcactctgggaaagcagctcaatgtgaatcgcagagagatcctcattaacaattttaagtacattttcagccaccttgtgtgcagctgcagcaaagatgaactggaaagagctctgcattacttgaagaatgagaccgagatcgaactgggatcactgctgcgccaagactttcagggcttacacaatgaactactgctgaggatcggcgagcactaccagcaggtgttcaacgggctcagcatcttggctagttttgccagtagcgatgacccatatcaggggccccgtgacatcatctccccggagctaatggcagactatttgcagcctaaactgctgggcattttagcattcttcaatatgcagcttctgagtagctctgtcggtatcgaggataagaaaatggctctcaactctctgatgtcccttatgaaacttatgggaccgaagcatgtttcgtctgttagggtgaagatgatgacaactctacgcacgggcctgaggtttaaagacgattttccagaactgtgttgccgggcttgggattgctttgtccggtgcttagatcatgcgtgcctcggaagcctactgtcccatgtcatagtggccctgcttccacttattcacatccaacctaaagagacagccgccattttccactatctaattattgaaaaccgggacgccgttcaggactttttacatgaaatctactttcttcctgaccaccctgagctcaagaagatcaaggcagtactgcaggagtatagaaaggaaacttcggaaagcactgacctgcaaacaacgctgcagctctccatgaaagccatacaacacgagaacgtcgacgtcaggattcacgctctgacatccctcaaggagacactctacaagaaccaagagaagctgattaaatatgctacagacagcgagacggtcgaacctataattagccagctggtgaccgttctgttgaagggatgtcaggacgcaaactctcaagctcgattgctctgtggggaatgcctcggagagctcggagccatagatcccggcaggctagacttctctaccacggaaacccaggggaaggacttcacatttgtgaccggtgtggaggatagtagtttcgcgtacggcctcctcatggaacttacacgggcatacctcgcctacgccgacaattccagggcccaggattcagccgcctacgctatccaggagctactatcaatttatgattgtcgggagatggaaacaaatggccctggacaccagttatggcgccgcttccctgagcacgtccgcgagatattggaacctcaccttaacactcgttataagtcaagccaaaagagcactgattggtccggagtgaaaaaacccatatacttgagcaagctgggaagtaacttcgcggaatggagcgcttcctgggcaggctacctgattacgaaggtcaggcatgacctggcctcgaaaatttttacctgctgctcaataatgatgaagcacgacttcaaagttaccatctacctcttaccacacattttggtgtatgttcttctagggtgtaaccaagaggatcaacaggaggtgtatgcagagataatggcggtccttaaacatgacgaccagcacaccatcaacactcaggatatcgcttccgacttgtgccagttgtcaacgcagacagtcttttctatgctggatcatctgacacagtgggctcgacacaagtttcaggctctgaaggccgagaagtgcccacactccaagtccaaccggaataaggttgatagcatggtaagtactgtcgactacgaagattaccagtccgtgacacgctttctggatctgattcctcaggatactctggctgtcgcgtcctttaggtccaaggcttataccagggccgtcatgcatttcgagtcatttattaccgagaaaaaacagaacatccaagaacacttgggattccttcaaaagttgtatgctgcaatgcatgaacccgacggtgttgccggggtcagcgctatccgaaaggctgagccatccctaaaagagcagatcctggaacatgagtcactgggactgttgagagatgccactgcctgctatgatcgtgctatccaacttgaaccagatcagattatccactaccacggggttgtgaaatccatgctgggactcgggcagttgtcaaccgtgattactcaagtgaacggcgttcacgctaaccgctctgagtggactgacgagctgaacacatatcgggtggaggccgcctggaaattgagccagtgggatttggttgagaattacctggccgccgacggcaaaagtactacctggagtgtcaggctggggcagctgctgctgagtgcaaaaaaacgagacatcaccgctttctacgattcattgaaactcgtgagggccgaacagattgtcccgcttagcgccgcctcctttgagcgcggctcctatcaacgggggtacgagtatatagtgagactccacatgctgtgcgagctcgagcactctataaaacctctgttccagcatagccctggtgatagttcccaggaagactcattgaactgggtcgcccgtctcgagatgacccaaaattcttacagagccaaggagcctattctggcactgagacgagcgctgcttagtctgaataagaggccagactataatgagatggtcggggagtgctggttgcagtctgcccgcgtagcccgcaaggccggtcaccaccagaccgcttataacgctctgctgaatgccggggaatctcgactggcagagttatacgttgaacgggcaaagtggctgtggtccaagggcgacgttcaccaggccctaattgtgttacagaagggtgtggagttatgctttcctgagaatgagacccccccagagggaaagaacatgcttattcatggccgggctatgctgttggtgggtcgattcatggaagaaacagcaaatttcgagtcaaatgctatcatgaagaagtataaggatgtcacagcgtgcctcccagagtgggaagatggccacttttacttggccaagtattatgacaagctgatgcccatggtcaccgacaacaaaatggagaagcaaggtgatctgatcagatatatcgttctgcactttggccgttctctgcagtacggcaaccagttcatctaccagtccatgccacggatgcttacactctggcttgactacggaaccaaggcgtacgagtgggagaaggccggcaggagcgacagagtgcagatgcgaaacgacctcggcaaaattaacaaggtcattactgagcatacgaactatctggcaccatatcaattcctaaccgcttttagtcaactgatctctcggatttgccatagccatgacgaggttttcgtggttctgatggaaatcatagcaaaagtgttcttggcatacccccagcaggctatgtggatgatgaccgccgtaagtaaatcaagctaccccatgcgggtcaacaggtgtaaggagatccttaataaggcgattcacatgaagaagagtctcgagaaattcgtgggggacgccactcgtctgacagataaactactggagctgtgcaacaagcctgtcgacggatcctcgagcaccctcagcatgagcactcatttcaagatgctaaagaagctggtcgaagaagcaaccttctccgagattctaattccattgcaatccgttatgatccctacccttccctctattttggggactcacgctaaccacgcctctcacgagcccttcccagggcactgggcgtatattgcagggttcgacgacatggtggaaatcctcgcgagtctgcaaaaaccaaaaaagatttcgttgaaaggttcagatggaaagttttatatcatgatgtgtaaaccaaaggatgacctgcggaaagactgccggcttatggagttcaatagccttattaacaagtgtctccgtaaagacgctgaatcccgaagacgagagctgcacatccggacctatgcggtgatccctttaaatgacgaatgcggtataattgagtgggtcaataacaccgcaggattgcggccaatccttaccaagctgtacaaggagaagggagtgtacatgacgggcaaggaactgagacagtgcatgctgcctaagtccgccgccttaagcgaaaagctcaaggtgttcagagagttcctcctcccacgacatcccccgatcttccatgagtggtttctccggacattcccggacccaactagctggtactcctctcggagcgcatactgccgtagtactgccgtgatgtcaatggtcgggtacattcttggcctgggagatcgtcatggcgaaaatatcctgtttgactctctcaccggcgagtgtgttcacgtcgacttcaattgtctgtttaacaagggagagacttttgaagtacccgagatcgtaccctttagacttacacacaatatggtgaatggcatgggaccgatgggcacggaaggtttgttcagacgagcttgtgaagtaaccatgagacttatgcgggatcagcgcgagccactgatgagcgttctgaagaccttcctgcacgatccactcgtggaatggtccaagccagtcaaaggtcactcaaaagctccactgaatgagaccggcgaagtggttaacgagaaagcgaaaacacatgtcttggacatcgagcagcgactgcagggcgttataaaaacacggaacagagtgacggggctcccgctttccatcgaaggccacgtacattatttgatccaggaagctaccgacgagaacctattatgtcaaatgtacctcggttggacgccttacatgtag

SEQ ID NO: 301710 - DNA, 7742 bp, Artificial Sequence
  derived and/or modified sequence
atgggagaacacggactggagttggcctctatgatccccgcactgcgggagctgggctctgcaactcccgaggaatataataccgtggttcagaagcccaggcaaattctgtgtcagttcatagaccgcatcttaaccgatgtaaacgtggtcgccgtagaattggtgaaaaagacagacagtcagcccacttccgtgatgctacttgacttcatacagcacattatgaagtcgtcccccttaatgttcgtaaacgtgtcaggcagtcatgaggcaaaggggagctgtatcgaatttagcaactggattatcactagactcttgcgaattgccgctaccccgagttgccatcttcttcataaaaaaatttgcgaggtcatttgtagtcttctcttcctctttaaatccaagtcaccagcaatttttggagtgctgactaaggagttgcttcagctgttcgaggacctggtttacctgcataggagaaacgtgatgggacacgccgtggaatggccagtggtgatgagccgattcttgtcccagctcgatgaacacatgggatatctgcagtctgcccctctacagctgatgtccatgcagaacctcgaatttatcgaagtaacgctgctgatggtgttgacacgaattattgcgatcgtttttttcagaagacaggaactgctgctgtggcagattgggtgtgtcctgcttgagtacggctcacccaagatcaagagcctggccatttcttttttgacagagctttttcagctcgggggactccctgcgcaacctgcgagtacctttttctctagttttctggagctcctcaaacatctggtcgaaatggataccgatcagctcaaattgtatgaggagcctctctcgaaactgataaagactctcttcccatttgaagctgaagcctatcggaatatagagcctgtttacctgaacatgctgctggaaaagctgtgtgttatgtttgaagacggtgttctgatgaggctgaagtctgatctgttgaaggctgcactgtgccacttgcttcaatatttcttgaaatttgtaccagctggttatgaatcagctttacaagttcgcaaggtgtacgtacgaaacatttgcaaggcactgctggatgtcctgggcatcgaggttgacgctgagtatttacttggacccctctatgccgctttgaagatggaaagcatggaaattattgaagagatccagtgtcagactcagcaggagaacctgagcagcaactccgacggtatctcccctaaacgcaggagactcagtagttctttgaacccatctaaaagggccccaaagcagactgaagatagaacatttaaggactgtcagcataagtctaagaagaagcccagtgtcgtaatcacctggatgagcctcgatttctatacgaaagtcttgaaaagctgtcgatcgttgctggaaagtgtacagaagctggatttggaggccacaatcgataaggtggtgaagatctatgacgccctaatatatatgcaggtcaactcatcgttcgaggaccatatcctagaggatctttgcggaatgctgagtctgccttggatttatagccattctgatgacggctgcctgaagctgactacctttgccgcaaacctgctgaccttgtcgtgtcgtatatctgacagttacagcccacaggctcaatcacggtgcgtgttcttattgactctttttccccgtaggatctttctagaatggcggaccgctgtctacaactgggctcttcagtcctcccacgaggtgatacgcgcttcatgcgtttcaggatttttcatcctgttgcagcagcaaaacagctgtaaccgggtgccaaaaatcctgattgacaaagtcaaggacgactcggacatagtcaagaaagagttcgcaagtattcttggacagctggtgtgtactctgcacggcatgttttacttaacttcttcacttactgagcccttttccgagcatggacacgtcgatctgttctgtcggaatttgaaggccacttcacagcatgagtgcagctctagccaactgaaggcttcagtttgcaagcctttcttgtttctgttgaaaaagaagatcccctctcctgtaaaactcgccttcattgacaatctgcaccatttgtgtaaacacctggactttcgagaggacgagaccgatgtgaaagctgttctcggtactctgttaaacctcatggaggacccagacaaggatgtgcgcgttgcattcagtgggaacatcaaacatatacttgagtccctcgattctgaggatggcttcattaaggaactgtttgtgctaaggatgaaagaagcttacacacatgcccagataagcagaaataatgagctgaaagatacactgattcttacaactggtgacattggcagagcggctaagggagaccttgtgcctttcgccctcctgcatctgctgcactgcctgctgagcaagagtgccagtgtcagtggggctgcatacactgaaattcgggctctcgtcgccgcaaaatcggtgaagctgcaaagctttttcagccagtacaaaaagcctatttgccagttcttggtggagagtctgcattcatcccaaatgactgctcttcctaataccccttgtcaaaatgcagatgttcggaagcaggacgttgcccaccaaagggaaatggccctcaatacactgtccgaaattgccaacgtgttcgactttccagatcttaacaggtttcttaccaggacgctgcaggtgttactacccgacctggcagcaaaagcgtcccctgccgctagcgcactaatccgaacccttggcaagcagttgaacgttaatcgtagagagatactaattaacaacttcaaatatattttctctcacctggtgtgtagttgtagcaaagatgaactggagcgtgcattacactatcttaaaaacgagaccgaaatcgagctgggcagtctcctgcgccaggactttcagggtctccacaatgagttactcttgcgtatcggtgaacactaccaacaagtatttaacggtctgtccattctcgcttccttcgcttcttctgacgacccatatcaaggacctagagatataatcagtcccgaactaatggccgattatctccaaccaaaattgctgggcatcttggcattcttcaacatgcagttgctgtctagctccgtgggaatcgaagacaaaaagatggcattgaatagtcttatgtctttgatgaagctgatgggtcccaagcatgtgtccagcgtcagagtgaagatgatgaccaccctgagaactggccttcgcttcaaagacgacttccctgagctgtgttgcagagcttgggattgcttcgttagatgtctggatcatgcctgcttggggtccttattgtcccacgtgatcgtggccttgttgcccctaatccatatccagcccaaggagactgcagcaatttttcattatttaatcattgagaatcgggatgcagtccaagacttcctgcatgagatttatttcctgcctgaccaccctgagttaaaaaaaattaaggccgtgctgcaagagtataggaaagaaacgtctgagtctacagacctgcagaccactctgcagttgtcgatgaaagcgattcagcatgagaatgtggatgtgagaatccacgcactgacatcgctgaaggaaacgctctataaaaatcaagaaaagttgattaaatatgccaccgattctgagaccgtggaacccatcatttcacagctggtgacagtgctcttgaaggggtgccaggatgccaactctcaggcacggctcctatgcggcgagtgcctgggagagctcggcgcaattgaccctggaagattggatttctctactacagagacacaggggaaggacttcacatttgtgaccggagtggaggattcctcctttgcatacggactgttgatggagctgactcgcgcttacctcgcctacgctgacaacagtagggcacaggacagcgctgcctacgcgatccaagagctcttgagcatttacgattgtagggagatggagactaacggcccaggtcaccagctctggcgacgcttcccagaacacgtccgagagattctggagccgcacctgaacacaagatataaatccagccagaagagcacagattggagcggggtgaagaagccaatttacctgtcaaagctcgggtcgaattttgccgaatggagcgcatcgtgggccggatatctcatcacaaaagtgcggcatgacttagcgagcaagatctttacctgctgttccatcatgatgaaacacgatttcaaagtgaccatctatttactcccccacatcttagtatacgtcctgctcgggtgcaaccaggaggaccagcaggaggtctacgccgagattatggccgtgctgaaacacgacgatcaacataccatcaatacacaagatatcgccagcgacctgtgtcaactgtcaacccagacagtgttttctatgcttgaccacttgacccagtgggcaagacacaaatttcaggccctcaaggccgaaaaatgtccccactcgaagtctaataggaacaaagtggattctatggtcagcacagtggactatgaagactaccagagtgttaccaggtttttagacctcatcccccaggacacattagctgtcgcttcttttcgttcaaaggcctatacccgggcagtcatgcattttgagtcattcataactgaaaaaaaacaaaatatccaggagcacttggggtttttgcagaaactttacgcagccatgcatgaacccgacggcgtcgcaggcgtctctgccattagaaaggcggagccttctttgaaagagcagatcctggagcacgaatcactcggcctcttacgcgacgcaaccgcttgctacgacagggctatacagctggagcctgatcagataatccattatcacggtgtagtcaaatcaatgctcggacttggccagctgtctaccgtgatcacccaagttaacggagtgcacgcaaatagaagcgaatggacagatgagttgaacacctacagagtggaagctgcctggaagctctcccagtgggacctagtcgagaactatctagccgcagacgggaaaagcaccacctggtcagtcagactggggcagctcctgctgtccgctaagaaaagagatatcaccgctttttatgattccctgaaactggtacgcgctgaacagatagtcccattgtctgcagcttcatttgagagagggtcttatcaacgtggctacgagtacatcgtgcggctgcatatgctttgtgagttggaacactctataaaaccgctctttcagcactcccctggggactcaagtcaggaagactctctcaattgggtggcacggctggaaatgacacagaactcctaccgcgctaaagaacctattctggctttacgaagagcacttctgagtctgaataagagacccgattataatgagatggtgggcgagtgttggctgcaatccgcaagagtggcccgtaaggccggacaccaccagaccgcgtacaacgcactcttaaatgccggagagtctcgtctggccgaactgtacgtagagcgcgcaaagtggctgtggtcaaagggggacgtccaccaggccctgatcgtgctgcaaaaaggggtagagctgtgtttccccgaaaacgagaccccccctgagggcaagaatatgctgatacacggcagggcaatgctgctcgtgggcaggttcatggaggaaaccgctaattttgagtcaaacgccataatgaaaaagtataaggacgttacggcctgtctgcccgagtgggaggatggtcacttttacctagccaagtattacgataagctgatgccaatggttaccgataataagatggagaagcagggggatctgatacggtatattgtactgcacttcggtagatctctgcagtacggcaatcagttcatttaccagtctatgcctcggatgctgaccttatggttggactacggtaccaaggcatatgagtgggagaaggcaggccgatcagatagggtccagatgagaaacgacctggggaagattaataaagtgatcacggagcacacgaattatctggcaccataccagttcctgacagcgttttctcaacttattagtcggatctgccatagccacgacgaagttttcgtagttctgatggaaatcattgcgaaagtattcctggcttaccctcaacaagcaatgtggatgatgactgcagtgagtaagagttcctaccccatgcgggtaaataggtgcaaagaaattctgaataaagcgatacacatgaaaaagtcattagagaagttcgtcggggacgctacgcgtctgactgacaaacttctggagctgtgtaacaagcctgtcgacgggagttctagcaccctgtccatgtcaacccacttcaaaatgctaaaaaagctggttgaggaggctactttttcggagatactgattcctcttcagtctgtgatgatcccaacgctaccgtccatcttaggtacccatgccaaccacgcctcacatgagccatttcccggacactgggcgtacattgccggttttgacgacatggtggagatccttgcaagcttgcagaaaccgaaaaaaatttccctcaaggggagcgatggaaagttctacattatgatgtgcaagcccaaggatgatctacggaaagactgtagattgatggagtttaactccctgattaacaaatgtttacggaaggacgcagagtctaggcgtagagagctccacattaggacctatgccgtcatacccctgaatgacgaatgtgggatcattgagtgggtgaataacacagccggtctgagacctatactgacgaagctctataaggagaaaggcgtatatatgacgggaaaggagctgcgacagtgtatgctcccaaagtcggcagcgctgtcagagaagctgaaagtgtttcgcgagttcctccttcctcggcatcctcctatcttccacgaatggttcttacgcacttttccagatccgacctcttggtattcaagccgaagtgcctattgccgaagtactgcggtgatgtccatggtggggtacatactgggtctgggagatcgccatggggagaatatcctgtttgactccttgacaggcgaatgtgtgcatgtagacttcaattgcttgtttaacaagggggagacctttgaagtccctgagatcgtgcccttccgcttgacacacaacatggtcaatggcatggggcctatgggaacggagggcctcttccggagggcttgcgaagtgaccatgcgcttgatgcgcgatcagcgagaacctcttatgtccgtgctgaaaacgtttctccacgatcctctggtggaatggagcaagccggtgaagggtcacagtaaggccccactgaatgaaacaggagaagtggtgaatgaaaaagccaagacacacgttttggatatcgaacagcggttacaaggagtgattaagacgaggaaccgggtaacaggccttcctctttcaattgagggccacgttcactatctcattcaagaggctactgacgagaatctgctgtgccagatgtatctcggttggaccccatacatgta

SEQ ID NO: 301711 - DNA, 8056 bp, Artificial Sequence
  derived and/or modified sequence
ttccgggaggagttttggcctccacacggctccgtcgggcgccgcgctcttccggcagcggtagctttggagacgccgggaacccgcgttggcgtggttgactagtgcctcgcagcctcagcatgggggaacatggcctggagctggcttccatgatccccgccctgcgggagctgggcagtgccacaccagaggaatataatacagttgtacagaagccaagacaaattctgtgtcaattcattgaccggatacttacagatgtaaatgttgttgctgtagaacttgtaaagaaaactgactctcagccaacctccgtgatgttgcttgatttcatccagcatatcatgaaatcctccccacttatgtttgtaaatgtgagtggaagccatgaggccaaaggcagttgtattgaattcagtaattggatcataacgagacttctgcggattgcagcaactccctcctgtcatttgttacacaagaaaatctgtgaagtcatctgttcattattatttctttttaaaagcaagagtcctgctatttttggggtactcacaaaagaattattacaactttttgaagacttggtttacctccatagaagaaatgtgatgggtcatgctgtggaatggccagtggtcatgagccgatttttaagtcaattagatgaacacatgggatatttacaatcagctcctttgcagttgatgagtatgcaaaatttagaatttattgaagtcactttattaatggttcttactcgtattattgcaattgtgttttttagaaggcaagaactcttactttggcagataggttgtgttctgctagagtatggtagtccaaaaattaaatccctagcaattagctttttaacagaactttttcagcttggaggactaccagcacaaccagctagcacttttttcagctcatttttggaattattaaaacaccttgtagaaatggatactgaccaattgaaactctatgaagagccattatcaaagctgataaagacactatttccctttgaagcagaagcttatagaaatattgaacctgtctatttaaatatgctgctggaaaaactctgtgtcatgtttgaagacggtgtgctcatgcggcttaagtctgatttgctaaaagcagctttgtgccatttactgcagtatttccttaaatttgtgccagctgggtatgaatctgctttacaagtcaggaaggtctatgtgagaaatatttgtaaagctcttttggatgtgcttggaattgaggtagatgcagagtacttgttgggcccactttatgcagctttgaaaatggaaagtatggaaatcattgaggagattcaatgccaaactcaacaggaaaacctcagcagtaatagtgatggaatatcacccaaaaggcgtcgtctcagctcgtctctaaacccttctaaaagagcaccaaaacagactgaggaccgtactttcaaggactgtcaacataaatccaagaagaaaccttctgtagtgataacttggatgtcattggatttttacacaaaagtgcttaagagctgtagaagtttgttagaatctgttcagaaactggacctggaggcaaccattgataaggtggtgaaaatttatgatgctttgatttatatgcaagtaaacagttcatttgaagatcatatcctggaagatttatgtggtatgctctcacttccatggatttattcccattctgatgatggctgtttaaagttgaccacatttgccgctaatcttctaacattaagctgtaggatttcagatagctattcaccacaggcacaatcacgatgtgtgtttcttctgactctgtttccaagaagaatattccttgagtggagaacagcagtttacaactgggccctgcagagctcccatgaagtaatccgggctagttgtgttagtggattttttatcttattgcagcagcagaattcttgtaacagagttcccaagattcttatagataaagtcaaagatgattctgacattgtcaagaaagaatttgcttctatacttggtcaacttgtctgtactcttcacggcatgttttatctgacaagttctttaacagaacctttctctgaacacggacatgtggacctcttctgtaggaacttgaaagccacttctcaacatgaatgttcatcttctcaactaaaagcttctgtctgcaagccattccttttcctactgaaaaaaaaaatacctagtccagtaaaacttgctttcatagataatctacatcatctttgtaagcatcttgattttagagaagatgaaacagatgtaaaagcagttcttggaactttattaaatttaatggaagatccagacaaagatgttagagtggcttttagtggaaatatcaagcacatattggaatccttggactctgaagatggatttataaaggagctttttgtcttaagaatgaaggaagcatatacacatgcccaaatatcaagaaataatgagctgaaggataccttgattcttacaacaggggatattggaagggccgcaaaaggagatttggtaccatttgcactcttacacttattgcattgtttgttatccaagtcagcatctgtctctggagcagcatacacagaaattagagctctggttgcagctaaaagtgttaaactgcaaagttttttcagccagtataagaaacccatctgtcagtttttggtagaatcccttcactctagtcagatgacagcacttccgaatactccatgccagaatgctgacgtgcgaaaacaagatgtggctcaccagagagaaatggctttaaatacgttgtctgaaattgccaacgttttcgactttcctgatcttaatcgttttcttactaggacattacaagttctactacctgatcttgctgccaaagcaagccctgcagcttctgctctcattcgaactttaggaaaacaattaaatgtcaatcgtagagagattttaataaacaacttcaaatatattttttctcatttggtctgttcttgttccaaagatgaattagaacgtgcccttcattatctgaagaatgaaacagaaattgaactggggagcctgttgagacaagatttccaaggattgcataatgaattattgctgcgtattggagaacactatcaacaggtttttaatggtttgtcaatacttgcctcatttgcatccagtgatgatccatatcagggcccgagagatatcatatcacctgaactgatggctgattatttacaacccaaattgttgggcattttggctttttttaacatgcagttactgagctctagtgttggcattgaagataagaaaatggccttgaacagtttgatgtctttgatgaagttaatgggacccaaacatgtcagttctgtgagggtgaagatgatgaccacactgagaactggccttcgattcaaggatgattttcctgaattgtgttgcagagcttgggactgctttgttcgctgcctggatcatgcttgtctgggctcccttctcagtcatgtaatagtagctttgttacctcttatacacatccagcctaaagaaactgcagctatcttccactacctcataattgaaaacagggatgctgtgcaagattttcttcatgaaatatattttttacctgatcatccagaattaaaaaagataaaagccgttctccaggaatacagaaaggagacctctgagagcactgatcttcagacaactcttcagctctctatgaaggccattcaacatgaaaatgtcgatgttcgtattcatgctcttacaagcttgaaggaaaccttgtataaaaatcaggaaaaactgataaagtatgcaacagacagtgaaacagtagaacctattatctcacagttggtgacagtgcttttgaaaggttgccaagatgcaaactctcaagctcggttgctctgtggggaatgtttaggggaattgggggcgatagatccaggtcgattagatttctcaacaactgaaactcaaggaaaagattttacatttgtgactggagtagaagattcaagctttgcctatggattattgatggagctaacaagagcttaccttgcgtatgctgataatagccgagctcaagattcagctgcctatgccattcaggagttgctttctatttatgactgtagagagatggagaccaacggcccaggtcaccaattgtggaggagatttcctgagcatgttcgggaaatactagaacctcatctaaataccagatacaagagttctcagaagtcaaccgattggtctggagtaaagaagccaatttacttaagtaaattgggtagtaactttgcagaatggtcagcatcttgggcaggttatcttattacaaaggttcgacatgatcttgccagtaaaattttcacctgctgtagcattatgatgaagcatgatttcaaagtgaccatctatcttcttccacatattctggtgtatgtcttactgggttgtaatcaagaagatcagcaggaggtttatgcagaaattatggcagttctaaagcatgacgatcagcataccataaatacccaagacattgcatctgatctgtgtcaactcagtacacagactgtgttctccatgcttgaccatctcacacagtgggcaaggcacaaatttcaggcactgaaagctgagaaatgtccacacagcaaatcaaacagaaataaggtagactcaatggtatctactgtggattatgaagactatcagagtgtaacccgttttctagacctcataccccaggatactctggcagtagcttcctttcgctccaaagcatacacacgagctgtaatgcactttgaatcatttattacagaaaagaagcaaaatattcaggaacatcttggatttttacagaaattgtatgctgctatgcatgaacctgatggagtggccggagtcagtgcaattagaaaggcagaaccatctctaaaagaacagatccttgaacatgaaagccttggcttgctgagggatgccactgcttgttatgacagggctattcagctagaaccagaccagatcattcattatcatggtgtagtaaagtccatgttaggtcttggtcagctgtctactgttatcactcaggtgaatggagtgcatgctaacaggtccgagtggacagatgaattaaacacgtacagagtggaagcagcttggaaattgtcacagtgggatttggtggaaaactatttggcagcagatggaaaatctacaacatggagtgtcagactgggacagctattattatcagccaaaaaaagagatatcacagctttttatgactcactgaaactagtgagagcagaacaaattgtacctctttcagctgcaagctttgaaagaggctcctaccaacgaggatatgaatatattgtgagattgcacatgttatgtgagttggagcatagcatcaaaccacttttccagcattctccaggtgacagttctcaagaagattctctaaactgggtagctcgactagaaatgacccagaattcctacagagccaaggagcctatcctggctctccggagggctttactaagcctcaacaaaagaccagattacaatgaaatggttggagaatgctggctgcagagtgccagggtagctagaaaggctggtcaccaccagacagcctacaatgctctccttaatgcaggggaatcacgactcgctgaactgtacgtggaaagggcaaagtggctctggtccaagggtgatgttcaccaggcactaattgttcttcaaaaaggtgttgaattatgttttcctgaaaatgaaaccccacctgagggtaagaacatgttaatccatggtcgagctatgctactagtgggccgatttatggaagaaacagctaactttgaaagcaatgcaattatgaaaaaatataaggatgtgaccgcgtgcctgccagaatgggaggatgggcatttttaccttgccaagtactatgacaaattgatgcccatggtcacagacaacaaaatggaaaagcaaggtgatctcatccggtatatagttcttcattttggcagatctctacaatatggaaatcagttcatatatcagtcaatgccacgaatgttaactctatggcttgattatggtacaaaggcatatgaatgggaaaaagctggccgctccgatcgtgtacaaatgaggaatgatttgggtaaaataaacaaggttatcacagagcatacaaactatttagctccatatcaatttttgactgctttttcacaattgatctctcgaatttgtcattctcacgatgaagtttttgttgtcttgatggaaataatagccaaagtatttctagcctatcctcaacaagcaatgtggatgatgacagctgtgtcaaagtcatcttatcccatgcgtgtgaacagatgcaaggaaatcctcaataaagctattcatatgaaaaaatccttagagaagtttgttggagatgcaactcgcctaacagataagcttctagaattgtgcaataaaccggttgatggaagtagttccacattaagcatgagcactcattttaaaatgcttaaaaagctggtagaagaagcaacatttagtgaaatcctcattcctctacaatcagtcatgatacctacacttccatcaattctgggtacccatgctaaccatgctagccatgaaccatttcctggacattgggcctatattgcagggtttgatgatatggtggaaattcttgcttctcttcagaaaccaaagaagatttctttaaaaggctcagatggaaagttctacatcatgatgtgtaagccaaaagatgacctgagaaaggattgtagactaatggaattcaattccttgattaataagtgcttaagaaaagatgcagagtctcgtagaagagaacttcatattcgaacatatgcagttattccactaaatgatgaatgtgggattattgaatgggtgaacaacactgctggtttgagacctattctgaccaaactatataaagaaaagggagtgtatatgacaggaaaagaacttcgccagtgtatgctaccaaagtcagcagctttatctgaaaaactcaaagtattccgagaatttctcctgcccaggcatcctcctatttttcatgagtggtttctgagaacattccctgatcctacatcatggtacagtagtagatcagcttactgccgttccactgcagtaatgtcaatggttggttatattctggggcttggagaccgtcatggtgaaaatattctctttgattctttgactggtgaatgcgtacatgtagatttcaattgtcttttcaataagggagaaacctttgaagttccagaaattgtgccatttcgcctgactcataatatggttaatggaatgggtcctatgggaacagagggtctttttcgaagagcatgtgaagttacaatgaggctgatgcgtgatcagcgagagcctttaatgagtgtcttaaagacttttctacatgatcctcttgtggaatggagtaaaccagtgaaagggcattccaaagcgccactgaatgaaactggagaagttgtcaatgaaaaggccaagacccatgttcttgacattgagcagcgactacaaggtgtaatcaagactcgaaatagagtgacaggactgccgttatctattgaaggacatgtgcattaccttatacaggaagctactgatgaaaacttactatgccagatgtatcttggttggactccatatatgtgaaatgaaattatgtaaaagaatatgttaataatctaaaagtaatgcatttggtatgaatctgtggttgtatctgttcaattctaaagtacaacataaatttacgttctcagcaactgttatttctctctgatcattaattatatgtaaaataatatacattcagttattaagaaataaactgctttcttaat

SEQ ID NO: 301712 - DNA, 7743 bp, Artificial Sequence
  derived and/or modified sequence
atgggcgagcacggcctggagctggccagcatgatccccgccctgagagagctgggcagcgccacccccgaggagtacaacaccgtggtgcagaagcccagacagatcctgtgccagttcatcgacagaatcctgaccgacgtgaacgtggtggccgtggagctggtgaagaagaccgacagccagcccaccagcgtgatgctgctggacttcatccagcacatcatgaagagcagccccctgatgttcgtgaacgtgagcggcagccacgaggccaagggcagctgcatcgagttcagcaactggatcatcaccagactgctgagaatcgccgccacccccagctgccacctgctgcacaagaagatctgcgaggtgatctgcagcctgctgttcctgttcaagagcaagagccccgccatcttcggcgtgctgaccaaggagctgctgcagctgttcgaggacctggtgtacctgcacagaagaaacgtgatgggccacgccgtggagtggcccgtggtgatgagcagattcctgagccagctggacgagcacatgggctacctgcagagcgcccccctgcagctgatgagcatgcagaacctggagttcatcgaggtgaccctgctgatggtgctgaccagaatcatcgccatcgtgttcttcagaagacaggagctgctgctgtggcagatcggctgcgtgctgctggagtacggcagccccaagatcaagagcctggccatcagcttcctgaccgagctgttccagctgggcggcctgcccgcccagcccgccagcaccttcttcagcagcttcctggagctgctgaagcacctggtggagatggacaccgaccagctgaagctgtacgaggagcccctgagcaagctgatcaagaccctgttccccttcgaggccgaggcctacagaaacatcgagcccgtgtacctgaacatgctgctggagaagctgtgcgtgatgttcgaggacggcgtgctgatgagactgaagagcgacctgctgaaggccgccctgtgccacctgctgcagtacttcctgaagttcgtgcccgccggctacgagagcgccctgcaggtgagaaaggtgtacgtgagaaacatctgcaaggccctgctggacgtgctgggcatcgaggtggacgccgagtacctgctgggccccctgtacgccgccctgaagatggagagcatggagatcatcgaggagatccagtgccagacccagcaggagaacctgagcagcaacagcgacggcatcagccccaagagaagaagactgagcagcagcctgaaccccagcaagagagcccccaagcagaccgaggacagaaccttcaaggactgccagcacaagagcaagaagaagcccagcgtggtgatcacctggatgagcctggacttctacaccaaggtgctgaagagctgcagaagcctgctggagagcgtgcagaagctggacctggaggccaccatcgacaaggtggtgaagatctacgacgccctgatctacatgcaggtgaacagcagcttcgaggaccacatcctggaggacctgtgcggcatgctgagcctgccctggatctacagccacagcgacgacggctgcctgaagctgaccaccttcgccgccaacctgctgaccctgagctgcagaatcagcgacagctacagcccccaggcccagagcagatgcgtgttcctgctgaccctgttccccagaagaatcttcctggagtggagaaccgccgtgtacaactgggccctgcagagcagccacgaggtgatcagagccagctgcgtgagcggcttcttcatcctgctgcagcagcagaacagctgcaacagagtgcccaagatcctgatcgacaaggtgaaggacgacagcgacatcgtgaagaaggagttcgccagcatcctgggccagctggtgtgcaccctgcacggcatgttctacctgaccagcagcctgaccgagcccttcagcgagcacggccacgtggacctgttctgcagaaacctgaaggccaccagccagcacgagtgcagcagcagccagctgaaggccagcgtgtgcaagcccttcctgttcctgctgaagaagaagatccccagccccgtgaagctggccttcatcgacaacctgcaccacctgtgcaagcacctggacttcagagaggacgagaccgacgtgaaggccgtgctgggcaccctgctgaacctgatggaggaccccgacaaggacgtgagagtggccttcagcggcaacatcaagcacatcctggagagcctggacagcgaggacggcttcatcaaggagctgttcgtgctgagaatgaaggaggcctacacccacgcccagatcagcagaaacaacgagctgaaggacaccctgatcctgaccaccggcgacatcggcagagccgccaagggcgacctggtgcccttcgccctgctgcacctgctgcactgcctgctgagcaagagcgccagcgtgagcggcgccgcctacaccgagatcagagccctggtggccgccaagagcgtgaagctgcagagcttcttcagccagtacaagaagcccatctgccagttcctggtggagagcctgcacagcagccagatgaccgccctgcccaacaccccctgccagaacgccgacgtgagaaagcaggacgtggcccaccagagagagatggccctgaacaccctgagcgagatcgccaacgtgttcgacttccccgacctgaacagattcctgaccagaaccctgcaggtgctgctgcccgacctggccgccaaggccagccccgccgccagcgccctgatcagaaccctgggcaagcagctgaacgtgaacagaagagagatcctgatcaacaacttcaagtacatcttcagccacctggtgtgcagctgcagcaaggacgagctggagagagccctgcactacctgaagaacgagaccgagatcgagctgggcagcctgctgagacaggacttccagggcctgcacaacgagctgctgctgagaatcggcgagcactaccagcaggtgttcaacggcctgagcatcctggccagcttcgccagcagcgacgacccctaccagggccccagagacatcatcagccccgagctgatggccgactacctgcagcccaagctgctgggcatcctggccttcttcaacatgcagctgctgagcagcagcgtgggcatcgaggacaagaagatggccctgaacagcctgatgagcctgatgaagctgatgggccccaagcacgtgagcagcgtgagagtgaagatgatgaccaccctgagaaccggcctgagattcaaggacgacttccccgagctgtgctgcagagcctgggactgcttcgtgagatgcctggaccacgcctgcctgggcagcctgctgagccacgtgatcgtggccctgctgcccctgatccacatccagcccaaggagaccgccgccatcttccactacctgatcatcgagaacagagacgccgtgcaggacttcctgcacgagatctacttcctgcccgaccaccccgagctgaagaagatcaaggccgtgctgcaggagtacagaaaggagaccagcgagagcaccgacctgcagaccaccctgcagctgagcatgaaggccatccagcacgagaacgtggacgtgagaatccacgccctgaccagcctgaaggagaccctgtacaagaaccaggagaagctgatcaagtacgccaccgacagcgagaccgtggagcccatcatcagccagctggtgaccgtgctgctgaagggctgccaggacgccaacagccaggccagactgctgtgcggcgagtgcctgggcgagctgggcgccatcgaccccggcagactggacttcagcaccaccgagacccagggcaaggacttcaccttcgtgaccggcgtggaggacagcagcttcgcctacggcctgctgatggagctgaccagagcctacctggcctacgccgacaacagcagagcccaggacagcgccgcctacgccatccaggagctgctgagcatctacgactgcagagagatggagaccaacggccccggccaccagctgtggagaagattccccgagcacgtgagagagatcctggagccccacctgaacaccagatacaagagcagccagaagagcaccgactggagcggcgtgaagaagcccatctacctgagcaagctgggcagcaacttcgccgagtggagcgccagctgggccggctacctgatcaccaaggtgagacacgacctggccagcaagatcttcacctgctgcagcatcatgatgaagcacgacttcaaggtgaccatctacctgctgccccacatcctggtgtacgtgctgctgggctgcaaccaggaggaccagcaggaggtgtacgccgagatcatggccgtgctgaagcacgacgaccagcacaccatcaacacccaggacatcgccagcgacctgtgccagctgagcacccagaccgtgttcagcatgctggaccacctgacccagtgggccagacacaagttccaggccctgaaggccgagaagtgcccccacagcaagagcaacagaaacaaggtggacagcatggtgagcaccgtggactacgaggactaccagagcgtgaccagattcctggacctgatcccccaggacaccctggccgtggccagcttcagaagcaaggcctacaccagagccgtgatgcacttcgagagcttcatcaccgagaagaagcagaacatccaggagcacctgggcttcctgcagaagctgtacgccgccatgcacgagcccgacggcgtggccggcgtgagcgccatcagaaaggccgagcccagcctgaaggagcagatcctggagcacgagagcctgggcctgctgagagacgccaccgcctgctacgacagagccatccagctggagcccgaccagatcatccactaccacggcgtggtgaagagcatgctgggcctgggccagctgagcaccgtgatcacccaggtgaacggcgtgcacgccaacagaagcgagtggaccgacgagctgaacacctacagagtggaggccgcctggaagctgagccagtgggacctggtggagaactacctggccgccgacggcaagagcaccacctggagcgtgagactgggccagctgctgctgagcgccaagaagagagacatcaccgccttctacgacagcctgaagctggtgagagccgagcagatcgtgcccctgagcgccgccagcttcgagagaggcagctaccagagaggctacgagtacatcgtgagactgcacatgctgtgcgagctggagcacagcatcaagcccctgttccagcacagccccggcgacagcagccaggaggacagcctgaactgggtggccagactggagatgacccagaacagctacagagccaaggagcccatcctggccctgagaagagccctgctgagcctgaacaagagacccgactacaacgagatggtgggcgagtgctggctgcagagcgccagagtggccagaaaggccggccaccaccagaccgcctacaacgccctgctgaacgccggcgagagcagactggccgagctgtacgtggagagagccaagtggctgtggagcaagggcgacgtgcaccaggccctgatcgtgctgcagaagggcgtggagctgtgcttccccgagaacgagaccccccccgagggcaagaacatgctgatccacggcagagccatgctgctggtgggcagattcatggaggagaccgccaacttcgagagcaacgccatcatgaagaagtacaaggacgtgaccgcctgcctgcccgagtgggaggacggccacttctacctggccaagtactacgacaagctgatgcccatggtgaccgacaacaagatggagaagcagggcgacctgatcagatacatcgtgctgcacttcggcagaagcctgcagtacggcaaccagttcatctaccagagcatgcccagaatgctgaccctgtggctggactacggcaccaaggcctacgagtgggagaaggccggcagaagcgacagagtgcagatgagaaacgacctgggcaagatcaacaaggtgatcaccgagcacaccaactacctggccccctaccagttcctgaccgccttcagccagctgatcagcagaatctgccacagccacgacgaggtgttcgtggtgctgatggagatcatcgccaaggtgttcctggcctacccccagcaggccatgtggatgatgaccgccgtgagcaagagcagctaccccatgagagtgaacagatgcaaggagatcctgaacaaggccatccacatgaagaagagcctggagaagttcgtgggcgacgccaccagactgaccgacaagctgctggagctgtgcaacaagcccgtggacggcagcagcagcaccctgagcatgagcacccacttcaagatgctgaagaagctggtggaggaggccaccttcagcgagatcctgatccccctgcagagcgtgatgatccccaccctgcccagcatcctgggcacccacgccaaccacgccagccacgagcccttccccggccactgggcctacatcgccggcttcgacgacatggtggagatcctggccagcctgcagaagcccaagaagatcagcctgaagggcagcgacggcaagttctacatcatgatgtgcaagcccaaggacgacctgagaaaggactgcagactgatggagttcaacagcctgatcaacaagtgcctgagaaaggacgccgagagcagaagaagagagctgcacatcagaacctacgccgtgatccccctgaacgacgagtgcggcatcatcgagtgggtgaacaacaccgccggcctgagacccatcctgaccaagctgtacaaggagaagggcgtgtacatgaccggcaaggagctgagacagtgcatgctgcccaagagcgccgccctgagcgagaagctgaaggtgttcagagagttcctgctgcccagacacccccccatcttccacgagtggttcctgagaaccttccccgaccccaccagctggtacagcagcagaagcgcctactgcagaagcaccgccgtgatgagcatggtgggctacatcctgggcctgggcgacagacacggcgagaacatcctgttcgacagcctgaccggcgagtgcgtgcacgtggacttcaactgcctgttcaacaagggcgagaccttcgaggtgcccgagatcgtgcccttcagactgacccacaacatggtgaacggcatgggccccatgggcaccgagggcctgttcagaagagcctgcgaggtgaccatgagactgatgagagaccagagagagcccctgatgagcgtgctgaagaccttcctgcacgaccccctggtggagtggagcaagcccgtgaagggccacagcaaggcccccctgaacgagaccggcgaggtggtgaacgagaaggccaagacccacgtgctggacatcgagcagagactgcagggcgtgatcaagaccagaaacagagtgaccggcctgcccctgagcatcgagggccacgtgcactacctgatccaggaggccaccgacgagaacctgctgtgccagatgtacctgggctggaccccctacatgtag

SEQ ID NO: 301713 - DNA, 585 bp, Artificial Sequence
  derived and/or modified sequence
tgagtcaggaggcgcgccgaattacgcatggccgtcccaggttcgttccctctgttggtagaagggagctgggggccggaccctcccaaaaacctaaacaccaaactgcaaatgtactttcagagccctaagagaagcggcggaggagaatgcgaggtcaggcaggatcccagatcaccctcccggtttctcgtgttcttctaccccgaggacgttcgtcagaaggtgctcgagcgcaagaaccacgaactcgtctggcagggaaaagggacctttaaattgaccgttcagcttcctgccacacccgacgagatcgaccatgtgttcgaggaggagcttcttacgaaggaaagtaaaaccaaggaagacgtgaaggagcctgatactatccgattcgtcgacgattgcacaaagcatcattctataaaacaactccaactgtcaccccggctgcttgaagttacaaacaccattagagtggaaaatctgccccctggagccgacgactatagcctcaagcttttttttgaaaatccctacaatgggggagggcgggttgccaacgtggagtattttccagaatag

SEQ ID NO: 301714 - DNA, 585 bp, Artificial Sequence
  derived and/or modified sequence
tgagtgagaagaagagctgagctgaggatggctgtgcccggcagcttccccctgctggtggagggctcctggggccctgacccccccaagaacctgaacaccaagctgcagatgtacttccagagccccaagaggtctgggggcggggagtgtgaggtgcggcaggaccccaggagccccagccgcttcctggtgttcttctacccagaagatgtgcggcagaaggtgctggagaggaagaaccacgagctggtgtggcagggcaagggcaccttcaagctgactgtgcagctgcctgccaccccagatgaaattgaccacgtgtttgaggaggagctgctgaccaaggagagcaagaccaaggaggatgtgaaggagccagacaccatccgctttgtggatgactgcaccaagcaccacagcatcaagcagctgcagctgagcccccggctgctggaggtgaccaacaccatccgggtggagaacctgcccccaggagcagatgactacagcctgaagctgttctttgagaacccctacaatggaggcggccgggtggccaacgtggagtacttccctgagtag

SEQ ID NO: 301715 - DNA, 585 bp, Artificial Sequence
  derived and/or modified sequence
tgagtgcggcggcgggccgagctgcggatggccgtgcccggcagctttcctcttcttgtggaaggctcttgggggcccgatcccccaaaaaatctgaacaccaagctgcagatgtactttcaaagccctaagagatccgggggaggggagtgcgaggtgcgccaggatccccggagtccctcgcggtttctcgttttcttctaccccgaggacgtgcgtcaaaaagtgctagagagaaagaatcacgaactcgtgtggcagggtaaaggcacattcaagctgaccgttcagttgcccgccacacccgacgagatcgaccacgtgttcgaagaggagctcctaacaaaagagtctaagaccaaggaggatgtaaaggagcctgatacaattaggttcgtggacgactgtacaaagcaccatagcattaagcagcttcagctgagcccaagactcctggaggtaactaacacaatccgagtggagaacctgccaccaggggcagatgattactcactgaagttgttttttgagaacccttataatgggggtggccgtgtggctaacgtggagtatttcccggagtag

SEQ ID NO: 301716 - DNA, 581 bp, Artificial Sequence
  derived and/or modified sequence
agtccggcggagagcggagctgaggatggctgtgcccggctccttcccgctgctggtcgagggctcctggggccccgaccccccgaagaacttgaacaccaagttgcagatgtacttccagagcccgaagaggtcgggaggcggcgagtgtgaggtccgccaggatcccaggagcccatcccgcttcctggtgttcttctacccggaggacgttcggcagaaggttctggagagaaaaaatcatgagttggtatggcaaggaaaaggaacattcaagttaactgtccagttacctgcaaccccagatgaaatcgatcatgtctttgaagaggaacttctaacaaaagaatccaagaccaaagaagatgttaaagaaccagatactataagatttgttgatgattgtaccaagcaccattcaattaaacaacttcagctttctccaagacttctggaagtgacaaacacaatcagggttgaaaacctgccacctggtgctgatgactacagtttaaaacttttctttgaaaatccctataatggagggggaagagttgccaatgttgaatattttcctgaag

SEQ ID NO: 301717 - DNA, 585 bp, Artificial Sequence
  derived and/or modified sequence
tgagtcaggaggcgagctgaactcaggatggccgtcccaggctctttcccattactcgtagaaggaagctgggggccagatccccctaaaaacctcaatacaaaactgcagatgtacttccagtcgcctaagcggagtggcggtggtgagtgtgaagtcaggcaggaccctcgatcccccagtcgtttcctggtatttttttaccctgaggatgtccgccaaaaggtgctggaaagaaaaaaccatgagctagtgtggcaaggcaaaggaactttcaagctgacagtgcagctcccggctactcctgacgagattgaccatgtgttcgaggaagaactcttgacaaaggaatccaaaactaaagaggacgttaaggaacctgataccatccgcttcgtcgacgactgtactaaacaccactccatcaaacagttacagctaagcccccgtcttctggaagtgaccaacactatacgggtggaaaacctgcccccaggagctgatgactactcactgaaacttttctttgagaatccttacaatggaggaggaagagttgccaatgttgaatacttcccagaatag

SEQ ID NO: 301718 - DNA, 585 bp, Artificial Sequence
  derived and/or modified sequence
tgagtgagaagaagagccgagctgagaatggccgtgcccggcagcttccccctgctggtggagggcagctggggccccgacccccccaagaacctgaacaccaagctgcagatgtacttccagagccccaagagaagcggcggcggcgagtgcgaggtgagacaggaccccagaagccccagcagattcctggtgttcttctaccccgaggacgtgagacagaaggtgctggagagaaagaaccacgagctggtgtggcagggcaagggcaccttcaagctgaccgtgcagctgcccgccacccccgacgagatcgaccacgtgttcgaggaggagctgctgaccaaggagagcaagaccaaggaggacgtgaaggagcccgacaccatcagattcgtggacgactgcaccaagcaccacagcatcaagcagctgcagctgagccccagactgctggaggtgaccaacaccatcagagtggagaacctgccccccggcgccgacgactacagcctgaagctgttcttcgagaacccctacaacggcggcggcagagtggccaacgtggagtacttccccgagtag

SEQ ID NO: 301719 - DNA, 351 bp, Artificial Sequence
  derived and/or modified sequence
atggcacagaccgacaagcctacgtgcattcctcctgagcttccaaagatgctcaaagagtttgccaaagcggctattagggttcagccgcaggacctcattcagtgggctgccgactattttgaggcactctctcgtggtgagaccccccccgtccgcgaaagatcggaaagggtcgcattatgtaacagggccgaacttactcctgaactgctgaagattctgcacagccaggtggcggggagactgataattagggcagaagagctggctcagatgtggaaagtcgtcaacctccctaccgacctctttaattcggtgatgaacgttggtagattcaccgaggaatag

SEQ ID NO: 301720 - DNA, 393 bp, Artificial Sequence
  derived and/or modified sequence
atggcacaaactgataagcctacctgcataccacccgagctgcctaaaatgcttaaggagttcgctaaggccgcgatcagggtacagccccaggatctcatccaatgggctgctgactactttgaggctcttagccgcggagagaccccccctgtcagagaaaggtcagagagagtggctctttgcaatagagcggaactaacaccagagctattgaaaatactacacagtcaggtggccggtaggcttataatacgcgccgaagagctcgctcagatgtggaaggttgttaacctgcctacagacctgtttaacagcgttatgaacgtggggaggttcaccgaggagatagagtggcttaaatttctggccttagcgtgtagcgccctttag

SEQ ID NO: 301721 - DNA, 312 bp, Artificial Sequence
  derived and/or modified sequence
atggcccagaccgacaaacctacctgcattccccccgagctgcctaagatgctgaaggagtttgccaaggctgccattcgggtgcagccgcaggacctcatccagtgggcagcagactattttgaggctctctccagaggcgaaacacctccggtgcgagaacggtccgagcgtgtggccctgtgcaaccgggccgagctgacccctgagctgctgaaaattctgcattcccaggtcgcaggcaggctgataatccgcgcggaggaattggcacagatgtggaaggtggtgaacctacctacggatctgtag

SEQ ID NO: 301722 - DNA, 234 bp, Artificial Sequence
  derived and/or modified sequence
atggcacagactgataaacccacttgtatccctcccgaactccccaagatgctgaaggaatttgccaaggctgccatcagagtccagccgcaggatctgattcaatgggccgccgattattttgaggccttgtccagaggcgagactccccctgttagagagcgatccgagagggtggcgttgtgcaatagagccgaactaacaccagagctcctcaaaatcctacattcctag

SEQ ID NO: 301723 - DNA, 351 bp, Artificial Sequence
  derived and/or modified sequence
atggcccagacagacaagcccacctgcatccccccagagctgcccaagatgctgaaggagtttgccaaggccgccatccgggtgcagccccaggacctgatccagtgggccgctgactactttgaggccctgagcagaggagagaccccacctgtgcgggagaggtctgagcgggtggccctgtgcaacagagctgagctgaccccagagctgctgaagatcctgcacagccaggtggccggccgcctcatcatccgggcagaggagctggcccagatgtggaaggtggtgaacctgcccacagacctcttcaacagcgtgatgaatgtgggccgcttcacagaggagtag

SEQ ID NO: 301724 - DNA, 393 bp, Artificial Sequence
  derived and/or modified sequence
atggcccagacagacaagcccacctgcatccccccagagctgcccaagatgctgaaggagtttgccaaggccgccatccgggtgcagccccaggacctgatccagtgggccgctgactactttgaggccctgagcagaggagagaccccacctgtgcgggagaggtctgagcgggtggccctgtgcaacagagctgagctgaccccagagctgctgaagatcctgcacagccaggtggccggccgcctcatcatccgggcagaggagctggcccagatgtggaaggtggtgaacctgcccacagacctcttcaacagcgtgatgaatgtgggccgcttcacagaggagattgagtggctgaagttcctggccctggcctgcagcgccctgtag

SEQ ID NO: 301725 - DNA, 312 bp, Artificial Sequence
  derived and/or modified sequence
atggcccagacagacaagcccacctgcatccccccagagctgcccaagatgctgaaggagtttgccaaggccgccatccgggtgcagccccaggacctgatccagtgggccgctgactactttgaggccctgagcagaggagagaccccacctgtgcgggagaggtctgagcgggtggccctgtgcaacagagctgagctgaccccagagctgctgaagatcctgcacagccaggtggccggccgcctcatcatccgggcagaggagctggcccagatgtggaaggtggtgaacctgcccacagacctgtag

SEQ ID NO: 301726 - DNA, 234 bp, Artificial Sequence
  derived and/or modified sequence
atggcccagacagacaagcccacctgcatccccccagagctgcccaagatgctgaaggagtttgccaaggccgccatccgggtgcagccccaggacctgatccagtgggccgctgactactttgaggccctgagcagaggagagaccccacctgtgcgggagaggtctgagcgggtggccctgtgcaacagagctgagctgaccccagagctgctgaagatcctgcacagctag

SEQ ID NO: 301727 - DNA, 351 bp, Artificial Sequence
  derived and/or modified sequence
atggcccagaccgacaagcccacctgcatcccccccgagctgcccaaaatgctgaaggagtttgccaaggccgctatccgagtgcagccacaggacctcattcagtgggccgcggactattttgaagctctttctcgaggagaaaccccccctgtgcgtgaaaggagcgagagggtggcattatgcaacagagccgagcttacaccggagttattgaaaattctgcacagtcaagtggcgggacgcctaattattagagccgaggagctggcgcagatgtggaaggtggttaatctgccaacagacctgttcaactcagtgatgaacgtcgggcgcttcaccgaggaatag

SEQ ID NO: 301728 - DNA, 393 bp, Artificial Sequence
  derived and/or modified sequence
atggcccagaccgacaagcccacctgcatcccccccgagctgcccaagatgttaaaagagtttgccaaggccgccataagggtgcagccacaggacctgattcaatgggcagcggactacttcgaagcgctcagcaggggcgaaacacctcccgtgcgcgagcgttccgagagagtggccctgtgcaatcgagcagaactcacgccagagcttctcaagattctccactcccaagtcgccgggagattgatcataagagccgaagaactggcccaaatgtggaaggtggttaacctgccaaccgacctgtttaactccgtcatgaacgtggggcggttcaccgaggagatcgagtggctcaagttcctagcactggcatgtagcgccctctag

SEQ ID NO: 301729 - DNA, 312 bp, Artificial Sequence
  derived and/or modified sequence
atggcccagaccgacaagcccacctgcatcccccccgagctgcccaagatgttgaaagagtttgcgaaagcagctatcagggtacagccccaagaccttatccagtgggcagcagattactttgaggctctgagcaggggcgagacgcccccagtgcgggaacgctctgagcgtgtagcactttgtaacagagccgagctgacacccgagctcttgaaaatcctccactcccaagtcgcaggaagactgatcatccgggccgaagaactagcacagatgtggaaggtggttaatctaccaactgacctgtag

SEQ ID NO: 301730 - DNA, 234 bp, Artificial Sequence
  derived and/or modified sequence
atggcccagaccgacaagcccacctgcatcccccccgagctgcccaaaatgctgaaggaattcgccaaggctgccattcgggtccaacctcaggacctcatacaatgggctgcggattacttcgaagccctgtcccgaggggagaccccacccgtccgggaacggtctgagcgggtggccctgtgcaaccgcgcagagctaacaccggagttgctgaagattctccacagctag

SEQ ID NO: 301731 - DNA, 351 bp, Artificial Sequence
  derived and/or modified sequence
atggcccagactgacaagcccacgtgcattccccctgagctcccgaagatgctgaaggagttcgcaaaggccgctatcagggtgcagccacaggacctaatacagtgggccgcagactatttcgaggctctctcccgcggagaaaccccaccagtgcgcgagagatccgagagagtcgctctgtgcaaccgggcagaattgacaccagaactgctaaaaatcctgcatagccaagttgccggaaggttaatcattcgggcagaggagctggcccagatgtggaaagtagttaatctgccaacagatctgttcaattctgtcatgaacgtcgggaggtttaccgaagagtag

SEQ ID NO: 301732 - DNA, 393 bp, Artificial Sequence
  derived and/or modified sequence
atggcgcaaacggataaacccacatgtatcccaccggaactgccgaaaatgctcaaggagtttgcaaaggcggctatccgagtgcaaccgcaagacctgatccagtgggctgctgactatttcgaggcactcagccggggagagacaccaccagtgcgcgagcgatccgaacgagtggctctctgcaatagagccgaactgacaccagagctcctgaaaatcctgcactctcaggtggcgggacggcttatcattcgggctgaagagctggcccagatgtggaaggtagttaacttaccaacagacctcttcaattctgtgatgaacgtaggtaggtttactgaagaaatcgaatggttgaaattcctggcactcgcctgcagcgccctctag

SEQ ID NO: 301733 - DNA, 312 bp, Artificial Sequence
  derived and/or modified sequence
atggcccagactgataaaccaacatgtattccacctgagttaccaaagatgctcaaggagttcgctaaagcggcaattcgggttcagccacaggacctgattcagtgggcagccgattattttgaggctctgagccgtggagagactccgccagttcgagagcggtcggagagagtagccctgtgcaacagagcagagctcactccagagttgctcaagattctgcattcgcaggtggcagggaggctaataatccgtgccgaggagctggcacaaatgtggaaagttgttaatctcccaacagatttgtag

SEQ ID NO: 301734 - DNA, 234 bp, Artificial Sequence
  derived and/or modified sequence
atggcccaaaccgacaagcctacgtgcataccacctgagctgcccaaaatgctcaaggagttcgctaaagccgctatccgcgtccaacctcaggacttgatccaatgggcggctgactattttgaggccctcagccgaggcgaaacacctcctgtcagagagagatcagagagagtggcattatgcaatcgggcagagctgactccggagctgttgaagatcctccattcctag

SEQ ID NO: 301735 - DNA, 727 bp, Artificial Sequence
  derived and/or modified sequence
aggcggagcgctaacgtctaacgctaacggcggtcgtgccccgccgctgctgtcacccccggccgctgctgccctccccgccgaggttctactgctctccttcttaagaagggtgggaggcactcggtctctccccacacctctcgcctgaggccaggcgccaggtgtcgcctgaagccagacagccggtttgggagcgagcctgagttccaggcactgggctaggcactgggatggtgtggtgagcaaaaactgaccagtcctgccgtggagtttgctgggggagacacatgttactcaaagaatcacactaaggatagcaatttatctcaaagctgcaagttcctgccatctacatgtgcccaggccaaccaatcaatggctcagacagataagccaacatgcatcccgccggagctgccgaagatgctgaaggagtttgccaaagccgccattagggtgcagccgcaggacctcatccagtgggcagccgattattttgaggccctgtcccgtggagagacgcctccggtgagagagcggtctgagcgagtcgctttgtgtaaccgggcagagctaacacctgagctgttaaagatcctgcattctcaggttgctggcagactgatcatccgtgcagaggagctggcccagatgtggaaagtggtgaatctcccaacagatctgtttaatagtgtgatgaatgtgggtcgcttcacggaggaga

SEQ ID NO: 301736 - DNA, 683 bp, Artificial Sequence
  derived and/or modified sequence
gaggttctactgctctccttcttaagaagggtgggaggcactcggtctctccccacacctctcgcctgaggccaggcgccaggtgtcgcctgaagccagacagccggtttgggagcgagcctgagcaatttatctcaaagctgcaagttcctgccatctacatgtgcccagagtccccaaaattgagtgtcaaacagaggctgggtgacctcctgtccaggattgctctcatcgtatgaatcgaagttttcatcttaacgtatttttttctcctgagaataggccaaccaatcaatggctcagacagataagccaacatgcatcccgccggagctgccgaagatgctgaaggagtttgccaaagccgccattagggtgcagccgcaggacctcatccagtgggcagccgattattttgaggccctgtcccgtggagagacgcctccggtgagagagcggtctgagcgagtcgctttgtgtaaccgggcagagctaacacctgagctgttaaagatcctgcattctcaggttgctggcagactgatcatccgtgcagaggagctggcccagatgtggaaagtggtgaatctcccaacagatctgtttaatagtgtgatgaatgtgggtcgcttcacggaggagatcgagtggctgaagtttttagcccttgcttgcagcgctct

SEQ ID NO: 301737 - DNA, 704 bp, Artificial Sequence
  derived and/or modified sequence
cccgccgaggttctactgctctccttcttaagaagggtgggaggcactcggtctctccccacacctctcgcctgaggccaggcgccaggtgtcgcctgaagccagacagccggtttgggagcgagcctgagggcaaggggaaggcaaggggatcttcaagagaatgtgactgtgggggattatggctttctggccaatttgttacctattgaacactaagttccaggcactgggctaggcactgggatggtgtggtgagcaaaaactgaccagtcctgccgtggagtttgctgggggagacacatgttactcaaagaatcacactaaggatagcaatttatctcaaagctgcaagttcctgccatctacatgtgcccagaataggccaaccaatcaatggctcagacagataagccaacatgcatcccgccggagctgccgaagatgctgaaggagtttgccaaagccgccattagggtgcagccgcaggacctcatccagtgggcagccgattattttgaggccctgtcccgtggagagacgcctccggtgagagagcggtctgagcgagtcgctttgtgtaaccgggcagagctaacacctgagctgttaaagatcctgcattctcaggttgctggcagactgatcatccgtgcagaggagctggcccagatgtggaaagtggtgaatctcccaacagatct

SEQ ID NO: 301738 - DNA, 548 bp, Artificial Sequence
  derived and/or modified sequence
gctacccctggtgacctggcagcggagcccgcgcagggtttgccaggcgaaggcggagcgctaacgtctaacgctaacggcggtcgtgccccgccgctgctgtcacccccggccgctgctgccctccccgccgaggttctactgctctccttcttaagaagggtgggaggcactcggtctctccccacacctctcgcctgaggccaggcgccaggtgtcgcctgaagccagacagccggtttgggagcgagcctgagcaatttatctcaaagctgcaagttcctgccatctacatgtgcccaggccaaccaatcaatggctcagacagataagccaacatgcatcccgccggagctgccgaagatgctgaaggagtttgccaaagccgccattagggtgcagccgcaggacctcatccagtgggcagccgattattttgaggccctgtcccgtggagagacgcctccggtgagagagcggtctgagcgagtcgctttgtgtaaccgggcagagctaacacctgagctgttaaagatcctgcattctca

SEQ ID NO: 301739 - DNA, 351 bp, Artificial Sequence
  derived and/or modified sequence
atggcccagaccgacaagcccacctgcatcccccccgagctgcccaagatgctgaaggagttcgccaaggccgccatcagagtgcagccccaggacctgatccagtgggccgccgactacttcgaggccctgagcagaggcgagaccccccccgtgagagagagaagcgagagagtggccctgtgcaacagagccgagctgacccccgagctgctgaagatcctgcacagccaggtggccggcagactgatcatcagagccgaggagctggcccagatgtggaaggtggtgaacctgcccaccgacctgttcaacagcgtgatgaacgtgggcagattcaccgaggagtag

SEQ ID NO: 301740 - DNA, 393 bp, Artificial Sequence
  derived and/or modified sequence
atggcccagaccgacaagcccacctgcatcccccccgagctgcccaagatgctgaaggagttcgccaaggccgccatcagagtgcagccccaggacctgatccagtgggccgccgactacttcgaggccctgagcagaggcgagaccccccccgtgagagagagaagcgagagagtggccctgtgcaacagagccgagctgacccccgagctgctgaagatcctgcacagccaggtggccggcagactgatcatcagagccgaggagctggcccagatgtggaaggtggtgaacctgcccaccgacctgttcaacagcgtgatgaacgtgggcagattcaccgaggagatcgagtggctgaagttcctggccctggcctgcagcgccctgtag

SEQ ID NO: 301741 - DNA, 312 bp, Artificial Sequence
  derived and/or modified sequence
atggcccagaccgacaagcccacctgcatcccccccgagctgcccaagatgctgaaggagttcgccaaggccgccatcagagtgcagccccaggacctgatccagtgggccgccgactacttcgaggccctgagcagaggcgagaccccccccgtgagagagagaagcgagagagtggccctgtgcaacagagccgagctgacccccgagctgctgaagatcctgcacagccaggtggccggcagactgatcatcagagccgaggagctggcccagatgtggaaggtggtgaacctgcccaccgacctgtag

SEQ ID NO: 301742 - DNA, 234 bp, Artificial Sequence
  derived and/or modified sequence
atggcccagaccgacaagcccacctgcatcccccccgagctgcccaagatgctgaaggagttcgccaaggccgccatcagagtgcagccccaggacctgatccagtgggccgccgactacttcgaggccctgagcagaggcgagaccccccccgtgagagagagaagcgagagagtggccctgtgcaacagagccgagctgacccccgagctgctgaagatcctgcacagctag

SEQ ID NO: 301743 - protein, 161 aa, Artificial Sequence
  derived and/or modified sequence
MDIEEQKADIYEMGKIAKVCGCPLYWKAPMFRAAGGEKTGFVTAQSFIAMWRKLLNNHHDDASKFICLLAKPNCSSLEQEDFIPLLQDVVDTHPGLTFLKDAPEFHSRYITTVIQRIFYTVNRSWSGKITSTEIRKSNFLQSNEDLAKLAVHDGYTNIFLF

SEQ ID NO: 301744 - DNA, 486 bp, Artificial Sequence
  derived and/or modified sequence
atggacatcgaggagcagaaggccgacatctacgagatgggcaagatcgccaaggtgtgcggctgccccctgtactggaaggcccccatgttcagagccgccggcggcgagaagaccggcttcgtgaccgcccagagcttcatcgccatgtggagaaagctgctgaacaaccaccacgacgacgccagcaagttcatctgcctgctggccaagcccaactgcagcagcctggagcaggaggacttcatccccctgctgcaggacgtggtggacacccaccccggcctgaccttcctgaaggacgcccccgagttccacagcagatacatcaccaccgtgatccagagaatcttctacaccgtgaacagaagctggagcggcaagatcaccagcaccgagatcagaaagagcaacttcctgcagagcaacgaggacctggccaagctggccgtgcacgacggctacaccaacatcttcctgttctag

SEQ ID NO: 301745 - DNA, 486 bp, Artificial Sequence
  derived and/or modified sequence
atggacatcgaggaacagaaggctgatatctatgaaatggggaagatagccaaggtctgcgggtgccccctctactggaaggctcccatgttcagagccgctggaggggaaaagacaggattcgtgacggctcagtctttcatcgcgatgtggcgcaaattgctgaacaatcatcacgacgatgcctctaagttcatctgtcttctggcaaagcccaattgttcttcactcgagcaggaggacttcattccacttctgcaagacgtcgttgacactcatcctggactcacatttctcaaagacgctccggagtttcactctagatacatcacgaccgtcatccagcggattttttacaccgttaacagaagctggtctgggaaaataaccagcacagagatcagaaagagcaacttcctacagtctaatgaggatctggcaaagctcgcagtgcatgacggctatacaaatatatttttgttctag

SEQ ID NO: 301746 - DNA, 486 bp, Artificial Sequence
  derived and/or modified sequence
atggacatcgaggagcagaaggctgacatctatgagatgggcaagatcgccaaggtgtgtggctgccccctgtactggaaggcccccatgttccgggccgccggcggggagaagacaggctttgtgacagcccagagcttcatcgccatgtggaggaagctgctgaacaaccaccatgatgatgccagcaagttcatctgcctgctggccaagcccaactgcagcagcctggagcaggaggacttcatccccctgctgcaggatgtggtggacacccaccctggcctgaccttcctgaaggatgcccctgagttccacagccgctacatcaccaccgtcatccagaggatcttctacacagtgaacagatcctggagcggcaagatcaccagcacagagatcaggaagagcaacttcctgcagagcaatgaagacctggccaagctggccgtgcatgatggctacaccaacatcttcctgttctag

SEQ ID NO: 301747 - DNA, 486 bp, Artificial Sequence
  derived and/or modified sequence
atggacatcgaggagcagaaggccgacatctacgagatgggcaagatcgcgaaggtttgtggatgccctctctactggaaagccccgatgttcagagccgctggcggcgagaagactggcttcgttacggctcagagcttcattgcaatgtggcgcaagctgctgaacaaccaccacgacgatgctagcaagtttatctgtctgctggcgaagcctaactgtagcagtcttgaacaggaagacttcattccccttttgcaggacgtcgtagatactcaccctggcctcacatttctcaaggacgcccccgagtttcacagccgctacataaccacagtgattcagaggattttttatactgttaatcggtcttggtccggcaaaattacatcaacagagatccgaaagtccaatttcttgcagagtaatgaagacttagcgaagctcgccgtccacgacggctacaccaatatctttctattctag

SEQ ID NO: 301748 - DNA, 486 bp, Artificial Sequence
  derived and/or modified sequence
atggatattgaagagcagaaagcggacatttacgagatgggtaagattgctaaagtgtgcgggtgtccactttactggaaagctcccatgttccgcgcagctggaggtgagaaaactgggttcgtgaccgcacagtccttcatcgctatgtggcgtaaactgctcaataatcaccacgatgatgccagtaaatttatttgcttgttggccaagcctaactgttcttccctcgagcaggaggacttcattcccctgctgcaggatgttgtggacactcatccaggactgacctttttgaaggatgcaccggagttccattctagatatattacaacggtcattcagagaatattctataccgtaaatcggagctggagcgggaaaattacatcgactgaaattcgaaagagcaattttctgcagagtaatgaagatctggctaaactcgctgttcacgacggatacacgaacatttttttgttctag

SEQ ID NO: 301749 - DNA, 804 bp, Artificial Sequence
  derived and/or modified sequence
aaacattccacggttctactttcctgaaggactcccagatacctgtagtaatcatgaacaaactctaagcagaattgaaactgctttcatggatattgaagaacagaaagcagacatttatgaaatggggaaaattgcaaaggtctgtggctgtcctctctattggaaagcccccatgttcagggctgcagggggagagaagacaggatttgtgacagcacagtcattcattgccatgtggagaaagttgctgaataaccatcatgatgatgcctctaaattcatctgtcttctagcaaagcccaactgcagctctctagaacaggaggatttcatccctctacttcaggatgtggtggatacccaccctggtctcacgttcctgaaagatgctccagaattccactcccgctacatcaccacggttattcagagaatattctacacagtcaacagatcttggagtggaaaaattacttcgacagagataagaaaaagcaactttttgcaaagtaatgaagacttggcaaaattagcagtccatgatggatatacaaacatttttttattctaaaatgaacagtcatcatcacagtcagtgttgatatttattgaacacctgatgcctgcctgggctctcagtagaccctagcacttttggaagaagaggaagatataaaccaaattacagattacttctcctatgaacatttctatgttatttattgtaaattctgggaactagatactgatcacgacctctacatcagccaggccgatctgtctcgatacaatgaccagggt

SEQ ID NO: 301750 - DNA, 339 bp, Artificial Sequence
  derived and/or modified sequence
atgcccggcggcagaagaggccccagcagacagcagctgagcagaagcgccctgcccagcctgcagaccctggtgggcggcggctgcggcaacggcaccggcctgagaaacagaaacggcagcgccatcggcctgcccgtgccccccatcaccgccctgatcacccccggccccgtgagacactgccagatccccgacctgcccgtggacggcagcctgctgttcgagttcctgttcttcatctacctgctggtggccctgttcatccagtacatcaacatctacaagaccgtgtggtggtacccctacaaccaccccgccagctgcaccagcctgtag

SEQ ID NO: 301751 - DNA, 579 bp, Artificial Sequence
  derived and/or modified sequence
atgcccggcggcagaagaggccccagcagacagcagctgagcagaagcgccctgcccagcctgcagaccctggtgggcggcggctgcggcaacggcaccggcctgagaaacagaaacggcagcgccatcggcctgcccgtgccccccatcaccgccctgatcacccccggccccgtgagacactgccagatccccgacctgcccgtggacggcagcctgctgttcgagttcctgttcttcatctacctgctggtggccctgttcatccagtacatcaacatctacaagaccgtgtggtggtacccctacaaccaccccgccagctgcaccagcctgaacttccacctgatcgactaccacctggccgccttcatcaccgtgatgctggccagaagactggtgtgggccctgatcagcgaggccaccaaggccggcgccgccagcatgatccactacatggtgctgatcagcgccagactggtgctgctgaccctgtgcggctgggtgctgtgctggaccctggtgaacctgttcagaagccacagcgtgctgaacctgctgttcctgggctacccctag

SEQ ID NO: 301752 - DNA, 423 bp, Artificial Sequence
  derived and/or modified sequence
atgcccggcggcagaagaggccccagcagacagcagctgagcagaagcgccctgcccagcctgcagaccctggtgggcggcggctgcggcaacggcaccggcctgagaaacagaaacggcagcgccatcggcctgcccgtgccccccatcaccgccctgatcacccccggccccgtgagacactgccagatccccgacctgcccgtggacggcagcctgctgttcgagttcctgttcttcatctacctgctggtggccctgttcatccagtacatcaacatctacaagaccgtgtggtggtacccctacaaccaccccgccagctgcaccagcctgaacttccacctgatcgactaccacctggccgccttcatcaccgtgatgctggccagaagactggtgtgggccctgatcagcgagtag

SEQ ID NO: 301753 - DNA, 339 bp, Artificial Sequence
  derived and/or modified sequence
atgcctgggggcagacgggggcccagcaggcagcagttatctaggtccgcccttcctagcctgcagaccttagtaggcggtgggtgcggcaatggaaccgggctgcgaaaccgcaacggcagcgcaatcggactcccagtgcctcccataactgctcttattacaccgggaccggtgcggcactgccagatccctgacctgcctgtggacgggtctcttctatttgaattcctgttttttatctatctcctggtcgctctttttattcagtatatcaacatctacaagacagtatggtggtatccttataaccacccagcctcttgtacgtcattatag

SEQ ID NO: 301754 - DNA, 579 bp, Artificial Sequence
  derived and/or modified sequence
atgccaggcggcagaaggggaccttctagacagcagctgtcccgctccgctcttcccagcctgcagactttggtgggcggaggttgcgggaacgggactggccttcgcaaccgcaacggctccgccatcggccttcccgtcccacctataacagccctgatcaccccgggccccgttcgccattgtcagattcctgatctccctgtggatggctccctgctctttgaatttctcttttttatttatctactggtggctctctttattcagtacatcaatatatacaagacggtgtggtggtatccgtataaccatcctgcaagctgtacttccctgaatttccacttaattgactatcacctggctgcctttatcaccgtaatgctggcccgaaggctggtttgggccctgattagcgaagccacaaaagcaggagcagcctccatgatccattatatggtcctgatctccgccagactggtcctgttgactctgtgcggctgggtactgtgctggactcttgtgaacctgtttcgttcccactcggttttaaatctgctgtttctggggtatccctag

SEQ ID NO: 301755 - DNA, 423 bp, Artificial Sequence
  derived and/or modified sequence
atgcccggcggtcgccgcggacccagccggcagcaattgtctcgatctgctttgccgtctcttcagacactagtgggcgggggatgtgggaatggcacaggactccgcaatagaaatggcagcgcaatcggcctgcctgtcccacctatcaccgcactgattactcccggccccgtgaggcactgtcaaatcccagaccttcctgtggatggatcgctgctgttcgagttcctctttttcatatacctgttagtggctctcttcatacaatatattaatatatataaaactgtgtggtggtatccctacaaccatccagcctcctgtacaagtttgaattttcatctaatcgattaccacctggcggcctttatcactgttatgctagcccgacgtcttgtgtgggccttaatcagcgaatag

SEQ ID NO: 301756 - DNA, 339 bp, Artificial Sequence
  derived and/or modified sequence
atgcctgggggcagaagaggccccagccggcagcagctgagccgcagcgccctgcccagcctgcagaccctggtgggcggcggctgtggaaatggaacaggcctgaggaacagaaatggaagtgccatcggcctgcctgtgccccccatcacagccctgatcaccccaggccctgtgcgccactgccagatcccagacctgcctgtggatggcagcctgctgtttgagttcctgttcttcatctacctgctggtggccctcttcatccagtacatcaacatctacaagacagtgtggtggtacccctacaaccacccagccagctgcaccagcctgtag

SEQ ID NO: 301757 - DNA, 579 bp, Artificial Sequence
  derived and/or modified sequence
atgcctgggggcagaagaggccccagccggcagcagctgagccgcagcgccctgcccagcctgcagaccctggtgggcggcggctgtggaaatggaacaggcctgaggaacagaaatggaagtgccatcggcctgcctgtgccccccatcacagccctgatcaccccaggccctgtgcgccactgccagatcccagacctgcctgtggatggcagcctgctgtttgagttcctgttcttcatctacctgctggtggccctcttcatccagtacatcaacatctacaagacagtgtggtggtacccctacaaccacccagccagctgcaccagcctgaacttccacctgattgactaccacctggccgccttcatcaccgtgatgctggcccggcggctggtgtgggccctgatcagcgaggccaccaaggccggggccgcctccatgatccactacatggtgctgatcagcgcccggctggtgctgctgaccctgtgtggctgggtgctgtgctggaccctggtgaacctcttccgcagccacagcgtgctgaacctgctcttcctgggctacccctag

SEQ ID NO: 301758 - DNA, 423 bp, Artificial Sequence
  derived and/or modified sequence
atgcctgggggcagaagaggccccagccggcagcagctgagccgcagcgccctgcccagcctgcagaccctggtgggcggcggctgtggaaatggaacaggcctgaggaacagaaatggaagtgccatcggcctgcctgtgccccccatcacagccctgatcaccccaggccctgtgcgccactgccagatcccagacctgcctgtggatggcagcctgctgtttgagttcctgttcttcatctacctgctggtggccctcttcatccagtacatcaacatctacaagacagtgtggtggtacccctacaaccacccagccagctgcaccagcctgaacttccacctgattgactaccacctggccgccttcatcaccgtgatgctggcccggcggctggtgtgggccctgatcagcgagtag

SEQ ID NO: 301759 - DNA, 339 bp, Artificial Sequence
  derived and/or modified sequence
atgcccggcggccggcggggccccagccggcagcagctgagccggagcgccctgccatctctgcagacactggttggtggcgggtgtggtaatggcaccgggctgagaaatcggaatggctcggctatcggcctgcctgtacccccaattacagctttgattactcctggaccagttcgtcattgccagattcctgatctgcctgttgacgggtctttgttatttgagttcctgttctttatttacttgttagtcgcactgtttattcagtacataaacatatacaagacggtgtggtggtacccgtataatcatcctgcttcctgtacgtcattgtag

SEQ ID NO: 301760 - DNA, 579 bp, Artificial Sequence
  derived and/or modified sequence
atgcccggcggccggcggggccccagccggcagcagctgagccggtcagctttgccatctttgcagacccttgttgggggcggctgcggtaatgggaccgggttgcgcaatagaaacggctcggctatcggtttaccagtgccccctataaccgcgctgataacccctgggcctgtgaggcattgccagatccctgatttgccagtggacggcagcctgttattcgagtttttattttttatttacttgctggtcgctctgtttatccaatatataaacatttataaaacagtctggtggtatccctataatcacccggcctcgtgcacttcccttaacttccatctcatagactatcacttagctgctttcataaccgttatgttagcaagaaggttagtgtgggcactgattagcgaagcgacgaaggcgggtgcggcttcaatgattcactacatggtcctgatctccgctcggttggtcctcttaacgctttgcggatgggtactttgttggacgctggtcaacctcttccgctcccactcggttctgaatctgctctttttgggttatccatag

SEQ ID NO: 301761 - DNA, 423 bp, Artificial Sequence
  derived and/or modified sequence
atgcccggcggccggcggggccccagccggcagcagctgagccggagtgccctcccttccttacagaccctagttggtgggggctgcgggaatggaaccggtttaagaaaccgtaatggatcggccatcggcctgccggtgcctccaatcaccgctttaattacacccggacctgtacgccactgccagatcccggatttgcctgtcgacggcagtctcctgttcgaatttcttttcttcatctacctcctcgtggctctctttattcaatatataaatatatataagacagtgtggtggtacccttataatcacccagcaagttgcacatcactgaattttcatctgattgactatcacctcgcggcattcataacagtaatgctcgccaggagactcgtctgggcgttgattagtgagtag

SEQ ID NO: 301762 - DNA, 339 bp, Artificial Sequence
  derived and/or modified sequence
atgcctgggggtaggcgcggaccttcccgacagcagctctctcggagcgctctgccaagccttcaaacactagtgggagggggatgtgggaacggaaccggcctgaggaaccgtaatggctctgcgatagggctgcctgtgcccccaataactgcgcttataacgcccggaccagtaaggcactgccagatcccggaccttcctgtggacggcagcctgttgtttgagttcctcttcttcatctatttgcttgtggccctgtttatccaatacataaatatatataagaccgtgtggtggtacccatataaccaccctgccagttgtacctctttatag

SEQ ID NO: 301763 - DNA, 579 bp, Artificial Sequence
  derived and/or modified sequence
atgcccggaggaagaagaggcccaagcagacagcaattgtcacgatccgccctcccctccctgcagactctggtaggtggaggctgtgggaacggcacaggactgcgaaacaggaacgggagcgcaattggtctcccggtcccaccaatcacggccctgattaccccagggcctgttaggcattgccaaattccagacctgccagttgacggatcattgttatttgaatttctgttctttatttatctgctagtggcgcttttcatccagtacatcaacatctacaaaactgtgtggtggtacccttataatcaccccgcaagttgcacctcattgaatttccatctgattgactaccacttagcggctttcatcaccgtgatgctggctaggcgtctcgtgtgggccctcatatcagaagccactaaggctggcgcagccagcatgatacactacatggtgctgattagcgcgcgtcttgttctgctcaccttatgcggatgggtgttgtgttggaccctggtgaacttgtttcggtctcactctgtgctgaatttgctcttcctgggctacccctag

SEQ ID NO: 301764 - DNA, 423 bp, Artificial Sequence
  derived and/or modified sequence
atgcctggtggcaggcgaggccctagtagacaacaactcagcaggtccgccctgccctccctgcagactctggttggagggggatgcggtaatggcaccggactcaggaaccgaaacggctccgccattggcctgcccgtccccccaatcaccgccctcatcacaccaggacctgtgaggcattgccaaatcccagatctgcccgtcgacggctctctgctattcgagtttctgtttttcatttatctgttagtggcccttttcatccagtacattaacatctacaaaacagtgtggtggtatccttataatcatcctgcctcttgcacctcgctgaatttccaccttattgactaccacttggccgcatttattaccgtaatgctggctaggcgcctagtgtgggctctgatttcggagtag

SEQ ID NO: 301765 - DNA, 588 bp, Artificial Sequence
  derived and/or modified sequence
gacgtcatcgccgtgcgctgccacgtctgctcagctccgcggcgggggctgcctgcgtccaagcagctggtttgcagcgttccaacgctgggagggagttcccttacctggggtccagtctgtaaagttgtcgccgctttctagggaccccgccccaccggctgggactcttccatgcagttgaaactggttgacaaccattaacctgggttgcaactacaggtggcactggaagcagactggttcctggacatgcccggtggaaggaggggccctagtcggcaacagctaagccgttcagctttaccttctttgcagactttggttggtggaggctgtggcaatggaacaggcttgagaaacaggaatggtagtgctattggccttccagtcccacctatcacagccttaatcaccccaggtcctgttcgtcattgccaaattcctgacttgcctgtggatgggagcctactctttgaattcctttttttcatctacctgttggttgctcttttcattcagtacatcaacatttataaaacagtgtggtggtatccttacaatcatcctgcttcttgtacatcactg

SEQ ID NO: 301766 - DNA, 935 bp, Artificial Sequence
  derived and/or modified sequence
agaccgcggtcgcgtagctgacgtcatcgccgtgcgctgccacgtctgctcagctccgcggtaatggaggctagggatgggtgctgaagtatcaggctctggctctagctttagctctggcactggaactgcgtcggagtctgggtctgagtctggcagcccgaagcctggacaccttttcttgattctctaggcgggggctgcctgcgtccaagcagctggtttgcagcgttccaacgctgggagggagttcccttacctggggtccagtctgtaaagttgtcgccgctttctagggaccccgccccaccggctgggactcttccatgcgtggcactggaagcagactggttcctggacatgcccggtggaaggaggggccctagtcggcaacagctaagccgttcagctttaccttctttgcagactttggttggtggaggctgtggcaatggaacaggcttgagaaacaggaatggtagtgctattggccttccagtcccacctatcacagccttaatcaccccaggtcctgttcgtcattgccaaattcctgacttgcctgtggatgggagcctactctttgaattcctttttttcatctacctgttggttgctcttttcattcagtacatcaacatttataaaacagtgtggtggtatccttacaatcatcctgcttcttgtacatcactgaattttcatctcattgattatcatctggcagcattcatcacagtgatgcttgcgaggaggcttgtatgggctctcatctcagaggctactaaggcaggtgcagcatcaatgattcactacatggttctgatatcagctcgcttggtactactcactttgtgtggatgggtactttgttggaccctcgtcaatctctttcgaagccattcagtcctcaatctccttttccttggctaccc

SEQ ID NO: 301767 - DNA, 590 bp, Artificial Sequence
  derived and/or modified sequence
gtggggaggataaacgaatggaccagttgcctatcctccctccctggcacccctgggaaaataggtctgcagccagaaaactgaaggtcagagaggagttgaaactggttgacaaccattaacctgggttgcaactacaggtggcactggaagcagactggttcctggacatgcccggtggaaggaggggccctagtcggcaacagctaagccgttcagctttaccttctttgcagactttggttggtggaggctgtggcaatggaacaggcttgagaaacaggaatggtagtgctattggccttccagtcccacctatcacagccttaatcaccccaggtcctgttcgtcattgccaaattcctgacttgcctgtggatgggagcctactctttgaattcctttttttcatctacctgttggttgctcttttcattcagtacatcaacatttataaaacagtgtggtggtatccttacaatcatcctgcttcttgtacatcactgaattttcatctcattgattatcatctggcagcattcatcacagtgatgcttgcgaggaggcttgtatgggctctcatctcagag

SEQ ID NO: 301768 - protein, 110 aa, Artificial Sequence
  derived and/or modified sequence
MQISSEKEEDDNEKRQDPGDNWEEGGGGGGGMEKSSGPWNKTAPVQAPPAPVIVTETPEPAMTSGVYRPPGARLTTTRKTPQGPPEIYSDTQFPSLQSTAKHVESRKYLK

SEQ ID NO: 301769 - DNA, 3621 bp, Artificial Sequence
  derived and/or modified sequence
accccttccgatatccgcggtggagccgcccttcccaccccgcgtcgctcggcgttagccaaggcccgggcggcgccaccctccgggggcactaggtctggggccgcagtgcccagcacagagcagcgtttatcgggacgaagatgaatggaaagaattggagcaaaaagaggttgattacagcggcctcagggttcaggcaatgcaaataagcagtgaaaaggaagaagacgataatgaaaagagacaagatccaggtgataactgggaagaaggtggaggtggtggtggaggtatggaaaaatcttcaggtccctggaataaaacagctccagtacaagcacctcctgctccagtaattgttacagaaaccccagaaccagcgatgactagtggtgtgtataggcctcctggggccaggttaaccacaacaaggaaaacaccacaaggaccaccagaaatctacagtgatacacagttcccatccctgcagtcaactgccaagcatgtagaaagccggaagtacttaaaatgaatgctacctggaattaaatgactacatatggcacatctacatcttactttagggacatgaattttttaaaataaataaaatgggaagaaatgtaaatgacatcagatggaaatgtgttttttggggtggcttttagaataaatcccagccttttcaccactttgagagcacagctggcttgaatttaaacctccacgtggacttgctcctctgctctgtcttaaaaaatgtgtaagggaccttgggagggcagtgattcaccacactcgagtttctttacctgatctaatcagatccactcccacaaaatcgatgtgaggagaaatcattgactaatgagtagaatttacttgaatgagaaaattgttacccttgtgcataaagagagagatgtattatctattacttgctaaaagtaagagtcttaggaggaatgtcattacacagcttttaacagttttcttcaagtttgtcctgaaatagggtcacagttaatactgttcagtagaagataggaccctagagcttcaatacagcgttctgtgttttctgtttgaattgaagccttaaaatggtttgataaggattttctatatgcctccactcctacccctccccaggattcttctaaggggtggcttttttttaaattcaaggacgaatattttcaaaaaccctagtgaagaagaaatatttactgattacatttcttttcccttagggataaagaaatggagaagagctttgaagtagtaagacacaaaaatagaggtagggatgaggtttcaaaaaaccaggcccttaaacttcagctagacaaccaatatgctgtgcttgaaaatcagaaaagcagccactcacaatacaattaaggaatgggctttgctaacccttctgaggtaactagactgcagctaaccaccaccaacagccattcatcatctgatctctgctggatctacagacaccgatgcagaccactcgatttcatgaccggccctattgcactatggaagttaaagtgtcacgactgctctatgcatattggatttaggggaattttcattgttacataaatgtgtgaactagtttcaacagtgttctttcatatttactctgcaaatacaaaaaaccaaaacctgcagccagtggtcatttcaaaatctttttatgttcagatactgagccttcataagggttgactacctcagatttgctgcactcattgtggacttcatgtggatcacaacttctggataagaagattacaactattaagtgtcgatgtgaaccttgcaaccagctctactggattcttatcagaaatcctgcataaaaagtcagccatctgggttctgatctgctgtaaaagatgaagatttaagtgaccttaattaacctgtcctgtgccctacccttaaggaatactctctgtagtaggctgttgttatattagacttcctggaacacactgctgaaaagaactgatgtgttcagatcatctgtgtagggctgtgatttgtaatttaaactaattgtattctgaggtaaccacaaaataaattcaaccaaactggggtccaccaagtgggggaaggggaagggagagaataatcttgggggttttttttttttggtaatttttttatttggatagtgcttttttgttttgtttttgttctgcattaaggccttttttgctttgacttgaaataagttctttgacagagcatattgcttggttaattaagtaacctaaagtatgcattaggattgtgaaatgtctcgtgagtatgccaatcctgagggtggaaccaaatagcctttgatgaaaagggcagtggattctggaggctctacttcaggtgctgctataatgcctcatctaatcaggactaaattgtgtaggaaactgcagtgggaagaatatgctttctgctcaggctaagagggtcactgatctgtccttagaaattcagagtaacatgagcaaaacctcagctaaaacccatttaagtggcatggattgtgcatgatctttgataagaattcctcatgtacttgtgcctagtttttcaaggtattggctgttctatagatgcagtgattgtcccagctagctctgttaccagccttttggtgtgtctttatgttcatttggagagtcagggcgaaagacaggtgatgtagcacttctgtttttaataattattgcttaaaatacctattaatagttttgggtcatttaaagggacttgaggaagctacccaggattacagaagagtgtccacctaacaagatggtctggcagtttcctagttttgtatctggttcaatagaaatatgtgaaagtggtaatgtcatcatttgatgcagagtccgggtttctctataataaatccctttgccaaatgcatgagttgcagacttgctactggcaagagtgaagcaagtgggtgagtaaaactattttgacgtgggagcgttttcagataggagtttagtcttgacgaaagtgtccgtgcaggaattggactccgaggagggttacagtatctcctgacgggacctgccactcgcatctgggcaatgttgacatttgaggtggcaggcaggatgcctgccttctaatatatttgggtgagtaactgagccagccaagggaaggttgaatgattaaatcagaaatgggattcttggtaaactgaagacttttatttgggaatgaaaaaccttaaaaaaatctcttcatcgttgaactgtgcattttccctgcattttttcccaacaaaattttgttgggggttatgttactgaagaatgaacagatgagtaagtggaggtgttatgtaaaggcatattgtactcgaaatctgaagacctgcagcagatttaaattacaactcttgttataactttttaaaagattgtgaaaatatcaaaatataaatgaatcaagttttaatatactgtatgatgggtggatgaggctgtccattgtaccatttgtttgaattctcaggcatggtttggcagtgcaagaattctgtaacattaacaaattcaataaaaagtaaatatatgg

SEQ ID NO: 301770 - protein, 1854 aa, Artificial Sequence
  derived and/or modified sequence
MKEPDDQDTDGEKSVTSKSDGKKSLRSSKSESRSPVQEDNTFLEDDTDETFTKGEGSYLEEDSDEERLEGSLSSFQYGDLQSTTVPQQTPAPAVEEAEEEVKKKISESFFYDYMELASMPFVTLDSNIPLDLLTLVHSFGYDCRKRANLQLLDDSIAIYIAGNQLIFLNLKTKEQIYLRSSSGEGIGVIGVHPHKTYFTVAEKGSFPDIIIYEYPSLRPYRVLRDGTEKGYAYVDFNYSGNLLASVGSNPDYTLTIWNWKEEQPILRTKAFSQEVFKVTFNPDKEEQLTTSGSGHIKFWEMAFTFTGLKLQGSLGRFGKTITTDIEGYMELPDGKVLSGSEWGNMLLWEGGLIKVELCRGTSKSCHNGPINQIMLYEGEVITVGSDGYVRIWDFETIDTADVIDETGLLEIEPINELQVDKNVNLFSMIKMNETGNNFWLAQDANGAIWKLDLSFSNITQDPECLFSFHSGAIEAVAVSPLTYLMATTALDCSVRIYDFASKTPLAQMKFKQGGTALVWVPRMVNFTGAQIIVGFEDGVVRILELYDPKGLTIFAGRKKILDADIQLKQVFKPHTACVTALAYERDGEILATGSKDQTVFFFEVERDYKPIGYINTPGPVCQLMWSPMSHPESTLLIICENGYILEAPLPTIKQEEDDHDVVSYEIKDMCIKCFHFSSVKSKILRLIEIEKRERQRELKEKIREERRNKLAAEMGEDGEKEFQEEEEEKEEEEEEEEPLPEIFIPSTPSPILCGFYSEPGKFWVSLGGYDSGFLYHCEFPPCDESSDFKEQKDEPIDVRYLADTEDNPIQTITFNINKVMMFCGMKNGAIRVYVLNQNDPSLTSLVDYWHFNMHDNNYGCIKSIANSFDDRFLVTAGADGNIFVFNIFSEFMLRKDMKAKVPSPRFGIETEPIPEDIEDPKAYSIENARRKREHDKLMKEVGEIKARKREQIKALRSEFCNLLEMNEKLPKHMQFKRTDFDVDSQIRAEMHRKTAFKIQQVEKELAWEKEKHELGLMKLKNRFRDPLESDTIVVHAILSDHKISSYRLVQPSKYSKFKRASQSERKPSKLDRFEKEGPGRKDSQRDAGGSVTIQEESIIEKGKKFRPKTLSEIIVENQIEKTRKLILKAERAQLKIQQRKKEWEELYKSKPGDDYEDPKDLQAIKEAQVYMGDFNLKTAPDYKIPEHMRINAAKKEEELGHLDSLVHGNKRHMNKCILSLRDLKVAVVEEIQCLVQELKNIQSTLHISKHIPIPKIPQIHPEEVPEKRFQYDEETLLNFKQQQMKSKDEKSPGVEQTGSGGPVGGFLKLSSRKDGDLTTRDSISRSSKASTFSLDIPKCLEFEKAEPTDVELEIMKRDEIKHVYMQQYLVNRIKELVVTFDAELRLLRHQKLKLDTQMKLSDLHHVTLFQEILLLKNFEKQENILQERVNSLDKEEQYMQWKINETLKEMEEKKNEITKLQEQEKALYAGFQAAIGENNKFANFLMKVLKKKIKRVKKKEVEGDADEDEESEESSEEESSLESDEDESESEDEVFDDSICPTNCDVALFELALHLREKRLDIEEALVEEKKIVDNLKKEYDTLSKKVKIVATNLNAAEEALEAYQREKQQRLNELLVVIPLKLHQIEYVVFGEIPSDLSGTLVFSNHALRRLQERIHELQEENSKQQKLNKEWRERRKQLIREKREMTKTIHKMEETVRQLMISKFGRVVNLEALQTLSVNTTLEELKIRKLRKELANAKEMKMWEEKIAQMRWELMMKTKEHTRKLYQMNDLCIEKKKLDSRLNTLQNQQGNAFQGPREADVVAREEVTELIQLQAERISALKEEIALLRRKGSLILPPIQSPREKEIQPADL

SEQ ID NO: 301771 - DNA, 10259 bp, Artificial Sequence
  derived and/or modified sequence
gagtaaacggaggcctccggcagacgctgtgaagagaggagccgcggcggtcagtaccttcgaggaaatgaaggaaccagatgatcaggatactgatggggagaaatcagttacatcaaagagtgatgggaagaagtctctgaggtcttctaaatcagaatcaagatctcctgttcaagaagataacacatttttagaagatgacacagatgaaacatttaccaaaggggaaggatcatatttagaagaagactcagatgaggaacgtttggaaggaagtttgagttcatttcagtatggtgatttgcaaagcactacagtacctcagcaaacccctgctccagctgtggaagaagcagaggaggaagttaagaagaaaatatcagagagcttcttctatgattatatggagcttgcttcgatgccttttgtgactctggattcaaacataccactggatcttctcacacttgtacattcttttggttatgactgtagaaagcgagccaacctacaacttctggacgacagtatcgccatatacatagctgggaaccaactgatctttctgaatttgaaaaccaaggaacagatctacctgcgaagtagcagtggtgaaggaattggcgtcattggggttcatccacataaaacttatttcacagtagctgaaaaagggagttttccagatattatcatctatgaatatccttctctgagaccatacagagtccttcgagatgggactgagaagggatatgcttatgtggactttaactacagcggtaacttgctggcctctgttggtagtaaccctgactacacactgactatctggaactggaaagaagaacaacccatactaaggacaaaagctttttctcaggaagtttttaaggttactttcaatcctgataaggaagagcagcttactacatcgggatcaggccacatcaagttctgggaaatggcttttacgttcaccggtctcaagctgcagggatcactaggtcgatttggcaaaacaatcactactgatatagaaggctacatggagctcccagatgggaaggtgctctcagggtcagaatggggcaacatgctgctttgggaaggtggtctgatcaaagtggagctctgtcgagggacaagcaagtcatgtcacaatggtcccattaaccagataatgctgtatgagggtgaagttatcactgttgggtcagatggatatgttaggatatgggattttgagacaatagacactgctgatgtaatagatgagactggattgttggagattgagcctattaatgaacttcaagtagacaagaatgtgaatctcttctctatgataaaaatgaatgaaactggaaataacttttggttggctcaggatgccaatggagccatatggaagcttgaccttagtttttcaaatattacccaggacccagaatgcctcttctccttccattctggagctattgaagccgtggctgtttctcctctcacttatctcatggccacaactgccttggactgctctgttcgaatctatgattttgctagcaaaactcctttggcccagatgaaattcaaacaaggaggtactgcccttgtttgggtaccccgaatggtaaacttcactggagcacaaattattgtaggatttgaagatggagttgttcgaattcttgaactttatgatccaaaagggctcacgatttttgcgggacggaagaaaattttggatgctgatattcagttgaaacaggttttcaaaccccatactgcttgtgtcactgctttagcttatgaacgtgatggggaaattctagccacagggagtaaagatcaaactgttttcttctttgaagtggaaagggattataagccgattggttatattaatactcctggacctgtgtgtcagttaatgtggtctcccatgtctcatcctgaaagtactttactaattatctgtgaaaatggctatattcttgaagctccacttccaaccataaagcaagaagaggatgatcatgatgtagtctcctatgaaatcaaagacatgtgcataaaatgtttccatttttcaagtgtcaaatctaagattctgagattaatagaaattgaaaagagggagagacaaagggagttgaaggagaaaataagggaagaaaggaggaacaagctagcagcagagatgggagaagatggagaaaaagaatttcaggaggaggaagaggagaaagaggaggaggaggaggaagaagagccattacctgaaatatttattccgtcaaccccctctcccatcctctgtggattttactcagagccagggaagttctgggtttctttgggtggctatgattctggttttctatatcactgtgagttccccccttgtgatgaaagcagtgatttcaaagaacaaaaagatgaacctattgatgtccgttatcttgcggatacagaggacaatcccatccaaactatcactttcaacattaacaaagttatgatgttttgtggaatgaaaaatggagcaattcgagtctatgtcctaaatcaaaatgatccttcattgaccagtttggtggactactggcacttcaatatgcatgacaataattatggatgtattaaaagtattgctaatagctttgatgatcgtttcttggtgactgctggagcagatggcaatatctttgttttcaacattttttctgaatttatgctaaggaaagacatgaaggccaaagttccatctcccaggtttggaattgaaacagagccaattccagaagacattgaagatcccaaagcctacagtatcgagaatgctaggagaaaaagagaacatgacaagttaatgaaagaagtgggagaaataaaggcacggaagagagagcaaatcaaagctttgaggagtgaattttgtaatctattagaaatgaatgaaaaattaccaaagcatatgcagtttaaacgaacagattttgatgtagattcccaaatccgtgctgagatgcacagaaaaacagctttcaaaattcaacaagtggaaaaggaattagcttgggaaaaagagaaacatgaactcggcctaatgaagctaaagaatcgatttcgagatccactggaaagtgatactattgtggttcatgccatactgagtgaccacaagatatcctcttacaggctggtgcagccctctaagtactccaaattcaaacgagctagtcaatcagagagaaaaccaagcaaattggacaggtttgaaaaagagggacctggaagaaaggacagccagagagatgcaggtgggagtgttaccatacaagaagaatcaataatagaaaaagggaagaaatttcggcctaaaaccctaagtgaaatcatcgtggaaaatcaaattgagaaaacgagaaaacttatattaaaagctgaaagggcacaactaaagattcaacagcgaaaaaaagaatgggaggaactatacaagagtaaacctggtgatgactatgaagatcccaaagatcttcaagccatcaaagaagcccaggtgtatatgggagatttcaatctgaagacagccccagactacaagatacctgagcacatgagaataaatgctgccaagaaggaagaggaactaggacacctagattctttggtccatggaaataaaaggcacatgaacaagtgcattctctctcttagagaccttaaagtggctgttgttgaggaaatacagtgcctggtacaagaactgaagaacattcagtcgactcttcacatatccaagcacatacccattcccaaaattcctcagatacacccagaagaagttccagaaaagagatttcagtatgatgaagaaactctcctaaattttaagcaacagcaaatgaaaagtaaagatgaaaagtcccccggagtggaacagacagggtctggaggcccagttggaggattcctcaaactctcttctagaaaggatggggatttgacaacccgtgattcaatatctagatcatcaaaggcatcaacattcagcctagatataccaaagtgtttggaatttgaaaaagcagagccaacggatgtggagctggaaattatgaagagagacgagattaaacacgtgtacatgcaacagtatttggtcaacaggatcaaagaactggttgtcactttcgatgcagaactccgtctccttagacatcagaaactaaaactagatactcagatgaaattatctgacctgcaccatgtcaccttatttcaagaaatacttctcctgaagaattttgaaaaacaggagaacatacttcaagaacgtgttaattccttagacaaagaggaacagtacatgcaatggaaaataaatgaaactcttaaagagatggaagagaaaaagaatgaaatcaccaaactccaggagcaagaaaaggcactctatgctggttttcaagcagccattggagaaaacaataaatttgcaaacttcctcatgaaggtcctaaagaagaagattaaacgggtaaagaaaaaagaagttgaaggagatgctgatgaagatgaggagagtgaggaatcaagtgaagaagaatctagcttggagagtgatgaagatgagtctgaatcagaagatgaggtttttgatgattctatttgcccaacaaattgtgatgtggctctttttgagctggcccttcaccttcgagagaaaaggctggacattgaggaggctttagttgaagaaaagaaaattgttgataacctcaaaaaggaatatgatacattgtcaaaaaaagtgaaaattgtggcaactaatctgaatgcagcagaggaggccctggaggcttatcagcgagagaagcagcagcggctgaatgaactgctagttgtgattccgctcaagctccaccagatagagtatgtggtatttggagaaatacctagcgatctttctggtactttggtcttctctaaccatgccttgagacggctgcaagaacgaatccatgagctccaggaggaaaattccaagcagcaaaaacttaacaaagaatggagagagagacgtaaacagctcatccgagaaaagagagaaatgacaaaaaccatacacaaaatggaggaaacagtccggcagctcatgatcagcaagtttggccgtgtggtaaatctagaagcccttcaaacgctttctgttaatacaacacttgaagaactgaagatcagaaaacttcgaaaggagctagcaaatgcgaaagagatgaagatgtgggaggaaaagattgctcaaatgcgatgggaactgatgatgaagacaaaagaacacaccagaaagctttatcagatgaatgatttgtgtattgaaaagaagaaacttgattctcggttgaatacactacagaatcagcagggcaatgccttccagggccctcgggaagcagatgttgtggcaagagaggaggtcactgaattgatccaactccaggcggaaaggatttcggccttaaaggaggagattgctcttttgcgtaggaaaggcagtcttatcctcccacccattcagtctccacgagagaaagagatacagcccgcagacctttgagtttgctattttctcaaacccatacaagatttctgacataactcactggaagttctgtctcctcatcacctccaacaatcttattactttaaactgaactcgcctgaaagtgtaaaaccagatccagtcacgttaagtcactttaagaatctctctacaatttggttatcttagaactgactgcagcacccaacctctgttatgaaactgaatcattttagatgtttcgaacctactagattgaatatgaagtctcggaaggctgtgtttcatgattgcagcaaatcacctgtaatatattttgttttaggaaaatttgatttgggggtatcctgaatttttagcccttggcaagaaaaactatcattcagcaattcatgagaaaactttgttttcttgatccttagaaaataaacttagatgttattaagtgttctctgagaggatgcaggagaaaaggacattttgtcagctatatcttagaatagaaatgcaaatttcagttttggcattgttgacttcataaagcagtgttttgagggctcaggattcaggaaatacaaacagacatggcagagcagtttgctttgggttggcagaaagcaggaaaataaccagccttcttggattgcccacagtttttgtagactcctcagttctgagtggagcagaggggcatgcttaataaaacagtcaataaagaggcttttctttaaagatttctgcaactccgtcagaattctaagttttccccatagtttctcatgtcccctgccattttctttcaggttttacttgggccatttgctggttttgatatagatgaggagataatgaaatagatttactagagatcatctttaacaatcacctttgattatgcataacattttaaactaattgaagagtatccttttggtttgggggtaagtgctcattgaagttcatggctataaccattgcaggataatctcactgacatttggaatcctgttagtaacagagcatagctctttagattaagagctctgtattaacgagctactcattgaggctgttccaggataagctggtcactgagaagggcgggtgaagaaaggaacattgcataaatgtagaagggaactcagcaatgccaagtcttcctcacctgtgattagcctgctaatgtgccccccaaaattacagacaggtcttgctttctttgtacatcagcatattcttagaggtggccacttggcctattgtcttcctaagattccttcatattcctatttaagaggtcagaataccttattgtttgcacttgtcaccattaatttctgatgtagtcacttctctactggagagcacccacttttttttttaaatcactttctgtgttgtatatcctaagccatgtgtgcctttcaagtatttttaaaaatatgctagtcatagccctgagtgtcttatttattgcggtaaaaaattacccccaaacttagcttgaaacaacaaacttgtgatctcacccaggagtgagagggtttctgaggtccaggaatctggggacagcttggccgggtgttctggctcagggtctttcgtggagttgcagtcacactaggagctggggctgcagccatctgaagcttggctggagctggaggggctattagcaaattcactcccttggccattaggcagggcttcagttcctcgccatgtgggcctctccatagggccgcttgggatatgacttctcccagagcaagtgatccaagagtgagggagacagcaagagagaatgatgtatacaagagccacagtcttttacagcccaagctcagaagtgacatagcgtcactattgtcatatgggtcacaggctgaccctgtgtgatgtgggaggggactgaacagggtgtgaatgccaggtgggggtcaccggggccttcgtgggagctggcagccacaagaagcagctgcctggagagagtggctggtctctgagaaaggtcttgaggcgataccatccccttggtaattgtagagaatcaggagaagttacgttatcttcctgggcctcattttattatctgacaaatgaaggattggtagaatgggttccttcccattctgagattctgattctgattgcagcaagaatggacctacagtctacagaagagccacatcaggacttgctgtgcatttcaactgagaggaaagctaatcgggataattattcccaaactgagctggactaaatcactagttaattctacaatattcagggcttcattccgcatgtttgggaattgacgacagttaacactgaattactttattttgaattggacaaaatatgttgatagctttaggttcatttcaacttgattccaggcttagtcttaaatctgtagttaagttagagcatctgagtctttgggaagttaagcttcaaacacaagtagaccagcagggtgtggcatgggcagggtggctgggaagctatcctgctcctggcacacttccctgccttctgctgtgctcccagaggagcagcctcacctctgagggtaaggccaaaaatcagcctacactgagttacttgtgggtcaattgttcatataacttggctcttctgaactgtcatccatagtatcaccgatgatcaatctcagcattggaagaaaaagaaaccacagagtccagcccctctgtcacaacttcagagtaaaggagttgctcatgcctgccagccagcctgtcccaccacagcgggctccccagcttagggaggtctgtgagccatgtgctaaatttctctttagagctaaatccattgagtgctatgattccagtgctgtgcagaaagcagatgtttcacctatcacttcagaaaagttcaccagacttcattttgacagctaccttagatcatcaaggagaaaaaggaaaaaatgtaaaaaccagtggggctagaaggtgagttacagctcagattggggggcctctggatagcaaagcaatgactgagagcgtcagccctacccaccccagaagtgagctctgggccgtgatgccaggttgtctgaaatcacagtatcttattttttctcttctcttccctgctctgcttctcatttcctaacatttacctgttccttacagtccttccttttaaataatatttttaaaatactgctttcctgaaaaccatgctgcacttccacatgaagttctctctgacgttgagcttgatggaaaaaggatgcagaagtcaggaatagcaggtgctatacttattttggccagcagaggatgcacttgccctaaacagtcagagtgactcttccctaggaccctgtttatcaaattcttcatgtttaaaagccagggtctggccccccacttaacgagattgtctcaagtggcatttcatctgtaactcaattttacagaaatctagaaaatacaggctccccccaccctctccagccccaaaacacaaagcgtagtaaggctttcattgcaagcatcagtctccatctaattccacttccacatataaagattttaaaatttcaattaaaaaagaatctatggttgatcctttggttggacaacagtaagtaaatgttgattttaaactagtgagtcaactactctggcaatgttggtgtatctttggaaagaagggaagtgaatttattatgcaccatatgtccatgtgtggcacagcacttagctaaacagtattttggagaaaatatttggtcttcaacacacacctatataaaaaagattagttctatttcttcaatatgacctaaacttcatctcaagtccagttggtaagagaactatgaacctgtttttcctggtctgttgtacaacggttcccttgtggactaaacggtaatgtgttctgcatgaatccaagcacaactgacattcactgttttaaaaaacaaaaaagagaaacatttactacctttttcagatctcatttctgatggacctgaaaatattgtaagtgggtattttcttcaaatactcagagactgaattctaacatgtaaagaaaatgctgactcacacatgactcagtttgaaggttacagggaagactaaacatttatttagaagttacagtgtttgtttttacagagatatgttgccacggattattgattctggaaggttttttaatgctcatagtgctgtacacatcttggtctgttctcatgggcatcttaggaaaatgtttcccgtagcaccggatccagccatctgtgtgggtgtctccaggctgtgataccgtgccccttgctgttccctcatgctcgtgatgaaccatgtgcctgggatccttcctcttgccagcttatctgtgggcctcctgcagcctcgcctgccactgcagaggccccaggttaggagtctgtcccgcgccagcctgtgcggtgctttcctgggtgactcctgttaggtggcagcttctttattttccctctccaacctcaacgggtaggactccttatgtctctccagaattataaaacatatacatttatttacaagtgcataaatatataaatatggctataatagaaaaataaataccaattttctctgtc

SEQ ID NO: 301772 - protein, 982 aa, Artificial Sequence
  derived and/or modified sequence
MKEPDDQDTDGEKSVTSKSDGKKSLRSSKSESRSPVQEDNTFLEDDTDETFTKGEGSYLEEDSDEERLEGSLSSFQYGDLQSTTVPQQTPAPAVEEAEEEVKKKISESFFYDYMELASMPFVTLDSNIPLDLLTLVHSFGYDCRKRANLQLLDDSIAIYIAGNQLIFLNLKTKEQIYLRSSSGEGIGVIGVHPHKTYFTVAEKGSFPDIIIYEYPSLRPYRVLRDGTEKGYAYVDFNYSGNLLASVGSNPDYTLTIWNWKEEQPILRTKAFSQEVFKVTFNPDKEEQLTTSGSGHIKFWEMAFTFTGLKLQGSLGRFGKTITTDIEGYMELPDGKVLSGSEWGNMLLWEGGLIKVELCRGTSKSCHNGPINQIMLYEGEVITVGSDGYVRIWDFETIDTADVIDETGLLEIEPINELQVDKNVNLFSMIKMNETGNNFWLAQDANGAIWKLDLSFSNITQDPECLFSFHSGAIEAVAVSPLTYLMATTALDCSVRIYDFASKTPLAQMKFKQGGTALVWVPRMVNFTGAQIIVGFEDGVVRILELYDPKGLTIFAGRKKILDADIQLKQVFKPHTACVTALAYERDGEILATGSKDQTVFFFEVERDYKPIGYINTPGPVCQLMWSPMSHPESTLLIICENGYILEAPLPTIKQEEDDHDVVSYEIKDMCIKCFHFSSVKSKILRLIEIEKRERQRELKEKIREERRNKLAAEMGEDGEKEFQEEEEEKEEEEEEEEPLPEIFIPSTPSPILCGFYSEPGKFWVSLGGYDSGFLYHCEFPPCDESSDFKEQKDEPIDVRYLADTEDNPIQTITFNINKVMMFCGMKNGAIRVYVLNQNDPSLTSLVDYWHFNMHDNNYGCIKSIANSFDDRFLVTAGADGNIFVFNIFSEFMLRKDMKAKVPSPRFGIETEPIPEDIEDPKAYSIENARRKREHDKLMKEVGEIKARKREQIKALRSEFCNLLEMNEKLPKHMQFKRTVSLI

SEQ ID NO: 301773 - protein, 84 aa, Artificial Sequence
  derived and/or modified sequence
MKEPDDQDTDGEKSVTSKSDGKKSLRSSKSESRSPVQEDNTFLEDDTDETFTKGEGSYLEEDSDEERLEGSLSSFQYGDLQSTT

SEQ ID NO: 301774 - DNA, 5565 bp, Artificial Sequence
  derived and/or modified sequence
atgaaggagcccgacgaccaggacaccgacggcgagaagagcgtgaccagcaagagcgacggcaagaagagcctgagaagcagcaagagcgagagcagaagccccgtgcaggaggacaacaccttcctggaggacgacaccgacgagaccttcaccaagggcgagggcagctacctggaggaggacagcgacgaggagagactggagggcagcctgagcagcttccagtacggcgacctgcagagcaccaccgtgccccagcagacccccgcccccgccgtggaggaggccgaggaggaggtgaagaagaagatcagcgagagcttcttctacgactacatggagctggccagcatgcccttcgtgaccctggacagcaacatccccctggacctgctgaccctggtgcacagcttcggctacgactgcagaaagagagccaacctgcagctgctggacgacagcatcgccatctacatcgccggcaaccagctgatcttcctgaacctgaagaccaaggagcagatctacctgagaagcagcagcggcgagggcatcggcgtgatcggcgtgcacccccacaagacctacttcaccgtggccgagaagggcagcttccccgacatcatcatctacgagtaccccagcctgagaccctacagagtgctgagagacggcaccgagaagggctacgcctacgtggacttcaactacagcggcaacctgctggccagcgtgggcagcaaccccgactacaccctgaccatctggaactggaaggaggagcagcccatcctgagaaccaaggccttcagccaggaggtgttcaaggtgaccttcaaccccgacaaggaggagcagctgaccaccagcggcagcggccacatcaagttctgggagatggccttcaccttcaccggcctgaagctgcagggcagcctgggcagattcggcaagaccatcaccaccgacatcgagggctacatggagctgcccgacggcaaggtgctgagcggcagcgagtggggcaacatgctgctgtgggagggcggcctgatcaaggtggagctgtgcagaggcaccagcaagagctgccacaacggccccatcaaccagatcatgctgtacgagggcgaggtgatcaccgtgggcagcgacggctacgtgagaatctgggacttcgagaccatcgacaccgccgacgtgatcgacgagaccggcctgctggagatcgagcccatcaacgagctgcaggtggacaagaacgtgaacctgttcagcatgatcaagatgaacgagaccggcaacaacttctggctggcccaggacgccaacggcgccatctggaagctggacctgagcttcagcaacatcacccaggaccccgagtgcctgttcagcttccacagcggcgccatcgaggccgtggccgtgagccccctgacctacctgatggccaccaccgccctggactgcagcgtgagaatctacgacttcgccagcaagacccccctggcccagatgaagttcaagcagggcggcaccgccctggtgtgggtgcccagaatggtgaacttcaccggcgcccagatcatcgtgggcttcgaggacggcgtggtgagaatcctggagctgtacgaccccaagggcctgaccatcttcgccggcagaaagaagatcctggacgccgacatccagctgaagcaggtgttcaagccccacaccgcctgcgtgaccgccctggcctacgagagagacggcgagatcctggccaccggcagcaaggaccagaccgtgttcttcttcgaggtggagagagactacaagcccatcggctacatcaacacccccggccccgtgtgccagctgatgtggagccccatgagccaccccgagagcaccctgctgatcatctgcgagaacggctacatcctggaggcccccctgcccaccatcaagcaggaggaggacgaccacgacgtggtgagctacgagatcaaggacatgtgcatcaagtgcttccacttcagcagcgtgaagagcaagatcctgagactgatcgagatcgagaagagagagagacagagagagctgaaggagaagatcagagaggagagaagaaacaagctggccgccgagatgggcgaggacggcgagaaggagttccaggaggaggaggaggagaaggaggaggaggaggaggaggaggagcccctgcccgagatcttcatccccagcacccccagccccatcctgtgcggcttctacagcgagcccggcaagttctgggtgagcctgggcggctacgacagcggcttcctgtaccactgcgagttccccccctgcgacgagagcagcgacttcaaggagcagaaggacgagcccatcgacgtgagatacctggccgacaccgaggacaaccccatccagaccatcaccttcaacatcaacaaggtgatgatgttctgcggcatgaagaacggcgccatcagagtgtacgtgctgaaccagaacgaccccagcctgaccagcctggtggactactggcacttcaacatgcacgacaacaactacggctgcatcaagagcatcgccaacagcttcgacgacagattcctggtgaccgccggcgccgacggcaacatcttcgtgttcaacatcttcagcgagttcatgctgagaaaggacatgaaggccaaggtgcccagccccagattcggcatcgagaccgagcccatccccgaggacatcgaggaccccaaggcctacagcatcgagaacgccagaagaaagagagagcacgacaagctgatgaaggaggtgggcgagatcaaggccagaaagagagagcagatcaaggccctgagaagcgagttctgcaacctgctggagatgaacgagaagctgcccaagcacatgcagttcaagagaaccgacttcgacgtggacagccagatcagagccgagatgcacagaaagaccgccttcaagatccagcaggtggagaaggagctggcctgggagaaggagaagcacgagctgggcctgatgaagctgaagaacagattcagagaccccctggagagcgacaccatcgtggtgcacgccatcctgagcgaccacaagatcagcagctacagactggtgcagcccagcaagtacagcaagttcaagagagccagccagagcgagagaaagcccagcaagctggacagattcgagaaggagggccccggcagaaaggacagccagagagacgccggcggcagcgtgaccatccaggaggagagcatcatcgagaagggcaagaagttcagacccaagaccctgagcgagatcatcgtggagaaccagatcgagaagaccagaaagctgatcctgaaggccgagagagcccagctgaagatccagcagagaaagaaggagtgggaggagctgtacaagagcaagcccggcgacgactacgaggaccccaaggacctgcaggccatcaaggaggcccaggtgtacatgggcgacttcaacctgaagaccgcccccgactacaagatccccgagcacatgagaatcaacgccgccaagaaggaggaggagctgggccacctggacagcctggtgcacggcaacaagagacacatgaacaagtgcatcctgagcctgagagacctgaaggtggccgtggtggaggagatccagtgcctggtgcaggagctgaagaacatccagagcaccctgcacatcagcaagcacatccccatccccaagatcccccagatccaccccgaggaggtgcccgagaagagattccagtacgacgaggagaccctgctgaacttcaagcagcagcagatgaagagcaaggacgagaagagccccggcgtggagcagaccggcagcggcggccccgtgggcggcttcctgaagctgagcagcagaaaggacggcgacctgaccaccagagacagcatcagcagaagcagcaaggccagcaccttcagcctggacatccccaagtgcctggagttcgagaaggccgagcccaccgacgtggagctggagatcatgaagagagacgagatcaagcacgtgtacatgcagcagtacctggtgaacagaatcaaggagctggtggtgaccttcgacgccgagctgagactgctgagacaccagaagctgaagctggacacccagatgaagctgagcgacctgcaccacgtgaccctgttccaggagatcctgctgctgaagaacttcgagaagcaggagaacatcctgcaggagagagtgaacagcctggacaaggaggagcagtacatgcagtggaagatcaacgagaccctgaaggagatggaggagaagaagaacgagatcaccaagctgcaggagcaggagaaggccctgtacgccggcttccaggccgccatcggcgagaacaacaagttcgccaacttcctgatgaaggtgctgaagaagaagatcaagagagtgaagaagaaggaggtggagggcgacgccgacgaggacgaggagagcgaggagagcagcgaggaggagagcagcctggagagcgacgaggacgagagcgagagcgaggacgaggtgttcgacgacagcatctgccccaccaactgcgacgtggccctgttcgagctggccctgcacctgagagagaagagactggacatcgaggaggccctggtggaggagaagaagatcgtggacaacctgaagaaggagtacgacaccctgagcaagaaggtgaagatcgtggccaccaacctgaacgccgccgaggaggccctggaggcctaccagagagagaagcagcagagactgaacgagctgctggtggtgatccccctgaagctgcaccagatcgagtacgtggtgttcggcgagatccccagcgacctgagcggcaccctggtgttcagcaaccacgccctgagaagactgcaggagagaatccacgagctgcaggaggagaacagcaagcagcagaagctgaacaaggagtggagagagagaagaaagcagctgatcagagagaagagagagatgaccaagaccatccacaagatggaggagaccgtgagacagctgatgatcagcaagttcggcagagtggtgaacctggaggccctgcagaccctgagcgtgaacaccaccctggaggagctgaagatcagaaagctgagaaaggagctggccaacgccaaggagatgaagatgtgggaggagaagatcgcccagatgagatgggagctgatgatgaagaccaaggagcacaccagaaagctgtaccagatgaacgacctgtgcatcgagaagaagaagctggacagcagactgaacaccctgcagaaccagcagggcaacgccttccagggccccagagaggccgacgtggtggccagagaggaggtgaccgagctgatccagctgcaggccgagagaatcagcgccctgaaggaggagatcgccctgctgagaagaaagggcagcctgatcctgccccccatccagagccccagagagaaggagatccagcccgccgacctgtag

SEQ ID NO: 301775 - DNA, 5565 bp, Artificial Sequence
  derived and/or modified sequence
atgaaggagccagatgaccaggataccgatggagaaaagtccgtcactagcaagagtgacggtaaaaagtcactgcgctcaagcaaatcggagtccagatctccagtccaggaagacaacacattcctcgaggatgacacggacgagaccttcactaaaggagaagggagttatttggaggaggatagtgatgaagaacggctcgaaggctccctgtcgtcctttcagtatggcgatctgcagtcaaccaccgtgccgcagcagacacccgcccccgccgtagaggaggctgaggaggaagttaagaagaagatttctgaatcttttttctacgattatatggagctcgcttcaatgcctttcgtcacgctggactccaatatccccctggacctactcaccctcgtgcactccttcggatacgactgcaggaaacgcgctaatctgcaactcctcgacgacagcatcgcaatatacatcgctggaaaccagctgattttcctgaacctgaagaccaaggaacagatctatctgcggtcctccagcggcgagggaataggcgtaattggagtccacccacacaagacatacttcacagtcgccgagaagggatcctttcctgatataatcatatacgaatatccatctctccgtccttaccgtgttctacgggatggcactgagaaaggctacgcctacgtggatttcaattattctgggaacttactagcatcagtcggaagtaatccagattacaccttgaccatttggaattggaaagaagaacagcccatcctaaggacaaaagccttttcccaggaagtgttcaaagtgacgtttaaccctgataaggaggaacagctcactacgtctgggagcgggcacatcaagttctgggaaatggcgttcacatttacagggttgaagctgcagggcagtcttggcagatttggtaaaaccatcactaccgacatcgagggatacatggagctccccgacggcaaggttctgtctggcagcgagtggggcaatatgctgctgtgggagggaggcctaatcaaggtggaactgtgccgaggcacctccaagagttgccacaatgggccaatcaatcagataatgctgtacgagggcgaagtaattacggtcgggagcgatggttacgtccggatctgggatttcgagacgatcgataccgctgatgttatcgacgagacaggcctgctggaaatcgagccgatcaatgaactacaggtggataagaacgttaacctcttctcaatgataaagatgaacgagactggcaacaatttttggctggcccaggacgcaaatggggcaatctggaagctggatctgagtttcagcaatatcacccaggatcccgagtgtctgttcagcttccatagcggggctatcgaagctgtggccgttagcccacttacataccttatggctacaacagctctagactgtagtgtgagaatctacgactttgcctctaagactccactggcacagatgaagtttaaacagggtggcacggcactcgtatgggtgcccaggatggtaaatttcaccggtgcacagataatcgtcggcttcgaagacggcgtggtacgaatcttggagctttacgatcccaaggggttaacaatattcgccgggaggaaaaagatcctcgatgctgacatccagttgaaacaggtgtttaaacctcataccgcctgtgtcactgccctggcttatgagcgcgatggtgagatcctcgctaccggatctaaggatcagacagtgttcttttttgaagtggaaagagactacaaaccgatcgggtacattaatactcccggaccagtctgccagctaatgtggagtcctatgtcccacccagaatctacgttgttgattatatgcgaaaacgggtatatcttagaagctcccctccctaccattaaacaagaagaagacgaccatgatgttgtcagctatgagattaaggacatgtgcatcaaatgtttccacttttccagcgtcaagtccaagattctgagactcatcgagatcgagaagagagagaggcagcgcgagctcaaggaaaagatacgcgaggaaaggagaaataagcttgccgctgagatgggtgaagacggcgaaaaggagtttcaggaagaggaggaagagaaggaagaggaggaagaggaggaggaaccactgcccgagatcttcatcccgtcaacaccgtctccgatactgtgcggtttttattctgaacctgggaaattttgggtgtcgctgggcggttatgacagcggtttcctataccattgtgagtttccaccatgcgacgagagctctgatttcaaggagcagaaagacgagcccatcgatgttcggtatttggctgatacggaggataatccaatccagactatcactttcaacatcaacaaggtgatgatgttctgtggtatgaagaatggtgcgatccgggtgtacgtgctgaaccagaacgatccctcgctcacatccctggtcgattactggcactttaacatgcacgataataattatggttgcatcaagtccatagccaatagttttgacgaccgctttctggtgacagccggggccgatggtaatatcttcgtttttaatattttctcagaatttatgttgcgcaaggatatgaaagccaaggtgcctagccctcggttcggtatcgaaaccgaacctatccctgaagacatcgaagacccaaaagcttattccatagaaaacgcacggcgaaagcgcgagcacgacaaattaatgaaggaggtgggcgagattaaagcccggaaacgagaacagataaaggccctaaggagtgaattctgcaacctgcttgagatgaacgaaaaactgccaaaacacatgcaatttaaacgcacagatttcgacgttgatagccagatacgtgcggaaatgcatagaaagaccgcttttaagattcaacaggtggaaaaagagttggcgtgggaaaaggagaagcacgagctaggtctaatgaagttgaagaaccggtttagggatcccctcgaaagcgacacaattgtggttcatgccatactgtcagatcacaaaatctccagctatcgacttgtgcagccctcgaaatacagtaagtttaaaagagcctcacaatctgagcgaaaacccagtaaactggatcgctttgaaaaggaaggacccggaaggaaggactcgcaacgcgatgccggcggcagtgtgactatccaagaggagagcataatcgaaaaaggcaagaaatttcgccctaaaacattgtccgagattatagtagaaaaccagattgaaaagacccggaagctcattctgaaggctgagcgcgcccagctgaagattcagcagaggaagaaggaatgggaagaactatataagtccaagcccggagacgactatgaggaccctaaagacctgcaggccatcaaagaagctcaggtatacatgggagatttcaacctgaagacagccccagactataagatccctgaacacatgcgaatcaacgcagcgaaaaaggaggaggagttggggcacctggatagcctagttcacggtaataaaagacacatgaacaaatgtattctcagcctcagagaccttaaggtagcagtggtggaggaaatccaatgcctagtacaggagttaaaaaatatccagtctactcttcacatctccaagcatatacccatacctaagatcccacaaatccacccagaagaagtgccggagaagcgtttccagtatgacgaagagacattactgaacttcaaacaacaacagatgaaatccaaagatgagaagtcgccgggcgtggagcagaccggctctgggggccctgtcggcggatttctcaagctgtcctcacgtaaagacggagatctaaccacacgtgacagtattagtcgttccagtaaagccagtacctttagcctcgatatcccgaaatgcctggagttcgagaaagcagagcccaccgacgtagaattggagattatgaagcgggatgaaatcaaacatgtctacatgcagcagtacctggttaacagaatcaaggagctggtagtaacctttgacgcggagctccggttgctgaggcaccagaaactcaagctcgacactcagatgaagctgtccgaccttcatcatgtcaccctctttcaggagatcctgttactgaagaatttcgaaaagcaggagaatatcttacaggaaagggttaatagcctcgataaggaggagcagtacatgcagtggaaaattaacgagacactcaaggaaatggaagaaaaaaagaatgagattaccaagctgcaagagcaggagaaagctctatatgcaggctttcaggccgccatcggtgaaaataacaagtttgcgaattttctcatgaaagtccttaagaagaaaataaagagagtgaagaagaaggaagtggaaggagatgccgacgaagacgaggagagcgaggagagctctgaagaggagagcagcctggagtctgacgaggatgaatcagagtcagaggacgaggtatttgacgactcaatttgtcctaccaactgcgatgtggcgttatttgagcttgcattgcacttgcgcgagaagagactcgatattgaggaagccctagtcgaggaaaaaaaaatcgtggacaacctaaaaaaggaatacgatactctgtcaaagaaggtgaaaattgtggccactaatttgaacgctgctgaagaagctctggaggcgtaccagcgcgaaaagcaacaaagactcaatgaattgctggttgtcattcctctgaagctgcaccagatcgaatacgtggttttcggagagattccctccgacctgtctggcaccctggtgttctccaaccatgctttgagacggctacaggaaagaattcatgagctgcaggaagaaaacagcaagcagcagaagctgaacaaagaatggagagaacggcggaaacagctcattcgtgagaagagggagatgacaaaaactatccacaaaatggaggagactgtgcggcaactgatgatcagcaagttcgggcgggttgtgaatctcgaagcattacagaccctgagcgtgaatacaactctggaggagctgaaaatacgcaagcttcgcaaagagctggcaaacgcgaaagaaatgaaaatgtgggaagaaaaaatcgcccagatgaggtgggaactcatgatgaaaacgaaagagcatacaaggaaactgtatcagatgaatgatctgtgtatagagaagaaaaagctggatagcaggctcaataccttgcagaaccagcagggcaatgccttccagggtccccgggaagctgacgtggttgctcgtgaggaggtgactgagctgattcagctccaggcggagcgcatatccgccctcaaagaggaaatcgccctactcagaagaaagggtagcctgattctccctcctattcagagcccaagagagaaggaaattcagccggccgacctatag

SEQ ID NO: 301776 - DNA, 5565 bp, Artificial Sequence
  derived and/or modified sequence
atgaaggagccagatgaccaggacacagatggagagaagtctgtgaccagcaagagtgatggcaagaagagcctgcggagcagcaagtctgagagccgcagccctgtgcaggaggacaacaccttcctggaggatgacacagatgagaccttcaccaagggggagggcagctacctggaggaggacagtgatgaggagcggctggagggcagcctgagcagcttccagtatggagacctgcagagcaccaccgtgccccagcagaccccagccccagctgtggaggaggccgaggaggaggtgaagaagaagatcagcgagagcttcttctatgactacatggagctggcctccatgccctttgtgaccctggacagcaacatccccctggacctgctgaccctggtgcacagctttggctatgactgcaggaagagggccaacctgcagctgctggatgacagcatcgccatctacatcgccggcaaccagctgatcttcctgaacctgaagaccaaggagcagatctacctgcggagcagcagcggggagggcatcggcgtgattggagtgcacccccacaagacctacttcaccgtggccgagaagggcagcttcccagacatcatcatctatgagtaccccagcctgcggccctacagagtgctgagagatggaacagagaagggctacgcctacgtggacttcaactacagcggcaacctgctggcctctgtgggcagcaacccagactacaccctgaccatctggaactggaaggaggagcagcccatcctgcggaccaaggccttcagccaggaggtgttcaaggtgaccttcaacccagacaaggaggagcagctgaccaccagcggcagcggccacatcaagttctgggagatggccttcaccttcaccggcctgaagctgcagggcagcctgggccgctttgggaagaccatcaccacagacatcgagggctacatggagctgcctgatggcaaggtgctgagcggcagcgagtggggcaacatgctgctgtgggagggcggcctcatcaaggtggagctgtgccggggcaccagcaagagctgccacaacggccccatcaaccagatcatgctgtatgaaggagaggtgatcaccgtgggcagtgatggctacgtgcgcatctgggactttgagaccatcgacacagcagatgtgattgatgagaccggcctgctggagattgagcccatcaatgagctgcaggtggacaagaatgtgaacctcttctccatgatcaagatgaatgagaccggcaacaacttctggctggcccaggatgccaatggagccatctggaagctggacctgtccttcagcaacatcacccaggaccctgaatgtctcttctccttccacagcggggccattgaagctgtggccgtgagccccctgacctacctgatggccaccacagccctggactgcagcgtgcgcatctatgactttgccagcaagacccccctggcccagatgaagttcaagcagggcggcacagccctggtgtgggtgcccaggatggtgaacttcaccggggcccagatcatcgtgggctttgaagatggagtggtgcgcatcctggagctgtatgaccccaagggcctgaccatctttgctggcaggaagaagatcctggatgctgacatccagctgaagcaggtgttcaagccccacacagcctgtgtgacagccctggcctatgaaagagatggagagatcctggccaccggcagcaaggaccagaccgtcttcttctttgaggtggagcgggactacaagcccatcggctacatcaacaccccaggccctgtgtgccagctgatgtggagccccatgagccaccctgagagcaccctgctgatcatctgtgaaaatggctacatcctggaggcccccctgcccaccatcaagcaggaggaggatgaccatgatgtggtgtcctatgagatcaaggacatgtgcatcaagtgcttccacttcagctctgtgaagagcaagatcctgcggctgattgaaattgagaagcgggagcggcagcgggagctgaaggagaagatccgggaggagaggaggaacaagctggccgctgagatgggagaagatggagagaaggagttccaggaggaggaggaggagaaggaggaggaggaggaggaggaggagcccctgcctgagatcttcatccccagcacccccagccccatcctgtgtggcttctacagcgagcccgggaagttctgggtgtccctgggcggctatgattctggcttcctgtaccactgtgagttccccccctgtgatgagagcagtgacttcaaggagcagaaggatgagcccattgatgtgcgctacctggccgacacagaggacaaccccatccagaccatcaccttcaacatcaacaaggtgatgatgttctgtggcatgaagaatggagccatccgggtgtatgtgctgaaccagaatgaccccagcctgaccagcctggtggactactggcacttcaacatgcatgacaacaactacggctgcatcaagagcatcgccaacagctttgatgaccgcttcctggtgacagctggagcagatggcaacatctttgtgttcaacatcttcagcgagttcatgctgaggaaggacatgaaggccaaggtgcccagcccccgcttcggcatcgagacagagcccatcccagaagatattgaggaccccaaggcctacagcattgaaaatgcccggaggaagcgggagcatgacaagctgatgaaggaggtgggggagatcaaggccaggaagcgggagcagatcaaggccctgcggtctgagttctgcaacctgctggagatgaatgagaagctgcccaagcacatgcagttcaagaggacagactttgatgtggacagccagatccgggcagagatgcacaggaagacagccttcaagatccagcaggtggagaaggagctggcctgggagaaggagaagcatgagctgggcctgatgaagctgaagaaccgcttccgggaccccctggagagtgacaccatcgtggtgcacgccatcctgagtgaccacaagatcagcagctaccgcctggtgcagcccagcaagtacagcaagttcaagagggccagccagagcgagaggaagcccagcaagctggacagatttgagaaggagggccctggcaggaaggacagccagagagatgctgggggctctgtgaccatccaggaggagagcatcatcgagaagggcaagaagttccggcccaagaccctgtctgagatcatcgtggagaaccagatcgagaagaccaggaagctgatcctgaaggccgagcgggcccagctgaagatccagcagaggaagaaggagtgggaggagctgtacaagagcaagccaggagatgattatgaggaccccaaggacctgcaggccatcaaggaggcccaggtgtacatgggagacttcaacctgaagacagccccagactacaagatccctgagcacatgaggatcaatgctgccaagaaggaggaggagctgggccacctggacagcctggtgcacggcaacaagaggcacatgaacaagtgcatcctgagcctgcgggacctgaaggtggccgtggtggaggagatccagtgcctggtgcaggagctgaagaacatccagagcaccctgcacatcagcaagcacatccccatccccaagatcccccagatccaccctgaggaggtgcctgagaagcgcttccagtatgatgaggagaccctgctgaacttcaagcagcagcagatgaagagcaaggatgagaagagccctggggtggagcagacaggcagcggcggccctgtgggcggcttcctgaagctgagcagcaggaaggatggagacctgaccacccgggacagcatcagccgcagcagcaaggccagcaccttcagcctggacatccccaagtgcctggagtttgagaaggccgagcccacagatgtggagctggagatcatgaagagagatgagatcaagcacgtgtacatgcagcagtacctggtgaaccgcatcaaggagctggtggtgacctttgatgctgagctgcggctgctgcggcaccagaagctgaagctggacacccagatgaagctgagtgacctgcaccacgtgaccctcttccaggagatcctgctgctgaagaactttgagaagcaggagaacatcctgcaggagcgggtgaacagcctggacaaggaggagcagtacatgcagtggaagatcaatgagaccctgaaggagatggaggagaagaagaatgagatcaccaagctgcaggagcaggagaaggccctgtatgccggcttccaggccgccatcggggagaacaacaagtttgccaacttcctgatgaaggtgctgaagaagaagatcaagagggtgaagaagaaggaggtggagggagatgctgatgaagatgaggagagcgaggagagcagcgaggaggagagcagcctggagagtgatgaagatgagagcgagagtgaagatgaggtgtttgatgacagcatctgccccaccaactgtgatgtggccctgtttgagctggccctgcacctgcgggagaagaggctggacatcgaggaggccctggtggaggagaagaagatcgtggacaacctgaagaaggagtatgacaccctgagcaagaaggtgaagatcgtggccaccaacctgaatgctgctgaggaggccctggaggcctaccagcgggagaagcagcagaggctgaatgagctgctggtggtgatccccctgaagctgcaccagatcgagtatgtggtgtttggagagatccccagcgacctgagcggcaccctggtgttcagcaaccacgccctgcggcggctgcaggagcgcatccacgagctgcaggaggagaacagcaagcagcagaagctgaacaaggagtggagggagaggaggaagcagctgatccgggagaagcgggagatgaccaagaccatccacaagatggaggagaccgtgcggcagctgatgatcagcaagtttggccgggtggtgaacctggaggccctgcagaccctgtctgtgaacaccaccctggaggagctgaagatcaggaagctgaggaaggagctggccaatgccaaggagatgaagatgtgggaggagaagatcgcccagatgcgctgggagctgatgatgaagaccaaggagcacaccaggaagctgtaccagatgaatgacctgtgcatcgagaagaagaagctggacagccggctgaacaccctgcagaaccagcagggcaatgccttccagggcccccgggaggctgatgtggtggcccgggaggaggtgacagagctgatccagctgcaggccgagcgcatcagcgccctgaaggaggagatcgccctgctgcggaggaagggcagcctcatcctgccccccatccagagcccccgggagaaggagatccagcctgctgacctgtag

SEQ ID NO: 301777 - DNA, 5565 bp, Artificial Sequence
  derived and/or modified sequence
atgaaggagcccgacgaccaggacaccgacggcgagaagagcgtgactagcaagtctgacggaaagaaaagtctgcgaagctcaaagtccgaaagccgcagccccgtacaagaagacaatactttcttagaagacgatacagacgagacattcacaaaaggggaaggatcttatctggaggaggatagcgatgaggagagactagagggcagcttgagttcttttcagtacggtgatctacagtctactactgtgccacagcaaacccctgctcctgccgtggaggaggctgaggaggaggtgaaaaagaaaatttcagagtcttttttctatgactatatggaactcgctagtatgcctttcgttacgttggatagtaacattccgcttgatctcctaaccctggtgcacagcttcggttacgattgcaggaaaagggccaacctgcagctcctggatgacagcattgccatttatatagccggaaatcagctcatctttcttaacctgaagaccaaggaacagatctatttgcgcagctcgagcggtgaaggaataggcgtaataggcgtacaccctcacaaaacatattttaccgttgccgagaagggtagcttcccagacattattatttacgagtatccttccctccgcccctatcgggtgttaagagacggtactgaaaaagggtacgcatatgtcgatttcaattacagcggcaatctgctcgcttctgtcggatctaaccctgactacactctcaccatttggaactggaaagaggaacaaccaatacttcgcacgaaggcattctcccaggaagtatttaaggtcacttttaacccggacaaagaagaacagttaacaacgtcggggtccggccacatcaagttttgggagatggcattcacatttaccggccttaagctccaggggtctttgggtcggttcggtaagaccatcactacagatattgagggctatatggaacttcccgatggtaaggtgttaagcggatctgagtggggcaacatgctgctgtgggagggcggactgatcaaagtggagttgtgccgcggaacgagcaagtcttgtcacaatgggccgataaatcagatcatgctctatgagggagaggtaatcactgtcggatcagacggttacgtcaggatctgggatttcgagacaatagatacagcggacgttatcgacgaaaccggcctgctggagattgagccaatcaacgagctgcaggtggacaagaatgtcaacctcttctctatgatcaagatgaacgagacgggaaataatttttggcttgcacaagatgccaacggtgcaatatggaagctcgacctaagtttttctaatatcacacaagacccggaatgcctcttcagctttcatagcggcgccatcgaggcggtcgcggtctcccctcttacctacctgatggccacgaccgcactggactgctctgtgcgaatttatgactttgcgagcaagacccccctggcgcagatgaaattcaaacaggggggcacagctttagtatgggtgccccggatggtgaattttacgggtgcccagatcattgtcgggtttgaggatggggtcgtacgaattctcgaactctacgatcccaaggggctgaccattttcgccggcagaaagaaaattcttgacgccgacatccaattgaagcaggtgtttaagcctcataccgcctgtgtgactgctctcgcttacgagagggacggggaaatcttggctacgggatctaaggaccagaccgtgtttttttttgaggtggagagggactacaaaccaataggctacatcaacacacctggacccgtgtgtcagctgatgtggagccctatgtctcatcccgaatctacgctcttaatcatatgcgagaacggatatattcttgaagcgccgcttccaaccattaaacaggaggaggatgatcacgacgttgtttcttatgaaattaaggacatgtgtatcaaatgctttcacttttctagcgtcaaaagcaaaatcttgcgcctcatcgaaattgaaaaacgcgagaggcaacgggagctcaaagaaaagatccgagaagagcgtcgtaataaactggccgccgaaatgggcgaggacggagagaaagagtttcaggaagaagaggaggaaaaggaggaggaagaggaggaagaagaaccccttcccgagatcttcattcccagcaccccaagcccgattctctgcggcttctacagcgagcctgggaaattttgggtctccctgggtggctatgatagcggctttctctatcattgtgagtttcctccgtgtgatgagagctccgattttaaggagcagaaggacgaaccgatagatgtgaggtacctcgccgacactgaggacaaccctatccaaacaattacctttaacattaataaggtaatgatgttctgcgggatgaagaacggggcaattcgagtatacgtgctgaatcagaatgacccgtccctgacgagtctcgtagactattggcatttcaacatgcatgataacaactatggctgtatcaagagcattgctaactctttcgacgaccgtttcctggtgaccgccggggccgacgggaacattttcgtgtttaacatcttctcagaattcatgttgaggaaagatatgaaggccaaggtgccgagcccccggtttggtatcgaaacagaaccgattcctgaagacatcgaagaccctaaagcatatagcattgaaaatgccagacgcaaaagagaacacgacaagttaatgaaggaagtgggagaaattaaggctcgtaaaagggagcagattaaagccctgcggtccgagttctgtaaccttctcgagatgaatgaaaaactgccaaagcacatgcagttcaagagaacagattttgacgttgactcacagatacgggctgaaatgcacaggaaaaccgcatttaaaatccagcaggtggagaaggaactcgcatgggaaaaagagaaacatgagctcgggttgatgaagttaaagaacagattcagagacccgctggaaagtgacactatcgtggtgcatgccatcctctctgatcacaagatctcatcataccgactggtgcagccctcgaaatacagcaagttcaaaagggcgtcccaatcagaaagaaagcctagcaaactagataggtttgagaaagagggcccaggccggaaggattctcagagggatgcgggtgggagtgtaacaatccaggaagaatctatcattgaaaagggtaagaaatttcgccctaagaccttgagcgagatcattgtggagaatcagatcgagaaaactcgaaaactgattctgaaggctgagcgggctcagctgaagattcagcagagaaagaaggagtgggaagaactctacaagagcaaaccaggcgacgactatgaagacccaaaggacttgcaggcaataaaggaggcccaggtgtacatgggagatttcaatctgaaaacagccccagactacaagatcccagagcacatgaggattaatgccgccaagaaggaagaagagttgggacatctggactccctggtgcacgggaataagagacacatgaataagtgcatcctgagcctgagggatttgaaggtggcagttgtggaggaaatccagtgtctggtccaggaacttaagaacatccagagcactttgcatatatccaaacatatccctattcccaagatcccacaaattcatcctgaggaagtgccagagaaaagatttcagtacgacgaagaaacattactcaattttaaacagcagcagatgaagagtaaagacgaaaagagtccgggggtcgagcagaccggaagtggaggccctgtgggggggttcctcaaactcagttctagaaaggatggtgacctaaccacacgcgactccatctcgcgctcatccaaggcaagcaccttttctctggacatccctaagtgtcttgagtttgagaaggccgagccaacggacgtagaactggagatcatgaagcgtgatgaaattaaacacgtgtatatgcagcagtatttggtgaaccggattaaagagttggtcgtgaccttcgatgctgaattgagactgctaagacaccagaagctgaagctcgacacccaaatgaagctcagcgaccttcaccatgtgacgctgtttcaggagatcttgttgctcaaaaactttgagaagcaggaaaacatcttgcaggaacgagttaatagcctggataaagaagaacaatatatgcaatggaagattaatgagacgttgaaagagatggaggaaaagaaaaacgagataactaaactccaagaacaggaaaaggcgctttacgccggatttcaagccgctataggagagaataacaagtttgccaattttctcatgaaggtgctaaagaagaagatcaaacgcgtcaagaaaaaggaggtggagggagacgcagacgaggacgaagagtcagaggagagctctgaggaagagtctagcctcgagtctgacgaagatgaaagcgagtctgaagacgaagtttttgacgattctatctgccccactaactgcgatgtggccctgttcgagctcgcccttcacctccgcgaaaagagattggatattgaggaggctctcgtggaagagaaaaagatcgtggacaatctgaaaaaggagtatgatacactgtccaaaaaagtgaagatcgtggcaaccaacttaaatgcagctgaggaggccctggaggcatatcagcgtgaaaaacagcagaggctgaacgagctgctggtcgtcatcccactcaaattacaccagatcgaatacgttgtgtttggggaaattcctagcgacttgagcggtaccctggttttttccaatcatgcactgcggagattgcaagaaaggattcacgagctgcaggaagagaactcaaaacagcaaaagctgaacaaagaatggagagaacggcgtaagcaactcatcagggaaaagcgtgaaatgaccaagacaatccacaagatggaagaaactgtaaggcaacttatgatctcaaaattcggacgcgtggttaacctggaagctttgcagactctcagcgttaacacaaccctggaagagctgaagatccgtaagcttaggaaagaacttgccaacgcaaaggagatgaagatgtgggaagagaagatagcacagatgaggtgggaactcatgatgaaaaccaaagaacacacaaggaagttgtaccagatgaacgatctttgcatagaaaaaaaaaagctcgattctagactgaacaccttacagaaccagcaggggaacgcgtttcagggtcccagagaagcggacgtggtagccagagaggaggttactgagcttattcagctgcaagcggaacgcatttccgccctcaaggaagaaattgccctgctaagaaggaagggcagcctcatcctccccccaattcagagtccaagagaaaaggagattcagcctgcagacctgtag

SEQ ID NO: 301778 - DNA, 5564 bp, Artificial Sequence
  derived and/or modified sequence
atgaaagagcctgatgaccaggatacagatggcgagaaaagcgtgacttctaaaagcgacgggaagaaaagtctcagaagcagtaaatccgagtcccggtccccagtccaagaagacaacacctttttagaggacgacaccgacgaaacttttactaaaggggaaggctcatatctggaggaggattccgacgaggagcgactcgaggggtccctatcaagcttccaatatggcgacctgcaatccactacagtgccacagcaaacccctgcaccagcggttgaggaggctgaagaagaggtcaagaagaagatcagtgaatccttcttttatgactacatggaactggcatctatgccatttgtgaccctggattcaaatatcccactggatctcttgacactagtgcattccttcggttatgattgtcgcaagcgcgcaaacctgcaactcttggatgattctattgccatctacatcgctggcaaccagctcatttttctgaatcttaaaacaaaagaacagatctatctgcgtagctcttctggcgagggtattggcgtcataggcgtgcatcctcataaaacgtattttaccgtagctgaaaagggatccttccctgatattatcatttacgagtaccctagtctccggccatatcgggtgttgagagatgggaccgaaaagggatatgcctacgtcgattttaactattcaggtaaccttctggcatccgtaggctccaatccggattatacactcacgatctggaactggaaggaggaacagcccatactccgtactaaagctttcagccaagaggttttcaaagtgacctttaacccagataaagaagaacaactgacaacgtctggatcagggcacattaaattttgggaaatggcatttacctttactggtttgaaactgcagggctcgctcggacgattcggcaagaccattaccactgacatcgagggatacatggagctccctgatggcaaggtgttgagtggttccgagtggggaaacatgttgctctgggagggaggcctcattaaggttgagctttgcagaggtacatcaaagtcttgtcacaacggcccaatcaaccagataatgctctacgagggggaggtcattactgtcggctcagacgggtatgtgcggatttgggacttcgaaaccattgatactgcagacgttatcgacgagactggccttcttgaaatcgagcccataaatgagcttcaggtcgataaaaacgtgaaccttttttcaatgataaagatgaacgagacgggcaacaacttctggctggctcaagacgccaatggcgctatctggaagctcgacttaagtttctctaacatcacacaggatcccgagtgtcttttctcctttcactccggggcaattgaggcagttgctgtatcacctctgacatatctcatggccacaaccgctcttgattgttcagtccgtatttacgattttgcctcaaaaactcctctcgcacagatgaaattcaagcagggtggaacagcactcgtttgggtgcctagaatggtgaacttcacaggcgcacaaattatcgttggcttcgaagatggggtcgtcaggatcctggagctgtacgatccaaaaggactaaccatctttgcagggcgaaagaaaatcctggacgccgacatccaattgaagcaggtgttcaagcctcacaccgcctgcgtgactgccctggcatatgaacgagatggcgaaatcctggcaacgggaagcaaggaccagaccgtcttcttctttgaggtggagcgagactacaaacctattggatatatcaacacgcccggaccagtttgccaactcatgtggagtccaatgagccaccctgaatcgactctcctcataatttgtgaaaatggctacatactggaggcccctttgcccactattaaacaggaggaggatgatcatgacgtggtgagctacgagataaaagatatgtgcatcaaatgtttccatttcagttctgtcaaatccaagatactcagacttatagaaattgaaaagcgggaacgccagcgggagttgaaagagaaaatccgtgaggagcggcgaaacaagctggccgctgagatgggcgaagatggagagaaagaattccaagaggaggaagaggagaaggaggaggaggaagaggaagaggaacctctgccagagatctttatcccatctaccccctctccaatactctgtgggttttatagtgagccaggcaagttctgggtgtctctggggggttatgatagtgggtttctctatcattgtgagttccctccatgcgacgaatctagcgactttaaagaacagaaagacgaacccattgacgtgaggtatctcgccgatacggaagataatcccatccaaaccatcaccttcaatatcaacaaggttatgatgttctgcggcatgaaaaatggagccatccgagtctacgtcttgaatcagaacgacccatcattaacgtctctggtggattactggcacttcaatatgcacgacaataactacgggtgcattaagagtatagctaatagtttcgatgaccggttccttgtgacggccggtgcggacggaaatatctttgtcttcaatatctttagcgagttcatgctgcgcaaggacatgaaagcgaaggtcccaagccctagattcgggattgaaactgagcctatacctgaggatattgaggaccccaaggcttatagcatcgagaacgcgagacgtaagagagaacacgacaaactgatgaaggaagtcggggagatcaaagccagaaaacgtgaacagataaaagctttaagatcagaattttgtaatctgctagagatgaacgagaagcttccaaagcacatgcagtttaagcgcaccgattttgatgtggattctcagataagggctgaaatgcacagaaagactgcgttcaaaattcagcaggtggagaaagagctcgcatgggagaaagagaaacatgaactgggcctgatgaagctgaaaaaccgctttcgggatcctctcgagagtgacaccattgtggtacacgctatcttatctgatcataaaatatccagctaccgactggtacaaccatctaagtacagtaagtttaagcgagcctcacagtctgagcggaaacctagtaagctggaccgcttcgaaaaggaaggacctggcagaaaagattctcaacgggacgccggaggatctgtgacaattcaggaggagtccattatcgaaaaggggaaaaagtttcggcctaagacgctgtctgagatcatcgtggaaaatcagatcgagaaaactcggaaactgatactcaaggcggagagagctcaactgaagatccaacaacggaagaaggaatgggaagaactctataagagtaagcctggggatgactacgaggaccccaaggacctgcaagccatcaaggaggcccaggtttatatgggagatttcaacctaaagaccgcacccgactataagataccagaacatatgcgaattaatgccgctaagaaggaggaagagctgggacacctggattcattagtccacggaaacaagcgtcacatgaacaaatgcatcctatctcttcgcgatctgaaagtggctgtggtggaagagatccagtgcctggtccaggaactgaaaaatattcaatcaacactgcacatctccaaacatatccccataccaaagattcctcagatccacccagaggaggtgcccgagaaaagatttcaatatgacgaagaaaccctgctgaacttcaagcaacagcaaatgaaatcaaaagacgagaaaagccccggagtcgaacagactggctctggcggacccgttggcggatttttgaagctatcgtcccggaaagacggggatttgactacccgagactctatttcgaggtcatccaaagccagcacattcagcttggacatcccaaagtgcctggagtttgaaaaggccgagcctacagacgtggaactggaaattatgaagcgtgatgagatcaagcacgtgtacatgcaacagtacttggtgaacagaattaaggagttggtcgtcactttcgacgcagagctgcgactcctccgccatcagaagctgaaactcgacacacagatgaaattgtcagatctccatcacgtgaccctgtttcaagaaatcttacttctcaagaattttgaaaaacaagagaatattctgcaggaacgggttaactcactggacaaggaagagcagtatatgcagtggaagattaacgagacattgaaggaaatggaggaaaagaaaaacgagattactaagctccaagagcaagagaaggctctgtacgcaggatttcaggcggctataggagaaaataacaaattcgccaacttcctgatgaaggtgctcaaaaaaaagataaagcgtgtgaagaaaaaagaggtagagggagacgccgacgaggacgaggaatcggaggagtcaagcgaggaggagtcatctttagaatccgatgaggacgagtccgaatcggaggatgaggtgtttgacgacagcatctgtccaacaaattgcgacgtcgctctgtttgaactcgcactacacctacgagaaaaacggctggacatcgaagaggccctggtggaggaaaaaaagatcgttgataacctgaagaaggagtacgatacattgtccaaaaaggtgaagattgtggctacaaatctcaatgcagcagaggaagccctggaggcctaccagcgtgaaaagcagcagcgcctgaacgagctcctcgtcgtaattcctctgaagttgcatcagatagagtatgtagtgtttggggagatcccttccgacctgagcgggaccctggtgttctcaaaccacgcattaaggcgactacaggagcgcattcacgaattgcaggaggagaattcaaagcaacagaagttgaacaaggagtggagggagaggcgtaagcaactcatacgggaaaagcgtgaaatgacaaaaacaatccataaaatggaagagacggttcggcaactcatgatcagtaagttcgggcgtgtggtcaatctggaagcgctccaaacactgagcgtgaacacgaccctcgaggagctgaagattcgcaaacttcgaaaggagctggccaatgctaaggagatgaagatgtgggaggagaagatcgctcagatgaggtgggagctgatgatgaagacaaaagagcatacccggaagctctatcagatgaatgacctctgtatcgaaaagaagaagctcgattctcggctgaatacacttcagaatcagcaggggaatgccttccaggggcctcgcgaagccgatgtggttgctcgggaagaagtgacagagctgatacagctccaagcagagaggatatcggccttgaaagaagagatcgccctgttgcgcagaaaggggtccctgatattgcctccgattcagtcaccccgtgagaaggaaatacagccagcagaccttta

SEQ ID NO: 301779 - DNA, 3377 bp, Artificial Sequence
  derived and/or modified sequence
gggttcccggagagctggacgccggccgcgcatgcgccccacggcccgccctggttccgcctccctggaagaggggtggcgttgtctcggtaaccggagtaaacggaggcctccggcagacgctgtgaagagaggagccgcggcggtcagtaccttcgaggaaatgaaggaaccagatgatcaggatactgatggggagaaatcagttacatcaaagagtgatgggaagaagtctctgaggtcttctaaatcagaatcaagatctcctgttcaagaagataacacatttttagaagatgacacagatgaaacatttaccaaaggggaaggatcatatttagaagaagactcagatgaggaacgtttggaaggaagtttgagttcatttcagtatggtgatttgcaaagcactacagtacctcagcaaacccctgctccagctgtggaagaagcagaggaggaagttaagaagaaaatatcagagagcttcttctatgattatatggagcttgcttcgatgccttttgtgactctggattcaaacataccactggatcttctcacacttgtacattcttttggttatgactgtagaaagcgagccaacctacaacttctggacgacagtatcgccatatacatagctgggaaccaactgatctttctgaatttgaaaaccaaggaacagatctacctgcgaagtagcagtggtgaaggaattggcgtcattggggttcatccacataaaacttatttcacagtagctgaaaaagggagttttccagatattatcatctatgaatatccttctctgagaccatacagagtccttcgagatgggactgagaagggatatgcttatgtggactttaactacagcggtaacttgctggcctctgttggtagtaaccctgactacacactgactatctggaactggaaagaagaacaacccatactaaggacaaaagctttttctcaggaagtttttaaggttactttcaatcctgataaggaagagcagcttactacatcgggatcaggccacatcaagttctgggaaatggcttttacgttcaccggtctcaagctgcagggatcactaggtcgatttggcaaaacaatcactactgatatagaaggctacatggagctcccagatgggaaggtgctctcagggtcagaatggggcaacatgctgctttgggaaggtggtctgatcaaagtggagctctgtcgagggacaagcaagtcatgtcacaatggtcccattaaccagataatgctgtatgagggtgaagttatcactgttgggtcagatggatatgttaggatatgggattttgagacaatagacactgctgatgtaatagatgagactggattgttggagattgagcctattaatgaacttcaagtagacaagaatgtgaatctcttctctatgataaaaatgaatgaaactggaaataacttttggttggctcaggatgccaatggagccatatggaagcttgaccttagtttttcaaatattacccaggacccagaatgcctcttctccttccattctggagctattgaagccgtggctgtttctcctctcacttatctcatggccacaactgccttggactgctctgttcgaatctatgattttgctagcaaaactcctttggcccagatgaaattcaaacaaggaggtactgcccttgtttgggtaccccgaatggtaaacttcactggagcacaaattattgtaggatttgaagatggagttgttcgaattcttgaactttatgatccaaaagggctcacgatttttgcgggacggaagaaaattttggatgctgatattcagttgaaacaggttttcaaaccccatactgcttgtgtcactgctttagcttatgaacgtgatggggaaattctagccacagggagtaaagatcaaactgttttcttctttgaagtggaaagggattataagccgattggttatattaatactcctggacctgtgtgtcagttaatgtggtctcccatgtctcatcctgaaagtactttactaattatctgtgaaaatggctatattcttgaagctccacttccaaccataaagcaagaagaggatgatcatgatgtagtctcctatgaaatcaaagacatgtgcataaaatgtttccatttttcaagtgtcaaatctaagattctgagattaatagaaattgaaaagagggagagacaaagggagttgaaggagaaaataagggaagaaaggaggaacaagctagcagcagagatgggagaagatggagaaaaagaatttcaggaggaggaagaggagaaagaggaggaggaggaggaagaagagccattacctgaaatatttattccgtcaaccccctctcccatcctctgtggattttactcagagccagggaagttctgggtttctttgggtggctatgattctggttttctatatcactgtgagttccccccttgtgatgaaagcagtgatttcaaagaacaaaaagatgaacctattgatgtccgttatcttgcggatacagaggacaatcccatccaaactatcactttcaacattaacaaagttatgatgttttgtggaatgaaaaatggagcaattcgagtctatgtcctaaatcaaaatgatccttcattgaccagtttggtggactactggcacttcaatatgcatgacaataattatggatgtattaaaagtattgctaatagctttgatgatcgtttcttggtgactgctggagcagatggcaatatctttgttttcaacattttttctgaatttatgctaaggaaagacatgaaggccaaagttccatctcccaggtttggaattgaaacagagccaattccagaagacattgaagatcccaaagcctacagtatcgagaatgctaggagaaaaagagaacatgacaagttaatgaaagaagtgggagaaataaaggcacggaagagagagcaaatcaaagctttgaggagtgaattttgtaatctattagaaatgaatgaaaaattaccaaagcatatgcagtttaaacgaacagtaagcctaatataaacttgatttttattttaacatatgctatttctggatagagatgactattttcccaacaagtagaaacacttaaaatcatctttcttttttgtttgtttctttcaaaatttcaatagccatttattttgggcatcttttaatttgtatgtggggtttatcccttttaatcagttaagattcttgttgacacaaattgttttacatcaactgttgttatagaacacatgaaaggaatacatggggaagaaataaagtagaacccaag

SEQ ID NO: 301780 - DNA, 724 bp, Artificial Sequence
  derived and/or modified sequence
gggagacagtcatcatactacactctcctttgtcctttgatcgtgtagtgtaccatatctgctttaggcataccagtctatcttcagagaccaggaagatataacagtgtggcagtttaagtaaccctcatagcaggcttgtaaaaagttttttcttcattcccattacagttggggaattcatataaagtttagttagctagttatatgtcagtactgggattcaaaccctaatctaactataaatctgatccaaatagaactagtgttccattctgcttgccaggcatatcgtagaagaatgttgaggaaacatagggtgtttagtatagagaagtgaagacttagaaggaaggtgttttcaaatatatgaaaagctgcattatagacagagggcagagaaaacctgttgtgtcgctcccctctttaaaaccctttaatggttttcagttgtcaaggaaataagaggaaatgaaggaaccagatgatcaggatactgatggggagaaatcagttacatcaaagagtgatgggaagaagtctctgaggtcttctaaatcagaatcaagatctcctgttcaagaagataacacatttttagaagatgacacagatgaaacatttaccaaaggggaaggatcatatttagaagaagactcagatgaggaacgtttggaaggaagtttgagttcatttcagtatggtgatttgcaaagcactacag

SEQ ID NO: 301781 - protein, 610 aa, Artificial Sequence
  derived and/or modified sequence
MQYSHHCEHLLERLNKQREAGFLCDCTIVIGEFQFKAHRNVLASFSEYFGAIYRSTSENNVFLDQSQVKADGFQKLLEFIYTGTLNLDSWNVKEIHQAADYLKVEEVVTKCKIKMEDFAFIANPSSTEISSITGNIELNQQTCLLTLRDYNNREKSEVSTDLIQANPKQGALAKKSSQTKKKKKAFNSPKTGQNKTVQYPSDILENASVELFLDANKLPTPVVEQVAQINDNSELELTSVVENTFPAQDIVHTVTVKRKRGKSQPNCALKEHSMSNIASVKSPYEAENSGEELDQRYSKAKPMCNTCGKVFSEASSLRRHMRIHKGVKPYVCHLCGKAFTQCNQLKTHVRTHTGEKPYKCELCDKGFAQKCQLVFHSRMHHGEEKPYKCDVCNLQFATSSNLKIHARKHSGEKPYVCDRCGQRFAQASTLTYHVRRHTGEKPYVCDTCGKAFAVSSSLITHSRKHTGEKPYICGICGKSFISSGELNKHFRSHTGERPFICELCGNSYTDIKNLKKHKTKVHSGADKTLDSSAEDHTLSEQDSIQKSPLSETMDVKPSDMTLPLALPLGTEDHHMLLPVTDTQSPTSDTLLRSTVNGYSEPQLIFLQQLY

SEQ ID NO: 301782 - protein, 500 aa, Artificial Sequence
  derived and/or modified sequence
MQYSHHCEHLLERLNKQREAGFLCDCTIVIGEFQFKAHRNVLASFSEYFGAIYRSTSENNVFLDQSQVKADGFQKLLEFIYTGTLNLDSWNVKEIHQAADYLKVEEVVTKCKIKMEDFAFIANPSSTEISSITGNIELNQQTCLLTLRDYNNREKSEVSTDLIQANPKQGALAKKSSQTKKKKKAFNSPKTGQNKTVQYPSDILENASVELFLDANKLPTPVVEQVAQINDNSELELTSVVENTFPAQDIVHTVTVKRKRGKSQPNCALKEHSMSNIASVKSPYEAENSGEELDQRYSKAKPMCNTCGKVFSEASSLRRHMRIHKGVKPYVCHLCGKAFTQCNQLKTHVRTHTGEKPYKCELCDKGFAQKCQLVFHSRMHHGEEKPYKCDVCNLQFATSSNLKIHARKHSGEKPYVCDRCGQRFAQASTLTYHVRRHTGEKPYVCDTCGKAFAVSSSLITHSRKHTGEKPYICGICGKSFISSGELNKHFRSHTVVWSMN

SEQ ID NO: 301783 - DNA, 3178 bp, Artificial Sequence
  derived and/or modified sequence
ggcttcaggagagaggcccgcggtgctgtgctgccgggcctcggcgcagagccccggcagagcgccagacgctgactgccggcaccagaatgctcgcgatgaggaagacaggcggagcgctgcgagctagcgagccctcagctctcgtatccatgacgcctgctgcttcgggggacccctggcatgctggggagtgggtctctgtggtacatcctgtaccgccctggccggcgccggacccccatggccccagaacctcccgcactgccacgggaagacagagccggacgtgacgccaccgtggaaggaagggaggggcggagcgtggctcggtgacgtcctcccaagatggcggagacagagtgaagaaactgtgttccccccttgggttgctatcgatcaagggtaaaattccattctgatatcaaaatgcagtattcgcaccactgtgagcaccttttagagagactgaacaaacagcgggaagcaggttttctctgtgactgtaccatagtgattggggaattccagtttaaagctcataggaatgtgctggcctcctttagtgagtattttggtgcgatctacagaagcacttctgagaacaatgtctttcttgatcagagtcaggtgaaggctgatggatttcagaaactgttggagtttatatacacaggaactttaaatcttgacagttggaatgttaaagaaattcatcaggctgctgactatctcaaagtggaagaggtggtcactaaatgcaaaataaagatggaagattttgcttttattgctaatccttcttctacagagatatctagtattactggaaacattgaattgaatcaacagacttgtcttcttactctgcgagattataataatcgagagaaatcagaagtatctacagatttgattcaggcaaatcctaaacaaggcgcgttagcgaaaaagtcatctcaaacgaaaaagaagaagaaggctttcaactccccgaaaacagggcagaataaaacagtgcaatatcccagtgacatcttagagaatgcatctgttgaattattcctagatgcaaataaactgcccacacctgtagtagaacaagttgcacaaataaatgataattcagaactcgagttgacatcagttgtggaaaatacttttccagcacaagatattgtgcacactgttacagtgaaacggaaacgtggaaaatcacagccaaactgtgctctgaaagaacactctatgtctaatatagccagcgtcaagagtccttatgaggcggagaactccggggaagagctggatcagaggtattccaaggccaagccaatgtgtaacacatgtgggaaagtgttttcagaagccagcagtttgagaaggcacatgagaatacataaaggagtcaaaccttacgtctgccacttatgtggaaaggcatttacccaatgtaaccagctgaaaacgcatgtaagaactcatacaggtgagaagccatacaaatgtgaattgtgtgataaaggatttgctcagaaatgtcagctagtcttccatagtcgcatgcatcatggtgaagaaaaaccctataaatgtgatgtatgcaacttacagtttgcgacttctagcaatctcaagattcatgcaaggaagcatagtggagagaagccatatgtctgtgataggtgtggacagagatttgctcaagccagcacactgacctatcatgtccgtaggcatactggagaaaagccttatgtatgtgatacctgtgggaaggcatttgctgtctctagttctcttatcactcattctcgaaaacatacaggtgaaaaaccatacatatgtggtatttgtgggaaaagttttatttcctcaggagagctcaacaaacactttcggtcccatacaggagaaagaccatttatctgcgaattatgtggaaattcttacacagatattaaaaatttaaagaagcacaaaacaaaagtccattctggtgcagataaaactctagactccagtgcagaggatcatactttgagtgaacaggattccatacaaaaaagtcctttatcagaaactatggatgtgaagccttctgatatgactttaccattagctcttccacttgggactgaggaccatcacatgcttctgcctgtcacggatactcagtctcctacatcagatacattgttgaggtcaactgtgaatgggtattcagaaccacagttgatttttttacaacaattatactgactttgtaaggaatatggaattgctaagatatcattggtagcaaacatctctggtaaggtgcatatattcatattaaattcccattcatttgagttgtgaccattatttttcattcactgaagtaaaagcacctgatgctgcatcacaactgcaatgtttgtttttatttttggctttatgtctatactccacagagagctttttaagtaatgaattatgtagcactattttgggtggatgagttttattttcttttaaagctgccttaattccatttttattttgcattttagaattgcccttcatttactaaatcagccagttaatgtgattcagttgtgacctgtgggattttaaaattttcctgccctcataatttaagcaaaatccacgatagtatcagcccaagagtgtgttgctatttgtaagccccatggatcaatacataaactatgcataaaaataaaatttcatattttcgctcgtaaaaatttaggcgctgaataagaattgtgctatttctctattaatatattgttagaaataacttttctaatgaaacaaaaatgtttctcaaaatctagaaaagtgcatataaatttttgttcatttagaactgagtattctggagaaaaccaatggtcagcacttttggtttgagttatctgagattgtattttcaaaatgaattttaagtagatatttggtgtttttatcttgtcaaagacagtttcaaaatttgattcagtttatgttttattccgttctaaaatattggagatgaggaaaatgtacttgagttttgaaatattttggtaagcctctcttactcctgttatgcactttttaaaataaatactgaattccagaaaaaaaaaaaaaaaaaaaaaaaaaaaaaaaaaaaaaaaaaaaaaaa

SEQ ID NO: 301784 - DNA, 1833 bp, Artificial Sequence
  derived and/or modified sequence
atgcagtatagccaccattgcgaacaccttctggaaaggctgaacaagcaacgcgaggcgggatttctatgcgactgcactattgttatcggggagtttcagttcaaggcacaccgcaacgtgttagcgtctttttccgagtacttcggtgctatatatcggagtacatccgaaaacaatgtgttcctggaccagagccaggtgaaagccgacggctttcagaaactcctggagtttatatatacgggcactctaaatttagactcatggaacgtgaaggagatacatcaggcagcagactacctgaaggttgaagaagtcgtcactaaatgcaaaattaaaatggaggattttgcctttatcgcaaaccccagcagtaccgagatcagttctatcacaggcaatatcgagctgaatcagcagacctgcctgctcaccttgagggactacaacaatagggagaagagtgaagtatcaaccgacctgatccaggctaatccaaagcagggtgccttggcaaagaaatcttcccagacaaagaagaaaaagaaagcttttaactctccgaagacagggcagaataagacagttcaataccctagtgacatcttggagaacgcctctgttgagctgtttctggatgccaacaagctgccgactccggtagtggaacaagtggctcagatcaacgacaacagcgaactcgagttgactagcgtggtcgagaatacctttcctgcacaagacattgtgcatactgtgacggtgaagagaaaaagagggaagtcccagcctaactgtgcactgaaagagcattcaatgtctaatatcgcatctgtgaaatccccatatgaagccgaaaattcgggagaggaacttgaccagcgatattctaaggccaagccaatgtgcaatacttgcggtaaggtgttctcagaagcttccagccttcgaagacatatgaggattcacaaaggcgtaaagccgtacgtctgccatctgtgcggaaaagcttttacacaatgcaatcagttgaaaacacacgtgcggacgcacactggggagaagccctataaatgtgagttatgtgacaaaggattcgcccaaaagtgtcagctggtttttcattcccgcatgcatcatggggaagagaagccctataagtgtgatgtgtgcaacttacagtttgcaacctcttcaaatctgaaaatacatgctagaaagcactctggcgaaaaaccgtacgtctgcgacagatgtgggcaacgattcgcccaagcttctacactgacctatcacgtgagaagacacaccggggagaaaccctatgtgtgcgatacatgcggaaaagccttcgccgtgtcttcgtctctcatcacacatagccggaagcatacaggggagaaaccttacatttgcgggatctgcgggaagagtttcattagctctggagaacttaataaacacttccggtcacacactggggagcggccctttatctgcgagctgtgtggcaacagctacaccgatatcaaaaacttaaaaaagcacaagaccaaagtacattccggtgcggacaaaaccctggatagctccgccgaggatcacaccctgtctgagcaggactcgatccagaaatctcccttatccgaaaccatggatgttaagccgagcgatatgaccctccctctagctttgcctctcgggactgaggatcatcacatgttgctgcctgtgacagacacgcagtctcccacgtccgacacactcctcaggagcactgtcaacggctactccgaacctcagttgatttttctccagcaactgtactag

SEQ ID NO: 301785 - DNA, 1833 bp, Artificial Sequence
  derived and/or modified sequence
atgcagtatagccaccactgcgagcatctgctcgaacggttgaataagcagagagaggctggcttcctctgtgactgtacaattgtgatcggcgagttccagtttaaggcacacaggaacgttctggcatcgttcagcgagtactttggcgcaatttaccggtcaacgtcagaaaacaatgtgtttttggatcagtcgcaggtcaaggcggacgggttccagaagctgctggagtttatctacactggcactctgaacctggatagctggaatgtcaaagagatccaccaggcggcggattacttaaaagtggaggaggtggtgacaaagtgcaagattaaaatggaggattttgccttcatcgccaacccttcctcaaccgagatctccagtatcaccggaaacatagagctcaaccagcagacgtgccttctgacccttcgagattacaacaatagggaaaagtcagaagtatccacagacctgatacaggccaatcctaagcaaggagcactggccaagaaatcctcacagaccaagaagaaaaaaaaggcctttaacagccctaagacaggacagaataagaccgtgcaatacccgagtgatattctggagaatgcttcagtcgaactattcctcgacgctaataaactgccaaccccggtggtggagcaggtggcccagatcaacgacaactctgaacttgagctcacctctgtagtcgaaaatacgttccctgcccaagatattgtccacaccgtcaccgttaagagaaagcgcggcaaatctcagccaaactgcgctctaaaggaacatagcatgtctaacattgcatcagtcaaaagtccatatgaagctgagaatagtggtgaagagctcgatcagcggtactccaaggccaagccgatgtgcaatacctgtggcaaggtgttctccgaagcctcttccctgcgccgacacatgcgtatccacaagggggtcaagccctatgtatgtcacctgtgtggtaaagccttcacccaatgcaatcaactgaaaacccacgttcgcacccacacaggggagaaaccctacaagtgcgagttatgcgacaagggctttgcacagaaatgccagttggttttccatagtcggatgcatcacggggaagagaagccgtataagtgcgatgtgtgcaacctgcagttcgccactagctcaaatctaaagattcatgcacgcaaacacagtggagagaagccatacgtttgtgacaggtgtggtcagaggttcgcccaagcttctacacttacttaccatgtgcggcgccacactggagaaaagccttacgtgtgcgatacatgcggcaaggcctttgctgtttcgtccagtctgattacccattctcgaaaacataccggagaaaaaccctacatctgcggcatctgtggcaagtcttttatttcgtctggcgagctcaacaaacactttcggtcccataccggcgagcgaccttttatttgcgagctgtgtggcaactcctacacagacataaaaaatctgaagaaacacaaaaccaaagtgcatagcggtgcggacaaaacactcgacagttcagccgaggatcacaccttaagcgaacaggatagtattcaaaaatctcctctctctgagacgatggatgtgaagccaagcgacatgaccttgcccttagctttgcctctggggaccgaggaccatcacatgctcttgccggtgaccgatactcagagccctacttccgacaccctgttacgctcaactgttaacggctattcagaacctcagctcattttcctccagcagttgtactag

SEQ ID NO: 301786 - DNA, 1503 bp, Artificial Sequence
  derived and/or modified sequence
atgcagtattctcaccactgtgaacacctgctagagcgactgaataagcagcgcgaggcggggtttttgtgtgactgtacgatcgttatcggcgagttccagtttaaggcccatcgcaatgttttggctagcttttccgaatattttggtgctatttacaggtctacctcagagaacaacgtattcctggaccaaagccaggtaaaggcagacggctttcaaaagctgttggagtttatttacactggcactttgaatctagacagttggaacgtaaaggagattcaccaggcagcagattatctcaaggtggaggaagttgtgacgaagtgtaaaataaaaatggaggatttcgccttcattgccaatccgagtagtaccgagatttcttccatcactggcaatatcgaactgaatcaacagacttgtttgcttacgctgagagactacaataacagggaaaagtccgaggtgtctacagatctaatccaagcaaaccccaaacagggcgccctggccaagaagagttctcaaacaaagaaaaagaaaaaagcattcaacagtccgaagaccggacagaacaagactgtgcagtatccaagtgatatcctggaaaatgcgagcgtggaactgttcctggacgctaacaagttgccaacgcccgtcgtggagcaggtggctcagatcaacgataacagtgaattggagttaacctccgtggtcgagaacacctttccggcgcaagacatcgtccatacagtaacagtcaaacgaaaaagagggaaatcccagccaaattgcgccctgaaggaacactccatgagcaatattgcttctgtcaagtctccctacgaggccgagaattctggagaggagcttgaccagagatacagcaaagctaaacccatgtgcaatacctgcggcaaggtgttctcagaggcaagttcacttcgtcggcacatgcggattcacaaaggagtcaagccgtatgtgtgtcatctgtgcggcaaggcgttcacacagtgtaaccaactgaagacgcacgtaaggacccatactggcgaaaagccctacaaatgcgagctctgtgataaaggtttcgcccagaagtgtcagcttgttttccatagccggatgcatcatggcgaggagaaaccttacaaatgtgacgtgtgcaacctccaattcgccacctcgagcaatctcaagatccatgcgcgcaaacattccggtgaaaagccttacgtttgtgaccggtgtggacagcgctttgcacaggccagcacacttacgtaccatgtgcgacgccacaccggagaaaaaccgtatgtctgtgatacgtgtggcaaagccttcgctgtgtcctcttcactgataacccatagcaggaagcataccggggagaaaccgtacatctgtggaatatgcggaaagtccttcattagttcgggagaactcaataagcatttccgtagccacactgtggtctggagcatgaactag

SEQ ID NO: 301787 - DNA, 5300 bp, Artificial Sequence
  derived and/or modified sequence
ggcttcaggagagaggcccgcggtgctgtgctgccgggcctcggcgcagagccccggcagagcgccagacgctgactgccggcaccagaatgctcgcgatgaggaagacaggcggagcgctgcgagctagcgagccctcagctctcgtatccatgacgcctgctgcttcgggggacccctggcatgctggggagtgggtctctgtggtacatcctgtaccgccctggccggcgccggacccccatggccccagaacctcccgcactgccacgggaagacagagccggacgtgacgccaccgtggaaggaagggaggggcggagcgtggctcggtgacgtcctcccaagatggcggagacagagtgaagaaactgtgttccccccttgggttgctatcgatcaagggtaaaattccattctgatatcaaaatgcagtattcgcaccactgtgagcaccttttagagagactgaacaaacagcgggaagcaggttttctctgtgactgtaccatagtgattggggaattccagtttaaagctcataggaatgtgctggcctcctttagtgagtattttggtgcgatctacagaagcacttctgagaacaatgtctttcttgatcagagtcaggtgaaggctgatggatttcagaaactgttggagtttatatacacaggaactttaaatcttgacagttggaatgttaaagaaattcatcaggctgctgactatctcaaagtggaagaggtggtcactaaatgcaaaataaagatggaagattttgcttttattgctaatccttcttctacagagatatctagtattactggaaacattgaattgaatcaacagacttgtcttcttactctgcgagattataataatcgagagaaatcagaagtatctacagatttgattcaggcaaatcctaaacaaggcgcgttagcgaaaaagtcatctcaaacgaaaaagaagaagaaggctttcaactccccgaaaacagggcagaataaaacagtgcaatatcccagtgacatcttagagaatgcatctgttgaattattcctagatgcaaataaactgcccacacctgtagtagaacaagttgcacaaataaatgataattcagaactcgagttgacatcagttgtggaaaatacttttccagcacaagatattgtgcacactgttacagtgaaacggaaacgtggaaaatcacagccaaactgtgctctgaaagaacactctatgtctaatatagccagcgtcaagagtccttatgaggcggagaactccggggaagagctggatcagaggtattccaaggccaagccaatgtgtaacacatgtgggaaagtgttttcagaagccagcagtttgagaaggcacatgagaatacataaaggagtcaaaccttacgtctgccacttatgtggaaaggcatttacccaatgtaaccagctgaaaacgcatgtaagaactcatacaggtgagaagccatacaaatgtgaattgtgtgataaaggatttgctcagaaatgtcagctagtcttccatagtcgcatgcatcatggtgaagaaaaaccctataaatgtgatgtatgcaacttacagtttgcaacttctagcaatctcaagattcatgcaaggaagcatagtggagagaagccatatgtctgtgataggtgtggacagagatttgctcaagccagcacactgacctatcatgtccgtaggcatactggagaaaagccttatgtatgtgatacctgtgggaaggcatttgctgtctctagttctcttatcactcattctcgaaaacatacaggtgaaaaaccatacatatgtggtatttgtgggaaaagttttatttcctcaggagagctcaacaaacactttcggtcccatacaggagaaagaccatttatctgcgaattatgtggaaattcttacacagatattaaaaatttaaagaagcacaaaacaaaagtccattctggtgcagataaaactctagactccagtgcagaggatcatactttgagtgaacaggattccatacaaaaaagtcctttatcagaaactatggatgtgaagccttctgatatgactttaccattagctcttccacttgggactgaggaccatcacatgcttctgcctgtcacggatactcagtctcctacatcagatacattgttgaggtcaactgtgaatgggtattcagaaccacagttgatttttttacaacaattatactgactttgtaaggaatatggaattgctaagatatcattggtagcaaacatctctggtaaggtgcatatattcatattaaattcccattcatttgagttgtgaccattatttttcattcactgaagtaaaagcacctgatgctgcatcacaactgcaatgtttgtttttatttttggctttatgtctatactccacagagagctttttaagtaatgaattatgtagcactattttgggtggatgagttttattttcttttaaagctgccttaattccatttttattttgcattttagaattgcccttcatttactaaatcagccagttaatgtgattcagttgtgacctgtgggattttaaaattttcctgccctcataatttaagcaaaatccacgatagtatcagcccaagagtgtgttgctatttgtaagccccatggatcaatacataaactatgcataaaaataaaatttcatattttcgctcgtaaaaatttaggcgctgaataagaattgtgctatttctctattaatatattgttagaaataacttttctaatgaaacaaaaatgtttctcaaaatctagaaaagtgcatataaatttttgttcatttagaactgagtattctggagaaaaccaatggtcagcacttttggtttgagttatctgagattgtattttcaaaatgaattttaagtagatatttggtgtttttatcttgtcaaagacagtttcaaaatttgattcagtttatgttttattccgttctaaaatattggagatgaggaaaatgtacttgagttttgaaatattttggtaagcctctcttactcctgttatgcactttttaaaataaatactgaattccagaaagaattttctagatataaacttaatgcatactagaaatcacttggcttctaaatttggtacattatattgcataaagagttaagaaattaacctcaattataagtaaacattttgagttaccagaaagccaactatagttaaatattttatatctgagttttctataagtttggggtttgttaattttataaattaaaccacaacttttggtggtggttgtagtttcacaatggtccttttccttccaaatgaatgtagaaaattcgttattatcctgatatttgcaccactcatccccatgccacttttcccacatattaatttatttcactgcctgatctttggatatgaaattatgagttccacaaagtcaatttttatagtgccaatcaaacagcatggtgatattctttttctttttttttccccccacaaggctgttgttcagtgtgagatgacatcatttcttatttctgccatgctgtggcttttttgtgttctgcttttaaactacacctgtagtacagttaatatgttttttattggtattgatttctttaattcattaattttctctatttgggacccaagtcataagaaccaattagaggacataataaaaacacttaatgcttgtagtctgtagagatcttcaccatttcacagcacacacattattttcataataaattgccactggtgggacatgggactgacttatttgaatagagtttgaaataccacctttgtatgatgcaaacaatatttgattattttatctaagaaatctatgcatgtgtatcaagttaaaatagtgggtttaaatacaatttacaaagcattagaatgttacctaatctcttctgggttaaatgtgataggaatgtattggaatgtgaagaaattatagaaaattaaaagactcagcctctttaggaagtttgctaaaatggagaggttatgtttaatttatttatatcttcgttaatccaagcatctaatgaacaaaaaactgctacagtgacgtcataattctataagggcaatagttgccaaatttcctctggtattattagcattctgcctttgcatagattagccttcaaatttattatttttagtattatttgatacgattgaagtggctaagattgattgagcttttcttgatcacattttctgcttcttagctaaagtaattttatttaaattgacatggcttgagttgtcatcattttctgctcttctagaatgatgtgtagagaaaacttgaagatactatcccttctttggcattcttctcttaatgctatgctattatttatcataatatgcatatatttagttgtatctggtatcattctaacactcataactaccattttagttaagtccaactttatatttgttacaatgcagtgttttgggaaaggtctattagtaattatttaagtattacatatttttatggaagtctttagaaggtgaagatcttactgagaaactattttctaaataaatttaattttcttttgtatttgtatcagatcatgcctactgtatgttagattttagactattttaaaagaaaccgtagattatataaaaatttttttgctgtttttaaatggcatttgtcttatgtttaatttcacaggatgattttgatagacaaattttagaaaaccttttttcaaaggtaatggttctatcagtttcattccaacagtagctaatttctgtgtttcagtcctacagaaattgtgtgagtagttgaaataatgtacatgtactagtttttttaagtattctaaatagttctaacatttaatgcatatcagaaacatgcttaagaaataacaatatccaggcccaccccacctattgaatcagacagttcccagggcatatatatgctggggaagccccataggtgattttaatgtataccaaacatgtagagtctcactctgttgcccaggctggagtgcaatgacgtgatctcagctaactgcaacctctgcctcctggattcaagcaattctccggcctcagcctcctgagtagctggtactacaggtgcgcgccaccacacctgactaatttttgttagagatggggtttcattctgttggccaggctggtctcgaactcctgacctcaggt

SEQ ID NO: 301788 - DNA, 5367 bp, Artificial Sequence
  derived and/or modified sequence
ggcttcaggagagaggcccgcggtgctgtgctgccgggcctcggcgcagagccccggcagagcgccagacgctgactgccggcaccagaatgctcgcgatgaggaagacaggcggagcgctgcgagctagcgagccctcagctctcgtatccatgacgcctgctgcttcgggggacccctggcatgctggggagtgggtctctgtggtacatcctgtaccgccctggccggcgccggacccccatggccccagaacctcccgcactgccacgggaagacagagccggacgtgacgccaccgtggaaggaagggaggggcggagcgtggctcggtgacgtcctcccaagatggcggagacagagtgaagaaactgtgttccccccttgggttgctatcggtggtagaagtgttgccattcaccgtcacttattgatgtgtccaaaggattgtgttagttgatcaagatcaagggtaaaattccattctgatatcaaaatgcagtattcgcaccactgtgagcaccttttagagagactgaacaaacagcgggaagcaggttttctctgtgactgtaccatagtgattggggaattccagtttaaagctcataggaatgtgctggcctcctttagtgagtattttggtgcgatctacagaagcacttctgagaacaatgtctttcttgatcagagtcaggtgaaggctgatggatttcagaaactgttggagtttatatacacaggaactttaaatcttgacagttggaatgttaaagaaattcatcaggctgctgactatctcaaagtggaagaggtggtcactaaatgcaaaataaagatggaagattttgcttttattgctaatccttcttctacagagatatctagtattactggaaacattgaattgaatcaacagacttgtcttcttactctgcgagattataataatcgagagaaatcagaagtatctacagatttgattcaggcaaatcctaaacaaggcgcgttagcgaaaaagtcatctcaaacgaaaaagaagaagaaggctttcaactccccgaaaacagggcagaataaaacagtgcaatatcccagtgacatcttagagaatgcatctgttgaattattcctagatgcaaataaactgcccacacctgtagtagaacaagttgcacaaataaatgataattcagaactcgagttgacatcagttgtggaaaatacttttccagcacaagatattgtgcacactgttacagtgaaacggaaacgtggaaaatcacagccaaactgtgctctgaaagaacactctatgtctaatatagccagcgtcaagagtccttatgaggcggagaactccggggaagagctggatcagaggtattccaaggccaagccaatgtgtaacacatgtgggaaagtgttttcagaagccagcagtttgagaaggcacatgagaatacataaaggagtcaaaccttacgtctgccacttatgtggaaaggcatttacccaatgtaaccagctgaaaacgcatgtaagaactcatacaggtgagaagccatacaaatgtgaattgtgtgataaaggatttgctcagaaatgtcagctagtcttccatagtcgcatgcatcatggtgaagaaaaaccctataaatgtgatgtatgcaacttacagtttgcaacttctagcaatctcaagattcatgcaaggaagcatagtggagagaagccatatgtctgtgataggtgtggacagagatttgctcaagccagcacactgacctatcatgtccgtaggcatactggagaaaagccttatgtatgtgatacctgtgggaaggcatttgctgtctctagttctcttatcactcattctcgaaaacatacaggtgaaaaaccatacatatgtggtatttgtgggaaaagttttatttcctcaggagagctcaacaaacactttcggtcccatacaggagaaagaccatttatctgcgaattatgtggaaattcttacacagatattaaaaatttaaagaagcacaaaacaaaagtccattctggtgcagataaaactctagactccagtgcagaggatcatactttgagtgaacaggattccatacaaaaaagtcctttatcagaaactatggatgtgaagccttctgatatgactttaccattagctcttccacttgggactgaggaccatcacatgcttctgcctgtcacggatactcagtctcctacatcagatacattgttgaggtcaactgtgaatgggtattcagaaccacagttgatttttttacaacaattatactgactttgtaaggaatatggaattgctaagatatcattggtagcaaacatctctggtaaggtgcatatattcatattaaattcccattcatttgagttgtgaccattatttttcattcactgaagtaaaagcacctgatgctgcatcacaactgcaatgtttgtttttatttttggctttatgtctatactccacagagagctttttaagtaatgaattatgtagcactattttgggtggatgagttttattttcttttaaagctgccttaattccatttttattttgcattttagaattgcccttcatttactaaatcagccagttaatgtgattcagttgtgacctgtgggattttaaaattttcctgccctcataatttaagcaaaatccacgatagtatcagcccaagagtgtgttgctatttgtaagccccatggatcaatacataaactatgcataaaaataaaatttcatattttcgctcgtaaaaatttaggcgctgaataagaattgtgctatttctctattaatatattgttagaaataacttttctaatgaaacaaaaatgtttctcaaaatctagaaaagtgcatataaatttttgttcatttagaactgagtattctggagaaaaccaatggtcagcacttttggtttgagttatctgagattgtattttcaaaatgaattttaagtagatatttggtgtttttatcttgtcaaagacagtttcaaaatttgattcagtttatgttttattccgttctaaaatattggagatgaggaaaatgtacttgagttttgaaatattttggtaagcctctcttactcctgttatgcactttttaaaataaatactgaattccagaaagaattttctagatataaacttaatgcatactagaaatcacttggcttctaaatttggtacattatattgcataaagagttaagaaattaacctcaattataagtaaacattttgagttaccagaaagccaactatagttaaatattttatatctgagttttctataagtttggggtttgttaattttataaattaaaccacaacttttggtggtggttgtagtttcacaatggtccttttccttccaaatgaatgtagaaaattcgttattatcctgatatttgcaccactcatccccatgccacttttcccacatattaatttatttcactgcctgatctttggatatgaaattatgagttccacaaagtcaatttttatagtgccaatcaaacagcatggtgatattctttttctttttttttccccccacaaggctgttgttcagtgtgagatgacatcatttcttatttctgccatgctgtggcttttttgtgttctgcttttaaactacacctgtagtacagttaatatgttttttattggtattgatttctttaattcattaattttctctatttgggacccaagtcataagaaccaattagaggacataataaaaacacttaatgcttgtagtctgtagagatcttcaccatttcacagcacacacattattttcataataaattgccactggtgggacatgggactgacttatttgaatagagtttgaaataccacctttgtatgatgcaaacaatatttgattattttatctaagaaatctatgcatgtgtatcaagttaaaatagtgggtttaaatacaatttacaaagcattagaatgttacctaatctcttctgggttaaatgtgataggaatgtattggaatgtgaagaaattatagaaaattaaaagactcagcctctttaggaagtttgctaaaatggagaggttatgtttaatttatttatatcttcgttaatccaagcatctaatgaacaaaaaactgctacagtgacgtcataattctataagggcaatagttgccaaatttcctctggtattattagcattctgcctttgcatagattagccttcaaatttattatttttagtattatttgatacgattgaagtggctaagattgattgagcttttcttgatcacattttctgcttcttagctaaagtaattttatttaaattgacatggcttgagttgtcatcattttctgctcttctagaatgatgtgtagagaaaacttgaagatactatcccttctttggcattcttctcttaatgctatgctattatttatcataatatgcatatatttagttgtatctggtatcattctaacactcataactaccattttagttaagtccaactttatatttgttacaatgcagtgttttgggaaaggtctattagtaattatttaagtattacatatttttatggaagtctttagaaggtgaagatcttactgagaaactattttctaaataaatttaattttcttttgtatttgtatcagatcatgcctactgtatgttagattttagactattttaaaagaaaccgtagattatataaaaatttttttgctgtttttaaatggcatttgtcttatgtttaatttcacaggatgattttgatagacaaattttagaaaaccttttttcaaaggtaatggttctatcagtttcattccaacagtagctaatttctgtgtttcagtcctacagaaattgtgtgagtagttgaaataatgtacatgtactagtttttttaagtattctaaatagttctaacatttaatgcatatcagaaacatgcttaagaaataacaatatccaggcccaccccacctattgaatcagacagttcccagggcatatatatgctggggaagccccataggtgattttaatgtataccaaacatgtagagtctcactctgttgcccaggctggagtgcaatgacgtgatctcagctaactgcaacctctgcctcctggattcaagcaattctccggcctcagcctcctgagtagctggtactacaggtgcgcgccaccacacctgactaatttttgttagagatggggtttcattctgttggccaggctggtctcgaactcctgacctcaggt

SEQ ID NO: 301789 - DNA, 1932 bp, Artificial Sequence
  derived and/or modified sequence
ggcttcaggagagaggcccgcggtgctgtgctgccgggcctcggcgcagagccccggcagagcgccagacgctgactgccggcaccagaatgctcgcgatgaggaagacaggcggagcgctgcgagctagcgagccctcagctctcgtatccatgacgcctgctgcttcgggggacccctggcatgctggggagtgggtctctgtggtacatcctgtaccgccctggccggcgccggacccccatggccccagaacctcccgcactgccacgggaagacagagccggacgtgacgccaccgtggaaggaagggaggggcggagcgtggctcggtgacgtcctcccaagatggcggagacagagtgaagaaactgtgttccccccttgggttgctatcgatcaagggtaaaattccattctgatatcaaaatgcagtattcgcaccactgtgagcaccttttagagagactgaacaaacagcgggaagcaggttttctctgtgactgtaccatagtgattggggaattccagtttaaagctcataggaatgtgctggcctcctttagtgagtattttggtgcgatctacagaagcacttctgagaacaatgtctttcttgatcagagtcaggtgaaggctgatggatttcagaaactgttggagtttatatacacaggaactttaaatcttgacagttggaatgttaaagaaattcatcaggctgctgactatctcaaagtggaagaggtggtcactaaatgcaaaataaagatggaagattttgcttttattgctaatccttcttctacagagatatctagtattactggaaacattgaattgaatcaacagacttgtcttcttactctgcgagattataataatcgagagaaatcagaagtatctacagatttgattcaggcaaatcctaaacaaggcgcgttagcgaaaaagtcatctcaaacgaaaaagaagaagaaggctttcaactccccgaaaacagggcagaataaaacagtgcaatatcccagtgacatcttagagaatgcatctgttgaattattcctagatgcaaataaactgcccacacctgtagtagaacaagttgcacaaataaatgataattcagaactcgagttgacatcagttgtggaaaatacttttccagcacaagatattgtgcacactgttacagtgaaacggaaacgtggaaaatcacagccaaactgtgctctgaaagaacactctatgtctaatatagccagcgtcaagagtccttatgaggcggagaactccggggaagagctggatcagaggtattccaaggccaagccaatgtgtaacacatgtgggaaagtgttttcagaagccagcagtttgagaaggcacatgagaatacataaaggagtcaaaccttacgtctgccacttatgtggaaaggcatttacccaatgtaaccagctgaaaacgcatgtaagaactcatacaggtgagaagccatacaaatgtgaattgtgtgataaaggatttgctcagaaatgtcagctagtcttccatagtcgcatgcatcatggtgaagaaaaaccctataaatgtgatgtatgcaacttacagtttgcaacttctagcaatctcaagattcatgcaaggaagcatagtggagagaagccatatgtctgtgataggtgtggacagagatttgctcaagccagcacactgacctatcatgtccgtaggcatactggagaaaagccttatgtatgtgatacctgtgggaaggcatttgctgtctctagttctcttatcactcattctcgaaaacatacaggtgaaaaaccatacatatgtggtatttgtgggaaaagttttatttcctcaggagagctcaacaaacactttcggtcccatacagttgtttggagtatgaattaa

SEQ ID NO: 301790 - DNA, 1833 bp, Artificial Sequence
  derived and/or modified sequence
atgcagtacagccaccactgtgagcacctgctggagcggctgaacaagcagcgggaggccggcttcctgtgtgactgcaccatcgtcatcggggagttccagttcaaggcccacagaaatgtgctggccagcttcagcgagtactttggagccatctaccgcagcaccagcgagaacaacgtgttcctggaccagagccaggtgaaggcagatggcttccagaagctgctggagttcatctacacaggcaccctgaacctggacagctggaatgtgaaggagatccaccaggccgctgactacctgaaggtggaggaggtggtgaccaagtgcaagatcaagatggaggactttgccttcatcgccaaccccagcagcacagagatcagcagcatcactggaaacatcgagctgaaccagcagacctgcctgctgaccctgcgggactacaacaaccgggagaagtctgaggtgtccacagacctgatccaggccaaccccaagcagggcgccctggccaagaagagcagccagaccaagaagaagaagaaggccttcaacagccccaagacaggccagaacaagacagtgcagtaccccagcgacatcctggagaatgcctctgtggagctgttcctggatgccaacaagctgcccacccctgtggtggagcaggtggcccagatcaatgacaacagcgagctggagctgacctctgtggtggagaacaccttccctgcccaggacatcgtgcacacagtgacagtgaagaggaagaggggcaagagccagcccaactgtgccctgaaggagcacagcatgagcaacatcgcctctgtgaagagcccctatgaagcagaaaattctggagaggagctggaccagcgctacagcaaggccaagcccatgtgcaacacctgtgggaaggtgttcagcgaggccagcagcctgcggcggcacatgaggatccacaagggcgtgaagccctacgtgtgccacctgtgtgggaaggccttcacccagtgcaaccagctgaagacccacgtgaggacccacactggagagaagccctacaagtgtgagctgtgtgacaagggctttgcccagaagtgccagctggtgttccacagcaggatgcaccacggggaggagaagccctacaagtgtgatgtgtgcaacctgcagtttgccaccagcagcaacctgaagatccacgccaggaagcacagcggggagaagccctacgtgtgtgacagatgtggccagagatttgcccaggccagcaccctgacctaccacgtgagaagacacactggagagaagccctacgtgtgtgacacctgtgggaaggcctttgctgtgagcagcagcctcatcacccacagcaggaagcacactggagagaagccctacatctgtggcatctgtgggaagagcttcatcagcagtggagagctgaacaagcacttccgcagccacactggagagcggcccttcatctgtgagctgtgtggcaacagctacacagacatcaagaacctgaagaagcacaagaccaaggtgcacagcggggctgacaagaccctggacagcagcgctgaggaccacaccctgtctgagcaggacagcatccagaagagccccctgtctgagaccatggatgtgaagcccagcgacatgaccctgcccctggccctgcccctgggcacagaggaccaccacatgctgctgcctgtgacagacacccagagccccaccagtgacaccctgctgcggagcacagtgaatggctacagcgagccccagctgatcttcctgcagcagctgtactag

SEQ ID NO: 301791 - DNA, 1503 bp, Artificial Sequence
  derived and/or modified sequence
atgcagtacagccaccactgtgagcacctgctggagcggctgaacaagcagcgggaggccggcttcctgtgtgactgcaccatcgtcatcggggagttccagttcaaggcccacagaaatgtgctggccagcttcagcgagtactttggagccatctaccgcagcaccagcgagaacaacgtgttcctggaccagagccaggtgaaggcagatggcttccagaagctgctggagttcatctacacaggcaccctgaacctggacagctggaatgtgaaggagatccaccaggccgctgactacctgaaggtggaggaggtggtgaccaagtgcaagatcaagatggaggactttgccttcatcgccaaccccagcagcacagagatcagcagcatcactggaaacatcgagctgaaccagcagacctgcctgctgaccctgcgggactacaacaaccgggagaagtctgaggtgtccacagacctgatccaggccaaccccaagcagggcgccctggccaagaagagcagccagaccaagaagaagaagaaggccttcaacagccccaagacaggccagaacaagacagtgcagtaccccagcgacatcctggagaatgcctctgtggagctgttcctggatgccaacaagctgcccacccctgtggtggagcaggtggcccagatcaatgacaacagcgagctggagctgacctctgtggtggagaacaccttccctgcccaggacatcgtgcacacagtgacagtgaagaggaagaggggcaagagccagcccaactgtgccctgaaggagcacagcatgagcaacatcgcctctgtgaagagcccctatgaagcagaaaattctggagaggagctggaccagcgctacagcaaggccaagcccatgtgcaacacctgtgggaaggtgttcagcgaggccagcagcctgcggcggcacatgaggatccacaagggcgtgaagccctacgtgtgccacctgtgtgggaaggccttcacccagtgcaaccagctgaagacccacgtgaggacccacactggagagaagccctacaagtgtgagctgtgtgacaagggctttgcccagaagtgccagctggtgttccacagcaggatgcaccacggggaggagaagccctacaagtgtgatgtgtgcaacctgcagtttgccaccagcagcaacctgaagatccacgccaggaagcacagcggggagaagccctacgtgtgtgacagatgtggccagagatttgcccaggccagcaccctgacctaccacgtgagaagacacactggagagaagccctacgtgtgtgacacctgtgggaaggcctttgctgtgagcagcagcctcatcacccacagcaggaagcacactggagagaagccctacatctgtggcatctgtgggaagagcttcatcagcagtggagagctgaacaagcacttccgcagccacacagtggtgtggagcatgaactag

SEQ ID NO: 301792 - DNA, 1833 bp, Artificial Sequence
  derived and/or modified sequence
atgcagtacagccaccactgcgagcacctgctggagcggctgaacaaacagcgcgaggccggtttcctttgcgactgtacaattgtgataggagaattccagttcaaggcacatcgcaatgtgctggcgtccttctccgaatacttcggagccatttatcgatccaccagtgagaataacgtcttcttggaccagagtcaggtgaaggctgacggcttccagaaattacttgagtttatttacacaggaaccctgaacctcgactcctggaacgtcaaagagattcatcaagccgcagactacctgaaggtcgaggaggtcgttacaaagtgtaagatcaagatggaggatttcgcatttattgccaacccctcatccactgagatctcttccatcaccggtaacatcgaactgaaccaacagacttgtcttctaactctgagagattacaacaatcgggagaagtcagaagtctccacggacctcattcaggctaaccccaaacagggggccctggcaaagaagtccagtcaaacaaagaaaaagaagaaggccttcaacagtcctaagacaggccagaataaaactgttcagtacccttccgatattctcgagaatgctagcgtcgagctcttcctggatgctaacaaacttccaactccagtcgtggagcaagtggcccagatcaatgataattcggagctcgagctgaccagcgtcgtggagaacacattccctgcacaggatattgtccacacagtgaccgtgaagcgaaaaagggggaagtcacagccaaactgcgccctaaaagaacactctatgtctaatattgcttccgttaaatcaccatacgaggccgagaactccggggaggagctagaccagcgatactcaaaggcgaaacccatgtgcaatacttgcggcaaggtattttcagaagcgtcttccttacgaagacatatgaggatccataagggagtgaaaccctacgtgtgtcatctgtgtggaaaagcgttcacacagtgcaatcagctcaagacccacgtcagaactcacacaggagaaaaaccatataagtgcgagctgtgcgataaagggttcgcgcagaagtgccagctcgtctttcattcaaggatgcatcacggagaagagaaaccatacaagtgcgacgtctgtaatctccagtttgccactagttctaacttaaaaattcacgcgagaaagcacagcggagagaagccctacgtgtgtgataggtgcggccagcgcttcgctcaagcttccactctcacttatcatgtgaggcggcatactggagagaagccctacgtatgcgatacctgcgggaaggccttcgctgtgtctagcagccttatcacacacagtcgtaagcatacaggtgaaaagccttatatctgcggcatttgcggaaagtccttcatctcgtccggggaattaaataagcattttaggagccacacaggtgaacgccccttcatctgtgagttatgcggcaacagctacacagatattaagaacctgaagaaacacaaaacaaaagtgcatagtggggcggataaaacgttggattcctccgccgaagatcacaccttaagcgagcaggacagtattcaaaagagtccgttgagtgagaccatggatgtgaaaccttcggacatgaccctcccgcttgcactgcccttgggaactgaagaccaccatatgctgttgcctgtgaccgacactcaaagtcccacgtcagatacactgctgcgatcaacagtgaacgggtattccgaacctcagctgattttccttcagcagttgtattag

SEQ ID NO: 301793 - DNA, 1833 bp, Artificial Sequence
  derived and/or modified sequence
atgcagtacagccaccactgcgagcacctgctggagcggctgaacaagcagcgcgaagcgggtttcctttgcgactgtaccattgtgatcggggagtttcagttcaaggcccaccggaatgtcctggcttcattttcagaatatttcggggccatttatcgtagtacttccgaaaacaatgtctttttagaccaatcccaggtcaaagcagatggtttccagaagcttctagaattcatctacactggtaccctgaatttggacagttggaacgtgaaagagatccatcaagcagccgattaccttaaagtggaggaggtggtgaccaagtgtaagatcaagatggaagactttgcgttcatcgcaaaccccagctcaaccgaaatctcttcaattaccggcaacatcgaactcaatcaacagacgtgcctgttgacgctacgtgattataataatcgtgagaaaagtgaagtgtccacagacctgattcaagccaacccaaaacagggcgcgttggctaaaaaatcaagtcagaccaagaagaaaaagaaggcttttaattcccccaagaccggtcaaaataaaacagtccagtatcctagcgacatactggagaatgcgagcgtggagctgttcctggatgctaataagcttcccacaccagtcgtcgaacaagttgcccagatcaacgacaattcagagctcgaactgaccagcgtggtggagaatacctttcccgctcaggatattgtccacacggtgactgttaaacgcaagcggggcaagagccagcccaattgtgcactcaaggagcactctatgtctaacatcgcctccgtgaaatctccttatgaagctgaaaacagcggcgaagagctggaccagcgttattccaaagccaaacctatgtgcaacacgtgcggtaaggtgttctccgaggcaagctcacttcggaggcatatgagaatccataagggcgtgaaaccctatgtctgccacctgtgtggaaaggcctttacccagtgtaaccagttaaagactcatgtgcgcacgcataccggagaaaaaccttacaagtgcgagctttgcgataaggggttcgctcagaaatgtcagctggtctttcatagccgcatgcatcatggggaagaaaagccctataaatgtgacgtctgcaatctccagttcgcaacaagctcgaatctaaagatccatgctagaaaacactccggggaaaaaccctatgtgtgtgataggtgcggacagcggttcgcgcaggccagtacactcacataccacgttcgacggcacaccggcgagaagccctatgtgtgtgatacctgtggaaaagccttcgctgtctcatcttctttgatcactcattcccgaaagcacaccggtgaaaaaccgtatatatgtggtatctgcggcaagagttttatatcctcaggagaactcaataagcactttcgatcccatactggggagcgacccttcatttgtgagctgtgtggtaattcttacacagatataaagaatttaaaaaagcataaaactaaagtgcacagcggagctgataaaacactggattcctcggccgaggaccacaccctgagtgagcaggattctattcaaaagtctcccctgtcggagacaatggacgttaaaccttccgacatgacgcttcccctcgctctgccattaggaacggaggaccaccatatgctgctccccgtgacagacacacagtctccaacatcagacacactcctcagatctactgttaatggttactctgaaccacagcttattttcctgcaacagctgtattag

SEQ ID NO: 301794 - DNA, 1503 bp, Artificial Sequence
  derived and/or modified sequence
atgcagtacagccaccactgcgagcacctgctggagcggctgaacaaacagagagaagctggatttctgtgcgattgcactattgtgataggtgaattccagttcaaggcgcatcgcaacgtactcgcatccttctccgagtatttcggcgccatctacagatctaccagtgagaacaatgttttcctcgatcagtctcaagtcaaagcggacggctttcagaaattactggaatttatctacacagggactctgaatctggacagttggaatgttaaggaaatccaccaagcagccgactacctgaaggtcgaggaggtggtcacgaagtgcaaaatcaagatggaggattttgcctttattgcaaatcccagcagtacggaaattagttccattactggcaacatcgaacttaatcagcaaacctgcttgctgacattacgcgactacaacaatcgggagaaatccgaagtgagcaccgatcttatacaggctaacccaaaacagggtgccctcgcaaaaaaatcatcacagactaagaaaaagaaaaaggcttttaactccccaaagaccggtcagaacaagaccgtgcagtacccgagcgacattctggaaaacgcttctgtcgaactgtttctggacgccaataagctcccaacccctgtggtagagcaggtggcgcagattaacgataattccgagctggaactgaccagcgtggtggagaatacttttcctgcccaagacattgtccataccgtgacagtcaaaagaaaaagagggaaatcccagcctaactgcgctctcaaggaacattctatgagtaatatcgcctctgtgaagtcaccttacgaagctgagaatagtggcgaagagctggatcagcgatatagtaaggcaaaacctatgtgcaatacatgtggcaaagtgttcagcgaagcttcctctttacgtcggcacatgagaattcacaagggcgtgaagccatatgtgtgccatctgtgcggcaaagctttcacgcagtgtaaccaattaaagactcatgttcggactcacaccggggagaaaccttacaaatgcgagctgtgcgataagggcttcgcacagaagtgccagttggtcttccactcccgcatgcaccacggcgaagaaaagccttacaaatgtgatgtctgcaatcttcagttcgccacctcctctaatctcaaaatccatgctcgtaaacacagcggcgaaaagccttatgtctgtgatcgatgcgggcagagatttgcccaggcctcgacactgacataccatgttaggaggcataccggcgaaaagccctacgtgtgtgacacttgtgggaaggctttcgcggtgtcaagctcactcatcacacattcccgaaagcacacaggcgaaaaaccctacatctgcggtatttgcggaaagagttttatttcttccggtgagctgaacaagcacttccgctctcacaccgtcgtgtggtctatgaactag

SEQ ID NO: 301795 - DNA, 1833 bp, Artificial Sequence
  derived and/or modified sequence
atgcagtacagccaccactgcgaacatttattagaaagattgaataaacagcgggaggctggcttcttatgtgattgtaccattgtaatcggcgaatttcaatttaaggctcacaggaacgttttggcgtccttttcagagtactttggcgcaatttaccgaagcacttcggaaaacaatgtatttctggaccagtcccaggtgaaagccgacgggttccagaagctgctcgaattcatctatactggcacgcttaatctagattcctggaacgttaaggagattcatcaggccgcagactacttgaaggtagaggaggtcgtgactaagtgcaaaatcaagatggaagattttgcttttatcgcaaaccctagctccacagaaatctcaagtatcaccggtaatattgaattaaatcagcaaacttgcttgctaactctacgtgattataataatcgagaaaaaagcgaagtgtcgactgatctgatacaggcaaatccaaagcagggcgcactggctaaaaaaagctctcagaccaaaaaaaaaaaaaaggcatttaacagtcccaaaaccggacagaacaagacagttcaatatccatcggacatactcgagaatgcttcagtggagctgtttttggacgcgaataagctgcctactcccgttgttgaacaggtagcccaaattaacgacaatagcgagcttgagttgactagcgtcgttgaaaacacctttccggcacaggacatcgttcatacggtcactgtgaagcgtaagcgagggaaaagccagccaaactgcgcccttaaggagcattcaatgagtaatatcgccagtgttaagtccccttatgaggctgagaactctggagaagagttggatcagcggtacagtaaggcaaagcctatgtgtaatacctgtggtaaagtgttcagcgaggccagttccctgaggagacacatgcgcattcacaaaggcgtcaaaccatatgtttgccacctgtgtggcaaggcatttacccaatgcaaccagctgaaaactcacgtcagaacacacaccggcgaaaaaccctacaagtgcgaactctgtgataagggttttgctcagaagtgccagctggtgttccattctcgaatgcatcacggcgaggaaaaaccttacaaatgtgatgtgtgcaaccttcagtttgctacctcctccaacctcaaaatacacgctcgtaaacattcaggtgagaaaccctatgtctgtgacagatgcggtcagaggttcgcccaagcctcaaccttaacatatcacgtaaggagacacacgggcgagaagccttatgtttgcgacacatgcggcaaagccttcgccgtctcatcttctcttattacccattcacgcaagcataccggggagaagccatatatatgtggtatttgcggcaaaagctttatctcctccggggagcttaacaagcattttcgaagtcacacgggtgaaaggccatttatctgtgagctgtgcggcaattcctatacagacatcaagaatctgaagaaacacaaaacgaaggtgcactccggggctgataagacactggacagctctgctgaggatcacaccctgtcagaacaggattcgatccagaaatccccgctgagcgaaactatggacgtgaaacccagcgatatgactctgcccttggcactccctctcggcacagaggatcatcacatgctgttaccggtgacagacacacaatcccccactagtgacacacttttacgttccacagtcaatggctactcggagcctcagctgatctttctccaacaactctactag

SEQ ID NO: 301796 - DNA, 1833 bp, Artificial Sequence
  derived and/or modified sequence
atgcaatacagtcaccattgcgagcacctgctggagaggctgaacaagcagcgagaggcaggttttctgtgcgattgcaccatcgtcattggcgaatttcagttcaaggcacatagaaacgtactcgcctccttttccgagtacttcggcgctatctaccgctcaacaagtgagaacaatgtgtttctggaccagagccaggtgaaagctgatggcttccagaaattgttggagtttatctataccggcaccctgaacctcgacagctggaacgtgaaagagattcaccaggctgctgattacttgaaagtagaagaggttgtaacaaaatgcaaaatcaaaatggaggatttcgcctttatcgctaacccatcttccactgaaatttcctccataactggcaacatcgagctcaaccagcagacttgcctcctcacactccgagattacaataaccgcgaaaagtccgaggttagcaccgacctaatccaggccaatcccaagcagggagccttggcaaagaaaagctcccagacaaaaaaaaagaaaaaggcattcaattctcctaagactggccagaacaaaacagtgcaatacccaagtgacatcttggaaaacgcctccgtcgagctgtttcttgatgccaacaaattgcctacccctgtggtcgagcaggtggcacagataaatgataattcggagcttgaattaacaagcgttgtcgagaatacctttcccgctcaggacatcgtgcataccgtgactgttaagcggaagcggggtaagagtcagcctaattgtgctcttaaagaacactctatgtccaatattgcaagtgtcaaaagcccatatgaggctgaaaattctggcgaggaactcgatcagagatactctaaagcgaagcctatgtgcaatacttgtgggaaagtgtttagtgaagcctcctccctgaggcgccacatgagaattcataaaggggttaaaccatatgtttgccacttgtgcggaaaggctttcacccagtgtaatcagctcaaaacgcatgtgagaactcacaccggggaaaaaccttacaagtgcgagctgtgtgataagggatttgctcagaaatgccagctagtcttccactccaggatgcaccacggagaggaaaagccctataagtgcgacgtttgcaacttgcagtttgccacctcttcaaatctgaaaatacacgccaggaagcacagcggcgaaaagccgtatgtttgtgaccgatgcggccagcgcttcgcacaggcttcgacactgacctaccacgtgcgcaggcataccggggagaagccatatgtctgcgacacctgcggaaaagcctttgccgtctcctcctctttaattacccatagccgcaaacacaccggggaaaagccttatatatgcggcatatgcggcaagtcctttatttcttcaggcgaactgaataaacactttaggagccacacaggcgagaggcctttcatttgtgagctgtgtgggaattcgtatacagatatcaaaaacctgaaaaagcataaaactaaggtacattctggagccgacaagacgcttgatagcagtgcagaggatcacaccctaagcgagcaggacagtattcagaagtctccactgagcgaaacaatggacgtgaaaccgagcgatatgaccctccccctagccttgcctctcgggaccgaagaccaccacatgctcctgccagtcacggatactcagtcccctactagtgacacgctgctgcggagcaccgttaatggctacagcgaaccccagttaattttcttgcaacaactgtattag

SEQ ID NO: 301797 - DNA, 1503 bp, Artificial Sequence
  derived and/or modified sequence
atgcagtatagccatcactgtgaacatcttcttgagcggctgaataagcaacgggaggccggtttcctatgtgattgcacaattgttattggcgagtttcagtttaaagctcaccgcaacgtactggcctctttctccgaatactttggagccatatacagatctacaagtgagaataatgtgtttttagaccagtcacaagtgaaagccgacggcttccagaagttgttggagttcatttatacagggaccctgaacctggacagttggaacgtcaaagagatccaccaggctgctgactacctgaaagttgaagaggttgtaactaagtgcaagatcaaaatggaagattttgcattcatagccaacccttcaagcacagagatctcctcgatcaccggtaacatcgagctgaaccagcaaacctgcttgcttacactgagggattacaacaatcgggagaagagtgaagtctcgactgacttgatccaagcaaacccgaaacagggtgcactggccaagaagtcatcccagacaaagaaaaagaaaaaagcgtttaactctccaaagactggccagaacaaaactgtgcagtatccctcagacatactggagaacgcgtccgtcgagcttttcttagacgccaacaagctcccaaccccagtggtggagcaggttgcccagattaacgataatagcgagctggagctcacctctgtggtcgagaacaccttccccgctcaagacatagttcacacagtgactgtgaagaggaaaagaggaaagagccagcctaactgcgctcttaaagaacactcgatgtcgaacattgcctcagtcaagagcccctatgaagccgaaaactctggggaggaacttgaccaaaggtactcaaaagcaaaacccatgtgcaacacttgcgggaaagtattcagtgaggcatcctctttgaggagacacatgagaatccacaagggcgtcaaaccttatgtttgtcacctgtgtgggaaggccttcacccagtgcaaccagctgaaaactcatgtgcgcacccacaccggcgaaaagccttacaagtgtgagctttgtgataagggctttgctcagaaatgtcaattagtcttccactccagaatgcatcatggagaggaaaaaccctacaagtgcgacgtgtgcaacttgcagttcgctacctcatctaacctgaaaatccacgccagaaaacactccggagaaaaaccatatgtgtgcgatcgctgtggccaaagattcgcccaggcctctacattgacttatcacgttcggcgtcacacaggggagaagccatatgtatgcgatacttgcggcaaagctttcgcggttagttcttcgttaatcacacatagcaggaagcatacaggagagaagccttacatctgtggtatctgtggaaagtcttttattagtagtggtgagctcaataaacattttcgctcgcatacggtggtatggtcaatgaattag

SEQ ID NO: 301798 - DNA, 1833 bp, Artificial Sequence
  derived and/or modified sequence
atgcagtacagccaccactgcgagcacctgctggagagactgaacaagcagagagaggccggcttcctgtgcgactgcaccatcgtgatcggcgagttccagttcaaggcccacagaaacgtgctggccagcttcagcgagtacttcggcgccatctacagaagcaccagcgagaacaacgtgttcctggaccagagccaggtgaaggccgacggcttccagaagctgctggagttcatctacaccggcaccctgaacctggacagctggaacgtgaaggagatccaccaggccgccgactacctgaaggtggaggaggtggtgaccaagtgcaagatcaagatggaggacttcgccttcatcgccaaccccagcagcaccgagatcagcagcatcaccggcaacatcgagctgaaccagcagacctgcctgctgaccctgagagactacaacaacagagagaagagcgaggtgagcaccgacctgatccaggccaaccccaagcagggcgccctggccaagaagagcagccagaccaagaagaagaagaaggccttcaacagccccaagaccggccagaacaagaccgtgcagtaccccagcgacatcctggagaacgccagcgtggagctgttcctggacgccaacaagctgcccacccccgtggtggagcaggtggcccagatcaacgacaacagcgagctggagctgaccagcgtggtggagaacaccttccccgcccaggacatcgtgcacaccgtgaccgtgaagagaaagagaggcaagagccagcccaactgcgccctgaaggagcacagcatgagcaacatcgccagcgtgaagagcccctacgaggccgagaacagcggcgaggagctggaccagagatacagcaaggccaagcccatgtgcaacacctgcggcaaggtgttcagcgaggccagcagcctgagaagacacatgagaatccacaagggcgtgaagccctacgtgtgccacctgtgcggcaaggccttcacccagtgcaaccagctgaagacccacgtgagaacccacaccggcgagaagccctacaagtgcgagctgtgcgacaagggcttcgcccagaagtgccagctggtgttccacagcagaatgcaccacggcgaggagaagccctacaagtgcgacgtgtgcaacctgcagttcgccaccagcagcaacctgaagatccacgccagaaagcacagcggcgagaagccctacgtgtgcgacagatgcggccagagattcgcccaggccagcaccctgacctaccacgtgagaagacacaccggcgagaagccctacgtgtgcgacacctgcggcaaggccttcgccgtgagcagcagcctgatcacccacagcagaaagcacaccggcgagaagccctacatctgcggcatctgcggcaagagcttcatcagcagcggcgagctgaacaagcacttcagaagccacaccggcgagagacccttcatctgcgagctgtgcggcaacagctacaccgacatcaagaacctgaagaagcacaagaccaaggtgcacagcggcgccgacaagaccctggacagcagcgccgaggaccacaccctgagcgagcaggacagcatccagaagagccccctgagcgagaccatggacgtgaagcccagcgacatgaccctgcccctggccctgcccctgggcaccgaggaccaccacatgctgctgcccgtgaccgacacccagagccccaccagcgacaccctgctgagaagcaccgtgaacggctacagcgagccccagctgatcttcctgcagcagctgtactag

SEQ ID NO: 301799 - DNA, 1503 bp, Artificial Sequence
  derived and/or modified sequence
atgcagtacagccaccactgcgagcacctgctggagagactgaacaagcagagagaggccggcttcctgtgcgactgcaccatcgtgatcggcgagttccagttcaaggcccacagaaacgtgctggccagcttcagcgagtacttcggcgccatctacagaagcaccagcgagaacaacgtgttcctggaccagagccaggtgaaggccgacggcttccagaagctgctggagttcatctacaccggcaccctgaacctggacagctggaacgtgaaggagatccaccaggccgccgactacctgaaggtggaggaggtggtgaccaagtgcaagatcaagatggaggacttcgccttcatcgccaaccccagcagcaccgagatcagcagcatcaccggcaacatcgagctgaaccagcagacctgcctgctgaccctgagagactacaacaacagagagaagagcgaggtgagcaccgacctgatccaggccaaccccaagcagggcgccctggccaagaagagcagccagaccaagaagaagaagaaggccttcaacagccccaagaccggccagaacaagaccgtgcagtaccccagcgacatcctggagaacgccagcgtggagctgttcctggacgccaacaagctgcccacccccgtggtggagcaggtggcccagatcaacgacaacagcgagctggagctgaccagcgtggtggagaacaccttccccgcccaggacatcgtgcacaccgtgaccgtgaagagaaagagaggcaagagccagcccaactgcgccctgaaggagcacagcatgagcaacatcgccagcgtgaagagcccctacgaggccgagaacagcggcgaggagctggaccagagatacagcaaggccaagcccatgtgcaacacctgcggcaaggtgttcagcgaggccagcagcctgagaagacacatgagaatccacaagggcgtgaagccctacgtgtgccacctgtgcggcaaggccttcacccagtgcaaccagctgaagacccacgtgagaacccacaccggcgagaagccctacaagtgcgagctgtgcgacaagggcttcgcccagaagtgccagctggtgttccacagcagaatgcaccacggcgaggagaagccctacaagtgcgacgtgtgcaacctgcagttcgccaccagcagcaacctgaagatccacgccagaaagcacagcggcgagaagccctacgtgtgcgacagatgcggccagagattcgcccaggccagcaccctgacctaccacgtgagaagacacaccggcgagaagccctacgtgtgcgacacctgcggcaaggccttcgccgtgagcagcagcctgatcacccacagcagaaagcacaccggcgagaagccctacatctgcggcatctgcggcaagagcttcatcagcagcggcgagctgaacaagcacttcagaagccacaccgtggtgtggagcatgaactag

SEQ ID NO: 301800 - protein, 615 aa, Artificial Sequence
  derived and/or modified sequence
MSITFRSDFSNEERFTGFDAHYMAVDVDECKEREDEELSCDHYCHNYIGGYYCSCRFGYILHTDNRTCRVECSDNLFTQRTGVITSPDFPNPYPKSSECLYTIELEEGFMVNLQFEDIFDIEDHPEVPCPYDYIKIKVGPKVLGPFCGEKAPEPISTQSHSVLILFHSDNSGENRGWRLSYRAAGNECPELQPPVHGKIEPSQAKYFFKDQVLVSCDTGYKVLKDNVEMDTFQIECLKDGTWSNKIPTCKIVDCRAPGELEHGLITFSTRNNLTTYKSEIKYSCQEPYYKMLNNNTGIYTCSAQGVWMNKVLGRSLPTCLPECGQPSRSLPSLVKRIIGGRNAEPGLFPWQALIVVEDTSRVPNDKWFGSGALLSASWILTAAHVLRSQRRDTTVIPVSKEHVTVYLGLHDVRDKSGAVNSSAARVVLHPDFNIQNYNHDIALVQLQEPVPLGPHVMPVCLPRLEPEGPAPHMLGLVAGWGISNPNVTVDEIISSGTRTLSDVLQYVKLPVVPHAECKTSYESRSGNYSVTENMFCAGYYEGGKDTCLGDSGGAFVIFDDLSQRWVVQGLVSWGGPEECGSKQVYGVYTKVSNYVDWVWEQMGLPQSVVEPQVER

SEQ ID NO: 301801 - protein, 82 aa, Artificial Sequence
  derived and/or modified sequence
MFCAGYYEGGKDTCLGDSGGAFVIFDDLSQRWVVQGLVSWGGPEECGSKQVYGVYTKVSNYVDWVWEQMGLPQSVVEPQVER

SEQ ID NO: 301802 - protein, 480 aa, Artificial Sequence
  derived and/or modified sequence
MSITFRSDFSNEERFTGFDAHYMAVDVDECKEREDEELSCDHYCHNYIGGYYCSCRFGYILHTDNRTCRVECSDNLFTQRTGVITSPDFPNPYPKSSECLYTIELEEGFMVNLQFEDIFDIEDHPEVPCPYDYIKIKVGPKVLGPFCGEKAPEPISTQSHSVLILFHSDNSGENRGWRLSYRAAGNECPELQPPVHGKIEPSQAKYFFKDQVLVSCDTGYKVLKDNVEMDTFQIECLKDGTWSNKIPTCKIVDCRAPGELEHGLITFSTRNNLTTYKSEIKYSCQEPYYKMLNNNTGIYTCSAQGVWMNKVLGRSLPTCLPECGQPSRSLPSLVKRIIGGRNAEPGLFPWQALIVVEDTSRVPNDKWFGSGALLSASWILTAAHVLRSQRRDTTVIPVSKEHVTVYLGLHDVRDKSGAVNSSAARVVLHPDFNIQNYNHDIALVQLQEPVPLGPHVMPVCLPRLEPPGGRLGHLQSQCDS

SEQ ID NO: 301803 - protein, 426 aa, Artificial Sequence
  derived and/or modified sequence
MEFAELCKQEGIIFIGPPPSAIRDMGIKSTSKSIMAAAGVPVVEGYHGEDQSDQCLKEHARRIGYPVMIKAVRGGGGKGMRIVRSEQEFQEQLESARREAKKSFNDDAMLIEKFVDTPRHVEVQVFGDHHGNAVYLFERDCSVQRRHQKIIEEAPAPGIKSEVRKKLGEAAVRAAKAVNYVGAGTVEFIMDSKHNFCFMEMNTRLQVEHPVTEMITGTDLVEWQLRIAAGEKIPLSQEEITLQGHAFEARIYAEDPSNNFMPVAGPLVHLSTPRADPSTRIETGVRQGDEVSVHYDPMIAKLVVWAADRQAALTKLRYSLRQYNIVGLHTNIDFLLNLSGHPEFEAGNVHTDFIPQHHKQLLLSRKAAAKESLCQAALGLILKEKAMTDTFTLQAHDQFSPFSSSSGRRLNISYTRNMTLKDGKNN

SEQ ID NO: 301804 - DNA, 2156 bp, Artificial Sequence
  derived and/or modified sequence
agtggccgggctccagggacatggcggcggcctctgcggtgtcggtgctgctggtggcggcggagaggaaccggtggcatcgtctcccgagcctgctcctgccgccgaggacatgggtgtggaggcaaagaaccatgaagtacacaacagccacaggcagatgaagcatattccatcggccccgctccctcccagcagagctacctatctatggagaaaatcattcaagtggccaagacctctgctgcacagcacatccaatccataatggctgctgctggagtacctgttgtggagggttatcatggtgaggaccaatcagaccagtgcctgaaggaacacgccaggagaattggctatcctgtcatgattaaagccgtccggggtggaggaggaaaaggaatgaggattgttagatcagaacaagaatttcaagaacagttagagtcagcacggagagaagctaagaagtctttcaatgatgatgctatgctgatcgagaagtttgtagacacaccgaggcatgtagaagtccaggtgtttggtgatcaccatggcaatgctgtgtacttgtttgaaagagactgtagtgtgcagaggcgacatcagaagatcattgaggaggccccagcgcctggtattaaatctgaagtaagaaaaaagctgggagaagctgcagtcagagctgctaaagctgtaaattatgttggagcagggactgtggagtttattatggactcaaaacataatttctgtttcatggagatgaatacaaggctgcaagtggaacatcctgttactgagatgatcacaggaactgacttggtggagtggcagcttagaattgcagcaggagagaagattcctttgagccaggaagaaataactctgcagggccatgccttcgaagctagaatatatgcagaagatcctagcaataacttcatgcctgtggcaggcccattagtgcacctctctactcctcgagcagacccttccaccaggattgaaactggagtacggcaaggagacgaagtttccgtgcattatgaccccatgattgcgaagctggtcgtgtgggcagcagatcgccaggcggcattgacaaaactgaggtacagccttcgtcagtacaatattgttggactgcacaccaacattgacttcttactcaacctgtctggccacccagagtttgaagctgggaacgtgcacactgatttcatccctcaacaccacaaacagttgttgctcagtcggaaggctgcagccaaagagtctttatgccaggcagccctgggtctcatcctcaaggagaaagccatgaccgacactttcactcttcaggcacatgatcaattctctccattttcgtctagcagtggaagaagactgaatatctcgtataccagaaacatgactcttaaagatggtaaaaacaatgtagccatagctgtaacgtataaccatgatgggtcttatagcatgcagattgaagataaaactttccaagtccttggtaatctttacagcgagggagactgcacttacctgaaatgttctgttaatggagttgctagtaaagcgaagctgattatcctggaaaacactatttacctattttccaaggaaggaagtattgagattgacattccagtccccaaatacttatcttctgtgagctcacaagaaactcagggcggccccttagctcctatgactggaaccattgaaaaggtgtttgtcaaagctggagacaaagtgaaagcgggagattccctcatggttatgatcgccatgaagatggagcataccataaagtctccaaaggatggcacagtaaagaaagtgttctacagagaaggtgctcaggccaacagacacactcctttagtcgagtttgaggaggaagaatcagacaaaagggaatcggaataaactccagcaaggaaatggccagttaagtagtgtcttctctctccaccaaaaagaggaagtgcctccagcttttctgggggtctcataaagagcagttttactaaatgattgtatgcttatgctgaacacctttcatattggagaatcatgcatttgggtcactaattatctcaaaatatttcatactaataaagttgaattattttttattggaagcc

SEQ ID NO: 301805 - DNA, 1425 bp, Artificial Sequence
  derived and/or modified sequence
atggccgcagcaagcgcagtgagtgtcttactggttgccgctgaacggaatcgctggcataggctgccaagtctgcttctgccacctcgtacctgggtgtggaggcaacggaccatgaagtataccacagcaaccgatgaagcctacagcatcggacctgccccttcccagcagtcatatctttctatggagaaaatcatacaggttgcgaagacttccgcagcccaggcaattcatcccgggtgtggcttcctgagcgaaaatatggaatttgccgagctgtgcaagcaagaaggaatcatattcattggaccacctccttccgcaatcagggacatgggcatcaagagtactagtaagagtattatggccgctgccggtgtgcctgtagtggagggctaccacggggaagatcagtctgatcagtgcttaaaggagcacgctaggcggatcggttaccctgtgatgattaaggcggtcagggggggtggtggaaagggcatgcgcatcgttcggagtgagcaggaattccaggagcagctggagtccgcgcgtcgagaagccaaaaaatctttcaatgatgacgcaatgcttatcgagaaatttgttgacaccccaaggcatgttgaagtgcaggtatttggagatcaccatggcaatgcggtctatctcttcgagagagactgctcggtgcagcgcaggcatcaaaagattatcgaagaggccccagctccagggattaagtctgaggtgcggaagaagctgggtgaagccgctgtccgggcagccaaagccgtgaactacgtcggagccggcactgtagaattcattatggattccaagcataacttctgctttatggaaatgaacacgagactgcaggtggagcatccagtgactgaaatgatcacaggtacagatctggtggagtggcagcttaggatcgctgctggggagaaaatccctttatcacaggaggagattacgctgcaggggcacgcttttgaagccagaatttacgccgaggatccttccaataattttatgccagtggctggaccacttgtgcacctttccacgcctagagctgatccttccaccagaatcgagactggcgtaaggcagggcgacgaggtcagcgttcactacgatccgatgatcgccaagctggtcgtgtgggccgcggacaggcaggcagctttaaccaagctaagatactcattgcgccagtacaatatcgtagggttacacacaaacctgactagctactcgacctgcttagccactcagagcctcaagctagggacgtgtaccctaatttcctccctcaacaccactaacagttgctgcagtgtggggcggctgcagccaaaatcactgtatgcccggcaaccttgggtatcctcatctagacgaaagccctag

SEQ ID NO: 301806 - DNA, 603 bp, Artificial Sequence
  derived and/or modified sequence
atggagaagatcatccaagtagccaagacttcagcagcgcaggccatacatccaggctgtggcttcctgtcagaaaacatggaatttgccgaactgtgtaaacaggaaggtattatttttattggtcctccaccaagcgccatacgtgatatggggatcaagtcaacatctaagtccattatggctgcggctggtgtacctgtggtggaagggtatcatggcgaggaccagtctgaccagtgcctgaaggaacacgcccggcgaataggatatccagtcatgatcaaagccgtccgagggggcgggggtaagggcatgaggatcgtccggagcgagcaggaatttcaggaacagctggagtccgctcgccgcgaggcaaagaagagcttcaacgatgacgcgatgttaatagagaagtttgtggataccccgaggcacgtggaagtccaggtgtttggcgaccaccacgggaatgctgtgtacttgtttgagcgggattgctccgttcaaagaagacaccagaagattatcgaggaagcccctgcacctggtattaaaagtgaagtgcggaagaagggacgcagttgtagtcagtcctgttag

SEQ ID NO: 301807 - DNA, 1425 bp, Artificial Sequence
  derived and/or modified sequence
atggctgctgccagcgctgtgtctgtgctgctggtggccgctgagaggaaccgctggcaccggctgcccagcctgctgctgccccccaggacctgggtgtggaggcagaggaccatgaagtacaccacagccacagatgaggcctacagcatcggccctgcccccagccagcagagctacctgtccatggagaagatcatccaggtggccaagaccagcgctgcccaggccatccaccctggctgcggcttcctgtctgagaacatggagtttgctgagctgtgcaagcaggagggcatcatcttcatcggccccccacccagcgccatccgggacatgggcatcaagagcaccagcaagagcatcatggctgctgctggggtgcctgtggtggagggctaccatggagaggaccagagcgaccagtgcctgaaggagcacgccaggagaattggctaccctgtgatgatcaaggctgtgcggggcggcggcggcaagggcatgagaattgtgcgctctgagcaggagttccaggagcagctggagagcgcccggcgggaggccaagaagagcttcaatgatgatgccatgctgattgagaagtttgtggacacccccaggcatgtggaggtgcaggtgtttggagaccaccacggcaatgctgtgtacctgtttgagcgggactgcagcgtgcagaggaggcaccagaagatcatcgaggaggccccagcccctggcatcaagtctgaggtgaggaagaagctgggggaggccgctgtgcgggccgccaaggctgtgaactacgtgggcgccggcaccgtggagttcatcatggacagcaagcacaacttctgcttcatggagatgaacacccggctgcaggtggagcaccctgtgacagagatgatcaccggcacagacctggtggagtggcagctgagaattgctgctggggagaagatccccctgagccaggaggagatcaccctgcagggccacgcctttgaggcccgcatctatgcagaggaccccagcaacaacttcatgcctgtggccggccccctggtgcacctgagcacccccagggctgaccccagcaccagaattgaaacaggagtgcggcagggagatgaggtgtctgtgcactatgaccccatgattgccaagctggtggtgtgggccgctgaccggcaggccgccctgaccaagctgcgctacagcctgcggcagtacaacatcgtgggcctgcacaccaacctgaccagctacagcacctgcctggccacccagagcctgaagctgggcacctgcaccctcatcagcagcctgaacaccaccaacagctgctgcagcgtgggccgcctgcagcccaagagcctgtatgcccggcagccctgggtgagcagcagcaggaggaagccctag

SEQ ID NO: 301808 - DNA, 603 bp, Artificial Sequence
  derived and/or modified sequence
atggagaagatcatccaggtggccaagaccagcgctgcccaggccatccaccctggctgcggcttcctgtctgagaacatggagtttgctgagctgtgcaagcaggagggcatcatcttcatcggccccccacccagcgccatccgggacatgggcatcaagagcaccagcaagagcatcatggctgctgctggggtgcctgtggtggagggctaccatggagaggaccagagcgaccagtgcctgaaggagcacgccaggagaattggctaccctgtgatgatcaaggctgtgcggggcggcggcggcaagggcatgagaattgtgcgctctgagcaggagttccaggagcagctggagagcgcccggcgggaggccaagaagagcttcaatgatgatgccatgctgattgagaagtttgtggacacccccaggcatgtggaggtgcaggtgtttggagaccaccacggcaatgctgtgtacctgtttgagcgggactgcagcgtgcagaggaggcaccagaagatcatcgaggaggccccagcccctggcatcaagtctgaggtgaggaagaagggccgcagctgcagccagagctgctag

SEQ ID NO: 301809 - DNA, 1067 bp, Artificial Sequence
  derived and/or modified sequence
atcagcccaaaggtaggctcaggctccgacggtggccggcgggggtcacgaggcttcgtagtggaggaacgggtttggcgtgtgggacgcagctgcctctgtactggggagtcacggagtggccgggctccagggacatggcggcggcctctgcggtgtcggtgctgctggtggcggcggagaggaaccggtggcatcgtctcccgagcctgctcctgccgccgaggacatgggtgtggaggcaaagaaccatgaagtacacaacagccacaggaagaaacattaccaaggtcctcattgcaaacagaggagaaattgcctgcagggtgatgcgcacagccaaaaaactgggtgtacagactgtggcggtttatagtgaggctgacagaaattccatgcatgtagatatggcagatgaagcatattccatcggccccgctccctcccagcagagctacctatctatggagaaaatcattcaagtggccaagacctctgctgcacaggctatccatccaggatgcggttttctctcagaaaacatggaatttgctgaactttgtaagcaagaaggaattatttttataggccctcctccatctgcaattagagacatgggtataaagagcacatccaaatccataatggctgctgctggagtacctgttgtggagggttatcatggtgaggaccaatcagaccagtgcctgaaggaacacgccaggagaattggctatcctgtcatgattaaagccgtccggggtggaggaggaaaaggaatgaggattgttagatcagaacaagaatttcaagaacagttagagtcagcacggagagaagctaagaagtctttcaatgatgatgctatgctgatcgagaagtttgtagacacaccgaggcatgtagaagtccaggtgtttggtgatcaccatggcaatgctgtgtacttgtttgaaagagactgtagtgtgcagaggcgacatcagaagatcattgaggaggccccagcgcctggtattaaatctgaagtaagaaaaaaggggagaagctgcagtcagagctgctaa

SEQ ID NO: 301810 - DNA, 1425 bp, Artificial Sequence
  derived and/or modified sequence
atggccgccgccagcgccgtgagcgtgctgctggtggccgccgagaggaacaggtggcaccggctccccagtcttctcctgccgcctagaacgtgggtttggcgtcaacgaactatgaagtacactaccgctacagacgaagcctactccatcgggccagcgccttcacagcaatcttacctgagtatggagaagatcatccaggtggcaaaaaccagcgccgcccaagcaatccaccccgggtgtgggtttcttagcgagaacatggagttcgccgagttgtgcaaacaagaaggcatcattttcatcggacccccgcccagcgccattcgggacatgggcattaagtcaactagcaaaagcatcatggctgccgccggcgtccccgtggtggaaggataccacggcgaggaccagagcgaccagtgcctgaaagaacatgctaggagaatcggctatcccgtcatgatcaaagccgtccgcgggggcggggggaaaggaatgagaatcgtgcggtcagagcaggaattccaggaacagctagaatctgcccgccgggaggctaaaaagagtttcaacgatgatgccatgctaattgagaaatttgtcgacactcccagacatgtcgaagtccaagtattcggggatcaccacgggaacgccgtgtacctgtttgaaagagattgttctgtgcagcgaaggcatcagaagatcattgaagaagcacccgcacccggcattaaatctgaggtccggaaaaagctgggggaggcagcggtgagagcagctaaggctgtaaactatgtgggggccggcactgttgaattcataatggactctaaacataatttttgcttcatggagatgaatacgcgactgcaggtggaacatcccgttaccgagatgatcacaggcaccgacctggtggaatggcagctgaggatcgcagccggcgaaaaaatcccactgtctcaagaagaaatcaccctgcaaggacacgcttttgaggcacggatttacgcagaagacccaagcaataacttcatgcccgttgccgggccactggtccacctctccacccctagggccgacccgtcaactcgcatcgaaacgggggtacggcagggcgacgaggtgtctgtgcattatgatcctatgatcgcaaagttggtggtatgggccgcagaccgacaagctgccctgacgaagctgagatactcgctgcggcaatataacatcgtggggctgcacactaacttaactagctattcaacctgcttagcaacccagtctttaaagctggggacctgtaccctcatttcctctctcaacacaactaactcctgttgttccgtgggacgcctgcagcccaaaagcttgtacgcacgacagccttgggttagttcctcgcggagaaagccatag

SEQ ID NO: 301811 - DNA, 603 bp, Artificial Sequence
  derived and/or modified sequence
atggagaagatcatccaggtggccaagaccagcgccgcccaggccatccaccccggatgtgggttcctgtctgagaatatggaattcgcagaattatgcaagcaggaaggcatcatcttcataggccctccgccgtctgctataagagatatgggaatcaaatcaaccagtaaatcaatcatggctgctgccggagtaccagttgtggaaggttatcacggagaggaccagagtgaccagtgcctgaaagagcacgcccgtcggatcggctaccctgtgatgatcaaggcagtgcggggaggcggcgggaagggaatgaggattgtgcgtagcgagcaggaatttcaggaacagcttgagagcgcacggagagaggcgaagaagtcctttaacgacgatgcaatgctgatcgaaaagttcgtggataccccccgtcacgtggaagtgcaggtgttcggggaccaccacggcaacgcagtgtatctgttcgaaagagactgctctgttcagcgccgtcaccagaaaatcatcgaagaagccccggcccctggaataaagagtgaagtgaggaagaaggggcggagttgctctcagtcatgctag

SEQ ID NO: 301812 - DNA, 1425 bp, Artificial Sequence
  derived and/or modified sequence
atggcagccgctagtgcagtttctgtgcttctggtggcagctgaaagaaaccgctggcaccgactcccgtcactgttattgccccctcgaacatgggtgtggcgccaaagaaccatgaaatatacaactgccacagacgaagcgtatagtatcggacctgctccatcgcagcaatcctacctctctatggaaaaaattatacaggtcgccaagacgtctgcagcacaagcaattcacccaggatgcgggttcctcagcgaaaacatggagttcgcagaactgtgtaagcaggagggcatcatatttataggccctcctccctctgcaattcgtgatatgggtatcaagtccacatctaaatcaataatggcagctgccggagtgcccgtggttgagggatatcatggcgaagatcagagtgatcagtgtcttaaagaacacgctcgccgaattggctacccggtgatgattaaagccgtcagagggggagggggtaagggcatgcgaatcgtgaggagtgaacaggagttccaggagcagctcgagagcgcacggagagaggccaagaagtctttcaatgatgacgcgatgctcattgagaagtttgtagacacacccaggcatgtggaagtccaggtgttcggggaccatcatggaaacgctgtgtatcttttcgaaagggactgcagtgttcagcgaaggcatcagaagatcatcgaagaagccccagcccctggaattaagtcggaagtgcgtaagaaactcggggaggcagctgtgagagctgcgaaagctgttaactatgtcggcgcagggacagtggagttcatcatggacagcaaacacaatttctgttttatggagatgaatactcgcttgcaggtggagcatccggtgaccgaaatgattacaggaacagacttggtggagtggcaactccgtatcgcggcaggggagaagatccccttgtcacaggaggaaataaccttacaaggccacgcttttgaagccagaatttacgcggaggacccgagtaataactttatgccagtcgctgggcctctggtacatctctccacaccacgtgctgatccctcaactagaatcgagacaggggtgcgccagggcgacgaagtatctgtacactacgacccaatgatcgccaagctggtggtgtgggccgcagaccgccaggctgcattaaccaaattgaggtactctcttcgtcagtacaatatagttggtctacataccaacctgacctcatactctacctgtctcgccacgcagtcgctgaaacttggtacatgcacccttatatcgagcctgaatactaccaatagctgctgcagcgtgggtagactgcagccaaaatcactctatgcaagacagccttgggtgtcatcttctaggcggaagccatag

SEQ ID NO: 301813 - DNA, 603 bp, Artificial Sequence
  derived and/or modified sequence
atggagaaaattattcaggttgcgaaaacatccgcggctcaggccattcacccaggctgtggattcctgagcgagaacatggaattcgcagaattgtgtaaacaggaaggcatcatttttatcggaccaccacctagcgctatacgggatatggggatcaagagtacttctaaatctatcatggctgccgctggcgtccctgttgtcgagggatatcatggcgaagatcaatccgaccagtgcctcaaagagcatgcaagacgaattggctaccctgtgatgataaaagccgtccggggagggggaggcaaggggatgagaattgtgagaagcgagcaggagttccaggagcagctcgagtccgctcgcagggaggctaaaaagtcctttaatgacgatgctatgctgattgagaagttcgtcgacactccacgacatgtggaagtccaggtgttcggcgatcaccatggcaatgccgtgtatttgtttgaaagagactgcagcgtccaaaggcgacatcaaaaaataatagaagaggctcctgccccaggcatcaagtctgaggtgcgcaagaagggaaggtcctgctcccagtcgtgttag

SEQ ID NO: 301814 - DNA, 1425 bp, Artificial Sequence
  derived and/or modified sequence
atggccgccgccagcgccgtgagcgtgctgctggtggccgccgagagaaacagatggcacagactgcccagcctgctgctgccccccagaacctgggtgtggagacagagaaccatgaagtacaccaccgccaccgacgaggcctacagcatcggccccgcccccagccagcagagctacctgagcatggagaagatcatccaggtggccaagaccagcgccgcccaggccatccaccccggctgcggcttcctgagcgagaacatggagttcgccgagctgtgcaagcaggagggcatcatcttcatcggccccccccccagcgccatcagagacatgggcatcaagagcaccagcaagagcatcatggccgccgccggcgtgcccgtggtggagggctaccacggcgaggaccagagcgaccagtgcctgaaggagcacgccagaagaatcggctaccccgtgatgatcaaggccgtgagaggcggcggcggcaagggcatgagaatcgtgagaagcgagcaggagttccaggagcagctggagagcgccagaagagaggccaagaagagcttcaacgacgacgccatgctgatcgagaagttcgtggacacccccagacacgtggaggtgcaggtgttcggcgaccaccacggcaacgccgtgtacctgttcgagagagactgcagcgtgcagagaagacaccagaagatcatcgaggaggcccccgcccccggcatcaagagcgaggtgagaaagaagctgggcgaggccgccgtgagagccgccaaggccgtgaactacgtgggcgccggcaccgtggagttcatcatggacagcaagcacaacttctgcttcatggagatgaacaccagactgcaggtggagcaccccgtgaccgagatgatcaccggcaccgacctggtggagtggcagctgagaatcgccgccggcgagaagatccccctgagccaggaggagatcaccctgcagggccacgccttcgaggccagaatctacgccgaggaccccagcaacaacttcatgcccgtggccggccccctggtgcacctgagcacccccagagccgaccccagcaccagaatcgagaccggcgtgagacagggcgacgaggtgagcgtgcactacgaccccatgatcgccaagctggtggtgtgggccgccgacagacaggccgccctgaccaagctgagatacagcctgagacagtacaacatcgtgggcctgcacaccaacctgaccagctacagcacctgcctggccacccagagcctgaagctgggcacctgcaccctgatcagcagcctgaacaccaccaacagctgctgcagcgtgggcagactgcagcccaagagcctgtacgccagacagccctgggtgagcagcagcagaagaaagccctag

SEQ ID NO: 301815 - DNA, 603 bp, Artificial Sequence
  derived and/or modified sequence
atggagaagatcatccaggtggccaagaccagcgccgcccaggccatccaccccggctgcggcttcctgagcgagaacatggagttcgccgagctgtgcaagcaggagggcatcatcttcatcggccccccccccagcgccatcagagacatgggcatcaagagcaccagcaagagcatcatggccgccgccggcgtgcccgtggtggagggctaccacggcgaggaccagagcgaccagtgcctgaaggagcacgccagaagaatcggctaccccgtgatgatcaaggccgtgagaggcggcggcggcaagggcatgagaatcgtgagaagcgagcaggagttccaggagcagctggagagcgccagaagagaggccaagaagagcttcaacgacgacgccatgctgatcgagaagttcgtggacacccccagacacgtggaggtgcaggtgttcggcgaccaccacggcaacgccgtgtacctgttcgagagagactgcagcgtgcagagaagacaccagaagatcatcgaggaggcccccgcccccggcatcaagagcgaggtgagaaagaagggcagaagctgcagccagagctgctag

SEQ ID NO: 301816 - protein, 319 aa, Artificial Sequence
  derived and/or modified sequence
MSRNETEHRYLGTHFGAESGSPETKKPTFMDEEVQSILTKMTGLNLQKTFKPAIQELKPPTYKLMTQAQLEEATRQAVEAAKVRLKMPPVLEERVPINDVLAEDKILEGTETTKYVFTDISYSIPHRERFIVVREPSGTLRKASWEERDRMIQVYFPKEGRKILTPIIFKEENLRTMYSQDRHVDVLNLCFAQFEPDSTEYIKVHHKTYEDIDKRGKYDLLRSTRYFGGMVWYFVNNKKIDGLLIDQIQRDLIDDATNLVQLYHVLHPDGQSAQGAKDQAAEGINLIKVFAKTEAQKGAYIELTLQTYQEALSRHSAAS

SEQ ID NO: 301817 - DNA, 960 bp, Artificial Sequence
  derived and/or modified sequence
atgtccaggaacgaaaccgagcacagatatctcggcacccacttcggcgctgaaagcggtagccctgaaaccaagaagcctacctttatggatgaggaggtgcagtcaattttaaccaagatgacaggtcttaacctgcagaaaaccttcaaaccagctatacaagagctcaagcctccgacctacaagctgatgactcaggcgcagctcgaggaggctacccgtcaagctgtggaggcagcaaaggtgcgcctgaaaatgcctccagtgctggaggagcgcgtacccataaacgatgtcttggcagaagacaagattctagaaggcacagagactacaaagtacgtatttacggacatctcgtattccataccccaccgtgagaggtttatcgttgtacgcgagccgtccggaactctccgcaaagcctcctgggaggaacgggatcggatgatccaggtatactttcctaaggaaggcagaaagattctcactccaatcatattcaaggaggagaacctccgtacaatgtactcccaggatagacatgtagatgttctcaatctttgcttcgcccagttcgagccagactctaccgaatacatcaaagttcatcataaaacctatgaggacatcgacaagagaggcaagtatgatctcctgcgatcaactagatattttgggggcatggtgtggtactttgtaaataacaaaaagatagacggactcctaatcgatcagatccaaagggaccttatcgacgacgccaccaacctggtgcagttgtaccatgtcctgcatcccgacggacagagcgcccagggtgcaaaagaccaggcagctgaggggattaaccttatcaaagttttcgccaaaacggaagctcagaagggcgcgtatatcgagttaaccctccagacctatcaggaggcgttaagccgccattccgcagcatcctag

SEQ ID NO: 301818 - DNA, 960 bp, Artificial Sequence
  derived and/or modified sequence
atgagcagaaatgaaacagagcaccgctacctgggcacccactttggagctgagagcggcagccctgagaccaagaagcccaccttcatggatgaggaggtgcagagcatcctgaccaagatgacaggcctgaacctgcagaagaccttcaagccagccatccaggagctgaagccacccacctacaagctgatgacccaggcccagctggaggaggccacccggcaggccgtggaggccgccaaggtgcggctgaagatgcctcctgtgctggaggagcgggtgcccatcaatgatgtgctggccgaggacaagatcctggagggcacagagaccaccaagtatgtgttcacagacatctcctacagcatcccccaccgggagcgcttcatcgtggtgcgggagcccagcggcaccctgaggaaggcctcctgggaggagcgggacaggatgatccaggtgtacttccccaaggagggcaggaagatcctgacccccatcatcttcaaggaggagaacctgcggaccatgtacagccaggacagacatgtggatgtgctgaacctgtgctttgcccagtttgagccagacagcacagagtacatcaaggtgcaccacaagacctatgaggacatcgacaagaggggcaagtatgacctgctgcggagcacccgctactttggaggcatggtgtggtactttgtgaacaacaagaagattgatggcctgctgattgaccagatccagagggacctgattgatgatgccaccaacctggtgcagctgtaccacgtgctgcacccagatggccagagcgcccagggcgccaaggaccaggccgctgagggcatcaacctgatcaaggtgtttgccaagacagaggcccagaagggggcctacatcgagctgaccctgcagacctaccaggaggccctgagccgccacagcgctgccagctag

SEQ ID NO: 301819 - DNA, 1065 bp, Artificial Sequence
  derived and/or modified sequence
ggaaggtcagggaagggttcctggcaaatatgaccaaagctgagatctggttagccatgctaaggagaaagcaagaagcttctcaagcataggggacagtagcagatgtccagaaatgagactgagcacagatatttgggaacccattttggagcagaatctggtagcccagagaccaagaaacctacatttatggatgaggaagttcaaagcatactcacgaaaatgacaggcttgaacttgcagaagacttttaagccagctatacaagaactgaagccaccaacctataagctaatgactcaggcacagttggaagaggctacaagacaggcagttgaggcagctaaagtacgattaaaaatgccaccagttctggaagagcgagtaccaataaatgatgtgttagctgaagataagattttggaaggaacagaaacaaccaaatatgtgtttactgatatatcatatagcataccacaccgggagcgttttattgtcgtcagagaaccaagtggcacactacgcaaagcctcttgggaagaacgggaccgaatgatacaagtttatttcccaaaagaaggtcgtaaaattttgacaccaataattttcaaggaagaaaatcttaggactatgtatagccaggacaggcatgttgatgtcctcaatctctgctttgcccagtttgagccagattccacagagtatatcaaggttcatcacaagacctatgaagatatagataaacgtggaaaatatgaccttttacgttcaacaagatactttggtggaatggtgtggtattttgtaaataataaaaagattgatggtttgctgattgaccagattcagagagatttaatcgatgatgcaaccaacttggtccagctgtatcacgtgctccatccagatggccagtcggctcaaggggccaaggatcaggctgctgagggaataaatttaatcaaggtctttgcaaaaacagaagcacagaagggagcctatatagaactaacactgcagacttatcaagaagcactcagtcgccattctgcagcttcctaa

SEQ ID NO: 301820 - DNA, 960 bp, Artificial Sequence
  derived and/or modified sequence
atgagccggaacgagaccgagcaccggtacctgggcacccacttcggcgcagagagtggaagtccagagaccaaaaagccgacctttatggatgaggaagtccagtctatcttaacaaagatgacgggcctgaatctgcagaagactttcaaacccgcgatccaagagttgaagccacctacctacaaactgatgacacaggcccaactggaggaggcgacaagacaggcagtagaggctgccaaggtacggctgaaaatgccccccgttctcgaagagagagtgcctatcaatgatgtcctcgccgaggataagatacttgaagggactgagaccacgaagtatgtattcacagacatcagctactccatcccccaccgtgagcggttcattgttgttcgggagccgtctgggactctgaggaaagcttcctgggaagagcgtgatcgtatgatacaggtgtatttccctaaggaaggccggaagatcttaacccccatcatcttcaaggaggaaaaccttaggacgatgtattctcaggacaggcacgtggatgtgctcaacctctgttttgcccagtttgaaccggactccactgagtacatcaaggtccaccacaaaacatacgaggacattgacaaacggggaaaatacgatttgcttcgctctactcggtactttggaggcatggtgtggtactttgtaaacaacaaaaaaatcgacggtctgttgattgatcaaatacagcgagaccttatcgacgacgctaccaacttggtgcaactttatcacgtactgcaccccgacgggcagtctgcccaaggagccaaggaccaggccgccgaggggattaatctgattaaagtgttcgctaaaaccgaggcccagaaaggagcctacatcgagctgacactccagacctaccaggaggctctttctaggcacagcgcggcatcatag

SEQ ID NO: 301821 - DNA, 960 bp, Artificial Sequence
  derived and/or modified sequence
atgtccagaaacgagaccgagcaccggtacctcggcacgcacttcggagccgagtcaggttccccagaaaccaagaaacccacttttatggacgaagaggtccagtcaatcctcacaaaaatgacgggcctcaatctgcagaaaacgtttaaaccagcgatccaggagctgaaacccccaacctacaagctgatgacccaggcgcagctggaggaggcaaccaggcaggctgtggaggcagctaaagttcggttaaagatgcctcctgtgcttgaggagcgcgtaccaattaacgatgtgcttgctgaggacaagatactggaaggcactgagaccactaagtacgtcttcactgacattagctattcgattccccatagggaacgttttattgtggtgagagagccgtctggaaccctccgaaaagcaagctgggaggagcgagaccgtatgatccaagtgtattttcctaaggaggggcgaaagattttgacgcctatcatcttcaaggaggaaaatctacgcaccatgtactcccaggaccgccacgtcgacgtgcttaacctctgcttcgcgcagtttgaacccgattctactgagtatatcaaagttcaccacaaaacatatgaagatatcgacaaacgcggtaagtatgacttattgcgatctacccgctatttcggcggaatggtctggtacttcgtgaacaataaaaaaatcgatggacttctcatcgatcagatccaaagagacctgatcgatgacgctaccaacctcgtgcaattgtatcacgttttgcaccccgacggccaatcagcacagggcgcaaaagaccaggccgctgaggggattaatcttataaaggtcttcgccaagacagaggcccaaaaaggagcatatatagagctgacgttacaaacttaccaggaggcactgagccgccactccgccgctagctag

SEQ ID NO: 301822 - DNA, 960 bp, Artificial Sequence
  derived and/or modified sequence
atgagcagaaacgagaccgagcacagatacctgggcacccacttcggcgccgagagcggcagccccgagaccaagaagcccaccttcatggacgaggaggtgcagagcatcctgaccaagatgaccggcctgaacctgcagaagaccttcaagcccgccatccaggagctgaagccccccacctacaagctgatgacccaggcccagctggaggaggccaccagacaggccgtggaggccgccaaggtgagactgaagatgccccccgtgctggaggagagagtgcccatcaacgacgtgctggccgaggacaagatcctggagggcaccgagaccaccaagtacgtgttcaccgacatcagctacagcatcccccacagagagagattcatcgtggtgagagagcccagcggcaccctgagaaaggccagctgggaggagagagacagaatgatccaggtgtacttccccaaggagggcagaaagatcctgacccccatcatcttcaaggaggagaacctgagaaccatgtacagccaggacagacacgtggacgtgctgaacctgtgcttcgcccagttcgagcccgacagcaccgagtacatcaaggtgcaccacaagacctacgaggacatcgacaagagaggcaagtacgacctgctgagaagcaccagatacttcggcggcatggtgtggtacttcgtgaacaacaagaagatcgacggcctgctgatcgaccagatccagagagacctgatcgacgacgccaccaacctggtgcagctgtaccacgtgctgcaccccgacggccagagcgcccagggcgccaaggaccaggccgccgagggcatcaacctgatcaaggtgttcgccaagaccgaggcccagaagggcgcctacatcgagctgaccctgcagacctaccaggaggccctgagcagacacagcgccgccagctag

SEQ ID NO: 301823 - protein, 941 aa, Artificial Sequence
  derived and/or modified sequence
MKGSNRNKDHSAEGEGVGKRPKRKCLQWHPLLAKKLLDFSEEEEEEDEEEDIDKVQLLGADGLEQDVGETEDDESPEQRARRPMNAFLLFCKRHRSLVRQEHPRLDNRGATKILADWWAVLDPKEKQKYTDMAKEYKDAFMKANPGYKWCPTTNKPVKSPTPTVNPRKKLWAFPSDSSRDLPSPKKAKTEEMPQLNFGMADPTQMGGLSMLLLAGEHALGTPEVSSGTCRPDVSESPELRQKSPLFQFAEISSSTSHSDASTKQCQTSALFQFAEISSNTSQLGGAEPVKRCGKSALFQLAEMCLASEGMKMEESKLIKAKESDGGRIKELEKGKEEKEIKMEKTDETRLQKEAEFEKSAKENLRDSKELRNFEALQIDDIMAIKMEDPKEIRKEELEEDHKCSHFPDFSYSASSKIIISDVPSRKDHMCHPHGIMIIEDPAALNKPEKLKKKKKKSKMDRHGNDKSTPKKTCKKRQSSESDIESVIYTIEAVAKGDWGIEKLGDTPRKKVRTSSSGKGSILDAKPPKKKVKSREKKMSKEKSSDTTKESRPPDFISISASKNISGETPEGIKAEPLTPMEDALPPSLSGQAKPEDSDCHRKIETCGSRKSERSCKGALYKTLVSEGMLTSLRANVDRGKRSSGKGNSSDHEGCWNEESWTFSQSGTSGSKKFKKTKPKEDCLLGSAKLDEEFEKKFNSLPQYSPVTFDRKCVPVPRKKKKTGNVSSEPTKTSKGPFQSQKKNLFHKIVSKYKHKKEKPNVPEKGSGDKWSNKQLFLDAIHPTEAIFSEDRNTMEPVHKVKNIPSIFNTPEPTTTQEPLVGSQKRKARKTKITHLVRTADGRVSPAGGTLDDKPKEQLQRSLPKATETDCNDKCSHNTEVGETRSSTPEMPAVSAFFSLAALAEVAAMENVHRGQRSTPLTHDGQPKEMPQAPVLISCADQ

SEQ ID NO: 301824 - DNA, 75 bp, Artificial Sequence
  derived and/or modified sequence
atgaaaggctccaatcggaataaagatcacagcgctgagggcgaaggcgtcggcaagaggcccaagaggaaatag

SEQ ID NO: 301825 - DNA, 42 bp, Artificial Sequence
  derived and/or modified sequence
atgaagggctcaaaccgcaataaagaccactccgccgagtag

SEQ ID NO: 301826 - DNA, 75 bp, Artificial Sequence
  derived and/or modified sequence
atgaagggcagcaacagaaacaaggaccacagcgctgagggggagggcgtgggcaagaggcccaagaggaagtag

SEQ ID NO: 301827 - DNA, 42 bp, Artificial Sequence
  derived and/or modified sequence
atgaagggcagcaacagaaacaaggaccacagcgctgagtag

SEQ ID NO: 301828 - DNA, 75 bp, Artificial Sequence
  derived and/or modified sequence
atgaagggcagcaaccggaacaaggaccacagcgccgagggcgagggagtgggcaaaagaccaaaacggaagtag

SEQ ID NO: 301829 - DNA, 42 bp, Artificial Sequence
  derived and/or modified sequence
atgaagggcagcaaccggaacaaggaccacagcgccgagtag

SEQ ID NO: 301830 - DNA, 75 bp, Artificial Sequence
  derived and/or modified sequence
atgaagggctcaaatcggaataaggatcatagtgccgagggtgaaggcgttgggaagcgacctaagcggaagtag

SEQ ID NO: 301831 - DNA, 42 bp, Artificial Sequence
  derived and/or modified sequence
atgaagggatcgaatcgcaacaaagaccactccgctgagtag

SEQ ID NO: 301832 - DNA, 3517 bp, Artificial Sequence
  derived and/or modified sequence
atgtggagcagtgtacagtgaagcggaggcagagcggctccgcgagcttctctccactttcccatagagaaaccctgactggccgctgagggctagctacacacacgccctcacgcccggcgagcccgcgaggtcactatcatatgacaaaggctttgccgcagttcatcttcctccctgtgtactttccatttgccttcctggaatcctgctgcatcacagaagctggaagttctgatgttccactgaaatcacaatggaaagtcttgacttgactggtcacagtaatgaaaggcagtaatagaaataaggatcattcagcagaaggagaaggggttggaaaacgaccaaaacgaaagtgtcttcagtggcatccattgctagcaaagaaacttcttgatttttcagaagaggaagaagaggaagacgaagaggaggatattgataaggttcaacttcttggggccgatggcctagagcaagatgttggtgaaactgaagatgatgaatcaccagagcagcgagcccggagaccaatgaatgcatttcttttattttgcaaacgccatcgctctcttgtacgtcaggaacaccccaggcttgataaccgaggtgctaccaagatactagctgattggtgggctgttcttgatccaaaggaaaagcagaaatacacagacatggccaaggagtataaggatgcatttatgaaagcaaatcctggctacaaatggtgtcctaccacaaacaagcctgtgaaatccccaacacccactgtcaatccacgaaagaaactttgggccttcccatctgactcttcaagagacttgccaagccccaagaaagcaaagactgaagaaatgcctcagcttaactttggaatggctgatcctactcaaatgggaggcctgagtatgctgctgttagctggagaacatgctcttggcacaccagaggtatcctctggcacatgcaggcctgatgtttcagaatctcctgaattacgtcagaagtcaccattgtttcagtttgccgagatatcttcaagtacgtcccactctgatgcttctacaaagcagtgtcaaacatctgccttgtttcagtttgcagagatttcttcaaacacttcgcagttgggtggtgctgagcctgtaaaacgctgtggaaagtctgcactctttcaactggcagagatgtgcctggcatcagaagggatgaaaatggaagaatcaaagctaataaaagcaaaagaatccgatggtggaagaattaaagaattagagaagggaaaggaagaaaaagaaattaaaatggagaaaacagatgaaactaggttacagaaggaagcagaatttgaaaaatcggctaaggaaaatttaagagattctaaggaattgagaaattttgaggcattgcaaatagatgacataatggctataaaaatggaagatcccaaagaaattagaaaggaagagttagaagaagatcacaaatgtagtcattttcctgatttttcttattctgccagtagcaagataataattagtgatgttcccagtagaaaggatcatatgtgccatcctcatggaattatgatcattgaggatcccgcagcattaaacaagccagaaaagctaaaaaagaaaaagaagaaaagcaaaatggatcgacatggaaatgataaatccacacccaagaagacttgcaaaaagaggcagtcttcggaatctgacattgagagcgtcatatataccattgaagccgtcgcaaaaggagactggggcatagagaaacttggagatacccctcgcaagaaggtccgcacatcctcaagtggcaagggaagcattttggatgccaagccaccaaagaaaaaagtgaaatcaagagagaagaaaatgtcaaaggagaaatcctcagacaccaccaaagagtcaagacctccagatttcattagtatttctgctagcaagaacatttctggtgagacaccagagggtataaaagcagaaccattgacccctatggaagatgcactaccacccagcctatcaggacaggccaagcctgaggacagtgactgtcacagaaaaatagaaacttgtggttccaggaaatccgagaggtcttgcaaaggtgctctttataaaaccctggtgtctgagggcatgctcacctctctgcgagctaatgttgacagaggaaaacgaagctcaggaaaaggaaactcctctgatcatgaagggtgttggaatgaagaaagctggacatttagtcagagtgggaccagtgggagcaagaagttcaagaagacaaagccaaaagaagactgtctccttggctccgcaaagctggatgaagaatttgaaaaaaaattcaacagcctccctcaatatagtcctgttacatttgaccggaaatgtgtacctgtcccaagaaaaaagaagaagactggaaatgtgtcctcagaaccgactaaaaccagcaaaggtcctttccagtctcagaaaaagaacttattccacaaaattgtcagcaaatataagcacaaaaaggagaagcccaatgttccggaaaaaggaagtggggataaatggtcaaacaagcaactcttcttggatgccattcaccctacagaagccatattttcagaagacagaaacaccatggagcctgttcataaggttaaaaatatcccatccattttcaacactccagagccaacaacaacgcaagaacctttggtgggcagccaaaagagaaaagcaaggaaaaccaagattacacaccttgtcaggacagcagatggccgggtatcaccagcaggaggtactttggatgacaaaccaaaggaacaactgcagaggagtctccctaaagcaactgagacagactgcaatgacaaatgctcacacaacaccgaggtcggggagacgcggagcagtactccagaaatgcctgccgtgtctgcgttctttagcctcgctgcgctggctgaagtggcagccatggaaaatgtgcacagaggtcagaggtcaactccgctcacccatgatggacagccaaaagaaatgccgcaggctcctgtacttatttcctgcgctgaccagtgaagcgccctttcattgtaaaacattgtgctttacctactaccctagccttgtctttaccgagggatgctagtgagtccaagtggtggaaaatatagactgcaaacaagtgcttgttgccccacacggcccagattcacttgaagcagaagttagcatcctgggccagtttgttctctcagaacccagaatctttgagggtaaggttatctgtctgatactgagcagaaacagaatgatcctggagctttgctttctattgaaggcttttgacggtaataggtggtaacttggtaaaaggctgcctttactgtagctcacccagcatctcttttaccaaccagagagtgtgaaactagtttcatatattacctagttattctttcaaaacaaaacaaaaaaaaaac

SEQ ID NO: 301833 - DNA, 1586 bp, Artificial Sequence
  derived and/or modified sequence
agttcgagcaggcacgggcacggggacaccccactcgttgctcctccgttatggaaaggtgtttagcagacttttacgcccggagtgtcactatcatatgacaaaggctttgccgcagttcatcttcctccctgtgtactttccatttgccttcctggaatcctgctgcatcacagaagctggaagttctgatgttccactgaaatcacaatggaaagtcttgacttgactggtcacagtaatgaaaggcagtaatagaaataaggatcattcagcagaaggagaaggggttggaaaacgaccaaaacgaaagtgtcttcagtggcatccattgctagcaaagaaacttcttgatttttcagaagaggaagaagaggaagacgaagaggaggatattgataaggttcaacttcttggggccgatggcctagagcaagatgttggtgaaactgaagatgatgaatcaccagagcagcgagcccggagaccaatgaatgcatttcttttattttgcaaacgccatcgctctcttgtacgtcaggaacaccccaggcttgataaccgaggtgctaccaagatactagctgattggtgggctgttcttgatccaaaggaaaagcagaaatacacagacatggccaaggagtataaggatgcatttatgaaagcaaatcctggctacaaatggtgtcctaccacaaacaagcctgtgaaatccccaacacccactgtcaatccacgaaagaaactttgggccttcccatctgactcttcaagagacttgccaagccccaagaaagcaaagactgaagaaatgcctcagcttaactttggaatggctgatcctactcaaatgggaggcctgagtatgctgctgttagctggagaacatgctcttggcacaccagaggtatcctctggcacatgcaggcctgatgtttcagaatctcctgaattacgtcagaagtcaccattgtttcagtttgccgagatatcttcaagtacgtcccactctgatgcttctacaaagcagtgtcaaacatctgccttgtttcagtttgcagagatttcttcaaacacttcgcagttgggtggtgctgagcctgtaaaacgctgtggaaagtctgcactctttcaactggcagagatgtgcctggcatcagaagggatgaaaatggaagaatcaaagctaataaaagcaaaagaatccgatggtggaagaattaaagaattagagaagggaaaggaagaaaaagaaattaaaatggagaaaacagatgaaactaggttacagaaggaagcagaatttgaaaaatcggctaaggaaaatttaagagattctaaggaattgagaaattttgaggcattgcaaatagatgacataatggctataaaaatggaagatcccaaagaaattagaaaggaagagttagaagaagatcacaaatgtagtcattttcctgatttttcttattctgccagtagcaagataataattagtgatgttcccagtagaaaggatcatatgtgccatcctcatggaattatgatcattgaggatcccgcagcattaaacaagccagaaa

SEQ ID NO: 301834 - DNA, 550 bp, Artificial Sequence
  derived and/or modified sequence
tcttacttacttacctggaagcagtgaggcagtcaagaattatgtgctgtcagagctggtctcagcatgatcaaggaagtgtgatcattggatatttttttcttgtcaattttattattttttaaagtgtgacttttattgatctccattatcaagcatatgggccactgaaaacttctgagcaatggatataaatgagatggaacagaaggaaaaaaaggtagacattggaaagactggtttagggggctttactattatcctagatggggaaactgaagaacagagaggtgaaattatctgcccaaggttacgctgctaataagtggcaaagctggaattcaaactcaggctgtctggctgcagggtttgttctcctaaccacaccaccacactgcctgtagattatcctcacatgtttgggtatccttttacattcatgtgcatgaatgcactgtttatttttaacgtcacagtaatgaaaggcagtaatagaaataaggatcattcagcagaaggagaaggggttggaaaacgaccaaaacgaaag

SEQ ID NO: 301835 - DNA, 702 bp, Artificial Sequence
  derived and/or modified sequence
ggaggaggggaagaaggaggaagaggaggagagggaggcgttttctgcccagaccgccgccagttcgagcaggcacgggcacggggacaccccactcgttgctcctccgttatggaaaggtcactatcatatgacaaaggctttgccgcagttcatcttcctccctgtgtactttccatttgccttcctggaatcctgctgcatcacagaagctggaagttctgatgttccactgaaatcacaatggaaagtcttgacttgactggcaccctcaggaagaccccaagcctctagcagtacctggtatcatctccagcatgttatagatgtggaggattcactgggatattgagaaataccagaggcgaattgttccactgtagtcacagtaatgaaaggcagtaatagaaataaggatcattcagcagaaggagaaggggttggaaaacgaccaaaacgaaagtgtcttcagtggcatccattgctagcaaagaaacttcttgatttttcagaagaggaagaagaggaagacgaagaggaggatattgataaggttcaacttcttggggccgatggcctagagcaagatgttggtgaaactgaagatgatgaatcaccagagcagcgagcccggagaccaatgaatgcatttcttttattttgcaaacgccatcgctctcttgtacgtcaggaacaccccag

SEQ ID NO: 301836 - DNA, 552 bp, Artificial Sequence
  derived and/or modified sequence
acatcttacttacttacctggaagcagtgaggcagtcaagaattatgtgctgtcagagctggtctcagcatgatcaaggaagtgtgatcattggatatttttttcttgtcaattttattattttttaaagtgtgacttttattgatctccattatcaaatgctctttgacttaaaatggggctacatcctgatacactcactgtcacagtaatgaaaggcagtaatagaaataaggatcattcagcagaaggagaaggggttggaaaacgaccaaaacgaaagtgtcttcagtggcatccattgctagcaaagaaacttcttgatttttcagaagaggaagaagaggaagacgaagaggaggatattgataaggttcaacttcttggggccgatggcctagagcaagatgttggtgaaactgaagatgatgaatcaccagagcagcgagcccggagaccaatgaatgcatttcttttattttgcaaacgccatcgctctcttgtacgtcaggaacaccccaggcttgataaccgaggtgctaccaagatact

SEQ ID NO: 301837 - DNA, 392 bp, Artificial Sequence
  derived and/or modified sequence
gggctggggagtagtaggccagccggtgccaggctgcgtttgcaaccagcacctctcggcacacaggcagcgccgcctgagaggggcacgggcgccggggcgcgggctggagcggccccaggaaaacaacaacagagccctcacgccggcgggcggctcgtggccgcccggggagccccaaacttcatctcggcgaaagtcactatcatatgacaaaggctttgccgcagttcatcttcctccctgtgtactttccatttgccttcctggaatcctgctgcatcacagaagctggaagttctgatgttccactgaaatcacaatggaaagtcttgacttgactggtcacagtaatgaaaggcagtaatagaaataaggatcattcagcagaa

SEQ ID NO: 301838 - DNA, 581 bp, Artificial Sequence
  derived and/or modified sequence
agactcgaggtttcttttcctcctccacctcgtctcgctcactcaccctctgaaatttattatcatattttatttattttttggtattgtatgaaacttaacataactgagaccgaacccgagtcctgtaatttacaaggaccctgaatcccagaatctggaacacgtttatgtgtgaaatagccgcgatcatttctgctaaatgaggaaggtcactatcatatgacaaaggctttgccgcagttcatcttcctccctgtgtactttccatttgccttcctggaatcctgctgcatcacagaagctggaagttctgatgttccactgaaatcacaatggaaagtcttgacttgactggtcacagtaatgaaaggcagtaatagaaataaggatcattcagcagaaggagaaggggttggaaaacgaccaaaacgaaagtgtcttcagtggcatccattgctagcaaagaaacttcttgatttttcagaagaggaagaagaggaagacgaagaggaggatattgataaggttcaacttcttggggccgatggcctagagcaagatgttggtgaaactgaaga

SEQ ID NO: 301839 - DNA, 556 bp, Artificial Sequence
  derived and/or modified sequence
atgcattctgaataacataaactgaaatagtaagctgaaatataacaagtctgggtttttttttttttttttttgcattagaaatttatttttgctgttgtatttttagacggtcctagctagtagatgcatgcttttcacgtttggatatcagagttggatatggtttgaatcccagctgtactagcttttaaacgttgggcaatctacttcacaatgctgaatctcaatttccacatgtgtaaactaacaccggaaatatttacctcaaagagtcctgagtacgtgctaggtcacagtaatgaaaggcagtaatagaaataaggatcattcagcagaaggagaaggggttggaaaacgaccaaaacgaaagtgtcttcagtggcatccattgctagcaaagaaacttcttgatttttcagaagaggaagaagaggaagacgaagaggaggatattgataaggttcaacttcttggggccgatggcctagagcaagatgttggtgaaactgaagatgatgaatcaccagagcagcgagcccggagaccaatgaat

SEQ ID NO: 301840 - DNA, 513 bp, Artificial Sequence
  derived and/or modified sequence
agactcgaggtttcttttcctcctccacctcgtctcgctcactcaccctctgaaatttattatcatattttatttattttttggtattgtatgaaacttaacataactgagaccgaacccgagtcctgtaatttacaaggaccctgaatcccagaatctggaacacgtttatgtgtgaaatagccgcgatcatttctgctaaatgaggaaggtcacagtaatgaaaggcagtaatagaaataaggatcattcagcagaaggagaaggggttggaaaacgaccaaaacgaaagtgtcttcagtggcatccattgctagcaaagaaacttcttgatttttcagaagaggaagaagaggaagacgaagaggaggatattgataaggttcaacttcttggggccgatggcctagagcaagatgttggtgaaactgaagatgatgaatcaccagagcagcgagcccggagaccaatgaatgcatttcttttattttgcaaacgccatcgctctcttgt

SEQ ID NO: 301841 - DNA, 75 bp, Artificial Sequence
  derived and/or modified sequence
atgaagggcagcaacagaaacaaggaccacagcgccgagggcgagggcgtgggcaagagacccaagagaaagtag

SEQ ID NO: 301842 - DNA, 42 bp, Artificial Sequence
  derived and/or modified sequence
atgaagggcagcaacagaaacaaggaccacagcgccgagtag

SEQ ID NO: 301843 - protein, 149 aa, Artificial Sequence
  derived and/or modified sequence
MKGSNRNKDHSAEGEGVGKRPKRKCLQWHPLLAKKLLDFSEEEEEEDEEEDIDKVQLLGADGLEQDVGETEDDESPEQRARRPMNAFLLFCKRHRSLVRQEHPRLDNRGATKILADWWAVLDPKEKQKYTDMAKEYKDAFMKANPGYKW

SEQ ID NO: 301844 - protein, 159 aa, Artificial Sequence
  derived and/or modified sequence
MKGSNRNKDHSAEGEGVGKRPKRKCLQWHPLLAKKLLDFSEEEEEEDEEEDIDKVQLLGADGLEQDVGETEDDESPEQRARRPMNAFLLFCKRHRSLVRQEHPRLDNRGATKILADWWAVLDPKEKQKYTDMAKEYKDAFMKANPGYKWCPTTNKPVKS

SEQ ID NO: 301845 - protein, 71 aa, Artificial Sequence
  derived and/or modified sequence
MKGSNRNKDHSAEGEGVGKRPKRKCLQWHPLLAKKLLDFSEEEEEEDEEEDIDKVQLLGADGLEQDVGETE

SEQ ID NO: 301846 - protein, 85 aa, Artificial Sequence
  derived and/or modified sequence
MKGSNRNKDHSAEGEGVGKRPKRKCLQWHPLLAKKLLDFSEEEEEEDEEEDIDKVQLLGADGLEQDVGETEDDESPEQRARRPMN

SEQ ID NO: 301847 - protein, 448 aa, Artificial Sequence
  derived and/or modified sequence
MKGSNRNKDHSAEGEGVGKRPKRKCLQWHPLLAKKLLDFSEEEEEEDEEEDIDKVQLLGADGLEQDVGETEDDESPEQRARRPMNAFLLFCKRHRSLVRQEHPRLDNRGATKILADWWAVLDPKEKQKYTDMAKEYKDAFMKANPGYKWCPTTNKPVKSPTPTVNPRKKLWAFPSDSSRDLPSPKKAKTEEMPQLNFGMADPTQMGGLSMLLLAGEHALGTPEVSSGTCRPDVSESPELRQKSPLFQFAEISSSTSHSDASTKQCQTSALFQFAEISSNTSQLGGAEPVKRCGKSALFQLAEMCLASEGMKMEESKLIKAKESDGGRIKELEKGKEEKEIKMEKTDETRLQKEAEFEKSAKENLRDSKELRNFEALQIDDIMAIKMEDPKEIRKEELEEDHKCSHFPDFSYSASSKIIISDVPSRKDHMCHPHGIMIIEDPAALNKPE

SEQ ID NO: 301848 - protein, 144 aa, Artificial Sequence
  derived and/or modified sequence
MKGSNRNKDHSAEGEGVGKRPKRKCLQWHPLLAKKLLDFSEEEEEEDEEEDIDKVQLLGADGLEQDVGETEDDESPEQRARRPMNAFLLFCKRHRSLVRQEHPRLDNRGATKILADWWAVLDPKEKQKYTDMAKEYKDAFMKAN

SEQ ID NO: 301849 - protein, 302 aa, Artificial Sequence
  derived and/or modified sequence
MVSYHKQACEIPPTVNPRKKLWAFPSDSSRDLPSPKKAKTEEMPQLNFGMADPTQMGGLSMLLLAGEHALGTPEVSSGTCRPDVSESPELRQKSPLFQFAEISSSTSHSDASTKQCQTSALFQFAEISSNTSQLGGAEPVKRCGKSALFQLAEMCLASEGMKMEESKLIKAKESDGGRIKELEKGKEEKEIKMEKTDETRLQKEAEFEKSAKENLRDSKELRNFEALQIDDIMAIKMEDPKEIRKEELEEDHKCSHFPDFSYSASSKIIISDVPSRKDHMCHPHGIMIIEDPAALNKPEKLK

SEQ ID NO: 301850 - protein, 193 aa, Artificial Sequence
  derived and/or modified sequence
MKGSNRNKDHSAEGEGVGKRPKRKCLQWHPLLAKKLLDFSEEEEEEDEEEDIDKVQLLGADGLEQDVGETEDDESPEQRARRPMNAFLLFCKRHRSLVRQEHPRLDNRGATKILADWWAVLDPKEKQKYTDMAKEYKDAFMKANPGYKWCPTTNKPVKSPTPTVNPRKKLWAFPSDSSRDLPSPKKAKTEEMP

SEQ ID NO: 301851 - protein, 166 aa, Artificial Sequence
  derived and/or modified sequence
MKGSNRNKDHSAEGEGVGKRPKRKCLQWHPLLAKKLLDFSEEEEEEDEEEDIDKVQLLGADGLEQDVGETEDDESPEQRARRPMNAFLLFCKRHRSLVRQEHPRLDNRGATKILADWWAVLDPKEKQKYTDMAKEYKDAFMKANPGYKWCPTTNKPVKSPTPTVNP

SEQ ID NO: 301852 - protein, 114 aa, Artificial Sequence
  derived and/or modified sequence
MKGSNRNKDHSAEGEGVGKRPKRKCLQWHPLLAKKLLDFSEEEEEEDEEEDIDKVQLLGADGLEQDVGETEDDESPEQRARRPMNAFLLFCKRHRSLVRQEHPRLDNRGATKIL

SEQ ID NO: 301853 - protein, 98 aa, Artificial Sequence
  derived and/or modified sequence
MKGSNRNKDHSAEGEGVGKRPKRKCLQWHPLLAKKLLDFSEEEEEEDEEEDIDKVQLLGADGLEQDVGETEDDESPEQRARRPMNAFLLFCKRHRSLV

SEQ ID NO: 301854 - DNA, 909 bp, Artificial Sequence
  derived and/or modified sequence
atggtctcttaccacaagcaggcatgtgaaataccaccgactgtgaaccccaggaaaaagttgtgggcgttcccgagcgacagcagcagggatctgccaagcccaaagaaggctaagactgaggagatgccccaactcaactttggaatggccgatcccactcagatgggcggtcttagcatgttgctcctggctggcgagcacgccctcgggactccagaggtgtcttctgggacctgccgtcctgatgtgagcgaatctccggaactgcggcagaagagccctctcttccagttcgccgagatcagttccagcacaagccatagcgacgcttccacgaaacagtgtcagacctctgcactgtttcaatttgcagaaatcagctcaaatacttcacaactgggcggggcagaacccgtcaaacgatgcggcaaatccgcactctttcaactggccgagatgtgtttggcaagcgaggggatgaagatggaggaaagtaagctaattaaggcaaaggaatccgatggcgggcggatcaaagaactggaaaagggcaaggaggaaaaagagatcaaaatggagaaaacggacgaaaccagactgcagaaagaggccgagtttgaaaaaagcgccaaggagaacctgagagatagtaaggaactgagaaactttgaggcacttcagattgatgacatcatggcaatcaagatggaagacccaaaagaaatcagaaaggaggagctggaggaggaccacaagtgctcccatttcccagactttagctactccgcctcctcaaaaatcattatttctgatgtgccctctcggaaggatcatatgtgccacccacacggcattatgattattgaggaccccgcagctcttaacaagcctgagaagctaaaatag

SEQ ID NO: 301855 - DNA, 1347 bp, Artificial Sequence
  derived and/or modified sequence
atgaagggttctaaccggaacaaggaccatagcgccgagggtgaaggggtgggaaagaggccgaaacgtaagtgcttacagtggcacccactgctggccaaaaaacttctggatttctccgaggaggaagaagaggaggacgaggaggaagacattgacaaagtgcagctgctgggtgctgacggcctggagcaggacgttggcgaaaccgaagatgatgaatcaccagagcaaagggcccggaggcccatgaacgcgttcttacttttctgcaaaagacatcggtcgctggtacgacaggaacatccacgtttggacaaccgcggagctacaaaaatcctggcagactggtgggccgtcctggacccaaaggagaagcagaaatacacggacatggccaaggaatataaggacgcattcatgaaggctaatcccggatataagtggtgtccaacgaccaataaaccagtaaaatctcctactcctactgtaaatcccaggaagaagctgtgggcttttcccagcgactcttccagggatctgccaagccccaaaaaggccaagacggaggagatgcctcagcttaactttggcatggctgatcccacacagatgggcggactgagtatgcttctccttgccggagagcatgccttggggacccccgaagtgtcctccgggacttgccggcccgacgtgagtgagagccccgaactcaggcagaagtctcctctgttccagtttgccgagatctcctcaagtacctcgcatagcgacgcaagcacgaagcagtgtcagactagtgccctctttcaattcgctgaaatctcttctaacacgtctcagctgggaggcgctgaacctgtgaagcgttgcgggaaaagtgcgctctttcagctagcagagatgtgcctggcatctgagggcatgaagatggaggagagtaagcttataaaggcaaaagaaagtgatggggggcggataaaggagttggagaaggggaaggaggagaaggaaatcaagatggagaagactgacgagaccaggttgcaaaaagaagccgaatttgaaaagtccgcaaaagagaatttaagggacagcaaagaactgaggaatttcgaggctttacagattgatgatatcatggccatcaaaatggaagaccccaaagagatccgtaaggaggagcttgaggaggatcacaagtgcagccactttccagacttttcttacagcgccagtagcaaaattatcattagtgatgtcccgtcccgtaaggatcacatgtgccaccctcacggaatcatgattatcgaggacccagccgcactcaataagcccgagtag

SEQ ID NO: 301856 - DNA, 909 bp, Artificial Sequence
  derived and/or modified sequence
atggtgtcctaccacaagcaggcctgtgagatcccccccaccgtgaaccccaggaagaagctgtgggccttccccagcgacagcagccgggacctgcccagccccaagaaggccaagacagaggagatgccccagctgaactttggcatggctgaccccacccagatgggcggcctgtccatgctgctgctggccggggagcacgccctgggcaccccagaggtgagcagcggcacctgcaggccagatgtgtctgagagccctgagctgcggcagaagagccccctcttccagtttgctgagatcagcagcagcaccagccacagtgatgccagcaccaagcagtgccagaccagcgccctcttccagtttgctgagatcagcagcaacaccagccagctgggcggcgctgagcctgtgaagagatgtgggaagagcgccctcttccagctggccgagatgtgcctggccagcgagggcatgaagatggaggagagcaagctgatcaaggccaaggagagtgatggcggccgcatcaaggagctggagaagggcaaggaggagaaggagatcaagatggagaagacagatgagacccggctgcagaaggaggccgagtttgagaagagcgccaaggagaacctgcgggacagcaaggagctgaggaactttgaggccctgcagattgatgacatcatggccatcaagatggaggaccccaaggagatcaggaaggaggagctggaggaggaccacaagtgcagccacttcccagacttctcctacagcgccagcagcaagatcatcatcagtgatgtgcccagcaggaaggaccacatgtgccacccccacggcatcatgatcatcgaggaccctgctgccctgaacaagccagagaagctgaagtag

SEQ ID NO: 301857 - DNA, 1347 bp, Artificial Sequence
  derived and/or modified sequence
atgaagggcagcaacagaaacaaggaccacagcgctgagggggagggcgtgggcaagaggcccaagaggaagtgcctgcagtggcaccccctgctggccaagaagctgctggacttcagcgaggaggaggaggaggaggatgaggaggaggacatcgacaaggtgcagctgctgggcgcagatggcctggagcaggatgtgggggagacagaagatgatgagagccctgagcagagggcccggcggcccatgaatgccttcctgctcttctgcaagaggcacaggagcctggtgcggcaggagcacccccggctggacaacagaggagccaccaagatcctggccgactggtgggccgtgctggaccccaaggagaagcagaagtacacagacatggccaaggagtacaaggatgccttcatgaaggccaaccctggctacaagtggtgccccaccaccaacaagcctgtgaagagccccacccccaccgtgaaccccaggaagaagctgtgggccttccccagcgacagcagccgggacctgcccagccccaagaaggccaagacagaggagatgccccagctgaactttggcatggctgaccccacccagatgggcggcctgtccatgctgctgctggccggggagcacgccctgggcaccccagaggtgagcagcggcacctgcaggccagatgtgtctgagagccctgagctgcggcagaagagccccctcttccagtttgctgagatcagcagcagcaccagccacagtgatgccagcaccaagcagtgccagaccagcgccctcttccagtttgctgagatcagcagcaacaccagccagctgggcggcgctgagcctgtgaagagatgtgggaagagcgccctcttccagctggccgagatgtgcctggccagcgagggcatgaagatggaggagagcaagctgatcaaggccaaggagagtgatggcggccgcatcaaggagctggagaagggcaaggaggagaaggagatcaagatggagaagacagatgagacccggctgcagaaggaggccgagtttgagaagagcgccaaggagaacctgcgggacagcaaggagctgaggaactttgaggccctgcagattgatgacatcatggccatcaagatggaggaccccaaggagatcaggaaggaggagctggaggaggaccacaagtgcagccacttcccagacttctcctacagcgccagcagcaagatcatcatcagtgatgtgcccagcaggaaggaccacatgtgccacccccacggcatcatgatcattgaagatcctgctgccctgaacaagccagagtag

SEQ ID NO: 301858 - DNA, 909 bp, Artificial Sequence
  derived and/or modified sequence
atggtgagctaccacaagcaggcctgcgagatcccccccaccgtgaatccccgtaagaagctctgggcgttcccttccgattcatcccgggatctgccttcgccaaagaaagccaagaccgaagagatgccccagctcaatttcgggatggctgatccaacccagatgggcggcctgtcaatgctgttgctcgcaggtgaacacgcactaggaactcccgaagtatcgtctggcacatgtaggccggacgtatccgagagcccggagctgaggcaaaagtctcccttgttccaatttgctgaaattagctctagcaccagtcactctgatgcctcaacaaagcaatgccagacttctgctctgtttcaatttgccgagatatcttccaatactagccagctgggaggagccgaaccagtgaagagatgcggcaaatctgccttattccagctagccgaaatgtgtctagcatcggaggggatgaagatggaagagtcaaagttgattaaagccaaggagtctgacggagggagaattaaggaactagaaaaaggtaaagaagagaaggagataaaaatggagaaaaccgacgaaacgcggctgcagaaagaggcggaattcgagaaatccgccaaagagaatttaagggatagtaaggaattgagaaactttgaggccttgcagattgatgatatcatggctattaaaatggaagaccccaaagaaattcgtaaggaggaactggaggaggatcataagtgttcccattttccggatttcagttactcggcttcgtccaagattattatctctgatgtgccatctaggaaggatcacatgtgccatccacatggcattatgataattgaggacccagctgccctgaacaaacccgaaaagctgaaatag

SEQ ID NO: 301859 - DNA, 1347 bp, Artificial Sequence
  derived and/or modified sequence
atgaagggcagcaaccggaacaaggaccacagcgccgagggcgagggcgtcggcaaacgacctaagcgcaaatgtcttcagtggcacccacttttggccaagaagctcctggacttttcagaagaggaggaggaggaggatgaggaagaagatattgataaagtgcaacttctgggagccgacggcctcgaacaagacgtgggagaaactgaagacgacgagagtcctgaacagcgagcaaggcgccccatgaacgcattcctgttgttttgtaagaggcataggtctctggtgcggcaggagcacccgcggctcgacaatcgcggcgctactaagatactcgcagactggtgggctgtcttagacccgaaggaaaagcagaaatacacggacatggcgaaggaatacaaggatgcatttatgaaggctaatccaggctacaagtggtgtcccaccacaaataagcctgttaagagtccaacaccaactgtgaacccaagaaagaaactttgggctttcccgagcgattcctcgcgggacctgccctctcctaagaaagccaaaacggaggagatgccacagctcaactttggaatggctgaccctacacagatgggggggctgagcatgctcttactcgctggtgaacacgcattaggcacccctgaagtgtcaagcgggacctgccggcccgacgtaagtgagtcacctgaactgaggcagaaaagccccttattccagtttgctgaaatttctagctccacctcgcactcagacgcctcaaccaagcagtgtcaaacttctgcactcttccagtttgctgagatttctagcaatacctctcaactgggaggagcagagcccgtcaagcggtgtggaaaatcagcactgtttcaactcgcggaaatgtgcttggcaagcgagggcatgaaaatggaggaatccaaattgataaaagcaaaagaatccgatgggggcagaattaaggaacttgagaaaggaaaagaagagaaagagattaaaatggaaaagacagacgagactagactccagaaggaggctgaatttgagaagtctgccaaggagaacctcagagactccaaggagctgagaaacttcgaagctttacagatcgacgatattatggcaattaagatggaggaccccaaagagatccggaaagaggagctggaggaggatcataagtgctcccacttccccgatttcagctattcagcaagcagcaaaatcattatcagcgatgtgccctcccggaaggaccatatgtgtcacccacatggaatcatgatcattgaagaccccgcagctctgaataaacccgagtag

SEQ ID NO: 301860 - DNA, 909 bp, Artificial Sequence
  derived and/or modified sequence
atggtaagctaccacaagcaggcatgcgagatccctccgacagtgaatcctcggaagaagttgtgggctttcccttccgattcctctcgtgacctgcccagtccgaagaaggccaaaactgaggaaatgccccagctgaactttgggatggcagacccgactcagatgggcggtctgagcatgcttctactcgcgggagagcacgctttgggtactcccgaggtgagttcaggaacgtgcagaccagatgtctctgagtcgccagagctgagacagaaatcgcctctgtttcagttcgctgaaattagctcttctacgtcacactccgatgcgagcaccaagcaatgtcaaacgagcgcactgttccaattcgcagagatttcctcaaacacatctcagcttggcggagccgaacctgtgaaaaggtgtgggaaatctgcgttgtttcagctggccgaaatgtgcctggcatcagaggggatgaaaatggaggaatctaagctcattaaagccaaggagtccgacggcggacgcattaaggaactcgagaaaggcaaggaggagaaagagatcaaaatggagaagaccgacgaaacgcgcctccagaaggaggctgagtttgagaagtcggcaaaggagaatttaagagactccaaggaattgaggaattttgaggccctacaaatcgacgacataatggccattaaaatggaggaccccaaggagatcaggaaagaagagctggaggaggatcacaagtgttcacatttccctgatttcagctactctgcaagctccaagatcataattagtgatgttccatctagaaaagaccacatgtgtcacccgcacgggattatgatcattgaggatcctgcagctctcaataagccggagaagctcaagtag

SEQ ID NO: 301861 - DNA, 1347 bp, Artificial Sequence
  derived and/or modified sequence
atgaaaggttcgaaccgcaataaggatcactctgcggaaggcgagggcgtagggaagaggccaaagagaaaatgcctgcagtggcatcctctcctggcaaaaaagctgctggacttctctgaagaggaagaagaggaagacgaagaggaggatatcgacaaggttcagcttctgggggctgatgggctggagcaggacgtgggagagacggaggatgacgagtcaccagagcagcgtgctcgtagaccaatgaacgctttcttactcttctgcaagcgccaccggtctctggtcaggcaagagcaccccaggctcgataacagaggcgcaaccaaaattctcgccgattggtgggcggtactggatcccaaagagaagcagaaatacacagatatggccaaggaatacaaagacgcctttatgaaagcaaatccgggatataagtggtgcccaactacaaataaacctgtcaagtcccccacaccaacagtgaacccccgtaagaaattgtgggctttccccagcgacagcagtcgggatcttccttcgccaaagaaagcgaagacagaggagatgccgcagctcaattttggcatggccgatcccacacagatgggcggtctgagcatgctgctcctggcgggtgagcacgccctggggacccctgaagtgtcttctggcacttgtcggcctgacgtatctgagtctcctgagctgaggcagaagtcccccctcttccagtttgccgaaatttcgtcatccacctctcatagcgatgcttccacaaagcaatgccagacctcggccctgtttcaattcgcagagatcagcagcaatacctctcagctcgggggagctgagccagtcaagcgttgtggtaaatctgccttattccagctcgctgagatgtgcctggcttccgaaggcatgaaaatggaggaaagcaagctgatcaaggccaaggagagcgacggagggaggatcaaagagctggaaaagggcaaggaggaaaaagaaataaagatggagaaaacagacgagacacgattgcagaaggaagccgagttcgaaaagagtgcgaaggaaaacctgagagatagcaaggaattgagaaacttcgaggcgctccagattgatgatatcatggccattaagatggaggaccccaaggagatccggaaggaagagctggaggaagatcacaagtgctcacacttccccgatttctcctacagcgccagctcaaaaatcatcatttcagacgtaccctcacgcaaggaccatatgtgccacccgcacggcattatgataatcgaggatccggctgcacttaacaagccggaatag

SEQ ID NO: 301862 - DNA, 909 bp, Artificial Sequence
  derived and/or modified sequence
atggtgagctaccacaagcaggcctgcgagatcccccccaccgtgaaccccagaaagaagctgtgggccttccccagcgacagcagcagagacctgcccagccccaagaaggccaagaccgaggagatgccccagctgaacttcggcatggccgaccccacccagatgggcggcctgagcatgctgctgctggccggcgagcacgccctgggcacccccgaggtgagcagcggcacctgcagacccgacgtgagcgagagccccgagctgagacagaagagccccctgttccagttcgccgagatcagcagcagcaccagccacagcgacgccagcaccaagcagtgccagaccagcgccctgttccagttcgccgagatcagcagcaacaccagccagctgggcggcgccgagcccgtgaagagatgcggcaagagcgccctgttccagctggccgagatgtgcctggccagcgagggcatgaagatggaggagagcaagctgatcaaggccaaggagagcgacggcggcagaatcaaggagctggagaagggcaaggaggagaaggagatcaagatggagaagaccgacgagaccagactgcagaaggaggccgagttcgagaagagcgccaaggagaacctgagagacagcaaggagctgagaaacttcgaggccctgcagatcgacgacatcatggccatcaagatggaggaccccaaggagatcagaaaggaggagctggaggaggaccacaagtgcagccacttccccgacttcagctacagcgccagcagcaagatcatcatcagcgacgtgcccagcagaaaggaccacatgtgccacccccacggcatcatgatcatcgaggaccccgccgccctgaacaagcccgagaagctgaagtag

SEQ ID NO: 301863 - DNA, 1347 bp, Artificial Sequence
  derived and/or modified sequence
atgaagggcagcaacagaaacaaggaccacagcgccgagggcgagggcgtgggcaagagacccaagagaaagtgcctgcagtggcaccccctgctggccaagaagctgctggacttcagcgaggaggaggaggaggaggacgaggaggaggacatcgacaaggtgcagctgctgggcgccgacggcctggagcaggacgtgggcgagaccgaggacgacgagagccccgagcagagagccagaagacccatgaacgccttcctgctgttctgcaagagacacagaagcctggtgagacaggagcaccccagactggacaacagaggcgccaccaagatcctggccgactggtgggccgtgctggaccccaaggagaagcagaagtacaccgacatggccaaggagtacaaggacgccttcatgaaggccaaccccggctacaagtggtgccccaccaccaacaagcccgtgaagagccccacccccaccgtgaaccccagaaagaagctgtgggccttccccagcgacagcagcagagacctgcccagccccaagaaggccaagaccgaggagatgccccagctgaacttcggcatggccgaccccacccagatgggcggcctgagcatgctgctgctggccggcgagcacgccctgggcacccccgaggtgagcagcggcacctgcagacccgacgtgagcgagagccccgagctgagacagaagagccccctgttccagttcgccgagatcagcagcagcaccagccacagcgacgccagcaccaagcagtgccagaccagcgccctgttccagttcgccgagatcagcagcaacaccagccagctgggcggcgccgagcccgtgaagagatgcggcaagagcgccctgttccagctggccgagatgtgcctggccagcgagggcatgaagatggaggagagcaagctgatcaaggccaaggagagcgacggcggcagaatcaaggagctggagaagggcaaggaggagaaggagatcaagatggagaagaccgacgagaccagactgcagaaggaggccgagttcgagaagagcgccaaggagaacctgagagacagcaaggagctgagaaacttcgaggccctgcagatcgacgacatcatggccatcaagatggaggaccccaaggagatcagaaaggaggagctggaggaggaccacaagtgcagccacttccccgacttcagctacagcgccagcagcaagatcatcatcagcgacgtgcccagcagaaaggaccacatgtgccacccccacggcatcatgatcatcgaggaccccgccgccctgaacaagcccgagtag

SEQ ID NO: 301864 - DNA, 516 bp, Artificial Sequence
  derived and/or modified sequence
atgctgaccagcaagctgcggagcaccctgcagaccctgcagggccttggactaaccagcagttgtctcctggacatcttcagtagcgtctctactcacattcgtaatttgccctgtctcaaccttacgttagcgtcatcctgtctgcaaagaattcagatcatgcagggagccggaaggaagcggaacagaggccgtgctgagaaacagaaagcttgtgccatatcgtttcaggtcgacttttctaaactccacattctcggggcaggaaggggtagaatattagaggaaaaacaaggcattctggtgcgtcaggctaacgcagattgtctgcgtgacttgggactcaagagtgcattcgaactggcattccgtcgctcttccctggtcttcagcccacgcgcaaaaggtctgaagtcttctgcagaagaccggcgctggccccttttttggcaaaacatggtctccatctttggcgcccgttgcaaggcatcctccgcccagacatcttgctag

SEQ ID NO: 301865 - protein, 13 aa, Artificial Sequence
  derived and/or modified sequence
MKGSNRNKDHSAE

SEQ ID NO: 301866 - DNA, 450 bp, Artificial Sequence
  derived and/or modified sequence
atgaaaggatctaataggaataaggaccactcagcagagggggagggtgtgggtaagaggccgaagcgcaagtgtttacagtggcacccgcttttggcgaaaaaacttcttgatttcagcgaggaagaggaggaagaagatgaggaggaagacattgataaggtgcagctcttaggagcggacggacttgaacaggacgtcggcgaaaccgaggatgatgaaagtcctgaacagagagcaaggagaccaatgaacgcattcctgcttttctgtaagcgacatcgatctttagtgcggcaggagcatccacgcctagataacagaggggcaacaaagatactggcggactggtgggcagtcttggacccaaaagagaagcagaaatatactgatatggcaaaagaatacaaggacgcgttcatgaaagccaacccgggttacaagtggtag

SEQ ID NO: 301867 - DNA, 582 bp, Artificial Sequence
  derived and/or modified sequence
atgaagggaagcaatcggaataaggatcactctgcggaaggagagggagtgggcaagcgaccaaaacgcaagtgcctgcagtggcaccctctcctggcaaaaaaacttctggactttagcgaggaagaggaagaggaagatgaagaggaggatatcgataaggtgcagctcctcggcgctgacggcttagagcaagatgtgggcgagacggaggacgacgaatcgcccgaacagcgcgcaagaaggcccatgaacgcatttttgttattttgtaagagacatagatctttagtgagacaggaacatcccaggctggacaacagaggcgccacaaagattctggcagattggtgggctgttttggaccctaaagaaaagcaaaagtatacagatatggcgaaggaatataaggacgccttcatgaaagcaaaccctggctacaagtggtgccctaccaccaacaaaccggtcaagagcccaacacccacagtgaatcccagaaagaagctctgggctttcccatcagatagtagccgggatctgccatccccaaagaaggcaaagaccgaagaaatgccgtag

SEQ ID NO: 301868 - DNA, 501 bp, Artificial Sequence
  derived and/or modified sequence
atgaaaggttctaaccggaataaagatcactccgcagagggagagggcgttggcaagagacccaaaagaaagtgtctgcagtggcaccctcttttagctaaaaagcttcttgacttctcagaggaggaggaagaggaggatgaagaggaggacatcgacaaagttcagttgctgggtgccgacggacttgagcaggatgttggagagacggaagacgacgagagccccgagcagagagccaggcgccctatgaatgcatttctgctgttctgtaaaagacacagatctctggtacggcaggagcacccacgacttgacaacaggggagccaccaagattctggccgactggtgggcggtactcgaccctaaggagaaacaaaagtacaccgatatggccaaggagtataaggacgcctttatgaaagccaaccctggttataagtggtgtcctaccacaaacaagcccgtcaaatctccaacgcccactgttaacccgtag

SEQ ID NO: 301869 - DNA, 312 bp, Artificial Sequence
  derived and/or modified sequence
atgaaaggttccaaccgcaataaggatcactctgcagaaggagagggagtaggcaagcggcccaagagaaagtgcctgcagtggcaccctctgctcgctaagaagctgcttgacttctccgaggaggaggaggaggaggacgaagaagaggatatcgacaaagtccagctcctcggtgcagacggcctggagcaggatgtgggggaaacagaggacgatgaatcccccgagcagcgcgcgagaagaccaatgaatgcctttctgctcttttgtaagcgccatagatcactcgtcaggcaagaacatccctag

SEQ ID NO: 301870 - DNA, 480 bp, Artificial Sequence
  derived and/or modified sequence
atgaaagggtcaaataggaataaggatcatagcgcggaaggcgagggcgttggaaaacgacctaagaggaaatgcctccaatggcatcctcttcttgctaaaaaacttctcgacttctcagaggaagaggaggaggaggacgaggaggaagatatcgacaaagtgcagctgctcggggcagacgggttggagcaagatgtgggcgagactgaagatgatgagagccccgagcagcgcgctaggagacccatgaacgcttttttactcttctgtaagagacaccggtccctggtgcgtcaggagcatcctaggctggacaataggggtgctactaaaattctcgccgactggtgggccgtcttggaccccaaagaaaagcaaaaatacactgatatggcaaaggagtacaaggacgcgtttatgaaggccaacccgggctacaaatggtgcccaactactaacaagcccgtcaagagctag

SEQ ID NO: 301871 - DNA, 345 bp, Artificial Sequence
  derived and/or modified sequence
atgaagggatcgaacaggaacaaggatcacagcgcagagggcgagggggtgggcaagaggccgaagcgaaaatgtctgcagtggcacccattgctggccaaaaagcttttggatttttctgaagaagaggaagaagaagacgaagaggaggacatcgacaaagtgcagttgctgggcgccgatggactggagcaggatgttggagagaccgaagatgatgagtctccggagcagcgcgctcgccgccctatgaatgccttcctgttgttctgcaaacgccatcggtccctcgtaagacaagaacatccccgactggacaaccgaggggccaccaaaatcttgtag

SEQ ID NO: 301872 - DNA, 435 bp, Artificial Sequence
  derived and/or modified sequence
atgaaaggtagtaataggaacaaggaccacagcgccgaaggggaaggggtcggcaagaggccgaaaaggaagtgtctccagtggcacccgctcctcgcgaagaagctgctggatttttcagaagaagaggaagaggaggatgaggaagaagatatcgacaaggtacagcttcttggtgccgacgggctggagcaagacgtcggtgaaaccgaggacgacgagtcacccgaacagcgcgcccgacggccaatgaacgccttcctgctgttctgtaaaaggcataggtcacttgtgcgccaggagcaccccagacttgacaaccgtggagcaactaagattctggccgattggtgggccgtgctagacccaaaagagaaacagaagtacaccgatatggcgaaggagtacaaagacgccttcatgaaagctaactag

SEQ ID NO: 301873 - DNA, 618 bp, Artificial Sequence
  derived and/or modified sequence
atgaaggggtcgaaccgtaataaggatcattcagctgaaggggagggcgttggaaaacgtccaaagagaaaatgccttcagtggcacccgctgctggccaagaaacttctggatttctccgaagaggaagaggaggaggatgaagaggaggatatcgataaggtgcagttgcttggcgcggacggcttagaacaggacgtgggtgagacagaggatgatgaatcccctgagcagcgtgcaagacgacccatgaatgccttcctgctcttttgtaagaggcatcgcagcctcgttcgtcaggagcaccctcgactggataatagaggcgccacaaaaatactggcagattggtgggctgttctcgatcccaaggaaaagcagaagtacacagacatggcaaaggagtataaagacgcctttatgaaagccaaccctggatataagtggtgccctaccacaaataaaccagttaagagtcccacaccgaccgtcaatccaagaaagaagctgtgggcttttcccagcgatagctctcgcgatctgcctagcccaaaaaaagctaaaacagaggagatgcctcagctgaattttgggatggctgatcctacccagatgtag

SEQ ID NO: 301874 - DNA, 216 bp, Artificial Sequence
  derived and/or modified sequence
atgaagggctcgaataggaataaagaccactcggccgagggtgaaggtgtgggaaagaggcccaagaggaaatgtctgcaatggcacccgctattggcaaagaagctccttgactttagtgaagaggaagaggaagaagatgaggaggaggacattgacaaggtgcagctcttgggtgccgacggtctggagcaggatgtcggagagacagaatag

SEQ ID NO: 301875 - DNA, 258 bp, Artificial Sequence
  derived and/or modified sequence
atgaaaggctctaaccggaataaggaccactctgccgagggggagggagtgggcaagagacctaagagaaaatgcctgcagtggcacccactgctggccaagaagcttctggactttagcgaggaggaggaggaagaggacgaggaggaggatatcgacaaggtgcagttgcttggagccgatggacttgagcaggacgttggtgagaccgaggatgacgagtctcccgagcagagagcccgccgccctatgaattag

SEQ ID NO: 301876 - DNA, 297 bp, Artificial Sequence
  derived and/or modified sequence
atgaagggaagcaatcgcaacaaagaccattctgccgagggagaaggggtgggcaagaggcctaaacggaagtgcctccagtggcaccctctgcttgccaagaaactcttggacttctccgaagaggaggaagaagaagatgaggaggaagatattgataaggtccagctgctaggggctgatggcctggagcaggacgtaggtgagaccgaagatgacgaaagtcccgagcagcgggcgaggaggccaatgaatgcctttctgcttttctgtaagcgtcaccgtagcctggtgtag

SEQ ID NO: 301877 - DNA, 450 bp, Artificial Sequence
  derived and/or modified sequence
atgaagggcagcaacagaaacaaggaccacagcgctgagggggagggcgtgggcaagaggcccaagaggaagtgcctgcagtggcaccccctgctggccaagaagctgctggacttcagcgaggaggaggaggaggaggatgaggaggaggacatcgacaaggtgcagctgctgggcgcagatggcctggagcaggatgtgggggagacagaagatgatgagagccctgagcagagggcccggcggcccatgaatgccttcctgctcttctgcaagaggcacaggagcctggtgcggcaggagcacccccggctggacaacagaggagccaccaagatcctggccgactggtgggccgtgctggaccccaaggagaagcagaagtacacagacatggccaaggagtacaaggatgccttcatgaaggccaaccctggctacaagtggtag

SEQ ID NO: 301878 - DNA, 582 bp, Artificial Sequence
  derived and/or modified sequence
atgaagggcagcaacagaaacaaggaccacagcgctgagggggagggcgtgggcaagaggcccaagaggaagtgcctgcagtggcaccccctgctggccaagaagctgctggacttcagcgaggaggaggaggaggaggatgaggaggaggacatcgacaaggtgcagctgctgggcgcagatggcctggagcaggatgtgggggagacagaagatgatgagagccctgagcagagggcccggcggcccatgaatgccttcctgctcttctgcaagaggcacaggagcctggtgcggcaggagcacccccggctggacaacagaggagccaccaagatcctggccgactggtgggccgtgctggaccccaaggagaagcagaagtacacagacatggccaaggagtacaaggatgccttcatgaaggccaaccctggctacaagtggtgccccaccaccaacaagcctgtgaagagccccacccccaccgtgaaccccaggaagaagctgtgggccttccccagcgacagcagccgggacctgcccagccccaagaaggccaagacagaggagatgccctag

SEQ ID NO: 301879 - DNA, 501 bp, Artificial Sequence
  derived and/or modified sequence
atgaagggcagcaacagaaacaaggaccacagcgctgagggggagggcgtgggcaagaggcccaagaggaagtgcctgcagtggcaccccctgctggccaagaagctgctggacttcagcgaggaggaggaggaggaggatgaggaggaggacatcgacaaggtgcagctgctgggcgcagatggcctggagcaggatgtgggggagacagaagatgatgagagccctgagcagagggcccggcggcccatgaatgccttcctgctcttctgcaagaggcacaggagcctggtgcggcaggagcacccccggctggacaacagaggagccaccaagatcctggccgactggtgggccgtgctggaccccaaggagaagcagaagtacacagacatggccaaggagtacaaggatgccttcatgaaggccaaccctggctacaagtggtgccccaccaccaacaagcctgtgaagagccccacccccaccgtgaacccctag

SEQ ID NO: 301880 - DNA, 312 bp, Artificial Sequence
  derived and/or modified sequence
atgaagggcagcaacagaaacaaggaccacagcgctgagggggagggcgtgggcaagaggcccaagaggaagtgcctgcagtggcaccccctgctggccaagaagctgctggacttcagcgaggaggaggaggaggaggatgaggaggaggacatcgacaaggtgcagctgctgggcgcagatggcctggagcaggatgtgggggagacagaagatgatgagagccctgagcagagggcccggcggcccatgaatgccttcctgctcttctgcaagaggcacaggagcctggtgcggcaggagcacccctag

SEQ ID NO: 301881 - DNA, 480 bp, Artificial Sequence
  derived and/or modified sequence
atgaagggcagcaacagaaacaaggaccacagcgctgagggggagggcgtgggcaagaggcccaagaggaagtgcctgcagtggcaccccctgctggccaagaagctgctggacttcagcgaggaggaggaggaggaggatgaggaggaggacatcgacaaggtgcagctgctgggcgcagatggcctggagcaggatgtgggggagacagaagatgatgagagccctgagcagagggcccggcggcccatgaatgccttcctgctcttctgcaagaggcacaggagcctggtgcggcaggagcacccccggctggacaacagaggagccaccaagatcctggccgactggtgggccgtgctggaccccaaggagaagcagaagtacacagacatggccaaggagtacaaggatgccttcatgaaggccaaccctggctacaagtggtgccccaccaccaacaagcctgtgaagagctag

SEQ ID NO: 301882 - DNA, 345 bp, Artificial Sequence
  derived and/or modified sequence
atgaagggcagcaacagaaacaaggaccacagcgctgagggggagggcgtgggcaagaggcccaagaggaagtgcctgcagtggcaccccctgctggccaagaagctgctggacttcagcgaggaggaggaggaggaggatgaggaggaggacatcgacaaggtgcagctgctgggcgcagatggcctggagcaggatgtgggggagacagaagatgatgagagccctgagcagagggcccggcggcccatgaatgccttcctgctcttctgcaagaggcacaggagcctggtgcggcaggagcacccccggctggacaacagaggagccaccaagatcctgtag

SEQ ID NO: 301883 - DNA, 435 bp, Artificial Sequence
  derived and/or modified sequence
atgaagggcagcaacagaaacaaggaccacagcgctgagggggagggcgtgggcaagaggcccaagaggaagtgcctgcagtggcaccccctgctggccaagaagctgctggacttcagcgaggaggaggaggaggaggatgaggaggaggacatcgacaaggtgcagctgctgggcgcagatggcctggagcaggatgtgggggagacagaagatgatgagagccctgagcagagggcccggcggcccatgaatgccttcctgctcttctgcaagaggcacaggagcctggtgcggcaggagcacccccggctggacaacagaggagccaccaagatcctggccgactggtgggccgtgctggaccccaaggagaagcagaagtacacagacatggccaaggagtacaaggatgccttcatgaaggccaactag

SEQ ID NO: 301884 - DNA, 618 bp, Artificial Sequence
  derived and/or modified sequence
atgaagggcagcaacagaaacaaggaccacagcgctgagggggagggcgtgggcaagaggcccaagaggaagtgcctgcagtggcaccccctgctggccaagaagctgctggacttcagcgaggaggaggaggaggaggatgaggaggaggacatcgacaaggtgcagctgctgggcgcagatggcctggagcaggatgtgggggagacagaagatgatgagagccctgagcagagggcccggcggcccatgaatgccttcctgctcttctgcaagaggcacaggagcctggtgcggcaggagcacccccggctggacaacagaggagccaccaagatcctggccgactggtgggccgtgctggaccccaaggagaagcagaagtacacagacatggccaaggagtacaaggatgccttcatgaaggccaaccctggctacaagtggtgccccaccaccaacaagcctgtgaagagccccacccccaccgtgaaccccaggaagaagctgtgggccttccccagcgacagcagccgggacctgcccagccccaagaaggccaagacagaggagatgccccagctgaactttggcatggctgaccccacccagatgtag

SEQ ID NO: 301885 - DNA, 216 bp, Artificial Sequence
  derived and/or modified sequence
atgaagggcagcaacagaaacaaggaccacagcgctgagggggagggcgtgggcaagaggcccaagaggaagtgcctgcagtggcaccccctgctggccaagaagctgctggacttcagcgaggaggaggaggaggaggatgaggaggaggacatcgacaaggtgcagctgctgggcgcagatggcctggagcaggatgtgggggagacagaatag

SEQ ID NO: 301886 - DNA, 258 bp, Artificial Sequence
  derived and/or modified sequence
atgaagggcagcaacagaaacaaggaccacagcgctgagggggagggcgtgggcaagaggcccaagaggaagtgcctgcagtggcaccccctgctggccaagaagctgctggacttcagcgaggaggaggaggaggaggatgaggaggaggacatcgacaaggtgcagctgctgggcgcagatggcctggagcaggatgtgggggagacagaagatgatgagagccctgagcagagggcccggcggcccatgaactag

SEQ ID NO: 301887 - DNA, 297 bp, Artificial Sequence
  derived and/or modified sequence
atgaagggcagcaacagaaacaaggaccacagcgctgagggggagggcgtgggcaagaggcccaagaggaagtgcctgcagtggcaccccctgctggccaagaagctgctggacttcagcgaggaggaggaggaggaggatgaggaggaggacatcgacaaggtgcagctgctgggcgcagatggcctggagcaggatgtgggggagacagaagatgatgagagccctgagcagagggcccggcggcccatgaatgccttcctgctcttctgcaagaggcacaggagcctggtgtag

SEQ ID NO: 301888 - DNA, 450 bp, Artificial Sequence
  derived and/or modified sequence
atgaagggcagcaaccggaacaaggaccacagcgccgagggcgagggcgtggggaaacggccaaagcgcaaatgtctgcaatggcaccctctgcttgccaagaaactgctggactttagcgaggaggaagaagaagaagacgaggaggaagacatcgacaaggtccagcttctcggcgccgatggacttgaacaggatgtaggggaaaccgaagacgacgagtcacccgagcagcgtgccaggcgaccaatgaacgccttcttgctcttctgcaaacgccaccggtcactggtgcgtcaagaacacccgcgcctggataatagaggtgctactaagatcttagccgactggtgggctgtcctcgaccctaaggagaagcaaaaatataccgatatggccaaagaatacaaagatgccttcatgaaggctaacccggggtataagtggtag

SEQ ID NO: 301889 - DNA, 582 bp, Artificial Sequence
  derived and/or modified sequence
atgaagggcagcaaccggaacaaggaccacagcgccgagggcgagggggttggaaaacggccgaagagaaagtgtttgcaatggcatcctttgctagccaagaaattattagatttcagcgaagaagaggaagaggaggacgaagaagaggatatcgataaggtgcaattactgggagctgacgggttagagcaggacgttggtgaaaccgaagacgatgaatctcccgaacaacgagctcggcggccaatgaatgccttcctgctgttttgtaaacgacaccggtcactcgttcgccaggagcatccccgcctggataacagaggcgctacaaagatattggccgattggtgggccgttttggatcctaaagagaaacagaagtacaccgatatggcaaaagagtacaaggatgcattcatgaaggccaaccccgggtacaaatggtgtcccacaactaacaagccagtgaaaagccctaccccaactgttaacccgagaaaaaaattatgggctttccctagtgactctagcagagatttgccatcccctaaaaaagccaagactgaggagatgccatag

SEQ ID NO: 301890 - DNA, 501 bp, Artificial Sequence
  derived and/or modified sequence
atgaagggcagcaaccggaacaaggaccacagcgccgagggcgagggcgtgggcaagcgccctaagcgaaaatgtctccagtggcatccactgctagccaaaaaattgctcgactttagcgaagaggaggaggaagaagatgaggaagaggatatagacaaggttcaactattgggagccgacggactggaacaggacgttggggagactgaggacgatgagagcccggagcaacgcgcacgccgacctatgaacgcctttctcctcttttgcaagcggcatcggagcttggtccggcaggaacatccgcgactggacaacagaggcgctacaaagattctggccgactggtgggccgtcctagaccccaaagagaaacaaaagtatactgacatggcaaaagagtacaaagacgcattcatgaaagccaatcctggttacaagtggtgcccgactacaaacaagcccgtgaaatccccaaccccgacagtcaatccatag

SEQ ID NO: 301891 - DNA, 312 bp, Artificial Sequence
  derived and/or modified sequence
atgaagggcagcaaccggaacaaggaccacagcgccgagggcgagggagttggcaagcggcccaagcgaaaatgcctgcaatggcaccctctgctcgctaagaagttgctggacttctcagaggaggaggaagaggaggacgaggaggaagatatcgacaaagtacaacttctgggagcggatgggctggagcaagacgtgggcgaaactgaagacgacgaatccccggagcagcgcgcccgtagacctatgaatgcgtttctgctcttctgtaagcggcataggagcctggtccggcaggagcacccctag

SEQ ID NO: 301892 - DNA, 480 bp, Artificial Sequence
  derived and/or modified sequence
atgaagggcagcaaccggaacaaggaccacagcgccgagggcgagggagtcggcaagcgacctaagcgaaagtgcctacagtggcaccctctcttagccaaaaaactgcttgacttttcagaggaggaggaagaggaagacgaggaagaagacatcgataaggttcagctgctcggcgcagatggtcttgaacaggatgtgggggagacagaggacgatgagtctccagagcaaagagccagaaggccgatgaatgcattcctgctcttttgcaagcgacatcgatccctggtgagacaggagcaccctagactcgacaatcgcggagccacaaaaattcttgccgattggtgggcggttttggaccctaaagagaagcaaaaatatacagacatggcaaaggagtataaagacgcatttatgaaggctaatcctggctacaaatggtgtccaactactaacaagcctgtaaagtcctag

SEQ ID NO: 301893 - DNA, 345 bp, Artificial Sequence
  derived and/or modified sequence
atgaagggcagcaaccggaacaaggaccacagcgccgagggcgagggcgtgggaaagagacctaagcgaaagtgcctacagtggcacccattactagctaaaaagcttctcgatttttctgaggaggaagaagaggaagatgaggaagaagacattgacaaagtccaactcctgggcgcagacggactggagcaggacgttggagaaaccgaggacgacgagagcccagaacagcgagcacgccgacctatgaatgccttcctgttattctgcaagcgccaccggtcactcgtacggcaggagcatccaagactggataataggggagccaccaagatcctgtag

SEQ ID NO: 301894 - DNA, 435 bp, Artificial Sequence
  derived and/or modified sequence
atgaagggcagcaaccggaacaaggaccacagcgccgagggcgagggagtcggaaaacggccgaagaggaagtgcctgcagtggcatcccctgcttgcaaaaaaattgctggactttagcgaggaggaggaggaggaggacgaagaagaagatatcgataaagttcaactactgggggcagatggactcgaacaagatgttggagaaactgaagacgacgagtcgcctgagcaaagggccaggaggccaatgaatgcatttctgctattttgtaaacgtcacaggtcacttgttaggcaagaacatccacggctcgacaatcggggagccacgaagatcctggccgattggtgggcggtattggaccctaaggagaaacagaagtatactgacatggcaaaggaatataaggacgcttttatgaaggcgaactag

SEQ ID NO: 301895 - DNA, 618 bp, Artificial Sequence
  derived and/or modified sequence
atgaagggcagcaaccggaacaaggaccacagcgccgagggcgagggcgtggggaaacgaccgaagaggaaatgtttgcagtggcatccgctgttagcgaagaagctgttggactttagtgaagaggaggaagaggaagacgaagaggaagacatcgataaggtgcagttgctcggtgccgacggacttgaacaagacgtaggcgaaaccgaggatgacgaaagtccagagcaacgggcccggcgcccaatgaatgcatttcttctgttctgtaaacgacacagaagcctggttcggcaggaacacccaaggctggacaacaggggcgccacaaagatcctagctgattggtgggccgtgctcgaccctaaggaaaagcagaaatataccgacatggcaaaagagtacaaggatgcatttatgaaagctaatccagggtataagtggtgtcctacaactaacaagcctgttaaaagtccgacacctaccgtcaaccccaggaagaagttatgggccttccccagtgatagctccagagatctcccaagcccaaaaaaagccaaaacagaagagatgccacaacttaatttcgggatggctgaccctacacagatgtag

SEQ ID NO: 301896 - DNA, 216 bp, Artificial Sequence
  derived and/or modified sequence
atgaagggcagcaaccggaacaaggaccacagcgccgagggcgagggagtggggaaacgccccaagagaaaatgcctgcaatggcatcccttgctggctaagaaactgctagatttttctgaagaggaagaagaggaagatgaggaggaggacattgacaaggtgcagttattaggagccgacggattggaacaggatgtaggcgaaacagagtag

SEQ ID NO: 301897 - DNA, 258 bp, Artificial Sequence
  derived and/or modified sequence
atgaagggcagcaaccggaacaaggaccacagcgccgagggcgagggcgtcgggaagaggcccaaacgcaagtgtttacagtggcatcctctactcgcaaaaaagctcctggacttcagcgaggaggaggaggaggaggacgaagaggaggatattgacaaggtgcagctgctgggcgccgacggcctggaacaagacgtcggggaaaccgaggacgacgagagtccagaacagcgcgcacgtagaccaatgaactag

SEQ ID NO: 301898 - DNA, 297 bp, Artificial Sequence
  derived and/or modified sequence
atgaagggcagcaaccggaacaaggaccacagcgccgagggcgagggggtggggaaacgccctaagcgtaaatgtctgcaatggcacccactcttagccaagaagctcctggacttctctgaggaggaggaggaggaggatgaagaagaagatattgataaagttcagctgcttggggccgatgggctggagcaagacgttggcgagacggaggatgacgagagtccggagcagagggctagaaggccaatgaacgcctttctgctcttttgcaagaggcaccgctctcttgtgtag

SEQ ID NO: 301899 - DNA, 450 bp, Artificial Sequence
  derived and/or modified sequence
atgaaaggttctaaccggaacaaagatcatagtgcagagggagaaggtgtcgggaagaggcccaagagaaagtgtctccagtggcatcctctgcttgcaaagaaattgctggacttttccgaggaggaagaagaggaggacgaagaggaggacatcgacaaagtgcagttgctgggcgctgacggactggaacaggatgtcggcgaaacagaggatgatgaatcaccagagcaacgagcgaggcggccaatgaacgcattcctcctattctgtaaacgacatagaagtcttgttagacaggaacatcccaggttagataataggggagccacaaagatcctagccgactggtgggcagtgctggaccctaaggaaaagcaaaaatatacggacatggcaaaagaatacaaggatgccttcatgaaggcgaatcccggttataagtggtag

SEQ ID NO: 301900 - DNA, 582 bp, Artificial Sequence
  derived and/or modified sequence
atgaagggctccaacagaaataaagatcatagcgcagagggtgagggagttggaaaacgacctaaacgcaaatgtttgcagtggcaccctctgttagccaaaaagttactggactttagcgaggaagaggaagaggaggacgaggaagaagatatagacaaggtgcagttacttggtgccgacggactggagcaggacgttggcgaaacagaagatgatgagtcgccagaacagcgagctcgacgacccatgaatgccttcttgctcttttgcaagcgacatcggtctctcgttcggcaggaacacccgcgtttagacaacaggggcgctaccaagattttggcggattggtgggcagtgttagatcccaaggaaaaacagaagtatactgatatggcaaaagagtataaggacgctttcatgaaagcaaatccaggctacaagtggtgtcccacaacaaataagcctgtcaaaagcccgactcctactgtgaatccgagaaaaaagctgtgggcatttccctctgatagctctagagacctgcccagtcccaagaaggccaaaaccgaggagatgccttag

SEQ ID NO: 301901 - DNA, 501 bp, Artificial Sequence
  derived and/or modified sequence
atgaagggatcaaaccgcaacaaggatcactcggccgagggcgaaggagttggcaaacgacctaagagaaaatgcctgcagtggcacccactgctcgccaagaaactgttggacttctccgaagaagaggaagaagaggatgaagaggaggacattgacaaggtgcaactgctgggcgctgatggactcgaacaggatgtgggcgagacagaggatgatgaaagtcctgagcagagagcacggaggccaatgaatgcttttctgctgttctgcaagagacacaggtcactggtgcgtcaagagcacccaaggctggataacagaggcgcaactaagatcctcgcagattggtgggccgtattggaccctaaggagaaacaaaaatacactgatatggctaaagaatataaagatgcatttatgaaggccaacccaggctataagtggtgtccaaccactaataagccagtcaagtctcctacgcctaccgtgaacccctag

SEQ ID NO: 301902 - DNA, 312 bp, Artificial Sequence
  derived and/or modified sequence
atgaagggaagcaatcggaataaagaccacagcgctgagggcgagggggtcgggaagagaccaaaacgtaagtgtctgcagtggcatcctctcctggccaaaaagcttcttgatttcagcgaagaagaagaggaagaagacgaggaggaagacatcgacaaggttcagctgctcggcgctgatgggctcgagcaggacgttggtgaaactgaggatgatgagtcacccgaacagcgtgctagaagacccatgaacgcattcctgttgttctgtaaacggcatcgcagtctggttcgacaggaacacccatag

SEQ ID NO: 301903 - DNA, 480 bp, Artificial Sequence
  derived and/or modified sequence
atgaagggctccaaccgaaacaaagaccactcagccgagggagagggcgtggggaaaagacctaaaaggaagtgtctgcagtggcacccgctactggccaagaaactacttgacttctcagaagaagaggaagaagaggatgaggaggaggatatcgataaagtgcaactgttgggtgccgacgggctcgagcaggacgtgggagagacagaagacgacgaatcccctgagcaaagagccagacgccctatgaatgctttcttgctgttttgcaaacgccacaggtcactggttaggcaagagcatccaaggcttgataaccggggagccaccaaaattcttgctgattggtgggccgtcctcgatccaaaagaaaagcagaaatacaccgacatggccaaagagtataaggacgccttcatgaaggcgaatcccggatacaagtggtgcccgaccacaaacaagcctgtgaagagctag

SEQ ID NO: 301904 - DNA, 345 bp, Artificial Sequence
  derived and/or modified sequence
atgaaagggtccaatcgcaataaggaccactccgctgagggcgagggggtcggcaagcggcctaagaggaagtgtctgcagtggcaccccctgctcgctaagaagctgctggatttttccgaagaggaggaggaagaagatgaggaggaggatatagacaaagtgcagctactgggcgctgatggcctagagcaggacgtcggagaaacagaagacgatgagagtcctgaacaacgtgccagacgcccaatgaatgccttcctattattttgcaagcgtcatcggtccctggtgcgccaggaacatccaaggctggacaatcgcggtgccacgaagatcctgtag

SEQ ID NO: 301905 - DNA, 435 bp, Artificial Sequence
  derived and/or modified sequence
atgaaaggtagcaatagaaacaaggatcactccgccgagggggaaggggtgggcaagaggccaaagcggaagtgcctgcagtggcacccactactggccaaaaagttgttagatttctccgaggaagaagaggaggaagacgaagaagaagatatcgacaaggtgcagcttctcggtgccgatggactggaacaggacgtgggtgagaccgaggacgacgaatccccagagcagagggccagacgtccaatgaacgcttttctactcttctgcaagcgacaccggtccctggtgcggcaggagcatccacgccttgataacagaggcgcaactaaaatactcgccgattggtgggccgtcctggatccaaaggagaagcaaaaatacacggatatggcgaaggagtacaaggacgcattcatgaaggctaattag

SEQ ID NO: 301906 - DNA, 618 bp, Artificial Sequence
  derived and/or modified sequence
atgaaaggcagtaaccgcaataaggatcatagcgcagagggtgaaggcgtcggcaagagaccgaaacggaaatgtcttcaatggcaccccttgctggccaaaaaactgctggacttttccgaggaggaagaagaggaagatgaggaagaggacatcgacaaagtgcagctcctgggtgcggatggactcgagcaggatgtaggggagacggaggatgatgaatccccagagcagcgggctcggaggcctatgaatgcatttctgttgttttgcaagcggcaccggtccctcgtgcgacaagaacacccaagactagataatcgcggagctaccaagatactcgccgattggtgggctgtactggatcctaaggaaaagcagaagtacacagatatggccaaagaatacaaagacgcttttatgaaggcgaatcccggatacaagtggtgtcccacgactaataagcctgtcaaaagccctacacctacagtgaaccctaggaaaaagttgtgggccttcccaagtgacagttctcgtgatctgccctctccaaaaaaggccaagaccgaggagatgccccaattgaattttggaatggccgaccctacacagatgtag

SEQ ID NO: 301907 - DNA, 216 bp, Artificial Sequence
  derived and/or modified sequence
atgaaaggtagcaaccggaacaaagaccacagcgccgagggggagggggtcgggaaaaggccaaaaagaaagtgcctgcagtggcatcctcttctcgccaagaaattgcttgattttagtgaggaggaggaggaagaggacgaagaagaggacatcgacaaagtacagctgctaggcgcagatggactcgaacaagatgtgggagagaccgagtag

SEQ ID NO: 301908 - DNA, 258 bp, Artificial Sequence
  derived and/or modified sequence
atgaagggcagcaatcgcaacaaagaccacagcgcagagggcgagggcgttggaaagcggccaaagaggaagtgcctccagtggcaccctctattggccaagaaactgcttgacttcagcgaagaagaagaagaggaggatgaggaagaggacatcgacaaagttcagttgcttggagctgacggtttggagcaagatgttggcgagactgaagatgacgaaagccccgaacaaagggccagacgcccaatgaactag

SEQ ID NO: 301909 - DNA, 297 bp, Artificial Sequence
  derived and/or modified sequence
atgaaaggaagtaatcggaataaggaccattccgccgagggcgaaggagtgggcaagcgtcccaagcggaaatgcctgcaatggcacccgctgcttgctaaaaaattactggactttagcgaggaagaggaagaagaagatgaagaggaagacatcgacaaggtgcagctactcggagccgacggacttgagcaagacgtgggtgagactgaggacgacgagtcccccgagcaacgagcaagacggccaatgaatgcctttctgttgttctgcaaacgccacagatctctggtgtag

SEQ ID NO: 301910 - DNA, 819 bp, Artificial Sequence
  derived and/or modified sequence
aatcctgctgcatcacagaagctggaagttctgatgttccactgaaatcacaatggaaagtcttgacttgactggtaagagctgttgtgaaggtacatcttacttacttacctggaagcagtgaggcagtcaagaattatgtgctgtcagagctggtctcagcatgatcaaggaagtgtgatcattggatatttttttcttgtcaattttattattttttaaagtgtgacttttattgatctccattatcaagcatatgggccactgaaaacttctgagcaatggatataaatgagatggaacagaaggaaaaaaaggtagacattggaaagactggtttagggggctttactattatcctaggtcacagtaatgaaaggcagtaatagaaataaggatcattcagcagaaggagaaggggttggaaaacgaccaaaacgaaagtgtcttcagtggcatccattgctagcaaagaaacttcttgatttttcagaagaggaagaagaggaagacgaagaggaggatattgataaggttcaacttcttggggccgatggcctagagcaagatgttggtgaaactgaagatgatgaatcaccagagcagcgagcccggagaccaatgaatgcatttcttttattttgcaaacgccatcgctctcttgtacgtcaggaacaccccaggcttgataaccgaggtgctaccaagatactagctgattggtgggctgttcttgatccaaaggaaaagcagaaatacacagacatggccaaggagtataaggatgcatttatgaaagcaaatcctggctacaaatgg

SEQ ID NO: 301911 - DNA, 959 bp, Artificial Sequence
  derived and/or modified sequence
ggcagagcggctccgcgagcttctctccactttcccatagagaaaccctgactggccgctgagggctagctacacacacgccctcacgcccggcgagcccgcgaggtcactatcatatgacaaaggctttgccgcagttcatcttcctccctgtgtactttccatttgccttcctgggaatatccttggaattaatatacctggaacaattctttctgcagttaaagattggtgcctggccagaaatgcctgtgaaacagctgtggtttaagcttcaactgtaaaagacagacggaatcctgctgcatcacagaagctggaagttctgatgttccactgaaatcacaatggaaagtcttgacttgactggtcacagtaatgaaaggcagtaatagaaataaggatcattcagcagaaggagaaggggttggaaaacgaccaaaacgaaagtgtcttcagtggcatccattgctagcaaagaaacttcttgatttttcagaagaggaagaagaggaagacgaagaggaggatattgataaggttcaacttcttggggccgatggcctagagcaagatgttggtgaaactgaagatgatgaatcaccagagcagcgagcccggagaccaatgaatgcatttcttttattttgcaaacgccatcgctctcttgtacgtcaggaacaccccaggcttgataaccgaggtgctaccaagatactagctgattggtgggctgttcttgatccaaaggaaaagcagaaatacacagacatggccaaggagtataaggatgcatttatgaaagcaaatcctggctacaaatggtgtcctaccacaaacaagcctgtgaaatccccaacacccactgtcaatccacgaaagaaactttgggccttcccatctgactcttcaagagacttgccaagccccaagaaagcaaagactgaagaaatgcctca

SEQ ID NO: 301912 - DNA, 539 bp, Artificial Sequence
  derived and/or modified sequence
tttgctaagaggtagtgttagggcaaggcctggtcacagtaatgaaaggcagtaatagaaataaggatcattcagcagaaggagaaggggttggaaaacgaccaaaacgaaagtgtcttcagtggcatccattgctagcaaagaaacttcttgatttttcagaagaggaagaagaggaagacgaagaggaggatattgataaggttcaacttcttggggccgatggcctagagcaagatgttggtgaaactgaagatgatgaatcaccagagcagcgagcccggagaccaatgaatgcatttcttttattttgcaaacgccatcgctctcttgtacgtcaggaacaccccaggcttgataaccgaggtgctaccaagatactagctgattggtgggctgttcttgatccaaaggaaaagcagaaatacacagacatggccaaggagtataaggatgcatttatgaaagcaaatcctggctacaaatggtgtcctaccacaaacaagcctgtgaaatccccaacacccactgtcaatcca

SEQ ID NO: 301913 - DNA, 843 bp, Artificial Sequence
  derived and/or modified sequence
cttacttacttacctggaagcagtgaggcagtcaagaattatgtgctgtcagagctggtctcagcatgatcaaggaagtgtgatcattggatatttttttcttgtcaattttattattttttaaagtgtgacttttattgatctccattatcaaatggggaaactgaagaacagagaggtgaaattatctgcccaaggttacgctgctaataagtggcaaagctggaattcaaactcaggctgtctggctgcagggtttgttctcctaaccacaccaccacactgcctgtagattatcctcacatgtttgggtatccttttacattcatgtgcatgaatgcactgtttatttttaacgtcacagtaatgaaaggcagtaatagaaataaggatcattcagcagaaggagaaggggttggaaaacgaccaaaacgaaagtgtcttcagtggcatccattgctagcaaagaaacttcttgatttttcagaagaggaagaagaggaagacgaagaggaggatattgataaggttcaacttcttggggccgatggcctagagcaagatgttggtgaaactgaagatgatgaatcaccagagcagcgagcccggagaccaatgaatgcatttcttttattttgcaaacgccatcgctctcttgtacgtcaggaacaccccaggcttgataaccgaggtgctaccaagatactagctgattggtgggctgttcttgatccaaaggaaaagcagaaatacacagacatggccaaggagtataaggatgcatttatgaaagcaaatcctggctacaaatggtgtcctaccacaaacaagcctgtgaaatcc

SEQ ID NO: 301914 - DNA, 675 bp, Artificial Sequence
  derived and/or modified sequence
aataagtttaaggtggagagagcgaggctgagggtggtggtggaggggaggaggaaggccttggccgtttaaagtcttatttctgaaggtcactatcatatgacaaaggctttgccgcagttcatcttcctccctgtgtactttccatttgccttcctggaatcctgctgcatcacagaagctggaagttctgatgttccactgaaatcacaatggaaagtcttgacttgactggtcacagtaatgaaaggcagtaatagaaataaggatcattcagcagaaggagaaggggttggaaaacgaccaaaacgaaagtgtcttcagtggcatccattgctagcaaagaaacttcttgatttttcagaagaggaagaagaggaagacgaagaggaggatattgataaggttcaacttcttggggccgatggcctagagcaagatgttggtgaaactgaagatgatgaatcaccagagcagcgagcccggagaccaatgaatgcatttcttttattttgcaaacgccatcgctctcttgtacgtcaggaacaccccaggcttgataaccgaggtgctaccaagatactagctgattggtgggctgttcttgatccaaaggaaaagcagaaatacacagacatggccaaggagtataaggatgcatttatgaaagcaaat

SEQ ID NO: 301915 - DNA, 871 bp, Artificial Sequence
  derived and/or modified sequence
agaccgccgccagttcgagcaggcacgggcacggggacaccccactcgttgctcctccgttatggaaaggtgtttagcagacttttacgcccggagtgtggtcactatcatatgacaaaggctttgccgcagttcatcttcctccctgtgtactttccatttgccttcctggaatcctgctgcatcacagaagctggaagttctgatgttccactgaaatcacaatggaaagtcttgacttgactggtcacagtaatgaaaggcagtaatagaaataaggatcattcagcagaaggagaaggggttggaaaacgaccaaaacgaaagtgtcttcagtggcatccattgctagcaaagaaacttcttgatttttcagaagaggaagaagaggaagacgaagaggaggatattgataaggttcaacttcttggggccgatggcctagagcaagatgttggtgaaactgaagatgatgaatcaccagagcagcgagcccggagaccaatgaatgcatttcttttattttgcaaacgccatcgctctcttgtacgtcaggaacaccccaggcttgataaccgaggtgctaccaagatactagctgattggtgggctgttcttgatccaaaggaaaagcagaaatacacagacatggccaaggagtataaggatgcatttatgaaagcaaatcctggctacaaatggtgtcctaccacaaacaagcctgtgaaatccccaacacccactgtcaatccacgaaagaaactttgggccttcccatctgactcttcaagagacttgccaagccccaagaaagcaaagactgaagaaatgcctcagcttaactttggaatggctgatcctactcaaatgg

SEQ ID NO: 301916 - DNA, 450 bp, Artificial Sequence
  derived and/or modified sequence
atgaagggcagcaacagaaacaaggaccacagcgccgagggcgagggcgtgggcaagagacccaagagaaagtgcctgcagtggcaccccctgctggccaagaagctgctggacttcagcgaggaggaggaggaggaggacgaggaggaggacatcgacaaggtgcagctgctgggcgccgacggcctggagcaggacgtgggcgagaccgaggacgacgagagccccgagcagagagccagaagacccatgaacgccttcctgctgttctgcaagagacacagaagcctggtgagacaggagcaccccagactggacaacagaggcgccaccaagatcctggccgactggtgggccgtgctggaccccaaggagaagcagaagtacaccgacatggccaaggagtacaaggacgccttcatgaaggccaaccccggctacaagtggtag

SEQ ID NO: 301917 - DNA, 582 bp, Artificial Sequence
  derived and/or modified sequence
atgaagggcagcaacagaaacaaggaccacagcgccgagggcgagggcgtgggcaagagacccaagagaaagtgcctgcagtggcaccccctgctggccaagaagctgctggacttcagcgaggaggaggaggaggaggacgaggaggaggacatcgacaaggtgcagctgctgggcgccgacggcctggagcaggacgtgggcgagaccgaggacgacgagagccccgagcagagagccagaagacccatgaacgccttcctgctgttctgcaagagacacagaagcctggtgagacaggagcaccccagactggacaacagaggcgccaccaagatcctggccgactggtgggccgtgctggaccccaaggagaagcagaagtacaccgacatggccaaggagtacaaggacgccttcatgaaggccaaccccggctacaagtggtgccccaccaccaacaagcccgtgaagagccccacccccaccgtgaaccccagaaagaagctgtgggccttccccagcgacagcagcagagacctgcccagccccaagaaggccaagaccgaggagatgccctag

SEQ ID NO: 301918 - DNA, 501 bp, Artificial Sequence
  derived and/or modified sequence
atgaagggcagcaacagaaacaaggaccacagcgccgagggcgagggcgtgggcaagagacccaagagaaagtgcctgcagtggcaccccctgctggccaagaagctgctggacttcagcgaggaggaggaggaggaggacgaggaggaggacatcgacaaggtgcagctgctgggcgccgacggcctggagcaggacgtgggcgagaccgaggacgacgagagccccgagcagagagccagaagacccatgaacgccttcctgctgttctgcaagagacacagaagcctggtgagacaggagcaccccagactggacaacagaggcgccaccaagatcctggccgactggtgggccgtgctggaccccaaggagaagcagaagtacaccgacatggccaaggagtacaaggacgccttcatgaaggccaaccccggctacaagtggtgccccaccaccaacaagcccgtgaagagccccacccccaccgtgaacccctag

SEQ ID NO: 301919 - DNA, 312 bp, Artificial Sequence
  derived and/or modified sequence
atgaagggcagcaacagaaacaaggaccacagcgccgagggcgagggcgtgggcaagagacccaagagaaagtgcctgcagtggcaccccctgctggccaagaagctgctggacttcagcgaggaggaggaggaggaggacgaggaggaggacatcgacaaggtgcagctgctgggcgccgacggcctggagcaggacgtgggcgagaccgaggacgacgagagccccgagcagagagccagaagacccatgaacgccttcctgctgttctgcaagagacacagaagcctggtgagacaggagcacccctag

SEQ ID NO: 301920 - DNA, 480 bp, Artificial Sequence
  derived and/or modified sequence
atgaagggcagcaacagaaacaaggaccacagcgccgagggcgagggcgtgggcaagagacccaagagaaagtgcctgcagtggcaccccctgctggccaagaagctgctggacttcagcgaggaggaggaggaggaggacgaggaggaggacatcgacaaggtgcagctgctgggcgccgacggcctggagcaggacgtgggcgagaccgaggacgacgagagccccgagcagagagccagaagacccatgaacgccttcctgctgttctgcaagagacacagaagcctggtgagacaggagcaccccagactggacaacagaggcgccaccaagatcctggccgactggtgggccgtgctggaccccaaggagaagcagaagtacaccgacatggccaaggagtacaaggacgccttcatgaaggccaaccccggctacaagtggtgccccaccaccaacaagcccgtgaagagctag

SEQ ID NO: 301921 - DNA, 345 bp, Artificial Sequence
  derived and/or modified sequence
atgaagggcagcaacagaaacaaggaccacagcgccgagggcgagggcgtgggcaagagacccaagagaaagtgcctgcagtggcaccccctgctggccaagaagctgctggacttcagcgaggaggaggaggaggaggacgaggaggaggacatcgacaaggtgcagctgctgggcgccgacggcctggagcaggacgtgggcgagaccgaggacgacgagagccccgagcagagagccagaagacccatgaacgccttcctgctgttctgcaagagacacagaagcctggtgagacaggagcaccccagactggacaacagaggcgccaccaagatcctgtag

SEQ ID NO: 301922 - DNA, 435 bp, Artificial Sequence
  derived and/or modified sequence
atgaagggcagcaacagaaacaaggaccacagcgccgagggcgagggcgtgggcaagagacccaagagaaagtgcctgcagtggcaccccctgctggccaagaagctgctggacttcagcgaggaggaggaggaggaggacgaggaggaggacatcgacaaggtgcagctgctgggcgccgacggcctggagcaggacgtgggcgagaccgaggacgacgagagccccgagcagagagccagaagacccatgaacgccttcctgctgttctgcaagagacacagaagcctggtgagacaggagcaccccagactggacaacagaggcgccaccaagatcctggccgactggtgggccgtgctggaccccaaggagaagcagaagtacaccgacatggccaaggagtacaaggacgccttcatgaaggccaactag

SEQ ID NO: 301923 - DNA, 618 bp, Artificial Sequence
  derived and/or modified sequence
atgaagggcagcaacagaaacaaggaccacagcgccgagggcgagggcgtgggcaagagacccaagagaaagtgcctgcagtggcaccccctgctggccaagaagctgctggacttcagcgaggaggaggaggaggaggacgaggaggaggacatcgacaaggtgcagctgctgggcgccgacggcctggagcaggacgtgggcgagaccgaggacgacgagagccccgagcagagagccagaagacccatgaacgccttcctgctgttctgcaagagacacagaagcctggtgagacaggagcaccccagactggacaacagaggcgccaccaagatcctggccgactggtgggccgtgctggaccccaaggagaagcagaagtacaccgacatggccaaggagtacaaggacgccttcatgaaggccaaccccggctacaagtggtgccccaccaccaacaagcccgtgaagagccccacccccaccgtgaaccccagaaagaagctgtgggccttccccagcgacagcagcagagacctgcccagccccaagaaggccaagaccgaggagatgccccagctgaacttcggcatggccgaccccacccagatgtag

SEQ ID NO: 301924 - DNA, 216 bp, Artificial Sequence
  derived and/or modified sequence
atgaagggcagcaacagaaacaaggaccacagcgccgagggcgagggcgtgggcaagagacccaagagaaagtgcctgcagtggcaccccctgctggccaagaagctgctggacttcagcgaggaggaggaggaggaggacgaggaggaggacatcgacaaggtgcagctgctgggcgccgacggcctggagcaggacgtgggcgagaccgagtag

SEQ ID NO: 301925 - DNA, 258 bp, Artificial Sequence
  derived and/or modified sequence
atgaagggcagcaacagaaacaaggaccacagcgccgagggcgagggcgtgggcaagagacccaagagaaagtgcctgcagtggcaccccctgctggccaagaagctgctggacttcagcgaggaggaggaggaggaggacgaggaggaggacatcgacaaggtgcagctgctgggcgccgacggcctggagcaggacgtgggcgagaccgaggacgacgagagccccgagcagagagccagaagacccatgaactag

SEQ ID NO: 301926 - DNA, 297 bp, Artificial Sequence
  derived and/or modified sequence
atgaagggcagcaacagaaacaaggaccacagcgccgagggcgagggcgtgggcaagagacccaagagaaagtgcctgcagtggcaccccctgctggccaagaagctgctggacttcagcgaggaggaggaggaggaggacgaggaggaggacatcgacaaggtgcagctgctgggcgccgacggcctggagcaggacgtgggcgagaccgaggacgacgagagccccgagcagagagccagaagacccatgaacgccttcctgctgttctgcaagagacacagaagcctggtgtag

SEQ ID NO: 301927 - DNA, 2241 bp, Artificial Sequence
  derived and/or modified sequence
atgccatgcctcggactgctcgcgaacctgtgccgccacaatctctctgttcagacgcatataaagaccctgtctaatgtaaagtccttctataggacattaattacattattggcccacagcagcctgacagtggtggtctttgctctgtcgattttatctagcctcaccctgaatgaagaagtcggagagaagttgttccacgcaaggaacatccatcagacattccagctcatttttaacatattaatcaacggggatggcacattaacccggaagtactctgtggatctccttatggacttattaaaaaaccctaaaatcgcggactacctgacgcgttacgagcacttctccagctgcctccaccaggtccttggtctcctgaacggtaaggaccctgatagtagcagtaaggtcctcgaattactcttagcattctgctccgtcacacagctccgccacatgctcacacagatgatgttcgaacagagtccgcccgggtcagccactctcgggtctcataccaagtgcctggagccaactgtagctctcctccggtggctgtcccagcccctggacggctccgagaactgctcggtgctggcattggagctatttaaagagatcttcgaagatgttattgatgctgccaactgctcgtcagccgatcgctttgttacgcttctgcttcccacgattctggaccaactgcagttcactgaacagaatctcgatgaagcgctcacccgcaaaaaatgtgagagaattgcaaaagccatcgaggttctgctgacgctctgtggggacgataccctcaagatgcacatcgcaaaaattctcacaaccgtcaagtgtaccaccctgatcgaacagcagttcacctacggaaaaatagatctgggcttcgggacaaaagttgcggacagcgagctatgtaagctggctgccgacgtaatcttaaaaacactggacttaatcaacaaactcaaaccacttgtgcccggcatggaagtctcattttacaaaatccttcaagatccccgccttatcacacccctagcattcgccctcacgtccgacaaccgggaacaagtgcagtctggactaagaatcttgctagaggctgcaccccttccagactttcccgcactcgtgctgggggaatcaatcgccgcaaataacgcttatcggcagcaggagaccgagcatattccgcggaaaatgccctggcagtcaagcaatcactcatttcctacatccatcaagtgcttaacaccgcaccttaaggacggagtgcccgggttgaacattgaggaactgatcgaaaaactccagtctggaatggtagtaaaggaccagatctgtgatgtgcgcatctccgacatcatggacgtgtacgagatgaagcttagcacactggctagcaaggagtcccgactgcaggacttactcgaaaccaaagccctcgccctcgcgcaggcggaccgcctaatcgcacagcaccgatgccagcggacccaggcagagacagaggcacggaccctcgcctcaatgctgagggaagtagaacggaaaaacgaggagcttagtgtactgctgaaggcacaacaagtggaaagcgagagggctcaatctgacatcgaacacctgttccaacacaatcggaaacttgagagtgtggctgaggagcacgaaattctgaccaaaagctacatggagctgctgcaacgcaacgagtctactgagaagaagaataaagacctgcagataacatgtgatagcttaaacaaacaaatagaaacagtaaagaagttaaatgaatcattgaaggagcagaatgagaagtccattgcacagcttatcgaaaaagaggagcaaaggaaggaggtgcagaaccagctggtggacagagaacacaagctcgccaacctgcaccaaaaaaccaaagtccaggaggaaaagattaagactctccagaaggagcgggaagacaaagaggagacaatagatatcttacgaaaagaactgtcaagaacagaacaaattaggaaggagttgagtataaaggcatctagtttagaggtgcagaaggcacaactggagggacgcctcgaagaaaaggagtctctggtgaagctgcagcaagaagagctgaataaacactctcatatgatcgcaatgattcacagtctctccggcggtaaaatcaaccctgagaccgttaatttgagtatctag

SEQ ID NO: 301928 - DNA, 2241 bp, Artificial Sequence
  derived and/or modified sequence
atgccctgcctgggcctgctggccaacctgtgccgccacaacctgtctgtgcagacccacatcaagaccctgagcaatgtgaagagcttctaccgcaccctcatcaccctgctggcccacagcagcctgactgtggtggtgtttgccctgagcatcctgagcagcctgaccctgaatgaggaggtgggggagaagctgttccacgccaggaacatccaccagaccttccagctgatcttcaacatcctgatcaatggagatggcaccctgaccaggaagtacagcgtggacctgctgatggacctgctgaagaaccccaagattgctgactacctgaccaggtatgagcacttcagcagctgcctgcaccaggtgctgggcctgctgaatggcaaggaccctgacagcagcagcaaggtgctggagctgctgctggccttctgcagcgtgacccagctgcggcacatgctgacccagatgatgtttgagcagagccccccaggcagcgccaccctgggcagccacaccaagtgcctggagcccaccgtggccctgctgcgctggctgagccagcccctggatggcagcgagaactgcagcgtgctggccctggagctgttcaaggagatctttgaagatgtgattgatgctgccaactgcagcagcgctgacagatttgtgaccctgctgctgcccaccatcctggaccagctgcagttcacagagcagaacctggatgaggccctgaccaggaagaagtgtgaaagaattgccaaggccatcgaggtgctgctgaccctgtgtggagatgacaccctgaagatgcacatcgccaagatcctgaccaccgtgaagtgcaccaccctcatcgagcagcagttcacctacggcaagattgacctgggcttcggcaccaaggtggccgacagcgagctgtgcaagctggccgcagatgtgatcctgaagaccctggacctgatcaacaagctgaagcccctggtgcccggcatggaggtgtccttctacaagatcctgcaggaccccaggctcatcacccccctggcctttgccctgaccagtgacaaccgggagcaggtgcagagcggcctgcgcatcctgctggaggccgcccccctgcctgacttccctgccctggtgctgggggagagcattgctgccaacaatgcctaccggcagcaggagacagagcacatccccaggaagatgccctggcagagcagcaaccacagcttccccaccagcatcaagtgcctgaccccccacctgaaggatggagtgcccggcctgaacatcgaggagctgattgagaagctgcagagcggcatggtggtgaaggaccagatctgtgatgtgcgcatcagtgacatcatggatgtgtatgagatgaagctgagcaccctggccagcaaggagagccggctgcaggacctgctggagaccaaggccctggccctggcccaggccgaccggctgattgcccagcaccgctgccagaggacccaggccgagacagaggcccggaccctggcctccatgctgcgggaggtggagaggaagaatgaggagctgtctgtgctgctgaaggcccagcaggtggagagcgagcgggcccagagcgacatcgagcacctgttccagcacaacaggaagctggagagcgtggccgaggagcacgagatcctgaccaagagctacatggagctgctgcagagaaatgaaagcacagagaagaagaacaaggacctgcagatcacctgtgacagcctgaacaagcagatcgagaccgtgaagaagctgaatgaaagcctgaaggagcagaatgagaagagcatcgcccagctgattgagaaggaggagcagaggaaggaggtgcagaaccagctggtggaccgggagcacaagctggccaacctgcaccagaagaccaaggtgcaggaggagaagatcaagaccctgcagaaggagcgggaggacaaggaggagaccatcgacatcctgaggaaggagctgagcaggacagagcagatcaggaaggagctgagcatcaaggccagcagcctggaggtgcagaaggcccagctggagggccgcctggaggagaaggagagcctggtgaagctgcagcaggaggagctgaacaagcacagccacatgattgccatgatccacagcctgagcggcggcaagatcaaccctgagaccgtgaacctgagcatctag

SEQ ID NO: 301929 - DNA, 2241 bp, Artificial Sequence
  derived and/or modified sequence
atgccctgcctgggcctgctggccaacctgtgccggcacaacctgtccgttcagacacacattaaaactctgagtaacgtgaaatcattctataggaccttgatcacactgctggcacactccagcctgacggtcgttgtgttcgcactgtccatcctgtcctccttgaccctcaacgaagaggttggcgagaaactctttcacgccagaaatatacaccagactttccagttaatttttaacattctcattaacggggacggcacattaacgcggaagtatagcgtcgaccttctgatggacctgttgaagaatccaaagatcgctgattatctcacgcggtacgagcacttctcctcctgtttgcaccaggtgctaggattgcttaacggcaaagaccctgacagctcttctaaagttctggaattgctgctcgcattctgcagcgtgacgcagctccggcacatgctgacacagatgatgttcgaacagtctccccctggctctgccactctggggtcgcacactaaatgtcttgaaccaacagttgccctccttcgatggttgtcacaacccttggatgggagtgagaattgcagcgtgcttgccctcgagcttttcaaggaaatcttcgaggacgtcatagacgccgccaactgtagctccgccgataggtttgtgacactgctgctgccaacaattctcgatcagctgcaatttacggagcagaatttggacgaagctcttacaaggaagaaatgtgagagaatcgcgaaggccattgaggtcctgctgactttgtgcggtgacgacacccttaagatgcatattgcaaaaatactaacaacagtgaagtgcacgaccttaatcgagcagcagtttacctatggcaaaattgacctggggtttggcacaaaggtagctgatagtgagctatgcaagctagctgctgatgtgattctgaagacactcgatctgataaataagctgaaaccactcgtgcctggcatggaagtgagtttttataaaatcctccaggaccctagactgattaccccacttgcgtttgcgttgacctctgataatcgagaacaggtccagtccgggctccgaatattactggaggctgctcccctgcccgatttcccagcccttgtcctgggcgagtccatcgcagccaacaacgcataccggcagcaagaaactgaacacatccccaggaagatgccttggcaatcgtctaatcactcctttcccacatctattaaatgcctgacaccccaccttaaagatggcgtgcccggcctcaacattgaggaactgatcgaaaagctgcaatctggcatggtggtcaaggatcagatctgcgatgtcagaattagcgacataatggacgtatacgagatgaaattgtctacattagcgagcaaagaaagtcggctgcaagatctactggagaccaaagcacttgcattagctcaggctgatcggcttatcgcacagcatcgctgccagcggacacaggcggagacggaagcacgcaccctggcgtcgatgttacgggaggtggagcggaaaaatgaggaattatctgtacttctgaaagcccagcaggtagagtcagaacgggcccagagcgacatagagcacctgttccagcacaaccgaaaactcgagtccgtggcagaagaacatgagatcctgactaagtcttatatggaactgttgcaaagaaacgaatcaaccgagaaaaaaaataaggatctgcagatcacgtgcgatagtctcaacaaacagatcgagacggttaagaaactcaacgaatcgctaaaggagcagaatgagaaaagcatcgcacagctcatagagaaagaagagcagcggaaagaagttcagaatcagctcgtggaccgcgagcacaaactagccaatcttcaccagaaaaccaaagttcaggaggaaaagatcaagactctacagaaagagagagaggataaggaggagaccatcgacatcctgcgcaaagaactctccaggaccgagcagattcgcaaagagcttagtattaaagcttcctctctggaagtccagaaggcccaacttgaaggtaggcttgaggaaaaggaatccctcgtcaaattgcaacaggaggaattgaataagcacagccacatgatcgctatgatccactccctgtctggcggaaagatcaacccggagaccgtgaacttatctatttag

SEQ ID NO: 301930 - DNA, 2241 bp, Artificial Sequence
  derived and/or modified sequence
atgccgtgcctgggtctgctcgctaacctttgccgacataacctaagtgtccaaacccatattaagacattgagcaatgtgaagtccttctatcggactcttatcaccctgctggcccacagcagtttgactgtggtggttttcgccctgtcgatccttagcagcctcacactgaatgaagaggtgggtgagaagcttttccatgccaggaacatccaccaaacatttcagctcattttcaacatcctgatcaacggggatggaactctgacaaggaagtactccgtggatcttcttatggatctgctgaagaaccctaagattgccgactacctcacaaggtatgagcacttctcctcttgcctccatcaggtcctgggtctcttaaatggcaaagatccagacagctcttctaaagtgctcgagttacttctcgccttttgttctgtgacccagcttcgccatatgctgacccagatgatgtttgaacagtcacccccaggatctgcaaccctgggtagtcacacaaaatgtctggaacccaccgttgccctgctccgatggctgtctcagccccttgatggatccgagaattgttccgtactggcccttgaactgttcaaagaaatattcgaagatgtgattgacgccgctaactgcagtagcgctgacaggtttgtgacactactgctgcccaccattctggaccagctacagttcactgagcaaaatttagacgaggcccttaccaggaagaaatgcgagagaatcgctaaagcgatcgaggtcttgttgactctctgcggcgacgataccctgaaaatgcacatcgccaaaatcttgaccaccgtgaagtgcacgaccctgatcgagcagcagttcacctacggaaaaattgacctgggctttgggacaaaagttgccgacagcgagctgtgcaagttggcggcagatgtgatcctgaagacactggacctgattaataagctgaagccgctggttcccggtatggaggtaagtttttataagattcttcaggacccaagattgattactccactcgcgttcgcacttacatccgacaacagagaacaagttcaatcggggttgcggatcctgctggaggctgctccactgcctgactttcccgcattggtgttgggagaatcaattgccgcaaacaatgcatatcgccaacaagagactgaacatattccacggaagatgccgtggcagagctcaaaccacagctttcctacctcaatcaaatgtctgacaccacacctcaaggacggagtgccgggactaaacattgaggagctgatagagaagctacagtccgggatggttgttaaagaccagatatgcgacgtgcggataagtgacataatggatgtgtacgaaatgaagctttcaaccctggctagcaaggagagcaggctgcaggatctgctggagacaaaggccctcgccctggcgcaggccgacagactcatcgcccagcaccgatgtcagcgcactcaggcagaaaccgaagccaggaccctggctagcatgctacgggaagtagaaaggaagaatgaggaactcagcgtgttgctaaaagcgcaacaggtggaatccgaacgagcccagtctgacatcgagcatctgttccagcacaataggaagctggagtccgttgccgaagagcatgagatcctgactaaatcttatatggaactcctacagagaaacgagagtacagaaaagaaaaacaaggatctgcagatcacctgtgactccctgaacaaacaaatcgagaccgttaagaaactgaacgaaagtctcaaagagcaaaatgagaagtctatcgctcagttgatcgagaaggaggagcaacgtaaggaagtgcagaaccagttagtcgacagagaacataagctcgccaacttgcaccagaaaactaaagtgcaggaagaaaagatcaaaacactgcagaaggagagagaggataaggaggaaacaatagacattttgcgtaaggaactttccaggaccgaacagattagaaaggaactgtcaatcaaagccagctccctggaggtgcagaaggcacagttggagggacgacttgaggagaaagagtcattagttaaacttcagcaagaggaactgaacaagcactctcacatgatagccatgattcattccctgagcggcggtaaaattaatccggagacagtaaatctaagtatctag

SEQ ID NO: 301931 - DNA, 2241 bp, Artificial Sequence
  derived and/or modified sequence
atgccctgcctgggcctgctggccaacctgtgcagacacaacctgagcgtgcagacccacatcaagaccctgagcaacgtgaagagcttctacagaaccctgatcaccctgctggcccacagcagcctgaccgtggtggtgttcgccctgagcatcctgagcagcctgaccctgaacgaggaggtgggcgagaagctgttccacgccagaaacatccaccagaccttccagctgatcttcaacatcctgatcaacggcgacggcaccctgaccagaaagtacagcgtggacctgctgatggacctgctgaagaaccccaagatcgccgactacctgaccagatacgagcacttcagcagctgcctgcaccaggtgctgggcctgctgaacggcaaggaccccgacagcagcagcaaggtgctggagctgctgctggccttctgcagcgtgacccagctgagacacatgctgacccagatgatgttcgagcagagcccccccggcagcgccaccctgggcagccacaccaagtgcctggagcccaccgtggccctgctgagatggctgagccagcccctggacggcagcgagaactgcagcgtgctggccctggagctgttcaaggagatcttcgaggacgtgatcgacgccgccaactgcagcagcgccgacagattcgtgaccctgctgctgcccaccatcctggaccagctgcagttcaccgagcagaacctggacgaggccctgaccagaaagaagtgcgagagaatcgccaaggccatcgaggtgctgctgaccctgtgcggcgacgacaccctgaagatgcacatcgccaagatcctgaccaccgtgaagtgcaccaccctgatcgagcagcagttcacctacggcaagatcgacctgggcttcggcaccaaggtggccgacagcgagctgtgcaagctggccgccgacgtgatcctgaagaccctggacctgatcaacaagctgaagcccctggtgcccggcatggaggtgagcttctacaagatcctgcaggaccccagactgatcacccccctggccttcgccctgaccagcgacaacagagagcaggtgcagagcggcctgagaatcctgctggaggccgcccccctgcccgacttccccgccctggtgctgggcgagagcatcgccgccaacaacgcctacagacagcaggagaccgagcacatccccagaaagatgccctggcagagcagcaaccacagcttccccaccagcatcaagtgcctgaccccccacctgaaggacggcgtgcccggcctgaacatcgaggagctgatcgagaagctgcagagcggcatggtggtgaaggaccagatctgcgacgtgagaatcagcgacatcatggacgtgtacgagatgaagctgagcaccctggccagcaaggagagcagactgcaggacctgctggagaccaaggccctggccctggcccaggccgacagactgatcgcccagcacagatgccagagaacccaggccgagaccgaggccagaaccctggccagcatgctgagagaggtggagagaaagaacgaggagctgagcgtgctgctgaaggcccagcaggtggagagcgagagagcccagagcgacatcgagcacctgttccagcacaacagaaagctggagagcgtggccgaggagcacgagatcctgaccaagagctacatggagctgctgcagagaaacgagagcaccgagaagaagaacaaggacctgcagatcacctgcgacagcctgaacaagcagatcgagaccgtgaagaagctgaacgagagcctgaaggagcagaacgagaagagcatcgcccagctgatcgagaaggaggagcagagaaaggaggtgcagaaccagctggtggacagagagcacaagctggccaacctgcaccagaagaccaaggtgcaggaggagaagatcaagaccctgcagaaggagagagaggacaaggaggagaccatcgacatcctgagaaaggagctgagcagaaccgagcagatcagaaaggagctgagcatcaaggccagcagcctggaggtgcagaaggcccagctggagggcagactggaggagaaggagagcctggtgaagctgcagcaggaggagctgaacaagcacagccacatgatcgccatgatccacagcctgagcggcggcaagatcaaccccgagaccgtgaacctgagcatctag

SEQ ID NO: 301932 - DNA, 834 bp, Artificial Sequence
  derived and/or modified sequence
atgatgaaaattgttggaggccactatttgaaggtgactctgaagcccattctggacgagatctgtgactcctctaagtcctgcgaaatcgatccaataaagttgaaggagggcgacaacgttgaaaacaataaggagaacctcaggtactacgtagataagctgttcaacaccattgtgaaatcgagcatgtcttgccccacggttatgtgtgatatcttctattcgcttcgccagatggctactcagaggtttcccaatgatccgcacgtccaatacagcgctgttagtagttttgtgtttctccgctttttcgcagtcgccgtcgtgtcacctcacaccttccaccttaggcctcaccacccggatgctcagactattcgcacactcactttgatctccaaaacgatacaaacactagggtcttgggggtctttgtcaaagagcaagtccagcttcaaggagactttcatgtgcgaattcttcaagatgttccaggaggaaggctacataatcgcggtgaagaaattcctggatgagatttcgagcactgaaacgaaggaaagtagtgggactagtgagccggtgcacctcaaggaaggcgagatgtataagcgagcacaaggaagaaccaggatcggaaagaagaatttcaagaagaggtggttctgtctgacctcccgtgaactgacgtatcacaagcagccaggcagctgcgtgtatgccctgctgtggggtttcagctggttctcagtgaaagtgtcgttgcccctcatcgtgacactggtcaatccctttagcaacataaccgtggtttacggcttttcgcactag

SEQ ID NO: 301933 - DNA, 834 bp, Artificial Sequence
  derived and/or modified sequence
atgatgaagatcgtgggcggccactacctgaaggtgaccctgaagcccatcctggatgagatctgtgacagcagcaagagctgtgaaattgaccccatcaagctgaaggagggggacaacgtggagaacaacaaggagaacctgcgctactacgtggacaagctgttcaacaccatcgtgaagagctccatgagctgccccaccgtgatgtgtgacatcttctacagcctgcggcagatggccacccagcgcttccccaatgacccccacgtgcagtacagcgctgtgagcagctttgtgttcctgcgcttctttgctgtggccgtggtgagcccccacaccttccacctgcggccccaccacccagatgcccagaccatccgcaccctgaccctcatcagcaagaccatccagaccctgggctcctggggcagcctgagcaagagcaagagcagcttcaaggagaccttcatgtgtgagttcttcaagatgttccaggaggagggctacatcatcgctgtgaagaagttcctggatgagatcagcagcacagagaccaaggagagcagcggcaccagcgagcctgtgcacctgaaggagggggagatgtacaagagggcccagggccgcaccagaattggcaagaagaacttcaagaagcgctggttctgcctgaccagccgggagctgacctaccacaagcagcccggcagctgtgtgtatgccctgctgtggggcttctcctggttctctgtgaaggtgtccctgcccctgattgtgaccctggtgaaccccttcagcaacatcaccgtggtgtatggcttcagccactag

SEQ ID NO: 301934 - DNA, 834 bp, Artificial Sequence
  derived and/or modified sequence
atgatgaagatcgtgggcggccactacctgaaggtgaccctgaagcctatattagacgaaatttgcgatagttccaaaagctgcgaaattgatcctatcaaactgaaagagggtgataatgtggagaacaataaggaaaacttaaggtattatgtcgacaaactgttcaacactatagtgaaaagctccatgtcctgtccgaccgtgatgtgcgatatattttactctctgagacagatggcaactcagaggtttcctaacgatcctcatgtccagtatagcgctgtgagttcctttgtattcctgcgctttttcgccgtagccgttgtgtcaccccacaccttccaccttaggccgcaccatcctgacgctcagaccatcaggacgctgacccttatctctaagaccattcaaaccctggggagctggggatcgctgagcaaatctaagtccagcttcaaggagaccttcatgtgcgagtttttcaaaatgtttcaagaagaaggatacataatcgctgtcaagaaattcctggatgagatctcttccacagaaaccaaggagtcaagtggaacctcggaaccagtgcatctgaaggaaggggaaatgtacaaacgggcacaaggacgaacacggatcggcaagaaaaactttaaaaagaggtggttttgcctcacttcccgcgagcttacctaccacaagcagccaggatcctgtgtctacgccctcctgtggggcttttcttggttttctgtcaaagtaagcctccccctgatcgttactctggtgaacccattttctaacataacagtggtgtacgggttctctcattag

SEQ ID NO: 301935 - DNA, 834 bp, Artificial Sequence
  derived and/or modified sequence
atgatgaaaatcgtcggagggcactacctgaaggtcacattgaaaccaatcttggatgagatatgcgactcttccaagtcttgtgagatcgatcccattaaactgaaagagggtgataacgtcgaaaataacaaagaaaacttgcgttactacgtggataagcttttcaacacgatcgtgaagagcagcatgagctgcccgaccgtcatgtgtgacattttctattctttaagacagatggccacacagcgcttcccaaacgatcctcacgtccaatacagtgctgtgtcttcattcgtctttctgcgcttcttcgccgtcgccgtcgtgtcgccacacacgtttcatctgagaccacatcatccagacgcacagactatccgaactctcactctgatttctaaaaccattcagaccctaggcagctggggtagcctgtcaaaatcaaagtcgtcgtttaaagaaaccttcatgtgcgaattttttaagatgtttcaggaagagggctacatcatcgccgtcaagaaatttctcgatgagatttccagcactgaaaccaaagaaagctctgggacatctgagccagtccacctaaaagaaggggagatgtacaagagggcacaagggagaaccaggatcggaaagaaaaacttcaaaaagcgctggttttgcctgacgtcgcgggagctcacctaccacaaacaaccagggagctgtgtatacgcattgctgtggggcttttcgtggttttccgtgaaggtttccttacctctgatcgtcaccttggtgaacccatttagcaacattaccgtcgtgtacggcttcagccactag

SEQ ID NO: 301936 - DNA, 834 bp, Artificial Sequence
  derived and/or modified sequence
atgatgaagatcgtgggcggccactacctgaaggtgaccctgaagcccatcctggacgagatctgcgacagcagcaagagctgcgagatcgaccccatcaagctgaaggagggcgacaacgtggagaacaacaaggagaacctgagatactacgtggacaagctgttcaacaccatcgtgaagagcagcatgagctgccccaccgtgatgtgcgacatcttctacagcctgagacagatggccacccagagattccccaacgacccccacgtgcagtacagcgccgtgagcagcttcgtgttcctgagattcttcgccgtggccgtggtgagcccccacaccttccacctgagaccccaccaccccgacgcccagaccatcagaaccctgaccctgatcagcaagaccatccagaccctgggcagctggggcagcctgagcaagagcaagagcagcttcaaggagaccttcatgtgcgagttcttcaagatgttccaggaggagggctacatcatcgccgtgaagaagttcctggacgagatcagcagcaccgagaccaaggagagcagcggcaccagcgagcccgtgcacctgaaggagggcgagatgtacaagagagcccagggcagaaccagaatcggcaagaagaacttcaagaagagatggttctgcctgaccagcagagagctgacctaccacaagcagcccggcagctgcgtgtacgccctgctgtggggcttcagctggttcagcgtgaaggtgagcctgcccctgatcgtgaccctggtgaaccccttcagcaacatcaccgtggtgtacggcttcagccactag

SEQ ID NO: 301937 - DNA, 240 bp, Artificial Sequence
  derived and/or modified sequence
atgtcggaactcgagcagttacgccaagaggctgagcagctccgaaatcagattcaggacgcgaggaaggcatgcaacgacgctactctggttcagattacctccaacatggacagtgtgggcagaattcagatgcgcacccgtaggacacttcgcggccatctggccaaaatttacgcaatgcactgggggtacgactctcgcctgctggtgtcagcttctcaggatggcaaactgtag

SEQ ID NO: 301938 - DNA, 571 bp, Artificial Sequence
  derived and/or modified sequence
ctgggtgtggccggcggctctggtctcggctgtgagctgcgctctccacgccggctccgcgctccaggggctgctgagcgcccagcggacaccggcagcgcgcggtcgacgcgggcctgagctccctccagagatggatacctgccatgtagcccaggctggtcttgaactcctggcctcaagtgatctgcccacctcagcctcccaaagtgctgggattatgggcatgagccactgcgcctggcctatcctgcctttgtgccaggcagtcctcctcatgtgtattacagctgttttcactcattagctcctgaggtaaacaaattgaaaaaatgagcgaactggaacagttgaggcaagaagcagaacaactgcggaatcagattcaggatgctcggaaagcatgtaatgatgcaacgcttgttcagattacatcaaatatggactctgtgggtcgaatacaaatgcgaacaagacgtacactgaggggccacctagctaaaatctatgctatgcattggggatacgattccaggctgctagtcagtgcttctcaagatggaaaattaat

SEQ ID NO: 301939 - DNA, 240 bp, Artificial Sequence
  derived and/or modified sequence
atgtctgagctggagcagctgcggcaggaggccgagcagctgaggaaccagatccaggatgccaggaaggcctgcaatgatgccaccctggtgcagatcaccagcaacatggattctgtgggccgcatccagatgaggaccaggaggaccctgcggggccacctggccaagatctatgccatgcactggggctatgacagccggctgctggtgtctgccagccaggacggcaagctgtag

SEQ ID NO: 301940 - DNA, 240 bp, Artificial Sequence
  derived and/or modified sequence
atgagcgagctggagcagctgcggcaggaggccgagcagctgcggaatcagatccaagacgctcgcaaagcatgtaacgacgcaacattggtccagatcacctctaatatggattcagtggggcgtatccagatgcgtactagacggacccttagaggccacctggccaagatctacgcaatgcattggggatacgactcacgccttcttgttagcgcgtctcaggatggtaagctctag

SEQ ID NO: 301941 - DNA, 240 bp, Artificial Sequence
  derived and/or modified sequence
atgtctgaattggagcagctgcggcaggaggctgaacagcttagaaatcagatccaggacgccaggaaggcatgcaatgatgcgaccctcgtccaaataactagtaacatggactcggtgggcagaattcagatgcgcacacggaggacgctgaggggacatcttgcgaagatttacgcaatgcattgggggtacgatagcagattattggtcagtgcttcccaggatggcaagctgtag

SEQ ID NO: 301942 - DNA, 240 bp, Artificial Sequence
  derived and/or modified sequence
atgagcgagctggagcagctgagacaggaggccgagcagctgagaaaccagatccaggacgccagaaaggcctgcaacgacgccaccctggtgcagatcaccagcaacatggacagcgtgggcagaatccagatgagaaccagaagaaccctgagaggccacctggccaagatctacgccatgcactggggctacgacagcagactgctggtgagcgccagccaggacggcaagctgtag

SEQ ID NO: 301943 - DNA, 771 bp, Artificial Sequence
  derived and/or modified sequence
atgaaggacaagggccacgacggcgtgaaggagctggacagcctgaacagcgacagactgagaaccgtgcagctgaacgtgtgcagcagcgaggaggtggagaaggtggtggagatcgtgagaagcagcctgaaggaccccgagaagggcatgtggggcctggtgaacaacgccggcatcagcaccttcggcgaggtggagttcaccagcctggagacctacaagcaggtggccgaggtgaacctgtggggcaccgtgagaatgaccaagagcttcctgcccctgatcagaagagccaagggcagagtggtgaacatcagcagcatgctgggcagaatggccaaccccgccagaagcccctactgcatcaccaagttcggcgtggaggccttcagcgactgcctgagatacgagatgtaccccctgggcgtgaaggtgagcgtggtggagcccggcaacttcatcgccgccaccagcctgtacagccccgagagcatccaggccatcgccaagaagatgtgggaggagctgcccgaggtggtgagaaaggactacggcaagaagtacttcgacgagaagatcgccaagatggagacctactgcagcagcggcagcaccgacaccagccccgtgatcgacgccgtgacccacgccctgaccgccaccaccccctacaccagataccaccccatggactactactggtggctgagaatgcagatcatgacccacctgcccggcgccatcagcgacatgatctacatcagatag

SEQ ID NO: 301944 - DNA, 1605 bp, Artificial Sequence
  derived and/or modified sequence
cccagcgcgcgcttcgcgtgtagaagcgtccgggtggcggaggccgcaggccgcaggagtgctggtggaggggcttccagaaagaccctgcggcagcgccccccctcggctctccccgcaggagagcgggcacctgcgcggcgccgggtgaaggcgagagcctcggcgagccctctgcagcggagccccctgcccatttggttttggccagtcagcctggaaatctgcctgtagtcagctgatgcagagtcaccctgcagttcctactttgaggggttgcagaagcacatatttcactatggagggccgcctgcaggcctcgcgctgacaggatcttttgtgacgctgcaaatgtcctgacgcccactattgcttggttctacttcctttatcccgattggccgtcggacttatgccagtgcggcggagccggtgacaaagctgtcctggtcacaggctgtgactctggatttgggttctcattggccaagcatctgcattcaaaaggcttccttgtgtttgctggctgcttgatgaaggacaaaggccatgatggggtcaaggagctggacagcctaaacagtgaccgattgagaaccgtccagctcaatgtctgcagcagcgaagaggtggagaaagtggtggagattgtccgctcgagcctgaaggaccctgagaaaggcatgtggggcctcgttaacaatgccggcatctcaacgttcggggaggtggagttcaccagcctggagacctacaagcaggtggcagaagtgaacctttggggcacagtgcggatgacgaaatcctttctccccctcatccgaagggccaaaggccgcgtcgtcaatatcagcagcatgctgggccgcatggccaacccggcccgctccccgtactgcatcaccaagttcggggtagaggctttctcggactgcctgcgctatgagatgtaccccctgggcgtgaaggtcagcgtggtggagcccggcaacttcatcgctgccaccagcctttacagccctgagagcattcaggccatcgccaagaagatgtgggaggagctgcctgaggtcgtgcgcaaggactacggcaagaagtactttgatgaaaagatcgccaagatggagacctactgcagcagtggctccacagacacgtcccctgtcatcgatgctgtcacacacgccctgaccgccaccaccccctacacccgctaccaccccatggactactactggtggctgcgaatgcagatcatgacccacttgcctggagccatctccgacatgatctacatccgctgaagagtctcgctgtggcctctgtcagggatccctggtggaaggggaggggagggaggaacccatatagtcaactcttgattatccacgtgtggattatccaccatgccaggaagacccataactggttttaacactaactagagggaatgacttctttgcatagtgagtgacttgggccttcacaaacagggtgtggagtggcaggcagaggcctctaaatctcagggcaaacatggtgaatctatctctccggagataatttcatacagagattttaagaaaacatctttatattaaaaac

SEQ ID NO: 301945 - DNA, 771 bp, Artificial Sequence
  derived and/or modified sequence
atgaaggacaagggccatgatggagtcaaagaactggattcccttaatagcgaccgacttcggaccgttcagttgaatgtgtgttctagcgaagaggtggagaaggtcgtggaaatcgttaggtcctccctcaaagatcccgagaagggcatgtggggcctggtgaataatgcaggcattagcacattcggagaggttgaattcacgtctctcgaaacatataagcaagttgccgaggtaaacctttggggtaccgtccgcatgacgaaatccttcctgccccttattaggcgcgctaaaggtcgggtggtgaatatctcttccatgctcggacggatggccaaccccgcccggtcaccttactgcatcaccaagttcggtgttgaggcattcagtgactgcttaagatatgaaatgtacccattgggcgtgaaagtctcggtggtggagcccggcaactttattgcagccaccagcttatatagtcccgaatcaatacaggctatcgcaaagaaaatgtgggaggagctacccgaagtggtacggaaggactacggcaaaaaatatttcgacgagaagatcgcgaagatggaaacatactgctcatccggttccactgacacctcccccgtgattgacgctgtcactcacgcactgacggcaaccaccccttatacccgctatcacccgatggactactactggtggctgaggatgcagataatgacgcatttgcccggtgccattagcgatatgatatatatcaggtag

SEQ ID NO: 301946 - DNA, 771 bp, Artificial Sequence
  derived and/or modified sequence
atgaaggacaagggccatgatggagtgaaggagctggacagcctgaacagcgaccggctgaggacagtgcagctgaatgtgtgcagcagcgaggaggtggagaaggtggtggagatcgtgcgcagcagcctgaaggaccctgagaagggcatgtggggcctggtgaacaatgccggcatcagcacctttggagaggtggagttcaccagcctggagacctacaagcaggtggccgaggtgaacctgtggggcaccgtgaggatgaccaagagcttcctgcccctcatcagaagagccaagggccgggtggtgaacatcagctccatgctgggccgcatggccaacccagcccggagcccctactgcatcaccaagtttggagtggaggccttcagtgactgcctgcgctatgagatgtaccccctgggcgtgaaggtgtctgtggtggagcccggcaacttcatcgccgccaccagcctgtacagccctgagagcatccaggccatcgccaagaagatgtgggaggagctgcctgaggtggtgaggaaggactatggcaagaagtactttgatgagaagatcgccaagatggagacctactgcagcagcggcagcacagacaccagccctgtgattgatgctgtgacccacgccctgacagccaccaccccctacacccgctaccaccccatggactactactggtggctgaggatgcagatcatgacccacctgcccggggccatcagtgacatgatctacatcagatag

SEQ ID NO: 301947 - DNA, 771 bp, Artificial Sequence
  derived and/or modified sequence
atgaaggacaagggccacgacggcgtgaaggagctggacagcctgaactcagatcgtctgcgcacggtacaactgaacgtttgcagctcggaagaggtggaaaaggtggtcgaaattgtgagaagcagcttgaaagaccctgaaaaaggcatgtggggtctggtcaacaatgccgggatcagtacattcggagaagtcgaatttacttccctggagacatacaagcaggtggctgaggtgaatctgtgggggacagtacggatgacaaaaagcttcttgccgctaataagacgcgcaaagggtagagttgtaaatatcagcagcatgctgggacggatggccaaccccgccaggagcccctactgtataaccaagttcggcgtggaagctttttcagattgtttgaggtacgagatgtatccgctgggcgtgaaggtgtctgtggtcgagccgggaaactttatagcagcaacatctctgtacagccccgaaagtatccaggcaattgcaaagaagatgtgggaggagctgcctgaggtcgtccgtaaagattacggaaagaaatacttcgacgagaaaatcgctaagatggagacctattgcagctccggatcaacagacacatcgcccgtgatcgacgcagtgacccacgcccttactgccacgacaccatataccagatatcacccaatggattattactggtggctccgtatgcaaattatgacccatctgcccggggctatcagcgatatgatctatatccgctag

SEQ ID NO: 301948 - DNA, 771 bp, Artificial Sequence
  derived and/or modified sequence
atgaaggataaagggcacgacggcgtgaaggaactcgactccctgaattccgacaggctacgaacggtgcagttgaacgtctgcagcagcgaggaagtagagaaagtagtcgagattgtgcgaagttcattgaaagaccctgaaaaaggcatgtggggtttagttaataatgcgggaatttctacattcggcgaagtcgagtttacttctctcgaaacctacaaacaagtggccgaagtcaatttatggggcacagtgcggatgacaaagagcttcctccctctaattagacgtgctaaaggtagggtagttaacattagcagcatgctgggacggatggcaaaccctgctcggtcgccctactgcataaccaaattcggcgtagaagcgtttagtgactgccttcgatatgagatgtaccctctcggtgtcaaggtgagcgtagtggaacctggcaactttatcgctgcaaccagtctctactcgccagagtcaatccaggccattgcgaagaagatgtgggaagaattgcccgaggtggtgaggaaggattatggcaagaaatactttgatgaaaagattgccaagatggaaacctattgttcctccggttccaccgacacatccccagtcatagatgcagttactcatgcactgacagccaccacgccatacacccgctaccacccaatggactactattggtggcttcggatgcaaatcatgacacatctgccaggagctatctcggacatgatctatatccgctag

SEQ ID NO: 301949 - protein, 289 aa, Artificial Sequence
  derived and/or modified sequence
MILLQHAVLPPPKQPSPSPPMSVATRSTGTLQLPPQKPFGQEASLPLAGEEELSKGGEQDCALEELCKPLYCKLCNVTLNSAQQAQAHYQGKNHGKKLRNYYAANSCPPPARMSNVVEPAATPVVPVPPQMGSFKPGGRVILATENDYCKLCDASFSSPAVAQAHYQGKNHAKRLRLAEAQSNSFSESSELGQRRARKEGNEFKMMPNRRNMYTVQNNSAGPYFNPRSRQRIPRDLAMCVTPSGQFYCSMCNVGAGEEMEFRQHLESKQHKSKVSEQRYRNEMENLGYV

SEQ ID NO: 301950 - protein, 148 aa, Artificial Sequence
  derived and/or modified sequence
MILLQHAVLPPPKQPSPSPPMSVATRSTGTLQLPPQKPFGQEASLPLAGEEELSKGGEQDCALEELCKPLYCKLCNVTLNSAQQAQAHYQGKNHGKKLRNYYAANSCPPPARMSNVVEPAATPVVPVPPQMGSFKPGGRVILATENDY

SEQ ID NO: 301951 - DNA, 870 bp, Artificial Sequence
  derived and/or modified sequence
atgatcctgctgcagcacgccgtgctgcccccccccaagcagcccagccccagcccccccatgagcgtggccaccagaagcaccggcaccctgcagctgcccccccagaagcccttcggccaggaggccagcctgcccctggccggcgaggaggagctgagcaagggcggcgagcaggactgcgccctggaggagctgtgcaagcccctgtactgcaagctgtgcaacgtgaccctgaacagcgcccagcaggcccaggcccactaccagggcaagaaccacggcaagaagctgagaaactactacgccgccaacagctgccccccccccgccagaatgagcaacgtggtggagcccgccgccacccccgtggtgcccgtgcccccccagatgggcagcttcaagcccggcggcagagtgatcctggccaccgagaacgactactgcaagctgtgcgacgccagcttcagcagccccgccgtggcccaggcccactaccagggcaagaaccacgccaagagactgagactggccgaggcccagagcaacagcttcagcgagagcagcgagctgggccagagaagagccagaaaggagggcaacgagttcaagatgatgcccaacagaagaaacatgtacaccgtgcagaacaacagcgccggcccctacttcaaccccagaagcagacagagaatccccagagacctggccatgtgcgtgacccccagcggccagttctactgcagcatgtgcaacgtgggcgccggcgaggagatggagttcagacagcacctggagagcaagcagcacaagagcaaggtgagcgagcagagatacagaaacgagatggagaacctgggctacgtgtag

SEQ ID NO: 301952 - DNA, 870 bp, Artificial Sequence
  derived and/or modified sequence
atgatcctgcttcaacacgcagtgctcccaccaccaaaacagccatcccccagcccgcccatgtcagttgccacccgttccactggaacactccaactaccacctcagaaaccctttggacaggaggccagccttcctcttgcaggtgaagaggagctttccaaagggggagaacaagattgcgccttagaagagctctgcaaaccactctactgcaaactgtgcaacgtgacactaaactctgctcaacaggcacaggcgcactatcagggcaagaaccatgggaagaagctaagaaattattatgcagccaacagttgtccgccccccgcccgcatgtccaatgttgtggagcccgcggcgacaccagtagtgcctgtacctccacagatgggctctttcaagccgggaggacgagttatcctggctactgagaatgattactgtaagctttgtgacgcatccttcagcagccccgccgtggctcaggctcattatcaggggaaaaatcacgcgaaaaggttgcgtttggccgaagcacagtcaaactcattcagcgagtcgtctgaactgggacagcgccgtgcccgcaaagaggggaatgaatttaagatgatgccaaatcgtaggaacatgtacaccgtccagaacaatagcgcgggaccttattttaacccccgcagccgacagaggattccccgggaccttgccatgtgcgtgactcctagcggccaattctattgttccatgtgtaacgtgggggctggcgaggaaatggaatttcgccagcacctggagagtaagcagcacaagtccaaggtgtcagaacagaggtacaggaatgaaatggaaaacctcggttatgtttag

SEQ ID NO: 301953 - DNA, 870 bp, Artificial Sequence
  derived and/or modified sequence
atgatcctgctgcagcacgctgtgctgcccccacccaagcagcccagccccagcccccccatgtctgtggccaccaggagcacaggcaccctgcagctgcccccccagaagcccttcggccaggaggccagcctgcccctggccggggaggaggagctgagcaaaggaggagagcaggactgtgccctggaggagctgtgcaagcccctgtactgcaagctgtgcaatgtgaccctgaacagcgcccagcaggcccaggcccactaccagggcaagaaccacggcaagaagctgaggaactactatgctgccaacagctgccccccaccagccaggatgagcaatgtggtggagcctgctgccacccctgtggtgcctgtgcccccccagatgggcagcttcaagccaggcggccgggtcatcctggccacagaaaatgactactgcaagctgtgtgatgccagcttcagcagccctgctgtggcccaggcccactaccagggcaagaaccacgccaagaggctgcggctggccgaggcccagagcaacagcttcagcgagagcagcgagctgggccagaggcgggccaggaaggagggcaatgagttcaagatgatgcccaacagaagaaacatgtacacagtgcagaacaacagcgctggcccctacttcaaccccaggagccggcagaggatcccccgggacctggccatgtgtgtgaccccatctggccagttctactgcagcatgtgcaatgtgggcgctggggaggagatggagttccggcagcacctggagagcaagcagcacaagagcaaggtgtctgagcagcgctacagaaatgagatggagaacctgggctacgtgtag

SEQ ID NO: 301954 - DNA, 870 bp, Artificial Sequence
  derived and/or modified sequence
atgatcctgctgcagcacgccgtgctgcccccccccaagcagcccagcccgtctcccccaatgtcggtagccacccggtccacaggaaccctgcagctcccccctcagaagccttttggccaggaagcgtccttgcctctcgcgggcgaggaagagctgagcaaaggcggagagcaggattgcgcgctcgaggaactatgcaaacccctttattgcaagctttgcaacgtcactctgaacagcgcacaacaagctcaggcccattatcaggggaaaaaccacggcaagaaacttcgcaactattatgcagccaacagttgtccaccccctgctcgcatgagtaacgttgttgagcccgccgccactccagtggtgcccgtcccgccacagatgggatcctttaagcctgggggacgagtgattttggctaccgaaaatgactactgcaagctgtgtgatgcttctttcagtagcccggcggtggcccaagcccactaccaaggcaaaaaccacgcaaaaagacttcgattggccgaagcccagagtaactctttctctgagtcttccgagctaggacaaaggcgggctaggaaggagggaaacgaatttaagatgatgcctaaccgacgaaacatgtataccgtgcagaataatagcgccggtccgtactttaatccacggtccagacaaaggattccgcgcgacctggccatgtgtgtcactcctagtgggcagttttattgcagcatgtgcaatgttggcgcgggagaggaaatggagtttcggcaacaccttgaaagcaagcaacacaaatccaaggtcagcgaacagaggtaccgaaacgagatggagaatctggggtacgtctag

SEQ ID NO: 301955 - DNA, 870 bp, Artificial Sequence
  derived and/or modified sequence
atgatcctcctgcagcacgctgtgctaccgccaccaaaacagcccagtccctccccccctatgagcgtggcaacacgatcgaccggcacgctgcagctgccgccacagaagccatttggccaagaggccagcctgcccctcgcaggagaagaggagctgtccaaagggggtgagcaggactgcgcccttgaggaactgtgcaaaccgctgtattgtaaactttgcaatgtcactctcaattccgcccaacaagctcaggcgcactaccaaggaaaaaatcacggaaagaaattgcgtaattactacgccgcaaatagctgcccacccccagccagaatgagcaatgtggttgaaccggcagctactcccgtggtacccgtccctccccagatggggagttttaagcccggaggcagggtgattttggccaccgagaatgactactgcaagctgtgcgatgcttccttctcatcccccgcagtggcacaggcccattaccaagggaagaatcatgcgaaacgcctgcggctggccgaggctcagagtaactcattcagtgagagttctgagctggggcagcggcgagctcgcaaggaagggaatgagttcaaaatgatgccaaaccggagaaacatgtacaccgtccagaacaatagcgctggcccttacttcaatccaagatccaggcaaagaatccccagggaccttgcaatgtgtgtgactcctagtgggcagttctattgcagcatgtgcaatgtgggagccggtgaagagatggaatttagacagcatctggagtcgaaacagcacaaaagtaaagtctcagaacagagatacagaaacgagatggagaatttaggatacgtgtag

SEQ ID NO: 301956 - DNA, 9406 bp, Artificial Sequence
  derived and/or modified sequence
ctccatcctggggcggaagtggggagagcagcagtttaaaggttctgttgcagcagtttaaaggatccactcagccgccttaaccgccaaccagcaggctaagggaggaacagaatgaacaatgtttggatcccaatgactggagatgaaagttgcaaaagctctgcccaggcttctaccaaggattaactttccagggcatctgctgaactgctcttcggggctgtctgctgagattggcggcgggaccctcccgcctctcactcgtgcctttgttccccacgccggcctaaccccgcgcccctgcgctcgcggccagggcacctgacccacgcgccgcccgccggggatgcgggagccgccactgctaccgctgccaccgctgccgggcctgctccgccaagcacatgcgcagtggcgacgccgagccggcgccctcagtctcctcctccaccgcctcccggttccgcagtcacttcctgcagctgtttccctgtgggtcgggttggactgacttttgacagtcagccttcggctgcggagggggctcggcggcggccggcggagaaagttgctccgagaagaggctgggtcgagctgggccgagccgggcgcgcagggcgggcgtcgcgggcgtcccgggcggacgcggcgcggagactgccggcgcgtcccgggggttccgatttgaagaccttgcttctcatcacccactggattatgccccaggcttccctacccaatgatcctcttgcaacacgccgtgcttcctccacctaagcagccctcaccctcgcctcctatgtcagtggccaccaggtctacaggaaccttgcagcttccaccacagaagccttttgggcaggaggcttccttgcctcttgcaggggaagaagagttatcgaagggaggggagcaagactgtgccctggaggagctatgtaagcccctgtactgcaaactctgcaatgtcaccttgaactctgcacagcaagcccaggctcattatcagggtaaaaatcatggtaagaaactccgaaattactatgcagcaaatagctgtcctcctcctgctagaatgagcaatgtggtcgagcctgcagctactccagttgttccagtccctccgcagatgggctcctttaagccaggaggccgagtgatcctggccacggagaatgattactgtaagctctgtgatgcctccttcagttccccagctgtggctcaggctcactatcaagggaagaatcatgccaagaggctgcggctggcggaagctcagagtaactcattctcggaatcctcagagctgggtcaacggcgggccaggaaagaagggaatgagtttaagatgatgcctaacaggagaaatatgtatacagtacagaataattcagcaggtccttacttcaatccccgctctcggcagagaattccacgtgatctggccatgtgtgttactccaagtggccagttttactgctcaatgtgtaatgttggagctggcgaagagatggaattccggcagcatttagagagcaagcaacataagagcaaggtgtctgaacagcggtacaggaatgagatggagaatctgggatatgtatagtgattatcatattaagatagagcagcttttcctgcctgttgtttgccttttgtcaacttgccctgctttgtggtctttttgatatgagtacattcctctgcttaatgttaatacatgtaacccacagtggtaccatgagatgtcaaaacctgggggcccgggggcggggcggggggaggtgggtgtgaagaacgtgcttcttaggtcataacgcttttgcagggtcaatggtgttgagccgctcatagcatgtgacctacctaccccatcagaaataactttttatcttgctcaagttctggtcaactagtagcctgacggcttagaactttgactatttaaaagtttcattttcttttgcaattttagttttatgtactgttaaagaattgtactgaattctttttagatcacagtaaaaataggttggcagagatttcagtttcccagggcttaaccagaaccgccacctcaatgcattgtcagtagaatacattattagaaactgttaaggtctttcccgggacatttttttctgccattttcttttgcaattgtagttttatgtactgttaaagaattgtattgaattctttttagatcaaagtaaaaataggtcagcagagatttcagtttcccagggcttaaccagaaccgccacctcaatgcattgtcagtaggatacattattagaaactgttagggtctttcccaggacatttttttttctgtatcatgtctccccatcattgaagcgcaaattttcttgaattcaaatactcccaatgagcttgtatacttccaaacagctaaacttgatttccagttgtggatttcacacatataattgccgccttcttccctcctcttttttcccccctagttgaatcagcttgtctaacaagcccattttcatgccccagctgtgctgtgggttttccaagcctcatatttgaatattcaatgagtttaagatggatatgatttcaaaaaatagggccgggcgcggtggctcacgcctgtaatcccagcactttgggaggccgaagcaggcggatcacgaggtcaggaggtcgagatcatcctggctaacacagtgaaaccccatctctactaaaaatacaaaacattagccgggcgtggtggtgggtgcctgtagtcccagctactctggaggctgaggcaggagaatggcgtgaacccgggaggcggagcttgcagtgagccgagatcgcgccactgcactccagcctgggtgacagagcgagactccgtctcaaaaaaaaaaaaaaaaaaaaaaaaaaaatatatatatatatagatatattttccagcagtttttaggaaacaaaggtgtgtttgattttccaatttagagttacttcattgatagtaacatgcgcttatatcatgatctaaaccataagttcagattgcttgatattttgttttgccagacttttttgataatctgattcttacggtttacttacattttcctctgtcttgccagtctggtggccatcctgaaaaatatcaccacctgctgttttatacacagaggaattttttaaaaagcaaataaagtttcactatcttcgtttccagtagaaatatacacgaactatggttttattctttgtaattcggctttcttgaagatactaacaagtatatgatagatcactttggcatctgataattatatcagtattattatttttgtttttttgcgtttaaaataagaagttgtatgaacccaggaggtggaggttgcagtcagccaagaatcgtgccactgcactccagtctgggcgacagagcaatactccgtctccaaaaaaaaaaaaaaagaagctataatatatatctagattaactaatggagtgctctgtgaatattcattaactacattttatctatttactatattttatatgggtaagaccagtggtcatccgtatttcttttgaaagcccacttgatcaggaagtttatattttaagcagtatgtttgcacaatggtcagttcacatttgattgcttgtattactaattagaggtaaaacttctattttttcttgataattctgtaggcaaaaaaaattggggaaggcaaattacaatcattcttcttctgtaatactttgggacaatttttaaacaactcagacccatgtttaaaaacgagttttgtgtgattaacccttgtatagtatccagttactgtcttctcttgaagtggtggttctttgagaagtagaattattttgtaacttttcttctcccagaaacagaagaatcaaatactattctgttaggattctatctagacctgtgactcttagtataataacccttttattattattattattattattttttcagtaatctataaagtagagttgcttagttttgagcaatttagggcttttcttattggccagtaggttattcattttgctgctaaatataattttttggttaattttaacattatagtgctggccgcttggttctatgattacctaaaaatctagtttttttcctccataggtagatgtgtgtgtatgcatacccccacacacacacgtacatatatgttgtcatagagaggtatttcaacccttatttcaaataacagtagaagatacgaacatgaatttatattttgtaaaaatgtcattcatccactttgttttccattggaaatagttttataagaagggttccccttgctctctccacttaacaatttcattatatacgtagaaaaagcagccgacttaagggcttgatgttttttcaggccttgtggattcaggtttccagtttcccagtgcccttaatggatgttatgaatgcataagcacattttcttttaaagaaagaagttagatttatagtgttatttcttacttgctatatttctttgcactaaaaaagagctatgtgtttgttttataggacactttagtaccgtattgcctacaataactcagtttgctccttaaattccaaactctgggaagttgataaataacttccatgatcacttgtaaaagttacatgcacatctgaaaaaaaatcacaaatctctatgacagtaggttatgttttgagcttgttaccttgcagtattcttctctgttccataggtgaaaacaaagggtgacagaggttatcaggcaggaaatgcctaaatagatacatctctgcatggtacaatttctcatattcatgtattccataaacagtgttttttctctgtttaagcagactgttgtttcttctgagtcagtgatatgtgatcttcgttggtttcattttgtgaagctcagtctgtctctgtaacatactttaggatttgcaccttgtgctccccaggaattatgttagtgtccttttctatgctgtcttcaaggatggacagaggcctaaaccacaacaacaacaaaaattagaaaaaaaaatacttagatttcggtaatcatccataggaactcatagcatcagtctcttttctctgtgaataatatctttgtgtaagttgtcataaaaaatcaacgttagaagatgacaattagaattcttcttaggtattgagggtaagaagttgtaaagaaagaaaattcgtgtttcaactaaaagattggattgcatatacctttgaagtggttttgtaaaaaaagttcagttactaaactgagtgtgccctgtaatccttttgagtgcactgaagatgctttgaaaatactttgttggtcttcacattgtgcatcatgtcctgcaacttgtaaatatgtgcatgttgtttatgtttgtctgcctgtctcttattgcactaaattctgcaaggtgaataatttttttataccatttatttggaaaaagttcctcctccaactcttcttcactgaccttttaattagttggtaaacttagaaaaccaggtaggatttttgaagccctgagtttaaaagaagaatcgtggctatttgacatcatccttacattcccctgacttaaaaagctaacaagaagcacgagatcttccacctcattttagaaagcttttctacagaactatatgcttgcttatagctacctatctacagtttgaacagggagaaagggagatatgtatgtctggttacatcttccttcactcttgaattggctgggacagcaagcaacaacagtttgaggtccagtgacctacgtaaaatgagtgtcgtttgtgtcaggggacacatgtaactgtgcaacatggtattttctacagggagggctaggaagggtggttttggaacctaacctactttgtgtcttcattgtcagaactaaggttggaaatgccctttaaagaacttggtgaggcatatgctaggacaatagagctgctttagaaagaaattgagacatgttttgtcaggacagataaaagtttaatgcaggcttttgaacagatgttttaaaacaaatttgaccttaccaactatttttttcttctagccaaatcattgtacaggagtttcatatatgataaaaagtgttttgttattgtttttgctttcttggcaggggagaacccctaccattgtgagcagttactgtcactctggctgaatggacaaatagctgtgtaaatagcttctcataaaacgcttctactgatagctgtttgactttttcttcccgttatgaatgggaggaacatttgtaaacttcctttctgggtagctaccaaaaaacgtactggcttatggtcccatgtgaccttgtctccgttaagcccagaatctgagtgcctttagcaagtgttagcatttcacagagagaagagagacagaattattgctattaatcaccattcataaataggagcttggaataacaaaggtctgtgtgaattctgttctacgtcttttttttcccttttttaaataaatgtcaatttgatatcaagtaaaactattgtcattattgatcagaaaccatacattctgaaaatgaatccagttttcccaagctggcagaagtcagagatcatttttcaccttgatctgtgttgcgtttgtacttagtgaatggcagtgtggttgattggaagagcttgacactgatgtttggaaaaattctttattctagtggtcattttcaaacttgtcttctgtagagaggggaaaaattatgtatttgcagctaaagcgaagagactggcacaataattattaattgtgttagttcatttctatattaaatgaagcatcttcacaaatcaggtttgaagccattaaaagcaaaattttccctagtttaattaatttaaaattctaaattgcctgactacttagaatcttagaaacgccctgctagactgattttattatagaaatgttaacatgttcctcaacattttctcaagaaaattttcagacatatatcaaagttgaaaaaactttgcagtataaccactgctagattctgccatcaacatttgactatacttgtattgccatgtatctgttcatattctctatccctcttttcatccatcgatccatcagattttttttttaaagaacattccaaagtaaattttaggcaatacactgccctaaattcttagcatgggtgtcattaattaaggtttagtattcgtttaaatatctattttgaaagtggtgtatgaagttgataatctgagccaattaacatacttttttttttttcctcctgtggacttttgtcttccagtttctctttttgtgtgtacttagggtgagggaggacaattcctttcaaacacaagtttattttagaattggtcatttttaagtgcttgtcataaattttaaagtttcaatataatttttcttttccccacttctgataatgtatttttgccaaactatgcagcttcttcaaaaaactgtaaattactgattggggtttatgaaatcagcgaatacctcatttcaatctgttgctgcttttctccctcttgtcacttctcctttcactactttcagctgctctaccagaaggtagaggggagtaaagggtcaaacccctatataattagctgttttaaacaactctaggagagcagattaagtagcttagtaagttgaaactattaatttttctaaagaatttgatttgaattccttgagaattgtaattatccacacttcctccagctataattagcagaattaaaaatgattgtactgtacaatgagttgttgaaattgtaagccttagtaaccatctttagctttattgtagtcatgtttagaaaaaattatttttacatatgcctttatttttatgcccactttttgtggataagattctttagataaaatctaaagaattttaagtgactttctccaggtcatgaagattcaatgggtagaattgaatcagaattgaaatgttccagattcatattcttgtgtgtgtttgataaaattcatggcttccaaagtaactgaacacttcctttgggcccttggagggaaaatccatatttttactaattacacttttttttttagacatctggcagttctttgaacttaaacatattctcatggccatagttccaaattaagcccgacgcagttgctaaaaatcttgctgcactgttgaatactaataatgcaacatttattggatgtttttgcattttgatgaccttcatgattcatttataagtctttgtaagtgcttaagtgaccccctcactagtgaaaataataaatgttctatatcatttattattatttgtgtattctctacatgatatatttttttaaggaagagtaactccacatgtcagaatgagtgatattatcctagggcaaagcgcaaatagggcagtttgtttctactctgcaaatatggcatgtataggaacaaaactcttttggagtggctggtcattgttctgccctcttttggtacctgagtacctttctggggttttgtaaatcgtgtgtcatttgtaagaatttcacgttaactctgcgttacttggtgttcacctgtggtatccttgactgaccataatgatttagtttgggtatgatgtgtctgctttgaaatgccttactggagtatgtcagatcctgctttaaagcattccatatatctgctgggacaataagttgcttctccttggaaatatgctctagattcagaagcaaaaccgattttgctttcaccattaaggttgcattttaatgcagttattgttttaaattagagaataaaatgtaaaaccaagggaggctttagaaccctttattgaatggcatggcaaacttttaaaactgcttttgctatttcactagaactatctttgataaaggatatagctaaaaaatgtcagcccaaactgtgtgtaattagggttgtttattaaaattttctctaaatgtcatacagaggcttaagatctgtgtatgctgttgggtcggagtgccagtcactgctttggaagtctgtgttctggggctgcagaatgacaaacgtgtcatgggattaaaaccaatcaactgtgaattgtgaaattgaaactactctttcggttttattttctttagcatattgagtatagaaatctgaaacttatttaaaatttatactgcttttgttgatggctcattttggctgtgtatcctcacttatgtactgatttctgataaaggcttgacattattataacacgcattttgtgttccagtttaataaaacggtttctgagtcttgtctgaaaa

SEQ ID NO: 301957 - protein, 208 aa, Artificial Sequence
  derived and/or modified sequence
MFTKEKIWSEVILVQVNPGETFTIRAEDGTLQCIQGPAEVPMMSPNGSIPPIHVPPGYISQVIEDSTGVRRVVVTPQSPECYPPSYPSAMSPTHHLPPYLTHHPHFIHNSHTAYYPPVTGPGDMPPQFFPQHHLPHTIYGEQEIIPFYGMSTYITREDQYSKPPHKKLKDRQIDRQNRLNSPPSSIYKSSCTTVYNGYGKGHSGGSGG

SEQ ID NO: 301958 - DNA, 231 bp, Artificial Sequence
  derived and/or modified sequence
atgattgccggagagcaccgactggatcccgcaactatatccctcggcgttgatcaaacagatgaccatcagcagccaacccatagtaggatccgaaagaagcgtgtgagccctacttctgtctggtttcaaccatacttctgcatccttaaaacgctttgtaccacgctggacacagttcaggatgacgccacttctagctggatgctgatctgtcacgtggatttctag

SEQ ID NO: 301959 - DNA, 678 bp, Artificial Sequence
  derived and/or modified sequence
agcagacactggaatgtgaatgcattgggaggtgagcccttaaggagagcccaaatgtttaccaaagagaaaatctggtcagaggttattctcgttcaagttaatccaggtgagactttcacaataagagcagaggatggaacacttcagtgcattcaaggacctgctgaagttcccatgatgtcacccaatggatccattcctcccattcatgtgcctccaggttatatctcacaggtgattgaagatagtactggagtccgccgggtggtggtcacaccccagtctcctgagtgttatcccccaagctacccctcagccatgtctccaacccatcatctccctccctatctgactcaccatccacattttattcataactcacacacggcttactacccacctgttaccggacctggagatatgccgcctcagttttttccccagcatcatcttccccacacaatatatggtgagcaagaaattataccattttatggaatgtcaacctacatcacccgagaagaccagtacagcaagcctccgcacaaaaaactgaaagaccgccagatcgatcgccagaaccgcctcaacagccctccttcttctatctacaaaagcagctgcacaacagtatacaatggctatgggaagggccatagtggtggaagtggcgga

SEQ ID NO: 301960 - DNA, 627 bp, Artificial Sequence
  derived and/or modified sequence
atgttcaccaaggaaaaaatttggtctgaggtgatcctggtgcaggtgaatccaggggaaaccttcactattcgcgccgaggacggcaccctccagtgtatacaggggcccgccgaggttccaatgatgagccccaacgggtctatcccaccaattcatgtcccgcccggatatatcagccaggtgatcgaggactccacaggcgtaaggcgggttgttgtgacacctcagtcccccgaatgctatcctccttcttatccatctgcgatgtcccccactcatcatctacccccttacctgacccatcacccacacttcattcacaactcgcatacagcgtattatccacccgttacaggcccaggtgacatgcctccccagttcttcccacaacaccacctccctcataccatttacggagagcaggagattatccccttttacggcatgagtacttatatcacaagagaggaccagtatagcaagccgccgcacaaaaagctcaaggatcgccagatcgaccgacagaatagattaaattcccctcccagcagcatatataaaagttcttgtactactgtctacaacggatatggcaagggccacagcgggggctctggaggatag

SEQ ID NO: 301961 - DNA, 627 bp, Artificial Sequence
  derived and/or modified sequence
atgttcaccaaggagaagatctggagcgaggtgatcctggtgcaggtgaaccctggagagaccttcaccatccgggcagaagatggcaccctgcagtgcatccagggccctgctgaggtgcccatgatgagccccaacggcagcatcccccccatccacgtgcccccaggctacatcagccaggtgattgaggacagcactggagtgcggcgggtggtggtgaccccccagagccctgagtgctacccacccagctaccccagcgccatgagccccacccaccacctgcccccctacctgacccaccacccccacttcatccacaacagccacacagcctactacccacctgtgactggacctggggacatgccaccccagttcttcccccagcaccacctgccccacaccatctatggagagcaggagatcatccccttctacggcatgagcacctacatcacccgggaggaccagtacagcaagccaccccacaagaagctgaaggaccggcagattgaccggcagaaccggctgaacagcccccccagcagcatctacaagagcagctgcaccaccgtgtacaacggctacggcaagggccacagcggcggcagcggcggctag

SEQ ID NO: 301962 - DNA, 627 bp, Artificial Sequence
  derived and/or modified sequence
atgttcaccaaggagaagatctggagcgaggtgatcctggtgcaggtcaatcccggggagacctttaccatcagggccgaggatggtaccctgcagtgcattcagggtccagcagaagtaccgatgatgagtcctaacgggtcgattcctcctattcacgttccccccggttacatctctcaagtcattgaggactctactggggtgaggcgcgttgtggtgaccccgcagagtcctgaatgttaccctcctagctacccttcagcgatgtcaccaacacaccatctccccccttatctcactcaccatccacacttcatccacaactctcatacagcatattatccacccgtcaccggtcccggcgacatgccaccgcagttctttccgcaacaccatcttccacatactatttacggcgaacaggagatcatacccttctatggcatgagtacttacataacacgtgaggaccagtattctaagccgcctcacaagaagctgaaggataggcagatcgatagacaaaaccgactcaactcacccccctctagcatttacaagtcttcatgtacaaccgtgtacaacggctacgggaaaggacattctggggggtcaggaggatag

SEQ ID NO: 301963 - DNA, 627 bp, Artificial Sequence
  derived and/or modified sequence
atgttcactaaagagaaaatatggtctgaggtcattttagtgcaggtgaatcctggagagacttttactattcgcgctgaagatggcacattgcagtgtatccagggaccggcagaagtgcctatgatgagtccaaatggcagcataccaccaatccacgttccacccggatacatatctcaggtcatagaagactcaacgggcgtacgccgagttgttgtgacacctcagagcccggaatgttatcccccttcttaccctagcgctatgtcgcctactcaccatctaccgccatatttgacacatcacccccactttatccacaactcccacactgcatattatccacctgtcacaggaccaggtgacatgccaccccagttttttccgcagcaccatctgccccataccatctatggggaacaggagatcatccccttttatggaatgtctacatacattacccgggaggatcaatactctaaaccaccacataagaagctgaaggatagacagattgacaggcagaataggctcaattccccacccagttctatatacaagagttcatgcaccaccgtctacaacggctacgggaagggtcacagcggaggcagcggcggatag

SEQ ID NO: 301964 - DNA, 627 bp, Artificial Sequence
  derived and/or modified sequence
atgttcaccaaggagaagatctggagcgaggtgatcctggtgcaggtgaaccccggcgagaccttcaccatcagagccgaggacggcaccctgcagtgcatccagggccccgccgaggtgcccatgatgagccccaacggcagcatcccccccatccacgtgccccccggctacatcagccaggtgatcgaggacagcaccggcgtgagaagagtggtggtgaccccccagagccccgagtgctacccccccagctaccccagcgccatgagccccacccaccacctgcccccctacctgacccaccacccccacttcatccacaacagccacaccgcctactacccccccgtgaccggccccggcgacatgcccccccagttcttcccccagcaccacctgccccacaccatctacggcgagcaggagatcatccccttctacggcatgagcacctacatcaccagagaggaccagtacagcaagcccccccacaagaagctgaaggacagacagatcgacagacagaacagactgaacagcccccccagcagcatctacaagagcagctgcaccaccgtgtacaacggctacggcaagggccacagcggcggcagcggcggctag

SEQ ID NO: 301965 - protein, 415 aa, Artificial Sequence
  derived and/or modified sequence
MGLLPKLGASQGSDTSTSRAGRCARSVFGNIKVFVLCQGLLQLCQLLYSAYFKSSLTTIEKRFGLSSSSSGLISSLNEISNAILIIFVSYFGSRVHRPRLIGIGGLFLAAGAFILTLPHFLSEPYQYTLASTGNNSRLQAELCQKHWQDLPPSKCHSTTQNPQKETSSMWGLMVVAQLLAGIGTVPIQPFGISYVDDFSEPSNSPLYISILFAISVFGPAFGYLLGSVMLQIFVDYGRVNTAAVNLVPGDPRWIGAWWLGLLISSALLVLTSFPFFFFPRAMPIGAKRAPATADEARKLEEAKSRGSLVDFIKRFPCIFLRLLMNSLFVLVVLAQCTFSSVIAGLSTFLNKFLEKQYGTSAAYANFLIAHQVLYIRSLLPAAGTARAQILSSTRSVETMESSTSPLAMPAAATST

SEQ ID NO: 301966 - DNA, 1248 bp, Artificial Sequence
  derived and/or modified sequence
atgggcctgctgcccaagctgggcgccagccagggcagcgacaccagcaccagcagagccggcagatgcgccagaagcgtgttcggcaacatcaaggtgttcgtgctgtgccagggcctgctgcagctgtgccagctgctgtacagcgcctacttcaagagcagcctgaccaccatcgagaagagattcggcctgagcagcagcagcagcggcctgatcagcagcctgaacgagatcagcaacgccatcctgatcatcttcgtgagctacttcggcagcagagtgcacagacccagactgatcggcatcggcggcctgttcctggccgccggcgccttcatcctgaccctgccccacttcctgagcgagccctaccagtacaccctggccagcaccggcaacaacagcagactgcaggccgagctgtgccagaagcactggcaggacctgccccccagcaagtgccacagcaccacccagaacccccagaaggagaccagcagcatgtggggcctgatggtggtggcccagctgctggccggcatcggcaccgtgcccatccagcccttcggcatcagctacgtggacgacttcagcgagcccagcaacagccccctgtacatcagcatcctgttcgccatcagcgtgttcggccccgccttcggctacctgctgggcagcgtgatgctgcagatcttcgtggactacggcagagtgaacaccgccgccgtgaacctggtgcccggcgaccccagatggatcggcgcctggtggctgggcctgctgatcagcagcgccctgctggtgctgaccagcttccccttcttcttcttccccagagccatgcccatcggcgccaagagagcccccgccaccgccgacgaggccagaaagctggaggaggccaagagcagaggcagcctggtggacttcatcaagagattcccctgcatcttcctgagactgctgatgaacagcctgttcgtgctggtggtgctggcccagtgcaccttcagcagcgtgatcgccggcctgagcaccttcctgaacaagttcctggagaagcagtacggcaccagcgccgcctacgccaacttcctgatcgcccaccaggtgctgtacatcagaagcctgctgcccgccgccggcaccgccagagcccagatcctgagcagcaccagaagcgtggagaccatggagagcagcaccagccccctggccatgcccgccgccgccaccagcacctag

SEQ ID NO: 301967 - DNA, 1248 bp, Artificial Sequence
  derived and/or modified sequence
atgggtctcctcccaaagctgggagccagccagggctccgatacctcaaccagtagagccggacgatgcgctcgtagcgtgtttggcaacatcaaagtgttcgttttgtgccagggactgttgcagctgtgtcaactcctctactctgcatactttaaaagctctctgactactatcgaaaaacgcttcggattgtcctcctccagcagtggcctgatctcaagcctaaacgaaatctcaaacgccatacttattatttttgtgtcatacttcggatcacgcgtgcacagacccaggttgattggcataggcggactgttcttagccgcaggcgcctttattctgacccttccgcactttctgagcgaaccgtaccaatataccctcgcctccactgggaataactcccgacttcaggcagagttgtgtcagaaacactggcaggatctcccacccagtaagtgccacagcacaactcaaaatccccaaaaagagacctccagcatgtggggcctaatggttgttgcacaactgcttgctggcatagggacagtgcccatccagccgttcggcatctcatatgttgatgatttttccgagccctctaactcacccctctacatttcaatcctcttcgcgattagcgtgttcgggccggcatttgggtatcttctgggtagcgtaatgcttcagatttttgtggattacggccgtgtgaatacagccgccgtgaatcttgtcccgggcgacccaagatggatcggcgcctggtggctcgggctgcttatatcgtcagccttacttgtgctgacatctttccctttttttttcttcccacgagccatgcccatcggcgctaaacgtgcccccgccaccgccgacgaagcgcggaaactggaagaagccaagagtcgaggctctttggtcgacttcatcaaaagatttccctgcatatttctcaggctgctgatgaatagcctgttcgttctggtggtcctcgcacagtgtacattttcatcggtgattgccggactgagcacatttttgaacaagttcctggagaagcagtacggtacgagcgcagcctacgcgaactttctcattgcccaccaggttctgtatattaggtctctactcccagctgccggcactgcaagggcacaaattctctcctccactaggtctgtggagaccatggagtcctccacaagtccactcgccatgcctgcggcagcaaccagcacatag

SEQ ID NO: 301968 - DNA, 1248 bp, Artificial Sequence
  derived and/or modified sequence
atgggcctgctgcccaagctgggcgccagccagggcagtgacaccagcaccagccgggccggccgctgtgcccggtctgtgtttggaaacatcaaggtgtttgtgctgtgccagggcctgctgcagctgtgccagctgctgtacagcgcctacttcaagagcagcctgaccaccatcgagaagagatttggcctgagcagcagcagcagcggcctcatcagcagcctgaatgagatcagcaatgccatcctgatcatctttgtgtcctacttcggcagccgggtgcaccggccccggctgattggaattggaggcctcttcctggccgccggggccttcatcctgaccctgccccacttcctgtctgagccctaccagtacaccctggccagcacaggcaacaacagccggctgcaggccgagctgtgccagaagcactggcaggacctgccccccagcaagtgccacagcaccacccagaacccccagaaggagaccagctccatgtggggcctgatggtggtggcccagctgctggccggcatcggcaccgtgcccatccagcccttcggcatctcctatgtggatgacttcagcgagcccagcaacagccccctgtacatcagcatcctgtttgccatctctgtgtttggacctgccttcggctacctgctgggctctgtgatgctgcagatctttgtggactatggccgggtgaacacagctgctgtgaacctggtgcctggggacccccgctggattggagcctggtggctgggcctgctgatcagcagcgccctgctggtgctgaccagcttccccttcttcttcttcccccgggccatgcccatcggggccaagagggccccagccacagcagatgaggccaggaagctggaggaggccaagagccggggcagcctggtggacttcatcaagcgcttcccctgcatcttcctgcggctgctgatgaacagcctgtttgtgctggtggtgctggcccagtgcaccttcagctctgtgattgctggcctgagcaccttcctgaacaagttcctggagaagcagtatggcaccagcgctgcctatgccaacttcctgattgcccaccaggtgctgtacatccgcagcctgctgcctgctgctggaacagcccgggcccagatcctgagcagcaccaggtctgtggagaccatggagagcagcaccagccccctggccatgcctgctgctgccaccagcacctag

SEQ ID NO: 301969 - DNA, 1248 bp, Artificial Sequence
  derived and/or modified sequence
atgggcctgctgcccaagctgggcgccagccagggcagcgacaccagcacaagcagagccggcaggtgtgctagaagtgtcttcggcaacattaaggtgttcgtactgtgtcaaggactgttgcagctctgccagctgctctactctgcgtatttcaagagctcccttacaacaatcgagaagagattcgggcttagctcaagctcctccggcctgatcagtagcttaaacgagatatccaatgccatccttatcatattcgtgtcatactttggcagcagggttcatcgaccccggctcataggaattggcggcctctttcttgccgctggtgcctttatcctaacactgccacacttcctcagtgaaccctaccaatatactctcgcctctaccggcaataactctcgcctgcaagccgagctgtgtcagaaacattggcaagacctcccaccttccaaatgccactccaccactcagaacccccagaaagagacaagtagcatgtgggggctgatggtggtggcccagctcctggcgggaataggaactgtccctatccagccctttgggatcagctacgtagatgacttctcagagccaagcaactcaccactgtacatctccatactctttgccatctctgtgtttggccctgccttcggctatttgcttggctcagttatgctacagatattcgtagattacggccgcgtgaacaccgctgcagttaacttagtgccgggggatccccggtggataggggcctggtggctagggctactgatcagctcagccctgctggtgctcaccagcttcccttttttcttctttccgagagcaatgcctatcggggctaagagggcaccggcgacagccgatgaggcaaggaagctggaagaagccaaaagtcggggcagcctcgttgactttattaagaggttcccgtgtatctttttaagattactcatgaattctttgtttgtcctggtggtcctggctcagtgcacgtttagtagtgtgattgcagggctgtccactttcctgaataagtttctcgagaagcagtatgggacctctgccgcatacgcaaattttctgatcgcccaccaggtgctgtacattcgaagcctcctgcccgcagctggaacagccagggcacagattctctcgagcactcgtagcgtggagactatggaatcaagcacttctcctttggcgatgccggctgcagctacgtctacctag

SEQ ID NO: 301970 - DNA, 1248 bp, Artificial Sequence
  derived and/or modified sequence
atgggactgctgccgaagcttggcgcttcccaaggtagtgacacttcaaccagtcgcgcaggccgatgcgccagatccgtgtttggaaacattaaggtgttcgtgctttgtcagggcttgcttcagctttgccagcttctctatagcgcctattttaaatcatcacttactactattgaaaagaggttcggcctgagcagttctagcagcgggctgatcagcagcctgaacgagatcagcaacgcgatactgattatctttgtcagctacttcggcagccgggtccaccggccaaggctgatcggcatcggaggtctctttcttgctgccggagctttcattctcacacttccacattttctctccgagccgtatcagtatactctggcgtcaactggtaataatagccggctgcaagccgaactttgtcaaaagcactggcaggacctgcctccatcaaagtgccacagcactactcagaacccccaaaaagagacatcttccatgtggggtctgatggtggtggcccagctgctagccggtattggcacagttcccattcagccctttggcatatcttatgtggatgactttagcgagccgtccaatagtccgttatacataagcatattatttgctatctccgtgtttggccctgccttcggatacttattggggtctgtcatgctccagatctttgtggattatggaagagttaataccgctgcagtgaatctcgtgccgggagacccccgttggataggagcctggtggctgggtcttctcatatcgtccgctctgctggtgctcaccagcttccctttcttcttcttcccgagagcaatgcccatcggggcaaaaagggcaccggctaccgccgacgaagctaggaaactggaggaagctaagtcccgcggaagcctcgtggattttattaagagatttccctgcatatttctgcgactcctgatgaattcactcttcgtgttagtggttctggcacagtgtacattttcatctgtgatcgcagggctctccaccttcctgaacaagtttcttgaaaagcagtatgggacctctgccgcatacgccaattttttaatagcgcaccaggtgctgtacatacgctccctactaccagctgccggtacggctcgagcgcagatactttccagtacacgcagtgtggaaacaatggaaagtagcacctcgcctcttgcgatgcccgctgctgctacgtccacatag

SEQ ID NO: 301971 - DNA, 1937 bp, Artificial Sequence
  derived and/or modified sequence
tctccgctccgcgaatctcctccggccactgccgccgcggtcgcctctcacccgcccggccgctccagcccgaggcgccccgaccccgcgccactccgcgcccggccagccgcccgcagccatggggctcctgcccaagctcggcgcgtcccagggcagcgacacctctactagccgagccggccgctgtgcccgctcggtcttcggcaacattaaggtgtttgtgctctgccaaggcctcctgcagctctgccaactcctgtacagcgcctacttcaagagcagcctcaccaccattgagaagcgctttgggctctccagttcttcatcgggtctcatttccagcttgaatgagatcagcaatgccatcctcatcatctttgtcagctactttggcagccgggtgcaccgtccacgtctgattggcatcggaggtctcttcctggctgcaggtgccttcatcctcaccctcccacacttcctctccgagccctaccagtacaccttggccagcactgggaacaacagccgcttgcaggccgagctctgccagaagcattggcaggacctgcctcccagtaagtgccacagcaccacccagaacccccagaaggagaccagcagcatgtggggcctgatggtggttgcccagctgctggctggcatcgggacagtgcctattcagccatttgggatctcctatgtggatgacttctcagagcccagcaactcgcccctgtacatctccatcttatttgccatctctgtatttggaccggctttcgggtacctgctgggctctgtcatgctgcagatctttgtggactatggcagggtcaacacagctgcagttaacttggtcccgggtgacccccgatggattggagcctggtggctaggcctgctcatttcttcagctttattggttctcacctctttccccttttttttcttccctcgagcaatgcccataggagcaaagagggctcctgccacagcagatgaagcaaggaagttggaggaggccaagtcaagaggctccctggtggatttcattaaacggtttccatgcatctttctgaggctcctgatgaactcactcttcgtcctggtggtcctggcccagtgcaccttctcctccgtcattgctggcctctccaccttcctcaacaagttcctggagaagcagtatggcacctcagcagcctatgccaacttcctcattgcacatcaagttctatacatccgcagtctcctgcctgccgcagggactgctcgtgcccagattctatcttccacccggtctgtggagacaatggaatcgagtacctctccccttgccatgccggctgcagcaacatcaacatgagctctgcaacctccaagcaactgatctatttgaactgcagctgtgtgaccgggggatccgcttcagcaaagacaggatcgtgccctgtcccctgtgcccacttcctgctcccggccatcttcctcatctccttcgtgtccctgatagcctgcatctcccacaaccccctctacatgatggttctgcgtgtggtgaaccaggaggaaaagtcatttgccatcggggtgcagttcttgttgatgcgcttgctggcctggctgccatctccagccctctatggcctcaccattgaccactcctgcatccggtggaactcgctgtgcttggggaggcgaggggcctgcgcctactatgacaacgatgctctccgagacaggtacctgggcctgcagatgggctacaaggcgctgggcatgctgctgctttgcttcatcagctggagggtgaagaagaacaaggagtacaacgtgcagaaggcggcaggcctcatctgaccccaccctgggccactgccctgctccagagagtggaccttgactcttccacacctgcctatactcactaatgt

SEQ ID NO: 301972 - protein, 575 aa, Artificial Sequence
  derived and/or modified sequence
MKRSLQALYCQLLSFLLILALTEALAFAIQEPSPRESLQVLPSGTPPGTMVTAPHSSTRHTSVVMLTPNPDGPPSQAAAPMATPTPRAEGHPPTHTISTIAATVTAPHSESSLSTGPAPAAMATTSSKPEGRPRGQAAPTILLTKPPGATSRPTTAPPRTTTRRPPRPPGSSRKGAGNSSRPVPPAPGGHSRSKEGQRGRNPSSTPLGQKRPLGKIFQIYKGNFTGSVEPEPSTLTPRTPLWGYSSSPQPQTVAATTVPSNTSWAPTTTSLGPAKDKPGLRRAAQGGGSTFTSQGGTPDATAASGAPVSPQAAPVPSQRPHHGDPQDGPSHSDSWLTVTPGTSRPLSTSSGVFTAATGPTPAAFDTSVSAPSQGIPQGASTTPQAPTHPSRVSESTISGAKEETVATLTMTDRVPSPLSTVVSTATGNFLNRLVPAGTWKPGTAGNISHVAEGDKPQHRATICLSKMDIAWVILAISVPISSCSVLLTVCCMKRKKKTANPENNLSYWNNTITMDYFNRHAVELPREIQSLETSEDQLSEPRSPANGDYRDTGMVLVNPFCQETLFVGNDQVSEI

SEQ ID NO: 301973 - protein, 153 aa, Artificial Sequence
  derived and/or modified sequence
MKRSLQALYCQLLSFLLILALTEALAFAIQEPSPRESLQVLPSGTPPGTMVTAPHSSTRHTSVVMLTPNPDGPPSQAAAPMATPTPRAEGHPPTHTISTIAATVTAPHSESSLSTGPAPAAMATTSSKPEGRPRGQAAPTILLTKPPGATSRP

SEQ ID NO: 301974 - protein, 72 aa, Artificial Sequence
  derived and/or modified sequence
MKRSLQALYCQLLSFLLILALTEALAFAIQEPSPRESLQVLPSGTPPGTMVTAPHSSTRHTSVVMLTPNPDG

SEQ ID NO: 301975 - protein, 149 aa, Artificial Sequence
  derived and/or modified sequence
MKRSLQALYCQLLSFLLILALTEALAFAIQEPSPRESLQVLPSGTPPGTMVTAPHSSTRHTSVVMLTPNPDGPPSQAAAPMATPTPRAEGHPPTHTISTIAATVTAPHSESSLSTGPAPAAMATTSSKPEGRPRGQAAPTILLTKPPGA

SEQ ID NO: 301976 - protein, 488 aa, Artificial Sequence
  derived and/or modified sequence
MKRSLQALYCQLLSFLLILALTEALAFAIQEPSPRESLQVLPSGTPPGTMVTAPHSSTRHTSVVMLTPNPDGPPSQAAAPMATPTPRAEGHPPTHTISTIAATVTAPHSESSLSTGPAPAAMATTSSKPEGRPRGQAAPTILLTKPPGATSRPTTAPPRTTTRRPPRPPGSSRKGAGNSSRPVPPAPGGHSRSKEGQRGRNPSSTPLGQKRPLGKIFQIYKGNFTGSVEPEPSTLTPRTPLWGYSSSPQPQTVAATTVPSNTSWAPTTTSLGPAKDKPGLRRAAQGGGSTFTSQGGTPDATAASGAPVSPQAAPVPSQRPHHGDPQDGPSHSDSWLTVTPGTSRPLSTSSGVFTAATGPTPAAFDTSVSAPSQGIPQGASTTPQAPTHPSRVSESTISGAKEETVATLTMTDRVPSPLSTVVSTATGNFLNRLVPAGTWKPGTAGNISHVAEGDKPQHRATICLSKMDIAWVILAISVPISSCSDPIT

SEQ ID NO: 301977 - DNA, 1728 bp, Artificial Sequence
  derived and/or modified sequence
atgaagagaagcctgcaggccctgtactgccagctgctgagcttcctgctgatcctggccctgaccgaggccctggccttcgccatccaggagcccagccccagagagagcctgcaggtgctgcccagcggcaccccccccggcaccatggtgaccgccccccacagcagcaccagacacaccagcgtggtgatgctgacccccaaccccgacggcccccccagccaggccgccgcccccatggccacccccacccccagagccgagggccacccccccacccacaccatcagcaccatcgccgccaccgtgaccgccccccacagcgagagcagcctgagcaccggccccgcccccgccgccatggccaccaccagcagcaagcccgagggcagacccagaggccaggccgcccccaccatcctgctgaccaagccccccggcgccaccagcagacccaccaccgccccccccagaaccaccaccagaagaccccccagaccccccggcagcagcagaaagggcgccggcaacagcagcagacccgtgccccccgcccccggcggccacagcagaagcaaggagggccagagaggcagaaaccccagcagcacccccctgggccagaagagacccctgggcaagatcttccagatctacaagggcaacttcaccggcagcgtggagcccgagcccagcaccctgacccccagaacccccctgtggggctacagcagcagcccccagccccagaccgtggccgccaccaccgtgcccagcaacaccagctgggcccccaccaccaccagcctgggccccgccaaggacaagcccggcctgagaagagccgcccagggcggcggcagcaccttcaccagccagggcggcacccccgacgccaccgccgccagcggcgcccccgtgagcccccaggccgcccccgtgcccagccagagaccccaccacggcgacccccaggacggccccagccacagcgacagctggctgaccgtgacccccggcaccagcagacccctgagcaccagcagcggcgtgttcaccgccgccaccggccccacccccgccgccttcgacaccagcgtgagcgcccccagccagggcatcccccagggcgccagcaccaccccccaggcccccacccaccccagcagagtgagcgagagcaccatcagcggcgccaaggaggagaccgtggccaccctgaccatgaccgacagagtgcccagccccctgagcaccgtggtgagcaccgccaccggcaacttcctgaacagactggtgcccgccggcacctggaagcccggcaccgccggcaacatcagccacgtggccgagggcgacaagccccagcacagagccaccatctgcctgagcaagatggacatcgcctgggtgatcctggccatcagcgtgcccatcagcagctgcagcgtgctgctgaccgtgtgctgcatgaagagaaagaagaagaccgccaaccccgagaacaacctgagctactggaacaacaccatcaccatggactacttcaacagacacgccgtggagctgcccagagagatccagagcctggagaccagcgaggaccagctgagcgagcccagaagccccgccaacggcgactacagagacaccggcatggtgctggtgaaccccttctgccaggagaccctgttcgtgggcaacgaccaggtgagcgagatctag

SEQ ID NO: 301978 - DNA, 462 bp, Artificial Sequence
  derived and/or modified sequence
atgaagagaagcctgcaggccctgtactgccagctgctgagcttcctgctgatcctggccctgaccgaggccctggccttcgccatccaggagcccagccccagagagagcctgcaggtgctgcccagcggcaccccccccggcaccatggtgaccgccccccacagcagcaccagacacaccagcgtggtgatgctgacccccaaccccgacggcccccccagccaggccgccgcccccatggccacccccacccccagagccgagggccacccccccacccacaccatcagcaccatcgccgccaccgtgaccgccccccacagcgagagcagcctgagcaccggccccgcccccgccgccatggccaccaccagcagcaagcccgagggcagacccagaggccaggccgcccccaccatcctgctgaccaagccccccggcgccaccagcagaccctag

SEQ ID NO: 301979 - DNA, 219 bp, Artificial Sequence
  derived and/or modified sequence
atgaagagaagcctgcaggccctgtactgccagctgctgagcttcctgctgatcctggccctgaccgaggccctggccttcgccatccaggagcccagccccagagagagcctgcaggtgctgcccagcggcaccccccccggcaccatggtgaccgccccccacagcagcaccagacacaccagcgtggtgatgctgacccccaaccccgacggctag

SEQ ID NO: 301980 - DNA, 450 bp, Artificial Sequence
  derived and/or modified sequence
atgaagagaagcctgcaggccctgtactgccagctgctgagcttcctgctgatcctggccctgaccgaggccctggccttcgccatccaggagcccagccccagagagagcctgcaggtgctgcccagcggcaccccccccggcaccatggtgaccgccccccacagcagcaccagacacaccagcgtggtgatgctgacccccaaccccgacggcccccccagccaggccgccgcccccatggccacccccacccccagagccgagggccacccccccacccacaccatcagcaccatcgccgccaccgtgaccgccccccacagcgagagcagcctgagcaccggccccgcccccgccgccatggccaccaccagcagcaagcccgagggcagacccagaggccaggccgcccccaccatcctgctgaccaagccccccggcgcctag

SEQ ID NO: 301981 - DNA, 1467 bp, Artificial Sequence
  derived and/or modified sequence
atgaagagaagcctgcaggccctgtactgccagctgctgagcttcctgctgatcctggccctgaccgaggccctggccttcgccatccaggagcccagccccagagagagcctgcaggtgctgcccagcggcaccccccccggcaccatggtgaccgccccccacagcagcaccagacacaccagcgtggtgatgctgacccccaaccccgacggcccccccagccaggccgccgcccccatggccacccccacccccagagccgagggccacccccccacccacaccatcagcaccatcgccgccaccgtgaccgccccccacagcgagagcagcctgagcaccggccccgcccccgccgccatggccaccaccagcagcaagcccgagggcagacccagaggccaggccgcccccaccatcctgctgaccaagccccccggcgccaccagcagacccaccaccgccccccccagaaccaccaccagaagaccccccagaccccccggcagcagcagaaagggcgccggcaacagcagcagacccgtgccccccgcccccggcggccacagcagaagcaaggagggccagagaggcagaaaccccagcagcacccccctgggccagaagagacccctgggcaagatcttccagatctacaagggcaacttcaccggcagcgtggagcccgagcccagcaccctgacccccagaacccccctgtggggctacagcagcagcccccagccccagaccgtggccgccaccaccgtgcccagcaacaccagctgggcccccaccaccaccagcctgggccccgccaaggacaagcccggcctgagaagagccgcccagggcggcggcagcaccttcaccagccagggcggcacccccgacgccaccgccgccagcggcgcccccgtgagcccccaggccgcccccgtgcccagccagagaccccaccacggcgacccccaggacggccccagccacagcgacagctggctgaccgtgacccccggcaccagcagacccctgagcaccagcagcggcgtgttcaccgccgccaccggccccacccccgccgccttcgacaccagcgtgagcgcccccagccagggcatcccccagggcgccagcaccaccccccaggcccccacccaccccagcagagtgagcgagagcaccatcagcggcgccaaggaggagaccgtggccaccctgaccatgaccgacagagtgcccagccccctgagcaccgtggtgagcaccgccaccggcaacttcctgaacagactggtgcccgccggcacctggaagcccggcaccgccggcaacatcagccacgtggccgagggcgacaagccccagcacagagccaccatctgcctgagcaagatggacatcgcctgggtgatcctggccatcagcgtgcccatcagcagctgcagcgaccccatcacctag

SEQ ID NO: 301982 - DNA, 1728 bp, Artificial Sequence
  derived and/or modified sequence
atgaagagatcacttcaggcgctatattgccagctgctttctttcctccttatccttgcattaacagaagctctcgccttcgctatccaggagccatcaccacgagagagtctgcaggtgctgcctagcggaacccctcctggaactatggtgaccgccccgcattcttccacacgccacaccagtgtggtgatgctcacaccgaacccagacggccccccatcgcaggccgcagccccaatggctacacccaccccccgggcagagggccacccacccactcataccatctcaaccattgcagctaccgttactgcacctcacagcgaatcttccctgagtactgggcctgctcctgcagctatggcaacgacctcttctaaacctgagggaaggcccaggggtcaggccgctcctacgattttgctcaccaagcccccgggagctacctctcgccccacgactgcgccgccgaggactactactagacgccccccacgcccaccagggtcctcccgcaagggagccggaaattcgtctagaccagtccctccggcacctggaggacacagtaggagtaaggaaggccaaagggggcgcaacccgagttcaacaccactaggacagaaaaggcccctgggcaaaatcttccaaatctacaaaggcaatttcactggctccgtggagccagaaccctccaccctgacaccccgcacgcctctgtggggctacagttcgtccccccagccacagacagtcgcggcaacaaccgtgccctccaacaccagttgggcacctacaaccacgtcattgggacctgctaaggacaagcccggacttcgacgggctgctcaggggggaggaagcaccttcacatcccagggcggaacccctgatgccactgcagcctctggagcccccgtaagcccacaggccgcacccgtgccaagtcagagaccacatcatggagatccccaggatggcccctcgcacagcgatagctggctcacagtgactcccgggacctccaggcctctgagcacatcttctggtgtttttaccgccgccaccggccctacaccagccgcctttgacacaagtgtgtcagcccctagccaggggatcccacaaggcgcttctaccacacctcaggcccctactcacccatctcgagtcagtgagagcacaatatcaggggcaaaagaagaaacggtcgcaacgttgacgatgacagacagggtgccttctcctctgtccacggtggtgtccactgctactggcaatttcctcaacagactcgtgcctgccggcacctggaaacctgggactgctggcaacataagccacgttgccgaaggtgataagccacagcacagagcgaccatctgcctgtcgaagatggacatcgcatgggtgatcctggccatttccgtgccgatctctagctgctcagtactgctgaccgtgtgttgcatgaaaagaaagaagaaaacagccaaccccgaaaacaaccttagttattggaacaatacaatcaccatggattactttaaccggcacgccgtcgaactgccacgagaaatccagagcctcgagaccagcgaagaccagctgtctgaaccacgctcacctgcgaacggcgactatagggataccggtatggttttggtcaatcctttctgtcaagaaacactattcgtaggaaatgatcaggtaagtgaaatctag

SEQ ID NO: 301983 - DNA, 1728 bp, Artificial Sequence
  derived and/or modified sequence
atgaaaagaagcctccaggcgctctattgtcagctgctctcatttctgctgatcctggcgctcactgaagcactagcctttgcaattcaagaacctagcccacgagaaagcctacaagtgctgcccagtgggactcctccgggaaccatggtcactgcaccacactcctctactcggcatacctccgtggttatgctcaccccaaatccggacggaccaccctcgcaggctgcagctcccatggcgacacctactcctcgagccgagggccatcctccaacacacactatcagtactatcgcagccacagtgaccgcacctcattcagagagtagcctgagtacaggtccggccccggcagcaatggccaccacttcatcgaagcctgaaggccggccgagagggcaagcagcaccgacaattctattgactaaaccccccggtgcaacctcccgccctaccacggcgccgcctcgcactacaacccgaaggcctcctcggcctcccggcagttctcggaagggcgcaggcaactcttcaaggcccgtgcctcctgcacccggagggcacagtaggtctaaggagggccagcgcggccgcaacccgagcagcacaccactgggtcagaagcggcctttggggaaaatttttcagatatacaaagggaattttactgggtccgtggagcccgaaccttctacgttgacccccaggacgccactctggggctattcaagcagcccacagccccagaccgtggctgccaccaccgttcccagcaacacctcctgggctccaaccaccacatcccttggccctgccaaggataaaccaggcctgcgcagggcagcccaaggggggggctctacatttacctcacaggggggcacccccgacgctactgctgcatctggcgccccagtgagtcctcaggctgcacctgtgccatctcagcgccctcatcacggagacccccaagatggtccatcgcattccgactcatggctgaccgtgactcccggcacgagtcgacctctgtccacctcctccggggtgtttacagcggcaactggacctacccccgccgctttcgacacatccgtctccgctccaagccagggaatcccccagggcgcctccacgactccccaggctcctacccatcccagccgagtctccgaatctaccattagcggggcaaaagaggagaccgttgcgaccctgactatgactgatcgtgttccgagccctctctctaccgtggtatctacagcaacaggcaacttcttgaacagactggtaccagctggcacttggaagcccggaactgccgggaatatctcccacgtggctgagggagacaaacctcagcatcgggccacgatatgtcttagtaaaatggatattgcgtgggtcatcctggctattagtgtgcctattagctcatgtagtgtgttgcttaccgtgtgttgcatgaaaagaaaaaagaagaccgcaaatcccgaaaacaatctctcttattggaacaacaccattacaatggactatttcaatcgccacgccgtggagctgccccgcgaaatccagagcctggaaacctccgaggaccagctgtccgagccacgctctcccgccaatggtgattatcgggataccggaatggtcctcgtgaatcccttctgccaggagacactctttgttgggaatgaccaggtctctgagatttag

SEQ ID NO: 301984 - DNA, 462 bp, Artificial Sequence
  derived and/or modified sequence
atgaaacggtccctgcaagccctttactgtcagctgctgtctttcctgttaatccttgccctgaccgaagcgctggcatttgccatccaggaaccttcacccagagagagcctccaggtgcttcccagcggaacgccccctggaacaatggtgacagcaccacactcatccacgagacatacctccgtggtgatgctcacacctaatccggatgggcccccgtctcaggctgctgccccaatggcaacacctacgccacgtgccgaaggacacccacctactcataccatctctaccatcgcggccactgtcacggccccacactctgagagttctctcagtacagggccagctcccgctgcaatggcaacaacctctagtaagcccgagggtcggccccggggacaggccgcacccacgatcttgctgacgaaaccccccggagctacaagtcggccttag

SEQ ID NO: 301985 - DNA, 219 bp, Artificial Sequence
  derived and/or modified sequence
atgaagcgatctttgcaggccttgtattgccaactactgagtttcctactgatcctggctttaaccgaagccctggccttcgccatccaggagccctcaccaagggagtcactgcaggtgctccccagcgggacaccacccggcacgatggtgaccgctccacattcctcaacaaggcacacctctgtggtgatgctgacgcccaaccccgacggatag

SEQ ID NO: 301986 - DNA, 450 bp, Artificial Sequence
  derived and/or modified sequence
atgaagcggagtctgcaggccctgtattgccagctgctgagcttcctcctgattctagcgctgactgaggccctggcgtttgctattcaagagccttcaccccgagaatccttacaggttcttccatcagggaccccccccggaacgatggtcaccgcgccccactcttccaccaggcacacctcggtcgtgatgctgacccctaaccctgacggccccccatcccaagctgcagctcctatggccacgcccacgcccagggcagaggggcacccacccacacatacaattagcactatcgctgctactgttaccgccccccactccgaaagctcattatcaaccggacccgcacccgccgccatggccactacttcctctaagccagaagggagaccccgggggcaagcggcacctaccattctcctgactaagccacctggcgcctag

SEQ ID NO: 301987 - DNA, 1467 bp, Artificial Sequence
  derived and/or modified sequence
atgaaaaggagtctgcaggcattgtactgccagttgctttcctttctcctcatccttgcccttacagaagccctcgcgttcgccattcaggagccctcaccaagggagagcttgcaagttctgccaagtggcacccccccaggtaccatggtgactgccccacatagctccaccaggcacacctctgttgtaatgctcaccccaaatcctgatggcccacctagtcaggcagctgcgccaatggccaccccaaccccaagggctgaagggcatccccccacccacactattagcaccattgctgccacagtaaccgccccccatagcgagagctccttgtcaaccggacccgccccggccgctatggccaccacttccagcaagcctgagggccgccctagaggccaggcagcacctacaatactcctgacaaagccaccaggcgctacatctagaccgacaaccgcaccaccaaggacgacgactcgccgtcccccaagacccccaggatcttccaggaagggggctggcaatagctcgcgcccagtgccccccgccccaggtggccatagcagatcgaaagagggccagcgaggcaggaatccctccagtacccctctgggccagaagcgccctctcggcaagattttccagatttacaagggtaacttcaccggctctgtggaacccgaaccgtcaacactgactcctcgaacccccctctggggttattcctctagtccccaaccacagacggtagcagcaaccacggttccgtctaacaccagctgggctcctactaccacctctctgggccccgcaaaagacaagccgggtctccgccgcgcggcacagggcggcggttcgacgttcacaagccaaggaggaacaccggatgctacggcggcaagtggagctcctgtaagtccacaagctgctccggtcccctcacagcgcccacaccacggagatcctcaggacggaccctcacactccgatagctggctgaccgttactcccggtacatcaaggcccctctctactagcagtggtgtgtttacagcagccaccggacccacacccgcagcattcgacactagtgtttcagctccctctcagggaattccccagggggcctcaacaactccacaagctccaacacatccctctcgggtgtccgaaagtactatttccggggccaaagaagagacagtggcaaccctaacgatgactgaccgtgtaccttcaccgctctctactgtggtcagcaccgctaccggaaatttcctcaacaggctagtccccgctggtacttggaaaccaggtacggccggcaatatttcacatgtagcggaaggggacaaaccacagcaccgcgccacgatatgcctaagtaaaatggatattgcatgggtgattctggcaatctccgtgcctatatcttcctgtagcgaccccatcacttag

SEQ ID NO: 301988 - DNA, 1728 bp, Artificial Sequence
  derived and/or modified sequence
atgaagaggagcctgcaggccctgtactgccagctgctgtccttcctgctgatcctggccctgacagaggccctggcctttgccatccaggagcccagcccccgggagagcctgcaggtgctgcccagcggcaccccacctggcaccatggtgacagccccccacagcagcaccaggcacacctctgtggtgatgctgacccccaacccagatggcccccccagccaggccgccgcccccatggccacccccacccccagggctgagggccacccccccacccacaccatcagcaccatcgccgccaccgtgacagccccccacagcgagagcagcctgagcactggacctgccccagctgccatggccaccaccagcagcaagccagagggccggccccggggccaggccgcccccaccatcctgctgaccaagcccccaggggccaccagccggcccaccacagccccacccaggaccaccaccaggaggcctccccggcccccaggcagcagcaggaagggggccggcaacagcagcaggcctgtgcccccagcccctgggggccacagccgcagcaaggagggccagaggggcaggaaccccagcagcacccccctgggccagaagaggcccctgggcaagatcttccagatctacaagggcaacttcaccggctctgtggagcctgagcccagcaccctgacccccaggacccccctgtggggctacagcagcagcccccagccccagacagtggccgccaccaccgtgcccagcaacacctcctgggcccccaccaccaccagcctgggccctgccaaggacaagccaggcctgcggcgggccgcccagggcggcggcagcaccttcaccagccagggcggcaccccagatgccacagctgccagcggggcccctgtgagcccccaggccgcccctgtgcccagccagaggccccaccacggggacccccaggacggccccagccacagcgacagctggctgactgtgaccccaggcaccagccggcccctgagcaccagcagcggggtcttcaccgctgccaccggccccaccccagctgcctttgacacctctgtgtctgcccccagccagggcatcccccagggcgccagcaccaccccccaggcccccacccaccccagccgggtgtctgagagcaccatcagcggggccaaggaggagaccgtggccaccctgaccatgacagacagagtgcccagccccctgagcacagtggtgtccacagccaccggcaacttcctgaaccggctggtgcctgctggcacctggaagccaggcacagctggcaacatcagccacgtggccgagggggacaagccccagcaccgggccaccatctgcctgagcaagatggacatcgcctgggtgatcctggccatctctgtgcccatcagcagctgcagcgtgctgctgactgtgtgctgcatgaagaggaagaagaagacagccaaccctgagaacaacctgagctactggaacaacaccatcaccatggactacttcaacagacatgctgtggagctgccccgggagatccagagcctggagaccagcgaggaccagctgtctgagcccaggagccctgccaacggggactacagagacaccggcatggtgctggtgaaccccttctgccaggagaccctgtttgtgggcaatgaccaggtgtctgagatctag

SEQ ID NO: 301989 - DNA, 462 bp, Artificial Sequence
  derived and/or modified sequence
atgaagaggagcctgcaggccctgtactgccagctgctgtccttcctgctgatcctggccctgacagaggccctggcctttgccatccaggagcccagcccccgggagagcctgcaggtgctgcccagcggcaccccacctggcaccatggtgacagccccccacagcagcaccaggcacacctctgtggtgatgctgacccccaacccagatggcccccccagccaggccgccgcccccatggccacccccacccccagggctgagggccacccccccacccacaccatcagcaccatcgccgccaccgtgacagccccccacagcgagagcagcctgagcactggacctgccccagctgccatggccaccaccagcagcaagccagagggccggccccggggccaggccgcccccaccatcctgctgaccaagcccccaggggccaccagccggccctag

SEQ ID NO: 301990 - DNA, 219 bp, Artificial Sequence
  derived and/or modified sequence
atgaagaggagcctgcaggccctgtactgccagctgctgtccttcctgctgatcctggccctgacagaggccctggcctttgccatccaggagcccagcccccgggagagcctgcaggtgctgcccagcggcaccccacctggcaccatggtgacagccccccacagcagcaccaggcacacctctgtggtgatgctgacccccaacccagatggatag

SEQ ID NO: 301991 - DNA, 450 bp, Artificial Sequence
  derived and/or modified sequence
atgaagaggagcctgcaggccctgtactgccagctgctgtccttcctgctgatcctggccctgacagaggccctggcctttgccatccaggagcccagcccccgggagagcctgcaggtgctgcccagcggcaccccacctggcaccatggtgacagccccccacagcagcaccaggcacacctctgtggtgatgctgacccccaacccagatggcccccccagccaggccgccgcccccatggccacccccacccccagggctgagggccacccccccacccacaccatcagcaccatcgccgccaccgtgacagccccccacagcgagagcagcctgagcactggacctgccccagctgccatggccaccaccagcagcaagccagagggccggccccggggccaggccgcccccaccatcctgctgaccaagcccccaggggcctag

SEQ ID NO: 301992 - DNA, 1467 bp, Artificial Sequence
  derived and/or modified sequence
atgaagaggagcctgcaggccctgtactgccagctgctgtccttcctgctgatcctggccctgacagaggccctggcctttgccatccaggagcccagcccccgggagagcctgcaggtgctgcccagcggcaccccacctggcaccatggtgacagccccccacagcagcaccaggcacacctctgtggtgatgctgacccccaacccagatggcccccccagccaggccgccgcccccatggccacccccacccccagggctgagggccacccccccacccacaccatcagcaccatcgccgccaccgtgacagccccccacagcgagagcagcctgagcactggacctgccccagctgccatggccaccaccagcagcaagccagagggccggccccggggccaggccgcccccaccatcctgctgaccaagcccccaggggccaccagccggcccaccacagccccacccaggaccaccaccaggaggcctccccggcccccaggcagcagcaggaagggggccggcaacagcagcaggcctgtgcccccagcccctgggggccacagccgcagcaaggagggccagaggggcaggaaccccagcagcacccccctgggccagaagaggcccctgggcaagatcttccagatctacaagggcaacttcaccggctctgtggagcctgagcccagcaccctgacccccaggacccccctgtggggctacagcagcagcccccagccccagacagtggccgccaccaccgtgcccagcaacacctcctgggcccccaccaccaccagcctgggccctgccaaggacaagccaggcctgcggcgggccgcccagggcggcggcagcaccttcaccagccagggcggcaccccagatgccacagctgccagcggggcccctgtgagcccccaggccgcccctgtgcccagccagaggccccaccacggggacccccaggacggccccagccacagcgacagctggctgactgtgaccccaggcaccagccggcccctgagcaccagcagcggggtcttcaccgctgccaccggccccaccccagctgcctttgacacctctgtgtctgcccccagccagggcatcccccagggcgccagcaccaccccccaggcccccacccaccccagccgggtgtctgagagcaccatcagcggggccaaggaggagaccgtggccaccctgaccatgacagacagagtgcccagccccctgagcacagtggtgtccacagccaccggcaacttcctgaaccggctggtgcctgctggcacctggaagccaggcacagctggcaacatcagccacgtggccgagggggacaagccccagcaccgggccaccatctgcctgagcaagatggacatcgcctgggtgatcctggccatctctgtgcccatcagcagctgcagcgaccccatcacctag

SEQ ID NO: 301993 - DNA, 1728 bp, Artificial Sequence
  derived and/or modified sequence
atgaagcggagcctgcaggccctgtactgccagctgctgagcttcttactgatcctggcgctgaccgaggccctcgcgtttgctatacaagagcccagtccacgtgaatctttgcaggtgctcccctctggaactccgccgggcacgatggttaccgcaccacactcctccacgcgccacacgtctgttgtcatgttaactccaaaccctgatggaccccctagtcaggccgccgcacctatggctactcctacacccagagccgagggacatcccccgacccacacgatcagcaccattgcagcaaccgttacagcgccgcattccgagtcctcactgagcacagggccggcccctgccgcaatggctaccacatctagtaagccagaaggacgccctcgggggcaggccgcaccaacaatcttgctcaccaaaccccctggagccacgagcagacctaccacagctccccctcggactacaacgcgacgcccacccagaccccccggttcatctagaaaaggcgccgggaattctagcaggcccgttccacctgcacctggaggacatagtagatccaaggagggccagcggggacgaaacccttcatccactcccctcgggcagaaacgacctctcggtaagattttccaaatatacaaaggcaatttcaccggttccgtagagcccgaaccctcgaccctcactccccgaacccccctgtgggggtactcaagctctccccaaccccagacggtggcggcaacaacagttccttcaaacacaagctgggctcctaccacaacctcccttggcccggccaaggataaacctggcctaagacgagccgcacagggaggaggttcaacatttacttcccagggggggaccccagacgctacagccgcgagcggcgctccagtatctccccaggcagcgcccgttcctagtcaaagaccccaccacggagacccccaagatggaccctcacactccgattcctggcttacagtaacacccgggacgagtcgaccactatctacatcatccggcgtatttactgctgcaacggggcccacccccgcagcgtttgatacttcagtgtctgcaccttctcagggaattcctcagggcgccagcaccaccccacaggccccaacccatccatccagggtctcagagtcaacgatttccggagccaaggaagaaacagtggctactctcaccatgaccgacagagtaccttcccctctcagcaccgtggtctcgacagccacaggcaattttctcaaccggttggtgccagccggcacctggaaaccggggactgcaggtaacatatcacacgtggccgaaggcgataaaccacagcaccgcgcaaccatctgcttgagcaagatggatatcgcatgggtcatcctagctatcagcgtgcccataagctcttgttctgtgctgcttacagtctgttgcatgaagcgaaaaaagaaaaccgctaatccagagaacaacctttcatactggaacaatacgatcacaatggactacttcaataggcatgccgtggaactgcctagggaaattcagagcctcgagacgtccgaggatcagctcagcgagcctcgcagtccagctaatggcgattaccgggacacaggcatggtgctcgtgaacccattctgtcaggaaacactattcgtcggcaatgaccaggttagtgaaatctag

SEQ ID NO: 301994 - DNA, 1728 bp, Artificial Sequence
  derived and/or modified sequence
atgaagcggagcctgcaggccctgtactgccagctgctgagcttcctgctgattctggccctgacggaagccctggctttcgccatccaagagccctcgcctagagagagcctgcaggtgctcccgtcaggcacaccacccggcactatggtaaccgcaccccacagttccacccgccacacaagcgtggtgatgctaacgccgaatcccgacggacctccatcccaggccgcggcacccatggcgaccccaacccctagagcagagggccatccgcccactcacacaattagtacaatagctgccacggtgactgcccctcactcagaatcttctcttagcacgggtcccgcccccgctgccatggccactacctctagcaagccagagggacgccctaggggacaagctgcccccacaattttactgactaagcctccaggagctacaagtcggcccactacggccccacctagaacgaccacaaggcggcccccacgccccccaggcagttcccggaaaggcgctggcaacagctccagacctgtgccccccgccccaggcggacactccagatcaaaagaggggcaacgcggcaggaatcctagttctaccccgcttggtcagaaaagacccctgggaaagattttccagatttacaagggcaattttaccggatcggtggagcctgaaccctctacactcaccccgcgaaccccactctggggatactccagctctccgcagccgcagactgttgcagcaacaaccgtgccttcaaacacctcatgggcccccaccaccacgagcctgggccccgccaaggacaagccagggctgcgaagagctgcgcagggaggaggctctacctttacttctcagggtggcaccccagatgcaaccgcggctagtggagcccccgtgtcgccccaggccgcaccagttccctcacagaggccacaccacggggacccacaggatggaccgagtcatagtgacagttggctcaccgtgacccccggaaccagccgtccgctgagtacttcctctggagtatttaccgccgccaccggacccacaccagctgccttcgatacaagcgtcagcgccccgagccaaggcatcccacagggagcctctacaacacctcaggcaccaacacacccctctcgtgtgtcagagtcaactatttctggagctaaagaagaaacagtagccacattaacaatgactgatcgggtaccttctcctctcagtacagtcgtgtcaacagccaccgggaactttctcaacagactggtcccagccggaacctggaagcccgggactgcaggtaatatcagccatgtggcagaaggagataagcctcagcatcgggcaacgatatgcctctctaaaatggacatagcatgggtcatcctggctatttccgttccaataagctcttgtagcgtgttgttgaccgtgtgttgtatgaagcgaaagaagaagacagccaatcctgagaataatctgtcttactggaataacacaattactatggattatttcaaccgccacgccgtggagttgccgagagaaatccagagcctcgagacgtccgaggatcagctgtccgagcctcgctctccagcgaacggggactaccgcgacaccggaatggttctcgtgaatccattttgtcaggaaaccctgtttgtgggaaatgatcaggtgagtgagatctag

SEQ ID NO: 301995 - DNA, 462 bp, Artificial Sequence
  derived and/or modified sequence
atgaagcggagcctgcaggccctgtactgccagctgctgagcttcctgttgattttagctctcactgaggctctggcttttgccatacaagagccaagccccagagagtccctccaggtgttaccttctggtacccccccggggactatggtgacagccccacacagctcaacgcgccatacttccgtggtgatgctcactcctaaccccgatgggcccccaagtcaggcagccgctcctatggccaccccaactccccgggcagaaggtcatccacccacacacacaatctctaccattgctgccactgtcacagccccgcactccgaatcaagcttatcaactgggcccgcccccgctgccatggctacaacaagctccaaacccgaaggcaggcccaggggtcaggctgcccctactattcttctcacaaagccacccggagccactagcaggccttag

SEQ ID NO: 301996 - DNA, 219 bp, Artificial Sequence
  derived and/or modified sequence
atgaagcggagcctgcaggccctgtactgccagctgctgagcttcttactgatccttgccttaactgaggccttggcttttgcgatccaggaaccatctccaagagaatcgctgcaggtgctcccctctggaaccccccccgggaccatggttaccgcaccacatagcagtacaagacacacttcagttgtcatgttgacccctaatcccgacggatag

SEQ ID NO: 301997 - DNA, 450 bp, Artificial Sequence
  derived and/or modified sequence
atgaagcggagcctgcaggccctgtactgccagctgctgagcttcctgctgatcttagccctaaccgaggccctggcattcgccatccaggaaccctcgcccagggaaagtctacaggtgttgccttctggcacacccccaggaaccatggtgaccgctcctcatagtagcaccagacatacaagcgtggtgatgctgacaccaaatcctgatggtccaccctctcaggcggctgccccaatggctacaccaacgcctcgggccgaagggcacccgccaacccatacaatctccacaatagccgccacggtgaccgcgcctcatagcgaatcttctctcagcaccggccccgccccagctgccatggcaactacgtcctccaaacccgagggcagaccacggggacaggccgccccaacaatcctcctgacgaaaccacctggtgcttag

SEQ ID NO: 301998 - DNA, 1467 bp, Artificial Sequence
  derived and/or modified sequence
atgaagcggagcctgcaggccctgtactgccagctgctgagcttcttacttatcttggctctgacggaagctctggcctttgccatacaggagccaagccccagggaatcgcttcaggtactgccaagtggaacacctcccggcactatggtcactgccccacatagctctacacggcataccagtgtggtgatgctgacacccaaccccgatggccccccaagccaggccgctgcccctatggccacgcccacacctagggccgaggggcaccctcctactcatactatctccaccatagctgctacagtgaccgccccacacagcgagtcatcgctgagtacaggacctgcgcccgcagctatggccacaactagcagcaagcccgaggggcggccccgggggcaggccgccccgactatccttttgaccaagcctccgggtgccacatctcggccaactaccgctccccctagaaccaccactcggagaccacccagaccgccaggctcaagccgaaagggcgccggcaattcctcacgtccggttccccccgcacccggggggcacagccgcagcaaagaggggcagcggggaaggaacccttctagcactcctctgggccaaaagagacctctgggaaagatctttcagatctacaaagggaacttcactggctccgtcgaacccgagccctccactcttactccgcgcacgcccctgtgggggtacagttcatcaccacaaccacagaccgtcgctgccacgacggtgccatctaacacgagctgggctcccacaaccacatctttaggtccggctaaggacaagcccggcttgcgccgcgccgcgcagggcggcggttccactttcactagccaaggcggcaccccggatgccacagcagcctctggggcaccagtctcaccccaggccgcaccagtaccttcccagcgtccccaccatggcgatcctcaagacggaccatcccattccgattcctggcttaccgtcactcctggaaccagcaggcccctcagtactagttctggcgtgttcacagcagctactggccccactccggcggcatttgacaccagtgtgtcagctccttcacagggaattcctcagggagccagcacaaccccccaggctcccacccacccgtccagggtatcagaaagtactattagtggagctaaagaagaaaccgttgctacattaacgatgacagacagggtaccatcaccactctccactgtcgtaagtaccgccacagggaacttcctcaaccgcctggttcctgcgggcacctggaaacctggaaccgcgggcaacatttcgcatgttgcagaaggagataaacctcaacaccgggccacaatatgcctgtccaaaatggatattgcttgggtcatcctggcaatttccgtccctatcagttcctgtagcgatcctatcacgtag

SEQ ID NO: 301999 - DNA, 1728 bp, Artificial Sequence
  derived and/or modified sequence
atgaagcgttctctgcaggccttgtattgccaattgctatcatttcttttgatactggctctcaccgaagccctggcttttgctatccaagagccaagcccacgggaatctctgcaagtgctcccatccggaactcctcctggcacgatggtgacagctccccacagctccacacgccatacgtctgtagttatgctgacccccaaccccgatggtccccctagccaggccgcagcgccaatggcaacacccacaccaagagccgagggtcaccccccaacacataccatttctaccatcgcggcaacagtaactgctcctcactctgaatcttcattgtccaccggcccagcccctgctgccatggcaacaacatcctccaagcccgagggcaggccacgcggacaggcggctcccaccatcttattgaccaagccacctggagcgacctctcggccaacaactgctccccctcgcactacaaccagacgtccccctcgacctcccggttcttcccgcaagggtgccggaaactcatcccggcctgtgccgcctgcacctggaggccattcgcggtcgaaggaaggccagagaggtcggaatccctcaagcacgcctctcggccagaagaggccgctgggcaagattttccagatctacaagggcaatttcacagggtctgtggaaccagagccctcaactctcacccccagaacccccctgtggggatacagctccagcccgcagccccagaccgtggcggctaccaccgtgccttcaaacacttcttgggcacctactacgacgtcattgggccctgctaaagacaaacctggactgcgcagggccgctcaaggaggcggatccaccttcacctcacagggtggaacacccgatgccactgcagcctccggggcacccgtctcaccacaagcagccccagtgcccagccagcgaccccatcatggggaccctcaggacggaccctctcattctgatagctggctgacagttacccccggtacgtccaggcctctttcgacttcatcaggcgtgttcactgccgctacaggaccaactcctgctgccttcgatacttctgtgtcggcgccatctcaagggatccctcagggagctagtactacccctcaggctccgacccacccttcccgagtgagtgagtcaaccatttctggggcaaaggaagaaaccgtggccacgctaacaatgacagacagagtgccatcaccattgtcaacagtagtctccacagctacgggcaactttctgaatcgtctggtcccagcgggaacatggaaacctggcaccgccggtaacatcagccacgttgcggagggagataagccgcaacaccgcgctacaatttgtttgtctaagatggacatcgcgtgggtaatacttgctatctctgtccccataagctcttgctctgtgctactcactgtttgttgcatgaaaaggaagaagaagactgctaaccccgaaaataatctctcttattggaacaacactattacaatggattactttaaccggcacgcagtcgaactacctcgtgagatacagagtctagagacttctgaagatcagctgagtgaaccaaggtcacctgccaatggagattatcgggacacgggaatggtgctagttaatcctttctgccaagagaccctgttcgttggcaacgaccaggttagcgagatatag

SEQ ID NO: 302000 - DNA, 1728 bp, Artificial Sequence
  derived and/or modified sequence
atgaagaggtctcttcaggcattgtactgccagctattgtcctttctattaatcctggcactgaccgaagctctggccttcgctatccaagagccttctccaagagagtccttacaggtgctaccatccgggaccccccctggcacaatggttactgctcctcactctagtacgaggcatacttcagtggtgatgctgacaccgaatccggacggtccccctagccaggcagctgcacccatggccacaccaacaccaagggccgaaggacatcctccgacccacacaataagtaccattgcggctaccgtgaccgcccctcattcggaaagtagtcttagtaccggtccagcccctgcagccatggccaccaccagttctaaacctgaagggaggccaagaggacaggcagcaccaaccatactgctgactaagccaccaggggctacgtccagacctactacagccccacctcggaccacgacaagaagaccgcctcgcccacctggatcttccaggaagggagcaggaaatagttctaggcccgtacccccagctccaggcggtcatagtaggtccaaggagggtcaaagaggacgtaacccgagctcgacccctctcggccagaaaagaccattagggaaaatttttcaaatatacaagggaaatttcacgggcagcgtcgagccagaaccgagtactctgacccctaggactcccctgtgggggtattccagcagcccccaaccccagaccgtggcagccacaacagtgccaagcaacacatcctgggcccctacaacaacaagcctgggcccagctaaagacaaacccggtctgcgccgagcggctcagggagggggatccacattcaccagccagggagggacgcccgatgcgacagcggctagcggcgctccagtcagcccccaggctgcgccagttccaagccagagacctcaccatggtgatcctcaggatggtccaagccactcagactcatggctgactgtaacaccaggcacatcccgacccttatcaaccagctccggcgttttcaccgccgctaccggcccaaccccagctgcctttgacacttccgttagtgctcccagccaggggatcccccagggcgcttctactactccgcaggctccaacacacccgagccgcgtttcagaatctaccatatccggagcaaaagaggagacagtcgcaaccctaactatgaccgaccgtgtgccatcccccttatctactgtcgtatccaccgctacaggtaacttcctgaaccggctggtgccggcagggacttggaaaccaggaaccgccggtaatatctctcacgtggcagaaggcgacaaaccacagcaccgcgctacaatctgcctctcaaagatggacattgcctgggtgatactagcgatttccgtgcccatctcatcctgctccgtgctcttgactgtttgctgcatgaaaagaaagaagaaaacagcaaaccccgagaataatttgtcttactggaacaacacaatcacgatggactacttcaatcgacacgccgtcgagctgccccgagaaattcagagcttggagacttccgaggaccagctgagcgaacccagatctccagctaacggcgattatcgcgacaccggaatggtgttagttaaccctttttgccaggagaccctcttcgtgggcaatgaccaggtgagcgagatctag

SEQ ID NO: 302001 - DNA, 462 bp, Artificial Sequence
  derived and/or modified sequence
atgaagcgcagcttgcaagctttgtattgccaactgctatcattcttactcattcttgccctgacagaagccctggcattcgccattcaagagccgtctcctcgtgaatcgttgcaggtgctgcctagcgggactcccccagggaccatggtgacggcacctcattcctccacccggcacacgagcgtcgtcatgctaacgccaaatccagacgggccaccaagccaggctgcggctccaatggctacacctacaccaagagcagaggggcatccccctacccacaccatctccactattgccgcaacggtgacagccccacatagcgagagctcactaagtacagggcctgctccggcagctatggccactacgtctagtaaacccgaggggcgaccacggggacaagcggcaccaactattctgctgacaaaaccacctggggctacgtcaagaccttag

SEQ ID NO: 302002 - DNA, 219 bp, Artificial Sequence
  derived and/or modified sequence
atgaaacggtccctacaagcgttatattgccagctcttgagctttctgttgatccttgcactcaccgaggcactggccttcgcgatccaggagccatccccccgagagtcgctgcaggtgctgccaagcggtacccctcctggtactatggtgacggcacctcactccagtacccgccacacatccgtcgtaatgctcacccctaatcctgatggttag

SEQ ID NO: 302003 - DNA, 450 bp, Artificial Sequence
  derived and/or modified sequence
atgaagcgcagcctgcaagcgctttactgtcagctgctgagcttccttctaattctcgcactgaccgaagctttggctttcgcgatacaggaaccatctccacgggaaagcctccaggtactgcccagcggtactcctcctgggaccatggttacggctccccacagctcaaccaggcacacatccgtggtgatgcttacgccgaatccagatggcccaccatcgcaggctgccgctcctatggcaacaccgactcccagggcagaggggcaccccccaacacacacaatctccactatagccgcaaccgtgaccgctcctcactccgaaagctctcttagtacaggaccagcccctgcggcaatggccactacatcctctaaacccgagggaagaccacggggtcaggccgcacctacaatcctcctgaccaaaccaccgggtgcatag

SEQ ID NO: 302004 - DNA, 1467 bp, Artificial Sequence
  derived and/or modified sequence
atgaagaggtcactgcaagcactgtactgtcagcttctgtcattcttattgatcctggcactgactgaggccctggcttttgccatccaggagcctagtcctcgcgaatcactccaggtgcttccaagcggcaccccaccaggaacaatggtgactgcaccccacagctccactcggcatacttcagtcgtgatgctgacccctaaccccgacgggcctccctcccaggcagccgcaccaatggcgacacctacacctagagccgaaggtcaccctccaacacacactattagcacaatcgccgcaacagtcacagccccacactccgaatcctctctaagtaccgggcctgctccggcagccatggctaccactagctccaagcccgaagggaggcctcgcggacaagctgcccctaccattctgctgaccaagcctccaggcgcaactagccgcccaaccacggcgccaccccgtaccactacacgtcgacccccaagaccacctgggtcatctcggaagggcgctgggaattctagtaggcccgtgccacctgctcccggtggacactctagatctaaagagggccagagaggccgaaacccaagctcaacaccactgggacagaaaagaccacttgggaagatctttcaaatctacaagggaaacttcaccggatcagtcgagcctgaaccttcaacgctgacaccacgcactccattgtgggggtatagttcctccccgcagccacagacagtggcggcaacaacggtccctagcaacacttcatgggcccctacgacaacttctctgggccctgctaaagataaacctggtctacgaagggctgcgcaaggaggagggtcaaccttcacctctcaaggcggaacaccggacgcaactgcagccagtggtgcccctgtgagccctcaggccgcacctgtgccgtcacagagaccccatcatggtgatccacaggatgggcctagccatagtgatagctggctgacggtgacccccggaacttcacggcctctctctactagctccggagtctttacagcagctacgggcccaacgcctgcagctttcgatacgagtgtgagcgccccttctcagggaatcccccagggcgcaagcacaaccccacaagccccaacacacccctctcgtgtttctgaaagcactatctcaggcgcaaaggaggagactgtggctacgcttaccatgaccgatagggtacctagtcccctgtccaccgtggtctccaccgcaacggggaattttctgaaccggctcgtgcccgctggcacctggaagccgggaactgcaggtaacatttcccacgttgcagagggggacaaaccacaacacagagcaacgatttgtctgtccaagatggacatagcgtgggtgatactcgccattagcgtgcctatctcttcatgcagtgaccctatcacttag

SEQ ID NO: 302005 - DNA, 3744 bp, Artificial Sequence
  derived and/or modified sequence
gctttctcctgagccgtcggagggagccggagcgcttctcccgagttggtgatagattggtggtcatccaacatgcagaaatgaatgagcagtgaaaagcagcagagccgatgggtcatgaggatgtaagtgcgtttgaaggcttccacaccctctactccaggacagaatcatgaataaactggaggataagcaggaccagatgataccatgaagagaagtttacaggccctctattgccaactgttaagtttcctgctgatcttggcactgaccgaagcgctggcatttgccatccaggaaccatctcccagggaatctcttcaggtcctcccttcaggcactcccccgggaaccatggtgacagcaccccacagctctaccagacatacttctgtggtgatgctgacccccaatcccgatggacccccctcacaggctgcagctcccatggcaacaccgacaccccgtgcagaggggcaccctcctacgcacaccatctccaccatcgctgcgacagtaaccgccccccattctgaaagctccctgtccacagggcccgctccagcagccatggcaaccacatcctccaagccagagggccgccctcgagggcaggctgcccccaccatcctgctgacaaagccaccgggggccaccagccgccccaccacagcgcccccccgcactaccacacgcaggccccccaggcccccaggctcttcccgaaaaggggctggtaattcatcacgccctgtcccgcctgcacctggtggccactccaggagtaaagaaggacagcgaggacgaaatccaagctccacacctctggggcagaagcggcccctggggaaaatctttcagatctacaagggcaacttcacagggtctgtggaaccggagccctctaccctcacccccaggaccccactctggggctactcctcttcaccacagccccagacagtggctgcgaccacagtgcccagcaatacctcatgggcacccaccaccacctccctggggcctgcaaaggacaagccaggccttcgcagagcagcccaggggggtggttctaccttcaccagccaaggagggacaccagatgccacagcagcctcaggtgcccctgtcagtccacaagctgccccagtgccttctcagcgcccccaccacggtgacccacaggatggccccagccatagtgactcttggcttactgttacccctggcaccagcagacctctgtctaccagctctggggtcttcacggctgccacggggcccaccccagctgccttcgataccagtgtctcagccccttcccaggggattcctcagggagcatccacaaccccacaagctccaacccatccctccagggtctcagaaagcactatttctggagccaaggaggagactgtggccaccctcaccatgaccgaccgggtgcccagtcctctctccacagtggtatccacagccacaggcaatttcctcaaccgcctggtccccgccgggacctggaagcctgggacagcagggaacatctcccatgtggccgagggggacaaaccgcagcacagagccaccatctgcctgagcaagatggatatcgcctgggtgatcctggccatcagcgtgcccatctcctcctgctctgtcctgctgacggtgtgctgcatgaagaggaagaagaagaccgccaacccggagaacaacctgagctactggaacaacaccatcaccatggactacttcaacaggcatgctgtggagctgcccagggagatccagtcccttgaaacctctgaggaccagctctcagagccccgctccccagccaatggcgactatagagacactgggatggtccttgttaaccccttctgtcaagaaacactgtttgtgggaaacgatcaagtatctgagatctaactacagcaggcatcactttgccattccgtatttttcgtctctaaattataaatatacaaatacatatattataaatataacctttgtgtaaccctgacttaatgagaaacattttcagctttttttcctatgaattgtcaacatcttttttacaagtgtggtttaaaaaaaaaaaaaactttacagaatgatctgtggctttataaaataaaggtatttctaagcaaagcagttgcattgattgcttctcttaataactattcttgagcacctggggatcccaggaaccctggtcaggtgaggtaagagactgacctcctgtagaagctgaatgttacagtgcaagcgcacgattctttgagtgattcttaaagctctggttcctcttgatttggtgtgaccccatttcctcccttctcatacgcacacctgtaaagggaactggaccgcctcaggggaagacggcagactcatgcacagagaaggaaaagggaacatctcatcacctctgaggatgagtaccctggagccttatgacggcaccattggatgtcatgtttaattccatccaagttgtggatggcaggcaggagcatggagccctcaggaatccatggaggacatcaaggcatcccaaggccatattcccctaacattacttccactgctaacaacaggactgcctttccctggtgggaaaatgctccctttatgcccattcctgtatcccctccaacacccacatctgcattaaacacccgtgcctttctcttggagagggtttagatgcagatcccggccctggagctttaaaatgcttgcccttccttcttcaaggatcaaatgtttattggggttcagctttgttttctcaaaaggccatggtatcgtgcccctgaggaacatgtttatctaagaagctttgaggtagtagagcgataatttttgaaaccttcctcctgcaatctttaaaaaagaaaaaaaagattgcccaaacaaatcatttgggagaagacatcattatactcctacttggcactgcaaacctgctcgcagcaccagccggtggacttgccatccagctctcagcttccactgctccccttgttcccggccggctggctgcctccccgtgctgtgtccagcacggccaacaacgtcagaccctcagagacgcccaaggggcttccagaggtggccgcttctctattttttcctgattgtggctgagagagatgattactgctttgacacttcctttctctaaaagaaaaatagtttgatagtatattttgaatatagatgctcttatagtcagattgggaattgaacttgaatattgggtcatatgtttgtgttgttgctgtagtctatcatgacttttttctttctgcattttccttaaaaaaaaaaaaaagatggccttcaaaagtgtgttctcaatgttgtatgaacctccttcacatgagttcggttgttgtctctcttcaaagactcttcaacccacaaagaagcaactaaatgtttctctaagtttaattttctagcgtgttgttgtcttacctttttaaccttaccataatatttctgttaactgttacatttaatataccaatgtgtgtaagtatacagagaaaaatctgtttgtaaagtaaaatttatatataatatatgtaatcaaagatacatatgttatatatacatatgtggatgtatgacttatttttccttatccacagatttcagctaccatgtatatataaataaacttattttattagccagaggattctgttgctaatacat

SEQ ID NO: 302006 - DNA, 2165 bp, Artificial Sequence
  derived and/or modified sequence
agccgtcggagggagccggagcgcttctcccgagttggtgatagattggtggtcatccaacatgcagaaatgaatgagcagtgaaaagcagcagagccgatgggtcatgaggatgtaagtgcgtttgaaggcttccacaccctctactccaggaatcatgaataaactggaggataagcaggaccagatgataccatgaagagaagtttacaggccctctattgccaactgttaagtttcctgctgatcttggcactgaccgaagcgctggcatttgccatccaggaaccatctcccagggaatctcttcaggtcctcccttcaggcactcccccgggaaccatggtgacagcaccccacagctctaccagacatacttctgtggtgatgctgacccccaatcccgatggacccccctcacaggctgcagctcccatggcaacaccgacaccccgtgcagaggggcaccctcctacgcacaccatctccaccatcgctgcgacagtaaccgccccccattctgaaagctccctgtccacagggcccgctccagcagccatggcaaccacatcctccaagccagagggccgccctcgagggcaggctgcccccaccatcctgctgacaaagccaccgggggccaccagccgccccaccacagcgcccccccgcactaccacacgcaggccccccaggcccccaggctcttcccgaaaaggggctggtaattcatcacgccctgtcccgcctgcacctggtggccactccaggagtaaagaaggacagcgaggacgaaatccaagctccacacctctggggcagaagcggcccctggggaaaatctttcagatctacaagggcaacttcacagggtctgtggaaccggagccctctaccctcacccccaggaccccactctggggctactcctcttcaccacagccccagacagtggctgcgaccacagtgcccagcaatacctcatgggcacccaccaccacctccctggggcctgcaaaggacaagccaggccttcgcagagcagcccaggggggtggttctaccttcaccagccaaggagggacaccagatgccacagcagcctcaggtgcccctgtcagtccacaagctgccccagtgccttctcagcgcccccaccacggtgacccacaggatggccccagccatagtgactcttggcttactgttacccctggcaccagcagacctctgtctaccagctctggggtcttcacggctgccacggggcccaccccagctgccttcgataccagtgtctcagccccttcccaggggattcctcagggagcatccacaaccccacaagctccaacccatccctccagggtctcagaaagcactatttctggagccaaggaggagactgtggccaccctcaccatgaccgaccgggtgcccagtcctctctccacagtggtatccacagccacaggcaatttcctcaaccgcctggtccccgccgggacctggaagcctgggacagcagggaacatctcccatgtggccgagggggacaaaccgcagcacagagccaccatctgcctgagcaagatggatatcgcctgggtgatcctggccatcagcgtgcccatctcctcctgctctgtcctgctgacggtgtgctgcatgaagaggaagaagaagaccgccaacccggagaacaacctgagctactggaacaacaccatcaccatggactacttcaacaggcatgctgtggagctgcccagggagatccagtcccttgaaacctctgaggaccagctctcagagccccgctccccagccaatggcgactatagagacactgggatggtccttgttaaccccttctgtcaagaaacactgtttgtgggaaacgatcaagtatctgagatctaactacagcaggcatcactttgccattccgtatttttcgtctctaaattataaatatacaaatacatatattataaatataacctttgtgtaaccctgacttaatgagaaacattttcagctttttttcctatgaattgtcaacatcttttttacaagtgtggtttaaaaaaaaaaaaaactttacagaatgatctgtggctttataaaataaaggtatttctaagcaaagcagttgcattgat

SEQ ID NO: 302007 - DNA, 555 bp, Artificial Sequence
  derived and/or modified sequence
ggtgaggcggccagcttcatgaggaaggagaatgcattgggaagcaagaaaagaatcatgaataaactggaggataagcaggaccagatgataccatgaagagaagtttacaggccctctattgccaactgttaagtttcctgctgatcttggcactgaccgaagcgctggcatttgccatccaggaaccatctcccagggaatctcttcaggtcctcccttcaggcactcccccgggaaccatggtgacagcaccccacagctctaccagacatacttctgtggtgatgctgacccccaatcccgatggacccccctcacaggctgcagctcccatggcaacaccgacaccccgtgcagaggggcaccctcctacgcacaccatctccaccatcgctgcgacagtaaccgccccccattctgaaagctccctgtccacagggcccgctccagcagccatggcaaccacatcctccaagccagagggccgccctcgagggcaggctgcccccaccatcctgctgacaaagccaccgggggccaccagccgcccca

SEQ ID NO: 302008 - DNA, 510 bp, Artificial Sequence
  derived and/or modified sequence
gtatgcaaagacagagcctctcatgagaacttggatggtggagtataaacactcatttaaaaataaatccagatgtagttggctgcagtcatctgacagaaccctgattctctcttcaataatgacgttcatttgtacctcattaattgagagtttttaataatttctccagggtaagaaaactgagtcacacaaggatatatttgtgtaacacaatttcaaaaaggcaaactcttgctcttgttaacgacagaatcatgaataaactggaggataagcaggaccagatgataccatgaagagaagtttacaggccctctattgccaactgttaagtttcctgctgatcttggcactgaccgaagcgctggcatttgccatccaggaaccatctcccagggaatctcttcaggtcctcccttcaggcactcccccgggaaccatggtgacagcaccccacagctctaccagacatacttctgtggtgatgctgacccccaatcccgatgg

SEQ ID NO: 302009 - DNA, 681 bp, Artificial Sequence
  derived and/or modified sequence
gaagctagtctacacacatggatgggactatggaaatatacatgtgacttttaaacctgaacagtagctgttggtgatagattggtggtcatccaacatgcagaaatgaatgagcagtgaaaagcagcagagccgatgggtcatgaggatgtaagtgcgtttgaaggcttccacaccctctactccaggacagaatcatgaataaactggaggataagcaggaccagatgataccatgaagagaagtttacaggccctctattgccaactgttaagtttcctgctgatcttggcactgaccgaagcgctggcatttgccatccaggaaccatctcccagggaatctcttcaggtcctcccttcaggcactcccccgggaaccatggtgacagcaccccacagctctaccagacatacttctgtggtgatgctgacccccaatcccgatggacccccctcacaggctgcagctcccatggcaacaccgacaccccgtgcagaggggcaccctcctacgcacaccatctccaccatcgctgcgacagtaaccgccccccattctgaaagctccctgtccacagggcccgctccagcagccatggcaaccacatcctccaagccagagggccgccctcgagggcaggctgcccccaccatcctgctgacaaagccaccgggggc

SEQ ID NO: 302010 - DNA, 4833 bp, Artificial Sequence
  derived and/or modified sequence
tccaactagactctgaaatgaattagatggagatttaaaatagggcaatttagtgggaagagatacttaatttgaagacagaatcatgaataaactggaggataagcaggaccagatgataccatgaagagaagtttacaggccctctattgccaactgttaagtttcctgctgatcttggcactgaccgaagcgctggcatttgccatccaggaaccatctcccagggaatctcttcaggtcctcccttcaggcactcccccgggaaccatggtgacagcaccccacagctctaccagacatacttctgtggtgatgctgacccccaatcccgatggacccccctcacaggctgcagctcccatggcaacaccgacaccccgtgcagaggggcaccctcctacgcacaccatctccaccatcgctgcgacagtaaccgccccccattctgaaagctccctgtccacagggcccgctccagcagccatggcaaccacatcctccaagccagagggccgccctcgagggcaggctgcccccaccatcctgctgacaaagccaccgggggccaccagccgccccaccacagcgcccccccgcactaccacacgcaggccccccaggcccccaggctcttcccgaaaaggggctggtaattcatcacgccctgtcccgcctgcacctggtggccactccaggagtaaagaaggacagcgaggacgaaatccaagctccacacctctggggcagaagcggcccctggggaaaatctttcagatctacaagggcaacttcacagggtctgtggaaccggagccctctaccctcacccccaggaccccactctggggctactcctcttcaccacagccccagacagtggctgcgaccacagtgcccagcaatacctcatgggcacccaccaccacctccctggggcctgcaaaggacaagccaggccttcgcagagcagcccaggggggtggttctaccttcaccagccaaggagggacaccagatgccacagcagcctcaggtgcccctgtcagtccacaagctgccccagtgccttctcagcgcccccaccacggtgacccacaggatggccccagccatagtgactcttggcttactgttacccctggcaccagcagacctctgtctaccagctctggggtcttcacggctgccacggggcccaccccagctgccttcgataccagtgtctcagccccttcccaggggattcctcagggagcatccacaaccccacaagctccaacccatccctccagggtctcagaaagcactatttctggagccaaggaggagactgtggccaccctcaccatgaccgaccgggtgcccagtcctctctccacagtggtatccacagccacaggcaatttcctcaaccgcctggtccccgccgggacctggaagcctgggacagcagggaacatctcccatgtggccgagggggacaaaccgcagcacagagccaccatctgcctgagcaagatggatatcgcctgggtgatcctggccatcagcgtgcccatctcctcctgctcagatcctatcacctgaaagcatgcccttccacaaatgtgaatacagtactcagggctccatctgaaaatggagtgacccctcttcttcctgtcacacatctgacaagccatggatgactccccagtgacattcctgggaacccaagagagcttaattcccaactctgttttaaaactcaaggaaattgggactccatgacctcctccagagtcttgatggctactgcctcaggagaaacagagcagttgaagcttttcaactaaatgggaaagggaacagttaacatcttgtgtttgcatagagctgcgcagtttacaaaacgcttctgcatatgtcatctctataccctccggtgttcaggacaatacaggatagtggatatcaacttgaagatcatcaagacctggactcaagttgcagtaattagttgggtgatcaagatcaatactattagcttctatgaccttcagttacctgttctgaaaatgggaagagcaatagtgccttcctcaggcagttatcatgtgggctaaataagcttcaaagtgcctgggtcagtgctgggaatatagtagagaccctgtaagtctgacttgtacttttctttcttggatgaaaggtgagaccactgaaatagtgaatgttctaacccctaggtggagctttgtccttgagccacccaatagtcatataacacagtttttctttctagatctctcttgtagaggatgttgggagaacaagaagagaactgtcattaattaagcatccattgtgtgtcaggcattgtgtttggcattttgcatccatgatctctttaattctcattacaagcctatgaagttcatcttaagtgactttccaggtggaatacatggcagagtcacaatttgaacctaggtctttctgtagccaggctggctttcagtaagtaaatgaaatggtgtttgagaagcactggaaactccctgagagaaatataatcaggccaggagcatgaacatgtgaggggaagacagcgtggagcagaactttctgttctgactcccaggccttcccgcagggcaggatctctgcatctggcattctaacaacatgggctgttagagcactggactcgggggcggaggacttggattctgcaacctctaccagcccaggttagcagcatggccttgagcaagttcacctctctaggtttccatgccccaccttctagaataagaatgtaggctgggggaaggggctgatttgtttcagcacctactgtgcaccagggacaatttgaagtgctggcagatgtatgactgcatttaatcttcccaaggaagctgacgctgagagaggttaagtaacttactcaagtcatgcaagtaatagattgtcacctagattctaattctaaattcgatgtcccttttgccctattgactaggcctaagatggcatctgtcactttgattctgtttgcttataactgctcagtagatcagaggcacaaatatctttctaccttagagaggcgtgcaaactatacaaatctgactcacagatacacttttcccctgccagcctgtgttctgtgtctatggcagtgttttgtggggcatgatgggatgtgcccctacaggctgataactgaagagctgttctgtttgtcctgattgctcccctccctctagctctaactctaccaaaactgagctggagctgaggaaacagcacttttcccacttcccagatggttccctctttatggcttctgtcacaccagctagaactcctccaggtgtttcaccatgccagctgcaggagcagagtgaaaggtagtgacaatgaagaacagagacaccagagaaggggacaggggacccgggatcttgtcccagctctgccactcacatacctgtgacctgtggcaaggcggccagcactttaggccacagtttttcctctagaataaggaggcggcctgaattagcaagtttcaggctgagcaccacagccccctccttgcccctttcctcttcaaccatctgaagaaagggttttttggaaggaagggagggaaagaggaaagagatccacaatatttgaaaagttctgtaccagctaatctctcaaatccccgttagccctaacactcagaaattccttctatgttttaaagattttttaaaaaggatctagaagactgaaaagcaaattagaagtctttttgatcaaagcagataagataaagtagaaacttaccctatctcctaaccttgtacagagacctttccaggttgagaggccagcaaggctggcagctggaaagaaagctacagaattccccaggcagcctacagggccctgggctctgggctgtgaggtctcagcctatacaggtgccagcttgtgcaactgccccacaccctggcatgaacccacccctgatgctggccagaccctcaggctgctgcgaacagagctggccctctgccaacccccggtgctggcctctctggacagcccagcctgggaccccgactccccagcacagagatggttggcaccaccaggatgtcagatgtggctcttggcttcagctctcctcatccccagaggctctggtgatgatgaacctggggcaggatatactcagtcctcacttcatggcttctccccaagaggcctctgtcacccttgtccttgtgttacccttctgcagtgtgaatctggacaggccaccccacctctctgacctcagaagccttccctgctcacaagccactcaattcacacatggttaatcaacaatatcgagacataattcttcctcctgggccctgggagtctcagggatgaacagacagggtcacatgtcacactgtgctcagtcaagctgtgtggagcccacctcaggccatctgtgcaggtgggcttttgcatcaatctaaggcaggaatcagctggtaagagcatagactggccaggtgcagtggctcacacctgtaatcaatcccagcactttaggaggctgaggcaggcggattacctgaggtcaggagttcgagaccagcctaaccaacatggcaaaaccctgtctctactaaaaatacaaaaattagccagacatggtggcaggcacctgtaatatcccagcttcttgggaggctgaggcaggagaatcgcttgatcccaggaggcagaggttgcagtgagccaagattgcgccactgcactccagcctgggcaacggagctagactccatc

SEQ ID NO: 302011 - protein, 571 aa, Artificial Sequence
  derived and/or modified sequence
MNQLRGKKSCHTGLGRSAGWNIPIGLLYCDLPEPRKPLEKAVANFFSGSCAPCADGTDFPQLCQLCPGCGCSTLNQYFGYSGAFKCLKDGAGDVAFVKHSTIFENLANKADRDQYELLCLDNTRKPVDEYKDCHLAQVPSHTVVARSMGGKEDLIWELLNQAQEHFGKDKSKEFQLFSSPHGKDLLFKDSAHGFLKVPPRMDAKMYLGYEYVTAIRNLREGTCPEAPTDECKPVKWCALSHHERLKCDEWSVNSVGKIECVSAETTEDCIAKIMNGEADAMSLDGGFVYIAGKCGLVPVLAENYNKSDNCEDTPEAGYFAIAVVKKSASDLTWDNLKGKKSCHTAVGRTAGWNIPMGLLYNKINHCRFDEFFSEGCAPGSKKDSSLCKLCMGSGLNLCEPNNKEGYYGYTGAFRCLVEKGDVAFVKHQTVPQNTGGKNPDPWAKNLNEKDYELLCLDGTRKPVEEYANCHLARAPNHAVVTRKDKEACVHKILRQQQHLFGSNVTDCSGNFCLFRSETKDLLFRDDTVCLAKLHDRNTYEKYLGEEYVKAVGNLRKCSTSSLLEACTFRRP

SEQ ID NO: 302012 - protein, 698 aa, Artificial Sequence
  derived and/or modified sequence
MRLAVGALLVCAVLGLCLAVPDKTVRWCAVSEHEATKCQSFRDHMKSVIPSDGPSVACVKKASYLDCIRAIAANEADAVTLDAGLVYDAYLAPNNLKPVVAEFYGSKEDPQTFYYAVAVVKKDSGFQMNQLRGKKSCHTGLGRSAGWNIPIGLLYCDLPEPRKPLEKAVANFFSGSCAPCADGTDFPQLCQLCPGCGCSTLNQYFGYSGAFKCLKDGAGDVAFVKHSTIFENLANKADRDQYELLCLDNTRKPVDEYKDCHLAQVPSHTVVARSMGGKEDLIWELLNQAQEHFGKDKSKEFQLFSSPHGKDLLFKDSAHGFLKVPPRMDAKMYLGYEYVTAIRNLREGTCPEAPTDECKPVKWCALSHHERLKCDEWSVNSVGKIECVSAETTEDCIAKIMNGEADAMSLDGGFVYIAGKCGLVPVLAENYNKSDNCEDTPEAGYFAIAVVKKSASDLTWDNLKGKKSCHTAVGRTAGWNIPMGLLYNKINHCRFDEFFSEGCAPGSKKDSSLCKLCMGSGLNLCEPNNKEGYYGYTGAFRCLVEKGDVAFVKHQTVPQNTGGKNPDPWAKNLNEKDYELLCLDGTRKPVEEYANCHLARAPNHAVVTRKDKEACVHKILRQQQHLFGSNVTDCSGNFCLFRSETKDLLFRDDTVCLAKLHDRNTYEKYLGEEYVKAVGNLRKCSTSSLLEACTFRRP

SEQ ID NO: 302013 - DNA, 1716 bp, Artificial Sequence
  derived and/or modified sequence
atgaaccagctgagaggcaagaagagctgccacaccggcctgggcagaagcgccggctggaacatccccatcggcctgctgtactgcgacctgcccgagcccagaaagcccctggagaaggccgtggccaacttcttcagcggcagctgcgccccctgcgccgacggcaccgacttcccccagctgtgccagctgtgccccggctgcggctgcagcaccctgaaccagtacttcggctacagcggcgccttcaagtgcctgaaggacggcgccggcgacgtggccttcgtgaagcacagcaccatcttcgagaacctggccaacaaggccgacagagaccagtacgagctgctgtgcctggacaacaccagaaagcccgtggacgagtacaaggactgccacctggcccaggtgcccagccacaccgtggtggccagaagcatgggcggcaaggaggacctgatctgggagctgctgaaccaggcccaggagcacttcggcaaggacaagagcaaggagttccagctgttcagcagcccccacggcaaggacctgctgttcaaggacagcgcccacggcttcctgaaggtgccccccagaatggacgccaagatgtacctgggctacgagtacgtgaccgccatcagaaacctgagagagggcacctgccccgaggcccccaccgacgagtgcaagcccgtgaagtggtgcgccctgagccaccacgagagactgaagtgcgacgagtggagcgtgaacagcgtgggcaagatcgagtgcgtgagcgccgagaccaccgaggactgcatcgccaagatcatgaacggcgaggccgacgccatgagcctggacggcggcttcgtgtacatcgccggcaagtgcggcctggtgcccgtgctggccgagaactacaacaagagcgacaactgcgaggacacccccgaggccggctacttcgccatcgccgtggtgaagaagagcgccagcgacctgacctgggacaacctgaagggcaagaagagctgccacaccgccgtgggcagaaccgccggctggaacatccccatgggcctgctgtacaacaagatcaaccactgcagattcgacgagttcttcagcgagggctgcgcccccggcagcaagaaggacagcagcctgtgcaagctgtgcatgggcagcggcctgaacctgtgcgagcccaacaacaaggagggctactacggctacaccggcgccttcagatgcctggtggagaagggcgacgtggccttcgtgaagcaccagaccgtgccccagaacaccggcggcaagaaccccgacccctgggccaagaacctgaacgagaaggactacgagctgctgtgcctggacggcaccagaaagcccgtggaggagtacgccaactgccacctggccagagcccccaaccacgccgtggtgaccagaaaggacaaggaggcctgcgtgcacaagatcctgagacagcagcagcacctgttcggcagcaacgtgaccgactgcagcggcaacttctgcctgttcagaagcgagaccaaggacctgctgttcagagacgacaccgtgtgcctggccaagctgcacgacagaaacacctacgagaagtacctgggcgaggagtacgtgaaggccgtgggcaacctgagaaagtgcagcaccagcagcctgctggaggcctgcaccttcagaagaccctag

SEQ ID NO: 302014 - DNA, 2097 bp, Artificial Sequence
  derived and/or modified sequence
atgagactggccgtgggcgccctgctggtgtgcgccgtgctgggcctgtgcctggccgtgcccgacaagaccgtgagatggtgcgccgtgagcgagcacgaggccaccaagtgccagagcttcagagaccacatgaagagcgtgatccccagcgacggccccagcgtggcctgcgtgaagaaggccagctacctggactgcatcagagccatcgccgccaacgaggccgacgccgtgaccctggacgccggcctggtgtacgacgcctacctggcccccaacaacctgaagcccgtggtggccgagttctacggcagcaaggaggacccccagaccttctactacgccgtggccgtggtgaagaaggacagcggcttccagatgaaccagctgagaggcaagaagagctgccacaccggcctgggcagaagcgccggctggaacatccccatcggcctgctgtactgcgacctgcccgagcccagaaagcccctggagaaggccgtggccaacttcttcagcggcagctgcgccccctgcgccgacggcaccgacttcccccagctgtgccagctgtgccccggctgcggctgcagcaccctgaaccagtacttcggctacagcggcgccttcaagtgcctgaaggacggcgccggcgacgtggccttcgtgaagcacagcaccatcttcgagaacctggccaacaaggccgacagagaccagtacgagctgctgtgcctggacaacaccagaaagcccgtggacgagtacaaggactgccacctggcccaggtgcccagccacaccgtggtggccagaagcatgggcggcaaggaggacctgatctgggagctgctgaaccaggcccaggagcacttcggcaaggacaagagcaaggagttccagctgttcagcagcccccacggcaaggacctgctgttcaaggacagcgcccacggcttcctgaaggtgccccccagaatggacgccaagatgtacctgggctacgagtacgtgaccgccatcagaaacctgagagagggcacctgccccgaggcccccaccgacgagtgcaagcccgtgaagtggtgcgccctgagccaccacgagagactgaagtgcgacgagtggagcgtgaacagcgtgggcaagatcgagtgcgtgagcgccgagaccaccgaggactgcatcgccaagatcatgaacggcgaggccgacgccatgagcctggacggcggcttcgtgtacatcgccggcaagtgcggcctggtgcccgtgctggccgagaactacaacaagagcgacaactgcgaggacacccccgaggccggctacttcgccatcgccgtggtgaagaagagcgccagcgacctgacctgggacaacctgaagggcaagaagagctgccacaccgccgtgggcagaaccgccggctggaacatccccatgggcctgctgtacaacaagatcaaccactgcagattcgacgagttcttcagcgagggctgcgcccccggcagcaagaaggacagcagcctgtgcaagctgtgcatgggcagcggcctgaacctgtgcgagcccaacaacaaggagggctactacggctacaccggcgccttcagatgcctggtggagaagggcgacgtggccttcgtgaagcaccagaccgtgccccagaacaccggcggcaagaaccccgacccctgggccaagaacctgaacgagaaggactacgagctgctgtgcctggacggcaccagaaagcccgtggaggagtacgccaactgccacctggccagagcccccaaccacgccgtggtgaccagaaaggacaaggaggcctgcgtgcacaagatcctgagacagcagcagcacctgttcggcagcaacgtgaccgactgcagcggcaacttctgcctgttcagaagcgagaccaaggacctgctgttcagagacgacaccgtgtgcctggccaagctgcacgacagaaacacctacgagaagtacctgggcgaggagtacgtgaaggccgtgggcaacctgagaaagtgcagcaccagcagcctgctggaggcctgcaccttcagaagaccctag

SEQ ID NO: 302015 - DNA, 1716 bp, Artificial Sequence
  derived and/or modified sequence
atgaaccagctgcgaggtaagaagtcctgtcacacaggactcgggagatcagctggatggaacattcccattggtctcctttactgcgatcttccagagcctagaaagcccctggaaaaggccgtggccaacttcttctcaggtagttgcgctccatgcgctgacggaacagacttcccccaactttgtcagctgtgtcccggttgcgggtgttccaccttgaatcaatatttcggatactcaggggccttcaaatgcttaaaggatggagctggagatgttgcatttgtgaagcacagcactatttttgagaatctggccaacaaggcggatcgtgatcagtatgagcttctctgtctcgataatacccggaagcctgtggacgagtacaaagactgccatctcgcacaggtcccgagccacacagttgttgctcgctctatgggcggaaaggaggacctgatttgggagttgttaaaccaggcccaggagcactttggcaaggacaaatccaaggaattccagttgtttagctctcctcatggaaaggaccttctgttcaaggacagcgcacacggatttctgaaggtcccccctcggatggatgccaagatgtacctggggtatgagtatgttaccgccatccgaaatcttcgggagggcacttgtcctgaggcgcccacagacgagtgcaagccggttaaatggtgtgcgctgagtcaccacgagcggctgaagtgcgatgaatggagcgtcaactctgtggggaaaatagaatgtgtgtctgcagagaccaccgaggactgtatcgccaaaatcatgaacggcgaggctgacgcaatgagtctggacggggggttcgtgtacattgctggaaaatgtggcttagtaccagtactcgccgaaaactacaacaagtccgataattgtgaggacactcctgaggccggatacttcgccatagccgttgtaaagaaaagtgcttcagacctcacttgggacaatttgaagggcaaaaaatcctgtcacaccgctgtcggcaggactgccggatggaatatacccatgggattactgtataacaagatcaaccattgtagatttgatgaattctttagtgagggctgcgccccagggagcaaaaaggatagctcactttgtaagctgtgtatggggagcgggttgaacctctgtgagcctaacaataaagaaggctactatggatacaccggcgcctttagatgcctggtggaaaagggagatgtagcattcgtgaagcatcaaactgtaccccagaacacaggaggaaagaacccagacccctgggcaaaaaacctgaatgaaaaggactacgagttgctgtgcctggatggaaccaggaagcctgtggaggagtatgccaactgccacctcgctagggctcccaatcacgctgtggtcactcgcaaagataaggaagcttgtgtgcacaagatcttgcgccagcaacaacacctgttcggctccaatgtaaccgattgttccgggaatttctgcttgttccgtagcgaaacgaaagatttactttttagggacgacacagtctgcctcgccaagctgcatgaccggaacacatatgagaaatatttgggcgaggaatacgtgaaggcagtaggcaatttaagaaaatgtagcacttcgtccttacttgaagcttgcacatttcggcgaccctag

SEQ ID NO: 302016 - DNA, 2097 bp, Artificial Sequence
  derived and/or modified sequence
atgcgtctggccgtcggcgcacttcttgtgtgtgctgtcctgggactgtgcctggctgtccccgataagaccgtaaggtggtgtgccgtgtccgagcatgaggcaacaaaatgccagtcgtttcgagaccacatgaaaagcgtgatccccagtgatggaccttcggtagcttgtgtcaagaaagcgtcatatctggactgcataagagccattgcggcgaatgaggccgatgcagtgaccttggacgccggattggtatatgacgcttatctagcgcccaacaatttgaagccagtggtggcagaattctacggctcgaaggaggaccctcaaactttttactacgctgtggctgtggtcaaaaaagactcaggtttccaaatgaatcagttgcgaggcaagaaatcatgtcacacaggcttagggaggtccgctgggtggaacatcccaatcggcctgttatactgtgacctgccagagccccggaaaccgctggagaaagctgtagcgaacttcttcagtgggagctgcgcgccctgcgcagacgggactgactttccacagctctgtcaactctgcccaggatgtgggtgctcgacactcaatcaatactttggctattctggggctttcaagtgtcttaaagatggagccggggatgtagcatttgtgaaacattcaaccatttttgagaatcttgccaacaaagccgacagagatcagtacgagctgctgtgtttggacaacacgcgcaaaccggtggacgaatacaaggactgccatctggcccaggtccctagtcataccgtagtagcacggagtatgggcgggaaagaagacttgatctgggagcttctgaatcaggcgcaggaacattttggtaaagataaaagcaaggagtttcagcttttttcgtcccctcatggaaaagatctactctttaaggacagtgcgcacggttttctgaaggtccccccaaggatggacgctaagatgtatttgggctatgaatatgtgaccgctataaggaacttgagagaggggacctgccccgaggctcccaccgatgaatgcaagccggtgaagtggtgcgcactaagtcaccacgagaggttgaaatgcgatgagtggtcagtgaatagcgtggggaagatagagtgcgtatcggctgagaccaccgaagactgcatagccaagatcatgaacggtgaggctgatgccatgtcactcgatgggggctttgtctatatagctggaaagtgcgggcttgtgcctgtgctggccgaaaactacaacaagtccgataactgcgaagataccccggaagcaggttattttgccatcgctgtggtgaagaaatctgccagcgatttaacatgggacaatttgaaaggtaagaaaagttgccacactgccgtggggcggaccgccggctggaatatcccaatgggactcttgtataacaaaataaatcactgtcgattcgacgaatttttctcagagggatgcgctcccgggtctaagaaagactctagtctctgcaaattatgtatggggtcaggcctgaatctgtgcgaacctaacaataaagaaggatactacggttataccggggcattcaggtgtctggtggagaagggggacgttgccttcgtcaagcaccaaactgtaccccagaacacaggtgggaagaaccccgacccatgggcaaaaaatctcaacgaaaaagactacgagctgttatgtctagatggtactcggaaacctgtagaagagtatgccaactgtcatcttgccagagcccccaaccacgcggtagtcacccgcaaggataaggaagcgtgtgtgcacaaaatcctccgtcagcagcaacacctattcgggtcaaacgtaactgactgtagtggcaacttctgcctctttcgttcggaaactaaagaccttctgtttcgtgacgacaccgtctgcttggctaaactgcacgatcggaacacatatgagaagtatcttggggaggaatatgtgaaagctgtaggaaatcttcgtaaatgctcaacttcttcacttttggaagcctgcactttccgtaggccatag

SEQ ID NO: 302017 - DNA, 1716 bp, Artificial Sequence
  derived and/or modified sequence
atgaaccagctgcggggcaagaagagctgccacacaggcctgggccgctctgctggctggaacatccccatcggcctgctgtactgtgacctgcctgagcccaggaagcccctggagaaggctgtggccaacttcttcagcggcagctgtgccccctgtgctgatggaacagacttcccccagctgtgccagctgtgccccggctgcggctgcagcaccctgaaccagtacttcggctacagcggggccttcaagtgcctgaaggatggagctggagatgtggcctttgtgaagcacagcaccatctttgagaacctggccaacaaggctgaccgggaccagtatgagctgctgtgcctggacaacaccaggaagcctgtggatgagtacaaggactgccacctggcccaggtgcccagccacacagtggtggcccgctccatgggcggcaaggaggacctgatctgggagctgctgaaccaggcccaggagcactttgggaaggacaagagcaaggagttccagctgttcagcagcccccacggcaaggacctgctcttcaaggacagcgcccacggcttcctgaaggtgccccccaggatggatgccaagatgtacctgggctatgaatatgtgacagccatccggaacctgcgggagggcacctgcccagaggcccccacagatgagtgcaagcctgtgaagtggtgtgccctgagccaccacgagcggctgaagtgtgatgagtggagcgtgaacagcgtgggcaagattgaatgtgtgtctgctgagaccacagaggactgcatcgccaagatcatgaatggagaggctgatgccatgagcctggatggcggctttgtgtacatcgccgggaaatgtggcctggtgcctgtgctggccgagaactacaacaagagtgacaactgtgaggacaccccagaggccggctactttgccatcgctgtggtgaagaagagcgccagtgacctgacctgggacaacctgaagggcaagaagagctgccacacagctgtgggccgcacagctggctggaacatccccatgggcctgctgtacaacaagatcaaccactgccgctttgatgagttcttcagcgagggctgtgcccctggcagcaagaaggacagcagcctgtgcaagctgtgcatgggcagcggcctgaacctgtgtgagcccaacaacaaggagggctactacggctacaccggggccttccgctgcctggtggagaagggagatgtggcctttgtgaagcaccagacagtgccccagaacacaggaggcaagaacccagacccctgggccaagaacctgaatgagaaggactatgagctgctgtgcctggatggcaccaggaagcctgtggaggagtatgccaactgccacctggcccgggcccccaaccacgctgtggtgaccaggaaggacaaggaggcctgtgtgcacaagatcctgcggcagcagcagcacctgtttggcagcaatgtgacagactgcagcggcaacttctgcctcttccgctctgagaccaaggacctgctcttcagagatgacacagtgtgcctggccaagctgcatgacaggaacacctatgagaagtacctgggggaggagtatgtgaaggctgtgggcaacctgaggaagtgcagcaccagcagcctgctggaggcctgcaccttcagaagaccctag

SEQ ID NO: 302018 - DNA, 2097 bp, Artificial Sequence
  derived and/or modified sequence
atgaggctggccgtgggcgccctgctggtgtgtgctgtgctgggcctgtgcctggccgtgcctgacaagacagtgcgctggtgtgctgtgtctgaacatgaggccaccaagtgccagagcttccgggaccacatgaagagcgtcatccccagtgatggccccagcgtggcctgtgtgaagaaggccagctacctggactgcatccgggccatcgccgccaatgaagcagatgctgtgaccctggatgctggcctggtgtatgatgcctacctggcccccaacaacctgaagcctgtggtggccgagttctacggcagcaaggaggacccccagaccttctactatgctgtggccgtggtgaagaaggacagcggcttccagatgaaccagctgcggggcaagaagagctgccacacaggcctgggccgctctgctggctggaacatccccatcggcctgctgtactgtgacctgcctgagcccaggaagcccctggagaaggctgtggccaacttcttcagcggcagctgtgccccctgtgctgatggaacagacttcccccagctgtgccagctgtgccccggctgcggctgcagcaccctgaaccagtacttcggctacagcggggccttcaagtgcctgaaggatggagctggagatgtggcctttgtgaagcacagcaccatctttgagaacctggccaacaaggctgaccgggaccagtatgagctgctgtgcctggacaacaccaggaagcctgtggatgagtacaaggactgccacctggcccaggtgcccagccacacagtggtggcccgctccatgggcggcaaggaggacctgatctgggagctgctgaaccaggcccaggagcactttgggaaggacaagagcaaggagttccagctgttcagcagcccccacggcaaggacctgctcttcaaggacagcgcccacggcttcctgaaggtgccccccaggatggatgccaagatgtacctgggctatgaatatgtgacagccatccggaacctgcgggagggcacctgcccagaggcccccacagatgagtgcaagcctgtgaagtggtgtgccctgagccaccacgagcggctgaagtgtgatgagtggagcgtgaacagcgtgggcaagattgaatgtgtgtctgctgagaccacagaggactgcatcgccaagatcatgaatggagaggctgatgccatgagcctggatggcggctttgtgtacatcgccgggaaatgtggcctggtgcctgtgctggccgagaactacaacaagagtgacaactgtgaggacaccccagaggccggctactttgccatcgctgtggtgaagaagagcgccagtgacctgacctgggacaacctgaagggcaagaagagctgccacacagctgtgggccgcacagctggctggaacatccccatgggcctgctgtacaacaagatcaaccactgccgctttgatgagttcttcagcgagggctgtgcccctggcagcaagaaggacagcagcctgtgcaagctgtgcatgggcagcggcctgaacctgtgtgagcccaacaacaaggagggctactacggctacacaggagccttccgctgcctggtggagaagggagatgtggcctttgtgaagcaccagacagtgccccagaacacaggaggcaagaacccagacccctgggccaagaacctgaatgagaaggactatgagctgctgtgcctggatggcaccaggaagcctgtggaggagtatgccaactgccacctggcccgggcccccaaccacgctgtggtgaccaggaaggacaaggaggcctgtgtgcacaagatcctgcggcagcagcagcacctgtttggcagcaatgtgacagactgcagcggcaacttctgcctcttccgctctgagaccaaggacctgctcttcagagatgacacagtgtgcctggccaagctgcatgacaggaacacctatgagaagtacctgggggaggagtatgtgaaggctgtgggcaacctgaggaagtgcagcaccagcagcctgctggaggcctgcaccttccggcggccctag

SEQ ID NO: 302019 - DNA, 1716 bp, Artificial Sequence
  derived and/or modified sequence
atgaaccagctgcggggcaagaagagctgccacaccggcctgggccggagcgctggttggaacatccctatcgggctgctctattgcgatctacccgaacctaggaaaccccttgaaaaggccgtggctaacttcttttcaggctcgtgcgccccatgcgctgatggaacagacttcccacagctttgccagctgtgccccggttgcggctgttccacgctgaatcagtattttgggtatagcggggcttttaagtgtctgaaggatggcgccggggacgtcgcatttgtgaaacattctaccattttcgagaatctggccaataaggcagatcgcgatcagtacgagctgctttgccttgataatactcgaaaaccagttgacgaatacaaggactgccacttggctcaggtccccagccatacagtcgtggccaggtctatgggtgggaaggaagacctgatctgggagctgctgaaccaagcccaggaacacttcggcaaggacaagtctaaggagttccagctatttagttcaccacacgggaaagacttgttattcaaggactctgcccacggcttcctgaaggttccgccgcgcatggatgccaagatgtacttaggatatgagtacgtgaccgccattaggaatctccgggaaggcacttgcccagaagcccccaccgacgaatgtaagcccgtgaagtggtgtgccctgtcccaccacgaacgcctcaagtgcgacgaatggtctgtaaattccgtagggaagattgaatgcgtctctgccgaaacgacggaagactgcatagcgaagattatgaatggtgaagctgatgccatgagtttggatgggggtttcgtctatatcgctggcaagtgcggactcgtgccagtattagccgagaactacaataagagcgacaattgcgaagacacccccgaggccggctattttgctatagctgttgtgaaaaaatccgcctcagacctcacatgggataatctgaaaggcaaaaagtcttgtcacacagcagttgggcggacagctggatggaatattcctatgggtttgttgtataacaagatcaaccactgccgcttcgacgaatttttcagtgaaggttgtgctcccggctccaaaaaagatagctccctctgcaagctgtgcatggggtcaggtctgaacctgtgcgagccaaacaacaaggaaggttattacggctatacaggagcattccggtgcctggtggagaagggcgacgtggcttttgtgaaacaccagacagtgccccagaacactggcggtaaaaatccagacccgtgggccaagaatctgaacgaaaaagattacgagctgctgtgccttgacggaacccgcaagcctgtggaagagtacgctaactgccacttggcccgagcgccaaatcacgcggttgtgacccgcaaggacaaggaggcctgtgtccacaagatccttcggcaacaacaacacctgttcgggtccaatgtgaccgactgttctggcaacttctgcctgttccgttctgagacaaaggatctgctctttagagatgacactgtgtgtctggcaaagcttcatgatcgcaatacctatgagaaatatctcggggaggagtatgttaaagccgtgggaaacctacggaaatgtagcacctcaagtctccttgaagcttgcacgttcagacggccgtag

SEQ ID NO: 302020 - DNA, 2097 bp, Artificial Sequence
  derived and/or modified sequence
atgcggctggccgtgggcgccctgctggtgtgcgccgtgctgggcctgtgccttgccgtgccagacaaaacagtccgctggtgtgcagtgtccgagcacgaggccacaaaatgccaaagttttagagaccacatgaaatccgtgataccttcagatgggccatccgttgcctgcgtgaagaaggcatcatacctggattgtatccgcgccattgctgcgaatgaagccgacgcagtgacactggacgccggacttgtgtatgacgcctacctggcccccaataaccttaagccggtcgtggctgagttttacggcagtaaagaggacccccagaccttctactacgccgttgccgtagttaaaaaggactccgggtttcagatgaatcagctgcggggtaagaaaagctgccacacagggctcggaagatccgcaggctggaacattcctatagggttactctattgcgatctgcccgaacctcggaagcccctggaaaaagccgtggccaatttcttttcgggatcttgtgccccctgtgcagacggaacagatttcccacagctgtgtcagttatgtcccgggtgcggctgctctaccctcaatcaatacttcggctattcgggcgccttcaagtgccttaaggacggggccggcgacgtggcctttgttaagcactctaccatcttcgagaacctcgcaaacaaagcggaccgggatcagtacgagctcttgtgccttgacaacacccgcaagccagtcgacgagtacaaagattgccatctggcacaggtgccatcccacaccgtggtcgcccgctctatgggcggtaaggaggatctcatctgggagctgctgaaccaggcccaagagcatttcggcaaagataagtcaaaagaattccagcttttcagcagcccacatggcaaggacctactgttcaaggactccgcacatggattcttaaaggttcccccacggatggacgctaaaatgtatctgggatacgaatacgtcacagccatacgcaacctcagagaaggaacgtgtcctgaggcccctacagatgaatgtaagcctgtgaagtggtgcgctctgagtcaccacgagagattgaagtgcgatgagtggagcgtaaacagtgtcggaaagatagagtgtgtaagcgctgagaccacggaagactgtatcgcaaagatcatgaatggtgaggccgacgccatgagcttggatggaggatttgtatacatagccgggaagtgcggtctcgtgccagtcctggctgaaaactataataaatccgacaactgcgaagacacacccgaagccggttatttcgccattgccgtggttaaaaaatctgcgagtgatcttacttgggacaacctgaagggaaagaagagctgccataccgccgttggccgaactgccgggtggaatatccccatgggcttactgtataacaagattaatcattgtcggttcgacgaattcttcagtgaaggatgcgcccctggttccaagaaagacagtagcctctgcaagctgtgtatggggagtggacttaacctatgcgaaccgaacaataaagaaggctactacggctacacaggtgccttcaggtgcctggtcgaaaaaggggacgttgccttcgtgaagcatcagaccgtgccacaaaatacgggcggcaaaaaccccgatccatgggccaagaatttgaacgagaaggactacgaactcctgtgcctggacggcacaaggaagccagtcgaggaatatgcaaattgccacctagctagggcacccaatcatgctgtggtcacgagaaaagacaaggaggcttgtgtgcacaagatcctcagacagcagcagcatcttttcgggtccaacgtaaccgactgcagtgggaatttctgcctgtttagaagcgaaacaaaagacctcctgtttagggatgacaccgtgtgcttggcaaagctgcatgaccggaacacgtacgagaagtacttaggcgaagaatatgtgaaggcggtgggaaatctcaggaaatgctctactagctcccttttagaagcgtgtactttcaggcgaccttag

SEQ ID NO: 302021 - DNA, 1716 bp, Artificial Sequence
  derived and/or modified sequence
atgaaccaattgagaggcaagaaaagttgtcacactggtttggggagatctgcaggctggaatattccaatcggcctcctgtactgtgacctgccagagccacgaaaaccgctggaaaaggctgtggctaacttcttctctggttcttgtgcaccatgcgccgacggaactgattttcctcaactctgtcagttgtgccctgggtgtggctgctccacactcaaccagtatttcgggtactctggcgcattcaaatgccttaaagacggggcaggcgatgtggcatttgtcaaacactccaccatctttgagaaccttgctaataaggccgatagggatcagtatgaactcttgtgtctggataatactcgaaaacctgttgatgagtacaaagattgtcacttggcccaagtgccatcgcacacagttgtagccaggtctatgggaggtaaagaggatcttatctgggagctgttgaatcaggctcaagagcatttcggcaaagataagtccaaagaattccagttgttctcgtcccctcatggaaaggacctcctcttcaaggatagcgctcatgggtttctaaaagtcccacccaggatggatgcaaaaatgtacttgggttacgagtatgtgacagcgattagaaacctgagagagggaacctgtccagaggctccgactgatgaatgcaagcccgttaaatggtgtgcattatcccatcacgagaggttgaagtgcgatgagtggtctgttaattctgtcggtaaaatagaatgtgtcagcgcggaaaccactgaggactgcattgcaaagatcatgaacggggaggcagacgcaatgagtttggacggcggtttcgtctacattgccggtaagtgcggactggtgccagtcctggcagaaaattataataaatccgataactgcgaagacacccccgaggctgggtatttcgcaatcgccgtcgttaaaaagtccgcttcagaccttacatgggataatctgaagggcaaaaagagctgtcatacagcagtcggacgcactgccggttggaatatccctatggggctgctgtacaacaagattaaccactgcagatttgacgaattttttagcgaaggatgcgccccaggatccaagaaagactcttcactgtgtaaactgtgtatggggtctggactgaatttatgcgagcccaacaacaaagagggttattacgggtataccggcgctttcaggtgcctggtggagaagggggacgtggctttcgtcaagcaccagacggtcccccagaatacagggggaaagaaccccgatccttgggcaaaaaacttgaacgagaaggactatgaactgctgtgcctcgacggcaccaggaagcccgtggaggagtatgccaattgccatttggctagagcccctaatcatgcagtcgtcacaaggaaggacaaggaggcatgtgtacacaaaattctcagacagcagcagcacctatttgggtccaacgtcaccgactgttctggaaatttctgtctgtttagaagcgagactaaggatctgttatttagagatgacacagtctgtctggcaaagttgcacgacaggaacacatacgaaaaatatttaggggaagagtacgtcaaggctgtcggtaacctgcgcaagtgcagcaccagctctctgctggaggcatgtacatttcgtcgcccttag

SEQ ID NO: 302022 - DNA, 2097 bp, Artificial Sequence
  derived and/or modified sequence
atgcggctcgccgtcggggctctcctggtgtgcgctgttcttggcttgtgtcttgccgtgccggacaagaccgtacgatggtgcgccgtatcggaacacgaagcaacgaagtgccaatcttttagagatcacatgaaaagtgtcatcccatccgacggaccttcagtggcctgcgtgaagaaggccagttatctcgactgtattagagccattgcggctaacgaagcagatgcagtgacactggatgccggtctcgtatacgacgcgtatctggcacccaacaatctcaagcctgtggtcgcagagttttatgggtctaaggaggaccctcagacattttactatgccgttgcagtggtgaaaaaagatagcggattccagatgaaccaacttagggggaagaaatcctgccataccggtctgggtaggagcgccggatggaatatacctattggcctcctctactgtgacttgcctgaaccacgtaagcctcttgagaaggccgtcgccaatttctttagcggcagctgcgctccttgtgcagatgggaccgactttccccagctgtgccaattatgtcctggatgcgggtgcagcacccttaaccaatattttggatattcaggggcatttaagtgcctgaaagacggggcaggcgatgtggcattcgtaaagcatagcaccattttcgaaaacttagccaacaaagcagatagagaccagtacgaactgctgtgcctggataacacaaggaaacctgtcgatgaatacaaagattgtcatctcgcgcaagtacccagtcacactgttgtggccagatccatgggaggaaaggaagacctcatctgggaactgttgaaccaggcccaggaacactttggcaaggacaagtcaaaggagtttcagttgttcagcagcccgcacggtaaggacctcctgtttaaagatagtgctcacggctttctcaaagtgccgccaagaatggatgcgaagatgtatctcggctacgaatacgtaactgcgatcaggaacttaagagagggcacctgccctgaggctcccaccgacgaatgcaagccagtgaaatggtgcgcactgagccaccatgagcgtctcaagtgtgacgaatggagcgtcaattcagtgggcaagatagaatgcgtgtctgccgaaaccactgaggactgcatcgctaaaattatgaacggggaggcagacgccatgtccctggacggaggttttgtttatattgcaggcaagtgcggccttgtgcctgtgttagcagaaaattacaacaaatccgacaattgcgaggacacacctgaagcagggtacttcgccattgccgtggtcaagaagagcgcctctgacctgacctgggacaatttgaaaggaaagaagtcctgccacacagccgtaggccgtactgcaggctggaacattccgatgggactgctgtacaacaagattaaccattgtcggtttgatgaatttttcagcgaaggatgtgcgccaggatccaaaaaggattcctcactgtgcaaactgtgcatgggcagcggactcaacctgtgcgaacctaacaacaaggaggggtactacggctatacgggcgctttccggtgtctggtggaaaaaggcgacgtggctttcgttaagcaccaaaccgtccctcaaaatactggcggaaaaaaccctgacccttgggcgaagaacttgaacgagaaagactatgagctactttgcctcgacgggacccgcaaacccgtggaggagtacgccaattgccacctcgccagagctcccaatcatgcagtagtgacaaggaaagacaaggaagcctgtgtgcacaaaatccttcgccagcagcaacatctgttcggttccaacgtcacagactgctcaggcaatttttgtttgttcagatctgagactaaagacctcctcttcagagatgatactgtgtgcctggctaagctccatgatcggaacacctatgaaaaatatttgggagaggagtatgtgaaggccgtcggaaacctccgaaaatgttctacctcgagtcttctggaggcctgtacctttcgcagaccttag

SEQ ID NO: 302023 - DNA, 2143 bp, Artificial Sequence
  derived and/or modified sequence
acagaagcgagtccgactgtgctcgctgctcagcgccgcacccggaagatgaggctcgccgtgggagccctgctggtctgcgccgtcctgggcaaacgaagcggatgctgtgacactggatgcaggtttggtgtatgatgcttacctggctcccaataacctgaagcctgtggtggcagagttctatgggtcaaaagaggatccacagactttctattatgctgttgctgtggtgaagaaggatagtggcttccagatgaaccagcttcgaggcaagaagtcctgccacacgggtctaggcaggtccgctgggtggaacatccccataggcttactttactgtgacttacctgagccacgtaaacctcttgagaaagcagtggccaatttcttctcgggcagctgtgccccttgtgcggatgggacggacttcccccagctgtgtcaactgtgtccagggtgtggctgctccacccttaaccaatacttcggctactcgggagccttcaagtgtctgaaggatggtgctggggatgtggcctttgtcaagcactcgactatatttgagaacttggcaaacaaggctgacagggaccagtatgagctgctttgcctggacaacacccggaagccggtagatgaatacaaggactgccacttggcccaggtcccttctcataccgtcgtggcccgaagtatgggcggcaaggaggacttgatctgggagcttctcaaccaggcccaggaacattttggcaaagacaaatcaaaagaattccaactattcagctctcctcatgggaaggacctgctgtttaaggactctgcccacgggtttttaaaagtcccccccaggatggatgccaagatgtacctgggctatgagtatgtcactgccatccggaatctacgggaaggcacatgcccagaagccccaacagatgaatgcaagcctgtgaagtggtgtgcgctgagccaccacgagaggctcaagtgtgatgagtggagtgttaacagtgtagggaaaatagagtgtgtatcagcagagaccaccgaagactgcatcgccaagatcatgaatggagaagctgatgccatgagcttggatggagggtttgtctacatagcgggcaagtgtggtctggtgcctgtcttggcagaaaactacaataagagcgataattgtgaggatacaccagaggcagggtattttgctatagcagtggtgaagaaatcagcttctgacctcacctgggacaatctgaaaggcaagaagtcctgccatacggcagttggcagaaccgctggctggaacatccccatgggcctgctctacaataagatcaaccactgcagatttgatgaatttttcagtgaaggttgtgcccctgggtctaagaaagactccagtctctgtaagctgtgtatgggctcaggcctaaacctgtgtgaacccaacaacaaagagggatactacggctacacaggcgctttcaggtgtctggttgagaagggagatgtggcctttgtgaaacaccagactgtcccacagaacactgggggaaaaaaccctgatccatgggctaagaatctgaatgaaaaagactatgagttgctgtgccttgatggtaccaggaaacctgtggaggagtatgcgaactgccacctggccagagccccgaatcacgctgtggtcacacggaaagataaggaagcttgcgtccacaagatattacgtcaacagcagcacctatttggaagcaacgtaactgactgctcgggcaacttttgtttgttccggtcggaaaccaaggaccttctgttcagagatgacacagtatgtttggccaaacttcatgacagaaacacatatgaaaaatacttaggagaagaatatgtcaaggctgttggtaacctgagaaaatgctccacctcatcactcctggaagcctgcactttccgtagaccttaaaatctcagaggtagggctgccaccaaggtgaagatgggaacgcagatgatccatgagtttgccctggtttcactggcccaagtggtttgtgctaaccacgtctgtcttcacagctctgtgttgccatgtgtgctgaacaaaaaataaaaattattattgattttatatttc

SEQ ID NO: 302024 - DNA, 2968 bp, Artificial Sequence
  derived and/or modified sequence
gggctttgcctgtcattctgcagttctagtgtggggtctgggcgcagttcttttccctctccagcctcggagtcttcctctgtggactgcgcagataggactggtggcacggaccagctctgcagccctggagtcaggagcagagccccccggctcccagcccgccgtagccgctcctggcaccgagcgagccgcgatgacaatggctgcattgtgcttcatgtcccttcccatcaacatttctgtgctggactccttccactcgcgggtcgtctccagagctcagaaaatgaggtgatcagtgggacgagtaaggaaggggggttgggagaggggcgattgggcaacccggctgcacaaacacgggaggtcaaagattgcgcccagcccgcccaggccgggaatggaataaagggacgcggggcgccggaggctgcacagaagcgagtccgactgtgctcgctgctcagcgccgcacccggaagatgaggctcgccgtgggagccctgctggtctgcgccgtcctggggctgtgtctggctgtccctgataaaactgtgagatggtgtgcagtgtcggagcatgaggccactaagtgccagagtttccgcgaccatatgaaaagcgtcattccatccgatggtcccagtgttgcttgtgtgaagaaagcctcctaccttgattgcatcagggccattgcggcaaacgaagcggatgctgtgacactggatgcaggtttggtgtatgatgcttacctggctcccaataacctgaagcctgtggtggcagagttctatgggtcaaaagaggatccacagactttctattatgctgttgctgtggtgaagaaggatagtggcttccagatgaaccagcttcgaggcaagaagtcctgccacacgggtctaggcaggtccgctgggtggaacatccccataggcttactttactgtgacttacctgagccacgtaaacctcttgagaaagcagtggccaatttcttctcgggcagctgtgccccttgtgcggatgggacggacttcccccagctgtgtcaactgtgtccagggtgtggctgctccacccttaaccaatacttcggctactcgggagccttcaagtgtctgaaggatggtgctggggatgtggcctttgtcaagcactcgactatatttgagaacttggcaaacaaggctgacagggaccagtatgagctgctttgcctggacaacacccggaagccggtagatgaatacaaggactgccacttggcccaggtcccttctcataccgtcgtggcccgaagtatgggcggcaaggaggacttgatctgggagcttctcaaccaggcccaggaacattttggcaaagacaaatcaaaagaattccaactattcagctctcctcatgggaaggacctgctgtttaaggactctgcccacgggtttttaaaagtcccccccaggatggatgccaagatgtacctgggctatgagtatgtcactgccatccggaatctacgggaaggcacatgcccagaagccccaacagatgaatgcaagcctgtgaagtggtgtgcgctgagccaccacgagaggctcaagtgtgatgagtggagtgttaacagtgtagggaaaatagagtgtgtatcagcagagaccaccgaagactgcatcgccaagatcatgaatggagaagctgatgccatgagcttggatggagggtttgtctacatagcgggcaagtgtggtctggtgcctgtcttggcagaaaactacaataagagcgataattgtgaggatacaccagaggcagggtattttgctatagcagtggtgaagaaatcagcttctgacctcacctgggacaatctgaaaggcaagaagtcctgccatacggcagttggcagaaccgctggctggaacatccccatgggcctgctctacaataagatcaaccactgcagatttgatgaatttttcagtgaaggttgtgcccctgggtctaagaaagactccagtctctgtaagctgtgtatgggctcaggcctaaacctgtgtgaacccaacaacaaagagggatactacggctacacaggcgctttcaggtgtctggttgagaagggagatgtggcctttgtgaaacaccagactgtcccacagaacactgggggaaaaaaccctgatccatgggctaagaatctgaatgaaaaagactatgagttgctgtgccttgatggtaccaggaaacctgtggaggagtatgcgaactgccacctggccagagccccgaatcacgctgtggtcacacggaaagataaggaagcttgcgtccacaagatattacgtcaacagcagcacctatttggaagcaacgtaactgactgctcgggcaacttttgtttgttccggtcggaaaccaaggaccttctgttcagagatgacacagtatgtttggccaaacttcatgacagaaacacatatgaaaaatacttaggagaagaatatgtcaaggctgttggtaacctgagaaaatgctccacctcatcactcctggaagcctgcactttccgtagaccttaaaatctcagaggtagggctgccaccaaggtgaagatgggaacgcagatgatccatgagtttgccctggtttcactggcccaagtggtttgtgctaaccacgtctgtcttcacagctctgtgttgccatgtgtgctgaacaaaaaataaaaattattattgattttatatttcaaaaactccattctttcctaaatattttcaacaaaggatttctttatgcattctgcctaaatacctatgcaactgagcccttccttctcagctcaagattcgtctggtctttccctacagctttgtgtgtgccatggccacatctcctgggtacagttcaaggagacatcttttctaaaagggtctgcgtgatcattaaaatataatcaaatgta

SEQ ID NO: 302025 - DNA, 261 bp, Artificial Sequence
  derived and/or modified sequence
atgaccgccaagaacgtgggcctgaccagcaccaacgccgaggtgagaggcttcatcgaccagaacctgagccccaccaagggcaacatcagcttcgtggccttccccgtgagcaacaccaacagccccaccaagatcctgcccaagaccctgggccccatcaacgtgaacgtgggcccccagatgatcatcagcaccccccagagactgaccagcagcggcagcgtgctgatcggcagcccctacacccccgccccctag

SEQ ID NO: 302026 - DNA, 141 bp, Artificial Sequence
  derived and/or modified sequence
atgatcatcagcaccccccagagactgaccagcagcggcagcgtgctgatcggcagcccctacacccccgcccccgccatggtgacccagacccacatcgccgaggccaccggctgggtgcccggcgacagaaagagatag

SEQ ID NO: 302027 - DNA, 270 bp, Artificial Sequence
  derived and/or modified sequence
atgatcatcagcaccccccagagactgaccagcagcggcagcgtgctgatcggcagcccctacacccccgcccccgccatggtgacccagacccacatcgccgaggccaccggctgggtgcccggcgacagaaagagagccagaaagttcatcgacagcgacttcagcgagagcaagagaagcaagaagggcgacaagaacggcaagggcctgagacacttcagcatgaaggtgtgcgagaaggtgcagagaaagggcaccaccagctag

SEQ ID NO: 302028 - DNA, 84 bp, Artificial Sequence
  derived and/or modified sequence
atgatcatcagcaccccccagagactgaccagcagcggcagcgtgctgatcggcagcccctacacccccgcccccgccatgtag

SEQ ID NO: 302029 - DNA, 261 bp, Artificial Sequence
  derived and/or modified sequence
atgaccgccaaaaacgtgggactgacatcaaccaatgcggaggtccgagggtttattgaccaaaatctgagtcccacaaaaggcaatataagctttgtggccttcccagtttccaatacgaatagccccaccaagatcttgcccaagactctcggccctatcaatgtaaacgtggggccccagatgataattagcactccacaaaggctcacctcttccggaagtgtcctgatcgggagcccttacactcccgccccctag

SEQ ID NO: 302030 - DNA, 141 bp, Artificial Sequence
  derived and/or modified sequence
atgatcatatccacaccccagcggttgacatcctctggaagcgtcttgattggtagcccatacactcctgcgccagcgatggtgacacaaacccacatcgcggaggccaccggatgggtccccggcgataggaaaagatag

SEQ ID NO: 302031 - DNA, 270 bp, Artificial Sequence
  derived and/or modified sequence
atgattatttcaacccctcagcgactgacttctagcgggtcggttttaattgggtcaccatatactcctgcgcctgcaatggtgacacagactcacattgctgaggctaccggatgggtccccggcgaccggaaacgcgcccgcaagttcattgactcagatttttccgagagcaaacgatccaagaagggggacaagaacggcaaaggattgcgccatttcagcatgaaggtgtgcgaaaaagtgcagcggaagggcaccacctcatag

SEQ ID NO: 302032 - DNA, 84 bp, Artificial Sequence
  derived and/or modified sequence
atgatcatcagcacaccccagcgccttacaagttccggctccgtgctgattggcagcccttacacccccgcccccgcaatgtag

SEQ ID NO: 302033 - DNA, 261 bp, Artificial Sequence
  derived and/or modified sequence
atgacagccaagaatgtgggcctgaccagcaccaatgctgaggtgcggggcttcatcgaccagaacctgagccccaccaagggcaacatcagctttgtggccttccctgtgagcaacaccaacagccccaccaagatcctgcccaagaccctgggccccatcaacgtgaatgtgggcccccagatgatcatcagcaccccccagaggctgaccagcagcggctctgtgctgattggcagcccctacaccccagccccctag

SEQ ID NO: 302034 - DNA, 141 bp, Artificial Sequence
  derived and/or modified sequence
atgatcatcagcaccccccagaggctgaccagcagcggctctgtgctgattggcagcccctacaccccagccccagccatggtgacccagacccacatcgccgaggccaccggctgggtgcctggggacaggaagaggtag

SEQ ID NO: 302035 - DNA, 270 bp, Artificial Sequence
  derived and/or modified sequence
atgatcatcagcaccccccagaggctgaccagcagcggctctgtgctgattggcagcccctacaccccagccccagccatggtgacccagacccacatcgccgaggccaccggctgggtgcctggggacaggaagagggccaggaagttcatcgacagcgacttcagcgagagcaagaggagcaagaagggggacaagaatggcaagggcctgcggcacttctccatgaaggtgtgtgagaaggtgcagaggaagggcaccaccagctag

SEQ ID NO: 302036 - DNA, 84 bp, Artificial Sequence
  derived and/or modified sequence
atgatcatcagcaccccccagaggctgaccagcagcggctctgtgctgattggcagcccctacaccccagccccagccatgtag

SEQ ID NO: 302037 - DNA, 261 bp, Artificial Sequence
  derived and/or modified sequence
atgaccgccaagaacgtgggcctgaccagcaccaacgccgaggtgagaggtttcatcgaccagaatctgagcccgactaagggtaatataagttttgttgcattccctgtctccaacacaaactcacccaccaagatattgcctaagacactcggccctataaatgtcaacgtagggccccaaatgatcatttctacacctcagagattgacctcaagtgggtctgtactgattgggtctccgtataccccagccccctag

SEQ ID NO: 302038 - DNA, 141 bp, Artificial Sequence
  derived and/or modified sequence
atgatcatcagcaccccccagcggctgaccagcagcggcagcgtgctgattggctctccatacacaccagctcccgccatggtgactcagactcacatcgccgaggccactggttgggtgccaggtgataggaaacggtag

SEQ ID NO: 302039 - DNA, 270 bp, Artificial Sequence
  derived and/or modified sequence
atgatcatcagcaccccccagcggctgaccagcagcggcagcgtgcttatcggctccccctacactccagcgccagcaatggtgactcagacccacatagccgaggccaccgggtgggtaccaggggatagaaagcgagctcggaaatttatcgactcggatttttctgagagcaaaaggtctaagaagggtgacaagaatggaaaaggactgagacacttctctatgaaggtctgcgaaaaagtacagaggaaaggtaccacatcgtag

SEQ ID NO: 302040 - DNA, 84 bp, Artificial Sequence
  derived and/or modified sequence
atgatcatcagcaccccccagcggctgaccagcagcggcagcgtgctgataggtagcccctacactccagcacccgctatgtag

SEQ ID NO: 302041 - DNA, 261 bp, Artificial Sequence
  derived and/or modified sequence
atgaccgcaaaaaacgtgggactgacctcaacgaatgccgaggtgcgaggcttcattgatcaaaatctcagcccgacaaagggcaacatttccttcgtggcctttccggtgtccaatactaactcaccaacaaaaattctgcccaagacgctaggacctatcaacgtcaatgttggaccacagatgattatttctactcctcaaaggctgaccagctctgggagtgtgctgatcggctctccttacaccccagctccatag

SEQ ID NO: 302042 - DNA, 141 bp, Artificial Sequence
  derived and/or modified sequence
atgattataagcacaccacaaaggctgacgtccagcggttccgtgctgattggatccccgtacaccccggcacccgctatggtaacacagacccacatcgctgaagccaccggctgggtgcccggagaccgcaaacgctag

SEQ ID NO: 302043 - DNA, 270 bp, Artificial Sequence
  derived and/or modified sequence
atgattatctctaccccacagcgtttaacaagttccgggtcggtgctgattggatcaccttacaccccggctccagccatggtcactcagacccatatagctgaagctacaggatgggtcccaggagaccggaaacgggcaagaaaattcattgattcagatttctccgaaagtaagcgctctaagaagggggataagaacggtaagggcctgcgacactttagtatgaaggtttgtgagaaagtgcagaggaagggcactacatcatag

SEQ ID NO: 302044 - DNA, 84 bp, Artificial Sequence
  derived and/or modified sequence
atgattatttcaaccccacagagactaaccagctcgggttcagtgttaatcggctcaccgtatacacctgcaccagccatgtag

SEQ ID NO: 302045 - DNA, 571 bp, Artificial Sequence
  derived and/or modified sequence
ttctggcttttaaaaaaactgtgttgtttctgtaataaaatctgggaatgtgtagtcccagctactcgggaggctgaggcaggagaatcgcttgaatccgggaggcggaggttgcagtgagccaagatcgtgccacttcactccagcctggtgacagagagagactacatctcaaaaaaaaaaaaaaaagaaaagaaaaaaattctgggaaccccatgactggttgttcttttaaagaattattgaagacgaaggtttttttctttttatttttttaatggctttacagaatcttaaatagaatacagtttgacatgacggcaaaaaatgttggtttgacttccacaaatgcagaagtaagaggatttatagatcagaatctcagtccaacaaaaggcaacatttcatttgttgcatttccagtttccaataccaactcacctacaaagattttaccaaaaaccttaggaccaataaatgtgaatgttggaccccaaatgattataagcacaccacagagactaaccagttcaggaagtgttctgattgggagtccatatacccctgcacc

SEQ ID NO: 302046 - DNA, 578 bp, Artificial Sequence
  derived and/or modified sequence
aaagctcgcgcgggggaagcggggctgtagctgggcagggagagggcggacgaaatcggtagcgatctcggctgcggcgctgccgcagctgcccggcccgcggggcgcgccctgacccttcatctttgggcaggctcgagggcgcgcgcacggttggcgttctggggcctcaaactcctgggccttgaccgggcaggccgcgtctccccgggtgtgagtccaccgggacccggccgccgcctaagcgcgggcgccacagaagcggcggcgcccgaagacgcgctcctggctcggcccgacagcctcgcttggccgccagttcttctgcagccgaaggcggcaacatttcatttgttgcatttccagtttccaataccaactcacctacaaagattttaccaaaaaccttaggaccaataaatgtgaatgttggaccccaaatgattataagcacaccacagagactaaccagttcaggaagtgttctgattgggagtccatatacccctgcaccagcaatggttactcagacacacatagcagaagctactggctgggtccctggtgatagaaaacgg

SEQ ID NO: 302047 - DNA, 416 bp, Artificial Sequence
  derived and/or modified sequence
ctgtaatcccagcactttggggggccaaggtgggcggatcacctgaggcaacatttcatttgttgcatttccagtttccaataccaactcacctacaaagattttaccaaaaaccttaggaccaataaatgtgaatgttggaccccaaatgattataagcacaccacagagactaaccagttcaggaagtgttctgattgggagtccatatacccctgcaccagcaatggttactcagacacacatagcagaagctactggctgggtccctggtgatagaaaacgggctagaaaatttatagactctgatttttcagaaagtaaacgaagcaaaaaaggagataaaaatgggaaaggcttgagacacttttcaatgaaagtgtgtgagaaagttcaacgaaaaggtacaacatcgt

SEQ ID NO: 302048 - DNA, 578 bp, Artificial Sequence
  derived and/or modified sequence
gaaatcggtagcgatctcggctgcggcgctgccgcagctgcccggcccgcggggcgcgccctgacccttcatctttgggcaggctcgagggcgcgcgcacggttggcgttctggggcctcaaactcctgggccttgaccgggcaggccgcgtctccccgggtgtgagtccaccgggacccggccgccgcctaagcgcgggcgccacagaagcggcggcgcccgaagacgcgctcctggctcggcccgacagcctcgcttggccgccagttcttctgcagccgaaggcggttgttcttttaaagaattattgaagacgaaggtttttttctttttatttttttaatggctttacagaatcttaaatagaatacagtttgacatgacggcaaaaaatgcaacatttcatttgttgcatttccagtttccaataccaactcacctacaaagattttaccaaaaaccttaggaccaataaatgtgaatgttggaccccaaatgattataagcacaccacagagactaaccagttcaggaagtgttctgattgggagtccatatacccctgcaccagcaatgg

SEQ ID NO: 302049 - protein, 123 aa, Artificial Sequence
  derived and/or modified sequence
MAERRRHKKRIQEVGEPSKDEKSETKKQQKSDSEEKSDSEKKEDEEGKVGPGNHGTEGSGGERHSDTDSDRREDDRSQHSSGNGNDFEMITKEELEQQTDGDCEEDEEEENDGETPKSSHEKS

SEQ ID NO: 302050 - DNA, 1200 bp, Artificial Sequence
  derived and/or modified sequence
atggccgagcgcaggcgccacaagaagcgcatccaggaggtcggagagccttctaaagaggaaaaggcagtcgccaagtacctgaggtttaattgtcccacaaagtccacgaatatgatgggccatagagttgactactttatcgcttccaaagctgtagattgtttactcgactctaagtgggccaaggcaaagaagggcgaagaggctctgttcaccacccgtgagtccgtagtggactattgtaacaggttgctgaagaaacagttttttcaccgcgcactgaaggtcatgaagatgaaatacgacaaagacattaaaaaggagaaggacaaaggcaaggctgaatccgggaaagaagaagataaaaagtcaaagaaagaaaatatcaaggatgaaaagacaaagaaagaaaaagagaagaaaaaggacggtgagaaagaagaaagtaaaaaggaagaaactcctggcacacctaagaagaaggagacaaagaagaagttcaagctcgaacctcacgacgatcaggtgttcctggatgggaacgaggtctatgtgtggatctacgacccggtgcattttaaaacgtttgtcatgggactgatcctggtgattgctgtgatagcagctacgctgtttcccctgtggcccgcagagatgagagtcggcgtgtattatctgagcgttggcgccggttgttttgtcgctagcattttactgctcgccgtggcgaggtgcatactcttcttgataatctggctcattacaggcgggaggcaccatttctggtttctccccaatcttacggccgacgtggggttcattgactctttccgtcccctgtacacgcacgagtacaagggcccgaaagccgatttgaaaaaagatgaaaagagcgagacaaaaaaacagcagaagtccgattcagaagagaaatccgactcggaaaaaaaagaggatgaggagggtaaggtggggcccggaaaccacgggaccgaaggtagcggcggcgaacgtcacagcgatactgactccgaccggcgggaagacgaccggagccagcattcgagcggaaacgggaatgactttgagatgataaccaaagaagagcttgagcagcagactgacggcgattgtgaagaagatgaggaagaagagaacgacggggaaacccccaagtcgtcacacgagaagtcctag

SEQ ID NO: 302051 - DNA, 1200 bp, Artificial Sequence
  derived and/or modified sequence
atggccgagcgtcgcaggcacaaaaagagaattcaagaggtcggggagccatcgaaggaggagaaagctgtcgcaaaatatctccgtttcaactgccctaccaagtccactaacatgatggggcaccgggttgattatttcatagcatctaaagccgtggattgtctcctggactccaagtgggccaaagctaaaaagggggaagaggccttgttcacaactcgcgagagtgtcgtggattactgcaataggcttctgaagaagcaatttttccaccgggccctgaaagttatgaagatgaagtacgataaggacataaaaaaagagaaggataaagggaaagcagaatccggaaaggaggaagataaaaaaagcaagaaagaaaacataaaagacgaaaaaacaaagaaggaaaaggagaagaaaaaagacggggaaaaggaagaatccaagaaggaagagactcccggaactcccaagaaaaaggagacaaagaaaaaatttaagctcgaaccacacgatgatcaggtgttcctagatggaaacgaagtttacgtgtggatctatgacccagttcactttaaaacttttgtcatgggtctgatcttggtcatcgctgtcatcgctgcaaccttgtttcccttgtggcctgccgagatgcgggttggggtatactacttgagtgtgggagctggatgcttcgtggccagtattctgctgcttgcagtagcccgctgcattctgttccttatcatctggctcatcacaggaggccggcatcacttttggttcttacccaacctcaccgccgacgtggggttcatcgatagcttcagacccctctatacccatgagtacaaagggccaaaagccgatctcaaaaaagacgagaaaagcgagacaaagaagcagcaaaaatccgacagtgaggaaaaaagcgacagtgagaagaaggaggatgaggagggaaaagtgggcccaggaaatcacgggactgaaggctccggtggagaacggcattctgacactgactcagatcggcgcgaggacgaccgtagccagcatagcagcggtaacggcaatgacttcgagatgattacaaaggaggaactggagcagcagacagatggggactgcgaggaggacgaggaggaagagaacgacggcgaaacgccgaagtcgtcacatgagaagagctag

SEQ ID NO: 302052 - DNA, 372 bp, Artificial Sequence
  derived and/or modified sequence
atggcagagcggaggagacacaagaagcgcatacaggaggtcggggaaccatcaaaggacgagaagtctgaaaccaagaagcagcagaaaagcgattccgaagagaagtctgattcggaaaagaaggaggacgaggaaggaaaagtcggcccaggaaatcatgggacagagggcagtgggggggaaagacattccgatactgactctgatcggcgggaggatgaccgatcccagcactcctcaggcaacggaaatgattttgagatgatcactaaggaagaattggagcaacagacagacggagactgcgaggaggatgaggaggaggagaacgacggagagactcccaagagtagtcatgagaagtcttag

SEQ ID NO: 302053 - DNA, 1200 bp, Artificial Sequence
  derived and/or modified sequence
atggccgagaggagaagacacaagaagaggatccaggaggtgggggagcccagcaaggaggagaaggctgtggccaagtacctgcgcttcaactgccccaccaagagcaccaacatgatgggccaccgggtggactacttcatcgccagcaaggctgtggactgcctgctggacagcaagtgggccaaggccaagaagggggaggaggccctcttcaccacccgggagagcgtggtggactactgcaaccggctgctgaagaagcagttcttccaccgggccctgaaggtgatgaagatgaagtatgacaaggacatcaagaaggagaaggacaagggcaaggccgagagcggcaaggaggaggacaagaagagcaagaaggagaacatcaaggatgagaagaccaagaaggagaaggagaagaagaaggatggagagaaggaggagagcaagaaggaggagaccccaggcacccccaagaagaaggagaccaagaagaagttcaagctggagccccatgatgaccaggtgttcctggatggaaatgaggtgtatgtgtggatctatgaccctgtgcacttcaagacctttgtgatgggcctcatcctggtgattgctgtgattgctgccaccctcttccccctgtggccagctgagatgagggtgggcgtgtactacctgtctgtgggcgccggctgctttgtggccagcatcctgctgctggccgtggcccgctgcatcctcttcctgatcatctggctgatcaccggcggccgccaccacttctggttcctgcccaacctgacagcagatgtgggcttcatcgacagcttccggcccctgtacacccatgagtacaagggccccaaggctgacctgaagaaggatgagaagtctgagaccaagaagcagcagaagagtgacagcgaggagaagagtgacagcgagaagaaggaggatgaggagggcaaggtgggccctggcaaccacggcacagagggcagcggcggggagcggcacagcgacacagacagcgacagaagagaagatgacaggagccagcacagcagtggaaatggaaatgactttgagatgatcaccaaggaggagctggagcagcagacagatggagactgtgaagaagatgaggaggaggagaatgatggagagacccccaagagcagccatgagaagagctag

SEQ ID NO: 302054 - DNA, 372 bp, Artificial Sequence
  derived and/or modified sequence
atggccgagaggagaagacacaagaagaggatccaggaggtgggggagcccagcaaggatgagaagtctgagaccaagaagcagcagaagagtgacagcgaggagaagagtgacagcgagaagaaggaggatgaggagggcaaggtgggccctggcaaccacggcacagagggcagcggcggggagcggcacagcgacacagacagcgacagaagagaagatgacaggagccagcacagcagtggaaatggaaatgactttgagatgatcaccaaggaggagctggagcagcagacagatggagactgtgaagaagatgaggaggaggagaatgatggagagacccccaagagcagccatgagaagagctag

SEQ ID NO: 302055 - DNA, 1200 bp, Artificial Sequence
  derived and/or modified sequence
atggccgagcggcggcggcacaagaagcggatccaggaggtgggcgagccctctaaggaggagaaggccgtggcaaaatacctgcggttcaattgtccaactaagtccactaatatgatgggacatcgggtggactacttcatagcatcaaaagcggtggattgcctactggatagcaagtgggccaaggctaaaaaaggtgaggaagctctgttcaccactcgggagtctgtggtggattactgtaatagactgcttaaaaagcagttctttcatcgagctctcaaagtcatgaaaatgaaatacgataaggatatcaagaaggagaaggacaagggaaaggccgagtcgggtaaggaggaggacaagaaatctaaaaaggagaatatcaaggacgaaaagacaaaaaaagaaaaggaaaaaaaaaaggatggcgagaaggaagagtccaagaaagaagagaccccaggtactccgaagaagaaggagaccaagaaaaaattcaaacttgagccacatgatgaccaagtgtttctggatggtaatgaggtctacgtctggatttatgatcccgttcactttaagacattcgtgatgggactgatactggtgattgcagtgattgctgctactcttttccctctgtggcctgcagagatgcgggtgggggtgtattacctgtccgttggcgcaggatgtttcgtggcttctatcctgttgcttgctgtcgctcgctgtattctgttcttgattatatggctcatcactggcggccgacaccatttctggttcctaccaaatttaaccgccgatgtcggctttatagattccttcagaccattgtacactcatgagtacaagggtcccaaggctgatctgaaaaaagacgaaaagtccgagacgaaaaaacagcagaaatctgactccgaggagaaaagcgattcagagaaaaaggaagacgaagaaggcaaagtgggacccggaaatcacgggaccgagggtagcggaggggagaggcactccgacactgactctgacagacgggaagacgaccgatctcagcactccagcggaaatggtaatgacttcgagatgataaccaaggaagagctggaacagcaaacagatggggattgcgaggaagatgaagaggaagaaaacgacggcgagactccaaaatcaagccatgagaaaagctag

SEQ ID NO: 302056 - DNA, 1200 bp, Artificial Sequence
  derived and/or modified sequence
atggccgagcggcggcggcacaagaagcggatccaggaggtgggcgagccctccaaagaagaaaaagccgtggccaaatacctacgcttcaattgcccgaccaagtctactaatatgatgggccaccgggtggattactttattgcaagcaaagccgtggattgtctactcgatagtaaatgggccaaggccaaaaaaggagaggaggctctgttcaccacgcgggagagtgtggtcgactactgtaaccgcctgcttaagaagcaattttttcaccgcgctcttaaggtgatgaagatgaagtatgataaggacataaagaaggaaaaggacaaaggtaaggccgaaagcggtaaagaggaggataaaaaatccaagaaggagaatatcaaagatgaaaaaaccaaaaaagaaaaagaaaagaagaaagatggtgaaaaagaggagtcaaaaaaggaggagacccccgggaccccaaagaagaaagaaaccaagaagaagttcaagctcgagccccatgacgaccaggtgtttctcgacggcaacgaggtctatgtctggatctacgaccccgttcatttcaaaaccttcgttatgggcctgatcctcgtaattgcagtgatcgccgctaccctgttcccactgtggccggctgagatgcgcgtcggcgtgtactacttgtcggtgggggccggttgttttgttgccagtatactgctgttggccgtcgcccggtgcattttgttcttgataatctggctgattaccggaggtagacatcacttctggtttttgcctaacttgacggccgacgttggcttcattgattcattcaggccactgtatacacacgagtataagggtccgaaggctgaccttaagaaagacgaaaagtcggaaacaaagaagcagcagaaatctgacagtgaggagaaatccgactcagaaaagaaggaagatgaagagggtaaagtcgggccgggaaaccacgggactgagggctcaggcggcgagaggcatagcgacacggactcagacagaagggaagatgacaggagccaacatagtagtggcaatgggaatgacttcgaaatgataacaaaggaggagctcgaacagcagaccgatggagactgcgaagaggacgaggaggaggagaacgacggcgagacccctaaaagctctcatgagaagagttag

SEQ ID NO: 302057 - DNA, 372 bp, Artificial Sequence
  derived and/or modified sequence
atggccgagcggcggcggcacaagaagcggatccaggaggtgggcgaaccgtccaaggacgagaagtcggaaactaagaagcagcaaaaatccgatagtgaggaaaaaagcgactctgaaaaaaaggaagatgaggagggcaaagtgggccccggtaaccacggaaccgagggatccgggggagagcggcacagcgacactgatagtgaccgcagagaagatgacagatcccagcattcttccgggaacgggaatgacttcgagatgatcaccaaggaggaactggagcagcagaccgacggcgattgcgaggaggatgaggaagaagagaatgatggggaaacacctaagagctcccacgagaagtcttag

SEQ ID NO: 302058 - DNA, 1200 bp, Artificial Sequence
  derived and/or modified sequence
atggctgagcggaggagacataagaagaggatccaagaggtgggcgagccatcaaaagaagaaaaggcagtcgctaaatatctgcggttcaactgccctactaaaagtactaacatgatggggcaccgggtcgattactttattgcttcgaaggcagtcgactgtctcctggactccaaatgggcgaaggcaaagaaaggagaggaggctctgttcaccacacgagagtcagtggtggactactgtaatcgactgctgaagaagcagttctttcacagggcattgaaggtcatgaagatgaagtatgataaggatattaagaaggaaaaggacaagggcaaagcggagagcggtaaggaggaagacaaaaagtccaagaaagagaatattaaggacgagaagaccaaaaaagagaaggagaagaagaaggatggtgagaaagaggagtctaagaaagaggagactcccggaacacctaagaagaaagagaccaagaagaagtttaaactggagccacacgacgaccaggtgttcctggacgggaacgaagtgtacgtctggatctacgacccagtacatttcaagacctttgttatggggctgatcttagtgatcgcagtcatagctgctaccttattccccctgtggccagccgagatgcgagtgggcgtttattacctctctgtgggcgctggttgtttcgttgcctccatactgctactggccgttgctcgctgtatactgttccttatcatctggctgatcaccggcggaaggcatcacttctggttcctgcccaacctgacggctgacgttgggtttatcgatagctttcgaccgttatacactcatgaatacaagggaccaaaagcagacctcaagaaagacgagaagagcgagacaaagaagcagcagaagtccgacagtgaggagaagtccgatagcgaaaagaaggaggacgaggagggaaaggtgggccctggtaatcacggcaccgagggatctggcggagagcgacattctgacacggactctgaccgaagggaggacgatcgctcccagcattctagcggtaatgggaatgacttcgagatgattaccaaagaggagttagaacaacagacagacggagattgtgaagaggacgaggaggaagaaaatgatggcgagaccccgaagagtagccatgagaaaagttag

SEQ ID NO: 302059 - DNA, 1200 bp, Artificial Sequence
  derived and/or modified sequence
atggcagagcgccgtaggcacaaaaagaggatacaagaagtcggggaaccgtctaaggaagagaaagctgtggcgaaatatctccgtttcaactgtcccacgaagtcgacgaacatgatgggtcatcgggtggactattttatagccagtaaggctgtcgattgtctcctcgactctaaatgggccaaggccaaaaagggcgaggaagcattattcacaacgagagagagcgttgtggactactgtaacaggctgctgaagaaacagttctttcacagagctttgaaagtgatgaagatgaaatacgacaaggatattaagaaggaaaaggataaaggcaaggcggaatccggtaaagaagaggacaagaaatcaaagaaggaaaacattaaagacgaaaagacgaaaaaagagaaagagaagaaaaaggatggtgagaaagaggagagtaaaaaggaggaaacccctgggacgcccaaaaaaaaggagacaaagaagaaattcaagcttgaaccacatgacgaccaagtctttctggacggtaacgaggtctatgtatggatctacgatccagttcacttcaagacgtttgttatggggctgattctcgtgattgctgtcatagccgcaaccctgttcccgctctggccagctgagatgcgggtgggcgtgtactatctgtcggtaggtgcagggtgtttcgttgcctcgatcctcctgctggcagtcgcgcgatgcatattgtttctcataatctggctcatcaccggaggcagacatcacttttggttcttgccaaaccttactgcagatgtgggattcatcgacagttttcggcctctatacacccacgagtataagggccctaaagctgacctgaagaaagacgagaaaagcgaaacgaaaaagcagcagaaaagcgacagcgaggaaaaaagcgatagtgagaaaaaagaagatgaagaggggaaggtgggacccggaaaccatggaaccgagggcagtggtggagagaggcattccgatactgactccgataggcgcgaggacgatcgctcacagcactcctccgggaacggcaacgattttgaaatgatcacgaaagaagagctggaacaacagaccgatggagattgcgaagaagatgaagaggaagagaatgatggagagacccccaagagcagtcatgagaagagctag

SEQ ID NO: 302060 - DNA, 372 bp, Artificial Sequence
  derived and/or modified sequence
atggctgagaggaggcgacacaaaaagcggattcaggaggtcggagaaccttcgaaagacgagaaatcagagacaaaaaaacaacaaaagtctgattcggaagaaaaatctgacagtgagaagaaagaggacgaggagggcaaggtggggcctgggaatcacgggaccgaggggagcggaggtgagaggcactcagataccgatagtgacaggcgcgaagacgatcggagccaacattcctctgggaatgggaatgactttgagatgatcactaaggaggagctagaacagcagactgacggggactgcgaggaagatgaagaggaggaaaatgatggtgaaacaccgaaatccagtcacgagaagtcctag

SEQ ID NO: 302061 - DNA, 6568 bp, Artificial Sequence
  derived and/or modified sequence
aggtttccaccgccccctcctcgctccacgtcagagggaaccgggcggagcggccaacatggcggaacgcaggagacacaagaagcggatccaggaagttggtgaaccatctaaagaagagaaggctgtggccaagtatcttcgattcaactgtccaacaaagtccaccaatatgatgggtcaccgggttgattattttattgcttcaaaagcagtggactgtcttttggattcaaagtgggcaaaggccaagaaaggagaggaagctttatttacaaccagggagtctgtggttgactactgcaacaggcttttaaagaagcagttttttcaccgagccctaaaagtaatgaaaatgaaatatgataaagacataaagaaagaaaaagataaaggaaaagctgaaagtggaaaagaagaagataaaaagagcaagaaagaaaatataaaggatgagaagacaaaaaaagaaaaagagaaaaaaaaagatggtgaaaaggaagaatccaaaaaggaggaaactccaggaactcctaaaaagaaggaaactaagaaaaaattcaaacttgagccacatgatgatcaggtttttctggatggaaatgaggtgtatgtatggatctatgacccagttcactttaaaacatttgtcatgggattaattcttgtgattgcagtaatagcggccaccctcttccccctttggccagcagaaatgagagtaggtgtttattacctcagtgtgggtgcaggctgttttgtagccagtattcttctccttgctgttgctcgatgcattctatttctcatcatttggctcataactggaggaaggcaccacttttggttcttgccaaatctgactgctgatgtgggcttcattgactccttcaggcctctgtacacacatgaatacaaaggaccaaaagcagacttaaagaaagatgagaagtctgaaaccaaaaagcaacagaagtccgacagtgaggaaaagtcagacagtgagaaaaaggaagatgaggaggggaaagtaggaccaggaaatcatggaacagaaggctcggggggagaacggcattcagacacggacagtgacaggagggaagatgatcgatcccagcacagtagtggaaatggaaatgattttgaaatgataacaaaagaggaactggaacagcaaacagatggggattgtgaagaggatgaggaagaggaaaatgatggagaaacacctaaatcttcacatgaaaaatcataatctgactaattttgggactgaatgaataagtacaagaggttggattttctatgttggctgattaccatattgaacacatggcatttgtagcattctttaaatctatctactgaaatgtatttgacattcaagcagttatattcggtccttcattttatagaatattggcactattattggtacagtttaaagccattaatatgttttatccatttgataattttacagtaagtaggtctcattcattttgacagttatcaaagatgtactttccacagttaaatttacattaatggcaatttttgatagttttatggctttttactgttagactaatcaaaaataactttaaaaggaacaaagaaactccaacatttcacattatgcatagttatgtagccatttcacagtttctttaagatgtgtaaactcattgtccttgatagtttttatttttcattataaaattataccaggagatttcttttaagattctgagttagcagagttcaaaactattttgtggaaacaagccaactagtaacaatgcagcaacacttctggtttagctaaattatttttccaatgtaggaaatccacactgatttgtacgtctgactgagagaaagatggtcgtctccagcagagaaagtgaacagcatttgttggaaggtgatggctctccctcctccctccccatttcattggcgtaacgtaaagtgtattctgtacataatttacaaataaaacattttattttaattgttacttattatttagatatttctcaacacttaaattcataaaattaagaccatgtaagggtatgtttttagagaaatggaagtttgagtaacccacagaacatctgtgatctttctacagcagcttcagttttgtgccaacattccatgtattttgaatatgagcaaaaactgatcttaagagcagacttaaagtagctttgtacgccttaatgttcattttgatttattttaaatctttacattcagaaatgagatactgtattatcagaccaggaggcattgctgtgaaagataatttcctattctaaaatatcaaatttaaaataaagataatgaaagaaaacataagagaactattggactctaattgctttgaactagttttgcagtttgactttacgtcttatacatcttagttacaagtctttggaaactcttgtttacttatgagcataatcattccttggagttatactaactaataatgaatattaaatgatttttcttcagtcacagtgagagcatcttgctttgtggttgaaataggtagtgtatgtcagtctttgctttaggctgtttctcatctaagtgtttgaattaaagatgttaaatttttctaattgtgaaaaatatgttttctgtatcgacacattttattaaacttggcttgattgcttctttatagtagtccctgtaagtggacataaatgtggctatttgatgttaatgcaactatgtcaaggctgcaatcactttaatagtttctttttagcaaataaatgttcattgatgaagtgcctgggtattttcccgtcccatttgcagagctctactacttcatttccacagtaagcatatatataatgatcacttctgagtttatcaccagtaacattgatacctattttggggtataaacatggtgtttttcagaaataaaaattatttcattaacctttactattactgtgataatacccaggcactcaatattcatcctgaaattttttataatatatgtaatttgtctagtcttaaagacatttggagcatggccaacaggaaggtcagcttcttactgatgtgtgtggattcttacagaatgttagtacaaatttttataaatatttggtgatccctggggggaaatatcattcttactatggttagaaagtgaattagaaatttcagctcagtttctattttactattcaagttgtgtactttaaacaaatataaaaatcaaaaggctgcctctattacaatcctcagtggaatagatggctatctttcttggctaacattaaatattcttgtaccagagcatggaaaatcgtttataattgttaatagaatggcgatttttttttaagaacttcagatttgctatgctgctgtaagtagaaagcatgaagctttttgatcatgtagggcttattgtagagggtatcaattggcctaactaagcaggattgaatttaccagaggctaagttcagatagtaagaataatgcatatgtgattgttcttaaagtcaatgtattaaataaggtatttttccttttccctcttactggatttttcaattttcaaaccatatggcctaggtaactttaattgaaataatatagatttagttgaatactattcaggaagtaataaattttaatatatcacattgaaattatgcagtggtgatgaattttggtgtttcccccctctttctggttttacatcatgaggatcagttagctgctgacaagaaaagtcatcttgtgtcttttgtaaattgaattttttttttaaatctattaggaactggaaaacagcaagtatggttgattctcattattcaaggtagttacgttctataaagtcactgcgaacactgaattagcaaatatagaacctaggggaaatacaaggctagatttctgcaagccactggtcacattttcatcaagcagtcaacatgtaaatttctgttgtaaagacaccttatttaatataatcgattcattaacattgaagtcatgaccaacaacactgtaactcatgcctgaatgaagcttatctgacacataagcttcataaggcacacaacagcctttttacccttaggaacagctttttgcccttagcactatgcttgggggccattttaaacagtgaaatcaaaaaaagaacagaaatgcaaaaaccatggcattagcgtaaaaaggacacgtttatagtatgaaagctggaacatggccttgttcaacctcagctcagaatatgtgtacagcaagttttttgctgtaccacaaaattttaggttaggcaaattcacaaatacggaatccatgaataacgaggatcaactgtacttaactatattttaaagctgtgacatttatctacctggtttatggaatagaatttattgctgaatcatgctccagtatttgagtgatgttttaaatatcctatgtctgaaaataattcctcctaattgtgtggtaatttgcttttactgtttccacagtatttcaggtctttgctcattcactcagtaatactgagcacttaccatgtaccagaattttactaggcacaaccatgaataaaaatacaattctcttgcaccattaaatagtgtgttaagtgctacggcagcaaattgctacatgtgctggatatctcttgttttcccctccagctccactctgctcttgcccacaaagctgacccgaatggaccacagcagtgggctcctatgcctcctggcttctgagtgggtttggccaaggagtgtcctggccagagatcagaggatggtagggtgcctattctcggctcttctcctggggttggggggctgccttagcagccaaaggtcacttctcccaaactccttccctgctttccaggttgccagtccctgcactcttcctttctggccaaggatgatgtcagttctgctgctactagcctggagttgcagaagctactgtgcttcctctttgggtagcctatacctatacttatctcctcataatatcttcatgtaaagaaccatctgtttcttattggaatcaagaccaataccaaggagaaattcctagggaacaaaaattccaatgaggaattgacctctttgtcagatccttatcaccaaacattagaaaagatctcataactttatacagcatgttgtaagcattttgataactaaaatcctgttctagtgaatgtcatgcagataactacacaaggagattaatttaaatttgccttctttggcaagcccttaaaccaatggctaaagcagttagttgtgagtttctgagtaggtcccaatgcgtttatttcatttgtccaacctagcacagagatcctttgatactttaattgcatggcttttccaatcagacgaaatttcagtctgagagaggacatattttctgaggtttatagttttaggattgtccaaaaggcctatgatctcttcttagcatgacagaaagagggaaagataagttaaatttcaagggggtcatatcatcacactttggtcttatttcattttcaatgatttcctagatcactttaacttttttgtgtcatggactcctcagaataatgggttttttttgtttgtttgtttgtttgagatggagtctcactctgtcacccaggctggagtgcagtggcgaaatctcagctcactgcaacctccgcctcctgaggttcaagtgatcctcctgcctcagcctcccaagtagctgggattacaggcacatgccaccacacccagctaatttttgtattttttagtagagacagggtttcaccgtgttggcgagactgatcttgaactcctgacatcaggtgatccacctgcctcggcctcccaaagtgctgggattacaggcatgagccaccatgcctggccagaataatgtttttaaatgcagaaaaggaaatgcatggggttacaagggaaacgaattacactgaagtgtaagctaccaaataatttatgatgtggtagttataggtgtgcatttaatagccagatctacgagtggatgtaataactgctatgatgttgaagtagcataaaacatatattagatatctgcaacaactgtgatgtaacatgaaaatacctgatttctgttgacaaagttactgctagtacaactgtggattgttgtctgcactcgtcattgaaggaaatactaaattttagttttaggctagtgaaattaaagttaatttttcccatccaagttcatgtatcttctgaattctatccgtgaatcccttagaggtctgtgaattgtaggttaagaacccctgccctagctaatcagatccaccaatgtttcaaataggactataacttattcaaaggccaatgatacttcgcataattcaattttaatattattcacatttcatgtcacaaatttagtaagttacatgtgttatgtgatgttttgttttgatagattatatcttactcctaaataaaaagtcaagatttttgtagcaa

SEQ ID NO: 302062 - DNA, 1430 bp, Artificial Sequence
  derived and/or modified sequence
ggcggagcggccaacatggcggaacgcaggagacacaagaagcggatccaggaagttggtgaaccatctaaagaagagaaggctgtggccaagtatcttcgattcaactgtccaacaaagtccaccaatatgatgggtcaccgggttgattattttattgcttcaaaagcagtggactgtcttttggattcaaagtgggcaaaggccaagaaaggagaggaagctttatttacaaccagggagtctgtggttgactactgcaacaggcttttaaagaagcagttttttcaccgagccctaaaagtaatgaaaatgaaatatgataaagacataaagaaagaaaaagataaaggaaaagctgaaagtggaaaagaagaagataaaaagagcaagaaagaaaatataaaggatgagaagacaaaaaaagaaaaagagaaaaaaaaagatggtgaaaaggaagaatccaaaaaggaggaaactccaggaactcctaaaaagaaggaaactaagaaaaaattcaaacttgagccacatgatgatcaggtttttctggatggaaatgaggtgtatgtatggatctatgacccagttcactttaaaacatttgtcatgggattaattcttgtgattgcagtaatagcggccaccctcttccccctttggccagcagaaatgagagtaggtgtttattacctcagtgtgggtgcaggctgttttgtagccagtattcttctccttgctgttgctcgatgcattctatttctcatcatttggctcataactggaggaaggcaccacttttggttcttgccaaatctgactgctgatgtgggcttcattgactccttcaggcctctgtacacacatgaatacaaaggaccaaaagcagacttaaagaaagatgagaagtctgaaaccaaaaagcaacagaagtccgacagtgaggaaaagtcagacagtgagaaaaaggaagatgaggaggggaaagtaggaccaggaaatcatggaacagaaggctcggggggagaacggcattcagacacggacagtgacaggagggaagatgatcgatcccagcacagtagtggaaatggaaatgattttgaaatgataacaaaagaggaactggaacagcaaacagatggggattgtgaagaggatgaggaagaggaaaatgatggagaaacacctaaatcttcacatgaaaaatcataatctgactaattttgggactgaatgaataagtacaagaggaaatccacactgatttgtacgtctgactgagagaaagatggtcgtctccagcagagaaagtgaacagcatttgttggaaggtgatggctctccctcctccctccccatttcattggcgtaacgtaaagtgtattctgtacataatttacaaataaaacattttattttaattgtta

SEQ ID NO: 302063 - DNA, 947 bp, Artificial Sequence
  derived and/or modified sequence
gggaaccgggcggagcggccaacatggcggaacgcaggagacacaagaagcggatccaggaagttggtgaaccatctaaagatgagaagtctgaaaccaaaaagcaacagaagtccgacagtgaggaaaagtcagacagtgagaaaaaggaagatgaggaggggaaagtaggaccaggaaatcatggaacagaaggctcggggggagaacggcattcagacacggacagtgacaggagggaagatgatcgatcccagcacagtagtggaaatggaaatgattttgaaatgataacaaaagaggaactggaacagcaaacagatggggattgtgaagaggatgaggaagaggaaaatgatggagaaacacctaaatcttcacatgaaaaatcataatctgactaattttgggactgaatgaataagtacaagaggttggattttctatgttggctgattaccatattgaacacatggcatttgtagcattctttaaatctatctactgaaatgtatttgacattcaagcagttatattcggtccttcattttatagaatattggcactattattggtacagtttaaagccattaatatgttttatccatttgataattttacagtaagtaggtctcattcattttgacagttatcaaagatgtactttccacagttaaatttacattaatggcaatttttgatagttttatggctttttactgttagactaatcaaaaataactttaaaaggaacaaagaaactccaacatttcacattatgcatagttatgtagccatttcacagtttctttaagatgtgtaaactcattgtccttgatagtttttatttttcattataaaattataccaggagatttcttttaagattctgagttagcagagttcaaaactattttgtggaaacaagccaactagtaacaatgcag

SEQ ID NO: 302064 - DNA, 1200 bp, Artificial Sequence
  derived and/or modified sequence
atggccgagagaagaagacacaagaagagaatccaggaggtgggcgagcccagcaaggaggagaaggccgtggccaagtacctgagattcaactgccccaccaagagcaccaacatgatgggccacagagtggactacttcatcgccagcaaggccgtggactgcctgctggacagcaagtgggccaaggccaagaagggcgaggaggccctgttcaccaccagagagagcgtggtggactactgcaacagactgctgaagaagcagttcttccacagagccctgaaggtgatgaagatgaagtacgacaaggacatcaagaaggagaaggacaagggcaaggccgagagcggcaaggaggaggacaagaagagcaagaaggagaacatcaaggacgagaagaccaagaaggagaaggagaagaagaaggacggcgagaaggaggagagcaagaaggaggagacccccggcacccccaagaagaaggagaccaagaagaagttcaagctggagccccacgacgaccaggtgttcctggacggcaacgaggtgtacgtgtggatctacgaccccgtgcacttcaagaccttcgtgatgggcctgatcctggtgatcgccgtgatcgccgccaccctgttccccctgtggcccgccgagatgagagtgggcgtgtactacctgagcgtgggcgccggctgcttcgtggccagcatcctgctgctggccgtggccagatgcatcctgttcctgatcatctggctgatcaccggcggcagacaccacttctggttcctgcccaacctgaccgccgacgtgggcttcatcgacagcttcagacccctgtacacccacgagtacaagggccccaaggccgacctgaagaaggacgagaagagcgagaccaagaagcagcagaagagcgacagcgaggagaagagcgacagcgagaagaaggaggacgaggagggcaaggtgggccccggcaaccacggcaccgagggcagcggcggcgagagacacagcgacaccgacagcgacagaagagaggacgacagaagccagcacagcagcggcaacggcaacgacttcgagatgatcaccaaggaggagctggagcagcagaccgacggcgactgcgaggaggacgaggaggaggagaacgacggcgagacccccaagagcagccacgagaagagctag

SEQ ID NO: 302065 - DNA, 372 bp, Artificial Sequence
  derived and/or modified sequence
atggccgagagaagaagacacaagaagagaatccaggaggtgggcgagcccagcaaggacgagaagagcgagaccaagaagcagcagaagagcgacagcgaggagaagagcgacagcgagaagaaggaggacgaggagggcaaggtgggccccggcaaccacggcaccgagggcagcggcggcgagagacacagcgacaccgacagcgacagaagagaggacgacagaagccagcacagcagcggcaacggcaacgacttcgagatgatcaccaaggaggagctggagcagcagaccgacggcgactgcgaggaggacgaggaggaggagaacgacggcgagacccccaagagcagccacgagaagagctag

SEQ ID NO: 302066 - DNA, 144 bp, Artificial Sequence
  derived and/or modified sequence
atggacagagaggagagaaagaccatcaaccagggccaggaggacgagatggagatctacggctacaacctgagcagatggaagctggccatcgtgagcctgggcgtgatctgcagcggcggcttcctgctgctgctgctgtag

SEQ ID NO: 302067 - DNA, 144 bp, Artificial Sequence
  derived and/or modified sequence
atggaccgggaggaacggaagaccatcaaccagggacaagaggacgagatggaaatttatggatataacctgagcagatggaagcttgccatcgtcagcctaggtgttatttgctcagggggattcctgctgctgctgctgtag

SEQ ID NO: 302068 - DNA, 144 bp, Artificial Sequence
  derived and/or modified sequence
atggaccgggaggagaggaagaccatcaaccagggccaggaggatgagatggagatctacggctacaacctgagccgctggaagctggccatcgtgtccctgggcgtcatctgcagcggcggcttcctgctgctgctgctgtag

SEQ ID NO: 302069 - DNA, 144 bp, Artificial Sequence
  derived and/or modified sequence
atggaccgggaggagcggaagaccatcaaccagggccaggaggacgaaatggagatctacggctacaaccttagccgttggaagcttgctattgtgtctttaggagttatttgttccggtggctttctgcttctcctgttgtag

SEQ ID NO: 302070 - DNA, 144 bp, Artificial Sequence
  derived and/or modified sequence
atggacagagaggaaagaaagactataaatcagggccaggaagatgagatggagatatatggctacaacttgagtcgatggaaactagccatcgtgtcactaggcgtaatctgctcaggcggtttccttctccttttactgtag

SEQ ID NO: 302071 - protein, 716 aa, Artificial Sequence
  derived and/or modified sequence
MVATHSTVRVSVCRVNEEIEEIFSTDLVPGDVMVIPLNGTIMPCDAVLINGTCIVNESMLTGESVPVTKTNLPNPSVDVKGIGDELYNPETHKRHTLFCGTTVIQTRFYTGELVKAIVVRTGFSTSKGQLVRSILYPKPTDFKLYRDAYLFLLCLVAVAGIGFIYTIINSILNEVQVGVIIIESLDIITITVPPALPAAMTAGIVYAQRRLKKIGIFCISPQRINICGQLNLVCFDKTGTLTEDGLDLWGIQRVENARFLSPEENVCNEMLVKSQFVACMATCHSLTKIEGVLSGDPLDLKMFEAIGWILEEATEEETALHNRIMPTVVRPPKQLLPESTPAGNQEMELFELPATYEIGIVRQFPFSSALQRMSVVARVLGDRKMDAYMKGAPEAIAGLCKPETVPVDFQNVLEDFTKQGFRVIALAHRKLESKLTWHKVQNISRDAIENNMDFMGLIIMQNKLKQETPAVLEDLHKANIRTVMVTGDSMLTAVSVARDCGMILPQDKVIIAEALPPKDGKVAKINWHYADSLTQCSHPSAIDPEAIPVKLVHDSLEDLQMTRYHFAMNGKSFSVILEHFQDLVPKLMLHGTVFARMAPDQKTQLIEALQNVDYFVGMCGDGANDCGALKRAHGGISLSELEASVASPFTSKTPSISCVPNLIREGRAALITSFCELALFSIVTYSLDHFIISILISNMLVLFFSDFHNCAFYSLV

SEQ ID NO: 302072 - DNA, 2018 bp, Artificial Sequence
  derived and/or modified sequence
ggcgggagtcgccggggctccttcctgtggtgcagcttcgggtctcggagtttggcccctactctgaccccaccccagctccgctccgccttgggttccggcagaacccgccttgcggtagccatggcagcaggctccgaggcgaccactcctgtgatcgttgcggctggggctggaggggaggaaggtgaacatgtcaaaccttttaagccagagaaagcaaaagaaattatcatgtctttacaacaacctgcaatcttctgtaacatggtgtttgattggccagcacgacactggaatgctaaatacctttcgcaggtccttcatggcaagcagatacgattcagaatggggatgaaaagcatgagcacagttcctcagtttgaaactacatgtaattacgtagaagctacactcgaagagtttctgacctggaactgtgaccagtctagtatttctggaccatttagagattatgaccattccaagttctgggcttatgctgactataaatattttgtcagtctatttgaagacaagacagatcttttccaggatgtgaaatggtctgacttcgggtttcctggaagaaatggacaggaaagtacattgtggattggctccttgggagcccacacaccctgtcatctggactcctatggttgtaacttggtattccaggtacaaggaaggctggagtgcaatggcatgatcatagctcctggacctcaagccatcctcctgccgcagcctctcaagtatctaggactacaggaaacgatggcatctctttcctcctgaagatactcctttcctttatccaactagaatcccttatgaagaatctagtgtgttcagtaaaatcaatgttgtcaatcctgatttaaagcgttttcctcagttccggaaagctcaaagacatgcggttacactgagcccaggacaggttctctttgttcccagacactggtggcattacgtagaatccattgatcctgtcactgtcagtataaactcatggattgaactggaagaggatcacctagcccgggtagaagaggcaatcacccgtatgcttgtgtgtgccctgaaaactgcagagaatccacaaaataccagagcctggttaaaccccactgaggttgaggaaacgtcccatgcagtcaactgttgctacttaaatgcagctgtttctgcattttttgatcgctgcagaacatctgaggtagtagaaatccaagcactgagaacagatggagagcacatgaaaaaggaagaattaaatgtgtgcaaccacatggaggtgggccaaacaggtagccagaacttgaccacaggaacagacaaaccggaggcagcaagtccctttggccctgatctggtccctgtagcacagaggtccgaagaaccgccttcagaaagaggaggcatatttggaagtgatgggaaagactttgtggacaaggatggagaacactttggaaaattgcattgtgccaagagacaacaaataatgagcaacagtgaaaatgcaattgaggaacagattgcctcaaatactactacgactcctcaaacattcatttctacggatgacttgctggactgcttggtgaatccacaagtaaccaggatagtggcacaacttttgatacaaggaagaagtttatgattcaagtggaagatgacttttaaaataatattttttaaatatatatttttaagtagtatgactaaaataaagatgaaccagcaaaaggtcagtttgcacatttgtaaatgtatttatccttaccgaattacatgtcagtctgttgccaccttctttcatgcacattcctctttggccaaactggctgctctttgtttgtaagcttttgttcctctctcatcccatacttttagcctgtgtcaaatgtaagtcccaagtatttccagcaggaagtaatgtcttcctcagcctcaaccagggaccaaccggctgcttacttttgcaaataaaattttactagaacacg

SEQ ID NO: 302073 - protein, 225 aa, Artificial Sequence
  derived and/or modified sequence
MAAGSEATTPVIVAAGAGGEEGEHVKPFKPEKAKEIIMSLQQPAIFCNMVFDWPARHWNAKYLSQVLHGKQIRFRMGMKSMSTVPQFETTCNYVEATLEEFLTWNCDQSSISGPFRDYDHSKFWAYADYKYFVSLFEDKTDLFQDVKWSDFGFPGRNGQESTLWIGSLGAHTPCHLDSYGCNLVFQVQGRLECNGMIIAPGPQAILLPQPLKYLGLQETMASLSS

SEQ ID NO: 302074 - DNA, 678 bp, Artificial Sequence
  derived and/or modified sequence
atggccgccggcagcgaggccaccacccccgtgatcgtggccgccggcgccggcggcgaggagggcgagcacgtgaagcccttcaagcccgagaaggccaaggagatcatcatgagcctgcagcagcccgccatcttctgcaacatggtgttcgactggcccgccagacactggaacgccaagtacctgagccaggtgctgcacggcaagcagatcagattcagaatgggcatgaagagcatgagcaccgtgccccagttcgagaccacctgcaactacgtggaggccaccctggaggagttcctgacctggaactgcgaccagagcagcatcagcggccccttcagagactacgaccacagcaagttctgggcctacgccgactacaagtacttcgtgagcctgttcgaggacaagaccgacctgttccaggacgtgaagtggagcgacttcggcttccccggcagaaacggccaggagagcaccctgtggatcggcagcctgggcgcccacaccccctgccacctggacagctacggctgcaacctggtgttccaggtgcagggcagactggagtgcaacggcatgatcatcgcccccggcccccaggccatcctgctgccccagcccctgaagtacctgggcctgcaggagaccatggccagcctgagcagctag

SEQ ID NO: 302075 - DNA, 678 bp, Artificial Sequence
  derived and/or modified sequence
atggctgcaggttctgaggcaacaacacccgtgattgtcgctgccggcgccgggggtgaggaaggtgaacacgtcaaaccgttcaagccagagaaagccaaagagattattatgtcgctccagcagccagccatattttgtaacatggtgttcgactggcctgccagacattggaacgcaaagtatctatcacaggtgctgcacggaaaacagatccggtttagaatgggtatgaagagcatgtctacggtaccccaattcgaaaccacatgtaattatgtcgaagctacattggaagagttcctcacctggaactgtgatcagtcaagcatctccggtccttttagagactatgaccattccaagttctgggcctacgcagattacaagtatttcgtgtccctgttcgaggacaagactgacttgtttcaggatgtgaaatggtctgactttggctttcccgggagaaatgggcaggaaagtaccctctggattggatccctgggggcgcacacgccatgtcacctggattcctacggttgcaatctggtcttccaggtgcagggacgcctggagtgtaacggaatgattattgcacctggtccccaggcaatcctcctgccacagcccctaaaatacctggggctccaagagacgatggcttccctgagttcctag

SEQ ID NO: 302076 - DNA, 678 bp, Artificial Sequence
  derived and/or modified sequence
atggctgctggcagcgaggccaccacccctgtgattgtggccgccggggccggcggggaggagggggagcacgtgaagcccttcaagccagagaaggccaaggagatcatcatgagcctgcagcagcctgccatcttctgcaacatggtgtttgactggccagcccggcactggaatgccaagtacctgagccaggtgctgcacggcaagcagatccgcttcaggatgggcatgaagtccatgagcacagtgccccagtttgagaccacctgcaactacgtggaggccaccctggaggagttcctgacctggaactgtgaccagagcagcatcagcggccccttccgggactatgaccacagcaagttctgggcctatgctgactacaagtactttgtgtccctgtttgaggacaagacagacctcttccaggatgtgaagtggagcgactttggcttccctggaagaaatggccaggagagcaccctgtggattggcagcctgggcgcccacaccccctgccacctggacagctatggctgcaacctggtgttccaggtgcagggccgcctggagtgcaatggcatgatcatcgcccctggcccccaggccatcctgctgccccagcccctgaagtacctgggcctgcaggagaccatggccagcctgagcagctag

SEQ ID NO: 302077 - DNA, 678 bp, Artificial Sequence
  derived and/or modified sequence
atggccgccggcagcgaggccaccacccccgtgatcgtggccgccggcgcagggggagaagagggagagcatgtcaagcccttcaagcccgagaaagctaaagagattatcatgtccttacagcagccagcaattttttgtaatatggtgtttgattggccggccagacattggaatgccaaatatctttcacaagtgcttcatggaaaacagattcgcttccgaatgggaatgaaaagcatgagtacagtgcctcaattcgagaccacatgcaattatgtcgaggccaccctagaagagtttctgacctggaattgtgatcaaagtagcatctcggggcccttccgggattacgatcacagtaaattttgggcttatgcagactacaagtacttcgtaagtctgttcgaggataagacagacctattccaggacgtgaagtggagcgattttggcttccctggtaggaacggtcaggaaagcactctctggattggaagtcttggagcgcacacaccatgtcacttagattcctatgggtgcaatctggtctttcaggttcagggaagacttgaatgcaacgggatgatcatcgcccccggcccacaggccatcttgctgccccaacccctcaaatacctgggattacaggaaactatggcgagtctaagcagctag

SEQ ID NO: 302078 - DNA, 678 bp, Artificial Sequence
  derived and/or modified sequence
atggcagccggtagcgaggcaaccaccccagtgatagtggccgctggggctgggggagaggagggggagcacgtcaaacctttcaaacccgagaaggccaaggagatcatcatgtcactgcagcagccagctatattctgtaacatggtgttcgattggccagccagacattggaatgctaagtacctgtctcaggtgctacacggtaagcagatccggttccggatggggatgaagagtatgtctacagttccccagtttgaaacaacctgtaattatgttgaagcaactctggaggagtttctgacctggaattgtgatcagtcctctatctctggtccatttagggattatgaccactcaaagttttgggcatatgccgactataaatattttgtctcactgttcgaagacaagactgacctgtttcaggacgttaagtggtcagatttcggatttccaggaagaaacgggcaggagtcgacactgtggataggatctctgggagcgcatacaccgtgccacctggacagctatggctgtaacctggtttttcaggtgcaggggcgtcttgaatgcaacggaatgatcattgctccaggcccacaggccattctcttaccacaaccgctgaagtatttgggcctgcaggagacaatggcttcactgagttcctag

SEQ ID NO: 302079 - protein, 142 aa, Artificial Sequence
  derived and/or modified sequence
MSISSDEVNFLVYRYLQESGFSHSAFTFGIESHISQSNINGALVPPAALISIIQKGLQYVEAEVSINEDGTLFDGRPIESLSLIDAVMPDVVQTRQQAYRDKLAQQQAAAAAAAAAAASQQGSAKNGENTANGEENGAHTIA

SEQ ID NO: 302080 - protein, 33 aa, Artificial Sequence
  derived and/or modified sequence
MSISSDEVNFLVYRYLQESGFSHSAFTFGIESH

SEQ ID NO: 302081 - protein, 87 aa, Artificial Sequence
  derived and/or modified sequence
MSISSDEVNFLVYRYLQESGFSHSAFTFGIESHISQSNINGALVPPAALISIIQKGLQYVEAEVSINEDGTLFDGRPIESLSLIDAV

SEQ ID NO: 302082 - protein, 68 aa, Artificial Sequence
  derived and/or modified sequence
MSISSDEVNFLVYRYLQESGFSHSAFTFGIESHISQSNINGALVPPAALISIIQKGLQYVEAEVSINE

SEQ ID NO: 302083 - protein, 62 aa, Artificial Sequence
  derived and/or modified sequence
MSISSDEVNFLVYRYLQESGFSHSAFTFGIESHISQSNINGALVPPAALISIIQKGLQYVEA

SEQ ID NO: 302084 - protein, 514 aa, Artificial Sequence
  derived and/or modified sequence
MSISSDEVNFLVYRYLQESGFSHSAFTFGIESHISQSNINGALVPPAALISIIQKGLQYVEAEVSINEDGTLFDGRPIESLSLIDAVMPDVVQTRQQAYRDKLAQQQAAAAAAAAAAASQQGSAKNGENTANGEENGAHTIANNHTDMMEVDGDVEIPPNKAVVLRGHESEVFICAWNPVSDLLASGSGDSTARIWNLSENSTSGSTQLVLRHCIREGGQDVPSNKDVTSLDWNSEGTLLATGSYDGFARIWTKDGNLASTLGQHKGPIFALKWNKKGNFILSAGVDKTTIIWDAHTGEAKQQFPFHSAPALDVDWQSNNTFASCSTDMCIHVCKLGQDRPIKTFQGHTNEVNAIKWDPTGNLLASCSDDMTLKIWSMKQDNCVHDLQAHNKEIYTIKWSPTGPGTNNPNANLMLASASFDSTVRLWDVDRGICIHTLTKHQEPVYSVAFSPDGRYLASGSFDKCVHIWNTQTGALVHSYRGTGGIFEVCWNAAGDKVGASASDGSVCVLDLRK

SEQ ID NO: 302085 - protein, 96 aa, Artificial Sequence
  derived and/or modified sequence
MSISSDEVNFLVYRYLQESGFSHSAFTFGIESHISQSNINGALVPPAALISIIQKGLQYVEAEVSINEDGTLFDGRPIESLSLIDAVMPDVVQTRQ

SEQ ID NO: 302086 - protein, 81 aa, Artificial Sequence
  derived and/or modified sequence
MSISSDEVNFLVYRYLQESGFSHSAFTFGIESHISQSNINGALVPPAALISIIQKGLQYVEAEVSINEDGTLFDGRPIESL

SEQ ID NO: 302087 - protein, 120 aa, Artificial Sequence
  derived and/or modified sequence
MSISSDEVNFLVYRYLQESGFSHSAFTFGIESHISQSNINGALVPPAALISIIQKGLQYVEAEVSINEDGTLFDGRPIESLSLIDAVMPDVVQTRQQAYRDKLAQQQAAAAAAAAAAASQ

SEQ ID NO: 302088 - protein, 376 aa, Artificial Sequence
  derived and/or modified sequence
MPDVVQTRQQAYRDKLAQQQAAAAAAAAAAASQQGSAKNGENTANGEENGAHTIARIWNLSENSTSGSTQLVLRHCIREGGQDVPSNKDVTSLDWNSEGTLLATGSYDGFARIWTKDGNLASTLGQHKGPIFALKWNKKGNFILSAGVDKTTIIWDAHTGEAKQQFPFHSAPALDVDWQSNNTFASCSTDMCIHVCKLGQDRPIKTFQGHTNEVNAIKWDPTGNLLASCSDDMTLKIWSMKQDNCVHDLQAHNKEIYTIKWSPTGPGTNNPNANLMLASASFDSTVRLWDVDRGICIHTLTKHQEPVYSVAFSPDGRYLASGSFDKCVHIWNTQTGALVHSYRGTGGIFEVCWNAAGDKVGASASDGSVCVLDLRK

SEQ ID NO: 302089 - DNA, 429 bp, Artificial Sequence
  derived and/or modified sequence
atgagcatcagcagcgacgaggtgaacttcctggtgtacagatacctgcaggagagcggcttcagccacagcgccttcaccttcggcatcgagagccacatcagccagagcaacatcaacggcgccctggtgccccccgccgccctgatcagcatcatccagaagggcctgcagtacgtggaggccgaggtgagcatcaacgaggacggcaccctgttcgacggcagacccatcgagagcctgagcctgatcgacgccgtgatgcccgacgtggtgcagaccagacagcaggcctacagagacaagctggcccagcagcaggccgccgccgccgccgccgccgccgccgccgccagccagcagggcagcgccaagaacggcgagaacaccgccaacggcgaggagaacggcgcccacaccatcgcctag

SEQ ID NO: 302090 - DNA, 102 bp, Artificial Sequence
  derived and/or modified sequence
atgagcatcagcagcgacgaggtgaacttcctggtgtacagatacctgcaggagagcggcttcagccacagcgccttcaccttcggcatcgagagccactag

SEQ ID NO: 302091 - DNA, 264 bp, Artificial Sequence
  derived and/or modified sequence
atgagcatcagcagcgacgaggtgaacttcctggtgtacagatacctgcaggagagcggcttcagccacagcgccttcaccttcggcatcgagagccacatcagccagagcaacatcaacggcgccctggtgccccccgccgccctgatcagcatcatccagaagggcctgcagtacgtggaggccgaggtgagcatcaacgaggacggcaccctgttcgacggcagacccatcgagagcctgagcctgatcgacgccgtgtag

SEQ ID NO: 302092 - DNA, 207 bp, Artificial Sequence
  derived and/or modified sequence
atgagcatcagcagcgacgaggtgaacttcctggtgtacagatacctgcaggagagcggcttcagccacagcgccttcaccttcggcatcgagagccacatcagccagagcaacatcaacggcgccctggtgccccccgccgccctgatcagcatcatccagaagggcctgcagtacgtggaggccgaggtgagcatcaacgagtag

SEQ ID NO: 302093 - DNA, 189 bp, Artificial Sequence
  derived and/or modified sequence
atgagcatcagcagcgacgaggtgaacttcctggtgtacagatacctgcaggagagcggcttcagccacagcgccttcaccttcggcatcgagagccacatcagccagagcaacatcaacggcgccctggtgccccccgccgccctgatcagcatcatccagaagggcctgcagtacgtggaggcctag

SEQ ID NO: 302094 - DNA, 1545 bp, Artificial Sequence
  derived and/or modified sequence
atgagcatcagcagcgacgaggtgaacttcctggtgtacagatacctgcaggagagcggcttcagccacagcgccttcaccttcggcatcgagagccacatcagccagagcaacatcaacggcgccctggtgccccccgccgccctgatcagcatcatccagaagggcctgcagtacgtggaggccgaggtgagcatcaacgaggacggcaccctgttcgacggcagacccatcgagagcctgagcctgatcgacgccgtgatgcccgacgtggtgcagaccagacagcaggcctacagagacaagctggcccagcagcaggccgccgccgccgccgccgccgccgccgccgccagccagcagggcagcgccaagaacggcgagaacaccgccaacggcgaggagaacggcgcccacaccatcgccaacaaccacaccgacatgatggaggtggacggcgacgtggagatcccccccaacaaggccgtggtgctgagaggccacgagagcgaggtgttcatctgcgcctggaaccccgtgagcgacctgctggccagcggcagcggcgacagcaccgccagaatctggaacctgagcgagaacagcaccagcggcagcacccagctggtgctgagacactgcatcagagagggcggccaggacgtgcccagcaacaaggacgtgaccagcctggactggaacagcgagggcaccctgctggccaccggcagctacgacggcttcgccagaatctggaccaaggacggcaacctggccagcaccctgggccagcacaagggccccatcttcgccctgaagtggaacaagaagggcaacttcatcctgagcgccggcgtggacaagaccaccatcatctgggacgcccacaccggcgaggccaagcagcagttccccttccacagcgcccccgccctggacgtggactggcagagcaacaacaccttcgccagctgcagcaccgacatgtgcatccacgtgtgcaagctgggccaggacagacccatcaagaccttccagggccacaccaacgaggtgaacgccatcaagtgggaccccaccggcaacctgctggccagctgcagcgacgacatgaccctgaagatctggagcatgaagcaggacaactgcgtgcacgacctgcaggcccacaacaaggagatctacaccatcaagtggagccccaccggccccggcaccaacaaccccaacgccaacctgatgctggccagcgccagcttcgacagcaccgtgagactgtgggacgtggacagaggcatctgcatccacaccctgaccaagcaccaggagcccgtgtacagcgtggccttcagccccgacggcagatacctggccagcggcagcttcgacaagtgcgtgcacatctggaacacccagaccggcgccctggtgcacagctacagaggcaccggcggcatcttcgaggtgtgctggaacgccgccggcgacaaggtgggcgccagcgccagcgacggcagcgtgtgcgtgctggacctgagaaagtag

SEQ ID NO: 302095 - DNA, 291 bp, Artificial Sequence
  derived and/or modified sequence
atgagcatcagcagcgacgaggtgaacttcctggtgtacagatacctgcaggagagcggcttcagccacagcgccttcaccttcggcatcgagagccacatcagccagagcaacatcaacggcgccctggtgccccccgccgccctgatcagcatcatccagaagggcctgcagtacgtggaggccgaggtgagcatcaacgaggacggcaccctgttcgacggcagacccatcgagagcctgagcctgatcgacgccgtgatgcccgacgtggtgcagaccagacagtag

SEQ ID NO: 302096 - DNA, 246 bp, Artificial Sequence
  derived and/or modified sequence
atgagcatcagcagcgacgaggtgaacttcctggtgtacagatacctgcaggagagcggcttcagccacagcgccttcaccttcggcatcgagagccacatcagccagagcaacatcaacggcgccctggtgccccccgccgccctgatcagcatcatccagaagggcctgcagtacgtggaggccgaggtgagcatcaacgaggacggcaccctgttcgacggcagacccatcgagagcctgtag

SEQ ID NO: 302097 - DNA, 363 bp, Artificial Sequence
  derived and/or modified sequence
atgagcatcagcagcgacgaggtgaacttcctggtgtacagatacctgcaggagagcggcttcagccacagcgccttcaccttcggcatcgagagccacatcagccagagcaacatcaacggcgccctggtgccccccgccgccctgatcagcatcatccagaagggcctgcagtacgtggaggccgaggtgagcatcaacgaggacggcaccctgttcgacggcagacccatcgagagcctgagcctgatcgacgccgtgatgcccgacgtggtgcagaccagacagcaggcctacagagacaagctggcccagcagcaggccgccgccgccgccgccgccgccgccgccgccagccagtag

SEQ ID NO: 302098 - DNA, 604 bp, Artificial Sequence
  derived and/or modified sequence
aattgcctctcaccccccggaggggttattttgggggtggttggaggcggtggcggcggcggcgaggaggggaatttccttgtgcctccattcccgggaggggggagcggcgttggaggccaccgtttccagggttatatcctgtgttgtgacctcatggtttaagtgggaataaagatgagtataagcagtgatgaggtcaacttcttggtatatagatacttgcaagagtcaggattttctcattcagcatttacctttggtatagaaagccatatcagtcagtccaatataaatggtgccctcgtcccacccgctgcattgatttctatcatccagaaaggtctacagtatgtagaagcagaagttagtattaatgaggatggtaccttgtttgatggtcgaccaatagagtctctgtccctgatagatgccgtaatgcctgatgtagtacaaacaagacaacaagcttatagagataagcttgcacagcaacaggcagcagctgctgcagctgccgcagctgcagccagccaacaaggatctgcaaaaaatggagaaaacacagcaaatggggaggagaatggagcacatactatagcaa

SEQ ID NO: 302099 - DNA, 429 bp, Artificial Sequence
  derived and/or modified sequence
atgagtatctctagcgacgaagtgaatttcctggtgtatcggtacctgcaagagtcagggttttctcatagcgcatttacgttcgggattgagtcacacataagccaaagtaacatcaacggagcattagtgcctccagccgcccttatctctattattcaaaagggcttacagtacgttgaagcagaggtgtccatcaacgaggatggaacactctttgatggaaggcctatcgagagcttgtccctaatagacgccgtgatgccagatgttgtacaaactcgacaacaggcctatagagataagcttgcccaacagcaggcggccgctgctgcggccgccgcagccgccgcaagccagcaggggagcgctaaaaatggggagaataccgctaatggagaggagaacggggcgcatacgatcgcctag

SEQ ID NO: 302100 - DNA, 102 bp, Artificial Sequence
  derived and/or modified sequence
atgagcatcagcagcgacgaggtgaattttttggtgtataggtatctacaggagagcggcttcagccatagcgctttcacttttggcatcgagtcacactag

SEQ ID NO: 302101 - DNA, 264 bp, Artificial Sequence
  derived and/or modified sequence
atgtcaatttcctcggacgaagtgaattttctagtgtatagatatctgcaggaatctggcttcagccactcagcctttaccttcgggattgagagccatatttctcagagcaatatcaatggcgccctcgtccctcccgccgcactgatcagtataattcagaaaggtctgcaatacgtcgaggccgaggtttccataaacgaagacggcaccctctttgacgggaggcccatagaatctctgtctctcattgatgccgtttag

SEQ ID NO: 302102 - DNA, 207 bp, Artificial Sequence
  derived and/or modified sequence
atgtcaatctcgagcgatgaggtgaacttcttggtgtatcgatacctccaggagagcgggttctctcactctgcatttaccttcggaatcgagtcacatatcagccagagcaatattaacggggctctcgtaccaccagcggccctgataagcataatccagaaagggttgcagtacgttgaggctgaggtttccattaacgagtag

SEQ ID NO: 302103 - DNA, 189 bp, Artificial Sequence
  derived and/or modified sequence
atgagtatctcaagtgacgaggtgaacttccttgtgtacagatatttgcaggaatccggcttctctcactccgcgtttactttcggtatcgagtcacatattagtcaaagtaatatcaacggcgccctggttcccccagccgctctgatatcaatcatacaaaagggattacaatacgtcgaggcatag

SEQ ID NO: 302104 - DNA, 1545 bp, Artificial Sequence
  derived and/or modified sequence
atgtctatctcttcagacgaggtcaatttcctcgtgtacaggtatcttcaagagagcggttttagtcattccgcattcacatttgggatcgaatcccacatctcccagagtaatatcaacggcgcgttagtgccccccgcagcactgatctctattattcaaaaaggtctgcagtatgttgaggccgaggtgtctatcaacgaagatggcacgctgtttgacggacgccccattgaaagcctgtcactaatagatgccgttatgcctgatgtggtgcaaacccggcagcaagcgtacagggataagctggctcagcagcaggccgcagcggccgcagccgctgcagccgctgcatcgcagcaggggagtgccaagaatggcgagaacacggctaacggcgaagaaaacggcgctcatactatagcaaataatcacaccgacatgatggaggttgatggagatgtcgaaatccctcccaacaaagccgtggtactccgcgggcatgagtcagaagtcttcatttgcgcatggaaccctgtctcagatctactagcctccggcagtggcgacagtacagctagaatctggaatctgagcgagaactccacgtccggcagcacccagctcgtacttagacattgtattcgggaaggaggccaggatgtcccaagcaataaagacgtgacctccctggattggaatagtgaaggcaccttactggctaccggtagctacgacggatttgcccggatttggaccaaggacggcaacttggcctccacgctcgggcagcataaaggtcctatctttgccctaaaatggaacaagaagggaaactttatcctttccgctggtgtagacaagaccactatcatctgggacgcgcacacaggggaggctaaacagcagttcccctttcacagcgcgcctgctttagacgtcgactggcagtctaataatacgttcgcaagctgttccacggacatgtgtatccacgtctgcaagttagggcaggacaggcccatcaagacttttcaaggacacactaacgaggtaaacgctatcaaatgggatcctacaggtaacctccttgccagttgttctgatgacatgacacttaagatctggagtatgaaacaggacaactgcgtgcacgacctccaggcccataataaagagatttacaccattaagtggtccccaacgggacccgggacaaacaatcccaacgctaacctgatgctcgcctccgctagctttgattcgaccgtgagactctgggacgtggatcgaggcatctgtattcacactcttaccaagcatcaagaacccgtgtactccgtggctttttctcccgacggccgttatcttgccagcgggtccttcgataaatgcgtgcacatctggaatactcagactggagcattagtgcatagctatcgcgggaccggggggatctttgaagtgtgttggaacgcggcgggggataaagtgggggcatcagctagcgacgggagcgtttgcgtattggatcttcgtaagtag

SEQ ID NO: 302105 - DNA, 291 bp, Artificial Sequence
  derived and/or modified sequence
atgagtatctccagtgacgaggttaatttcctggtctataggtacctgcaggaaagtggcttttctcacagcgcgttcacatttggcatcgagtctcacatctcgcagtctaatattaacggcgctttggtccctcctgccgctcttatatctatcatacaaaagggcctgcagtacgtggaggccgaggtgagtattaatgaagatggaactcttttcgacggacggcccattgaatccctctctcttatcgacgccgtgatgcctgacgtagttcagactcggcagtag

SEQ ID NO: 302106 - DNA, 429 bp, Artificial Sequence
  derived and/or modified sequence
atgagtataagctctgacgaagtgaattttttggtgtaccgctacctgcaagaatctggcttcagccactccgcctttacctttggaatagaatcccacatcagccaatccaacattaacggagctttggtgcctcctgctgcactgatcagcattatacagaaggggctgcagtacgtggaagccgaagtaagcatcaacgaggacggaaccttgttcgacggtcgcccaatcgagagcctgagcctcatagacgcagttatgcccgacgtcgttcagacccgtcagcaggcatatagggataagctggctcagcagcaggctgccgccgccgcggccgcagcagctgcagcatcacagcaggggagcgcaaagaacggagaaaataccgccaacggcgaagaaaatggagctcacacaatcgcctag

SEQ ID NO: 302107 - DNA, 246 bp, Artificial Sequence
  derived and/or modified sequence
atgtctatttcctccgacgaggtgaacttccttgtctatagatacctgcaggagtccgggttcagtcattccgctttcacctttgggatagagagtcatatcagtcagtccaacatcaacggagccctggtgccccccgccgcactgatctctatcatccagaagggccttcaatatgtagaggcagaagtatccattaatgaggatggcactctgtttgatggccgacctatagagtccctgtag

SEQ ID NO: 302108 - DNA, 363 bp, Artificial Sequence
  derived and/or modified sequence
atgagcatctcctccgacgaggtgaacttcctcgtgtacaggtacctgcaggagtccggcttttcacatagcgcatttaccttcggcatagagtctcacatctcacaatcgaacattaacggagcgctcgttcctcccgcagctctgatctctatcatccagaaggggctacagtacgtggaggccgaggtgagcattaatgaagatggcactcttttcgacggccgacccatagaaagtctatcactgatcgatgccgtgatgccagatgtggtccaaactcgacagcaggcctaccgggataagttagctcagcagcaggcagctgccgctgctgccgctgcagccgccgcttcacagtag

SEQ ID NO: 302109 - DNA, 1545 bp, Artificial Sequence
  derived and/or modified sequence
atgtccattagttccgacgaggtcaacttcttggtttatcggtacttgcaggaaagtggtttctcccatagtgccttcactttcggaatcgagtcccacatttcccagtcgaacataaacggcgcgctcgtgcccccagcagcacttatcagcatcatccagaaaggcctgcagtatgttgaggccgaggtgagcatcaatgaagacgggaccctctttgacgggcgacccatcgaaagcctctctctaatcgacgccgtcatgcccgatgtggtgcaaacccgccagcaggcctacagagataagctggcacagcagcaggcggccgccgccgcagcagccgccgccgctgcgagtcagcagggctccgccaaaaatggcgaaaatacagccaatggagaagagaacggtgcacatacaatagcaaacaatcacaccgacatgatggaagtcgatggagacgtggaaatccctcccaataaggcagtggttctgagggggcacgagtctgaggtgttcatttgcgcatggaaccctgtctctgatctgcttgcctccggttccggcgactctaccgcccgaatatggaacctctctgagaactctacatctggcagcactcagctggttctccggcattgcattcgggagggtggccaggatgtgcctagtaataaagatgtgacatctcttgattggaacagcgagggcaccctgctcgcaactggcagttacgacggtttcgctcggatctggactaaagatggaaatctagcctcaaccctgggccagcataagggccccatttttgcgctgaagtggaacaaaaaagggaatttcatcttgtccgcgggagtggacaagacaaccatcatctgggacgcacacacaggcgaagcaaagcaacaattccccttccattctgcccctgctctggacgttgattggcagagtaataacacattcgcctcatgctccacggatatgtgtattcatgtctgtaaattaggacaggatcgtccaattaagacttttcagggacatactaacgaggtgaatgccatcaagtgggatccaaccggcaatttgttagcaagctgcagcgatgatatgactctcaagatctggagcatgaagcaagacaattgcgtccacgacctgcaagcacataataaagaaatttacacaatcaaatggtcacctactggcccagggactaataatcccaacgccaacctgatgctcgcttccgctagttttgactcaaccgtgcgcctctgggacgttgacaggggtatttgtatccataccttgaccaagcaccaagagcccgtgtatagtgttgcttttagcccggacggccggtatctagcctcaggtagttttgacaaatgtgttcacatctggaatacacagacaggcgccctggttcactcctaccggggcaccggcggtatattcgaagtgtgctggaatgctgcgggcgataaggttggcgcttctgcctccgatggctcagtatgcgtgctggacctgcggaagtag

SEQ ID NO: 302110 - DNA, 429 bp, Artificial Sequence
  derived and/or modified sequence
atgagcatcagcagtgatgaggtgaacttcctggtgtaccgctacctgcaggagagcggcttcagccacagcgccttcaccttcggcatcgagagccacatcagccagagcaacatcaacggggccctggtgcccccagctgccctgatcagcatcatccagaagggcctgcagtatgtggaggccgaggtgtccatcaatgaagatggcaccctgtttgatggccggcccatcgagagcctgagcctgattgatgctgtgatgccagatgtggtgcagacccggcagcaggcctacagagacaagctggcccagcagcaggccgctgctgctgctgctgctgctgctgctgccagccagcagggcagcgccaagaatggagagaacacagccaacggggaggagaatggagcccacaccatcgcctag

SEQ ID NO: 302111 - DNA, 102 bp, Artificial Sequence
  derived and/or modified sequence
atgagcatcagcagtgatgaggtgaacttcctggtgtaccgctacctgcaggagagcggcttcagccacagcgccttcaccttcggcatcgagagccactag

SEQ ID NO: 302112 - DNA, 264 bp, Artificial Sequence
  derived and/or modified sequence
atgagcatcagcagtgatgaggtgaacttcctggtgtaccgctacctgcaggagagcggcttcagccacagcgccttcaccttcggcatcgagagccacatcagccagagcaacatcaacggggccctggtgcccccagctgccctgatcagcatcatccagaagggcctgcagtatgtggaggccgaggtgtccatcaatgaagatggcaccctgtttgatggccggcccatcgagagcctgagcctgattgatgctgtgtag

SEQ ID NO: 302113 - DNA, 207 bp, Artificial Sequence
  derived and/or modified sequence
atgagcatcagcagtgatgaggtgaacttcctggtgtaccgctacctgcaggagagcggcttcagccacagcgccttcaccttcggcatcgagagccacatcagccagagcaacatcaacggggccctggtgcccccagctgccctgatcagcatcatccagaagggcctgcagtatgtggaggccgaggtgtccatcaatgaatag

SEQ ID NO: 302114 - DNA, 189 bp, Artificial Sequence
  derived and/or modified sequence
atgagcatcagcagtgatgaggtgaacttcctggtgtaccgctacctgcaggagagcggcttcagccacagcgccttcaccttcggcatcgagagccacatcagccagagcaacatcaacggggccctggtgcccccagctgccctgatcagcatcatccagaagggcctgcagtatgtggaggcctag

SEQ ID NO: 302115 - DNA, 1545 bp, Artificial Sequence
  derived and/or modified sequence
atgagcatcagcagtgatgaggtgaacttcctggtgtaccgctacctgcaggagagcggcttcagccacagcgccttcaccttcggcatcgagagccacatcagccagagcaacatcaacggggccctggtgcccccagctgccctgatcagcatcatccagaagggcctgcagtatgtggaggccgaggtgtccatcaatgaagatggcaccctgtttgatggccggcccatcgagagcctgagcctgattgatgctgtgatgccagatgtggtgcagacccggcagcaggcctacagagacaagctggcccagcagcaggccgctgctgctgctgctgctgctgctgctgccagccagcagggcagcgccaagaatggagagaacacagccaacggggaggagaatggagcccacaccatcgccaacaaccacacagacatgatggaggtggatggagatgtggagatcccccccaacaaggctgtggtgctgcggggccacgagagcgaggtgttcatctgtgcctggaaccctgtgtctgacctgctggccagcggcagcggggacagcacagcccgcatctggaacctgtctgagaacagcaccagcggcagcacccagctggtgctgcggcactgcatccgggagggcggccaggatgtgcccagcaacaaggatgtgaccagcctggactggaacagcgagggcaccctgctggccaccggcagctatgatggctttgcccgcatctggaccaaggatggcaacctggccagcaccctgggccagcacaagggccccatctttgccctgaagtggaacaagaagggcaacttcatcctgtctgctggggtggacaagaccaccatcatctgggatgcccacactggagaggccaagcagcagttccccttccacagcgccccagccctggatgtggactggcagagcaacaacacctttgccagctgcagcacagacatgtgcatccacgtgtgcaagctgggccaggaccggcccatcaagaccttccagggccacaccaatgaggtgaatgccatcaagtgggaccccaccggcaacctgctggccagctgcagtgatgacatgaccctgaagatctggagcatgaagcaggacaactgtgtgcatgacctgcaggcccacaacaaggagatctacaccatcaagtggagccccaccggccctggcaccaacaaccccaatgccaacctgatgctggccagcgccagctttgacagcacagtgcggctgtgggatgtggaccggggcatctgcatccacaccctgaccaagcaccaggagcctgtgtacagcgtggccttctccccagatggccgctacctggccagcggcagctttgacaagtgtgtgcacatctggaacacccagacaggagccctggtgcacagctaccggggcactggaggcatctttgaggtgtgctggaatgctgctggggacaaggtgggcgccagcgccagtgatggctctgtgtgtgtgctggacctgaggaagtag

SEQ ID NO: 302116 - DNA, 291 bp, Artificial Sequence
  derived and/or modified sequence
atgagcatcagcagtgatgaggtgaacttcctggtgtaccgctacctgcaggagagcggcttcagccacagcgccttcaccttcggcatcgagagccacatcagccagagcaacatcaacggggccctggtgcccccagctgccctgatcagcatcatccagaagggcctgcagtatgtggaggccgaggtgtccatcaatgaagatggcaccctgtttgatggccggcccatcgagagcctgagcctgattgatgctgtgatgccagatgtggtgcagacccggcagtag

SEQ ID NO: 302117 - DNA, 246 bp, Artificial Sequence
  derived and/or modified sequence
atgagcatcagcagtgatgaggtgaacttcctggtgtaccgctacctgcaggagagcggcttcagccacagcgccttcaccttcggcatcgagagccacatcagccagagcaacatcaacggggccctggtgcccccagctgccctgatcagcatcatccagaagggcctgcagtatgtggaggccgaggtgtccatcaatgaagatggcaccctgtttgatggccggcccatcgagagcctgtag

SEQ ID NO: 302118 - DNA, 363 bp, Artificial Sequence
  derived and/or modified sequence
atgagcatcagcagtgatgaggtgaacttcctggtgtaccgctacctgcaggagagcggcttcagccacagcgccttcaccttcggcatcgagagccacatcagccagagcaacatcaacggggccctggtgcccccagctgccctgatcagcatcatccagaagggcctgcagtatgtggaggccgaggtgtccatcaatgaagatggcaccctgtttgatggccggcccatcgagagcctgagcctgattgatgctgtgatgccagatgtggtgcagacccggcagcaggcctacagagacaagctggcccagcagcaggccgctgctgctgctgctgctgctgctgctgccagccagtag

SEQ ID NO: 302119 - DNA, 429 bp, Artificial Sequence
  derived and/or modified sequence
atgagcatcagcagcgacgaggtgaacttcctggtgtaccggtacttgcaggagtctggcttctcgcattccgccttcacttttggtattgagtctcacatcagtcagagtaacatcaatggcgccttagtcccaccagcagctcttatctcaattatccagaaaggcctgcagtacgtggaagccgaggtgtcgatcaacgaagatgggacactgtttgacggcagacctatcgaatccctgtccctgatcgatgccgtgatgcccgatgtggtgcagactaggcagcaggcatatcgggataaattggcgcagcaacaggcagccgctgcagccgctgccgcagcagccgctagccagcagggctcagcgaagaacggggaaaacaccgccaatggagaagaaaacggtgcacatacgatcgcctag

SEQ ID NO: 302120 - DNA, 102 bp, Artificial Sequence
  derived and/or modified sequence
atgagcatcagcagcgacgaggtgaacttcctggtgtaccggtacctccaggagtctggcttctcccatagcgccttcaccttcggcattgagagtcattag

SEQ ID NO: 302121 - DNA, 264 bp, Artificial Sequence
  derived and/or modified sequence
atgagcatcagcagcgacgaggtgaacttcctggtgtaccggtacctgcaggagagcggcttttctcattcggctttcacttttggaatagagagccatatatctcaatcaaacatcaacggagcattggtgccccccgctgccctgatctcaatcatacagaagggacttcagtacgtggaggcagaagttagcatcaacgaggacggtaccctgtttgacggaaggccaatcgagtccttaagcctgatcgacgcggtatag

SEQ ID NO: 302122 - DNA, 207 bp, Artificial Sequence
  derived and/or modified sequence
atgagcatcagcagcgacgaggtgaacttcctggtgtaccggtacctgcaagaatctggtttcagccacagtgcattcacattcggcattgaatcacatatttcccaatctaatataaacggcgccctagtgccacctgctgctctgatatcaatcatccaaaaagggctgcaatacgtggaggccgaggtgagcattaacgagtag

SEQ ID NO: 302123 - DNA, 189 bp, Artificial Sequence
  derived and/or modified sequence
atgagcatcagcagcgacgaggtgaacttcctggtgtaccggtacttgcaagagtctggctttagccatagcgcattcacctttggtatcgagtcccatataagtcagtctaatattaatggagcgctcgtgccccctgctgcactgatttccatcatacaaaagggcctccaatacgtggaggcctag

SEQ ID NO: 302124 - DNA, 1545 bp, Artificial Sequence
  derived and/or modified sequence
atgagcatcagcagcgacgaggtgaacttcctggtgtaccggtacttacaggagtcagggttctcccacagcgccttcaccttcggcattgaaagccatattagccagtcaaacatcaacggtgccttggtccctccggctgccctcatatccatcatccaaaaagggttacagtatgtcgaagcagaggtgagcatcaacgaagacggcactttgtttgacggtcgtcctatcgaatcattgagtttgattgacgccgtgatgcccgacgtcgtgcagaccagacagcaggcataccgcgataaacttgctcagcaacaggccgccgccgccgccgcagccgcagctgcagccagtcagcagggctccgccaagaacggggagaacacagctaacggtgaggagaatggggctcatacgatcgcaaataatcacaccgacatgatggaagtggacggagatgtggaaattccaccaaataaggctgtcgtgctccgggggcatgaatccgaggtgtttatttgcgcctggaacccagtgagcgatctgctcgcatccgggagtggcgactccactgcccggatctggaacttgagcgaaaattctacctccgggagcacacaactcgtcctccgccactgtatcagggagggcggacaggatgtgccctctaataaagacgttacaagccttgattggaattctgaggggactttgctcgcaaccgggagctacgatggtttcgctaggatttggacaaaggacgggaatctggcatccacccttggccagcataagggacctatcttcgctcttaaatggaacaaaaaagggaacttcattctgtctgctggcgtggataagaccactatcatatgggatgcacacactggagaggcgaagcaacagtttccatttcacagcgcccctgccctggatgtggactggcagtctaacaatacattcgcttcatgtagtacagacatgtgtattcatgtgtgcaaacttgggcaggacaggcctattaagacatttcaaggccacaccaatgaggttaacgcaattaagtgggaccccaccggcaacctgttggcctcttgctccgatgatatgaccctgaaaatatggagcatgaaacaggataattgcgtgcacgatctgcaggctcacaacaaagagatttacaccattaagtggtctcccacaggaccaggtaccaataacccaaatgcaaacctcatgttggcatctgcctcatttgattccacggtccggttgtgggacgttgatcggggtatttgcattcacacactcacaaagcatcaggagcccgtttactccgtggcctttagtccagacggtcggtacctggcaagcggctctttcgataaatgcgttcacatttggaatacacagactggtgcccttgtgcacagttacaggggaaccggaggcatttttgaggtgtgctggaatgccgctggggataaggtgggcgcctccgcctcggacggatcagtctgtgtgctggatctgcgaaagtag

SEQ ID NO: 302125 - DNA, 291 bp, Artificial Sequence
  derived and/or modified sequence
atgagcatcagcagcgacgaggtgaacttcctggtgtaccggtacctgcaggagtccggattttctcactccgcgtttacttttggcatcgagagccacatctcacaaagcaatatcaatggtgccttagttccacctgcagcccttatctccattatccaaaagggactgcagtacgttgaggccgaggttagcatcaacgaagatggaactctgttcgacggacgcccaatagagagtctgtctctgatcgacgctgtcatgcccgatgtcgtccaaactcggcaatag

SEQ ID NO: 302126 - DNA, 429 bp, Artificial Sequence
  derived and/or modified sequence
atgagcatcagcagcgacgaggtgaacttcctggtgtaccggtaccttcaagaaagtggatttagccatagcgcgtttacgtttggcattgagtcacacatctcacaatctaacattaacggtgcactggttcctccagctgcgctgatcagcatcatccagaagggactacagtacgtagaggcagaagtctccatcaatgaggatggcactctctttgacggtcgacccatcgagagcttgtcgttaatcgacgcagtgatgccagacgtggtgcagactaggcaacaagcttaccgggacaaactggctcagcaacaagctgcagccgccgctgccgctgcagctgcggcctcccagcagggcagcgctaagaacggagagaacacagctaatggtgaggaaaatggagcccatactattgcttag

SEQ ID NO: 302127 - DNA, 246 bp, Artificial Sequence
  derived and/or modified sequence
atgagcatcagcagcgacgaggtgaacttcctggtgtaccggtaccttcaagaatctggcttcagccacagcgcttttaccttcgggattgaaagccacatcagccagtcaaatattaatggcgctctggtgcccccagcagccctgatatccatcattcaaaagggcctgcaatacgttgaggccgaagtaagcattaatgaagacggaaccctgttcgacgggcgccctatcgaatcactgtag

SEQ ID NO: 302128 - DNA, 363 bp, Artificial Sequence
  derived and/or modified sequence
atgagcatcagcagcgacgaggtgaacttcctggtgtaccggtacctccaggagtctggctttagtcattccgcattcaccttcggtattgagtctcatatctctcagtctaatattaatggtgcgcttgtcccccctgctgccctgatctctatcatccaaaaggggctacaatacgtggaagctgaagtttccatcaacgaagatggtaccctcttcgacgggaggcccatcgaatcgctttccttaattgacgccgtgatgccagatgtcgtccaaacacgccagcaggcttaccgcgataagctcgcacagcagcaggcagccgccgcagccgctgctgcggctgcggcgtctcaatag

SEQ ID NO: 302129 - DNA, 1545 bp, Artificial Sequence
  derived and/or modified sequence
atgagcatcagcagcgacgaggtgaacttcctggtgtaccggtacttacaggagagtgggttctcccactctgctttcacctttgggatcgagtcccatatctcccagtccaacattaatggtgctctggtgcctccagctgccctgattagtatcatccagaagggcttacaatatgtggaggccgaagtaagcattaacgaagatggaacgctcttcgatgggcgcccaattgagagtctgtctttgatagatgcggtcatgcccgacgtggttcagaccagacagcaggcttaccgggataaactcgctcagcaacaggctgcggcggccgccgccgccgccgcagccgctagtcagcaggggtcagccaaaaacggcgagaacaccgctaatggtgaagagaatggcgcccacaccatcgctaacaaccacactgatatgatggaggtagatggagatgtggagatcccgcctaacaaggccgtggttttaaggggccacgaatcagaggtattcatatgcgcgtggaatccagtatccgacctcctagcatcaggctccggcgatagcactgcgcgcatctggaatttgtccgaaaacagtacatcagggtcgacacagttggtactgagacattgcatacgagaaggagggcaagatgtgccttccaataaagacgtgaccagtctggattggaattctgagggaactctactagcaacgggctcatatgatgggtttgctcggatctggactaaggatggcaacttggccagcaccctcggccagcacaagggaccaatctttgctctgaaatggaacaagaagggcaatttcatcctttccgccggtgtggacaagaccaccatcatttgggacgcccataccggagaggcaaagcagcagtttccctttcacagtgccccggctctcgacgtggattggcagagtaataacacttttgcctcttgttctaccgacatgtgcatccacgtgtgcaagcttgggcaggatagacctataaagacctttcagggacacaccaacgaggtcaatgccatcaaatgggatcctactggtaacctgcttgcttcttgcagcgacgacatgacccttaagatttggtcaatgaagcaggataactgtgtccacgatctccaggcacataacaaagaaatatacaccattaaatggtctcccacagggccaggaacaaataatccaaatgccaacctcatgctggcctctgcgtctttcgatagtacggtcaggctatgggacgtcgacagagggatttgtatccatacactcactaagcaccaggagcctgtttacagtgtcgccttcagtcccgatggaagatatcttgctagcggatcttttgacaagtgcgtgcacatttggaatacccagacaggagcactggtgcatagctatagaggcactggaggaatcttcgaggtgtgttggaatgcagcgggagacaaggtcggtgcatctgcttcagacgggagtgtgtgcgtactggatctgagaaaatag

SEQ ID NO: 302130 - DNA, 429 bp, Artificial Sequence
  derived and/or modified sequence
atgtcaatttctagtgatgaagttaactttctggtttatagatacctgcaggaatccggatttagccactctgcctttacgttcggcatcgaatcccatatctctcagtcgaacatcaacggtgccctcgttccgcctgcagcactaatctcgataatccagaaaggcctccagtacgttgaggcggaggtgtcaatcaacgaggacggcacactattcgatgggagacccatagagagcctatctctcatagacgccgtgatgccagacgtggtgcaaaccagacagcaggcctaccgtgacaagcttgcgcagcagcaggctgcagctgctgccgcagcagccgcagccgcatctcagcagggcagtgctaagaacggggagaacaccgctaacggggaagagaatggagcacacactatcgcctag

SEQ ID NO: 302131 - DNA, 604 bp, Artificial Sequence
  derived and/or modified sequence
attttgggggtggttggaggcggtggcggcggcggcgaggaggggaatttccttgtgcctccattcccgggaggggggagcggcgttggaggccaccgtttccagagtttcactctgtcacccaggctcgagtgcagtggcgtgttctcggctcactacaacctccgtcctctgggctcaagcagtcctcgcatctcagcctcccaaggagctgggacctcagcatcaacaacagcaacttgtgattggcggtgaccggatattcagttgcacatccccacatcaatgcactgccaatgggttatatcctgtgttgtgacctcatggtttaagtgggaataaagatgagtataagcagtgatgaggtcaacttcttggtatatagatacttgcaagagtcaggattttctcattcagcatttacctttggtatagaaagccatatcagtcagtccaatataaatggtgccctcgtcccacccgctgcattgatttctatcatccagaaaggtctacagtatgtagaagcagaagttagtattaatgaggatggtaccttgtttgatggtcgaccaatagagtctctgtccctgatagatgccgt

SEQ ID NO: 302132 - DNA, 797 bp, Artificial Sequence
  derived and/or modified sequence
ggctctttcccttagtaacagcttttaccttctgcctcaattcctctccccgctcgcgcccttcccccgcgcgccgcctccccccgccgccggccgcgtgcgcccccgcccctccccccgcggcgggagcacctccgctcgccacctggggacccgcgccgcgctccccgcccccgcccgcccggcgcccatcccccgcgccctccgctcgctggggttataattgcctctcaccccccggaggggttattttgggggtggttggaggcggtggcggcggcggcgaggaggggaatttccttgtgcctccattcccgggaggggggagcggcgttggaggccaccgtttccagcatcaacaacagcaacttgtgattggcggtgaccggatattcagttgcacatccccacatcaatgcactgccaatgatgaggaaactgaggccttggactagaacagaggtctcctgactcagtccaggactctttctattacatcatgcggcctgatatttgtctttatggaactcagcaacatcacatacaggggttatatcctgtgttgtgacctcatggtttaagtgggaataaagatgagtataagcagtgatgaggtcaacttcttggtatatagatacttgcaagagtcaggattttctcattcagcatttacctttggtatagaaagccatatcagtcagtccaatataaatggtgccctcgtcccacccgctgcattgatttctatcatccagaaaggtctacagtatgtagaagcagaagttagtattaatgag

SEQ ID NO: 302133 - DNA, 102 bp, Artificial Sequence
  derived and/or modified sequence
atgagcatatcttcggacgaagtgaacttcctagtgtaccggtatttacaggagtccggattcagccacagtgccttcaccttcggaatagaatctcactag

SEQ ID NO: 302134 - DNA, 264 bp, Artificial Sequence
  derived and/or modified sequence
atgagtattagcagcgacgaagtaaactttctagtgtacaggtacttgcaggagagcgggttcagtcattccgctttcacattcggaatcgaaagtcacatctcacagagtaacatcaacggggctttggttccaccagccgcactaatttccatcatccagaaagggctgcagtacgtagaagcagaagtttcgattaatgaagacgggacccttttcgatggaagacccatcgaaagcctgtctctcatcgacgctgtctag

SEQ ID NO: 302135 - DNA, 207 bp, Artificial Sequence
  derived and/or modified sequence
atgagtatctcatccgatgaagtgaactttttggtttacagatacctgcaggagagcggcttcagccatagcgcattcacctttggaatcgagtctcacatctcccagtccaatatcaacggcgcactggttccgcctgccgcattaattagcattattcagaaaggccttcagtacgtggaggccgaggtttcaatcaatgaatag

SEQ ID NO: 302136 - DNA, 189 bp, Artificial Sequence
  derived and/or modified sequence
atgtccatatcctctgatgaggtgaattttttggtctacaggtatctccaggagagtggcttcagccatagcgcattcacgtttggcatagagtctcatatttctcagtctaatataaacggcgcacttgtacccccagccgctctcatcagcatcatacagaagggtctgcagtacgtagaggcctag

SEQ ID NO: 302137 - DNA, 1545 bp, Artificial Sequence
  derived and/or modified sequence
atgagtatcagtagtgacgaagtgaattttcttgtttacaggtacctccaagaatccgggttctctcatagtgccttcacattcggtatcgagagccatataagtcagagcaacatcaacggcgctctcgtgcctcctgcagctctgatctcgattattcagaaaggccttcagtatgtagaggcagaggtctcgattaacgaagatgggacgttgtttgacgggcgaccgatcgagagcctgagtctaatagatgcggtgatgcctgacgtcgtgcagacgcgccagcaggcctatcgcgacaagctggcacagcagcaggcggctgccgcagcagctgcagcggcagccgctagtcagcagggcagtgcaaaaaacggcgaaaacacagctaatggggaagagaatggcgctcatacaatagccaataaccatacagatatgatggaagtggatggggacgtagagattccacctaataaagccgtggtcctccgcggacacgaatctgaggttttcatctgtgcctggaaccccgtcagtgatctgctggccagtggctcgggtgactccaccgcccgaatctggaacctgagcgagaattctacctcaggatctacccagctggtgcttcggcactgtattcgggaaggcggacaagacgtgccaagcaataaagacgtgacctctctggattggaactctgaaggtacgctcctggcgacagggagctacgacgggtttgccaggatctggacgaaggatggaaatctggcctcaacactgggccaacacaaaggccctatctttgcacttaagtggaataaaaagggcaacttcatcctctcagcaggtgttgacaaaaccaccattatctgggatgcccataccggagaagctaaacagcagtttccattccattcagccccagcactggacgtggattggcagtctaacaatacattcgcttcttgttccacagatatgtgcattcatgtgtgcaaactaggccaggacaggccgattaagacttttcaggggcatacgaatgaagtgaatgccattaaatgggatcctaccgggaatctgctggccagctgctcggacgatatgacattgaagatctggagcatgaagcaggacaactgcgttcatgatttgcaagcccataacaaggaaatctacactatcaagtggtccccgactgggcctgggacaaataatccgaatgcaaacctgatgctggcctctgccagtttcgacagcaccgtacgcctgtgggatgtggacagggggatttgcattcacacactgactaagcatcaagagccggtctatagcgtcgcattttcccctgacggccgatatttggcttcaggatcctttgacaagtgtgttcacatttggaacacacagacaggagccctggtacactcctaccggggtaccgggggaatctttgaggtttgctggaatgccgcaggcgacaaggtaggggctagcgctagcgacggatctgtatgtgtgctggatctacgcaaatag

SEQ ID NO: 302138 - DNA, 291 bp, Artificial Sequence
  derived and/or modified sequence
atgagcatcagttccgacgaggtgaattttctggtctacagatatctacaggaaagtggtttttcccactcagcgttcacctttggaattgagtcacatatatctcaaagtaacatcaacggtgccctggtgcccccagcggcactcatctccatcatccagaagggactgcagtatgtggaagcggaggtgtccattaacgaagatggcaccctgttcgatggcagacctatcgagagcctaagtcttatcgacgctgtgatgcccgacgttgtgcagacacgccagtag

SEQ ID NO: 302139 - DNA, 429 bp, Artificial Sequence
  derived and/or modified sequence
atgagtatcagctctgacgaggtcaactttctggtttacagatatctgcaggagtctgggttctcccattccgcgtttacattcggcatcgagtcccacataagccaatcgaacattaacggggctttggtcccgcctgctgctctcatttccatcattcaaaagggtctgcagtacgtcgaagccgaggtctctattaatgaggatggaactcttttcgacggacgcccaatcgagtctctgtccttgatcgacgccgtgatgccggatgttgtgcagacaagacaacaagcctatcgcgataagctggcccagcagcaggcagccgctgccgcagcagctgctgccgcagcctcgcagcaaggttctgccaaaaatggcgagaacaccgcgaatggggaagagaacggagcccacaccatcgcatag

SEQ ID NO: 302140 - DNA, 554 bp, Artificial Sequence
  derived and/or modified sequence
attgcctctcaccccccggaggggttattttgggggtggttggaggcggtggcggcggcggcgaggaggggaatttccttgtgcctccattcccgggaggggggagcggcgttggaggccaccgtttccaggtgtgggaataagtatctttggaagaccaggcactttatgcagtattgagctcaggaggcagtgagtgttaaggaatgggtgtaaaacatcaacaacagcaacttgtgattggcggtgaccggatattcagttgcacatccccacatcaatgcactgccaatgtgggattacagctaagtattacgttttaaaggttatatcctgtgttgtgacctcatggtttaagtgggaataaagatgagtataagcagtgatgaggtcaacttcttggtatatagatacttgcaagagtcaggattttctcattcagcatttacctttggtatagaaagccatatcagtcagtccaatataaatggtgccctcgtcccacccgctgcattgatttctatcatccagaaaggtctacagtatgtagaagc

SEQ ID NO: 302141 - DNA, 246 bp, Artificial Sequence
  derived and/or modified sequence
atgtcaattagcagcgatgaggtgaacttcctggtgtatcggtacctgcaagagtccggcttctcacattccgccttcacctttgggatcgaaagccatatctctcaaagcaacattaacggggcactcgtccctccagccgctctgatatccataattcagaagggcttgcagtatgtggaggcagaagtttccatcaatgaagatggtacattgtttgatggtaggccaatcgaatcactgtag

SEQ ID NO: 302142 - DNA, 363 bp, Artificial Sequence
  derived and/or modified sequence
atgagcatcagctctgatgaggtcaatttccttgtgtaccggtatttgcaggaatcaggcttctcacacagcgcattcacattcggcatagagagtcacataagtcaatctaacatcaacggagccctggtgcctccagctgctctgatctctataatacagaaggggttacagtatgtcgaagccgaagtgtcaatcaatgaagatggcaccctgtttgatggcaggccgatagagtctttgtcgctcatcgacgcggtgatgccggacgtcgtgcagacaagacagcaggcctaccgcgataagctggcccagcagcaggctgctgctgccgctgcagccgctgccgcagcttcccagtag

SEQ ID NO: 302143 - DNA, 1545 bp, Artificial Sequence
  derived and/or modified sequence
atgagcatttctagcgatgaggtcaactttcttgtgtaccgctatctacaagagtcaggttttagtcacagtgcgtttacgttcggcatagaatcccacatctcccagagcaatattaacggtgcactggtgcctcccgcagcccttatttctataatccagaagggtctgcagtacgtggaggccgaagtgagtatcaacgaagatggtaccctgttcgatggaaggccaatcgagtcccttagcttaattgacgcagtgatgcctgatgtggtccagactcggcagcaggcctacagggataagctggcacaacagcaggcagccgctgcagcggcagccgcagcggctgccagtcagcagggatcggccaaaaacggcgaaaacacggctaacggcgaggagaacggggctcacaccattgcaaataaccacacagacatgatggaagtagacggagatgtggagatacctcccaataaggcggtggtgcttcgaggacatgagagtgaggtgttcatctgtgcctggaaccctgtctccgatctgcttgccagtggaagcggcgattccacagccaggatttggaatctctcagagaattctacctctgggagcacccagcttgtcctccgccactgtatccgggagggaggccaagatgtgccctcaaataaggacgttacttccctggactggaacagcgaggggaccttgctggcaacaggatcttacgatggatttgcgagaatttggacaaaagacggcaacctggctagtaccttagggcaacacaaaggcccaatatttgctctaaaatggaacaaaaaggggaactttatcctgtctgctggagttgataagactaccatcatctgggatgcacacacaggcgaagcgaaacagcaatttccctttcatagtgcccctgcacttgatgtcgactggcaatccaacaacacatttgcgtcttgttcaacagacatgtgtatccacgtatgcaagctcggccaggaccggcctatcaagacattccagggtcatactaatgaagtcaacgccatcaagtgggaccctacggggaatctattagcctcttgctctgacgacatgactctcaagatctggagtatgaagcaggacaactgtgtgcacgacttgcaagcccacaataaagaaatttatactataaaatggtcgcctacgggacccggaacaaataatcctaatgctaatctgatgctcgctagcgcctcttttgattccacggtgcgcctctgggacgtggaccggggaatttgtatccatactcttacaaagcatcaagagccagtttatagcgtggcgttcagccctgatggtaggtatctggcctccgggagctttgacaagtgtgtgcacatctggaatacacagaccggggctctcgtgcattcatatcgcggtaccgggggtattttcgaagtctgttggaatgccgcaggggataaagtaggagcttcggcaagcgacggctctgtctgtgttctcgatctgcggaaatag

SEQ ID NO: 302144 - DNA, 7948 bp, Artificial Sequence
  derived and/or modified sequence
gcgcggcagccgggccttgctccgggacgtgtttatttgtaacttagtgctttttatcgtcttaaggaggtatttggtggaggctctttgaagttgggttcaggagtgtagaattggcaaagttattgccagcttcctgcatcaacaacagcaacttgtgattggcggtgaccggatattcagttgcacatccccacatcaatgcactgccaatgggttatatcctgtgttgtgacctcatggtttaagtgggaataaagatgagtataagcagtgatgaggtcaacttcttggtatatagatacttgcaagagtcaggattttctcattcagcatttacctttggtatagaaagccatatcagtcagtccaatataaatggtgccctcgtcccacccgctgcattgatttctatcatccagaaaggtctacagtatgtagaagcagaagttagtattaatgaggatggtaccttgtttgatggtcgaccaatagagtctctgtccctgatagatgccgtaatgcctgatgtagtacaaacaagacaacaagcttatagagataagcttgcacagcaacaggcagcagctgctgcagctgccgcagctgcagccagccaacaaggatctgcaaaaaatggagaaaacacagcaaatggggaggagaatggagcacatactatagcaaataatcatactgatatgatggaagtggatggggatgttgaaatccctcctaataaagctgttgtgttgcggggccatgaatctgaagtttttatctgtgcctggaaccctgttagtgatctcctagcatcagggtctggagactcaacagcaagaatatggaatcttagtgagaacagcaccagtggctctacacagttagtacttagacattgtatacgagaaggagggcaagatgttccaagcaacaaggatgtcacatctctagattggaatagtgaaggtacacttctagcaactggttcctatgatgggtttgccagaatatggactaaagatggtaaccttgctagcaccttagggcagcataaaggccctatatttgcattaaaatggaataagaaaggaaatttcatcctaagtgctggagtagacaagactacaattatttgggacgcacatactggtgaagccaagcaacagtttccttttcattcagcaccagcattggatgttgattggcagagcaacaacacctttgcttcttgtagtacagatatgtgcattcatgtctgtaaattaggacaagacagacctattaaaacattccaaggacatacgaatgaagtaaatgctatcaaatgggacccaactggcaatctcttggcctcctgttctgacgacatgactttaaagatatggagtatgaaacaagacaattgtgtccatgatttgcaagcacataataaagaaatttatactatcaaatggagtccaacaggaccagggactaataatccaaatgccaaccttatgttagcaagtgcatcctttgattctactgttaggttatgggatgtagaccgagggatatgcatccataccttgacaaaacaccaagagcctgtgtacagtgtagctttcagtcctgatggcaggtatctggcaagtggttcttttgacaaatgtgtacacatctggaacacgcagacaggtgctctagttcacagctataggggaacaggtggaatatttgaagtttgctggaatgcagcaggagacaaagttggagccagtgcatcagatggttcagtttgtgtattagaccttcggaaatagcgctactagttggaagccatggaccgactatgaatgtgtacatagccaaaatgactgtccctgacccatgtactgctatagtcccacttgaaccatggccagtccactacagccaaatctaaaagaaatatatacatacagtgtatataaacaaaattgcaccctgaagatgacagagttttgtcacagcttgtgaattctgttcaccaagtgctggaatctaatctgctgtgcccctaaaatagcatttagaagttttggatatgaaaaacagaagagagaaaaatatacattataaaagcagaacatacatgtaccagtttttggatactaaatgacagccttgtttctcccctttgaatcagcagacaccatggattatattctttttttcccttcagtagtgagcagtttgtatgtacagagaaaatggacttacaaaaacttgcagcagtagtttgttcttgctttaaaatttcgtttttggtttagattatggatgcatgaagtaagggagtgaatcagtttcttgtttatatttttttcaccttttaaacaaaaaattctttaaaatattttaatgcattcttttgaagaggtagatgtttggtacattttatggctcccagagcatatattcagttggtgcatgttgtggaagggggaattggaaattaaatgaaaacctatgactttggtcatgtcaatctgtaagacacatcagtaaaagggtattatgctctgttggttttgtttttttgttttgctttttttttttttttttcttttttgttttttggtgatgtggcttaaatgcaatagtttcttttttgggacatatttctgccaattaaagactagaagggcacaactttttttttaattaccatagagaagatacattaaaaaaaatcttctgatgttttgtagccataactaaattatggtaaaaatgtgcactattgtgaaaaggagcaacgtagttttgggttttttgttgtttgtttgttttgctttgttttttaagagattaaaatgtttctggataaggattagcttctcgaagtgtccatcattctgtgtagaagcttaaatatgtaatgtaaccaaactccagtattaaaaatctctcatgttgttttctttatacaaagcaagataacggcatataacactgccattacatggcaaaatgtttgctaccttagtttaaaaaacaatctcaaacaaaagacttgcttcaaggtgtttttaaatagcagtgattcagaattttttttaatgaaagtataattgcactaaccttcttcctgctgctctgattctgcatttgtggtacttgtgactacgttttttcaaatatagatagatttaagctgctaatttttttttttttagtaatcactactatatcatgtcttttactctgtttataatatcaagtattttcttaaagatatagatattaaaccttgtgctcatgcaacttagagtaacatatacagacaaatgattgcatgaggccatgtttatatgtgtgactaataaggcttgtcatgattaacataatccaggtatgtcatttctgaagagaatagtcatcaaatttatatctcgaagattttaattaaggaattgcttattgttgagcttagcaaattaataacactatttctgtcactaattattttgaggccttttagtactaaaattttaacctgtgttctaagtagaaactgatttaacccaagtaatgcagctttgattgatttcagcattcgttgctttgctatttttacaaaacagcattgattgaagcaagtcttggttttactaaggtagggtagcatttgctattggtaaagagaataaatacacttaatttcacaatacattgttatatgtaccccagttgttgttagtggggactatgatactgtaataatatttttaaaaatttacatcaagagaggcagtcattcacgatggttttgtgccagctctttttagggttttggatcacattagagatatttagaacatattaccctgtgacttacgtaggaaacctaatatgctgagtatctggcacttgaattcctgcttttattgctggaggtccacatctgtggttgacctctgttattgtttaaaaaaaataaataaaaattaaaaaaatctgtgcaataattttaaaatgtgctcccaggaatagacacaaatgttttgagtatcttttaagctgcattttcctttagtgatgcatttgtcaattgcactgaatttaaatctgaaagtcagaggtgattattgatagtacttttgtattttgatatggacagtttattcatttgcatacagttattgactttttcccagctgattaaaagatagtcaagaaattctgcaatatagctgccaaaatagacagctacatttttatgatattgtcatcttttctgttttttttttcttttttttctttagctattttacttaagcataatagccacaataggacatataaaagattataaatacagagctttattatcctgacgtcttgggtcttttaagtatatacttttctgaaaggtatccattttgtaggcttgggttcttcatgagcatacgattgtttatttttgctgctgttctcaacatcatcattgcctgctgatgtgccacgatgctgctccaatagacagcaataagattgtctctaatttgagcagtaacatgattgcaagagaccaagtttcacagcttgtaaagttctgtatttgggattcttgcttatttttccgcctgtgtttttctgagaacttattcctgatgatcaattgaatccagtagtttttctatgctatttgttgttgtataagctactgtaagaaacttatcataaggaaaaatagaaaggaaaacttgaatcaatactcattgattaaaatggaataaagaaagagcagctgccacttttaaacaacataaaggaatatctttttttgtctccgtgtaggaaatcccataagttcttatatttgttccagttcccatttcctgccattgaccagataacatcattgactttcaaatgacttttagaagtgataactcttaatttcctaatagatactagattgtattgaattctgttttaattattctctaggtaagtatgttttaggattaaataccttttacagatactgaaagtgcctccttttgtggtgtaaaaaacaaattatggtgcaaaaagtaatcactagattgaaatacatgaaggttttttgctttttgacatacgaaaatgtcaagagaaaggccaaagatttgtactttttcacttacaaagcactcctttttcccttaaacttctttctgtcaaattagatttaatgagagagtactatttttaaggagctatctgtttatgtagaatgattttgttaagagtaatgtaaactattattgagtagaggcctaaagaggactgtgcatttttgctatttaaaggaatcacaaatgatcatacttaagtgagcaaaaatgacaagttttactagctaagtagagaaataaatctcaaatgcagcgctacaattttcattatcttaagtacattgtacatttctacagaacctgtgattattctcgcatgataaggatggtacttgcatatggtgaattactactgttgacagtttccgcagaaatcctatttcagtggaccaacattgtggcatggcagcaaatgccaacattttgtggaatagcagcaaatctacaagagaccctggttggtttttcgttttgttttctttgttttttcccccttctcctgaatcagcagggatggaaggagggtagggaagttatgaattactccttccagtagtagctctgaagtgtcacatttaatatcagttttttttaaacatgattctagttaaatgtagaagagagaagaaagaggaagtgttcacttttttaatacactgatttagaaatttgatgtcttatatcagtagttctgaggtattgatagcttgctttatttctgcctttacgttgacagtgttgaagcagggtgaataactagggcatatattttttttttttttgtaagctgtttcatgatgttttctttggaatttccggataagttcaggaaaacattctgcatgttgtatctagtctgatgtacttatccatctcattacaaacaaaaacacacagactgcatttgtagctctgtaatccttgaatacggaagtaaattttcttctttcctgactttgacattgtagctatactgtttccatttttgtttttacaaatcctttgggtctaattctgtgagcctacctatagcactggattaaaatgtctgcatcatttctttagttatccagttaactttaaaactgttgtaaaagtgtaaaccagcccatgacaggtttttgtacatgttaaagaacttcattgttcagttttcatgattattgtgtaaggaagactgatgtagatgttctgtgctgtcctggaccatgttaattacacttacgacgtattttagttccacatcacaatgatttgtccccagtgacccttttatcctttctaggcacatttcttgttgttgttgttgttgcagttcccctttgcattgtattgctttgacaactgtaatttgaatcagatctgaaagaggtccagaataaaatatattttgatattatgttggctgtgtacatatataaaacctttgatgtctatgtagtttatatagactatttactagtcaggtaaagagagagggatggtatttcttgtttacagtttgtttacattttaattgcttttacttctccagtgttctattgtagaataaacctttttttccaagttagccttcataacctataacacattcattctctcccatactggtgttactgattaataactgccatcagaacccaaaccactgtttttcataaacgtattgtttcccaagatatatactttaagcccataataaaattacaaattttactatttttattacttcttgcaggagataagatttttttaaatgaaggggttatttactatttttattaaagtataatagagcatctaatcagctaagggattgtaatttttaattcttttgaaaaataaatattgtatttaaaagacgttatttcacagaagctgaaaaagagaccttagataacatttgtttggttagccacacggttgagcacaaaacaatgtgtagatgtgttgaagattagggcaggaggctcaacttctcggtgacctttttttgcttcacaacaagccaattatagttgaatcattttctctcttagctagttgttactacaaactttataagaaaaacaactagacaccttctagttttaattaataccaactcctttagagttagagactttttaaaaagaatcattgagcatattttcttttttttttttttaagaatttacactctctaggtcttctatttttcctgtttatttccttaaacagaaataaattcaagcatagttttatgttttattagaaataagccactgcagttgctagaactgacatgctttcattttcaaggggttaacttttattgcatggcatagattattagtaatatcctgcattgtatacttttccaaaaagggttggactcctaaggattagaatccttataagcttgagggaaagctgaaactaatttgaacagtaatagaagggattatttttaatttcatagttaacactttacaatggattagatttattacctagtataatccgtagcagatcagatcaaagtttactgttttaccaatatattcatttgaaaaaatacagtggaggaaaagacactttagatggtagttttatggtgcttttctctgctgtaccaaagtgctttgtcatcaatgaaatgttaaccctatgctactttttctgcatgcttcttaaatgtcatcttaatgcttaattgtcctaacttgtaatatttttgtattaaatttttttaggagttccttgtaatttctttacaatttaaaatatattaaacacaaagtgtttagtaaagtaca

SEQ ID NO: 302145 - DNA, 559 bp, Artificial Sequence
  derived and/or modified sequence
ggcgaggaggggaatttccttgtgcctccattcccgggaggggggagcggcgttggaggccaccgtttccagcatcaacaacagcaacttgtgattggcggtgaccggatattcagttgcacatccccacatcaatgcactgccaatgacagcaaaaccaacttctcctcagccttgtgaagaggatgaggaccttcaggatgattcacttccatttaatgaatgggttatatcctgtgttgtgacctcatggtttaagtgggaataaagatgagtataagcagtgatgaggtcaacttcttggtatatagatacttgcaagagtcaggattttctcattcagcatttacctttggtatagaaagccatatcagtcagtccaatataaatggtgccctcgtcccacccgctgcattgatttctatcatccagaaaggtctacagtatgtagaagcagaagttagtattaatgaggatggtaccttgtttgatggtcgaccaatagagtctctgtccctgatagatgccgtaatgcctgatgtagtacaaacaagacaac

SEQ ID NO: 302146 - DNA, 556 bp, Artificial Sequence
  derived and/or modified sequence
atcgtcttaaggaggtatttggtggaggctctttgaagttgggttcaggagtgtagaattggcaaagttattgccagcttcctgggttatatcctgtgttgtgacctcatggtttaagtgggaataaagatgagtataagcagtgatgaggtcaacttcttggtatatagatacttgcaagagtcaggattttctcattcagcatttacctttggtatagaaagccatatcagtcagtccaatataaatggtgccctcgtcccacccgctgcattgatttctatcatccagaaaggtctacagtatgtagaagcagaagttagtattaatgaggatggtaccttgtttgatggtcgaccaatagagtctctgtccctgatagatgccgtaatgcctgatgtagtacaaacaagacaacaagcttatagagataagcttgcacagcaacaggcagcagctgctgcagctgccgcagctgcagccagccaacaaggatctgcaaaaaatggagaaaacacagcaaatggggaggagaatggagcacatactatagcaa

SEQ ID NO: 302147 - DNA, 580 bp, Artificial Sequence
  derived and/or modified sequence
ttagtgctttttatcgtcttaaggaggtatttggtggaggctctttgaagttgggttcaggagtgtagaattggcaaagttattgccagcttcctgcatcaacaacagcaacttgtgattggcggtgaccggatattcagttgcacatccccacatcaatgcactgccaatgatgaggaaactgaggccttggactagaacagaggtctcctgactcagtccaggactctttctattacatcatgcggcctgatatttgtctttatggaactcagcaacatcacatacaggggttatatcctgtgttgtgacctcatggtttaagtgggaataaagatgagtataagcagtgatgaggtcaacttcttggtatatagatacttgcaagagtcaggattttctcattcagcatttacctttggtatagaaagccatatcagtcagtccaatataaatggtgccctcgtcccacccgctgcattgatttctatcatccagaaaggtctacagtatgtagaagcagaagttagtattaatgaggatggtaccttgtttgatggtcgaccaatagagtctctgt

SEQ ID NO: 302148 - DNA, 587 bp, Artificial Sequence
  derived and/or modified sequence
gggaatttccttgtgcctccattcccgggaggggggagcggcgttggaggccaccgtttccagatgaggaaactgaggccttggactagaacagaggtctcctgactcagtccaggactctttctattacatcatgcggcctgatatttgtctttatggaactcagcaacatcacatacaggggttatatcctgtgttgtgacctcatggtttaagtgggaataaagatgagtataagcagtgatgaggtcaacttcttggtatatagatacttgcaagagtcaggattttctcattcagcatttacctttggtatagaaagccatatcagtcagtccaatataaatggtgccctcgtcccacccgctgcattgatttctatcatccagaaaggtctacagtatgtagaagcagaagttagtattaatgaggatggtaccttgtttgatggtcgaccaatagagtctctgtccctgatagatgccgtaatgcctgatgtagtacaaacaagacaacaagcttatagagataagcttgcacagcaacaggcagcagctgctgcagctgccgcagctgcagccagccaa

SEQ ID NO: 302149 - DNA, 4192 bp, Artificial Sequence
  derived and/or modified sequence
tttcccttagtaacagcttttaccttctgcctcaattcctctccccgctcgcgcccttcccccgcgcgccgcctccccccgccgccggccgcgtgcgcccccgcccctccccccgcggcgggagcacctccgctcgccacctggggacccgcgccgcgctccccgcccccgcccgcccggcgcccatcccccgcgccctccgctcgctggggttataattgcctctcaccccccggaggggttattttgggggtggttggaggcggtggcggcggcggcgaggaggggaatttccttgtgcctccattcccgggaggggggagcggcgttggaggccaccgtttccagcatcaacaacagcaacttgtgattggcggtgaccggatattcagttgcacatccccacatcaatgcactgccaatgggttatatcctgtgttgtgacctcatggtttaagtgggaataaagatgagtataagcagtgatgaggtcaacttcttggtatatagatacttgcaagagtcaggattttctcattcagcatttacctttggtatagaaagccatatcagtcagtccaatataaatggtgccctcgtcccacccgctgcattgatttctatcatccagaaaggtctacagtatgtagaagcagaagttagtattaatgaggatggtaccttgtttgatggtcgaccaatagagtctctgtccctgatagatgccgtaatgcctgatgtagtacaaacaagacaacaagcttatagagataagcttgcacagcaacaggcagcagctgctgcagctgccgcagctgcagccagccaacaaggatctgcaaaaaatggagaaaacacagcaaatggggaggagaatggagcacatactatagcaaataatcatactgatatgatggaagtggatggggatgttgaaatccctcctaataaagctgttgtgttgcggggccatgaatctgaagtttttatctgtgcctggaaccctgttagtgatctcctagcatcagggtctggagactcaacagcaagaatatggaatcttagtgagaacagcaccagtggctctacacagttagtacttagacattgtatacgagaaggagggcaagatgttccaagcaacaaggatgtcacatctctagattggaatagtgaaggtacacttctagcaactggttcctatgatgggtttgccagaatatggactaaagatggtaaccttgctagcaccttagggcagcataaaggccctatatttgcattaaaatggaataagaaaggaaatttcatcctaagtgctggagtagacaagactacaattatttgggacgcacatactggtgaagccaagcaacagtttccttttcattcagcaccagcattggatgttgattggcagagcaacaacacctttgcttcttgtagtacagatatgtgcattcatgtctgtaaattaggacaagacagacctattaaaacattccaaggacatacgaatgaagtaaatgctatcaaatgggacccaactggcaatctcttggcctcctgttctgacgacatgactttaaagatatggagtatgaaacaagacaattgtgtccatgatttgcaagcacataataaagaaatttatactatcaaatggagtccaacaggaccagggactaataatccaaatgccaaccttatgttagcaagtgcatcctttgattctactgttaggttatgggatgtagaccgagggatatgcatccataccttgacaaaacaccaagagcctgtgtacagtgtagctttcagtcctgatggcaggtatctggcaagtggttcttttgacaaatgtgtacacatctggaacacgcagacaggtgctctagttcacagctataggggaacaggtggaatatttgaagtttgctggaatgcagcaggagacaaagttggagccagtgcatcagatggttcagtttgtgtattagaccttcggaaatagcgctactagttggaagccatggaccgactatgaatgtgtacatagccaaaatgactgtccctgacccatgtactgctatagtcccacttgaaccatggccagtccactacagccaaatctaaaagaaatatatacatacagtgtatataaacaaaattgcaccctgaagatgacagagttttgtcacagcttgtgaattctgttcaccaagtgctggaatctaatctgctgtgcccctaaaatagcatttagaagttttggatatgaaaaacagaagagagaaaaatatacattataaaagcagaacatacatgtaccagtttttggatactaaatgacagccttgtttctcccctttgaatcagcagacaccatggattatattctttttttcccttcagtagtgagcagtttgtatgtacagagaaaatggacttacaaaaacttgcagcagtagtttgttcttgctttaaaatttcgtttttggtttagattatggatgcatgaagtaagggagtgaatcagtttcttgtttatatttttttcaccttttaaacaaaaaattctttaaaatattttaatgcattcttttgaagaggtagatgtttggtacattttatggctcccagagcatatattcagttggtgcatgttgtggaagggggaattggaaattaaatgaaaacctatgactttggtcatgtcaatctgtaagacacatcagtaaaagggtattatgctctgttggttttgtttttttgttttgctttttttttttttttttcttttttgttttttggtgatgtggcttaaatgcaatagtttcttttttgggacatatttctgccaattaaagactagaagggcacaactttttttttaattaccatagagaagatacattaaaaaaaatcttctgatgttttgtagccataactaaattatggtaaaaatgtgcactattgtgaaaaggagcaacgtagttttgggttttttgttgtttgtttgttttgctttgttttttaagagattaaaatgtttctggataaggattagcttctcgaagtgtccatcattctgtgtagaagcttaaatatgtaatgtaaccaaactccagtattaaaaatctctcatgttgttttctttatacaaagcaagataacggcatataacactgccattacatggcaaaatgtttgctaccttagtttaaaaaacaatctcaaacaaaagacttgcttcaaggtgtttttaaatagcagtgattcagaattttttttaatgaaagtataattgcactaaccttcttcctgctgctctgattctgcatttgtggtacttgtgactacgttttttcaaatatagatagatttaagctgctaatttttttttttttagtaatcactactatatcatgtcttttactctgtttataatatcaagtattttcttaaagatatagatattaaaccttgtgctcatgcaacttagagtaacatatacagacaaatgattgcatgaggccatgtttatatgtgtgactaataaggcttgtcatgattaacataatccaggtatgtcatttctgaagagaatagtcatcaaatttatatctcgaagattttaattaaggaattgcttattgttgagcttagcaaattaataacactatttctgtcactaattattttgaggccttttagtactaaaattttaacctgtgttctaagtagaaactgatttaacccaagtaatgcagctttgattgatttcagcattcgttgctttgctatttttacaaaacagcattgattgaagcaagtcttggttttactaaggtagggtagcatttgctattggtaaagagaataaatacacttaatttcacaatacattgttatatgtaccccagttgttgttagtggggactatgatactgtaataatatttttaaaaatttacatcaagagaggcagtcattcacgatggttttgtgccagctctttttagggttttggatcacattagagatatttagaacatattaccctgtgacttacgtaggaaacctaatatgctgagtatctggcacttgaattcctgcttttattgctggaggtccacatctgtggttgacctctgttattgtttaaaaaaaataaataaaaattaaaaaaa

SEQ ID NO: 302150 - protein, 461 aa, Artificial Sequence
  derived and/or modified sequence
MHERRILHRDLKSKNVFLKNNLLKIGDFGVSRLLMGSCDLATTLTGTPHYMSPEALKHQGYDTKSDIWSLACILYEMCCMNHAFAGSNFLSIVLKIVEGDTPSLPERYPKELNAIMESMLNKNPSLRPSAIEILKIPYLDEQLQNLMCRYSEMTLEDKNLDCQKEAAHIINAMQKRIHLQTLRALSEVQKMTPRERMRLRKLQAADEKARKLKKIVEEKYEENSKRMQELRSRNFQQLSVDVLHESDEPTLENLPESQPIPSMDLHELESIVEDATSDLGYHEIPEDPLVAEEYYADAFDSYCEESDEEEEEIALERPEKEIRNEGSQPAYRTNQQDSDIEALARCLENVLGCTSLDTKTITTMAEDMSPGPPIFNSVMARTKMKRMRESAMQKLGTEVFEEVYNYLKRARHQNASEAEIRECLEKVVPQASDCFEVDQLLYFEEQLLITMGKEPTLQNHL

SEQ ID NO: 302151 - DNA, 2337 bp, Artificial Sequence
  derived and/or modified sequence
agtttgaggcctgcccgattacccgcaagacttgggcagccccgggcgccgctccgaccacgacagggaaaggaactgaccaacactggatgaatttgaccatttcttaggagactggaatgttaagtttctataaatgaatgaaccagttctctcttgtttggagcaatgctgaaattccaagaggcagctaagtgtgtgagtggatcaacagccatttccacttatccaaagaccttgattgcaagaagatacgtgcttcaacaaaaacttggcagtggaagttttggaactgtctatctggtttcagacaagaaagccaaacgaggagaggaattggccgagatctggacgataaaattcaggaatataaacaagctggaaaaatctttccagaaaatcaaataatagaatggtttatccagctgctgctgggagttgactacatgcatgagaggaggatacttcatcgagacttaaagtcaaagaatgtatttctgaaaaataatctccttaaaattggagattttggagtttctcgacttctaatgggatcctgtgacctggccacaactttaactggaactccccattatatgagtcctgaggctctgaaacaccaaggctatgacacaaagtcggacatctggtcactggcatgcattttgtatgagatgtgctgcatgaatcatgcattcgctggctccaatttcttatccattgttttaaaaattgttgaaggtgacacaccttctctccctgagagatatccaaaagaactaaatgccatcatggaaagcatgttgaacaagaatccttcattaagaccatctgctatcgaaattttaaaaatcccttaccttgatgagcagctacagaacctaatgtgtagatattcagaaatgactctggaagacaaaaatttggattgtcagaaggaggctgctcatataattaatgccatgcaaaaaaggatccacctgcagactctgagggcactgtcagaagtacagaaaatgacgccaagagaaaggatgcggctgaggaagctccaggcggctgatgagaaagccaggaagctgaaaaagattgtggaagaaaaatatgaagaaaatagcaaacgaatgcaagaattgagatctcggaactttcagcagctgagtgttgatgtactccatgaatctgatgaaccaactttagagaacctgcctgagtctcagcctattccttccatggacctccacgaacttgaatcaattgtagaggatgccacatctgaccttggataccatgagatcccagaagacccacttgtggctgaagagtactacgctgatgcatttgattcctattgtgaagagagtgatgaggaggaagaagaaatagcgttagaaagaccagagaaagaaatcaggaatgagggatcccagcctgcttacagaacaaaccaacaggacagtgatatcgaagcgttggccaggtgtttggaaaatgtcctgggttgcacttctctagacacaaagaccatcaccaccatggctgaagacatgtccccaggaccaccaattttcaacagtgtgatggccaggaccaagatgaaacgcatgagggaatcagccatgcagaagctggggacagaagtatttgaagaggtctataattacctcaagagagcaaggcatcagaatgctagcgaagcagagatccgcgagtgtttggaaaaagtggtgcctcaagccagcgactgttttgaagtggaccagctcctgtactttgaagagcagttgctgatcacgatgggaaaagaacctactctccagaaccatctctaggcaactatcaaaaagaagcagaagttcaagtggacaaatttatgtgaaaattcatttaacatataagctgaactctattatggggaatggatacaaaagcagagctcccatcttgactttcaattcctcatcagaagtactggcttctttagagagtagtaagcatggctgcctatgcttggagtcataagtgttatttggactataccctgagataagcttatagatcaagtttggctcccttgaaaagcatttctctcatgtgcgccctcagggcttccagcaggattgagtcaccctgacgatgaccggggagaagccgtgtgctcttcattattttcagctggaggacagagctcagtgcctgactgcctagggtctcatggactgtaggcagcctgccagtgaaggtcactggactctagcctacaacatgctgagctacagcccagaagccagacatgcctgtcttagctgacctgtttttggtccacttttgcccttc

SEQ ID NO: 302152 - protein, 482 aa, Artificial Sequence
  derived and/or modified sequence
MLKFQEAAKCVSGSTAISTYPKTLIARRYVLQQKLGSGSFGTVYLVSDKKAKRGEELKVLKEISVGELNPNETVQANLEAQLLSKLDHPAIVKFHASFVEQDNFCIITEYCEGRDLDDKIQEYKQAGKIFPENQIIEWFIQLLLGVDYMHERRILHRDLKSKNVFLKNNLLKIGDFGVSRLLMGSCDLATTLTGTPHYMSPEALKHQGYDTKSDIWSLACILYEMCCMNHAFAGSNFLSIVLKIVEGDTPSLPERYPKELNAIMESMLNKNPSLRPSAIEILKIPYLDEQLQNLMCRYSEMTLEDKNLDCQKEAAHIINAMQKRIHLQTLRALSEVQKMTPRERMRLRKLQAADEKARKLKKIVEEKYEENSKRMQELRSRNFQQLSVDVLHEKTHLKGMEEKEEQPEGRLSCSPQDEDEERWQGREEESDEPTLENLPESQPIPSMDLHELESIVEDATSDLGYHGDCNLISLDEYWKNEK

SEQ ID NO: 302153 - DNA, 1449 bp, Artificial Sequence
  derived and/or modified sequence
atgcttaaattccaagaggctgctaaatgtgtatcaggttccacggccatcagcacctatcctaaaacactgattgcaagaaggtatgtactacagcaaaaactcggcagcggctctttcggaactgtgtatctcgtgtccgataagaaggcaaagcggggggaagagctgaaggtgctgaaagaaatcagcgtgggggaacttaatcctaacgaaaccgttcaagccaatctagaagcccagctgttgtcaaaactggatcatccagctatagttaaattccatgcatcctttgttgaacaggacaatttctgcatcataacagaatattgcgaaggaagagatcttgacgataagatccaggagtacaagcaggctggtaaaatctttccggagaatcagattatagagtggttcattcagcttctgctaggcgtagactacatgcacgagcggagaatcctgcatagggatttaaagtccaagaatgtcttcttgaaaaacaatttgttaaaaataggtgatttcggcgtaagtcggcttctgatggggagttgcgaccttgcaaccaccttgaccggtactccacattacatgagccccgaggcactgaagcaccaggggtacgacaccaagagcgatatctggagtcttgcctgcattctctatgaaatgtgttgcatgaaccacgcctttgccggttccaactttctttcaatagttctgaagatcgtggaaggtgataccccatctttaccagaaaggtaccctaaggagctgaacgccattatggaaagcatgttgaacaaaaatccgtctctgcgcccaagcgctattgagatcctcaaaatcccttatcttgacgagcaactgcagaacttaatgtgtagatattccgagatgacacttgaggacaaaaacctggattgtcagaaagaagccgcacatatcataaatgccatgcagaagcggattcatttacagaccctgagagctctgtcggaggtccaaaagatgactccccgagaacgaatgcgtcttcgaaagctccaggctgccgatgaaaaagcccggaagctgaagaagatcgtcgaagagaaatatgaggagaacagcaaacgcatgcaggagctgcgctcacgaaatttccagcaacttagtgttgacgttctgcatgagaagactcacctcaaagggatggaagaaaaggaggagcaacctgagggaaggctgtcttgttcacctcaggacgaagatgaggagcgctggcagggcagagaagaagaatcagacgagcccacccttgagaatttgcctgagtcacaacccattcctagcatggacctccacgagcttgagtcaatcgttgaagatgccactagcgatctgggctaccatggcgattgcaacttgatatccctagatgaatattggaaaaacgaaaagtag

SEQ ID NO: 302154 - DNA, 1449 bp, Artificial Sequence
  derived and/or modified sequence
atgctaaagttccaagaggccgcaaagtgcgtctcgggctctaccgcgatctctacctaccccaaaacattgatagctcgcagatacgtactgcagcagaaattaggcagtggaagctttgggactgtgtatctagttagcgacaagaaagctaaaaggggagaagagctaaaggtcctgaaagaaatctcagtaggcgagctcaaccccaatgagacagtgcaggctaatttggaggcccagctactgagtaagcttgaccatcccgcaattgtgaaattccacgcatccttcgtggaacaagacaatttttgcattattaccgaatattgcgaggggagagatttagacgataagatccaggagtataagcaggccggaaagatatttccagagaatcagattatcgaatggtttatacagttattactgggcgtcgattacatgcatgaaagaaggatcttgcatagggacctgaagtcaaagaacgttttcttgaaaaacaacctgctcaagatcggagacttcggtgtcagccgcctgctgatgggctcctgtgacctggctacgactctcactgggaccccacactatatgtcccccgaggcactgaaacaccagggatatgacaccaagagcgacatttggagtctcgcttgtattctatatgaaatgtgctgtatgaatcacgcctttgccggctcaaactttttgtctatagtgcttaagatcgtagaaggagacactccatccctacctgagaggtacccaaaagagctcaacgccatcatggaaagtatgttaaataagaatccctcgctgcggccgtcagccattgagattctgaaaatcccttatctggacgaacagctacagaacctcatgtgcaggtatagcgagatgactctggaggataagaatctggattgccagaaagaagccgcgcacattatcaacgctatgcaaaagagaatccacctgcaaaccttgagggccctgtcggaggtgcaaaagatgactccccgggagcggatgcggttgcggaaactgcaagcggccgatgagaaagcacggaaacttaaaaagattgttgaggaaaagtacgaagaaaacagtaagcgcatgcaagaactcaggtcccggaattttcaacagctatccgtcgacgtcctgcacgagaagacccacctcaaaggcatggaagagaaggaggagcagccagaagggaggctgagttgctccccacaggacgaggacgaggagcgttggcaaggccgggaggaagagtcggacgagcctacactggaaaacttacccgaatctcagccgattccttctatggacttacacgagctggagagcattgttgaggacgccacttctgaccttggctatcacggagattgcaatctcatctccctggacgagtactggaagaacgaaaagtag

SEQ ID NO: 302155 - DNA, 1449 bp, Artificial Sequence
  derived and/or modified sequence
atgctgaagttccaggaggccgccaagtgtgtgtctggcagcacagccatcagcacctaccccaagaccctgattgccaggagatatgtgctgcagcagaagctgggcagcggcagctttggcaccgtgtacctggtgtctgacaagaaggccaagagaggagaggagctgaaggtgctgaaggagatctctgtgggggagctgaaccccaatgaaacagtgcaggccaacctggaggcccagctgctgagcaagctggaccacccagccatcgtgaagttccacgccagctttgtggagcaggacaacttctgcatcatcacagagtactgtgagggccgggacctggatgacaagatccaggagtacaagcaggccggcaagatcttccctgagaaccagatcatcgagtggttcatccagctgctgctgggcgtggactacatgcatgagcggcgcatcctgcaccgggacctgaagagcaagaatgtgttcctgaagaacaacctgctgaagattggagactttggagtgtcccggctgctgatgggcagctgtgacctggccaccaccctgaccggcaccccccactacatgagccctgaggccctgaagcaccagggctatgacaccaagagtgacatctggagcctggcctgcatcctgtatgagatgtgctgcatgaaccacgcctttgctggcagcaacttcctgagcatcgtgctgaagatcgtggagggggacacccccagcctgcctgagcgctaccccaaggagctgaatgccatcatggagagcatgctgaacaagaaccccagcctgcggcccagcgccatcgagatcctgaagatcccctacctggatgagcagctgcagaacctgatgtgccgctacagcgagatgaccctggaggacaagaacctggactgccagaaggaggccgcccacatcatcaatgccatgcagaagaggatccacctgcagaccctgcgggccctgtctgaggtgcagaagatgaccccccgggagaggatgaggctgaggaagctgcaggccgcagatgagaaggccaggaagctgaagaagatcgtggaggagaagtatgaggagaacagcaagaggatgcaggagctgcggagcaggaacttccagcagctgtctgtggatgtgctgcacgagaagacccacctgaagggcatggaggagaaggaggagcagcctgagggccgcctgagctgcagcccccaggatgaagatgaggagcgctggcagggccgggaggaggagagtgatgagcccaccctggagaacctgcctgagagccagcccatccccagcatggacctgcacgagctggagagcatcgtggaggatgccaccagtgacctgggctaccacggggactgcaacctgatcagcctggatgagtactggaagaatgagaagtag

SEQ ID NO: 302156 - DNA, 1449 bp, Artificial Sequence
  derived and/or modified sequence
atgctgaagttccaggaggccgccaagtgcgtgagcggcagcaccgcgatctccacttatcccaaaacattaattgctcgacgatacgtgctacagcaaaaacttgggtcaggctcattcggaaccgtgtacctggtctctgataaaaaggcaaaaaggggcgaggaacttaaggtgctaaaagaaattagcgtgggggaactgaatccgaacgaaacggtgcaggcaaacctcgaagcccagctgctcagtaagctagatcaccctgccatcgtcaaattccacgccagctttgtagagcaggataatttctgcatcattacagaatactgtgaggggagggacctggatgataagatccaggagtataaacaggcaggtaaaatattccccgaaaatcagattattgagtggtttatccagctgttactcggtgtggattacatgcatgagcggaggatcctacacagggatctcaagagtaagaatgtgtttctgaagaacaatctgcttaagataggagattttggcgtgagccgactcctcatgggttcatgcgacttagctacaacactgacgggcaccccgcactacatgagccctgaggcactgaagcaccagggttacgacacgaaatccgacatctggtcgctcgcatgcatcttgtacgagatgtgttgtatgaaccacgcatttgcaggttctaattttctgagcatcgtgctcaagattgtggagggtgacactcctagcctgcccgaacgttaccctaaggagctcaacgccatcatggaatccatgcttaataaaaatccttcccttaggccctcggctatcgagatccttaagatcccctacttagatgagcagctccaaaacctcatgtgtcgctactccgaaatgacactggaggacaaaaatctggactgccagaaagaggcggctcacatcatcaatgcaatgcagaaaaggatccatcttcagactctacgtgcacttagtgaagtgcagaagatgactccaagggaaagaatgagactccgcaaactccaggctgctgatgagaaggcgcgcaaactcaagaagatagtcgaggagaagtacgaagagaattcaaagcggatgcaggaactcagaagccgtaatttccaacagctatcagtggacgtgctccacgagaagactcatcttaagggaatggaggagaaagaggagcagcctgagggccgtctttcctgctccccacaagacgaggatgaagagcgttggcaaggacgggaggaggagtccgacgaacctacactcgaaaacctaccggagagccagcccattcccagtatggatctgcatgagttagagagtattgttgaagatgcgacttctgatttggggtatcatggagattgcaacttgatctccctggacgagtactggaaaaatgagaaatag

SEQ ID NO: 302157 - DNA, 1449 bp, Artificial Sequence
  derived and/or modified sequence
atgctgaagttccaggaggccgccaagtgcgtgagcggcagcaccgccatcagcacctacccaaaaacactcatcgctcgtcgatacgttttacaacaaaagttgggttcaggcagctttggcaccgtgtacctagtgtcagataaaaaggcaaagaggggagaggagctgaaggtgcttaaggagatttcagtaggcgagttaaatccgaacgagaccgtgcaagccaatttagaagcacagctgctgagtaaactggatcatcccgcgatcgtgaaattccatgcgagcttcgttgagcaggataacttttgtataattaccgaatactgtgaaggcagggatcttgatgacaaaattcaagaatacaagcaggctggcaagattttccccgagaaccagataattgagtggtttattcaactcttgcttggggtagattatatgcatgaacggagaatcctgcatcgtgatttaaaaagcaagaacgtatttctcaagaacaacctgctgaagattggagacttcggtgtctcccgccttttgatgggatcatgcgatttagctacgaccctgacaggcacaccccactacatgtcacctgaagcactaaagcaccaaggttacgacactaagagcgacatatggtccctagcgtgtatcctgtacgagatgtgctgcatgaaccacgctttcgctggcagcaatttcttgtcaattgttttaaagatagtcgagggcgatacccccagcttgccggagcgttaccccaaggagcttaacgccatcatggaaagcatgctgaataagaatccgtcgctgcggcctagcgctatcgagattttaaagattccctacttggatgaacagttgcaaaatttgatgtgtcggtactccgagatgacgctagaagataaaaacctggattgtcaaaaagaggccgcccacataatcaatgccatgcagaagagaatccatctgcagaccctgagagcccttagcgaggtccaaaagatgacgccacgtgaacgcatgcggctcagaaagctacaggcggcggatgagaaggctcgcaagctcaaaaagatagtagaggagaagtacgaggagaacagcaaaagaatgcaagagctccgcagcagaaactttcaacaactgagtgttgacgtgctgcacgagaaaacccatctcaaggggatggaagaaaaggaagaacagcccgaaggcagattatcttgcagtccgcaggacgaggatgaggaacggtggcaagggagagaggaagagagcgacgagccaacactagagaatctgcccgagtcccagccaataccctctatggatctgcacgaactggaatccatcgtagaggatgctacctctgatttgggctatcatggagactgcaacctaattagtctggacgaatactggaaaaatgagaagtag

SEQ ID NO: 302158 - DNA, 1702 bp, Artificial Sequence
  derived and/or modified sequence
agtatgccccgcgccgtctccctggccacggttccaaacagccgtggcccgcggtgtctggcgctcggtgggtgtggttgcccctagtttgaggcctgcccgattacccgcaagacttgggcagccccgggcgccgctccgaccacgacagggaaaggaactgaccaacactggatgaatttgaccatttcttaggagactggaatgttaagtttctataaatgaatgaaccagttctctcttgtttggagcaatgctgaaattccaagaggcagctaagtgtgtgagtggatcaacagccatttccacttatccaaagaccttgattgcaagaagatacgtgcttcaacaaaaacttggcagtggaagttttggaactgtctatctggtttcagacaagaaagccaaacgaggagaggaattaaaggtacttaaggaaatatctgttggagaactaaatccaaatgaaactgtacaggccaatttggaagcccaactcctctccaagctggaccacccagccattgtcaagttccatgcaagttttgtggagcaagataatttctgcattatcacggagtactgtgagggccgagatctggacgataaaattcaggaatataaacaagctggaaaaatctttccagaaaatcaaataatagaatggtttatccagctgctgctgggagttgactacatgcatgagaggaggatacttcatcgagacttaaagtcaaagaatgtatttctgaaaaataatctccttaaaattggagattttggagtttctcgacttctaatgggatcctgtgacctggccacaactttaactggaactccccattatatgagtcctgaggctctgaaacaccaaggctatgacacaaagtcggacatctggtcactggcatgcattttgtatgagatgtgctgcatgaatcatgcattcgctggctccaatttcttatccattgttttaaaaattgttgaaggtgacacaccttctctccctgagagatatccaaaagaactaaatgccatcatggaaagcatgttgaacaagaatccttcattaagaccatctgctatcgaaattttaaaaatcccttaccttgatgagcagctacagaacctaatgtgtagatattcagaaatgactctggaagacaaaaatttggattgtcagaaggaggctgctcatataattaatgccatgcaaaaaaggatccacctgcagactctgagggcactgtcagaagtacagaaaatgacgccaagagaaaggatgcggctgaggaagctccaggcggctgatgagaaagccaggaagctgaaaaagattgtggaagaaaaatatgaagaaaatagcaaacgaatgcaagaattgagatctcggaactttcagcagctgagtgttgatgtactccatgaaaaaacacatttaaaaggaatggaagaaaaggaggagcaacctgagggaagactttcttgttcaccccaggacgaggatgaagagaggtggcaaggcagggaagaggaatctgatgaaccaactttagagaacctgcctgagtctcagcctattccttccatggacctccacgaacttgaatcaattgtagaggatgccacatctgaccttggataccatggagactgtaatctaatttcactagacgaatactggaaaaatgaaaaataa

SEQ ID NO: 302159 - DNA, 1841 bp, Artificial Sequence
  derived and/or modified sequence
ggatgacctaaaagtggactgggatgggggtggcagggctgagtctgtgagggtgggcgggagggaacctagtcccagagtcttctgcagcctggaccagactacttaagcactgctgggtttagactgtcctttaaaataagagccgctagaagtgaacttctcattctgtccgtccctaattctgtccttctctaaaaggaaccttaatctcatctttaaaataaggagaattactgagtgacctgaaggacccttttcagctggaaagtctgaactgaccaacactggatgaatttgaccatttcttaggagactggaatgttaagtttctataaatgaatgaaccagttctctcttgtttggagcaatgctgaaattccaagaggcagctaagtgtgtgagtggatcaacagccatttccacttatccaaagaccttgattgcaagaagatacgtgcttcaacaaaaacttggcagtggaagttttggaactgtctatctggtttcagacaagaaagccaaacgaggagaggaattaaaggtacttaaggaaatatctgttggagaactaaatccaaatgaaactgtacaggccaatttggaagcccaactcctctccaagctggaccacccagccattgtcaagttccatgcaagttttgtggagcaagataatttctgcattatcacggagtactgtgagggccgagatctggacgataaaattcaggaatataaacaagctggaaaaatctttccagaaaatcaaataatagaatggtttatccagctgctgctgggagttgactacatgcatgagaggaggatacttcatcgagacttaaagtcaaagaatgtatttctgaaaaataatctccttaaaattggagattttggagtttctcgacttctaatgggatcctgtgacctggccacaactttaactggaactccccattatatgagtcctgaggctctgaaacaccaaggctatgacacaaagtcggacatctggtcactggcatgcattttgtatgagatgtgctgcatgaatcatgcattcgctggctccaatttcttatccattgttttaaaaattgttgaaggtgacacaccttctctccctgagagatatccaaaagaactaaatgccatcatggaaagcatgttgaacaagaatccttcattaagaccatctgctatcgaaattttaaaaatcccttaccttgatgagcagctacagaacctaatgtgtagatattcagaaatgactctggaagacaaaaatttggattgtcagaaggaggctgctcatataattaatgccatgcaaaaaaggatccacctgcagactctgagggcactgtcagaagtacagaaaatgacgccaagagaaaggatgcggctgaggaagctccaggcggctgatgagaaagccaggaagctgaaaaagattgtggaagaaaaatatgaagaaaatagcaaacgaatgcaagaattgagatctcggaactttcagcagctgagtgttgatgtactccatgaaaaaacacatttaaaaggaatggaagaaaaggaggagcaacctgagggaagactttcttgttcaccccaggacgaggatgaagagaggtggcaaggcagggaagaggaatctgatgaaccaactttagagaacctgcctgagtctcagcctattccttccatggacctccacgaacttgaatcaattgtagaggatgccacatctgaccttggataccatggagactgtaatctaatttcactagacgaatactggaaaaatgaaaaataaaggaatttctgaaataaggaaa

SEQ ID NO: 302160 - DNA, 1449 bp, Artificial Sequence
  derived and/or modified sequence
atgttgaaattccaggaggccgctaagtgtgtgtcagggtccacagccataagtacctaccctaaaaccctgattgccagacggtacgtcctgcaacagaagctggggagtggttcatttggaaccgtgtatctggtgagtgataagaaggctaaacggggagaagagctgaaggttctaaaggaaatctctgtcggggagctcaatcctaacgaaactgtgcaggccaaccttgaagctcagctactgagtaaactcgaccatcctgctatcgtgaagtttcatgccagctttgtcgagcaggacaacttttgtatcatcaccgagtattgtgaagggagagacctcgatgataaaatacaggagtacaagcaggcaggtaagatatttcctgagaatcaaatcatcgaatggtttatccaattgctcctgggcgtggattacatgcatgagaggagaatcctccaccgggacctgaaatccaagaatgtcttcctcaagaataacctactgaagattggggacttcggcgtcagcaggctgctgatgggatcctgcgaccttgccacgacactaaccggcacgccacactatatgtctccagaggctttgaagcatcagggatatgacaccaagtctgacatatggagcctggcctgcattctgtatgagatgtgctgtatgaaccatgcctttgctgggtcaaacttcctcagcattgtgctaaagatcgtggagggggacacgccttctctacctgaacgctacccaaaagagctaaacgctattatggaatcaatgcttaacaagaatcccagcctcaggccctccgctatcgaaatcttgaaaatcccttacctggatgaacaactccagaatcttatgtgccggtacagcgaaatgaccttagaggataagaatctggattgtcagaaggaagccgctcatatcataaatgcgatgcaaaaacggatacatttgcaaacccttagagcgctcagcgaagtgcagaaaatgactccacgagagagaatgcgcctgaggaagctccaggccgctgatgagaaagccagaaagctgaagaagatagtggaggaaaagtacgaagagaactccaagaggatgcaggagctgcgctctagaaactttcagcaactgtctgttgacgtcctgcacgaaaagacccacctgaagggcatggaagaaaaagaagaacagccagaggggagactttcctgctcaccacaggatgaagatgaagaacgatggcaggggagagaagaggaaagcgacgagcccacacttgagaacttgccagagtcccaacccatccccagcatggacctccacgagctggaaagtatcgtcgaggatgcgaccagtgacctggggtatcacggcgactgtaacctgatctctcttgatgagtactggaaaaatgaaaaatag

SEQ ID NO: 302161 - DNA, 1449 bp, Artificial Sequence
  derived and/or modified sequence
atgttgaagttccaggaagccgctaagtgtgtgtcagggagtacagccatatccacctacccgaaaacactcatcgcgagacgttatgtgctccagcaaaaactgggttccgggtcattcggaacagtgtaccttgtgtctgacaagaaagcaaaacgtggtgaggaacttaaagtgctcaaagaaatatcagtaggcgagctcaatcccaacgaaactgtgcaagccaatttggaagcccagctcctgagcaagctggatcaccctgcgatagtgaaattccatgcgagctttgttgaacaggacaacttctgtatcatcacagaatactgcgaagggagggacctggatgataaaatccaggaatacaaacaagccggaaagatattccccgaaaaccagatcatcgagtggtttatccagcttctcttaggggttgattacatgcatgagagaagaatacttcacagggacctgaagtcaaagaacgtcttcctgaaaaataaccttctgaaaataggcgacttcggggtgagccgtctgctgatgggtagctgcgacctggcaacgaccttaactggaactccccactacatgtctccggaagctcttaaacatcagggatacgacaccaagtcagatatctggagtctggcgtgcatcctttatgagatgtgttgtatgaaccacgccttcgctggctctaacttcctcagcatcgtgctcaagatcgttgaaggcgatactccctcactgcccgagcgctatcccaaggagttgaacgccatcatggagagcatgttaaataaaaaccccagcctgcgaccctctgccatcgaaattctgaaaatcccatacctcgacgagcagctgcaaaacctaatgtgtagatactctgagatgaccctggaggacaaaaatctggactgccaaaaggaagccgcacacatcatcaacgccatgcagaaacgaattcatctccagacactcagggccttgtctgaagtgcaaaagatgacccctcgtgagcgtatgagattaagaaaactgcaagcggctgacgagaaagcgagaaagctcaaaaagatagttgaggagaagtacgaggaaaactctaaacgcatgcaggagttgcgctcccgaaactttcagcagcttagtgtcgacgtgctgcatgagaaaacccacttgaagggaatggaagaaaaagaagaacagcccgaggggagactctcctgctcaccccaggacgaagacgaagagcgctggcagggacgcgaagaggagtctgacgaaccaactctcgagaacctgccagagtctcagccgattccatctatggacttacacgagctcgagtctatagtggaggacgccacatccgatctcgggtatcacggcgattgtaacttgatctccctggacgagtactggaagaacgagaagtag

SEQ ID NO: 302162 - DNA, 1449 bp, Artificial Sequence
  derived and/or modified sequence
atgctgaagttccaggaggccgccaagtgcgtgagcggcagcaccgccatcagcacctaccccaagaccctgatcgccagaagatacgtgctgcagcagaagctgggcagcggcagcttcggcaccgtgtacctggtgagcgacaagaaggccaagagaggcgaggagctgaaggtgctgaaggagatcagcgtgggcgagctgaaccccaacgagaccgtgcaggccaacctggaggcccagctgctgagcaagctggaccaccccgccatcgtgaagttccacgccagcttcgtggagcaggacaacttctgcatcatcaccgagtactgcgagggcagagacctggacgacaagatccaggagtacaagcaggccggcaagatcttccccgagaaccagatcatcgagtggttcatccagctgctgctgggcgtggactacatgcacgagagaagaatcctgcacagagacctgaagagcaagaacgtgttcctgaagaacaacctgctgaagatcggcgacttcggcgtgagcagactgctgatgggcagctgcgacctggccaccaccctgaccggcaccccccactacatgagccccgaggccctgaagcaccagggctacgacaccaagagcgacatctggagcctggcctgcatcctgtacgagatgtgctgcatgaaccacgccttcgccggcagcaacttcctgagcatcgtgctgaagatcgtggagggcgacacccccagcctgcccgagagataccccaaggagctgaacgccatcatggagagcatgctgaacaagaaccccagcctgagacccagcgccatcgagatcctgaagatcccctacctggacgagcagctgcagaacctgatgtgcagatacagcgagatgaccctggaggacaagaacctggactgccagaaggaggccgcccacatcatcaacgccatgcagaagagaatccacctgcagaccctgagagccctgagcgaggtgcagaagatgacccccagagagagaatgagactgagaaagctgcaggccgccgacgagaaggccagaaagctgaagaagatcgtggaggagaagtacgaggagaacagcaagagaatgcaggagctgagaagcagaaacttccagcagctgagcgtggacgtgctgcacgagaagacccacctgaagggcatggaggagaaggaggagcagcccgagggcagactgagctgcagcccccaggacgaggacgaggagagatggcagggcagagaggaggagagcgacgagcccaccctggagaacctgcccgagagccagcccatccccagcatggacctgcacgagctggagagcatcgtggaggacgccaccagcgacctgggctaccacggcgactgcaacctgatcagcctggacgagtactggaagaacgagaagtag

SEQ ID NO: 302163 - DNA, 1386 bp, Artificial Sequence
  derived and/or modified sequence
atgcacgagagacggatattgcaccgtgacctcaaaagcaagaatgttttccttaagaataacctgcttaaaattggggatttcggagtgtcaaggctgcttatgggctcctgcgatctcgccactaccctaacgggtactcctcattacatgtctcctgaggcactgaagcaccaaggctatgacacgaaatccgatatttggagcctagcctgtattttgtatgaaatgtgctgcatgaatcacgcatttgcgggttctaatttccttagcatagtgctcaaaattgtcgagggcgacactccaagtttacccgagagatacccgaaggaactgaacgccattatggagtccatgctcaacaaaaaccccagcctgcggccatccgcaatagagatcctcaagatcccctacctggacgagcaactacagaatctaatgtgtcgatattccgagatgaccttggaggacaaaaaccttgattgccagaaggaggcagcccacatcattaatgctatgcaaaaacgaattcatctgcaaaccttgagagcgctttccgaggtgcagaaaatgaccccgagagaacgaatgcgtctgcggaagttgcaagccgcagatgagaaagccaggaagctcaagaaaattgtagaggaaaaatacgaagagaatagtaagcggatgcaggagcttcgcagtaggaattttcagcagctgagtgtggatgtcctccatgagtctgacgagcccaccctggagaacctcccagaatctcagcctatcccgtcaatggacctgcacgaattagagagtattgtcgaggacgctacctccgatttggggtaccatgagatcccggaggacccccttgtggccgaagagtactacgccgacgcatttgatagctactgtgaggagtcagatgaggaggaagaggaaatcgccctggaacgaccagagaaagagatcaggaatgaaggttcacagccggcctacagaaccaatcagcaggatagcgatatcgaagctctggcccggtgcctagaaaacgtgctggggtgtactagtctcgatacaaagaccatcactaccatggccgaggatatgtctcccgggccacctatctttaatagcgtcatggccagaacgaaaatgaaaagaatgcgcgagtcagcgatgcaaaagctggggactgaagtgtttgaggaagtctataactacctgaagcgagctagacaccagaatgcatccgaagctgaaattcgcgagtgtctggaaaaggtcgtgccccaagccagcgattgttttgaggtggaccagctgctttacttcgaagaacaattactgattactatgggcaaggagccaaccttgcagaatcatctttag

SEQ ID NO: 302164 - DNA, 1386 bp, Artificial Sequence
  derived and/or modified sequence
atgcatgagcggcgcatcctgcaccgggacctgaagagcaagaatgtgttcctgaagaacaacctgctgaagattggagactttggagtgtcccggctgctgatgggcagctgtgacctggccaccaccctgaccggcaccccccactacatgagccctgaggccctgaagcaccagggctatgacaccaagagtgacatctggagcctggcctgcatcctgtatgagatgtgctgcatgaaccacgcctttgctggcagcaacttcctgagcatcgtgctgaagatcgtggagggggacacccccagcctgcctgagcgctaccccaaggagctgaatgccatcatggagagcatgctgaacaagaaccccagcctgcggcccagcgccatcgagatcctgaagatcccctacctggatgagcagctgcagaacctgatgtgccgctacagcgagatgaccctggaggacaagaacctggactgccagaaggaggccgcccacatcatcaatgccatgcagaagaggatccacctgcagaccctgcgggccctgtctgaggtgcagaagatgaccccccgggagaggatgaggctgaggaagctgcaggccgcagatgagaaggccaggaagctgaagaagatcgtggaggagaagtatgaggagaacagcaagaggatgcaggagctgcggagcaggaacttccagcagctgtctgtggatgtgctgcacgagagtgatgagcccaccctggagaacctgcctgagagccagcccatccccagcatggacctgcacgagctggagagcatcgtggaggatgccaccagtgacctgggctaccacgagatccctgaggaccccctggtggccgaggagtactatgcagatgcctttgacagctactgtgaggagagtgatgaggaggaggaggagatcgccctggagaggcctgagaaggagatcagaaatgaaggcagccagcctgcctaccgcaccaaccagcaggacagcgacatcgaggccctggcccgctgcctggagaatgtgctgggctgcaccagcctggacaccaagaccatcaccaccatggccgaggacatgagccctggcccccccatcttcaacagcgtgatggcccggaccaagatgaagaggatgagggagagcgccatgcagaagctgggcacagaggtgtttgaggaggtgtacaactacctgaagagggcccggcaccagaatgccagcgaggccgagatccgggagtgcctggagaaggtggtgccccaggccagtgactgctttgaggtggaccagctgctgtactttgaggagcagctgctgatcaccatgggcaaggagcccaccctgcagaaccacctgtag

SEQ ID NO: 302165 - DNA, 1386 bp, Artificial Sequence
  derived and/or modified sequence
atgcacgagcggcggatcctgcaccgggacctgaagagcaagaacgtatttctgaagaataatctgctaaaaatcggtgattttggcgtttcccgcttacttatgggaagctgtgatctcgccacaaccctaaccggtacaccccactatatgtctcccgaagctttgaagcaccagggttacgacacgaagagcgatatttggtctctggcatgcattctttatgagatgtgctgtatgaaccacgctttcgccggatctaatttcctgagcatcgtgctcaagatcgtggaaggagacaccccgagtcttcctgaaaggtaccccaaggaactcaatgccatcatggagagtatgctcaacaaaaatccgagcctgaggccaagcgccatcgagatactcaagataccctaccttgatgagcagctgcagaatttgatgtgccgatacagcgagatgaccttagaggataaaaacctggattgccagaaggaagccgcccatatcataaacgctatgcagaagcgcattcatcttcagacattgcgtgccttgtccgaggtgcagaaaatgacacctcgtgagcgcatgcgcctcagaaaactccaggccgccgacgagaaagcacgcaagctgaagaagattgtcgaggagaagtacgaagaaaattctaagcgcatgcaggaactccgcagtaggaacttccagcaattaagtgtagacgtcctgcacgaatccgacgagcccacattggagaatctgccagagagccagcctattcccagcatggatctccatgaattggaatctatagttgaagacgctacctcagatcttggctaccatgaaattccggaggacccactggtcgccgaggagtattacgcggatgcttttgacagctactgtgaagagtcggatgaggaggaagaggaaatcgctctggagaggcccgaaaaggagatcagaaacgaagggtcacagcccgcatataggacaaaccagcaggacagcgacatcgaggcccttgcccggtgccttgagaatgtgctgggttgtacctctctcgacacaaagacaattactaccatggctgaggacatgtccccaggacctccgatctttaacagcgtgatggcccgaactaagatgaagcggatgcgcgaaagcgctatgcagaagcttggcactgaagtctttgaagaagtttacaactatctgaaacgggccaggcaccaaaatgcttcagaagctgaaatccgcgagtgtctggaaaaagtggttccacaagcctcggattgcttcgaggtcgaccagctactctacttcgaggagcagcttctgatcacaatggggaaggaacccacattacaaaaccacctgtag

SEQ ID NO: 302166 - DNA, 1386 bp, Artificial Sequence
  derived and/or modified sequence
atgcatgagcgccgaatcttgcatagagacttaaagtctaagaatgtatttctgaaaaataaccttctcaagattggggactttggagtgagccgcctgctgatgggctcatgcgatctggccacaacattgaccgggactccacactacatgagccccgaggctctgaaacatcagggctatgatacgaaatctgatatctggtcgctggcctgcatcctgtacgaaatgtgttgtatgaatcatgctttcgccggatccaatttcctgtccatcgtgctgaagatcgtggaaggcgatactcccagtttgccggaaaggtatcctaaggagctgaatgccatcatggaatctatgctgaataaaaaccccagcctaagaccctccgcgatcgagatactcaaaatcccgtacctagatgagcaactgcagaacctcatgtgtcgatacagcgaaatgacacttgaagataagaacttggattgccagaaggaagcagctcacatcatcaacgccatgcagaaaaggatccatttgcagactttgagagcgctgagcgaggtgcaaaaaatgactccacgggaacgcatgaggcttaggaaactccaggccgctgatgagaaagccagaaaacttaaaaagatcgtcgaggagaagtatgaagagaactctaagaggatgcaggagctgagatcccgaaacttccagcagctgtccgtggatgtcctccacgagagtgacgagccgactctggaaaaccttcccgaaagtcaacctatacccagcatggatctgcatgaactggagagcattgtggaagacgccacctctgacctaggctatcacgaaattcctgaggacccgctcgttgcagaggagtactacgcggatgcgtttgattcatattgcgaggagagcgacgaagaggaggaggagattgccctggaaaggcccgaaaaagagatccgcaatgaaggtagccaacccgcttatcgcactaaccaacaggattctgacatcgaggcactggccagatgccttgagaatgtactgggatgtaccagtcttgatacgaagaccattacgactatggccgaggacatgagccccggtccgccaatcttcaacagcgtaatggcacgcaccaagatgaagaggatgagagagtccgcaatgcagaaattggggacagaagtgtttgaagaggtctataattatctgaagagggctagacaccaaaatgccagtgaggcagaaatccgggagtgtctcgagaaagtcgttccacaggccagtgactgtttcgaagtagaccagctgctgtattttgaggagcaacttctgattactatgggaaaggaacctaccctccagaaccatctgtag

SEQ ID NO: 302167 - DNA, 1386 bp, Artificial Sequence
  derived and/or modified sequence
atgcacgagagaagaatcctgcacagagacctgaagagcaagaacgtgttcctgaagaacaacctgctgaagatcggcgacttcggcgtgagcagactgctgatgggcagctgcgacctggccaccaccctgaccggcaccccccactacatgagccccgaggccctgaagcaccagggctacgacaccaagagcgacatctggagcctggcctgcatcctgtacgagatgtgctgcatgaaccacgccttcgccggcagcaacttcctgagcatcgtgctgaagatcgtggagggcgacacccccagcctgcccgagagataccccaaggagctgaacgccatcatggagagcatgctgaacaagaaccccagcctgagacccagcgccatcgagatcctgaagatcccctacctggacgagcagctgcagaacctgatgtgcagatacagcgagatgaccctggaggacaagaacctggactgccagaaggaggccgcccacatcatcaacgccatgcagaagagaatccacctgcagaccctgagagccctgagcgaggtgcagaagatgacccccagagagagaatgagactgagaaagctgcaggccgccgacgagaaggccagaaagctgaagaagatcgtggaggagaagtacgaggagaacagcaagagaatgcaggagctgagaagcagaaacttccagcagctgagcgtggacgtgctgcacgagagcgacgagcccaccctggagaacctgcccgagagccagcccatccccagcatggacctgcacgagctggagagcatcgtggaggacgccaccagcgacctgggctaccacgagatccccgaggaccccctggtggccgaggagtactacgccgacgccttcgacagctactgcgaggagagcgacgaggaggaggaggagatcgccctggagagacccgagaaggagatcagaaacgagggcagccagcccgcctacagaaccaaccagcaggacagcgacatcgaggccctggccagatgcctggagaacgtgctgggctgcaccagcctggacaccaagaccatcaccaccatggccgaggacatgagccccggcccccccatcttcaacagcgtgatggccagaaccaagatgaagagaatgagagagagcgccatgcagaagctgggcaccgaggtgttcgaggaggtgtacaactacctgaagagagccagacaccagaacgccagcgaggccgagatcagagagtgcctggagaaggtggtgccccaggccagcgactgcttcgaggtggaccagctgctgtacttcgaggagcagctgctgatcaccatgggcaaggagcccaccctgcagaaccacctgtag

SEQ ID NO: 302168 - protein, 186 aa, Artificial Sequence
  derived and/or modified sequence
MDTEPNPGTSSVSTTTSSTTTTTITTSSSRMQQPQISVYSGSDRHAVQALHRPPSSAAQYLQQMYAAQQQHLMLHTAALQQQHLSSSQLQSLAAVQASLSSGRPSTSPTGSVTQQSSMSQTSINLSTSPTPAQLISRSQASSSTSGSITQQTMLLGSTSPTLTASQAQMYLRAQMVRYELPNFFSV

SEQ ID NO: 302169 - DNA, 561 bp, Artificial Sequence
  derived and/or modified sequence
atggatacagagcccaaccccggtacatcctccgtcagtacgacaacatccagcactacaactactacaattaccacttcctcaagcaggatgcaacaaccgcagatcagtgtgtactcagggtccgatcgacacgccgtgcaggccctccataggccacccagttcagccgcccagtatctgcagcagatgtatgccgctcagcagcagcacctgatgctgcatacggctgctctgcagcagcagcacctgtcatcttcacaactccagagcctagcggcagtccaggctagcttatcatctggaaggccctcaacctcgccaaccggctcagtgacccagcagagtagcatgtcccagacttccattaacctcagcacctcacccactccagcccagcttatatcgcgatcgcaggcctctagcagcacctcgggttccatcacccagcaaacaatgctgttaggctcgaccagtcctactctgaccgcaagccaagctcagatgtatcttcgggctcagatggtcaggtatgaacttccgaacttcttttcagtgtag

SEQ ID NO: 302170 - DNA, 561 bp, Artificial Sequence
  derived and/or modified sequence
atggacacagagcccaaccctggcaccagctctgtgtccaccaccaccagcagcaccaccaccaccaccatcaccaccagcagcagcaggatgcagcagccccagatctctgtgtacagcggcagtgacagacatgctgtgcaggccctgcacaggcctcccagcagcgctgcccagtacctgcagcagatgtatgctgcccagcagcagcacctgatgctgcacacagctgccctgcagcagcagcacctgagcagcagccagctgcagagcctggccgctgtgcaggccagcctgagcagcggccggcccagcaccagccccactggatctgtgacccagcagagctccatgagccagaccagcatcaacctgagcaccagccccaccccagcccagctgatcagccgcagccaggccagcagcagcaccagcggcagcatcacccagcagaccatgctgctgggcagcaccagccccaccctgacagccagccaggcccagatgtacctgcgggcccagatggtgcgctatgagctgcccaacttcttctctgtgtag

SEQ ID NO: 302171 - DNA, 561 bp, Artificial Sequence
  derived and/or modified sequence
atggacaccgagcccaaccccggcaccagcagcgtgagcaccaccacatctagcactacgacgactaccattacaacttcttccagccgtatgcaacagccccagatcagtgtctacagtggcagcgatcgtcacgccgtgcaagcccttcaccgaccccccagttccgctgcacagtatctgcagcagatgtacgccgcccagcagcaacacctgatgctccacaccgctgccctccagcaacagcaccttagcagtagtcagctgcagagcctggcagccgtccaggctagcctgtcttccggacggccctcaacatcgcccaccgggtcagtgacacagcagagctccatgagccagacctcaattaatcttagcacatcgccaacacctgctcagctgattagtcggtctcaggcaagcagctccacttcaggcagcatcacccagcagacaatgttactgggtagcaccagcccaactcttactgcttcccaggcacaaatgtatctgcgggcacagatggtgcggtacgaattacccaatttttttagcgtgtag

SEQ ID NO: 302172 - DNA, 561 bp, Artificial Sequence
  derived and/or modified sequence
atggacaccgagcccaaccctggtacctctagcgtatccactaccacttcttccaccacgaccaccactatcaccacaagctccagccgtatgcaacagccacagatcagtgtctacagtggttccgataggcacgctgtgcaggctttgcatcggccaccttcatccgccgcacagtacctccaacaaatgtacgccgcacaacagcagcatctcatgctacacactgcggctctgcagcagcagcatctctcttcttcacagcttcagagcttggctgcagtgcaggcttctcttagcagcggacgcccaagtaccagcccaacgggctctgtcactcagcagtcatccatgtctcagaccagcatcaacctgagcaccagtccaacccccgcacagctcattagtcggtcccaggcttcatctagcacctctggtagcatcactcagcaaacaatgctcctcgggagcacgtctccgacattgacagccagtcaagcacagatgtacttacgagctcagatggttagatatgaactcccaaacttcttcagcgtatag

SEQ ID NO: 302173 - DNA, 561 bp, Artificial Sequence
  derived and/or modified sequence
atggacaccgagcccaaccccggcaccagcagcgtgagcaccaccaccagcagcaccaccaccaccaccatcaccaccagcagcagcagaatgcagcagccccagatcagcgtgtacagcggcagcgacagacacgccgtgcaggccctgcacagaccccccagcagcgccgcccagtacctgcagcagatgtacgccgcccagcagcagcacctgatgctgcacaccgccgccctgcagcagcagcacctgagcagcagccagctgcagagcctggccgccgtgcaggccagcctgagcagcggcagacccagcaccagccccaccggcagcgtgacccagcagagcagcatgagccagaccagcatcaacctgagcaccagccccacccccgcccagctgatcagcagaagccaggccagcagcagcaccagcggcagcatcacccagcagaccatgctgctgggcagcaccagccccaccctgaccgccagccaggcccagatgtacctgagagcccagatggtgagatacgagctgcccaacttcttcagcgtgtag

SEQ ID NO: 302174 - protein, 371 aa, Artificial Sequence
  derived and/or modified sequence
MFQEVKADKVTMLWNKKATAVLVIASTDVDKTGASYYGEQTLHYIATNGESAVVQLPKNGPIYDVVWNSSSTEFCAVYGFMPAKATIFNLKCDPVFDFGTGPRNAAYYSPHGHILVLAGFGNLRGQMEVWDVKNYKLISKPVASDSTYFAWCPDGEHILTATCAPRLRVNNGYKIWHYTGSILHKYDVPSNAELWQVSWQPFLDGIFPAKTITYQAVPSEVPNEEPKVATAYRPPALRNKPITNSKLHEEEPPQNMKPQSGNDKPLSKTALKNQRKHEAKKAAKQEARSDKSPDLAPTPAPQSTPRNTVSQSISGDPEIDKKIKNLKKKLKAIEQLKEQAATGKQLEKNQLEKIQKETALLQELEDLELGI

SEQ ID NO: 302175 - DNA, 1445 bp, Artificial Sequence
  derived and/or modified sequence
atgttccaggaagtaaaggcagataaagttacaatgctgtggaataaaaaagctactgctgtgttggtaatagctagcacagatgttgacaagacaggagcttcctactatggagaacaaactctacactacattgcaacaaatggagaaagtgctgtagtgcaattaccaaaaaatggccccatttatgatgtagtttggaattctagttctactgagttttgtgctgtatatggttttatgcctgccaaagcgacaattttcaacttgaaatgtgatcctgtatttgactttggaactggtcctcgtaatgcagcctactatagccctcatggacatatattagtattagctggatttggaaatctgaggggacaaatggaagtgtgggatgtgaaaaactacaaacttatttctaaaccggtggcttctgattctacatattttgcttggtgcccggatggtgagcatattttaacagctacatgtgctcccaggttacgggttaataatggatacaaaatttggcattatactggctctatcttgcacaagtatgatgtgccatcaaatgcagaattatggcaggtttcttggcagccatttttggatggaatatttccagcaaaaacaataacttaccaagcagttccaagtgaagtacccaatgaggaacctaaagttgcaacagcttatagacccccagctttaagaaataaaccaatcaccaattccaaattgcatgaagaggaaccacctcagaatatgaaaccacaatcaggaaacgataagccattatcaaaaacagctcttaaaaatcaaaggaagcatgaagctaagaaagctgcaaagcaggaagcaagaagtgacaagagtccagatttggcacctactcctgccccacagagcacaccacgaaacactgtctctcagtcaatttctggggaccctgagatagacaaaaaaatcaagaacctaaagaagaaactgaaagcaatcgaacaactgaaagaacaagcagcaactggaaaacagctagaaaaaaatcagttggagaaaattcagaaagaaacagcccttctccaggagctggaagatttggaattgggtatttaaagattcacggaaagcaagttgatgaccagaaatcagtgcaaacacatcttctgttaaacccattggtatacacagaatattcctgtgcccacacttaatgtcaatctataattttaaccatttatccaagattctactaagtgtaaaattatttaataatgtctattaaattgatatttatatcttgcatcctatatcatgtcaatatgtgatatagaaaagagatacgtgaattttttagctaagcttgacagattgaaagacaagtgtcatttttttttgtagagggtgatatataccatgtaaatgaacaaagacattttaaattt

SEQ ID NO: 302176 - DNA, 1116 bp, Artificial Sequence
  derived and/or modified sequence
atgtttcaggaggtaaaggcagataaggtcaccatgctgtggaataagaaggccacagccgtgctggtgattgcaagcacggacgtggacaagaccggagcctcctactatggggagcagaccctgcattacattgccaccaacggtgaatccgccgtggtgcagctgccaaagaatgggccgatttacgatgtggtatggaatagttcgtctacagagttttgtgctgtctatggcttcatgccagccaaggcaaccatttttaacctgaagtgcgatcccgtgtttgactttggcaccggacctagaaacgctgcctattatagtcctcacggccacatcctcgtcctagcagggtttggcaatctgcggggtcagatggaagtctgggacgttaaaaactataagctgattagtaagccagtggcctccgacagtacttacttcgcctggtgccctgatggagaacatatcctgacagccacttgcgcaccccgtctgcgcgtgaacaacggctacaaaatttggcactatacgggttccatcctacacaaatatgatgtacctagcaacgcggaattgtggcaagtatcttggcaaccttttctggacggcatcttccccgccaaaacaataacatatcaggccgtaccatctgaagtgccaaacgaggaaccaaaagtggccaccgcttaccgaccccctgccttgagaaataagccaataacgaatagcaagctgcacgaagaggagcctccccaaaatatgaaaccccagagcggcaacgataagcctctgtctaagacagctctcaagaatcagagaaagcatgaagctaaaaaggccgccaagcaagaagccaggagcgacaagtctcccgatcttgcgccgacaccagcaccacagagcacacctcggaacactgtcagtcagtctatcagcggagatccagaaatcgacaagaagattaagaacctgaagaaaaagttaaaagctattgaacagctgaaggagcaagctgcaacgggaaaacagctggaaaagaatcaactggagaagatacagaaggaaacagccctcctgcaagagttggaggacctggagttaggcatatag

SEQ ID NO: 302177 - DNA, 1116 bp, Artificial Sequence
  derived and/or modified sequence
atgttccaggaggtgaaggctgacaaggtgaccatgctgtggaacaagaaggccacagctgtgctggtgattgccagcacagatgtggacaagacaggagccagctactatggagagcagaccctgcactacatcgccaccaacggggagagcgctgtggtgcagctgcccaagaatggccccatctatgatgtggtgtggaacagcagcagcacagagttctgtgctgtgtatggcttcatgcctgccaaggccaccatcttcaacctgaagtgtgaccctgtgtttgattttggcaccggccccagaaatgctgcctactacagcccccacggccacatcctggtgctggccggcttcggcaacctgcggggccagatggaggtgtgggatgtgaagaactacaagctgatcagcaagcctgtggccagtgacagcacctactttgcctggtgcccagatggagagcacatcctgacagccacctgtgccccccggctgcgggtgaacaacggctacaagatctggcactacacaggcagcatcctgcacaagtatgatgtgcccagcaatgctgagctgtggcaggtgtcctggcagcccttcctggatggcatcttccctgccaagaccatcacctaccaggccgtgcccagcgaggtgcccaatgaggagcccaaggtggccacagcctaccggcccccagccctgaggaacaagcccatcaccaacagcaagctgcacgaggaggagcccccccagaacatgaagccccagagcggaaatgacaagcccctgagcaagacagccctgaagaaccagaggaagcatgaggccaagaaggccgccaagcaggaggcccggagtgacaagagcccagacctggcccccaccccagccccccagagcacccccaggaacacagtgtcccagagcatcagcggggaccctgagattgacaagaagatcaagaacctgaagaagaagctgaaggccatcgagcagctgaaggagcaggccgccaccgggaagcagctggagaagaaccagctggagaagatccagaaggagacagccctgctgcaggagctggaggacctggagctgggcatctag

SEQ ID NO: 302178 - DNA, 1116 bp, Artificial Sequence
  derived and/or modified sequence
atgttccaggaggtgaaggccgacaaggtgaccatgctgtggaacaagaaggccactgctgtgcttgtcatagcaagcactgacgtcgataagaccggcgcgtcatattatggcgagcagacgctgcattacattgctactaatggcgagtccgcagtcgtgcagctgccgaaaaatgggccaatttacgatgtagtgtggaactccagctcaaccgaattctgtgctgtgtacggcttcatgcccgcgaaagcgactatcttcaacttgaagtgtgaccccgtgttcgactttggaacgggaccacgcaacgcggcttactatagtccacacggtcacatattagtgctcgctggattcggcaatctcaggggccagatggaagtgtgggatgtgaaaaactacaagctgatcagtaagcctgtggcgtccgacagcacttatttcgcttggtgcccggatggcgaacacattcttactgccacgtgcgccccccgcttgagggtgaacaacggttacaagatctggcactatacaggcagcatactgcataagtatgatgtgccctcaaacgcggagctatggcaggtttcatggcagccattccttgacggaattttcccagctaagaccataacctaccaggctgtgccttctgaggtcccgaacgaggaacccaaggtcgcgaccgcctacagaccaccggctttacgtaataaaccaattacaaactctaagctgcatgaggaagagccccctcagaacatgaagccccagtctgggaacgataagcccctgtcaaagactgccctgaaaaatcagaggaagcacgaagccaaaaaagcagccaagcaggaggctcgctctgataagagcccggatctcgcccccacacccgcacctcagtctaccccccgtaataccgtgagtcagagtatttccggcgatcccgagatcgacaaaaagatcaagaatctgaagaaaaagctgaaggccatagagcaacttaaagaacaagctgcaacagggaagcagttggagaaaaaccagttggagaaaatccagaaggagactgccctgctgcaagagctggaggatttggagttgggtatctag

SEQ ID NO: 302179 - DNA, 1116 bp, Artificial Sequence
  derived and/or modified sequence
atgtttcaggaagtcaaagctgacaaggtgactatgctatggaataaaaaagcaaccgctgtgcttgtcattgcgtccactgatgtcgacaagacaggagcatcttattacggcgagcagacccttcactatatcgccactaacggtgagagtgctgttgtgcagttgcccaaaaatggacctatctatgatgttgtatggaactcctcaagcactgaattttgtgccgtgtacggcttcatgccagccaaggccactatcttcaaccttaagtgtgatccagttttcgactttggcactggacccaggaacgccgcttactactcacctcacgggcatattctggtcctggcgggtttcgggaaccttaggggacagatggaggtgtgggacgtaaaaaactacaaactcatctctaagccagtggcaagcgactccacctacttcgcctggtgtcccgacggggagcatatacttaccgccacgtgtgcacctaggcttagagtgaacaatggttacaaaatctggcattacacgggctcaattctgcataaatacgatgtaccttccaacgcggaactttggcaggtgtcctggcagcccttcctcgatggcatcttccctgcaaagacgatcacataccaggctgtcccatccgaggtccccaacgaggaacccaaagtagccaccgcttaccggccaccagctcttagaaataaacccatcacaaattcaaaactacatgaggaggaaccccctcaaaacatgaagcctcagagcggaaacgataaaccattgtctaaaacggccctaaaaaaccagcggaagcacgaggctaaaaaagcggctaagcaggaggctcgatccgacaagtcccctgatctggctccaactcccgctccacagtccacgcctaggaatactgtcagccagtccattagcggcgacccagaaattgacaagaaaattaaaaatctcaaaaaaaagctgaaggccatagagcagctgaaggagcaagccgcaaccggaaagcagctggaaaagaatcagcttgagaaaatacaaaaggagactgccctgctgcaggagctcgaagacttagagctcggcatctag

SEQ ID NO: 302180 - DNA, 1116 bp, Artificial Sequence
  derived and/or modified sequence
atgttccaggaggtgaaggccgacaaggtgaccatgctgtggaacaagaaggccaccgccgtgctggtgatcgccagcaccgacgtggacaagaccggcgccagctactacggcgagcagaccctgcactacatcgccaccaacggcgagagcgccgtggtgcagctgcccaagaacggccccatctacgacgtggtgtggaacagcagcagcaccgagttctgcgccgtgtacggcttcatgcccgccaaggccaccatcttcaacctgaagtgcgaccccgtgttcgacttcggcaccggccccagaaacgccgcctactacagcccccacggccacatcctggtgctggccggcttcggcaacctgagaggccagatggaggtgtgggacgtgaagaactacaagctgatcagcaagcccgtggccagcgacagcacctacttcgcctggtgccccgacggcgagcacatcctgaccgccacctgcgcccccagactgagagtgaacaacggctacaagatctggcactacaccggcagcatcctgcacaagtacgacgtgcccagcaacgccgagctgtggcaggtgagctggcagcccttcctggacggcatcttccccgccaagaccatcacctaccaggccgtgcccagcgaggtgcccaacgaggagcccaaggtggccaccgcctacagaccccccgccctgagaaacaagcccatcaccaacagcaagctgcacgaggaggagcccccccagaacatgaagccccagagcggcaacgacaagcccctgagcaagaccgccctgaagaaccagagaaagcacgaggccaagaaggccgccaagcaggaggccagaagcgacaagagccccgacctggcccccacccccgccccccagagcacccccagaaacaccgtgagccagagcatcagcggcgaccccgagatcgacaagaagatcaagaacctgaagaagaagctgaaggccatcgagcagctgaaggagcaggccgccaccggcaagcagctggagaagaaccagctggagaagatccagaaggagaccgccctgctgcaggagctggaggacctggagctgggcatctag

SEQ ID NO: 302181 - protein, 378 aa, Artificial Sequence
  derived and/or modified sequence
MRMLVSGRRVKKWQLIIQLFATCFLASLMFFWEPIDNHIVSHMKSYSYRYLINSYDFVNDTLSLKHTSAGPRYQYLINHKEKCQAQDVLLLLFVKTAPENYDRRSGIRRTWGNENYVRSQLNANIKTLFALGTPNPLEGEELQRKLAWEDQRYNDIIQQDFVDSFYNLTLKLLMQFSWANTYCPHAKFLMTADDDIFIHMPNLIEYLQSLEQIGVQDFWIGRVHRGAPPIRDKSSKYYVSYEMYQWPAYPDYTAGAAYVISGDVAAKVYEASQTLNSSLYIDDVFMGLCANKIGIVPQDHVFFSGEGKTPYHPCIYEKMMTSHGHLEDLQDLWKNATDPKVKTISKGFFGQIYCRLMKIILLCKISYVDTYPCRAAFI

SEQ ID NO: 302182 - protein, 62 aa, Artificial Sequence
  derived and/or modified sequence
MRMLVSGRRVKKWQLIIQLFATCFLASLMFFWEPIDNHIVSHMKSYSYRYLINSYDFVNDTL

SEQ ID NO: 302183 - protein, 81 aa, Artificial Sequence
  derived and/or modified sequence
MRMLVSGRRVKKWQLIIQLFATCFLASLMFFWEPIDNHIVSHMKSYSYRYLINSYDFVNDTLSLKHTSAGPRYQYLINHKE

SEQ ID NO: 302184 - protein, 50 aa, Artificial Sequence
  derived and/or modified sequence
MRMLVSGRRVKKWQLIIQLFATCFLASLMFFWEPIDNHIVSHMKSYSYRY

SEQ ID NO: 302185 - DNA, 1137 bp, Artificial Sequence
  derived and/or modified sequence
atgagaatgctggtgagcggcagaagagtgaagaagtggcagctgatcatccagctgttcgccacctgcttcctggccagcctgatgttcttctgggagcccatcgacaaccacatcgtgagccacatgaagagctacagctacagatacctgatcaacagctacgacttcgtgaacgacaccctgagcctgaagcacaccagcgccggccccagataccagtacctgatcaaccacaaggagaagtgccaggcccaggacgtgctgctgctgctgttcgtgaagaccgcccccgagaactacgacagaagaagcggcatcagaagaacctggggcaacgagaactacgtgagaagccagctgaacgccaacatcaagaccctgttcgccctgggcacccccaaccccctggagggcgaggagctgcagagaaagctggcctgggaggaccagagatacaacgacatcatccagcaggacttcgtggacagcttctacaacctgaccctgaagctgctgatgcagttcagctgggccaacacctactgcccccacgccaagttcctgatgaccgccgacgacgacatcttcatccacatgcccaacctgatcgagtacctgcagagcctggagcagatcggcgtgcaggacttctggatcggcagagtgcacagaggcgccccccccatcagagacaagagcagcaagtactacgtgagctacgagatgtaccagtggcccgcctaccccgactacaccgccggcgccgcctacgtgatcagcggcgacgtggccgccaaggtgtacgaggccagccagaccctgaacagcagcctgtacatcgacgacgtgttcatgggcctgtgcgccaacaagatcggcatcgtgccccaggaccacgtgttcttcagcggcgagggcaagaccccctaccacccctgcatctacgagaagatgatgaccagccacggccacctggaggacctgcaggacctgtggaagaacgccaccgaccccaaggtgaagaccatcagcaagggcttcttcggccagatctactgcagactgatgaagatcatcctgctgtgcaagatcagctacgtggacacctacccctgcagagccgccttcatctag

SEQ ID NO: 302186 - DNA, 189 bp, Artificial Sequence
  derived and/or modified sequence
atgagaatgctggtgagcggcagaagagtgaagaagtggcagctgatcatccagctgttcgccacctgcttcctggccagcctgatgttcttctgggagcccatcgacaaccacatcgtgagccacatgaagagctacagctacagatacctgatcaacagctacgacttcgtgaacgacaccctgtag

SEQ ID NO: 302187 - DNA, 246 bp, Artificial Sequence
  derived and/or modified sequence
atgagaatgctggtgagcggcagaagagtgaagaagtggcagctgatcatccagctgttcgccacctgcttcctggccagcctgatgttcttctgggagcccatcgacaaccacatcgtgagccacatgaagagctacagctacagatacctgatcaacagctacgacttcgtgaacgacaccctgagcctgaagcacaccagcgccggccccagataccagtacctgatcaaccacaaggagtag

SEQ ID NO: 302188 - DNA, 153 bp, Artificial Sequence
  derived and/or modified sequence
atgagaatgctggtgagcggcagaagagtgaagaagtggcagctgatcatccagctgttcgccacctgcttcctggccagcctgatgttcttctgggagcccatcgacaaccacatcgtgagccacatgaagagctacagctacagatactag

SEQ ID NO: 302189 - DNA, 1137 bp, Artificial Sequence
  derived and/or modified sequence
atgcgcatgctggtgagtggccggcgcgttaagaaatggcagctaattatccagctgttcgccacctgtttcttagctagtttgatgtttttttgggagcctattgacaatcacatagtttcacacatgaaaagttattcatatcggtacctgatcaattcctatgattttgtgaacgataccctaagcttaaagcatacgagcgctggaccgaggtaccagtacctgattaaccataaagaaaaatgccaggctcaggacgtcctgctcctgctgttcgtaaagaccgctcccgaaaactacgacaggaggagcgggattagacgaacatggggcaatgaaaactacgtgagatcgcagctgaatgccaatatcaagacactgttcgccttagggactcccaaccccttggagggagaagaactccagcggaagctagcgtgggaggaccagcgctataatgacattatacagcaggactttgtggattcattctacaacctcacactgaagctgctcatgcagttcagttgggccaacacttattgtcctcacgccaaatttctcatgactgcagacgacgatatattcatccatatgcccaacttgattgagtacttgcagagccttgaacagataggagtccaggacttttggatcggccgggtccacagaggcgccccaccaattcgggataaaagttcaaaatactatgtaagctacgagatgtatcagtggcccgcctacccggattacacagccggagctgcctacgtcatctcaggggatgtggccgcaaaggtatatgaagcatcgcagactctcaattcctctctgtatatagatgacgtcttcatgggtctgtgcgcaaacaaaatcggtatcgtccctcaggatcatgtgttctttagcggagagggcaaaacgccctaccatccctgcatctatgagaagatgatgacgtcccatggtcatcttgaggatctgcaggacctgtggaaaaacgcgactgaccctaaagtgaaaaccattagcaaggggttctttggtcagatatactgccggcttatgaaaattatcctgctgtgtaaaatttcatatgtcgatacttatccgtgtagagctgccttcatctag

SEQ ID NO: 302190 - DNA, 1137 bp, Artificial Sequence
  derived and/or modified sequence
atgcgcatgctggtatccggtagaagagtgaaaaaatggcaactgatcatccaattgtttgcaacgtgttttctggcttcgctgatgttcttctgggagcctattgataaccacatcgtcagtcacatgaaatcctatagctatcggtatcttatcaatagttacgatttcgtaaacgataccctgtctttaaagcacaccagcgctggcccacgctatcagtaccttataaatcacaaggaaaagtgccaggcacaagatgtgttattgctgcttttcgtcaagacggcaccagagaattacgatcggcgttctggaattagacggacatggggtaatgagaattacgtgaggtctcagttaaatgcaaatatcaaaactctgtttgcgttaggaacccctaatcccctggagggggaggagttgcagagaaagctggcatgggaagaccagcgctacaatgacatcatacagcaggacttcgtggactccttctacaatttaacactgaaactactgatgcaattctcctgggccaatacttattgtcctcacgccaagtttcttatgactgctgacgacgatattttcattcacatgccaaatttgatagaatatctgcagagcctggagcagatcggggtacaggatttttggattggaagggttcataggggcgcccctccaatccgtgacaaatccagtaaatactacgtaagctacgagatgtatcagtggcctgcataccctgactataccgctggggctgcatatgtcatctcgggcgacgtagccgcaaaagtctacgaagctagtcagacactgaattcgtccctttacatcgacgacgtattcatgggcctctgcgccaataaaatcggaatcgtgccacaagaccacgttttcttttccggggagggcaaaaccccataccacccatgtatttacgagaagatgatgacaagccacgggcacctggaggacctgcaggatctgtggaagaacgcgactgatccaaaggtgaaaacaataagtaagggtttctttggtcagatttactgcagactgatgaaaattattcttctgtgtaagattagctacgttgatacctatccatgtagagccgcatttatctag

SEQ ID NO: 302191 - DNA, 189 bp, Artificial Sequence
  derived and/or modified sequence
atgcgaatgttagtgtcaggccggcgggtaaagaagtggcagctgatcatacagctgtttgctacatgttttcttgccagcctgatgtttttctgggaaccgattgataaccacattgtgagtcacatgaagtcatattcctacaggtacttaataaactcctatgacttcgtgaatgacacgttatag

SEQ ID NO: 302192 - DNA, 246 bp, Artificial Sequence
  derived and/or modified sequence
atgcgcatgcttgtgtcagggaggcgagtgaagaaatggcaactgataatacaactctttgccacatgttttctagcctccttaatgttcttctgggagcccatcgacaaccacatcgtctctcacatgaaaagttacagctatcgctacttaatcaattcttacgattttgtgaatgataccttatctctgaagcacacaagcgctggtcctcgttaccaataccttatcaaccataaggaatag

SEQ ID NO: 302193 - DNA, 1137 bp, Artificial Sequence
  derived and/or modified sequence
atgcgaatgctcgtcagtggtagacgcgttaagaagtggcagctgattatccagctgttcgcgacttgttttttagctagcttgatgtttttttgggaacccatagataatcatatcgttagccacatgaagtcctattcatacaggtacttgatcaattcatatgatttcgtcaatgacactctgagcctgaagcacactagtgcagggccacggtatcagtatctgattaaccataaagagaaatgtcaggcccaggacgtgctgctgctgctttttgtaaagactgctcctgaaaactatgacaggcgcagcggcatccggaggacctggggtaatgaaaattatgtgcgatctcagctgaatgctaacatcaaaaccctgtttgcgttgggcacaccaaatcccctcgagggcgaggaactgcaaagaaaattagcgtgggaagaccagagatacaacgatataatccaacaggacttcgttgactctttctacaatctcacattgaagctgttgatgcagtttagttgggccaacacttattgtccccatgcaaaattcctgatgaccgccgatgacgatatttttatacacatgcccaatcttatcgagtatcttcagagtctggagcagattggggtccaggatttttggatcggtagggtgcaccggggagctccgcccatccgggataagtctagcaagtattacgtttcctacgaaatgtaccagtggcctgcatatcccgactatactgctggcgctgcctacgttatctccggagacgtggctgccaaggtgtatgaggcctctcagacattaaattctagcttatacatcgatgacgtgtttatggggctgtgcgccaataagataggcattgtaccacaggaccatgtcttcttctcgggcgagggaaagactccataccatccgtgtatttatgaaaagatgatgacaagtcatgggcacctggaggacctgcaggacctgtggaagaacgcaaccgatccgaaagtgaaaaccattagtaagggattcttcggtcaaatctattgcaggctgatgaagataattttattgtgcaagatctcttatgtggatacttatccatgtagggcggcctttatttag

SEQ ID NO: 302194 - DNA, 153 bp, Artificial Sequence
  derived and/or modified sequence
atgaggatgcttgtcagcgggagacgggtgaagaagtggcaactgattattcagcttttcgcgacctgtttccttgctagcttgatgttcttctgggagccaatagacaaccacatagtgtcccatatgaagtcctactcttataggtactag

SEQ ID NO: 302195 - DNA, 1137 bp, Artificial Sequence
  derived and/or modified sequence
atgaggatgctggtgtctggccggcgggtgaagaagtggcagctgatcatccagctgtttgccacctgcttcctggccagcctgatgttcttctgggagcccatcgacaaccacatcgtgagccacatgaagagctacagctaccgctacctgatcaacagctatgactttgtgaatgacaccctgagcctgaagcacaccagcgctggcccccgctaccagtacctgatcaaccacaaggagaagtgccaggcccaggatgtgctgctgctgctgtttgtgaagacagccccagaaaattatgacagaagaagtggcatccggaggacctggggcaatgaaaactacgtgcgcagccagctgaatgccaacatcaagaccctgtttgccctgggcacccccaaccccctggagggggaggagctgcagaggaagctggcctgggaggaccagcgctacaatgacatcatccagcaggactttgtggacagcttctacaacctgaccctgaagctgctgatgcagttctcctgggccaacacctactgcccccacgccaagttcctgatgacagcagatgatgacatcttcatccacatgcccaacctgattgagtacctgcagagcctggagcagattggagtgcaggacttctggattggccgggtgcacagaggagccccacccatccgggacaagagcagcaagtactacgtgtcctatgagatgtaccagtggccagcctacccagactacacagctggggccgcctacgtgatctctggagatgtggccgccaaggtgtatgaggccagccagaccctgaacagcagcctgtacattgatgatgtgttcatgggcctgtgtgccaacaagattggaattgtgccccaggaccacgtgttcttcagcggggagggcaagaccccctaccacccctgcatctatgagaagatgatgaccagccacggccacctggaggacctgcaggacctgtggaagaatgccacagaccccaaggtgaagaccatcagcaagggcttcttcggccagatctactgccgcctgatgaagatcatcctgctgtgcaagatctcctatgtggacacctacccctgcagagctgccttcatctag

SEQ ID NO: 302196 - DNA, 189 bp, Artificial Sequence
  derived and/or modified sequence
atgaggatgctggtgtctggccggcgggtgaagaagtggcagctgatcatccagctgtttgccacctgcttcctggccagcctgatgttcttctgggagcccatcgacaaccacatcgtgagccacatgaagagctacagctaccgctacctgatcaacagctatgactttgtgaatgacaccctgtag

SEQ ID NO: 302197 - DNA, 246 bp, Artificial Sequence
  derived and/or modified sequence
atgaggatgctggtgtctggccggcgggtgaagaagtggcagctgatcatccagctgtttgccacctgcttcctggccagcctgatgttcttctgggagcccatcgacaaccacatcgtgagccacatgaagagctacagctaccgctacctgatcaacagctatgactttgtgaatgacaccctgagcctgaagcacaccagcgctggcccccgctaccagtacctgatcaaccacaaggagtag

SEQ ID NO: 302198 - DNA, 153 bp, Artificial Sequence
  derived and/or modified sequence
atgaggatgctggtgtctggccggcgggtgaagaagtggcagctgatcatccagctgtttgccacctgcttcctggccagcctgatgttcttctgggagcccatcgacaaccacatcgtgagccacatgaagagctacagctaccgctactag

SEQ ID NO: 302199 - DNA, 1137 bp, Artificial Sequence
  derived and/or modified sequence
atgcggatgctggtgagcggccggcgggtgaagaagtggcagctgataattcaactgtttgccacttgttttttggcatcccttatgtttttctgggagcccattgacaaccatatagtgtcccacatgaagagttactcttaccgctacctgattaattcctacgacttcgtgaacgacacgctgtcgctgaagcacaccagcgctggacctagataccaatacctcattaaccacaaggaaaagtgtcaagcgcaggacgtgctcctgctattgttcgtcaagacggctcccgaaaactatgacagaagaagtggaatccggagaacctggggtaatgagaactatgttcgctcccaactgaatgccaacatcaagacactatttgcccttgggactccaaaccccctggaaggagaggagctccagcgaaagctggcctgggaggatcagcgctataatgatataattcagcaggattttgtggactccttctacaacctgacattaaaactgctgatgcagttttcttgggcgaatacatattgtccgcatgcaaagtttctgatgacagcagatgatgacatcttcatacacatgcctaatctgatcgaatatctccaatccctggaacagatcggcgtgcaggacttctggatcgggcgagtccacagaggagctcccccaatccgcgacaagtccagcaagtattacgtgtcctatgagatgtaccagtggccagcctaccccgattacacagcaggcgcagcctacgtgatctctggcgatgtggcggcgaaagtatacgaagcatcacagactctcaattcctctctgtacattgacgatgtgttcatgggtctgtgcgcgaataagataggcatagtgccacaggatcatgtcttcttcagtggggaaggaaagactccatatcacccttgtatctacgagaagatgatgacctcccatgggcatcttgaggacctccaagacctgtggaagaacgcgacagaccccaaagtaaagacaatatcaaagggtttcttcggtcagatttactgcagattaatgaagattatcttactctgcaaaatcagttacgtcgatacttacccatgcagggccgcattcatttag

SEQ ID NO: 302200 - DNA, 1137 bp, Artificial Sequence
  derived and/or modified sequence
atgcggatgctggtgagcggccggcgggtgaagaagtggcagctgatcatccagctctttgcaacatgttttctggcctccctcatgttcttctgggaacctatagacaatcacattgtgagccacatgaaaagttacagctatagatacctgattaattcatatgacttcgtcaacgatacactgagcctgaaacatacatccgcggggcccaggtaccaatatctcatcaaccataaagaaaagtgccaggctcaggacgtgctactgttgctgttcgtcaaaacagcccctgaaaactacgaccgccggtccggcattaggagaacatggggtaatgaaaactacgttcgaagtcagcttaatgctaatattaaaacccttttcgcgctgggcacaccgaatcctctggaaggggaggagctgcagcggaaactggcgtgggaagaccagaggtataacgatattattcagcaagactttgtggactctttctacaaccttaccctcaagctgctaatgcagttcagctgggctaatacctactgtccccacgctaagtttttaatgacagccgatgacgatatcttcatccatatgccaaatctcattgaatacctgcaaagcctggagcagatcggtgtccaggatttctggataggacgcgtgcataggggagctccacctatccgggataagtcgtcaaagtactacgtgagctatgagatgtaccaatggccagcctatccggactatactgctggcgccgcttatgttatctcaggcgacgtggccgctaaagtgtatgaggcttctcagacactaaactcctctctgtatattgacgacgtgttcatggggttgtgtgctaataagatcgggattgtgcctcaggatcatgtgttttttagcggcgagggcaaaaccccttatcacccatgtatttatgagaagatgatgaccagccacggacacctagaagacctgcaggacttatggaagaatgcgaccgaccccaaggtgaaaactattagcaaagggttctttggccagatttactgtcgcctgatgaagatcatcctcttgtgcaagatttcctacgtggacacatatccatgtcgcgccgcattcatctag

SEQ ID NO: 302201 - DNA, 189 bp, Artificial Sequence
  derived and/or modified sequence
atgcggatgctggtgagcggccggcgggtgaagaagtggcagctgattatccagctttttgcaacgtgctttctagcgagtctgatgtttttctgggagccgatagacaaccatatcgtgtcacatatgaagagctatagctacaggtacctcatcaactcttacgacttcgtgaacgacaccctgtag

SEQ ID NO: 302202 - DNA, 246 bp, Artificial Sequence
  derived and/or modified sequence
atgcggatgctggtgagcggccggcgggtgaagaagtggcagctgattattcaattgtttgccacctgttttctcgctagtctaatgttcttttgggagcctatcgacaaccacatagtgtcacatatgaagagctactcttacaggtatctgataaactcttatgacttcgtaaacgacacattgagcctgaaacacaccagcgctggaccccgataccaatacttgatcaaccacaaggagtag

SEQ ID NO: 302203 - DNA, 1137 bp, Artificial Sequence
  derived and/or modified sequence
atgcggatgctggtgagcggccggcgggtgaagaagtggcagctgatcatccagctgttcgctacttgttttctagcctccctgatgtttttttgggaaccaatcgacaatcatattgtttctcatatgaagtcttatagctatagatatctgatcaattcgtatgactttgtgaacgacaccctgagcctaaaacatacttcggccggccccagataccaataccttatcaatcataaggagaaatgtcaggcccaagacgttctcctcttgctatttgtaaaaaccgcccccgaaaactacgatcgtcgcagtggtattcgcagaacatggggcaatgaaaattacgttaggtcccagctgaatgctaacatcaagactctcttcgcactgggtacacccaatccactggaaggggaggagcttcagcgtaaacttgcttgggaggatcaacgctacaatgatattatccaacaggacttcgtcgattcgttctacaatttgacacttaaattgttgatgcaatttagttgggcaaacacctattgtccccatgccaagttcctgatgaccgcggacgacgacatttttattcatatgcctaatttgattgaatacttacaaagtttggaacagatcggcgtccaggatttctggattggacgggtgcaccggggagcccctccaatacgggacaaatcttccaaatactacgtgtcttacgagatgtaccaatggcctgcttaccccgactacacggccggggccgcttatgtcatttcaggcgacgtcgctgctaaggtgtatgaagcctcccagaccttaaattcaagcttatatatcgacgacgtgttcatgggtctctgcgctaataaaataggcattgtgccccaggaccacgtgtttttttcaggagaggggaaaactccctatcatccgtgtatctacgaaaagatgatgacctctcacggacacctcgaggacctccaggatttatggaagaacgccactgatcctaaagtgaagacaatttccaagggatttttcggccagatttactgccgcctgatgaagatcattctgttgtgtaaaatcagttacgtggacacatacccctgcagggccgcctttatttag

SEQ ID NO: 302204 - DNA, 153 bp, Artificial Sequence
  derived and/or modified sequence
atgcggatgctggtgagcggccggcgggtgaagaagtggcagctgatcattcaactgttcgcaacatgctttcttgctagcctcatgttcttctgggagccaatcgataaccatatagtctcgcatatgaaaagttacagttaccgctactag

SEQ ID NO: 302205 - DNA, 1137 bp, Artificial Sequence
  derived and/or modified sequence
atgcgtatgctggtttctggtagacgggtgaagaaatggcagttaattattcagttattcgccacctgtttccttgcctccctcatgtttttctgggaaccaattgataatcatattgtgagccatatgaagagctacagctatagatatctgattaattcatatgattttgttaacgatacacttagcctgaagcatacatcagccggtcccagatatcagtacctgataaaccacaaggagaaatgccaggcgcaggacgtgctcctgttactgttcgtaaagactgcaccggagaactacgacaggaggagcggcatacgaaggacatggggcaatgaaaactacgtgagaagtcagctgaatgccaatatcaaaacactcttcgcgctcggcactcctaaccctttggagggcgaagagctgcagcgtaagctcgcatgggaagatcagaggtataacgacatcatccagcaggattttgtggacagtttctataatctgactctgaaattgctcatgcagttctcctgggccaacacatactgtccacacgcaaaattccttatgaccgcagatgacgatatctttattcacatgcccaacctgatagagtacctgcaaagcctggagcagatcggggtccaggatttttggattgggcgagtacatcggggagcccctcctatccgcgataagagcagcaagtactacgtgagttacgaaatgtatcagtggcctgcgtaccctgattacaccgcgggtgctgcctacgtaatctctggcgatgtggcggcaaaagtgtatgaagcatctcagacacttaactcatctctttacattgacgacgtatttatgggactgtgcgcgaataagattggcatcgttcctcaagaccatgttttcttctccggagaaggcaaaacaccataccatccctgcatttatgagaagatgatgacaagtcatggccatctcgaggatctgcaggatctgtggaaaaatgccactgatcccaaggtaaagactataagtaaaggcttcttcggccagatttactgcagattgatgaaaattattcttctctgtaagatttcttatgtcgatacatatccatgcagagcggcatttatatag

SEQ ID NO: 302206 - DNA, 1137 bp, Artificial Sequence
  derived and/or modified sequence
atgcgaatgctggttagcggacggcgagtcaaaaaatggcaactcattattcagttgttcgcaacatgctttttagcgtccctgatgttcttctgggaacctattgataaccatatagtaagtcatatgaaaagttatagctacagatacctcattaacagttacgatttcgtcaatgacaccctgagtctaaaacacaccagcgcaggacctagatatcagtacctgattaatcataaagaaaaatgccaggcgcaggacgtgctcctactgctgttcgtgaagactgcacccgaaaattatgaccgcagatctggcataaggcggacctggggaaacgagaattacgtgaggtcacaactgaacgccaacatcaagactctattcgccctcggcacccctaatcctttggagggagaggagttgcagcgcaaactggcttgggaagatcaaaggtataacgatattatccagcaggactttgttgatagcttttacaacctgacactgaaactacttatgcagttttcttgggccaatacttactgcccccatgccaaattcctgatgaccgctgatgacgacatattcatccacatgccaaaccttattgaatatctccagtcactggagcagatcggggtccaagacttctggatcggtagagtgcacaggggtgcccctcctatcagggacaaaagctctaagtattacgtgtcctacgaaatgtatcagtggcctgcttaccccgattacaccgccggtgcagcgtatgtgatcagcggcgatgtcgccgctaaagtttacgaggccagtcaaaccctgaactcctcgctgtatattgatgatgtgttcatgggtttatgcgctaacaaaatcggaatcgtgcctcaggatcatgtcttcttttcaggtgagggtaagaccccataccatccttgtatttacgaaaagatgatgacgtcccacggccacctggaagatctccaagacctgtggaaaaacgctactgacccaaaagtgaagactattagcaaaggtttcttcggccagatatattgtcggctcatgaaaattattctcctgtgcaaaataagctatgttgacacatatccttgtagagccgctttcatatag

SEQ ID NO: 302207 - DNA, 189 bp, Artificial Sequence
  derived and/or modified sequence
atgcgaatgctggtgagtgggcgtcgagtgaaaaaatggcagctgataatccagctttttgcgacctgtttcctggcctcgctaatgtttttctgggaacccatcgataaccacatcgtgagccacatgaagagttattcatatcggtacctgatcaatagctacgactttgtcaacgatacactctag

SEQ ID NO: 302208 - DNA, 246 bp, Artificial Sequence
  derived and/or modified sequence
atgcggatgctggtttcaggacggagagtgaaaaaatggcagctcatcatccagctgttcgctacatgttttctcgcaagcctgatgttcttctgggagccaatagacaatcatattgtgagccacatgaaatcctattcctacagatacctgattaattcctacgactttgtcaacgatacactcagtctcaagcatacaagtgccggaccgaggtaccagtatctgattaatcacaaagagtag

SEQ ID NO: 302209 - DNA, 1137 bp, Artificial Sequence
  derived and/or modified sequence
atgcgcatgctggttagcggtaggcgcgtgaagaaatggcagctgatcatccaattgttcgctacatgctttctagcctccctaatgttcttctgggaacctattgacaaccatattgtttcccacatgaaatcttactcgtaccgttacctcatcaacagctatgatttcgtcaatgacaccctgtccttgaagcacaccagcgctggacctaggtatcaatacttaattaatcacaaggaaaagtgtcaagcccaggacgtcttgctgctcctatttgtgaaaacagccccagagaattacgaccgcagatcagggattaggaggacctggggcaatgagaactatgtgaggagtcagctcaatgccaacattaagaccctcttcgcattgggaacgcccaaccccttggaaggcgaggagctccagcgaaagcttgcctgggaggaccagcgttataacgacataatccagcaggactttgtggattccttctataacctgactctgaagcttctgatgcagttctcctgggctaatacctactgtccccatgccaaattcctgatgaccgcagatgacgacatctttatccacatgccgaacctgatcgagtacttgcagtccctagagcaaattggggtgcaggatttctggatcggacgcgtgcaccggggagctcctcctattagggacaagagctcgaagtactacgtgtcttacgagatgtatcagtggcctgcatacccagactacacggcaggggcagcctatgtcatcagcggcgacgtcgccgctaaggtgtatgaggcttcacagaccttgaactcaagtctctacattgacgatgtgttcatgggactgtgcgcaaacaagatcggtatcgttccgcaggaccatgtatttttttctggagagggtaagacaccctatcatccgtgtatttacgaaaagatgatgacctcacatggtcacttggaggatctccaggatctctggaaaaacgccactgaccctaaggtcaagactatcagcaagggtttttttggccagatctactgtcgacttatgaagataatactcttatgcaaaatttcctatgttgatacctatccatgcagggcagccttcatatag

SEQ ID NO: 302210 - DNA, 153 bp, Artificial Sequence
  derived and/or modified sequence
atgagaatgctcgtgagcggtcgacgagtcaagaaatggcaattgattatccaattgtttgcaacatgcttcctggcgtccctaatgttcttttgggagcccattgataatcatatagtatcccacatgaaatcctatagctatcggtactag

SEQ ID NO: 302211 - DNA, 4123 bp, Artificial Sequence
  derived and/or modified sequence
atcccgcccgcatacagcccgcatcccgccggggaagcgagcccagtccagcgctgcccgtccagtcctcgcccaagatttaaagcccgcaagttttgttcttgagaccagcgactttagctccgatgcgggaaggaaagccgacctccgatttggacatttaaagagctgggcttgaacttcgtgagtttcgctctaaactgcccttgaaatgaagctggacttggaggtggcatggaatattcacatgggagagccgcatgaggccgcccaccacgcttcctgaaggatgcccgtgtggaagaattttgacgtgccagtgtcctcgttctacagggtgttccattcttccgcaatctcagaaaaatgggactaaaagaaactattttgtaaaataagaagacttccatttttaatgaccaacatgtattaagatggacacctactctacgaaacacgaagttctatggtctcgaagaagcccgtgcctgtttaaaactgatcctaactaaaaacagacttgagtggatatgagaatgttggttagtggcagaagagtcaaaaaatggcagttaattattcagttatttgctacttgttttttagcgagcctcatgtttttttgggaaccaatcgataatcacattgtgagccatatgaagtcatattcttacagatacctcataaatagctatgactttgtgaatgataccctgtctcttaagcacacctcagcggggcctcgctaccaatacttgattaaccacaaggaaaagtgtcaagctcaagacgtcctccttttactgtttgtaaaaactgctcctgaaaactatgatcgacgttccggaattagaaggacgtggggcaatgaaaattatgttcggtctcagctgaatgccaacatcaaaactctgtttgccttaggaactcctaatccactggagggagaagaactacaaagaaaactggcttgggaagatcaaaggtacaatgatataattcagcaagactttgttgattctttctacaatcttactctgaaattacttatgcagttcagttgggcaaatacctattgtccacatgccaaatttcttatgactgctgatgatgacatatttattcacatgccaaatctgattgagtaccttcaaagtttagaacaaattggtgttcaagacttttggattggtcgtgttcatcgtggtgcccctcccattagagataaaagcagcaaatactacgtgtcctatgaaatgtaccagtggccagcttaccctgactacacagccggagctgcctatgtaatctccggtgatgtagctgccaaagtctatgaggcatcacagacactaaattcaagtctttacatagacgatgtgttcatgggcctctgtgccaataaaatagggatagtaccgcaggaccatgtgtttttttctggagagggtaaaactccttatcatccctgcatctatgaaaaaatgatgacatctcatggacacttagaagatctccaggacctttggaagaatgctacagatcctaaagtaaaaaccatttccaaaggtttttttggtcaaatatactgcagattaatgaagataattctcctttgtaaaattagctatgtggacacatacccttgtagggctgcgtttatctaatagtacttgaatgttgtatgttttcactgtcactgagtcaaacctggatgaaaaaaacctttaaatgttcgtctataccctaagtaaaatgaggacgaaagacaaatattttgaaagcctagtccatcagaatgtttctttgattctagaagctgtttaatatcacttatctacttcattgcctaagttcatttcaaagaatttgtatttagaaaaggtttatattattagtgaaaacaaaactaaagggaagttcaagttctcatgtaatgccacatatatacttgaggtgtagagatgttattaagaagttttgatgttagaataattgcttttggaaaataccaaatgaacgtacagtacaacatttcaaggaaatgaatatattgttagaccaggtaagcaagtttatttttgttaaagagcacttggtggaggtagtaggggcagggaaaggtcagcataggagagaaagttcatgaatctggtaaaacagtctcttgttcttaagaggagatgtagaaaaatgtgtacaatgttattataaacagacaaatcacgtcttaccacatccatgtagctactggtgttagagtcattaaaatacctttttttgcatcttttttcaaagtttaatgtgaacttttagaaaagtgattaatgttgccctaatactttatatgtttttaatggatttttttttaagtattagaaaatgacacataacacgggcagctggttgctcatagggtccttctctagggagaaaccattgttaattcaaataagctgattttaatgacgttttcaactggtttttaaatattcaatattggtctgtgtttaagtttgttatttgaatgtaatttacatagaggaatataataatggagagacttcaaatggaaagacagaacattacaagcctaatgtctccataattttataaaatgaaatcttagtgtctaaatccttgtactgattactaaaattaacccactcctccccaacaaggtcttataaaccacagcactttgttccaagttcagagttttaaattgagagcattaaacatcaaagttataatatctaaaacaatttatttttcatcaataactgtcagaggtgatctttattttctaaatatttcaaacttgaaaacagagtaaaaaagtgatagaaaagttgccagtttggggttaaagcatttttaaagctgcatgttccttgtaatcaaagagatgtgtctgagatctaatagagtaagttacatttattttacaaagcaggataaaaatgtggctataatacacactacctcccttcactacagaaagaactaggtggtgtctactgctagggagattatatgaaggccaaaataatgacttcagcaagagtgactgaactcactctaaggcctttgactgcagaggcacctgttagggaaaatcagatgtctcatataataaggtgatgtcggaaacacgcaaaacaaaacgaaaaaagatttctcagtatacacaactgaatgatgatacttacaatttttagcaggtagctttttaatgtttacagaaattttaatttttttctattttgaaatttgaggcttgtttacattgcttagataatttagaatttttaactaatgtcaaaactacagtgtcaaacattctaggttgtagttactttcagagtagatacagggttttagatcattacagtttaagttttctgaccaattaaaaaaacatagagaacaaaagcatatttgaccaagcaacaagcttataattaatttttattagttgattgattaatgatgtattgccttttgcccatatataccctgtgtatctatacttggaagtgtttaaggttgccattggttgaaaacataagtgtctctggccatcaaagtgatcttgtttacagcagtgcttttgtgaaacaattatttatttgctgaaagagctcttctgaactgtgtccttttaatttttgcttagaatagaatggaacaagtttaaatttcaaggaaatatgaaggcacttcctttttttctaagaaggaagttgctagatgattccttcatcacacttacttaaagtactgagaagagtatctgtaaataaaagggttccaaccttttaaaaaagaaggaaaaaactttttggtgctccagtgtagggctatctttttaaaaaatgtcaacaaagggaaaataaactatcagcttggatggtcacttgaatagaagatggttatacacagtgttattgttaaaatttttttaccttttggttggtttgcatcttttttccatattgttaattttataccaaaatgttaaatatttgtattacttgaattttgctcttgtatggcaaaataattagtgagtttaaaaaaaatctatagtttccaataaacaactgaaaaattatcatga

SEQ ID NO: 302212 - DNA, 3368 bp, Artificial Sequence
  derived and/or modified sequence
ctgggccggtggttccgcgcggagttagtctgtggtcagttacgtggtgaaaacacggctgtgccgcggccgcatctttccgcggccgaggcctctctgggtgggagtgttggcttcctttccggatcgctaaatggggaaagttctggccgctcggcgggatacgtctccaggccacggatggttcgttctccgtgccgcggccccgagctgggctccctgggtctccagcgcgggctcccggcattgggggctgcgggccggcccctccgccccgcccccgccccgccgcgcctcctcggccgagcggctcgcggtctccggcgcgggaggctccgagtctgcccactccgggccgagcgaggtctctggaggagaagagtggcgaggaggtgagggcacgccggccctcgcccggcgggtggcgccaggacttcaggtggcatggaatattcacatgggagagccgcatgaggccgcccaccacgcttcctgaaggatgcccgtgtggaagaattttgacgtgccagtgtcctcgttctacagggtgttccattcttccgcaatctcagaaaaatgggactaaaagaaactattttgtaaaataagaagacttccatttttaatgaccaacatgtattaagatggacacctactctacgaaacacgaagttctatggtctcgaagaagcccgtgcctgtttaaaactgatcctaactaaaaacagacttgagtggatatgagaatgttggttagtggcagaagagtcaaaaaatggcagttaattattcagttatttgctacttgttttttagcgagcctcatgtttttttgggaaccaatcgataatcacattgtgagccatatgaagtcatattcttacagatacctcataaatagctatgactttgtgaatgataccctgtctcttaagcacacctcagcggggcctcgctaccaatacttgattaaccacaaggaaaagtgtcaagctcaagacgtcctccttttactgtttgtaaaaactgctcctgaaaactatgatcgacgttccggaattagaaggacgtggggcaatgaaaattatgttcggtctcagctgaatgccaacatcaaaactctgtttgccttaggaactcctaatccactggagggagaagaactacaaagaaaactggcttgggaagatcaaaggtacaatgatataattcagcaagactttgttgattctttctacaatcttactctgaaattacttatgcagttcagttgggcaaatacctattgtccacatgccaaatttcttatgactgctgatgatgacatatttattcacatgccaaatctgattgagtaccttcaaagtttagaacaaattggtgttcaagacttttggattggtcgtgttcatcgtggtgcccctcccattagagataaaagcagcaaatactacgtgtcctatgaaatgtaccagtggccagcttaccctgactacacagccggagctgcctatgtaatctccggtgatgtagctgccaaagtctatgaggcatcacagacactaaattcaagtctttacatagacgatgtgttcatgggcctctgtgccaataaaatagggatagtaccgcaggaccatgtgtttttttctggagagggtaaaactccttatcatccctgcatctatgaaaaaatgatgacatctcatggacacttagaagatctccaggacctttggaagaatgctacagatcctaaagtaaaaaccatttccaaaggtttttttggtcaaatatactgcagattaatgaagataattctcctttgtaaaattagctatgtggacacatacccttgtagggctgcgtttatctaatagtacttgaatgttgtatgttttcactgtcactgagtcaaacctggatgaaaaaaacctttaaatgttcgtctataccctaagtaaaatgaggacgaaagacaaatattttgaaagcctagtccatcagaatgtttctttgattctagaagctgtttaatatcacttatctacttcattgcctaagttcatttcaaagaatttgtatttagaaaaggtttatattattagtgaaaacaaaactaaagggaagttcaagttctcatgtaatgccacatatatacttgaggtgtagagatgttattaagaagttttgatgttagaataattgcttttggaaaataccaaatgaacgtacagtacaacatttcaaggaaatgaatatattgttagaccaggtaagcaagtttatttttgttaaagagcacttggtggaggtagtaggggcagggaaaggtcagcataggagagaaagttcatgaatctggtaaaacagtctcttgttcttaagaggagatgtagaaaaatgtgtacaatgttattataaacagacaaatcacgtcttaccacatccatgtagctactggtgttagagtcattaaaatacctttttttgcatcttttttcaaagtttaatgtgaacttttagaaaagtgattaatgttgccctaatactttatatgtttttaatggatttttttttaagtattagaaaatgacacataacacgggcagctggttgctcatagggtccttctctagggagaaaccattgttaattcaaataagctgattttaatgacgttttcaactggtttttaaatattcaatattggtctgtgtttaagtttgttatttgaatgtaatttacatagaggaatataataatggagagacttcaaatggaaagacagaacattacaagcctaatgtctccataattttataaaatgaaatcttagtgtctaaatccttgtactgattactaaaattaacccactcctccccaacaaggtcttataaaccacagcactttgttccaagttcagagttttaaattgagagcattaaacatcaaagttataatatctaaaacaatttatttttcatcaataactgtcagaggtgatctttattttctaaatatttcaaacttgaaaacagagtaaaaaagtgatagaaaagttgccagtttggggttaaagcatttttaaagctgcatgttccttgtaatcaaagagatgtgtctgagatctaatagagtaagttacatttattttacaaagcaggataaaaatgtggctataatacacactacctcccttcactacagaaagaactaggtggtgtctactgctagggagattatatgaaggccaaaataatgacttcagcaagagtgactgaactcactctaaggcctttgactgcagaggcacctgttagggaaaatcagatgtctcatataataaggtgatgtcggaaacacgc

SEQ ID NO: 302213 - DNA, 608 bp, Artificial Sequence
  derived and/or modified sequence
agtttgctgtaagtttccttactttgttactgaggcccccagagctccacgcataagtggtgtgaccagaaaccttttaacaagacccgcctgagcctgcgttagagctcccgctcggaaagtggcatggaatattcacatgggagagccgcatgaggccgcccaccacgcttcctgaaggatgcccgtgtggaagaattttgacgtgccagtgtcctcgttctacagggtgttccattcttccgcaatctcagaaaaatgggactaaaagaaactattttgtaaaataagaagacttccatttttaatgaccaacatgtattaagatggacacctactctacgaaacacgaagttctatggtctcgaagaagcccgtgcctgtttaaaactgatcctaactaaaaacagacttgagtggatatgagaatgttggttagtggcagaagagtcaaaaaatggcagttaattattcagttatttgctacttgttttttagcgagcctcatgtttttttgggaaccaatcgataatcacattgtgagccatatgaagtcatattcttacagatacctcataaatagctatgactttgtgaatgataccctg

SEQ ID NO: 302214 - DNA, 684 bp, Artificial Sequence
  derived and/or modified sequence
gaacgccgcgcccaccaattcggttgccggccgggggccccaggcttgcggccacccgcctccggctggagggctgaattcgagtcgaaagcccgtgtcgggctggaaagaagaaaccgccaacctgagaacgctttcggtggcatggaatattcacatgggagagccgcatgaggccgcccaccacgcttcctgaaggatgcccgtgtggaagaattttgacgtgccagtgtcctcgttctacagggtgttccattcttccgcaatctcagaaaaatgggactaaaagaaactattttgtaaaataagaagacttccatttttaatgaccaacatgtattaagatggacacctactctacgaaacacgaagttctatggtctcgaagaagcccgtgcctgtttaaaactgatcctaactaaaaacagacttgagtggatatgagaatgttggttagtggcagaagagtcaaaaaatggcagttaattattcagttatttgctacttgttttttagcgagcctcatgtttttttgggaaccaatcgataatcacattgtgagccatatgaagtcatattcttacagatacctcataaatagctatgactttgtgaatgataccctgtctcttaagcacacctcagcggggcctcgctaccaatacttgattaaccacaaggaaa

SEQ ID NO: 302215 - DNA, 1766 bp, Artificial Sequence
  derived and/or modified sequence
tgcacccacagcagtctgttgtggatggttgctgagctgcgcattcggcattgggcttgctttgtttcctgccaggcccagcattttcttctaccagatcggcaggcttgtgggcttcttcctaggtccctcccctgcactctgaataggaaagctggaagctgtgctttagagaagctttaagacgccgaaagaaaccagaagagtgagcgccagttgtatgtggcatggaatattcacatgggagagccgcatgaggccgcccaccacgcttcctgaaggatgcccgtgtggaagaattttgacgtgccagtgtcctcgttctacagggtgttccattcttccgcaatctcagaaaaatgggactaaaagaaactattttgtaaaataagaagacttccatttttaatgaccaacatgtattaagatggacacctactctacgaaacacgaagttctatggtctcgaagaagcccgtgcctgtttaaaactgatcctaactaaaaacagacttgagtggatatgagaatgttggttagtggcagaagagtcaaaaaatggcagttaattattcagttatttgctacttgttttttagcgagcctcatgtttttttgggaaccaatcgataatcacattgtgagccatatgaagtcatattcttacagatacctcataaatagctatgactttgtgaatgataccctgtctcttaagcacacctcagcggggcctcgctaccaatacttgattaaccacaaggaaaagtgtcaagctcaagacgtcctccttttactgtttgtaaaaactgctcctgaaaactatgatcgacgttccggaattagaaggacgtggggcaatgaaaattatgttcggtctcagctgaatgccaacatcaaaactctgtttgccttaggaactcctaatccactggagggagaagaactacaaagaaaactggcttgggaagatcaaaggtacaatgatataattcagcaagactttgttgattctttctacaatcttactctgaaattacttatgcagttcagttgggcaaatacctattgtccacatgccaaatttcttatgactgctgatgatgacatatttattcacatgccaaatctgattgagtaccttcaaagtttagaacaaattggtgttcaagacttttggattggtcgtgttcatcgtggtgcccctcccattagagataaaagcagcaaatactacgtgtcctatgaaatgtaccagtggccagcttaccctgactacacagccggagctgcctatgtaatctccggtgatgtagctgccaaagtctatgaggcatcacagacactaaattcaagtctttacatagacgatgtgttcatgggcctctgtgccaataaaatagggatagtaccgcaggaccatgtgtttttttctggagagggtaaaactccttatcatccctgcatctatgaaaaaatgatgacatctcatggacacttagaagatctccaggacctttggaagaatgctacagatcctaaagtaaaaaccatttccaaaggtttttttggtcaaatatactgcagattaatgaagataattctcctttgtaaaattagctatgtggacacatacccttgtagggctgcgtttatctaatagtacttgaatgttgtatgttttcactgtcactgagtcaaacctggatgaaaaaaacctttaaatgttcgtctataccctaagtaaaatgaggacgaaagacaaa

SEQ ID NO: 302216 - DNA, 614 bp, Artificial Sequence
  derived and/or modified sequence
attcggcattgggcttgctttgtttcctgccaggcccagcattttcttctaccagatcggcaggcttgtgggcttcttcctaggtccctcccctgcactctgaataggaaagctggaagctgtgctttagagaagctttaagacgccgaaagaaaccagaagagtggcatggaatattcacatgggagagccgcatgaggccgcccaccacgcttcctgaaggatgcccgtgtggaagaattttgacgtgccagtgtcctcgttctacagggtgttccattcttccgcaatctcagaaaaatgggactaaaagaaactattttgtaaaataagaagacttccatttttaatgaccaacatgtattaagatggacacctactctacgaaacacgaagttctatggtctcgaagaagcccgtgcctgtttaaaactgatcctaactaaaaacagacttgagtggatatgagaatgttggttagtggcagaagagtcaaaaaatggcagttaattattcagttatttgctacttgttttttagcgagcctcatgtttttttgggaaccaatcgataatcacattgtgagccatatgaagtcatattcttacagatac

SEQ ID NO: 302217 - DNA, 366 bp, Artificial Sequence
  derived and/or modified sequence
atgggcttgcttgatagactatccgtattgctggggctgaagaaaaaagaggtgcatgttctctgcctggggctcgacaactcaggtaagaccactattattaataaactcaaacctagcaatgcgcagtcacagaatattttgccaaccattggattttctattgaaaagtttaagtcgtcttcactcagctttactgtcttcgatatgtccggccaaggtcgttatcggaatttgtgggagcattattataaagaaggacaagcaatcattttcgtgatcgattcatctgacaggctgagaatggtggttgcaaaggaggagctggataccttacttaaccaccctgatatcaaacacaggtag

SEQ ID NO: 302218 - DNA, 894 bp, Artificial Sequence
  derived and/or modified sequence
gctacgccgggaactgcccggctcctcgcaggaaataggcagctcaccctgccacctgtgcacacatttttcttcaatgtatagttcctcggcgcgcctctgaccttttcccggagctcttcaatcccagaagctatagcacaacggctgaatcgccaggacccccggggaggcgtggcttcaggaccggaagaagctcctgttgccaagggaacggtgcctgccaaggcgcctgctcagcgactgatgcacagactgctgcagaggctgccggttttcccaacttctagagacggctttgctcattaccaggcatccttcccatgtaggcatcgagaagaaggctgagggaccctcgcaccagatttccatcccggagaccgatacgagtgcgtccattcctgttgccagctcctgcgccctccggactaacctcaaaaaccagatacagttgtcttggaagcctgttattgataaagttgctgcagcctcacatccttcaagctggtttgtaaatatttgaatcacattatgggattgctagacagactttcagtcttgcttggcctgaagaagaaggaggttcatgttttgtgccttgggctagataatagtggcaaaacgacgatcattaacaaacttaaaccttcaaatgctcaatctcaaaatatccttccaacaataggattcagcatagagaaattcaaatcatccagtttgtcatttacagtgtttgacatgtcaggtcaaggaagatacagaaatctctgggaacactattataaagaaggccaagctattatttttgtcattgatagtagtgatagattaagaatggttgtggccaaagaagaactcgatactcttctgaatcatccagatattaaacaccgt

SEQ ID NO: 302219 - DNA, 366 bp, Artificial Sequence
  derived and/or modified sequence
atgggcctgctggaccggctgtctgtgctgctgggcctgaagaagaaggaggtgcacgtgctgtgcctgggcctggacaacagcggcaagaccaccatcatcaacaagctgaagcccagcaatgcccagagccagaacatcctgcccaccatcggcttcagcattgagaagttcaagagcagcagcctgtccttcaccgtgtttgacatgagcggccagggccgctacagaaacctgtgggagcactactacaaggagggccaggccatcatcttcgtcatcgacagcagtgaccggctgaggatggtggtggccaaggaggagctggacaccctgctgaaccacccagacatcaagcacaggtag

SEQ ID NO: 302220 - DNA, 366 bp, Artificial Sequence
  derived and/or modified sequence
atgggcctgctggaccggctgagcgtgctgctgggcctgaagaagaaggaagtccacgtcctgtgtctgggactggacaattctggaaagacaaccattatcaataaactgaagccgtctaacgcacagagccagaatattctccccacaatcggcttcagcattgagaaattcaagtctagcagcctgtcgttcaccgtgttcgacatgagtggacaaggacgatataggaatctctgggagcattattacaaggagggtcaagcaatcattttcgttatcgactcaagtgaccgcttgcggatggtggtggctaaagaggaactggacacacttctcaatcatcccgatattaaacatcgctag

SEQ ID NO: 302221 - DNA, 366 bp, Artificial Sequence
  derived and/or modified sequence
atgggcctcctcgatcgactatctgtgttgctgggactcaaaaagaaggaggtgcacgttctgtgcttgggtctggacaactccggcaagactaccatcattaataagttgaaaccaagcaatgcgcagagtcagaacattctgcctaccatcggattctccattgagaagttcaagagcagctctctaagcttcaccgtgttcgacatgagcggtcaaggacgctatcgcaatctgtgggagcattactacaaagaggggcaagccatcatcttcgtgatcgacagttctgaccgcctgcgcatggtggttgccaaagaggagctcgatacactcctgaaccaccctgacatcaagcaccggtag

SEQ ID NO: 302222 - DNA, 366 bp, Artificial Sequence
  derived and/or modified sequence
atgggcctgctggacagactgagcgtgctgctgggcctgaagaagaaggaggtgcacgtgctgtgcctgggcctggacaacagcggcaagaccaccatcatcaacaagctgaagcccagcaacgcccagagccagaacatcctgcccaccatcggcttcagcatcgagaagttcaagagcagcagcctgagcttcaccgtgttcgacatgagcggccagggcagatacagaaacctgtgggagcactactacaaggagggccaggccatcatcttcgtgatcgacagcagcgacagactgagaatggtggtggccaaggaggagctggacaccctgctgaaccaccccgacatcaagcacagatag

SEQ ID NO: 302223 - DNA, 1005 bp, Artificial Sequence
  derived and/or modified sequence
atgagatacaagaccagcctggtgatgagaaagagactgagactgtacagaaacaccctgaaggagagcagcagcagcagcggccaccacggcccccagctgaccgccgccagcagccccagcgtgttccccggcctgcacgaggagcccccccaggccagccccagcagacccctgaacggcctgctgagactgggcctgcccggcgacatgtacgccagacccgagcccttcccccccggccccgccgccagaagcgacgccctggccgccgccgccgccctgcacggctacggcggcatgaacctgaccgtgaacctggccgccccccacggccccggcgccttcttcagatacatgagacagcccatcaagcaggagctgatctgcaagtggctggccgccgacggcaccgccacccccagcctgtgcagcaagaccttcagcaccatgcacgagctggtgacccacgtgaccgtggagcacgtgggcggccccgagcaggccaaccacatctgcttctgggaggagtgccccagacagggcaagcccttcaaggccaagtacaagctggtgaaccacatcagagtgcacaccggcgagaagcccttcccctgccccttccccggctgcggcaaggtgttcgccagaagcgagaacctgaagatccacaagagaacccacaccggcgagaagcccttcagatgcgagttcgagggctgcgagagaagattcgccaacagcagcgacagaaagaagcacagccacgtgcacaccagcgacaagccctacacctgcaaggtgagaggctgcgacaagtgctacacccaccccagcagcctgagaaagcacatgaaggtgcacggcagaagccccccccccagcagcggctacgacagcgccacccccagcgccctggtgagccccagcagcgactgcggccacaagagccaggtggccagcagcgccgccgtggccgccagaaccgccgacctgagcgagtag

SEQ ID NO: 302224 - DNA, 690 bp, Artificial Sequence
  derived and/or modified sequence
atgagatacaagaccagcctggtgatgagaaagagactgagactgtacagaaacaccctgaaggagagcagcagcagcagcggccaccacggcccccagctgaccgccgccagcagccccagcgtgttccccggcctgcacgaggagcccccccaggccagccccagcagacccctgaacggcctgctgagactgggcctgcccggcgacatgtacgccagacccgagcccttcccccccggccccgccgccagaagcgacgccctggccgccgccgccgccctgcacggctacggcggcatgaacctgaccgtgaacctggccgccccccacggccccggcgccttcttcagatacatgagacagcccatcaagcaggagctgatctgcaagtggctggccgccgacggcaccgccacccccagcctgtgcagcaagaccttcagcaccatgcacgagctggtgacccacgtgaccgtggagcacgtgggcggccccgagcaggccaaccacatctgcttctgggaggagtgccccagacagggcaagcccttcaaggccaagtacaagctggtgaaccacatcagagtgcacaccggcgagaagcccttcccctgccccttccccggctgcggcaaggtgttcgccagaagcgagaacctgaagatccacaagagaacccacacctag

SEQ ID NO: 302225 - DNA, 207 bp, Artificial Sequence
  derived and/or modified sequence
atgagatacaagaccagcctggtgatgagaaagagactgagactgtacagaaacaccctgaaggagagcagcagcagcagcggccaccacggcccccagctgaccgccgccagcagccccagcgtgttccccggcctgcacgaggagcccccccaggccagccccagcagacccctgaacggcctgctgagactgggcctgccctag

SEQ ID NO: 302226 - DNA, 234 bp, Artificial Sequence
  derived and/or modified sequence
atgagatacaagaccagcctggtgatgagaaagagactgagactgtacagaaacaccctgaaggagagcagcagcagcagcggccaccacggcccccagctgaccgccgccagcagccccagcgtgttccccggcctgcacgaggagcccccccaggccagccccagcagacccctgaacggcctgctgagactgggcctgcccggcgacatgtacgccagacccgagccctag

SEQ ID NO: 302227 - DNA, 1005 bp, Artificial Sequence
  derived and/or modified sequence
atgcgttataagactagtctagttatgaggaagaggctgcggctgtatcgcaacacgctgaaggagtccagctcgtcctctggacaccacggcccccagttaactgcagccagctccccctctgttttccctgggctgcatgaggaacctccccaggcaagtccgagccggcctttgaatgggcttctgaggctgggcctcccgggcgatatgtatgctcggcccgaaccatttccaccggggccagccgctcggtcggatgccttagcagccgccgcagcgctccatggatatggcggaatgaacctaaccgtaaacttggccgcaccacacggaccaggtgcattttttagatacatgcggcagccaatcaagcaagagctgatatgtaaatggctggcagccgacggcacggctacaccgtctctttgctccaagacattctctaccatgcacgagttggttactcatgtgacagtcgagcatgtcggtggacccgaacaggcaaaccatatctgtttttgggaggaatgcccaaggcagggtaaacctttcaaggcaaagtataaattggtgaaccatatacgagtgcacacgggcgaaaagccatttccctgtcccttccctggttgcggtaaagtgttcgcacgcagcgagaatttgaaaatccacaaacgcacacatactggcgagaagccatttcggtgcgagttcgaagggtgtgaacgacgttttgccaatagctccgatagaaaaaagcatagccatgtccacacgtctgacaaaccgtatacttgcaaggttcggggctgtgacaaatgctatacccaccctagcagcctgcgcaaacatatgaaggttcacggcaggagccctccgccttcttccggatatgatagcgctacccctagtgcactggtgagtccctcttccgactgtgggcataaatctcaagttgcctccagtgcagctgtagcagccaggacggcggatttgtcagaatag

SEQ ID NO: 302228 - DNA, 690 bp, Artificial Sequence
  derived and/or modified sequence
atgagatacaaaacaagcctagttatgcggaaacgattgagactctatagaaatacactcaaagaatcatcatccagcagcgggcatcacggacctcagctgactgcagcatctagcccatccgttttccctggtctgcacgaagagcctcctcaggcctctccctcaagacccctcaacggacttctacggctgggcctccccggggatatgtacgccagaccggagccctttcctcccggccccgccgctaggtccgacgctctcgctgctgccgcagccctgcatggttatggggggatgaatctcaccgtcaatctcgcagcccctcatgggcccggagcttttttcagatacatgcgccaacccataaaacaggagttaatctgcaagtggctggccgccgatggcacggctaccccctccctctgcagcaaaacctttagtacgatgcacgaactggtcactcacgtaactgtagaacatgtcggggggccggaacaagccaatcatatttgtttttgggaagagtgtccgcgacagggcaaacccttcaaagcaaagtataaactggtgaaccacatacgcgtgcacactggcgaaaagcctttcccttgcccattccccgggtgtggaaaggtgttcgcccggagtgagaatttgaaaatccacaaaagaactcacacatag

SEQ ID NO: 302229 - DNA, 207 bp, Artificial Sequence
  derived and/or modified sequence
atgagatacaagacatcactcgtgatgagaaagcgtttgcggctgtacagaaacaccctcaaagagtccagctcaagctcgggacaccatggcccacaattgaccgcagcctcaagcccgagcgtgtttccgggtcttcacgaggagcctccccaggcttcaccatctcggcccctgaatggcctgttaaggctaggcttgccgtag

SEQ ID NO: 302230 - DNA, 1005 bp, Artificial Sequence
  derived and/or modified sequence
atgagatacaagacatccctggtcatgagaaaaagattgaggctgtaccgcaacacccttaaagagtcttcaagttcatcaggccatcacggccctcagctgactgcagcatcctcccctagtgtgtttcccgggttgcacgaggagccaccccaagcatcacccagccggcctctcaacgggctcctgcgcctgggattgcctggagacatgtacgcccgccctgagcctttccctccaggccccgcagctcggtctgacgccttagccgctgccgccgctcttcacggctacgggggtatgaacctcaccgttaacctcgccgccccccacgggcctggcgcgttctttcggtacatgcgacaacctatcaagcaggaacttatctgtaagtggctcgccgcagatgggacggccacaccttccttgtgctccaagacattcagtaccatgcacgagcttgtcacccatgtgaccgtggagcacgtgggcggccctgagcaagccaaccacatctgtttttgggaagagtgtccccgccagggtaagccctttaaagctaaatataaattggtgaatcatattagagtacacacaggggagaaaccatttccctgccccttccctggatgtggtaaggtgtttgcacgcagcgaaaacctcaagattcataaaaggacacacaccggcgaaaagcctttccgatgtgaatttgagggatgcgagagacgctttgcaaactcatcggacagaaaaaaacattcccatgtgcatacgtcagataagccttatacatgcaaagtccgggggtgtgacaagtgctacactcatccatcctctctgcgcaagcacatgaaggtgcatgggcgcagccctccgcctagttcgggctacgactccgctacaccctccgctctggtttctcctagtagcgattgtggacacaagagccaggtggcaagttcggctgctgtggccgcacgaactgctgacctgtctgagtag

SEQ ID NO: 302231 - DNA, 1005 bp, Artificial Sequence
  derived and/or modified sequence
atgaggtacaaaacaagcttggttatgcgaaagcgtctccggctgtatagaaacactctgaaagagagctcgagttccagcggacatcatgggcctcagctcacagccgctagttctcccagcgtatttccaggtttacacgaggagcctccgcaggcttcaccttctaggccgctcaatgggctccttaggctcgggctgcctggagacatgtatgccaggccagagcctttcccaccgggcccggcagctagatccgatgctctggccgctgccgctgcgctgcatggatacggtggcatgaacttgactgtgaacctcgccgcaccgcacggccctggtgcgtttttcagatacatgagacagcctattaagcaggaactgatctgtaagtggcttgccgccgacggaaccgccacgccctccctctgttctaaaactttttcaactatgcatgagttggtgacgcatgtgaccgttgaacatgtgggaggcccagaacaggcaaaccatatctgtttttgggaagagtgtcctagacagggtaagccctttaaagcaaagtataagctcgtcaaccatattcgggtgcatacaggagaaaagccattcccatgtccgtttcccggatgcggcaaggtgtttgcacgcagcgagaatctaaagatccataaacgtacacacacgggggagaaaccgtttagatgtgagtttgagggatgtgagaggcggttcgcaaattcatcagaccggaagaagcactctcacgtgcacacatccgacaaaccatatacctgtaaagtgcgcggatgcgataagtgttacacacatccgagttcacttagaaaacatatgaaggtgcacggaaggtctcctccgccatccagtgggtatgacagcgccacgcccagcgccctcgtgtccccctcctcggattgtggacataagagtcaggtcgcctcatccgccgcggtcgccgcccgcacagcagatctcagcgaatag

SEQ ID NO: 302232 - DNA, 234 bp, Artificial Sequence
  derived and/or modified sequence
atgaggtataagaccagcttggtgatgcgcaagcggcttaggctctaccgtaatactctcaaggagagttccagctcaagcggacatcatgggcctcagcttactgccgccagttctccttccgtcttccctggcttgcacgaagaacctcctcaggcatccccaagtcgccccctgaatggcttactcaggttaggcctgccaggagacatgtacgcacgcccagagccctag

SEQ ID NO: 302233 - DNA, 1005 bp, Artificial Sequence
  derived and/or modified sequence
atgagatacaagaccagcctggtgatgaggaagaggctgcggctgtacagaaacaccctgaaggagagcagcagcagcagcggccaccacggcccccagctgacagctgccagcagccccagcgtcttccctggcctgcacgaggagcccccccaggccagccccagccggcccctgaatggcctgctgcggctgggcctgcccggggacatgtatgcccggcctgagcccttccccccaggccctgctgcccggagtgatgccctggccgctgctgctgccctgcacggctacggcggcatgaacctgactgtgaacctggccgcccctcatggccctggggccttcttccgctacatgaggcagcccatcaagcaggagctgatctgcaagtggctggccgcagatggaacagccacccccagcctgtgcagcaagaccttcagcaccatgcatgagctggtgacccacgtgacagtggagcacgtgggcggccctgagcaggccaaccacatctgcttctgggaggagtgcccccggcagggcaagcccttcaaggccaagtacaagctggtgaaccacatccgggtgcacactggagagaagcccttcccctgccccttccctggctgcggcaaggtgtttgcccggtctgagaacctgaagatccacaagaggacccacactggagagaagcccttccgctgtgaatttgagggctgtgaaagaagatttgccaacagcagtgacaggaagaagcacagccacgtgcacaccagtgacaagccctacacctgcaaggtgcggggctgtgacaagtgctacacccaccccagcagcctgaggaagcacatgaaggtgcacggccgcagccccccacccagcagcggctatgacagcgccacccccagcgccctggtgagccccagcagtgactgtggccacaagagccaggtggccagcagcgctgctgtggccgccaggacagctgacctgtctgagtag

SEQ ID NO: 302234 - DNA, 690 bp, Artificial Sequence
  derived and/or modified sequence
atgagatacaagaccagcctggtgatgaggaagaggctgcggctgtacagaaacaccctgaaggagagcagcagcagcagcggccaccacggcccccagctgacagctgccagcagccccagcgtcttccctggcctgcacgaggagcccccccaggccagccccagccggcccctgaatggcctgctgcggctgggcctgcccggggacatgtatgcccggcctgagcccttccccccaggccctgctgcccggagtgatgccctggccgctgctgctgccctgcacggctacggcggcatgaacctgactgtgaacctggccgcccctcatggccctggggccttcttccgctacatgaggcagcccatcaagcaggagctgatctgcaagtggctggccgcagatggaacagccacccccagcctgtgcagcaagaccttcagcaccatgcatgagctggtgacccacgtgacagtggagcacgtgggcggccctgagcaggccaaccacatctgcttctgggaggagtgcccccggcagggcaagcccttcaaggccaagtacaagctggtgaaccacatccgggtgcacactggagagaagcccttcccctgccccttccctggctgcggcaaggtgtttgcccggtctgagaacctgaagatccacaagaggacccacacctag

SEQ ID NO: 302235 - DNA, 207 bp, Artificial Sequence
  derived and/or modified sequence
atgagatacaagaccagcctggtgatgaggaagaggctgcggctgtacagaaacaccctgaaggagagcagcagcagcagcggccaccacggcccccagctgacagctgccagcagccccagcgtcttccctggcctgcacgaggagcccccccaggccagccccagccggcccctgaatggcctgctgcggctgggcctgccctag

SEQ ID NO: 302236 - DNA, 234 bp, Artificial Sequence
  derived and/or modified sequence
atgagatacaagaccagcctggtgatgaggaagaggctgcggctgtacagaaacaccctgaaggagagcagcagcagcagcggccaccacggcccccagctgacagctgccagcagccccagcgtcttccctggcctgcacgaggagcccccccaggccagccccagccggcccctgaatggcctgctgcggctgggcctgcccggggacatgtatgcccggcctgagccctag

SEQ ID NO: 302237 - DNA, 1005 bp, Artificial Sequence
  derived and/or modified sequence
atgcggtacaagaccagcctggtgatgcggaagcggctgcggctgtaccggaataccctgaaggagtcttccagttcgtccggacatcatggtccccaactgaccgcggcatcatccccaagtgtgttccccggtcttcacgaagagcccccccaggcgtcaccatcacgcccacttaacggcctgttgcggctcggcctccctggggatatgtacgcccgacccgagcctttcccccccggacccgcggcaaggagtgacgcactagctgccgcggccgctctgcatggatacggtggtatgaatctaacggtcaaccttgccgctccccacggccccggggcctttttccgctatatgagacaacccattaaacaggaacttatttgcaagtggttggcagctgatggtaccgccaccccttcactgtgttcgaagaccttcagtacgatgcacgaattagtgacccacgtcacagtggagcacgtcggtggaccagaacaggcaaatcatatttgcttctgggaagagtgcccacgacaagggaagcctttcaaagccaaatacaaactcgttaatcatatccgagtccatacgggggagaaacctttcccgtgtccttttccgggctgcggtaaagtgtttgcaaggtctgaaaatttgaagatccataaacggactcacactggggagaaaccgttccgctgcgaattcgaaggctgtgagcggcggtttgcgaattccagcgatagaaagaagcattcacatgtgcacactagcgacaaaccttatacttgtaaggtacgtggctgcgataaatgttacactcacccaagtagcctaaggaaacatatgaaggtacacggacgaagtccacctcccagctctgggtacgattccgcgactccttcagccctggtcagtcctagttctgactgtggccacaaatcacaagttgcgtcgtctgctgctgtggcggcacgcaccgccgatcttagcgagtag

SEQ ID NO: 302238 - DNA, 690 bp, Artificial Sequence
  derived and/or modified sequence
atgcggtacaagaccagcctggtgatgcggaagcggctgcggctgtataggaacaccttgaaggaatccagcagctccagcgggcatcacggcccacaattaaccgctgcttctagccccagcgtgttccccggtctgcatgaggagcctccccaggcctcgccctcccgtcctttaaacggattactccggctcggactgcccggggacatgtatgctcgtcccgaaccattcccccccggcccagccgctcgatcagacgccctggccgctgccgctgcgctgcacggatatgggggtatgaacttgacagtcaatctggccgccccccacggccctggagccttcttcagatatatgagacagcccatcaagcaggagttgatttgcaaatggctggccgctgatggaactgcaacaccatccctctgcagtaaaactttttctacaatgcacgaactggtcacccatgttaccgtggaacatgtggggggccctgagcaagcgaatcatatctgtttctgggaagagtgcccaaggcaaggaaagcccttcaaggctaagtacaagctcgttaaccatattcgcgtgcacactggggagaagcctttcccctgccctttccccggctgcgggaaggttttcgccaggtctgagaacttgaaaatccataagaggactcacacctag

SEQ ID NO: 302239 - DNA, 207 bp, Artificial Sequence
  derived and/or modified sequence
atgcggtacaagaccagcctggtgatgcggaagcggctgcggctgtaccgtaacacactgaaggaatcgtcttcgagctccggacaccacggcccccaactgactgcagccagttccccctcagtgttcccaggtctgcacgaagagcccccccaggcatctcctagccgcccacttaacggattgttgcgtctgggcctgccttag

SEQ ID NO: 302240 - DNA, 1005 bp, Artificial Sequence
  derived and/or modified sequence
atgcggtacaagaccagcctggtgatgcggaagcggctgcggctgtaccgcaacactcttaaggagtctagctcatcaagcggacatcatggaccccagttgacagcagcttcctctccttctgtctttcccggtctgcatgaggagcccccacaggccagtccctccaggccactaaatggactgctcaggctggggctgccaggcgatatgtacgccagaccagaaccttttccgcccggtcctgcggcccgctctgacgcactggccgccgccgctgcacttcacggctatgggggaatgaacctcacagtaaatttggctgcgccccacggccccggggctttttttagatatatgcgacaacccattaagcaggagctaatctgcaagtggctggctgccgacggtactgccacgccgtcactctgctcgaaaaccttttccacaatgcatgaattagttactcatgtgaccgtggaacacgtgggaggtccagagcaggctaatcacatctgcttctgggaagagtgtcctagacagggtaagccatttaaagctaagtataagctagtcaaccacatcagagtacatactggggaaaaacccttcccttgcccattccccggctgtggcaaggtcttcgctcgttcggaaaacctcaaaattcacaaacggacccacacaggagagaagccctttcgctgtgaattcgaagggtgtgaacgaaggttcgccaatagttccgacaggaagaaacattcccacgtacatacttctgataaaccatatacatgcaaagttcgtgggtgtgataaatgctacactcatccctcatctttgaggaagcatatgaaagtacacggacgaagcccaccccccagctctggctacgatagtgcaacaccctctgccctcgtctcacctagtagtgattgcggccacaagtctcaggtcgcaagcagtgcggcagtggcggccaggactgccgatctctctgaatag

SEQ ID NO: 302241 - DNA, 1005 bp, Artificial Sequence
  derived and/or modified sequence
atgcggtacaagaccagcctggtgatgcggaagcggctgcggctgtatagaaatacgctgaaggaatcatcctccagctccggacatcacgggcctcagctgactgcggcatccagccccagcgtgttcccgggcctacacgaggagcctccccaggcttctccttctaggccactcaacggacttttaagattggggcttcccggcgatatgtacgctcgtccagaacccttcccgcccgggcccgcggcgcggtccgatgcactcgccgcagcagccgctctccatggctacggcgggatgaacctgaccgttaacctagccgcacctcacggccctggtgcattctttaggtatatgaggcagccaattaaacaggagctgatctgtaaatggctcgcagctgacggtacagcgacgccaagtctctgctctaaaactttctccacgatgcatgaacttgtcacgcacgtcacagtggagcacgtgggtgggccagagcaggcaaatcatatctgcttctgggaagagtgtccccgtcaggggaagccttttaaagccaaatacaagctggtgaatcatatccgcgtgcatacaggagagaagccatttccgtgcccctttcctggatgcgggaaggtctttgccagatcagaaaacctcaagatccataaacgaacacatacgggagagaagcctttcagatgtgaatttgaaggctgcgagaggcgatttgctaattcctctgaccgcaaaaagcattcccacgtccacacgtctgacaagccatacacctgcaaggtcagagggtgtgacaagtgttacacacacccgtcaagtctcaggaagcacatgaaagttcacgggcggagtcctccaccaagttccggctacgattctgcgactccttcggctctcgtctccccctcctccgactgcggacacaagtcccaggttgccagttccgccgccgttgccgcacgcaccgctgacctttccgagtag

SEQ ID NO: 302242 - DNA, 234 bp, Artificial Sequence
  derived and/or modified sequence
atgcggtacaagaccagcctggtgatgcggaagcggctgcggctgtatcggaatacgctcaaggagagcagcagcagctctggccaccacggaccgcagctgacagctgcgtcctcaccttctgtgtttcccgggctgcacgaggagccgcctcaagcctctccatcccgacctctcaacggtcttttgcgcctcgggctcccaggcgacatgtacgcccgccccgagccttag

SEQ ID NO: 302243 - DNA, 1005 bp, Artificial Sequence
  derived and/or modified sequence
atgcgttacaaaacctctttggtgatgcgcaagcgactgcgcctgtatcgaaacaccttgaaagagagttcatcaagttccggtcaccatggtcctcaactaacagcagcttcgtcgcctagcgtttttcctggcttgcacgaagagcctccccaggcgtccccctccagacctctgaatggtctcctcagactggggcttcccggtgatatgtacgccaggcctgagcctttcccaccgggtccagcggctcgttccgacgcactggctgcggctgctgcactccacggctacggcggtatgaaccttaccgtgaatctggctgccccacatggccctggtgcatttttcaggtatatgagacaacctatcaagcaggaactcatatgtaagtggcttgctgccgacggtacggcaacaccctcactttgcagcaaaaccttctctacgatgcatgagctggtcacacatgtgactgtggagcacgtcgggggtccggaacaggcaaatcatatctgcttttgggaggagtgcccgaggcaggggaagcctttcaaagcgaaatacaagctcgtgaaccacatacgcgtccacaccggagagaaacccttcccctgccctttccccggttgcggcaaagtgtttgctaggagcgaaaacttaaaaatccacaaaaggactcatacaggcgagaagcctttccgctgtgagttcgaggggtgcgagcgtcgcttcgcaaactcttctgataggaagaagcatagccatgtccacaccagcgataagccttatacctgtaaggtaagaggctgtgataaatgctacacccacccatcttctttgagaaaacatatgaaggtgcacggaagatctccaccaccaagctctggatatgacagtgccactccaagcgcactggtttctccgtcatccgactgcggtcataaatcccaggttgcgagctccgccgctgtcgcagcgcgaacagccgacctcagtgagtag

SEQ ID NO: 302244 - DNA, 690 bp, Artificial Sequence
  derived and/or modified sequence
atgaggtacaagacctctttggtgatgagaaagcggttacggctgtaccggaacacactcaaggagagctcaagctcctccggacaccacggccctcagcttaccgcagcctccagtccatctgtgttccccggactgcacgaagagccaccacaggccagccctagccgtcccctcaatggccttctcaggctgggattaccaggagacatgtacgccaggcctgaaccctttccacccggaccagcggcacggtccgatgccctggccgctgcagcagcacttcatggctacggcggaatgaatctgacggtgaacctggctgccccacatgggccaggggcattctttagatacatgaggcaacccatcaagcaggaattaatttgtaagtggcttgctgccgatggtaccgcgaccccttcactttgttctaaaactttctctaccatgcacgagctggtgacacacgtcacagtggagcatgttgggggacctgaacaggctaatcacatttgtttttgggaggagtgtccacgccagggtaaacccttcaaagctaagtacaagctggtaaatcatatacgcgttcatacgggggaaaagccgtttccctgtccttttccaggctgtggcaaagttttcgcacgttccgaaaatctcaagatccacaaacgtacacacacctag

SEQ ID NO: 302245 - DNA, 207 bp, Artificial Sequence
  derived and/or modified sequence
atgcgatacaaaacttccctggtaatgcgtaaacggctccgtttatatagaaatactctcaaggagagctcttcgtcctcaggccatcacggccctcagcttactgccgctagcagcccctccgtcttccctgggctgcacgaggagcctcctcaggcctctccttctcgcccactgaacggcctcttgcgcttagggctgccgtag

SEQ ID NO: 302246 - DNA, 1005 bp, Artificial Sequence
  derived and/or modified sequence
atgcgatataaaacaagtctcgtaatgcggaagagactgcgcctttatcgcaacacgctgaaagagagctcttcatccagtggccaccatggtccacaactaactgctgccagttctccaagtgtatttcctggcctccacgaggaaccacctcaggctagcccgagccggccactcaacgggctgcttcggttggggcttcccggtgatatgtatgccagacccgagccattcccacctggcccagctgccaggtcagatgccctggctgctgctgctgcactgcatggctatggtgggatgaatctcaccgttaacctggccgctccacacgggcctggcgctttctttcgctacatgcgacagcccatcaagcaggaactgatctgcaaatggctagctgctgatggaaccgcaacaccatcgctctgcagcaagacgttttccaccatgcacgaattggtcacccatgtgactgttgaacacgtgggaggcccagagcaggcgaaccatatctgcttctgggaggagtgtcctaggcagggcaaacctttcaaggctaagtataaactagtcaaccacatcagagtacacacaggggaaaagcctttcccatgcccttttcctgggtgcgggaaggtgttcgctaggtctgaaaacctaaaaatccacaagagaacgcacaccggagagaaaccattccgatgcgagttcgaaggatgtgaaaggcgctttgcaaactctagcgacaggaaaaaacacagccacgtccatacgagcgacaagccctacacctgcaaagtcagaggctgtgataagtgttatacccatccttccagtttgcgaaagcatatgaaagtgcacggcaggagcccgccaccaagttcaggttatgactccgctacgccctcggccttggtgagtcctagtagcgactgtggacacaaatcacaggtggcgtcttcagccgctgtagctgccaggaccgccgatttgagcgaatag

SEQ ID NO: 302247 - DNA, 1005 bp, Artificial Sequence
  derived and/or modified sequence
atgcgatataaaacttccctggtcatgagaaaacggctgcggttgtaccgcaatactctcaaggagtccagtagtagttccggccatcacggaccccagctgacagcagccagcagcccctcggtcttccccggactgcatgaagagcccccacaggctagcccctcccgcccactgaacggcttactccgactggggctgcctggcgacatgtacgcgaggccagagccctttccacctgggccagctgctaggagtgacgccttagcggcagctgcagcacttcacggctacggcggaatgaacttgaccgtgaacctggcagcccctcatggccctggggcattttttcgatatatgcggcagccaattaagcaagagttgatttgcaagtggcttgccgctgacggcacagccacccctagcctgtgcagtaagacttttagtacaatgcatgagctggtcacgcacgttaccgttgagcatgtgggcggtccagaacaggccaaccacatctgtttttgggaagaatgtccaagacaagggaaacccttcaaagctaaatataagctcgtgaaccatataagagtgcacacaggcgagaaaccttttccatgcccattccctggctgtggtaaagtgtttgcacggagcgagaacctgaagatacacaaacggacgcacacgggcgaaaaaccatttcgatgcgagttcgaggggtgcgaacgaagattcgccaacagcagtgatcggaaaaagcactcccatgtccatactagcgataagccctacacatgcaaggtgaggggctgtgacaaatgctatacccatccctcctccctaagaaaacacatgaaggtgcatggacgcagccctcctccctcttcaggatacgactcagcaacaccctctgcacttgtctcaccatcttctgactgcggccacaagtctcaggtcgcatcaagtgccgctgtggccgctaggactgctgatctttcagaatag

SEQ ID NO: 302248 - DNA, 234 bp, Artificial Sequence
  derived and/or modified sequence
atgcgttataagacttctcttgtcatgcgtaaaaggttgcgcctgtaccgcaatacactgaaagagagttcctcatcaagcggtcatcacggccctcagctaacagccgcaagttccccctcagtgttccccggtctgcacgaagaacctccccaagcctcgccatccagacctttaaatggattattgcgcctcggcctgcctggagacatgtatgcccgacccgagccttag

SEQ ID NO: 302249 - protein, 576 aa, Artificial Sequence
  derived and/or modified sequence
MGHFEKGQHALLNEGEENEMEIFGYRTQGCRKSLCLAGSIFSFGILPLVFYWRPAWHVWAHCVPCSLQEADTVLLRTTDEFQIYSWKKVIWIYLSALNSAFGLTPDHPLMTDEEYIINRAIRKPDLKVRCIKVQKIRYVWNYLEGQFQKIGSLEDWLSSAKIHQKFGSGLTREEQEIRRLICGPNTIDVEVTPIWKLLIKEVLNPFYIFQLFSVCLWFSEDYKEYAFAIIIMSIISISLTVYDLREQSVKLHHLVESHNSITVSVCGRKAGVQELESRVLVPGDLLILTGNKVLMPCDAVLIEGSCVVDEGMLTGESIPVTKTPLPKMDSSVPWKTQSEADYKRHVLFCGTEVIQAKAACSGTVRAVVLQTGFNTAKGDLVRSILYPKPVNFQLYRDAIRFLLCLVGTATIGMIYTLCVYVLSGEPPEEVVRKALDVITIAVPPALPAALTTGIIYAQRRLKKRGIFCISPQRINVCGQLNLVCFDKTGTLTRDGLDLWGVVSCDRNGFQEVHSFASGQALPWGPLCAAMASCHSLILLDGTIQGDPLDLKMFEATTWVSLCSSENLRSFFNARAT

SEQ ID NO: 302250 - protein, 211 aa, Artificial Sequence
  derived and/or modified sequence
MLLQVPCNSWGDFLLDTISGLVFDTAKEDVELRTGIPRQLLLQVESTTVATRRLSGFLRTLADRLEGTKELLSSDMKKDFIMHRLPPYSAGDGAELSTPGGKLPRLDSVVRLQFKDHIVLTVLPDQDQSDEAQEKMVYIYHSLKNSRETHMMGNEEETEFHGLRFPLSHLDALKQIWNSPAISVKDLKLTTDEEKESLVLSLWTECLIQVV

SEQ ID NO: 302251 - DNA, 636 bp, Artificial Sequence
  derived and/or modified sequence
atgctgctgcaggtaccgtgcaacagctggggagactttcttctggacactatcagtggactggtgttcgataccgctaaagaggacgtggaactgcgtacgggcatcccccgccaactgctgctacaggtagagagtacaacagtagccacccgccgattgtccggctttttgaggactttagccgatcgcctagaaggcactaaggagctcctcagctcggatatgaaaaaagacttcatcatgcatagactccccccttatagcgctggggacggagctgagttgagcacccccggcggtaaactgcccagactggactccgtcgtcaggcttcagtttaaagatcacattgtgctcaccgttttacctgatcaggaccaaagtgatgaggcccaagagaagatggtctacatctatcactcactcaagaacagccgcgaaacccacatgatgggaaatgaggaggaaacagagtttcatggccttaggtttcccctgagtcaccttgatgcattaaaacagatctggaacagccctgccatttcggtgaaggatctgaagctcaccaccgacgaggagaaagagtctctggtgctgtcactgtggaccgagtgccttatccaagtggtctag

SEQ ID NO: 302252 - DNA, 636 bp, Artificial Sequence
  derived and/or modified sequence
atgctgctgcaggtgccctgcaacagctggggagacttcctgctggacaccatcagcggcctggtgtttgacacagccaaggaggatgtggagctgaggacaggcatcccccggcagctgctgctgcaggtggagagcaccaccgtggccacccggcggctgagcggcttcctgcggaccctggccgaccggctggagggcaccaaggagctgctgagcagtgacatgaagaaggacttcatcatgcaccggctgcccccctacagcgctggagatggagctgagctgagcaccccaggcggcaagctgccccggctggacagcgtggtgcggctgcagttcaaggaccacatcgtgctgactgtgctgcctgaccaggaccagagtgatgaggcccaggagaagatggtgtacatctaccacagcctgaagaacagccgggagacccacatgatgggaaatgaggaggagacagagttccacggcctgcgcttccccctgagccacctggatgccctgaagcagatctggaacagccctgccatctctgtgaaggacctgaagctgaccacagatgaggagaaggagagcctggtgctgagcctgtggacagaatgtctcatccaggtggtgtag

SEQ ID NO: 302253 - DNA, 4003 bp, Artificial Sequence
  derived and/or modified sequence
atgctccttcaggtaccatgtaattcatggggagatttccttttggataccatctcggggcttgtatttgatactgcaaaggaagacgtggagttacggaccggcataccccggcagctgctcctgcaggtggaatccacaactgttgctacaagacgattaagtggcttcctgaggacacttgcagaccggctggagggcaccaaagaactgctttcctcagacatgaagaaggattttattatgcacagactccccccttactctgcgggagatggggcagagctgtcaacaccaggtggaaagttaccgaggctggacagtgtagtgagactgcagtttaaagaccacattgtcctcacagtactgccggatcaagatcaatctgatgaagctcaagaaaagatggtgtacatctatcattccttaaagaatagtagagagacacacatgatgggaaatgaggaggaaacagagtttcatggacttcgcttccctttgtcacatttggatgcactgaagcaaatttggaatagtccagctatttctgtcaaggacctgaaacttactacagatgaggaaaaggaaagcctggtattatccctctggacagaatgtttaattcaagtagtctagtgcctttgcagaatcaaatgcctactattttatatgcatatattaaaagaaaagcaaagacctgagccgaggagaggatgaattcaagtttccttacctgcgtatctactaacaaacatgagacctccctgttacaggtggtcagttggccaaatgtactaacgggcacatgaaagaaagaacagcaaattaccaagtgtctcagaaaatgacaaaaccatattttgacaagtttatttaatccagtgtggtagaaaaggcacaattccaatgtatcatttagaattgaatgtcattaacctggctttgttctttggaagaaacaacttctttaaagagcttctttggctctagaaaaatttcaaacaattaaaataagaaaaaattttaaactggttttttataatgaaaatatacatacctttgtgtatagacaagcccatgcccattaaaataaagttatcctgtaacataaattttattaaataatacttccccacagatgagaggcacgcaacacctatggacaaaagggagttacagaggctgcttaaaagatggagaaaagcctgagattgaaggaggaaaaaaacccagtatttaaagtctataaaaaatactcaaaatagtgggtcttcgagtttaaaatagtcattgttattttacattctaaagtgcatgtaggttgatattttttaaaatatcattggagaatttaatctttctttataaaaatagagcatttttctgctttctggcaaaagttggggataaaaggaaaaaaagttgtcaaaatgtaattttcagtccaattcaccaggaaaacatgcttgtgaattgtgcagtaaaaggtggtaatgactactggaagctaagtcaaaggtgatttcctacctgattttacttacttaaataaaagttacttacaatgggagtgaaaaactgaggtttctgttatttagtagagaaatcaactccacgtttacttaaagagatggtaaggtcaaggttcaaatgctactgtgttttaatttggatatttgaaatttctcttgaggcaaaaaaaaaaaaaaattgatgcctctccttaaatctaggatgaagtgtcaacatggagacaggtaaccactgttatagagtcttgtcacctaaagggatgtcttggttaacacgtaacagtgcaagtttggccataggttatttatttgtacttttttagtttgaaggactgaggaaacaatagctacagaaaatacttcttgtgccttattcctaacaaagctgaggtccctgcctggggttagttacaagtataaatacttaacgaggtgcgttcattataaaagcctcagtatagaaaccttaaagtttatctaggaaagtttagtatattttcaggtgttgctaaaaaattactcatctgtttgcaaaagtatgacttgacctatagaaatctgtttctttatgctttgtactcatacaagcatctaggtaggatattaataaataatacaggataatagcatcaccagtgtccaataacgggccatcaggaacaggattcacgtttggtggatatgagagaaaataaacacttcaggaaacttgctcaccacagctggagatcaggaatagaacctttccaagatatcataatattttctttataggaacactgagtaatggcaagaatattttgagcttttccatggttaagagcgatagtctcagaggctggagaaaatgttcattctgctcagtgatccaggagtgtgaggacagtagcttcctttccacgtccacaagacaatgacagatgtgtttccttctttgctctttctagggatctttctagggatgttgattctctcacaatatttcaatgtcccatttctgtgtttcttctccctccaggggctgatttacaattacatgagtcttgtcacaataatttcctcctaaaatagaaattccaaaagaaaagattatttgttcaggcaggtgcttagcaatttcacaattttcacaagcttctgttcagctcaccatttcggtggatgaatgtgtcatttacaaagaagtctgaaatgggaagctgagtttgaacaggcttagccattattcacctcaaattggaccttattatgactcaaattgaaatactaaaaggtataatacatgattgtataagtggcgtgccttaatgtgattctttagaacaaagtgctcttgagagaactctggctgaatgtcaggtactgtgtttttgtttctacaccaacaaaactgtgactaacccaattaaagcaacagccatgaataatattggccctgaccttgctgaattcaaaaacaaggttaattgatacctaccataaattctacctgagggtttttaaggaccatggcaattcctggcaaaaagctagagatgtttctaagaaacagatgacattcatttcatggtttatggtgcttgaaatttagaactgttctgagttcacgtagcaaatgaaagttttacaactgtactaatgaacaaaaaccctaagctttgttgtttggctttttctgctaattgttttgtttgtaaaactgcctatcttaattttcttcaagcataattttaaatgacttaacatttctcttatacataaggatgtcctttacccaaaatgaggagatttggaactgaaactaatatccagggacacaacattgggtatcatcaaaggcccacctttaacatcaaggacaagttgatcactgagataagagctgatagttccatttttattcagtctccacttctgcctgaattgcccatgttcagtccatagagctactttagctccaggtgtgtcccggccaccaatcacatcaagacatgtatcactggcctaaaagggttaagaaatgattaattggcagtagtatgtttgctaaagtaagttgaattaggtcccttttatcttaggtaaacaagtcatagacatgaagtgtgtgtgtgtcttatctaaaaaaatactatatagtataatttcagtaagccttttttaatgtcttctttacggctgtgggtaggagatggtacagaaataaaccaactgaaatagaggtacttgtttttaataggatgtctacatctgacaacagatgttcaataaagatttggtgaattggaattaaatgttaaatccctgtttgcttaaaacgtattatgttgagcttggttttcttatgaaaacattgcatgatgggctaaagatatccagacaataattacttttaaaagtttttcatttttgaagcatgagaaaaagtagataatccattggtgatacaataaaacacagtttgaatgttt

SEQ ID NO: 302254 - DNA, 636 bp, Artificial Sequence
  derived and/or modified sequence
atgctgctgcaggtgccctgcaacagctggggcgacttcctgctggacaccattagtgggcttgtgttcgacaccgccaaagaagacgttgaattgcgaacagggattccacgccagttgttgcttcaggtagaatctaccacggtggcgacccgccgcctgtctgggttcctaaggactctggctgacagactggagggcactaaggagctgctgagtagcgatatgaagaaagattttattatgcatagactgccaccctactccgctggcgatggtgcagagctgagtactcctggcggaaagttaccacggctggactctgtggtgcgactgcagttcaaagatcacattgttctgactgtcttacctgaccaagatcagtcagatgaagcccaggaaaaaatggtttatatatatcactctttaaaaaatagtcgagagacccatatgatggggaatgaggaggagaccgaattccatggactgaggtttcctctgagccatctggatgccctgaaacagatctggaacagcccggcgatcagcgtgaaggacttaaaactgaccacggacgaggaaaaggagtctttggtgctctcactgtggacggaatgtttgattcaggtggtttag

SEQ ID NO: 302255 - DNA, 636 bp, Artificial Sequence
  derived and/or modified sequence
atgcttctccaagtgccatgcaatagttggggggacttcctgctggacaccattagcggactggtcttcgacactgccaaggaggatgttgaacttcgcaccggaatccccaggcaactgttgctccaggtggaaagcactactgtggcaactagacgcttaagtgggttcctgcgcactctcgccgaccgtctggaaggcactaaagaacttctctcatctgatatgaaaaaggattttatcatgcataggctgccaccctactcggctggcgacggagccgagttaagcacccccggaggtaagctgccgaggctggacagcgtggttaggttacagtttaaagatcacatagtgctgaccgtgctgccggatcaggaccagtctgacgaagcacaagaaaagatggtttacatctatcatagtctgaagaattcccgggaaactcacatgatggggaatgaagaggagacagagtttcatggcctccgctttcctttgagtcacctggatgccctgaagcagatctggaacagccccgctataagtgtcaaagatttgaagctgacgacggacgaagaaaaggaatccctcgtgcttagcctttggaccgaatgtcttattcaagtggtgtag

SEQ ID NO: 302256 - DNA, 636 bp, Artificial Sequence
  derived and/or modified sequence
atgctgctgcaggtgccctgcaacagctggggcgacttcctgctggacaccatcagcggcctggtgttcgacaccgccaaggaggacgtggagctgagaaccggcatccccagacagctgctgctgcaggtggagagcaccaccgtggccaccagaagactgagcggcttcctgagaaccctggccgacagactggagggcaccaaggagctgctgagcagcgacatgaagaaggacttcatcatgcacagactgcccccctacagcgccggcgacggcgccgagctgagcacccccggcggcaagctgcccagactggacagcgtggtgagactgcagttcaaggaccacatcgtgctgaccgtgctgcccgaccaggaccagagcgacgaggcccaggagaagatggtgtacatctaccacagcctgaagaacagcagagagacccacatgatgggcaacgaggaggagaccgagttccacggcctgagattccccctgagccacctggacgccctgaagcagatctggaacagccccgccatcagcgtgaaggacctgaagctgaccaccgacgaggagaaggagagcctggtgctgagcctgtggaccgagtgcctgatccaggtggtgtag

SEQ ID NO: 302257 - DNA, 1161 bp, Artificial Sequence
  derived and/or modified sequence
atgaaaatcgaagaggtcaaatctactactaagacccaacggatcgcatcacactctcacgtcaaaggcctgggactggacgaatccggtctggccaagcaagctgccagcggtctagtgggacaggagaatgcgagagaagcatgtggagtcattgtggagctcatcaagtccaaaaagatggctggtagagcagtcctgctggccggcccccccggaaccgggaagacagctctcgcacttgcaatcgctcaggaactgggctctaaggtgcccttctgccccatggtcggaagcgaggtgtatagcacggaaatcaaaaagaccgaggtgctgatggagaattttagaagggctattgggctgcggataaaagagaccaaagaggtatatgagggggaagtgacggagctaacaccttgtgagacggagaaccccatggggggctacggcaagacaatctcccacgtcatcatcggtttgaagacagccaaaggcacgaaacagcttaagttagatccctcaatcttcgaatccctgcagaaggagagagtggaggccggcgatgtgatatacattgaggccaacagtggggccgtgaaacgacaggggaggtgcgacacatatgcaacggaattcgatttggaggccgaggaatatgtgccattgccaaaaggggacgtgcacaaaaaaaaggaaatcatccaggatgtcacattgcatgacctcgatgtcgcgaacgcacgccctcagggaggacaagacatccttagcatgatgggtcagctgatgaagccgaaaaaaacagaaatcaccgacaagctccggggtgagataaacaaggttgtgaataagtatattgaccagggtattgcagaactggtgcccggagtactcttcgtcgatgaagtacatatgctcgacatcgagtgtttcacctacttgcaccgcgcccttgagagcagcatcgctcctattgtgatctttgccagcaaccgagggaattgtgttatcagggggaccgaggacatcactagccctcacggtataccattggatttactggaccgggtcatgattatcaggaccatgctatatacaccacaagagatgaaacaagtcctctctgccgcggcggacccaggacagctagcttgttag

SEQ ID NO: 302258 - DNA, 1161 bp, Artificial Sequence
  derived and/or modified sequence
atgaagattgaggaggtgaagagcaccaccaagacccagagaattgccagccacagccacgtgaagggcctgggcctggatgaaagtggcctggccaagcaggccgccagcggcctggtgggccaggagaatgcccgggaggcctgtggggtcatcgtggagctgatcaagagcaagaagatggccggccgggctgtgctgctggccggccccccaggcaccgggaagacagccctggccctggccatcgcccaggagctgggcagcaaggtgcccttctgccccatggtgggcagcgaggtgtacagcacagagatcaagaagacagaggtgctgatggagaacttcagaagagccatcggcctgcgcatcaaggagaccaaggaggtgtatgaaggagaggtgacagagctgaccccctgtgaaacagagaaccccatgggcggctacggcaagaccatcagccacgtgatcatcggcctgaagacagccaagggcaccaagcagctgaagctggaccccagcatctttgagagcctgcagaaggagcgggtggaggccggagatgtgatctacatcgaggccaacagcggggctgtgaagaggcagggccgctgtgacacctacgccacagaatttgacctggaggccgaggagtatgtgcccctgcccaagggagatgtgcacaagaagaaggagatcatccaggatgtgaccctgcatgacctggatgtggccaatgcccggccccagggcggccaggacatcctgtccatgatgggccagctgatgaagcccaagaagacagagatcacagacaagctgcggggggagatcaacaaggtggtgaacaagtacatcgaccagggcattgctgagctggtgcctggggtgctgtttgtggatgaggtgcacatgctggacatcgagtgcttcacctacctgcaccgggccctggagagcagcatcgcccccatcgtcatctttgccagcaacagaggcaactgtgtgatccggggcacagaggacatcaccagcccccacggcatccccctggacctgctggacagagtgatgatcatccgcaccatgctgtacaccccccaggagatgaagcaggtgctgtctgctgctgctgaccccggccagctggcctgctag

SEQ ID NO: 302259 - DNA, 1161 bp, Artificial Sequence
  derived and/or modified sequence
atgaagatcgaggaggtgaagagcaccaccaagacccagcggatcgcttcccactcacacgttaaggggctcggcctagacgaatcaggtctcgccaaacaagcagcatctggactggtcgggcaagaaaacgcaagggaggcttgcggcgtcattgttgagctgattaagagcaaaaagatggcaggcagggcagtccttcttgctggaccaccaggaacaggcaagaccgccctcgccctagctatagctcaagagctgggcagcaaggtcccattctgtccgatggtgggttccgaggtctactccacagaaatcaaaaagaccgaggttctcatggagaatttccgaagggcaatcggtctccggatcaaggaaaccaaggaggtgtacgagggcgaggtgactgagttaaccccctgcgagacagagaacccaatgggcggatacggcaagacaatcagccacgtgatcattgggctgaagaccgctaagggcacaaaacagctaaagcttgacccttcaattttcgagtcccttcagaaggagcgagttgaggcgggcgatgtgatttacatcgaggccaactcaggagctgtcaaaaggcaggggcgctgcgatacctacgctaccgagttcgacctcgaagccgaggagtacgtacccctcccgaagggcgacgtgcacaaaaaaaaagaaatcattcaggacgtgacactgcacgatctggacgtggcaaacgctcgccctcagggggggcaggacatcctctccatgatggggcaattgatgaagcctaagaagacggagatcacggataagctacggggcgagatcaataaggtggtaaataaatacattgatcagggtatagccgaattggtccctggggtactgttcgtcgacgaggtgcatatgctggacatcgagtgctttacatatctgcaccgggccctggagtccagcatcgcccctattgttatcttcgcatcaaataggggtaactgtgtaatacgtgggaccgaagatataaccagtccacatggaatccccctggacttactggacagagttatgatcattagaacaatgctgtatactcctcaggagatgaaacaggtgctcagcgccgctgccgatccaggccagctcgcctgttag

SEQ ID NO: 302260 - DNA, 1161 bp, Artificial Sequence
  derived and/or modified sequence
atgaaaattgaagaggtgaaaagcaccactaagacacagcggatcgctagtcacagccatgtgaagggattaggcctcgacgagtctggactggcaaaacaggccgcatctggcctcgtgggacaggagaacgccagagaggcctgcggagtcatcgtggagctgattaagagcaaaaagatggccggaagggcagtcctgctggccggaccccctggcaccgggaagacggcactagccctggccattgcccaggaattaggcagtaaggtcccgttctgcccaatggtggggtcagaggtttattccacagagatcaagaaaacggaagtcctaatggaaaatttccgtcgggctattgggctgcgtatcaaagaaactaaggaagtctacgagggagaggttaccgagcttacgccgtgcgagactgagaatcccatgggaggctacggcaagacgatctcacatgtgatcataggattgaaaaccgccaaagggacgaagcagttgaagttagatccatcaatcttcgagtcccttcaaaaggagcgggttgaggccggtgatgttatctatatagaagcgaattctggagcagtgaaacgccaagggagatgtgacacctatgctacagaatttgatttggaggccgaggaatatgtgccacttccaaaaggggacgttcacaaaaaaaaagagatcatccaggacgtgactctgcacgatctagacgttgcaaatgcccgtccccagggaggacaggacattctcagtatgatggggcagctaatgaagccaaagaaaacagaaattaccgacaagctgaggggggaaattaataaggttgtgaacaagtacattgatcaaggcatcgccgaactggtgccaggcgtactttttgttgatgaagtacacatgctggatattgaatgctttacttacctgcatagagcgctcgagtcatcgatcgcgcctatagtgatctttgcaagcaatagagggaactgtgtcatacggggaaccgaagatatcactagcccccacgggattccattggatcttctggaccgcgtgatgattatccggactatgctgtataccccgcaggagatgaagcaggtccttagtgctgcagctgacccaggtcaattagcctgctag

SEQ ID NO: 302261 - DNA, 1641 bp, Artificial Sequence
  derived and/or modified sequence
atggtaactcaggcgccgggcgcactgtcctagctgctggttttccacgctggttttagctcccggcgtctgcaaaatgaagattgaggaggtgaagagcactacgaagacgcagcgcatcgcctcccacagccacgtgaaagggctggggctggacgagagcggcttggccaagcaggcggcctcagggcttgtgggccaggagaacgcgcgagaggcatgtggcgtcatagtagaattaatcaaaagcaagaaaatggctggaagagctgtcttgttggcaggacctcctggaactggcaagacagctctggctctggctattgctcaggagctgggtagtaaggtccccttctgcccaatggtggggagtgaagtttactcaactgagatcaagaagacagaggtgctgatggagaacttccgcagggccattgggctgcgaataaaggagaccaaggaagtttatgaaggtgaagtcacagagctaactccgtgtgagacagagaatcccatgggaggatatggcaaaaccattagccatgtgatcataggactcaaaacagccaaaggaaccaaacagttgaaactggaccccagcatttttgaaagtttgcagaaagagcgagtagaagctggagatgtgatttacattgaagccaacagtggggccgtgaagaggcagggcaggtgtgatacctatgccacagaattcgaccttgaagctgaagagtatgtccccttgccaaaaggggatgtgcacaaaaagaaagaaatcatccaagatgtgaccttgcatgacttggatgtggctaatgcgcggccccaggggggacaagatatcctgtccatgatgggccagctaatgaagccaaagaagacagaaatcacagacaaacttcgaggggagattaataaggtggtgaacaagtacatcgaccagggcattgctgagctggtcccgggtgtgctgtttgttgatgaggtccacatgctggacattgagtgcttcacctacctgcaccgcgccctggagtcttctatcgctcccatcgtcatctttgcatccaaccgaggcaactgtgtcatcagaggcactgaggacatcacatcccctcacggcatccctcttgaccttctggaccgagtgatgataatccggaccatgctgtatactccacaggaaatgaaacaggtactcagtgcagctgctgaccccggccaacttgcttgctaaaatcaacgggaaggacagcattgagaaagagcatgtcgaagagatcagtgaacttttctatgatgccaagtcctccgccaaaatcctggctgaccagcaggataagtacatgaagtgagatggctgaggttttcagcagtaagagactccccaggtgtgcctggcctgggtccagcctgtgggcgcttgcccctgggcttggggctgccgtccccactcaggcgtggtctgcagcgctgtcagttcagtgtggaaagcatttctttttaagttatcgtaactgttcctgtggttgctttgaaagaacccttccttacctggtgtgttttctataaatcttcataggttattttgattctctctctctctctctctaagttttttaaaaataaacttttcagaac

SEQ ID NO: 302262 - DNA, 1161 bp, Artificial Sequence
  derived and/or modified sequence
atgaagatcgaggaggtgaagagcaccaccaagacccagagaatcgccagccacagccacgtgaagggcctgggcctggacgagagcggcctggccaagcaggccgccagcggcctggtgggccaggagaacgccagagaggcctgcggcgtgatcgtggagctgatcaagagcaagaagatggccggcagagccgtgctgctggccggcccccccggcaccggcaagaccgccctggccctggccatcgcccaggagctgggcagcaaggtgcccttctgccccatggtgggcagcgaggtgtacagcaccgagatcaagaagaccgaggtgctgatggagaacttcagaagagccatcggcctgagaatcaaggagaccaaggaggtgtacgagggcgaggtgaccgagctgaccccctgcgagaccgagaaccccatgggcggctacggcaagaccatcagccacgtgatcatcggcctgaagaccgccaagggcaccaagcagctgaagctggaccccagcatcttcgagagcctgcagaaggagagagtggaggccggcgacgtgatctacatcgaggccaacagcggcgccgtgaagagacagggcagatgcgacacctacgccaccgagttcgacctggaggccgaggagtacgtgcccctgcccaagggcgacgtgcacaagaagaaggagatcatccaggacgtgaccctgcacgacctggacgtggccaacgccagaccccagggcggccaggacatcctgagcatgatgggccagctgatgaagcccaagaagaccgagatcaccgacaagctgagaggcgagatcaacaaggtggtgaacaagtacatcgaccagggcatcgccgagctggtgcccggcgtgctgttcgtggacgaggtgcacatgctggacatcgagtgcttcacctacctgcacagagccctggagagcagcatcgcccccatcgtgatcttcgccagcaacagaggcaactgcgtgatcagaggcaccgaggacatcaccagcccccacggcatccccctggacctgctggacagagtgatgatcatcagaaccatgctgtacaccccccaggagatgaagcaggtgctgagcgccgccgccgaccccggccagctggcctgctag

SEQ ID NO: 302263 - protein, 497 aa, Artificial Sequence
  derived and/or modified sequence
MDWLVLGELQMALEWAGRPGLRISGHIAARKSCDVLQSVLCGADALIPVQTGAAGSASLTLLGNGSLIYQVQVVGTSSEVVAMTLETKPQRRDQRTVLCHMAGLQPGGHTAVGICPGLGARGAHMLLQNELFLNVGTKDFPDGELRGHVAALPYCGHSARHDTLPVPLAGALVLPPVKSQAAGHAWLSLDTHCHLHYEVLLAGLGGSEQGTVTAHLLGPPGTPGPRRLLKGFYGSEAQGVVKDLEPELLRHLAKGMASLMITTKGSPRGELRGQRRTVICDPVVCPPPSCPHPVQAPDQCCPVCPEKQDVRDLPGLPRSRDPGEGCYFDGDRSWRAAGTRWHPVVPPFGLIKCAVCTCKGGTGEVHCEKVQCPRLACAQPVRVNPTDCCKQCPVGSGAHPQLGDPMQADGPRGCRFAGQWFPESQSWHPSVPPFGEMSCITCRCGAGVPHCERDDCSLPLSCGSGKESRCCSRCTAHRRPAPETRTDPELEKEAEGS

SEQ ID NO: 302264 - DNA, 1494 bp, Artificial Sequence
  derived and/or modified sequence
atggactggctcgtgttgggagaactacagatggctctggaatgggctgggcgaccaggcctgaggatatcgggccacatcgccgcacgcaaatcctgtgacgttctgcaatctgtgctgtgcggcgcagatgctttgatcccagttcagactggcgccgcagggtccgctagcctcacgcttttgggcaatggcagcctcatctaccaggtccaggttgtgggaacctcatctgaagtcgtcgccatgactttggagaccaaacctcagcggagggatcagaggactgtgctgtgccacatggctggtttgcagccaggagggcacacagcagtgggaatctgccccggactgggcgctcgcggtgctcatatgctccttcagaatgagctttttctcaatgtagggacaaaagactttcccgacggagagctgcgcggccacgttgcagcattgccatactgtggacactcagcccgccatgacactctccccgtgcccctggccggagccttggtgcttccacctgtcaagagtcaggccgccgggcacgcttggctttctctggacactcattgccacctgcactacgaagttctattggcgggacttggtggatcagaacagggtactgtcactgcccatctgctcggtccccctgggactccgggaccacggcggttgcttaagggattttatggatctgaagcacagggagttgtcaaggacctcgaaccagaactcctgagacaccttgcaaagggcatggcatcgcttatgataacaacgaagggctccccacgtggcgagctgcggggccagcgaagaacagtgatttgtgaccctgtcgtctgtccgcccccatcatgcccacatcccgttcaggcccccgatcaatgctgtccagtatgcccagagaagcaggacgtgagggacctgccagggctcccgcgcagccgcgacccaggagaaggatgctactttgatggcgaccggtcctggagggcagccgggactaggtggcatcctgtagtgcccccgtttggattgatcaagtgtgcagtgtgtacctgcaaaggcggcacaggtgaggtgcactgcgaaaaagttcagtgtccaaggctagcctgtgctcaacccgtgcgagtaaacccaaccgactgctgcaagcagtgcccagtgggcagtggtgctcaccctcaactgggggatcctatgcaggcagacggacccaggggctgcaggttcgccggtcagtggtttccagaatcacagtcctggcacccgagcgttcctccatttggcgagatgagttgtattacatgccgatgtggggccggggtgccccactgtgaacgagacgactgctccttaccattatcctgtggctccgggaaagaaagcaggtgctgctcgaggtgcacggcccatcgacgtccagctccagagactaggacagatcccgagctggagaaagaagctgagggaagttag

SEQ ID NO: 302265 - DNA, 1494 bp, Artificial Sequence
  derived and/or modified sequence
atggactggctggtgctgggggagctgcagatggccctggagtgggccggccggcccggcctgcgcatcagcggccacatcgccgccaggaagagctgtgatgtgctgcagagcgtgctgtgtggggctgatgccctgatccctgtgcagacaggagctgctggcagcgccagcctgaccctgctgggcaatggcagcctcatctaccaggtgcaggtggtgggcaccagcagcgaggtggtggccatgaccctggagaccaagccccagaggcgggaccagaggacagtgctgtgccacatggccggcctgcagcccggcggccacacagctgtgggcatctgccccggcctgggcgcccggggggcccacatgctgctgcagaatgaactcttcctgaatgtgggcaccaaggacttcccagatggagagctgcggggccacgtggccgccctgccctactgcggccacagcgcccggcatgacaccctgcctgtgcccctggccggggccctggtgctgccccctgtgaagagccaggccgccggccacgcctggctgagcctggacacccactgccacctgcactatgaggtgctgctggccggcctgggcggcagcgagcagggcaccgtgacagcccacctgctgggccccccaggcaccccaggcccccggcggctgctgaagggcttctacggcagcgaggcccagggcgtggtgaaggacctggagcctgagctgctgcggcacctggccaagggcatggccagcctgatgatcaccaccaagggcagccccagaggagagctgcggggccagaggagaactgtcatctgtgaccctgtggtgtgccccccacccagctgcccccaccctgtgcaggccccagaccagtgctgccctgtgtgcccagagaagcaggatgtgcgggacctgcccggcctgcccaggagccgggaccccggggagggctgctactttgatggagaccgctcctggagggctgctggcacccgctggcaccctgtggtgccccccttcggcctcatcaagtgtgctgtgtgcacctgcaagggcggcaccggggaggtgcactgtgagaaggtgcagtgcccccggctggcctgtgcccagcctgtgcgggtgaaccccacagactgctgcaagcagtgccctgtgggcagcggggcccacccccagctgggggaccccatgcaggctgatggcccccggggctgccgctttgctggccagtggttccctgagagccagagctggcaccccagcgtgcccccatttggagagatgagctgcatcacctgccgctgtggggccggcgtgccccactgtgaaagagatgactgcagcctgcccctgagctgtggcagcggcaaggagagccgctgctgcagccgctgcacagcccaccggcggcctgcccctgagaccaggacagatcctgagctggagaaggaggccgagggcagctag

SEQ ID NO: 302266 - DNA, 1494 bp, Artificial Sequence
  derived and/or modified sequence
atggactggctggtgctgggcgagctgcagatggccctggagtgggctggacgccctggactccgcatctctggccatatcgcagctagaaagtcatgcgatgtgttacagtccgtactgtgtggagccgatgccctgatcccagtgcaaaccggcgccgcgggatcagccagcctgaccctacttggaaatgggtcactgatctatcaggttcaggtcgtggggacttccagcgaggtcgtagcaatgacactggaaacaaaaccccagagacgggaccagcggaccgtactgtgccacatggccggcctgcagcccggtggccacactgctgtgggcatttgtcctggactgggggcccggggcgcccacatgctgttacagaacgaactgtttctgaacgtcggaaccaaggatttccccgatggagaacttcgtggccacgtggccgctctgccttattgcggtcacagcgccagacacgatacgcttccagtgccattggccggcgcacttgtccttcctcccgtaaaaagtcaagccgcaggccacgcatggctgtcactcgacactcactgccatttgcactatgaggtgctcctcgctggcctgggcggttctgagcagggcacggttactgctcatctcttggggccgcctggcacaccgggacctcgccggctgctaaaggggttctatgggtccgaggcacagggcgttgtcaaggacctcgagcctgagctgctgcggcatctcgccaagggcatggcaagcctcatgatcacaactaaggggagtcctagaggcgaactgcgaggccaacgccgtacggtgatctgtgaccctgtagtgtgcccaccgcccagctgcccacaccctgtacaggccccggatcagtgctgccccgtttgccccgaaaagcaggatgtccgtgatctccctggcctgcccaggtcaagggatcctggtgaaggttgctattttgacggagatcgcagttggcgcgccgccgggactcgctggcacccagtggtcccaccgtttgggctgatcaaatgcgccgtgtgtacgtgtaagggcgggacaggcgaggtgcattgcgagaaagttcagtgtcccagacttgcatgcgcacagccagtacgggtgaacccaactgattgttgtaagcaatgccccgtggggtcaggagcgcacccccaactgggggaccccatgcaggccgatggcccccgcggctgcagatttgccgggcaatggttccctgaaagtcagtcctggcatccttccgttccaccctttggcgaaatgagttgtattacctgtcgctgtggcgctggggtacctcactgtgagagggatgattgcagtctgcctctctcctgtgggtcgggaaaggagagccgatgctgctccaggtgcaccgcacacagaagacccgctccggagacacggaccgaccccgagctggaaaaagaggctgagggatcatag

SEQ ID NO: 302267 - DNA, 1494 bp, Artificial Sequence
  derived and/or modified sequence
atggattggcttgtgctaggggaactgcaaatggccctggagtgggccggacgaccaggcctgcggatctccggtcatatcgccgctagaaagtcctgcgacgtgctgcaatcggttttgtgtggcgcagatgcgttgatacccgtgcagactggagctgccggtagcgctagcctcacgctgcttgggaatgggagcctcatctaccaggtgcaggtagtgggcacaagctctgaggtggtcgccatgacactggagactaagccccagcgcagggaccaacgcaccgtgctgtgccacatggctggcttgcagcctggagggcatacagcagtagggatctgcccaggtctaggtgcccgtggagcgcacatgctcctgcaaaatgaactatttttgaacgttggcactaaggatttcccagacggcgagttaagaggtcacgtcgccgcattaccatactgtggccatagtgctcgacacgataccctccctgtgcccctggccggagcattggtgctgccgcctgtgaagtcacaagcagctgggcacgcctggttgagcctggacactcactgtcatctgcactatgaggtcctgctggcaggcctggggggaagtgaacagggaacagtcactgcccatttgcttggccctcccggaacaccgggtccacgtagactgctgaagggtttctatggcagcgaagcgcagggcgtggttaaggatttagagccggaattgcttcggcacctggcgaaggggatggcttcactgatgataacaactaaaggctcgccccgaggcgaactgcgcggtcagcggcgaactgtgatctgtgaccctgtggtttgcccgccaccctcctgtccacatccagtccaggctcctgatcagtgttgccccgtctgccccgagaagcaggacgtgagagatctgccaggcttgcccaggtccagggatcctggggaaggctgttatttcgacggggatagaagctggagagctgccggtacacgatggcatcccgtcgtgccaccctttggactgatcaagtgcgcggtgtgtacttgtaaaggcggaacaggcgaggttcattgtgagaaagtccaatgtccgagacttgcatgcgcgcagcctgtgcgtgtgaatcccacagactgctgcaagcagtgccccgtggggtctggagcacatccacaacttggggatcctatgcaggccgacgggcctaggggatgtcgatttgctgggcagtggtttccagagtcacagagctggcacccttccgtgcccccatttggtgagatgtcatgtattacctgccggtgtggcgcaggggtcccgcattgcgaacgggacgactgtagccttcctctgtcctgcggcagtggcaaggaatccaggtgttgctcacggtgcaccgctcacagacggcctgccccagaaactagaaccgatcctgagctggaaaaggaagctgaagggtcctag

SEQ ID NO: 302268 - DNA, 2536 bp, Artificial Sequence
  derived and/or modified sequence
tcttaagcttcctagggcaccctggaggttcctttccatgttcctttttcataagccctgcctgggcatcctaattggcctagcctgcacagtgtctgagcgtagggccttcttgtctctctgctccaggtctgtggggtgtggcgggcagtgcctcggttgtctctgcggctccttagggcagaacagctgcatgtggcacttgtgacactcactcacccttcaggggaggtctgggggcctctcatccggcaccgggccctggctgcagagaccttcagtgccatcctgactctagaaggccccccacagcagggcgtagggggcatcaccctgctcactctcagtgacacagaggactccttgcattttttgctgctcttccgagggctgctggaacccaggagtgggggtaagtgggatgggggcaaaacacgtgagaaggttagggagagcacctgtctcagaaaggcccacatgtgcggccttgcaggactaacccaggttcccttgaggctccagattctacaccaggggcagctactgcgagaacttcaggccaatgtctcagcccaggtgagtggggatctggctctcgctgccacctgtcttggcctcttgctattgcccatcacaccctgctctgtccccaggaaccaggctttgctgaggtgctgcccaacctgacagtccaggagatggactggctggtgctgggggagctgcagatggccctggagtgggcaggcaggccagggctgcgcatcagtggacacattgctgccaggaagagctgcgacgtcctgcaaagtgtcctttgtggggctgatgccctgatcccagtccagacgggtgctgccggctcagccagcctcacgctgctaggaaatggctccctgatctatcaggtgcaagtggtagggacaagcagtgaggtggtggccatgacactggagaccaagcctcagcggagggatcagcgcactgtcctgtgccacatggctggactccagccaggaggacacacggccgtgggtatctgccctgggctgggtgcccgaggggctcatatgctgctgcagaatgagctcttcctgaacgtgggcaccaaggacttcccagacggagagcttcgggggcacgtggctgccctgccctactgtgggcatagcgcccgccatgacacgctgcccgtgcccctagcaggagccctggtgctaccccctgtgaagagccaagcagcagggcacgcctggctttccttggatacccactgtcacctgcactatgaagtgctgctggctgggcttggtggctcagaacaaggcactgtcactgcccacctccttgggcctcctggaacgccagggcctcggcggctgctgaagggattctatggctcagaggcccagggtgtggtgaaggacctggagccggaactgctgcggcacctggcaaaaggcatggcctccctgatgatcaccaccaagggtagccccagaggggagctccgagggcagagacgaacggtgatctgtgacccggtggtgtgcccaccgcccagctgcccacacccggtgcaggctcccgaccagtgctgccctgtttgccctgagaaacaagatgtcagagacttgccagggctgccaaggagccgggacccaggagagggctgctattttgatggtgaccggagctggcgggcagcgggtacgcggtggcaccccgttgtgcccccctttggcttaattaagtgtgctgtctgcacctgcaaggggggcactggagaggtgcactgtgagaaggtgcagtgtccccggctggcctgtgcccagcctgtgcgtgtcaaccccaccgactgctgcaaacagtgtccagtggggtcgggggcccacccccagctgggggaccccatgcaggctgatgggccccggggctgccgttttgctgggcagtggttcccagagagtcagagctggcacccctcagtgcccccttttggagagatgagctgtatcacctgcagatgtggggcaggggtgcctcactgtgagcgggatgactgttcactgccactgtcctgtggctcggggaaggagagtcgatgctgttcccgctgcacggcccaccggcggccagccccagagaccagaactgatccagagctggagaaagaagccgaaggctcttagggagcagccagagggccaagtgaccaagaggatggggcctgagctggggaaggggtggcatcgaggaccttcttgcattctcctgtgggaagcccagtgcctttgctcctctgtcctgcctctactcccacccccactacctctgggaaccacagctccacaagggggagaggcagctgggccagaccgaggtcacagccactccaagtcctgccctgccaccctcggcctctgtcctggaagccccacccctttcctcctgtacataatgtcactggcttgttgggatttttaatttatcttcactcagcaccaagggcccccgacactccactcctgctgcc

SEQ ID NO: 302269 - DNA, 1494 bp, Artificial Sequence
  derived and/or modified sequence
atggactggctggtgctgggcgagctgcagatggccctggagtgggccggcagacccggcctgagaatcagcggccacatcgccgccagaaagagctgcgacgtgctgcagagcgtgctgtgcggcgccgacgccctgatccccgtgcagaccggcgccgccggcagcgccagcctgaccctgctgggcaacggcagcctgatctaccaggtgcaggtggtgggcaccagcagcgaggtggtggccatgaccctggagaccaagccccagagaagagaccagagaaccgtgctgtgccacatggccggcctgcagcccggcggccacaccgccgtgggcatctgccccggcctgggcgccagaggcgcccacatgctgctgcagaacgagctgttcctgaacgtgggcaccaaggacttccccgacggcgagctgagaggccacgtggccgccctgccctactgcggccacagcgccagacacgacaccctgcccgtgcccctggccggcgccctggtgctgccccccgtgaagagccaggccgccggccacgcctggctgagcctggacacccactgccacctgcactacgaggtgctgctggccggcctgggcggcagcgagcagggcaccgtgaccgcccacctgctgggcccccccggcacccccggccccagaagactgctgaagggcttctacggcagcgaggcccagggcgtggtgaaggacctggagcccgagctgctgagacacctggccaagggcatggccagcctgatgatcaccaccaagggcagccccagaggcgagctgagaggccagagaagaaccgtgatctgcgaccccgtggtgtgccccccccccagctgcccccaccccgtgcaggcccccgaccagtgctgccccgtgtgccccgagaagcaggacgtgagagacctgcccggcctgcccagaagcagagaccccggcgagggctgctacttcgacggcgacagaagctggagagccgccggcaccagatggcaccccgtggtgccccccttcggcctgatcaagtgcgccgtgtgcacctgcaagggcggcaccggcgaggtgcactgcgagaaggtgcagtgccccagactggcctgcgcccagcccgtgagagtgaaccccaccgactgctgcaagcagtgccccgtgggcagcggcgcccacccccagctgggcgaccccatgcaggccgacggccccagaggctgcagattcgccggccagtggttccccgagagccagagctggcaccccagcgtgccccccttcggcgagatgagctgcatcacctgcagatgcggcgccggcgtgccccactgcgagagagacgactgcagcctgcccctgagctgcggcagcggcaaggagagcagatgctgcagcagatgcaccgcccacagaagacccgcccccgagaccagaaccgaccccgagctggagaaggaggccgagggcagctag

SEQ ID NO: 302270 - protein, 94 aa, Artificial Sequence
  derived and/or modified sequence
MPSLPAPPAPLLLLGLLLLGSRPARGAGPEPPVLPIRSEKEPLPVRGAAGCTFGGKVYALDETWHPDLGEPFGVMRCVLCACEATGTLRPREMK

SEQ ID NO: 302271 - DNA, 285 bp, Artificial Sequence
  derived and/or modified sequence
atgccatcattgcctgccccaccagcgcccctgctcctcctgggcctgttactgcttggatcaaggccggctagaggggccggacctgagccacctgtgctgcccatcaggagtgaaaaagaacctctgcccgtacgtggagccgcaggatgtactttcggcggtaaggtttatgccctggacgaaacctggcatccggatttaggggagccctttggtgtcatgagatgcgtactctgtgcatgtgaagccaccggaacactaagaccacgggaaatgaagtag

SEQ ID NO: 302272 - DNA, 285 bp, Artificial Sequence
  derived and/or modified sequence
atgcccagcctgcctgcccccccagcccccctgctgctgctgggcctgctgctgctgggcagcaggcctgcccggggagctggccctgagccccctgtgctgcccatccgctctgagaaggagcccctgcctgtgagaggagctgctggctgcacctttggaggcaaggtgtatgccctggatgagacctggcacccagacctgggggagcccttcggcgtgatgagatgtgtgctgtgtgcctgtgaggccaccggcaccctgcggccccgggagatgaagtag

SEQ ID NO: 302273 - DNA, 285 bp, Artificial Sequence
  derived and/or modified sequence
atgcccagcctgcccgccccccccgcccccctgctgctgctgggcctgttgttgctggggtcgagacctgcccggggcgctggaccagaaccacccgtgctccctattcgtagcgagaaggagcccctacctgtgaggggggctgccgggtgcacgttcggggggaaagtttatgctttagacgagacatggcacccagatctgggagagccctttggggtcatgcgctgcgtcctgtgtgcctgcgaggcaaccggtacactcaggccaagagagatgaagtag

SEQ ID NO: 302274 - DNA, 285 bp, Artificial Sequence
  derived and/or modified sequence
atgccatcacttccagcccctcctgctcctctgttattgctgggcctactcctgctggggagtcgccctgctcgaggagcagggccagaaccccctgtgctccccatcaggtcagaaaaggagccactccctgtcaggggagcagctgggtgtacttttggcggtaaagtgtatgcgcttgacgaaacctggcacccggatctaggggaaccgttcggcgtgatgcggtgcgtgctgtgcgcttgtgaggccaccgggacgctgcgcccaagggagatgaagtag

SEQ ID NO: 302275 - DNA, 531 bp, Artificial Sequence
  derived and/or modified sequence
cccgggtcagcgcccgcccgcccgcgctcctcccggccgctcctcccgccccgcccggcccggcgccgactctgcggccgcccgacgagcccctcgcggcactgccccggccccggccccggccccggccccctcccgccgcaccgcccccggcccggccctccgccctccgcactcccgcctccctccctccgcccgctcccgcgccctcctccctccctcctccccagctgtcccgttcgcgtcatgccgagcctcccggccccgccggccccgctgctgctcctcgggctgctgctgctcggctcccggccggcccgcggcgccggcccagagccccccgtgctgcccatccgttctgagaaggagccgctgcccgttcggggagcggcaggctgcaccttcggcgggaaggtctatgccttggacgagacgtggcacccggacctaggggagccattcggggtgatgcgctgcgtgctgtgcgcctgcgaggcgacagggaccttgaggcccagagagatgaagtag

SEQ ID NO: 302276 - DNA, 285 bp, Artificial Sequence
  derived and/or modified sequence
atgcccagcctgcccgccccccccgcccccctgctgctgctgggcctgctgctgctgggcagcagacccgccagaggcgccggccccgagccccccgtgctgcccatcagaagcgagaaggagcccctgcccgtgagaggcgccgccggctgcaccttcggcggcaaggtgtacgccctggacgagacctggcaccccgacctgggcgagcccttcggcgtgatgagatgcgtgctgtgcgcctgcgaggccaccggcaccctgagacccagagagatgaagtag

SEQ ID NO: 302277 - DNA, 123 bp, Artificial Sequence
  derived and/or modified sequence
atgaaaaagctgatggtcgtactaagcttaatcgccgccggtatttttagatccagctgggggtccataacctttggcaagggacgcgtcccacgctccagggtcttgctgtccggcttgtag

SEQ ID NO: 302278 - protein, 960 aa, Artificial Sequence
  derived and/or modified sequence
MALAPGPDAHAHLPPLIELKFQMANSMNGRNPGGRGGNPRKGRILGIIDAIQDAVGPPKQAAADRRTVEKTWKLMDKVVRLCQNPKLQLKNSPPYILDILPDTYQHLRLILSKYDDNQKLAQLSENEYFKIYIDSLMKKSKRAIRLFKEGKERMYEEQSQDRRNLTKLSLIFSHMLAEIKAIFPNGQFQGDNFRITKADAAEFWRKFFGDKTIVPWKVFRQCLHEVHQISSGLEAMALKSTIDLTCNDYISVFEFDIFTRLFQPWGSILRNWNFLAVTHPGYMAFLTYDEVKARLQKYSTKPGSYIFRLSCTRLGQWAIGYVTGDGNILQTIPHNKPLFQALIDGSREGFYLYPDGRSYNPDLTGLCEPTPHDHIKVTQEQYELYCEMGSTFQLCKICAENDKDVKIEPCGHLMCTSCLTAWQESDGQGCPFCRCEIKGTEPIIVDPFDPRDEGSRCCSIIDPFGMPMLDLDDDDDREESLMMNRLANVRKCTDRQNSPVTSPGSSPLAQRRKPQPDPLQIPHLSLPPVPPRLDLIQKGIVRSPCGSPTGSPKSSPCMVRKQDKPLPAPPPPLRDPPPPPPERPPPIPPDNRLSRHIHHVESVPSRDPPMPLEAWCPRDVFGTNQLVGCRLLGEGSPKPGITASSNVNGRHSRVGSDPVLMRKHRRHDLPLEGAKVFSNGHLGSEEYDVPPRLSPPPPVTTLLPSIKCTGPLANSLSEKTRDPVEEDDDEYKIPSSHPVSLNSQPSHCHNVKPPVRSCDNGHCMLNGTHGPSSEKKSNIPDLSIYLKGEDAFDALPPSLPPPPPPARHSLIEHSKPPGSSSRPSSGQDLFLLPSDPFVDLASGQVPLPPARRLPGENVKTNRTSQDYDQLPSCSDGSQAPARPPKPRPRRTAPEIHHRKPHGPEAALENVDAKIAKLMGEGYAFEEVKRALEIAQNNVEVARSILREFAFPPPVSPRLNL

SEQ ID NO: 302279 - protein, 770 aa, Artificial Sequence
  derived and/or modified sequence
MANSMNGRNPGGRGGNPRKGRILGIIDAIQDAVGPPKQAAADRRTVEKTWKLMDKVVRLCQNPKLQLKNSPPYILDILPDTYQHLRLILSKYDDNQKLAQLSENEYFKIYIDSLMKKSKRAIRLFKEGKERMYEEQSQDRRNLTKLSLIFSHMLAEIKAIFPNGQFQGDNFRITKADAAEFWRKFFGDKTIVPWKVFRQCLHEVHQISSGLEAMALKSTIDLTCNDYISVFEFDIFTRLFQPWGSILRNWNFLAVTHPGYMAFLTYDEVKARLQKYSTKPGSYIFRLSCTRLGQWAIGYVTGDGNILQTIPHNKPLFQALIDGSREGFYLYPDGRSYNPDLTGLCEPTPHDHIKVTQEQYELYCEMGSTFQLCKICAENDKDVKIEPCGHLMCTSCLTAWQESDGQGCPFCRCEIKGTEPIIVDPFDPRDEGSRCCSIIDPFGMPMLDLDDDDDREESLMMNRLANVRKCTDRQNSPVTSPGSSPLAQRRKPQPDPLQIPHLSLPPVPPRLDLIQKGIVRSPCGSPTGSPKSSPCMVRKQDKPLPAPPPPLRDPPPPPPERPPPIPPDNRLSRHIHHVESVPSRDPPMPLEAWCPRDVFGTNQLVGCRLLGEGSPKPGITASSNVNGRHSRVGSDPVLMRKHRRHDLPLEGAKVFSNGHLGSEEYDVPPRLSPPPPVTTLLPSIKCTGPLANSLSEKTRDPVEEDDDEYKIPSSHPVSLNSQPSHCHNVKPPVRSCDNGHCMLNGTHGPSSEKKSNIPDLSIYLKGTYRI

SEQ ID NO: 302280 - DNA, 2883 bp, Artificial Sequence
  derived and/or modified sequence
atggctctcgcccctggccccgatgctcacgcgcatttgccgcctttaattgagttgaaattccagatggcaaatagcatgaatggcagaaacccaggcggcaggggtgggaaccctcgcaagggaaggattcttggcataatcgatgccatccaggacgcagtgggtccacccaagcaggccgcagccgatcggcggacagtagaaaagacttggaagttaatggacaaagtggtgcgcctgtgccaaaatccaaaactgcagttaaagaattctcccccatacatcctggacattctccctgacacgtaccagcatttgagactgattttatctaaatacgacgacaatcagaaactcgcccaacttagcgagaatgagtactttaaaatttatattgatagcttgatgaaaaagagcaagagggccattcgtttgttcaaggagggaaaagaaagaatgtacgaagagcagagccaggatcgaagaaatctgaccaagctcagcctgattttctcacacatgttggctgagatcaaggccatttttccaaatggccaattccagggcgacaattttcggatcacaaaagctgacgctgccgagttttggaggaaattctttggcgacaagaccattgtgccatggaaggtcttcaggcagtgccttcatgaagtccaccagatctcctccggtctcgaggcaatggccttaaagtcgaccatcgaccttacctgcaacgactacataagcgtattcgaattcgacatctttacgcgcctctttcaaccgtggggatctatcctacgtaactggaacttcttagccgtcacgcatcctggttacatggccttcctaacatacgatgaagtgaaagcacgactgcagaagtactccacgaagccaggttcctacatcttcagattaagctgcacaaggctggggcagtgggccatcggctacgtgacgggcgatggcaacatcttgcaaaccattcctcataataagcctttgttccaagctctgattgacgggtcaagggagggcttttacctttatcccgatggccgctcgtataatcccgatctcacaggtctctgtgaaccaacacctcacgaccacatcaaagttacccaggagcagtacgaactctattgtgagatgggaagcaccttccaactgtgtaagatatgtgccgaaaatgataaggacgtgaaaattgaaccttgtggccaccttatgtgtacctcttgtttaactgcctggcaggaaagtgacggacagggatgcccgttttgtcgctgtgagattaagggcactgaacccatcattgtggaccctttcgacccacgcgacgaagggagtcggtgttgcagtataatcgaccctttcgggatgcccatgctagatcttgatgacgacgacgatcgtgaggaatcccttatgatgaatcgcttagctaacgtgcgcaaatgcacagacagacaaaactcgcctgtcacttcacccggttccagtcctctagcccagcggcggaaacctcagcctgaccccctgcagattccccacctgtcgttaccgcctgtaccacctcggttggatctgatccaaaaagggattgtgcgatcaccgtgtggatctcctaccggctctccgaaatcaagcccatgcatggttcgaaaacaggataagccgcttccggctcccccaccccccttgagggaccctccacccccccccccagagcggccaccccctattccccccgacaatcgcttgagtcgacacatccatcatgtcgaaagcgttccatccagggaccctcctatgcctctggaggcttggtgtcctcgtgacgtgttcgggaccaaccagcttgtcggttgtcgcctcctcggcgaagggtcccctaaacctggaatcaccgcctcaagcaatgtgaacggcaggcattctagagtaggctcagacccggtgctcatgaggaaacatcgtcggcacgacttgccgctggaaggggctaaagtcttctccaatgggcatctcgggtctgaagagtatgacgtgcctccacggttgtcacctccaccgcctgtgactacgctgttgccaagtattaaatgcactggacccttggcaaattcactgtccgaaaagacaagagatcccgttgaggaagacgacgacgaatacaagatccctagcagtcacccagtatccctgaattcacagccaagtcattgccacaacgtgaagccccccgttagatcttgtgacaatggccactgcatgttgaacggaactcacgggccaagtagtgaaaagaaatctaatatacccgatctttctatttacctgaaaggggaggatgccttcgacgccctgcctccttcacttcctcctccccctcctcccgcaaggcacagcctgattgaacacagcaagcctcctggatcatcatccaggccctccagcggacaagatttatttcttctaccaagcgatccctttgtagacttggccagcggacaagtacccctgccaccagctcgaagactccccggggaaaacgtcaagacgaatagaacaagtcaggactacgatcagctgcccagctgttccgacgggtctcaggcgcccgctcggccacctaagccacgtcctagaagaaccgctcccgaaatccaccaccgaaagcctcatggcccagaggctgcactcgaaaacgtggatgctaagatcgccaaactcatgggtgagggatatgcttttgaagaggtgaaaagggctttggagatcgctcagaataacgtagaagtagcccggtctatcctccgagagttcgcttttccccctcccgtctctccccggctgaacttatag

SEQ ID NO: 302281 - DNA, 2883 bp, Artificial Sequence
  derived and/or modified sequence
atggccctggcccctggcccagatgcccacgcccacctgccccccctgattgagctgaagttccagatggccaacagcatgaatggaagaaatcctgggggccggggcggcaaccccaggaagggccgcatcctgggcatcattgatgccatccaggatgctgtgggcccccccaagcaggccgctgctgacagaagaacagtggagaagacctggaagctgatggacaaggtggtgcggctgtgccagaaccccaagctgcagctgaagaacagccccccctacatcctggacatcctgcctgacacctaccagcacctgcggctcatcctgagcaaatatgatgacaaccagaagctggcccagctgtctgaaaatgagtacttcaagatctacatcgacagcctgatgaagaagagcaagagggccatccgcctcttcaaggagggcaaggagaggatgtatgaggagcagagccaggacagaagaaacctgaccaagctgagcctcatcttcagccacatgctggccgagatcaaggccatcttccccaacggccagttccagggcgacaacttccgcatcaccaaggcagatgctgctgagttctggaggaagttcttcggggacaagaccatcgtgccctggaaggtgttccggcagtgcctgcacgaggtgcaccagatcagcagcggcctggaggccatggccctgaagagcaccatcgacctgacctgcaatgactacatctctgtgtttgaatttgacatcttcaccaggctcttccagccctggggcagcatcctgaggaactggaacttcctggccgtgacccaccctggctacatggccttcctgacctatgatgaggtgaaggcccggctgcagaagtacagcaccaagccaggcagctacatcttccggctgagctgcacccggctgggccagtgggccatcggctacgtgactggagatggcaacatcctgcagaccatcccccacaacaagcccctcttccaggccctgattgatggcagccgggagggcttctacctgtacccagatggccgcagctacaacccagacctgaccggcctgtgtgagcccacccctcatgaccacatcaaggtgacccaggagcagtatgagctgtactgtgagatgggcagcaccttccagctgtgcaagatctgtgccgagaatgacaaggatgtgaagattgagccctgtggccacctgatgtgcaccagctgcctgacagcctggcaggagagtgatggccagggctgccccttctgccgctgtgagatcaagggcacagagcccatcatcgtggacccctttgaccccagagatgagggcagccgctgctgcagcatcatcgaccccttcggcatgcccatgctggacctggatgatgatgatgaccgggaggagagcctgatgatgaaccggctggccaacgtgaggaaatgtacagaccggcagaacagccctgtgaccagccctggcagcagccccctggcccagaggaggaagccccagcctgaccccctgcagatcccccacctgagcctgccccctgtgcccccccggctggacctgatccagaagggcatcgtgcgcagcccctgtggcagccccaccggcagccccaagagcagcccctgcatggtgaggaagcaggacaagcccctgcctgcccctcctccacccctgcgggaccccccacctcctcctcctgagcggcccccacccatccccccagacaaccggctgagccgccacatccaccacgtggagagcgtgcccagccgggacccccccatgcccctggaggcctggtgccccagagatgtgtttggcaccaaccagctggtgggctgccgcctgctgggggagggcagccccaagccaggcatcacagccagcagcaatgtgaatggccgccacagccgggtgggcagtgaccctgtgctgatgaggaagcacagaagacatgacctgcccctggagggcgccaaggtgttcagcaatggccacctgggcagcgaggagtatgatgtgcccccccggctgagccccccacctcctgtgaccaccctgctgcccagcatcaagtgcaccggccccctggccaacagcctgtctgagaagacccgggaccctgtggaggaggatgatgatgagtacaagatccccagcagccaccctgtgtccctgaacagccagcccagccactgccacaacgtgaagccccctgtgcgcagctgtgacaatggccactgcatgctgaatggcacccacggccccagcagcgagaagaagagcaacatcccagacctgagcatctacctgaagggagaagatgcctttgatgccctgccccccagcctgcccccacctcctcctccagcccggcacagcctgattgagcacagcaagcccccaggcagcagcagccggcccagcagcggccaggacctcttcctgctgcccagcgacccctttgtggacctggccagcggccaggtgcccctgcccccagcccggcggctgcccggggagaatgtgaagaccaacagaaccagccaggactatgaccagctgcccagctgcagtgatggcagccaggccccagcccggccccccaagccccggcccaggagaacagcccctgagatccaccacaggaagccccacggccctgaggccgccctggagaatgtggatgccaagatcgccaagctgatgggagagggctacgcctttgaggaggtgaagagggccctggagatcgcccagaacaacgtggaggtggcccggagcatcctgcgggagtttgccttccccccacctgtgagcccccggctgaacctgtag

SEQ ID NO: 302282 - DNA, 2883 bp, Artificial Sequence
  derived and/or modified sequence
atggccctggcccccggccccgacgcccacgcccacctgcccccccttatcgaactcaaatttcagatggcgaattctatgaatgggagaaacccagggggtagaggcggcaatccacggaagggccgcattctcggcattatcgacgccattcaagacgcagtcggcccgccaaaacaagctgcagccgacaggcgcaccgtagaaaaaacgtggaaactcatggacaaagtggtgcgtctctgccagaacccaaagttacaactgaaaaactccccgccatatatactagatattctgcccgacacataccagcacctgaggcttattttatctaagtatgacgacaaccagaaactggcccaactgtccgagaacgaatacttcaaaatctatattgattctttaatgaagaagtccaaaagagctattagactttttaaagaggggaaggaaaggatgtacgaggaacagtcccaggacagacgcaacctcacaaagctgtcactgatcttttcccatatgctcgcagagataaaggccatattcccgaacgggcaattccagggggacaattttcgcattaccaaagccgatgcagctgagttttggcgtaagtttttcggagataagaccattgtgccatggaaagtgtttaggcaatgcttacatgaagtgcatcaaatctcatctggcctggaggcgatggcattaaaatccacaatcgacctcacgtgtaatgactatattagtgtttttgaatttgatatttttaccaggttgtttcagccgtggggctctattttgagaaattggaatttccttgctgtgactcaccccggctatatggcatttcttacgtacgatgaggtcaaggcccggctccagaagtacagtaccaaaccgggctcctacatattccgacttagctgcacccgcctggggcagtgggcgataggatatgtcaccggggatggcaatattctgcagaccatcccacataataagccccttttccaagcactgattgacgggagtcgcgaagggttttatctgtacccggacgggagatcctacaacccagacctgaccggcctatgtgaacccacacctcatgaccatatcaaggttacacaggagcagtacgagctttattgcgagatgggcagcaccttccagctatgcaaaatctgcgcggaaaatgataaggatgtgaagattgaaccttgcgggcatctcatgtgtaccagctgtctcaccgcctggcaggaaagcgatgggcagggatgtcctttctgccggtgcgaaatcaagggtactgagccaatcatagtcgacccctttgacccaagggacgagggaagcaggtgttgcagcattatcgacccttttggcatgcccatgctcgacctagacgatgatgacgatcgtgaagagtccttgatgatgaatagacttgccaacgtgagaaagtgtactgatcggcagaactcccccgtgacttctcccggatcaagccctcttgcccagaggcgtaagccacaaccagacccacttcagatccctcatttgagcctgccgcctgtgcccccacggcttgatctgatccagaaggggatagtgaggagcccttgcggctctcctactggatcaccaaaatcatccccatgcatggttaggaagcaggataaaccgctgccagctccacctccgccattgagggatccgcctcccccccctccagagcgaccacccccaatccctccagacaatcggctgtcgcgccatattcatcacgtggagagcgtaccatccagggaccctcccatgccactggaagcgtggtgcccgcgagacgtctttgggacgaatcagctggtgggatgccgcctgctgggagagggttctccaaagccaggtattaccgcctcaagtaacgtgaatgggaggcattccagagtgggatccgacccagttctcatgcgaaagcacaggagacacgatctgcctctggagggggctaaagtattttccaatggtcacctcgggtccgaggagtacgatgtcccaccaagattgtctccccctcctcctgttacaactttgcttccctccataaagtgcacagggcccttggctaattctctgtccgagaagacgcgggacccggttgaagaggacgacgacgagtacaaaatcccttcttctcaccctgtaagcctgaactcccaaccgtctcactgccataacgtgaaaccgcctgttcgctcttgcgataacggccattgtatgctcaacggaactcacggcccaagttcagagaaaaagagcaacatccccgatctttccatctatcttaagggcgaagatgccttcgatgcattgccccctagtctgccacctccgccccctcccgcccgccatagcctgatagagcatagcaagcccccaggatccagtagccgcccctcttctggacaggatctttttcttctgccgagcgaccccttcgttgacttagcatccggtcaagtgcccctgccacctgctcggaggctaccaggtgagaacgtcaagaccaacagaacctcgcaggactatgaccagctgccatcttgctcggatggctctcaagccccggctaggcccccgaaacctaggccccggcgaacagcccctgaaatccatcaccgcaaaccccacggccccgaggccgccctagagaacgttgacgcaaagattgccaagctgatgggagagggctatgcttttgaagaagtcaaacgcgcgctagaaatcgcacagaataatgtcgaggtagcccgcagtatcctgagggagttcgcattccctcctcctgtttccccccgactcaatctgtag

SEQ ID NO: 302283 - DNA, 2883 bp, Artificial Sequence
  derived and/or modified sequence
atggctctcgctcccggaccagacgcacatgcacatctgccaccactaattgagttaaagttccagatggccaattcaatgaacgggaggaatccagggggtcgcggaggcaatccacgcaaaggacggatcctcggaatcatcgacgctattcaggacgccgtcggtccacctaaacaggccgcagcagatcgcagaacagtggagaaaacttggaaactgatggacaaagtcgtcaggctctgtcagaatccaaaactgcagttaaaaaactcacctccatatattctagacattttacccgacacgtaccagcaccttaggcttatcctctccaaatatgatgacaatcagaaactggcacaactctctgagaatgaatactttaagatttacatcgatagccttatgaagaaaagtaagcgcgcaattagattattcaaagaaggtaaggagcgaatgtacgaggaacagtctcaagaccgtcgtaatctgaccaaactctcccttatctttagccacatgttagcagagattaaggccatcttccccaacggtcaatttcagggggataatttcaggatcacaaaggcagacgcggcagaattctggcgtaaattcttcggggataaaaccattgtgccctggaaggttttcagacagtgcctgcacgaggttcaccagatcagttccggcctcgaagccatggctctcaaaagcacaattgacctgacttgcaacgattacattagcgtgtttgaatttgacatttttacaagactttttcaaccttgggggagcattttgcgcaattggaattttctcgctgttactcacccaggctatatggccttcctcacttacgacgaagtgaaggcccgactacagaaatatagcaccaaaccaggttcatatattttccgcttgtcttgtactcggcttggccagtgggctattggttatgtaacaggcgatggtaacatactccagacaatccctcacaacaaacctctattccaggccctaatcgacgggagtcgagagggattctacctgtatccggacggaaggtcgtataacccagatctgacaggcctctgcgaacccaccccccatgatcacatcaaggttacgcaggagcagtatgagctgtattgcgaaatgggtagtactttccagctctgcaagatctgcgctgaaaatgataaggatgtgaaaatcgaaccctgcgggcatctgatgtgcacttcctgtctgacagcctggcaggagagcgacgggcaggggtgtcccttttgccgatgcgagatcaaaggaaccgagccaatcatcgtcgacccttttgatccccgagacgaaggatctcgctgctgcagcattatcgatcctttcggaatgccgatgcttgatttagatgacgatgatgaccgcgaagaatccctgatgatgaaccgccttgctaacgtgaggaaatgcaccgacaggcagaatagtcccgttacctcaccgggttcgagtccattagcacagcggagaaaaccccaacccgatcccctgcagataccacacctcagcctgccgcctgtgcctccaaggctggaccttatccagaaaggcattgtccggtccccctgtgggtcccctaccggcagccctaagtctagcccgtgcatggtgcgaaaacaggacaaaccgctgccggcaccaccccctccgctaagagaccctcccccaccaccgcctgagcgaccacccccaattccccctgataaccgcctgagccggcacatccaccacgtggagagcgtaccttcacgcgatcctccaatgcctcttgaggcatggtgtccgagggacgtcttcggaacaaatcagctggtcggctgcaggctgctgggggagggatcacccaaaccagggatcactgcctcttcaaacgtgaacggtagacacagtagagtagggtcggaccccgtgctgatgcgtaagcataggaggcacgatctgcccttggaaggcgctaaagtcttctcaaatggccacctcggatcggaagagtatgatgtccctcccagactcagcccacctccgccagtaactaccctcctgccctccataaaatgtactgggccactcgcaaatagcctatctgagaagaccagagatcctgtcgaggaggacgatgacgaatataaaatcccaagctcacaccccgtgtccttgaactcccagccctcacactgccacaatgtcaaaccccctgttaggtcctgtgacaacggtcactgtatgcttaatggtacacacggtccttcctctgagaagaaaagtaacataccagatctctcaatctatttgaaaggcgaggatgcttttgatgccctgcctccaagtttgcctccgccaccgcctccagcacgtcacagcctgatagagcactccaaacccccagggagctcaagtcggccatctagcggccaagacctcttcctactgccctcggatccctttgtcgatcttgccagtggccaggtgcccctgccacctgccaggcgactgccgggagaaaatgtcaaaacgaaccgcacctcccaggactatgatcagcttcctagttgctctgacggaagtcaagcacccgctcgcccacctaaaccacggccaaggcgtaccgcacccgagattcaccaccggaagccccatggacctgaggctgctctggagaatgttgacgccaaaattgcgaagttgatgggcgaagggtacgcctttgaggaagtcaaacgcgcactcgaaattgcccaaaataacgtggaggtcgctcgctcgatcctcagggaatttgcatttcctcctccagtatcccccagactcaatctctag

SEQ ID NO: 302284 - DNA, 3430 bp, Artificial Sequence
  derived and/or modified sequence
cctttcagccccagatggctttggctcccggtcccgacgctcacgcccacctgccaccccttattgaactaaaattccagatggcaaactcaatgaatggcagaaaccctggtggtcgaggaggaaatccccgaaaaggtcgaattttgggtattattgatgctattcaggatgcagttggaccccctaagcaagctgccgcagatcgcaggaccgtggagaagacttggaagctcatggacaaagtggtaagactgtgccaaaatcccaaacttcagttgaaaaatagcccaccatatatacttgatattttgcctgatacatatcagcatttacgacttatattgagtaaatatgatgacaaccagaaacttgcccaactcagtgagaatgagtactttaaaatctacattgatagccttatgaaaaagtcaaaacgggcaataagactctttaaagaaggcaaggagagaatgtatgaagaacagtcacaggacagacgaaatctcacaaaactgtcccttatcttcagtcacatgctggcagaaatcaaagcaatctttcccaatggtcaattccagggagataactttcgtatcacaaaagcagatgctgctgaattctggagaaagttttttggagacaaaactatcgtaccatggaaagtattcagacagtgccttcatgaggtccaccagattagctctggcctggaagcaatggctctaaaatcaacaattgatttaacttgcaatgattacatttcagtttttgaatttgatatttttaccaggctgtttcagccttggggctctattttgcggaattggaatttcttagctgtgacacatccaggttacatggcatttctcacatatgatgaagttaaagcacgactacagaaatatagcaccaaacccggaagctatattttccggttaagttgcactcgattgggacagtgggccattggctatgtgactggggatgggaatatcttacagaccatacctcataacaagcccttatttcaagccctgattgatggcagcagggaaggattttatctttatcctgatgggaggagttataatcctgatttaactggattatgtgaacctacacctcatgaccatataaaagttacacaggaacaatatgaattatattgtgaaatgggctccacttttcagctctgtaagatttgtgcagagaatgacaaagatgtcaagattgagccttgtgggcatttgatgtgcacctcttgccttacggcatggcaggagtcggatggtcagggctgccctttctgtcgttgtgaaataaaaggaactgagcccataatcgtggacccctttgatccaagagatgaaggctccaggtgttgcagcatcattgacccctttggcatgccgatgctagacttggacgacgatgatgatcgtgaggagtccttgatgatgaatcggttggcaaacgtccgaaagtgcactgacaggcagaactcaccagtcacatcaccaggatcctctccccttgcccagagaagaaagccacagcctgacccactccagatcccacatctaagcctgccacccgtgcctcctcgcctggatctaattcagaaaggcatagttagatctccctgtggcagcccaacgggttcaccaaagtcttctccttgcatggtgagaaaacaagataaaccactcccagcaccacctcctcccttaagagatcctcctccaccgccacctgaaagacctccaccaatcccaccagacaatagactgagtagacacatccatcatgtggaaagcgtgccttccagagacccgccaatgcctcttgaagcatggtgccctcgggatgtgtttgggactaatcagcttgtgggatgtcgactcctaggggagggctctccaaaacctggaatcacagcgagttcaaatgtcaatggaaggcacagtagagtgggctctgacccagtgcttatgcggaaacacagacgccatgatttgcctttagaaggagctaaggtcttttccaatggtcaccttggaagtgaagaatatgatgttcctccccggctttctcctcctcctccagttaccaccctcctccctagcataaagtgtactggtccgttagcaaattctctttcagagaaaacaagagacccagtagaggaagatgatgatgaatacaagattccttcatcccaccctgtttccctgaattcacaaccatctcattgtcataatgtaaaacctcctgttcggtcttgtgataatggtcactgtatgctgaatggaacacatggtccatcttcagagaagaaatcaaacatccctgacttaagcatatatttaaagggtgaagatgcttttgatgccctccctccatctctcccacctcccccacctcctgcaaggcatagtctcattgaacattcaaaacctcctggctccagtagccggccatcctcaggacaggatctttttcttcttccttcagatccctttgttgatctagcaagtggccaagttcctttgcctcctgctagaaggttaccaggtgaaaatgtcaaaactaacagaacatcacaggactatgatcagcttccttcatgttcagatggttcacaggcaccagccagaccccctaaaccacgaccgcgcaggactgcaccagaaattcaccacagaaaaccccatgggcctgaggcggcattggaaaatgtcgatgcaaaaattgcaaaactcatgggagagggttatgcctttgaagaggtgaagagagccttagagatagcccagaataatgtcgaagttgcccggagcatcctccgagaatttgccttccctcctccagtatccccacgtctaaatctatagcagccagaactgtagacaccaaaatggaaagcaatcgatgtattccaagagtgtggaaataaagagaactgagatggaattcaagagagaagtgtctcctcctcgtgtagcagcttgagaagaggcttgggagtgcagcttctcaaaggagaccgatgcttgctcaggatgtcgacagctgtggcttccttgtttttgctagccatatttttaaatcagggttgaactgacaaaaataatttaaagacgtttacttcccttgaactttgaacctgtgaaatgctttaccttgtttacagtttggcaaagttgcagtttgttcttgtttttagtttagttttgttttggtgttttgatacctgtactgtgttcttcacagaccctttgtagcgtggtcaggtctgctgtaacatttcccaccaactctcttgctgtccacatcaacagctaaatcatttattcatatggatctctaccatccccatgccttgcccaggtccagttccatttctctcattcacaagatgctttga

SEQ ID NO: 302285 - DNA, 2883 bp, Artificial Sequence
  derived and/or modified sequence
atggccctggcccccggccccgacgcccacgcccacctgccccccctgatcgagctgaagttccagatggccaacagcatgaacggcagaaaccccggcggcagaggcggcaaccccagaaagggcagaatcctgggcatcatcgacgccatccaggacgccgtgggcccccccaagcaggccgccgccgacagaagaaccgtggagaagacctggaagctgatggacaaggtggtgagactgtgccagaaccccaagctgcagctgaagaacagccccccctacatcctggacatcctgcccgacacctaccagcacctgagactgatcctgagcaagtacgacgacaaccagaagctggcccagctgagcgagaacgagtacttcaagatctacatcgacagcctgatgaagaagagcaagagagccatcagactgttcaaggagggcaaggagagaatgtacgaggagcagagccaggacagaagaaacctgaccaagctgagcctgatcttcagccacatgctggccgagatcaaggccatcttccccaacggccagttccagggcgacaacttcagaatcaccaaggccgacgccgccgagttctggagaaagttcttcggcgacaagaccatcgtgccctggaaggtgttcagacagtgcctgcacgaggtgcaccagatcagcagcggcctggaggccatggccctgaagagcaccatcgacctgacctgcaacgactacatcagcgtgttcgagttcgacatcttcaccagactgttccagccctggggcagcatcctgagaaactggaacttcctggccgtgacccaccccggctacatggccttcctgacctacgacgaggtgaaggccagactgcagaagtacagcaccaagcccggcagctacatcttcagactgagctgcaccagactgggccagtgggccatcggctacgtgaccggcgacggcaacatcctgcagaccatcccccacaacaagcccctgttccaggccctgatcgacggcagcagagagggcttctacctgtaccccgacggcagaagctacaaccccgacctgaccggcctgtgcgagcccaccccccacgaccacatcaaggtgacccaggagcagtacgagctgtactgcgagatgggcagcaccttccagctgtgcaagatctgcgccgagaacgacaaggacgtgaagatcgagccctgcggccacctgatgtgcaccagctgcctgaccgcctggcaggagagcgacggccagggctgccccttctgcagatgcgagatcaagggcaccgagcccatcatcgtggaccccttcgaccccagagacgagggcagcagatgctgcagcatcatcgaccccttcggcatgcccatgctggacctggacgacgacgacgacagagaggagagcctgatgatgaacagactggccaacgtgagaaagtgcaccgacagacagaacagccccgtgaccagccccggcagcagccccctggcccagagaagaaagccccagcccgaccccctgcagatcccccacctgagcctgccccccgtgccccccagactggacctgatccagaagggcatcgtgagaagcccctgcggcagccccaccggcagccccaagagcagcccctgcatggtgagaaagcaggacaagcccctgcccgccccccccccccccctgagagacccccccccccccccccccgagagacccccccccatcccccccgacaacagactgagcagacacatccaccacgtggagagcgtgcccagcagagacccccccatgcccctggaggcctggtgccccagagacgtgttcggcaccaaccagctggtgggctgcagactgctgggcgagggcagccccaagcccggcatcaccgccagcagcaacgtgaacggcagacacagcagagtgggcagcgaccccgtgctgatgagaaagcacagaagacacgacctgcccctggagggcgccaaggtgttcagcaacggccacctgggcagcgaggagtacgacgtgccccccagactgagcccccccccccccgtgaccaccctgctgcccagcatcaagtgcaccggccccctggccaacagcctgagcgagaagaccagagaccccgtggaggaggacgacgacgagtacaagatccccagcagccaccccgtgagcctgaacagccagcccagccactgccacaacgtgaagccccccgtgagaagctgcgacaacggccactgcatgctgaacggcacccacggccccagcagcgagaagaagagcaacatccccgacctgagcatctacctgaagggcgaggacgccttcgacgccctgccccccagcctgccccccccccccccccccgccagacacagcctgatcgagcacagcaagccccccggcagcagcagcagacccagcagcggccaggacctgttcctgctgcccagcgaccccttcgtggacctggccagcggccaggtgcccctgccccccgccagaagactgcccggcgagaacgtgaagaccaacagaaccagccaggactacgaccagctgcccagctgcagcgacggcagccaggcccccgccagaccccccaagcccagacccagaagaaccgcccccgagatccaccacagaaagccccacggccccgaggccgccctggagaacgtggacgccaagatcgccaagctgatgggcgagggctacgccttcgaggaggtgaagagagccctggagatcgcccagaacaacgtggaggtggccagaagcatcctgagagagttcgccttccccccccccgtgagccccagactgaacctgtag

SEQ ID NO: 302286 - protein, 810 aa, Artificial Sequence
  derived and/or modified sequence
MANSMNGRNPGGRGGNPRKGRILGIIDAIQDAVGPPKQAAADRRTVEKTWKLMDKVVRLCQNPKLQLKNSPPYILDILPDTYQHLRLILSKYDDNQKLAQLSENEYFKIYIDSLMKKSKRAIRLFKEGKERMYEEQSQDRRNLTKLSLIFSHMLAEIKAIFPNGQFQGDNFRITKADAAEFWRKFFGDKTIVPWKVFRQCLHEVHQISSGLEAMALKSTIDLTCNDYISVFEFDIFTRLFQPWGSILRNWNFLAVTHPGYMAFLTYDEVKARLQKYSTKPGSYIFRLSCTRLGQWAIGYVTGDGNILQTIPHNKPLFQALIDGSREGFYLYPDGRSYNPDLTGLCEPTPHDHIKVTQEQYELYCEMGSTFQLCKICAENDKDVKIEPCGHLMCTSCLTAWQESDGQGCPFCRCEIKGTEPIIVDPFDPRDEGSRCCSIIDPFGMPMLDLDDDDDREESLMMNRLANVRKCTDRQNSPVTSPGSSPLAQRRKPQPDPLQIPHLSLPPVPPRLDLIQKGIVRSPCGSPTGSPKSSPCMVRKQDKPLPAPPPPLRDPPPPPPERPPPIPPDNRLSRHIHHVESVPSRDPPMPLEAWCPRDVFGTNQLVGCRLLGEGSPKPGITASSNVNGRHSRVGSDPVLMRKHRRHDLPLEGAKVFSNGHLGSEEYDVPPRLSPPPPVTTLLPSIKCTGPLANSLSEKTRDPVEEDDDEYKIPSSHPVSLNSQPSHCHNVKPPVRSCDNGHCMLNGTHGPSSEKKSNIPDLSIYLKGDVFDSASDPVPLPPARPPTRDNPKHGSSLNRTPSDYDLLIPPLG

SEQ ID NO: 302287 - DNA, 420 bp, Artificial Sequence
  derived and/or modified sequence
atggccaactcaatgaacgggagaaacccgggaggtcggggtggaaatccgagaaagggaagaatactcggcataatagacgcgatacaagacgctgtcgggccccccaaacaggccgctgctgatcgtcgtaccgtagaaaagacatggaaactcatggataaggtagttaggctctgccagaatccgaagttacagttaaagaattcaccaccatacattctggacatcctcccggacacttatcagcatctccggttgattcttagtaagtacgatgacaaccagaagctggcacagttaagcgagaacgaatactttaagatctatattgactctcttatgaaaaagtcaaagcgcgccatccgtttgttcaaggagggtaaggagaggatgtatgaggaacagtcccaggactag

SEQ ID NO: 302288 - DNA, 684 bp, Artificial Sequence
  derived and/or modified sequence
atggcactcgcccccggacctgacgcccatgcacatttgccacccctgatcgaactaaagtttcagatggccaactcaatgaatggtcggaacccaggggggcgtggaggtaaccctcggaagggcagaatcctgggcattatcgatgccattcaggacgctgtcggccctccaaaacaggccgcagccgacagacgcaccgtggaaaaaacctggaagctaatggataaggtagttaggctctgtcagaaccctaaactgcaattaaaaaattctcccccctacattttggatatactgcccgatacgtatcagcacttgcgtctcatcctgtcaaaatatgatgataaccagaaactggcgcagctgagcgaaaacgagtactttaagatctacatcgactctctaatgaagaagtccaagcgcgccattcggcttttcaaggagggcaaggaaagaatgtacgaggaacagtcccaagacaggaccatcgtgccatggaaggtgttccggcaatgtctacatgaagtacaccagattagcagcggtttggaagccatggcacttaagtctaccatagacctgacttgtaacgattatatcagcgtgtttgaattcgatatcttcacacgcctctttcaggttagtgataacttcactgaatatctgatatatcttacctag

SEQ ID NO: 302289 - DNA, 420 bp, Artificial Sequence
  derived and/or modified sequence
atggccaacagcatgaatggaagaaatcctgggggccggggcggcaaccccaggaagggccgcatcctgggcatcattgatgccatccaggatgctgtgggcccccccaagcaggccgctgctgacagaagaacagtggagaagacctggaagctgatggacaaggtggtgcggctgtgccagaaccccaagctgcagctgaagaacagccccccctacatcctggacatcctgcctgacacctaccagcacctgcggctcatcctgagcaaatatgatgacaaccagaagctggcccagctgtctgaaaatgagtacttcaagatctacatcgacagcctgatgaagaagagcaagagggccatccgcctcttcaaggagggcaaggagaggatgtatgaggagcagagccaggactag

SEQ ID NO: 302290 - DNA, 684 bp, Artificial Sequence
  derived and/or modified sequence
atggccctggcccctggcccagatgcccacgcccacctgccccccctgattgagctgaagttccagatggccaacagcatgaatggaagaaatcctgggggccggggcggcaaccccaggaagggccgcatcctgggcatcattgatgccatccaggatgctgtgggcccccccaagcaggccgctgctgacagaagaacagtggagaagacctggaagctgatggacaaggtggtgcggctgtgccagaaccccaagctgcagctgaagaacagccccccctacatcctggacatcctgcctgacacctaccagcacctgcggctcatcctgagcaaatatgatgacaaccagaagctggcccagctgtctgaaaatgagtacttcaagatctacatcgacagcctgatgaagaagagcaagagggccatccgcctcttcaaggagggcaaggagaggatgtatgaggagcagagccaggacaggaccatcgtgccctggaaggtgttccggcagtgcctgcacgaggtgcaccagatcagcagcggcctggaggccatggccctgaagagcaccatcgacctgacctgcaatgactacatctctgtgtttgaatttgacatcttcaccaggctcttccaggtgtctgacaacttcacagagtacctgatctacctgacctag

SEQ ID NO: 302291 - DNA, 420 bp, Artificial Sequence
  derived and/or modified sequence
atggccaacagcatgaacggccggaaccccggcggccggggcggcaaccctagaaaaggaaggatcctgggtattatcgacgccatccaggatgccgtggggccccctaaacaagcggcggcagaccggcgaaccgtagagaaaacctggaaactgatggataaggtcgtcaggttgtgccagaatcctaaattgcaactgaagaactcacccccctacatactcgacatcttgccagacacatatcagcacctaaggctcatactatccaaatacgatgacaatcaaaagttggcccaactcagcgaaaatgagtattttaagatatacatcgactcgctgatgaagaagtcaaagcgcgctatacggctgtttaaagaaggcaaggagcgtatgtacgaggagcagtcccaagattag

SEQ ID NO: 302292 - DNA, 684 bp, Artificial Sequence
  derived and/or modified sequence
atggccctggcccccggccccgacgcccacgcccacctgcccccccttattgagctcaagtttcagatggccaattccatgaacggtcgtaacccaggcgggagaggtggtaatcctaggaagggaaggattctcggtatcattgacgccattcaagatgccgtcgggccccccaaacaggcagccgcagacaggaggacagtggaaaaaacatggaagctgatggacaaggtcgtgaggttgtgtcagaacccgaagctgcaactaaaaaactctcccccttacatcctggacatcctgccagacacttaccagcaccttcggctcatattgtctaaatacgatgataaccagaagttggcgcagctatctgagaatgagtatttcaagatctatatcgactctctgatgaagaaaagcaaacgcgcaattcgactgtttaaggagggcaaagagagaatgtacgaagaacagagccaggatcgcactattgtgccctggaaggtgtttaggcagtgtcttcacgaagttcatcagatttcatctggcctggaggccatggccctgaagtccacaattgatctcacctgtaatgattacattagtgtgttcgagtttgacatttttacacggcttttccaggtgagtgacaatttcacagaatacctaatctatcttacctag

SEQ ID NO: 302293 - DNA, 420 bp, Artificial Sequence
  derived and/or modified sequence
atggctaattccatgaatggacgcaacccaggagggaggggcggaaacccgcgaaagggaagaattctgggcattatagacgccatacaggacgctgtcggaccacctaagcaggccgctgctgataggagaactgtcgagaagacctggaagctgatggacaaggtggtcaggctgtgtcaaaacccgaagctgcagctgaagaatagccctccatacattctagatattctgcccgacacctatcagcatttgagattaatattgagtaaatatgatgacaatcagaaactggcacagctgtccgagaatgagtattttaagatctatattgacagtttgatgaaaaagagtaagagagctatccggttgtttaaagaaggaaaagagcggatgtacgaggaacagagtcaggattag

SEQ ID NO: 302294 - DNA, 684 bp, Artificial Sequence
  derived and/or modified sequence
atggccctggcgccagggccagacgcgcacgcgcatttaccgccactgatcgaacttaagttccagatggcaaactcaatgaacggaagaaaccccggaggacgaggcggaaatcctagaaagggaaggatactgggaatcatagacgccattcaagacgcagtgggcccacctaagcaggcggcagcagataggagaacagtggagaaaacttggaagctcatggataaggtcgttcgtctatgccaaaatcccaagttgcagcttaagaactcccctccttatatcctggatatccttccggacacctatcaacacctgagactaattttgtccaaatacgatgataaccaaaagctggcccagctgtcagaaaatgaatatttcaagatttacatcgatagtctaatgaagaaatctaaaagggctattcggctgttcaaggaaggtaaagagaggatgtatgaggaacagagccaggatcgcactatcgtgccttggaaggtgtttagacaatgccttcatgaggttcatcagatcagctctggattggaagctatggcccttaagagcacgattgatctcacctgtaatgactatatttctgtttttgaatttgacatcttcactagattgttccaagtgtccgataatttcaccgagtatttgatttacttgacttag

SEQ ID NO: 302295 - DNA, 561 bp, Artificial Sequence
  derived and/or modified sequence
gctgtcctgggtagaagggtttggcagccctagggagatgaatttctccagcgttggacccgcccagagcggagaagcaacacccttccagccactactctgttgctatgaaacaaaagactaggaagaactaaaattccagatggcaaactcaatgaatggcagaaaccctggtggtcgaggaggaaatccccgaaaaggtcgaattttgggtattattgatgctattcaggatgcagttggaccccctaagcaagctgccgcagatcgcaggaccgtggagaagacttggaagctcatggacaaagtggtaagactgtgccaaaatcccaaacttcagttgaaaaatagcccaccatatatacttgatattttgcctgatacatatcagcatttacgacttatattgagtaaatatgatgacaaccagaaacttgcccaactcagtgagaatgagtactttaaaatctacattgatagccttatgaaaaagtcaaaacgggcaataagactctttaaagaaggcaaggagagaatgtatgaagaacagtcacaggacag

SEQ ID NO: 302296 - DNA, 1632 bp, Artificial Sequence
  derived and/or modified sequence
ttcagccccagatggctttggctcccggtcccgacgctcacgcccacctgccaccccttattgaactaaaattccagatggcaaactcaatgaatggcagaaaccctggtggtcgaggaggaaatccccgaaaaggtcgaattttgggtattattgatgctattcaggatgcagttggaccccctaagcaagctgccgcagatcgcaggaccgtggagaagacttggaagctcatggacaaagtggtaagactgtgccaaaatcccaaacttcagttgaaaaatagcccaccatatatacttgatattttgcctgatacatatcagcatttacgacttatattgagtaaatatgatgacaaccagaaacttgcccaactcagtgagaatgagtactttaaaatctacattgatagccttatgaaaaagtcaaaacgggcaataagactctttaaagaaggcaaggagagaatgtatgaagaacagtcacaggacagaactatcgtaccatggaaagtattcagacagtgccttcatgaggtccaccagattagctctggcctggaagcaatggctctaaaatcaacaattgatttaacttgcaatgattacatttcagtttttgaatttgatatttttaccaggctgtttcaggtttctgataattttacagaatatcttatttatttaacatgatacaaagacattctaaatagtaagagctttgcttcttcaccttgtcaaggaagagagtaaaagtaatcttcctacattaaacctaactgctcattctaggaaccttggggctctattttgcggaattggaatttcttagctgtgacacatccaggttacatggcatttctcacatatgatgaagttaaagcacgactacagaaatatagcaccaaacccggaagctatattttccggttaagttgcactcgattgggacagtgggccattggctatgtgactggggatgggaatatcttacagaccatacctcataacaagcccttatttcaagccctgattgatggcagcagggaaggattttatctttatcctgatgggaggagttataatcctgatttaactggattatgtgaacctacacctcatgaccatataaaagttacacaggaacaatatgaattatattgtgaaatgggctccacttttcagctctgtaagatttgtgcagagaatgacaaagatgtcaagattgagccttgtgggcatttgatgtgcacctcttgccttacggcatggcagccagaagttattgagtttctgtgggagatactgtgctttgaaaattcttggtatggatccaacctattctcagtgcatttatatacatataatttttccagttataattgctatgtttaaaaaaagatttgtggcaacctcatagctacatgaaatatagcaaggagtcggatggtcagggctgccctttctgtcgttgtgaaataaaaggaactgagcccataatcgtggacccctttgatccaagagatgaaggctccaggtgttgcagcatcattgacccctttggcatgccgatgctagacttggacgacgatgatgatcgtgaggagtccttgatgatgaatcggttggc

SEQ ID NO: 302297 - DNA, 420 bp, Artificial Sequence
  derived and/or modified sequence
atggccaacagcatgaacggcagaaaccccggcggcagaggcggcaaccccagaaagggcagaatcctgggcatcatcgacgccatccaggacgccgtgggcccccccaagcaggccgccgccgacagaagaaccgtggagaagacctggaagctgatggacaaggtggtgagactgtgccagaaccccaagctgcagctgaagaacagccccccctacatcctggacatcctgcccgacacctaccagcacctgagactgatcctgagcaagtacgacgacaaccagaagctggcccagctgagcgagaacgagtacttcaagatctacatcgacagcctgatgaagaagagcaagagagccatcagactgttcaaggagggcaaggagagaatgtacgaggagcagagccaggactag

SEQ ID NO: 302298 - DNA, 684 bp, Artificial Sequence
  derived and/or modified sequence
atggccctggcccccggccccgacgcccacgcccacctgccccccctgatcgagctgaagttccagatggccaacagcatgaacggcagaaaccccggcggcagaggcggcaaccccagaaagggcagaatcctgggcatcatcgacgccatccaggacgccgtgggcccccccaagcaggccgccgccgacagaagaaccgtggagaagacctggaagctgatggacaaggtggtgagactgtgccagaaccccaagctgcagctgaagaacagccccccctacatcctggacatcctgcccgacacctaccagcacctgagactgatcctgagcaagtacgacgacaaccagaagctggcccagctgagcgagaacgagtacttcaagatctacatcgacagcctgatgaagaagagcaagagagccatcagactgttcaaggagggcaaggagagaatgtacgaggagcagagccaggacagaaccatcgtgccctggaaggtgttcagacagtgcctgcacgaggtgcaccagatcagcagcggcctggaggccatggccctgaagagcaccatcgacctgacctgcaacgactacatcagcgtgttcgagttcgacatcttcaccagactgttccaggtgagcgacaacttcaccgagtacctgatctacctgacctag

SEQ ID NO: 302299 - DNA, 666 bp, Artificial Sequence
  derived and/or modified sequence
gtgcagccaggggcttccggccgcggccctggcgcgtggtctgcgcgcgcccggccgtgcgtgcggatgcggggaggctgcgtgtgtgcgcagggagagaacgccggccaccttcccgcttccgagctgggtgcgcgccgagcacaggagattgcctgcgtttaggaggtggctgcgttgtgggaaaagctatcaaggaagaaattgccaaaccatgtctttttttctgttttcagagtagttcacaacagatctgagtgttttaattaagcatggaatacagaaaacaacaaaaaacttaagctttaatttcatctggaattccacagttttcttagctccctggacccggttgacctgttggctcttcccgctggctgctctatcacgtggtgctctccgactactcaccccgagtgtaaagtcttgctgctctgttgcccaggctggagtacagtggcaggatctcagctcactgcaatctccgtctctcaggtttaagcagttctcctgcctcagcctcccaagtaggtgggactacagaaccttcggctcgcgtgcttctgagctgctgtggatggcctcggctctctggactgtccttccgagtaggatgtcactgagatccctcaaatggagcctcctgctgctgtcactcctgagttt

SEQ ID NO: 302300 - DNA, 541 bp, Artificial Sequence
  derived and/or modified sequence
ggcccaggccgcggccgcgccgcatccgctggttgtccaccttgccttgccccagggtgcaatacctgccttgcgtcgcccgtgccgctccagccaccgtcaaatccgggtagcgacccggggcgtttgcagcggtgccgaggaagaggacgggaacggtgttacgattgcctgcgtttaggaggtggctgcgttgtgggaaaagctatcaaggaagaaattgccaaaccatgtctttttttctgttttcagagtagttcacaacagatctgagtgttttaattaagcatggaatacagaaaacaacaaaaaacttaagctttaatttcatctggaattccacagaaccttcggctcgcgtgcttctgagctgctgtggatggcctcggctctctggactgtccttccgagtaggatgtcactgagatccctcaaatggagcctcctgctgctgtcactcctgagtttctttgtgatgtggtacctcagccttccccactacaatgtgatagaacgcgtgaactggatgtacttctatgag

SEQ ID NO: 302301 - protein, 642 aa, Artificial Sequence
  derived and/or modified sequence
MLEETLRMATTTIKEQGFRAIIISGGPNSVYAEDAPWFDPAIFTIGKPVLGICYGMQMMNKVFGGTVHKKSVREDGVFNISVDNTCSLFRGLQKEEVVLLTHGDSVDKVADGFKVVARSGNIVAGIANESKKLYGAQFHPEVGLTENGKVILKNFLYDIAGCSGTFTVQNRELECIREIKERVGTSKVLVLLSGGVDSTVCTALLNRALNQEQVIAVHIDNGFMRKRESQSVEEALKKLGIQVKVINAAHSFYNGTTTLPISDEDRTPRKRISKTLNMTTSPEEKRKIIGDTFVKIANEVIGEMNLKPEEVFLAQGTLRPDLIESASLVASGKAELIKTHHNDTELIRKLREEGKVIEPLKDFHKDEVRILGRELGLPEELVSRHPFPGPGLAIRVICAEEPYICKDFPETNNILKIVADFSASVKKPHTLLQRVKACTTEEDQEKLMQITSLHSLNAFLLPIKTVGVQGDCRSYSYVCGISSKDEPDWESLIFLARLIPRMCHNVNRVVYIFGPPVKEPPTDVTPTFLTTGVLSTLRQADFEAHNILRESGYAGKISQMPVILTPLHFDRDPLQKQPSCQRSVVIRTFITSDFMTGIPATPGNEIPVEVVLKMVTEIKKIPGISRIMYDLTSKPPGTTEWE

SEQ ID NO: 302302 - protein, 337 aa, Artificial Sequence
  derived and/or modified sequence
PPQPSKMLGLQVAQLFTDNFDYQTRDDFVRGLLVNEEILGNQIHMHVTAKEYGARVSNLHMYSAVCADVIRRWVYPLTPEANFTDSTTQSCTHSRHNIYRGPEVSLGHGSILEENVLLGSGTVIGSNCFITNSVIGPGCHIGDNVVLDQTYLWQGVRVAAGAQIHQSLLCDNAEVKERVTLKPRSVLTSQVVVGPNITLPEGSVISLHPPDAEEDEDDGEFSDDSGADQEKDKVKMKGYNPAEVGAAGKGYLWKAAGMNMEEEEELQQNLWGLKINMEEESESESEQSMDSEEPDSRGGSPQMDDIKVFQNEVLGTLQRGKEENISCDNLVLEINSL

SEQ ID NO: 302303 - DNA, 1801 bp, Artificial Sequence
  derived and/or modified sequence
ccacctcagccttccaaaatgctgggattacaggtggcacaactctttacagacaactttgactaccaaactcgagatgactttgtgcgaggtctcttagtgaatgaggagatcctagggaaccagatccacatgcacgtaacagctaaggaatatggtgcccgtgtctccaacctacacatgtactcagctgtctgtgctgacgtcatccgccgatgggtctaccctctcaccccagaggcgaacttcactgacagcaccacccagagctgcactcattcccggcacaacatctaccgagggcctgaggtcagcctgggccatggcagcatcctagaggaaaatgtgctcctgggctctggcactgtcattggcagcaattgctttatcaccaacagtgtcattggccccggctgccacattggtgataacgtggtgctggaccagacctacctgtggcagggtgttcgagtggcggctggagcacagatccatcagtctctgctttgtgacaatgctgaggtcaaggaacgagtgacactgaaaccacgctctgtcctcacttcccaggtggtcgtgggcccaaatatcacgctgcctgagggctcggtgatctctttgcaccctccagatgcagaggaagatgaagatgatggcgagttcagtgatgattctggggctgaccaagaaaaggacaaagtgaagatgaaaggttacaatccagcagaagtaggagctgctggcaagggctacctctggaaagctgcaggcatgaacatggaggaagaggaggaactgcagcagaatctgtggggactcaagatcaacatggaagaagagagtgaaagtgaaagtgagcaaagtatggattctgaggagccggacagccggggaggctcccctcagatggatgacatcaaagtgttccagaatgaagttttaggaacactacagcggggcaaagaggagaacatttcttgtgacaatctcgtcctggaaatcaactctctcaagtatgcctataacataagtctaaaggaggtgatgcaggtactgagccacgtggtcctggagttccccctgcaacagatggattccccgcttgactcaagccgctactgtgccctgctgcttcctctgctaaaggcctggagccctgtttttaggaactacataaagcgcgcagccgaccatttggaagcgttagcagccattgaggacttcttcctagagcatgaagctcttggtatttccatggccaaggtactgatggctttctaccagctggagatcctggctgaggaaacaattctgagctggttcagccaaagagatacaactgacaagggccagcagttgcgcaagaatcaacagctgcagaggttcatccagtggctaaaagaggcagaagaggagtcatctgaagatgactgaagtcacactgcctgctcctttgggtgtgattgagtgccctcctggctcctgggctgggacaagtgaggaactagctgcagagggatgagtgaccaccatccaggctgagactgaaaggagcagaggctggaactacagtattctttcccctgctagcaaccatgtgcctcccatcctgactgtggagttgggatgtggaagtggggctggaacaaagcttctgcctagggaggagctaagcaggcccggcagttggaggaaggccagaggaacagctttgtgctccggctttccctcagggaacagcagagagcagttggctctttctgctgcttgtatatgttaatattaaaagagagagtggtgt

SEQ ID NO: 302304 - DNA, 1014 bp, Artificial Sequence
  derived and/or modified sequence
cccccccagccttcgaaaatgctggggctgcaggttgcacagctttttacagataactttgactaccagacacgagacgacttcgtcagagggcttctggtgaacgaggaaatcctcgggaatcagatccatatgcacgtgaccgccaaggagtacggtgctcgcgtgagtaacttacatatgtactccgccgtatgtgccgacgtgattaggcgttgggtttaccccctgaccccggaggctaacttcaccgacagcacaactcagtcgtgcacccacagcagacataacatctatcgcggtccagaggtgtccctcggacatgggagtattttggaggagaacgttctgttggggtcggggacagtcatcgggtcaaactgctttatcacaaatagcgtgatcggaccaggatgtcatataggcgacaacgtggtcctcgaccaaacatacctctggcagggggtccgtgtggcagcgggtgcgcagattcaccaatctctgctatgcgacaatgccgaagttaaggagagagtcactctaaaacctcgttccgtcttgacatctcaagtggtggtgggccctaatataaccttgcctgagggatccgtcattagtctgcatccccccgacgcggaagaggacgaggacgacggcgagttcagcgatgactccggcgcagaccaggagaaggacaaggtgaaaatgaagggttacaaccctgccgaagtaggcgctgcgggaaagggatatctctggaaggcggcagggatgaatatggaagaggaggaagagctccagcagaatctttgggggttaaagattaacatggaggaagaatcggaatctgaatcagagcaatccatggactcagaagagcctgacagccgaggcggtagcccacagatggacgacatcaaggtgtttcagaacgaagtgctgggaaccctgcaaaggggcaaagaagaaaatatttcctgtgacaacctcgtgctggagataaactcgttgtag

SEQ ID NO: 302305 - DNA, 1014 bp, Artificial Sequence
  derived and/or modified sequence
cctccccagcccagcaagatgctgggcctgcaggtggcccagctgttcacagacaactttgactaccagaccagagatgactttgtgcggggcctgctggtgaatgaggagatcctgggcaaccagatccacatgcacgtgacagccaaggagtatggagcccgggtgagcaacctgcacatgtacagcgctgtgtgtgctgatgtgatccgccgctgggtgtaccccctgaccccagaggccaacttcacagacagcaccacccagagctgcacccacagccgccacaacatctaccggggccctgaggtgtccctgggccacggcagcatcctggaggagaatgtgctgctgggcagcggcaccgtcatcggcagcaactgcttcatcaccaacagcgtgattggccctggctgccacatcggggacaacgtggtgctggaccagacctacctgtggcagggcgtgcgggtggccgccggggcccagatccaccagagcctgctgtgtgacaatgctgaggtgaaggagcgggtgaccctgaagcccaggtctgtgctgaccagccaggtggtggtgggccccaacatcaccctgcctgagggcagcgtcatcagcctgcaccccccagatgctgaggaggatgaagatgatggagagttcagtgatgattctggagctgaccaggagaaggacaaggtgaagatgaagggctacaacccagctgaggtgggcgctgctgggaagggctacctgtggaaggccgccggcatgaacatggaggaggaggaggagctgcagcagaacctgtggggcctgaagatcaacatggaggaggagagcgagagcgagagcgagcagagcatggattctgaggagccagacagccggggcggcagcccccagatggatgacatcaaggtgttccagaatgaggtgctgggcaccctgcagaggggcaaggaggagaacatcagctgtgacaacctggtgctggagatcaacagcctgtag

SEQ ID NO: 302306 - DNA, 1014 bp, Artificial Sequence
  derived and/or modified sequence
cccccccagcccagcaagatgctgggcctgcaggtggcccagctgttcaccgataatttcgattatcagactagggatgactttgtaagaggcttgctggtcaacgaggaaatcctagggaatcagatacacatgcacgtgactgctaaggagtatggcgcccgtgtatcgaatctacatatgtactctgccgtgtgtgccgacgttatccggagatgggtctaccccctcaccccggaggccaatttcaccgattcaactacacagtcctgcactcactcacgtcacaatatttaccggggccccgaggtttctttaggccatggttccattctggaggagaatgtgctgctgggatccgggacagtcatcgggagcaactgctttatcaccaattcagtaatcggcccagggtgccacattggtgacaatgtagtgctggatcagacatacctgtggcagggcgtgagggtggctgccggggcccagatccaccagtccctcttgtgtgacaatgcggaggtgaaggagagagtgacccttaagccccggtcagtgttaacctctcaagtggtcgtgggtcccaatatcacacttcccgagggctcagtgatttctctacacccacccgatgcggaagaggatgaagacgatggggagttctccgacgactctggtgcagaccaggagaaggacaaggttaaaatgaaaggctacaatcctgcagaggttggggccgccgggaaggggtacctgtggaaagccgccggcatgaatatggaggaggaagaagagctgcagcagaatctgtggggacttaagatcaacatggaggaggagagcgaatccgagtccgagcaaagcatggatagtgaggagccggacagtcggggaggctcgcctcagatggatgatatcaaggtgtttcagaatgaggtgttggggactctacagcggggcaaagaggaaaacatctcatgcgacaatctcgttctcgaaatcaatagtttgtag

SEQ ID NO: 302307 - DNA, 1014 bp, Artificial Sequence
  derived and/or modified sequence
cccccacagccaagtaagatgctgggacttcaggtagcccagctcttcacggacaactttgattatcagacgagagatgacttcgtcagaggcctgctcgtgaatgaggagatccttggcaatcagattcacatgcacgtcactgcaaaggagtacggcgctcgtgtgtctaatttgcatatgtatagcgccgtgtgtgcagacgtgataagaaggtgggtctaccctctgactccagaggccaatttcactgattctaccactcagtcatgtacacattctcggcataacatttaccgcggacctgaagtgtctttgggtcacggcagtatactcgaagagaacgttctcctgggtagcggcaccgtaatagggagcaactgctttatcacaaattctgtgattgggcctgggtgtcatatcggggacaatgtggtgctcgaccaaacctatctatggcagggagtgagggtcgccgctggcgctcaaatccatcaatctctgctgtgtgataacgccgaagtgaaagaacgcgttacactgaagccgagaagtgtgttaactagtcaagtcgtggtgggcccaaacatcaccctgcctgagggcagcgtgatttctctgcaccccccagacgccgaggaggatgaggacgatggagaattctccgacgactccggcgcagaccaagaaaaagataaggtaaaaatgaagggatacaatcctgccgaggttggcgcagcagggaagggatacctgtggaaagccgcaggaatgaacatggaagaggaagaagaactccagcagaacttatggggccttaagataaacatggaagaggaatctgagtccgagtctgaacagagcatggactccgaagaacctgattctaggggtgggtctccacagatggacgacatcaaggtgtttcagaatgaggtcttgggcactctacaaaggggcaaggaggaaaacatctcctgtgataacttggtcttagagatcaacagcctgtag

SEQ ID NO: 302308 - DNA, 1014 bp, Artificial Sequence
  derived and/or modified sequence
cccccccagcccagcaagatgctgggcctgcaggtggcccagctgttcaccgacaacttcgactaccagaccagagacgacttcgtgagaggcctgctggtgaacgaggagatcctgggcaaccagatccacatgcacgtgaccgccaaggagtacggcgccagagtgagcaacctgcacatgtacagcgccgtgtgcgccgacgtgatcagaagatgggtgtaccccctgacccccgaggccaacttcaccgacagcaccacccagagctgcacccacagcagacacaacatctacagaggccccgaggtgagcctgggccacggcagcatcctggaggagaacgtgctgctgggcagcggcaccgtgatcggcagcaactgcttcatcaccaacagcgtgatcggccccggctgccacatcggcgacaacgtggtgctggaccagacctacctgtggcagggcgtgagagtggccgccggcgcccagatccaccagagcctgctgtgcgacaacgccgaggtgaaggagagagtgaccctgaagcccagaagcgtgctgaccagccaggtggtggtgggccccaacatcaccctgcccgagggcagcgtgatcagcctgcacccccccgacgccgaggaggacgaggacgacggcgagttcagcgacgacagcggcgccgaccaggagaaggacaaggtgaagatgaagggctacaaccccgccgaggtgggcgccgccggcaagggctacctgtggaaggccgccggcatgaacatggaggaggaggaggagctgcagcagaacctgtggggcctgaagatcaacatggaggaggagagcgagagcgagagcgagcagagcatggacagcgaggagcccgacagcagaggcggcagcccccagatggacgacatcaaggtgttccagaacgaggtgctgggcaccctgcagagaggcaaggaggagaacatcagctgcgacaacctggtgctggagatcaacagcctgtag

SEQ ID NO: 302309 - DNA, 4364 bp, Artificial Sequence
  derived and/or modified sequence
gttaccatagcgacgtgcacgcagtagccaggcctgacccgctggtcccttgctggcgggaggaaagaggcggcaccatgagccacgcagtaaccatcgaggagccccaggcccagccgcaggtgtctcaaactcggtaccgggagaggtcgcgggctgggagccacatctcctccaatcgagcgtatgattttctgtacgatccattgtttattgtgtcaagtgagaaagaccatacacaggcaaatatccaagctaccctgattcgcagcagactgagaaaagttcccaggtttaaaaccatgttcagtaacctgatccattatccaagatattctctatattggagcaagtcagatcctgtcccaccatttatcagtcgggaatggaagggacataaggagaaacacagagaagccctccggcagctcaccacaactgacgcttcttttcagatgcctaaagaagtttatgaagatcctgaagttactggaaagaatcgctataaagggcagaaccatacacttttcctcctacttctactaagcacctatccatcccttcaaagtctactgtgggcactcagactgattatcgggatgctgacgttcaaacagatccatactctgcagaatatgtagtatgtcaggactcaatccctgagctcttgaccctggctacgcttacttggggtcggggtctcccagcaggacaagctgaggtggagatgatagaaagagcccgcgagaagcgtgcttgggaagcctctctccccgctctgagtgacacctcccagtttgagaagaggaggaaaatgatgaatgaaatggagaggaaggagtgggccttcagagagcaggagattgaaaaactgcaggagattcgcctggaagttctaaaagagctgttgaggaagcgtgaagagaatcagaatgaagtgaatatgaagcacttgaatgcccggtggtctaaactgcaggagggaaaagaggcaaaaatggcaaaaattcagcgcacgcatgtatcaacaatcagaaaacttgtaggaaagagaaagaatatagaagggaagttggagagaagaaatatcatcaaggattattctgattatgcatcacaggtctatggacctctgtctcgtcttgggtgtttcccagacaacaactcagaggactttgtagtaaaaaactactatctcaacacctatgaaggattagtggaacttgagtcatgtctcccagattttgtgacacaaccccaaatcagagctccaaaacctaaagtcattaccaccaaagctggttttctgaagagggcagcaaggttggactatgagttggcagaggttcataaggcactgttggataagaagaataaagttcttgaagtaaagaaaccccctcgcttccttcaaagaaacccaatacctcaacctcggcttccaactccaaccttggaaatgacgtccaatgaagaagaagaaatggaaatggctgtgatctaccttcaaaagttactccggggcagagtcgttcagaacatgatgtttgaagggaaagaaaagcgactggagttgatccaggagttgcgcacctgccacgcactacaagaagatgaaaagctggtgaaaaaagccgagaagcaagtgaccctggccttacagcggcagaggaacttgcatgagcacaaggtgtcactggttgaaaaccatttggccggactggaaggaagggcactagcagacatgtttgacttcctgtccaaagagctggtgagactgcaggaggagaggaggatccatgcctttgtcatgctggctgagcgccagcggcgggtacgagaggctgaagagagtggtcggcgccaggtggaaaaacagcgcctgcgggaggaggacgagatatttaaggaggtggttaaagttcaccatagtactataagctcctacctagaagacataatactgaataccgaagcgaatactgcagaagaacaagccagggcagaaatagagaagatggctgagaaaatcaatgacattgcttatgaaatggaaagccgccgaacctatcttcagtcagaggagattgttgctgagttggtttatagttttctgatcccagaggtgcaaaaatactttgtcaaagaaaaagtgaggaacgcacagcggaaacatattcttgcagcccatcagatcatccacagttacacggaaagcatggttcaaaagaaattaactgagggagagcaagatgaggcctcaaatgctgccatgttacttgagaaagaaactcaaaatgagaacaacagctaagattgtgatttttttgtaaaagaagctgtacgaatcatcataaataattccaatagtctgcacttctcccaaggtgtgcactgctcataaacttgccagtgtgtgattcatgagaaaggagatttattttccttaaacatccaataatttaaaatgattttcaataataataatcaaatgaaaaagcttcattctcttcagtgtcttctagatgccctacttaaagagaacattttcttatgtctcatttcaatattttgttaactatgaggatgtgctggtttgttgaatcaaacaaaaggaaatgttgtggaatatttttccaagtagttttggttcactattcacaggacattggcattatctactaaggctgaaaatgtgcatattccatgactcaggattttatctcctagatatatattcaacagaaatgcatgagtatgtgcaccaacaggcatgacaaaaatatttatagtagtggtgttcacaatagtcccaaactggaaacccaagtgtccatctccatcggaacagaaaactatactttggtctgcttctacagtggcacatcaacccacctttgagctttagatctaagaagtgtgttcatgcaacagccatagagatggtgctattgaaaggcaatctgcccatcctgtgtattgacaagcatcaggattccaggaggattcttcctgattcaaagactgtcaaataggaaaaaagaaaacagtaaatgaacaaaaacatcaacatggagtccaagtaatgaatttatagaggaaaatgtatgctactctgaaaacaaagcttatgttagagaatatcttactgtaagaaacaaggaaaattgcagaaacatttgctgagtgtttttaataggagtcaaaaagaaagggtcttttcagaaactgaagtaggaaataataacagacaaggtcaaaaaatagatgcaggctgaaaagaaaaggaagtgggctaagatgggaaaaatataaaaagatttaaaatccagcaacaaaatttacacattcatttggatgcagtgaaaagggcagaaataccacagcagagaataaaattgataatgttggcaacacatttattaagtgatccaacatgggatgggaaggaatgggcaaagagattaaaatgacagaagttagctgtagatgacctatcccacagcaatcggagttcttgaagaagaaaccagaacaaataaaatagaaacaataatcagagtttaataattaattttctgagtttttttttaaaaaaactaattatacaaacttgaaagggttcaccttgccctagcaaaactaggattgggacacctttttttccccctgaggatcactgacaaaaaacactgcaccagtaaggaagcaactaaattttgttttgttctttgaaaaaggctaacctgagctaggtaaaggttatatcattcacttttgaaataaaccatcgagaacacaaaatgacaagtgagttaggttgggctgatgggatagaaggtgggaggggaatgctatacagctgggaacagcagactttctctgaagggccagatggtaactacattagggtttgcgggtctgatggtcgccatcataactgcatactcaactctgccgttgtagggtaagagcagcactcgatgacacagaaatgaatgcacatgactgtgttccagtaaaattttattttaattaaaatcaattcatgtttgaaaaaggatttaaagtagcttctaataaaggacatgtgtaatgaaacttaaaatatgatattttctttaaaaatctttatccttatgtagacttctaaaactatgttttgcatttagacagtcaaggaaaatacaagttgttatacaattctcattgactaattgaagtttactaggagaggaaaactttttcttgataccggcaatcttttacttataatggcttgagttaaaatgctccaacttttctaatttttgcttttgaaaataaaacacctatagtgacaataaaaacacacatttaaagcc

SEQ ID NO: 302310 - DNA, 564 bp, Artificial Sequence
  derived and/or modified sequence
atgagccatgctgtgaccatagaagaacctcaggctcagccgcaggtgtcccagacccggtatagagagcgctctcgagctgggagtcacatcagttctaaccgcgcctatgattttctctacgatccactttttattgttagctcggaaaaagaccacacgcaggcaaatattcaggctacattgatccggtcccgcctccggaaggtccctcgcttcaagaccatgttctcaaaccttatccactatccacgctacagtctgtattggtccaaatcagatcccgtgccaccctttattagcagagagtggaaaggacacaaggagaagcatcgggaggctctgagacagcttactacgaccgacgcctcattccagatgccgaaagaagtctatgaggacccagaggtcacaggcaagaataggtacaagggtcagaaccataccctgttcctacttctgctgttatcaacatacccctcgctccagagcttgctctgggcacttcgcctaattatcggaatgctcacctttaaacaaatacatactctgcaaaacatgtag

SEQ ID NO: 302311 - DNA, 717 bp, Artificial Sequence
  derived and/or modified sequence
atgtctcacgcagtgaccatcgaggaaccccaggctcagccccaagtaagccagacccgctatagagagaggtccagggccggatcccacatttcaagtaatcgcgcttacgacttcctctacgacccactgttcatcgtaagctcagagaaagaccacacgcaagcaaatatacaggcgaccctcatcagatctcgccttcgaaaagttccaaggttcaaaaccatgttttccaaccttattcattatccgcggtactcactctattggtcaaaatccgacccagtgcctccttttatttccagagaatggaaaggtcataaggaaaaacatagggaggcgctgcgacaactgaccacaactgacgccagcttccagatgcctaaggaagtatatgaggatcccgaagttaccggcaagaatcgttataaatatttcgaaaggccattcctgcctttcttccaacaaatgccttttaatgtagtgtacgctgtatctaaagccgaaccttatacctttcctcccacatcaaccaagcatctgtccatcccgtcaaagtccaccgtcggtacacagaccgattatcgagacgcagacgttcagaccgatccctacagtgccgagtacgtggtatgccaggattccattcccgaactattaaccctcgcaactctcacgtggggagagctagtgaatttactgacaatcggcagatag

SEQ ID NO: 302312 - DNA, 564 bp, Artificial Sequence
  derived and/or modified sequence
atgagccatgctgtgaccatcgaggagccccaggcccagccccaggtgtcccagacccgctaccgggagaggagcagagctggcagccacatcagcagcaacagagcctatgacttcctgtatgaccccctcttcatcgtgtcctctgagaaggaccacacccaggccaacatccaggccaccctcatccgcagccggctgaggaaggtgccccgcttcaagaccatgttcagcaacctgatccactacccccgctacagcctgtactggagcaagagtgaccctgtgccccccttcatcagccgggagtggaagggccacaaggagaagcaccgggaggccctgcggcagctgaccaccacagatgccagcttccagatgcccaaggaggtgtatgaagatcctgaggtgacaggcaagaaccgctacaagggccagaaccacaccctcttcctgctgctgctgctgagcacctaccccagcctgcagagcctgctgtgggccctgcggctcatcatcggcatgctgaccttcaagcagatccacaccctgcagaacatgtag

SEQ ID NO: 302313 - DNA, 717 bp, Artificial Sequence
  derived and/or modified sequence
atgagccatgctgtgaccatcgaggagccccaggcccagccccaggtgtcccagacccgctaccgggagaggagcagagctggcagccacatcagcagcaacagagcctatgacttcctgtatgaccccctcttcatcgtgtcctctgagaaggaccacacccaggccaacatccaggccaccctcatccgcagccggctgaggaaggtgccccgcttcaagaccatgttcagcaacctgatccactacccccgctacagcctgtactggagcaagagtgaccctgtgccccccttcatcagccgggagtggaagggccacaaggagaagcaccgggaggccctgcggcagctgaccaccacagatgccagcttccagatgcccaaggaggtgtatgaagatcctgaggtgacaggcaagaaccgctacaagtactttgagcggcccttcctgcccttcttccagcagatgcccttcaacgtggtgtatgctgtgtccaaggccgagccctacaccttcccccccaccagcaccaagcacctgagcatccccagcaagagcacagtgggcacccagacagactacagagatgctgatgtgcagacagacccctacagcgcagaatatgtggtgtgccaggacagcatccctgagctgctgaccctggccaccctgacctggggcgagctggtgaacctgctgaccatcggccgctag

SEQ ID NO: 302314 - DNA, 564 bp, Artificial Sequence
  derived and/or modified sequence
atgagccacgccgtgaccatcgaggagccccaggcccagccccaggtcagtcaaactcgttatcgcgagaggtcaagggctggctcacatatcagctcaaacagagcttatgacttcctctacgatcctctatttatcgtgtcttctgagaaggaccacacccaggccaatatccaggctaccctgataagatcacgcctgagaaaggtcccccgttttaaaacaatgttctccaaccttatccactatccacgctacagtttatactggtccaagagtgacccagtgcccccattcatttctcgggaatggaaggggcataaggagaaacaccgggaggccctgagacaactgaccacaaccgacgccagttttcagatgcccaaggaggtatacgaggacccagaggtgacaggcaaaaatcgttataaggggcaaaaccacaccctatttttactattgctcctttctacatacccgagcctgcaaagcctgctctgggcccttaggttgatcataggaatgctgacattcaaacagatccacacactccagaacatgtag

SEQ ID NO: 302315 - DNA, 717 bp, Artificial Sequence
  derived and/or modified sequence
atgagccacgccgtgaccatcgaggagccccaggcccagccccaggtctcccagacccggtatcgtgaaagaagcagagccgggtcccacatcagtagcaacagggcatacgacttcctgtacgaccccttattcattgtctcttccgagaaggatcacacacaggcaaatatacaggctactttaattcgcagtcggctccggaaggtgccccggttcaagactatgtttagcaacttaatccattatcccaggtactctctatattggtccaaaagtgatcctgttcctccatttatatccagggagtggaagggccacaaagagaagcatcgcgaggcactcaggcagctgaccaccacagacgcctcctttcagatgcccaaagaggtttatgaagaccctgaagtcaccggcaagaacaggtacaaatactttgagagaccttttctgccattttttcagcaaatgccctttaacgttgtgtacgctgtctcgaaagcagagccatatacgttcccaccgactagtactaagcatctatccattccatctaaatccactgttggcacccagaccgattatcgggacgccgacgtacagaccgacccatacagcgctgagtacgtcgtgtgtcaagacagcatcccggagctgctgaccctggccactctcacctggggggaattggtcaaccttcttactattggacgatag

SEQ ID NO: 302316 - DNA, 564 bp, Artificial Sequence
  derived and/or modified sequence
atgagccatgcggtgaccattgaggagccccaggcgcagcctcaggtcagccagacccgatacagagaacgaagtcgggctggctcgcatatttcaagtaatagagcctacgatttcctgtacgatccactcttcatcgtgagttcagaaaaggaccacactcaagcaaacatccaggctacgctgatccgcagccgactcagaaaagttcctaggttcaaaacaatgttttccaacttaattcattaccctaggtatagcctctattggtcaaaaagtgatccagtgcccccatttatcagccgggaatggaagggccataaagagaaacatagggaagccttgcgtcagcttaccacaactgatgcaagttttcaaatgccaaaagaagtctacgaggatcctgaggtaactggcaaaaaccgctacaaaggccagaaccacacactctttctgctgcttctgttgagtacctacccatccctccagagcctgctgtgggcgctccgcctgatcattggtatgctgaccttcaagcagatccacacattacaaaacatgtag

SEQ ID NO: 302317 - DNA, 717 bp, Artificial Sequence
  derived and/or modified sequence
atgagccacgccgtcaccatcgaagaaccacaggctcagccacaggttagtcagacccggtatcgagagcgcagcagggcaggcagtcatattagctccaaccgggcatatgacttcctgtatgacccgctgtttattgtcagcagcgagaaagaccacacgcaagcaaacattcaagcaaccctgatcagatccaggcttcgtaaagtgcccaggttcaaaacaatgtttagcaacctaattcattatccccgttacagcttgtactggtccaagtctgacccagttccccctttcatcagtcgggagtggaaggggcacaaggagaaacaccgggaagcactgagacagctaaccaccactgacgcaagcttccagatgccgaaggaggtatacgaagatcccgaggtgacaggaaaaaataggtataaatactttgagcgtccttttctgccttttttccagcagatgcccttcaacgtcgtctatgctgtgagtaaagctgagccgtacacatttcctcctacctctacaaagcatctgtccattccttccaagagcaccgtgggaacccagaccgactatcgggatgcagacgtccaaaccgacccctactctgcagagtatgtggtctgtcaagatagcatcccagaactgctgacactggcaaccctgacttggggagaactggttaacttactgaccattggacggtag

SEQ ID NO: 302318 - DNA, 939 bp, Artificial Sequence
  derived and/or modified sequence
gacgtgcacgcagtagccaggcctgacccgctggtcccttgctggcgggaggaaagaggcggcaccatgagccacgcagtaaccatcgaggagccccaggcccagccgcaggtgtctcaaactcggtaccgggagaggtcgcgggctgggagccacatctcctccaatcgagcgtatgattttctgtacgatccattgtttattgtgtcaagtgagaaagaccatacacaggcaaatatccaagctaccctgattcgcagcagactgagaaaagttcccaggtttaaaaccatgttcagtaacctgatccattatccaagatattctctatattggagcaagtcagatcctgtcccaccatttatcagtcgggaatggaagggacataaggagaaacacagagaagccctccggcagctcaccacaactgacgcttcttttcagatgcctaaagaagtttatgaagatcctgaagttactggaaagaatcgctataaatactttgaaaggccttttctcccattttttcagcagatgccattcaatgttgtttatgccgtatccaaggcagaaccatacacttttcctcctacttctactaagcacctatccatcccttcaaagtctactgtgggcactcagactgattatcgggatgctgacgttcaaacagatccatactctgcagaatatgtagtatgtcaggactcaatccctgagctcttgaccctggctacgcttacttggggtgagttggtaaatctcctgactattggcagatgacgatgctgataaccacgcatgctgttcaaatggcccatgtacaggcaattgtggtttacagtgttgctatataaagtgtcttagtacagcaacttcatagactcataatttttctgatacttctggtcaaataaagatactatctttttattgtga

SEQ ID NO: 302319 - DNA, 564 bp, Artificial Sequence
  derived and/or modified sequence
atgagccacgccgtgaccatcgaggagccccaggcccagccccaggtgagccagaccagatacagagagagaagcagagccggcagccacatcagcagcaacagagcctacgacttcctgtacgaccccctgttcatcgtgagcagcgagaaggaccacacccaggccaacatccaggccaccctgatcagaagcagactgagaaaggtgcccagattcaagaccatgttcagcaacctgatccactaccccagatacagcctgtactggagcaagagcgaccccgtgccccccttcatcagcagagagtggaagggccacaaggagaagcacagagaggccctgagacagctgaccaccaccgacgccagcttccagatgcccaaggaggtgtacgaggaccccgaggtgaccggcaagaacagatacaagggccagaaccacaccctgttcctgctgctgctgctgagcacctaccccagcctgcagagcctgctgtgggccctgagactgatcatcggcatgctgaccttcaagcagatccacaccctgcagaacatgtag

SEQ ID NO: 302320 - DNA, 717 bp, Artificial Sequence
  derived and/or modified sequence
atgagccacgccgtgaccatcgaggagccccaggcccagccccaggtgagccagaccagatacagagagagaagcagagccggcagccacatcagcagcaacagagcctacgacttcctgtacgaccccctgttcatcgtgagcagcgagaaggaccacacccaggccaacatccaggccaccctgatcagaagcagactgagaaaggtgcccagattcaagaccatgttcagcaacctgatccactaccccagatacagcctgtactggagcaagagcgaccccgtgccccccttcatcagcagagagtggaagggccacaaggagaagcacagagaggccctgagacagctgaccaccaccgacgccagcttccagatgcccaaggaggtgtacgaggaccccgaggtgaccggcaagaacagatacaagtacttcgagagacccttcctgcccttcttccagcagatgcccttcaacgtggtgtacgccgtgagcaaggccgagccctacaccttcccccccaccagcaccaagcacctgagcatccccagcaagagcaccgtgggcacccagaccgactacagagacgccgacgtgcagaccgacccctacagcgccgagtacgtggtgtgccaggacagcatccccgagctgctgaccctggccaccctgacctggggcgagctggtgaacctgctgaccatcggcagatag

SEQ ID NO: 302321 - DNA, 730 bp, Artificial Sequence
  derived and/or modified sequence
tcaagcttttggaccctcgtacagaagctaatacgactcactatagggaaataagagagaaaagaagagtaagaagaaatataagagccaccatggtttttaccctcgaagattttgtcggagattggagacagactgccggatacaaccttgaccaagtcctcgagcaaggcggtgtgtcgtcactcttccaaaacctgggtgtgtccgtgactcccatccagcgcatcgtcctgagcggcgaaaatgggttgaagatcgacatccatgtgatcattccatacgagggactgtccggggaccagatgggtcagatcgaaaagattttcaaagtggtgtacccggtcgacgatcatcacttcaaggtgatcctgcactacggaacgctggtgatcgatggggtgaccccgaacatgattgactatttcggacggccttacgagggcatcgcagtgttcgacggaaagaagatcaccgtgaccggcactctgtggaatggaaacaaaatcatcgacgaacgcctgatcaatccggatggctcgctgttgttccgggtgaccattaacggagtcactggatggaggctctgcgagcgcatccttgcgtgataataggctggagcctcggtggccatgcttcttgccccttgggcctccccccagcccctcctccccttcctgcacccgtacccccgtggtctttgaataaagtctgagtgggcggctctaga

SEQ ID NO: 302322 - DNA, 679 bp, Artificial Sequence
  derived and/or modified sequence
gggaaataagagagaaaagaagagtaagaagaaatataagagccaccatggtttttaccctcgaagattttgtcggagattggagacagactgccggatacaaccttgaccaagtcctcgagcaaggcggtgtgtcgtcactcttccaaaacctgggtgtgtccgtgactcccatccagcgcatcgtcctgagcggcgaaaatgggttgaagatcgacatccatgtgatcattccatacgagggactgtccggggaccagatgggtcagatcgaaaagattttcaaagtggtgtacccggtcgacgatcatcacttcaaggtgatcctgcactacggaacgctggtgatcgatggggtgaccccgaacatgattgactatttcggacggccttacgagggcatcgcagtgttcgacggaaagaagatcaccgtgaccggcactctgtggaatggaaacaaaatcatcgacgaacgcctgatcaatccggatggctcgctgttgttccgggtgaccattaacggagtcactggatggaggctctgcgagcgcatccttgcgtgataataggctggagcctcggtggccatgcttcttgccccttgggcctccccccagcccctcctccccttcctgcacccgtacccccgtggtctttgaataaagtctgagtgggcggc

SEQ ID NO: 302323 - DNA, 819 bp, Artificial Sequence
  derived and/or modified sequence
gggaaataagagagaaaagaagagtaagaagaaatataagagccaccatggtttttaccctcgaagattttgtcggagattggagacagactgccggatacaaccttgaccaagtcctcgagcaaggcggtgtgtcgtcactcttccaaaacctgggtgtgtccgtgactcccatccagcgcatcgtcctgagcggcgaaaatgggttgaagatcgacatccatgtgatcattccatacgagggactgtccggggaccagatgggtcagatcgaaaagattttcaaagtggtgtacccggtcgacgatcatcacttcaaggtgatcctgcactacggaacgctggtgatcgatggggtgaccccgaacatgattgactatttcggacggccttacgagggcatcgcagtgttcgacggaaagaagatcaccgtgaccggcactctgtggaatggaaacaaaatcatcgacgaacgcctgatcaatccggatggctcgctgttgttccgggtgaccattaacggagtcactggatggaggctctgcgagcgcatccttgcgtgataataggctggagcctcggtggccatgcttcttgccccttgggcctccccccagcccctcctccccttcctgcacccgtacccccgtggtctttgaataaagtctgagtgggcggcaaaaaaaaaaaaaaaaaaaaaaaaaaaaaaaaaaaaaaaaaaaaaaaaaaaaaaaaaaaaaaaaaaaaaaaaaaaaaaaaaaaaaaaaaaaaaaaaaaaaaaaaaaaaaaaaaaaaaaaaaaaaaaaaaaaaaaaaaaaa

SEQ ID NO: 302324 - DNA, 725 bp, Artificial Sequence
  derived and/or modified sequence
tcaagcttttggaccctcgtacagaagctaatacgactcactatagggaaataagagagaaaagaagagtaagaagaaatataagagccaccatggtttttaccctcgaagattttgtcggagattggagacagactgccggatacaaccttgaccaagtcctcgagcaaggcggtgtgtcgtcactcttccaaaacctgggtgtgtccgtgactcccatccagcgcatcgtcctgagcggcgaaaatgggttgaagatcgacatccatgtgatcattccatacgagggactgtccggggaccagatgggtcagatcgaaaagattttcaaagtggtgtacccggtcgacgatcatcacttcaaggtgatcctgcactacggaacgctggtgatcgatggggtgaccccgaacatgattgactatttcggacggccttacgagggcatcgcagtgttcgacggaaagaagatcaccgtgaccggcactctgtggaatggaaacaaaatcatcgacgaacgcctgatcaatccggatggctcgctgttgttccgggtgaccattaacggagtcactggatggaggctctgcgagcgcatccttgcgtgataataggctggagcctcggtggccatgcttcttgccccttgggcctccccccagcccctcctccccttcctgcacccgtacccccgtggtctttgaataaagtctgagtgggcggct

SEQ ID NO: 302325 - protein, 1654 aa, Artificial Sequence
  derived and/or modified sequence
MTDRFWDQWYLWYLRLLRLLDRGSFRNDGLKASDVLPILKEKVAFVSGGRDKRGGPILTFPARSNHDRIRQEDLRKLVTYLASVPSEDVCKRGFTVIIDMRGSKWDLIKPLLKTLQEAFPAEIHVALIIKPDNFWQKQKTNFGSSKFIFETSMVSVEGLTKLVDPSQLTEEFDGSLDYNHEEWIELRLSLEEFFNSAVHLLSRLEDLQEMLARKEFPVDVEGSRRLIDEHTQLKKKVLKAPVEELDREGQRLLQCIRCSDGFSGRNCIPGSADFQSLVPKITSLLDKLHSTRQHLHQMWHVRKLKLDQCFQLRLFEQDAEKMFDWISHNKELFLQSHTEIGVSYQYALDLQTQHNHFAMNSMNAYVNINRIMSVASRLSEAGHYASQQIKQISTQLDQEWKSFAAALDERSTILAMSAVFHQKAEQFLSGVDAWCKMCSEGGLPSEMQDLELAIHHHQTLYEQVTQAYTEVSQDGKALLDVLQRPLSPGNSESLTATANYSKAVHQVLDVVHEVLHHQRRLESIWQHRKVRLHQRLQLCVFQQDVQQVLDWIENHGEAFLSKHTGVGKSLHRARALQKRHDDFEEVAQNTYTNADKLLEAAEQLAQTGECDPEEIYKAARHLEVRIQDFVRRVEQRKLLLDMSVSFHTHTKELWTWMEDLQKEMLEDVCADSVDAVQELIKQFQQQQTATLDATLNVIKEGEDLIQQLRSAPPSLGEPSEARDSAVSNNKTPHSSSISHIESVLQQLDDAQVQMEELFHERKIKLDIFLQLRIFEQYTIEVTAELDAWNEDLLRQMNDFNTEDLTLAEQRLQRHTERKLAMNNMTFEVIQQGQDLHQYITEVQASGIELICEKDIDLAAQVQELLEFLHEKQHELELNAEQTHKRLEQCLQLRHLQAEVKQVLGWIRNGESMLNASLVNASSLSEAEQLQREHEQFQLAIEKTHQSALQVQQKAEVLLQAGHYDADAIRECAEKVALHWQQLMLKMEDRLKLVNASVAFYKTSEQVCSVLESLEQEYRRDEDWCGGRDKLGPAAEIDHVIPLISKHLEQKEAFLKACTLARRNAEVFLKYIHRNNVSMPSVASHTRGPEQQVKAILSELLQRENRVLHFWTLKKRRLDQCQQYVVFERSAKQALDWIQETGEFYLSTHTSTGETTEETQELLKEYGEFRVPAKQTKEKVKLLIQLADSFVEKGHIHATEIRKWVTTVDKHYRDFSLRMGKYRYSLEKALGVNTEDNKDLELDIIPASLSDREVKLRDANHEVNEEKRKSARKKEFIMAELLQTEKAYVRDLHECLETYLWEMTSGVEEIPPGILNKEHIIFGNIQEIYDFHNNIFLKELEKYEQLPEDVGHCFVTWADKFQMYVTYCKNKPDSNQLILEHAGTFFDEIQQRHGLANSISSYLIKPVQRITKYQLLLKELLTCCEEGKGELKDGLEVMLSVPKKANDAMHVSMLEGFDENLDVQGELILQDAFQVWDPKSLIRKGRERHLFLFEISLVFSKEIKDSSGHTKYVYKNKLLTSELGVTEHVEGDPCKFALWSGRTPSSDNKTVLKASNIETKQEWIKNIREVIQERIIHLKGALKEPLQLPKTPAKQRNNSKRDGVEDIDSQGDGSSQPDTISIASRTSQNTVDSDKDGNLVPRWHLGPGDPFSTYV

SEQ ID NO: 302326 - DNA, 4965 bp, Artificial Sequence
  derived and/or modified sequence
atgaccgaccgtttttgggaccagtggtatctctggtacctgcgcttactgcgactgctggatcgcgggagttttaggaacgacggcctgaaggccagtgacgtgctgccaattctcaaggagaaggtggcctttgtctcaggcgggcgggacaaacggggtggacctattcttacgtttcctgcccgaagcaaccacgataggatcagacaggaagatctcagaaagctggtgacttacctggctagtgtcccatccgaggacgtgtgtaaacgggggttcacagtgattatcgacatgcgcggctctaagtgggatctcataaaacctcttcttaaaacacttcaggaagcgtttcccgccgagattcatgttgcactgattatcaaaccagacaatttttggcaaaagcaaaaaacaaatttcggtagttccaaattcatcttcgaaacgtctatggtgtcagtggaaggattgaccaaactggtggatccttcccaactcaccgaagagtttgacgggagcctggattataaccacgaagagtggatcgaactgcggcttagcctggaagagttctttaacagcgcagttcacctgctctctaggcttgaagatctacaagagatgctggcaagaaaggaattcccagttgacgtagagggctctcggaggctgattgacgagcacacacagctcaaaaagaaggttttgaaggctcctgtggaagaattagatagagaaggccaacggcttctacaatgcatacgctgcagcgatggattcagcggtcgaaactgtatacctggatccgctgatttccagtctctggtgcccaaaattacctccttactggataaactgcattctacccgccaacacctccatcagatgtggcacgtccgaaagctgaagctggaccagtgttttcagctgcgactgttcgagcaggatgccgagaaaatgtttgattggattagccacaataaggagttgttcctgcagtcacacactgagattggggttagctatcagtacgccctcgacctgcagacccagcataatcatttcgccatgaactcaatgaacgcttatgttaatattaaccgcattatgagcgtggcctctcggttgagcgaggccggccactacgcatcccaacaaatcaagcaaatcagcacccagctggaccaagagtggaagagttttgccgcggccctagatgagcgctcaactattcttgccatgtccgcagtttttcatcagaaagctgaacagttcctgagcggcgtggacgcctggtgcaaaatgtgctctgagggcggcctccccagcgaaatgcaggaccttgaactggctatccaccaccaccagaccctctatgagcaggttacccaggcttataccgaggtgtctcaagacggcaaagcgctgttggacgtcctacagcggccactgtccccgggtaattcagaaagcctgaccgccactgccaactacagtaaagcagtgcatcaagtcctggacgtagtacacgaagtgctgcaccatcagagacggctagagagtatctggcagcacaggaaggtacgactgcaccagcggctccagctgtgtgttttccagcaggatgttcagcaggttctggattggattgagaaccatggagaagcatttctcagtaagcataccggggtcggaaaatcattgcatagagccagggccctccaaaaaagacatgatgattttgaggaggtagcacagaatacgtatacaaacgctgataagctcctagaagcggcagaacagctcgctcagacgggcgagtgtgatccagaagagatctataaggccgctcggcatctcgaagtgcgcatccaagacttcgtacgaagggtggagcagaggaaattattactggatatgagcgtttcatttcatacgcacacgaaagagctctggacctggatggaggatctgcaaaaggagatgctcgaggacgtctgtgcggatagcgtcgatgcagtgcaggaacttattaaacagttccagcaacagcagaccgccacactggacgccactcttaatgtcattaaggaaggcgaggatctcatccagcaattacgctccgctcctccatcactgggagaaccctcggaggctcgggacagcgctgtctccaacaacaagacgccccatagctcaagtatttcccatatagaatccgttttgcagcaattggacgatgcccaggtccaaatggaagagctcttccacgaaagaaagatcaaactggatatcttcctgcagctgcgcatttttgagcagtacacgattgaggtaactgcagagcttgatgcttggaatgaagacctgcttcgacagatgaatgacttcaacactgaggatctaactcttgccgagcagaggctgcagagacacaccgagcgcaagcttgccatgaacaacatgacatttgaggtgatccagcaggggcaggacctccatcagtatatcaccgaagtgcaggcttcgggtatagaacttatttgtgaaaaagacattgatttggcggctcaggtgcaggagctcctggagttccttcatgaaaagcagcacgagctagaactgaatgcagagcaaactcacaagcgtctggagcagtgcctccagctgcggcatcttcaagctgaagtcaaacaagtcctgggttggattcgcaatggggaatcaatgctcaatgccagcctggtgaatgcctctagtctgagtgaagctgagcagctgcagcgggaacacgaacagtttcagcttgctatcgagaagactcatcagtctgctctccaagtccagcagaaggcagaagtgctgctgcaggcgggccattacgacgctgatgcaattcgggagtgcgccgagaaagttgctttacactggcaacagctcatgctgaaaatggaggataggctcaaactggtaaatgcttctgttgcattttataagacttctgagcaggtgtgtagtgtgttggaatcactggaacaggagtatagacgtgacgaagactggtgcggcggccgcgacaagctggggcctgctgcggagattgatcacgtcataccactaataagcaaacaccttgaacaaaaggaagccttcctgaaagcctgtacactggcaaggcgtaacgcagaggtctttctgaaatacatccacaggaacaatgtgtccatgccaagcgtggcatcccacacacgcggaccggaacaacaggtaaaagccatcctgagtgagctgctccaaagagaaaatagggtactgcacttttggacgctgaaaaaacgaaggttagatcagtgccagcaatacgtggtgtttgagcgctccgccaaacaggctctcgactggattcaggaaactggggagttttacctcagcacacacacttctaccggagagactacagaagaaactcaagagctcctcaaggagtacggagagtttcgcgtgcctgccaagcagactaaagaaaaagttaagttgctgatccagctggcagattcatttgtcgagaagggtcatatccatgctacagaaatcaggaaatgggtgacgaccgttgataagcattacagagatttttctctcagaatgggaaaatacagatactcattggagaaagctcttggagtgaacactgaagacaacaaggacttggagctggatatcattcccgcctccctgtctgaccgtgaggtaaagcttagggatgctaatcatgaagtcaatgaagagaaacggaagagcgcaagaaagaaagagtttatcatggctgagctgctgcagactgagaaagcctacgttcgagatttacatgaatgccttgagacttatctttgggagatgaccagcggcgtcgaggagatacccccggggatcctcaataaagagcatattatctttggaaacatccaggaaatatatgatttccacaacaatatcttcctgaaggaactggaaaagtatgagcagctgcccgaggacgtgggacattgttttgtgacatgggccgacaagtttcagatgtacgtcacatactgcaagaacaagccggattcaaaccaattaatccttgagcatgcaggcacattttttgatgaaatccagcagcggcatgggctggctaacagcatcagctcctatctcataaagccagttcagagaataaccaaatatcaactcctgttgaaagaacttctgacatgttgtgaagagggtaagggcgagctgaaagacgggctggaggtgatgctcagcgttccgaagaaagccaatgatgctatgcacgtgtccatgttagaggggtttgacgagaatctggatgtgcagggggaactcatcctccaggacgcatttcaagtatgggatccgaaaagcctcattcggaagggccgggagcggcacctgttcctcttcgaaatctcacttgtgttttccaaggagataaaggactcctccgggcataccaagtacgtgtataaaaacaaattactaacttccgaactcggagtgacggaacacgtcgaaggggacccgtgtaaatttgctctctggagcggaaggactccttcgtcggacaataaaacagtattgaaagccagtaacatcgaaactaaacaggaatggattaagaacatcagagaggtgatacaggaaagaattattcacttgaaaggggcgttgaaagagcccctgcaactgcctaaaaccccagccaagcagaggaataattctaaacgcgacggagtagaggatattgattcccagggtgatggttcatcccagccagataccatttccatcgcgtcgcggacaagccagaataccgtcgatagcgacaaagacggaaacctggtacccaggtggcatctggggcccggcgacccgttctcaacttacgtttag

SEQ ID NO: 302327 - DNA, 6509 bp, Artificial Sequence
  derived and/or modified sequence
gtgtgggaggactggtggctgtctttgcaggcaggcatttgcttagagcaggctgtgtgcgagcccagcgtcaagtgattccggcctcctcgagtcagcggtggtgggatgaggctctgccgaggggactggctgtgaaggatgagttcagggtgggatgacggaccgcttctgggaccagtggtatctctggtatctccgcttgctccggctgctggatcgagggtcttttcggaatgatggtttgaaagcttctgatgtccttcctatcctaaaggaaaaggtggccttcgtgtctgggggtcgtgataagcgaggcggacccatcctgaccttccctgctcgcagcaatcatgacagaataagacaggaagacctgcggaaactcgtgacgtatttggccagcgtgccaagtgaggacgtgtgcaaacgtggcttcactgtcatcatcgacatgcggggctccaagtgggacctcatcaagcccctcctcaaaacgctgcaggaagcctttccagctgagatccatgtggccctcatcattaaacccgacaacttctggcagaaacagaagaccaactttggcagctccaaattcatctttgagacgagcatggtatctgtggagggcctcacaaagctggtggacccctcccagctgacggaggagtttgatggctccctggactacaaccatgaggagtggatcgaactgcggctctccctggaggagttcttcaacagcgccgtgcacctgctctcgcgcctcgaggacctccaggagatgctagcccggaaggagtttcctgtggatgtggagggctctcggcggctcattgacgaacacacacagctcaagaaaaaggtgctgaaggcccctgtggaggagctggaccgggaggggcagcggctgctgcagtgcatccgctgcagcgacggcttctcaggacgcaactgcatcccgggcagtgctgacttccagagcctggtgcccaagatcaccagtctcctggacaagctgcactccacccggcagcacctgcaccagatgtggcatgtgcgcaagctcaagctggaccagtgctttcagctgcggctcttcgagcaggatgctgagaagatgtttgactggataagccacaacaaggagttattcctccagagccacacggagatcggagtcagctaccagtacgcccttgacctccagacgcagcacaatcactttgccatgaactccatgaatgcctatgtcaacatcaaccgcatcatgtccgtggcttcccgcctctctgaggccggtcattatgcctcacaacaaatcaagcagatctccacccagctggaccaggagtggaagagcttcgctgctgccctggatgaacgcagcaccatcctcgccatgtctgctgtgttccaccagaaggctgagcagttcctgtcgggagtggatgcctggtgcaagatgtgcagtgaaggtggtctgccatccgagatgcaagacctagagctggcaatccaccaccaccagaccttgtatgagcaggtgacccaagcctacacagaggtcagccaggatggcaaagcactacttgatgtgctgcagcggcccctgagccctgggaactccgaatccctcacggccacagccaactactccaaggcagtgcaccaggtgctggacgtggtgcatgaggtgttacatcaccagcgacggctggagagcatctggcagcaccgcaaggtgcggctccaccagcggctgcagctctgcgtcttccagcaggatgtacagcaggtgttggactggattgaaaaccatggtgaggcctttctcagcaaacacactggagttgggaagtccctacatcgagcccgggccctgcagaagaggcatgatgactttgaagaggtggctcagaatacgtacaccaatgcggacaagctcctagaagcagcagagcagttggctcagacgggggaatgtgaccccgaggagatctacaaggcagctcgacacctggaggtgcgcatccaagacttcgtgcgcagggtggagcagcggaagcttctcctggacatgtctgtttccttccacacacacaccaaagagttgtggacatggatggaagaccttcagaaggagatgttggaggatgtctgtgcagattctgtggatgcagtccaggaactgatcaagcagttccagcagcagcagaccgccactctagatgccacactcaatgtcatcaaggaaggcgaagaccttatccagcagctcaggtcagcgcctccctccctcggggagcccagcgaggccagggactcggctgtgtccaacaacaaaacaccccacagcagctccatcagccacatcgagtcggtcctgcagcagcttgatgatgcccaggtgcagatggaggagctgttccacgagcggaagatcaagctggacatcttcctgcaactgcgcatctttgagcagtacaccatcgaggtgacagcagagctagacgcctggaatgaagacttgcttcggcagatgaatgacttcaacacagaggacctaaccctggcagaacagcggctgcagcgccacacagaacggaagctagccatgaacaacatgacctttgaggttatccagcagggacaggatctgcaccagtacatcacggaggtccaggcatcaggaattgagttgatctgtgaaaaagacattgatctggcagcccaggtgcaagagttattggaatttctccatgagaagcagcatgaattggagctcaatgcagagcagactcataagcggctagagcagtgcctccaattacgtcacctccaggctgaagtcaaacaggttctgggatggatccgcaatggagagtcaatgctcaacgccagcctggtcaatgccagctctttgtcggaagcagagcagctgcagcgggagcacgagcagttccaactggccatcgagaagacgcaccagagtgccctgcaggtacagcagaaagccgaggtgctgctccaggccggccactacgatgccgatgccatccgggaatgtgctgagaaggtggccctccactggcagcagctcatgctgaagatggaagaccggctaaaattggtcaatgcctctgtggccttttacaaaacttctgaacaggtgtgtagtgtcctggagagcttagagcaagaataccggagagatgaggactggtgtggtggacgagataagctggggccagcagcagagatcgaccatgtcattcccctcatcagcaaacatttggaacaaaaggaggcctttcttaaggcctgcaccctggctcggcggaatgctgaggtgtttctcaagtacatccacaggaacaacgtcagcatgcccagtgtcgccagccacactcggggacccgagcaacaagtgaaagccatcctgagtgagctcctgcagagggagaatcgcgtgctgcatttctggaccttgaagaagcggcggttagaccaatgccagcaatatgtggtgttcgagcgcagcgctaagcaggcgcttgactggatccaagaaacaggtgaattttacctctcaacacatacctccactggagagaccacagaggagactcaggaactgctgaaagaatatggggaattcagggtgcctgccaagcaaacaaaggagaaggtgaagcttctgattcagctggccgatagctttgtggaaaaaggccacattcatgccacggagataaggaaatgggtgaccacggtggacaagcactacagagatttctccctgaggatgggaaagtaccgatactcactggagaaagccctaggagtcaacacagaggataataaggacctggagctggatattatcccagcaagcctttcggatcgggaggtcaagctgcgggacgccaaccacgaagtcaatgaagagaagcggaagtcagcccggaagaaagaatttattatggctgaactactccagacagagaaggcttatgtaagggatttgcatgagtgcttagagacctacctgtgggaaatgaccagtggtgtggaggagatcccccctgggatcctcaataaagagcatatcatctttggcaacatccaagagatctacgatttccataacaacatcttcctcaaagagctggagaagtacgagcaactgcctgaggatgtgggacactgctttgttacctgggcagacaaatttcagatgtatgtcacctactgtaaaaacaagcctgattccaaccagcttatcctggagcatgcgggcaccttctttgatgagatacaacagcggcatggtctggccaactccatctcttcctacctaattaagcctgtccaaaggatcaccaaatatcaactgctcctgaaggaacttttaacttgctgtgaagaagggaaaggggagctcaaggatggcctggaggtgatgctcagtgtcccaaagaaagccaatgatgccatgcatgtcagcatgctggaagggttcgacgagaacctggatgtgcagggggagttgattctccaggatgcctttcaagtgtgggacccgaagtcgctgatccggaaggggcgggagcggcacttgttcctctttgagatctccttggtttttagcaaggagatcaaagattcttcaggacacacgaaatatgtttacaagaacaagctactgacctcagagctgggtgtgaccgagcacgtggagggcgatccctgcaaattcgccttgtggtctgggcgcaccccatcctcagacaataaaacagtgctgaaagcctccaacattgaaaccaagcaggagtggatcaagaacattcgagaagtgattcaagaaaggatcattcacctgaaaggagctttaaaggagccacttcagctccccaaaacaccagccaaacagaggaacaatagtaagagggatggagtggaggatattgacagccagggggatgggagcagccaaccagacaccatctccattgcttctaggacctctcagaacacagtggacagtgacaaggatggcaaccttgttcctcggtggcacctgggacctggagatcctttctccacttacgtttagcgcgcatcctgggacttgtccctgcagctcaccgggttagccgtggcaccgttgggacctcccaccaggactccaatcacccacctctcttgagacttctctggcagggctggtgtggggtgcagcctttgctcagagggcaacatgttccaagcaaaatctccccgcctgggccatgggctcaccctcggggctcccttcttctctactgggtgcaattcgaggttgctgagcttctctccaaagtctaaaatggtggggcagtagggacctgtgagaggcccaatggcccaatgtacttcccccagatcccactcagaacagcaggtacgcccaggctcctgctgccctagaggtctgcaacatgagtgaagaggttaattagagggacacacttatctctgaagtttttctccaggctgaacatttctattatcagtggcccctaatctggaaaaacccatcattctaatctagcttgtatccccacatcatgagaaagagggaagaagaagaagggatgatgtgtggtagagaagatgagggttaactttagcctttcccaaacactggcaacaaccacttcctcaacaatttttctatttgcttcagcctactcagattttttcaggtttttctagctcctccataacctcactccctcccgaggtctctggttcaaagaccaccctaccagcccctatttgcttcaggttatcctgttgagggtgggtgggaagagtgagaagatataaatgaaaaactggccacatgttgataattgttgaaactagatgatggtacgtggacattcattataccattctccccacttctgtatttgtttgcaatttttcataataaaaaagttttaaaagtcctccagtttccaacacactcaagagagagccccaaccccaaacacagagtttcatggaaaccccacaccaaggcaagaggcagagatgatgattccatttcatatatacactcattttctaactttttttaaaggcccactgctttattttcaatagattaaacctgatttctgagaggtcctgaagttgggcttatttccctggctgggttatgggggagggcagggtaaagggatccttaaaaaagtttacacttctatgtatctcacaatcttattgtgaggatgtgacttgttcagtgttctgaacttttcgaaggaatcgtgctctcaatgcaaagtgtcattctctggaattgcacctggctcaggaaaggactgtctttgtacttgaatttaaatccaatggagaactttaacacgggcatttgcatgactgagaattgctgctgtcttttttccgtatgtcactttcttgaatgtgttctaataaaatgattctaaagc

SEQ ID NO: 302328 - DNA, 4965 bp, Artificial Sequence
  derived and/or modified sequence
atgacagaccgcttctgggaccagtggtacctgtggtacctgcggctgctgcggctgctggaccggggcagcttcagaaatgatggcctgaaggccagtgatgtgctgcccatcctgaaggagaaggtggcctttgtgtctgggggccgggacaagaggggcggccccatcctgaccttccctgcccggagcaaccacgaccgcatccggcaggaggacctgaggaagctggtgacctacctggcctctgtgcccagtgaagatgtgtgcaagaggggcttcaccgtcatcatcgacatgaggggcagcaagtgggacctgatcaagcccctgctgaagaccctgcaggaggccttccctgctgagatccacgtggccctgatcatcaagccagacaacttctggcagaagcagaagaccaactttggcagcagcaagttcatctttgagacctccatggtgtctgtggagggcctgaccaagctggtggaccccagccagctgacagaggagtttgatggcagcctggactacaaccacgaggagtggattgagctgcggctgagcctggaggagttcttcaacagcgctgtgcacctgctgagccggctggaggacctgcaggagatgctggccaggaaggagttccctgtggatgtggagggcagccggcggctgattgatgagcacacccagctgaagaagaaggtgctgaaggcccctgtggaggagctggaccgggagggccagaggctgctgcagtgcatccgctgcagtgatggcttctctggaagaaactgcatccctggcagcgctgacttccagagcctggtgcccaagatcaccagcctgctggacaagctgcacagcacccggcagcacctgcaccagatgtggcacgtgaggaagctgaagctggaccagtgcttccagctgcggctgtttgagcaggatgctgagaagatgtttgactggatcagccacaacaaggagctgttcctgcagagccacacagaaattggagtgtcctaccagtatgccctggacctgcagacccagcacaaccactttgccatgaacagcatgaatgcctacgtgaacatcaaccgcatcatgtctgtggccagccggctgtctgaggccggccactacgccagccagcagatcaagcagatcagcacccagctggaccaggagtggaagagctttgctgctgccctggatgagaggagcaccatcctggccatgtctgctgtgttccaccagaaggccgagcagttcctgtctggagtggatgcctggtgcaagatgtgcagcgagggcggcctgcccagcgagatgcaggacctggagctggccatccaccaccaccagaccctgtatgagcaggtgacccaggcctacacagaggtgtcccaggacggcaaggccctgctggatgtgctgcagaggcccctgagccctggcaacagcgagagcctgacagccacagccaactacagcaaggctgtgcaccaggtgctggatgtggtgcatgaggtgctgcaccaccagaggcggctggagagcatctggcagcacaggaaggtgcggctgcaccagaggctgcagctgtgtgtgttccagcaggatgtgcagcaggtgctggactggattgaaaatcatggagaggccttcctgagcaagcacactggagtgggcaagagcctgcaccgggcccgggccctgcagaagagacatgatgactttgaggaggtggcccagaacacctacaccaatgctgacaagctgctggaggccgctgagcagctggcccagacaggagaatgtgaccctgaggagatctacaaggccgcccggcacctggaggtgcgcatccaggactttgtgagaagagtggagcagaggaagctgctgctggacatgtctgtgtccttccacacccacaccaaggagctgtggacctggatggaggacctgcagaaggagatgctggaggatgtgtgtgccgacagcgtggatgctgtgcaggagctgatcaagcagttccagcagcagcagacagccaccctggatgccaccctgaatgtcatcaaggagggggaggacctgatccagcagctgcggagcgccccacccagcctgggggagcccagcgaggcccgggacagcgctgtgagcaacaacaagaccccccacagcagcagcatcagccacatcgagagcgtgctgcagcagctggatgatgcccaggtgcagatggaggagctgttccacgagaggaagatcaagctggacatcttcctgcagctgcgcatctttgagcagtacaccatcgaggtgacagctgagctggatgcctggaatgaagacctgctgcggcagatgaatgacttcaacacagaggacctgaccctggccgagcagaggctgcagaggcacacagagaggaagctggccatgaacaacatgacctttgaggtgatccagcagggccaggacctgcaccagtacatcacagaggtgcaggccagcggcatcgagctgatctgtgagaaggacatcgacctggccgcccaggtgcaggagctgctggagttcctgcacgagaagcagcacgagctggagctgaatgctgagcagacccacaagaggctggagcagtgcctgcagctgcggcacctgcaggccgaggtgaagcaggtgctgggctggatcagaaatggagagagcatgctgaatgccagcctggtgaatgccagcagcctgtctgaggccgagcagctgcagcgggagcacgagcagttccagctggccatcgagaagacccaccagagcgccctgcaggtgcagcagaaggccgaggtgctgctgcaggccggccactatgatgctgatgccatccgggagtgtgccgagaaggtggccctgcactggcagcagctgatgctgaagatggaggaccggctgaagctggtgaatgcctctgtggccttctacaagaccagcgagcaggtgtgcagcgtgctggagagcctggagcaggagtacagaagagatgaggactggtgtggcggccgggacaagctgggccctgctgctgagattgaccacgtgatccccctcatcagcaagcacctggagcagaaggaggccttcctgaaggcctgcaccctggccaggagaaatgctgaggtgttcctgaagtacatccacagaaataatgtgtccatgcccagcgtggccagccacacccggggccctgagcagcaggtgaaggccatcctgtctgagctgctgcagagagaaaatagagtgctgcacttctggaccctgaagaagaggcggctggaccagtgccagcagtatgtggtgtttgagaggtctgccaagcaggccctggactggatccaggagaccggggagttctacctgagcacccacaccagcactggagagaccacagaggagacccaggagctgctgaaggagtatggagagttccgggtgcctgccaagcagaccaaggagaaggtgaagctgctgatccagctggccgacagctttgtggagaagggccacatccacgccacagagatcaggaagtgggtgaccaccgtggacaagcactacagagacttcagcctgaggatgggcaagtaccgctacagcctggagaaggccctgggcgtgaacacagaggacaacaaggacctggagctggacatcatcccagccagcctgagtgaccgggaggtgaagctgagagatgccaaccacgaggtgaatgaggagaagaggaagagcgccaggaagaaggagttcatcatggccgagctgctgcagacagagaaggcctacgtgcgggacctgcatgaatgtctggagacctacctgtgggagatgaccagcggcgtggaggagatccccccaggcatcctgaacaaggagcacatcatctttggaaacatccaggagatctatgacttccacaacaacatcttcctgaaggagctggagaagtatgagcagctgcctgaagatgtgggccactgctttgtgacctgggccgacaagttccagatgtatgtgacctactgcaagaacaagccagacagcaaccagctgatcctggagcacgccggcaccttctttgatgagatccagcagagacatggcctggccaacagcatcagcagctacctgatcaagcctgtgcagaggatcaccaagtaccagctgctgctgaaggagctgctgacctgctgtgaggagggcaaaggagagctgaaggatggcctggaggtgatgctgtctgtgcccaagaaggccaatgatgccatgcacgtgtccatgctggagggctttgatgagaacctggatgtgcagggcgagctgatcctgcaggatgccttccaggtgtgggaccccaagagcctcatcaggaagggccgggagcggcacctgttcctgtttgagatcagcctggtgttcagcaaggagatcaaggacagcagcggccacaccaagtatgtgtacaagaacaagctgctgaccagcgagctgggcgtgacagaacatgtggagggggacccctgcaagtttgccctgtggagcggccgcacccccagcagtgacaacaagacagtgctgaaggccagcaacatcgagaccaagcaggagtggatcaagaacatccgggaggtgatccaggagcgcatcatccacctgaagggggccctgaaggagcccctgcagctgcccaagaccccagccaagcagaggaacaacagcaagagagatggagtggaggacatcgacagccagggagatggcagcagccagcctgacaccatcagcatcgccagcaggaccagccagaacacagtggacagcgacaaggatggcaacctggtgccccgctggcacctgggccctggggaccccttcagcacctacgtgtag

SEQ ID NO: 302329 - DNA, 4965 bp, Artificial Sequence
  derived and/or modified sequence
atgaccgaccggttctgggaccagtggtacctgtggtacctgcggttactgaggctgctcgaccgcggcagttttagaaatgatggactgaaggcaagcgatgtgctccccattttaaaggagaaggtggccttcgtctcgggcgggcgcgacaaaaggggcggtcctatactgaccttccctgctcgctctaaccatgacaggattcggcaggaggatcttaggaagctcgtgacatacctcgcaagtgtgccatctgaagacgtctgtaagagagggttcacagtcattattgacatgcgcgggagcaaatgggatctgatcaagcccctgttgaagaccctgcaagaggcttttcccgctgagattcatgtagcgttgattatcaaaccagacaacttttggcagaaacagaagactaattttggaagctcaaagtttatttttgaaactagtatggtttccgtggagggactcaccaagctcgtcgacccatcccagctgacggaggagttcgacggatcactggactataaccatgaagagtggatagagctgcggttatccctggaagagttctttaattccgccgtccatctcctgagccggctggaagatctacaagagatgctcgcgcgtaaggagttcccagtggatgtggagggatcccggcgtctgattgatgaacacacccagctgaaaaagaaggtgttaaaggcccctgtggaggagctagaccgggaaggacaaagacttctccaatgtatccggtgctctgatggcttttctggccgcaactgtatccctggatcagctgactttcagtctctcgtccctaagattactagtctcctggataagttacattcaactagacaacacttgcaccagatgtggcacgtgcgtaagctaaagctggatcagtgttttcagttacggctgtttgagcaggatgcagagaagatgttcgactggatctcccacaacaaggagctgtttttgcagtctcacactgagatcggagtgtcataccagtatgccctagacctccagacccagcataaccacttcgccatgaacagcatgaatgcctatgtcaatataaatcggatcatgtcagtggcttctagattaagcgaagctggtcattacgctagccagcagatcaagcaaatttctacccagctcgaccaggaatggaaatctttcgccgccgcattagacgagagatcaaccatcctcgccatgtccgcggtctttcaccaaaaggcagaacaatttctaagcggcgtcgacgcctggtgtaaaatgtgctctgagggagggttgccatcagaaatgcaggaccttgagcttgctatccaccaccaccaaacactgtacgaacaggtaacccaggcctataccgaggtcagccaggacgggaaagctctgctcgacgtgttacaaaggcccttgagtccaggcaattctgagtctcttaccgccacggccaactattcgaaggcagtacaccaggtgttagacgtggttcacgaagtgctgcaccaccagcgtcgcctggagagtatatggcaacaccgaaaggttcgcttacatcagcgattgcagttgtgcgtgtttcagcaggacgtgcagcaggtactggattggatcgaaaatcatggagaggcgtttctcagtaaacatacaggagtgggcaagagtctccatcgggcgcgcgccctacagaagcgccatgatgatttcgaagaagtcgcccaaaacacctacactaatgccgataaactcttggaagctgccgagcaattagctcagacaggagagtgtgacccggaggaaatttacaaagcagcccgacaccttgaagttcgtatccaggactttgtcagaagagtggagcagagaaagttactcttggatatgtcggttagctttcacacacatacaaaagaactgtggacgtggatggaggatctacagaaggaaatgttagaagatgtttgcgccgactctgtggacgcagtccaagagctgattaagcagttccagcagcaacagactgcaacactggatgccaccctcaacgtgattaaggaaggtgaggatctgatccagcaactcaggtccgcaccacccagcctcggtgagccttccgaggctcgggactccgccgtgagcaataacaaaaccccccactcttcaagcatttctcatattgaatcagtgctgcagcagctcgacgacgctcaagtccagatggaagaactctttcatgagagaaagatcaagctggacattttcctacagctcaggattttcgagcagtatacaatcgaagttactgctgaacttgatgcttggaatgaagatcttttaaggcaaatgaacgattttaatactgaggatctcaccttggcggaacagcgtctgcaaaggcacaccgaaagaaaattagccatgaacaacatgactttcgaggtcatccagcagggtcaggatctgcatcagtacataacagaagtgcaggccagtggaattgaactcatctgcgagaaggatatcgaccttgccgcccaagtacaggagctgctagagttcttgcacgagaaacaacacgagcttgagcttaacgcggagcaaacccacaagaggctcgaacagtgcctccaactgcggcacctgcaagccgaagtgaagcaggttctgggctggatacgcaatggcgaaagtatgctgaatgcttcattggtgaacgccagtagcctaagcgaagcggagcaattgcaacgtgagcacgaacaatttcaattggctattgagaagacccaccaaagcgcgctgcaggtccaacaaaaggctgaagtgctgctgcaggccggtcattacgacgccgacgccatccgggagtgtgcagagaaagtggcactgcactggcaacagctgatgttgaagatggaagaccgcctaaagctggttaatgctagcgtggcattctacaaaacaagcgagcaggtttgttccgtcctggagtcgcttgagcaggagtacaggcgcgacgaggactggtgtggtggtcgcgataaactgggccccgctgccgagattgatcacgtgatccctctgatctccaagcatcttgaacagaaggaggcctttctgaaggcgtgtactctggccagaagaaatgctgaagtattcttaaaatatattcatcgtaacaacgtttccatgccatctgttgccagccacacacgaggccctgaacagcaggttaaggcaatactgtccgagctgctacagcgagaaaaccgagtactccatttttggacattgaagaaacgccggctggatcagtgtcagcagtacgtcgtgttcgaacgcagcgccaagcaggccttggactggatccaggagacgggggaattctacctgagtacccacactagcactggagaaaccactgaggaaacacaggaactgctgaaagaatacggggagtttcgcgtgcctgcgaaacagacaaaggagaaagtgaaacttttgatccagctggccgattccttcgtcgaaaaggggcatatccacgcaaccgagatcaggaagtgggtcaccaccgtagataagcattatagagacttctccctgaggatgggcaagtacaggtactctctcgaaaaagcactgggcgttaacacagaagacaacaaggacttagagctggacataattccagccagcctcagcgaccgcgaggtcaagctccgggacgcgaatcacgaagtcaacgaggaaaagaggaagtcagcccgtaaaaaggagtttatcatggcggagctgctccagaccgagaaagcttatgtgagggacctacatgagtgtctcgagacttacctctgggagatgaccagcggagtcgaagaaattcccccggggatcctgaacaaggagcacataatattcggaaacattcaggagatctacgactttcacaataacatttttctaaaggagttggaaaagtacgagcaactacctgaggacgtaggccactgctttgtgacttgggccgataaattccaaatgtatgtgacctattgtaaaaacaagccagattctaatcagctgatcctcgagcatgctgggacttttttcgacgagatccaacagagacacggcctggctaacagtatttctagttaccttatcaagccagttcaacgcattaccaagtaccagctcctcttgaaagagcttctcacctgctgcgaggaggggaagggagagctgaaagatgggctcgaagtcatgctaagtgtgcctaagaaggcaaatgatgcaatgcatgtgagcatgttggagggatttgatgagaacttagacgtgcagggagagcttatcctacaggacgcttttcaagtctgggacccaaaaagtttgatccggaaaggtcgagagcggcatctatttctgttcgagatttcactggtgttttctaaagagatcaaggattcctccggacataccaagtatgtttataagaacaagctgttaacatcagagctcggagtgacggagcacgtggagggggacccctgtaaattcgcgctgtggtccgggagaaccccgtcctccgacaacaaaaccgtactgaaggcctccaatattgagaccaagcaggagtggattaagaatatccgagaggtcatacaagaaagaattattcatctgaaaggggccctgaaagagcccttgcaactccccaaaacccctgccaagcagcgcaacaacagcaagcgggatggcgtggaggacatcgactctcaaggggacggatccagccagcccgataccatcagtatcgcaagcaggacctcccagaacaccgtcgacagtgataaggatggcaatctagtgccaagatggcacctggggcccggcgaccccttttccacttatgtgtag

SEQ ID NO: 302330 - DNA, 4964 bp, Artificial Sequence
  derived and/or modified sequence
atgacagaccgattctgggatcagtggtatctgtggtatctgaggcttctgagactgcttgacagggggagtttccgcaatgatggcttgaaggcatccgacgtgcttcccattttgaaagagaaggtcgccttcgtgagcgggggtcgagataagagaggagggcctattctcacatttcctgcgaggagcaatcacgataggatccgccaggaagatttgcgcaaactggtgacttatcttgcctccgtcccatcggaggacgtgtgcaaaaggggctttaccgtgattattgatatgcggggaagcaagtgggacctgatcaaaccactcctgaaaactttacaggaggcttttcccgcagaaatccatgtggctctgatcataaagcccgacaacttctggcagaaacagaaaactaacttcgggtcatctaagtttatctttgaaactagcatggtctccgttgaaggactgacgaagcttgtcgatccaagtcaattgacagaggagtttgacggctccctggactataatcacgaggaatggattgagctgcgactgagcctagaagagttctttaactccgctgtgcacttgctgtcgaggctggaggacctgcaagaaatgctagctcggaaagaattccctgttgatgttgagggatctcgccgtctaattgatgaacacacccagctaaaaaagaaggtcctgaaggcccctgtagaggagctcgacagggaggggcagagacttcttcaatgtattcgatgctccgatggattttcggggaggaactgcatccctgggtctgccgactttcagtccctggtcccgaaaatcacctccctgcttgacaaactgcattccactcgccaacatctccatcagatgtggcacgtgcggaagctcaagcttgatcagtgcttccagcttaggttgtttgagcaggatgccgagaagatgttcgactggatttctcataataaggagctgtttctacagtcacacactgaaatcggcgtctcctatcaatacgccctcgacctccagacacagcataaccatttcgcgatgaatagcatgaatgcctacgtgaatattaatcgcattatgtctgtggcaagccggctgtctgaggccggtcattatgcctcccagcagatcaaacagatatccacacaactggatcaagaatggaagtcattcgctgctgctctggacgagcggtcaacaatcctggcaatgagtgcggtatttcaccagaaggctgagcagtttctgtctggcgtcgatgcatggtgcaaaatgtgcagtgaggggggactgcccagtgagatgcaggatctggagctcgctatccatcatcaccagaccctctatgaacaggtcactcaggcatacaccgaagtatcccaggacggaaaagcactcctggatgtgctccagaggcccctctccccaggcaactcagaaagcttgactgctaccgctaactacagcaaggcggtgcaccaggttctggacgtggttcacgaggtcctgcaccaccaacggcgattggagagcatctggcagcacaggaaagtgcggcttcatcagagactacagctgtgcgtgttccagcaagacgtgcaacaggtgcttgattggatcgagaaccatggagaggcctttttgagtaagcatactggcgtgggaaaaagcctgcatcgtgcccgtgccctgcagaagaggcatgatgactttgaagaagtcgcacagaatacctacaccaatgctgacaaactcctggaagccgcagaacagctcgcccaaactggggagtgtgacccagaagagatatataaggccgcaagacacctggaggttaggattcaggactttgtcagacgagtggagcagaggaagcttctgctggatatgtcggtaagctttcacacacataccaaggagctgtggacatggatggaagacttgcagaaagagatgctggaggatgtgtgcgctgacagcgtagatgctgtgcaagagctgataaaacagttccaacagcaacagaccgcaacactggacgctaccctaaacgttataaaggaaggggaagaccttatccagcagctgagatccgctccgccaagcctgggggaacccagtgaggcacgggacagtgccgttagtaataataagacaccacactcatccagcatctcccatattgaatccgttttacagcagctggatgacgcccaggttcagatggaagaactattccatgagcgcaagattaaattagacatttttctgcagctgcggatcttcgaacagtataccatagaggtcacggccgaactagacgcttggaatgaggatctcctgcggcaaatgaatgatttcaatactgaagaccttacattagctgaacagaggcttcagcgacacactgagcgcaaactggcaatgaacaacatgacatttgaagttatccagcagggccaagacctgcatcagtatataactgaggtacaggcctctgggatcgagctcatctgcgaaaaggatatagatcttgcagcacaggtccaggagctgctcgagttcttgcatgaaaaacagcatgagctcgaactgaatgctgagcagactcacaaacggctagagcaatgcctgcagctcaggcatctccaagctgaggttaagcaggttctagggtggattaggaacggcgagagcatgctgaacgcttctctggtgaacgctagttccctatccgaggccgaacaactgcaaagggaacatgagcagttccagctggccatcgagaaaactcaccagtccgccctgcaggtgcagcagaaggccgaggtgctgctgcaggccggtcactacgatgccgacgctatcagagaatgtgccgagaaggttgcactgcactggcagcaacttatgcttaaaatggaggacaggctaaagctggtgaacgcatccgtggctttttacaagacaagtgaacaggtctgtagcgtgctcgagagcttggagcaggagtaccggagagatgaagactggtgtggcggacgcgataaactcggcccagctgcagagatagatcatgtcattccactcattagcaaacacctggagcaaaaagaagcgttcttgaaggcttgcaccctcgcaagacgaaatgcggaagtttttttgaaatacatccaccgcaataatgtgtccatgccttcggtggcctctcacacccggggtcctgagcagcaggtgaaagccatcttatctgaactgctgcaaagggagaatcgtgtgcttcacttttggaccttgaagaagcgaagacttgaccagtgccagcagtacgtggtcttcgaacggtctgcaaagcaagctctggactggatacaggaaaccggtgagttttacctgagtacgcacacatcaacaggagagaccactgaagagacacaggagctgctcaaggagtacggagaatttcgggtcccagctaaacagactaaagaaaaagtgaagctgcttatccagcttgccgactcgttcgtggagaaagggcatatacatgctactgagattcgcaaatgggtgacgactgtggacaagcactacagagatttctccctaaggatgggaaaatatcgctatagcctggagaaggccctgggggtgaacaccgaagacaacaaggacctagagcttgacatcatcccagcgtccctcagcgaccgagaagtaaaactgagggacgcaaatcatgaagttaacgaggaaaagcgcaaatctgccagaaagaaagaatttattatggcagaactgctgcaaacagagaaagcctacgttagggatctccatgagtgtctggagacctatctttgggagatgacgtccggcgtggaagaaattccacctggaatcctcaataaggagcacatcatctttggtaatatccaggagatatatgacttccacaacaacattttcctcaaagaactggagaagtacgagcagctccccgaggacgtcgggcactgctttgtgacctgggctgacaagttccagatgtacgtcacgtattgcaagaacaagcccgattccaatcagctgatcctggaacatgcaggaacattttttgatgagattcagcagagacatggactagctaactctattagcagttacctcattaaaccggtccagcgtatcacaaagtaccaactgctgctcaaggagctcctgacatgttgcgaggaaggaaagggagaactaaaagatgggctcgaggtgatgctctccgtaccaaaaaaagccaacgatgccatgcacgtaagcatgctggagggatttgacgagaaccttgatgtgcagggtgaacttatcttgcaggacgccttccaggtgtgggaccccaagagcttgataagaaaaggtagggagaggcatctgtttctgtttgagatctcccttgtgtttagcaaggaaatcaaggactcctccgggcacacaaaatatgtatataaaaataaactgcttacctcagagctgggggtgactgagcacgtggaaggagatccctgtaagttcgccctgtggagcgggagaacaccatcctctgataacaagacagtcttgaaggcctccaatatcgaaacaaaacaggaatggatcaagaatattagggaagtcattcaagagaggataatccacctgaaaggcgcactgaaagagcccttgcaattgcccaagacaccggcaaagcaaagaaataattctaagcgcgacggcgtggaggatatcgacagccagggagacgggagttcgcagccagacactatctctattgcctctcgaacctcccaaaataccgttgattcagacaaggacgggaatctggtaccacgatggcacctggggccaggagacccctttagcacttatgtcta

SEQ ID NO: 302331 - DNA, 4965 bp, Artificial Sequence
  derived and/or modified sequence
atgaccgacagattctgggaccagtggtacctgtggtacctgagactgctgagactgctggacagaggcagcttcagaaacgacggcctgaaggccagcgacgtgctgcccatcctgaaggagaaggtggccttcgtgagcggcggcagagacaagagaggcggccccatcctgaccttccccgccagaagcaaccacgacagaatcagacaggaggacctgagaaagctggtgacctacctggccagcgtgcccagcgaggacgtgtgcaagagaggcttcaccgtgatcatcgacatgagaggcagcaagtgggacctgatcaagcccctgctgaagaccctgcaggaggccttccccgccgagatccacgtggccctgatcatcaagcccgacaacttctggcagaagcagaagaccaacttcggcagcagcaagttcatcttcgagaccagcatggtgagcgtggagggcctgaccaagctggtggaccccagccagctgaccgaggagttcgacggcagcctggactacaaccacgaggagtggatcgagctgagactgagcctggaggagttcttcaacagcgccgtgcacctgctgagcagactggaggacctgcaggagatgctggccagaaaggagttccccgtggacgtggagggcagcagaagactgatcgacgagcacacccagctgaagaagaaggtgctgaaggcccccgtggaggagctggacagagagggccagagactgctgcagtgcatcagatgcagcgacggcttcagcggcagaaactgcatccccggcagcgccgacttccagagcctggtgcccaagatcaccagcctgctggacaagctgcacagcaccagacagcacctgcaccagatgtggcacgtgagaaagctgaagctggaccagtgcttccagctgagactgttcgagcaggacgccgagaagatgttcgactggatcagccacaacaaggagctgttcctgcagagccacaccgagatcggcgtgagctaccagtacgccctggacctgcagacccagcacaaccacttcgccatgaacagcatgaacgcctacgtgaacatcaacagaatcatgagcgtggccagcagactgagcgaggccggccactacgccagccagcagatcaagcagatcagcacccagctggaccaggagtggaagagcttcgccgccgccctggacgagagaagcaccatcctggccatgagcgccgtgttccaccagaaggccgagcagttcctgagcggcgtggacgcctggtgcaagatgtgcagcgagggcggcctgcccagcgagatgcaggacctggagctggccatccaccaccaccagaccctgtacgagcaggtgacccaggcctacaccgaggtgagccaggacggcaaggccctgctggacgtgctgcagagacccctgagccccggcaacagcgagagcctgaccgccaccgccaactacagcaaggccgtgcaccaggtgctggacgtggtgcacgaggtgctgcaccaccagagaagactggagagcatctggcagcacagaaaggtgagactgcaccagagactgcagctgtgcgtgttccagcaggacgtgcagcaggtgctggactggatcgagaaccacggcgaggccttcctgagcaagcacaccggcgtgggcaagagcctgcacagagccagagccctgcagaagagacacgacgacttcgaggaggtggcccagaacacctacaccaacgccgacaagctgctggaggccgccgagcagctggcccagaccggcgagtgcgaccccgaggagatctacaaggccgccagacacctggaggtgagaatccaggacttcgtgagaagagtggagcagagaaagctgctgctggacatgagcgtgagcttccacacccacaccaaggagctgtggacctggatggaggacctgcagaaggagatgctggaggacgtgtgcgccgacagcgtggacgccgtgcaggagctgatcaagcagttccagcagcagcagaccgccaccctggacgccaccctgaacgtgatcaaggagggcgaggacctgatccagcagctgagaagcgccccccccagcctgggcgagcccagcgaggccagagacagcgccgtgagcaacaacaagaccccccacagcagcagcatcagccacatcgagagcgtgctgcagcagctggacgacgcccaggtgcagatggaggagctgttccacgagagaaagatcaagctggacatcttcctgcagctgagaatcttcgagcagtacaccatcgaggtgaccgccgagctggacgcctggaacgaggacctgctgagacagatgaacgacttcaacaccgaggacctgaccctggccgagcagagactgcagagacacaccgagagaaagctggccatgaacaacatgaccttcgaggtgatccagcagggccaggacctgcaccagtacatcaccgaggtgcaggccagcggcatcgagctgatctgcgagaaggacatcgacctggccgcccaggtgcaggagctgctggagttcctgcacgagaagcagcacgagctggagctgaacgccgagcagacccacaagagactggagcagtgcctgcagctgagacacctgcaggccgaggtgaagcaggtgctgggctggatcagaaacggcgagagcatgctgaacgccagcctggtgaacgccagcagcctgagcgaggccgagcagctgcagagagagcacgagcagttccagctggccatcgagaagacccaccagagcgccctgcaggtgcagcagaaggccgaggtgctgctgcaggccggccactacgacgccgacgccatcagagagtgcgccgagaaggtggccctgcactggcagcagctgatgctgaagatggaggacagactgaagctggtgaacgccagcgtggccttctacaagaccagcgagcaggtgtgcagcgtgctggagagcctggagcaggagtacagaagagacgaggactggtgcggcggcagagacaagctgggccccgccgccgagatcgaccacgtgatccccctgatcagcaagcacctggagcagaaggaggccttcctgaaggcctgcaccctggccagaagaaacgccgaggtgttcctgaagtacatccacagaaacaacgtgagcatgcccagcgtggccagccacaccagaggccccgagcagcaggtgaaggccatcctgagcgagctgctgcagagagagaacagagtgctgcacttctggaccctgaagaagagaagactggaccagtgccagcagtacgtggtgttcgagagaagcgccaagcaggccctggactggatccaggagaccggcgagttctacctgagcacccacaccagcaccggcgagaccaccgaggagacccaggagctgctgaaggagtacggcgagttcagagtgcccgccaagcagaccaaggagaaggtgaagctgctgatccagctggccgacagcttcgtggagaagggccacatccacgccaccgagatcagaaagtgggtgaccaccgtggacaagcactacagagacttcagcctgagaatgggcaagtacagatacagcctggagaaggccctgggcgtgaacaccgaggacaacaaggacctggagctggacatcatccccgccagcctgagcgacagagaggtgaagctgagagacgccaaccacgaggtgaacgaggagaagagaaagagcgccagaaagaaggagttcatcatggccgagctgctgcagaccgagaaggcctacgtgagagacctgcacgagtgcctggagacctacctgtgggagatgaccagcggcgtggaggagatcccccccggcatcctgaacaaggagcacatcatcttcggcaacatccaggagatctacgacttccacaacaacatcttcctgaaggagctggagaagtacgagcagctgcccgaggacgtgggccactgcttcgtgacctgggccgacaagttccagatgtacgtgacctactgcaagaacaagcccgacagcaaccagctgatcctggagcacgccggcaccttcttcgacgagatccagcagagacacggcctggccaacagcatcagcagctacctgatcaagcccgtgcagagaatcaccaagtaccagctgctgctgaaggagctgctgacctgctgcgaggagggcaagggcgagctgaaggacggcctggaggtgatgctgagcgtgcccaagaaggccaacgacgccatgcacgtgagcatgctggagggcttcgacgagaacctggacgtgcagggcgagctgatcctgcaggacgccttccaggtgtgggaccccaagagcctgatcagaaagggcagagagagacacctgttcctgttcgagatcagcctggtgttcagcaaggagatcaaggacagcagcggccacaccaagtacgtgtacaagaacaagctgctgaccagcgagctgggcgtgaccgagcacgtggagggcgacccctgcaagttcgccctgtggagcggcagaacccccagcagcgacaacaagaccgtgctgaaggccagcaacatcgagaccaagcaggagtggatcaagaacatcagagaggtgatccaggagagaatcatccacctgaagggcgccctgaaggagcccctgcagctgcccaagacccccgccaagcagagaaacaacagcaagagagacggcgtggaggacatcgacagccagggcgacggcagcagccagcccgacaccatcagcatcgccagcagaaccagccagaacaccgtggacagcgacaaggacggcaacctggtgcccagatggcacctgggccccggcgaccccttcagcacctacgtgtag

SEQ ID NO: 302332 - protein, 1114 aa, Artificial Sequence
  derived and/or modified sequence
MLRGTMTAWRGMRPEVTLACLLLATAGCFADLNEVPQVTVQPASTVQKPGGTVILGCVVEPPRMNVTWRLNGKELNGSDDALGVLITHGTLVITALNNHTVGRYQCVARMPAGAVASVPATVTLANLQDFKLDVQHVIEVDEGNTAVIACHLPESHPKAQVRYSVKQEWLEASRGNYLIMPSGNLQIVNASQEDEGMYKCAAYNPVTQEVKTSGSSDRLRVRRSTAEAARIIYPPEAQTIIVTKGQSLILECVASGIPPPRVTWAKDGSSVTGYNKTRFLLSNLLIDTTSEEDSGTYRCMADNGVGQPGAAVILYNVQVFEPPEVTMELSQLVIPWGQSAKLTCEVRGNPPPSVLWLRNAVPLISSQRLRLSRRALRVLSMGPEDEGVYQCMAENEVGSAHAVVQLRTSRPSITPRLWQDAELATGTPPVSPSKLGNPEQMLRGQPALPRPPTSVGPASPQCPGEKGQGAPAEAPIILSSPRTSKTDSYELVWRPRHEGSGRAPILYYVVKHRKVTNSSDDWTISGIPANQHRLTLTRLDPGSLYEVEMAAYNCAGEGQTAMVTFRTGRRPKPEIMASKEQQIQRDDPGASPQSSSQPDHGRLSPPEAPDRPTISTASETSVYVTWIPRGNGGFPIQSFRVEYKKLKKVGDWILATSAIPPSRLSVEITGLEKGTSYKFRVRALNMLGESEPSAPSRPYVVSGYSGRVYERPVAGPYITFTDAVNETTIMLKWMYIPASNNNTPIHGFYIYYRPTDSDNDSDYKKDMVEGDKYWHSISHLQPETSYDIKMQCFNEGGESEFSNVMICETKARKSSGQPGRLPPPTLAPPQPPLPETIERPVGTGAMVARSSDLPYLIVGVVLGSIVLIIVTFIPFCLWRAWSKQKHTTDLGFPRSALPPSCPYTMVPLGGLPGHQASGQPYLSGISGRACANGIHMNRGCPSAAVGYPGMKPQQHCPGELQQQSDTSSLLRQTHLGNGYDPQSHQITRGPKSSPDEGSFLYTLPDDSTHQLLQPHHDCCQRQEQPAAVGQSGVRRAPDSPVLEAVWDPPFHSGPPCCLGLVPVEEVDSPDSCQVSGGDWCPQHPVGAYVGQEPGMQLSPGPLVRVSFETPPLTI

SEQ ID NO: 302333 - DNA, 3345 bp, Artificial Sequence
  derived and/or modified sequence
atgctgagaggcaccatgaccgcctggagaggcatgagacccgaggtgaccctggcctgcctgctgctggccaccgccggctgcttcgccgacctgaacgaggtgccccaggtgaccgtgcagcccgccagcaccgtgcagaagcccggcggcaccgtgatcctgggctgcgtggtggagccccccagaatgaacgtgacctggagactgaacggcaaggagctgaacggcagcgacgacgccctgggcgtgctgatcacccacggcaccctggtgatcaccgccctgaacaaccacaccgtgggcagataccagtgcgtggccagaatgcccgccggcgccgtggccagcgtgcccgccaccgtgaccctggccaacctgcaggacttcaagctggacgtgcagcacgtgatcgaggtggacgagggcaacaccgccgtgatcgcctgccacctgcccgagagccaccccaaggcccaggtgagatacagcgtgaagcaggagtggctggaggccagcagaggcaactacctgatcatgcccagcggcaacctgcagatcgtgaacgccagccaggaggacgagggcatgtacaagtgcgccgcctacaaccccgtgacccaggaggtgaagaccagcggcagcagcgacagactgagagtgagaagaagcaccgccgaggccgccagaatcatctacccccccgaggcccagaccatcatcgtgaccaagggccagagcctgatcctggagtgcgtggccagcggcatccccccccccagagtgacctgggccaaggacggcagcagcgtgaccggctacaacaagaccagattcctgctgagcaacctgctgatcgacaccaccagcgaggaggacagcggcacctacagatgcatggccgacaacggcgtgggccagcccggcgccgccgtgatcctgtacaacgtgcaggtgttcgagccccccgaggtgaccatggagctgagccagctggtgatcccctggggccagagcgccaagctgacctgcgaggtgagaggcaaccccccccccagcgtgctgtggctgagaaacgccgtgcccctgatcagcagccagagactgagactgagcagaagagccctgagagtgctgagcatgggccccgaggacgagggcgtgtaccagtgcatggccgagaacgaggtgggcagcgcccacgccgtggtgcagctgagaaccagcagacccagcatcacccccagactgtggcaggacgccgagctggccaccggcaccccccccgtgagccccagcaagctgggcaaccccgagcagatgctgagaggccagcccgccctgcccagaccccccaccagcgtgggccccgccagcccccagtgccccggcgagaagggccagggcgcccccgccgaggcccccatcatcctgagcagccccagaaccagcaagaccgacagctacgagctggtgtggagacccagacacgagggcagcggcagagcccccatcctgtactacgtggtgaagcacagaaaggtgaccaacagcagcgacgactggaccatcagcggcatccccgccaaccagcacagactgaccctgaccagactggaccccggcagcctgtacgaggtggagatggccgcctacaactgcgccggcgagggccagaccgccatggtgaccttcagaaccggcagaagacccaagcccgagatcatggccagcaaggagcagcagatccagagagacgaccccggcgccagcccccagagcagcagccagcccgaccacggcagactgagcccccccgaggcccccgacagacccaccatcagcaccgccagcgagaccagcgtgtacgtgacctggatccccagaggcaacggcggcttccccatccagagcttcagagtggagtacaagaagctgaagaaggtgggcgactggatcctggccaccagcgccatcccccccagcagactgagcgtggagatcaccggcctggagaagggcaccagctacaagttcagagtgagagccctgaacatgctgggcgagagcgagcccagcgcccccagcagaccctacgtggtgagcggctacagcggcagagtgtacgagagacccgtggccggcccctacatcaccttcaccgacgccgtgaacgagaccaccatcatgctgaagtggatgtacatccccgccagcaacaacaacacccccatccacggcttctacatctactacagacccaccgacagcgacaacgacagcgactacaagaaggacatggtggagggcgacaagtactggcacagcatcagccacctgcagcccgagaccagctacgacatcaagatgcagtgcttcaacgagggcggcgagagcgagttcagcaacgtgatgatctgcgagaccaaggccagaaagagcagcggccagcccggcagactgcccccccccaccctggcccccccccagccccccctgcccgagaccatcgagagacccgtgggcaccggcgccatggtggccagaagcagcgacctgccctacctgatcgtgggcgtggtgctgggcagcatcgtgctgatcatcgtgaccttcatccccttctgcctgtggagagcctggagcaagcagaagcacaccaccgacctgggcttccccagaagcgccctgccccccagctgcccctacaccatggtgcccctgggcggcctgcccggccaccaggccagcggccagccctacctgagcggcatcagcggcagagcctgcgccaacggcatccacatgaacagaggctgccccagcgccgccgtgggctaccccggcatgaagccccagcagcactgccccggcgagctgcagcagcagagcgacaccagcagcctgctgagacagacccacctgggcaacggctacgacccccagagccaccagatcaccagaggccccaagagcagccccgacgagggcagcttcctgtacaccctgcccgacgacagcacccaccagctgctgcagccccaccacgactgctgccagagacaggagcagcccgccgccgtgggccagagcggcgtgagaagagcccccgacagccccgtgctggaggccgtgtgggacccccccttccacagcggccccccctgctgcctgggcctggtgcccgtggaggaggtggacagccccgacagctgccaggtgagcggcggcgactggtgcccccagcaccccgtgggcgcctacgtgggccaggagcccggcatgcagctgagccccggccccctggtgagagtgagcttcgagaccccccccctgaccatctag

SEQ ID NO: 302334 - DNA, 3345 bp, Artificial Sequence
  derived and/or modified sequence
atgctgcgaggaaccatgacagcctggcgtgggatgcgtcccgaggtgaccctggcttgcttgttattggccacagccggatgctttgctgatttgaacgaagtcccccaggtcactgtccagcccgcttcaacagtccaaaagcccggcgggaccgtcatattagggtgcgttgtagagccgccccgcatgaacgtcacctggcggctcaacggcaaggaattgaatggttctgacgatgcactaggtgtgctgataactcacggtacgctggtgattaccgctctcaacaaccacacagtgggccggtatcaatgtgtcgccaggatgcctgctggagcagttgcttctgtccccgccactgtcactctggccaatctgcaggacttcaagctagacgtacaacacgtgatcgaagtggacgagggcaacaccgctgtgatcgcgtgtcatttaccggagtctcacccaaaggcgcaagtcaggtacagcgtgaagcaggaatggctagaggcgtcccggggaaactatttaataatgccctccgggaacttacaaatcgtgaatgcttcccaggaagacgaaggcatgtacaagtgcgctgcgtataatcccgtcacccaggaggttaagacaagcggttccagcgatcgcctccgtgtccggcgttccaccgcagaagccgctagaatcatttacccaccagaggcccagactataatcgtcaccaaagggcagtcgctcattctggaatgcgtagcttctggcatcccgcccccgcgagtcacatgggcgaaggacggttcatccgtcactggctataacaaaactagatttctcttaagtaatctcctaatcgacaccactagtgaggaagatagcggcacttatcgatgcatggccgacaacggcgttggtcaacctggcgcagccgtcatactatataatgtccaggtttttgaacctcccgaggtgactatggagcttagccagcttgtgatcccctgggggcagtcggcaaaacttacatgcgaagtgcgtggaaacccgccaccctccgtgttatggctccgaaatgctgtgcctctcatctccagtcagagactgaggctgtctagacgcgcactgcgggtgttaagcatgggcccagaagatgagggggtctatcagtgtatggccgaaaatgaggtgggatcagctcatgcggtggtgcagctcagaacctcccgcccatctattactccacgactctggcaagatgcagagcttgcgactggcacacccccagtaagcccaagcaagctgggtaatcctgagcagatgctcaggggccagcccgccttgccgaggccgcctacatcagtagggcctgcctctcctcagtgtcccggggagaaaggacagggcgctcccgctgaggcacccattatcctcagcagcccccgcacaagtaaaactgactcttacgaactggtgtggagacctcgccatgaaggaagtgggcgggcccccatcttgtactatgtggtgaaacatcgcaaggttacgaatagctcagatgattggacaattagtggcatccccgcaaatcagcaccgactgacgcttactcgcctcgaccctggtagcttatatgaggtcgagatggcagcctataactgcgccggcgaagggcagactgctatggtaaccttccgcaccggtagacgtcctaagcctgagattatggcgagtaaggagcagcagattcagcgggatgatcccggcgcttctcctcaaagctctagccagcctgaccatggacggctctccccccctgaagctcccgaccgccccactatctcaactgctagtgagacgtctgtgtacgtgacctggatccccagaggtaatggcggattcccgattcagtcatttcgcgtggagtataaaaagttgaaaaaggtgggggactggatacttgccaccagtgcaatcccaccttccaggttatcagttgaaataaccggcctagagaaaggtacttcctacaaatttcgggtgcgcgcgttaaacatgctgggagagtccgagccctccgctcctagccgaccatatgtggtcagcgggtactcaggaagggtctacgagagacctgtcgccggcccttacatcacttttacagatgcagtgaatgaaaccaccataatgctgaaatggatgtacatccctgcaagcaataacaatacgcccattcacgggttttacatctactataggcccaccgactctgacaatgatagcgactataagaaagatatggtggaaggcgacaaatactggcattcaatctcgcatttacagcctgaaacctcatacgatattaaaatgcaatgctttaacgaagggggcgagagtgagttttcaaatgtaatgatttgtgagactaaggctagaaagtcatctggacaacccggcagactaccacctcctactcttgctcccccccagcccccgctgcctgaaaccattgagcgccccgtgggtacaggcgccatggtggcaaggtcttccgacctcccttatttaatagtgggagtcgtgctggggtccatcgtcctaattatcgttacattcatccctttttgcctgtggcgggcatggagcaagcagaagcatactaccgatctggggtttcccagaagtgccctcccaccaagctgcccctacaccatggtaccactgggcgggctgccaggccatcaggctagtggccagccatatctcagtggcatcagtggaagggcgtgtgccaacggaattcacatgaaccgaggttgccccagcgctgccgtcgggtaccccggaatgaaaccacagcagcattgtcccggcgagttgcaacagcagtctgacacaagttccctgctgcggcagacgcacctcggcaacggatatgacccccagtcccaccagattacccgaggacccaaaagctcgcctgacgagggtagcttcctgtataccctccccgatgatagcactcatcagcttttgcagccccaccatgattgttgccagcgacaagagcagcctgcggcagttggacagagcggcgtgcggagggcgccagactctcccgtactcgaagcagtgtgggatcccccttttcattccgggcccccgtgctgtctcggcctcgttccggttgaggaagtggacagtcccgacagctgccaggtatcaggcggggactggtgccctcaacaccccgtgggggcatatgtgggccaggaaccaggcatgcagctttctccaggaccattagttagagtgtcgttcgaaacacccccgctgaccatatag

SEQ ID NO: 302335 - DNA, 3345 bp, Artificial Sequence
  derived and/or modified sequence
atgctaaggggcactatgaccgcctggcgaggaatgcgtcccgaggtcacccttgcttgtctcttgctggcaacagccggttgttttgctgacttgaacgaagtacctcaggtgacggtgcaaccggcttccaccgtgcagaagcctggtggcacagtgattctcggctgtgtggtggaaccgcctcgcatgaacgtgacttggcggctgaatggcaaggaactgaacgggagcgacgatgctctcggagtgctcattacccatggcaccctggtcatcaccgccctgaataaccacacagtgggccgataccaatgtgtcgcgcgcatgccagcgggcgcagtggcctctgtgccagccaccgtgacactggcaaatcttcaggattttaagctggatgtgcagcacgtcatcgaagtggacgaaggcaatacggccgttatcgcctgtcacctgcccgagtctcaccccaaggcacaagtgaggtactcagtgaagcaagagtggctggaagcatcccggggaaattatcttatcatgccctctgggaacttgcagatagtgaatgcctcacaagaggacgaaggtatgtataagtgtgccgcttataatcccgtcacacaggaagtcaaaacaagcggttcttctgataggctgcgagtcagaagaagtacagccgaggctgcacgcatcatttaccctccagaagcccagaccatcatcgttaccaaaggccaatccctgatcttggagtgcgtggcctcggggatccctcctccccgcgtgacttgggcgaaggacgggtcaagcgtcactggatacaataaaacccgtttcctgctgtctaatctactcattgatacgacaagcgaagaggatagtggtacatatcggtgcatggctgacaatggagtgggtcaacccggtgccgccgtgatactttacaacgttcaagtttttgagccacctgaggtgacaatggagctaagtcagttagtgatcccttggggacagtcagccaagctcacttgcgaagttcgaggcaatccccccccaagcgtgttatggctgagaaacgccgtcccgctcattagcagtcagcgcctgcgattgagcaggcgggcgcttcgagtgctcagcatggggccggaagacgagggcgtgtaccagtgtatggcagagaacgaagtcggaagtgcccacgcagtggtacaactgcgtactagcagacccagtataacccctcgactatggcaggatgcagaactcgcaaccggcactccgccagtaagtccatccaaactgggtaacccggaacagatgcttcgaggccaacctgctctgccgcgcccccctacgtctgtggggcccgcaagtccgcagtgtcccggcgaaaaaggccaaggggctcccgctgaggccccgattattctcagcagccctcgcacatccaaaactgactcttacgaattagtttggcgaccaaggcacgagggatcggggcgagcgcctattttatattatgtggtgaagcaccgcaaagtgaccaactcctctgatgactggacgatcagcggaattccggccaaccagcaccgcctcactcttacgcgcctagatccaggttcattgtatgaggtggagatggccgcctataactgtgccggtgagggacagaccgctatggtgacatttaggacaggacggcggccaaagcccgagatcatggctagcaaggaacagcaaattcagcgcgatgatccaggcgcttctccccaaagttccagtcaaccagaccacggacgcctcagccctcccgaggcacctgatcggcctacaatcagcacagcctctgaaacaagtgtgtatgtgacatggatcccacgaggcaatgggggatttcctatccaaagtttcagggtcgaatacaaaaaattgaagaaagtgggagactggattctggccaccagcgccataccaccctctagactgtctgtcgaaattacaggcctggaaaaagggacttcctataagttcagagtgcgcgccttaaacatgctgggggagtcggagcctagcgcaccctctcgaccatacgtcgttagcgggtacagcgggagggtgtatgagcgccctgtcgccggcccctacatcacttttaccgatgctgtaaacgaaaccacgatcatgctaaagtggatgtacataccggcctctaacaacaacaccccaatccacggtttctatatctattataggcctacagattctgataacgacagtgattataaaaaggacatggtggaaggggacaagtactggcactcaatatcacacctccagccggaaacaagttatgacataaagatgcaatgtttcaatgaaggtggcgagtctgaattttccaatgtcatgatctgtgagactaaagcccggaagtctagtggccagcccggcagactgcctcctcctacactggcccccccacagccacccctaccggaaaccattgagaggcccgtaggcactggcgcgatggtcgccaggagcagcgacctgccttatcttatcgtcggagtcgtgctggggagcatagtactgatcatagtgacgttcatccctttttgcctttggcgcgcctggtctaagcaaaagcatacgacggacctgggatttccgagaagtgcccttcccccgagctgtccatatacaatggtgcccttaggcggcctccccggacatcaagcgtccggccagccctatctcagcggcatttcaggccgtgcctgcgcaaatggaatccatatgaaccgaggctgcccctcagctgccgtgggctatccaggcatgaaaccgcagcagcactgtccaggggaactgcagcagcaatccgacacttcgtcacttttgagacagactcacctgggcaatgggtacgacccgcaatcccaccaaatcacaaggggcccaaagagcagtcccgatgaggggagctttctatatactctaccagatgattctacccatcaactgctccaacctcaccacgactgctgtcaacgtcaggagcagccagcagcggtcggccaaagcggggtgcggcgagcgcctgattcgcctgtgcttgaggcggtctgggaccccccatttcactccggaccaccgtgctgtctgggactagtgccagtggaggaagtcgactcacctgattcatgtcaagtaagcggcggcgactggtgtccgcagcatcctgttggcgcttacgttggtcaggaaccgggcatgcagctgtcaccaggtcctctagttcgggtgtcgttcgaaaccccacccctgaccatttag

SEQ ID NO: 302336 - DNA, 3345 bp, Artificial Sequence
  derived and/or modified sequence
atgctgcggggcaccatgacagcctggaggggcatgaggcctgaggtgaccctggcctgcctgctgctggccacagctggctgctttgctgacctgaatgaggtgccccaggtgacagtgcagcctgccagcacagtgcagaagccaggcggcaccgtcatcctgggctgtgtggtggagccccccaggatgaatgtgacctggaggctgaatggcaaggagctgaatggaagtgatgatgccctgggcgtgctgatcacccacggcaccctggtgatcacagccctgaacaaccacacagtgggccgctaccagtgtgtggccaggatgcctgctggagctgtggcctctgtgcctgccaccgtgaccctggccaacctgcaggacttcaagctggatgtgcagcacgtgattgaggtggatgagggcaacacagctgtgattgcctgccacctgcctgagagccaccccaaggcccaggtgcgctacagcgtgaagcaggagtggctggaggccagccggggcaactacctgatcatgcccagcggcaacctgcagatcgtgaatgccagccaggaggatgagggcatgtacaagtgtgccgcctacaaccctgtgacccaggaggtgaagaccagcggcagcagtgaccggctgcgggtgcggcgcagcacagctgaggccgcccgcatcatctacccacctgaggcccagaccatcatcgtgaccaagggccagagcctcatcctggagtgtgtggccagcggcatccccccaccccgggtgacctgggccaaggatggcagctctgtgacaggctacaacaagacccgcttcctgctgagcaacctgctgattgacaccaccagcgaggaggacagcggcacctaccgctgcatggctgacaatggagtgggccagcccggggctgctgtgatcctgtacaacgtgcaggtgtttgagcccccagaggtgaccatggagctgagccagctggtgatcccctggggccagagcgccaagctgacctgtgaggtgcggggcaaccccccaccttctgtgctgtggctgagaaatgctgtgcccctcatcagcagccagaggctgcggctgagcagaagagccctgcgggtgctgtccatgggcccagaagatgaaggagtgtaccagtgcatggccgagaatgaggtgggcagcgcccatgctgtggtgcagctgcggaccagccggcccagcatcaccccccggctgtggcaggatgctgagctggccaccggcaccccacctgtgagccccagcaagctgggcaaccctgagcagatgctgcggggccagcctgccctgcccaggcctcccacctctgtgggccctgccagcccccagtgccctggagagaagggccagggcgccccagctgaggcccccatcatcctgagcagccccaggaccagcaagacagacagctatgagctggtgtggaggcccaggcatgagggcagcggccgggcccccatcctgtactacgtggtgaagcacaggaaggtgaccaacagcagtgatgactggaccatcagcggcatcccagccaaccagcaccggctgaccctgacccggctggaccccggcagcctgtatgaggtggagatggccgcctacaactgtgccggggagggccagacagccatggtgaccttcagaactggaagaagacccaagccagagatcatggccagcaaggagcagcagatccagagagatgaccccggggccagcccccagagcagcagccagcctgaccacggccgcctgagccccccagaggccccagaccggcccaccatcagcacagccagcgagacctctgtgtatgtgacctggatccccagaggaaatggaggcttccccatccagagcttccgggtggagtacaagaagctgaagaaggtgggggactggatcctggccaccagcgccatcccccccagccggctgtctgtggagatcaccggcctggagaagggcaccagctacaagttccgggtgcgggccctgaacatgctgggggagagcgagcccagcgcccccagccggccctacgtggtgtctggctacagcggccgggtgtatgaaagacctgtggccggcccctacatcaccttcacagatgctgtgaatgagaccaccatcatgctgaagtggatgtacatcccagccagcaacaacaacacccccatccacggcttctacatctactaccggcccacagacagcgacaatgacagcgactacaagaaggacatggtggagggggacaagtactggcacagcatcagccacctgcagcctgagaccagctatgacatcaagatgcagtgcttcaatgaaggaggagagagcgagttcagcaatgtgatgatctgtgagaccaaggccaggaagagcagcggccagcccggccgcctgcccccacccaccctggccccaccccagccccccctgcctgagaccatcgagaggcctgtgggcactggagccatggtggcccggagcagtgacctgccctacctgattgtgggcgtggtgctgggcagcatcgtgctgatcatcgtgaccttcatccccttctgcctgtggagggcctggagcaagcagaagcacaccacagacctgggcttccccaggtctgccctgccccccagctgcccctacaccatggtgcccctgggcggcctgcccggccaccaggccagcggccagccctacctgagcggcatcagcggccgggcctgtgccaacggcatccacatgaacagaggctgccccagcgctgctgtgggctacccaggcatgaagccccagcagcactgccctggagagctgcagcagcagagcgacaccagcagcctgctgcggcagacccacctgggcaatggctatgacccccagagccaccagatcacccggggccccaagagcagcccagatgagggcagcttcctgtacaccctgcctgatgacagcacccaccagctgctgcagccccaccacgactgctgccagaggcaggagcagcctgctgctgtgggccagagcggcgtgcggcgggccccagacagccctgtgctggaggccgtgtgggacccccccttccacagcggccccccctgctgcctgggcctggtgcctgtggaggaggtggacagcccagacagctgccaggtgtctggaggagactggtgcccccagcaccctgtgggcgcctacgtgggccaggagcccggcatgcagctgagccctggccccctggtgcgggtgtcctttgagaccccacccctgaccatctag

SEQ ID NO: 302337 - DNA, 3345 bp, Artificial Sequence
  derived and/or modified sequence
atgctgcggggcaccatgaccgcctggcggggcatgcggcccgaggtcacgctggcttgcctgcttctggccacagcaggctgcttcgcggacttaaacgaagtaccgcaagtgactgtccagcccgcgtcgacggtgcaaaagcccggcggcaccgtgatacttgggtgcgtggtggaacccccccgaatgaatgtgacctggagactcaacggaaaggagttgaacggtagcgacgacgctctgggagtcctcattacccatggaacacttgttattacagcgctcaataatcataccgtcggtcgttaccagtgtgtcgcgcgcatgccagcaggggccgtagcatccgtgcccgccaccgtgacactggctaatcttcaagactttaagctcgacgtccaacatgtgatagaagtcgatgaaggaaacaccgctgtcatcgcctgccacctacctgagtcacaccccaaggcccaggtgcggtactccgtgaagcaggaatggttggaagcatctagagggaattacctgatcatgccaagcggcaatctccaaatagtcaacgcgtcacaagaggacgaaggtatgtacaagtgcgctgcctacaacccggtaacccaggaggtcaagacttcaggctccagcgaccgactgcgagtgcgccgatcaactgctgaagctgcccgaattatttatccccctgaagctcagactattatcgtgactaaaggacagagcctgattctcgaatgtgtggcatcaggtatcccaccacctcgtgtcacctgggccaaggacggctcttctgtaacagggtacaataagacgcgattcctccttagcaacttgctcatcgacacaacatctgaggaagattccggaacctaccgttgtatggcggataacggcgttggccaacctggcgcggctgtaatcttgtataatgtccaagtttttgaacccccagaagtgaccatggaattgagccagctggtcatcccctggggacagtccgccaaactgacatgcgaggtgcgaggaaatcctcctcctagcgttctgtggttgaggaacgcggtgccactgatttcctcacagaggctgaggctgtctagaagagccctgcgtgtgctcagcatggggcctgaagacgaaggtgtctaccagtgtatggctgaaaacgaggtcggaagcgcccacgcggtcgtgcaactgcgtacatcacgtccttcaatcacccctcggctctggcaagacgctgagctggccaccgggaccccacccgtgtctccatccaagctcgggaaccctgagcagatgttgcggggacagcctgcgttgccaaggcctcctaccagcgtcggaccagcttcaccacagtgccccggagagaaaggacagggtgcccctgctgaggcgccaatcattctctcttctcccaggacttcaaagacggacagctacgagctggtgtggcgcccacggcacgaaggcagcggtcgggccccaatcctctactacgtcgtaaaacaccgtaaagtgaccaacagctctgacgactggactattagcggaatcccagctaaccaacatcgcctgactctcactcgcttagacccaggcagcttatatgaggtggagatggctgcttacaattgtgctggcgaaggacagacagccatggtcacattccgcaccggtcggcgacccaagccggaaattatggcctcgaaggagcagcaaattcagcgcgatgaccctggagcctctccccagtctagcagccaacctgaccatgggcgtctcagcccacccgaagctcccgacagaccgaccatttctaccgcatctgaaaccagtgtgtacgtgacatggatcccacggggtaacggggggttccccatccagtctttccgggtggagtacaaaaagctcaaaaaagtcggtgactggatcctggccacctctgcaattccaccgagccggctcagcgtggagattaccgggctggaaaagggtactagctataagtttagagtccgggccctcaacatgctgggagagtccgagccaagcgctccatcccggccttacgtggtcagcgggtattcaggcagggtttacgaacggccagttgcaggaccatatatcacctttactgacgccgtgaacgagaccactattatgctgaaatggatgtatatccccgccagcaacaataatacacccattcatggtttctacatctactataggcccacagattctgataatgactccgactacaagaaggacatggtggagggcgataaatactggcattccatttcacacttacagccagaaacctcctatgatatcaagatgcagtgttttaacgagggcggagagagtgagttttctaacgtgatgatatgtgagacaaaggctagaaagtccagcgggcagccaggaagactgcccccccctacactcgcaccgcctcagcctccccttccagaaacaatcgagcggccagtaggcactggcgctatggtcgccagaagctccgatttgccttacttaatcgtgggcgtggtgctcgggtccattgtgctgatcatcgtaacgtttataccattttgtttgtggcgggcgtggtccaagcaaaaacatactactgacctaggatttcctcggtccgccttaccaccatcgtgcccgtataccatggttccccttggcggtctacccgggcaccaggcgtctggccagccctacctgtccggcatttctggcagggcctgtgccaacgggatccacatgaacagaggctgtccaagtgccgctgtcggttatccgggcatgaagcctcaacagcactgccctggggagctgcagcagcagagcgatacaagttcgttgctgcgtcagacccatttgggtaatggttatgatccacaatcccatcagatcacgagggggcccaagagtagccctgacgaggggtcctttttatataccctcccagacgactccactcaccagctgctgcagccccaccatgattgttgtcagcggcaggagcagccagccgcagtgggacagtccggcgtgagacgcgcaccggattcccctgtcctcgaggctgtttgggacccaccctttcattcaggacctccatgctgtctggggcttgtgcctgtggaagaggtggacagtccagatagctgccaggtatcaggcggggactggtgcccccaacatcctgttggcgcctatgtggggcaagaacccggtatgcaactgtcccccgggcctcttgtgagggtctcattcgagacacccccactcacgatttag

SEQ ID NO: 302338 - DNA, 3345 bp, Artificial Sequence
  derived and/or modified sequence
atgctgcggggcaccatgaccgcctggcggggcatgcggcccgaggtgacccttgcctgcctgctgctcgcaaccgcaggttgctttgccgacctgaatgaggtgccccaggtcaccgtgcagcccgcctctaccgtgcagaaacccggtggtacagtgatcctcggctgtgtcgtcgaaccaccacgcatgaacgtgacttggagactgaacggtaaggaactaaacggcagcgacgatgcactgggagtcttgatcacgcacggaacattggtgatcaccgctctgaacaaccatacagtaggccggtaccaatgtgtggcaaggatgccggccggagctgtggcttcagtgccagccacggtgactctagcaaacttacaggatttcaaactagatgtgcagcacgtcatcgaggtggacgagggcaatacagccgttatagcatgtcacctgcctgaatcgcatccgaaagcacaagtgcggtattccgtcaaacaggagtggttggaggcatctaggggtaattacctgatcatgccctcgggaaatttacagattgtcaacgcttctcaggaggatgaaggcatgtacaagtgtgcagcctataatcctgtgacgcaggaagtcaaaacatcaggcagctcagaccgcctaagagtgcgccggtcaacagccgaggccgctcgaatcatctatcctcctgaagcgcagactatcatcgtgaccaagggccagagcttaattttggagtgcgtggcatccggcatccctcccccccgggttacatgggccaaagatggctcatctgtaaccggttacaacaagactagattcctgctctccaatctgctcatcgataccacctccgaggaggactccgggacataccgttgcatggcagataacggggtcggtcaaccgggtgccgctgtcatcctatataatgtacaggtgtttgaaccacctgaggtgaccatggaactgagccagcttgtgattccatggggacagagtgccaagctaacttgtgaggtgagaggcaatccacctcccagtgtcctgtggctccgtaatgccgtgcctttgattagcagtcagagactgcggctctctcgccgtgccttacgcgtgttgagtatgggccctgaagatgaaggcgtgtaccagtgcatggctgagaatgaagtggggagtgctcatgccgttgtacagctcaggaccagtcggcccagcatcacacctagattgtggcaggacgcggaactggcgaccggcaccccacccgtatccccatctaagctcggaaaccccgagcaaatgttacggggacaacccgctctgcctcgccctcctaccagcgttgggccggcgtcacctcagtgccccggcgagaaggggcagggagctccagctgaagctcccattatccttagtagccctaggacatctaagaccgactcctacgagcttgtttggcggcctcgccatgagggatccggacgtgcacctattttgtattacgtggtcaagcaccgcaaggtgactaattcgtcagatgattggacgatctccgggatccctgccaatcagcaccggcttaccctgacccggttggaccctggaagcctctacgaagtagagatggcagcatataactgcgcaggtgaaggacagacagccatggtgactttccgcactggacgtcgaccaaaaccggaaataatggcgtcaaaagaacagcagatccaacgggatgaccctggtgcttctcctcagagttccagtcagcccgatcatggaagattgtcaccacccgaggcccctgatcggcccaccattagtactgctagtgaaacttctgtgtatgtgacttggattccaaggggcaatggcggctttcctatccagagttttagagtggagtacaagaagctgaagaaagtgggggattggattctcgcgacctcagcaattccacctagcaggctgtctgtggagataacgggcctagaaaaggggacatcctataagtttcgtgttcgtgccctaaatatgctgggcgaatccgagccatctgcacctagccgcccctatgttgtttccggttatagtggccgggtgtatgagagacccgtcgccggaccgtacattacctttactgatgcagtgaatgagaccacgatcatgctaaaatggatgtatattcccgcaagtaacaataatacccctatccacgggttctatatatactatagacccactgatagcgataatgacagcgactacaaaaaggacatggtcgagggggacaaatactggcactcaatcagccacctgcagccggaaacctcgtacgatataaagatgcagtgttttaatgaaggaggagagagcgaattttctaacgttatgatctgtgaaacaaaggccagaaaatcatccgggcagccagggcgtctgcctccccccaccctggcgcccccccagccaccgttgccggagactatagaacggcctgttggcaccggcgccatggtagcccggtcttctgatctgccatacctcatcgtgggagtagtcctaggaagcattgtattgattatcgtgaccttcatccctttttgcctttggcgagcgtggagtaaacagaagcacaccacagatctcgggttccccaggagtgcactaccccctagttgtccctacactatggtaccactggggggactgcccggtcaccaggcgtccggccagccttacttatccgggatttcgggaagagcctgtgctaatggcattcacatgaacagggggtgcccatcggccgcggtggggtatcctggcatgaagccccagcagcattgtcccggggaactgcaacagcagagtgacacatcaagtctgcttcggcaaacacatctgggaaatggatatgatccacagtcacatcagattactcggggccccaagagcagccctgatgaggggtctttcctgtatacactcccagacgactctacgcatcagttgcttcagccacaccatgactgttgccagcgccaggagcagcccgcagccgtaggacagtccggagtccgccgcgcaccagattcacctgtgctagaagccgtgtgggatccacctttccactctgggccaccatgctgcctagggttggtgcccgtcgaggaggtggattcacccgatagctgtcaggtgagcggcggtgactggtgccctcagcatcccgtgggggcgtacgtcggccaggaaccaggcatgcagctgagccccggccccctagttcgcgtgtcattcgagactccccccttaaccatctag

SEQ ID NO: 302339 - DNA, 3345 bp, Artificial Sequence
  derived and/or modified sequence
atgctccggggaactatgactgcttggcggggaatgaggcctgaagttaccttggcatgtctcctgctggcaaccgcaggatgctttgccgacctgaatgaggtgcctcaggtcacagtgcagcctgcatccaccgtgcagaaacctgggggtacagtcatcctgggatgcgtggttgaaccaccaaggatgaacgtgacttggagactcaacggaaaagaactcaacggatccgatgacgccctgggcgttctcatcacccacgggacgctggtcattacagcccttaacaatcacacagtgggccgataccagtgtgtggctcgaatgccagcgggagcagttgcctctgtacctgctactgtgacactcgccaacttgcaggactttaaattggatgtacagcatgtcatcgaggtggatgaggggaacactgcagtcatagcttgccacctgcccgagtcacatccgaaagcccaggtgcggtactccgtgaagcaggagtggcttgaggctagtcgcggaaactacctaataatgccctccggcaatctgcaaatagttaatgccagtcaggaagacgagggcatgtataagtgtgccgcatacaaccctgtgacccaagaagtaaagacatcagggtcctccgaccggctaagagtgaggcgcagcaccgcagaagccgctcggattatctaccccccagaagcccaaacaatcatcgtaaccaaaggccagtctttgatccttgagtgcgtggccagcggcattcctcctcctagagtaacctgggccaaggatgggagtagcgttacaggctacaacaaaacgcgttttctgctttccaatctgttgatcgacaccacttccgaggaggacagtgggacatatagatgcatggcggacaacggcgtgggccagcctggagctgcagtcatactgtacaacgtgcaagtgtttgagcccccagaggtcacaatggagctgtctcagctcgtcatcccatggggccagtccgccaagcttacttgtgaagtccggggaaaccctccccctagcgtactgtggctgcggaacgccgtaccgttgatctctagccaacggctgagactctccaggagggctctcagggtgctctctatgggacccgaggatgagggcgtgtatcagtgcatggccgaaaacgaggtgggttccgcccacgcagtcgtgcagctccgcacatccaggccgtccattacaccccgactatggcaggacgccgagctcgccaccggcactcccccagtgagcccttcaaagcttgggaacccagaacagatgttacggggacagcctgccttacccaggccacccacaagcgtcgggcctgcgtctccccagtgtccaggggagaaagggcagggcgcaccagctgaagctccaattatcttgtcttcgccgaggacctccaaaacagactcatacgagctggtgtggagacccagacacgaggggagtggccgagcaccaatattatactacgttgttaaacaccggaaggtcacaaattcgtcggacgattggacaatctcaggtattcccgcaaaccagcacagattaactttgacaaggctggatccaggatcgctttacgaagtagagatggccgcatacaactgcgccggtgaagggcaaaccgctatggtgacgttcagaacgggaaggaggcctaagcccgagatcatggccagtaaggagcagcagatacaaagggacgaccccggagcctctccacagtcctcctcccagcccgatcatgggaggcttagccctcccgaggctcctgatagacccaccatcagcaccgcatctgagacatcagtgtacgtgacttggatcccgcgtggcaatggaggctttcccatccagagtttcagagtggaatataagaagctaaagaaagtcggtgattggattctggccacgtcagccatccctccatctagactgtctgtggaaattactggcctggagaaaggcacttcttataaattcagagtgagggcactcaacatgcttggcgagtcagagccttctgcaccaagtcgaccttacgtggtgtctggatactctggacgggtgtatgagcgtcctgtggccggaccttacatcactttcaccgatgccgtgaacgagaccactattatgctgaagtggatgtatattcctgccagtaataataatactccaattcacggtttttacatctactatagaccaacagactccgataacgattccgactacaaaaaggatatggtggaaggtgataagtattggcatagtatttctcacctgcaaccagagacctcttacgacattaagatgcagtgctttaacgagggaggagagtctgagttctcaaacgtgatgatttgcgagaccaaagcacgcaagagctcagggcagcctggcagattgcccccacctaccctagctccccctcaaccgcctctgcccgagactattgagagaccagttggcacaggagctatggttgcacgctcctctgatctcccgtacctgatcgttggggtcgttctcggaagcatcgtgcttataatcgtcactttcattcctttctgcctgtggagggcgtggtcgaagcagaagcatactaccgacctcgggtttcccaggtcagccctgcccccatcttgtccatatacgatggttcctcttgggggacttccgggtcatcaagcctcgggtcagccctacctgagtggcatctctggcagggcctgtgccaacggcatccacatgaatcggggatgcccctctgccgcagtgggatatccaggtatgaagccacaacagcactgccccggtgagctccagcaacaaagcgacacctccagtctgctgagacagactcacttggggaatgggtatgatccccagtcacaccagatcaccagggggccaaagtccagccctgacgaaggatcatttttatacacacttccggatgactccacacaccaacttctgcagccacaccatgactgctgccaaagacaagaacagccggcagccgttggccagtcaggtgtgcgtcgagcccctgacagtcctgttctggaggctgtgtgggatccacctttccatagcgggcctccatgctgtctgggattagtgcccgtagaggaagtggatagccctgacagctgccaggtaagcgggggagattggtgcccccagcaccccgtcggagcttacgtgggacaggaacccggaatgcagctgagtccaggacctctggtgcgggtgtcttttgagaccccaccactgacaatatag

SEQ ID NO: 302340 - DNA, 3345 bp, Artificial Sequence
  derived and/or modified sequence
atgctgaggggaacaatgacagcttggcggggtatgcggccagaggtcacactggcctgcctccttttagcaaccgctggctgtttcgcggacctgaacgaggtgccccaggtaacagtgcaaccggctagtactgtacaaaagcccggtggcaccgtgatcttaggatgcgtggttgaacccccacggatgaatgttacttggaggctgaatgggaaggaactgaatggaagtgatgatgccctcggcgtgttgattacccatggaactctggtcataacagccctgaataaccacactgtaggaaggtaccagtgtgtggctaggatgccggcaggggctgtggcgtccgtgccggctaccgtaactctcgctaacttgcaggactttaagctggacgttcaacacgtaatcgaagtcgatgagggaaatacagcagtgatcgcttgccacttaccagaaagtcacccaaaagcacaggtgcgctactctgttaagcaggaatggctggaagcctctcgagggaactatcttatcatgccttcgggaaacctgcaaatagtgaacgccagccaggaggacgaggggatgtataagtgtgccgcttacaatcccgtcactcaggaggtaaagaccagcggctcatctgataggctacgggtaagacggtcaactgcggaagccgctagaatcatttatcctccagaagctcaaacgatcattgtgacaaagggtcagagtctcatcctggagtgcgtggcctcgggcatccctcctcccagagttacatgggcaaaagatggtagctcagtgacagggtataacaaaacccggttcctactgtctaatttgctcatagacaccacctccgaggaggatagtgggacctatcggtgcatggctgacaacggcgtcgggcagccaggagctgctgtgattttatacaatgtgcaagtgttcgagccccctgaagtgacaatggagttatcccaactcgtaattccatgggggcagtctgccaaactgacgtgtgaggttcgagggaacccaccgcctagcgtactgtggctgcgtaacgccgtacccctgatcagctcccaacgcctgaggctgtcccggagggccttgagggtgctgagcatgggacctgaggatgagggtgtgtatcagtgcatggctgagaacgaggtgggcagtgctcacgcagtggttcagttgcggacttctagaccgagcatcacccccaggctgtggcaagacgccgaactggcaactggtacaccaccagtgtcccctagcaagctggggaaccccgagcagatgctgcgtggccagcctgctctccccagacccccaacgtcggttggccctgccagccctcagtgtccaggagagaagggacagggggctcccgcagaggcaccaatcattctgtcgtcgccacggactagcaagacagatagttacgagctagtctggaggccgcgacatgagggttccggcagggccccaatactctactatgtcgtgaagcacagaaaggtaaccaactcttctgatgactggacaatctccggcatcccggcaaatcagcatcgactgactctgactaggctggaccctgggtctttatatgaggtcgagatggccgcttataactgtgccggtgagggccagacggccatggtcacctttcgtacgggtagacgacctaaaccggagattatggctagcaaggaacagcaaatacagcgcgacgacccaggagcgtcacctcagagctccagtcagcctgaccacggacgcctctctccccctgaagcgccagaccgaccgaccatcagtacagcatcagaaacaagcgtgtacgtgacctggatacccaggggcaacggaggcttcccaatacagagctttagagtcgagtataagaagctgaagaaagtgggtgattggatcttggccacatccgccataccacccagtagactcagcgtggaaataaccggactggaaaaaggcactagttataaatttcgcgtgagggccctcaacatgctcggtgaaagtgaacccagcgccccaagccgaccctatgtggtttcaggctactccggcagagtgtatgagcgtccagtggcaggcccttacatcacttttactgacgctgtcaatgagactacaatcatgttgaaatggatgtacatccctgcaagcaataataatacaccaatccacggattttacatttactaccgaccaaccgattcggacaatgacagtgactacaagaaggacatggttgagggtgacaagtactggcactctatatctcacctccagcctgaaacaagctacgacatcaagatgcaatgcttcaatgagggaggggaatccgagtttagtaacgtgatgatctgtgagacaaaggcaagaaagagttccggccagccagggaggcttccgcctccaacgctggcccctcctcaacctccccttccagaaacaattgagaggcccgtggggactggtgcgatggtggctcggtcctcagatctaccgtatctaatcgtgggcgtcgtcctgggttcaatcgtgttgatcatcgtgaccttcattcctttctgtctatggagggcctggagcaagcaaaaacataccacagacctgggctttcctaggtcggctctgcctcctagttgtccgtatactatggtccctctggggggactgcctggccatcaggcatccgggcagccgtatctgtctggaatcagtgggagggcttgtgcaaatggaatccacatgaatcggggatgccccagcgcggctgttggctaccctgggatgaagcctcaacaacattgtcctggagagctgcagcaacagagcgacacctcttcactactgaggcagactcacttaggcaatggctatgatccccagtcccaccaaataacaaggggccctaaatccagccccgatgaaggtagtttcctgtataccctccccgacgactccacccaccagctgctgcagcctcaccacgactgttgtcagaggcaggagcagcctgcagcagtgggccaatcgggtgtaagacgcgcacctgacagtcctgtgttggaggcagtgtgggatccaccatttcacagcggacccccatgctgcctgggtcttgttcccgtcgaggaggtggacagccctgatagctgtcaagtgtcaggaggagactggtgccctcagcatccagtgggagcttatgtcggacaggaacccggtatgcaattgtctccagggccactggtccgcgtttcttttgaaaccccaccactgacaatctag

SEQ ID NO: 302341 - DNA, 4278 bp, Artificial Sequence
  derived and/or modified sequence
gtttctcatagttggcgtcttctaaaggaaaaacactaaaatgaggaactcagcggaccgggagcgacgcagcttgagggaagcatccctagctgttggcgcagaggggcgaggctgaagccgagtggcccgaggtgtctgaggggctggggcaaaggtgaaagagtttcagaacaagcttcctggaacccatgacccatgaagtcttgtcgacatttataccgtctgagggtagcagctcgaaagtagaagaagtggagtgttgccagggacggcagtatctctttgtgtgaccctggcggcttatgggacgttggcttcagacctttgtgatacaccatgctgcgtgggacgatgacggcgtggagaggaatgaggcctgaggtcacactggcttgcctcctcctagccacagcaggctgctttgctgacttgaacgaggtccctcaggtcaccgtccagcctgcgtccaccgtccagaagcccggaggcactgtgatcttgggctgcgtggtggaacctccaaggatgaatgtaacctggcgcctgaatggaaaggagctgaatggctcggatgatgctctgggtgtcctcatcacccacgggaccctcgtcatcactgcccttaacaaccacactgtgggacggtaccagtgtgtggcccggatgcctgcgggggctgtggccagcgtgccagccactgtgacactagccaatctccaggacttcaagttagatgtgcagcacgtgattgaagtggatgagggaaacacagcagtcattgcctgccacctgcctgagagccaccccaaagcccaggtccggtacagcgtcaaacaagagtggctggaggcctccagaggtaactacctgatcatgccctcagggaacctccagattgtgaatgccagccaggaggacgagggcatgtacaagtgtgcagcctacaacccagtgacccaggaagtgaaaacctccggctccagcgacaggctacgtgtgcgccgctccaccgctgaggctgcccgcatcatctaccccccagaggcccaaaccatcatcgtcaccaaaggccagagtctcattctggagtgtgtggccagtggaatcccacccccacgggtcacctgggccaaggatgggtccagtgtcaccggctacaacaagacgcgcttcctgctgagcaacctcctcatcgacaccaccagcgaggaggactcaggcacctaccgctgcatggccgacaatggggttgggcagcccggggcagcggtcatcctctacaatgtccaggtgtttgaaccccctgaggtcaccatggagctatcccagctggtcatcccctggggccagagtgccaagcttacctgtgaggtgcgtgggaaccccccgccctccgtgctgtggctgaggaatgctgtgcccctcatctccagccagcgcctccggctctcccgcagggccctgcgcgtgctcagcatggggcctgaggacgaaggcgtctaccagtgcatggccgagaacgaggttgggagcgcccatgccgtagtccagctgcggacctccaggccaagcataaccccaaggctatggcaggatgctgagctggctactggcacacctcctgtatcaccctccaaactcggcaaccctgagcagatgctgagggggcaaccggcgctccccagacccccaacgtcagtggggcctgcttccccgcagtgtccaggagagaaggggcagggggctcccgccgaggctcccatcatcctcagctcgccccgcacctccaagacagactcatatgaactggtgtggcggcctcggcatgagggcagtggccgggcgccaatcctctactatgtggtgaaacaccgcaaggtcacaaattcctctgacgattggaccatctctggcattccagccaaccagcaccgcctgaccctcaccagacttgaccccgggagcttgtatgaagtggagatggcagcttacaactgtgcgggagagggccagacagccatggtcaccttccgaactggacggcggcccaaacccgagatcatggccagcaaagagcagcagatccagagagacgaccctggagccagtccccagagcagcagccagccagaccacggccgcctctcccccccagaagctcccgacaggcccaccatctccacggcctccgagacctcagtgtacgtgacctggattccccgtgggaatggtgggttcccaatccagtccttccgtgtggagtacaagaagctaaagaaagtgggagactggattctggccaccagcgccatccccccatcgcggctgtccgtggagatcacgggcctagagaaaggcacctcctacaagtttcgagtccgggctctgaacatgctgggggagagcgagcccagcgccccctctcggccctacgtggtgtcgggctacagcggtcgcgtgtacgagaggcccgtggcaggtccttatatcaccttcacggatgcggtcaatgagaccaccatcatgctcaagtggatgtacatcccagcaagtaacaacaacaccccaatccatggcttttatatctattatcgacccacagacagtgacaatgatagtgactacaagaaggatatggtggaaggggacaagtactggcactccatcagccacctgcagccagagacctcctacgacattaagatgcagtgcttcaatgaaggaggggagagcgagttcagcaacgtgatgatctgtgagaccaaagctcggaagtcttctggccagcctggtcgactgccacccccaactctggccccaccacagccgccccttcctgaaaccatagagcggccggtgggcactggggccatggtggctcgctccagcgacctgccctatctgattgtcggggtcgtcctgggctccatcgttctcatcatcgtcaccttcatccccttctgcttgtggagggcctggtctaagcaaaaacatacaacagacctgggttttcctcgaagtgcccttccaccctcctgcccgtatactatggtgccattgggaggactcccaggccaccaggccagtggacagccctacctcagtggcatcagtggacgggcctgtgctaatgggatccacatgaataggggctgcccctcggctgcagtgggctacccgggcatgaagccccagcagcactgcccaggcgagcttcagcagcagagtgacaccagcagcctgctgaggcagacccatcttggcaatggatatgacccccaaagtcaccagatcacgaggggtcccaagtctagcccggacgagggctctttcttatacacactgcccgacgactccactcaccagctgctgcagccccatcacgactgctgccaacgccaggagcagcctgctgctgtgggccagtcaggggtgaggagagcccccgacagtcctgtcctggaagcagtgtgggaccctccatttcactcagggcccccatgctgcttgggccttgtgccagttgaagaggtggacagtcctgactcctgccaagtgagtggaggagactggtgtccccagcaccccgtaggggcctacgtaggacaggaacctggaatgcagctctccccggggccactggtgcgtgtgtcttttgaaacaccacctctcacaatttaggcagaagctgatatcccagaaagactatatattgttttttttttaaaaaaaaaaagaagaaaaaagagacagagaaaattggtatttatttttctattatagccatatttatatatttatgcacttgtaaataaatgtatatgttttataattctggagagacataaggagtcctacccgttgaggttggagagggaaaataaagaagctgccacctaacaggagtcacccaggaaagcaccgcacaggctggcgcgggacagactcctaacctggggcctctgcagtggcaggcgaggctgcaggaggcccacagataagctggcaagaggaaggatcccaggcacatggttcatcacgagcatgagggaacagcaaggggcacggtatcacagcctggagacacccacacagatggctggatccggtgctacgggaaacattttcctaagatgcccatgagaacagaccaagatgtgtacagcactatgagcattaaaaaaccttccagaatcaataatccgtggcaacatatctctgtaaaaacaaacactgtaacttctaaataaatgtttagtcttccctgtaaccttc

SEQ ID NO: 302342 - DNA, 4638 bp, Artificial Sequence
  derived and/or modified sequence
cctcctcctcctcctcgcacggtaatgggaggctcctaggcaggagaagcaaaagaaggaattgtttgcgagttcagtcatccaaaaagcttcttccatatggagggaccgggtgcgctgggcgcggcgtcccctgcgttgtcctcctgctgccgcccccgcggccgccgctttctgccgcggggaccctgagccccggcccgccggtgtcagccgccgcgcgcgcgcacagacacacacacagagacacacaaacacacacagaaaagacacacacgcgcacacacggcgcgcacaccctcacgcccgccacagccacaacacgcccgcacgcgccctccctctccggcccgcaacttctcggtcctcggctcctttgttgctccagccgcggccgctcgcccgtgttgtgtgtccccggtgtcaccgagcgtgttgtgtgtccgtgcggcgcggcgctgtgtggctccctcgcgcccaccacgctggcccccgggccccggctcgcccttcccaggcgccggctgcagcagagtttcagaacaagcttcctggaacccatgacccatgaagtcttgtcgacatttataccgtctgagggtagcagctcgaaagtagaagaaagtgttgccagggacggcagtatctctttgtgtgaccctggcggcttatgggacgttggcttcagacctttgtgatacaccatgctgcgtgggacgatgacggcgtggagaggaatgaggcctgaggtcacactggcttgcctcctcctagccacagcaggctgctttgctgacttgaacgaggtccctcaggtcaccgtccagcctgcgtccaccgtccagaagcccggaggcactgtgatcttgggctgcgtggtggaacctccaaggatgaatgtaacctggcgcctgaatggaaaggagctgaatggctcggatgatgctctgggtgtcctcatcacccacgggaccctcgtcatcactgcccttaacaaccacactgtgggacggtaccagtgtgtggcccggatgcctgcgggggctgtggccagcgtgccagccactgtgacactagccaatctccaggacttcaagttagatgtgcagcacgtgattgaagtggatgagggaaacacagcagtcattgcctgccacctgcctgagagccaccccaaagcccaggtccggtacagcgtcaaacaagagtggctggaggcctccagaggtaactacctgatcatgccctcagggaacctccagattgtgaatgccagccaggaggacgagggcatgtacaagtgtgcagcctacaacccagtgacccaggaagtgaaaacctccggctccagcgacaggctacgtgtgcgccgctccaccgctgaggctgcccgcatcatctaccccccagaggcccaaaccatcatcgtcaccaaaggccagagtctcattctggagtgtgtggccagtggaatcccacccccacgggtcacctgggccaaggatgggtccagtgtcaccggctacaacaagacgcgcttcctgctgagcaacctcctcatcgacaccaccagcgaggaggactcaggcacctaccgctgcatggccgacaatggggttgggcagcccggggcagcggtcatcctctacaatgtccaggtgtttgaaccccctgaggtcaccatggagctatcccagctggtcatcccctggggccagagtgccaagcttacctgtgaggtgcgtgggaaccccccgccctccgtgctgtggctgaggaatgctgtgcccctcatctccagccagcgcctccggctctcccgcagggccctgcgcgtgctcagcatggggcctgaggacgaaggcgtctaccagtgcatggccgagaacgaggttgggagcgcccatgccgtagtccagctgcggacctccaggccaagcataaccccaaggctatggcaggatgctgagctggctactggcacacctcctgtatcaccctccaaactcggcaaccctgagcagatgctgagggggcaaccggcgctccccagacccccaacgtcagtggggcctgcttccccgcagtgtccaggagagaaggggcagggggctcccgccgaggctcccatcatcctcagctcgccccgcacctccaagacagactcatatgaactggtgtggcggcctcggcatgagggcagtggccgggcgccaatcctctactatgtggtgaaacaccgcaaggtcacaaattcctctgacgattggaccatctctggcattccagccaaccagcaccgcctgaccctcaccagacttgaccccgggagcttgtatgaagtggagatggcagcttacaactgtgcgggagagggccagacagccatggtcaccttccgaactggacggcggcccaaacccgagatcatggccagcaaagagcagcagatccagagagacgaccctggagccagtccccagagcagcagccagccagaccacggccgcctctcccccccagaagctcccgacaggcccaccatctccacggcctccgagacctcagtgtacgtgacctggattccccgtgggaatggtgggttcccaatccagtccttccgtgtggagtacaagaagctaaagaaagtgggagactggattctggccaccagcgccatccccccatcgcggctgtccgtggagatcacgggcctagagaaaggcacctcctacaagtttcgagtccgggctctgaacatgctgggggagagcgagcccagcgccccctctcggccctacgtggtgtcgggctacagcggtcgcgtgtacgagaggcccgtggcaggtccttatatcaccttcacggatgcggtcaatgagaccaccatcatgctcaagtggatgtacatcccagcaagtaacaacaacaccccaatccatggcttttatatctattatcgacccacagacagtgacaatgatagtgactacaagaaggatatggtggaaggggacaagtactggcactccatcagccacctgcagccagagacctcctacgacattaagatgcagtgcttcaatgaaggaggggagagcgagttcagcaacgtgatgatctgtgagaccaaagctcggaagtcttctggccagcctggtcgactgccacccccaactctggccccaccacagccgccccttcctgaaaccatagagcggccggtgggcactggggccatggtggctcgctccagcgacctgccctatctgattgtcggggtcgtcctgggctccatcgttctcatcatcgtcaccttcatccccttctgcttgtggagggcctggtctaagcaaaaacatacaacagacctgggttttcctcgaagtgcccttccaccctcctgcccgtatactatggtgccattgggaggactcccaggccaccaggccagtggacagccctacctcagtggcatcagtggacgggcctgtgctaatgggatccacatgaataggggctgcccctcggctgcagtgggctacccgggcatgaagccccagcagcactgcccaggcgagcttcagcagcagagtgacaccagcagcctgctgaggcagacccatcttggcaatggatatgacccccaaagtcaccagatcacgaggggtcccaagtctagcccggacgagggctctttcttatacacactgcccgacgactccactcaccagctgctgcagccccatcacgactgctgccaacgccaggagcagcctgctgctgtgggccagtcaggggtgaggagagcccccgacagtcctgtcctggaagcagtgtgggaccctccatttcactcagggcccccatgctgcttgggccttgtgccagttgaagaggtggacagtcctgactcctgccaagtgagtggaggagactggtgtccccagcaccccgtaggggcctacgtaggacaggaacctggaatgcagctctccccggggccactggtgcgtgtgtcttttgaaacaccacctctcacaatttaggcagaagctgatatcccagaaagactatatattgttttttttttaaaaaaaaaaagaagaaaaaagagacagagaaaattggtatttatttttctattatagccatatttatatatttatgcacttgtaaataaatgtatatgttttataattctggagagacataaggagtcctacccgttgaggttggagagggaaaataaagaagctgccacctaacaggagtcacccaggaaagcaccgcacaggctggcgcgggacagactcctaacctggggcctctgcagtggcaggcgaggctgcaggaggcccacagataagctggcaagaggaaggatcccaggcacatggttcatcacgagcatgagggaacagcaaggggcacggtatcacagcctggagacacccacacagatggctggatccggtgctacgggaaacattttcctaagatgcccatgagaacagaccaagatgtgtacagcactatgagcattaaaaaaccttccagaatcaataatccgtggcaacatatctctgtaaaaacaaacactgtaacttctaaataaatgtttagtcttccctgtaa

SEQ ID NO: 302343 - DNA, 561 bp, Artificial Sequence
  derived and/or modified sequence
gagctgcggccgaggctgggcgcgccgggcgccgggcgaagaagttggggcgaggcgggcagcgggggtcccgggggctgcagccgctacggggcccaggggcgccgcatctcgttccctgccgcagcggtctggccgggcgatggtggtttcgcctcagcggttcccagaagcttctcgggtggaagaaggatccagccagcctcccaaacttccaccgaaggttgacaccagcgccccggccccatgctccaggccgtggggggaacccgaggcgtggcggcaaatgcgtagagtcactcaacacgcactcggcctctttggaggtttcagaacaagcttcctggaacccatgacccatgaagtcttgtcgacatttataccgtctgagggtagcagctcgaaagtagaagaaagtgttgccagggacggcagtatctctttgtgtgaccctggcggcttatgggacgttggcttcagacctttgtgatacaccatgctgcgtgggacgatgacggcgtggagaggaatgaggcctgaggtcacactggcttgcctcct

SEQ ID NO: 302344 - DNA, 544 bp, Artificial Sequence
  derived and/or modified sequence
actaaaatgaggaactcagcggaccgggagcgacgcagcttgagggaagcatccctagctgttggcgcagaggggcgaggctgaagccgagtggcccgaggtgtctgaggggctggggcaaaggtgaaagagtttcagaacaagcttcctggaacccatgacccatgaagtcttgtcgacatttataccgtctgagggtagcagctcgaaagtagaagaagtgggtgaggttttctcttcagtctgatagctctggcctattaggtcagccatttgttcatgttttgtgttaccacttagagatagtttttctcatcctcaagtattgggagtccaactttgagtggaatctggactaaacttcagagtgttgccagggacggcagtatctctttgtgtgaccctggcggcttatgggacgttggcttcagacctttgtgatacaccatgctgcgtgggacgatgacggcgtggagaggaatgaggcctgaggtcacactggcttgcctcctcctagccacagcaggctgctttgctgacttga

SEQ ID NO: 302345 - protein, 966 aa, Artificial Sequence
  derived and/or modified sequence
MANFQEHLSCSSSPHLPFSESKTFNGLQDELTAMGNHPSPKLLEDQQEKGMVRTELIESVHSPVTTTVLTSVSEDSRDQFENSVLQLREHDESETAVSQGNSNTVDGESTSGTEDIKIQFSRSGSGSGGFLEGLFGCLRPVWNIIGKAYSTDYKLQQQDTWEVPFEEISELQWLGSGAQGAVFLGKFRAEEVAIKKVREQNETDIKHLRKLKHPNIIAFKGVCTQAPCYCIIMEYCAHGQLYEVLRAGRKITPRLLVDWSTGIASGMNYLHLHKIIHRDLKSPNVLVTHTDAVKISDFGTSKELSDKSTKMSFAGTVAWMAPEVIRNEPVSEKVDIWSFGVVLWELLTGEIPYKDVDSSAIIWGVGSNSLHLPVPSTCPDGFKILMKQTWQSKPRNRPSFRQTLMHLDIASADVLATPQETYFKSQAEWREEVKKHFEKIKSEGTCIHRLDEELIRRRREELRHALDIREHYERKLERANNLYMELSAIMLQLEMREKELIKREQAVEKKYPGTYKRHPVRPIIHPNAMEKLMKRKGVPHKSGMQTKRPDLLRSEGIPTTEVAPTASPLSGSPKMSTSSSKSRYRSKPRHRRGNSRGSHSDFAAILKNQPAQENSPHPTYLHQAQSQYPSLHHHNSLQQQYQQPPPAMSQSHHPRLNMHGQDIATCANNLRYFGPAAALRSPLSNHAQRQLPGSSPDLISTAMAADCWRSSEPDKGQAGPWGCCQADAYDPCLQCRPEQYGSLDIPSAEPVGRSPDLSKSPAHNPLLENAQSSEKTEENEFSGCRSESSLGTSHLGTPPALPRKTRPLQKSGDDSSEEEEGEVDSEVEFPRRQRPHRCISSCQSYSTFSSENFSVSDGEEGNTSDHSNSPDELADKLEDRLAEKLDDLLSQTPEIPIDISSHSDGLSDKECAVRRVKTQMSLGKLCVEERGYENPMQFEESDCDSSDGECSDATVRTNKHYSSATW

SEQ ID NO: 302346 - protein, 137 aa, Artificial Sequence
  derived and/or modified sequence
MANFQEHLSCSSSPHLPFSESKTFNGLQDELTAMGNHPSPKLLEDQQEKGMVRTELIESVHSPVTTTVLTSVSEDSRDQFENSVLQLREHDESETAVSQGNSNTVDGESTSGTEDIKIQFSRSGSGSGGFLEGLFGC

SEQ ID NO: 302347 - protein, 113 aa, Artificial Sequence
  derived and/or modified sequence
MANFQEHLSCSSSPHLPFSESKTFNGLQDELTAMGNHPSPKLLEDQQEKGMVRTELIESVHSPVTTTVLTSVSEDSRDQFENSVLQLREHDESETAVSQGNSNTVDGESTSGT

SEQ ID NO: 302348 - protein, 822 aa, Artificial Sequence
  derived and/or modified sequence
MSYVECKCLQLENKNTWEVPFEEISELQWLGSGAQGAVFLGKFRAEEVAIKKVREQNETDIKHLRKLKHPNIIAFKGVCTQAPCYCIIMEYCAHGQLYEVLRAGRKITPRLLVDWSTGIASGMNYLHLHKIIHRDLKSPNVLVTHTDAVKISDFGTSKELSDKSTKMSFAGTVAWMAPEVIRNEPVSEKVDIWSFGVVLWELLTGEIPYKDVDSSAIIWGVGSNSLHLPVPSTCPDGFKILMKQTWQSKPRNRPSFRQTLMHLDIASADVLATPQETYFKSQAEWREEVKKHFEKIKSEGTCIHRLDEELIRRRREELRHALDIREHYERKLERANNLYMELSAIMLQLEMREKELIKREQAVEKKYPGTYKRHPVRPIIHPNAMEKLMKRKGVPHKSGMQTKRPDLLRSEGIPTTEVAPTASPLSGSPKMSTSSSKSRYRSKPRHRRGNSRGSHSDFAAILKNQPAQENSPHPTYLHQAQSQYPSLHHHNSLQQQYQQPPPAMSQSHHPRLNMHGQDIATCANNLRYFGPAAALRSPLSNHAQRQLPGSSPDLISTAMAADCWRSSEPDKGQAGPWGCCQADAYDPCLQCRPEQYGSLDIPSAEPVGRSPDLSKSPAHNPLLENAQSSEKTEENEFSGCRSESSLGTSHLGTPPALPRKTRPLQKSGDDSSEEEEGEVDSEVEFPRRQRPHRCISSCQSYSTFSSENFSVSDGEEGNTSDHSNSPDELADKLEDRLAEKLDDLLSQTPEIPIDISSHSDGLSDKECAVRRVKTQMSLGKLCVEERGYENPMQFEESDCDSSDGECSDATVRTNKHYSSATW

SEQ ID NO: 302349 - DNA, 2901 bp, Artificial Sequence
  derived and/or modified sequence
atggctaatttccaggagcatttgagctgcagctcctcaccccatctgcccttctccgagagcaagacctttaacggcctgcaggacgaactgaccgcaatggggaatcacccgagcccgaagctgttggaggatcaacaggagaaaggcatggtccggaccgaacttatcgaatccgtgcattcacctgttactactaccgtgctcaccagcgttagtgaggatagcagagatcagtttgaaaacagtgttttgcagcttagagagcacgatgagagcgagaccgcggtctctcagggcaattctaacaccgttgacggtgagtccaccagcggaacggaggacatcaaaattcagttctcccggagcggatccggttcagggggattcttggaaggtctgtttggatgtctcagacccgtgtggaatatcatcggcaaggcatactccactgactacaagctgcagcagcaggacacctgggaggtgccctttgaagagatcagcgaactccaatggctaggcagtggtgcgcagggggccgtgtttctggggaagtttcgtgccgaagaggtggcaattaaaaaagttcgtgagcaaaacgaaaccgacattaaacacctccggaagctgaaacaccccaatattatcgcttttaaaggagtttgcacccaggcaccttgctactgcattattatggaatactgcgctcacgggcagttgtacgaggtgttacgggcaggccggaagattactccgagactgttagtggactggtccactgggattgcgagcggcatgaattacctccacctccacaaaattatccaccgtgacctgaaatctccaaacgtcctcgtgactcacactgacgcagtcaagatatccgatttcgggacctctaaggaattatccgataaatctacgaaaatgtccttcgcaggcacagtggcctggatggctcccgaggtgattcgtaacgagccagtctcagaaaaggtcgatatctggtcctttggggtggtgctgtgggagttactgacgggtgagatcccgtataaggacgttgattcatctgctattatatggggcgttggctctaatagtctccacctgcccgtgccttcaacatgtcccgatggatttaagatactgatgaagcagacatggcagtccaagcctcgcaatcgccccagttttcgccagacattgatgcacctcgatatcgcctctgccgacgtgctcgcaactccccaggagacctacttcaaatcccaggcggaatggcgggaggaagtgaagaagcacttcgaaaagatcaagtccgagggtacatgtatccacagattagacgaagaactcattcggcggcgtagagaggagctgcgccacgctctggacatccgtgagcactatgagcgtaaactcgaaagggccaacaacctttatatggaactgtccgcaattatgttgcagctggagatgagagaaaaggaactgattaagagagagcaggcggtggagaagaagtatcctggaacttacaaacggcaccctgttagacccatcatccatccaaacgccatggagaagcttatgaagcggaaaggagtcccgcacaaatccggaatgcaaaccaagcgaccggatctcctccggagcgagggcattcctacaacagaggtagcacccacggcgagtcctctttcagggtcccccaaaatgtcaacctcatccagcaagtctcgctaccgctctaagccgcgccataggagaggcaacagtcgggggtcgcactctgattttgctgccatcctcaaaaaccagcccgcgcaggagaatagtccccacccaacatacctgcatcaggcgcagtcccagtatccgtctttacatcatcacaactctctgcaacagcaataccaacaaccacctcccgccatgagtcaatcacatcacccgcggctgaatatgcacgggcaggatatcgcaacatgcgcaaacaatttgcggtacttcggccctgcagctgctcttcggtcccctctcagcaaccatgcccagcgtcagctccccggatccagcccagatttgatcagcacagcaatggccgctgactgttggagatctagcgagccagacaagggtcaagctggaccctgggggtgttgccaggctgatgcttacgatccatgcttgcagtgtcgcccagagcagtacggcagcctcgacattcccagcgctgagccagtcgggaggagcccagatctgtctaaatcacctgcacataatcctttgcttgaaaacgcccaaagcagcgagaaaacggaagagaacgaatttagtggctgccggagtgaatcttcgttggggaccagccatcttgggactccccctgccctcccacgaaagactcgtccactgcagaaatccggggatgacagtagcgaagaggaggagggagaagtcgactctgaggttgaattccctaggcggcagcggccccatcgctgcataagttcttgtcagtcctactccacattcagttcagagaactttagcgtaagcgacggggaggaaggtaacacctctgatcacagcaactcccccgacgagcttgccgacaagctcgaggaccgacttgccgagaagctcgacgatttattgagccagacaccggagatccctatcgatattagctcacacagcgatggcctctcagataaagaatgtgccgtccgtagggtcaagactcagatgtccctgggcaagttgtgcgtagaggagagggggtacgagaatccaatgcagtttgaagaatccgactgcgactccagcgatggagagtgtagtgatgcgacagtgaggacaaacaaacactactcttctgcaacttggtag

SEQ ID NO: 302350 - DNA, 2901 bp, Artificial Sequence
  derived and/or modified sequence
atggccaacttccaagagcatctgagctgttcctccagtccccatttgcctttcagcgaatcaaagaccttcaacgggttacaagatgaattgacggccatgggaaatcacccaagccctaaactcctggaggatcagcaggaaaagggaatggtgcggactgaactgattgagtcggtccacagtcctgtgactacgacagttctgacaagtgtaagtgaggattcgagggatcagtttgagaacagtgtcctgcaactgcgtgagcatgatgagagtgagaccgcagttagccagggtaatagtaatactgtggatggagaaagcacatccggaactgaggacataaagatccagttttcgcgaagcggatccgggtcaggtggctttctggagggactattcggatgcctcagacctgtgtggaacatcatcggaaaggcttattctacagactataaactgcagcagcaagatacatgggaagtgcccttcgaggagatcagcgagctgcagtggttgggctcaggtgctcaaggagcagtcttcctgggaaaattccgagctgaggaagtcgccattaagaaggtccgcgagcagaacgagactgacattaagcacctgagaaagctgaagcatcccaatatcattgcctttaagggcgtctgtacacaggcaccttgctattgcatcatcatggaatattgtgcccacggtcaactgtacgaagttctcagggccggacggaaaatcacaccaaggctgctggtagactggtccactgggattgcatctggaatgaactatctgcaccttcataagatcatccatcgagatcttaagtctcccaatgtgctggtcactcacactgacgcagtgaaaatctcagactttggcactagtaaggagctttcagataagtctactaagatgagctttgccgggaccgttgcctggatggcccctgaggtcattcgtaatgagcccgtttctgagaaggtggacatatggtcatttggagtggtgctgtgggagctgcttacaggagagatcccctacaaagatgttgactcctccgctattatttggggcgtcgggagcaactctctgcacctccccgtgccatctacttgtcccgacggtttcaaaattctgatgaaacagacctggcagtcaaaacctcgtaaccgcccgtctttccggcagaccctcatgcacctggatatcgcctccgccgatgtcctcgccaccccgcaagaaacatatttcaaatcccaggccgagtggcgagaggaggtgaagaagcacttcgaaaaaattaagtcggaggggacatgcatccatcgcttagacgaggagttgatccgtaggagaagggaggagctgagacatgcactggacatccgggaacattacgaacggaagctggagcgagcgaataatctctatatggagctctccgccatcatgctgcaattagaaatgagggaaaaggagctgattaagcgtgagcaagcagttgagaaaaagtaccccgggacctacaaaagacaccctgttagacctatcatccaccccaacgccatggaaaagctgatgaagcggaaaggcgtgccgcacaaaagcggtatgcagacaaaaaggccagacctcttacgatccgagggaatacccactaccgaagtggcgccaactgcgtctcccctgtccgggtcccctaaaatgtccacttcctcctcaaaatccaggtacagatccaaaccaagacataggcgcggaaacagtagaggtagccactccgattttgctgcaatattaaagaaccagcccgcgcaggagaactccccccatcccacttatctgcatcaggctcaaagccagtatcctagtttgcaccaccacaactccttgcaacagcaataccagcagccaccacccgctatgtcccagtcacatcatccacgattgaacatgcatgggcaggacatcgctacatgtgcaaacaacttgcggtattttgggcccgcagctgccttgcgttcccctctgtccaaccacgcccagcgacagctgcccggcagctctcccgacttaattagtactgctatggcagccgactgctggaggagcagcgagcccgataaaggccaagctgggccctgggggtgttgccaggcggacgcatatgacccatgtctgcagtgccgccccgaacagtatggtagtctcgacattccaagcgctgagcctgtcggaaggagcccagacctcagcaagagccctgcacacaatccgctcctcgagaacgcccagagcagtgagaagacagaggagaacgagttcagcggatgtcgcagcgaatcctcccttggaacgagtcaccttggcacacctcccgccttacctcgaaaaactcggcctttgcaaaaaagcggtgacgattcttccgaagaggaagaaggagaggtggactccgaggtagaatttccccgacgccagagaccccacagatgtatcagctcctgtcagtcttattcaaccttcagcagcgagaatttttcagtttcggatggcgaggaaggtaatacgagcgaccactccaattctcccgatgaactggccgataaattagaggacagactggccgaaaaactggacgacttgctcagccagacgcctgagatccctatcgatatttcctctcacagcgatggcttgagcgacaaggaatgcgcggtgcgcagggtcaagacccaaatgtccctgggtaaactttgtgtggaggaaagggggtacgagaatcccatgcagttcgaggagagtgactgtgattcatcagacggcgaatgcagcgacgccactgtgcgcactaataagcactactcttctgcgacctggtag

SEQ ID NO: 302351 - DNA, 414 bp, Artificial Sequence
  derived and/or modified sequence
atggccaatttccaggagcacctttcctgctcttcatcaccccatctgccgttctcggagtctaaaacgttcaatggcctgcaagacgagttgacagctatgggaaatcatccatcccccaaactgctcgaagaccagcaagagaagggcatggttagaaccgagcttatcgagtctgttcactcccccgtcactacgactgtgttaacatcggtgtccgaggattccagggatcagtttgaaaacagcgttctgcagctgcgagaacatgacgagagcgaaactgccgtttcgcaaggaaattcaaacaccgtcgatggcgaaagcacatcagggacagaggatattaagatacagttttcccggtcagggtccgggtctggcggtttcctggagggtctgttcgggtgctag

SEQ ID NO: 302352 - DNA, 342 bp, Artificial Sequence
  derived and/or modified sequence
atggccaatttccaggagcacctgtcttgctcttcatcccctcacctgcccttctcggagagcaaaacgtttaacggcctccaggatgaactgacagctatgggcaaccaccctagtccaaagttgcttgaggatcagcaagagaaagggatggtacggacagagctgatcgagtccgtgcattcacctgtcaccaccaccgtcctcacttctgtgagcgaggactccagggaccagtttgagaactctgtgctgcaactcagagagcatgatgaatctgagaccgctgtctcgcagggaaacagtaacacggtagatggtgagtctacatccggtacctag

SEQ ID NO: 302353 - DNA, 2469 bp, Artificial Sequence
  derived and/or modified sequence
atgtcctacgtagaatgcaagtgcctgcagctggagaataaaaacacgtgggaagtaccgttcgaggagattagcgagctgcagtggcttggcagtggggcgcagggagcggtttttttagggaaatttcgggccgaagaggttgccatcaagaaagttcgtgaacagaacgagactgacatcaagcacttgaggaagctcaagcaccctaacatcatcgccttcaaaggcgtgtgtactcaggcgccgtgttactgcatcatcatggaatattgtgcccatggacagctttacgaagtccttcgtgccggccgaaagataacgcctagacttctggtggactggagcactggaatcgctagtggaatgaactatctacatctgcacaagatcatacacagggacctaaagtctccaaacgtcctagttacccacacagacgctgtcaaaatatccgacttcgggaccagcaaggagctgtccgataagagcactaagatgagcttcgccggcactgtcgcctggatggctccggaagttatcaggaacgagcccgtgtcagagaaagtggacatctggtccttcggggtggttctctgggagctgctgacgggggagatcccttataaggatgtggattcatcagctattatctggggggttggatccaattccctccatctgcctgtccccagcacatgtccggatggatttaagatattgatgaagcaaacctggcagtcgaagccccgcaaccgtccttcttttagacagaccctgatgcacttggatattgctagcgcagacgttctagcaactccccaagaaacctactttaagagccaggccgaatggcgtgaagaggttaaaaagcacttcgagaagataaagtccgagggcacttgcatacaccgactcgacgaggagctaatccgacgtcgtcgtgaagagctgagacatgctcttgatatccgagaacactacgagagaaaacttgaacgggccaataacctctacatggaactgagtgccataatgcttcaacttgagatgagagagaaagagctgatcaaacgggagcaggccgtggagaagaaataccccggcacttataagagacacccagtgcggcctattattcacccaaatgctatggaaaaactgatgaaacgaaagggcgtgccgcacaagtcgggcatgcaaacaaagcgtcctgacctccttcggtccgagggcatccccaccacagaagtagccccgacagctagccctctgtctggatctcctaagatgtctacaagctcatccaagtccaggtatagaagtaaaccgaggcaccggcgcggcaactccaggggctcgcactccgatttcgccgcgatcctgaagaatcagcccgctcaggagaattcaccacaccccacttacctccaccaggcacagagtcagtatcccagcctgcatcaccataacagcctccagcagcagtatcaacaacccccccccgctatgtctcagtctcaccacccaaggttaaacatgcacggacaggacatagccacatgcgccaacaaccttcggtacttcggccctgctgccgccctgcgatcccctctgtccaaccacgcacaacgccagctaccgggatcttcccctgacctgatctctacagctatggccgccgactgttggcggtcttccgagcccgacaagggacaggccggaccttggggctgttgccaggcagatgcctacgacccttgtctgcagtgccgtcccgaacagtatgggtcgcttgacatccccagcgctgagcccgtgggaagatctcccgacctttcaaaatctccagcccataatccccttttagaaaatgcacaatcatctgagaaaaccgaggaaaacgagttctccggatgcaggtctgagagtagtttgggtacctcacacctggggacccctccggcactgcccaggaagacccggcctctacagaaatcaggagacgatagtagcgaagaagaagaaggcgaagtggacagtgaggtcgaattcccacggcgtcagcggcctcaccgctgcatcagttcctgccaatcttactctacgttctcaagcgagaatttctctgtaagcgatggagaggaaggcaatacaagcgaccattccaacagccctgacgaactggcagataagctggaagatcgcctcgcggaaaagttggatgacctgctaagccagacaccagagatacccatcgacatcagcagccactccgatggactatcggataaggagtgcgcagtcaggcgggtgaagacccaaatgtccctgggtaaactgtgtgtagaagaacgaggctacgagaaccccatgcaatttgaggaatcagattgcgacagcagcgacggtgaatgctcagacgccacggttcgtaccaataagcactacagtagtgcaacgtggtag

SEQ ID NO: 302354 - DNA, 2901 bp, Artificial Sequence
  derived and/or modified sequence
atggccaacttccaggagcacctgagctgcagcagcagcccccacctgcccttcagcgagagcaagaccttcaacggcctgcaggatgagctgacagccatgggcaaccaccccagccccaagctgctggaggaccagcaggagaagggcatggtgaggacagagctgattgaatctgtgcacagccctgtgaccaccaccgtgctgacctctgtgtctgaggacagccgggaccagtttgaaaattctgtgctgcagctgcgggagcatgatgaaagtgaaacagctgtgtcccagggcaacagcaacacagtggatggagagagcaccagcggcacagaggacatcaagatccagttcagccgcagcggcagcggcagcggcggcttcctggagggcctgtttggctgcctgcggcctgtgtggaacatcatcggcaaggcctacagcacagactacaagctgcagcagcaggacacctgggaggtgccctttgaggagatcagcgagctgcagtggctgggcagcggggcccagggcgctgtgttcctgggcaagttccgggcagaggaggtggccatcaagaaggtgcgggagcagaatgaaacagacatcaagcacctgaggaagctgaagcaccccaacatcatcgccttcaagggcgtgtgcacccaggccccctgctactgcatcatcatggagtactgtgcccacggccagctgtatgaggtgctgcgggccggcaggaagatcaccccccggctgctggtggactggagcactggaattgccagcggcatgaactacctgcacctgcacaagatcatccaccgggacctgaagagccccaacgtgctggtgacccacacagatgctgtgaagatcagtgactttggcaccagcaaggagctgagtgacaagagcaccaagatgagctttgctggcaccgtggcctggatggcccctgaggtgatcagaaatgaacctgtgtctgagaaggtggacatctggagctttggagtggtgctgtgggagctgctgaccggggagatcccctacaaggatgtggacagcagcgccatcatctggggcgtgggcagcaacagcctgcacctgcctgtgcccagcacctgcccagatggcttcaagatcctgatgaagcagacctggcagagcaagcccaggaaccggcccagcttccggcagaccctgatgcacctggacatcgccagcgcagatgtgctggccaccccccaggagacctacttcaagagccaggccgagtggagggaggaggtgaagaagcactttgagaagatcaagtctgagggcacctgcatccaccggctggatgaggagctgatcagaagaagaagagaggagctgcggcatgccctggacatccgggagcactatgaaaggaagctggagcgggccaacaacctgtacatggagctgagcgccatcatgctgcagctggagatgagggagaaggagctgatcaagcgggagcaggccgtggagaagaagtacccaggcacctacaagaggcaccctgtgcggcccatcatccaccccaatgccatggagaagctgatgaagaggaagggcgtgccccacaagagcggcatgcagaccaagaggccagacctgctgcggtctgagggcatccccaccacagaggtggcccccacagccagccccctgagcggcagccccaagatgagcaccagcagcagcaagagccgctaccgcagcaagcccaggcacagaagaggcaacagccggggcagccacagcgactttgctgccatcctgaagaaccagcctgcccaggagaacagcccccaccccacctacctgcaccaggcccagagccagtaccccagcctgcaccaccacaacagcctgcagcagcagtaccagcagcccccaccagccatgagccagagccaccacccccggctgaacatgcacggccaggacatcgccacctgtgccaacaacctgcgctactttggacctgctgctgccctgcggagccccctgagcaaccacgcccagaggcagctgcccggcagcagcccagacctgatcagcacagccatggctgctgactgctggaggagcagcgagccagacaagggccaggccggcccctggggctgctgccaggctgatgcctatgacccctgcctgcagtgcaggcctgagcagtatggcagcctggacatccccagcgctgagcctgtgggccgcagcccagacctgagcaagagccctgcccacaaccccctgctggagaatgcccagagcagcgagaagacagaggagaatgagttcagcggctgccgctctgagagcagcctgggcaccagccacctgggcaccccaccagccctgcccaggaagacccggcccctgcagaagtctggagatgacagcagcgaggaggaggagggggaggtggacagcgaggtggagttcccccggcggcagaggccccaccgctgcatcagcagctgccagagctacagcaccttcagcagcgagaacttctctgtgtctgatggagaggagggcaacaccagtgaccacagcaacagcccagatgagctggccgacaagctggaggaccggctggccgagaagctggatgacctgctgagccagaccccagagatccccatcgacatcagcagccacagtgatggcctgagtgacaaggaatgtgctgtgcggcgggtgaagacccagatgagcctgggcaagctgtgtgtggaggagcggggctatgagaaccccatgcagtttgaggagagtgactgtgacagcagtgatggagaatgttctgatgccaccgtgaggaccaacaagcactacagcagcgccacctggtag

SEQ ID NO: 302355 - DNA, 414 bp, Artificial Sequence
  derived and/or modified sequence
atggccaacttccaggagcacctgagctgcagcagcagcccccacctgcccttcagcgagagcaagaccttcaacggcctgcaggatgagctgacagccatgggcaaccaccccagccccaagctgctggaggaccagcaggagaagggcatggtgaggacagagctgattgaatctgtgcacagccctgtgaccaccaccgtgctgacctctgtgtctgaggacagccgggaccagtttgaaaattctgtgctgcagctgcgggagcatgatgaaagtgaaacagctgtgtcccagggcaacagcaacacagtggatggagagagcaccagcggcacagaggacatcaagatccagttcagccgcagcggcagcggcagcggcggcttcctggagggcctgtttggctgctag

SEQ ID NO: 302356 - DNA, 342 bp, Artificial Sequence
  derived and/or modified sequence
atggccaacttccaggagcacctgagctgcagcagcagcccccacctgcccttcagcgagagcaagaccttcaacggcctgcaggatgagctgacagccatgggcaaccaccccagccccaagctgctggaggaccagcaggagaagggcatggtgaggacagagctgattgaatctgtgcacagccctgtgaccaccaccgtgctgacctctgtgtctgaggacagccgggaccagtttgaaaattctgtgctgcagctgcgggagcatgatgaaagtgaaacagctgtgtcccagggcaacagcaacacagtggatggagagagcaccagcggcacctag

SEQ ID NO: 302357 - DNA, 2469 bp, Artificial Sequence
  derived and/or modified sequence
atgtcctatgtggagtgcaagtgcctgcagctggagaacaagaacacctgggaggtgccctttgaggagatcagcgagctgcagtggctgggcagcggggcccagggcgctgtgttcctgggcaagttccgggcagaggaggtggccatcaagaaggtgcgggagcagaatgaaacagacatcaagcacctgaggaagctgaagcaccccaacatcatcgccttcaagggcgtgtgcacccaggccccctgctactgcatcatcatggagtactgtgcccacggccagctgtatgaggtgctgcgggccggcaggaagatcaccccccggctgctggtggactggagcactggaattgccagcggcatgaactacctgcacctgcacaagatcatccaccgggacctgaagagccccaacgtgctggtgacccacacagatgctgtgaagatcagtgactttggcaccagcaaggagctgagtgacaagagcaccaagatgagctttgctggcaccgtggcctggatggcccctgaggtgatcagaaatgaacctgtgtctgagaaggtggacatctggagctttggagtggtgctgtgggagctgctgaccggggagatcccctacaaggatgtggacagcagcgccatcatctggggcgtgggcagcaacagcctgcacctgcctgtgcccagcacctgcccagatggcttcaagatcctgatgaagcagacctggcagagcaagcccaggaaccggcccagcttccggcagaccctgatgcacctggacatcgccagcgcagatgtgctggccaccccccaggagacctacttcaagagccaggccgagtggagggaggaggtgaagaagcactttgagaagatcaagtctgagggcacctgcatccaccggctggatgaggagctgatcagaagaagaagagaggagctgcggcatgccctggacatccgggagcactatgaaaggaagctggagcgggccaacaacctgtacatggagctgagcgccatcatgctgcagctggagatgagggagaaggagctgatcaagcgggagcaggccgtggagaagaagtacccaggcacctacaagaggcaccctgtgcggcccatcatccaccccaatgccatggagaagctgatgaagaggaagggcgtgccccacaagagcggcatgcagaccaagaggccagacctgctgcggtctgagggcatccccaccacagaggtggcccccacagccagccccctgagcggcagccccaagatgagcaccagcagcagcaagagccgctaccgcagcaagcccaggcacagaagaggcaacagccggggcagccacagcgactttgctgccatcctgaagaaccagcctgcccaggagaacagcccccaccccacctacctgcaccaggcccagagccagtaccccagcctgcaccaccacaacagcctgcagcagcagtaccagcagcccccaccagccatgagccagagccaccacccccggctgaacatgcacggccaggacatcgccacctgtgccaacaacctgcgctactttggacctgctgctgccctgcggagccccctgagcaaccacgcccagaggcagctgcccggcagcagcccagacctgatcagcacagccatggctgctgactgctggaggagcagcgagccagacaagggccaggccggcccctggggctgctgccaggctgatgcctatgacccctgcctgcagtgcaggcctgagcagtatggcagcctggacatccccagcgctgagcctgtgggccgcagcccagacctgagcaagagccctgcccacaaccccctgctggagaatgcccagagcagcgagaagacagaggagaatgagttcagcggctgccgctctgagagcagcctgggcaccagccacctgggcaccccaccagccctgcccaggaagacccggcccctgcagaagtctggagatgacagcagcgaggaggaggagggggaggtggacagcgaggtggagttcccccggcggcagaggccccaccgctgcatcagcagctgccagagctacagcaccttcagcagcgagaacttctctgtgtctgatggagaggagggcaacaccagtgaccacagcaacagcccagatgagctggccgacaagctggaggaccggctggccgagaagctggatgacctgctgagccagaccccagagatccccatcgacatcagcagccacagtgatggcctgagtgacaaggaatgtgctgtgcggcgggtgaagacccagatgagcctgggcaagctgtgtgtggaggagcggggctatgagaaccccatgcagtttgaggagagtgactgtgacagcagtgatggagaatgttctgatgccaccgtgaggaccaacaagcactacagcagcgccacctggtag

SEQ ID NO: 302358 - DNA, 9876 bp, Artificial Sequence
  derived and/or modified sequence
ccctcttttttttttcatgacacacaccacagcgaagtctgtgcggaatcctaaaccagcccaatttacatccattcatgaatctgtgacgtcagcaagcctttgggctcctttgcggtgggctggaggattgtgtgggtggaatccccctcccctttatttttccaattctgcaaggcttttaaaattcaccttacatcttttcaaagcaagaaaatggaacagcatgtgtaggaattcttcgttgttgttttggagccctctcttaagtcagaactctgtcccaaaaatcttctgagtgtcatctcaggactttggttatactcatggcacgatggccaactttcaggagcacctgagctgctcctcttctccacacttacccttcagtgaaagcaaaaccttcaatggactacaagatgagctcacagctatggggaaccacccttctcccaagctgctcgaggaccagcaggaaaaggggatggtacgaacagagctaatcgagagcgtgcacagccccgtcaccacaacagtgttgacgagcgtaagtgaggattccagggaccagtttgagaacagcgttcttcagctaagggaacacgatgaatcagagacggcggtgtctcaggggaacagcaacacggtggacggagagagcacaagcggaactgaagacataaagattcagttcagcaggtcaggcagtggcagtggtgggtttcttgaaggactatttggatgcttaaggcctgtatggaatatcattgggaaggcatattccactgattacaaattgcagcagcaagatacttgggaagtgccatttgaggagatctcagagctgcagtggctgggtagtggagcccaaggagcggtcttcttgggcaagttccgggcggaagaggtggccatcaagaaagtgagagaacagaatgagacggatatcaagcatttgaggaagttgaagcaccctaacatcatcgcattcaagggtgtttgtactcaggccccatgttattgtattatcatggaatactgtgcccatggacaactctacgaggtcttacgagctggcaggaagatcacacctcgattgctagtagactggtccacaggaattgcaagtggaatgaattatttgcacctccataaaattattcatcgtgatctcaaatcacctaatgttttagtgacccacacagatgcggtaaaaatttcagattttggtacatctaaggaactcagtgacaaaagtaccaagatgtcatttgctggcacggtcgcatggatggcgccagaggtgatacggaatgaacctgtctctgaaaaagttgatatatggtcttttggagtggtgctttgggagctgctgacaggagagatcccttacaaagatgtagattcttcagccattatctggggtgttggaagcaacagcctccaccttccagttccttccacttgccctgatggattcaaaatccttatgaaacagacgtggcagagtaaacctcgaaaccgaccttcttttcggcagacactcatgcatttagacattgcctctgcagatgtacttgccaccccacaagaaacttacttcaagtctcaggctgaatggagagaagaagtgaaaaaacattttgagaagatcaaaagtgaaggaacttgtatacaccggttagatgaagaactgattcgaaggcgcagagaagagctcaggcatgcgctggatattcgtgaacactatgagcggaagcttgagcgggcgaataatttatacatggaattgagtgccatcatgctgcagctagaaatgcgggagaaggagctcattaagcgtgagcaagcagtggaaaagaagtatcctgggacctacaaacgacaccctgttcgtcctatcatccatcccaatgccatggagaaactcatgaaaaggaaaggagtgcctcacaaatctgggatgcagaccaaacggccagacttgttgagatcagaagggatccccaccacagaagtggctcccactgcatcccctttgtccggaagtcccaaaatgtccacttctagcagcaagagccgatatcgaagcaaaccacgccaccgccgagggaatagcagaggcagccatagtgactttgccgcaatcttgaaaaaccagccagcccaggaaaattcaccccatcccacttacctgcaccaagctcaatcccaatacccttctcttcatcaccataattctctgcagcagcaataccagcagccccctcctgccatgtcccagagtcaccatcccagactcaatatgcacggacaggacatagcaacctgcgccaacaacctgaggtatttcggcccagcagcagccctgcggagcccactcagcaaccatgctcagagacagctgcccggctcgagccctgacctcatctccacagccatggctgcagactgctggagaagttctgagcctgacaagggccaagctggtccctggggctgttgccaggctgacgcttatgacccctgccttcagtgcaggccagaacagtatgggtccttagacataccctctgctgagccagtggggaggagccctgacctttccaagtcaccagcacataatcctctcttggaaaacgcccagagttctgagaaaacggaagaaaatgaattcagcggctgtaggtctgagtcatccctcggcacctctcatctcggcacccctccagcgctacctcgaaaaacaaggcctctgcagaagagtggagatgactcctcagaagaggaagaaggggaagtagatagtgaagttgaatttccacgaagacagaggccccatcgctgtatcagcagctgccagtcatattcaacctttagctctgagaatttctctgtgtctgatggagaagagggaaataccagtgaccactcaaacagtcctgatgagttagctgataaacttgaagaccgcttggcagagaagctagacgacctgctgtcccagacgccagagattcccattgacatatcctcacactcggatgggctctctgacaaggagtgtgccgtgcgccgtgtgaagactcagatgtctctgggcaagctgtgtgtggaggaacgtggctatgagaaccccatgcagtttgaagaatcggactgtgactcttcagatggggagtgttctgatgccacagttaggaccaataaacactacagctctgctacctggtaatgaaggaatacacatcctgaagatctcgtgactatactggcatttcagatccaccccacccccagactcatcccactctctcccagcattttgtctgggaagagagactaccccatctttaccaccccctagaaatgagctgcaataacaggaacatgagacttcgcaaatctctggaaaataatatccaaatgaaattaagtctcactgaacatttcaatcaagaatggcagggatctattttattgaatattctagctactgtaacattgatatttatttttgtttgacattttaacactttgtactgcaaagagtgaactatatatgagatagagagacaataatttcttgcaaaaaaaaaaagagataaaagaaagaacagaaaaaaagaaataagtggaatttaagagcaacatccttgggaatttgtggggccgggaggtattattgctgcttgaacaggggaccaggtcttttggccataagtgactaaagaagagccagagcaagacattgaacattttagaacacaaagaacagcaaaagaaaagcaattccaggcaacttgtgaacagaccatattcacttcaaccagcttgtccaggtggcttacggaaatgacctagaaaagtctggtgaccagatacttgcacccaatgtcttcaagggcatgtgcttcctctaggagggaaaaacagacaaacaaacaaacaaacaaacctgtgtatgtggaagctggtttcatttttaaatgtttaagcagcagttggtagtgaggtttacagatagtgtcaaatcttgtttttggcaaatacgtccctttttagtgctgtcactgtcattaccttggcaaatgtgctaccttgacccaacgtgttgatctttcatactcaagtgccatttccttgtagctcatttcctttctgcctgctgaccacttcctgtaggaacaaaggttggggggcagtactgaggaggagaaaagggtgagagaggaagaacatctacagtggtgttaggaaaacgaacgtggaatttataaaactccattctcaggatcactcagttcagctacgaggagaagatggaaccacccctctctggagccaggttgcttgtctacttgagtcatattgattcaagcaggagaacagactttgaaggcagctaggatgtatgtgtgtctatacaatgtctgagcccaaaccatccctttgtttttattcaataactcattctatcttagaagttcttttttttttttttttttttgacagagttttgctctttttgcccaggctagagtgcaatggcacaatctcagttcactgcaacctccatctcccaggttcaagcgattctcctgcctcagcctcccgagtagctgggattacaggcgcccgcaaccacgcctggctaattttgtatttttagtagacacggggtttcaccatgttggccaggcttgtctcaaactcctgacctcaggtgatccgcctgcctcggcctcccaaagtgctgggattacaggcatcagccactgtgcccggcctatcttagaagtcttaatgactggctaccactgtcagaataaaagcaaaaacaagcagcttgcaaaaggcaactcctctcccagcacaatagcatttttgttcaatgctacttgtaaaatatcttttacttcactccaaatcaatgcagttttaaataactggatttgaacatttgtggaaagaacaagggatgctgagcagggataggaaggatttttacattgccaaaagcatgaggtcctgcctgtctccagggtcatgggctctgaaaagcattccaaggtacttcatggtgccttggccttaaggaaaaatttttttagaattttatgtacaaataggtgttgacctagtacctgtccctgtctccaagacagattaccgtcaaacaacctctctagattcactggactctttgacactgcatcatgttggacgttaggaaatacttgcacagacagctgttaaaccatttccaatgcacatgaaaatgttgccgctcctctgggttttactgattgcatcagccaaaaaggaaaggcaggagggaatttagagttccttttgcttgtttgatccatttgtttacactttatgttgatacattgatttaaaatgtagtgtctgtgatttatagctcttaggatgaaggaaaatgtttaatttatacaaagagcagtattgtttgcattaatttattccattttgtaaaaattctgtagctggactacatgaaagatcttaagttatggcattattatcattgttattttattttataatattatcattctcattttctgtcgatcagaaggtgtgatttatgatgtggcacaatggttgtgtttattgctaaccaggaattattatggattttatgattttaatgaaggaatgaaaatggaattcccatttgggagctccctggtattgatcttagctgtgttccctaattttctgtgtacaacaatcatctgaggacgcatgttctgccctgaagcccaatggatacattgtgattttgacttgatcatgaaagctcctgggtgggccgatgacccccaggatgtcaaatagtggatggacatatagttaaaaagctgtaaactttctaaagtttcttaggaaataaattcatgggactatattagaaataaaaagagaatgatttaatgtcctgagaggaacagacctagagggtttccgcacagggctcatggattcgtttcaagaattgacaacatagtttgcaatctccttcctgccagacccctttgttctcccacctttattctcctagtggagagtagcagggagactaaaaaaagaaatggtatacagtagtcccctcttacccatggcttcattttcatggtttcagttacgctcaacagcagtccaaaaatatttgatggaacattccagaaataaacaattcataaattttaattgcacagcattctgaggagcatgatgagatcttgccccttgctgccctggaggtgatcctccctctgtccagcatattcatgctgctcatccattagtcacttagtagcagtctcggtgatcagatcgactgtctcggttatcagatgactgtatcgcagtgcttgtgttcaagtacccctatttaattaataatagccccaaagggcaagagtgctgtgcctaatttacaaattaaattttatcatagatatgtaagtatagaaaaaaaaacatagtatatatagggtttggtactatcagagtttttaggcatccactgggggtcttggaatgtatcccccagaaataagggaggactaccgtatatacatgtagggcatgacataaaatgcctaactgtgatgtcatcctagaacaagactaaagaactttaagaaggaggcctggtcacttagaggaccaacgactggaaaaaaattcttgaaaggctatattttccatcctcttgacttcagatctcactgtactgtaaatctctctggttcattattccttggaacagagatgctacaactctatgtcttctttctatccaacataaaacactggcagttttgtccaattcttgcccacctttagtggcaacagagaaacatgagggtcagcttttatcttacatctttcagtgatggtcttcctagaaaacctacccctgatacctcgtaattttgatcagttttttttgaattctcatcttgattatctgttatgctattgtcatcatacaccttatgtggattaactgttatgagtatgttagggtagtacgtagtggctgaatctcagtcattcattgtatagtcgagagttgaataaagtccatattgaacacatttttttaagtagaattgactagaggtttcagaggagaataaggtccttagtggaggttaaaaagggaaataccttctctagcccagcctggtccttcgctgcctgccttgtgataaccgggaaaatcttgaattgatgtatgtttctttgagaacgactccacagtcatctgaagagtgttgaatcaagagctcagggaagttatgagctaattcttcagtcctgacaagtgtgttacaacagtgcttccaggaacctcacaagactgtgatttcaagctgcttcattgatggaaagtttcaccatcttgggatgaatgtccatgttccgttagcgtctgtttttaactgactgcaagatgatgagttttaatttgggttgcagatgagcatttggttctgattttcatctatttcaagatcatatcctctggataacagttccttttaaaattgctttgcagaggggctgagaagcctgcatctactttgaaattataatggaccttaccaccacttaagtttagacctgtttgcaagatggtggggagctcctactgagaaagatgaagatgctagctctattgtaaactggcgtcttcatctagctacttgaagttgagatactatattttaaaatgttggcatcaaacaaatctatccttctagaagtaaagacattttgagtaggatttagtaagtactggacatctcctgtagagcttcatcatgctaaattattcccctctccttttctaaataatagatgtgcttgggtttgggatttacctggcaccaacccagactttttttgggggggggtgagggcgcaggatctcactctgtcaccaggttggagtacagtggcatgattatggctcactgcagcctcaacctcctgggctcaagtgatcctcccacctcagcctcctgagtagctgggaccacaggtgtgtgccaccatgcacaacaattttttttttttttttgtagagatgggcgtctccctgtgttgcccaggctggtatcgaactctgggctctagcgatcctcctgctttggcctcccaaagtactgggattacaaacgtgagctgccatgcccagcctccagactattttaaatgccctctcccactgtggaacattggcatcctttaagaataaatgcatcctttttgatcaaatgatttactctttttttcttcaatgtcctcatgtctcaatttttttttccttttcttaaaacagtcccacttgaacttcctggaactgaattctccagaacataatatttataatccatagaattcctgccctgctctgcagtagagtgtgctatgttttgttttcccactgagccagaagccgaaatattatactaccacttaccaccatctaccacctccaagaccaagaccaacattatgtattgagcatcgtatctttcctactgagcctagacacagcctcagaacctctcaacatagcacttggagcaacaattgccgcttgattggaattgccatttgagcttgagttagccccaatggcagaacgacaggctcgcactagtgtccacctgtggctgtcaggggcggtaccacagaaaggggaaaggccacttgcctctacccactgcccttttggacaacaattccaattgaaggaacaccaatcactgatggatcccattccaaaatgtctcttcattcacatcatttaattctgttgaatgaatatgttcctccctcaccttttataaacagaaaattaatataagtcccagttacttgcttcttagactctgtgagactcatgtaccaaaacaatgtgacattcttttcgagactttgacttgtacggtcagtatgaatttagtgcctttccaggcagcaaaatgtttcttctttgctgatttcataggacaaatatcctagcatactcacaccaccagtgtcccaccctcacagactggcacattagaatcatattaatctgcttgtttgcatgttacaactgatactgcaaaagcctattcaagtcggactgaactaggctaagcagaggacccttgtggaacctggagcatttctcagggacaggtggctaaagaggggagctctaaaatcactgctctgagaaacaggaggtgggttaaggcttttgttaactgtcatgtggccagggtacgatggcaggacttcacagagcagagccctaagcagatggcaaggccactgtaaggaagctcccggcagcatcccaggtctgctctccagagccacttcacagcactcagggatcgctggctcccggccctaggctgctgtccagtgaccaggtggacagggtcctccagtgactgcaggccaagggaaccccagccagcatgtgcaagctattaggaagatgtcccatcttgcccatatcaccccagtggctcttcaccttcagagtgaccacttcccagactctggaagtgggaagaccctctttgacgctttattacagtaatttgagctcctatcgacttggagcgaatgaatttctcttttgtggttaggtctccaaatgaacctccttacctggctcccctctggtctcctgtactgtcagtccccagctcccagtgttgttttctgatgccggctccctctctgtattgaacggcaatgggaacaagaatgactatcaaagcaaacaaatgcatggaattaaacaaaaagtgtacttcactg

SEQ ID NO: 302359 - DNA, 3156 bp, Artificial Sequence
  derived and/or modified sequence
tgggtggggcggagcgtctgggatgcgctgggagcctaggatccccgacagaacactgaaatctatggactctaaaatggacttcatttaaagaaacccacggaccattaatggacaaaaacatgagtcaatatgtattgtggcattcaaatcctagcactctgggagaggttttggagccctctcttaagtcagaactctgtcccaaaaatcttctgagtgtcatctcaggactttggttatactcatggcacgatggccaactttcaggagcacctgagctgctcctcttctccacacttacccttcagtgaaagcaaaaccttcaatggactacaagatgagctcacagctatggggaaccacccttctcccaagctgctcgaggaccagcaggaaaaggggatggtacgaacagagctaatcgagagcgtgcacagccccgtcaccacaacagtgttgacgagcgtaagtgaggattccagggaccagtttgagaacagcgttcttcagctaagggaacacgatgaatcagagacggcggtgtctcaggggaacagcaacacggtggacggagagagcacaagcggaactgaagacataaagattcagttcagcaggtcaggcagtggcagtggtgggtttcttgaaggactatttggatgcttaaggcctgtatggaatatcattgggaaggcatattccactgattacaaattgcagcagcaagatacttgggaagtgccatttgaggagatctcagagctgcagtggctgggtagtggagcccaaggagcggtcttcttgggcaagttccgggcggaagaggtggccatcaagaaagtgagagaacagaatgagacggatatcaagcatttgaggaagttgaagcaccctaacatcatcgcattcaagggtgtttgtactcaggccccatgttattgtattatcatggaatactgtgcccatggacaactctacgaggtcttacgagctggcaggaagatcacacctcgattgctagtagactggtccacaggaattgcaagtggaatgaattatttgcacctccataaaattattcatcgtgatctcaaatcacctaatgttttagtgacccacacagatgcggtaaaaatttcagattttggtacatctaaggaactcagtgacaaaagtaccaagatgtcatttgctggcacggtcgcatggatggcgccagaggtgatacggaatgaacctgtctctgaaaaagttgatatatggtcttttggagtggtgctttgggagctgctgacaggagagatcccttacaaagatgtagattcttcagccattatctggggtgttggaagcaacagcctccaccttccagttccttccacttgccctgatggattcaaaatccttatgaaacagacgtggcagagtaaacctcgaaaccgaccttcttttcggcagacactcatgcatttagacattgcctctgcagatgtacttgccaccccacaagaaacttacttcaagtctcaggctgaatggagagaagaagtgaaaaaacattttgagaagatcaaaagtgaaggaacttgtatacaccggttagatgaagaactgattcgaaggcgcagagaagagctcaggcatgcgctggatattcgtgaacactatgagcggaagcttgagcgggcgaataatttatacatggaattgagtgccatcatgctgcagctagaaatgcgggagaaggagctcattaagcgtgagcaagcagtggaaaagaagtatcctgggacctacaaacgacaccctgttcgtcctatcatccatcccaatgccatggagaaactcatgaaaaggaaaggagtgcctcacaaatctgggatgcagaccaaacggccagacttgttgagatcagaagggatccccaccacagaagtggctcccactgcatcccctttgtccggaagtcccaaaatgtccacttctagcagcaagagccgatatcgaagcaaaccacgccaccgccgagggaatagcagaggcagccatagtgactttgccgcaatcttgaaaaaccagccagcccaggaaaattcaccccatcccacttacctgcaccaagctcaatcccaatacccttctcttcatcaccataattctctgcagcagcaataccagcagccccctcctgccatgtcccagagtcaccatcccagactcaatatgcacggacaggacatagcaacctgcgccaacaacctgaggtatttcggcccagcagcagccctgcggagcccactcagcaaccatgctcagagacagctgcccggctcgagccctgacctcatctccacagccatggctgcagactgctggagaagttctgagcctgacaagggccaagctggtccctggggctgttgccaggctgacgcttatgacccctgccttcagtgcaggccagaacagtatgggtccttagacataccctctgctgagccagtggggaggagccctgacctttccaagtcaccagcacataatcctctcttggaaaacgcccagagttctgagaaaacggaagaaaatgaattcagcggctgtaggtctgagtcatccctcggcacctctcatctcggcacccctccagcgctacctcgaaaaacaaggcctctgcagaagagtggagatgactcctcagaagaggaagaaggggaagtagatagtgaagttgaatttccacgaagacagaggccccatcgctgtatcagcagctgccagtcatattcaacctttagctctgagaatttctctgtgtctgatggagaagagggaaataccagtgaccactcaaacagtcctgatgagttagctgataaacttgaagaccgcttggcagagaagctagacgacctgctgtcccagacgccagagattcccattgacatatcctcacactcggatgggctctctgacaaggagtgtgccgtgcgccgtgtgaagactcagatgtctctgggcaagctgtgtgtggaggaacgtggctatgagaaccccatgcagtttgaagaatcggactgtgactcttcagatggggagtgttctgatgccacagttaggaccaataaacactacagctctgctacctggtaa

SEQ ID NO: 302360 - DNA, 573 bp, Artificial Sequence
  derived and/or modified sequence
aaagtttagtttagtctgtgaggaaactggcggctgctggtagttccatgctgtctgttcagacttcagcttggtgttttggagccctctcttaagtcagaactctgtcccaaaaatcttctgagtgtcatctcaggactttggttatactcatggcacgatggccaactttcaggagcacctgagctgctcctcttctccacacttacccttcagtgaaagcaaaaccttcaatggactacaagatgagctcacagctatggggaaccacccttctcccaagctgctcgaggaccagcaggaaaaggggatggtacgaacagagctaatcgagagcgtgcacagccccgtcaccacaacagtgttgacgagcgtaagtgaggattccagggaccagtttgagaacagcgttcttcagctaagggaacacgatgaatcagagacggcggtgtctcaggggaacagcaacacggtggacggagagagcacaagcggaactgaagacataaagattcagttcagcaggtcaggcagtggcagtggtgggtttcttgaaggactatttggatgctt

SEQ ID NO: 302361 - DNA, 618 bp, Artificial Sequence
  derived and/or modified sequence
gtggagggtgacgccatgggtggggcggagcgtctgggatgcgctgggagcctaggatccccgacagttttgcagaacactgaaatctatggactctaaaatggacttcatttaaagaaacccacggaccattaatggacaaaaacatgagtcaatatgtattgtggcattcaaatcctagcactctgggagaggttttggagccctctcttaagtcagaactctgtcccaaaaatcttctgagtgtcatctcaggactttggttatactcatggcacgatggccaactttcaggagcacctgagctgctcctcttctccacacttacccttcagtgaaagcaaaaccttcaatggactacaagatgagctcacagctatggggaaccacccttctcccaagctgctcgaggaccagcaggaaaaggggatggtacgaacagagctaatcgagagcgtgcacagccccgtcaccacaacagtgttgacgagcgtaagtgaggattccagggaccagtttgagaacagcgttcttcagctaagggaacacgatgaatcagagacggcggtgtctcaggggaacagcaacacggtggacggagagagcacaagcggaact

SEQ ID NO: 302362 - DNA, 2824 bp, Artificial Sequence
  derived and/or modified sequence
atgtcttatgttgagtgcaagtgtttacagttagaaaataaaaatacttgggaagtgccatttgaggagatctcagagctgcagtggctgggtagtggagcccaaggagcggtcttcttgggcaagttccgggcggaagaggtggccatcaagaaagtgagagaacagaatgagacggatatcaagcatttgaggaagttgaagcaccctaacatcatcgcattcaagggtgtttgtactcaggccccatgttattgtattatcatggaatactgtgcccatggacaactctacgaggtcttacgagctggcaggaagatcacacctcgattgctagtagactggtccacaggaattgcaagtggaatgaattatttgcacctccataaaattattcatcgtgatctcaaatcacctaatgttttagtgacccacacagatgcggtaaaaatttcagattttggtacatctaaggaactcagtgacaaaagtaccaagatgtcatttgctggcacggtcgcatggatggcgccagaggtgatacggaatgaacctgtctctgaaaaagttgatatatggtcttttggagtggtgctttgggagctgctgacaggagagatcccttacaaagatgtagattcttcagccattatctggggtgttggaagcaacagcctccaccttccagttccttccacttgccctgatggattcaaaatccttatgaaacagacgtggcagagtaaacctcgaaaccgaccttcttttcggcagacactcatgcatttagacattgcctctgcagatgtacttgccaccccacaagaaacttacttcaagtctcaggctgaatggagagaagaagtgaaaaaacattttgagaagatcaaaagtgaaggaacttgtatacaccggttagatgaagaactgattcgaaggcgcagagaagagctcaggcatgcgctggatattcgtgaacactatgagcggaagcttgagcgggcgaataatttatacatggaattgagtgccatcatgctgcagctagaaatgcgggagaaggagctcattaagcgtgagcaagcagtggaaaagaagtatcctgggacctacaaacgacaccctgttcgtcctatcatccatcccaatgccatggagaaactcatgaaaaggaaaggagtgcctcacaaatctgggatgcagaccaaacggccagacttgttgagatcagaagggatccccaccacagaagtggctcccactgcatcccctttgtccggaagtcccaaaatgtccacttctagcagcaagagccgatatcgaagcaaaccacgccaccgccgagggaatagcagaggcagccatagtgactttgccgcaatcttgaaaaaccagccagcccaggaaaattcaccccatcccacttacctgcaccaagctcaatcccaatacccttctcttcatcaccataattctctgcagcagcaataccagcagccccctcctgccatgtcccagagtcaccatcccagactcaatatgcacggacaggacatagcaacctgcgccaacaacctgaggtatttcggcccagcagcagccctgcggagcccactcagcaaccatgctcagagacagctgcccggctcgagccctgacctcatctccacagccatggctgcagactgctggagaagttctgagcctgacaagggccaagctggtccctggggctgttgccaggctgacgcttatgacccctgccttcagtgcaggccagaacagtatgggtccttagacataccctctgctgagccagtggggaggagccctgacctttccaagtcaccagcacataatcctctcttggaaaacgcccagagttctgagaaaacggaagaaaatgaattcagcggctgtaggtctgagtcatccctcggcacctctcatctcggcacccctccagcgctacctcgaaaaacaaggcctctgcagaagagtggagatgactcctcagaagaggaagaaggggaagtagatagtgaagttgaatttccacgaagacagaggccccatcgctgtatcagcagctgccagtcatattcaacctttagctctgagaatttctctgtgtctgatggagaagagggaaataccagtgaccactcaaacagtcctgatgagttagctgataaacttgaagaccgcttggcagagaagctagacgacctgctgtcccagacgccagagattcccattgacatatcctcacactcggatgggctctctgacaaggagtgtgccgtgcgccgtgtgaagactcagatgtctctgggcaagctgtgtgtggaggaacgtggctatgagaaccccatgcagtttgaagaatcggactgtgactcttcagatggggagtgttctgatgccacagttaggaccaataaacactacagctctgctacctggtaatgaaggaatacacatcctgaagatctcgtgactatactggcatttcagatccaccccacccccagactcatcccactctctcccagcattttgtctgggaagagagactaccccatctttaccaccccctagaaatgagctgcaataacaggaacatgagacttcgcaaatctctggaaaataatatccaaatgaaattaagtctcactgaacatttcaatcaagaatggcagggatctattttattgaatattctagctactgtaacattgatatttatttttgtttgacattttaacactttgtactgcaaagagtgaactatatatgagatagagagacaataatttcttgc

SEQ ID NO: 302363 - DNA, 2901 bp, Artificial Sequence
  derived and/or modified sequence
atggccaacttccaggagcacctgagctgcagcagcagcccccacctgcctttcagtgaatctaaaaccttcaacggcttacaagatgagctcacagcaatggggaaccaccccagtcccaagttactggaggaccagcaggaaaaagggatggtccgaaccgagctaattgagtcagtgcactctcccgtcactaccacagtactgacttcagtatccgaagatagtagagaccagttcgaaaattctgtgttgcaactaagggaacacgacgaatcagaaactgccgtgagtcaggggaatagtaatactgtcgatggagagtcgacaagtggtaccgaggatatcaaaatacagttctccaggtctggcagcggaagcggagggtttctggaggggttgttcggttgtctgagaccagtctggaatattattgggaaagcttacagcaccgattataaactccaacagcaagacacgtgggaagtgccatttgaggaaatcagtgagctgcagtggctgggcagtggggcacagggtgctgtgttcttagggaagttccgcgccgaagaagtggcgatcaaaaaggtcagagagcagaatgaaaccgacatcaagcatctgcgaaaactgaagcaccccaacatcatcgccttcaaaggcgtgtgcactcaagccccatgctactgtatcatcatggagtattgcgcgcacgggcagctatatgaagtacttagagccggcaggaagattacacccaggctgctagtggactggtctaccggaatcgcatcaggcatgaactatcttcacttgcacaagattatacaccgcgacttgaagagccctaacgttctggttacacatactgatgccgtcaagatctcagatttcggtacttctaaggaattatctgacaaaagtaccaaaatgtcatttgccgggactgttgcttggatggcccctgaggtcattaggaacgagcctgtttccgaaaaagtcgacatctggtccttcggcgtagtgctttgggaacttcttaccggcgaaatcccttataaggatgtcgattcatcagcgataatttggggggtcggctctaacagtttacacctgcctgtccccagcacatgccccgatggctttaagatcctaatgaaacagacttggcagtccaagccacggaaccgcccttcctttcgccagactctgatgcacttagacatagcctcagctgatgtcctcgccaccccacaagagacttatttcaagagtcaggccgagtggagggaggaagtaaaaaagcatttcgagaagattaagtccgaaggcacgtgcatccacagattggacgaggagctgatcaggaggaggagggaggaattgcgacatgctcttgacatcagggagcactatgagagaaaactcgagcgtgcaaataacctctacatggaactgtctgcgatcatgctacagctcgagatgagagagaaggaattgattaaaagggagcaggccgtggaaaaaaagtatccaggcacatacaaacgtcacccagtgcggccaataattcatccaaatgccatggagaagttaatgaagaggaagggagtgccccacaagtcaggcatgcagaccaaaagaccggatctcctccgctctgaagggatccccacaactgaagtggcccccactgcttcgcctctgtctggaagcccaaagatgtcaacttctagttccaaatcccgctaccgatctaagcctaggcataggagaggaaactccagagggtcccatagcgattttgccgctattctgaaaaaccagcctgcgcaggagaacagtcctcatccaacgtaccttcatcaggcacagtctcagtaccccagtctgcatcatcataactctcttcagcagcagtaccagcagcctcctccggccatgagccagtctcaccacccacgactgaacatgcacggccaagacattgccacgtgtgcaaacaaccttagatattttgggcctgcagccgcacttcggtccccattgtccaaccatgctcaacgtcagctgcctggtagcagcccagacttgatatccactgcaatggccgcagactgctggagatccagcgaacccgacaagggacaggccggcccatggggctgctgtcaggccgacgcttacgacccctgtcttcaatgcagaccggagcaatacgggtccctggacatcccctctgctgagcctgtgggacgctcccccgacctgagcaaaagcccggctcacaaccccttgttggagaatgcgcagagctctgagaagacagaagaaaatgagtttagcggttgtcgcagcgaaagttccctaggtacttcccatcttgggacaccgcctgctcttcctagaaaaactcgacccctccagaagtcaggggatgacagctctgaggaagaagagggagaggttgattcggaggtggagttccctagacggcagcggcctcatcggtgtatttcctcttgccagtcatactcaaccttttcttctgagaacttctcggtctctgacggagaagagggtaacacctccgaccacagtaattcccccgacgagctggccgacaagcttgaagaccgactggctgagaagttggacgatctgctgtcccagactcccgagattcctattgatataagcagccactcagacggtctgtctgataaggaatgtgcagttcgaagggttaagacacagatgtcattaggcaagctctgtgtggaggagcgggggtatgagaaccccatgcagtttgaggaatccgattgcgatagttccgacggtgagtgttccgatgcgaccgtacggactaacaaacattactcctccgctacttggtag

SEQ ID NO: 302364 - DNA, 2901 bp, Artificial Sequence
  derived and/or modified sequence
atggccaacttccaggagcacctgagctgcagcagcagcccccacctgccctttagcgaatccaagacttttaacggcctgcaggatgagctaactgccatgggtaatcatccaagcccaaaactgctcgaggaccagcaggagaaaggaatggttcgtacagaactgatcgaatccgtgcattccccagtgaccactaccgtcctgacaagcgtctccgaggatagccgcgatcagttcgagaattcagtgctccaactcagggagcatgacgagtcagagacagccgtcagccagggcaattcgaacactgtggacggcgagtctacgtctggcactgaggatattaaaatccagttcagccggagtggtagcggatcgggcgggtttcttgaggggctctttgggtgcctgaggcccgtgtggaacatcattggcaaggcctacagcacggactacaagctgcagcagcaagacacgtgggaggtacctttcgaggagatttcagagctgcagtggctgggctctggcgcccagggagcggtgtttttggggaaattccgcgccgaagaagtcgccatcaagaaagtccgcgaacagaacgagacggatatcaaacatttaaggaagcttaaacatcctaacattatcgcattcaaaggggtgtgtacccaagccccctgctattgcatcataatggaatattgtgcacacggccagctgtacgaagtgttacgcgccggacgcaagatcacaccacggctgctggtggattggtccacgggcattgcttccggaatgaactacttgcacctacataagatcatccaccgggatttgaaaagccccaatgtacttgttacacacaccgacgcagtgaagatcagtgacttcggcacgtccaaggagctatccgacaagtctacaaaaatgagtttcgctggtactgttgcgtggatggcccccgaggtgatccgcaacgaacctgtcagcgaaaaagttgatatatggtcatttggggtggtgctctgggaacttttaacaggcgagatcccttacaaagatgtggacagtagtgcaatcatatggggagttggatccaacagcttgcatctgcctgtgcccagtacctgccctgatggctttaaaatactgatgaaacaaacatggcagtcaaagccacgcaatcgacccagttttcgccagaccctgatgcacctagatatcgcctcagcggacgttcttgccaccccgcaagaaacttactttaaatcacaggctgagtggagagaggaggtaaagaagcactttgagaaaatcaaatctgaaggcacctgcatccaccgtcttgatgaagagctcatcaggcgccgtagagaggagctgagacacgcactggacatccgagagcattacgagcgcaaactggaaagggctaataacctctatatggaactgagtgccatcatgctccagttggagatgagagaaaaggagcttattaaacgagagcaggctgttgagaagaagtaccccggcacatataagagacacccagtgcggcccatcattcatcccaacgctatggagaaactcatgaagcgtaaaggtgtcccgcataaaagcggtatgcagaccaagcgccccgacctgctccgatccgagggaattcctacaacagaggtagcacccaccgctagccccctgagcggttcgcccaaaatgagtacgagcagttcaaaaagtcgctatcgctcaaaaccccgacaccgaagaggaaattctcgcggatctcactctgactttgcggcaatcctaaagaatcaaccagcccaagagaatagcccacaccctacctatctgcaccaggcccaaagtcaatacccctctctgcatcatcacaacagccttcagcaacagtaccagcagcctcctcctgcaatgtcacagagccaccacccccgcctgaatatgcacggccaggacatcgcaacatgtgcaaacaatttacggtacttcggtcctgccgccgcgctccggtctcccctgtccaatcatgctcagcgccagttgcccggtagttcacctgacctgataagtaccgccatggccgccgactgttggaggtcatccgagccggataagggccaggctggtccatgggggtgttgccaggccgacgcctacgacccttgccttcaatgtcgccccgaacagtatggaagcttggacatccccagcgccgaaccggtgggccgctcgcccgacttatccaaaagccccgcgcacaaccctctgctagagaatgcccagtcaagtgagaagacagaagagaatgagtttagtggttgccggtcagaatcttccttgggcacctcgcatctgggtacccctccagcactcccccgaaaaacacgtccgttgcaaaagtcaggggacgattccagtgaggaggaggagggagaggtcgattccgaagtcgagtttccgcgacggcagcggcctcacagatgcatatcgtcttgccaatcctattccaccttcagtagtgaaaattttagcgttagtgatggagaggaaggaaacacaagcgatcatagtaactcacccgatgagttggcagataaacttgaggacagactcgccgagaaactggatgacttgctgtcccaaaccccagagatccccatagatatctccagccactccgatgggctaagtgacaaggaatgcgctgtacggcgagtcaagacccagatgtctttaggaaaactctgtgtcgaagaacgcggatacgagaacccaatgcaatttgaggagagcgactgtgactcttcagacggcgaatgctccgacgccaccgttcgcaccaataagcattattcaagcgcaacttggtag

SEQ ID NO: 302365 - DNA, 414 bp, Artificial Sequence
  derived and/or modified sequence
atggccaacttccaggagcacctgagctgcagcagcagcccccacctgccattctctgaatctaaaaccttcaacgggcttcaggatgagctaactgctatggggaatcacccatccccaaagctgcttgaggatcagcaggaaaagggtatggttcgaactgagctgattgagagcgtgcactccccggtgactactactgtgcttactagcgtatcagaggattccagggaccagtttgaaaattccgtcctgcaactacgtgagcacgacgagagcgaaaccgctgtgagtcaggggaactctaacaccgtcgacggtgaatctacctctggcacggaggatatcaaaatccaatttagccggagtgggtctggcagcggaggcttcctcgagggactatttggatgttag

SEQ ID NO: 302366 - DNA, 342 bp, Artificial Sequence
  derived and/or modified sequence
atggccaacttccaggagcacctgagctgcagcagcagcccccacttgcccttttccgaaagcaaaactttcaatggtctgcaggatgagctgactgcaatgggaaatcatccaagccctaagctgctggaagaccaacaagagaagggaatggtccggacagaactgatagagtcagtgcactctccagtgactactacggtgctgacctctgtgtctgaggactcacgagatcagttcgagaactcagttcttcaactgagggagcacgacgagagcgagacagccgtcagtcaggggaacagtaatactgtggacggagaaagtacttccgggacatag

SEQ ID NO: 302367 - DNA, 2469 bp, Artificial Sequence
  derived and/or modified sequence
atgagctacgtggagtgcaagtgcctgcagctggagaacaagaacacctgggaggtgcccttcgaagagattagtgagttgcagtggcttggatccggcgctcaaggtgcagtctttcttggaaaatttcgggctgaggaggtggcaattaagaaggtgagagagcagaatgaaaccgatatcaagcatctccggaagctgaaacacccaaacatcatcgcgtttaagggggtgtgtacgcaggcaccttgttactgtatcattatggaatattgcgcgcacgggcagctctacgaagtcctgcgcgctgggcgtaaaatcaccccacgtctgttggtcgactggagtaccggcatcgcctctgggatgaactacttgcatttgcacaagatcatccatcgggacctgaaaagccctaatgtactggtgacgcataccgacgcggtgaagatcagcgactttgggacatctaaggaattatcagataaaagcacaaaaatgagcttcgcaggaacagtggcctggatggctccagaggtgatccgcaatgaacctgtgtctgagaaggtggatatttggtcttttggagtcgtcctttgggagctgctgactggagagattccgtacaaagatgttgattcaagcgctataatatggggtgtcggctcaaatagtctgcacctgcctgttcccagcacatgcccagacgggtttaaaatcctgatgaaacagacatggcagtccaagcccaggaaccgaccctcctttaggcagaccctcatgcacctggacatagcgtctgccgacgtcctggcaactcctcaagagacgtatttcaagagtcaggccgagtggagagaggaggtgaagaaacattttgagaaaatcaagtcagaggggacatgtattcacagactggatgaagagctcatcagaaggagaagggaagagctgcggcatgcgctagacatacgggagcactatgagcggaagctggagcgcgcaaacaatctctatatggaactgtctgccataatgctacagctagaaatgagggaaaaggaattgataaaacgcgaacaagcggttgagaagaaatatcctggaacttataagcggcatccagtgcggccaatcatacatcccaacgccatggaaaaattaatgaagcgcaaaggcgtccctcacaaaagcgggatgcaaaccaagcggccggatttgctgaggagtgaaggcattccaaccaccgaagtggcacccactgcgagccctctgtccggcagcccgaaaatgtccacctctagtagtaagtcacggtataggtctaagcccaggcaccgccgcggcaacagtagaggatcacatagcgattttgccgcgatcttaaaaaatcagccagcacaagaaaattctccccaccctacctaccttcaccaagcacagtcgcagtacccttccttacaccaccataattctcttcagcagcaataccagcagcctcccccggccatgagccaatctcaccacccacggctgaacatgcatggtcaggacattgccacttgtgccaacaatctacgttactttggccccgctgctgcactccggagtcctctctctaatcatgcacaaaggcagctgccagggtcttcgcctgatttgataagtaccgccatggccgctgattgctggaggtccagtgaaccagacaagggtcaggccggtccttggggctgttgccaggccgatgcatatgacccctgccttcagtgtcgcccggagcaatacggatctcttgacataccttcagctgaacccgtgggacgctcaccagacctcagcaagtccccggcacataacccactgctggagaacgcacagagctccgaaaaaaccgaagagaatgaattctccggatgccggtccgagagttctctgggaactagtcacctgggaacaccacccgctcttcctagaaagacccggcccctccagaagtcaggggacgactcaagcgaagaagaggaaggggaagtggactccgaggttgagttcccccgccgccagcgtccccacagatgcatttcatcctgccagtcctacagcacattttccagtgagaacttcagcgtgtctgacggtgaagaaggaaacacatcggatcatagcaactctcccgacgagctggccgacaaactggaagatcggctggctgaaaaactggatgacctcctaagccagacacctgaaattccaatcgacatcagctcccattctgacgggcttagcgacaaggaatgcgcagttcgcagggttaagactcagatgtctctggggaagctgtgtgtggaggagcggggatatgaaaacccaatgcagttcgaagagagcgattgtgatagttctgatggcgagtgcagcgacgccaccgttcggacaaacaagcactattcctctgcaacatggtag

SEQ ID NO: 302368 - DNA, 2901 bp, Artificial Sequence
  derived and/or modified sequence
atggcaaactttcaggaacatctctcctgcagttccagcccccacctgccatttagcgaatctaaaaccttcaacgggctgcaggatgagcttactgcaatggggaatcaccctagtccgaagctgctggaggatcagcaggaaaagggaatggttagaaccgaactgattgaaagcgtccattcaccagttaccacgactgtgttgacctctgtctctgaggattcccgagaccagtttgagaactcagtgctgcagctgcgagagcatgacgaaagcgagaccgccgtgtcccaagggaacagcaacaccgtggatggggagagtacatcaggaacggaagacatcaaaattcagttctcccgatctggcagcggctcgggaggatttctcgagggactgtttggttgtctccggccagtgtggaacatcattgggaaggcctattccacagattacaaactgcagcagcaggacacgtgggaagtgccatttgaagagatctcagaactgcagtggctcgggagcggagctcagggggcagtatttctagggaaattccgggctgaagaggttgccattaagaaagtcagggagcagaacgaaacagacattaagcacctcaggaagctcaagcacccaaatattatcgcattcaagggagtgtgcacacaagccccttgctattgtatcatcatggaatattgcgctcacgggcagctgtatgaagtgctgcgtgccggacgcaagatcaccccaaggttgctggtggactggtcgacaggaattgctagcggcatgaattatctccacttgcataagatcatccaccgggacctgaaatcacccaatgtactggtgacccacacagatgcagtgaagatttctgatttcgggaccagcaaagagctgtcggacaaatccacaaagatgtcatttgcgggaaccgtcgcgtggatggctccagaggtcatccggaacgaacctgtttccgagaaagtggacatctggtcgttcggcgtcgtgctgtgggagcttctcacaggcgagattccttacaaagacgtagatagttccgccatcatctggggagtgggaagcaacagtctgcatctgccagtgccctcaacatgccccgatggatttaagattctgatgaaacagacatggcagtctaagcctcgcaaccggccttcattcaggcagacactgatgcatttagatattgcctccgccgatgtgctggctacacctcaggaaacatattttaagtctcaggccgagtggagagaggaagtgaagaagcattttgagaagattaaaagtgagggaacatgcattcacaggctcgacgaggaattgataaggcggaggcgggaggagctgaggcacgctctcgacatcagggaacattatgaacggaagctggagagagccaataacctgtatatggaactgagtgctattatgctgcagctggaaatgcgggagaaggaactgatcaagcgcgaacaagccgtggaaaagaagtaccctggcacgtacaagcggcaccccgttcgcccaatcatccatcctaacgccatggaaaaactgatgaagcgaaaaggagtgccccataagtccggaatgcagaccaagagacctgatctgcttcgcagcgaaggcatccctactactgaagtcgcccctaccgccagtcccctgtcaggatccccgaagatgtcaaccagcagcagcaagtcacgctatagatctaagcctcgtcatcgacgagggaatagcagaggatcccatagtgatttcgccgctatccttaagaaccagccagcgcaggagaactctcctcatccaacctatttgcatcaggcacaaagtcaatacccttccctacaccaccataattccctgcagcagcagtaccagcagccacctcctgccatgagtcaatcacaccatccgcgactaaacatgcacggacaggacatcgctacatgtgccaataatctgcgatacttcggacccgcagcagccctgaggtctcccctcagcaaccatgctcagcgacagctccctggttcctccccggacttgatttccacagctatggcagcagattgctggcggtcttcagagcctgacaagggtcaagccggaccttggggctgttgtcaggccgacgcttacgacccctgcctgcaatgcagaccagaacaatacggctcattggatatacctagcgcagagccggtggggagaagtcccgatctcagtaagtctcccgctcataaccctctgctagaaaatgcccaaagcagcgaaaaaaccgaagagaacgagttttctgggtgtcggagcgaaagcagcctcggaaccagccaccttgggacacccccagcgttacctagaaagaccagacccctccagaagtcaggcgatgacagttccgaagaggaagaaggagaagtagactccgaagtcgagtttcctcggagacagagaccacatcggtgcatttcctcatgccagtcatactctactttttctagcgagaatttttcggtgtccgatggtgaggaaggaaacacctctgaccactcaaacagccccgacgagcttgccgacaagctggaagataggttggctgaaaagctagacgacctgctttctcaaactccagaaatccctatagatatctcttcacactcggatggcttaagtgataaagagtgcgccgtacgcagggtgaaaacgcagatgagcctagggaagctgtgcgttgaagagcggggatacgaaaaccccatgcagttcgaagaaagcgattgcgacagcagcgatggagagtgtagtgacgctactgttcgcacgaataagcattactcttccgcaacctggtag

SEQ ID NO: 302369 - DNA, 2901 bp, Artificial Sequence
  derived and/or modified sequence
atggccaacttccaagagcatctctcgtgcagcagcagtccacatttgcccttttccgagtccaagacattcaatggcctccaggatgagctgacagcgatgggcaatcatccatcgcccaagctgctcgaggatcagcaggagaagggcatggtaaggacagagttgattgagtcagtgcactccccggttactaccaccgtgttaacaagtgtgtccgaggattcgcgggatcagtttgagaatagtgtcctgcaactaagggagcatgatgagtctgagactgctgtctctcagggtaactctaacaccgttgacggagagagtaccagcggtacagaggacatcaaaatacagttttcaaggtctgggtccggctcaggcggtttcctggaagggttgttcggctgtctccggccagtgtggaatattatcggaaaggcctactcaacagattacaagctccagcagcaggacacttgggaggtgccatttgaagaaatttcagagttgcagtggttgggatctggggctcagggagccgtgtttctgggcaagttcagggcggaggaggtggctataaaaaaggtccgcgagcaaaatgagacggacataaaacatttgcgaaagttaaagcatccaaacattatcgccttcaaaggggtttgcacgcaggccccatgttattgtataatcatggagtactgcgcacatggacagctctacgaagttttgcgcgcaggcagaaaaatcacaccccgacttctcgttgattggtctacaggaatagctagcggcatgaattacctgcatcttcataagataatacacagggacctgaaatcaccaaacgtgttggtcacccatacagacgcagttaaaattagcgactttggaactagcaaggagctctcagacaagtcaaccaagatgagctttgctgggaccgtagcttggatggcacctgaggtcattcgcaacgagccggtgtctgaaaaggtcgacatctggtcattcggcgtcgtgttatgggagctgttaacgggggaaattccatacaaggatgtggattcctccgccataatctggggagtggggtcaaacagccttcacctacctgtacctagtacatgcccggacggctttaagattcttatgaagcagacctggcaatcaaagcccaggaatcgtccgagctttcggcagactctgatgcacctcgacatagcatcagctgacgtgctggccactcctcaggagacgtatttcaaatctcaggccgaatggcgggaagaagtcaagaagcactttgaaaaaattaagtccgaaggaacgtgtatacaccgcctggatgaggagctaattcgccgacggagagaggagcttagacacgccctagacatcagggagcactatgaacgaaagttggagcgggctaataacctctatatggagctgagcgcaattatgttgcagctcgagatgagagagaaggaactaatcaaaagggaacaagcagtggagaagaaataccccggtacctacaaaagacatcccgtaagacctattattcatcccaacgcaatggagaagttgatgaagcgtaagggcgtcccccataagagcgggatgcagacaaaacgcccagatctactgcgttctgagggtattcctactactgaggtggcaccgaccgcctctccactttctggctccccaaaaatgtccacttcttcatccaaaagtcgctatcgcagtaaaccgcgtcataggaggggcaacagtaggggctctcattcagactttgcagcaatcctgaaaaatcagcccgcacaggagaattccccgcatcctacttatctccatcaggcacagtcccagtacccctcattgcatcatcataacagtttacagcagcaatatcagcagccaccacccgctatgtctcagagccaccaccctagactgaatatgcatggacaggatattgcaacttgtgccaacaacctgagatattttggcccagcagccgctttgagaagccccctaagtaaccatgctcagaggcaactgcccggaagttcccctgacctgatcagcactgccatggctgccgactgctggcgtagctctgaacccgacaaaggacaagctggaccatgggggtgttgccaggctgacgcttatgatccgtgtctgcagtgtcgccctgagcagtacgggagtctggatattccctcagctgagcctgtgggcaggtctccggacctgtccaagagcccagcccacaatccactgcttgagaacgcccagtcttctgaaaaaaccgaggagaatgaattttccggatgccgaagcgaaagtagtcttggcacctcccacttgggcactccccctgccctgcctcgaaaaacaagaccactccaaaagagtggtgacgactcctcagaggaagaggaaggcgaagtggacagcgaggtcgagtttcccagaaggcagcggccacatcgttgtatatcttcttgtcagtcctatagtacattttctagtgagaattttagcgtgtcggacggcgaggaagggaacacaagcgaccactcaaacagtcccgacgagcttgccgacaagttggaagaccgcctggctgaaaagctcgacgatcttctgagccagacacccgagatcccaatcgacatttcttcccattctgacggcctatccgataaggaatgtgctgtccgccgagtcaagactcagatgagcctagggaagctatgcgtggaagaaaggggatacgaaaacccaatgcagtttgaagaatcagactgtgatagttcggatggcgagtgctctgatgctacagtgcggacaaataagcactatagctcagcaacctggtag

SEQ ID NO: 302370 - DNA, 414 bp, Artificial Sequence
  derived and/or modified sequence
atggcgaacttccaggaacacctgagttgtagcagttctccacatcttcccttctccgaaagcaagacattcaacggtctgcaagacgagctgactgccatgggtaaccacccatcccctaagttactggaggatcagcaggagaaggggatggtacgtacagagcttatcgaatcagtccacagccctgtgactacaacagtcctgacttctgtgtccgaagactcaagagatcagttcgagaattcagtgctacaactgcgggagcatgacgaatcagagactgctgtctctcaaggaaactccaataccgtagatggggaatcgaccagcggaaccgaagacataaagatccagttctcccgcagtggctctggaagcggcggtttcctggagggactgttcgggtgttag

SEQ ID NO: 302371 - DNA, 342 bp, Artificial Sequence
  derived and/or modified sequence
atggctaactttcaagaacatttatcgtgctcctcatccccacacctgcccttctcggagtcgaagacctttaatggactgcaggatgaactaaccgccatggggaaccacccttcacctaaactccttgaagaccaacaagagaagggcatggtgcgaacggagctcatcgaatctgttcacagcccggtgactaccacagtccttacatcggtatctgaggactcccgcgatcagttcgaaaacagtgtcctccagctcagagaacacgacgaaagcgagacggccgtttcacagggcaattcgaacacagtggatggagaatccacatcaggcacctag

SEQ ID NO: 302372 - DNA, 2469 bp, Artificial Sequence
  derived and/or modified sequence
atgagttatgtggaatgtaagtgcctgcagcttgagaacaagaacacctgggaagtgccctttgaggaaatctctgagctgcaatggttgggatctggcgctcaaggagcagtatttctagggaaatttagagctgaggaagtggctatcaaaaaggtgcgtgaacagaacgagactgatattaaacacctgagaaaactcaaacacccgaacatcatagccttcaagggcgtttgtacacaggcaccctgctactgtatcatcatggagtattgcgcccatggccagctgtatgaagtccttagagctggccgaaagattaccccccgacttcttgttgactggtccacagggatagcctctggtatgaattacctacacctacataaaatcatccatcgcgatctaaagagccctaatgtgcttgtgactcataccgacgccgtcaaaatttccgattttgggacatcaaaagaactttcagacaaatccacaaaaatgtctttcgcaggaactgtagcatggatggccccagaggtgatccggaacgagccagtcagcgagaaggttgatatctggtcttttggagtggttctgtgggagttgctgacgggagagattccatacaaagatgttgatagcagtgctatcatttggggcgttggatccaacagtctgcaccttccagtgccttcgacatgcccagacggattcaagattctcatgaagcagacgtggcagtccaagccaaggaaccggcctagttttcggcagaccctgatgcatctcgacatcgcttctgctgacgtgctcgccacgcctcaggaaacttacttcaaatctcaagcggagtggcgggaagaggtgaaaaaacatttcgagaaaatcaagagtgagggcacatgcatacaccggctggacgaggagttgataaggaggaggagggaggaattacgccatgcactggacattagagagcactacgagcgaaagctggagcgcgctaataacctctacatggaactgtctgccatcatgctccaactggagatgcgggagaaggaactgattaaacgagagcaggctgtggaaaagaagtatcccggaacttataagcggcacccggtgaggcccattatccatcctaacgctatggaaaagcttatgaaacggaaaggcgtaccacataagtccggcatgcaaacgaagaggcctgatctgcttagatcagaggggatccccacaaccgaggtagcacccactgcaagcccactgagcgggagccctaaaatgtctacgagcagcagtaaaagccgatacagaagcaaaccccgtcataggcgagggaattctcggggaagccactctgattttgcagcaattttgaagaaccagccagcgcaggagaacagtcctcatcccacatatttacaccaggctcagagccagtacccatctttacatcaccataatagcctccaacaacagtatcaacagccaccacctgcgatgtcacagagccaccatcctaggctgaacatgcacggccaggatatcgctacctgtgccaacaacctgcgatactttggcccagcggctgctctccgaagcccgctaagcaaccacgcccaacgccaactcccaggcagctcccccgaccttatcagcaccgccatggccgctgattgttggcggtcctctgagccagataagggccaggccggtccttggggatgttgccaagctgacgcgtacgatccttgcctccagtgccgccctgagcagtacggctctctggacatcccatctgccgaaccagtcggcaggtcaccggatttgtcaaagtcgcccgcacataaccccctcctggagaatgctcagagcagcgagaaaaccgaggagaatgaattttcggggtgccgaagcgagagctctctcggtacatctcaccttggaacccctcctgccttacctcgcaaaacacgaccacttcagaaatccggggacgactcatccgaagaagaagaaggcgaggttgatagtgaggtagagttccctcgtcgacagaggccccatcgctgcatctcgagctgccagtcttattccacatttagcagcgaaaatttctcagtctctgatggcgaagaggggaacacaagcgatcactcaaacagtccagatgagctggcggataaacttgaggatcgcctcgcagagaagctagatgacttactctctcagaccccagagattcctatcgacatctctagccattctgacggtttgagcgataaggagtgcgcagtaaggagagtcaaaacacagatgtccttgggcaagctgtgcgtggaggaacggggatatgaaaatcccatgcaattcgaggagtctgattgcgactcctccgacggagaatgctccgatgcgactgtcaggacaaacaagcattattcttccgctacttggtag

SEQ ID NO: 302373 - DNA, 2901 bp, Artificial Sequence
  derived and/or modified sequence
atggccaacttccaggagcacctgagctgcagcagcagcccccacctgcccttcagcgagagcaagaccttcaacggcctgcaggacgagctgaccgccatgggcaaccaccccagccccaagctgctggaggaccagcaggagaagggcatggtgagaaccgagctgatcgagagcgtgcacagccccgtgaccaccaccgtgctgaccagcgtgagcgaggacagcagagaccagttcgagaacagcgtgctgcagctgagagagcacgacgagagcgagaccgccgtgagccagggcaacagcaacaccgtggacggcgagagcaccagcggcaccgaggacatcaagatccagttcagcagaagcggcagcggcagcggcggcttcctggagggcctgttcggctgcctgagacccgtgtggaacatcatcggcaaggcctacagcaccgactacaagctgcagcagcaggacacctgggaggtgcccttcgaggagatcagcgagctgcagtggctgggcagcggcgcccagggcgccgtgttcctgggcaagttcagagccgaggaggtggccatcaagaaggtgagagagcagaacgagaccgacatcaagcacctgagaaagctgaagcaccccaacatcatcgccttcaagggcgtgtgcacccaggccccctgctactgcatcatcatggagtactgcgcccacggccagctgtacgaggtgctgagagccggcagaaagatcacccccagactgctggtggactggagcaccggcatcgccagcggcatgaactacctgcacctgcacaagatcatccacagagacctgaagagccccaacgtgctggtgacccacaccgacgccgtgaagatcagcgacttcggcaccagcaaggagctgagcgacaagagcaccaagatgagcttcgccggcaccgtggcctggatggcccccgaggtgatcagaaacgagcccgtgagcgagaaggtggacatctggagcttcggcgtggtgctgtgggagctgctgaccggcgagatcccctacaaggacgtggacagcagcgccatcatctggggcgtgggcagcaacagcctgcacctgcccgtgcccagcacctgccccgacggcttcaagatcctgatgaagcagacctggcagagcaagcccagaaacagacccagcttcagacagaccctgatgcacctggacatcgccagcgccgacgtgctggccaccccccaggagacctacttcaagagccaggccgagtggagagaggaggtgaagaagcacttcgagaagatcaagagcgagggcacctgcatccacagactggacgaggagctgatcagaagaagaagagaggagctgagacacgccctggacatcagagagcactacgagagaaagctggagagagccaacaacctgtacatggagctgagcgccatcatgctgcagctggagatgagagagaaggagctgatcaagagagagcaggccgtggagaagaagtaccccggcacctacaagagacaccccgtgagacccatcatccaccccaacgccatggagaagctgatgaagagaaagggcgtgccccacaagagcggcatgcagaccaagagacccgacctgctgagaagcgagggcatccccaccaccgaggtggcccccaccgccagccccctgagcggcagccccaagatgagcaccagcagcagcaagagcagatacagaagcaagcccagacacagaagaggcaacagcagaggcagccacagcgacttcgccgccatcctgaagaaccagcccgcccaggagaacagcccccaccccacctacctgcaccaggcccagagccagtaccccagcctgcaccaccacaacagcctgcagcagcagtaccagcagcccccccccgccatgagccagagccaccaccccagactgaacatgcacggccaggacatcgccacctgcgccaacaacctgagatacttcggccccgccgccgccctgagaagccccctgagcaaccacgcccagagacagctgcccggcagcagccccgacctgatcagcaccgccatggccgccgactgctggagaagcagcgagcccgacaagggccaggccggcccctggggctgctgccaggccgacgcctacgacccctgcctgcagtgcagacccgagcagtacggcagcctggacatccccagcgccgagcccgtgggcagaagccccgacctgagcaagagccccgcccacaaccccctgctggagaacgcccagagcagcgagaagaccgaggagaacgagttcagcggctgcagaagcgagagcagcctgggcaccagccacctgggcaccccccccgccctgcccagaaagaccagacccctgcagaagagcggcgacgacagcagcgaggaggaggagggcgaggtggacagcgaggtggagttccccagaagacagagaccccacagatgcatcagcagctgccagagctacagcaccttcagcagcgagaacttcagcgtgagcgacggcgaggagggcaacaccagcgaccacagcaacagccccgacgagctggccgacaagctggaggacagactggccgagaagctggacgacctgctgagccagacccccgagatccccatcgacatcagcagccacagcgacggcctgagcgacaaggagtgcgccgtgagaagagtgaagacccagatgagcctgggcaagctgtgcgtggaggagagaggctacgagaaccccatgcagttcgaggagagcgactgcgacagcagcgacggcgagtgcagcgacgccaccgtgagaaccaacaagcactacagcagcgccacctggtag

SEQ ID NO: 302374 - DNA, 414 bp, Artificial Sequence
  derived and/or modified sequence
atggccaacttccaggagcacctgagctgcagcagcagcccccacctgcccttcagcgagagcaagaccttcaacggcctgcaggacgagctgaccgccatgggcaaccaccccagccccaagctgctggaggaccagcaggagaagggcatggtgagaaccgagctgatcgagagcgtgcacagccccgtgaccaccaccgtgctgaccagcgtgagcgaggacagcagagaccagttcgagaacagcgtgctgcagctgagagagcacgacgagagcgagaccgccgtgagccagggcaacagcaacaccgtggacggcgagagcaccagcggcaccgaggacatcaagatccagttcagcagaagcggcagcggcagcggcggcttcctggagggcctgttcggctgctag

SEQ ID NO: 302375 - DNA, 342 bp, Artificial Sequence
  derived and/or modified sequence
atggccaacttccaggagcacctgagctgcagcagcagcccccacctgcccttcagcgagagcaagaccttcaacggcctgcaggacgagctgaccgccatgggcaaccaccccagccccaagctgctggaggaccagcaggagaagggcatggtgagaaccgagctgatcgagagcgtgcacagccccgtgaccaccaccgtgctgaccagcgtgagcgaggacagcagagaccagttcgagaacagcgtgctgcagctgagagagcacgacgagagcgagaccgccgtgagccagggcaacagcaacaccgtggacggcgagagcaccagcggcacctag

SEQ ID NO: 302376 - DNA, 2469 bp, Artificial Sequence
  derived and/or modified sequence
atgagctacgtggagtgcaagtgcctgcagctggagaacaagaacacctgggaggtgcccttcgaggagatcagcgagctgcagtggctgggcagcggcgcccagggcgccgtgttcctgggcaagttcagagccgaggaggtggccatcaagaaggtgagagagcagaacgagaccgacatcaagcacctgagaaagctgaagcaccccaacatcatcgccttcaagggcgtgtgcacccaggccccctgctactgcatcatcatggagtactgcgcccacggccagctgtacgaggtgctgagagccggcagaaagatcacccccagactgctggtggactggagcaccggcatcgccagcggcatgaactacctgcacctgcacaagatcatccacagagacctgaagagccccaacgtgctggtgacccacaccgacgccgtgaagatcagcgacttcggcaccagcaaggagctgagcgacaagagcaccaagatgagcttcgccggcaccgtggcctggatggcccccgaggtgatcagaaacgagcccgtgagcgagaaggtggacatctggagcttcggcgtggtgctgtgggagctgctgaccggcgagatcccctacaaggacgtggacagcagcgccatcatctggggcgtgggcagcaacagcctgcacctgcccgtgcccagcacctgccccgacggcttcaagatcctgatgaagcagacctggcagagcaagcccagaaacagacccagcttcagacagaccctgatgcacctggacatcgccagcgccgacgtgctggccaccccccaggagacctacttcaagagccaggccgagtggagagaggaggtgaagaagcacttcgagaagatcaagagcgagggcacctgcatccacagactggacgaggagctgatcagaagaagaagagaggagctgagacacgccctggacatcagagagcactacgagagaaagctggagagagccaacaacctgtacatggagctgagcgccatcatgctgcagctggagatgagagagaaggagctgatcaagagagagcaggccgtggagaagaagtaccccggcacctacaagagacaccccgtgagacccatcatccaccccaacgccatggagaagctgatgaagagaaagggcgtgccccacaagagcggcatgcagaccaagagacccgacctgctgagaagcgagggcatccccaccaccgaggtggcccccaccgccagccccctgagcggcagccccaagatgagcaccagcagcagcaagagcagatacagaagcaagcccagacacagaagaggcaacagcagaggcagccacagcgacttcgccgccatcctgaagaaccagcccgcccaggagaacagcccccaccccacctacctgcaccaggcccagagccagtaccccagcctgcaccaccacaacagcctgcagcagcagtaccagcagcccccccccgccatgagccagagccaccaccccagactgaacatgcacggccaggacatcgccacctgcgccaacaacctgagatacttcggccccgccgccgccctgagaagccccctgagcaaccacgcccagagacagctgcccggcagcagccccgacctgatcagcaccgccatggccgccgactgctggagaagcagcgagcccgacaagggccaggccggcccctggggctgctgccaggccgacgcctacgacccctgcctgcagtgcagacccgagcagtacggcagcctggacatccccagcgccgagcccgtgggcagaagccccgacctgagcaagagccccgcccacaaccccctgctggagaacgcccagagcagcgagaagaccgaggagaacgagttcagcggctgcagaagcgagagcagcctgggcaccagccacctgggcaccccccccgccctgcccagaaagaccagacccctgcagaagagcggcgacgacagcagcgaggaggaggagggcgaggtggacagcgaggtggagttccccagaagacagagaccccacagatgcatcagcagctgccagagctacagcaccttcagcagcgagaacttcagcgtgagcgacggcgaggagggcaacaccagcgaccacagcaacagccccgacgagctggccgacaagctggaggacagactggccgagaagctggacgacctgctgagccagacccccgagatccccatcgacatcagcagccacagcgacggcctgagcgacaaggagtgcgccgtgagaagagtgaagacccagatgagcctgggcaagctgtgcgtggaggagagaggctacgagaaccccatgcagttcgaggagagcgactgcgacagcagcgacggcgagtgcagcgacgccaccgtgagaaccaacaagcactacagcagcgccacctggtag

SEQ ID NO: 302377 - protein, 162 aa, Artificial Sequence
  derived and/or modified sequence
MGHTRRQGTSPSKCPYLNFFQLLVLAGLSHFCSGVIHVTKEVKEVATLSCGHNVSVEELAQTRIYWQKEKKMVLTMMSGDMNIWPEYKNRTIFDITNNLSIVILALRPSDEGTYECVVLKYEKDAFKREHLAEVTLSVKGFAPRCRERRRNERLRRESVRPV

SEQ ID NO: 302378 - protein, 256 aa, Artificial Sequence
  derived and/or modified sequence
MGHTRRQGTSPSKCPYLNFFQLLVLAGLSHFCSGVIHVTKEVKEVATLSCGHNVSVEELAQTRIYWQKEKKMVLTMMSGDMNIWPEYKNRTIFDITNNLSIVILALRPSDEGTYECVVLKYEKDAFKREHLAEVTLSVKADFPTPSISDFEIPTSNIRRIICSTSGGFPEPHLSWLENGEELNAINTTVSQDPETELYAVSSKLDFNMTTNHSFMCLIKYGHLRVNQTFNWNTSFAPRCRERRRNERLRRESVRPV

SEQ ID NO: 302379 - DNA, 489 bp, Artificial Sequence
  derived and/or modified sequence
atgggacatactcgtcgacaagggacatccccatcaaagtgcccttaccttaacttttttcagttgctggtcctcgccgggctgagccatttttgttcaggtgttatccacgttacgaaagaagtgaaagaagtggctactctgtcatgtgggcataacgtttccgtggaagaactggcccagacccggatctactggcaaaaggaaaaaaagatggtgcttaccatgatgagcggggatatgaacatctggccagaatataaaaatcgaactatctttgatataaccaacaatctgtctatcgtgattctggcattacggcctagtgacgagggtacatacgaatgcgtagtgctgaaatacgagaaggacgctttcaaacgggaacatttggccgaagtcactctgtccgttaaaggattcgctcctcgatgtcgggagaggcggagaaatgaacgccttcggagagagagcgtgaggcctgtctag

SEQ ID NO: 302380 - DNA, 771 bp, Artificial Sequence
  derived and/or modified sequence
atggggcacacaaggagacaggggactagtccgagcaagtgtccttatctgaatttcttccagctgctggtgctggccggcctcagtcacttttgtagcggggtgatccatgtcactaaagaggtgaaggaggtagccacgctttcttgtggacacaacgtgtctgtggaagagctagcccagacccggatttactggcaaaaagagaagaagatggtgctgacaatgatgtcaggggacatgaacatttggccagaatacaagaacagaaccatatttgacatcaccaataacctaagcattgtgatccttgccctgagaccatcagacgagggcacatacgaatgcgtggtcttaaagtacgagaaggacgcatttaagagagaacatctggctgaggtgaccctgtccgtgaaggcagatttcccaaccccttccatctccgactttgagattccaacaagtaacatcaggcggattatctgtagtacaagcggaggatttcccgaaccccatttaagctggcttgagaacggagaggaactgaatgccatcaatacgacagtgtcccaggatccagagacagagctgtatgctgtatctagcaagttggatttcaacatgactactaaccacagttttatgtgcctgataaagtatggccacctaagagtgaatcagacatttaactggaatacctctttcgcccctcggtgcagggaaagacggaggaatgagaggcttcgccgcgaaagcgtcaggccagtctag

SEQ ID NO: 302381 - DNA, 489 bp, Artificial Sequence
  derived and/or modified sequence
atgggccacacccggcggcagggcaccagccccagcaaatgtccctacctgaacttcttccagctgctggtgctggccggcctgagccacttctgcagcggggtcatccacgtgaccaaggaggtgaaggaggtggccaccctgagctgtggccacaacgtgtctgtggaggagctggcccagacccgcatctactggcagaaggagaagaagatggtgctgaccatgatgtctggggacatgaacatctggccagagtacaagaacagaaccatctttgacatcaccaacaacctgagcatcgtcatcctggccctgcggcccagtgatgagggcacctatgaatgtgtggtgctgaagtatgagaaggatgccttcaagcgggagcacctggccgaggtgaccctgtctgtgaagggctttgccccccgctgccgggagaggagaagaaatgaaaggctgcggcgggagagcgtgcggcctgtgtag

SEQ ID NO: 302382 - DNA, 771 bp, Artificial Sequence
  derived and/or modified sequence
atgggccacacccggcggcagggcaccagccccagcaaatgtccctacctgaacttcttccagctgctggtgctggccggcctgagccacttctgcagcggggtcatccacgtgaccaaggaggtgaaggaggtggccaccctgagctgtggccacaacgtgtctgtggaggagctggcccagacccgcatctactggcagaaggagaagaagatggtgctgaccatgatgtctggggacatgaacatctggccagagtacaagaacagaaccatctttgacatcaccaacaacctgagcatcgtcatcctggccctgcggcccagtgatgagggcacctatgaatgtgtggtgctgaagtatgagaaggatgccttcaagcgggagcacctggccgaggtgaccctgtctgtgaaggctgacttccccacccccagcatcagtgactttgagatccccaccagcaacatccgccgcatcatctgcagcaccagcggcggcttccctgagccccacctgtcctggctggagaatggagaggagctgaatgccatcaacaccaccgtgtcccaggaccctgagacagagctgtatgctgtgagcagcaagctggacttcaacatgaccaccaaccacagcttcatgtgcctgatcaagtatggccacctgcgggtgaaccagaccttcaactggaacaccagctttgccccccgctgccgggagaggagaagaaatgaaaggctgcggcgggagagcgtgcggcctgtgtag

SEQ ID NO: 302383 - DNA, 489 bp, Artificial Sequence
  derived and/or modified sequence
atgggccacacccggcggcagggcaccagccccagcaagtgcccctatctgaacttttttcagctgctggtactcgctggcctgagccatttttgctccggcgtgatccacgtaactaaagaggtgaaagaagttgctaccctctcttgcgggcacaacgtcagcgtggaagaacttgcacagactcgcatatactggcagaaggaaaagaaaatggtgcttacaatgatgtctggtgatatgaatatttggccagaatataagaaccgcaccatctttgatataacaaataatctgagcattgtaatcttggccctgcgtccatctgatgagggcacttatgagtgtgtggtgcttaagtacgaaaaagacgcctttaaacgcgagcacttggctgaggtgaccctgtcagtcaaaggcttcgccccccggtgtcgggagcgaagaagaaacgaaagattaagacgggaaagcgtgcgccctgtgtag

SEQ ID NO: 302384 - DNA, 771 bp, Artificial Sequence
  derived and/or modified sequence
atgggccacacccggcggcagggcaccagccccagcaagtgcccctacctgaattttttccaactcctggtgctggctggcctgtcccacttttgcagtggcgttatacacgttaccaaggaggtgaaagaggtggccactttatcctgtggccacaacgtcagcgtcgaagaactggctcaaacccggatatactggcagaaagagaaaaagatggtcttgactatgatgtcaggcgacatgaacatttggcccgagtataaaaatagaactattttcgatattacaaacaatctgagcatcgtgattttggctctcagacccagtgatgagggtacatatgagtgtgtcgtcctgaagtacgagaaggatgcttttaagcgcgaacacctggccgaagtaacactctccgtgaaagccgacttccctacacccagcatcagcgactttgaaatcccaactagcaatatacgacgaatcatctgcagcacctcaggaggattccctgaacctcacctgtcttggctcgaaaacggagaagagctgaatgccatcaacacgacagtcagtcaggaccccgaaaccgagctctacgcagtgtcaagcaagctggacttcaacatgaccactaatcatagctttatgtgcctgatcaagtacgggcatctgagggtcaatcagacatttaactggaacacaagctttgcgcctcgatgccgggaacggaggagaaacgagaggttacggagggagtcagttcgccccgtttag

SEQ ID NO: 302385 - DNA, 489 bp, Artificial Sequence
  derived and/or modified sequence
atggggcacactcggaggcagggaacgtctccgagtaaatgtccctacctgaacttctttcagttgcttgtgctcgccggtctatcacatttctgtagcggcgtgatccatgtgacaaaagaagtgaaggaggtggctacattatcatgtggccacaatgtgagcgtagaggagttggctcagacacgcatatattggcagaaggaaaaaaaaatggttttgacaatgatgagcggtgatatgaacatttggcccgagtacaagaacaggaccatctttgacataacaaacaacctgagcatcgtgattctggccttgaggccaagcgatgaaggaacatatgaatgtgtcgtcttgaagtacgagaaagatgcctttaagcgagaacatcttgcagaagtgacactgtccgtcaagggattcgcacccaggtgccgcgaacggcgacgaaacgagcgccttagacgcgaaagtgtgcggccagtgtag

SEQ ID NO: 302386 - DNA, 771 bp, Artificial Sequence
  derived and/or modified sequence
atgggccacactagacggcagggcacctcgcctagcaagtgtccatatctgaactttttccagctcctcgtgctggcagggcttagccatttttgttcaggagtgattcacgtgactaaggaggttaaggaagtggctacactgtcttgtggacataatgttagcgtggaggagctggcacaaactagaatatactggcaaaaggaaaagaagatggtcttgactatgatgtctggggacatgaatatatggcctgagtataaaaacagaaccatctttgatatcacaaacaacctttcaatcgtgatcttggcgctgagacctagcgatgaaggcacatacgagtgcgtagtgcttaagtatgagaaggacgcctttaaacgggaacacctggccgaggtcacactgtcagtaaaggccgactttcctactccatccatcagcgactttgagattccaacgagcaatattcggcgtattatctgtagcaccagcgggggatttccagaaccgcatttgagttggctagagaacggagaggaactgaacgctataaatacaactgtgtcgcaagaccccgaaacggagttgtacgccgtttcatctaagctagattttaacatgactacaaatcacagcttcatgtgtctgatcaagtatgggcatttaagagtaaatcagacttttaattggaacacaagctttgctcccaggtgcagggagagacgcaggaatgagcggcttcggagggaatccgtgaggcccgtttag

SEQ ID NO: 302387 - DNA, 489 bp, Artificial Sequence
  derived and/or modified sequence
atgggccacacacggaggcagggaacatcaccatccaagtgtccatacctcaatttctttcagctcttggtgctggctggtctttctcacttctgttcaggtgttatccacgtgaccaaggaagtgaaagaagtggcaacgctgtcctgtggtcacaatgtttctgttgaagagctggcacaaactcgcatctactggcaaaaggagaagaaaatggtgctgactatgatgtctggggacatgaatatatggcccgagtacaagaaccggaccatctttgatatcactaataacctctccattgtgatcctggctctgcgcccatctgacgagggcacatacgagtgtgttgttctgaagtatgaaaaagacgctttcaagcgggaacacctggctgaagtgacgttatcagtcaaaggctttgccccaagatgcagagagagaaggaggaatgagagattgagaagggaaagtgtacgccctgtataa

SEQ ID NO: 302388 - DNA, 771 bp, Artificial Sequence
  derived and/or modified sequence
atgggccacacacggaggcagggaacatcaccatccaagtgtccatacctcaatttctttcagctcttggtgctggctggtctttctcacttctgttcaggtgttatccacgtgaccaaggaagtgaaagaagtggcaacgctgtcctgtggtcacaatgtttctgttgaagagctggcacaaactcgcatctactggcaaaaggagaagaaaatggtgctgactatgatgtctggggacatgaatatatggcccgagtacaagaaccggaccatctttgatatcactaataacctctccattgtgatcctggctctgcgcccatctgacgagggcacatacgagtgtgttgttctgaagtatgaaaaagacgctttcaagcgggaacacctggctgaagtgacgttatcagtcaaagctgacttccctacacctagtatatctgactttgaaattccaacttctaatattagaaggataatttgctcaacctctggaggttttccagagcctcacctctcctggttggaaaatggagaagaattaaatgccatcaacacaacagtttcccaagatcctgaaactgagctctatgctgttagcagcaaactggatttcaatatgacaaccaaccacagcttcatgtgtctcatcaagtatggacatttaagagtgaatcagaccttcaactggaatacaagctttgccccaagatgcagagagagaaggaggaatgagagattgagaagggaaagtgtacgccctgtataa

SEQ ID NO: 302389 - DNA, 489 bp, Artificial Sequence
  derived and/or modified sequence
atgggccacaccagaagacagggcaccagccccagcaagtgcccctacctgaacttcttccagctgctggtgctggccggcctgagccacttctgcagcggcgtgatccacgtgaccaaggaggtgaaggaggtggccaccctgagctgcggccacaacgtgagcgtggaggagctggcccagaccagaatctactggcagaaggagaagaagatggtgctgaccatgatgagcggcgacatgaacatctggcccgagtacaagaacagaaccatcttcgacatcaccaacaacctgagcatcgtgatcctggccctgagacccagcgacgagggcacctacgagtgcgtggtgctgaagtacgagaaggacgccttcaagagagagcacctggccgaggtgaccctgagcgtgaagggcttcgcccccagatgcagagagagaagaagaaacgagagactgagaagagagagcgtgagacccgtgtag

SEQ ID NO: 302390 - DNA, 771 bp, Artificial Sequence
  derived and/or modified sequence
atgggccacaccagaagacagggcaccagccccagcaagtgcccctacctgaacttcttccagctgctggtgctggccggcctgagccacttctgcagcggcgtgatccacgtgaccaaggaggtgaaggaggtggccaccctgagctgcggccacaacgtgagcgtggaggagctggcccagaccagaatctactggcagaaggagaagaagatggtgctgaccatgatgagcggcgacatgaacatctggcccgagtacaagaacagaaccatcttcgacatcaccaacaacctgagcatcgtgatcctggccctgagacccagcgacgagggcacctacgagtgcgtggtgctgaagtacgagaaggacgccttcaagagagagcacctggccgaggtgaccctgagcgtgaaggccgacttccccacccccagcatcagcgacttcgagatccccaccagcaacatcagaagaatcatctgcagcaccagcggcggcttccccgagccccacctgagctggctggagaacggcgaggagctgaacgccatcaacaccaccgtgagccaggaccccgagaccgagctgtacgccgtgagcagcaagctggacttcaacatgaccaccaaccacagcttcatgtgcctgatcaagtacggccacctgagagtgaaccagaccttcaactggaacaccagcttcgcccccagatgcagagagagaagaagaaacgagagactgagaagagagagcgtgagacccgtgtag

SEQ ID NO: 302391 - DNA, 384 bp, Artificial Sequence
  derived and/or modified sequence
atgaagaagttcaacttcagaaaggtgctggacggcctgaccgccagcagccccggcagcggcagcagcagcggcagcaacagcggcggcggcgccggcagcggcagcgtgcaccccgccggcaccgccggcgtgctgagagaggagatccaggagaccctgaccagcgagtacttccagatctgcaagaccgtgagacacggcttcccccaccagcccaccgccctggccttcgaccccgtgcagaagatcctggccatcggcaccagaaccggcgccatcagaatcctgggcagacccggcgtggactgctactgccagcacgagagcggcgccgccgtgctgcagctgcagttcctgatcaacgagggcgccctggtgtag

SEQ ID NO: 302392 - DNA, 384 bp, Artificial Sequence
  derived and/or modified sequence
atgaagaagttcaatttccggaaggtgctagacggcctgactgcctccagcccgggatccggctctagttctgggagcaattctgggggtggcgcaggcagcggatcagtccatccagccgggactgccggcgttcttcgggaggagatccaagagacactaacatctgagtacttccagatttgcaagaccgtcagacatgggttcccccaccagcccacagccctcgcctttgaccctgtccaaaagatcctggctattgggactcgaacgggcgcaatccgaatcctagggcgacccggggttgactgttactgccaacacgaaagcggcgctgcagtgttacagttgcagttcttgatcaacgagggcgctctagtctag

SEQ ID NO: 302393 - DNA, 384 bp, Artificial Sequence
  derived and/or modified sequence
atgaagaagttcaacttcaggaaggtgctggatggcctgacagccagcagccctggcagcggcagcagcagcggcagcaacagcggcggcggggccggcagcggctctgtgcaccctgctggaacagctggggtgctgcgggaggagatccaggagaccctgaccagcgagtacttccagatctgcaagacagtgagacatggcttcccccaccagcccacagccctggcctttgatcctgtgcagaagatcctggccatcggcaccaggactggagccatccgcatcctgggccggcctggggtggactgctactgccagcacgagagcggggctgctgtgctgcagctgcagttcctgatcaatgaaggagccctggtgtag

SEQ ID NO: 302394 - DNA, 384 bp, Artificial Sequence
  derived and/or modified sequence
atgaagaagttcaacttccggaaggtgctggacggcctgaccgcctctagccctgggagcggctccagcagtggatcaaattccggcggcggcgcaggtagtggcagtgtccacccagccggcacagccggggtgctgagggaggagattcaggagacattaacttctgagtatttccagatctgcaagacagtccggcatgggttcccccatcagccgaccgctctcgcatttgatccggtgcagaaaatcctagctattggcacccgcactggcgccattcggattttgggacgccctggcgtggactgttactgtcagcatgagtcaggagccgccgtgcttcagttgcaatttttgatcaatgagggcgcattggtgtag

SEQ ID NO: 302395 - DNA, 384 bp, Artificial Sequence
  derived and/or modified sequence
atgaaaaaatttaacttccgcaaggttctggacgggctgaccgcgtcgtctcctgggtcaggaagctcctctggctctaattcaggaggaggggctggcagtggatctgtgcacccagctgggaccgcaggggtgctgagggaggaaattcaggagacccttacatcagaatacttccaaatttgcaaaacagtgaggcacggatttccacaccaacctaccgcactggcgttcgatcccgtccagaaaatactagccatcggaactcggacgggagcaataagaattcttggcagacctggcgttgattgttactgtcagcacgagtcaggggcagctgtactccagcttcagttcttaatcaatgagggcgctttggtgtag

SEQ ID NO: 302396 - DNA, 479 bp, Artificial Sequence
  derived and/or modified sequence
cccccaacgtcgtttttctgaaaataaaatactctgagccgaacgtttcgaagaaggaaagtccgcccttaagagagagacagagtcttgtgtttaaaatgaagaagtttaatttccgaaaagttttggatggcttaactgcctcctcccctggcagtggtagcagcagtggcagtaacagtggtggtggggctggaagtggttccgtacatccggcggggactgcaggggttctcagagaggaaattcaggaaactttgacttcggagtatttccagatttgcaagacagttcggcatggttttcctcatcagcccacagcattagcctttgatccagttcagaaaatcttggctattgggacgagaacaggtgctatacgaatactcgggagacctggtgttgattgctattgccaacatgaaagtggtgcagctgtcctacagctccaatttttgatcaatgagggtgccttggtc

SEQ ID NO: 302397 - protein, 40 aa, Artificial Sequence
  derived and/or modified sequence
MLTRKIKLWDINAHITCRLCSGYLIDATTVTECLHTFCRS

SEQ ID NO: 302398 - protein, 62 aa, Artificial Sequence
  derived and/or modified sequence
MLTRKIKLWDINAHITCRLCSGYLIDATTVTECLHTFCRSCLVKYLEENNTCPTCRIVIHQS

SEQ ID NO: 302399 - protein, 109 aa, Artificial Sequence
  derived and/or modified sequence
MLTRKIKLWDINAHITCRLCSGYLIDATTVTECLHTFCRSCLVKYLEENNTCPTCRIVIHQSHPLQYIGHDRTMQDIVYKLVPGLQEAEMRKQREFYHKLGMEVPGDIK

SEQ ID NO: 302400 - DNA, 123 bp, Artificial Sequence
  derived and/or modified sequence
atgctaactcgtaaaattaagctctgggatatcaatgcccacattacatgtagactctgcagcgggtatcttatcgacgcaactacggttacagaatgtttgcatacgttctgcagatcctag

SEQ ID NO: 302401 - DNA, 189 bp, Artificial Sequence
  derived and/or modified sequence
atgttgacaaggaagataaagctgtgggacataaacgcccacattacctgcaggctttgtagcggatacctgattgatgctaccaccgtaactgaatgccttcacacgttttgccgatcctgcctggttaaatacctcgaggaaaataacacctgccccacctgtaggatagtgattcatcagtcatag

SEQ ID NO: 302402 - DNA, 330 bp, Artificial Sequence
  derived and/or modified sequence
atgctcacgcggaaaatcaagctatgggacattaacgctcacattacctgtcgtctgtgtagtggatatctgattgacgcaaccacagtcaccgagtgtcttcacacgttctgtcgcagttgccttgttaaatacctggaggagaacaatacatgcccaacttgtcgcatcgttatccatcaatctcacccgctgcagtatatcggacacgaccgcactatgcaggacatcgtgtacaagctggtgcccggactgcaagaggcggagatgagaaagcaacgtgagttctatcacaagctggggatggaggttccaggggacataaagtag

SEQ ID NO: 302403 - DNA, 589 bp, Artificial Sequence
  derived and/or modified sequence
cttgccgcggggtgggagcccagacgcacaccgcgcatgctccgagcgcggcgcccccgacgcggcgctcggctcggctcgggcatttccgcctctttgttttaaactccggacgggcttttttctcctcctcttgggggggacccagagggagcggcgccccctcccccctccggcgcggaccccgcgtgcgccttgctcgcccgcagccccgagaccgcaggcgtcacaatgtagcagggaccccaggcgtcgtgctcagaaaatggaaaaagagccagggccggaaggagggtgcagaagcgagtccgcgtgcggagccaggaggcagcgtcgcgtgggagtgctggcctgaagcctccatgccccggcagagggacggacacgcggacgtctagcggagccccgcagggaggaggagaaggggaggatttgactttggaagtctctgtgaccagaagccaaagatgttgaccaggaagatcaagctgtgggacatcaacgcccacatcacctgccgcctgtgcagcgggtacctcatcgacgccaccacggtgaccgagtgtctgcacaccttctgcaggagctg

SEQ ID NO: 302404 - DNA, 582 bp, Artificial Sequence
  derived and/or modified sequence
atgctccgagcgcggcgcccccgacgcggcgctcggctcggctcgggcatttccgcctctttgttttaaactccggacgggcttttttctcctcctcttgggggggacccagagggagcggcgccccctcccccctccggcgcggaccccgcgtgcgccttgctcgcccgcagccccgagaccgcaggcgtcacaatgtagcagggaccccaggcgtcgtgctcaggtgccgtttctgtgctagaaaatggaaaaagagccagggccggaaggagggtgcagaagcgagtccgcgtgcggagccaggaggcagcgtcgcgtgggagtgctggcctgaagcctccatgccccggcagagggacggacacgcggacgtctagcggagaagccaaagatgttgaccaggaagatcaagctgtgggacatcaacgcccacatcacctgccgcctgtgcagcgggtacctcatcgacgccaccacggtgaccgagtgtctgcacaccttctgcaggagctgcctggtgaagtacctggaggagaacaacacctgccccacctgcaggattgtgatccaccagagcca

SEQ ID NO: 302405 - DNA, 639 bp, Artificial Sequence
  derived and/or modified sequence
agatgcgggcacaggagggagcttcccacactgttcaggtcaccagagcctgcgcttctgtggttggttttgatgaggactcgtatttcagctcctgtctctccttgtcagaggccgtgtgaggcgtcacaatgtagcagggaccccaggcgtcgtgctcagaaaatggaaaaagagccagggccggaaggagggtgcagaagcgagtccgcgtgcggagccaggaggcagcgtcgcgtgggagtgctggcctgaagcctccatgccccggcagagggacggacacgcggacgtctagcggagaagccaaagatgttgaccaggaagatcaagctgtgggacatcaacgcccacatcacctgccgcctgtgcagcgggtacctcatcgacgccaccacggtgaccgagtgtctgcacaccttctgcaggagctgcctggtgaagtacctggaggagaacaacacctgccccacctgcaggattgtgatccaccagagccaccccctgcagtacatcggtcatgacagaaccatgcaagatattgtttacaaattggtaccaggcctccaagaagcggaaatgagaaagcagagggagttctatcacaaattgggcatggaggtgccgggagacatcaag

SEQ ID NO: 302406 - DNA, 123 bp, Artificial Sequence
  derived and/or modified sequence
atgctgaccaggaagatcaagctgtgggacatcaatgcccacatcacctgccgcctgtgcagcggctacctgattgatgccaccaccgtgacagagtgcctgcacaccttctgccgctcctag

SEQ ID NO: 302407 - DNA, 189 bp, Artificial Sequence
  derived and/or modified sequence
atgctgaccaggaagatcaagctgtgggacatcaatgcccacatcacctgccgcctgtgcagcggctacctgattgatgccaccaccgtgacagagtgcctgcacaccttctgccgcagctgcctggtgaagtacctggaggagaacaacacctgccccacctgcagaattgtcatccaccagagctag

SEQ ID NO: 302408 - DNA, 330 bp, Artificial Sequence
  derived and/or modified sequence
atgctgaccaggaagatcaagctgtgggacatcaatgcccacatcacctgccgcctgtgcagcggctacctgattgatgccaccaccgtgacagagtgcctgcacaccttctgccgcagctgcctggtgaagtacctggaggagaacaacacctgccccacctgcagaattgtcatccaccagagccaccccctgcagtacatcggccatgacaggaccatgcaggacatcgtgtacaagctggtgcccggcctgcaggaggccgagatgaggaagcagcgggagttctaccacaagctgggcatggaggtgcctggggacatcaagtag

SEQ ID NO: 302409 - DNA, 123 bp, Artificial Sequence
  derived and/or modified sequence
atgctgacccggaagatcaagctgtgggacatcaacgcccacatcacttgtcgactatgctctggttacctgattgatgccacaacagtgactgagtgtttacacacattctgccgttcctag

SEQ ID NO: 302410 - DNA, 189 bp, Artificial Sequence
  derived and/or modified sequence
atgctgacccggaagatcaagctgtgggacatcaacgcccacatcacctgccggctgtgttctggctatcttatcgatgcaactacggtgacagagtgtttacatactttctgccgttcctgtctcgtgaaatacctggaggagaataatacctgccctacctgtcgcatcgttatacaccagtcatag

SEQ ID NO: 302411 - DNA, 330 bp, Artificial Sequence
  derived and/or modified sequence
atgctgacccggaagatcaagctgtgggacatcaacgcccacatcacctgtaggctctgttctggttaccttatcgacgccaccacagtgaccgaatgcttacataccttttgtaggtcctgcctcgttaaataccttgaggaaaacaacacctgcccaacatgtcggattgttatccatcagtctcaccccctccagtacatcggtcatgacaggacgatgcaggacattgtgtataagctagtgcccggattacaggaggctgagatgcgaaaacaacgcgaattttatcacaaactgggcatggaggtgcctggtgacataaaatag

SEQ ID NO: 302412 - DNA, 123 bp, Artificial Sequence
  derived and/or modified sequence
atgctgacccgcaaaattaagctttgggatattaatgctcacatcacttgtaggttatgctccggttacctcatcgatgcgacgacagtgactgaatgccttcataccttctgcagatcctag

SEQ ID NO: 302413 - DNA, 189 bp, Artificial Sequence
  derived and/or modified sequence
atgctgacccggaagatcaagctgtgggatattaatgctcacatcacctgtagactgtgctcgggttatttgatcgatgccacaaccgtgaccgagtgcctccataccttctgccgctcctgcctggttaagtacttggaggagaataatacctgtccaacctgcagaattgtcatccatcagtcctag

SEQ ID NO: 302414 - DNA, 330 bp, Artificial Sequence
  derived and/or modified sequence
atgctgacccggaaaatcaagctgtgggacatcaatgcacatatcacatgccgtttatgtagtggttatctcatcgatgctacaaccgttacagagtgtctgcacactttctgtaggtcatgtctcgtaaagtacctggaggaaaacaacacctgtcctacctgtagaatcgtgatacaccagagccaccccctgcagtacattggccacgatagaacgatgcaggatattgtctacaagctcgtgccaggattacaggaggcagagatgcggaagcagagggaattttaccacaagctaggaatggaagtgccgggtgacatcaagtag

SEQ ID NO: 302415 - DNA, 123 bp, Artificial Sequence
  derived and/or modified sequence
atgctgaccagaaagatcaagctgtgggacatcaacgcccacatcacctgcagactgtgcagcggctacctgatcgacgccaccaccgtgaccgagtgcctgcacaccttctgcagaagctag

SEQ ID NO: 302416 - DNA, 189 bp, Artificial Sequence
  derived and/or modified sequence
atgctgaccagaaagatcaagctgtgggacatcaacgcccacatcacctgcagactgtgcagcggctacctgatcgacgccaccaccgtgaccgagtgcctgcacaccttctgcagaagctgcctggtgaagtacctggaggagaacaacacctgccccacctgcagaatcgtgatccaccagagctag

SEQ ID NO: 302417 - DNA, 330 bp, Artificial Sequence
  derived and/or modified sequence
atgctgaccagaaagatcaagctgtgggacatcaacgcccacatcacctgcagactgtgcagcggctacctgatcgacgccaccaccgtgaccgagtgcctgcacaccttctgcagaagctgcctggtgaagtacctggaggagaacaacacctgccccacctgcagaatcgtgatccaccagagccaccccctgcagtacatcggccacgacagaaccatgcaggacatcgtgtacaagctggtgcccggcctgcaggaggccgagatgagaaagcagagagagttctaccacaagctgggcatggaggtgcccggcgacatcaagtag

SEQ ID NO: 302418 - DNA, 666 bp, Artificial Sequence
  derived and/or modified sequence
atgagcctgcaggtgctgaacgacaagaacgtgagcaacgagaagaacaccgagaactgcgacttcctgttcagcccccccgaggtgaccggcagaagcagcgtgctgagagtgagccagaaggagaacgtgccccccaagaacctggccaaggccatgaaggtgaccttccagacccccctgagagacccccagacccacagaatcctgagccccagcatggccagcaagctggaggcccccttcacccaggacgacaccctgggcctggagaacagccaccccgtgtggacccagaaggagaaccagcagctgatcaaggaggtggacgccaagaccacccacggcatcctgcagaagcccgtggaggccgacaccgacctgctgggcgacgccagccccgccttcggcagcggcagcagcagcgagagcggccccggcgccctggccgacctggactgcagcagcagcagccagagccccggcagcagcgagaaccagatggtgagccccggcaaggtgagcggcagccccgagcaggccgtggaggagaacctgagcagctacagcctggacagaagagtgacccccgccagcgagaccctggaggacccctgcagaaccgagagccagcacaaggccgagaccccccacggcgccgagtag

SEQ ID NO: 302419 - DNA, 696 bp, Artificial Sequence
  derived and/or modified sequence
atgagcctgcaggtgctgaacgacaagaacgtgagcaacgagaagaacaccgagaactgcgacttcctgttcagcccccccgaggtgaccggcagaagcagcgtgctgagagtgagccagaaggagaacgtgccccccaagaacctggccaaggccatgaaggtgaccttccagacccccctgagagacccccagacccacagaatcctgagccccagcatggccagcaagctggaggcccccttcacccaggacgacaccctgggcctggagaacagccaccccgtgtggacccagaaggagaaccagcagctgatcaaggaggtggacgccaagaccacccacggcatcctgcagaagcccgtggaggccgacaccgacctgctgggcgacgccagccccgccttcggcagcggcagcagcagcgagagcggccccggcgccctggccgacctggactgcagcagcagcagccagagccccggcagcagcgagaaccagatggtgagccccggcaaggtgagcggcagccccgagcaggccgtggaggagaacctgagcagctacagcctggacagaagagtgacccccgccagcgagaccctggaggacccctgcagaaccgagagccagcacaaggccgagaccccccacggcgccgaggaggagtgcaaggccgagaccccccacggctag

SEQ ID NO: 302420 - DNA, 666 bp, Artificial Sequence
  derived and/or modified sequence
atgtcacttcaggtgctgaatgataagaatgtgtctaatgagaagaatacagagaactgtgattttttgttttcaccccccgaggtcaccggtaggagctcagtcttaagagttagtcagaaagagaacgtcccccccaaaaacctggcaaaggccatgaaagtgacattccaaactccactccgcgatccgcagactcatcgaatcctctctcctagtatggcttcgaagcttgaggctccattcactcaggatgacacactcgggttagaaaattcccaccctgtctggacccagaaggagaaccaacaacttattaaagaagttgacgccaagaccactcacggcattctgcagaagcccgtagaggcggacactgatctgcttggagatgctagtccagctttcggttccggctcctcttccgagagtggtcccggagcccttgccgacctggactgtagtagctcatctcagagccccggctcatccgagaatcagatggtctcccccggtaaagttagcgggtcacccgagcaggccgtggaagagaacctgtcctcatactctttggataggagggttacacccgcatcagagaccctcgaggacccatgcaggacggagtcacaacataaggcagaaacccctcacggggctgaatag

SEQ ID NO: 302421 - DNA, 696 bp, Artificial Sequence
  derived and/or modified sequence
atgagcttacaggtgttgaatgataaaaatgtgtcaaacgaaaagaatacagaaaactgtgacttcctattctcaccgcccgaggttacaggcaggtcctcggtattgagggtgtctcagaaggagaacgtgccccccaagaacctggccaaagcaatgaaggttaccttccagactcccctcagggatccgcaaacacaccgcattctctcacccagcatggccagtaaattggaagctcccttcacacaagacgataccctcgggctcgagaattcccatccagtatggactcagaaagagaatcagcagcttataaaggaggtcgatgccaaaacgacccacggcattctccaaaaacctgtcgaagccgacaccgatctgttgggcgacgcatctcctgccttcgggagtggctctagttctgaatcgggccctggagccctcgccgatctggactgttcatcctcaagtcagagtcccggttcatcagagaatcaaatggtctcaccaggtaaagtcagcggctccccagaacaggcagtggaggaaaatctcagttcctattcccttgaccgccgcgtgactccagcctccgagaccctcgaggacccttgtcgtacagagtctcagcataaagcagagacaccccatggggccgaggaggaatgtaaggccgaaacgcctcacggctag

SEQ ID NO: 302422 - DNA, 666 bp, Artificial Sequence
  derived and/or modified sequence
atgagcctgcaggtgctgaatgacaagaatgtgtccaatgagaagaacacagagaactgtgacttcctgttcagccccccagaggtgacaggccgcagctctgtgctgcgggtgtcccagaaggaaaatgtgccccccaagaacctggccaaggccatgaaggtgaccttccagacccccctgcgggacccccagacccaccgcatcctgagccccagcatggccagcaagctggaggcccccttcacccaggatgacaccctgggcctggagaacagccaccctgtgtggacccagaaggagaaccagcagctgatcaaggaggtggatgccaagaccacccacggcatcctgcagaagcctgtggaggccgacacagacctgctgggagatgccagccctgccttcggcagcggcagcagcagcgagagcggccctggggccctggccgacctggactgcagcagcagcagccagagccctggcagcagcgagaaccagatggtgtccccaggcaaggtgtctggcagccctgagcaggccgtggaggagaacctgagcagctacagcctggacagaagagtgaccccagccagcgagaccctggaggacccctgcaggacagagagccagcacaaggccgagaccccccacggggctgagtag

SEQ ID NO: 302423 - DNA, 696 bp, Artificial Sequence
  derived and/or modified sequence
atgagcctgcaggtgctgaatgacaagaatgtgtccaatgagaagaacacagagaactgtgacttcctgttcagccccccagaggtgacaggccgcagctctgtgctgcgggtgtcccagaaggaaaatgtgccccccaagaacctggccaaggccatgaaggtgaccttccagacccccctgcgggacccccagacccaccgcatcctgagccccagcatggccagcaagctggaggcccccttcacccaggatgacaccctgggcctggagaacagccaccctgtgtggacccagaaggagaaccagcagctgatcaaggaggtggatgccaagaccacccacggcatcctgcagaagcctgtggaggccgacacagacctgctgggagatgccagccctgccttcggcagcggcagcagcagcgagagcggccctggggccctggccgacctggactgcagcagcagcagccagagccctggcagcagcgagaaccagatggtgtccccaggcaaggtgtctggcagccctgagcaggccgtggaggagaacctgagcagctacagcctggacagaagagtgaccccagccagcgagaccctggaggacccctgcaggacagagagccagcacaaggccgagaccccccacggggctgaggaggagtgcaaggccgagaccccccacggctag

SEQ ID NO: 302424 - DNA, 666 bp, Artificial Sequence
  derived and/or modified sequence
atgagcctgcaggtgctgaacgacaagaacgtgagcaacgagaagaacacggaaaattgtgatttcttgttctcccccccagaagttaccgggaggtcatcagtgctgagggtaagccagaaggaaaacgtaccaccgaagaacctcgccaaggccatgaaggttacattccagacaccattaagggatccacagactcaccgcatcctttcccccagcatggcatctaagttggaagcaccatttacacaggatgataccttagggctggaaaatagtcaccccgtgtggactcaaaaggaaaaccaacagctcatcaaagaggtggatgcaaagacaacacatggcattctgcagaagcccgtcgaggccgacaccgacctactcggggacgcgtcacctgcttttggtagcggcagctcttccgagagtggccccggcgccctggcggacttggactgctcctcaagctcacaaagcccgggatcctcagagaatcagatggttagcccaggcaaggtatcaggatccccagaacaagccgtggaggaaaatttgagcagttattctcttgataggcgagtaaccccggccagtgaaactctggaggacccatgccgtaccgaaagtcagcacaaagccgagactccccatggtgccgaatag

SEQ ID NO: 302425 - DNA, 696 bp, Artificial Sequence
  derived and/or modified sequence
atgagcctgcaggtgctgaacgacaagaacgtgagcaacgagaagaatactgagaattgcgactttctattttctccgcctgaggtgacaggaagaagtagcgtgctgagagtctcacagaaggagaatgtccctcctaaaaatctcgccaaggcaatgaaggtaactttccagacacctctgagggatccgcagacccacagaatcctcagtcccagcatggctagtaaactggaggccccattcacgcaggatgacacactggggctggaaaacagtcacccggtgtggactcaaaaagagaatcagcaacttatcaaggaggtggatgcaaaaactactcatggaattttgcaaaagcccgtggaagccgacacagacctgctgggagacgctagtcctgcattcggatcaggaagctcctcagaatctgggcccggggctctggctgatttggactgtagcagttcttcacaaagccctggaagtagcgaaaatcagatggtgagccctggaaaggtgtccggaagccccgagcaagctgtcgaagaaaatctcagtagttattctctggatagaagggtgaccccagcaagtgagacgctggaggatccctgccggactgagtcgcagcacaaggccgaaactccccacggcgcggaggaggaatgcaaggctgaaacacctcatggatag

SEQ ID NO: 302426 - DNA, 666 bp, Artificial Sequence
  derived and/or modified sequence
atgagcttgcaggtgctcaacgacaaaaatgtctctaatgaaaaaaacaccgaaaactgcgatttcttgttctcgcctccggaggtaaccggcagatcttcagtactgcgcgtcagccaaaaagagaatgtgccacccaaaaatctggccaaagccatgaaagtcactttccagacgccactccgcgacccacagactcacagaattctgtcccccagcatggcttccaagctggaggccccatttactcaagatgataccctcggattggagaatagccaccctgtgtggacacaaaaggaaaatcagcagctgattaaagaggttgatgcaaaaactacccacggaatcctgcaaaagcccgtcgaggctgatactgatctgcttggcgatgcatcaccagccttcggatccgggtcctcatccgaaagtggacctggggctctcgccgacctcgattgcagcagttcaagtcagtcacctgggagcagcgaaaatcagatggtttctcccggaaaggtcagcgggtcccctgaacaggccgttgaggagaatctgtcatcctattcactcgacaggagagtgacacctgcctccgagactctggaggatccatgtagaactgaatcacagcacaaagccgagaccccccacggcgcagagtag

SEQ ID NO: 302427 - DNA, 696 bp, Artificial Sequence
  derived and/or modified sequence
atgtccctacaggtgcttaatgataaaaacgtgtccaatgagaaaaataccgagaattgtgactttctcttttccccaccagaggtgactggtaggagctccgttcttagagtaagccagaaggagaacgtgccgccaaaaaatctggcaaaagcaatgaaggtgacctttcaaacaccattgcgagatccgcaaacgcacaggattctcagtcctagcatggcttcaaaattggaggctcctttcacccaggatgacacattggggctagagaactcacaccctgtgtggacacagaaggaaaatcaacagctgatcaaagaggtggacgccaaaaccactcatggcatcctgcagaaacccgttgaagcggatacggaccttctcggagatgcttcccctgcttttggtagcggttcaagctctgagagcggccctggagccttagcggatcttgattgctcttcatcttctcagagtccaggctcctcagaaaatcagatggtttcaccaggcaaggtgtccgggagtccggagcaggccgtggaggaaaacttgagctcttactcgttagatcgcagagtcaccccagctagcgagaccttagaggatccttgccggacggaatcacaacacaaggcagagacaccacacggggcagaagaggaatgcaaggctgaaaccccacatgggtag

SEQ ID NO: 302428 - DNA, 778 bp, Artificial Sequence
  derived and/or modified sequence
agagattatgcaggcttgggttttctttctcaccatctcagcctgaaggccctttagctcttggtcccaggaagcagcagtgctgcccatggctccccctgccaggctggagaaatgagtctgcaggtcttaaacgacaaaaatgtcagcaatgaaaaaaatacagaaaattgcgacttcctgttttcgccaccagaagttaccggaagatcgtctgttcttcgtgtgtcacagaaagaaaatgtgccacccaagaacctggccaaagctatgaaggtgacttttcagacacctctgcgggatccacagacgcacaggattctaagtcctagcatggccagcaaacttgaggctcctttcactcaggatgacacccttggactggaaaactcacacccggtctggacacagaaagagaaccaacagctcatcaaggaagtggatgccaaaactactcatggaattctacagaaaccagtggaggctgacaccgacctcctgggggatgcaagcccagcctttgggagtggcagctccagcgagtctggcccaggtgccctggctgacctggactgctcaagctcttcccagagcccaggaagttctgagaaccaaatggtgtctccaggaaaagtgtctggcagccctgagcaagccgtggaggaaaaccttagttcctattccttagacagaagagtgacacccgcctctgagaccctagaagacccttgcaggacagagtcccagcacaaagcggagactccgcacggagccgagg

SEQ ID NO: 302429 - DNA, 825 bp, Artificial Sequence
  derived and/or modified sequence
ccgccgccagaacctgtaccgcgccctgtcatgggacccggccctagaccgaccgccgggctgggccccctggatggtggccaggggcggctagagctgggccaagaccgacggcggagcgggcgccccgagaatgagtctgcaggtcttaaacgacaaaaatgtcagcaatgaaaaaaatacagaaaattgcgacttcctgttttcgccaccagaagttaccggaagatcgtctgttcttcgtgtgtcacagaaagaaaatgtgccacccaagaacctggccaaagctatgaaggtgacttttcagacacctctgcgggatccacagacgcacaggattctaagtcctagcatggccagcaaacttgaggctcctttcactcaggatgacacccttggactggaaaactcacacccggtctggacacagaaagagaaccaacagctcatcaaggaagtggatgccaaaactactcatggaattctacagaaaccagtggaggctgacaccgacctcctgggggatgcaagcccagcctttgggagtggcagctccagcgagtctggcccaggtgccctggctgacctggactgctcaagctcttcccagagcccaggaagttctgagaaccaaatggtgtctccaggaaaagtgtctggcagccctgagcaagccgtggaggaaaaccttagttcctattccttagacagaagagtgacacccgcctctgagaccctagaagacccttgcaggacagagtcccagcacaaagcggagactccgcacggagccgaggaagaatgcaaagcggagactccgcacgg

SEQ ID NO: 302430 - protein, 145 aa, Artificial Sequence
  derived and/or modified sequence
MSGVRPPIMNGPLHPRPLVALLDGRDCTVEMPILKDVATVAFCDAQSTQEIHEKVLNEAVGALMYHTITLTREDLEKFKALRIIVRIGSGFDNIDIKSAGDLGIAVCNVPAASVEETADSTLCHILNLYRRATWLHQALREGTRV

SEQ ID NO: 302431 - protein, 171 aa, Artificial Sequence
  derived and/or modified sequence
MSGVRPPIMNGPLHPRPLVALLDGRDCTVEMPILKDVATVAFCDAQSTQEIHEKVLNEAVGALMYHTITLTREDLEKFKALRIIVRIGSGFDNIDIKSAGDLGIAVCNVPAASVEETADSTLCHILNLYRRATWLHQALREGTRVQSVEQIREVASGAARIRGETLGIIGL

SEQ ID NO: 302432 - protein, 411 aa, Artificial Sequence
  derived and/or modified sequence
MCIKFSSVIAKKNERWHSDGIVYPKPTWLGEELLAKLAKWSVENKKSDFKSTLSLISIMKYSKAYQELKEKYKEMVKVWPEVTDPEKFVYEDVAIAAYLLILWEEERAERRLTARQSFVDLGCGNGLLVHILSSEGHPGRGIDVRRRKIWDMYGPQTQLEEDAITPNDKTLFPDVDWLIGNHSDELTPWIPVIAARSSYNCRFFVLPCCFFDFIGRYSRRQSKKTQYREYLDFIKEVGFTCGFHVDEDCLRIPSTKRVCLVGKSRTYPSSREASVDEKRTQYIKSRRGCPVSPPGWELSPSPRWVAAGSAGHCDGQQALDARVGCVTRAWAAEHGAGPQAEGPWLPGFHPREKAERVRNCAALPRDFIDQVVLQVANLLLGGKQLNTRSSRNGSLKTWNGGGKLSTILGRG

SEQ ID NO: 302433 - DNA, 1236 bp, Artificial Sequence
  derived and/or modified sequence
atgtgcatcaaattcagctcagttatcgcaaaaaaaaacgagcgctggcatagcgacggaattgtatacccgaagccaacttggctaggcgaagagctgctggcaaaactggctaaatggagcgtggaaaacaagaagtcagacttcaaatcaacactcagtttgatctcaatcatgaagtactccaaagcctaccaagagctgaaggagaaatataaggaaatggtgaaagtgtggcccgaagtgaccgatcccgaaaaattcgtatacgaggatgtggcaatcgccgcttacctgctgattctatgggaagaggagagggctgaaagaaggttaacagctcggcagtctttcgtcgatcttgggtgtggcaatggactgttagtccatattttgagctctgaggggcatcctggccgcggcatagatgtgcgtcggcggaagatttgggacatgtacggccctcaaactcagctcgaagaggacgctattacaccaaacgacaagactctgttccccgatgttgattggctcatagggaatcattctgatgaactcactccatggattcctgtcattgcggcccggagtagctacaactgcagattcttcgttctgccatgttgtttcttcgattttatcgggcgatactctcgtcggcaatccaaaaaaacccagtatcgagagtacttggattttataaaggaggtcgggtttacatgcggctttcacgtggacgaggattgtttacgcatcccgtccactaaacgcgtgtgcctcgtcggtaagtccagaacctacccgagctcgagagaagccagcgtggacgagaagcgtactcaatatatcaaaagccgtcgcggttgtcctgtgtctccaccaggctgggagctgtctccctccccccggtgggtagcagccggatccgccgggcattgcgatgggcagcaggctctggacgctagagtcggttgtgtgactcgcgcttgggccgccgaacacggagcgggcccccaggccgaaggcccctggctccctgggttccatccacgggagaaggccgagcgtgtgagaaattgcgccgctttgccacgagactttatcgatcaggttgtgctacaggtagcaaatctcctactgggcgggaaacagcttaatactcggagttcacggaatggctctctgaagacttggaatggaggcggcaagctgtctacaattttaggcaggggctag

SEQ ID NO: 302434 - DNA, 1236 bp, Artificial Sequence
  derived and/or modified sequence
atgtgcatcaagttcagctctgtgattgccaagaagaatgaacgctggcacagtgatggcatcgtgtaccccaagcccacctggctgggggaggagctgctggccaagctggccaagtggagcgtggagaacaagaagagtgacttcaagagcaccctgagcctcatcagcatcatgaagtacagcaaggcctaccaggagctgaaggagaagtacaaggagatggtgaaggtgtggccagaggtgacagatcctgagaagtttgtgtatgaagatgtggccatcgccgcctacctgctgatcctgtgggaggaggagcgggcagagcggcggctgacagcccggcagagctttgtggacctgggctgtggaaatggcctgctggtgcacatcctgagcagcgagggccaccctggccggggcattgatgtgagaagaaggaagatctgggacatgtatggcccccagacccagctggaggaggatgccatcaccccaaatgacaagaccctcttcccagatgtggactggctgattggcaaccacagtgatgagctgaccccctggatccctgtgattgctgcccggagcagctacaactgccgcttctttgtgctgccctgctgcttctttgacttcatcggccgctacagccggcggcagagcaagaagacccagtaccgggagtacctggacttcatcaaggaggtgggcttcacctgtggcttccacgtggatgaggactgcctgcgcatccccagcaccaagagggtgtgcctggtgggcaagagcaggacctaccccagcagccgggaggcctctgtggatgagaagaggacccagtacatcaagagccggcggggctgccctgtgtccccacctggctgggagctgagccccagcccccgctgggtggccgccggcagcgctggccactgtgatggccagcaggccctggatgcccgggtgggctgtgtgacccgggcctgggccgctgagcacggggccggcccccaggccgagggcccctggctgcccggcttccacccccgggagaaggccgagcgggtgaggaactgtgccgccctgccccgggacttcatcgaccaggtggtgctgcaggtggccaacctgctgctgggcggcaagcagctgaacaccaggagcagcagaaatggcagcctgaagacctggaatggaggcggcaagctgagcaccatcctgggccggggctag

SEQ ID NO: 302435 - DNA, 1666 bp, Artificial Sequence
  derived and/or modified sequence
gattcggagacgagaccaagctgttgctgaggacgacagccctgctctggtcactccggaggctgaccagtctacacacggctgaagcttgaagaaacaacaagcccggctctagtcacgcactggcagctgaatagtctacgcatggccgaagcttgaggacttgtcaagcaaatgtcctcaatggaaccataacgtttttgcctttggaagaagatgatgaggggaacctaaaggttaagatgagcaatgtgtatcaaattcagctcagtcatagcaaagaagaatgaaagatggcattcagatggaatcgtgtatcccaaacccacgtggcttggagaagagttgctggccaagttggccaagtggtctgtagagaacaagaagagtgactttaaaagcaccctttccctcatctccattatgaagtatagcaaggcttaccaggaacttaaagagaagtataaggaaatggttaaggtgtggcctgaagtcactgatcctgagaagttcgtgtatgaagatgtggctatcgcagcatacctgctgattctatgggaagaagaaagggctgagaggagactaactgccaggcagtcctttgtggacctgggatgtggaaatggcctcctggtccacatcctgagcagtgaggggcatccaggcagagggattgatgtccgaagaagaaaaatctgggacatgtatggaccacaaactcagttagaggaagatgcaatcacacccaatgataagacccttttccctgatgttgattggttaatcggtaaccattctgatgaactcacaccatggatacctgtcattgcagccaggtcttcctacaattgccgcttctttgtcctcccctgctgcttctttgacttcattggaagatactcccggaggcagagtaagaagactcagtaccgggaataccttgacttcattaaagaagtgggcttcacctgtgggtttcacgtggacgaagactgcctcaggattccttcaaccaaaagagtctgtctcgttggaaaatccagaacatacccttcctccagagaagcttccgtggatgaaaagaggactcagtacattaagagcaggcggggctgccctgtaagcccacctggctgggagctttccccttctccacgctgggttgctgctggcagtgctggtcactgtgacggtcagcaagctctggacgccagggtcgggtgtgtaaccagggcctgggccgctgagcatggagcagggccccaggctgaaggaccctggctacctggatttcatcccagagaaaaggctgagcgtgtgaggaactgtgccgccctgccacgagattttattgaccaagtggttttgcaagtagcgaatttactgttaggtggaaagcaattaaacacaagaagttctcgaaatgggagtttgaagacctggaatgggggaggtaagctgtccaccatcttagggaggggctagcacgctcccaggcttgagggcaggaattcacgtcttcagaaccgacatgaaatggtgtggccctgtgactacacactttgaaaaagccattgatggtgggtgcataggctctcttcaagcaaattctttaaaattttccaaatagctcttataaacataaaggactttgttatttccaggg

SEQ ID NO: 302436 - DNA, 1236 bp, Artificial Sequence
  derived and/or modified sequence
atgtgcatcaagttcagcagcgtgatcgccaagaagaacgagcggtggcacagcgatgggattgtgtatccgaagcctacttggcttggtgaggagctgctagcaaagctggctaagtggtcagttgaaaataagaaatccgattttaagtctacattgagcctcatctccatcatgaagtatagtaaagcttaccaagaactgaaggagaaatataaggaaatggtcaaagtatggcctgaggtgaccgacccagaaaagtttgtttatgaggacgtggcaattgcagcatacctgttgatcctctgggaagaggagcgcgcggagcgcaggttgacagcccgccagagctttgtggatctgggctgtggtaatggcctgctcgtgcatatactcagttctgaaggacacccagggcgcggaattgatgtgaggcgacgcaagatctgggatatgtacggcccacagactcaactcgaagaagatgccataacaccaaacgacaaaacgctgtttcccgatgtggactggctgatcggtaaccactctgatgagctgaccccctggattcccgttattgctgccagaagctcctacaactgtagattttttgtgttaccttgctgcttctttgacttcatcggtaggtactcccgaaggcagagcaagaaaactcaatacagagagtacctcgatttcatcaaagaggtcggctttacctgcgggtttcacgtcgatgaagattgtctgcgcatccctagtaccaaacgggtgtgtctggttggcaagtcgcgaacttatccctcctccagggaagcaagcgtcgacgagaaaaggacacagtacataaagtctcggaggggttgtccagtgtcaccccctggctgggagctgagcccctctccacggtgggtcgctgccgggtccgcaggacattgtgacggacagcaggcacttgatgcccgcgtaggttgtgtgaccagggcatgggcagccgagcacggggccgggcctcaggctgagggcccatggctccctggcttccatcccagggagaaggccgagcgcgtcaggaactgcgcagctttacctcgagacttcatcgaccaggtggtattgcaggtggcgaacctgctgctaggcggaaaacagctgaatactagatcctcaagaaatggttcactgaaaacttggaatgggggagggaagctttctaccatcttaggcagaggctag

SEQ ID NO: 302437 - DNA, 1236 bp, Artificial Sequence
  derived and/or modified sequence
atgtgtattaaattctcctcagtaattgccaagaagaatgaacgctggcacagcgacggaatcgtgtaccccaaacccacctggcttggagaggaactcttagctaagctggcgaaatggtccgtcgagaataagaaatcagactttaaatctactctgtctctcatttccatcatgaaatacagtaaagcttaccaagaacttaaggagaagtataaggagatggtcaaggtgtggcctgaggtcaccgaccctgaaaagtttgtgtatgaggatgtggcgatcgccgcttacctgctaatcctgtgggaggaagaacgagctgagcggaggctcactgcaaggcaaagctttgtggacttaggctgcggcaacggcctgttggttcatatcctctcctctgaaggccatccgggtcggggaatcgacgttcgtcgacgcaagatctgggacatgtatggaccacagacacagttggaggaggatgccatcacacctaacgacaagacccttttccccgacgtcgattggctgatcggcaatcattccgacgagctgaccccgtggattcccgtgattgcagcacgctcatcttacaactgccggttcttcgttctcccctgttgcttctttgatttcatcgggaggtattcccgaaggcagtcaaaaaaaacacagtaccgggaataccttgattttattaaagaggtgggttttacttgtggcttccacgtggatgaggactgcctccgaatcccctccacgaaacgggtttgtctggtgggtaaatctaggacttacccatcatccagggaggccagcgtcgatgaaaaacgcactcagtatattaaatcccggaggggctgcccggtcagccctcctgggtgggagctgtcccctagtcccagatgggtcgcagctggcagcgccggacactgcgatggccagcaagctctggatgcaagggtgggttgtgtgacgcgggcttgggccgctgagcacggagctggccctcaagcagagggtccatggctacccggatttcatcccagagagaaggcagagcgcgtgaggaactgcgcagcgctccctagagactttattgaccaggttgtgctgcaagtggcaaatctgctgctaggcggaaagcagctgaacaccagatcctcccgaaatggctctcttaagacctggaatggcggtggcaagctgtcaactattctcggaaggggctag

SEQ ID NO: 302438 - DNA, 1236 bp, Artificial Sequence
  derived and/or modified sequence
atgtgcatcaagttcagcagcgtgatcgccaagaagaacgagagatggcacagcgacggcatcgtgtaccccaagcccacctggctgggcgaggagctgctggccaagctggccaagtggagcgtggagaacaagaagagcgacttcaagagcaccctgagcctgatcagcatcatgaagtacagcaaggcctaccaggagctgaaggagaagtacaaggagatggtgaaggtgtggcccgaggtgaccgaccccgagaagttcgtgtacgaggacgtggccatcgccgcctacctgctgatcctgtgggaggaggagagagccgagagaagactgaccgccagacagagcttcgtggacctgggctgcggcaacggcctgctggtgcacatcctgagcagcgagggccaccccggcagaggcatcgacgtgagaagaagaaagatctgggacatgtacggcccccagacccagctggaggaggacgccatcacccccaacgacaagaccctgttccccgacgtggactggctgatcggcaaccacagcgacgagctgaccccctggatccccgtgatcgccgccagaagcagctacaactgcagattcttcgtgctgccctgctgcttcttcgacttcatcggcagatacagcagaagacagagcaagaagacccagtacagagagtacctggacttcatcaaggaggtgggcttcacctgcggcttccacgtggacgaggactgcctgagaatccccagcaccaagagagtgtgcctggtgggcaagagcagaacctaccccagcagcagagaggccagcgtggacgagaagagaacccagtacatcaagagcagaagaggctgccccgtgagcccccccggctgggagctgagccccagccccagatgggtggccgccggcagcgccggccactgcgacggccagcaggccctggacgccagagtgggctgcgtgaccagagcctgggccgccgagcacggcgccggcccccaggccgagggcccctggctgcccggcttccaccccagagagaaggccgagagagtgagaaactgcgccgccctgcccagagacttcatcgaccaggtggtgctgcaggtggccaacctgctgctgggcggcaagcagctgaacaccagaagcagcagaaacggcagcctgaagacctggaacggcggcggcaagctgagcaccatcctgggcagaggctag

SEQ ID NO: 302439 - DNA, 270 bp, Artificial Sequence
  derived and/or modified sequence
ggccggcaccaccccggcagccaccagcagtgggaccagctgctgtgctggctgagaggtttgctccatcccggtttgcatgggtgtcgtgccggtagggcgcaccttcagggagggcgcgttagggctggacccggtctgcatcgactgccagctggctgtcacgccgacgctagtggacctaccctaggatgccctgtgttactccatgcagtagccgcttggtcccgtcagccgggcgtggaaggctttattacagggttactttag

SEQ ID NO: 302440 - protein, 643 aa, Artificial Sequence
  derived and/or modified sequence
MDPVATHSCHLLQQLHEQRIQGLLCDCMLVVKGVCFKAHKNVLAAFSQYFRSLFQNSSSQKNDVFHLDVKNVSGIGQILDFMYTSHLDLNQDNIQVMLDTAQCLQVQNVLSLCHTFLKSATVVQPPGMPCNSTLSLQSTLTPDATCVISENYPPHLLQECSADAQQNKTLDESHPHASPSVNRHHSAGEISKQAPDTSDGSCTELPFKQPNYYYKLRNFYSKQYHKHAAGPSQERVVEQPFAFSTSTDLTTVESQPCAVSHSECILESPEHLPSNFLAQPVNDSAPHPESDATCQQPVKQMRLKKAIHLKKLNFLKSQKYAEQVSEPKSDDGLTKRLESASKNTLEKASSQSAEEKESEEVVSCENFNCISETERPEDPAALEDQSQTLQSQRQYACELCGKPFKHPSNLELHKRSHTGKCFGGSGDLRRHVRTHTGEKPYTCEICNKCFTRSAVLRRHKKMHCKAGDESPDVLEELSQAIETSDLEKSQSSDSFSQDTSVTLMPVSVKLPVHPVENSVAEFDSHSGGSYCKLRSMIQPHGVSDQEKLSLDPGKLAKPQMQQTQPQAYAYSDVDTPAGGEPLQADGMAMIRSSLAALDNHGGDPLGSRASSTTYRNSEGQFFSSMTLWGLAMKTLQNENELDQ

SEQ ID NO: 302441 - protein, 146 aa, Artificial Sequence
  derived and/or modified sequence
MDPVATHSCHLLQQLHEQRIQGLLCDCMLVVKGVCFKAHKNVLAAFSQYFRSLFQNSSSQKNDVFHLDVKNVSGIGQILDFMYTSHLDLNQDNIQVMLDTAQCLQVQNVLSLCHTFLKSATVVQPPGMPCNSTLSLQSTLTPDATC

SEQ ID NO: 302442 - DNA, 1932 bp, Artificial Sequence
  derived and/or modified sequence
atggaccccgtggccacccacagctgccacctgctgcagcagctgcacgagcagagaatccagggcctgctgtgcgactgcatgctggtggtgaagggcgtgtgcttcaaggcccacaagaacgtgctggccgccttcagccagtacttcagaagcctgttccagaacagcagcagccagaagaacgacgtgttccacctggacgtgaagaacgtgagcggcatcggccagatcctggacttcatgtacaccagccacctggacctgaaccaggacaacatccaggtgatgctggacaccgcccagtgcctgcaggtgcagaacgtgctgagcctgtgccacaccttcctgaagagcgccaccgtggtgcagccccccggcatgccctgcaacagcaccctgagcctgcagagcaccctgacccccgacgccacctgcgtgatcagcgagaactaccccccccacctgctgcaggagtgcagcgccgacgcccagcagaacaagaccctggacgagagccacccccacgccagccccagcgtgaacagacaccacagcgccggcgagatcagcaagcaggcccccgacaccagcgacggcagctgcaccgagctgcccttcaagcagcccaactactactacaagctgagaaacttctacagcaagcagtaccacaagcacgccgccggccccagccaggagagagtggtggagcagcccttcgccttcagcaccagcaccgacctgaccaccgtggagagccagccctgcgccgtgagccacagcgagtgcatcctggagagccccgagcacctgcccagcaacttcctggcccagcccgtgaacgacagcgccccccaccccgagagcgacgccacctgccagcagcccgtgaagcagatgagactgaagaaggccatccacctgaagaagctgaacttcctgaagagccagaagtacgccgagcaggtgagcgagcccaagagcgacgacggcctgaccaagagactggagagcgccagcaagaacaccctggagaaggccagcagccagagcgccgaggagaaggagagcgaggaggtggtgagctgcgagaacttcaactgcatcagcgagaccgagagacccgaggaccccgccgccctggaggaccagagccagaccctgcagagccagagacagtacgcctgcgagctgtgcggcaagcccttcaagcaccccagcaacctggagctgcacaagagaagccacaccggcaagtgcttcggcggcagcggcgacctgagaagacacgtgagaacccacaccggcgagaagccctacacctgcgagatctgcaacaagtgcttcaccagaagcgccgtgctgagaagacacaagaagatgcactgcaaggccggcgacgagagccccgacgtgctggaggagctgagccaggccatcgagaccagcgacctggagaagagccagagcagcgacagcttcagccaggacaccagcgtgaccctgatgcccgtgagcgtgaagctgcccgtgcaccccgtggagaacagcgtggccgagttcgacagccacagcggcggcagctactgcaagctgagaagcatgatccagccccacggcgtgagcgaccaggagaagctgagcctggaccccggcaagctggccaagccccagatgcagcagacccagccccaggcctacgcctacagcgacgtggacacccccgccggcggcgagcccctgcaggccgacggcatggccatgatcagaagcagcctggccgccctggacaaccacggcggcgaccccctgggcagcagagccagcagcaccacctacagaaacagcgagggccagttcttcagcagcatgaccctgtggggcctggccatgaagaccctgcagaacgagaacgagctggaccagtag

SEQ ID NO: 302443 - DNA, 1932 bp, Artificial Sequence
  derived and/or modified sequence
atggatcccgttgcaactcattcttgccacttgctgcagcagctgcatgaacaacgaatacaaggattgctgtgcgactgcatgcttgttgtcaagggtgtttgttttaaagcacacaagaacgtgctggctgccttctctcagtatttcagaagcctcttccaaaactctagctcccagaagaatgatgtgtttcacctagatgtgaagaatgtctctgggatcggccagatcctcgattttatgtatacctctcatctggacctaaaccaagataacattcaggtgatgctggataccgcccaatgcctgcaagtacaaaacgtgctgtctttgtgtcacacattccttaagagcgccacagttgtccaaccccctggtatgccgtgtaactccacattgtctctgcagtccaccctaacccctgacgctacatgtgttataagtgaaaactatcctcctcatctattgcaagaatgctctgcagatgcccaacagaacaagacactcgacgagagccacccccacgcttccccaagcgtgaatagacaccactcagcaggtgaaatctccaaacaggctccagatacgtccgacggttcatgcactgaactgccatttaagcagccgaattattattacaaactgagaaatttttactcgaaacagtatcataagcacgccgctggcccaagtcaggagagggtggtggagcaaccatttgcatttagtacctccactgacttgacaaccgttgagtcacaaccgtgcgccgtttcacactccgagtgcattctggagtcccctgagcatctgccctccaactttctcgcacagccagtgaacgattcagccccacacccagaatcagatgcaacctgtcagcagccggtcaaacagatgagactgaaaaaagccattcatctgaagaaacttaactttttgaagagccaaaagtacgctgagcaggtgtccgagcctaagtccgacgatggccttaccaagaggttggagagtgcttctaaaaacaccctggagaaggccagcagtcagagcgccgaagagaaagagtccgaagaagtcgtatcctgcgagaattttaattgtataagcgagaccgagcgacccgaagatccagccgccctagaagatcagagccaaactttgcagtctcagcggcagtacgcttgcgaactttgcgggaagcccttcaagcacccctctaacctagagttgcacaaacgctctcacactggcaagtgctttgggggctcaggtgatcttagacgccatgttcgtacccacaccggtgaaaagccatacacatgcgaaatctgtaataagtgctttacacgcagtgccgtcttgagaaggcacaaaaaaatgcattgtaaggccggcgacgagtcccctgatgtgctagaagaactgtcccaagccattgagacctccgacttagagaaatcacagtctagcgattcttttagtcaggacacgagcgtgaccttgatgcccgtaagtgtcaaactcccagtccatcctgtggagaactcagttgcagagtttgattctcactcaggtggcagctattgtaagctccgttctatgattcagccccatggcgtgtccgatcaggagaagctgtccctggatcccggaaaactcgcaaaacctcagatgcagcaaacccagccgcaggcttacgcttatagtgacgtcgacacacccgcgggtggagagccgctgcaggcagatggcatggctatgatcaggtccagtctggctgcactggataaccatggcggggacccattgggatccagggcctcctcaactacatacagaaactccgagggacagttcttttctagcatgaccctgtggggactggctatgaaaactctgcagaacgagaacgagctagatcagtag

SEQ ID NO: 302444 - DNA, 1932 bp, Artificial Sequence
  derived and/or modified sequence
atggaccctgtggccacccacagctgccacctgctgcagcagctgcacgagcagaggatccagggcctgctgtgtgactgcatgctggtggtgaagggcgtgtgcttcaaggcccacaagaatgtgctggccgccttcagccagtacttccgcagcctcttccagaacagcagcagccagaagaatgatgtgttccacctggatgtgaagaatgtgtctggaattggccagatcctggacttcatgtacaccagccacctggacctgaaccaggacaacatccaggtgatgctggacacagcccagtgcctgcaggtgcagaatgtgctgagcctgtgccacaccttcctgaagagcgccaccgtggtgcagcccccaggcatgccctgcaacagcaccctgagcctgcagagcaccctgaccccagatgccacctgtgtgatcagcgagaactacccaccccacctgctgcaggagtgcagcgcagatgcccagcagaacaagaccctggatgagagccacccccacgccagccccagcgtgaacagacaccacagcgctggggagatcagcaagcaggccccagacaccagtgatggcagctgcacagagctgcccttcaagcagcccaactactactacaagctgaggaacttctacagcaagcagtaccacaagcacgccgccggccccagccaggagcgggtggtggagcagccctttgccttcagcaccagcacagacctgaccaccgtggagagccagccctgtgctgtgagccacagcgagtgcatcctggagagccctgagcacctgcccagcaacttcctggcccagcctgtgaatgacagcgccccccaccctgagagtgatgccacctgccagcagcctgtgaagcagatgaggctgaagaaggccatccacctgaagaagctgaacttcctgaagagccagaagtatgcagagcaggtgtctgagcccaagagtgatgatggcctgaccaagaggctggagagcgccagcaagaacaccctggagaaggccagcagccagagcgctgaggagaaggagagcgaggaggtggtgtcctgtgagaacttcaactgcatcagcgagacagagaggccagaagatcctgctgccctggaggaccagagccagaccctgcagagccagaggcagtatgcctgtgagctgtgtgggaagcccttcaagcaccccagcaacctggagctgcacaagaggagccacacaggcaagtgcttcggcggcagcggggacctgcggagacatgtgaggacccacactggagagaagccctacacctgtgagatctgcaacaagtgcttcaccaggtctgctgtgctgcggcggcacaagaagatgcactgcaaggctggagatgagagcccagatgtgctggaggagctgagccaggccatcgagaccagtgacctggagaagagccagagcagtgacagcttcagccaggacacctctgtgaccctgatgcctgtgtctgtgaagctgcctgtgcaccctgtggagaacagcgtggccgagtttgacagccacagcggcggcagctactgcaagctgcgctccatgatccagccccacggcgtgtctgaccaggagaagctgagcctggaccccgggaagctggccaagccccagatgcagcagacccagccccaggcctatgcctacagtgatgtggacaccccagctggaggagagcccctgcaggctgatggcatggccatgatccgcagcagcctggccgccctggacaaccacggcggggaccccctgggcagccgggccagcagcaccacctacagaaattctgagggccagttcttcagctccatgaccctgtggggcctggccatgaagaccctgcagaatgaaaatgagctggaccagtag

SEQ ID NO: 302445 - DNA, 1932 bp, Artificial Sequence
  derived and/or modified sequence
atggaccccgtggccacccacagctgccacctgctgcagcagctgcatgaacaaagaatccaggggttactgtgcgattgtatgttggttgtgaaaggcgtttgcttcaaggctcacaagaatgtcctagccgctttcagtcagtactttcgctcattgttccagaattcgtcctcacaaaagaacgacgtcttccatctagacgtgaaaaatgtgtccggcatcggacaaattcttgattttatgtacacaagccatctggatttgaaccaggacaacatacaggtcatgctcgataccgctcagtgcttgcaggtgcaaaacgtgctgagcctatgccacacattcctgaagtccgccaccgtggtgcagccccctggtatgccatgcaattccacgctcagcctacaaagcaccctcacaccggatgctacctgtgtaatatccgaaaattaccccccgcacctcctccaagaatgctctgctgatgcacagcagaacaaaacgttagacgaatcccacccccacgcctcgccatctgtgaacaggcatcactccgcaggagagatctctaagcaggccccagacacaagtgacgggagctgcaccgagttgcctttcaagcaaccgaactattattataaactgcggaacttctatagtaagcagtaccacaaacacgcagccgggcctagtcaggagagagttgtcgaacaaccctttgcattctctacctccaccgatcttacaactgtggagtcccagccctgcgccgtatcccattcagagtgcattctggagtctccagagcacctcccgtctaattttctggctcagccagtgaacgactcggcgccacacccagaatcagacgcaacatgccagcagccagtaaagcagatgaggctgaaaaaagcaatccaccttaagaaattaaattttctgaaatcccaaaagtatgccgagcaggtgagcgagccaaaatcagatgatggcctgacgaagcgtctggagagcgcgtcaaaaaacactctcgagaaagcaagcagccagagtgcagaggagaaggaatctgaggaggttgtgtcatgcgagaatttcaattgcattagcgaaacagagcgccccgaagaccccgcagccctggaagaccagagccagaccctgcagagccaacggcaatacgcatgtgagttgtgtggaaaaccatttaagcatcccagcaatttagagctgcataaaaggtctcacaccgggaaatgttttggagggtcgggagacctgaggcggcacgttcggacccacaccggcgaaaaaccatacacttgtgagatctgtaataaatgtttcacccggtctgcagtgctccggagacataaaaaaatgcattgtaaagctggcgatgagtctccggatgtgcttgaagagctgagccaggccatcgaaacttctgatcttgagaagtcccaaagttctgatagttttagtcaggataccagcgtgacccttatgcccgtctcagtcaaactgcctgtccacccagtggaaaattccgtggcggaattcgactctcattctgggggaagttactgcaagttacggtctatgattcaaccacatggtgtgtccgaccaggagaaattatctctggaccccggaaagctcgccaaaccccagatgcagcagacccagccccaagcctatgcatatagtgatgtagataccccggcaggcggagagcccctgcaggcagacggaatggcaatgattaggtctagtctcgctgccctcgataatcatggcggagaccctcttggtagcagagcgagctcgactacctaccgcaattcagaaggccaatttttttcctcaatgacactgtggggcctagctatgaagactctgcaaaatgagaacgagctcgatcagtag

SEQ ID NO: 302446 - DNA, 1932 bp, Artificial Sequence
  derived and/or modified sequence
atggacccagtcgccacgcattcctgtcacctgctacagcagttacacgaacaacgaattcagggccttctctgtgactgcatgctggtggtgaagggggtttgctttaaggcacacaaaaatgttcttgcagcattctctcagtacttccgatccctgttccagaatagttcttctcagaagaatgatgtctttcatttggatgttaaaaatgtcagcggcatcggccagatcctcgacttcatgtacacttctcatttagatctcaatcaggataacatacaggtgatgctggataccgctcagtgcttgcaagtccagaatgtcctatctctgtgtcacacatttctcaagtccgccacagtggtgcaacctcctggaatgccttgtaattccactctgagtctgcagtccaccctgacccctgacgctacatgtgtgatttcagagaattatccaccccatctcctacaagagtgttccgccgatgcgcagcagaacaagaccttggacgaatctcacccacatgccagcccctctgtgaacagacaccatagcgccggagagatctccaagcaggcacctgacaccagcgatggcagttgcacagagctgccttttaagcagcctaactattactataagctgagaaatttttactccaagcagtaccacaagcatgcggctggtccatcacaggagcgcgttgtggaacaaccttttgcgttcagcacctcgacagatctcactactgtggagagccagccctgtgccgtaagtcactcagaatgtatactggaatcacctgaacacttaccttcaaattttctggctcaacctgtgaacgatagcgcacctcatcccgagagcgacgctacctgccagcagcctgttaaacagatgcggctcaaaaaagccatccatttaaagaaattaaatttcctgaaatcgcagaagtacgccgaacaggtaagtgaacccaagtctgatgacggtctgaccaagagactggaatctgcctctaagaacactctagagaaagcgtcctcacaatcagccgaggagaaggagagtgaagaggtagtaagttgcgagaattttaactgtatctccgagaccgaaagaccagaagacccggcagcactagaagatcagtcccagacactgcagtcacaaagacaatacgcctgtgagctgtgcggtaaaccctttaaacacccaagtaacttggagcttcataaaaggagtcacacaggaaagtgcttcggcggatcaggagatctgcggcgacacgtccggacccacaccggcgaaaagccctatacgtgcgagatctgtaataaatgctttacccggtccgcggtacttcgccgacacaagaagatgcactgcaaggccggtgatgaatcccccgatgtgcttgaagaattaagccaggctatcgagacctccgacttagaaaagtcgcagtcttcggatagcttctcacaagacacctctgtgactctcatgcccgtgtctgtcaagctgcccgtgcatcccgtggagaacagcgtcgctgaatttgacagccatagcggagggagctactgcaagctgcgatcaatgattcagcctcatggggtatcagaccaagaaaaactgagtctggaccccggaaaactggccaagccacagatgcaacagacccagcctcaggcgtacgcatattctgatgtagatacacccgctggaggagagccactgcaggcagatggcatggctatgataagaagctccctcgccgctctggacaaccatgggggtgatcctctcggttctcgggctagctcaacaacgtacaggaactctgagggccagtttttttctagtatgactctgtggggcctggccatgaaaacactgcagaacgaaaatgagctggatcagtag

SEQ ID NO: 302447 - DNA, 2576 bp, Artificial Sequence
  derived and/or modified sequence
agtggaagtgacgccaacggaagcaggaaggcggttccggcaagccaagggggcgttgtcgtgatgattccgcggccagcggatcgctgcgagtggccttgaaggcagctgctgcaggtgaagagtaggcggcggggcagagagcggcctccgagggtcacctgaatggttgagcatggaccctgttgctacccacagctgccatctgctccagcaactgcatgagcagcgaatccaaggcctgctttgtgactgtatgttggtggtaaaaggagtctgctttaaagcgcataagaatgtcctggcagcattcagccagtattttaggagcctctttcagaattcttcaagccagaagaatgatgtttttcacttggatgttaaaaatgtcagtggcatagggcagatcctggacttcatgtacacttctcatctagatcttaaccaggacaatatacaagtaatgctggacacagcacagtgtttgcaagttcaaaatgttctgagtctgtgtcacacatttttaaaatcagccactgtagtacagccacctggcatgccttgtaatagtacattgtctctacaaagcaccctgaccccagatgccacttgtgttatcagtgaaaactacccccctcatttactgcaggaatgttcagcagatgcacagcagaacaaaacgttggatgaatcgcatccgcatgcttcaccatcagttaatcgtcatcactccgcaggtgaaatctcaaaacaagctcctgatacttcagatggcagctgcacagaactgcctttcaaacagccaaattactattacaaactcagaaacttttacagtaagcagtaccataaacacgcagctggtcccagtcaggagagagttgttgagcagccttttgctttcagcacctctacagaccttaccacggtagagagccagccttgtgccgtcagtcattctgaatgcatcctggagtctcccgagcacttaccttccaacttcctggcccagcctgtgaatgactctgccccacaccctgagtcagacgccacatgccaacaacctgtcaagcagatgaggctcaaaaaggccattcatctgaagaagctcaatttcctgaagtcacagaaatacgcagagcaagtatctgaacccaagtcagatgatggtttgacaaagaggttggaatctgctagtaaaaataccctagagaaagctagcagccaaagtgctgaagaaaaagaaagtgaagaagtcgtcagttgtgagaattttaattgcattagtgagacggagaggcctgaagacccggctgccctggaagaccagtcccagacacttcagtcccagagacaatacgcgtgtgaattatgcgggaaaccttttaaacacccaagcaacttggagcttcacaaacggtctcatacagggaaatgttttgggggatcaggtgacctccgcaggcatgtccgcactcacactggggagaagccgtacacatgtgagatctgtaacaagtgctttacccgctctgcggtgctccggcggcacaagaagatgcactgcaaagctggtgacgagagcccagatgtgctggaggagctcagccaagccatcgagacctccgacctcgagaaatctcagagctcagactctttctcccaagacacgtctgtgacgctgatgccagtgtcggttaaactccctgtccacccagtggaaaattctgtggcagaatttgatagccactctggcggctcctattgtaagttacggtccatgatccaacctcatggagttagtgaccaggagaagctgagtttggatcctggtaaacttgccaagccccagatgcagcagacacagcctcaggcctatgcttactcggatgtggacaccccagccggtggcgaaccactgcaggccgatggcatggccatgatccgttcctctctggctgctttggacaaccacggcggtgaccccctgggcagtcgagcatcttccaccacttataggaactcagagggtcagtttttctccagcatgactctctgggggctagcgatgaagacgctgcagaatgaaaacgagttagaccagtgatgtaccgcgcttctccacggtagaggcgtgttctcagtttagcaggctggtgttaaggctgtaggaggacccagtttccccatgacagtgccttctaactagccagagaataggtagcttccctcctgatgatggctcataatctgaagcatcttgagctgggggtgtgagggggagggcctgctggctcaccgtgaggcagccgcgggagggagcgctgacgtcacagaagcgaaggcttgatgctgtctcagcagcctcagctgtgggggggaagcgcgtgtgcatcgtgtcaactactgtacatgttggtcatgtgaaaggaattatatatgtatagtattacaagtatttttgcatttttacaagattgaaatttgtagcattttgtattatttacacagaatttatttgtatatgaaactcataccataatttaattcgaataaatgaaacttttctatatatt

SEQ ID NO: 302448 - protein, 792 aa, Artificial Sequence
  derived and/or modified sequence
MGAPACALALCVAVAIVAGASSESLGTEQRVVGRAAEVPGPEPGQQEQLVFGSGDAVELSCPPPGGGPMGPTVWVKDGTGLVPSERVLVGPQRLQVLNASHEDSGAYSCRQRLTQRVLCHFSVRVTDAPSSGDDEDGEDEAEDTGVDTGAPYWTRPERMDKKLLAVPAANTVRFRCPAAGNPTPSISWLKNGREFRGEHRIGGIKLRHQQWSLVMESVVPSDRGNYTCVVENKFGSIRQTYTLDVLERSPHRPILQAGLPANQTAVLGSDVEFHCKVYSDAQPHIQWLKHVEVNGSKVGPDGTPYVTVLKTAGANTTDKELEVLSLHNVTFEDAGEYTCLAGNSIGFSHHSAWLVVLPAEEELVEADEAGSVYAGILSYGVGFFLFILVVAAVTLCRLRSPPKKGLGSPTVHKISRFPLKRQQVSLESNASMSSNTPLVRIARLSSGEGPTLANVSELELPADPKWELSRARLTLGKPLGEGCFGQVVMAEAIGIDKDRAAKPVTVAVKMLKDDATDKDLSDLVSEMEMMKMIGKHKNIINLLGACTQGGPLYVLVEYAAKGNLREFLRARRPPGLDYSFDTCKPPEEQLTFKDLVSCAYQVARGMEYLASQKCIHRDLAARNVLVTEDNVMKIADFGLARDVHNLDYYKKTTNLVLWGPALGDLHAGGLPVPRHPCGGALQAAEGGPPHGQARQLHTRPVHDHAGVLACRALPEAHLQAAGGGPGPCPYRDVHRRVPGPVGAFRAVLPGWPGHPQLQLLRGRLRVCPRPAAPGPTQQWGLADVKGHWSPTM

SEQ ID NO: 302449 - DNA, 2379 bp, Artificial Sequence
  derived and/or modified sequence
atgggcgcccccgcctgcgccctggccctgtgcgtggccgtggccatcgtggccggcgccagcagcgagagcctgggcaccgagcagagagtggtgggcagagccgccgaggtgcccggccccgagcccggccagcaggagcagctggtgttcggcagcggcgacgccgtggagctgagctgccccccccccggcggcggccccatgggccccaccgtgtgggtgaaggacggcaccggcctggtgcccagcgagagagtgctggtgggcccccagagactgcaggtgctgaacgccagccacgaggacagcggcgcctacagctgcagacagagactgacccagagagtgctgtgccacttcagcgtgagagtgaccgacgcccccagcagcggcgacgacgaggacggcgaggacgaggccgaggacaccggcgtggacaccggcgccccctactggaccagacccgagagaatggacaagaagctgctggccgtgcccgccgccaacaccgtgagattcagatgccccgccgccggcaaccccacccccagcatcagctggctgaagaacggcagagagttcagaggcgagcacagaatcggcggcatcaagctgagacaccagcagtggagcctggtgatggagagcgtggtgcccagcgacagaggcaactacacctgcgtggtggagaacaagttcggcagcatcagacagacctacaccctggacgtgctggagagaagcccccacagacccatcctgcaggccggcctgcccgccaaccagaccgccgtgctgggcagcgacgtggagttccactgcaaggtgtacagcgacgcccagccccacatccagtggctgaagcacgtggaggtgaacggcagcaaggtgggccccgacggcaccccctacgtgaccgtgctgaagaccgccggcgccaacaccaccgacaaggagctggaggtgctgagcctgcacaacgtgaccttcgaggacgccggcgagtacacctgcctggccggcaacagcatcggcttcagccaccacagcgcctggctggtggtgctgcccgccgaggaggagctggtggaggccgacgaggccggcagcgtgtacgccggcatcctgagctacggcgtgggcttcttcctgttcatcctggtggtggccgccgtgaccctgtgcagactgagaagcccccccaagaagggcctgggcagccccaccgtgcacaagatcagcagattccccctgaagagacagcaggtgagcctggagagcaacgccagcatgagcagcaacacccccctggtgagaatcgccagactgagcagcggcgagggccccaccctggccaacgtgagcgagctggagctgcccgccgaccccaagtgggagctgagcagagccagactgaccctgggcaagcccctgggcgagggctgcttcggccaggtggtgatggccgaggccatcggcatcgacaaggacagagccgccaagcccgtgaccgtggccgtgaagatgctgaaggacgacgccaccgacaaggacctgagcgacctggtgagcgagatggagatgatgaagatgatcggcaagcacaagaacatcatcaacctgctgggcgcctgcacccagggcggccccctgtacgtgctggtggagtacgccgccaagggcaacctgagagagttcctgagagccagaagaccccccggcctggactacagcttcgacacctgcaagccccccgaggagcagctgaccttcaaggacctggtgagctgcgcctaccaggtggccagaggcatggagtacctggccagccagaagtgcatccacagagacctggccgccagaaacgtgctggtgaccgaggacaacgtgatgaagatcgccgacttcggcctggccagagacgtgcacaacctggactactacaagaagaccaccaacctggtgctgtggggccccgccctgggcgacctgcacgccggcggcctgcccgtgcccagacacccctgcggcggcgccctgcaggccgccgagggcggccccccccacggccaggccagacagctgcacaccagacccgtgcacgaccacgccggcgtgctggcctgcagagccctgcccgaggcccacctgcaggccgccggcggcggccccggcccctgcccctacagagacgtgcacagaagagtgcccggccccgtgggcgccttcagagccgtgctgcccggctggcccggccacccccagctgcagctgctgagaggcagactgagagtgtgccccagacccgccgcccccggccccacccagcagtggggcctggccgacgtgaagggccactggagccccaccatgtag

SEQ ID NO: 302450 - DNA, 2379 bp, Artificial Sequence
  derived and/or modified sequence
atgggagctcctgcctgcgctctggccctgtgcgtggcggttgctatcgtagcgggcgcgagtagtgaaagcctggggaccgaacaaagagttgtgggacgcgccgcggaggttccaggccccgagccaggacagcaagagcagttggttttcggttccggcgatgcagttgaactgagctgtccacctcccggaggcggtcctatgggccccaccgtgtgggtgaaggatggcacaggactcgtgccttccgaacgggtgcttgtcgggcctcaacggctgcaggtgctgaacgcctcccacgaagactctggggcctatagttgtcggcaaagacttacgcagagagtgctttgccacttcagcgttcgggtcacagacgccccatcaagtggagacgacgaagatggagaggacgaggccgaggacactggggtggacacaggcgcgccatactggacaagacctgaacgcatggataaaaaattgctggccgtgccagctgctaatactgtccgcttccgctgccctgccgcaggcaacccaacccctagcatttcttggctgaagaacggccgagaatttaggggtgagcataggattggaggtattaaactgcgccatcagcagtggtcattggtgatggaatccgtggttcccagtgaccgggggaattacacctgcgtcgttgaaaacaagttcggctccatcaggcagacctataccctggatgtgttagagcggagcccgcaccgaccaatacttcaggctgggcttcccgcaaatcagaccgcagttctcggcagtgacgtggaattccattgcaaagtctacagcgatgcacaaccacacatccagtggctcaaacacgtcgaggtgaacggcagtaaagtgggaccagacgggaccccatacgtcaccgtcctcaagaccgccggggcgaacactaccgataaggagctggaggtgctatcactgcataacgttactttcgaggatgcgggagagtacacatgtctggctggtaatagtatcggatttagccatcatagcgcctggctcgttgtgctgccggcagaggaggaactcgttgaagccgacgaggctgggtcggtctatgcaggcattcttagctatggcgtgggcttcttcctttttattctagttgtagcagcggtgaccctgtgcagacttaggagcccccctaaaaaagggctcggaagcccaaccgtccacaagattagccgattccctctgaaaagacagcaggtgagcttggaaagtaatgcgtctatgagctccaatactcccttggtgcggatcgcacgcttgagttccggcgagggacccaccttggcaaacgtttctgaattggaactcccagcggacccaaaatgggagctgtctagggcgcgcctaaccctgggaaagccactcggcgaaggctgctttggacaggtcgtgatggccgaagctattggaatagacaaggatagagcggctaaaccagtgacagtggcagtaaagatgctcaaggatgacgcaaccgataaggatctctctgaccttgtgtcagagatggaaatgatgaagatgattggcaagcacaagaacattatcaacttactgggcgcctgtacgcaaggaggacctctctatgttctcgtagagtatgctgcaaagggcaaccttagggaatttcttcgtgccaggcggcctccaggcttggattactcattcgatacttgcaaaccgccggaagaacaactcacctttaaagatctcgtgagctgcgcttatcaagtggcgcgtggaatggaatatctcgctagccaaaaatgcatacacagagacctggccgcaaggaacgtgctggtgacagaggacaacgttatgaaaatcgctgactttggactggctagggatgtccataacctggattactataagaaaactacaaatctggtgctgtgggggccagccttaggagacctgcacgctggcggcctgccggtccctaggcacccatgtggtggagcactgcaggctgccgaaggtggacctccccacggacaagcacgtcaactacacacacgtccagttcacgatcatgccggggtgttggcctgccgcgctctccctgaggcccacctgcaagccgcagggggcggccctggcccttgtccatatcgagatgtccaccgccgggtacctggacccgtgggagcctttagagccgtactgccgggctggccaggtcatcctcaactccagctgctccggggcagactgagagtgtgccccagaccagctgctccgggcccgacccagcagtgggggctggccgacgtgaaaggacactggtctccaactatgtag

SEQ ID NO: 302451 - DNA, 4217 bp, Artificial Sequence
  derived and/or modified sequence
gcggcgtcgcgggcagctggcgccgcgcggtcctgctctgccggtcgcacggacgcaccggcgggccgccggccggagggacggggcgggagctgggcccgcggacagcgagccggagcgggagccgcgcgtagcgagccgggctccggcgctcgccagtctcccgagcggcgcccgcctcccgccggtgcccgcgccgggccgtggggggcagcatgcccgcgcgcgctgcctgaggacgccgcggcccccgcccccgccatgggcgcccctgcctgcgccctcgcgctctgcgtggccgtggccatcgtggccggcgcctcctcggagtccttggggacggagcagcgcgtcgtggggcgagcggcagaagtcccgggcccagagcccggccagcaggagcagttggtcttcggcagcggggatgctgtggagctgagctgtcccccgcccgggggtggtcccatggggcccactgtctgggtcaaggatggcacagggctggtgccctcggagcgtgtcctggtggggccccagcggctgcaggtgctgaatgcctcccacgaggactccggggcctacagctgccggcagcggctcacgcagcgcgtactgtgccacttcagtgtgcgggtgacagacgctccatcctcgggagatgacgaagacggggaggacgaggctgaggacacaggtgtggacacaggggccccttactggacacggcccgagcggatggacaagaagctgctggccgtgccggccgccaacaccgtccgcttccgctgcccagccgctggcaaccccactccctccatctcctggctgaagaacggcagggagttccgcggcgagcaccgcattggaggcatcaagctgcggcatcagcagtggagcctggtcatggaaagcgtggtgccctcggaccgcggcaactacacctgcgtcgtggagaacaagtttggcagcatccggcagacgtacacgctggacgtgctggagcgctccccgcaccggcccatcctgcaggcggggctgccggccaaccagacggcggtgctgggcagcgacgtggagttccactgcaaggtgtacagtgacgcacagccccacatccagtggctcaagcacgtggaggtgaatggcagcaaggtgggcccggacggcacaccctacgttaccgtgctcaagacggcgggcgctaacaccaccgacaaggagctagaggttctctccttgcacaacgtcacctttgaggacgccggggagtacacctgcctggcgggcaattctattgggttttctcatcactctgcgtggctggtggtgctgccagccgaggaggagctggtggaggctgacgaggcgggcagtgtgtatgcaggcatcctcagctacggggtgggcttcttcctgttcatcctggtggtggcggctgtgacgctctgccgcctgcgcagcccccccaagaaaggcctgggctcccccaccgtgcacaagatctcccgcttcccgctcaagcgacagcaggtgtccctggagtccaacgcgtccatgagctccaacacaccactggtgcgcatcgcaaggctgtcctcaggggagggccccacgctggccaatgtctccgagctcgagctgcctgccgaccccaaatgggagctgtctcgggcccggctgaccctgggcaagccccttggggagggctgcttcggccaggtggtcatggcggaggccatcggcattgacaaggaccgggccgccaagcctgtcaccgtagccgtgaagatgctgaaagacgatgccactgacaaggacctgtcggacctggtgtctgagatggagatgatgaagatgatcgggaaacacaaaaacatcatcaacctgctgggcgcctgcacgcagggcgggcccctgtacgtgctggtggagtacgcggccaagggtaacctgcgggagtttctgcgggcgcggcggcccccgggcctggactactccttcgacacctgcaagccgcccgaggagcagctcaccttcaaggacctggtgtcctgtgcctaccaggtggcccggggcatggagtacttggcctcccagaagtgcatccacagggacctggctgcccgcaatgtgctggtgaccgaggacaacgtgatgaagatcgcagacttcgggctggcccgggacgtgcacaacctcgactactacaagaagacgaccaacctggtcctttggggtcctgctctgggagatcttcacgctggggggctccccgtaccccggcatccctgtggaggagctcttcaagctgctgaaggagggccaccgcatggacaagcccgccaactgcacacacgacctgtacatgatcatgcgggagtgctggcatgccgcgccctcccagaggcccaccttcaagcagctggtggaggacctggaccgtgtccttaccgtgacgtccaccgacgagtacctggacctgtcggcgcctttcgagcagtactccccgggtggccaggacacccccagctccagctcctcaggggacgactccgtgtttgcccacgacctgctgcccccggccccacccagcagtgggggctcgcggacgtgaagggccactggtccccaacaatgtgaggggtccctagcagcccaccctgctgctggtgcacagccactccccggcatgagactcagtgcagatggagagacagctacacagagctttggtctgtgtgtgtgtgtgtgcgtgtgtgtgtgtgtgtgtgcacatccgcgtgtgcctgtgtgcgtgcgcatcttgcctccaggtgcagaggtaccctgggtgtccccgctgctgtgcaacggtctcctgactggtgctgcagcaccgaggggcctttgttctggggggacccagtgcagaatgtaagtgggcccacccggtgggacccccgtggggcagggagctgggcccgacatggctccggcctctgcctttgcaccacgggacatcacagggtgggcctcggcccctcccacacccaaagctgagcctgcagggaagccccacatgtccagcaccttgtgcctggggtgttagtggcaccgcctccccacctccaggctttcccacttcccaccctgcccctcagagactgaaattacgggtacctgaagatgggagcctttaccttttatgcaaaaggtttattccggaaactagtgtacatttctataaatagatgctgtgtatatggtatatatacatatatatatataacatatatggaagaggaaaaggctggtacaacggaggcctgcgaccctgggggcacaggaggcaggcatggccctgggcggggcgtgggggggcgtggagggaggccccagggggtctcacccatgcaagcagaggaccagggccttttctggcaccgcagttttgttttaaaactggacctgtatatttgtaaagctatttatgggcccctggcactcttgttcccacaccccaacacttccagcatttagctggccacatggcggagagttttaatttttaacttattgacaaccgagaaggtttatcccgccgatagagggacggccaagaatgtacgtccagcctgccccggagctggaggatcccctccaagcctaaaaggttgttaatagttggaggtgattccagtgaagatattttatttcctttgtcctttttcaggagaattagatttctataggatttttctttaggagatttattttttggacttcaaagcaagctggtattttcatacaaattcttctaattgctgtgtgtcccaggcagggagacggtttccagggaggggccggccctgtgtgcaggttccgatgttattagatgttacaagtttatatatatctatatatataatttattgagtttttacaagatgtatttgttgtagacttaacacttcttacgcaatgcttctagagttttatagcctggactgctacctttcaaagcttggagggaagccgtgaattcagttggttcgttctgtactgttactgggccctgagtctgggcagctgtcccttgcttgcctgcagggccatggctcagggtggtctcttcttggggcccagtgcatggtggccagaggtgtcacccaaaccggcaggtgcgattttgttaacccagcgacgaactttccgaaaaataaagacacctggttgct

SEQ ID NO: 302452 - DNA, 2379 bp, Artificial Sequence
  derived and/or modified sequence
atgggcgccccagcctgtgccctggccctgtgtgtggccgtggccatcgtggccggggccagcagcgagagcctgggcacagagcagagggtggtgggccgggctgctgaggtgcccggccctgagcccggccagcaggagcagctggtgtttggaagtggagatgctgtggagctgagctgccccccacctgggggcggccccatgggccccaccgtgtgggtgaaggatggcaccggcctggtgcccagcgagcgggtgctggtgggcccccagaggctgcaggtgctgaatgccagccatgaggacagcggggcctacagctgccggcagaggctgacccagagggtgctgtgccacttctctgtgcgggtgacagatgcccccagcagtggagatgatgaagatggagaagatgaagctgaggacaccggggtggacaccggggccccctactggaccaggcctgagaggatggacaagaagctgctggccgtgcctgctgccaacacagtgcgcttccgctgcccagctgctggcaaccccacccccagcatctcctggctgaagaatggccgggagttccggggggagcacagaattggaggcatcaagctgcggcaccagcagtggagcctggtgatggagagcgtggtgcccagcgaccggggcaactacacctgtgtggtggagaacaagtttggcagcatccggcagacctacaccctggatgtgctggagaggagcccccaccggcccatcctgcaggccggcctgcctgccaaccagacagctgtgctgggcagtgatgtggagttccactgcaaggtgtacagtgatgcccagccccacatccagtggctgaagcacgtggaggtgaatggcagcaaggtgggcccagatggcaccccctacgtgacagtgctgaagacagctggggccaacaccacagacaaggagctggaggtgctgagcctgcacaacgtgacctttgaagatgctggggagtacacctgcctggccggcaacagcatcggcttcagccaccacagcgcctggctggtggtgctgcctgctgaggaggagctggtggaggctgatgaagctggctctgtgtatgccggcatcctgtcctatggagtgggcttcttcctgttcatcctggtggtggccgctgtgaccctgtgccgcctgcggagcccccccaagaagggcctgggcagccccaccgtgcacaagatcagccgcttccccctgaagaggcagcaggtgtccctggagagcaatgcctccatgagcagcaacacccccctggtgagaattgcccggctgagcagcggggagggccccaccctggccaacgtgtctgagctggagctgcctgctgaccccaagtgggagctgagccgggcccggctgaccctgggcaagcccctgggggagggctgcttcggccaggtggtgatggccgaggccatcggcatcgacaaggaccgggccgccaagcctgtgacagtggccgtgaagatgctgaaggatgatgccacagacaaggacctgagtgacctggtgtctgagatggagatgatgaagatgattggcaagcacaagaacatcatcaacctgctgggcgcctgcacccagggcggccccctgtatgtgctggtggagtatgctgccaagggcaacctgcgggagttcctgcgggcccggcggcccccaggcctggactacagctttgacacctgcaagcccccagaggagcagctgaccttcaaggacctggtgtcctgtgcctaccaggtggcccggggcatggagtacctggccagccagaagtgcatccaccgggacctggccgccagaaatgtgctggtgacagaggacaacgtgatgaagattgctgactttggcctggccagagatgtgcacaacctggactactacaagaagaccaccaacctggtgctgtggggccctgccctgggggacctgcatgctgggggcctgcctgtgcccaggcacccctgtggcggggccctgcaggccgctgagggcggccccccccacggccaggcccggcagctgcacaccaggcctgtgcatgaccatgctggggtgctggcctgccgggccctgcctgaggcccacctgcaggccgccggcggcggccctggcccctgcccctacagagatgtgcacagaagagtgcccggccctgtgggcgccttccgggctgtgctgcccggctggccaggccacccccagctgcagctgctgcggggccgcctgcgggtgtgccccaggcctgctgcccctggccccacccagcagtggggcctggctgatgtgaagggccactggagccccaccatgtag

SEQ ID NO: 302453 - DNA, 2379 bp, Artificial Sequence
  derived and/or modified sequence
atgggcgcccccgcctgcgccctggccctgtgcgtggccgtggccattgtggccggtgcgagttcagagtccctgggcacagagcagagggtggtcggtagggcggcggaggtgccgggtccagaacccggccaacaggagcaattggtgttcggctcaggcgatgccgtggaattatcctgcccgccacccggtggcggccccatgggacctacggtgtgggtcaaagacggcaccggcttggtgccctccgagcgggtgttggtggggccccagcgactgcaggtgctcaatgcttcccacgaggactctggtgcctactcctgccgacagcgcctgacacaaagagtcctgtgccacttcagcgtgcgggtgaccgatgcaccaagctccggggatgacgaagatggggaagacgaggccgaggacacgggagttgatacaggggctccatattggacaaggccggaaagaatggataaaaaacttctggccgtccctgcggcaaataccgtgcgctttaggtgccctgcagccggaaaccccacgcccagtataagctggcttaagaatgggcgcgaatttagaggcgagcaccgcatcggaggtatcaagcttcggcatcagcagtggagcttggttatggagtcagtagtgccaagcgatcgtgggaactatacctgtgttgtggaaaataaattcggctccatccgccagacttacacacttgacgttttggaaagatccccacatcgtcccattttgcaggccggtctccccgccaaccagaccgctgtgctggggtctgacgtggaatttcactgcaaggtgtactcagacgcacaacctcatattcagtggttgaagcatgtggaagttaatgggtcgaaggtcggcccggacggcacaccatacgtgacagtgttgaagactgccggggcgaacactacagacaaagaacttgaagtactgtcactgcacaatgtcactttcgaggacgctggtgagtatacatgcttggccggaaactctattgggtttagccatcactcggcctggttggtggtgttgccggccgaagaggagttggtagaagctgacgaggctggtagcgtctatgccggcattttaagttatggagtaggcttctttctcttcatcctcgtcgtggcggccgtcactctctgccgcctccgctcacctcccaagaaggggctggggtctcccacggtgcataagattagcaggttccctttgaagcggcagcaggtttcactggagagtaacgcatctatgtcctcaaataccccgctggtgaggatcgctcgcctgagctccggtgagggcccaactttggccaacgttagcgaactggagctgcctgcagaccccaaatgggaactgtctcgtgccagactcacactgggtaagcctttgggggagggatgcttcggacaggttgtgatggcagaagcaatcgggattgacaaggaccgagcagccaaacccgtaactgtggcagtgaagatgctcaaagacgacgctaccgataaggatctcagtgacctcgtcagcgagatggagatgatgaaaatgataggtaagcacaaaaatattatcaacctgcttggagcctgtacccaaggcgggcctttatacgtccttgtcgaatacgctgctaaggggaatctgagggagttcctgagagcgagaagaccacctggccttgattatagcttcgacacttgtaagccccccgaagagcagctgaccttcaaggacctggtttcttgtgcctaccaagtggctcgtggcatggaatatttggcaagtcagaaatgcattcaccgtgacctcgctgccaggaacgtcctggtgactgaggacaacgtcatgaagatcgctgactttgggcttgcccgcgacgtgcataatttggattactataaaaaaaccacaaatctggtactttggggacctgcacttggagacctgcacgcaggggggctacccgtccctagacacccttgtggtggcgccttgcaggctgctgaagggggaccaccccacgggcaggcccggcaactccacacaagacctgttcacgaccatgcaggggtgctggcatgtcgagctttgccagaggcgcatctgcaggccgccgggggtgggccaggtccatgcccttaccgggatgtgcacagacgcgtccccggcccggttggagctttcagggctgtgctgcccgggtggcctggccatccccagctgcaattgctaagaggtagattgcgagtgtgccccagacccgctgcacctggcccgacgcagcagtgggggttggcggacgttaaagggcactggtcccccactatgtag

SEQ ID NO: 302454 - DNA, 2379 bp, Artificial Sequence
  derived and/or modified sequence
atgggggcacccgcatgtgcgctcgctctgtgcgttgccgtagccattgtggccggagccagctctgagagccttggcactgagcagcgtgtggtggggcgtgccgctgaagtccccggacctgagccgggtcagcaggaacagctggtgtttggctctggcgacgccgtggagctctcctgcccgccacctgggggtggccctatgggtccgactgtgtgggtgaaggacggcaccggtttggtaccatcagagagagtcctggttggcccacagagacttcaagtactgaacgccagccatgaggactcaggggcttacagttgtcggcaacgtcttactcagagggtgctgtgccatttttccgtgagggtcaccgatgccccttcctcaggggacgacgaggacggagaggacgaagcggaagacaccggggttgacacaggggctccatactggacgagaccagagcggatggataaaaagctactcgctgttccggcagctaacacagtgagattccgatgtcccgctgcagggaaccccaccccttcgatcagttggctcaagaacgggagagagttcagaggagaacaccgaataggcggaatcaagctgcgccaccagcagtggtctcttgttatggagtcagtggtgcctagcgataggggaaattatacatgcgtggtagagaacaagttcggcagcattaggcagacatatacgttggacgtcttggaacgctcccctcaccgccctatattgcaggcgggtctgccagcaaatcagacagctgtcttagggtcggacgtggaatttcactgtaaagtgtactccgacgcccaaccccatatccagtggctgaagcacgtcgaggtaaatgggtcaaaagtgggtccagatggcacaccctacgtgacagtgctcaagacagcaggtgcaaacaccacagacaaggagttggaggttctgtccttacataatgtaacatttgaggacgcaggggaatacacctgcctggccggaaactccataggattttcccatcattcagcgtggcttgtcgtgctcccagccgaggaagaactggtagaagccgacgaggccggatccgtgtacgctgggattctcagctatggtgtggggttcttcttattcatactggtagtggccgctgtcacactctgtcggctgcggtctccccctaaaaaggggttaggctcaccaacagttcacaaaattagtagatttccactgaaacgacagcaagtttctttagagagcaatgctagcatgtcttccaatacccccctggtgagaattgcgaggctcagttcaggggagggacctactcttgctaacgtgagcgaactggagctcccagccgaccccaaatgggaactgagtagggctaggcttactctcggaaagccactgggggagggctgcttcggtcaggtggttatggcagaggccatcgggatcgataaagacagggcggctaagccggtcactgtcgcagtgaagatgctcaaggatgacgccaccgataaagacctgagtgaccttgtttcagagatggaaatgatgaaaatgatagggaaacataaaaacataatcaatttactgggagcctgtacccagggcggacctctctatgtcctggttgagtacgctgcaaaagggaaccttagagaatttctgcgggctcggaggccaccaggactcgactactcgtttgacacttgcaaaccgccagaggagcagttgaccttcaaggatttagttagttgtgcttatcaggtcgccagagggatggagtatctggcaagtcaaaaatgtatccatagggatttggctgccagaaatgtccttgtaacagaggacaacgtgatgaagattgctgacttcggcctggcacgggatgttcacaacctagattattataagaagactaccaatctggtgctctgggggcctgcgttgggggacctccacgcaggcggtttgccagtcccacggcacccttgtggcggagcacttcaggcggcagaggggggacctccgcacggccaggctcggcagctgcacactcgtccggtgcacgaccatgcaggtgtccttgcatgtagagccctccctgaggcccacctacaggctgccggaggtggccctggaccttgtccctatcgggacgtgcatcgcagggtccctgggcctgtgggtgctttccgcgctgtgctgcccggatggccaggacatccacagcttcaattactcagaggtcggttgcgcgtgtgccctcggccagcagcgccaggtccaactcagcagtgggggttggcagatgtgaaaggtcactggtccccaaccatgtag

SEQ ID NO: 302455 - DNA, 2468 bp, Artificial Sequence
  derived and/or modified sequence
actgccctaacagagcaggtggggaatgttctgtttactccacttgtgcttctatttggccaacttcgcctcttcaattaaaaggacacatgctgttaacgggtgctgtggattacagatgatcgcactctgggcacagtcctctggaaatgcagatgcccgtgtggaggaaattctggcgggagaggagcggcgactcgccgctctgcttggatctcaaggcatgaggttctgggtgtgcctcgcagcctgcagagccatgtggggccttgctgccagacgaggacgggctgaagacagcagctcgtctccagtggacgcctccaagttcccatggaggggtgggcagcatcgcaccaccatgatgccttgtctgctgcgggtgggagttttcaggccctgtcatgtgagacccacgggggatccttcctgcgatgtgcagcctccacgactcggcttctccagagtgccagatacacaggtggcattttatggcagtggtcactgggacccaactcccttctctgtacacagctgtttttttaatttccaggtcagaaaaattatcttcctactttgaactctttctcctttttgccaaaaatgtttctctcttacaatgcagaagcagaacacagctcctgctcttgaaatactggatggatgtttcagagggtattgtgaggcttggagctccagccagtgacattccagccacatccttctctcctggctccacttcacagaggctggctgtgtctctggactacacctcagagctaatctgctttctggaagggtcgtgtttacttctgctggtgctgtgcatgtaggagacagctgtggccagccctgtttccctggggaggtggcagaggcggtaccatgagcaagggatgcagatgctcaagggggaccagtcaggggacacggggagggtttggcctctccagccaggggctcgccacctccatggtataaacatccatgtgaacaaaaaagttctaacaagtaccagcacactgagaatattttaaaccacaactatcgtggaaaatctgggagggtggttcctaggtccagggtggaaaagtagctgaaaacctggtagggtttgaagaacaatcagaggcggccttccacttctgagaacagttcctgtgagtcacctgatgttgttctagattaattctatcaaagacagtgttggtcaacccagctgcaggcacttgatttcctctaaaagctctggataacagaagcagagctgtgaagaaagtcaagttgaataaaatgcttccacttaaaagaatagggcttttccttgaaatggtccactggatcgaccatttcctctcatttattattattatcatctccattcccatgcatgctatttagacaaggaaggctggaagcaagtgacaggtgcggcagtgcgcagcaaggcctctgcacctggcccgtcagtagggccggcacgcagcctgactactgagtttcttctgcctcattcctctccagaggccctcaacttacaatagagacccaggagctgggagatgactgaatctgttaacatgacacagaaggactaacccataaacatgagcgtgaatgtcttttgttgggggactaaggagatgacactgaaaaggagaatcacaagccaagtgccataagcagaccacattccctgcaagctgccctgctaggctttatcccaaatcaaagaaaaagggagaatgtcttaatattctcacagatttgtaaccacttcactggggtaagttttcctttgtatagatgacggattatccttctaagctgcaagctgataaatgagaagctaagtataaaatatctagaactaaggtagatgaagatgtctatatgtgcactgggtgtcacttatatatctgcctgtgttattaagggcacaaaggttgtgtggggctgtgtaaactatagatattaggaatacagattaaaacagtaatttcacaatgcaagtagtgccaagccacgaaaatatgcctggagcatcttctcttttctctacttcacagaaaatatttccatagacacttttcaccaggcatctgcagctgtttttttttttttaaacaatcataattttaagcactatatggtaagccatttggaagccattcgaattatgcattaaaacaaggaaaaataagatgccacttgacatacactgaaacacataaaatcagatacagactcttgggtggaaaaagtatgttcttcaacttagttcagatgttaacatataaaacatgctcagggaaccctgaaaaaatccagaggtgaacactctgatggtcaatcacatgtgttccttcttctgatctggatgattcttacatttttagggcgctgtactgttttttagccctttgactcattaatgtatcagggaataaaaaggatatcaaactcaa

SEQ ID NO: 302456 - DNA, 135 bp, Artificial Sequence
  derived and/or modified sequence
aatgtaatccagcatataaacagagccaaagacaaaaaccacatgattatctcaatagatgcagaaaaagcctttgacaaaattcaacaacccttcatgctaaaaactctcaataaattaggtattgatgggacg

SEQ ID NO: 302457 - protein, 675 aa, Artificial Sequence
  derived and/or modified sequence
MRPLRPRAALLALLASLLAAPPVAPAEAPHLVHVDAARALWPLRRFWRSTGFWGSTGRGLSYNFTHLDGYLDLLRENQLLPGFELMGSASGHFTDFEDKQQVFEWKDLVSSLARRYIGRYGLAHVSKWNFETWNEPDHHDFDNVSMTMQGFLNYYDACSEGLRAASPALRLGGPGDSFHTPPRSPLSWGLLRHCHDGTNFFTGEAGVRLDYISLHRKVRPAPPSAPVFCALSRCAPGRADPGGAEAAPPAGCAQLHLHPGAGEGRRAADPAALPQVRGHPHLQRRGGPAGGLVPATAVEGGRDLRGHGGEGGPAQRPARPPATFLPRRDRRAVAAPPGPSCPGHPQVIAQHQNLLLANTTSAFPYALLSNDNAFLSYHPHPFAQRTLTARFQVNNTRPPHVQLLRKPVLTAMGLLALLDEEQLWAEVSQAGTVLDSNHTVGVLASAHRPQGPADAWRAAVLIYASDDTRAHPNRSVAVTLRLRGVPPGPGLVYVTRYLDNGLCSPDGEWRRLGRPVFPTAEQFRRMRAAEDPVAAAPRPLPAGGRLTLRPALRLPSLLLVHVCARPEKPPGQVTRLRALPLTQGQLVLVWSDEHVGSKCLWTYEIQFSQDGKAYTPVSRKPSTFNLFVFSPDTGAVSGSYRVRALDYWARPGPFSDPVPYLEVPVPRGPPSPGNP

SEQ ID NO: 302458 - DNA, 2028 bp, Artificial Sequence
  derived and/or modified sequence
atgagacccctgagacccagagccgccctgctggccctgctggccagcctgctggccgccccccccgtggcccccgccgaggccccccacctggtgcacgtggacgccgccagagccctgtggcccctgagaagattctggagaagcaccggcttctggggcagcaccggcagaggcctgagctacaacttcacccacctggacggctacctggacctgctgagagagaaccagctgctgcccggcttcgagctgatgggcagcgccagcggccacttcaccgacttcgaggacaagcagcaggtgttcgagtggaaggacctggtgagcagcctggccagaagatacatcggcagatacggcctggcccacgtgagcaagtggaacttcgagacctggaacgagcccgaccaccacgacttcgacaacgtgagcatgaccatgcagggcttcctgaactactacgacgcctgcagcgagggcctgagagccgccagccccgccctgagactgggcggccccggcgacagcttccacaccccccccagaagccccctgagctggggcctgctgagacactgccacgacggcaccaacttcttcaccggcgaggccggcgtgagactggactacatcagcctgcacagaaaggtgagacccgccccccccagcgcccccgtgttctgcgccctgagcagatgcgcccccggcagagccgaccccggcggcgccgaggccgccccccccgccggctgcgcccagctgcacctgcaccccggcgccggcgagggcagaagagccgccgaccccgccgccctgccccaggtgagaggccacccccacctgcagagaagaggcggccccgccggcggcctggtgcccgccaccgccgtggagggcggcagagacctgagaggccacggcggcgagggcggccccgcccagagacccgccagaccccccgccaccttcctgcccagaagagacagaagagccgtggccgccccccccggccccagctgccccggccacccccaggtgatcgcccagcaccagaacctgctgctggccaacaccaccagcgccttcccctacgccctgctgagcaacgacaacgccttcctgagctaccacccccaccccttcgcccagagaaccctgaccgccagattccaggtgaacaacaccagacccccccacgtgcagctgctgagaaagcccgtgctgaccgccatgggcctgctggccctgctggacgaggagcagctgtgggccgaggtgagccaggccggcaccgtgctggacagcaaccacaccgtgggcgtgctggccagcgcccacagaccccagggccccgccgacgcctggagagccgccgtgctgatctacgccagcgacgacaccagagcccaccccaacagaagcgtggccgtgaccctgagactgagaggcgtgccccccggccccggcctggtgtacgtgaccagatacctggacaacggcctgtgcagccccgacggcgagtggagaagactgggcagacccgtgttccccaccgccgagcagttcagaagaatgagagccgccgaggaccccgtggccgccgcccccagacccctgcccgccggcggcagactgaccctgagacccgccctgagactgcccagcctgctgctggtgcacgtgtgcgccagacccgagaagccccccggccaggtgaccagactgagagccctgcccctgacccagggccagctggtgctggtgtggagcgacgagcacgtgggcagcaagtgcctgtggacctacgagatccagttcagccaggacggcaaggcctacacccccgtgagcagaaagcccagcaccttcaacctgttcgtgttcagccccgacaccggcgccgtgagcggcagctacagagtgagagccctggactactgggccagacccggccccttcagcgaccccgtgccctacctggaggtgcccgtgcccagaggcccccccagccccggcaacccctag

SEQ ID NO: 302459 - DNA, 2028 bp, Artificial Sequence
  derived and/or modified sequence
atgcgaccactgcgcccccgcgcagctctacttgctctcttggcctccctgctcgcggcaccccctgtggccccagctgaggccccacacctggttcacgtagacgcagccagggctttgtggccgctgcgcaggttttggagaagtacaggcttttggggcagtaccggacgtggactctcctataacttcactcatctggacggctacctcgacttgctgagggagaaccaattgttgcctgggtttgaactcatgggcagtgccagtgggcacttcacagactttgaggataagcagcaggtgtttgagtggaaggacctcgtctcctcactggctcgtcgctatattggcagatacggcctggcccacgtgagtaaatggaactttgaaacctggaatgaaccggatcaccacgatttcgacaatgtgtccatgactatgcaaggcttcctgaactattacgacgcctgttcagagggcttacgggcagcctctccagccctgaggctgggtggtcctggagatagtttccatacaccgccacgctcccccttatcttggggactcctcagacactgtcatgatgggacaaacttttttaccggagaagccggggtgcggctcgattatatcagcctccacagaaaagtgcggccagccccaccttccgctcctgtcttctgtgctttgagtcgctgtgcgcccggacgtgccgatccaggcggtgcagaggccgcacccccggctggctgtgcccagcttcacctccacccaggtgccggagaggggcggcgcgctgccgaccctgcagctctgcctcaggtacgcgggcatcctcatctgcaaagacggggaggtccagctgggggactcgtgccggctactgctgtggagggaggaagagacctgcgaggtcacggaggcgaaggaggacccgcccagaggccagcacgacctcctgcaactttcctgccaagacgcgaccgaagggccgtggctgccccacctggaccatcatgtcctgggcaccctcaagttatcgctcaacatcaaaacctgctgctggccaacacaacatccgcttttccttacgctctgctcagcaacgacaacgcttttctctcatatcatcctcacccctttgcacagcgaaccctgactgcacgttttcaagtcaataacactagaccaccgcacgtgcagctgttgaggaagcccgtacttacagccatgggactgctcgccctccttgatgaggagcagctttgggccgaggtgtcccaggccggtacagttctcgatagcaatcacacagtgggcgtgttggctagcgcacacaggcctcagggaccagcggacgcctggcgcgccgctgtgctcatttacgcgagcgatgacacccgagcacatcctaacagatccgtggccgtgaccctgcgacttcggggcgttcccccaggcccaggactagtatacgtcacccgctatcttgataacggactatgttctccagacggtgagtggaggcggctgggacggcccgtctttcctactgccgaacagtttcgtcggatgcgggcggcagaggatccagttgctgctgcccctcgaccactccccgcgggtggaaggctaacactgcgacccgccctcagactcccaagcctcctcttggttcacgtgtgcgctcgtccagagaagccacccggccaggtaacccgactccgggccctgcctctcactcaggggcaacttgtcctagtatggagcgatgagcacgtgggatcgaagtgtctgtggacatacgaaatccagttttctcaggatggtaaggcctacacacctgtctcgcgaaaaccgtcgaccttcaatctgttcgtgttctctcctgacacaggcgccgtatccggcagctatcgtgtacgggcactggactattgggcacggccagggcccttctcagaccctgtgccctacctggaggtgcctgtgccaagaggacccccgtccccgggaaatccgtag

SEQ ID NO: 302460 - DNA, 2028 bp, Artificial Sequence
  derived and/or modified sequence
atgaggcccctgcggccccgggccgccctgctggccctgctggccagcctgctggccgcccctcctgtggccccagctgaggccccccacctggtgcacgtggatgctgcccgggccctgtggcccctgcggcgcttctggaggagcacaggcttctggggcagcacaggccggggcctgagctacaacttcacccacctggatggctacctggacctgctgcgggagaaccagctgctgcccggctttgagctgatgggcagcgccagcggccacttcacagactttgaggacaagcagcaggtgtttgagtggaaggacctggtgagcagcctggcccggcgctacatcggccgctatggcctggcccacgtgtccaagtggaactttgagacctggaatgaaccagaccaccacgactttgacaacgtgtccatgaccatgcagggcttcctgaactactatgatgcctgcagcgagggcctgcgggccgccagccctgccctgcggctgggcggccctggggacagcttccacaccccacccaggagccccctgtcctggggcctgctgcggcactgccatgatggcaccaacttcttcaccggggaggccggcgtgcggctggactacatcagcctgcacaggaaggtgcggcctgccccacccagcgcccctgtgttctgtgccctgagccgctgtgcccctggccgggctgaccctggaggagctgaggccgcccccccagctggctgtgcccagctgcacctgcaccctggagctggggagggcagaagagctgctgaccctgctgccctgccccaggtgcggggccacccccacctgcagaggcggggcggccctgctgggggcctggtgcctgccacagctgtggagggcggccgggacctgcggggccatggaggagagggcggccctgcccagaggcctgcccggcccccagccaccttcctgccccggcgggaccggcgggctgtggccgcccctcctggccccagctgccccggccacccccaggtgattgcccagcaccagaacctgctgctggccaacaccaccagcgccttcccctatgccctgctgagcaatgacaatgccttcctgagctaccacccccacccctttgcccagaggaccctgacagcccgcttccaggtgaacaacacccggcccccccacgtgcagctgctgaggaagcctgtgctgacagccatgggcctgctggccctgctggatgaggagcagctgtgggccgaggtgtcccaggccggcaccgtgctggacagcaaccacacagtgggcgtgctggccagcgcccaccggccccagggccctgcagatgcctggagggctgctgtgctgatctatgccagtgatgacacccgggcccaccccaacagatctgtggccgtgaccctgcggctgcggggcgtgcccccaggccctggcctggtgtatgtgacccgctacctggacaatggcctgtgcagcccagatggagagtggaggcggctgggccggcctgtgttccccacagctgagcagttccggaggatgagagctgctgaggaccctgtggccgccgccccccggcccctgcctgctgggggccgcctgaccctgcggcctgccctgcggctgcccagcctgctgctggtgcacgtgtgtgcccggcctgagaagcccccaggccaggtgacccggctgcgggccctgcccctgacccagggccagctggtgctggtgtggagcgatgagcacgtgggcagcaagtgcctgtggacctatgagatccagttcagccaggacggcaaggcctacacccctgtgtccaggaagcccagcaccttcaacctgtttgtgttctccccagacacaggagctgtgtctggcagctacagagtgcgggccctggactactgggcccggcccggccccttcagtgaccctgtgccctacctggaggtgcctgtgccccggggcccccccagccctggcaacccctag

SEQ ID NO: 302461 - DNA, 2028 bp, Artificial Sequence
  derived and/or modified sequence
atgcggcccctgcggccccgggccgccctgctggccctgctggccagcctgctcgctgccccccctgttgctccagccgaggctcctcatctagtccatgtcgacgcagcccgcgcactgtggcctctgcgacgtttttggcgcagcaccggattttggggatctacaggtagggggctgtcatacaacttcacacatctcgacggctatttagacctcctccgggaaaatcaactcctgcctgggttcgagcttatgggatccgcctccgggcactttactgactttgaggataaacagcaagtcttcgagtggaaggatctggtctcctcacttgctagacgctacatcggacgttatgggctcgcgcacgtttcaaaatggaacttcgagacatggaacgaaccagaccaccacgattttgacaacgtgagcatgactatgcagggtttccttaactactacgatgcctgcagcgaggggctaagagccgcgtccccagcactccgccttggcggccccggggactcatttcacactcctccccgcagccctttgagttgggggcttctgaggcactgccatgatggtacaaatttctttaccggagaagctggagtccgactagattacatctccctacatagaaaagtgcggccggcgcctccaagcgcccctgttttttgtgctttaagccgctgcgcgcccggccgggccgaccccggaggtgccgaagccgcaccacccgctgggtgtgcacaactgcaccttcatccaggcgccggagaggggagacgcgccgcagaccccgctgcgctcccccaagttagaggccatccacacctacaaagaagaggtggaccagcaggcggcctcgtccccgctaccgcagtagaaggaggtagggatctgagaggccacggtggggaaggcgggcccgcccagagaccagctcgccccccagccacatttctgcctcggagagacagaagagcggttgcagcgcctccaggcccctcatgccctggtcatccccaggtaatcgcgcagcaccagaatttgctgctggcaaataccacatccgcttttccttacgccctactctcaaacgataacgccttcctgagttatcacccgcatccgtttgcccagcgaacattgaccgccaggttccaagtgaacaacactcgcccaccgcacgttcagctgctgcgaaaacctgtgctcacagccatggggctgctggccctgctggatgaagaacagttatgggcagaggtatcgcaggctgggacagttctggacagtaaccacaccgtgggagtacttgccagtgcgcatcggccacagggaccggccgatgcgtggagagcggccgtgttgatttatgcgagtgatgacacgcgcgcccacccaaacagaagcgtggccgtgaccttgagactgcgcggagtcccccctggccctggcttggtctatgtcacaagatacctggacaatggtctgtgttccccagacggagaatggagacgccttggtagacctgtgttccctacagccgagcagtttagacgtatgcgggcagcagaggatccagtcgccgctgcaccccgcccactgccggcaggaggccgtctgactctgagaccggcgcttcgtctgcccagcctccttctagtccacgtgtgcgctaggcccgagaaacctccagggcaggtgactagattgcgggcccttcctctcacacagggacaactcgtcctggtgtggtctgacgagcatgtgggaagcaaatgcttatggacctacgagatccaattctcacaagacgggaaagcctacacccctgtatcccggaagccaagcacctttaatcttttcgtcttttctcccgatacaggagccgtttccgggagctacagggtgcgggccctggactattgggcccgtcccggcccattctcagatcccgtaccatacttggaggttcctgtcccaagaggaccgccctcaccgggaaacccatag

SEQ ID NO: 302462 - DNA, 2028 bp, Artificial Sequence
  derived and/or modified sequence
atgcggcctctcagacccagagcagccctccttgcgctgcttgccagcctgcttgcggctccgcctgtggcccctgcagaagctccccaccttgtccacgtggacgccgctcgagccttatggcccctccgcagattctggcggagcacgggtttttggggtagcaccggacggggactgtcgtacaacttcacgcacctggatggatacctggatctcctgcgggaaaatcaattactgccgggattcgaactaatggggagcgcctccggccactttaccgatttcgaggacaagcagcaggtgttcgaatggaaagatctcgtttctagcctcgcacgcaggtatatcggtcgctacgggctggctcacgtgtctaagtggaactttgaaacttggaatgaacctgaccatcacgattttgataacgtgtccatgactatgcagggctttttgaactactacgatgcatgcagcgagggactgcgggcagcttctccggctttgagattggggggtcctggggattcgttccatactccgcctcggagtcccttgtcgtggggcttgctacgccactgtcatgacgggactaacttcttcactggtgaggccggtgtgcgactggactatatctccctccatagaaaggtccgaccggcaccgccatccgctcctgtgttttgtgcactgtcccggtgcgccccaggtagagctgatcccggtggcgctgaagctgcccctcctgccggatgtgcacagctgcatttgcaccccggagccggagaaggacgcagggccgctgaccccgcagccctcccacaggtccgaggacatccccacctgcagcgacggggaggccctgccggagggttggtgcctgctacggccgttgagggaggacgggacctacgcggtcatggtggggagggcggtcctgcccagcggcctgctagaccacctgcgaccttcttaccaaggcgggaccgtagggcggtggcggcacccccagggcctagctgcccaggacatccccaggtaatcgcacagcaccagaatttactcttggcaaacactacctctgcatttccttacgccttacttagcaacgacaatgcatttttatcataccacccccatcccttcgcacagagaaccctgacagctaggtttcaagtcaataataccaggccgcctcacgtccagctgctgagaaagcccgtgctgacagcaatgggactgttggcgcttttagatgaggagcagctatgggcagaagtgtctcaggctggaactgttctcgacagcaatcacacagtcggtgtcctcgcttccgcgcataggccccagggcccagctgacgcctggcgtgctgccgtcctcatctacgcgagcgatgacaccagagcccacccaaaccgctctgtggctgtgaccttacgcctgcgtggggtgcctccgggtcccggactcgtgtatgtaactaggtatctggacaacggactctgtagccccgatggggaatggaggcgattggggaggcccgtgttcccgacagctgagcagtttcgcaggatgagagcagctgaagaccccgtcgctgccgcaccgaggcctctccccgctggaggacgccttacgttgcgccctgcattgcggctgccttcccttctgctcgtgcacgtgtgcgcacgaccagagaaacctccgggtcaagttacccgactgcgtgctctgcccctgacccaaggccagctcgttttggtgtggagcgatgaacatgtgggatcgaaatgtctgtggacttacgagatccagttttcacaggacggcaaggcctatacgcctgtttcgcgcaaaccctccaccttcaacctgttcgtgttttcccctgacactggagccgtgagcggcagctatcgggtgcgcgcactagattattgggccaggcctggaccctttagcgacccggtcccttatctcgaggttcctgttcccaggggcccaccatcacccggaaacccgtag

SEQ ID NO: 302463 - DNA, 2251 bp, Artificial Sequence
  derived and/or modified sequence
gtcacatggggtgcgcgcccagactccgacccggaggcggaaccggcagtgcagcccgaagccccgcagtccccgagcacgcgtggccatgcgtcccctgcgcccccgcgccgcgctgctggcgctcctggcctcgctcctggccgcgcccccggtggccccggccgaggccccgcacctggtgcatgtggacgcggcccgcgcgctgtggcccctgcggcgcttctggaggagcacaggcttctgggggtccactggacggggcctgagctacaacttcacccacctggacgggtacctggaccttctcagggagaaccagctcctcccagggtttgagctgatgggcagcgcctcgggccacttcactgactttgaggacaagcagcaggtgtttgagtggaaggacttggtctccagcctggccaggagatacatcggtaggtacggactggcgcatgtttccaagtggaacttcgagacgtggaatgagccagaccaccacgactttgacaacgtctccatgaccatgcaaggcttcctgaactactacgatgcctgctcggagggtctgcgcgccgccagccccgccctgcggctgggaggccccggcgactccttccacaccccaccgcgatccccgctgagctggggcctcctgcgccactgccacgacggtaccaacttcttcactggggaggcgggcgtgcggctggactacatctccctccacaggaaggtgcgccctgcccctccgtccgccccggtgttctgcgccctcagccgctgtgccccgggccgcgctgaccctggtggtgctgaggcggccccgcccgcagggtgcgcgcagctccatctccatcctggagcaggagaaggtcgtcgcgcagcagatccggcagctcttccccaagttcgcggacacccccatttacaacgacgaggcggacccgctggtgggctggtccctgccacagccgtggagggcggacgtgacctacgcggccatggtggtgaaggtgggccggcccaacgccctgcgcgccccccggccaccttcctcccgagacgggacaggcgagcggtggccgcgccacccggtcccagctgccctggacacccgcaggtcatcgcgcagcatcagaacctgctactggccaacaccacctccgccttcccctacgcgctcctgagcaacgacaatgccttcctgagctaccacccgcaccccttcgcgcagcgcacgctcaccgcgcgcttccaggtcaacaacacccgcccgccgcacgtgcagctgttgcgcaagccggtgctcacggccatggggctgctggcgctgctggatgaggagcagctctgggccgaagtgtcgcaggccgggaccgtcctggacagcaaccacacggtgggcgtcctggccagcgcccaccgcccccagggcccggccgacgcctggcgcgccgcggtgctgatctacgcgagcgacgacacccgcgcccaccccaaccgcagcgtcgcggtgaccctgcggctgcgcggggtgccccccggcccgggcctggtctacgtcacgcgctacctggacaacgggctctgcagccccgacggcgagtggcggcgcctgggccggcccgtcttccccacggcagagcagttccggcgcatgcgcgcggctgaggacccggtggccgcggcgccccgccccttacccgccggcggccgcctgaccctgcgccccgcgctgcggctgccgtcgcttttgctggtgcacgtgtgtgcgcgccccgagaagccgcccgggcaggtcacgcggctccgcgccctgcccctgacccaagggcagctggttctggtctggtcggatgaacacgtgggctccaagtgcctgtggacatacgagatccagttctctcaggacggtaaggcgtacaccccggtcagcaggaagccatcgaccttcaacctctttgtgttcagcccagacacaggtgctgtctctggctcctaccgagttcgagccctggactactgggcccgaccaggccccttctcggaccctgtgccgtacctggaggtccctgtgccaagagggcccccatccccgggcaatccatgagcctgtgctgagccccagtgggttgcacctccaccggcagtcagcgagctggggctgcactgtgcccatgctgccctcccatcaccccctttgcaatatatttttatattttattattttcttttatatcttggt

SEQ ID NO: 302464 - DNA, 2028 bp, Artificial Sequence
  derived and/or modified sequence
atgagaccccttcgccctagagccgcattgctggccctattagccagtctgcttgccgcacctcctgtggcccctgccgaagcaccacacctcgtgcatgtagacgcagcccgagccctgtggcccctccgtcggttttggagatcgacaggcttttggggtagtactggaagaggactgtcctataacttcacccatttggatggttacctcgacttgctcagggagaatcagctgctacccggttttgagctgatgggctcagctagtggccatttcacagacttcgaggacaagcagcaggtgttcgaatggaaggacctagtttcatccctggcaagaaggtacattggcagatatggattagctcacgtaagcaaatggaatttcgagacatggaatgagcctgatcaccacgattttgataacgtgtccatgaccatgcagggcttcctcaactattacgacgcctgtagtgagggcctgagggcagcttcccctgctctgcgcctgggcgggccaggtgacagcttccatactccaccacggtccccactttcatggggacttctgaggcactgtcacgatggcactaacttttttacaggcgaggccggggtaagactcgattacatcagtcttcaccgaaaagtgcgccctgccccacctagcgcacccgtcttttgcgctctctctagatgcgccccaggtagggctgatcctggcggagccgaagcagcccctccggcaggctgcgcccagttgcacctgcatccgggcgccggagaaggacgcagggctgccgaccccgctgcgctgccacaggtcaggggccacccacacctgcaacggcgcggagggccagccggaggcttggtgcccgcaactgccgtggaggggggacgtgatttgcgcggtcatggcggagaaggtggccccgcacagcgcccggctcggcctcccgccacatttctgccccgaagagatcgccgagctgtagccgccccaccaggcccctcctgtcccggccaccctcaagtgatcgctcagcatcagaatctgttactggccaatactacatcagcctttccgtatgcgttgctctctaatgacaacgccttcttgtcctaccaccctcacccctttgcccaaagaaccctgacagcgcgcttccaagtgaacaatactcggcccccacacgtgcagctgctgcgtaagcccgtcctcacggccatggggctgttggcactcctggatgaggaacagctctgggctgaggtatcgcaagcgggaacagttctggattctaatcacacagtgggagtcctggcatccgcccacagaccacaaggcccagcagacgcgtggagggccgctgtgctgatctacgcttcggacgatactcgagcccaccccaacagaagtgtggccgtcactcttagactccggggtgttccgcccggaccaggcctcgtctacgtgacccgttatctggacaacggcctctgctctcccgatggggagtggcggaggttggggcggccagtgtttccgaccgctgaacagttccggaggatgcgagcagctgaagacccagtggctgccgcccctcgacctctgcctgccggaggcagactcacgctcaggcccgcactgaggctcccctcactgctcctcgtccacgtgtgtgcccgccctgaaaagcctccgggacaggtgactaggctacgggctctacccctgacccaaggccaactagtactcgtctggtcagatgaacacgtaggatccaaatgcttatggacgtacgagatacagtttagtcaagacggcaaagcctacacacccgtcagtcggaagccaagtacttttaatctcttcgtcttctcacctgacaccggcgccgtttcgggctcataccgtgttagagcactggattattgggcacggcccggccctttttcagaccctgtgccgtacttagaagtgcctgtcccacgcggacctccatcccccggcaatccatag

SEQ ID NO: 302465 - DNA, 2028 bp, Artificial Sequence
  derived and/or modified sequence
atgagaccattgagacccagagcagcgcttttagccctgctggcaagcctgcttgcagctccaccagtcgcccccgccgaggctcctcatttggttcacgtggacgcagctcgagcactttggccattgcgaagattttggcgctctacaggattctggggcagcacaggtaggggcctctcttataattttacacaccttgacggttatctcgacctcctgagagaaaatcagttgttgcctggttttgagttaatggggtcggcctccggacatttcacagactttgaagacaagcagcaggtgtttgagtggaaggacctagtttccagcctggcaagaagatatattgggagatatggactagcccacgtaagcaaatggaattttgagacctggaacgagccggatcaccatgactttgataatgtttcaatgactatgcagggcttcttgaattattatgatgcgtgttcggaagggcttcgggccgcctcacccgctctcagacttgggggtcctggggactcgtttcacacacccccccgctcccctttatcttggggccttctgcgtcattgccatgacgggacaaattttttcaccggcgaagctggggtccggttggactatatttcattgcataggaaagtgaggcccgcccccccaagcgccccagtgttctgcgctctttcccgttgtgcccccggaagagcagatcccggaggagccgaggccgcaccacccgcaggctgcgcccagctgcacttgcatcccggggccggcgaaggtagaagagcagccgacccagccgcccttcctcaggtacgtggacacccacatctgcagcgacgaggcggacctgcaggcggactcgtccccgccaccgcagtagagggcggcagagatcttcggggccatggcggggaaggtggccccgctcagcgccctgcaaggccccccgccacattccttccacgccgagatcgccgtgccgtggcagccccccccggcccttcctgtcccggacatccccaggtaatcgctcaacaccagaatctgctgcttgccaacaccacatctgcatttccttacgctctgctcagtaatgacaatgcctttctgtcctaccaccctcacccttttgcacagcgaaccctcaccgcccgatttcaagttaataacaccaggccacctcacgtgcagctactcaggaagccagttctgactgctatgggtctgcttgcattgttagatgaggaacagctatgggccgaggtgtcccaagccggcacagtactggatagtaatcacaccgtgggcgttttagcctccgctcataggcctcagggacctgctgacgcctggcgcgccgccgtgcttatctatgccagcgatgatacccgagctcatcctaacagatctgtggccgtgactctcaggctgcgtggtgtcccacccggccctggccttgtttacgtaacccggtacctcgacaatgggctgtgttccccagacggcgagtggagaaggcttgggcggcccgtctttcccacggctgaacagttccggaggatgagagccgccgaggacccggtcgcagcagcgccacgcccactgcccgccggtggaaggctaacactgagacccgccttacgactaccctcgctgctccttgttcacgtgtgtgctcgccctgaaaaacccccaggacaagtcaccagactcagggccttacctctcacccagggccagctagtgcttgtgtggtcagatgaacatgttggatctaagtgcttgtggacctacgagattcagttttctcaggatggtaaggcttataccccggtcagccgaaagccctccacttttaatctgttcgtattcagccccgacactggtgccgtatcaggctcatatcgagtaagagctctggactattgggcccgccccggccccttctccgatcccgtaccatacctagaagttcccgtgcccagaggaccacccagccccggtaatccctag

SEQ ID NO: 302466 - DNA, 666 bp, Artificial Sequence
  derived and/or modified sequence
gccaggagaagaggagctgctgctgccctgagccgggcccgggtgtggggccgcctgtacccccagcccaagctgcaggaggccgcccccctgccccggcggggctgggatggcggcggccacgtgggcggcggcggagatgcccggggcccccggctggagggggagagcctgccccacccccggctggccccagctgcccccagcgccagccctgccctggcccaccccctggtggcccacccagcccggctggacagcagcagaaatcctggcaccggcatctactttggaggcagcgctgcctggaggcctggcctgagccgggtgtcccaggacaggagccccaacagcagccggcccctgagcctgagcggcatcccagcagatgtgtccccaccagccaagacccgggaggagaagcgggagcccgccctgtggagccgggagaaggaggagggcgccacagccctgcaggaccacggctgggagaaggagtggaggggcttccgcaccttctctgtgcggctgcacgtgcctgtgttcatcagcggcagccaggccctgggctcctgggcccgcatcacctgctgcccccccctgtggagccggggctgcttctgcaaggagagcagcggccgggagagcatggcctgcctgacctag

SEQ ID NO: 302467 - RNA, 2028 nt, Artificial Sequence
  derived and/or modified sequence
augagaccccuucgcccuagagccgcauugcuggcccuauuagccagucugcuugccgcaccuccuguggccccugccgaagcaccacaccucgugcauguagacgcagcccgagcccuguggccccuccgucgguuuuggagaucgacaggcuuuugggguaguacuggaagaggacuguccuauaacuucacccauuuggaugguuaccucgacuugcucagggagaaucagcugcuacccgguuuugagcugaugggcucagcuaguggccauuucacagacuucgaggacaagcagcagguguucgaauggaaggaccuaguuucaucccuggcaagaagguacauuggcagauauggauuagcucacguaagcaaauggaauuucgagacauggaaugagccugaucaccacgauuuugauaacguguccaugaccaugcagggcuuccucaacuauuacgacgccuguagugagggccugagggcagcuuccccugcucugcgccugggcgggccaggugacagcuuccauacuccaccacgguccccacuuucauggggacuucugaggcacugucacgauggcacuaacuuuuuuacaggcgaggccgggguaagacucgauuacaucagucuucaccgaaaagugcgcccugccccaccuagcgcacccgucuuuugcgcucucucuagaugcgccccagguagggcugauccuggcggagccgaagcagccccuccggcaggcugcgcccaguugcaccugcauccgggcgccggagaaggacgcagggcugccgaccccgcugcgcugccacaggucaggggccacccacaccugcaacggcgcggagggccagccggaggcuuggugcccgcaacugccguggaggggggacgugauuugcgcggucauggcggagaagguggccccgcacagcgcccggcucggccucccgccacauuucugccccgaagagaucgccgagcuguagccgccccaccaggccccuccugucccggccacccucaagugaucgcucagcaucagaaucuguuacuggccaauacuacaucagccuuuccguaugcguugcucucuaaugacaacgccuucuuguccuaccacccucaccccuuugcccaaagaacccugacagcgcgcuuccaagugaacaauacucggcccccacacgugcagcugcugcguaagcccguccucacggccauggggcuguuggcacuccuggaugaggaacagcucugggcugagguaucgcaagcgggaacaguucuggauucuaaucacacagugggaguccuggcauccgcccacagaccacaaggcccagcagacgcguggagggccgcugugcugaucuacgcuucggacgauacucgagcccaccccaacagaaguguggccgucacucuuagacuccgggguguuccgcccggaccaggccucgucuacgugacccguuaucuggacaacggccucugcucucccgauggggaguggcggagguuggggcggccaguguuuccgaccgcugaacaguuccggaggaugcgagcagcugaagacccaguggcugccgccccucgaccucugccugccggaggcagacucacgcucaggcccgcacugaggcuccccucacugcuccucguccacgugugugcccgcccugaaaagccuccgggacaggugacuaggcuacgggcucuaccccugacccaaggccaacuaguacucgucuggucagaugaacacguaggauccaaaugcuuauggacguacgagauacaguuuagucaagacggcaaagccuacacacccgucagucggaagccaaguacuuuuaaucucuucgucuucucaccugacaccggcgccguuucgggcucauaccguguuagagcacuggauuauugggcacggcccggcccuuuuucagacccugugccguacuuagaagugccugucccacgcggaccuccaucccccggcaauccauag

SEQ ID NO: 302468 - RNA, 2028 nt, Artificial Sequence
  derived and/or modified sequence
augagaccauugagacccagagcagcgcuuuuagcccugcuggcaagccugcuugcagcuccaccagucgcccccgccgaggcuccucauuugguucacguggacgcagcucgagcacuuuggccauugcgaagauuuuggcgcucuacaggauucuggggcagcacagguaggggccucucuuauaauuuuacacaccuugacgguuaucucgaccuccugagagaaaaucaguuguugccugguuuugaguuaauggggucggccuccggacauuucacagacuuugaagacaagcagcagguguuugaguggaaggaccuaguuuccagccuggcaagaagauauauugggagauauggacuagcccacguaagcaaauggaauuuugagaccuggaacgagccggaucaccaugacuuugauaauguuucaaugacuaugcagggcuucuugaauuauuaugaugcguguucggaagggcuucgggccgccucacccgcucucagacuuggggguccuggggacucguuucacacacccccccgcuccccuuuaucuuggggccuucugcgucauugccaugacgggacaaauuuuuucaccggcgaagcugggguccgguuggacuauauuucauugcauaggaaagugaggcccgcccccccaagcgccccaguguucugcgcucuuucccguugugcccccggaagagcagaucccggaggagccgaggccgcaccacccgcaggcugcgcccagcugcacuugcaucccggggccggcgaagguagaagagcagccgacccagccgcccuuccucagguacguggacacccacaucugcagcgacgaggcggaccugcaggcggacucguccccgccaccgcaguagagggcggcagagaucuucggggccauggcggggaagguggccccgcucagcgcccugcaaggccccccgccacauuccuuccacgccgagaucgccgugccguggcagccccccccggcccuuccugucccggacauccccagguaaucgcucaacaccagaaucugcugcuugccaacaccacaucugcauuuccuuacgcucugcucaguaaugacaaugccuuucuguccuaccacccucacccuuuugcacagcgaacccucaccgcccgauuucaaguuaauaacaccaggccaccucacgugcagcuacucaggaagccaguucugacugcuaugggucugcuugcauuguuagaugaggaacagcuaugggccgaggugucccaagccggcacaguacuggauaguaaucacaccgugggcguuuuagccuccgcucauaggccucagggaccugcugacgccuggcgcgccgccgugcuuaucuaugccagcgaugauacccgagcucauccuaacagaucuguggccgugacucucaggcugcguggugucccacccggcccuggccuuguuuacguaacccgguaccucgacaaugggcuguguuccccagacggcgaguggagaaggcuugggcggcccgucuuucccacggcugaacaguuccggaggaugagagccgccgaggacccggucgcagcagcgccacgcccacugcccgccgguggaaggcuaacacugagacccgccuuacgacuacccucgcugcuccuuguucacgugugugcucgcccugaaaaacccccaggacaagucaccagacucagggccuuaccucucacccagggccagcuagugcuuguguggucagaugaacauguuggaucuaagugcuuguggaccuacgagauucaguuuucucaggaugguaaggcuuauaccccggucagccgaaagcccuccacuuuuaaucuguucguauucagccccgacacuggugccguaucaggcucauaucgaguaagagcucuggacuauugggcccgccccggccccuucuccgaucccguaccauaccuagaaguucccgugcccagaggaccacccagccccgguaaucccuag

SEQ ID NO: 302469 - DNA, 111 bp, Artificial Sequence
  derived and/or modified sequence
gggagggatgactggcaagcagctccacctgcggccccagtgcgggatccactgggtgaagccagctgggctcctgagtgtggtggggacttggagaacctttatgtctag

SEQ ID NO: 302470 - protein, 95 aa, Artificial Sequence
  derived and/or modified sequence
MAPPPACRSPMSPPPPPLLLLLLSLALLGARARAEPAGSAVPAQSRPCVDCHAFEFMQRALQDLRKTACSLDARTETLLLQAERRALCACWPAGH

SEQ ID NO: 302471 - protein, 854 aa, Artificial Sequence
  derived and/or modified sequence
MSLSEEQARSFLDQNPDFARQYFGKKLSPENVAAACEDGCPPDCDSLRDLCQVEESTALLELVQDMQESINMERVVFKVLRRLCTLLQADRCSLFMYRQRNGVAELATRLFSVQPDSVLEDCLVPPDSEIVFPLDIGVVGHVAQTKKMVNVEDVAECPHFSSFADELTDYKTKNMLATPIMNGKDVVAVIMAVNKLNGPFFTSEDEDVFLKYLNFATLYLKIYHLSYLHNCETRRGQVLLWSANKVFEELTDIERQFHKAFYTVRAYLNCERYSVGLLDMTKEKEFFDVWSVLMGESQPYSGPRTPDGREIVFYKVIDYVLHGKEEIKVIPTPSADHWALASGLPSYVAESGFICNIMNASADEMFKFQEGALDDSGWLIKNVLSMPIVNKKEEIVGVATFYNRKDGKPFDEQDEVLMESLTQFLGWSVMNTDTYDKMNKLENRKDIAQDMVLYHVKCDRDEIQLILPTRARLGKEPADCDEDELGEILKEELPGPTTFDIYEFHFSDLECTELDLVKCGIQMYYELGVVRKFQIPQEVLVRFLFSISKGYRRITYHNWRHGFNVAQTMFTLLMTGKLKSYYTDLEAFAMVTAGLCHDIDHRGTNNLYQMKSQNPLAKLHGSSILERHHLEFGKFLLSEETLNIYQNLNRRQHEHVIHLMDIAIIATDLALYFKKRAMFQKIVDESKNYQDKKSWVEYLSLETTRKEIVMAMMMTACDLSAITKPWEVQSKVALLVAAEFWEQGDLERTVLDQQPIPMMDRNKAAELPKLQVGFIDFVCTFVYKEFSRFHEEILPMFDRLQNNRKEWKALADEYEAKVKALEEKEEEERVAAKKVGTEICNGGPAPKSSTCCIL

SEQ ID NO: 302472 - DNA, 1728 bp, Artificial Sequence
  derived and/or modified sequence
atgaccaaggaaaaggagttcttcgacgtttggtcagttctcatgggagaaagccaaccatactccgggccccgtacccctgatggcagggaaattgtgttttataaggttatcgactatgtgctccacggtaaggaggaaatcaaagtgatccctacaccttctgccgatcactgggcactcgccagcgggctccctagctacgtggcagaatctggattcatctgtaatattatgaatgcgagtgcagatgagatgtttaagtttcaggagggtgccctagatgactcaggttggttgatcaagaatgtgctgtcaatgcccatcgtgaataaaaaagaagagattgtcggcgttgctacgttctacaaccgaaaggatggcaaaccatttgacgaacaagacgaggttctcatggagtctctgactcagttccttggttggtccgtaatgaataccgacacatatgacaaaatgaataagctggaaaacaggaaagacatagcccaggatatggtgctctaccacgtcaagtgcgaccgagatgaaattcaacttatcctgcccacgagagctcgcttgggcaaggagcccgccgattgtgatgaagacgaactgggagagatacttaaggaagagttgccagggccaacaacatttgacatctatgaattccacttttcggatttggagtgtacagagttggatttagtcaaatgtggcatacagatgtactacgaactaggagtcgtccgtaaattccagattccacaggaagtcttagtgagatttttattttccatttctaagggctaccgccggataacataccacaactggcgtcacggtttcaatgttgcacagaccatgtttactcttctcatgacaggcaaattgaaatcttattacacggatctggaagcttttgcaatggtaacagctggtttatgtcatgacattgatcatagaggtacaaataacctgtaccagatgaagagccagaatcccctggccaagctccacggtagctcaatcctggaacgtcatcatctggaatttggcaaatttcttctgtctgaagaaaccttgaacatctaccaaaacctaaatcggcgccagcacgagcatgtgattcacttgatggatattgccattattgcaaccgatttagccctatacttcaaaaagagggccatgtttcagaagatcgtggatgaatctaaaaactatcaggataagaaatcctgggtagaatatctgtccctggaaaccacacgcaaggagatcgtgatggccatgatgatgaccgcatgtgacctgtctgcgattacaaagccgtgggaagtgcagtccaaggttgcacttcttgtggcggcagaattttgggaacagggcgatcttgagcgcacagttctcgaccagcagcctattccaatgatggatcggaacaaggccgctgagctccctaagctccaagtgggcttcatcgactttgtgtgcacttttgtttacaaagaattctcccggtttcatgaggagatcctccccatgttcgatcggctccagaataaccggaaagaatggaaagccctcgccgacgagtatgaggccaaagtgaaggccctggaggaaaaggaggaggaagagcgcgttgccgccaagaaagtaggcacagaaatctgcaacggtgggcccgcaccaaagagttccacctgttgcattctctag

SEQ ID NO: 302473 - DNA, 2565 bp, Artificial Sequence
  derived and/or modified sequence
atgtctctatccgaggaacaggcccgatccttccttgaccagaatccggactttgcacggcagtacttcgggaagaaactgagtccggagaatgtggccgccgcttgcgaggatgggtgccctccagactgtgactcactgagggacctgtgccaggtggaggagagcacggcgcttctggagttagtgcaggacatgcaggagagcatcaacatggaaagagttgtgttcaaggtgctgcgaagactttgtaccctgctccaggcagaccggtgctccctgtttatgtacagacagagaaatggagttgccgagctcgctacacgactgttctcggtgcaacctgattccgtactggaagattgtctagttcccccagatagcgagattgttttccccttagatattggggttgttggccatgtcgcacagaccaaaaagatggtgaacgtagaagacgttgctgagtgtccccatttttcgtctttcgcggatgagctgactgattacaagacgaaaaacatgctggctaccccaattatgaatggtaaagatgtcgtcgcagtaatcatggcagtaaacaagctgaatgggcctttctttacaagcgaggatgaagacgtctttctgaaatacctgaactttgcaacactgtatctgaagatttaccaccttagctacctgcacaattgtgaaaccagaaggggccaagtgcttctgtggagcgctaacaaggtgtttgaggaactgactgatattgaaaggcagttccataaagctttctatacagtgagggcctatctcaactgcgagcgctattcagtcggactgttagatatgacaaaggaaaaagagtttttcgatgtctggagtgtcctaatgggagaaagccagccctacagtgggcccagaacgccagacggtcgggagattgtattttataaagtgatagattatgtcctgcacggaaaggaggaaatcaaggttatccctaccccctcagcggaccactgggcactggctagcgggctgccatcatatgtcgccgaatcaggatttatctgcaatatcatgaatgccagcgcagacgagatgtttaaattccaggaaggagccctagacgattctgggtggctaataaagaatgtgctttccatgcctatcgtcaacaaaaaggaggagatcgttggagtcgcaaccttttacaaccgaaaagacggaaagccctttgatgaacaggacgaagtgctgatggagtcacttacccagtttcttggttggtctgtaatgaatacagatacctacgacaagatgaataaactggaaaataggaaggacattgcccaggatatggtgctgtaccatgtgaagtgtgatagagacgagattcagttgattttaccgaccagggccaggttgggcaaggaacctgcagactgcgacgaagacgaactgggcgagatactaaaagaggagcttcctggaccaactacattcgatatttacgagtttcacttcagtgatttggagtgtacagaactggatttagtgaagtgtggcattcagatgtactacgagctgggcgtcgtgagaaaattccagataccccaggaggtgctggtgaggtttcttttcagtatcagcaaagggtatcggcggataacctatcataattggcggcatggcttcaatgtggcccaaaccatgttcactttgctcatgactgggaaactcaagtcatattacaccgacctggaggctttcgccatggtaaccgccggtctatgtcacgacatcgatcatcgcgggacaaataacttgtaccaaatgaaatcacagaacccccttgccaaattgcacggctccagcatcttagagcgacaccatctcgagtttggaaagtttcttctgtccgaggagacactgaacatctaccaaaatctcaacagacgacagcatgagcatgttatacatcttatggacatcgccatcatagccaccgaccttgctctgtacttcaaaaaacgagccatgtttcagaagatcgtcgacgagtcgaaaaactaccaggacaagaaatcttgggtggaatacctgtccctggaaacaacacgcaaggaaatcgtgatggccatgatgatgacagcatgtgacctatccgcaatcaccaaaccgtgggaagtgcaatccaaggtggccttgctagtggctgcagaattctgggaacagggtgatctggagaggactgtgcttgaccagcagcccattcccatgatggacaggaacaaagctgcagaattgcctaagctgcaggtggggtttattgacttcgtatgcaccttcgtgtacaaggaattttctcggttccacgaggagatcttacctatgttcgataggttgcagaacaacagaaaggagtggaaggcactggcagacgaatacgaagccaaggtgaaagcactggaggagaaggaagaggaggaaagggtggccgccaaaaaagtgggtaccgagatctgtaacggtggccctgcccctaaaagcagtacatgctgtattctatag

SEQ ID NO: 302474 - DNA, 1728 bp, Artificial Sequence
  derived and/or modified sequence
atgaccaaggagaaggagttctttgatgtgtggagcgtgctgatgggagagagccagccctacagcggccccaggaccccagatggccgggagatcgtgttctacaaggtgattgattatgtgctgcacggcaaggaggagatcaaggtgatccccaccccatctgctgaccactgggccctggccagcggcctgcccagctatgtggccgagagcggcttcatctgcaacatcatgaatgccagcgcagatgagatgttcaagttccaggagggcgccctggatgattctggctggctgatcaagaatgtgctgtccatgcccatcgtgaacaagaaggaggagatcgtgggcgtggccaccttctacaacaggaaggatggcaagccctttgatgagcaggatgaggtgctgatggagagcctgacccagttcctgggctggagcgtgatgaacacagacacctatgacaagatgaacaagctggagaacaggaaggacatcgcccaggacatggtgctgtaccacgtgaagtgtgacagagatgagatccagctgatcctgcccacccgggcccggctgggcaaggagcctgctgactgtgatgaagatgagctgggggagatcctgaaggaggagctgcccggccccaccacctttgacatctatgagttccacttcagtgacctggagtgcacagagctggacctggtgaagtgtggcatccagatgtactatgagctgggcgtggtgaggaagttccagatcccccaggaggtgctggtgcgcttcctgttcagcatcagcaagggctaccgccgcatcacctaccacaactggaggcatggcttcaacgtggcccagaccatgttcaccctgctgatgaccgggaagctgaagagctactacacagacctggaggcctttgccatggtgacagctggcctgtgccacgacatcgaccaccggggcaccaacaacctgtaccagatgaagagccagaaccccctggccaagctgcacggcagcagcatcctggagcggcaccacctggagtttgggaagttcctgctgtctgaggagaccctgaacatctaccagaacctgaacagacggcagcacgagcacgtgatccacctgatggacatcgccatcatcgccacagacctggccctgtacttcaagaagagggccatgttccagaagatcgtggatgagagcaagaactaccaggacaagaagtcctgggtggagtacctgagcctggagaccaccaggaaggagatcgtgatggccatgatgatgacagcctgtgacctgagcgccatcaccaagccctgggaggtgcagagcaaggtggccctgctggtggccgctgagttctgggagcagggcgacctggagaggacagtgctggaccagcagcccatccccatgatggacaggaacaaggctgctgagctgcccaagctgcaggtgggcttcatcgactttgtgtgcacctttgtgtacaaggagttcagccgcttccacgaggagatcctgcccatgtttgaccggctgcagaacaacaggaaggagtggaaggccctggctgatgaatatgaggccaaggtgaaggccctggaggagaaggaggaggaggagcgggtggccgccaagaaggtgggcacagagatctgcaatggaggccctgcccccaagagcagcacctgctgcatcctgtag

SEQ ID NO: 302475 - DNA, 2565 bp, Artificial Sequence
  derived and/or modified sequence
atgagcctgtctgaggagcaggcccggagcttcctggaccagaacccagactttgcccggcagtactttgggaagaagctgagcccagaaaatgtggccgccgcctgtgaagatggctgccccccagactgtgacagcctgcgggacctgtgccaggtggaggagagcacagccctgctggagctggtgcaggacatgcaggagagcatcaacatggagcgggtggtgttcaaggtgctgcggcggctgtgcaccctgctgcaggccgaccgctgcagcctcttcatgtaccggcagagaaatggagtggccgagctggccaccaggctcttctctgtgcagccagattctgtgctggaggactgcctggtgcccccagacagcgagatcgtgttccccctggacatcggcgtggtgggccacgtggcccagaccaagaagatggtgaatgtggaggatgtggccgagtgcccccacttcagcagctttgctgatgagctgacagactacaagaccaagaacatgctggccacccccatcatgaatggcaaggatgtggtggccgtcatcatggctgtgaacaagctgaatggccccttcttcaccagtgaagatgaagatgtgttcctgaagtacctgaactttgccaccctgtacctgaagatctaccacctgagctacctgcacaactgtgagacccggcggggccaggtgctgctgtggagcgccaacaaggtgtttgaggagctgacagacatcgagcggcagttccacaaggccttctacacagtgcgggcctacctgaactgtgagcgctacagcgtgggcctgctggacatgaccaaggagaaggagttctttgatgtgtggagcgtgctgatgggagagagccagccctacagcggccccaggaccccagatggccgggagatcgtgttctacaaggtgattgattatgtgctgcacggcaaggaggagatcaaggtgatccccacccccagcgctgaccactgggccctggccagcggcctgcccagctatgtggccgagagcggcttcatctgcaacatcatgaatgccagcgcagatgagatgttcaagttccaggagggcgccctggatgacagcggctggctgatcaagaatgtgctgtccatgcccatcgtgaacaagaaggaggagatcgtgggcgtggccaccttctacaacaggaaggatggcaagccctttgatgagcaggatgaggtgctgatggagagcctgacccagttcctgggctggagcgtgatgaacacagacacctatgacaagatgaacaagctggagaacaggaaggacatcgcccaggacatggtgctgtaccacgtgaagtgtgacagagatgagatccagctgatcctgcccacccgggcccggctgggcaaggagcctgctgactgtgatgaagatgagctgggggagatcctgaaggaggagctgcccggccccaccacctttgacatctatgagttccacttcagtgacctggagtgcacagagctggacctggtgaagtgtggcatccagatgtactatgagctgggcgtggtgaggaagttccagatcccccaggaggtgctggtgcgcttcctgttcagcatcagcaagggctaccgccgcatcacctaccacaactggaggcatggcttcaacgtggcccagaccatgttcaccctgctgatgaccgggaagctgaagagctactacacagacctggaggcctttgccatggtgacagctggcctgtgccacgacatcgaccaccggggcaccaacaacctgtaccagatgaagagccagaaccccctggccaagctgcacggcagcagcatcctggagcggcaccacctggagtttgggaagttcctgctgtctgaggagaccctgaacatctaccagaacctgaacagacggcagcatgaacatgtgatccacctgatggacatcgccatcatcgccacagacctggccctgtacttcaagaagagggccatgttccagaagatcgtggatgagagcaagaactaccaggacaagaagtcctgggtggagtacctgagcctggagaccaccaggaaggagatcgtgatggccatgatgatgacagcctgtgacctgagcgccatcaccaagccctgggaggtgcagagcaaggtggccctgctggtggccgctgagttctgggagcagggcgacctggagaggacagtgctggaccagcagcccatccccatgatggacaggaacaaggctgctgagctgcccaagctgcaggtgggcttcatcgactttgtgtgcacctttgtgtacaaggagttcagccgcttccacgaggagatcctgcccatgtttgaccggctgcagaacaacaggaaggagtggaaggccctggctgatgaatatgaggccaaggtgaaggccctggaggagaaggaggaggaggagcgggtggccgccaagaaggtgggcacagagatctgcaatggaggccctgcccccaagagcagcacctgctgcatcctgtag

SEQ ID NO: 302476 - DNA, 1728 bp, Artificial Sequence
  derived and/or modified sequence
atgaccaaggagaaggagttcttcgacgtgtggagcgtgctgatgggtgagtcccaaccatatagcggcccacgcacaccggatggccgcgaaatagttttctacaaggtcattgattatgtgttacacggtaaggaagagatcaaggtgatcccaacccctagcgccgaccattgggctctcgcctcaggcctccccagctatgttgccgaaagcggattcatctgtaatatcatgaacgctagcgcggatgaaatgttcaaatttcaagagggcgctctggatgattccggctggctgattaagaatgttctgtccatgccaatcgtgaacaagaaagaagaaattgtgggcgtggctaccttctataaccgaaaagatgggaaaccctttgacgagcaggatgaagtattgatggagagcctcacccagttcctcggctggagtgtgatgaatactgacacttacgacaagatgaataagttagagaataggaaggatatcgcccaagacatggttctataccacgttaagtgtgatcgcgatgaaatccagctaatactccctaccagggctcgtttaggcaaggagcctgcggactgcgacgaagacgaactaggtgagatcctcaaagaggagttaccaggaccaaccacattcgacatctacgagttccacttttctgacttggagtgcacggagcttgacttggtgaaatgcggcatccagatgtactatgagctcggtgtggtcagaaaatttcaaatcccccaggaggtcctggttcggttcctgttctccatcagcaagggctataggcggatcacatatcacaactggaggcatggatttaatgtggctcaaaccatgttcactctgttaatgaccggcaaactgaaatcctattataccgatctggaggcttttgccatggtgaccgccggtctttgtcacgacattgaccacagagggacaaataacctttatcagatgaagagccagaatcccctggccaaactgcatggttccagcattctcgagcgccatcatcttgaattcggtaagttcttgctctctgaagaaaccctcaatatttaccagaatttaaacagacggcaacatgaacatgtcatccacctgatggacatcgccatcatcgcgaccgatctggcactttatttcaagaaacgcgcaatgtttcagaaaattgtggatgagtcgaaaaactaccaggataagaaatcatgggttgagtacctgtcactcgagaccactagaaaggaaatcgtgatggctatgatgatgaccgcttgcgacttgagcgctatcacgaaaccatgggaagtgcagagcaaggtggcgctgctggtagcagccgagttttgggagcagggagacctggagcgcacagtactcgatcaacaacctatcccaatgatggaccggaacaaggccgccgaattgcctaagctacaggttggatttatcgattttgtctgtactttcgtctacaaagagtttagccgattccacgaggaaattctgccaatgtttgataggcttcagaataacaggaaggagtggaaagccctagcggatgaatacgaagctaaggtcaaagctctagaggaaaaagaagaagaagagcgtgttgcagcaaagaaagtgggtactgaaatttgcaatggtggtcctgcaccaaagagcagcacttgctgcatcctgtag

SEQ ID NO: 302477 - DNA, 2565 bp, Artificial Sequence
  derived and/or modified sequence
atgagcctgagcgaggagcaggcccggagcttcctggaccagaaccccgatttcgcccgccagtattttggcaagaaactttctccagagaatgtagcagctgcctgtgaagacggttgcccccctgattgcgactccctgcgcgacctgtgtcaagtcgaggagagtaccgccctgcttgagctggtgcaggacatgcaagagtccatcaatatggaaagagtggtctttaaggtactgcgccgcttatgtaccttactgcaggcagacaggtgctccctgttcatgtaccgtcaaaggaacggggtagccgaactcgcgactcgtctgttttcagtccagccggacagcgtgctcgaagactgtctcgtacccccggactctgagattgtgtttccactggacatcggagtcgttggccatgtagcgcaaacaaaaaagatggttaatgtagaagacgtcgcggagtgcccacatttctcctcattcgcggatgagttaactgattacaagacgaaaaacatgttagctacccccatcatgaacggtaaagacgtagtggctgtcattatggccgtaaataaactaaatgggcctttcttcacgagtgaggacgaggacgtcttcctgaaatacctgaatttcgccaccctgtaccttaagatctaccatctgtcatacttacacaattgtgagacaagaaggggacaagtcctgctttggtctgctaacaaggtctttgaggagctgactgacatcgagagacaatttcacaaggccttctataccgtgagagcttatttaaattgtgagcggtattcagtaggccttctggatatgacaaaagaaaaggagttcttcgatgtttggagcgtccttatgggagaaagtcagccctactcagggccccgcaccccagacgggcgggaaatagtgttttacaaggttatcgactacgtgctccatgggaaggaagagattaaagtgatcccaacaccaagcgcagatcactgggctttggccagtggcttgccaagctatgttgcggagtccggcttcatctgcaacatcatgaacgcatctgccgatgagatgttcaagtttcaagagggagcactggacgactcaggttggctgataaagaacgtactatccatgccaattgtgaataagaaagaagagatagtgggcgtggccaccttctataatcgcaaggacggcaaaccttttgacgagcaggacgaggtgctgatggagtccctgacacagtttcttggttggtctgtcatgaatacagacacctacgataaaatgaacaagctggagaatcgtaaggacatagcccaggacatggttttgtaccacgttaagtgcgatcgcgatgagatccagcttatccttcccaccagggccagactgggcaaggagccagccgattgtgatgaggatgaactcggagagatcctgaaagaggagctccctggcccgaccactttcgacatctacgaattccactttagtgatctcgagtgtacggagctagacctggttaagtgcggaatccagatgtactatgagctgggggtggtgcgcaaattccaaattcctcaggaagtgctggttcggtttctgttttctataagcaaggggtatagacgaattacctatcataactggaggcacggtttcaatgtcgctcagaccatgttcactctactgatgacgggcaaactgaagtcatactacaccgacctcgaggcattcgctatggtgacagcgggcctgtgccatgatatcgatcataggggtacaaataatctgtaccaaatgaaaagccagaatcctctcgctaaactgcacgggtctagcatactggaacgccatcaccttgaattcggtaaatttcttctctccgaagagacactgaacatatatcaaaaccttaacaggcgtcaacacgagcacgttattcacctgatggatattgccattatcgcaactgatttggccctgtattttaagaagcgtgctatgttccagaaaatcgtggatgagagcaaaaactaccaggataagaaatcatgggtcgaatatctgtctctagagaccacacgaaaggagattgtgatggccatgatgatgacagcttgtgacctttcagctatcaccaaaccctgggaggtacagagcaaggtggccttgctggtcgccgcggaattctgggagcagggggaccttgagaggactgtgctcgatcagcaacctattccaatgatggatagaaataaagccgctgagttgccaaagctgcaggtgggcttcattgactttgtgtgtacattcgtatacaaagagttcagtaggttccatgaggaaatactgccaatgttcgatcgcctgcagaacaataggaaggagtggaaggccctcgccgatgaatatgaggcaaaagtgaaagcccttgaagaaaaggaagaggaagagcgggtggccgcaaagaaggtcggaaccgagatatgcaatggaggaccggccccaaagagcagcacttgttgcatcctttag

SEQ ID NO: 302478 - DNA, 2120 bp, Artificial Sequence
  derived and/or modified sequence
gcagcggaggagagggagctggcaccatgcggtagaagacccagcggccgccgcgagtgtgaggaggcagggcctggtggggcctgggtctgggccttgaccaaggaggcagagaaaggtggcccaaggagggccctggggtgctgctgtggtcggccaacaaggtgtttgaggagctgacggacatcgagaggcagttccacaaggccttctacacggtgcgggcctacctcaactgcgagcggtactccgtgggcctcctggacatgaccaaggagaaggaattttttgacgtgtggtctgtgctgatgggagagtcccagccgtactcgggcccacgcacgcctgatggccgggaaattgtcttctacaaagtgatcgactacgtcctccacggcaaggaggagatcaaggtcattcccacaccctcagccgatcactgggccctggccagcggccttccaagctacgtggcagaaagcggctttatttgtaacatcatgaatgcttccgctgacgaaatgttcaaatttcaggaaggggccctggacgactccgggtggctcatcaagaatgtgctgtccatgcccatcgtcaacaagaaggaggagattgtgggagtcgccacattttacaacaggaaagacgggaagccctttgacgaacaggacgaggttctcatggagtccctgacacagttcctgggctggtcagtgatgaacaccgacacctacgacaagatgaacaagctggagaaccgcaaggacatcgcacaggacatggtcctttaccacgtgaagtgcgacagggacgagatccagctcatcctgccaaccagagcgcgcctggggaaggagcctgctgactgcgatgaggacgagctgggcgaaatcctgaaggaggagctgccagggcccaccacatttgacatctacgaattccacttctctgacctggagtgcaccgaactggacctggtcaaatgtggcatccagatgtactacgagctgggcgtggtccgaaagttccagatcccccaggaggtcctggtgcggttcctgttctccatcagcaaagggtaccggagaatcacctaccacaactggcgccacggcttcaacgtggcccagacgatgttcacgctgctcatgaccggcaaactgaagagctactacacggacctggaggccttcgccatggtgacagccggcctgtgccatgacatcgaccaccgcggcaccaacaacctgtaccagatgaagtcccagaaccccttggctaagctccacggctcctcgattttggagcggcaccacctggagtttgggaagttcctgctctcggaggagaccctgaacatctaccagaacctgaaccggcggcagcacgagcacgtgatccacctgatggacatcgccatcatcgccacggacctggccctgtacttcaagaagagagcgatgtttcagaagatcgtggatgagtccaagaactaccaggacaagaagagctgggtggagtacctgtccctggagacgacccggaaggagatcgtcatggccatgatgatgacagcctgcgacctgtctgccatcaccaagccctgggaagtccagagcaaggtcgcacttctcgtggctgctgagttctgggagcaaggtgacttggaaaggacagtcttggatcagcagcccattcctatgatggaccggaacaaggcggccgagctccccaagctgcaagtgggcttcatcgacttcgtgtgcacattcgtgtacaaggagttctctcgtttccacgaagagatcctgcccatgttcgaccgactgcagaacaataggaaagagtggaaggcgctggctgatgagtatgaggccaaagtgaaggctctggaggagaaggaggaggaggagagggtggcagccaagaaagtaggcacagaaatttgcaatggcggcccagcacccaagtcttcaacctgctgtatcctgtgagcactggtcccatggggaccctatggctccctcaatcttcacccactaggatttgggttctgcctgtggctatttgctacaagaggttaggaagcccaagaaaatgactgaagatcattctggata

SEQ ID NO: 302479 - DNA, 3280 bp, Artificial Sequence
  derived and/or modified sequence
tgcgtgcctggagcagcagcgtctccagggacaggcagccaccatgagcctcagtgaggagcaggcccggagctttctggaccagaaccccgattttgcccgccagtactttgggaagaaactgagccctgagaatgtggccgcggcctgcgaggacgggtgcccgccggactgcgacagcctccgggacctctgccaggtggaggagagcacggcgctgctggagctggtgcaggatatgcaggagagcatcaacatggagcgcgtggtcttcaaggtcctgcggcgcctctgcaccctcctgcaggccgaccgctgcagcctcttcatgtaccgccagcgcaacggcgtggccgagctggccaccaggcttttcagcgtgcagccggacagcgtcctggaggactgcctggtgccccccgactccgagatcgtcttcccactggacatcggggtcgtgggccacgtggctcagaccaaaaagatggtgaacgtcgaggacgtggccgagtgccctcacttcagctcatttgctgacgagctcactgactacaagacaaagaatatgctggccacacccatcatgaatggcaaagacgtcgtggcggtgatcatggcagtgaacaagctcaacggcccattcttcaccagcgaagacgaagatgtgttcttgaagtacctgaattttgccacgttgtacctgaagatctatcacctgagctacctccacaactgcgagacgcgccgcggccaggtgctgctgtggtcggccaacaaggtgtttgaggagctgacggacatcgagaggcagttccacaaggccttctacacggtgcgggcctacctcaactgcgagcggtactccgtgggcctcctggacatgaccaaggagaaggaattttttgacgtgtggtctgtgctgatgggagagtcccagccgtactcgggcccacgcacgcctgatggccgggaaattgtcttctacaaagtgatcgactacgtcctccacggcaaggaggagatcaaggtcattcccacaccctcagccgatcactgggccctggccagcggccttccaagctacgtggcagaaagcggctttatttgtaacatcatgaatgcttccgctgacgaaatgttcaaatttcaggaaggggccctggacgactccgggtggctcatcaagaatgtgctgtccatgcccatcgtcaacaagaaggaggagattgtgggagtcgccacattttacaacaggaaagacgggaagccctttgacgaacaggacgaggttctcatggagtccctgacacagttcctgggctggtcagtgatgaacaccgacacctacgacaagatgaacaagctggagaaccgcaaggacatcgcacaggacatggtcctttaccacgtgaagtgcgacagggacgagatccagctcatcctgccaaccagagcgcgcctggggaaggagcctgctgactgcgatgaggacgagctgggcgaaatcctgaaggaggagctgccagggcccaccacatttgacatctacgaattccacttctctgacctggagtgcaccgaactggacctggtcaaatgtggcatccagatgtactacgagctgggcgtggtccgaaagttccagatcccccaggaggtcctggtgcggttcctgttctccatcagcaaagggtaccggagaatcacctaccacaactggcgccacggcttcaacgtggcccagacgatgttcacgctgctcatgaccggcaaactgaagagctactacacggacctggaggccttcgccatggtgacagccggcctgtgccatgacatcgaccaccgcggcaccaacaacctgtaccagatgaagtcccagaaccccttggctaagctccacggctcctcgattttggagcggcaccacctggagtttgggaagttcctgctctcggaggagaccctgaacatctaccagaacctgaaccggcggcagcacgagcacgtgatccacctgatggacatcgccatcatcgccacggacctggccctgtacttcaagaagagagcgatgtttcagaagatcgtggatgagtccaagaactaccaggacaagaagagctgggtggagtacctgtccctggagacgacccggaaggagatcgtcatggccatgatgatgacagcctgcgacctgtctgccatcaccaagccctgggaagtccagagcaaggtcgcacttctcgtggctgctgagttctgggagcaaggtgacttggaaaggacagtcttggatcagcagcccattcctatgatggaccggaacaaggcggccgagctccccaagctgcaagtgggcttcatcgacttcgtgtgcacattcgtgtacaaggagttctctcgtttccacgaagagatcctgcccatgttcgaccgactgcagaacaataggaaagagtggaaggcgctggctgatgagtatgaggccaaagtgaaggctctggaggagaaggaggaggaggagagggtggcagccaagaaaggcacagaaatttgcaatggcggcccagcacccaagtcttcaacctgctgtatcctgtgagcactggtcccatggggaccctatggctccctcaatcttcacccactaggatttgggttctgcctgtggctatttgctacaagaggttaggaagcccaagaaaatgactgaagatcattctggatattttaatttttttttttttttttttttgagatggagtcttgctctgtcacccaggctggagtgccgtggcacgatctcagctcactgcaacctccacctcccaggttcaagcgattctcgtgcctcagcctcctgagtagctgggactacaggcgcccaccaccacacatggctaatttttgtattttcagtacagatggggtttcaccatattgggcaggctggtctcgaactcctgacctcaggtgatcacccgcctcagcttcctgaagtgctgggattacaggcatgagccaccacgcccagcctgtttttataaactgaagccaactgtgaataaactgtagcctacattactcatccatttttggatagttaccactgggagacctttgaaaagggtccatgaactctgaaatcactgagaacatttgcagccacacatgtacatatgtgtacacaggtagacagatggacacaggccgtttctcatccagtttaggaaaacacacatgctcaggaattcagaataaaataaacagaaaacta

SEQ ID NO: 302480 - DNA, 3232 bp, Artificial Sequence
  derived and/or modified sequence
ctccagggacaggcagccaccatgagcctcagtgaggagcaggcccggagctttctggaccagaaccccgattttgcccgccagtactttgggaagaaactgagccctgagaatgtggccgcggcctgcgaggacgggtgcccgccggactgcgacagcctccgggacctctgccaggtggaggagagcacggcgctgctggagctggtgcaggatatgcaggagagcatcaacatggagcgcgtggtcttcaaggtcctgcggcgcctctgcaccctcctgcaggccgaccgctgcagcctcttcatgtaccgccagcgcaacggcgtggccgagctggccaccaggcttttcagcgtgcagccggacagcgtcctggaggactgcctggtgccccccgactccgagatcgtcttcccactggacatcggggtcgtgggccacgtggctcagaccaaaaagatggtgaacgtcgaggacgtggccgagtgccctcacttcagctcatttgctgacgagctcactgactacaagacaaagaatatgctggccacacccatcatgaatggcaaagacgtcgtggcggtgatcatggcagtgaacaagctcaacggcccattcttcaccagcgaagacgaagatgtgttcttgaagtacctgaattttgccacgttgtacctgaagatctatcacctgagctacctccacaactgcgagacgcgccgcggccaggtgctgctgtggtcggccaacaaggtgtttgaggagctgacggacatcgagaggcagttccacaaggccttctacacggtgcgggcctacctcaactgcgagcggtactccgtgggcctcctggacatgaccaaggagaaggaattttttgacgtgtggtctgtgctgatgggagagtcccagccgtactcgggcccacgcacgcctgatggccgggaaattgtcttctacaaagtgatcgactacgtcctccacggcaaggaggagatcaaggtcattcccacaccctcagccgatcactgggccctggccagcggccttccaagctacgtggcagaaagcggctttatttgtaacatcatgaatgcttccgctgacgaaatgttcaaatttcaggaaggggccctggacgactccgggtggctcatcaagaatgtgctgtccatgcccatcgtcaacaagaaggaggagattgtgggagtcgccacattttacaacaggaaagacgggaagccctttgacgaacaggacgaggttctcatggagtccctgacacagttcctgggctggtcagtgatgaacaccgacacctacgacaagatgaacaagctggagaaccgcaaggacatcgcacaggacatggtcctttaccacgtgaagtgcgacagggacgagatccagctcatcctgccaaccagagcgcgcctggggaaggagcctgctgactgcgatgaggacgagctgggcgaaatcctgaaggaggagctgccagggcccaccacatttgacatctacgaattccacttctctgacctggagtgcaccgaactggacctggtcaaatgtggcatccagatgtactacgagctgggcgtggtccgaaagttccagatcccccaggaggtcctggtgcggttcctgttctccatcagcaaagggtaccggagaatcacctaccacaactggcgccacggcttcaacgtggcccagacgatgttcacgctgctcatgaccggcaaactgaagagctactacacggacctggaggccttcgccatggtgacagccggcctgtgccatgacatcgaccaccgcggcaccaacaacctgtaccagatgaagtcccagaaccccttggctaagctccacggctcctcgattttggagcggcaccacctggagtttgggaagttcctgctctcggaggagaccctgaacatctaccagaacctgaaccggcggcagcacgagcacgtgatccacctgatggacatcgccatcatcgccacggacctggccctgtacttcaagaagagagcgatgtttcagaagatcgtggatgagtccaagaactaccaggacaagaagagctgggtggagtacctgtccctggagacgacccggaaggagatcgtcatggccatgatgatgacagcctgcgacctgtctgccatcaccaagccctgggaagtccagagcaaggtcgcacttctcgtggctgctgagttctgggagcaaggtgacttggaaaggacagtcttggatcagcagcccattcctatgatggaccggaacaaggcggccgagctccccaagctgcaagtgggcttcatcgacttcgtgtgcacattcgtgtacaaggagttctctcgtttccacgaagagatcctgcccatgttcgaccgactgcagaacaataggaaagagtggaaggcgctggctgatgagtatgaggccaaagtgaaggctctggaggagaaggaggaggaggagagggtggcagccaagaaagtaggcacagaaatttgcaatggcggcccagcacccaagtcttcaacctgctgtatcctgtgagcactggtcccatggggaccctatggctccctcaatcttcacccactaggatttgggttctgcctgtggctatttgctacaagaggttaggaagcccaagaaaatgactgaagatcattctggatattttaatttttttttttttttttttttgagatggagtcttgctctgtcacccaggctggagtgccgtggcacgatctcagctcactgcaacctccacctcccaggttcaagcgattctcgtgcctcagcctcctgagtagctgggactacaggcgcccaccaccacacatggctaatttttgtattttcagtacagatggggtttcaccatattgggcaggctggtctcgaactcctgacctcaggtgatcacccgcctcagcttcctgaagtgctgggattacaggcatgagccaccacgcccagcctgtttttataaactgaagccaactgtgaataaactgtagcctacattactcatccatttttggatagttaccactgggagacctttgaaaagggtccatgaactctgaaatcactgagaacatttgcagccacacatgtacatatgtgtacacaggtagacagatggacacaggccgtttctcatccagtttaggaaaacacacatgctcag

SEQ ID NO: 302481 - DNA, 1728 bp, Artificial Sequence
  derived and/or modified sequence
atgacaaaggagaaggaatttttcgacgtctggagtgtcttaatgggcgagtcccagccctactccggtcccaggacaccagacggaagagagatcgtgttctataaagtgatcgactacgtgctgcacggtaaggaagagattaaggtgatcccaactcccagtgcggatcactgggcactggcgagtggcctgccaagctacgtggcggaatccgggttcatatgcaatatcatgaacgcaagcgcagatgaaatgttcaagtttcaagaaggggctctggatgattccgggtggctcatcaaaaatgtgctcagtatgccaatcgtgaataagaaggaagagattgtgggcgtggctacattctacaatagaaaggacggcaaaccttttgacgagcaggacgaggtgctgatggaatccttgacgcaattcctaggctggagtgtaatgaatactgacacttatgacaaaatgaacaagctggaaaatcgaaaggacatcgcacaagacatggtgctgtatcacgtgaagtgcgatagggatgagatccagctgatcctgccgacgcgagccaggctcggaaaagaacccgctgattgcgatgaggacgagctcggagagattctcaaagaggaactcccaggacccacaaccttcgatatttatgaatttcatttttccgatttggagtgtacggagttggatcttgtgaagtgcgggattcagatgtactatgaattaggggtcgtacgcaagttccaaatccctcaggaagtgctagttagatttctcttctcgatcagtaagggatatagaaggatcacgtaccataactggcgacacggattcaacgttgcccagaccatgttcacgctccttatgaccggaaagctgaaaagctattacacagacctagaggcattcgccatggttactgccggtttatgtcatgacatcgaccaccggggaacaaacaatctctatcaaatgaagtcccagaacccactggccaagcttcatggtagctccattctggagcgtcaccaccttgagttcggtaaatttctgctcagcgaggagactctcaacatttaccagaacctgaaccgtcggcagcacgagcacgtcatccacctaatggacattgcaatcatagccacagacctggcgctctactttaagaagcgagccatgttccagaagatagtcgacgagtcgaaaaactatcaagataaaaaatcatgggttgagtatttatcccttgaaaccacgcggaaggagatagtgatggccatgatgatgaccgcatgcgatctgagcgctattacaaaaccctgggaggtgcagagcaaggtggctcttctggtagcagccgagttttgggaacagggagatctcgaaaggaccgtcctggaccagcaaccaatcccaatgatggacagaaataaagccgcagaactccctaaattgcaggtgggctttattgatttcgtgtgcactttcgtgtacaaggaattttctcgtttccatgaagaaattctgccaatgtttgaccggctccagaacaataggaaagaatggaaagccctggcggacgagtatgaagcgaaggtgaaggctctggaagaaaaggaggaggaagaacgtgttgccgcaaagaaggtcgggacagagatttgcaacgggggacccgcacctaagtcttctacctgttgtatactttag

SEQ ID NO: 302482 - DNA, 2565 bp, Artificial Sequence
  derived and/or modified sequence
atgagcctcagtgaggagcaagccaggtccttcctggaccagaaccctgacttcgcaaggcagtatttcggcaagaaactgtctccagaaaacgtggcagcggcatgtgaggatggctgtccccctgactgcgattcccttcgtgacctttgccaggtggaggagtctaccgctctcctggaactggtgcaggatatgcaggaatctataaatatggagcgggtcgtctttaaggttctgaggcgcttgtgcacactccttcaggcagaccgttgtagtctgttcatgtatcgacagaggaatggagtggccgagttggccacgcggcttttttccgtgcagcctgacagcgtgctggaggattgtctggtgccacctgactcggagatagtgttccctctggacatcggggtcgtaggtcacgtcgcccaaactaagaagatggtgaacgtagaggatgttgcagagtgtccacacttctcatcctttgcagatgagctgaccgactataagacaaaaaacatgctcgcgacacccattatgaacgggaaagatgttgtcgcagtgataatggccgtgaataagctcaacggcccttttttcaccagcgaggacgaggatgtgttcttgaagtaccttaactttgccactctttatttgaaaatttaccaccttagttatctgcacaattgcgaaactcgtcgcggacaggtgcttctttggtcagcaaacaaagtattcgaagagctaaccgatattgagcgccagtttcataaggcattctacacggtcagagcgtaccttaactgcgagcgctactctgttgggctgctcgacatgactaaagagaaagagttctttgatgtgtggtctgtgttgatgggagaatctcagccatactctggccctaggacgccggatgggagagaaatcgtattttacaaggttatagattatgtgctgcacggcaaagaggagatcaaggtgattcccaccccctctgccgatcactgggccctggccagcggcctaccttcgtacgtggccgagagtggctttatctgtaacattatgaacgctagtgccgatgaaatgtttaagttccaggagggtgccctggacgattcaggctggctgatcaaaaatgtcttgtctatgccaatcgtgaataaaaaagaagaaatcgtgggggtggcaacattttacaacagaaaagacgggaagccgttcgatgagcaggatgaagtgttaatggagtcacttactcagttccttgggtggtccgtcatgaatacagacacatatgataagatgaacaagcttgaaaatcgaaaggacatcgctcaagacatggttctttatcatgtcaagtgcgaccgcgatgagattcagttgattctcccgacccgggcacgattagggaaggagccggctgactgcgacgaagatgagttaggagaaatcttgaaagaagaactccctggcccaacaacctttgacatatatgagttccacttcagtgacctcgaatgcacagagctggaccttgttaagtgcggaatccagatgtattatgagctcggagtggtgagaaaatttcaaatcccgcaggaggtgctggtccgatttttattcagcattagtaagggctatcggcgtattacttaccacaattggagacatggctttaatgttgcacagaccatgttcaccctcttgatgaccggtaagctgaagtcctattatacagacctggaggctttcgcaatggttaccgccggtctgtgtcatgatatcgatcacagaggtaccaacaacctgtaccagatgaagagccaaaatcccctggctaaattgcacgggtccagtatcttggagaggcaccacctcgaatttggaaagttcctgctcagcgaggaaaccctgaatatataccaaaatttaaaccggaggcaacatgagcacgtaatacatctgatggatatcgccataattgccaccgacttggcgctctactttaaaaaacgggcaatgttccagaaaattgtcgatgaaagtaaaaactaccaggacaaaaagtcctgggtggagtacctgtcacttgagaccacaagaaaggagattgtcatggctatgatgatgaccgcttgtgacctgtcagccataaccaagccctgggaagtgcagagcaaagttgcccttctggtagcagccgagttttgggagcagggtgacctcgaaaggaccgtgttggatcagcagccaatccctatgatggatcgcaacaaggccgctgagctgcctaagttacaggttggattcatcgatttcgtgtgcacttttgtatataaagaattcagtcggttccatgaagagattctcccaatgttcgatagacttcagaataatagaaaggagtggaaagctctagcagacgaatacgaggcaaaggtgaaggcgctggaagagaaggaggaggaggaaagagtagccgcaaagaaggtcgggactgagatctgtaatggcggtccagctcccaagagttctacttgttgtatactgtag

SEQ ID NO: 302483 - DNA, 1728 bp, Artificial Sequence
  derived and/or modified sequence
atgaccaaggagaaggagttcttcgacgtgtggagcgtgctgatgggcgagagccagccctacagcggccccagaacccccgacggcagagagatcgtgttctacaaggtgatcgactacgtgctgcacggcaaggaggagatcaaggtgatccccacccccagcgccgaccactgggccctggccagcggcctgcccagctacgtggccgagagcggcttcatctgcaacatcatgaacgccagcgccgacgagatgttcaagttccaggagggcgccctggacgacagcggctggctgatcaagaacgtgctgagcatgcccatcgtgaacaagaaggaggagatcgtgggcgtggccaccttctacaacagaaaggacggcaagcccttcgacgagcaggacgaggtgctgatggagagcctgacccagttcctgggctggagcgtgatgaacaccgacacctacgacaagatgaacaagctggagaacagaaaggacatcgcccaggacatggtgctgtaccacgtgaagtgcgacagagacgagatccagctgatcctgcccaccagagccagactgggcaaggagcccgccgactgcgacgaggacgagctgggcgagatcctgaaggaggagctgcccggccccaccaccttcgacatctacgagttccacttcagcgacctggagtgcaccgagctggacctggtgaagtgcggcatccagatgtactacgagctgggcgtggtgagaaagttccagatcccccaggaggtgctggtgagattcctgttcagcatcagcaagggctacagaagaatcacctaccacaactggagacacggcttcaacgtggcccagaccatgttcaccctgctgatgaccggcaagctgaagagctactacaccgacctggaggccttcgccatggtgaccgccggcctgtgccacgacatcgaccacagaggcaccaacaacctgtaccagatgaagagccagaaccccctggccaagctgcacggcagcagcatcctggagagacaccacctggagttcggcaagttcctgctgagcgaggagaccctgaacatctaccagaacctgaacagaagacagcacgagcacgtgatccacctgatggacatcgccatcatcgccaccgacctggccctgtacttcaagaagagagccatgttccagaagatcgtggacgagagcaagaactaccaggacaagaagagctgggtggagtacctgagcctggagaccaccagaaaggagatcgtgatggccatgatgatgaccgcctgcgacctgagcgccatcaccaagccctgggaggtgcagagcaaggtggccctgctggtggccgccgagttctgggagcagggcgacctggagagaaccgtgctggaccagcagcccatccccatgatggacagaaacaaggccgccgagctgcccaagctgcaggtgggcttcatcgacttcgtgtgcaccttcgtgtacaaggagttcagcagattccacgaggagatcctgcccatgttcgacagactgcagaacaacagaaaggagtggaaggccctggccgacgagtacgaggccaaggtgaaggccctggaggagaaggaggaggaggagagagtggccgccaagaaggtgggcaccgagatctgcaacggcggccccgcccccaagagcagcacctgctgcatcctgtag

SEQ ID NO: 302484 - DNA, 2565 bp, Artificial Sequence
  derived and/or modified sequence
atgagcctgagcgaggagcaggccagaagcttcctggaccagaaccccgacttcgccagacagtacttcggcaagaagctgagccccgagaacgtggccgccgcctgcgaggacggctgcccccccgactgcgacagcctgagagacctgtgccaggtggaggagagcaccgccctgctggagctggtgcaggacatgcaggagagcatcaacatggagagagtggtgttcaaggtgctgagaagactgtgcaccctgctgcaggccgacagatgcagcctgttcatgtacagacagagaaacggcgtggccgagctggccaccagactgttcagcgtgcagcccgacagcgtgctggaggactgcctggtgccccccgacagcgagatcgtgttccccctggacatcggcgtggtgggccacgtggcccagaccaagaagatggtgaacgtggaggacgtggccgagtgcccccacttcagcagcttcgccgacgagctgaccgactacaagaccaagaacatgctggccacccccatcatgaacggcaaggacgtggtggccgtgatcatggccgtgaacaagctgaacggccccttcttcaccagcgaggacgaggacgtgttcctgaagtacctgaacttcgccaccctgtacctgaagatctaccacctgagctacctgcacaactgcgagaccagaagaggccaggtgctgctgtggagcgccaacaaggtgttcgaggagctgaccgacatcgagagacagttccacaaggccttctacaccgtgagagcctacctgaactgcgagagatacagcgtgggcctgctggacatgaccaaggagaaggagttcttcgacgtgtggagcgtgctgatgggcgagagccagccctacagcggccccagaacccccgacggcagagagatcgtgttctacaaggtgatcgactacgtgctgcacggcaaggaggagatcaaggtgatccccacccccagcgccgaccactgggccctggccagcggcctgcccagctacgtggccgagagcggcttcatctgcaacatcatgaacgccagcgccgacgagatgttcaagttccaggagggcgccctggacgacagcggctggctgatcaagaacgtgctgagcatgcccatcgtgaacaagaaggaggagatcgtgggcgtggccaccttctacaacagaaaggacggcaagcccttcgacgagcaggacgaggtgctgatggagagcctgacccagttcctgggctggagcgtgatgaacaccgacacctacgacaagatgaacaagctggagaacagaaaggacatcgcccaggacatggtgctgtaccacgtgaagtgcgacagagacgagatccagctgatcctgcccaccagagccagactgggcaaggagcccgccgactgcgacgaggacgagctgggcgagatcctgaaggaggagctgcccggccccaccaccttcgacatctacgagttccacttcagcgacctggagtgcaccgagctggacctggtgaagtgcggcatccagatgtactacgagctgggcgtggtgagaaagttccagatcccccaggaggtgctggtgagattcctgttcagcatcagcaagggctacagaagaatcacctaccacaactggagacacggcttcaacgtggcccagaccatgttcaccctgctgatgaccggcaagctgaagagctactacaccgacctggaggccttcgccatggtgaccgccggcctgtgccacgacatcgaccacagaggcaccaacaacctgtaccagatgaagagccagaaccccctggccaagctgcacggcagcagcatcctggagagacaccacctggagttcggcaagttcctgctgagcgaggagaccctgaacatctaccagaacctgaacagaagacagcacgagcacgtgatccacctgatggacatcgccatcatcgccaccgacctggccctgtacttcaagaagagagccatgttccagaagatcgtggacgagagcaagaactaccaggacaagaagagctgggtggagtacctgagcctggagaccaccagaaaggagatcgtgatggccatgatgatgaccgcctgcgacctgagcgccatcaccaagccctgggaggtgcagagcaaggtggccctgctggtggccgccgagttctgggagcagggcgacctggagagaaccgtgctggaccagcagcccatccccatgatggacagaaacaaggccgccgagctgcccaagctgcaggtgggcttcatcgacttcgtgtgcaccttcgtgtacaaggagttcagcagattccacgaggagatcctgcccatgttcgacagactgcagaacaacagaaaggagtggaaggccctggccgacgagtacgaggccaaggtgaaggccctggaggagaaggaggaggaggagagagtggccgccaagaaggtgggcaccgagatctgcaacggcggccccgcccccaagagcagcacctgctgcatcctgtag

SEQ ID NO: 302485 - DNA, 426 bp, Artificial Sequence
  derived and/or modified sequence
atgcactactggttcggccaggccttcttctacttccagggcaacagcaacaacatcgccaccgtggacatcagcgccggcttcgtgggcctggacacctacgtggagatccccgccgtgctgctgaccgccttcggcacctacgccggccccgtgctgtgggccagccacctggtgcacttcctgagcagcgagaccagaagcggcagcgccctgagccacgcctgcttctgctacgccctgatctgcagcatccccgtgttcacctacatcgtgctggtgaccagcctgagataccacctgttcatctggagcgtgttcagccccaagctgctgtacgagggcatgcacctgctgatcaccgccgccgtgtgcgtgttcttcacctggatcaagcccgacagccacagcctgagactgagctag

SEQ ID NO: 302486 - DNA, 426 bp, Artificial Sequence
  derived and/or modified sequence
atgcactactggtttggtcaggccttcttctacttccaaggaaattccaacaacatagcaaccgttgatattagcgccgggtttgtcggactcgacacttatgtagagattccagctgtcttgctcactgctttcggaacatacgcagggccagtcttatgggccagtcatctggtgcacttcctgagctccgagacgaggtcaggttcagccctgtcccatgcttgtttctgttacgccctgatctgcagcatacccgtgttcacctatattgttctggtcacctccctacggtatcatctgtttatttggtcagtcttcagcccgaagctgctatacgaggggatgcacctcctgataactgctgcagtctgcgtcttcttcacttggattaagcccgacagccactctctgcgcttgagctag

SEQ ID NO: 302487 - DNA, 426 bp, Artificial Sequence
  derived and/or modified sequence
atgcactactggtttggccaggccttcttctacttccagggcaacagcaacaacatcgccaccgtggacatctctgctggctttgtgggcctggacacctacgtggagatcccagctgtgctgctgacagccttcggcacctacgccggccctgtgctgtgggccagccacctggtgcacttcctgagcagcgagaccaggagcggcagcgccctgagccacgcctgcttctgctacgccctgatctgcagcatccctgtgttcacctacatcgtgctggtgaccagcctgcgctaccacctgttcatctggagcgtcttcagccccaagctgctgtatgagggcatgcacctgctgatcacagctgctgtgtgtgtgttcttcacctggatcaagccagacagccacagcctgcggctgtcctag

SEQ ID NO: 302488 - DNA, 426 bp, Artificial Sequence
  derived and/or modified sequence
atgcactactggttcggccaggccttcttctacttccagggcaactccaataatatcgccactgttgatatcagtgccggtttcgttggtctggatacctacgtagaaatccctgccgtgctcctgaccgcctttgggacttacgccggccctgtgttgtgggccagtcaccttgtccatttcctgagcagcgagacaaggagtggatctgctctcagtcacgcctgcttttgctatgccttaatctgctcaattcccgtttttacatacattgtgctggtgacaagtctgaggtaccacctctttatttggagcgtcttctcccctaaactcctgtatgaggggatgcaccttctgattaccgctgccgtctgtgtgttttttacctggattaagcctgatagtcatagcctgagactgagctag

SEQ ID NO: 302489 - DNA, 426 bp, Artificial Sequence
  derived and/or modified sequence
atgcattattggtttggccaggcttttttttacttccagggcaactccaacaacatcgctactgtggatattagtgccggattcgtcggtcttgatacctatgtggagatccctgctgtgcttttgacagcctttggcacctatgccggacccgtcctgtgggcctcccacctcgtacacttccttagttcggaaactagaagcgggtccgctctctctcacgcctgcttctgctacgccttgatatgtagcattcctgtctttacatacatcgtcttagtcacctcactgaggtaccacctgttcatatggagcgtgttttctccaaagctgctgtatgaggggatgcacctgctgattactgccgcagtatgcgtctttttcacctggataaagcctgactcacactcgctgcgactcagctag

SEQ ID NO: 302490 - protein, 1002 aa, Artificial Sequence
  derived and/or modified sequence
MGKVLESSLWRSSDFGTSYTKLTLQPGVTTVIDNFYICPTNKRKVILVSSSLSDRDQSLFLSADEGATFQKQPIPFFVETLIFHPKEEDKVLAYTKESKLYVSSDLGKKWTLLQERVTKDHVFWSVSGVDADPDLVHVEAQDLGGDFRYVTCAIHNCSEKMLTAPFAGPIDHGSLTVQDDYIFFKATSANQTKYYVSYRRNEFVLMKLPKYALPKDLQIISTDESQVFVAVQEWYQMDTYNLYQSDPRGVRYALVLQDVRSSRQAEESVLIDILEVRGVKGVFLANQKIDGKVMTLITYNKGRDWDYLRPPSMDMNGKPTNCKPPDCHLHLHLRWADNPYVSGTVHTKDTAPGLIMGAGNLGSQLVEYKEEMYITSDCGHTWRQVFEEEHHILYLDHGGVIVAIKDTSIPLKILKFSVDEGLTWSTHNFTSTSVFVDGLLSEPGDETLVMTVFGHISFRSDWELVKVDFRPSFSRQCGEEDYSSWELSNLQGDRCIMGQQRSFRKRKSTSWCIKGRSFTSALTSRVCECRDSDFLCDYGFERSSSSESSTNKCSANFWFNPLSPPDDCALGQTYTSSLGYRKVVSNVCEGGVDMQQSQVQLQCPLTPPRGLQVSIQGEAVAVRPGEDVLFVVRQEQGDVLTTKYQVDLGDGFKAMYVNLTLTGEPIRHRYESPGIYRVSVRAENTAGHDEAVLFVQVNSPLQALYLEVVPVIGLNQEVNLTAVLLPLNPNLTVFYWWIGHSLQPLLSLDNSVTTRFSDTGDVRVTVQAACGNSVLQDSRVLRVLDQFQVMPLQFSKELDAYNPNTPEWREDVGLVVTRLLSKETSVPQELLVTVVKPGLPTLADLYVLLPPPRPTRKRSLSSDKRLAAIQQVLNAQKISFLLRGGVRVLVALRDTGTGAEQLGGGGGYWAVVVLFVIGLFAAGAFILYKFKSRKRPGRTVYAQMHNEKEQEMTSPVSHSEDVQGAVQGEEFIDDDLDSQTLGNHSGVVLSINSREMHSYLVS

SEQ ID NO: 302491 - DNA, 3009 bp, Artificial Sequence
  derived and/or modified sequence
atgggcaaggtgctggagagcagcctgtggagaagcagcgacttcggcaccagctacaccaagctgaccctgcagcccggcgtgaccaccgtgatcgacaacttctacatctgccccaccaacaagagaaaggtgatcctggtgagcagcagcctgagcgacagagaccagagcctgttcctgagcgccgacgagggcgccaccttccagaagcagcccatccccttcttcgtggagaccctgatcttccaccccaaggaggaggacaaggtgctggcctacaccaaggagagcaagctgtacgtgagcagcgacctgggcaagaagtggaccctgctgcaggagagagtgaccaaggaccacgtgttctggagcgtgagcggcgtggacgccgaccccgacctggtgcacgtggaggcccaggacctgggcggcgacttcagatacgtgacctgcgccatccacaactgcagcgagaagatgctgaccgcccccttcgccggccccatcgaccacggcagcctgaccgtgcaggacgactacatcttcttcaaggccaccagcgccaaccagaccaagtactacgtgagctacagaagaaacgagttcgtgctgatgaagctgcccaagtacgccctgcccaaggacctgcagatcatcagcaccgacgagagccaggtgttcgtggccgtgcaggagtggtaccagatggacacctacaacctgtaccagagcgaccccagaggcgtgagatacgccctggtgctgcaggacgtgagaagcagcagacaggccgaggagagcgtgctgatcgacatcctggaggtgagaggcgtgaagggcgtgttcctggccaaccagaagatcgacggcaaggtgatgaccctgatcacctacaacaagggcagagactgggactacctgagaccccccagcatggacatgaacggcaagcccaccaactgcaagccccccgactgccacctgcacctgcacctgagatgggccgacaacccctacgtgagcggcaccgtgcacaccaaggacaccgcccccggcctgatcatgggcgccggcaacctgggcagccagctggtggagtacaaggaggagatgtacatcaccagcgactgcggccacacctggagacaggtgttcgaggaggagcaccacatcctgtacctggaccacggcggcgtgatcgtggccatcaaggacaccagcatccccctgaagatcctgaagttcagcgtggacgagggcctgacctggagcacccacaacttcaccagcaccagcgtgttcgtggacggcctgctgagcgagcccggcgacgagaccctggtgatgaccgtgttcggccacatcagcttcagaagcgactgggagctggtgaaggtggacttcagacccagcttcagcagacagtgcggcgaggaggactacagcagctgggagctgagcaacctgcagggcgacagatgcatcatgggccagcagagaagcttcagaaagagaaagagcaccagctggtgcatcaagggcagaagcttcaccagcgccctgaccagcagagtgtgcgagtgcagagacagcgacttcctgtgcgactacggcttcgagagaagcagcagcagcgagagcagcaccaacaagtgcagcgccaacttctggttcaaccccctgagcccccccgacgactgcgccctgggccagacctacaccagcagcctgggctacagaaaggtggtgagcaacgtgtgcgagggcggcgtggacatgcagcagagccaggtgcagctgcagtgccccctgaccccccccagaggcctgcaggtgagcatccagggcgaggccgtggccgtgagacccggcgaggacgtgctgttcgtggtgagacaggagcagggcgacgtgctgaccaccaagtaccaggtggacctgggcgacggcttcaaggccatgtacgtgaacctgaccctgaccggcgagcccatcagacacagatacgagagccccggcatctacagagtgagcgtgagagccgagaacaccgccggccacgacgaggccgtgctgttcgtgcaggtgaacagccccctgcaggccctgtacctggaggtggtgcccgtgatcggcctgaaccaggaggtgaacctgaccgccgtgctgctgcccctgaaccccaacctgaccgtgttctactggtggatcggccacagcctgcagcccctgctgagcctggacaacagcgtgaccaccagattcagcgacaccggcgacgtgagagtgaccgtgcaggccgcctgcggcaacagcgtgctgcaggacagcagagtgctgagagtgctggaccagttccaggtgatgcccctgcagttcagcaaggagctggacgcctacaaccccaacacccccgagtggagagaggacgtgggcctggtggtgaccagactgctgagcaaggagaccagcgtgccccaggagctgctggtgaccgtggtgaagcccggcctgcccaccctggccgacctgtacgtgctgctgcccccccccagacccaccagaaagagaagcctgagcagcgacaagagactggccgccatccagcaggtgctgaacgcccagaagatcagcttcctgctgagaggcggcgtgagagtgctggtggccctgagagacaccggcaccggcgccgagcagctgggcggcggcggcggctactgggccgtggtggtgctgttcgtgatcggcctgttcgccgccggcgccttcatcctgtacaagttcaagagcagaaagagacccggcagaaccgtgtacgcccagatgcacaacgagaaggagcaggagatgaccagccccgtgagccacagcgaggacgtgcagggcgccgtgcagggcgaggagttcatcgacgacgacctggacagccagaccctgggcaaccacagcggcgtggtgctgagcatcaacagcagagagatgcacagctacctggtgagctag

SEQ ID NO: 302492 - DNA, 3009 bp, Artificial Sequence
  derived and/or modified sequence
atgggaaaagtgctagagagcagcctttggagaagcagcgattttgggacaagctacaccaagctgacactgcagcccggggtaaccacagttatagacaacttttacatatgcccaaccaacaaaagaaaagtgatcttggtgagcagttccttatctgatagggatcagtctttgttcctgagcgctgacgaaggcgccaccttccaaaagcagcctattccgttctttgtggaaacactgattttccaccctaaggaggaagacaaggtgctcgcatacacgaaggagtctaaattgtatgtaagctcggacctgggcaaaaagtggactctgttacaggaacgggtgactaaagatcacgtgttttggagtgtttccggggtggatgccgatcccgacctggtccacgtggaggcgcaggatctcggcggagacttccgttacgtgacctgcgcaattcacaactgctcggagaagatgctgaccgctccatttgcgggacctatcgaccacggcagcctgaccgttcaggacgattacatcttcttcaaggccacttccgccaatcagacaaaatattatgttagctaccgcaggaatgagtttgtgctcatgaagctccccaagtacgctctcccaaaggatctccaaattatcagcacagacgagtcccaggtgttcgtagccgtccaggagtggtaccagatggatacgtacaatttataccagagcgatcccagaggagttaggtatgccctggtgttacaggacgtacggtcgagtcggcaagctgaggagagcgtattgatagatattctcgaggtgagaggggtaaagggagtatttctggccaaccaaaaaattgacgggaaggtgatgaccctgatcacctacaataaaggccgagattgggattatttaaggccaccttcaatggatatgaacggaaaaccaacaaattgtaagccacctgactgccacctccaccttcacttgaggtgggctgacaatccttacgtttccggaaccgtacatacgaaggacaccgccccaggcttgattatgggagcgggcaacctcggatctcagttagtcgagtataaagaagaaatgtacatcacctccgattgcggccatacatggcgtcaggtgtttgaggaagaacaccatatcctatatctggaccatggcggcgtgattgtggcaatcaaggatacatccattcccctgaagatcctaaaattttccgtcgacgagggtctgacctggtccactcataactttacctctacttccgtctttgtggatgggctgctttctgaacctggcgacgaaacgctggtcatgaccgtatttgggcacatcagttttcgctctgattgggaactggtcaaagtggatttccgtccatccttttctaggcaatgtggcgaggaagattactcttcttgggagctctccaatctacagggcgataggtgcataatgggacagcagcgatcattccgcaagaggaagtccacctcttggtgtatcaagggccgtagcttcacctctgctctgacttcaagggtctgcgaatgcagagattctgattttctgtgtgattatggcttcgagaggagcagcagttctgagtccagcactaataaatgttccgccaacttttggtttaacccgttgtctcctccagacgattgtgctctgggacagacgtacacatctagtttgggataccgcaaggttgtttccaacgtctgcgagggcggcgttgatatgcaacagagtcaggtgcaactccaatgccctctgacccctcctcggggtttacaggttagcattcagggagaagctgtggcagttaggcctggtgaggacgttctctttgtagtgaggcaggaacagggggacgtgctgacaaccaagtatcaggtggacctgggtgatgggtttaaggcaatgtacgtgaacttgacactgacgggggagcccatccgtcataggtatgagtcccctggcatctacagggtttccgtgcgagctgagaatactgccggtcacgatgaggcagtcctctttgttcaggttaatagccccctgcaggcgttatacctagaagtcgtgccagtgattgggctcaatcaagaggtgaatctcaccgctgtgctgctccctctaaatcctaatctgaccgtgttttactggtggatcggacacagcctgcagccgctcctctctctggataatagcgtgacgactagattctctgacacaggagacgtgagggtgacagtccaggccgcttgcggcaatagcgtcctgcaggacagtcgcgtactcagagtcctggatcagttccaggtcatgccactgcaattctcaaaagagctcgacgcttacaaccctaacaccccagaatggcgggaggacgtcggattggtcgtgacacggttgcttagtaaagaaacctccgtccctcaggaactactggttacggtggtcaagcctgggctgcctactctcgctgatttgtatgtgcttcttcccccaccacgtcccactagaaagagatctctcagcagcgacaagaggctggccgcaatccagcaagtgctgaacgctcagaaaattagtttcctgttacgtggcggggttagagtcctcgtggccctgcgcgatacgggcacaggggccgagcagctgggggggggcggcggctactgggctgtggtggtgctgtttgtgatcggtctgttcgccgctggtgcgtttattctctataaattcaagagtagaaagcggcccggacgaaccgtgtacgcacagatgcacaatgaaaaagagcaggagatgacgagtcccgtgtctcatagcgaggacgtccaaggggctgtgcagggagaggaatttatcgacgacgacctagattcacaaacattagggaaccatagtggtgtcgtgctgtccatcaattctcgagagatgcactcttatctcgtgagctag

SEQ ID NO: 302493 - DNA, 3009 bp, Artificial Sequence
  derived and/or modified sequence
atgggcaaggtgctggagagcagcctgtggaggagcagtgactttggcaccagctacaccaagctgaccctgcagcccggggtgaccaccgtcatcgacaacttctacatctgccccaccaacaagaggaaggtgatcctggtgagcagcagcctgagtgaccgggaccagagcctcttcctgtctgcagatgagggcgccaccttccagaagcagcccatccccttctttgtggagaccctcatcttccaccccaaggaggaggacaaggtgctggcctacaccaaggagagcaagctgtatgtgtccagtgacctgggcaagaagtggaccctgctgcaggagcgggtgaccaaggaccacgtgttctggagcgtgtctggagtggatgctgaccctgacctggtgcacgtggaggcccaggacctgggcggggacttccgctacgtgacctgtgccatccacaactgcagcgagaagatgctgacagccccctttgctggccccatcgaccacggcagcctgactgtgcaggatgactacatcttcttcaaggccaccagcgccaaccagaccaagtactacgtgtcctacagaagaaatgaatttgtgctgatgaagctgcccaagtatgccctgcccaaggacctgcagatcatcagcacagatgagagccaggtgtttgtggccgtgcaggagtggtaccagatggacacctacaacctgtaccagagcgacccccggggcgtgcgctatgccctggtgctgcaggatgtgcgcagcagccggcaggccgaggagagcgtgctgattgacatcctggaggtgcggggcgtgaagggcgtcttcctggccaaccagaagattgatggcaaggtgatgaccctcatcacctacaacaagggccgggactgggactacctgcggccccccagcatggacatgaatggcaagcccaccaactgcaagcccccagactgccacctgcacctgcacctgcgctgggccgacaacccctacgtgtctggcaccgtgcacaccaaggacacagcccctggcctcatcatgggcgccggcaacctgggcagccagctggtggagtacaaggaggagatgtacatcaccagtgactgtggccacacctggaggcaggtgtttgaggaggagcaccacatcctgtacctggaccatggaggagtgattgtggccatcaaggacaccagcatccccctgaagatcctgaagttctctgtggatgagggcctgacctggagcacccacaacttcaccagcacctctgtgtttgtggatggcctgctgtctgagcctggagatgagaccctggtgatgacagtgtttggccacatctccttcagaagtgactgggagctggtgaaggtggacttccggcccagcttcagccggcagtgtggggaggaggactacagctcctgggagctgagcaacctgcagggcgaccgctgcatcatgggccagcagaggagcttcaggaagaggaagagcacctcctggtgcatcaagggccgctccttcaccagcgccctgaccagccgggtgtgtgagtgccgggacagcgacttcctgtgtgactatggctttgagaggagcagcagcagcgagagcagcaccaacaagtgcagcgccaacttctggttcaaccccctgagccccccagatgactgtgccctgggccagacctacaccagcagcctgggctacaggaaggtggtgtccaatgtgtgtgagggcggcgtggacatgcagcagagccaggtgcagctgcagtgccccctgaccccaccccggggcctgcaggtgtccatccagggcgaggccgtggccgtgcggcctggagaagatgtgctgtttgtggtgcggcaggagcagggagatgtgctgaccaccaagtaccaggtggacctgggagatggcttcaaggccatgtatgtgaacctgaccctgaccggggagcccatccgccacagatatgagagccctggcatctacagagtgtctgtgcgggcagaaaatacagctggccatgatgaagctgtgctgtttgtgcaggtgaacagccccctgcaggccctgtacctggaggtggtgcctgtgattggcctgaaccaggaggtgaacctgacagctgtgctgctgcccctgaaccccaacctgaccgtcttctactggtggattggccacagcctgcagcccctgctgagcctggacaacagcgtgaccacccgcttcagtgacacaggagatgtgcgggtgacagtgcaggccgcctgtggcaacagcgtgctgcaggacagccgggtgctgcgggtgctggaccagttccaggtgatgcccctgcagttcagcaaggagctggatgcctacaaccccaacaccccagagtggagagaagatgtgggcctggtggtgacccggctgctgagcaaggagacctctgtgccccaggagctgctggtgacagtggtgaagccaggcctgcccaccctggccgacctgtatgtgctgctgcccccaccccggcccaccaggaagaggagcctgagcagtgacaagaggctggccgccatccagcaggtgctgaatgcccagaagatctccttcctgctgcggggcggcgtgcgggtgctggtggccctgcgggacacaggaactggagctgagcagctgggcggcggcggcggctactgggccgtggtggtgctgtttgtgattggcctgtttgctgctggggccttcatcctgtacaagttcaagagcaggaagaggcctggccgcacagtgtatgcccagatgcacaatgagaaggagcaggagatgaccagccctgtgagccacagtgaagatgtgcagggcgctgtgcagggcgaggagttcattgatgatgacctggacagccagaccctgggcaaccacagcggcgtggtgctgagcatcaacagccgggagatgcacagctacctggtgtcctag

SEQ ID NO: 302494 - DNA, 3009 bp, Artificial Sequence
  derived and/or modified sequence
atgggcaaggtgctggagagcagcctgtggcggagcagcgacttcggaacaagctatacaaaacttacactccagcccggcgtgaccacggtcattgataatttctacatctgcccaacgaacaaaagaaaagtaattctggtcagctcatccctgagcgatcgcgatcagtcactgttcctgtccgcagacgagggggctacctttcaaaagcaaccaattccattcttcgtcgagacattaattttccatcccaaggaagaggacaaggtgctcgcatacacgaaagaaagtaagctgtacgtttcgagcgatttgggaaagaaatggacattgctccaggagcgcgtgacgaaagatcatgtgttttggtccgtctccggcgtggatgcagaccctgatttggtccacgtcgaagcccaggatcttgggggtgatttccgatatgtgacttgcgcaatacataattgctcagagaaaatgttaacagccccattcgccggtcccattgaccacgggtccctcacagtgcaggatgactatatattcttcaaggccacttccgcaaatcaaaccaaatattacgtttcataccggcgtaatgaattcgtgctgatgaaactccctaagtacgccttacccaaggacctgcagatcatcagtaccgacgagtctcaggtgttcgtggcagtacaggaatggtatcagatggacacctataatttgtaccaatctgatccaaggggcgtgcgatatgcacttgtcctgcaggatgtgagaagctcccgccaggcggaagagagtgttctgatagatatactggaggtccgcggcgtgaagggtgtgtttctcgctaaccagaaaatcgatggtaaagtaatgactttgataacttataataaagggcgagactgggactatctacgtcccccttcgatggatatgaacgggaaaccgactaattgtaagccacccgactgccatttacacctgcatttacgctgggccgataatccctacgtgtccgggacggtgcacaccaaggataccgcacccggcctgatcatgggtgctgggaacttaggcagccaactggttgagtacaaagaagagatgtatattacaagtgattgtggacacacctggagacaagttttcgaagaggaacatcacatcctctacttggatcacggtggcgtcatcgttgccattaaggacacatcaataccactcaaaatcctgaagtttagcgtcgacgaaggcttgacctggtctacgcataacttcacttcaacgtctgtgtttgtagatggtctgttatccgaacctggcgacgaaactctggttatgacagtgttcggccacatcagctttagaagtgattgggaattagtgaaagtggactttagaccaagcttttctcggcaatgcggtgaggaagactactcttcatgggagctatctaacttgcaaggagaccgctgcataatggggcaacaacggtccttccgcaaacgcaagtccacgagctggtgtattaaaggtaggtccttcacatccgctctaaccagtcgggtttgtgaatgcagggatagcgatttcttgtgcgactacggcttcgagcgctctagctcgagcgagtcttccacaaacaaatgcagtgcaaacttctggttcaatcctctgtctccgcctgacgattgcgcccttggccagacctatacgagcagcctggggtatcgaaaagtggtatccaatgtgtgtgagggcggcgtcgacatgcagcaatctcaggtgcagctccagtgccccctgaccccacctcgtggactgcaagtgtccattcagggcgaggccgtggctgtgcgtcctggggaggacgtactgtttgtggtcaggcaagagcaaggagacgtgcttaccaccaagtaccaagttgatctgggtgacgggttcaaagccatgtacgttaacttgacattgaccggcgagccaatacggcatcgatacgagtcacccggcatttatagggtgtcagtacgagcagaaaatactgctggccatgatgaggccgtcctctttgtgcaggtcaactcacccctacaggctctctaccttgaagtggtgccagtaattggcttgaaccaggaggtgaacttgacagccgtgcttctgccgctaaatccaaatctaaccgtgttttactggtggataggccactcactgcagccactccttagcttggacaacagcgtcacaacccgcttcagcgataccggtgatgtgagggtgactgtccaggcggcgtgcgggaactcagtcttgcaggattcacgggtgctacgggtactggaccagtttcaggtgatgcctctgcagttctcaaaggagctggatgcttacaatcccaataccccagagtggcgcgaggatgtcggcctcgtcgtcacaaggttgctttctaaggagacctcagtcccgcaggagctcttggtcacagtggtgaagcccgggcttccaactctggcagacctctatgtcctcttgccacccccccgcccaacgcgaaagcggagcctgtcgagcgacaaaagattggccgcgattcagcaggtcttgaacgcccaaaagattagtttcttactccgcggcggcgtgagagtactggtcgccctgcgagatactggcaccggggcagagcagctgggggggggtggcggctactgggcagtcgtggtgttattcgtcatcgggctcttcgccgcaggtgccttcattctctacaaattcaagtcccggaagcgcccaggccgcacagtgtatgctcagatgcacaatgagaaggagcaggagatgacgagccccgtgtcccactccgaagacgtccagggcgccgttcagggagaagagtttattgatgatgacctggactctcagaccctggggaaccactccggggtggtgctcagtatcaacagcagagaaatgcactcatacctcgtatcgtag

SEQ ID NO: 302495 - DNA, 3009 bp, Artificial Sequence
  derived and/or modified sequence
atgggaaaggtgctggaaagttctctttggaggtctagtgacttcgggactagctatacaaagctgactctgcagcctggtgttaccaccgtgatcgataacttctacatctgccctacaaacaagaggaaggtgattctggtatcttcttctctcagcgatcgtgatcagagcctttttctgagtgcagacgagggcgctacgttccaaaagcaaccgatcccattttttgtagagacattaattttccacccgaaggaagaggacaaagtgttagcgtatacaaaggagagcaagttatacgtctcaagtgatttgggtaaaaaatggaccctgttgcaagagagggtcaccaaagatcatgtgttctggtctgtgtcaggcgtggacgcagacccagaccttgtgcacgtagaggctcaggatcttgggggagattttcgctacgttacatgcgcaatccacaactgctccgagaagatgctgaccgcccctttcgctggccctattgatcacggttcactgacggttcaggatgattacatcttttttaaggcaacctctgcaaatcagacaaaatattatgtatcttatcgtcgaaacgagttcgtcctaatgaagctcccgaaatacgcactgccaaaggatctgcagatcatatcaaccgacgaatcccaggtcttcgtggccgtgcaagaatggtatcagatggatacctacaacttgtatcagtccgatcctcggggtgttagatatgcccttgtcctgcaagatgtcagatccagcagacaagctgaggagtccgtgctcattgatattctggaagtcagaggggtgaagggagtttttctggccaaccaaaagattgatggcaaagtcatgacccttatcacctacaataaaggccgtgattgggattatctgagacccccatcaatggacatgaatggcaagcccacaaattgtaagccccctgactgtcatcttcaccttcaccttcgatgggccgacaacccttatgtttccggcacagtacatacaaaggacaccgcgcctggcttgattatgggagctggcaacctcggttctcaactggttgagtataaagaggagatgtacatcacaagtgactgcgggcatacttggcgccaggtgttcgaagaggaacaccatatcctgtatctggaccatgggggagtgattgttgccattaaggacacatccatccccctgaaaattcttaaattctcagtcgacgagggactcacatggtcaacacacaatttcaccagcacgagcgtgttcgtggacggtttgttatcggaaccaggcgatgagacgttggtgatgacagtgttcgggcatatatcatttaggtctgactgggaactcgttaaagttgatttccggccatccttttcacggcagtgtggtgaagaagactacagctcctgggagctgagcaatctccaaggcgacagatgcataatgggccagcagcgaagtttccggaagcggaagtctaccagctggtgcataaaaggccgatcttttacatccgctctcacgagcagagtctgcgagtgccgagacagcgattttctgtgtgactatggctttgaacggtcaagttcatcagagagtagcactaataagtgtagcgctaacttctggttcaaccccttgagcccaccagatgactgcgctctggggcagacttatacttcctcactgggctaccggaaggttgtcagtaacgtatgcgaaggtggggttgatatgcaacagagccaggtgcagctgcagtgcccgttgactcctcccagggggcttcaagtaagcatccagggtgaggccgtcgcggtcagaccaggggaggacgtgctattcgtcgtgagacaggaacagggggatgtcctgacgaccaaataccaggtagacctgggtgatggattcaaagccatgtatgttaatctgaccttgaccggcgagccaattcgccaccgctacgagtccccaggcatctatagagtatctgtgagagctgagaataccgctggccacgacgaagctgttctgtttgtgcaggtcaatagcccactgcaagccctatacctcgaagtggtgccagtgattggccttaaccaagaggtgaatcttactgccgtgctgctccccctcaatccaaatctcactgtgttttactggtggattgggcactcccttcagcctctgctatcgcttgataatagtgtcaccacacgatttagtgacacaggagacgtgcgtgtgaccgtccaagccgcttgtggaaattcagtgttacaggatagtcgcgtactgcgggtactagatcagttccaggtcatgcctctccaattcagcaaagagttggacgcctacaacccaaatactcccgagtggagagaggacgtcggcctagtggtgacacgcttactgagcaaggagaccagcgtcccacaggaacttctggttacggtggtaaaacccggactgccgactctggccgacttgtacgttcttctccctccccctcgtccaaccaggaagagaagtctctcatccgataaacgcctggccgctattcagcaggtcctaaacgcccaaaagatttctttcctgttgaggggcggtgtgagagtgctagtcgccctgcgggatacaggcaccggtgcggaacagctggggggagggggaggttattgggccgtagtcgtcctgtttgttattggacttttcgctgcaggcgcattcattctgtataaattcaaatcccgcaagcggcctggcagaaccgtgtacgcccagatgcacaacgagaaagaacaggaaatgacaagccctgtctctcattctgaagatgtgcaaggtgcagtacagggcgaagagttcattgatgacgatctagattcgcagacattgggaaaccatagtggagttgtgctctcgattaattcgcgagaaatgcattcgtatctggtttcctag

SEQ ID NO: 302496 - DNA, 2188 bp, Artificial Sequence
  derived and/or modified sequence
cgcgccggttcggtccccggggctctgcgggcgccgggcagagacctgcggccagggcgtgtcccgtgtgcccgagagcgccggcggcggggccggagggcgggccctgggccgagtgacaggccgcagccccccgagcaccgtcgaagccggcgcgcccgcccggtgcagccgctgtgcgagagcgaccccgcggtccaagcctcgcgtggccctgccgggccccttctttccccgagtagggcgcagcttcccagcctccgccccggcctcgcctggcgcttccttccgggtccttcggcctttccctggcggtgcggcaggccctcgcctcatcccaccagatatggatcagaaactttcgaagttggtagaagagctcacaacttcaggagaaccccgactaaatcctgagaaaatgaaggaactgaagaaaatttgcaagtcttcagaggagcagctgagccgcgcctaccgcctgctgatagcacagctgacccaggagcacgccgagatccgtctctcagccttccagattgtggaggaactcttcgtcaggtctcaccagttccggatgctggttgtttccaacttccaggagttcctggagctcacgctgggcacagaccccgcacagcctctgccgccccccagggaggcggcacagaggctgaggcaggcgaccacccgggccgtggaagggtggaatgagaagtttggggaggcctacaagaagcttgccttgggctaccacttcttaagacacaacaaaaaggtggattttcaagacacgaatgctcggagtctggcagaaaggaagagagaagaggagaagcagaagcacttggataaaatttatcaagaaagagccagccaggcggagagggagatgcaagaaatgtctggagaaattgaatcctgcttgacggaggtagagagctgctttaggctgctggtgccttttgactttgacccgaacccggagacggaatcccttggcatggcttctggcatgtccgatgcccttcgctcctcctgcgcgggccaggtgggcccctgccggtctggcacccctgacccccgggacggggagcagccctgctgcagtagagacctgcctgcctctgcaggccaccccagagcgggcggcggggcacagccatcccagacagccacaggtgacccctcagatgaggacgaggacagcgacctcgaggagtttgtgcggagccacgggctgggctcgcacaagtacacgctggatgtggagctctgctcagagggcctgaaggtgcaggagaacgaggacaaccttgctctcatccacgccgcccgcgacacactcaagctcatccggaacaagttcctgccggctgtgtgctcgtggatccagcgcttcacccgcgtcgggacccacggtggatgtttaaagcgtgccattgacctgaaggctgaattggagctcgtactgagaaaatacaaggagctggacatcgagcctgagggaggggaaaggcgcaggacagaagccctgggggatgcggaggaagatgaggacgatgaggactttgtggaggtccctgagaaggaggggtatgagccacacatccccgaccacttgcggcctgagtatgggctggaggcagcaccagagaaagacacagttgtgcggtgcttgcggacgaggacgaggatggacgaggaggtgtcggaccccacctctgcggctgctcagctgcggcagctccgggaccacttgcctccaccctcatctgccagcccctccagagcgttgccagagccacaggaggcccagaagctggcagcagagcgggcccgggcgcctgtggtgccctacggcgtggacctgcactactggggccaggagctccccacagccgggaagattgtcaagtctgactcccagcaccgcttctggaagcccagcgaggtggaggaggaagtggtcaatgccgacatctccgagatgctccggagccgccacatcacttttgccgggaagtttgagcctgtgcagcactggtgccgtgccccgaggccagacggccggctctgtgagcgccaagaccggctgaagactttccacagctgcccaagaccttccggctccagaggagggacggagccatccccacgtccctgtggctctcaggacgccctcctctga

SEQ ID NO: 302497 - DNA, 4560 bp, Artificial Sequence
  derived and/or modified sequence
gccagggcgtgtcccgtgtgcccgagagcgccggcggcggggccggagggcgggccctgggccgagtgacaggccgcagccccccgagcaccgtcgaagccggcgcgcccgcccggtgcagccgctgtgcgagagcgaccccgcggtccaagcctcgcgtggccctgccgggccccttctttccccgagtagggcgcagcttcccagcctccgccccggcctcgcctggcgcttccttccgggtccttcggcctttccctggcggtgcggcaggccctcgcctcatcccaccaggcacgccgcggtgctcggccctgggtatccgggcaggctgcctccgttagggccgcccctgctctccggacgcgacttttcattggtctcagaatttcttggctcctcttggcctctgcagccttgctggaggctgccctgcggaatctgaatatggatcagaaactttcgaagttggtagaagagctcacaacttcaggagaaccccgactaaatcctgagaaaatgaaggaactgaagaaaatttgcaagtcttcagaggagcagctgagccgcgcctaccgcctgctgatagcacagctgacccaggagcacgccgagatccgtctctcagccttccagattgtggaggaactcttcgtcaggtctcaccagttccggatgctggttgtttccaacttccaggagttcctggagctcacgctgggcacagaccccgcacagcctctgccgccccccagggaggcggcacagaggctgaggcaggcgaccacccgggccgtggaagggtggaatgagaagtttggggaggcctacaagaagcttgccttgggctaccacttcttaagacacaacaaaaaggtggattttcaagacacgaatgctcggagtctggcagaaaggaagagagaagaggagaagcagaagcacttggataaaatttatcaagaaagagccagccaggcggagagggagatgcaagaaatgtctggagaaattgaatcctgcttgacggaggtagagagctgctttaggctgctggtgccttttgactttgacccgaacccggagacggaatcccttggcatggcttctggcatgtccgatgcccttcgctcctcctgcgcgggccaggtgggcccctgccggtctggcacccctgacccccgggacggggagcagccctgctgcagtagagacctgcctgcctctgcaggccaccccagagcgggcggcggggcacagccatcccagacagccacaggtgacccctcagatgaggacgaggacagcgacctcgaggagtttgtgcggagccacgggctgggctcgcacaagtacacgctggatgtggagctctgctcagagggcctgaaggtgcaggagaacgaggacaaccttgctctcatccacgccgcccgcgacacactcaagctcatccggaacaagttcctgccggctgtgtgctcgtggatccagcgcttcacccgcgtcgggacccacggtggatgtttaaagcgtgccattgacctgaaggctgaattggagctcgtactgagaaaatacaaggagctggacatcgagcctgagggaggggaaaggcgcaggacagaagccctgggggatgcggaggaagatgaggacgatgaggactttgtggaggtccctgagaaggaggggtatgagccacacatccccgaccacttgcggcctgagtatgggctggaggcagcaccagagaaagacacagttgtgcggtgcttgcggacgaggacgaggatggacgaggaggtgtcggaccccacctctgcggctgctcagctgcggcagctccgggaccacttgcctccaccctcatctgccagcccctccagagcgttgccagagccacaggaggcccagaagctggcagcagagcgggcccgggcgcctgtggtgccctacggcgtggacctgcactactggggccaggagctccccacagccgggaagattgtcaagtctgactcccagcaccgcttctggaagcccagcgaggtggaggaggaagtggtcaatgccgacatctccgagatgctccggagccgccacatcacttttgccgggaagtttgagcctgtgcagcactggtgccgtgccccgaggccagacggccggctctgtgagcgccaagaccggctgaagtgccctttccatgggaagattgttccacgggacgacgaaggacggccgctcgacccggaagacagggctcgtgagcagcggcggcagctgcagaagcaggagcgcccggaatggcaggaccctgagttgatgagagacgtggaagcagccacagggcaggatctcggctcatccaggtacagcgggaaaggcagggggaagaagaggaggtaccccagcctcaccaacctgaaggctcaggctgataccgcccgcgctcgcattgggagaaaagtcttcgccaaggcagctgtgcggagggtagtggcagccatgaaccggatggaccagaagaagcacgagaagttttcaaaccagtttaactacgcactgaactagagagcggggcccagtgcactggccatcagcactttctccctctgccagtgtctcaggacagcagagtgggcgtgggtctgggcagtaaccatgctttgtctattactgtgtttgatgtaaagaaatggtgtgttgcaatgccctgaaggtacggccgctctgctgctacagggttcggcatcgtctggtgatgggtctggcctcgcagaagaggccctcgggcctggagatgtgaacacaggcagcgaccctgttccagagggcttctgcgagtcctcgtgagaccagtgcttgtcgtggtgtggggttcagcacggacggaatgtgtgtgcagctcagccttcagagcgtgcattccccagccaggaggcgaccactcagaggaactctgggaaacccacttttgtgcaaatgctgtttttaacacaaacacaaaggctagtgaaccgttcagtcatctgctttctgtttctggatgtgccttttcatacatgtgtcctcttgtccctggcttcttacacttggcgttgtttttaaggtttatccatgcagttcccctccaatgtataaaacaaaggaggtgaaaacctgtccatgcggaagcttgtgcacccatgttcacagcagcattggagaaggataccgaacatcttctcgtgggcttactggccatttgtgtatctcctttggagaggagtctattcaaacctcttgcctatttttaattgaatgatttatcttgagttgtaacagttgttttttttgtttttccttttagagatgggcttttgctcttacccaggctgagtgcagtggcagaatcatagctcagtgcagcctcaaactcctgggctcaagccatccttccacgtcagcctcccaggtagctgggactacaggcacacaccacaacacctggctaattttttaaattttttgtagagatgaggtctcactgtgttgcccacggtgatctcgaactcctagcctcaagcgatcctcctgcttcggtctcccaaagtgttgggattacaggcatgagccaccactcctggccaggagtttatatgtatactgtggatactagatcctcatgtgatttgcaaaaactttatttatttatttatttatttttgaaatggaatcttgctctgtcgccaggctggagtgcaatggcgtgatctcggctcactgcaactaccacctcctgggttcaagcgattcgcctgcgtcagcgtcctgagtagctgggactacaggcgcgcaccaccacgcccagctaatttttgtatttttagtagagacgggatttcactgtgttggctgggatggtcttgatctcttgacctcgtgatccacccacctcggcctcccatagtgctgggattacaggtgtgagccaccgcactcagctgatttgcaaaaactttcttccatactgttgtttcactttctggatagtgtcctctgaagcacaaaagttaattttgatgaagtacagcaatttatctgtttttttcttttgttgcttatgcttttgctgtcacatttcagaagccatcacctaatccaagatcacagagatttacacctagtttctaataagcattttataatttcagctcttatgtgtagatctttgatccattgtgaattaagttttgtgtgtggtgtaagagcccacattcttttgcatgtggatatccagttgtcccagcaccatttgttgaaaacattatttttccccattgaattatcttcgcaccattattgataatcagttgaccaaaaatgtacaggcttatttctgggcacttgactctattccattgacctgtttaaccttatgccagtgccacagtgccttgatcagtgctgctttgttgtgagaagttttactttgttctgcttcaaggctgttttgactcttctgcatctcttgcatttccaaatgaattttaggatccactcatcagtttcttc

SEQ ID NO: 302498 - DNA, 2597 bp, Artificial Sequence
  derived and/or modified sequence
tcttggctcctcttggcctctgcagccttgctggaggctgccctgcggaatctgagtgaataagggaaacagcaacagtcacgttggggaaaagctgattcggacagcgccactggttcctttaacgcacgaccctcaatgcagcgtcccacacacgggattgtagaggtcccgagtttaagatatggatcagaaactttcgaagttggtagaagagctcacaacttcaggagaaccccgactaaatcctgagaaaatgaaggaactgaagaaaatttgcaagtcttcagaggagcagctgagccgcgcctaccgcctgctgatagcacagctgacccaggagcacgccgagatccgtctctcagccttccagattgtggaggaactcttcgtcaggtctcaccagttccggatgctggttgtttccaacttccaggagttcctggagctcacgctgggcacagaccccgcacagcctctgccgccccccagggaggcggcacagaggctgaggcaggcgaccacccgggccgtggaagggtggaatgagaagtttggggaggcctacaagaagcttgccttgggctaccacttcttaagacacaacaaaaaggtggattttcaagacacgaatgctcggagtctggcagaaaggaagagagaagaggagaagcagaagcacttggataaaatttatcaagaaagagccagccaggcggagagggagatgcaagaaatgtctggagaaattgaatcctgcttgacggaggtagagagctgctttaggctgctggtgccttttgactttgacccgaacccggagacggaatcccttggcatggcttctggcatgtccgatgcccttcgctcctcctgcgcgggccaggtgggcccctgccggtctggcacccctgacccccgggacggggagcagccctgctgcagtagagacctgcctgcctctgcaggccaccccagagcgggcggcggggcacagccatcccagacagccacaggtgacccctcagatgaggacgaggacagcgacctcgaggagtttgtgcggagccacgggctgggctcgcacaagtacacgctggatgtggagctctgctcagagggcctgaaggtgcaggagaacgaggacaaccttgctctcatccacgccgcccgcgacacactcaagctcatccggaacaagttcctgccggctgtgtgctcgtggatccagcgcttcacccgcgtcgggacccacggtggatgtttaaagcgtgccattgacctgaaggctgaattggagctcgtactgagaaaatacaaggagctggacatcgagcctgagggaggggaaaggcgcaggacagaagccctgggggatgcggaggaagatgaggacgatgaggactttgtggaggtccctgagaaggaggggtatgagccacacatccccgaccacttgcggcctgagtatgggctggaggcagcaccagagaaagacacagttgtgcggtgcttgcggacgaggacgaggatggacgaggaggtgtcggaccccacctctgcggctgctcagctgcggcagctccgggaccacttgcctccaccctcatctgccagcccctccagagcgttgccagagccacaggaggcccagaagctggcagcagagcgggcccgggcgcctgtggtgccctacggcgtggacctgcactactggggccaggagctccccacagccgggaagattgtcaagtctgactcccagcaccgcttctggaagcccagcgaggtggaggaggaagtggtcaatgccgacatctccgagatgctccggagccgccacatcacttttgccgggaagtttgagcctgtgcagcactggtgccgtgccccgaggccagacggccggctctgtgagcgccaagaccggctgaagtgccctttccatgggaagattgttccacgggacgacgaaggacggccgctcgacccggaagacagggctcgtgagcagcggcggcagctgcagaagcaggagcgcccggaatggcaggaccctgagttgatgagagacgtggaagcagccacagggcaggatctcggctcatccaggtacagcgggaaaggcagggggaagaagaggaggtaccccagcctcaccaacctgaaggctcaggctgataccgcccgcgctcgcattgggagaaaagtcttcgccaaggcagctgtgcggagggtagtggcagccatgaaccggatggaccagaagaagcacgagaagttttcaaaccagtttaactacgcactgaactagagagcggggcccagtgcactggccatcagcactttctccctctgccagtgtctcaggacagcagagtgggcgtgggtctgggcagtaaccatgctttgtctattactgtgtttgatgtaaagaaatggtgtgttgcaatgccctgaaggtacggccgctctgctgctacagggttcggcatcgtctggtgatgggtctggcctcgcagaagaggccctcgggcctggagatgtgaacacaggcagcgaccctgttccagagggcttctgcgagtcctcgtgag

SEQ ID NO: 302499 - DNA, 2927 bp, Artificial Sequence
  derived and/or modified sequence
cgcgccggttcggtccccggggctctgcgggcgccgggcagagacctgcggccagggcgtgtcccgtgtgcccgagagcgccggcggcggggccggagggcgggccctgggccgagtgacaggccgcagccccccgagcaccgtcgaagccggcgcgcccgcccggtgcagccgctgtgcgagagcgaccccgcggtccaagcctcgcgtggccctgccgggccccttctttccccgagtagggcgcagcttcccagcctccgccccggcctcgcctggcgcttccttccgggtccttcggcctttccctggcggtgcggcaggccctcgcctcatcccaccagatatggatcagaaactttcgaagttggtagaagagctcacaacttcaggagaaccccgactaaatcctgagaaaatgaaggaactgaagaaaatttgcaagtcttcagaggagcagctgagccgcgcctaccgcctgctgatagcacagctgacccaggagcacgccgagatccgtctctcagccttccagattgtggaggaactcttcgtcaggtctcaccagttccggatgctggttgtttccaacttccaggagttcctggagctcacgctgggcacagaccccgcacagcctctgccgccccccagggaggcggcacagaggctgaggcaggcgaccacccgggccgtggaagggtggaatgagaagtttggggaggcctacaagaagcttgccttgggctaccacttcttaagacacaacaaaaaggtggattttcaagacacgaatgctcggagtctggcagaaaggaagagagaagaggagaagcagaagcacttggataaaatttatcaagaaagagccagccaggcggagagggagatgcaagaaatgtctggagaaattgaatcctgcttgacggaggtagagagctgctttaggctgctggtgccttttgactttgacccgaacccggagacggaatcccttggcatggcttctggcatgtccgatgcccttcgctcctcctgcgcgggccaggtgggcccctgccggtctggcacccctgacccccgggacggggagcagccctgctgcagtagagacctgcctgcctctgcaggccaccccagagcgggcggcggggcacagccatcccagacagccacaggtgacccctcagatgaggacgaggacagcgacctcgaggagtttgtgcggagccacgggctgggctcgcacaagtacacgctggatgtggagctctgctcagagggcctgaaggtgcaggagaacgaggacaaccttgctctcatccacgccgcccgcgacacactcaagctcatccggaacaagttcctgccggctgtgtgctcgtggatccagcgcttcacccgcgtcgggacccacggtggatgtttaaagcgtgccattgacctgaaggctgaattggagctcgtactgagaaaatacaaggagctggacatcgagcctgagggaggggaaaggcgcaggacagaagccctgggggatgcggaggaagatgaggacgatgaggactttgtggaggtccctgagaaggaggggtatgagccacacatccccgaccacttgcggcctgagtatgggctggaggcagcaccagagaaagacacagttgtgcggtgcttgcggacgaggacgaggatggacgaggaggtgtcggaccccacctctgcggctgctcagctgcggcagctccgggaccacttgcctccaccctcatctgccagcccctccagagcgttgccagagccacaggaggcccagaagctggcagcagagcgggcccgggcgcctgtggtgccctacggcgtggacctgcactactggggccaggagctccccacagccgggaagattgtcaagtctgactcccagcaccgcttctggaagcccagcgaggtggaggaggaagtggtcaatgccgacatctccgagatgctccggagccgccacatcacttttgccgggaagtttgagcctgtgcagcactggtgccgtgccccgaggccagacggccggctctgtgagcgccaagaccggctgaagtgccctttccatgggaagattgttccacgggacgacgaaggacggccgctcgacccggaagacagggctcgtgagcagcggcggcagctgcagaagcaggagcgcccggaatggcaggaccctgagttgatgagagacgtggaagcagccacagggcaggatctcggctcatccaggtacagcgggaaaggcagggggaagaagaggaggtaccccagcctcaccaacctgaaggctcaggctgataccgcccgcgctcgcattgggagaaaagtcttcgccaaggcagctgtgcggagggtagtggcagccatgaaccggatggaccagaagaagcacgagaagttttcaaaccagtttaactacgcactgaactagagagcggggcccagtgcactggccatcagcactttctccctctgccagtgtctcaggacagcagagtgggcgtgggtctgggcagtaaccatgctttgtctattactgtgtttgatgtaaagaaatggtgtgttgcaatgccctgaaggtacggccgctctgctgctacagggttcggcatcgtctggtgatgggtctggcctcgcagaagaggccctcgggcctggagatgtgaacacaggcagcgaccctgttccagagggcttctgcgagtcctcgtgagaccagtgcttgtcgtggtgtggggttcagcacggacggaatgtgtgtgcagctcagccttcagagcgtgcattccccagccaggaggcgaccactcagaggaactctgggaaacccacttttgtgcaaatgctgtttttaacacaaacacaaaggctagtgaaccgtt

SEQ ID NO: 302500 - protein, 164 aa, Artificial Sequence
  derived and/or modified sequence
MDEEVSDPTSAAAQLRQLRDHLPPPSSASPSRALPEPQEAQKLAAERARAPVVPYGVDLHYWGQELPTAGKIVKSDSQHRFWKPSEVEEEVVNADISEMLRSRHITFAGKFEPVQHWCRAPRPDGRLCERQDRLKTFHSCPRPSGSRGGTEPSPRPCGSQDALL

SEQ ID NO: 302501 - DNA, 495 bp, Artificial Sequence
  derived and/or modified sequence
atggacgaggaggtgagcgaccccaccagcgccgccgcccagctgagacagctgagagaccacctgcccccccccagcagcgccagccccagcagagccctgcccgagccccaggaggcccagaagctggccgccgagagagccagagcccccgtggtgccctacggcgtggacctgcactactggggccaggagctgcccaccgccggcaagatcgtgaagagcgacagccagcacagattctggaagcccagcgaggtggaggaggaggtggtgaacgccgacatcagcgagatgctgagaagcagacacatcaccttcgccggcaagttcgagcccgtgcagcactggtgcagagcccccagacccgacggcagactgtgcgagagacaggacagactgaagaccttccacagctgccccagacccagcggcagcagaggcggcaccgagcccagccccagaccctgcggcagccaggacgccctgctgtag

SEQ ID NO: 302502 - DNA, 231 bp, Artificial Sequence
  derived and/or modified sequence
atgtcacatttaccggcagttagcccggtgttcttccagctacccgcccctcatccacctaccgttctcagacctcagctgggcctgcatcctaatccggagtgcgacagagagaagatgagcgttcgggatcatgacccagaagttctcactagaaactccgcctgtaaaccccgcggacagttatcagggcacttgctcaaaccacgggctcccttggaagccgcctag

SEQ ID NO: 302503 - DNA, 495 bp, Artificial Sequence
  derived and/or modified sequence
atggacgaagaagttagtgatccaacgagcgccgctgcacagttacgtcaactgagggaccatctgccccccccctcgtcagcttccccaagccgggctctgcccgagccacaggaagcccaaaaactggctgccgaacgggcacgcgcccctgtcgtgccttacggagtcgatttgcattattggggtcaggaactcccaaccgcgggcaagattgtcaagtccgacagtcagcatcgcttttggaagcccagtgaggtggaggaggaagtggtaaatgctgatatctcggaaatgctccgcagccgccatatcaccttcgctgggaaatttgagccagttcagcactggtgcagagctcctcggcccgatggtagactgtgtgaaagacaggatcgcctcaaaacatttcactcatgcccgcggccctctggaagcaggggtgggaccgagcccagccctcgcccatgtggttcccaggacgcattattgtag

SEQ ID NO: 302504 - DNA, 231 bp, Artificial Sequence
  derived and/or modified sequence
atgagccacctgcctgctgtgtcccctgtgttcttccagctgcctgccccccaccccccaacagtgctgcggccccagctgggcctgcaccccaacccagaatgtgaccgggagaagatgtctgtgcgggaccatgaccctgaggtgctgaccaggaacagcgcctgcaagccccggggccagctgagcggccacctgctgaagccccgggcccccctggaggccgcctag

SEQ ID NO: 302505 - DNA, 495 bp, Artificial Sequence
  derived and/or modified sequence
atggatgaggaggtgtctgaccccaccagcgctgctgcccagctgcggcagctgcgggaccacctgcccccacccagcagcgccagccccagccgggccctgcctgagccccaggaggcccagaagctggccgctgagcgggcccgggcccctgtggtgccctatggagtggacctgcactactggggccaggagctgcccacagctgggaagatcgtgaagagtgacagccagcaccgcttctggaagcccagcgaggtggaggaggaggtggtgaatgctgacatcagcgagatgctgcggagccgccacatcacctttgctgggaagtttgagcctgtgcagcactggtgccgggcccccaggccagatggccgcctgtgtgagcggcaggaccggctgaagaccttccacagctgcccccggcccagcggcagccggggcggcacagagcccagcccccggccctgtggcagccaggatgccctgctgtag

SEQ ID NO: 302506 - DNA, 231 bp, Artificial Sequence
  derived and/or modified sequence
atgagccacctgcccgccgtgagccccgtgttcttccagctgcccgccccccaccctcccactgtgttgagaccacagctgggactgcatccaaacccagaatgtgaccgtgagaagatgtcagtccgagaccacgatcctgaagtcctcacccgcaactcggcctgtaaaccaaggggacagctctcgggtcatttgctgaagccacgcgcacccctggaagccgcctag

SEQ ID NO: 302507 - DNA, 495 bp, Artificial Sequence
  derived and/or modified sequence
atggacgaggaggtgagcgaccccaccagcgccgccgcccagctgcgtcaactccgcgaccatctgccccctccctcatctgccagtccatccagggcattgccagagccccaggaggcccagaagctggcggccgagagagcacgggcaccggttgtcccatatggggtggacttgcattactggggccaggaactccctacagctgggaaaatagtaaagtccgactctcagcatagattctggaagccaagcgaggtggaggaggaggtggtcaacgctgatatctcagagatgcttcgatctaggcacattacatttgcgggaaagttcgaaccagtccaacactggtgcagagcccctcgccctgatggtcgactctgcgaacggcaagataggttgaaaacgtttcatagctgcccaaggccctctggtagccgaggaggtaccgagccgtcccctcggccatgcggatcccaggacgccctcctctag

SEQ ID NO: 302508 - DNA, 231 bp, Artificial Sequence
  derived and/or modified sequence
atgtctcatcttcctgcggtcagccccgttttctttcagctgcctgccccacacccccctaccgtcctccggccacagcttgggctccatccaaatcctgagtgcgatcgcgaaaagatgtctgtgcgagatcacgacccggaagtgctcacacgcaactctgcctgtaaaccgcgaggccagctgtctggacacctcttgaagccacgcgctcctctagaggcagcatag

SEQ ID NO: 302509 - DNA, 495 bp, Artificial Sequence
  derived and/or modified sequence
atggatgaggaggtgtccgaccccacttccgctgctgctcagttgaggcagctgcgggaccatctgcctcccccaagttccgccagtccaagccgcgctctccccgaacctcaagaggcacaaaagctggccgctgagcgggctagagccccagtggtcccttacggagtggacctccattattggggccaagagctgccaactgcgggaaaaatcgtcaagtcagatagccaacataggttctggaagccttccgaagtcgaagaagaagttgtgaatgctgatatctcggaaatgctgcggagccggcatattacgtttgctgggaaattcgaacccgtgcagcactggtgtagggctccgagacccgacggtcgactgtgtgaacgccaggataggcttaagactttccactcctgccctaggccgagcggcagtaggggcggaactgagccatcaccgaggccatgtgggagccaggacgcccttctttag

SEQ ID NO: 302510 - protein, 1376 aa, Artificial Sequence
  derived and/or modified sequence
MFRAGEASKRPLPGPSPPRVRSVEVARGRAGYGFTLSGQAPCVLSCVMRGSPADFVGLRAGDQILAVNEINVKKASHEDVVKLIGKCSGVLHMVIAEGVGRFESCSSDEEGGLYEGKGWLKPKLDSKALGINRAERVVEEMQSGGIFNMIFENPSLCASNSEPLKLKQRSLSESAATRFDVGHESINNPNPNMLSKEEISKVIHDDSVFSIGLESHDDFALDASILNVAMIVGYLGSIELPSTSSNLESDSLQAIRGCMRRLRAEQKIHSLVTMKIMHDCVQLSTDKAGVVAEYPAEKLAFSAVCPDDRRFFGLVTMQTNDDGSLAQEEEGALRTSCHVFMVDPDLFNHKIHQGIARRFGFECTADPDTNGCLEFPASSLPVLQFISVLYRDMGELIEGMRARAFLDGDADAHQNNSTSSNSDSGIGNFHQEEKSNRVLVVDLGGSSSRHGPGGSAWDGVGGRGAQPWGAPWTGPFCPDPEGSPPFEAAHQTDRFWDLNKHLGPASPVEVPPASLRSSVPPSKRGTVGAGCGFNQRWLPVHVLREWQCGHTSDQDSYTDSTDGWSSINCGTLPPPMSKIPADRYRVEGSFAQPPLNAPKREWSRKAFGMQSIFGPHRNVRKTKEDKKGSKFGRGTGLTQPSQRTSARRSFGRSKRFSITRSLDDLESATVSDGELTGADLKDCVSNNSLSSNASLPSVQSCRRLRERRVASWAVSFERLLQDPVGVRYFSDFLRKEFSEENILFWQACEYFNHVPAHDKKELSYRAREIFSKFLCSKATTPVNIDSQAQLADDVLRAPHPDMFKEQQLQIFNLMKFDSYTRFLKSPLYQECILAEVEGRALPDSQQVPSSPASKHSLGSDHSSVSTPKKLSGKSKSGRSLNEELGDEDSEKKRKGAFFSWSRTRSTGRSQKKREHGDHADDALHANGGLCRRESQGSVSSAGSLDLSEACRTLAPEKDKATKHCCIHLPDGTSCVVAVKAGFSIKDILSGLCERHGINGAAADLFLVGGDKPLVLHQDSSILESRDLRLEKRTLFRLDLVPINRSVGLKAKPTKPVTEVLRPVVARYGLDLSGLLVRLSGEKEPLDLGAPISSLDGQRVVLEEKDPSRGKASADKQKGVPVKQNTAVNSSSRNHSATGEERTLGKSNSIKIKGENGKNARDPRLSKREESIAKIGKKKYQKINLDEAEEFFELISKAQSNRADDQRGLLRKEDLVLPEFLRLPPGSTELTLPTPAAVAKGFSKRSATGNGRESASQPGEQWEPVQESSDSPSTSPGSASSPPGPPGTTPPGQKSPSGPFCTPQSPVSLAQEGTAQIWKRQSQEVEAGGIQTVEDEHVAELTLMGEGDISSPNSTLLPPPSTPQEVPGPSRPGTSRF

SEQ ID NO: 302511 - DNA, 4131 bp, Artificial Sequence
  derived and/or modified sequence
atgttcagagccggcgaggccagcaagagacccctgcccggccccagcccccccagagtgagaagcgtggaggtggccagaggcagagccggctacggcttcaccctgagcggccaggccccctgcgtgctgagctgcgtgatgagaggcagccccgccgacttcgtgggcctgagagccggcgaccagatcctggccgtgaacgagatcaacgtgaagaaggccagccacgaggacgtggtgaagctgatcggcaagtgcagcggcgtgctgcacatggtgatcgccgagggcgtgggcagattcgagagctgcagcagcgacgaggagggcggcctgtacgagggcaagggctggctgaagcccaagctggacagcaaggccctgggcatcaacagagccgagagagtggtggaggagatgcagagcggcggcatcttcaacatgatcttcgagaaccccagcctgtgcgccagcaacagcgagcccctgaagctgaagcagagaagcctgagcgagagcgccgccaccagattcgacgtgggccacgagagcatcaacaaccccaaccccaacatgctgagcaaggaggagatcagcaaggtgatccacgacgacagcgtgttcagcatcggcctggagagccacgacgacttcgccctggacgccagcatcctgaacgtggccatgatcgtgggctacctgggcagcatcgagctgcccagcaccagcagcaacctggagagcgacagcctgcaggccatcagaggctgcatgagaagactgagagccgagcagaagatccacagcctggtgaccatgaagatcatgcacgactgcgtgcagctgagcaccgacaaggccggcgtggtggccgagtaccccgccgagaagctggccttcagcgccgtgtgccccgacgacagaagattcttcggcctggtgaccatgcagaccaacgacgacggcagcctggcccaggaggaggagggcgccctgagaaccagctgccacgtgttcatggtggaccccgacctgttcaaccacaagatccaccagggcatcgccagaagattcggcttcgagtgcaccgccgaccccgacaccaacggctgcctggagttccccgccagcagcctgcccgtgctgcagttcatcagcgtgctgtacagagacatgggcgagctgatcgagggcatgagagccagagccttcctggacggcgacgccgacgcccaccagaacaacagcaccagcagcaacagcgacagcggcatcggcaacttccaccaggaggagaagagcaacagagtgctggtggtggacctgggcggcagcagcagcagacacggccccggcggcagcgcctgggacggcgtgggcggcagaggcgcccagccctggggcgccccctggaccggccccttctgccccgaccccgagggcagcccccccttcgaggccgcccaccagaccgacagattctgggacctgaacaagcacctgggccccgccagccccgtggaggtgccccccgccagcctgagaagcagcgtgccccccagcaagagaggcaccgtgggcgccggctgcggcttcaaccagagatggctgcccgtgcacgtgctgagagagtggcagtgcggccacaccagcgaccaggacagctacaccgacagcaccgacggctggagcagcatcaactgcggcaccctgcccccccccatgagcaagatccccgccgacagatacagagtggagggcagcttcgcccagccccccctgaacgcccccaagagagagtggagcagaaaggccttcggcatgcagagcatcttcggcccccacagaaacgtgagaaagaccaaggaggacaagaagggcagcaagttcggcagaggcaccggcctgacccagcccagccagagaaccagcgccagaagaagcttcggcagaagcaagagattcagcatcaccagaagcctggacgacctggagagcgccaccgtgagcgacggcgagctgaccggcgccgacctgaaggactgcgtgagcaacaacagcctgagcagcaacgccagcctgcccagcgtgcagagctgcagaagactgagagagagaagagtggccagctgggccgtgagcttcgagagactgctgcaggaccccgtgggcgtgagatacttcagcgacttcctgagaaaggagttcagcgaggagaacatcctgttctggcaggcctgcgagtacttcaaccacgtgcccgcccacgacaagaaggagctgagctacagagccagagagatcttcagcaagttcctgtgcagcaaggccaccacccccgtgaacatcgacagccaggcccagctggccgacgacgtgctgagagccccccaccccgacatgttcaaggagcagcagctgcagatcttcaacctgatgaagttcgacagctacaccagattcctgaagagccccctgtaccaggagtgcatcctggccgaggtggagggcagagccctgcccgacagccagcaggtgcccagcagccccgccagcaagcacagcctgggcagcgaccacagcagcgtgagcacccccaagaagctgagcggcaagagcaagagcggcagaagcctgaacgaggagctgggcgacgaggacagcgagaagaagagaaagggcgccttcttcagctggagcagaaccagaagcaccggcagaagccagaagaagagagagcacggcgaccacgccgacgacgccctgcacgccaacggcggcctgtgcagaagagagagccagggcagcgtgagcagcgccggcagcctggacctgagcgaggcctgcagaaccctggcccccgagaaggacaaggccaccaagcactgctgcatccacctgcccgacggcaccagctgcgtggtggccgtgaaggccggcttcagcatcaaggacatcctgagcggcctgtgcgagagacacggcatcaacggcgccgccgccgacctgttcctggtgggcggcgacaagcccctggtgctgcaccaggacagcagcatcctggagagcagagacctgagactggagaagagaaccctgttcagactggacctggtgcccatcaacagaagcgtgggcctgaaggccaagcccaccaagcccgtgaccgaggtgctgagacccgtggtggccagatacggcctggacctgagcggcctgctggtgagactgagcggcgagaaggagcccctggacctgggcgcccccatcagcagcctggacggccagagagtggtgctggaggagaaggaccccagcagaggcaaggccagcgccgacaagcagaagggcgtgcccgtgaagcagaacaccgccgtgaacagcagcagcagaaaccacagcgccaccggcgaggagagaaccctgggcaagagcaacagcatcaagatcaagggcgagaacggcaagaacgccagagaccccagactgagcaagagagaggagagcatcgccaagatcggcaagaagaagtaccagaagatcaacctggacgaggccgaggagttcttcgagctgatcagcaaggcccagagcaacagagccgacgaccagagaggcctgctgagaaaggaggacctggtgctgcccgagttcctgagactgccccccggcagcaccgagctgaccctgcccacccccgccgccgtggccaagggcttcagcaagagaagcgccaccggcaacggcagagagagcgccagccagcccggcgagcagtgggagcccgtgcaggagagcagcgacagccccagcaccagccccggcagcgccagcagcccccccggcccccccggcaccaccccccccggccagaagagccccagcggccccttctgcaccccccagagccccgtgagcctggcccaggagggcaccgcccagatctggaagagacagagccaggaggtggaggccggcggcatccagaccgtggaggacgagcacgtggccgagctgaccctgatgggcgagggcgacatcagcagccccaacagcaccctgctgcccccccccagcaccccccaggaggtgcccggccccagcagacccggcaccagcagattctag

SEQ ID NO: 302512 - DNA, 4131 bp, Artificial Sequence
  derived and/or modified sequence
atgtttcgcgccggagaagcctccaaaaggccattacccggcccgtcccctcctcgggtgcggtccgttgaagttgctcgcggacgagccgggtacggcttcaccttgagcgggcaagctccctgcgtgctctcttgcgtaatgcggggctcccccgccgacttcgttgggctgcgagctggtgaccagattctcgctgtgaacgagatcaacgtcaaaaaggccagtcacgaagacgtagtgaagttgatcgggaaatgctccggagtcctgcatatggtgattgctgaaggcgtgggtcggtttgagtcctgctcttctgacgaagaaggcggattatatgaggggaaaggttggctgaaacccaaacttgacagtaaagcacttggtataaatagagccgagagggtggttgaggagatgcaatcaggagggatctttaacatgatatttgagaaccccagcctgtgcgcctcaaacagcgagcccctgaagttgaagcaacgtagtctatccgaatccgctgctacgcgcttcgacgtaggccatgaatccattaataacccaaatcctaacatgctgtctaaagaggagatttctaaggtaattcacgatgattcagtgttctccataggtctggagtcccatgacgattttgcgctggacgcatcgatcctgaacgtggcgatgatcgtcggatatctgggctcaatcgaactgccatctaccagtagtaatctggaatctgattccctccaggccattagaggctgtatgagacggctgcgagctgaacagaaaatccatagtctggtcaccatgaagatcatgcatgattgcgtgcagctgagcacagataaggcaggcgttgtggccgagtatcccgctgaaaaacttgctttcagtgctgtctgccccgatgacaggcgcttttttggattagtcaccatgcagaccaacgatgatggctcacttgcacaagaggaggagggtgcgttacgtacatcgtgtcatgtgttcatggtcgaccctgatctgttcaatcacaaaattcaccaaggaatcgctaggcgcttcggatttgagtgtaccgcggacccggacaccaatgggtgcctggagtttcccgccagcagcttaccagtcctgcagttcatcagcgtgctatatcgggacatgggagagttgatcgaaggtatgcgcgctagagcctttcttgacggtgatgccgacgctcatcagaacaacagcacatcaagcaacagtgacagcggaataggcaatttccaccaagaggaaaagtctaaccgggtgttggtggttgatctgggcggatctagtagtaggcatggtccagggggaagcgcatgggatggggtgggaggcagaggagctcagccctggggcgctccttggacaggtccgttttgtcctgaccctgagggctctccaccatttgaggcagcccatcaaacagatcgattttgggacctgaacaagcatttgggccccgctagcccagtggaagtgccacccgcctcactgcggagtagtgttcctccttccaagcgcggcactgtgggcgccggctgtggattcaatcagaggtggcttccggtgcacgtgctacgcgagtggcagtgtggccacacctccgaccaggatagctatacagatagcacagatggctggtcttcaatcaattgtgggaccttgccgcctcctatgagtaagattccggccgaccgatacagagtcgagggatccttcgcgcagccccctcttaatgctccaaaacgggagtggagccgcaaggcatttggtatgcaatctatttttggcccccaccgaaatgtgagaaaaacaaaggaggacaagaaagggagcaagtttgggagagggaccggtctgacacagcccagtcaaagaaccagcgctcgacgcagcttcggccgctccaaacggttcagcataaccaggtcactcgacgatctggaaagtgccaccgtcagcgacggtgagctaacaggtgcggatctgaaggactgcgtgtccaataacagtcttagcagtaacgcttcactgccaagcgtgcagtcatgtaggcgcctgcgggaacgcagagtagcttcttgggctgtgagtttcgagaggttattacaggatccagttggcgtgcgctactttagcgactttctgaggaaggagttcagcgaggagaatatattgttctggcaggcttgcgaatatttcaatcacgtccctgcgcacgataaaaaggagctgtcttatcgcgcccgcgagatcttcagcaaattcctgtgctccaaagcaacaactccggtgaatattgactcccaagcgcaattagccgatgacgtattgcgggcccctcaccctgacatgtttaaagagcagcagctgcaaattttcaacctgatgaaatttgactcctacacacggttcctgaagagtcccttgtatcaggaatgcatactggccgaagtggagggacgggccttgcctgattcacagcaggtgcctagctccccagcttctaagcattcactgggctcagatcacagcagcgtgtccacaccaaaaaagctgtctggcaagtccaaatccggtcgctccctgaatgaggaactgggtgacgaggattcagagaagaagagaaagggggccttttttagctggtcacgaacgcggtctactggccgctcccagaagaagagggagcatggcgaccacgcagacgacgctctacatgccaatgggggcctctgtcgcagggaaagtcagggcagcgtaagctcggcaggatcccttgatctgagtgaggcttgcaggaccctagcgcctgagaaggacaaggccacaaaacattgttgcatccatctcccagacggaacgagctgtgtagttgccgtgaaggcaggcttctccataaaggacattcttagtgggttgtgtgaacggcacgggatcaacggcgcggcggcagatctattcctggtcgggggagacaaacctctggtgctgcaccaggatagttcaatcctcgaatcaagagaccttcggctggagaaacggacactgttcagactggatctcgtgcctataaatcgtagcgtggggctcaaagcaaagccaactaagccagttaccgaagtgctgcggccagtcgtggcccgttacggactggatctttctggtttgctggtccgactaagcggggagaaggaacctctggatcttggggctccgatatcctccctggacggtcagcgcgtggtccttgaggagaaggatccaagcagaggcaaggcaagcgccgataaacaaaaaggcgtgccagtgaaacaaaatactgcagtcaatagcagtagtcggaaccacagtgccactggggaagagcgaacactcggaaaatctaacagcatcaagatcaaaggggagaatggaaagaatgcacgggatccacgattaagtaagagagaggaaagtatcgccaagatcggcaagaagaaatatcagaaaattaacttagatgaggcagaagagtttttcgagcttatcagcaaggctcagtcaaacagggccgatgaccaacgaggcttgttgagaaaagaagatttagtgctgccagaattcttgcgtcttcccccggggagtaccgagctgacgcttcctacccctgctgccgtcgcaaaaggctttagtaaaaggtccgccactggcaacggcagggagtctgccagccagccaggcgagcagtgggagccagtccaggaatcttctgatagtcctagtacgtcccccggatctgcgagttctccaccaggccctcccggcaccactccaccgggtcaaaagtctccctccgggcccttttgcacgccccaatctcccgtgagtcttgcccaggagggcacagctcaaatttggaagcgccagagccaggaagtcgaggcaggcggcatacaaacagtggaggacgagcacgttgccgagttaacccttatgggagagggtgatattagcagccccaacagcaccctcctgccacccccaagcaccccgcaagaggtgccaggaccgagtaggccagggacttcacgcttctag

SEQ ID NO: 302513 - DNA, 4131 bp, Artificial Sequence
  derived and/or modified sequence
atgtttcgtgccggcgaggccagcaaacgccccctccctgggccgtctcctccaagagtcaggtcagtggaggtggcccgcgggagggcaggctacgggttcaccttgtccggacaggccccttgcgtgctttcctgtgtcatgcgtggatcaccagcagatttcgtgggcctgagggcaggagaccaaattctcgccgtcaacgagatcaatgttaaaaaggcgagccacgaagatgtggtgaaattgataggcaagtgttccggggtgctccacatggtaatcgccgagggggttggcaggttcgaaagttgttctagcgacgaagagggtggcctgtacgaaggcaaggggtggctgaagccaaagctggacagcaaggcattgggaattaacagagctgaaagggtggtggaggaaatgcagagcggaggcatctttaatatgatttttgagaatccaagtttgtgcgcttctaacagcgaacccctcaaattgaagcagcgcagcctgagcgaaagcgcagcaactagatttgatgtggggcatgagtctatcaataaccccaatcccaacatgctatctaaagaggaaatcagtaaggtcattcatgacgactccgtttttagcatcgggcttgaaagtcacgacgactttgccctggatgcatcaattctaaacgtcgctatgatcgtgggttatctcggatccattgaactgccttccacaagttccaatctcgaaagtgattcgctgcaagcaatcagagggtgtatgcggcgattgagagccgagcaaaaaatccactcactagttaccatgaaaataatgcacgactgcgtgcagttgagtactgacaaagcgggggttgtggcagaatacccggccgaaaaattagcatttagcgctgtgtgtcctgatgacagacggttcttcgggttagttacaatgcagactaatgatgacggcagcctggcccaggaggaagaaggagcactgcgcacttcctgtcacgtcttcatggtggacccagacctgtttaaccataagattcaccagggcattgcgaggcggttcgggtttgagtgcaccgcagatcctgacaccaacggttgtcttgagtttccagcgtctagcctccctgtcctccagtttatcagtgtcctgtaccgggatatgggcgaactgattgagggcatgagagcccgcgcctttctggacggagacgcagacgcacatcagaataactctactagtagcaactcagattccgggatagggaactttcaccaggaggagaagagtaaccgggtccttgtggtggatctgggtggcagcagtagcagacacggtccagggggttctgcatgggacggcgtggggggccggggcgcacagccttggggggccccctggacaggacctttttgtcccgaccctgaaggcagtcccccatttgaggccgctcatcagacagacagattctgggatctgaacaagcacctgggccctgcatctcccgtcgaggtgcctccagcgagtttgagaagcagcgtgcccccttccaagagaggcacggtcggagccggctgcggctttaatcaaagatggctgccagtccatgtcctgcgcgaatggcagtgtgggcatacctccgatcaagattcttataccgactctacggacggctggagcagtatcaactgtggtaccctaccccctcctatgagtaagataccagcagatcggtacagagtggaaggtagttttgctcagccacccctgaacgcccctaagagagaatggtcacgtaaagcatttggaatgcagagtatctttggcccccatagaaatgtgcgcaaaacaaaggaagataagaaaggcagcaagttcggacggggaacaggactgacacagccatcccagcggacgagtgccagaaggtctttcggaagatccaagagattcagcataacccgatcactcgacgatctggaaagtgctacagtgtctgacggtgagcttacaggcgcagatctgaaggattgtgtgagcaataattctctgagctctaatgcttctctcccttccgttcaatcatgcaggaggctccgagaaaggcgtgtggctagttgggctgtgagtttcgaacgactgctgcaggatcctgtgggtgtgcgctatttctctgactttctaagaaaagaattttccgaagagaacatccttttctggcaggcatgcgagtacttcaaccacgtgcctgcccacgacaagaaggaactttcttatcgagcccgggagatttttagtaaatttctctgcagtaaggccaccacaccggtgaatatcgattcacaagctcagctggcagatgatgtgctgagggcacctcatccagatatgttcaaggaacagcagctgcagatcttcaacctgatgaaattcgatagctatacccggtttctgaagagccctttgtaccaggaatgcattctagctgaggtcgaaggaagagcgttacccgacagtcagcaggttccaagctcacccgctagtaaacacagcttgggttctgaccacagctctgtctctactcccaagaaattgagtggcaagagtaaatcggggagaagcctaaacgaggagctgggcgatgaagacagcgaaaaaaaacgaaaaggtgccttcttcagttggtctaggacccgcagcactggccgctctcagaagaagcgagaacacggagaccacgccgacgatgcccttcacgcaaacggcgggctatgccggagggaaagtcaaggatctgtcagctcagcgggtagtctcgatctctcggaggcttgccgcacactggcgcctgaaaaagataaggcgacaaaacattgttgtatccacctaccagacggcacgagttgcgtggtggctgtgaaagccggcttcagtattaaagatatcctgtccgggctgtgtgagagacacggcatcaacggcgcagcagctgacctgttcttggtggggggagacaaacctttggtactacaccaagactcctccatactcgagtctagggacctccgccttgaaaaaaggactcttttccgactggacttggtccccatcaatagaagcgtgggcctgaaagccaagcctacaaagcctgtgaccgaagttctgcggcctgtagttgcaaggtacgggctggacttatctgggcttttggtgcgcctgtccggagagaaggaaccactggatttaggggctccaatttcatctctggacggtcagcgagtagtgctcgaggagaaagaccctagcaggggaaaagccagcgcagacaagcagaagggcgtgcccgtgaagcagaatactgctgttaacagcagtagtcgcaatcattccgctaccggagaagagcggactcttggaaagtctaactcgattaagataaagggtgaaaacggtaagaatgcgagggatcccagactgagcaaaagagaagaaagcatcgccaaaatcggtaagaaaaaataccaaaagatcaacttagacgaagcggaggaatttttcgaacttatttctaaagcacagtcaaaccgagcagatgaccagaggggtctgctcaggaaggaggatttagtgctccccgaattccttcggctccccccagggtctaccgaactgaccctgccaacaccagccgccgtagctaagggtttcagtaagcgcagcgctacaggtaacggacgggaatccgcaagccagccaggtgaacagtgggagccagttcaagagagttcagactctccctccactagtcctggctccgcctcctcacctccaggaccacccggaactacaccccccggccaaaaaagccccagtggacctttctgtacaccacagtcacccgtaagccttgctcaggagggcacagctcagatctggaagcgacagagccaagaggtggaggccggaggcatacagacagtggaagacgagcacgtcgcagaactgaccctcatgggcgaaggagatatttcatcacctaactcaacacttctccctccaccctctacaccccaggaagtgcccggcccctctcggcctggcaccagtcgcttctag

SEQ ID NO: 302514 - DNA, 4131 bp, Artificial Sequence
  derived and/or modified sequence
atgttccgggccggggaggccagcaagaggcccctgcccggccccagccccccccgggtgcgctctgtggaggtggcccggggccgggccggctacggcttcaccctgagcggccaggccccctgtgtgctgagctgtgtgatgaggggcagccctgctgactttgtgggcctgcgggccggggaccagatcctggccgtgaatgagatcaacgtgaagaaggccagccatgaagatgtggtgaagctgattggcaagtgcagcggcgtgctgcacatggtgattgctgagggcgtgggccgctttgagagctgcagcagtgatgaggagggcggcctgtatgagggcaagggctggctgaagcccaagctggacagcaaggccctgggcatcaacagagctgagcgggtggtggaggagatgcagagcggcggcatcttcaacatgatctttgagaaccccagcctgtgtgccagcaacagcgagcccctgaagctgaagcagaggagcctgtctgagagcgctgccaccaggtttgatgtgggccacgagagcatcaacaaccccaaccccaacatgctgagcaaggaggagatcagcaaggtgattcatgatgattctgtgttcagcatcggcctggagagccatgatgactttgccctggatgccagcatcctgaatgtggccatgattgtgggctacctgggcagcattgagctgcccagcaccagcagcaacctggagagtgacagcctgcaggccatccggggctgcatgaggcggctgcgggcagagcagaagatccacagcctggtgaccatgaagatcatgcatgactgtgtgcagctgagcacagacaaggccggcgtggtggccgagtacccagctgagaagctggccttctctgctgtgtgcccagatgaccggcgcttcttcggcctggtgaccatgcagaccaatgatgatggcagcctggcccaggaggaggagggcgccctgcggaccagctgccacgtgttcatggtggaccctgacctcttcaaccacaagatccaccagggcatcgccaggagatttggatttgagtgcacagctgaccctgacaccaacggctgcctggagttccctgccagcagcctgcctgtgctgcagttcatctctgtgctgtacagagacatgggagagctgattgagggcatgagggcccgggccttcctggatggagatgctgatgcccaccagaacaacagcaccagcagcaacagcgacagcggcatcggcaacttccaccaggaggagaagagcaacagagtgctggtggtggacctgggcggcagcagcagccgccacggccctgggggcagcgcctgggatggagtgggcggccgcggggcccagccctggggcgccccctggacaggccccttctgcccagaccctgagggcagccccccatttgaggccgcccaccagacagaccgcttctgggacctgaacaagcacctgggccctgccagccctgtggaggtgcccccagccagcctgcggagctctgtgccccccagcaagaggggcaccgtgggcgccggctgcggcttcaaccagcgctggctgcctgtgcacgtgctgcgggagtggcagtgtggccacaccagtgaccaggacagctacacagacagcacagatggctggagcagcatcaactgtggcaccctgcccccacccatgagcaagatcccagctgaccgctacagagtggagggcagctttgcccagccccccctgaatgcccccaagcgggagtggagcaggaaggccttcggcatgcagagcatcttcggcccccacagaaatgtgaggaagaccaaggaggacaagaagggcagcaagtttggccggggcaccggcctgacccagcccagccagaggaccagcgcccggcgcagctttggccgcagcaagcgcttcagcatcaccaggagcctggatgacctggagagcgccaccgtgtctgatggagagctgaccggggctgacctgaaggactgtgtgagcaacaacagcctgagcagcaatgccagcctgcccagcgtgcagagctgccggcggctgcgggagaggagagtggcctcctgggccgtgtcctttgagcggctgctgcaggaccctgtgggcgtgcgctacttcagtgacttcctgaggaaggagttcagcgaggagaacatcctcttctggcaggcctgtgagtacttcaaccacgtgcctgcccatgacaagaaggagctgagctaccgggcccgggagatcttcagcaagttcctgtgcagcaaggccaccacccctgtgaacatcgacagccaggcccagctggctgatgatgtgctgcgggccccccacccagacatgttcaaggagcagcagctgcagatcttcaacctgatgaagtttgacagctacacccgcttcctgaagagccccctgtaccaggagtgcatcctggccgaggtggagggccgggccctgcctgacagccagcaggtgcccagcagccctgccagcaagcacagcctgggcagtgaccacagctctgtgtccacccccaagaagctgagcggcaagagcaagagcggccgcagcctgaatgaggagctgggagatgaagattctgagaagaagaggaagggggccttcttctcctggagcaggaccaggagcacaggccgcagccagaagaagcgggagcacggggaccatgctgatgatgccctgcacgccaacggcggcctgtgcagaagagagagccagggctctgtgagcagcgctggcagcctggacctgtctgaggcctgcaggaccctggcccctgagaaggacaaggccaccaagcactgctgcatccacctgcctgatggcaccagctgtgtggtggccgtgaaggccggcttcagcatcaaggacatcctgagcggcctgtgtgaaagacatggcatcaacggggctgctgctgacctcttcctggtgggcggggacaagcccctggtgctgcaccaggacagcagcatcctggagagccgggacctgcggctggagaagaggaccctcttccggctggacctggtgcccatcaacagatctgtgggcctgaaggccaagcccaccaagcctgtgacagaggtgctgcggcctgtggtggcccgctatggcctggacctgagcggcctgctggtgcggctgtctggagagaaggagcccctggacctgggcgcccccatcagcagcctggatggccagagggtggtgctggaggagaaggaccccagccggggcaaggccagcgctgacaagcagaagggcgtgcctgtgaagcagaacacagctgtgaacagcagcagcaggaaccacagcgccactggagaggagaggaccctgggcaagagcaacagcatcaagatcaagggggagaatggcaagaatgcccgggacccccggctgagcaagcgggaggagagcatcgccaagattggcaagaagaagtaccagaagatcaacctggatgaagctgaggagttctttgagctgatcagcaaggcccagagcaacagagcagatgaccagaggggcctgctgaggaaggaggacctggtgctgcctgagttcctgcggctgcccccaggcagcacagagctgaccctgcccaccccagctgctgtggccaagggcttcagcaagaggtctgccactggaaatggccgggagagcgccagccagcctggagagcagtgggagcctgtgcaggagagcagtgacagccccagcaccagccctggcagcgccagcagccccccaggccccccaggcaccaccccacctggccagaagagccccagcggccccttctgcaccccccagagccctgtgtccctggcccaggagggcacagcccagatctggaagaggcagagccaggaggtggaggccggcggcatccagacagtggaggatgagcacgtggccgagctgaccctgatgggagagggggacatcagcagccccaacagcaccctgctgcccccacccagcaccccccaggaggtgcccggccccagcaggcctggcaccagccgcttctag

SEQ ID NO: 302515 - DNA, 4131 bp, Artificial Sequence
  derived and/or modified sequence
atgttccgggccggcgaggccagcaagcggcccctgcccggccccagcccaccaagggtgagaagtgtggaagtcgctcggggccgcgcgggttacggctttactctctctgggcaagcgccgtgtgtgttgtcttgcgtcatgaggggatctcccgccgactttgtgggacttagggcaggagaccaaatcctggctgttaatgaaattaacgtgaagaaggcttctcatgaggatgtggtgaaactaatcggcaagtgttcgggtgtgttgcacatggtcatcgcagagggtgtgggacggttcgaatcctgttcttccgacgaagaggggggactctatgaaggaaaaggctggctcaagccaaagctagacagcaaagcccttgggattaacagggcagaacgagtggtggaggaaatgcagagtggtggcatcttcaacatgattttcgaaaatccctcattgtgtgcaagcaactcagaaccgctaaaattaaaacagcgctccttgagcgaatctgccgccacccgtttcgacgtggggcacgagtctattaataaccctaaccccaacatgctgtctaaggaagaaatatctaaggtgattcatgacgattcagtgtttagcattggactggaatcccacgacgacttcgctcttgacgcctcaattctgaacgttgccatgatcgtcgggtatttgggctccatcgagctgccctccacgtcttccaatttagagtctgattctctgcaggctattcgtgggtgcatgcgcaggctgcgagccgagcagaaaatacatagcttggtgactatgaagattatgcatgattgtgtccagctgtctaccgacaaggccggagtcgtggccgagtatccagcggaaaagctggcattttctgcagtgtgccccgacgacagaaggtttttcggcttggtcacaatgcagaccaacgacgacggcagcctagcccaggaggaagaaggtgcactgaggaccagctgccacgttttcatggtcgaccctgacctgtttaatcacaagatccaccaagggatagccaggcgcttcggcttcgagtgcacagccgacccagatactaacggctgcttagagttccctgctagctccctgccagtgctgcaatttatctcagtcctgtatagagacatgggagagcttatagaaggcatgcgtgctcgggcgtttctcgacggagacgcagatgcacaccagaataattccacatcttcaaactctgactctggcatcggcaattttcaccaggaagaaaagtctaatagagttctcgtggtggaccttggcggctcctcgtcacgacacggcccggggggcagtgcgtgggatggcgtaggggggaggggagcccagccctggggggcgccgtggacaggaccattttgtccagaccccgagggttcacctccatttgaagccgcacatcagactgaccgtttttgggatcttaataaacacttagggcccgcttcacctgttgaagtgccaccggctagcctaaggtccagcgtgccaccatccaaacgcggtacggtgggcgcaggctgcggatttaaccaacgctggctccctgtgcatgtactcagggaatggcagtgcggtcacaccagtgatcaggatagctacaccgactccacagacggctggagtagcattaactgtgggacgttgcctccgcccatgagcaagatccctgccgatagataccgtgtcgagggtagcttcgcgcagccaccactaaatgctcctaagcgagagtggtctcgaaaggcttttggcatgcagtccatattcggaccccacaggaacgttcgaaagacaaaggaagacaagaaaggttccaagttcggccgggggaccggactcacccagccatcccaacggactagcgcacgacgtagcttcgggaggtccaagcggttctctattacgagatctctggacgatctcgagtctgccacggtaagtgacggcgaactgacgggcgctgatctaaaagattgcgtctcaaataactctttgtctagtaatgcatccttgcccagcgtgcagagctgccgaaggctcagagaacgaagggtggcgagctgggctgtgagcttcgagagactgcttcaagatccagtcggagtgcggtacttttccgattttttgcgcaaggaattttccgaagaaaacattctcttttggcaggcctgcgagtactttaatcacgtcccagctcacgataaaaaagagctgagttacagagctagggaaattttcagcaaattcctttgttctaaggcgacgactcctgtgaatattgactctcaggcccagcttgctgacgacgtgctgagggccccccaccccgacatgtttaaagagcaacagttgcaaatatttaatttaatgaaattcgacagctacactaggttcttgaagagtcctctgtatcaggagtgtatcctggctgaagtggaaggtcgggcactgccagactcacagcaggtgccttcctcacccgcttctaaacactccctgggcagcgaccacagttcagtaagcactccaaagaagctatctgggaagtcgaaaagcggacgttcactaaacgaagaactgggtgacgaggacagtgagaagaaacgcaagggtgccttcttcagctggtctcgcaccaggagtaccggacgttctcagaagaaaagagagcacggcgaccatgccgatgatgcactccacgcaaatggaggcctatgtcgtagagaaagccagggatccgtctcatcagccggtagtctggatctgtccgaggcctgcagaacactggctccggagaaagacaaggccacaaagcattgctgcattcacctgccagacggaaccagttgtgttgtggccgtgaaagcaggattctccattaaagatatcttgagcgggttatgtgagagacacggcatcaatggggcagcagccgaccttttcttagttggcggggataagcccctggtgttgcaccaggattcttccatcttggaaagtcgggatctcaggctggagaaacgcactctattccggttagacttggtgcccattaataggtccgtcggcctgaaagctaagcctaccaagcccgtgactgaggttctcaggccggtggtggcgcgttacggccttgacttgagcggcctgttagttagactgagcggcgagaaggagccactggatctcggagcacctatttcgtccctggacgggcagcgggtggtgctcgaggaaaaagacccttccagaggcaaggccagcgcagataagcagaagggggtgcccgtgaagcaaaacactgctgtgaattcctcaagccgaaaccacagcgctactggagaagaaaggaccctcggcaaatcaaactctatcaagatcaagggggagaacggcaagaacgcccgcgatcctagactcagtaaacgggaagagtcaatcgctaaaatcggtaagaaaaaatatcagaagatcaatctggatgaagccgaggaattcttcgagttgataagcaaggcccagtccaacagagctgacgatcagcggggcctactgcgcaaggaagatcttgtgttgcctgagtttctgcggctcccccccggcagcacggagctcactctgcctacacctgccgccgtcgcaaagggtttcagtaaacgtagcgctactgggaatggccgagaatctgcctctcagcccggcgagcagtgggaacccgtacaagaaagttctgacagccctagcacaagcccaggcagcgcctcctccccgccaggaccaccagggacaacaccccccggccagaagagcccatccggccctttctgcactccccaatctccagtctctttggctcaggagggcaccgcacaaatatggaaacgccagtctcaggaagtcgaagctggggggatccagaccgtggaggatgaacacgtcgccgagctcaccctaatgggggagggtgacatcagctcaccaaactcaacgctgctgccacccccaagcaccccacaggaggtaccaggtcctagtaggcctggcacttcgagattctag

SEQ ID NO: 302516 - DNA, 4131 bp, Artificial Sequence
  derived and/or modified sequence
atgttccgggccggcgaggccagcaagcggcccctgcccggcccctccccaccaagggtgagatctgtagaggtggcacgtgggagagccggctatggttttactctgtcagggcaggccccgtgcgtcctttcttgtgtaatgcgcggaagtccagctgattttgtgggcctgagagccggagaccagatccttgcagttaatgaaatcaatgtgaagaaggcatcacacgaggacgtggtcaaactgattggaaaatgttcaggcgtgctgcacatggtcattgctgagggtgtgggcagattcgagtcatgcagttcagatgaggagggaggtctatatgagggaaagggctggctcaaacccaaactggatagcaaggcgctcggaattaatagggccgagcgcgtcgtggaggagatgcagtcaggagggatttttaatatgattttcgaaaatccctctctctgtgcgtccaactctgagccactcaaattgaaacagaggtctctgtcagaaagtgcagcgactcggtttgacgttggacatgagagtattaacaatcccaatcccaacatgctcagtaaagaggagatttcaaaggtcatacatgacgattcagtcttcagcattggactagaatcacacgacgattttgctctggatgctagcatcctgaatgtggccatgatcgtgggatacctagggtctatcgagctgccttctacaagcagtaacctggaatctgattctctccaggccatacggggttgcatgagaagactcagggccgagcagaagatccactcacttgttactatgaaaattatgcacgactgtgtgcaattgtcaactgacaaagccggagtggtagccgaataccctgccgaaaaattagccttctccgctgtctgtccagacgatcgaagattctttggactggtaacaatgcaaacgaacgatgatggctcactcgctcaggaggaagaaggagctctgcgcaccagctgccacgttttcatggtggaccctgacttgtttaaccataagatacatcagggcatcgcacggagattcggtttcgagtgtacagccgaccccgacactaatggatgcctagagttccctgcaagttcactgcccgtcctgcagtttatttccgttctctatcgcgacatgggtgagctcatcgagggaatgagggcacgggccttcctggatggtgacgcagacgcccatcagaacaactctacatcttccaactcagacagtggcatcggcaatttccaccaggaagagaagagcaatcgggtgctcgtggtggaccttggcggatcctcgtctcggcacggtcccggaggctctgcatgggatggagtgggagggcgcggcgctcagccatggggtgccccgtggaccggacctttctgccctgatcccgagggcagcccgccttttgaagccgcccaccaaaccgatcgattttgggatctgaacaagcatcttggtcctgcatcacccgtggaggttcctccagcttctttacggagttcagtgcccccttctaaaaggggaaccgtaggggccgggtgtggcttcaatcagagatggctgccagtgcacgtgttgagagagtggcagtgcggccatacctccgatcaagactcatatacagacagtaccgatggctggtcctcaatcaattgtggaacgctgccacctccaatgagtaaaatcccggccgaccggtaccgagtggaagggtccttcgcccagcctccgcttaatgctccaaagagagagtggagcagaaaggcttttggaatgcagtctatatttggcccacatagaaatgtgcgtaagacaaaggaggataagaaggggtccaaatttgggcgcggaactgggctgacccagcccagtcagcgcaccagcgccaggagatcatttggccgctcgaagcggttttctattacacgcagtctggacgacttggaatcagctacagtttctgacggggagctcactggcgccgatttaaaagactgtgtgtccaacaacagcctcagttccaatgcctccttgccctctgtgcagtcctgccgtcgcctcagagaaaggagggtcgcaagttgggctgttagctttgagcgcctgcttcaggaccctgttggcgtacgatacttctccgactttctgcgcaaagagttttcggaagaaaatattctgttctggcaagcatgcgagtacttcaatcatgtacctgcccatgataaaaaggagttatcttaccgggcgagagagatctttagtaagttcctgtgcagcaaggccaccaccccagtaaacatagactcccaagcgcagctagccgacgacgtcctcagggccccccaccccgacatgttcaaagaacagcagcttcagattttcaatctgatgaaatttgattcatatacacgatttctgaaatcgccactctaccaggagtgtatcctcgccgaagtggaggggcgcgcactgccagatagtcagcaggtgccctcatctcctgccagcaagcatagcctgggttccgaccacagctccgtgtctactccaaagaagctgagcggaaagtcaaagtcaggacgaagtctgaacgaggagctgggggacgaagactccgaaaagaaacggaaaggggcatttttttcctggagcagaacccggtctactggtcgcagccagaagaaacgggagcatggagaccacgccgatgatgcgctgcatgcgaacggaggactctgccgacgtgaatcccagggatcagtgtcatccgccggctcgctcgatctctctgaagcatgtcgaactctagcaccagaaaaggacaaggcgactaaacattgttgcatccaccttcctgacgggacctcctgtgttgtggctgtgaaagctggcttttccattaaagatattctgtccggtctatgcgagcgccacgggatcaatggcgctgccgcagacctgtttttagtggggggtgataagcctctggtactacatcaagattcttcgatcctggagtcacgtgaccttcgtctggaaaagcgaactctgtttcggctggatctggtgccaatcaacaggtccgtgggactcaaggcaaaacctaccaagcctgttaccgaggtcttgcggcctgtcgtagcccgctacgggctcgatttgtctgggctgctggtgcgcctgagtggagagaaagaacccctggatctaggggcccccattagcagcctggatggtcagagagtggtattagaagagaaggatccttcacggggcaaggcctccgcagataaacaaaaaggggtcccggtgaaacaaaatacagcagttaactcctcatctagaaatcacagcgcaactggcgaggagcgaactctcgggaagtcaaactccattaaaatcaagggcgagaatgggaaaaacgccagagatcctaggctatctaagagagaagagtccattgctaaaatcgggaaaaaaaagtatcagaagattaatctcgacgaagctgaagaattttttgagttgatttccaaagcccagagcaatcgagccgatgatcagagaggtctcctgcggaaggaagaccttgtgctgccggaattcctgaggcttccaccagggtccactgaactgaccctgcccacacccgcggcagtcgcaaaggggttctcaaagcggtcagctactggtaatgggagagagagcgctagtcagccaggcgaacagtgggaacccgtccaggaatctagcgactctccctctacctcccccggcagcgctagctctccaccgggtccgcccggaacgactccaccaggtcagaagtcccctagtggtcccttttgcacgccgcaatcccccgtgtcccttgcccaggaggggactgcccagatctggaaaaggcagtcgcaggaagtagaagctgggggaatccaaacggtggaagacgaacatgtggcagaattgactctcatgggagagggggatatcagcagccccaactccaccctgctgccccccccaagtacaccccaggaggtcccaggaccgtctagacccggcacgtctcgattttag

SEQ ID NO: 302517 - DNA, 4131 bp, Artificial Sequence
  derived and/or modified sequence
atgttcagggcaggcgaagcctcaaaacggcctctacccggaccctcacctccacgtgtgcggtccgttgaagttgccagaggacgcgcaggatacggcttcacactgtcgggccaagcaccttgcgtgttatcgtgtgttatgaggggcagccccgcagactttgtaggtctgagagctggtgaccaaatcctggcagttaacgaaatcaatgtgaagaaggctagccacgaggatgtggtgaagctaatcggaaaatgctcaggagtgctgcacatggttatagccgagggcgtgggtcgtttcgagtcctgctccagcgatgaggaaggcggattgtatgagggtaagggttggctgaagcccaagctagattcaaaggccctgggtatcaatagagcggagagggtggttgaagagatgcaaagcggtggcatcttcaatatgattttcgagaacccaagtctgtgcgcttcaaactcagaacccctgaagctgaaacagaggtccctgagcgaaagcgccgctacacgatttgatgtgggtcatgagagcattaataatcccaatccaaatatgctgtccaaagaggaaatttccaaggtgatacacgatgattccgtgttctccatcgggctggaaagccatgatgactttgcccttgatgcctctatccttaatgtcgctatgatcgtcgggtaccttggttcaatcgaactgcctagcacctccagcaatcttgaatccgacagcctgcaggccatccgcggttgtatgcggaggctcagagccgagcagaagattcattcgctggtgacgatgaagatcatgcatgattgtgtgcagctcagcacagataaagccggtgtggttgccgaatatcccgctgaaaaactcgcttttagcgcggtctgcccggacgaccgacgtttctttggtctggtcactatgcagacaaacgatgacggtagcctggcacaggaagaggagggcgctctgcggactagctgccacgttttcatggtggaccccgacctctttaatcacaaaatacaccaggggattgctcgcaggtttggctttgaatgcactgcagacccggataccaacggctgcctggaattccccgcaagcagtctgccagttctacagttcatctcagtcctctaccgggacatgggtgaattgattgaaggcatgcgggctagagccttcctcgatggagatgctgacgcacatcagaacaattccacctccagcaattccgactctggaatcgggaacttccaccaggaggagaagtccaaccgcgtgctggtcgtggaccttgggggaagctcttcacggcacggacctggcggttccgcctgggacggagtggggggacgcggagcccagccctggggagcaccctggacagggccattttgtcccgatcctgaaggctctcctcctttcgaggccgctcaccagactgaccgattctgggatctgaacaaacacctcggaccagccagcccggtagaggtaccacctgcctcactgcgcagctccgtgccccctagcaagagggggacagtgggcgctggctgcgggttcaaccagcgctggctgccagtccacgtgctccgcgagtggcaatgcggccacacatctgaccaggactcatacactgattcaactgacggctggagctcaatcaattgtggtacgttaccacccccaatgagtaaaattcccgctgacagatacagggtagagggaagctttgcccagcccccactgaatgctccaaagcgcgaatggtcacgcaaagcttttgggatgcagtctatttttggccctcacagaaacgttcggaagacaaaggaggacaaaaagggctccaagtttggaagaggaactggtttgactcaacctagccaacgcacctccgccagaaggagttttgggaggagtaagcgtttttcaattacccgtagcttagacgacctggaaagcgcgaccgtgtcagatggggaactgactggggcagacctcaaggactgtgttagcaacaatagcttatccagtaacgcctccctgccatcagtgcagtcgtgccggagactgagagagaggcgagtggcctcatgggcagtgtcatttgagaggctgctgcaggatcctgtaggcgtgaggtacttctccgatttcctcagaaaagagtttagcgaagagaacatcctgttctggcaggcatgcgaatattttaatcatgtaccagcgcatgacaaaaaagagctgagctaccgtgccagggagatctttagcaagttcctgtgctccaaggctaccacccccgtgaacatagactcgcaggcccagctcgccgatgacgtgctacgggcaccacacccagatatgtttaaggagcagcagttgcaaatatttaatttgatgaaattcgacagctatacgcgcttcctgaaatcccctctgtaccaggaatgtattcttgctgaagtggaagggagggcactcccagactcgcagcaagtgcccagcagccccgcttccaagcactcactgggttccgaccatagcagtgtgagtactcccaaaaaactatctggcaagagcaagagtggacgatcgcttaatgaggagctgggtgatgaggattcagagaagaagagaaagggggctttcttttcatggtctcgaaccagatctactggcagaagtcagaaaaagagagagcacggggatcacgcagatgatgctctgcacgccaatggtggactatgccgccgagagagtcaggggagcgtaagcagtgccggaagtctggacctgagcgaggcatgtagaacactggccccagaaaaagacaaggctacaaagcactgctgtatccatctgccggacggcacaagctgcgttgtcgctgtgaaagcaggattctccattaaggacattctgtccggactatgcgagcggcacggaatcaatggggcagccgctgacctgttcctggtcggaggcgacaaacccctcgttctccatcaagactcttcaattctggagtcgcgcgacctgcggcttgaaaagagaactttgttcaggcttgatctggtacctattaataggtctgtcggcttgaaggctaagccgaccaagcctgtgacagaagtcctcagaccagtggtggcaagatatggattggatcttagcggcttgcttgtaagactgtcaggcgaaaaggagcccctcgatttaggtgcccctatatcctccctggatggccagagagtcgtgctggaagagaaagatcctagcagggggaaagcatctgcggacaagcagaagggagtgccagtcaagcagaacactgctgtaaatagctccagccgtaatcacagcgctactggggaagaaagaacactggggaaaagcaattccatcaagataaagggcgagaacggaaaaaacgcacgggatcctcggctttccaaacgggaggagagcatagcaaaaatcggaaaaaaaaaatatcagaagataaacctcgacgaagcggaggagttcttcgaactaatcagtaaggcccaatcaaatagagctgacgatcaaagaggcctgcttcggaaagaggacctggtcctgcctgaatttcttagactgccaccaggatcaaccgagttaactctgcccactccggctgcagtcgccaaagggttctcaaagagatccgcgacaggaaatggcagggagtccgcttcacagccaggtgagcagtgggagcccgttcaggaaagctccgattccccttcaactagccctgggtccgccagtagccctcccggtcccccaggaacaaccccaccaggacagaagagtccctctggcccattttgtacccctcagagcccagtgtcgctcgcacaggaggggaccgctcagatctggaagcgccagtcacaggaggtcgaggccggagggattcagaccgtggaggacgaacacgttgccgagttgaccttgatgggggagggtgatatttctagtccaaatagtacactgcttcctcctccatccacacctcaggaagttcccggtccctctcggccaggtacctcacgtttctag

SEQ ID NO: 302518 - DNA, 4131 bp, Artificial Sequence
  derived and/or modified sequence
atgttccgagcaggggaagcatccaagcggcctcttccagggcctagtccaccacgcgtgaggtcggtggaggtggcacgcggacgagcaggttacgggttcacgctgtctgggcaggctccctgtgtgctatcatgtgtgatgcgaggctcacccgctgatttcgtgggtctcagagccggtgaccagattctggccgtgaacgagattaacgtcaagaaagcgagccatgaagatgtggtcaaattgataggcaagtgctccggcgtgcttcatatggtgatcgcggaaggagtcggaagattcgaaagctgtagctccgatgaggaaggtgggttgtacgagggtaagggctggctcaagcctaagcttgacagtaaggcactgggtataaaccgagctgaacgagtggttgaggagatgcagtccgggggaatttttaacatgattttcgagaacccatccctatgcgcttctaactccgaacccttgaaactgaaacagcggagtctgtctgagtctgcagctaccaggttcgatgtgggccatgagagtattaacaacccaaatcccaatatgctgagcaaggaggagatcagcaaggtgattcatgacgattctgtattctccatcgggctggagtcgcacgatgacttcgccctcgatgcctctatacttaatgtagccatgattgtggggtacctgggcagcatagagctgcccagcacttcatcgaacctcgagagcgattcactccaggccatacgcggttgcatgagaagactccgagctgaacagaagattcactcactcgtgacaatgaaaattatgcatgattgtgtccagctgtctaccgataaagcaggagtagttgccgagtacccagccgagaaacttgctttttcagctgtgtgcccagacgacaggcgcttctttggcttggtgactatgcagacgaacgatgatggctcgctcgcccaggaggaagaaggggctctcaggactagctgccacgtgtttatggtggaccctgaccttttcaatcataaaattcaccaaggtatcgctagaaggtttgggttcgagtgtaccgccgacccggataccaatggatgtctggaatttcccgcaagctcactcccagttctgcagttcatatccgtattgtatcgggatatgggagaattgatcgagggaatgcgcgctcgcgcattccttgacggcgatgcagacgcacaccaaaacaatagtacaagttctaacagtgacagtggaatcggaaatttccaccaggaggagaagtcaaaccgggtgttggtggtggacctggggggttcttcgtcccgtcacggccctgggggttctgcttgggacggcgtgggaggacgcggagcccagccttggggggctccatggaccggcccattttgccctgaccctgagggatcaccaccattcgaggcggcacaccaaactgatcgtttttgggacctcaataaacatctagggcctgcctccccagttgaggtgccaccggctagcctaagatcatcggtgccccctagtaaacgcggtaccgtgggggcagggtgtggcttcaatcaaagatggttacctgtccacgtcctgcgcgagtggcagtgtggtcatacctccgaccaagactcttatacggactccaccgacggctggtcatcaattaattgcggcacgctgccgccacccatgagcaagatacctgctgacaggtacagagtcgagggtagctttgctcaacctcccctcaatgcccctaagcgcgagtggtcaagaaaggccttcggaatgcagagcatctttggtccacacaggaatgtacggaaaacaaaggaggacaagaagggtagcaagttcgggagaggaaccggccttactcaaccctctcaaaggacaagtgctcgtcggagcttcggacggagcaaacgcttttccattacccggtcacttgatgatcttgagagcgcaaccgtaagcgatggggaattgactggcgctgacctgaaagattgtgtaagtaacaactccctctccagcaatgccagtctgcccagcgtccagtcttgcagacggttaagagaaaggcgcgttgcatcatgggccgtgtctttcgaacgactgcttcaggatcccgtgggagtgaggtatttctccgactttctaagaaaagaatttagtgaggaaaatatcctgttctggcaggcctgtgaatacttcaaccatgtgcccgcacacgataagaaagaattgtcgtatagggctagagaaatattctccaagtttctgtgttcgaaggcaacgacccccgtgaatatagattcacaagcccaattggccgatgatgtcctccgggctccacacccggacatgttcaaagagcagcagcttcagatctttaatttaatgaagttcgactcgtataccagattcttgaaatctccactataccaggagtgcatccttgccgaggtggagggcagagcccttccagactcccagcaagttccgtcatcgcctgcctctaaacattctctgggctctgatcactcaagcgtgtccactccaaagaagctatccggcaagtcaaaatctggacgctctcttaacgaagaactcggagatgaagactcggaaaagaaaaggaagggtgccttcttttcctggtctcggactcgtagcaccggtaggagccagaaaaagagagagcatggcgaccacgcagatgacgcgctgcatgccaacgggggactctgtcggagagaaagtcagggctcagtttccagcgctggttccctcgacctgtccgaagcctgtcgtaccctggctcccgagaaagataaggccaccaaacactgttgtatccatttacccgacggtactagttgtgttgtggctgtcaaggcagggttttctatcaaggatattttaagcggtctgtgtgagcgacacggcataaacggcgcagccgctgacctgtttttagtgggcggagacaaaccattggtgctgcaccaggactccagtatactggagtcaagagatttacggctagagaagagaacgctattcaggctggatttagtgcctattaaccgctcggttggcctgaaggctaagccgacgaaacccgtaactgaggtcctacgtcccgtagtagcacgatacggccttgacttgtccggactccttgtgaggctgtcaggcgaaaaggagccactggacctgggggcacctataagtagcctagacggtcagagggtcgtgctggaggaaaaggatccctctaggggtaaggctagtgccgataaacaaaagggggtacccgtgaagcagaacaccgctgtcaacagctcatcaaggaatcactcggctacaggtgaggagagaacacttgggaagagtaattccatcaagatcaaaggggaaaacggcaaaaacgccagggatcctagactgtccaagcgcgaagagtctattgctaagatagggaagaagaagtatcaaaaaatcaacctggatgaggcagaagaattttttgagctcatcagcaaagcacagagcaaccgagcggatgatcagcggggactgctcagaaaagaggacttggtgctccctgaatttttgcgccttccacctggctctactgagctgaccctgccaactcccgcagccgttgctaaaggatttagcaagaggtccgcaaccgggaacgggcgtgaatctgcttcgcagcctggtgaacagtgggagcccgtgcaggagtcttctgatagcccatccacttcaccaggaagcgccagctcccccccagggccaccagggacaaccccccctggccagaagtccccttcaggcccattttgtacccctcagagccccgtttcactcgctcaagaagggaccgcacaaatatggaaaaggcaatcacaggaggtggaggcgggtggcatccagaccgtggaagatgaacatgtcgctgagctcactctgatgggggagggagacatctcatctcctaactcaactcttctgcctcccccatcaactcctcaggaggtccccggaccctccagacctggcacttccagattctag

SEQ ID NO: 302519 - DNA, 6240 bp, Artificial Sequence
  derived and/or modified sequence
atttatattcattttttactcttttccatcaaaacataattttactaagtacgcatgttctgtgtccgtgttttgtcatcactgaagccacttttggagtcacctagtaatagcctttccactctatctagttctgtagcttttatgtgtgtaaattacttcaaatctgtttatgatcctattgctggaaactttatcccaagacacaaaaatcttttctattagaagttattaactttaaaacaattatttattttattttattttattttttgagacagagtctcgctttgtcacccaggctggagtgcagtggcacgatctcggctcactgcaagctccacctcccgagttcatgccattctcctgcctcagcctcccgagtagctgggactacgggcgtccgccaccatgcccagctaattttttttgtatttttggtagagacaaggtttcaccgtgttagccaggatggtcttgatctcctgacctcgtggtccacctgcctcggcctcccaaagcgctgggattataggcgtgagccaccgcacctggcctaaaacaattatttctttaaaaaaacataccctctattctattttgtgtcttcacaacacaatcacttactgtattgctttttaaagtgatctttaaagagtcttgcagaagagactacacagcaggcccgagaccatcctgagaggcctgtgtgcaaggctggccccccgctggtgtcaggacggtgcccaccaccctcaatgaagaggggctccctgtgcttagctgcttgtgtggggaacaagggcactgtttgaagaagcaaacatggtagcatcaagcattccttgaaatatggctccaagggaacaatgagacgtgctcttggtcttggaagctcatcagaatgtttagagctggggaggcctccaaacgcccattgcctgggccgtcgcccccaagggtgcggagtgtggaggttgcccgggggagggccggctacggattcacgctttcgggacaggcaccctgtgtgctcagctgcgtcatgagagggagccctgcggatttcgtgggcctccgagctggagaccagatacttgctgtcaatgaaatcaacgtgaaaaaagcatctcatgaagatgtagtgaaattaattgggaagtgctctggtgtccttcacatggtgattgctgaaggcgtcggccgcttcgaatcctgttccagtgatgaagaagggggactctatgaaggaaaaggctggctgaagcccaagctggattctaaagcactaggtataaacagagcagagcgagtcgtggaggaaatgcagtctggtggaattttcaatatgatttttgaaaacccgagcctttgtgcgagcaattcagagcccttgaaattgaaacaaagatccctttcagagtcggccgcaactcgatttgatgttggacatgaaagtataaataatccaaatcccaacatgctttctaaggaggaaatatcaaaagttattcatgatgattcggttttcagcattggactagaaagtcatgacgattttgcattggatgcaagtattttaaacgtggcgatgatcgtgggctacttaggctccattgagcttccttccacgagctccaacctggagtccgacagcttgcaagccatccgcggctgcatgcggcgcctgcgggcagagcagaaaatccactcgctggtgaccatgaagatcatgcacgactgtgtgcagctgagcactgacaaggctggagtcgtggccgagtacccggccgagaagctggccttcagcgccgtgtgcccggacgaccggcgatttttcgggttggttaccatgcagacgaatgacgacgggagcctggcccaggaggaggagggcgccctgcggacttcctgccacgtgttcatggtggacccagacttgtttaatcacaagatccaccaaggcattgctcggcggtttgggtttgagtgcacggccgacccagacaccaatggctgtctggaattcccggcgtcctccctccccgtcctgcagttcatctctgtcctgtaccgagacatgggtgagctgattgagggcatgcgggcccgcgcctttctggacggggacgccgatgcccaccagaacaacagcaccagcagcaacagtgacagcggcattgggaacttccaccaggaggagaagagcaaccgggtccttgtggtggacctgggtgggagctcgagcagacacggccccggaggcagcgcgtgggacggtgtgggtgggaggggtgcccagccctggggtgctccctggactgggcccttctgtccggaccccgaagggagccccccatttgaggccgctcatcagactgacaggttctgggacctaaacaagcacctagggccagcctctcctgtggaggtgcccccagcttccttgaggagctcagtccccccttccaagaggggcaccgtgggtgctggctgtggtttcaaccagcgctggctcccggtccacgtgctccgggagtggcagtgcggacacaccagcgaccaggactcttacacagattccaccgatggctggtccagcatcaactgcggcacactgccccctcctatgagcaagatccccgcagaccgctacagggtggagggcagcttcgcgcagcccccgctgaatgccccgaagagggagtggtccaggaaggcctttggaatgcaaagcatttttggtccccatcgaaatgttcgaaagactaaggaagataaaaagggctcaaaatttgggcggggaactggactcactcagccttctcaacgcacgtctgctcggagatcatttgggagatccaagagattcagtatcactcgctcccttgatgatcttgagtctgcaactgtgtctgatggcgagttgacgggcgccgacctgaaggactgcgtcagcaacaacagcctgagcagcaatgccagcctccccagcgtgcagagctgccggcgcctgcgtgagaggagggtcgccagctgggccgtgtcctttgagcgcctgctgcaggaccccgtcggtgtccgctacttctctgattttctaaggaaagaattcagtgaagaaaacattttattctggcaggcctgtgaatattttaatcatgttcctgcacatgacaaaaaggagctttcctacagggcccgggagattttcagtaagtttctctgcagcaaagccaccaccccggtcaacatcgacagccaggcccagctagcagacgacgtcctccgcgcacctcacccagacatgttcaaggagcagcagctgcagatcttcaatctcatgaagtttgatagctacactcgctttctgaagtccccgctgtaccaggaatgcatcctggcggaagtggagggccgtgcactcccggactcgcagcaggtccccagcagcccggcttccaagcacagcctcggttcagaccactccagtgtgtccacgccaaaaaagttaagtggaaaatcaaaatccggccgatccctgaatgaagagctgggggatgaggacagcgagaagaagcggaaaggcgcgtttttctcgtggtcgcggaccaggagcaccgggaggtcccagaaaaagagggagcacggggaccacgcagacgacgccctgcatgccaatggaggcctgtgtcgccgagagtcgcagggctctgtgtcctctgcggggagcctggacctgtcggaggcctgcaggactttggcacccgagaaggacaaggccaccaagcactgctgcattcatctcccggatgggacatcctgcgtggtggctgtcaaggcgggcttctccatcaaagacatcctgtccggactctgtgagcggcatggcatcaacggggcggccgcggacctcttcctggtgggcggggacaagcctctggtgctgcaccaagacagtagcatcttggagtcaagggacctgcgcctagaaaagcgcaccttgtttcggctggatcttgttccgattaaccggtcagtgggactcaaggccaagcccaccaagcccgtcacggaggtgctgcggcccgtggtggccagatacggcctggacctcagtggcctgctggtgaggctgagtggagagaaggagcccctggaccttggcgcccctatatcgagtctggacggacagcgggttgtcttggaggagaaggatccttccagaggaaaggcatccgcagataaacagaaaggtgtgccagtgaaacagaacacagctgtaaattccagctccagaaaccactcggctacgggagaggaaagaacactaggcaagtctaattctattaaaataaaaggagaaaatggaaaaaatgctagggatccccggctttcaaagagagaagaatctattgcaaagattgggaaaaaaaaatatcagaaaattaatttggacgaagcagaggagttttttgagcttatttccaaagctcagagcaacagagcagatgaccaacgtgggctgctaaggaaggaagacctggtgttgccagagttcctccgtttacctcctggttccacagaactcaccctccccactccagctgctgtggccaagggctttagcaagagaagcgccacaggcaacggccgggagagcgcctcccagcctggcgagcagtgggagccagtccaggagagcagcgacagcccgtccaccagcccgggctcagcctccagcccccctggacctcctgggacgaccccccccgggcagaagtctcccagcgggcccttctgcactccccagtcccccgtctccctcgcgcaggagggcaccgcccagatctggaagaggcagtctcaggaagtggaggccgggggcatccagacggtggaggatgagcacgtggccgagctgaccctgatgggggagggggacatcagcagccccaacagcaccttgctgccgccgccctccaccccccaggaagtgccaggaccttccagaccaggtacctccaggttctgatccctccaccttggccccgtaagcgtggtctgctcagcttccagtcagaaaggacagtgggcccccggctgccactgtttgctggtggtctccgtgaccccctcctcacctgctggttgggggcttccttggccctcttggaaaggaggggctcgtgtggccccaggccagtgtctgtcaggatggtccccccgaggcgctctgggcaggcatcctggtgtcctgagaggctcttgcaggaatgatacgtggcagtgcctgcagcgaggtctgggaacaccctgggtgaggcctgggggtttccgaaaatggaggcattcctttccaaatctggacagcgatcgtttttagtgtttctgtctcaagactggaaaacaatagcatttgtcttgagtgaggaagtgaagcccgctgtgttcatagcaggagagggctcccagacacaggcccgtcctcggaagagccttgagagtgcagctcggacccaccggcggcccccgtagcaggtggtgtgggtgctcgggagtggaggtgacgtcagcagcgctctctgaccgcgggtgtcacgggcatttctcaaaggaagcaggggattcagtgagtgtgaaggtgaacaggatggcctggcagcagggatgtttccgtgagccacaaataccagaaactgaggcgaggctcccagcagccggtagggaaaggtgtttccaggggtccgagggccgtggcctgcgtggccatcccctggagagaggagccgctcagggtgcgcgtcatggagtgtgctcaggggtgcgtggacacctctgctgtggtttgctgctgggggcgatgggagcgcctctccgtcctgtgccctggtccaggatgctgacagcagtgagaggcctgccgtgaggtttggtcttgtcagacctgtagcctggacctcgccgggggaccagggagtgcacgtctgtagatctgtacatatctgggcctttggaggccacgtgtggcatgggaggggctacctggtccctttcacagccaggacacgcctggatgagaaagcctgaggtgcctggcatgcccaccggtgccactctgcagcctccacccctggcctgagtccccctccatccgtcttggtggacacctgtgtggctctcacctgcgttttgagtctgttcttccaggagtaataaattctggacatcatcactgga

SEQ ID NO: 302520 - DNA, 5512 bp, Artificial Sequence
  derived and/or modified sequence
agggcactgtttgaagaagcaaacatggtagcatcaagcattccttgaaatatggctccaagggaacaatgagacgtgctcttggtcttggaagctcatcagaatgtttagagctggggaggcctccaaacgcccattgcctgggccgtcgcccccaagggtgcggagtgtggaggttgcccgggggagggccggctacggattcacgctttcgggacaggcaccctgtgtgctcagctgcgtcatgagagggagccctgcggatttcgtgggcctccgagctggagaccagatacttgctgtcaatgaaatcaacgtgaaaaaagcatctcatgaagatgtagtgaaattaattgggaagtgctctggtgtccttcacatggtgattgctgaaggcgtcggccgcttcgaatcctgttccagtgatgaagaagggggactctatgaaggaaaaggctggctgaagcccaagctggattctaaagcactaggtataaacagagcagagcgagtcgtggaggaaatgcagtctggtggaattttcaatatgatttttgaaaacccgagcctttgtgcgagcaattcagagcccttgaaattgaaacaaagatccctttcagagtcggccgcaactcgatttgatgttggacatgaaagtataaataatccaaatcccaacatgctttctaaggaggaaatatcaaaagttattcatgatgattcggttttcagcattggactagaaagtcatgacgattttgcattggatgcaagtattttaaacgtggcgatgatcgtgggctacttaggctccattgagcttccttccacgagctccaacctggagtccgacagcttgcaagccatccgcggctgcatgcggcgcctgcgggcagagcagaaaatccactcgctggtgaccatgaagatcatgcacgactgtgtgcagctgagcactgacaaggctggagtcgtggccgagtacccggccgagaagctggccttcagcgccgtgtgcccggacgaccggcgatttttcgggttggttaccatgcagacgaatgacgacgggagcctggcccaggaggaggagggcgccctgcggacttcctgccacgtgttcatggtggacccagacttgtttaatcacaagatccaccaaggcattgctcggcggtttgggtttgagtgcacggccgacccagacaccaatggctgtctggaattcccggcgtcctccctccccgtcctgcagttcatctctgtcctgtaccgagacatgggtgagctgattgagggcatgcgggcccgcgcctttctggacggggacgccgatgcccaccagaacaacagcaccagcagcaacagtgacagcggcattgggaacttccaccaggaggagaagagcaaccgggtccttgtggtggacctgggtgggagctcgagcagacacggccccggaggcagcgcgtgggacggtgtgggtgggaggggtgcccagccctggggtgctccctggactgggcccttctgtccggaccccgaagggagccccccatttgaggccgctcatcagactgacaggttctgggacctaaacaagcacctagggccagcctctcctgtggaggtgcccccagcttccttgaggagctcagtccccccttccaagaggggcaccgtgggtgctggctgtggtttcaaccagcgctggctcccggtccacgtgctccgggagtggcagtgcggacacaccagcgaccaggactcttacacagattccaccgatggctggtccagcatcaactgcggcacactgccccctcctatgagcaagatccccgcagaccgctacagggtggagggcagcttcgcgcagcccccgctgaatgccccgaagagggagtggtccaggaaggcctttggaatgcaaagcatttttggtccccatcgaaatgttcgaaagactaaggaagataaaaagggctcaaaatttgggcggggaactggactcactcagccttctcaacgcacgtctgctcggagatcatttgggagatccaagagattcagtatcactcgctcccttgatgatcttgagtctgcaactgtgtctgatggcgagttgacgggcgccgacctgaaggactgcgtcagcaacaacagcctgagcagcaatgccagcctccccagcgtgcagagctgccggcgcctgcgtgagaggagggtcgccagctgggccgtgtcctttgagcgcctgctgcaggaccccgtcggtgtccgctacttctctgattttctaaggaaagaattcagtgaagaaaacattttattctggcaggcctgtgaatattttaatcatgttcctgcacatgacaaaaaggagctttcctacagggcccgggagattttcagtaagtttctctgcagcaaagccaccaccccggtcaacatcgacagccaggcccagctagcagacgacgtcctccgcgcacctcacccagacatgttcaaggagcagcagctgcagatcttcaatctcatgaagtttgatagctacactcgctttctgaagtccccgctgtaccaggaatgcatcctggcggaagtggagggccgtgcactcccggactcgcagcaggtccccagcagcccggcttccaagcacagcctcggttcagaccactccagtgtgtccacgccaaaaaagttaagtggaaaatcaaaatccggccgatccctgaatgaagagctgggggatgaggacagcgagaagaagcggaaaggcgcgtttttctcgtggtcgcggaccaggagcaccgggaggtcccagaaaaagagggagcacggggaccacgcagacgacgccctgcatgccaatggaggcctgtgtcgccgagagtcgcagggctctgtgtcctctgcggggagcctggacctgtcggaggcctgcaggactttggcacccgagaaggacaaggccaccaagcactgctgcattcatctcccggatgggacatcctgcgtggtggctgtcaaggcgggcttctccatcaaagacatcctgtccggactctgtgagcggcatggcatcaacggggcggccgcggacctcttcctggtgggcggggacaagcctctggtgctgcaccaagacagtagcatcttggagtcaagggacctgcgcctagaaaagcgcaccttgtttcggctggatcttgttccgattaaccggtcagtgggactcaaggccaagcccaccaagcccgtcacggaggtgctgcggcccgtggtggccagatacggcctggacctcagtggcctgctggtgaggctgagtggagagaaggagcccctggaccttggcgcccctatatcgagtctggacggacagcgggttgtcttggaggagaaggatccttccagaggaaaggcatccgcagataaacagaaaggtgtgccagtgaaacagaacacagctgtaaattccagctccagaaaccactcggctacgggagaggaaagaacactaggcaagtctaattctattaaaataaaaggagaaaatggaaaaaatgctagggatccccggctttcaaagagagaagaatctattgcaaagattgggaaaaaaaaatatcagaaaattaatttggacgaagcagaggagttttttgagcttatttccaaagctcagagcaacagagcagatgaccaacgtgggctgctaaggaaggaagacctggtgttgccagagttcctccgtttacctcctggttccacagaactcaccctccccactccagctgctgtggccaagggctttagcaagagaagcgccacaggcaacggccgggagagcgcctcccagcctggcgagcagtgggagccagtccaggagagcagcgacagcccgtccaccagcccgggctcagcctccagcccccctggacctcctgggacgaccccccccgggcagaagtctcccagcgggcccttctgcactccccagtcccccgtctccctcgcgcaggagggcaccgcccagatctggaagaggcagtctcaggaagtggaggccgggggcatccagacggtggaggatgagcacgtggccgagctgaccctgatgggggagggggacatcagcagccccaacagcaccttgctgccgccgccctccaccccccaggaagtgccaggaccttccagaccaggtacctccaggttctgatccctccaccttggccccgtaagcgtggtctgctcagcttccagtcagaaaggacagtgggcccccggctgccactgtttgctggtggtctccgtgaccccctcctcacctgctggttgggggcttccttggccctcttggaaaggaggggctcgtgtggccccaggccagtgtctgtcaggatggtccccccgaggcgctctgggcaggcatcctggtgtcctgagaggctcttgcaggaatgatacgtggcagtgcctgcagcgaggtctgggaacaccctgggtgaggcctgggggtttccgaaaatggaggcattcctttccaaatctggacagcgatcgtttttagtgtttctgtctcaagactggaaaacaatagcatttgtcttgagtgaggaagtgaagcccgctgtgttcatagcaggagagggctcccagacacaggcccgtcctcggaagagccttgagagtgcagctcggacccaccggcggcccccgtagcaggtggtgtgggtgctcgggagtggaggtgacgtcagcagcgctctctgaccgcgggtgtcacgggcatttctcaaaggaagcaggggattcagtgagtgtgaaggtgaacaggatggcctggcagcagggatgtttccgtgagccacaaataccagaaactgaggcgaggctcccagcagccggtagggaaaggtgtttccaggggtccgagggccgtggcctgcgtggccatcccctggagagaggagccgctcagggtgcgcgtcatggagtgtgctcaggggtgcgtggacacctctgctgtggtttgctgctgggggcgatgggagcgcctctccgtcctgtgccctggtccaggatgctgacagcagtgagaggcctgccgtgaggtttggtcttgtcagacctgtagcctggacctcgccgggggaccagggagtgcacgtctgtagatctgtacatatctgggcctttggaggccacgtgtggcatgggaggggctacctggtccctttcacagccaggacacgcctggatgagaaagcctgaggtgcctggcatgcccaccggtgccactctgcagcctccacccctggcctgagtccccctccatccgtcttggtggacacctgtgtggctctcacctgcgttttgagtctgttcttccaggagtaataaattctggacatcatcactggactggcttacaacttttctttctcatttgaaactttgtttccactttagaaaataataaaagtattttaatcta

SEQ ID NO: 302521 - protein, 618 aa, Artificial Sequence
  derived and/or modified sequence
MAGSGPRPRSWGRREAGARDEAAAAGGRGPGPCRCSQGRRAWIAPGKPAMPAAWTPFMAAEEMHWPVPMKAIGAQNLLTMPGGVAKAGYLHKKGGTQLQLLKWPLRFVIIHKRCVYYFKSSTSASPQGAFSLSGYNRVMRAAEETTSNNVFPFKIIHISKKHRTWFFSASSEEERKSWMALLRREIGHFHEKKDLPLDTSDSSSDTDSFYGAVERPVDISLSPYPTDNEDYEHDDEDDSYLEPDSPEPGRLEDALMHPPAYPPPPVPTPRKPAFSDMPRAHSFTSKGPGPLLPPPPPKHGLPDVGLAAEDSKRDPLCPRRAEPCPRVPATPRRMSDPPLSTMPTAPGLRKPPCFRESASPSPEPWTPGHGACSTSSAAIMATATSRNCDKLKSFHLSPRGPPTSEPPPVPANKPKFLKIAEEDPPREAAMPGLFVPPVAPRPPALKLPVPEAMARPAVLPRPEKPQLPHLQRSPPDGQSFRSFSFEKPRQPSQADTGGDDSDEDYEKVPLPNSVFVNTTESCEVERLFKATSPRGEPQDGLYCIRNSSTKSGKVLVVWDETSNKVRNYRIFEKDSKFYLEGEVLFVSVGSMVEHYHTHVLPSHQSLLLRHPYGYTGPR

SEQ ID NO: 302522 - DNA, 1857 bp, Artificial Sequence
  derived and/or modified sequence
atggcaggctctgggccaagaccaaggtcctggggaagaagggaggccggagcacgcgacgaggcagcggcagctggaggaagaggcccaggcccgtgccgatgcagccaggggcggcgggcatggatagcccccggtaaaccagctatgccggctgcatggacacctttcatggctgctgaagagatgcattggccagtccccatgaaggctatcggtgctcaaaatctgttaactatgccgggcggcgtggctaaggcgggttacctgcacaaaaagggcggcactcagcttcaattgctcaagtggccactcagattcgttatcatccataagaggtgtgtctattatttcaagagttctacatccgcatcaccccagggtgccttttctctttccggctataatagggtgatgagggcagccgaagagacaactagcaacaatgtttttcctttcaagataattcatatctcgaaaaaacacaggacgtggtttttttcagcgagctctgaggaagagagaaagtcttggatggctcttttgagaagagagatcgggcatttccatgagaaaaaggacctgcctctggacacgagcgactcctcctcagatactgactcattttatggagctgtggaacggcctgtggatattagcctgagcccgtaccccacggacaacgaggattatgagcacgacgacgaggacgacagctacctcgaacccgactctcctgaacctggccgactggaggacgccctgatgcaccccccagcttatccaccccctcccgtaccgactcccaggaaacccgcgttcagtgatatgcccagggcccactcatttacctctaaaggtcctggacctttgctgcccccccccccacctaagcatgggttgcccgacgtcggcttggctgccgaggatagcaaacgggatcctctctgtcctagacgggctgagccctgccctagggtacccgcaacacctaggagaatgagtgatccacccttaagcactatgcccaccgcccctggtttgcgaaaacctccttgtttccgcgagagtgcttcaccatcccctgagccatggacgcctggccacggcgcctgctccacctcttctgcagcgattatggctacggccacctcgagaaattgcgataagctgaaatcctttcacctgagtccccgcggtccacctacatccgagccaccacctgtgccggctaacaaacctaaattcctaaagatagccgaagaggaccccccgcgcgaggcggccatgcctgggctcttcgttccacccgtagcaccacgacccccagcactcaagctacccgtgccggaggccatggctcgacctgccgtcctgcctaggcccgaaaagcctcagctgccgcatttacagcgtagcccacctgacggccagtcattccgttcgtttagtttcgagaagccgcgccagccttcccaggccgacaccggaggcgacgactctgacgaggactacgagaaggtgcccctgcctaacagcgtgtttgtaaacactacggagtcatgtgaggtggagagactcttcaaagctacaagcccacgaggcgagccacaagatggcctttattgcatcaggaattcctctaccaagtcaggaaaagtgttggtggtgtgggacgagacatctaataaagttcgaaactatcggatctttgagaaggactccaaattctaccttgagggagaagtactcttcgtgtccgttggctctatggttgagcattaccatacacacgtgctgcctagccaccaaagcctcctgctaagacatccctacggttacaccggcccaagatag

SEQ ID NO: 302523 - DNA, 1857 bp, Artificial Sequence
  derived and/or modified sequence
atggccggcagcggcccccggcccaggtcctggggcagaagagaggccggggccagagatgaggccgctgctgctgggggccggggccctggcccctgccgctgcagccagggcagaagagcctggatcgcccctgggaagccagccatgcctgctgcctggacccccttcatggctgctgaggagatgcactggcctgtgcccatgaaggccatcggggcccagaacctgctgaccatgcctggaggagtggccaaggccggctacctgcacaagaagggcggcacccagctgcagctgctgaagtggcccctgcgctttgtgatcatccacaagagatgtgtgtactacttcaagagcagcaccagcgccagcccccagggcgccttcagcctgagcggctacaacagagtgatgagagctgctgaggagaccaccagcaacaacgtgttccccttcaagatcatccacatcagcaagaagcacaggacctggttcttcagcgccagcagcgaggaggagaggaagtcctggatggccctgctgcggcgggagatcggccacttccacgagaagaaggacctgcccctggacaccagtgacagcagcagtgacacagacagcttctacggggctgtggagaggcctgtggacatcagcctgagcccctaccccacagacaatgaagattatgaacatgatgatgaagatgacagctacctggagccagacagccctgagcccggccgcctggaggatgccctgatgcaccccccagcctacccacctcctcctgtgcccacccccaggaagccagccttcagtgacatgccccgggcccacagcttcaccagcaagggccctggccccctgctgcccccacctccacccaagcacggcctgcctgatgtgggcctggccgctgaggacagcaagagggaccccctgtgccccaggagagctgagccctgcccccgggtgcctgccacccccaggaggatgtctgacccccccctgagcaccatgcccacagcccctggcctgaggaagccaccctgcttccgggagagcgccagccccagccctgagccctggaccccaggccatggagcctgcagcaccagcagcgctgccatcatggccacagccaccagcaggaactgtgacaagctgaagagcttccacctgagcccccggggcccccccaccagcgagcccccacctgtgcctgccaacaagcccaagttcctgaagattgctgaggaggaccccccccgggaggccgccatgcctggcctgtttgtgccccctgtggccccccggcccccagccctgaagctgcctgtgcctgaggccatggcccggcctgctgtgctgcccaggcctgagaagccccagctgccccacctgcagaggagccccccagatggccagagcttccgctccttctcctttgagaagccccggcagcccagccaggccgacacaggaggagatgacagtgatgaagattatgagaaggtgcccctgcccaacagcgtgtttgtgaacaccacagagagctgtgaggtggagcggctcttcaaggccaccagccccagaggagagccccaggacggcctgtactgcatccggaacagcagcaccaagagcggcaaggtgctggtggtgtgggatgagaccagcaacaaggtgaggaactaccgcatctttgagaaggacagcaagttctacctggagggggaggtgctgtttgtgtctgtgggctccatggtggagcactaccacacccacgtgctgcccagccaccagagcctgctgctgcggcacccctacggctacacaggccccaggtag

SEQ ID NO: 302524 - DNA, 1857 bp, Artificial Sequence
  derived and/or modified sequence
atggccggcagcggcccccggccccggagctggggccggcgggaggctggcgctcgagacgaggctgcggcggcgggtggtcgcggaccaggcccatgtagatgtagtcaagggcggagagcttggattgcccccggcaaaccagccatgccagctgcctggactccttttatggcagcagaagagatgcattggcctgtccccatgaaagcaatcggcgctcagaatctattgactatgcctgggggggtggcgaaagcagggtatctgcacaagaagggtggaacgcaactacaactcctcaagtggcccctaagattcgtcatcatacataagaggtgcgtatattatttcaaatcttccacgtccgcctctccacaaggtgcgttttctcttagtggttacaatcgcgtgatgcgcgccgccgaagaaaccacaagcaacaatgtgtttccctttaaaatcattcacatcagcaaaaagcaccgcacctggttctttagcgccagttccgaagaagagaggaaaagttggatggcactgctgcgtagagaaattgggcattttcacgagaagaaggatctgccattggataccagtgactccagttccgacaccgacagtttttacggcgcagtggaacgtcccgtggatatttccttatcaccttatccaacggataatgaggattatgagcacgacgatgaggacgatagttatctggaaccggacagccccgaacctgggaggctggaagacgcactcatgcatccaccggcctatcccccccccccagtgccaacaccaagaaagcccgcttttagtgacatgccaagggcccacagtttcactagcaagggtcctggacccctcttgccacccccaccaccaaagcacgggctacccgacgtggggcttgctgcagaagattccaagcgcgacccactgtgccccaggagagcagagccgtgtcctcgggtccccgctactcctagacgcatgtcagatcctccattgagcaccatgcccactgcacctggcttacggaagcccccgtgctttcgtgagtcagccagtccgtcccccgaaccttggactcctggacacggagcttgctccacttccagcgctgctataatggccactgccacgagccgtaactgcgataagctgaagtcttttcacctgtccccaaggggacctcccacaagtgaacctcctccggttcctgctaataagcctaaatttttaaaaattgctgaggaagatccgccgcgcgaagcagctatgcctggtctgttcgtacctcccgtcgccccaaggccacctgctctgaaactccctgtgcccgaggcaatggcgcgtcctgccgtactgcctaggcccgagaaacctcagctccctcacctgcagcgctccccaccggatggtcagtcattccgtagctttagtttcgagaaaccccggcagccttcccaagctgatacaggcggggatgattccgatgaagactacgagaaggtgccgctgcctaactcagtgtttgtgaatacgaccgagtcatgtgaggtcgaacgcctgttcaaagcaacgagccctaggggggagcctcaggacggactgtactgtattagaaactcctccaccaagtcaggaaaggtacttgtggtctgggacgaaacaagcaacaaggtacgcaattatcgaatattcgaaaaagattctaagttttacctggaaggcgaggtacttttcgtatctgtaggatcaatggtcgagcattatcacacacatgtgcttccgagccatcaatccctcctcctcagacatccttatggctatactggtcctcgatag

SEQ ID NO: 302525 - DNA, 1857 bp, Artificial Sequence
  derived and/or modified sequence
atggcaggctcaggaccacgacccagatcttggggccgaagagaggccggtgcaagggacgaagccgcagccgcaggcggtcgtggccctgggccatgtaggtgtagccaagggaggcgggcttggatcgcaccgggtaagcctgcaatgccagccgcttggacccccttcatggccgcagaggagatgcattggcccgtgcccatgaaagcgatcggcgctcaaaatttactcacaatgccaggtggagtggctaaagccggatacctccataaaaagggtggcacccagctgcagttactgaagtggccccttaggttcgtcatcatccataagcgttgcgtgtactactttaaatcttctaccagcgcatctccacagggagctttctccctgtccggttataacagagtaatgagggccgctgaggagacgaccagcaataacgttttcccttttaaaattatacacattagcaaaaaacatcgcacctggtttttttcagcttcttctgaggaagagcgaaaatcctggatggctctgttaagaagggagataggccactttcacgagaagaaggatcttcctctggatacgtctgatagctccagtgatacagattcattctacggagccgtagagcgcccagttgacatctctctgtctccatatccgacagacaatgaggactatgagcacgacgatgaagatgattcatacctggagcccgattcgccagagcccggacggctggaagacgcccttatgcacccacctgcatacccaccacctccagtgcccacccctcgcaaacctgcattttctgatatgcctagagcccattccttcaccagcaaggggcctgggccattactgcccccaccgccacctaaacacgggttacctgatgtggggcttgccgcagaagattccaagcgggatccactctgccccaggcgcgctgaaccttgcccgagggtccccgctacacccagaaggatgtctgaccccccactgagtactatgcctacggccccaggactgagaaaacctccctgcttcagagagtccgcaagtccatccccggaaccatggactcctggccacggggcttgctccacctcctcggcagctatcatggcaaccgccacgtcgcgaaattgtgataagctgaagagtttccatctctcccccagaggaccacccacaagcgaaccaccgcctgttccggcaaacaagccaaagtttctcaagattgctgaagaggaccccccaagggaggccgctatgcctggcctatttgtccctccggttgcccctcgcccaccggcactgaagttacctgtccctgaagccatggccaggccagccgtcctgcctcggccagagaaaccccagttgccacacctgcagcgtagccctcccgatggtcagtcttttaggtcattctcatttgagaaacctaggcagccaagtcaggccgacacaggaggcgatgattccgatgaggactacgaaaaagtgccattgcccaattcggtgtttgtcaacactacagaatcatgcgaagtggagcgactctttaaggccacctctcctaggggtgaaccacaggatggattgtactgcatccgcaattcttctaccaagagcggcaaggtactcgtggtctgggacgagacatcaaataaggttagaaactaccgaatttttgaaaaagatagcaaattctacctcgagggggaagttttattcgtaagcgtaggtagcatggtggagcattatcacacccatgtcttaccatcccaccagtccctcctccttcggcatccatacggctacactggtccacgttag

SEQ ID NO: 302526 - DNA, 9158 bp, Artificial Sequence
  derived and/or modified sequence
ggggaggagccggcggctgccaggccagggccggcgggcatggcgggctccgggccgcggccgcggagctggggccggcgggaggcgggcgcccgggacgaggcggcggcggccgggggacgcggcccggggccgtgccggtgctcgcaggggaggcgggcgtggatcgccccggggaagccggccatgcccgccgcgtggacgcccttcatggcggctgaagagatgcattggcctgtccctatgaaggccattggtgcccagaacctgctaaccatgcctgggggcgtggccaaggctggctacctgcacaagaagggcggtacccagctgcagctgctgaaatggcccctgcgctttgtcatcatccacaaacgctgcgtctactacttcaagagtagcacctctgcctccccgcagggcgccttctccctgagtggctataaccgggtgatgcgggcggctgaggagaccacgtccaacaacgttttccccttcaagatcatccatatcagcaagaagcaccgcacgtggttcttctcggcctcctccgaggaggagcgcaagagctggatggccttgctgcgcagggagattggccacttccacgaaaagaaagacctgcccttggacaccagcgactccagctcggacacagacagcttctacggcgcagttgagcggcctgtggatatcagcctttccccgtaccccacggacaatgaagactatgagcacgacgatgaggatgactcctacctggagcctgactccccggagcccggaaggcttgaggatgccctgatgcacccaccggcttacccaccacccccagtgcccacgcccaggaagccagccttctctgacatgccccgggcccactcctttacctccaagggccccggtcccctactgccacccccgccccctaagcacggcctcccagatgttggcctggctgctgaggactccaagagggacccactgtgcccgaggcgggctgagccttgccccagggtacctgctaccccccgaaggatgagcgatccccctctgagcaccatgcccaccgcacccggcctccggaaacccccttgcttccgggagagtgccagccccagcccggagccctggacccctggccacggggcctgctccacttccagtgctgccatcatggccactgccacctccagaaactgtgacaaactcaagtccttccacctgtccccccgaggaccacccacatctgagcccccacctgtgccagccaacaagcccaagttcctgaagatagctgaagaggaccccccaagggaggcagccatgcccggactctttgtgccccccgtggctccccggcctcctgcgctgaagctgccagtgcctgaggccatggcgcggcccgcagtcctgcccaggccagagaagccgcagctcccgcacctccagcgatcaccccccgatgggcagagtttcaggagcttctcctttgaaaagccccggcaaccctcacaggctgacactggcggggacgactcggacgaggactatgagaaggtgccactgcccaactcggtcttcgtcaacaccacggagtcctgcgaagtggaaaggttgttcaaggctacaagcccccggggagagccccaggatggactctactgcatccggaactcctctaccaagtcggggaaggtcctggttgtgtgggacgaaacctctaacaaagtgaggaactatcgcatttttgagaaggactctaagttctacctggagggcgaggtcctgtttgtgagtgtgggcagcatggtggagcactaccacacccacgtgctgcccagccaccagagcctgctgctgcggcacccctacggctacactgggcctaggtgatggcagtccatgtggctgccaggccaaggcagtcacaggggccctgaccccaggccacacagacggacatgggcccacatgggagggtgagcaggagcaaggctgtgcttgcctagggcctctgtgatggacatctcgtaggacccagccagtctcatccagcaggttgggttctagggctgaaccaggcgccaggctccagaggacgaagggactctgttgccccacactaacttgccctgtcccaatcccagaaacccaggaccaagctgtgcctgggctccaaggacaggaacactggtccccccatcacactcacccctaagtgggctgggagccaggcagggccagggcagctgggtgggggccggggctggccctgggacccccaggaacgctaagacacaggctccagtaggggctgttgcctccaataaagcagcagtgagctttgccttggtggctggggcttgattgggaaggaggggattaccagcttactgggtgcccatgctgatgtctaagtggtgaccgcagcagtacccgggaaccccaacagttggttgtcttgtcttccagggtgcaggtcactgagtgacttccccagggtgcacagcgagtaacagatcaggacccaaacttgggcagtctgggctgggagcccacaccccactcaccagttctgctgcctcaggtcaggccagggcagtgctgctgcagagctagaaggccctgcagctacagctgcttcattccctgcattagtgcctggttactgggtacctcctgagtggctgtccccgttccagaacttgcatacactgagcgggctacagagctagaaggccctgcagctacagctgcttcattccctgcattagcgagcagttattgggtacctcctgcatgcctggtcccattccagacaggggcctctggcctggctgagttcacagcccagtctggggacagctgggtatgaggtgcttacggcacagtgtccagggcagctgggtgtgcagggactgggggctcccggaagattttttggaggaagtaacagctacgatgggatgggaacagtggaccctaagcaggccaagggtgcgtagggacggtggtacccagatgcccaagtcttccaggcaatacctggctcaggcccagccccaatccatccccttactttctgccatggagttccagcaggtcactctccctggcacaccttccaggctggatttttaatgaaacagactcagggaggtaggggctggcagggaccctagaatccttgtgatttttcttagcaccttatgtcagggaaacctaaactgaggtcagcacttgggcccactgacagtgactgactgggggagaaggtcctgcagcccccttcccctgggtgtgttctggggacctgtggtttgctggcggaaacaagtgatgaggctggttagcggatgtgggaggctgtgaccccagggggccatagggtgcggtggaactgcaggccctgcagatgacggcagccagctgcttccaggaaccaggtgtccaaggccacctctgcaggggtttcctcttcagcctgcctggggtgagaggtcagtgcaccacagccgaggctggagcacagggagcttctgttgttctgatctatctctggaaaaccagccattcctcctccctgcagtcagaattctttgccctgtctgacctgaacttgcttagggagtcatgccactccccactgtggccatagtttctcttcctgtaaaattttattattttagttttttgtttttgagatgtagtctcaccctgtcgcccaggctggagtgcaatgccgtgatctccgctcactgccacctccgcctctctagttcaagcgattttcctgcctcagcctcccgagtagctgggattccaggcgcccgccaccacgcctggctaattttttgtatttttagtagagacgggattttatcatgttggccaggctggtctcgaactcctgacctcaggtgatctgcccaccttggcctcccaaagtgctgggattacaggcatgagccactgtgcctggccccttcctgtaaaatttttaaatggagaattgggtgcgagatgtggtttccagcctggtgcctggggtgctgagctagtgagtggtgcagtccaggacacctttgctttatgtcacttacacggtcacctggagccggctcaagtggctaaagcatcctggggcccagagccaggtgataggtccctctggccaactggacagttgaggcctgtggttacccgaagcccagctggggccctggtccagcctcgcctcccagactctgcacctgctagcacagctgtccacgtctgtgtgagctgctctaggccgagggcctcagtttcaagagtgtgttggggtgggatggggcaggccgtggtcctccagcatgaagaaggagccatgaggagttcccatgacctcccgagacttgccataagtgttctagtccacatataagggtagggttgggattaccatttactgaccacatctgtgaggtgccgagctgggtgcttgacatcatttgcttggagaagcagctgctagtagacccattttacaggtgagagaaccaagtctcacagaggcctgggttcaagtcccacctctgccactaactggcatgtgaccctatctatccttcactgctctgagcctagaccctggcccctgcctggctccctgccaggctccctgccacccctcacgacctctgatggtcgttgtgggggtctcttgcctggctcccagggctagggttagggctctggaggtgctttcactcaaccaagggggccacagcactggggagtgaaactgccccgcctcaccctgcgttgccctctgggtctgtgagggtgggctggcaggaggcctaggccttgccctaggggcagtcctgcttcctcattttatagatagggaaactgaggctttgggaggactcactgacatacctaccttcaagatgagttcaggtgggctcagttctggggcttgggaaaagggccccagtggctttgggaagcacccccagcccagggtgaaacatgcttcttctcttcctgtggttccatccgaaggattgtggtgagccccgtgccttcagttaataaagatttgtattgtgaaaagattttttcttttttttttgggacacagtctcactctgtcgcccaggctagagtggattggcgtgatctcggctcaatgcaaatctccagggttcaatcgattctcctgcctcaccctcccatgtagctgggattacagctgcctgccaaatttttgtatttttagtggaaccggggtttcaccatgttggccaggctggtcttgaactcctgacctcaactgatccgcccaccttggcctcccaagtgctgggattacaggcgcgagccacggcgcccagccttgaaaagatgtttttagaaccagaagaaacctcggttcccactgatccttctgggccacgttgtgcggagctcccctgctggttggggctcagcgcagccccagggaggtgcttcctgcacctcaggatgggcgagggtgggcattgggggagagggggacctgggacctgcggcttagttccctgaggcaggcagggcttattggggccatttcatagaaaggcagattgaagctcagcagggaagaggcttttgagggtgatccaggcgctggagggatggcctaggacaccagggtcacaccaggaacatgggagggccgtgcttgtctctagacgaggggaatgggggaagggccacaacctctgtttctgtgacccagcagcatcaagcccctcgctgggcacctcgcacacaccccctgccttatctctgcctgcacgccctgttccctccacctagactgcctgctgagggggcagtgccaggaggttgcctgtccttggggaagaggggcagtgaccctgtgaagatgcttgacagacaacccccaccacctcagaagtgtgtgtgagtggtgaacccttttaagccatcttccagccattctcactggagggagatttgatgggtacagagcagacccctacctgtctaccctccttcggacccctaggaagcttcgcaggccttccaggctgccagacagctgccctggcgttgccgtctgcttcttccctggccccactctgaggggctcagagctgaggcagaatccctttttcattcatttcctgcagaataaaacaacatacagaaaagtgaataaaacataaatgcacaacctaacacactgttaggaagtgaacgatctgcaaccaccatcaggaaatagttttgccagcacccaagtgccctcccctcacagtgtcacttccggcctctctgccctggcttatgtgagtcttgtgttcttgtttttctaaaaagtcttcagcacccaattatgcaggcattgcagtattttcctgtttctgtgctttatccccttgaatcatacagatgcaaattctggcagctggcttctttggctcgttattatgtctgtgagatttattcatgttgctgtgcgtagtatagtttgtgcatgttcattgctaaaaacttccattgtttggctgtatcgtagttcacagattcatttcactgtcagtcaagcttgtccaatgcatgcagcccaggatgcctttgaatgtggcccaacacaaatttgtaaactttcttaaaacattataaagatttttgtttgcgatttttttttttagctcatcagctatagttagtggtagtgtattttatgcgtgacccgagacagttcttccggtatggtccatggaagccaaaagattggacatgcctgctgtagatggacagttggtttgtttctagtttggggtaactacacacaatgctgctagcaacagttttgtccatgtctctgatgcacgtgtgttttttgcaaatggtgcacaaatttttctagggtttgtactcaggagtctgactcctgggttctagggtatgaagatctttctaaatattgttctagtttacgtgcccaccagcagtaaaacagaattcccttgccttcccatccttggcagacatttcacttttgccagtctggtggggtgtatagttatggccttaatttgcatttagctaattaccaaggagattgagcatatttttatgtttttattaaccattttgattttgtctcctgtgaagtgtctatcatcttttgcccattttttaacttgttgtctttttctttttcttttctttttttttttttctgagacagggtctcactctgttgccctggctggagtgcagtggtgcaatctcagctcactgcagccttgagtcaggctcaggtgattctctcacctcagcctcccaagtagctgggaccacaggcccacaccaccaagcccagctaattttttgtatttttaagtagagacgggtttcatcatgttatgcaggctgctctcaaactcttgagctcaagcgatctgctggcctcagcctcccaaagttgggattataggcgtgagctaccagattttttcttattaatctaataattctttgtatagtcttgatattatccataatgtgtattgcaaatatcttctctaactctggcttgactgtttatggtgtcctttttttttggggggggttttttgagacaaggtcttgctctgtcacccaggctggagtgttatggcacaatcttggcttattgcagcctcaattcctaggcttaaacagtcctcccacctcagcctcctgagtagccggaactacagtcacgcacttccatgtccagataattttttttttttttttagagataggatcttactatgccccagctggtctcaaactcctagactcaatgagcctcccatcttgacctcccaaagtgctgggagtacaggcatgagccactgtgcatgccagttcttatttttaatgcagttgaattgatcagtgttttcattttggttagtgctttttgtggcttaagaaattctttccaggctgggtacagtggctcacacctgtaatgccagcactttgggggcagaggcaggaggattacttgagctcaggagtttgagaccaacctggacaacatggcgaaacaccatctctacaaaaaatacaaaaattagctggacatggtggtgcgtgcctgtagtcccagctactcaggtggctggggtgagaggattgcttgagcccagaaggtcaaggctgcagtgagctgtgattgtgccactgcacttcagcctgtgagacagagtgagaccctatctcaaaaaaaaccaaaaaaaaaaaaaaaaaaaagaaaaccactgaaattatttccactccaaggtcatgaagatagtctcttagattatattctgaaatccttataaatgtaaatttcatatttaggcctttaattcacctagatttggttttttgcatatggtgtgaggtaaggattcactttcatttttttctctccatagggttacacacctgtcctatcattgtttgtaatctaactttctgcgcccatctgcaatgccacctctgtcatatgtccacatatgacatatgtagatctgttgttggattctttcctctgttccattagtctgtctgttcttgtgccaatatcaagctgtcttcattattatcaattatgtattgagatctgataaagtaagtcttttccaccttatttttcttctttgagagtgtcttgactattctggctctttgtattttcatgtaaggtttttctcccatataagttttaaaatcagcttgtcaattccaacaacaatgatgcacttgatagtttgggaatttattatagctatcaatcagttttgggaaaattgacgtctttacaatattgagttttctgattcatgaacatggtttacctctctttccatttgggtcttctttaaggtttaccaataggattttatatttttgtccattgtggtcttgcttatcttaagtttgatttgtaaatattttatgtttcttttagtctattgtaaattgtgtatttttaatttcatttttttttttgttaatagcatataaaacacaccttgtcttttaactggagcattttgtccattgtgtatttaatgtaattaaatctaccatcttattttatgcta

SEQ ID NO: 302527 - DNA, 2351 bp, Artificial Sequence
  derived and/or modified sequence
ggggaggagccggcggctgccaggccagggccggcgggcatggcgggctccgggccgcggccgcggagctggggccggcgggaggcgggcgcccgggacgaggcggcggcggccgggggacgcggcccggggccgtgccggtgctcgcaggggaggcgggcgtggatcgccccggggaagccggccatgcccgccgcgtggacgcccttcatggcggctgaagagatgcattggcctgtccctatgaaggccattggtgcccagaacctgctaaccatgcctgggggcgtggccaaggctggctacctgcacaagaagggcggtacccagctgcagctgctgaaatggcccctgcgctttgtcatcatccacaaacgctgcgtctactacttcaagagtagcacctctgcctccccgcagggcgccttctccctgagtggctataaccgggtgatgcgggcggctgaggagaccacgtccaacaacgttttccccttcaagatcatccatatcagcaagaagcaccgcacgtggttcttctcggcctcctccgaggaggagcgcaagagctggatggccttgctgcgcagggagattggccacttccacgaaaagaaagacctgcccttggacaccagcgactccagctcggacacagacagcttctacggcgcagttgagcggcctgtggatatcagcctttccccgtaccccacggacaatgaagactatgagcacgacgatgaggatgactcctacctggagcctgactccccggagcccggaaggcttgaggatgccctgatgcacccaccggcttacccaccacccccagtgcccacgcccaggaagccagccttctctgacatgccccgggcccactcctttacctccaagggccccggtcccctactgccacccccgccccctaagcacggcctcccagatgttggcctggctgctgaggactccaagagggacccactgtgcccgaggcgggctgagccttgccccagggtacctgctaccccccgaaggatgagcgatccccctctgagcaccatgcccaccgcacccggcctccggaaacccccttgcttccgggagagtgccagccccagcccggagccctggacccctggccacggggcctgctccacttccagtgctgccatcatggccactgccacctccagaaactgtgacaaactcaagtccttccacctgtccccccgaggaccacccacatctgagcccccacctgtgccagccaacaagcccaagttcctgaagatagctgaagaggaccccccaagggaggcagccatgcccggactctttgtgccccccgtggctccccggcctcctgcgctgaagctgccagtgcctgaggccatggcgcggcccgcagtcctgcccaggccagagaagccgcagctcccgcacctccagcgatcaccccccgatgggcagagtttcaggagcttctcctttgaaaagccccggcaaccctcacaggctgacactggcggggacgactcggacgaggactatgagaaggtgccactgcccaactcggtcttcgtcaacaccacggagtcctgcgaagtggaaaggttgttcaaggctacaagcccccggggagagccccaggatggactctactgcatccggaactcctctaccaagtcggggaaggtcctggttgtgtgggacgaaacctctaacaaagtgaggaactatcgcatttttgagaaggactctaagttctacctggagggcgaggtcctgtttgtgagtgtgggcagcatggtggagcactaccacacccacgtgctgcccagccaccagagcctgctgctgcggcacccctacggctacactgggcctaggtgatggcagtccatgtggctgccaggccaaggcagtcacaggggccctgaccccaggccacacagacggacatgggcccacatgggagggtgagcaggagcaaggctgtgcttgcctagggcctctgtgatggacatctcgtaggacccagccagtctcatccagcaggttgggttctagggctgaaccaggcgccaggctccagaggacgaagggactctgttgccccacactaacttgccctgtcccaatcccagaaacccaggaccaagctgtgcctgggctccaaggacaggaacactggtccccccatcacactcacccctaagtgggctgggagccaggcagggccagggcagctgggtgggggccggggctggccctgggacccccaggaacgctaagacacaggctccagtaggggctgttgcctccaataaagcagcagtgagctttgc

SEQ ID NO: 302528 - DNA, 1857 bp, Artificial Sequence
  derived and/or modified sequence
atggccggcagcggccccagacccagaagctggggcagaagagaggccggcgccagagacgaggccgccgccgccggcggcagaggccccggcccctgcagatgcagccagggcagaagagcctggatcgcccccggcaagcccgccatgcccgccgcctggacccccttcatggccgccgaggagatgcactggcccgtgcccatgaaggccatcggcgcccagaacctgctgaccatgcccggcggcgtggccaaggccggctacctgcacaagaagggcggcacccagctgcagctgctgaagtggcccctgagattcgtgatcatccacaagagatgcgtgtactacttcaagagcagcaccagcgccagcccccagggcgccttcagcctgagcggctacaacagagtgatgagagccgccgaggagaccaccagcaacaacgtgttccccttcaagatcatccacatcagcaagaagcacagaacctggttcttcagcgccagcagcgaggaggagagaaagagctggatggccctgctgagaagagagatcggccacttccacgagaagaaggacctgcccctggacaccagcgacagcagcagcgacaccgacagcttctacggcgccgtggagagacccgtggacatcagcctgagcccctaccccaccgacaacgaggactacgagcacgacgacgaggacgacagctacctggagcccgacagccccgagcccggcagactggaggacgccctgatgcacccccccgcctacccccccccccccgtgcccacccccagaaagcccgccttcagcgacatgcccagagcccacagcttcaccagcaagggccccggccccctgctgcccccccccccccccaagcacggcctgcccgacgtgggcctggccgccgaggacagcaagagagaccccctgtgccccagaagagccgagccctgccccagagtgcccgccacccccagaagaatgagcgacccccccctgagcaccatgcccaccgcccccggcctgagaaagcccccctgcttcagagagagcgccagccccagccccgagccctggacccccggccacggcgcctgcagcaccagcagcgccgccatcatggccaccgccaccagcagaaactgcgacaagctgaagagcttccacctgagccccagaggcccccccaccagcgagcccccccccgtgcccgccaacaagcccaagttcctgaagatcgccgaggaggacccccccagagaggccgccatgcccggcctgttcgtgccccccgtggcccccagaccccccgccctgaagctgcccgtgcccgaggccatggccagacccgccgtgctgcccagacccgagaagccccagctgccccacctgcagagaagcccccccgacggccagagcttcagaagcttcagcttcgagaagcccagacagcccagccaggccgacaccggcggcgacgacagcgacgaggactacgagaaggtgcccctgcccaacagcgtgttcgtgaacaccaccgagagctgcgaggtggagagactgttcaaggccaccagccccagaggcgagccccaggacggcctgtactgcatcagaaacagcagcaccaagagcggcaaggtgctggtggtgtgggacgagaccagcaacaaggtgagaaactacagaatcttcgagaaggacagcaagttctacctggagggcgaggtgctgttcgtgagcgtgggcagcatggtggagcactaccacacccacgtgctgcccagccaccagagcctgctgctgagacacccctacggctacaccggccccagatag

SEQ ID NO: 302529 - protein, 172 aa, Artificial Sequence
  derived and/or modified sequence
MAAEEMHWPVPMKAIGAQNLLTMPGGVAKAGYLHKKGGTQLQLLKWPLRFVIIHKRCVYYFKSSTSASPQGAFSLSGYNRVMRAAEETTSNNVFPFKIIHISKKHRTWFFSASSEEERKSWMALLRREIGHFHEKKDLPLDTSDSSSDTDSFYGAVERPVDISLSPYPTDNE

SEQ ID NO: 302530 - protein, 188 aa, Artificial Sequence
  derived and/or modified sequence
MAAEEMHWPVPMKAIGAQNLLTMPGGVAKAGYLHKKGGTQLQLLKWPLRFVIIHKRCVYYFKSSTSASPQGAFSLSGYNRVMRAAEETTSNNVFPFKIIHISKKHRTWFFSASSEEERKSWMALLRREIGHFHEKKDLPLDTSDSSSDTDSFYGAVERPVDISLSPYPTDNEDYEHDDEDDSYLEPDS

SEQ ID NO: 302531 - protein, 194 aa, Artificial Sequence
  derived and/or modified sequence
MAAEEMHWPVPMKAIGAQNLLTMPGGVAKAGYLHKKGGTQLQLLKWPLRFVIIHKRCVYYFKSSTSASPQGAFSLSGYNRVMRAAEETTSNNVFPFKIIHISKKHRTWFFSASSEEERKSWMALLRREIGHFHEKKDLPLDTSDSSSDTDSFYGAVERPVDISLSPYPTDNEDYEHDDEDDSYLEPDSPEPGRL

SEQ ID NO: 302532 - DNA, 1686 bp, Artificial Sequence
  derived and/or modified sequence
atggccgctgaggagatgcactggccagttcctatgaaggcgattggggcacaaaatctcctgaccatgcccgggggggtggccaaggccgggtacctgcataaaaagggcggaacgcaattgcaattgttaaagtggcccttacgctttgtgatcatccataagcggtgtgtttactacttcaagtcctccacctcagcttctcctcaaggcgccttttcccttagcggatataaccgtgtgatgcgagccgctgaagagacaaccagtaacaatgtattcccctttaagattattcacatcagcaagaaacatcggacttggttcttctcagcttcctccgaagaagaaaggaaaagctggatggcactactgcgacgggagattggccactttcatgaaaaaaaggatctccccctggatacctccgacagctcttcagacacagattccttttacggagccgtggagaggccagtggacatctctctgtctccttaccccactgataatgaagactacgaacacgacgatgaggatgactcttatctggagcctgatagccctgagccaggccgcctggaagatgctttaatgcacccgccggcatatccaccgccccccgtgcctacccctcgcaaacctgcctttagcgatatgccgcgtgctcattcattcacttcaaagggcccgggcccgctgctgccacctcctcctccaaagcacggcctgcctgacgtgggcctggctgcggaagattcaaagagagaccctctctgtcctcgccgggcggagccatgtccaagggtcccagccaccccccgccgcatgagcgaccctcccttgtcaactatgccaacagcaccagggcttagaaaacctccctgcttccgcgaaagcgcgagtccttcaccagagccatggacccctggccatggcgcttgttccacctctagtgccgccattatggccaccgccacctcccgcaattgcgataagctgaagagctttcacctctccccacgaggaccgcctaccagtgaacctcctcctgtcccggccaataagcccaagttcctgaagatcgcggaagaggacccacctcgcgaagccgctatgccgggcctgttcgttccacctgtggcacctagacctcccgcgcttaagctccctgtgcctgaggccatggcccggccagccgtgttgccaaggccagagaagccccagctgccgcatctccagcgaagtcctcctgatggtcagagttttcgctcttttagtttcgagaagccccgccagccctcccaggctgatactggcggggatgattcagacgaagattacgaaaaggttccccttccaaattcagtttttgtcaacaccacggagtcctgtgaagtcgagagactcttcaaggcgacatccccccgcggagagccacaggacggactgtactgtattagaaactcctcaacaaagtccgggaaggtcctagtggtgtgggatgagaccagcaataaggtaagaaactatagaatttttgagaaggattctaagttttatcttgaaggggaggtgctgttcgtatcagtcggctcaatggttgagcactatcacacacacgtactgccgtctcatcagagtctgcttctgaggcatccctacggatatacagggccccgatag

SEQ ID NO: 302533 - DNA, 1686 bp, Artificial Sequence
  derived and/or modified sequence
atggcggcggaggaaatgcattggcccgtgcccatgaaagctattggtgcccagaacctgttaaccatgcctggtggagtggcaaaggccgggtacttgcataaaaaagggggtacccaactgcagcttctaaaatggcctttgcgctttgtgataatccataaacgctgtgtgtattattttaagagcagcactagtgcttctcctcagggtgctttctccctgtcaggctacaaccgtgtgatgcgggccgctgaagagactacctccaacaacgtcttccccttcaaaataattcatatatctaaaaaacataggacatggttttttagcgcttcaagcgaagaagagcgtaagtcttggatggcccttttaagaagagagattggtcacttccatgaaaaaaaggatttgcctctcgacacctctgacagttcatctgacacggactccttttacggagcagtcgaaaggccggtggacatctctctctcaccataccccacagacaatgaggattatgaacacgacgatgaggacgactcttacctggaacctgactcccccgaaccaggccgtctcgaagatgcactgatgcatccccccgcctatccgcccccacccgtgccaacccctaggaaacccgccttcagtgacatgcctcgggcacatagcttcacttcaaagggccctgggcctcttctgcctccaccgccccctaagcatggcctaccggatgtgggattagctgcggaggactccaagcgtgacccactctgtccgcggcgtgcggagccgtgtccccgggtgccggcaacaccaaggagaatgagcgaccctcctctttcaacgatgcctacagcacccgggttacgcaagcctccctgctttagggaatccgccagccctagtcccgagccatggaccccaggccacggcgcttgcagcacgagctcagccgctataatggccaccgccacatccagaaattgtgacaagctgaaatcgttccacctgtctcctaggggcccgcccaccagcgaaccaccccctgtgccggccaataaacctaagtttttgaagatcgctgaagaagacccgcctagggaggcggcgatgcccggattattcgtgcctcccgttgcaccgagaccccccgctctcaaattacctgtgcccgaggcaatggcccggccggccgtgctgccccggcccgagaagcctcagttaccacacctgcagagatcacctcccgacggccaatctttcaggagtttcagcttcgagaagccaaggcagccatcgcaagccgatacaggaggcgacgactccgacgaggattacgagaaagtgcctctccctaacagcgttttcgtgaatactacggagtcttgtgaggtcgaaagattatttaaggccacaagtccccggggagaaccccaggatggtctgtactgcatcaggaactcttccacgaagtctggcaaagtgctggtggtttgggacgagacatctaataaggttcggaattacagaattttcgagaaggatagcaagttctatcttgaaggcgaggtgttgtttgtgagcgtaggatcaatggttgaacactatcacacacacgttctgcccagccaccagtcactgctgcttcggcacccttatgggtacaccgggccacggtag

SEQ ID NO: 302534 - DNA, 1686 bp, Artificial Sequence
  derived and/or modified sequence
atggctgctgaggagatgcattggccagtgccaatgaaagccataggggcccagaacttactcactatgccgggcggtgtggcaaaggccggctatctgcacaagaagggagggacgcagctccagctgctcaagtggcccctcagatttgttatcatccacaaaaggtgcgtttactatttcaagagtagcactagtgccagcccccagggggcatttagtttgagtggatataaccgggtaatgcgggccgccgaagagaccacctccaataatgtatttccgtttaagattatccacatctctaagaaacatcgtacctggttcttctctgcgtcaagcgaagaggaaagaaaatcctggatggccctgctcagacgggagatcggccactttcacgagaagaaagacctaccacttgacacctcagattcctcatccgacaccgattctttttatggagctgtggaaagacccgtggatataagtctatccccctatcccaccgacaacgaggattacgagcacgatgacgaagatgactcctacctagaacctgattcccctgaacccggcagactggaagacgctctgatgcacccccctgcttacccccctcctcctgtgcccacacccagaaagccggccttcagtgacatgcctcgtgcacactccttcaccagcaagggtccgggtccactgcttcccccccctccccccaagcacggactcccagacgtaggtttagccgctgaggactcaaagcgcgaccccctgtgtcctagaagggccgagccttgtcccagggttcccgctacacccagacggatgtccgatccaccgctgagcaccatgcccactgccccaggcctcagaaagccgccatgtttcagagagtccgcctctccatcacccgaaccatggactccggggcacggagcctgttcaacctcttccgcagcgataatggctactgcaaccagcagaaattgcgacaaactgaagtccttccacctgagcccacgtggaccccctacaagcgaaccccctcccgtgccagcaaacaagccaaagttcctgaagattgccgaagaggatcctcccagggaggcagccatgccaggcctgttcgtgcctcctgtggcaccccggcctcccgcgttgaagcttcctgttccagaggctatggccagaccggccgtcttgccgcggcccgagaaacctcagctgccacatctgcagaggtccccaccagacgggcagtcattccgcagtttcagtttcgagaaacctagacagccttctcaggcagacaccggaggggacgattcggacgaagattatgagaaagtgccactgcctaacagcgttttcgtcaatacaaccgaaagttgtgaagtggagaggctgtttaaggcgacgtcgcctaggggcgaacctcaggatggcctgtactgcatccgcaactctagtacaaagtccggaaaggtgttggtagtttgggacgaaacatccaacaaggtgcggaactacagaatattcgaaaaggatagcaagttttacttggagggggaggttctctttgtgtccgttggctctatggtcgagcattaccacactcatgtgttgccctcccaccagtcgctgcttctgcgccacccttatggatacactggtcctcgctag

SEQ ID NO: 302535 - DNA, 1686 bp, Artificial Sequence
  derived and/or modified sequence
atggctgctgaggagatgcactggccagtcccaatgaaggccatcggggctcagaacttgctcacaatgcctggcggggttgccaaggcaggttacctgcataaaaagggcggcacgcagctccagctcctgaagtggcctctgcgcttcgtgataatccataagcgatgtgtgtactacttcaagtcgagcacctccgctagcccgcaaggggccttctctctgtcaggatacaacagggtgatgagggctgccgaggagaccacctccaacaacgtctttccttttaagatcatccatataagtaagaagcacagaacgtggtttttcagcgcctcctcagaagaagagagaaaatcctggatggctttactgaggagagagatcggacacttccacgagaaaaaggacctgcccctggatactagcgattccagctctgacaccgattcgttctacggagcagtggaacgcccagtggacatatccttgtcgccataccctacagacaacgaggactatgagcatgatgacgaggatgattcatacctggaaccagattctcccgagccaggacggttggaagacgctcttatgcaccctcccgcgtacccgcctcctccggtacccactcctcgaaagccagcgtttagcgatatgccacgagctcactctttcacttccaaaggtcctggccctctgctgccaccgcccccaccaaagcatggcctcccagatgttggtctggccgccgaggactccaagagggatccactctgccctaggagggctgaaccatgccccagggtaccggcaacacctcgcagaatgtccgacccaccactgagtacaatgccaactgcccccggcttacgcaagcccccgtgctttagggaatccgcatctccatccccagagccttggacacccggacacggagcatgttcgacctcctctgccgctatcatggccacagctacctcacgaaattgcgacaagctgaagagcttccacctgtcaccccggggccctccaacaagcgaaccaccgcctgtgcccgccaataagccgaaatttctcaaaattgctgaggaggatcccccccgagaggcggccatgcctggtcttttcgttccccccgtcgcccccaggcctccagcactaaaactgcccgtcccagaagcaatggcgaggcctgccgtcttgccccggccagaaaaaccacagctcccacacctgcagagaagccccccggacggtcagagttttagatccttctctttcgaaaaaccccggcagcctagccaggccgacactggaggtgatgatagtgatgaagactacgaaaaggtgccactgcccaacagcgtgtttgtaaataccactgaaagctgtgaggtcgagaggctgtttaaggccacttctccccgtggcgaaccgcaagacggcctgtactgtattcggaacagttctaccaagtccgggaaggtactggtcgtctgggacgagacgtccaacaaagtgagaaattacaggatctttgagaaagacagtaagttttacctagagggcgaggtgctgttcgtgagcgtgggatcaatggtggaacactaccacacacatgttctgccctctcaccaatcacttctcctgcgacacccttatggttacactggtccgcgctag

SEQ ID NO: 302536 - DNA, 1686 bp, Artificial Sequence
  derived and/or modified sequence
atggctgctgaggagatgcactggcctgtgcccatgaaggccatcggggcccagaacctgctgaccatgcctgggggcgtggccaaggccggctacctgcacaagaagggcggcacccagctgcagctgctgaagtggcccctgcgcttcgtcatcatccacaagagatgtgtgtactacttcaagagcagcaccagcgccagcccccagggcgccttcagcctgagcggctacaacagagtgatgagagctgctgaggagaccaccagcaacaacgtgttccccttcaagatcatccacatcagcaagaagcacaggacctggttcttcagcgccagcagcgaggaggagaggaagtcctggatggccctgctgcggcgggagatcggccacttccacgagaagaaggacctgcccctggacaccagtgacagcagcagtgacacagacagcttctatggagctgtggagaggcctgtggacatcagcctgagcccctaccccacagacaatgaagattatgaacatgatgatgaagatgacagctacctggagccagacagccctgagcccggccgcctggaggatgccctgatgcaccccccagcctacccacctcctcctgtgcccacccccaggaagccagccttcagtgacatgccccgggcccacagcttcaccagcaaaggacctggccccctgctgcccccacctccacccaagcacggcctgcctgatgtgggcctggccgctgaggacagcaagagggaccccctgtgcccccggcgggcagagccctgcccccgggtgcctgccacccccaggaggatgtctgacccccccctgagcaccatgcccacagcccctggcctgaggaagccaccctgcttccgggagagcgccagccccagccctgagccctggaccccaggccacggggcctgcagcaccagcagcgctgccatcatggccacagccaccagcaggaactgtgacaagctgaagagcttccacctgagcccccggggcccccccaccagcgagcccccacctgtgcctgccaacaagcccaagttcctgaagattgctgaagaagatcctccccgggaggccgccatgcctggcctgtttgtgccccctgtggccccccggcccccagccctgaagctgcctgtgcctgaggccatggcccggcctgctgtgctgcccaggcctgagaagccccagctgccccacctgcagaggagccccccagatggccagagcttccgctccttctcctttgagaagccccggcagcccagccaggccgacacaggaggagatgacagtgatgaggactatgagaaggtgcccctgcccaacagcgtgtttgtgaacaccacagagagctgtgaggtggagcggctcttcaaggccaccagccccagaggagagccccaggacggcctgtactgcatccggaacagcagcaccaagagcggcaaggtgctggtggtgtgggatgagaccagcaacaaggtgaggaactaccgcatctttgagaaggacagcaagttctacctggagggggaggtgctgtttgtgtctgtgggctccatggtggagcactaccacacccacgtgctgcccagccaccagagcctgctgctgcggcacccctacggctacacaggccccaggtag

SEQ ID NO: 302537 - DNA, 1686 bp, Artificial Sequence
  derived and/or modified sequence
atggccgccgaggagatgcactggcccgtgcccatgaaggccatcggagcacaaaacttgcttacgatgcccggtggggtggcgaaggcagggtacttacacaagaagggcggcacacagctgcagcttttgaagtggcctctccggttcgtgatcatccataaaagatgtgtttattacttcaagtcatcgacgtccgcttctccgcagggtgctttcagtctctccggttataacagagttatgcgtgccgccgaagagacaacctcaaacaacgtcttcccctttaaaattattcacatcagcaaaaagcaccgaacctggtttttttcagccagctctgaagaggagaggaaatcatggatggcactgctacgtagagaaataggacactttcatgaaaagaaagatctgcccctggataccagtgatagctcatcagacaccgacagcttctatggcgccgtggaacgtccggtggacatatccctgtcgccctacccgacggataatgaagattatgagcatgacgacgaggacgattcctacctggagcccgactcaccagaaccagggcggctggaggacgcactcatgcacccacccgcgtacccgcctcctcctgtacccacacccagaaaacctgcttttagcgacatgcccagggcacactcattcacatctaagggaccgggacctctgctgccaccgcctcctccaaaacatggcctgcccgatgtgggcctggcggccgaggatagcaagagggatcccctgtgcccgaggagagctgaaccatgccctagagtgcccgctactcctcgcaggatgagtgacccccctttaagcaccatgccgactgcccccggcctcaggaagcccccttgtttcagagagtccgcttccccatcccccgaaccatggaccccaggacatggagcgtgtagcactagctcagccgcaattatggccactgccacatccagaaattgtgacaaattgaagagcttccatctctcccctaggggacccccgacctccgagcctcctcctgtgccagccaataagcccaagtttctcaagatagcagaagaagaccccccacgagaggctgccatgcctggcttgttcgtaccacctgtggccccccgccctcccgccctcaagctaccagttcctgaagccatggcgaggcccgcagtcctgcccagacccgagaaaccccagttgccccacctgcaacgatcacccccagatggacagagttttcgctcattttcatttgagaagcctcggcagccaagccaggccgacaccggcggtgacgattctgacgaggactacgagaaggtgccattacccaactctgtgtttgtgaatactacggagtcttgtgaggtggaacgcttattcaaagccactagcccaagaggagaaccccaggatgggttatactgcatccgcaattcctctacaaaaagtggaaaggtcctcgtggtgtgggacgaaacctcaaacaaagtgcggaactatagaatttttgaaaaagacagtaagttctaccttgaaggcgaagttctgtttgtgagtgtgggctctatggttgaacattatcacacacatgtactgcccagccaccagtccctgttacttcgccatccttatggctacaccgggcctagatag

SEQ ID NO: 302538 - DNA, 1686 bp, Artificial Sequence
  derived and/or modified sequence
atggccgccgaggagatgcactggcccgtgcccatgaaggccatcggagctcagaacctgctgaccatgcccgggggggtcgcaaaggcaggttaccttcacaaaaaaggagggacccagttgcagctcctgaagtggcccttaaggtttgttataatccacaagcgatgcgtctactactttaagtctagtacgtcagccagcccccagggtgcattctccctctcaggctataatagagttatgcgcgccgcagaggaaaccaccagcaataacgtttttccgttcaagataattcatattagcaaaaaacatcgcacctggttcttctctgcttcaagcgaagaggagagaaaatcgtggatggctctgctccgcagagagatcgggcacttccatgagaagaaggacctccccctcgacacctccgattcatcgtcggatactgactccttctatggcgccgtggaaaggcctgtggatattagcctgtccccatacccgacagataatgaggattatgagcacgatgacgaagatgacagctatctggaaccagattctccagagccaggaaggctcgaggacgcactgatgcaccctcccgcatatccaccgcccccggtgcccacacctcgcaaacctgcttttagcgacatgccccgtgcccactcgtttaccagcaaaggaccagggcccctgttgcccccccctcctccaaagcacgggttgcctgatgtgggcctggccgccgaggacagcaagagggaccccctgtgtccccgtcgggctgagccctgtccacgcgtgcccgccacgcctcgacggatgtccgacccacccctgtccaccatgccaactgcgcccggattgcgtaagcctccctgcttccgtgagagcgcttctccctctccagagccctggaccccaggccatggggcgtgttccacaagctcggccgcaattatggcaactgcgacctccaggaactgcgataaattgaaaagcttccacctgagcccacggggccctcccacttccgagccgccgcccgtcccagcaaacaagccaaaattcctgaaaatcgctgaggaggatcctcctcgggaggcagctatgccagggctgtttgtgccccctgtcgcaccacggccaccggcactaaagttgcccgtcccagaagcgatggcacggcctgccgtcctaccccgccccgagaaaccgcagttgccacacctccagaggagtcctcctgacggccagagttttcggtcctttagtttcgagaaacctcgccagccctcccaggccgacaccgggggagatgattccgatgaagactacgagaaggtgcccctgccgaatagtgtttttgtgaacactacagaatcctgcgaagtggagcggctgttcaaggccacatctcctagaggagagccccaggatggcctgtattgcatacgtaactcatccacaaaaagtgggaaggtcctggtggtgtgggatgagaccagcaacaaggtaagaaattatagaatctttgagaaagattccaagttttaccttgagggcgaggtcctctttgtctctgtcggcagcatggtcgaacactaccatactcacgtcctgccatcgcaccagagtctgttgctccgccacccttatggctacacgggaccccgttag

SEQ ID NO: 302539 - DNA, 1686 bp, Artificial Sequence
  derived and/or modified sequence
atggccgccgaggagatgcactggcccgtgcccatgaaggccatcggagcccagaatctgctcacaatgcctgggggggtggctaaggccggctacttgcacaagaaaggcgggacgcaactgcagctgctgaaatggccgctcagattcgtgatcattcataagagatgcgtgtactactttaagtcgtccacctctgctagcccccagggggcctttagtctatccggctacaacagagtcatgagggctgcagaggaaacgaccagcaataatgtgtttccgttcaaaatcattcatataagcaaaaagcatagaacctggtttttctccgccagctccgaagaagagcgcaaaagctggatggccctgctgcgtagggagataggacactttcatgaaaaaaaggatttgccactggacacttccgacagctcctcagatactgacagcttctacggggccgtcgaaagaccggtcgacataagtctgagcccataccccaccgacaatgaggactacgagcatgatgatgaggatgattcttatctggagcccgacagccccgagccgggccgtctcgaagatgcactgatgcaccctcccgcatacccccccccccctgtgccaacaccacgtaagcccgcattttctgatatgccacgagcccattcctttacaagcaagggacctgggcctctgctgccaccaccccctccaaaacatggcttgcccgacgtagggcttgccgctgaagacagcaagagagacccactctgccctagacgagccgaaccgtgtcctagggtgccagccactccaaggcggatgtccgacccgcccctaagtacgatgcccacggctcccggcttaaggaagccaccatgctttcgcgagtccgccagcccatcacctgaaccctggacaccgggtcacggcgcctgcagtactagcagtgccgccatcatggcaactgctacctctcgaaactgtgataaactgaagagttttcatttaagcccgagaggtccgccaacaagcgagccgccgccagtgcctgctaacaaacccaagttcctaaagatcgccgaggaggaccccccgcgggaagctgccatgcccgggctttttgttccacctgttgcaccccggccccccgccctcaagctgccagtgcctgaagccatggcccgtccggcagttctgccacgtccagagaagccccagttgccacatctccagagatctcctcctgacgggcagtccttccggtcattctcttttgagaaacccaggcaaccatcgcaggcggatacaggaggagacgacagtgatgaagattatgagaaggtgcctctccccaattcagtctttgtgaacactactgaaagctgtgaagttgaacgactgtttaaagccaccagcccacgaggggaacctcaagatggcctatactgcattcgaaatagttccacaaaaagcggaaaggttttagtcgtgtgggacgagacaagtaataaggtccgcaattaccggatattcgaaaaggattccaaattttacctagagggggaagtactgttcgtctcagtcggctccatggtggagcattatcacactcatgttctgcccagccatcagtccttgttgctccggcacccttacggctacaccgggccacgctag

SEQ ID NO: 302540 - DNA, 1686 bp, Artificial Sequence
  derived and/or modified sequence
atggccgccgaggagatgcactggcccgtgcccatgaaggccatcggggcacagaatctcttaacaatgcctggtggagtggccaaggccggctacctgcacaagaaaggtgggacacagcttcagctgctcaagtggcctctgaggttcgtcattattcacaagagatgcgtatattatttcaaatcctccactagcgcaagcccccagggggccttcagcttatccggttacaacagggtcatgagggccgccgaggagacgactagtaacaacgtgtttcccttcaagattattcatatctccaaaaaacataggacttggtttttctccgcatccagcgaagaagagagaaagtcctggatggccctgttgagacgggagatcgggcactttcatgaaaagaaggatctgccactcgataccagcgattctagctcagacaccgattccttctacggtgcagtggaacgccctgtcgacatttctttgtccccataccccactgacaatgaggattatgagcacgacgatgaggacgatagctatctggaacccgacagtcctgagccagggcgactggaggacgctttgatgcacccacccgcctacccgcctcccccagtcccaaccccacggaaacccgccttcagcgatatgccccgagcccattcattcacaagcaaaggtccgggacctcttctccccccccccccaccaaaacacgggctgccagacgtcgggttggctgcagaggattcaaagagagacccgttatgtccaagaagggctgaaccctgcccaagggtcccagcaactccaagacgcatgagtgatccccctctctctaccatgccaacagcaccggggctccggaaaccaccatgctttcgcgaaagcgcctctccttcaccagaaccctggaccccgggccatggggcctgcagcacgtcatcagccgcaatcatggctaccgccactagtcggaactgcgataaattgaagagcttccatctgagcccccgcgggccgccaacatcagagccaccacctgttccggccaacaagccgaagtttctcaaaatcgcagaggaggatccacctagggaggccgccatgcccggacttttcgtgccaccagtcgcaccccggcctcccgctttaaaattacccgttcctgaagctatggcccggcccgcagtgttgcctcggccagaaaaaccacagctgccacaccttcagaggagtcctcccgacggacaatctttccgttccttcagcttcgaaaaaccacggcagccttctcaggctgacacaggcggtgacgactccgatgaagactatgagaaagtgccactgcccaatagtgtttttgtaaatacaactgaatcatgtgaggtggaacgtctcttcaaagccacttctccacgaggcgaacctcaggatgggctgtactgcataagaaactctagcacaaaatcaggcaaagtcctggtggtgtgggacgagacctccaacaaggtcagaaattataggatcttcgagaaggattcgaagttctacctcgaaggtgaagtgctgtttgttagcgtagggtcaatggtggaacattaccacacgcacgtgctgccgtcccatcaaagcctgcttttgcgccacccttacggatataccgggccccgatag

SEQ ID NO: 302541 - DNA, 1686 bp, Artificial Sequence
  derived and/or modified sequence
atggctgctgaagaaatgcactggccagtgcctatgaaggccatcggcgctcagaatctcctaactatgcctgggggagtggccaaggctggatacttgcacaagaagggcggaacgcagctgcaactccttaagtggcctcttcggttcgtaattatccataagcgctgtgtctactatttcaagtctagtacatcggcctcacctcaaggcgcattcagcctttcaggttacaacagggtgatgcgtgcagcggaagagactacatcaaataacgtgtttccgtttaaaatcatacatatatccaagaaacaccgtacttggttcttcagcgctagcagcgaggaggagcgtaagtcatggatggctctgctgagaagagaaatcggacacttccatgagaagaaggatctccccttggataccagtgattcgtctagcgacactgatagtttctacggcgcagtcgaacgtccagttgacatctctttgtctccttatcccactgataatgaggattatgagcatgacgatgaggacgacagctatctagagcccgacagcccagagcccggacgtctcgaagatgccctcatgcacccacctgcttatccacctccccctgtgccgacaccacggaaaccagccttttccgacatgccacgagcccattcttttaccagtaaaggcccaggtcctctgctcccccctccaccaccgaagcacggtttgcctgatgtaggactggccgcagaagatagtaagcgcgatcccctgtgtccccgaagagcggagccatgcccccgagtgccagctaccccacggaggatgtctgatcctccgttgtctacaatgcccacggcgcctggattgagaaagccgccatgctttagggaatccgcttccccctcccctgaaccatggaccccagggcatggggcttgcagtacatcttcggcagcaatcatggctaccgccactagtcgtaattgcgacaagctaaagtctttccatctgagcccaagaggtccgccaaccagcgaaccaccacccgtaccagccaataaacctaagttcctgaagatcgctgaggaagacccccctagggaggccgcaatgcctggactctttgtccctcccgtggcccctagacccccagccctcaaactgcctgttccagaagccatggctcggccagcggtgcttccacggcctgagaaaccccagctcccccatttgcagaggtcacctcccgacggacaaagttttcgaagcttttcttttgagaagcctaggcagccgtcacaagctgataccggcggagatgacagcgacgaggattatgagaaggtgccccttccaaattctgtcttcgtaaacaccaccgaaagctgcgaggtcgagagactgtttaaggctactagcccgaggggtgaaccccaggacggactgtactgcatccgcaattcttctaccaagagcggcaaggtgcttgtagtgtgggacgagacaagcaacaaagtgaggaactaccgcattttcgaaaaggattctaagttttacctggagggtgaggtactttttgttagcgtgggctcgatggttgagcactaccatacgcatgtcctaccttcccaccaatcactactcttaaggcatccatacggctacaccggacccaggtag

SEQ ID NO: 302542 - DNA, 1686 bp, Artificial Sequence
  derived and/or modified sequence
atggctgccgaggaaatgcactggccagtgcccatgaaagctattggcgctcagaacctgctcaccatgcctggtggcgtggccaaggcgggatatctgcataagaagggtggtacgcagttacaattactcaagtggcccttacgcttcgttattattcacaagcgttgtgtgtattatttcaaaagctcaacgagtgccagtccgcagggcgcattttccttgtctggatataacagggtgatgcgcgctgcggaagagactacgagcaacaatgtgttcccttttaagattattcacatttcgaagaagcaccgcacgtggttctttagcgcgagctccgaggaggagagaaaatcatggatggccctcctccggagggagatcggacactttcacgagaagaaggatctgccattggatacatcagacagttctagcgataccgattcattctatggcgcagtggaacggcctgtggacatcagcctttccccataccctaccgacaacgaggattacgaacacgatgacgaggacgatagctatctggaaccagatagcccagagccaggacgacttgaggacgcactgatgcacccacctgcttatccgccaccaccagtccccacccccaggaaaccagcttttagcgatatgcctagggcgcactctttcacttccaagggcccagggccattactccccccaccccctccgaaacacgggttgcccgacgtgggtctagccgcagaggactcaaaaagagaccccctatgtcctaggcgggcagaaccttgccccagagtgccagccactcccagacggatgtccgacccgcctctttcaaccatgccgacagcgccagggttaagaaagccaccctgcttcagagaaagtgcgagtccgtcacccgagccgtggactcccggtcatggagcctgctccactagctccgctgccatcatggccaccgctacctccaggaattgcgacaagctgaaaagtttccatctgagcccacgaggaccgcctactagcgagcccccacctgtgccagccaacaaacctaagttcctgaagattgccgaggaagacccccctcgcgaggccgctatgcccggacttttcgtgcccccagttgccccaaggccccctgccctcaagctgccagtgccggaggcaatggcccgacctgccgtcctccccaggcctgaaaagccacagctacctcatctgcagagatctccaccagatggccagtctttccgcagtttttcatttgaaaagccacgacagcctagtcaggccgatacagggggagacgatagcgatgaggattatgaaaaggtcccacttcctaactcagtgtttgtgaacacgaccgaaagctgcgaggtggaaagattgtttaaggccacttcccccaggggggagccccaagacggattatactgtatccgaaattcatcaacaaaatcggggaaggtgctggttgtgtgggacgagacctccaacaaggttagaaactacaggatttttgaaaaggatagcaaattttatctggagggtgaggtcctgttcgtcagtgtggggtccatggtggagcattaccacactcacgtgctaccctcccaccagagcctcctgctgaggcatccctacggctataccgggcctaggtag

SEQ ID NO: 302543 - DNA, 1686 bp, Artificial Sequence
  derived and/or modified sequence
atggccgcagaggaaatgcactggcccgttcccatgaaggctataggggctcagaatctgctgactatgccgggtggtgttgcaaaagccggttatctccacaagaaaggcggaacgcagttgcaactcctgaaatggccattacgtttcgtgatcatccataaaaggtgcgtatactactttaaatcaagcaccagcgcctctcctcaaggggctttttcgctctccggctacaacagggttatgcgcgctgctgaggagaccacctcgaataacgtgtttccattcaaaataatacacataagcaagaagcatcggacctggtttttcagtgccagttccgaagaagaacgcaagtcctggatggctttactacggcgagagattggtcacttccacgaaaagaaggatcttccactggacaccagcgactccagctccgacactgactctttctacggcgctgtcgagcgcccagtggatataagcctgagtccttaccctaccgataatgaggactatgagcatgacgatgaggatgattcctacttagagcctgatagcccagagccgggtagattggaagacgcattgatgcatcctcctgcgtacccccctccccctgttcccactcccaggaagcccgctttttcagatatgccacgggctcacagcttcacaagtaaaggccctggaccgcttctgcctccccctccacccaaacatggcctgccagatgtgggtctggctgctgaagattcaaagagagatcccctctgtcctcgtagggcagaaccgtgtcctcgggtacccgcaacaccacggaggatgagtgaccctccattatccaccatgcctaccgcaccgggtttaagaaaaccaccatgctttagggagtccgcatcgcctagccctgaaccatggaccccagggcatggggcttgtagtacttcttctgcagccatcatggcaacagctactagcagaaactgcgataaactcaagtcatttcatctaagccctcgtgggcctcctacatcagagcctcctcccgtgcctgccaataaacccaagtttctgaagatcgcagaggaggaccctccgagggaggctgccatgccaggcttgtttgtaccccctgtcgcccctcgtcctccggctctgaagctccctgttcctgaggctatggctcgacctgcagttttacctcggcctgagaagccccagttaccccacctacagcgtagtccacccgacgggcagtcattccgttcgttttccttcgaaaagcccaggcagccctcccaggcggatacgggcggagacgatagtgacgaggactatgagaaggtgcctctccctaactccgtattcgtcaatacaaccgagagttgtgaggttgaaaggctgttcaaagccactagtcccaggggcgagccccaggacggcctatactgcattcgcaactcctcaaccaagagcggcaaggtgctcgtagtctgggatgaaacaagcaataaagtacgcaattatcggatttttgagaaggactccaaattttatctggaaggagaggtgctttttgtgtcggtcggatccatggtagaacattatcacactcatgtgctgcctagtcaccagtcacttctgttacgccacccatacggctatacaggaccaaggtag

SEQ ID NO: 302544 - DNA, 1686 bp, Artificial Sequence
  derived and/or modified sequence
atggccgctgaagaaatgcactggccggtgcctatgaaggcgattggtgcccagaatctcctgaccatgcctggtggggtggcaaaggcaggatacctgcacaagaagggcggaacacagctacagctgttaaaatggccccttcgctttgtcattattcacaagcgctgcgtatactacttcaaatcgagcacatctgccagcccacagggggcatttagcctgtctggctataacagggtcatgagggcggcagaggaaacgacatcgaacaatgtgtttccctttaaaattatacacatttctaagaagcatagaacctggttcttctctgctagctctgaagaggagcggaagtcatggatggccctgctacgacgcgaaatcggtcactttcatgaaaagaaggacctccctcttgatacttctgattctagttcggataccgactcgttttacggagctgtcgagaggccagtggatattagccttagcccctatcccacggacaacgaagactacgaacatgacgacgaagatgatagttatttggagcccgacagtcctgagcccggacgtctcgaggatgcgttaatgcacccccctgcctacccaccgccacccgtccctacaccaagaaaacccgctttcagtgacatgccaagagcccactcttttacaagtaaggggccaggtccccttttgcctcctcctcctcctaaacacggcctgccagacgttggactggccgctgaggatagcaagagagatccactgtgtcctaggagggcggaaccatgcccaagagtccctgcaactcctcgcaggatgagtgacccgcctttgtcgacaatgcccaccgcgccaggccttcggaagcccccatgcttccgggaaagcgccagcccctctcccgagccttggacacctgggcacggcgcatgctccacatcctccgccgctatcatggcaaccgccacgtctagaaattgcgataaactgaagtcattccatctgagtccaagaggccctcccacctctgagccacctcccgtgccggctaacaagcctaaattccttaagatagccgaggaagacccacctcgagaggcagcaatgcctggccttttcgtccccccagtcgcacccaggcccccagctctgaagctgccagttcctgaggcgatggcacggccagcggtcctgcctaggcctgagaagccccaactcccccaccttcagcgttccccgccagacgggcagtccttcagatcgttcagctttgagaaaccacgccaaccctctcaggctgatacagggggagatgatagcgatgaggattacgaaaaggttccgctgcccaactctgtgtttgttaacacaacagagagctgtgaagtggaaagattgttcaaggctacttctccgaggggcgaacctcaagacggattgtattgcatccgcaatagtagtacaaaatccgggaaagtcctggtagtgtgggacgagactagtaacaaggtgcgcaattacaggatttttgagaaggattccaagttctacttagagggagaggtgctctttgtatcagtcggatcaatggtcgagcactaccacacgcatgtactgccctcacatcagtcccttttactacggcacccgtatggatacacagggccacgatag

SEQ ID NO: 302545 - DNA, 1686 bp, Artificial Sequence
  derived and/or modified sequence
atggccgccgaggagatgcactggcccgtgcccatgaaggccatcggcgcccagaacctgctgaccatgcccggcggcgtggccaaggccggctacctgcacaagaagggcggcacccagctgcagctgctgaagtggcccctgagattcgtgatcatccacaagagatgcgtgtactacttcaagagcagcaccagcgccagcccccagggcgccttcagcctgagcggctacaacagagtgatgagagccgccgaggagaccaccagcaacaacgtgttccccttcaagatcatccacatcagcaagaagcacagaacctggttcttcagcgccagcagcgaggaggagagaaagagctggatggccctgctgagaagagagatcggccacttccacgagaagaaggacctgcccctggacaccagcgacagcagcagcgacaccgacagcttctacggcgccgtggagagacccgtggacatcagcctgagcccctaccccaccgacaacgaggactacgagcacgacgacgaggacgacagctacctggagcccgacagccccgagcccggcagactggaggacgccctgatgcacccccccgcctacccccccccccccgtgcccacccccagaaagcccgccttcagcgacatgcccagagcccacagcttcaccagcaagggccccggccccctgctgcccccccccccccccaagcacggcctgcccgacgtgggcctggccgccgaggacagcaagagagaccccctgtgccccagaagagccgagccctgccccagagtgcccgccacccccagaagaatgagcgacccccccctgagcaccatgcccaccgcccccggcctgagaaagcccccctgcttcagagagagcgccagccccagccccgagccctggacccccggccacggcgcctgcagcaccagcagcgccgccatcatggccaccgccaccagcagaaactgcgacaagctgaagagcttccacctgagccccagaggcccccccaccagcgagcccccccccgtgcccgccaacaagcccaagttcctgaagatcgccgaggaggacccccccagagaggccgccatgcccggcctgttcgtgccccccgtggcccccagaccccccgccctgaagctgcccgtgcccgaggccatggccagacccgccgtgctgcccagacccgagaagccccagctgccccacctgcagagaagcccccccgacggccagagcttcagaagcttcagcttcgagaagcccagacagcccagccaggccgacaccggcggcgacgacagcgacgaggactacgagaaggtgcccctgcccaacagcgtgttcgtgaacaccaccgagagctgcgaggtggagagactgttcaaggccaccagccccagaggcgagccccaggacggcctgtactgcatcagaaacagcagcaccaagagcggcaaggtgctggtggtgtgggacgagaccagcaacaaggtgagaaactacagaatcttcgagaaggacagcaagttctacctggagggcgaggtgctgttcgtgagcgtgggcagcatggtggagcactaccacacccacgtgctgcccagccaccagagcctgctgctgagacacccctacggctacaccggccccagatag

SEQ ID NO: 302546 - protein, 142 aa, Artificial Sequence
  derived and/or modified sequence
MAAEEMHWPVPMKAIGAQNLLTMPGGVAKAGYLHKKGGTQLQLLKWPLRFVIIHKRCVYYFKSSTSASPQGAFSLSGYNRVMRAAEETTSNNVFPFKIIHISKKHRTWFFSASSEEERKSWMALLRREIGHFHEKKDLPLDT

SEQ ID NO: 302547 - DNA, 294 bp, Artificial Sequence
  derived and/or modified sequence
atggcagccgaggagatgcattggcctgtgccaatgaaagccatcggggctcaaaatctactaaccatgccagggggcgttgcaaaggcagggtacctacataaaaaaggcggaacccagttacaactactgaagtggccgcttaggttcgtgatcatccataagagatgcgtctactacttcaagtcgtcgacgagcgcatccccccagggcgctttctctttgagtgggtacaatcgccagccgcggccccagccagcccaggccctttcccagacagaagcaggaccatag

SEQ ID NO: 302548 - DNA, 429 bp, Artificial Sequence
  derived and/or modified sequence
atggccgcagaggagatgcactggccggtacctatgaaagctatcggagcccaaaacctcctaaccatgcctggtggggtcgccaaagccggctacctacacaaaaagggcggcacacagcttcaattattaaaatggcctctgagattcgtgatcatccacaagcgctgcgtctattacttcaaatcctcaaccagcgcttcccctcagggcgccttcagcctgagtggatataaccgggtcatgcgggcggccgaggagactacctccaacaatgtctttccctttaaaatcattcatatcagcaagaaacaccgtacatggtttttctctgcatctagcgaagaagagaggaagagctggatggccctgctaagacgagaaattggccactttcacgaaaagaaggatttacctctggatacctag

SEQ ID NO: 302549 - DNA, 429 bp, Artificial Sequence
  derived and/or modified sequence
atggctgccgaggaaatgcactggccggtccccatgaaagccatcggggctcagaatttgttaacaatgcccggaggggtggcaaaagccggttacctgcataaaaaggggggtactcagctccagctgctcaaatggccactgagatttgtgatcatccacaagcgctgtgtgtattatttcaagagttcaacttcagctagtccacagggagcattctcactttctgggtataacagagtgatgcgggccgcggaagagaccacaagcaataatgtatttcctttcaaaatcattcatatctctaaaaagcaccgcacgtggttcttctccgcctcttccgaggaagagagaaagtcatggatggctctcctgaggcgagagattggacacttccacgaaaagaaagacctgcccctagacacctag

SEQ ID NO: 302550 - DNA, 519 bp, Artificial Sequence
  derived and/or modified sequence
atggctgccgaggagatgcactggccagtgcctatgaaggcaattggagctcagaatctgctgactatgccagggggagtcgctaaggcagggtatcttcacaagaaaggaggtacacagttgcaactgctgaaatggcctttgcgctttgtgatcatccacaaacgttgtgtgtattactttaagagctctacctccgcaagcccacagggtgctttcagcctatctggatacaatagggttatgagggcggccgaggagaccacttctaacaacgttttcccatttaagattatccacatcagcaaaaaacaccgaacatggttctttagtgccagttcagaggaagagcgcaagtcatggatggccttacttcgtcgtgagattgggcactttcatgaaaagaaggaccttcctctggacacaagtgactccagcagcgatacagatagcttctacggagctgtggaacggccagtggatatttccttaagtccctatcccactgacaacgagtag

SEQ ID NO: 302551 - DNA, 567 bp, Artificial Sequence
  derived and/or modified sequence
atggcagctgaagaaatgcattggcctgtacccatgaaggccattggagcccagaatctgctcaccatgcccggcggagtcgctaaagcgggttacctacataaaaaggggggcacacagttgcagctgctgaaatggcccctcagattcgtgatcattcataaacggtgcgtgtactactttaagtcatcaacatccgcttccccacagggcgccttcagcctcagcggctacaatcgggtcatgcgagccgccgaagagacgacctcgaataatgtgttcccttttaaaattattcatatatcaaaaaaacacagaacatggttcttctctgcaagctcagaggaggagagaaaaagctggatggctttattacgccgcgaaataggccatttccatgaaaagaaggacctaccattggacacatctgactctagctccgacaccgacagcttttatggcgccgtggaaagaccggtagatatatctctgtccccatatcccactgataatgaggattacgagcacgatgatgaggatgattcctacttggagcccgatagttag

SEQ ID NO: 302552 - DNA, 585 bp, Artificial Sequence
  derived and/or modified sequence
atggctgctgaggagatgcattggcctgtgcctatgaaagccatcggagcccaaaacctgctgaccatgcccggaggggtggccaaggcgggctatctgcacaagaaggggggcactcaactccagctgctcaagtggcccttacgcttcgtgattatacataagcgttgcgtttattacttcaaaagttccacctcagccagccctcagggcgcattcagtctcagtgggtacaacagagtaatgagggctgcagaagaaacaaccagtaataacgttttcccattcaagattattcacatctctaaaaagcaccgaacttggttcttttccgcatcaagcgaggaggagcgcaagtcgtggatggctttattaaggagagagatcggccatttccatgaaaagaaggatttacccctggacacctcagattcttcttccgatacagacagtttttatggcgccgtggaacgccctgtggacatctctttgtcaccttaccctacggataacgaagattacgagcacgatgacgaagatgactcatatctcgaacccgactctcctgagccaggccggctgtag

SEQ ID NO: 302553 - DNA, 411 bp, Artificial Sequence
  derived and/or modified sequence
atggcagccgaagaaatgcactggcccgtgcctatgaaggccatcggggctcagaatctgctcaccatgcccggcggtgtggcgaaggctggctatcttcacaagaaagggggaacccagctgcaactcttaaaatggccgctgaggtttgtgatcatacacaagaggtgtgtttactatttcaaatcaagtacttctgcaagtccacagggggctttctctctgagtgggtacaaccgcgttatgagggcagccgaggagaccacctctaataacgtgtttccattcaagatcattcatattagcaagaagcatcgaacctggtttttctcggcatcaagtgaggaggagcggaaatcctggatggcactgctcagaagggagattggacatttccacgagaaaaagtag

SEQ ID NO: 302554 - DNA, 294 bp, Artificial Sequence
  derived and/or modified sequence
atggctgctgaggagatgcactggcctgtgcccatgaaggccatcggggcccagaacctgctgaccatgcctgggggcgtggccaaggccggctacctgcacaagaagggcggcacccagctgcagctgctgaagtggcccctgcgcttcgtcatcatccacaagagatgtgtgtactacttcaagagcagcaccagcgccagcccccagggcgccttcagcctgagcggctacaaccggcagccccggccccagcctgcccaggccctgagccagacagaagctggcccctag

SEQ ID NO: 302555 - DNA, 429 bp, Artificial Sequence
  derived and/or modified sequence
atggctgctgaggagatgcactggcctgtgcccatgaaggccatcggggcccagaacctgctgaccatgcctgggggcgtggccaaggccggctacctgcacaagaagggcggcacccagctgcagctgctgaagtggcccctgcgcttcgtcatcatccacaagagatgtgtgtactacttcaagagcagcaccagcgccagcccccagggcgccttcagcctgagcggctacaacagagtgatgagagctgctgaggagaccaccagcaacaacgtgttccccttcaagatcatccacatcagcaagaagcacaggacctggttcttcagcgccagcagcgaggaggagaggaagtcctggatggccctgctgcggcgggagatcggccacttccacgagaagaaggacctgcccctggacacctag

SEQ ID NO: 302556 - DNA, 519 bp, Artificial Sequence
  derived and/or modified sequence
atggctgctgaggagatgcactggcctgtgcccatgaaggccatcggggcccagaacctgctgaccatgcctgggggcgtggccaaggccggctacctgcacaagaagggcggcacccagctgcagctgctgaagtggcccctgcgcttcgtcatcatccacaagagatgtgtgtactacttcaagagcagcaccagcgccagcccccagggcgccttcagcctgagcggctacaacagagtgatgagagctgctgaggagaccaccagcaacaacgtgttccccttcaagatcatccacatcagcaagaagcacaggacctggttcttcagcgccagcagcgaggaggagaggaagtcctggatggccctgctgcggcgggagatcggccacttccacgagaagaaggacctgcccctggacaccagtgacagcagcagtgacacagacagcttctatggagctgtggagaggcctgtggacatcagcctgagcccctaccccacagacaatgaatag

SEQ ID NO: 302557 - DNA, 567 bp, Artificial Sequence
  derived and/or modified sequence
atggctgctgaggagatgcactggcctgtgcccatgaaggccatcggggcccagaacctgctgaccatgcctgggggcgtggccaaggccggctacctgcacaagaagggcggcacccagctgcagctgctgaagtggcccctgcgcttcgtcatcatccacaagagatgtgtgtactacttcaagagcagcaccagcgccagcccccagggcgccttcagcctgagcggctacaacagagtgatgagagctgctgaggagaccaccagcaacaacgtgttccccttcaagatcatccacatcagcaagaagcacaggacctggttcttcagcgccagcagcgaggaggagaggaagtcctggatggccctgctgcggcgggagatcggccacttccacgagaagaaggacctgcccctggacaccagtgacagcagcagtgacacagacagcttctatggagctgtggagaggcctgtggacatcagcctgagcccctaccccacagacaatgaagattatgaacatgatgatgaagatgacagctacctggagccagacagctag

SEQ ID NO: 302558 - DNA, 585 bp, Artificial Sequence
  derived and/or modified sequence
atggctgctgaggagatgcactggcctgtgcccatgaaggccatcggggcccagaacctgctgaccatgcctgggggcgtggccaaggccggctacctgcacaagaagggcggcacccagctgcagctgctgaagtggcccctgcgcttcgtcatcatccacaagagatgtgtgtactacttcaagagcagcaccagcgccagcccccagggcgccttcagcctgagcggctacaacagagtgatgagagctgctgaggagaccaccagcaacaacgtgttccccttcaagatcatccacatcagcaagaagcacaggacctggttcttcagcgccagcagcgaggaggagaggaagtcctggatggccctgctgcggcgggagatcggccacttccacgagaagaaggacctgcccctggacaccagtgacagcagcagtgacacagacagcttctatggagctgtggagaggcctgtggacatcagcctgagcccctaccccacagacaatgaagattatgaacatgatgatgaagatgacagctacctggagccagacagccctgagcccggccgcctgtag

SEQ ID NO: 302559 - DNA, 411 bp, Artificial Sequence
  derived and/or modified sequence
atggctgctgaggagatgcactggcctgtgcccatgaaggccatcggggcccagaacctgctgaccatgcctgggggcgtggccaaggccggctacctgcacaagaagggcggcacccagctgcagctgctgaagtggcccctgcgcttcgtcatcatccacaagagatgtgtgtactacttcaagagcagcaccagcgccagcccccagggcgccttcagcctgagcggctacaacagagtgatgagagctgctgaggagaccaccagcaacaacgtgttccccttcaagatcatccacatcagcaagaagcacaggacctggttcttcagcgccagcagcgaggaggagaggaagtcctggatggccctgctgcggcgggagatcggccacttccacgagaagaagtag

SEQ ID NO: 302560 - DNA, 294 bp, Artificial Sequence
  derived and/or modified sequence
atggccgccgaggagatgcactggcccgtgcccatgaaggccatcggtgctcagaacctattaacaatgccaggcggagtggcgaaggccggctacttgcataagaagggcggcacccaactgcagctccttaaatggcccctgagatttgtcattatccacaagagatgcgtgtattactttaaatcgagcacatctgcttccccccagggtgccttctctcttagcggttacaatcgccagcccaggccacagcctgcacaggcattgtctcagacggaagctgggccctag

SEQ ID NO: 302561 - DNA, 429 bp, Artificial Sequence
  derived and/or modified sequence
atggccgccgaggagatgcactggcccgtgcccatgaaggccatcggtgctcagaacttgctgactatgcctggcggcgtcgctaaagctggctacctgcacaagaaaggaggcactcaactgcagctactgaagtggccactgcgattcgtcattatccacaagagatgcgtctattatttcaagagcagcacgtccgcgtcccctcagggtgcattctctctgtcaggatataatcgcgttatgagggccgccgaagaaaccacctcgaacaacgtatttcccttcaaaattattcatatctcaaagaaacatcggacatggtttttctccgcaagcagtgaggaagagaggaagtcgtggatggcactcttaagacgtgaaattggccacttccatgagaaaaaggatctgcccttagatacctag

SEQ ID NO: 302562 - DNA, 429 bp, Artificial Sequence
  derived and/or modified sequence
atggccgccgaggagatgcactggcccgtgcccatgaaggccatcggcgcccagaacttgctgactatgcctggcggcgtggctaaagcaggctatctgcacaaaaaggggggcactcagctgcaactgctaaagtggccccttcggtttgtaattatccacaaaaggtgcgtgtattacttcaagtcttcaacatcagctagcccccagggagctttcagccttagtggatacaacagagtgatgagggcagcagaagagactacatccaataatgtgttcccctttaaaatcatacatatttctaaaaagcatcggacgtggtttttttccgcttcttctgaggaggaacgaaagtcttggatggccctgctaagacgcgaaattggtcacttccatgagaaaaaggacctgccactggacacatag

SEQ ID NO: 302563 - DNA, 519 bp, Artificial Sequence
  derived and/or modified sequence
atggccgccgaggagatgcactggcccgtgcccatgaaggccatcggagcccagaaccttttaacaatgcctggcggggtcgctaaggctggatacttacacaaaaaaggcggcactcagctgcagctactaaaatggccattgagatttgtgattatccacaagcgttgtgtgtattattttaaatcttccacatcagcttccccgcaaggcgctttctccttgagtggctataacagggtgatgcgggcagctgaggagacaacaagtaataatgtgtttcccttcaaaatcatccatatctcgaagaaacaccggacatggttcttctccgcctccagcgaggaggagagaaaatcttggatggcccttctgagaagggagattggtcacttccatgagaagaaggatctgcccctagacacaagcgactcctcgtctgataccgacagcttttacggtgcggtggagagacctgtcgacataagtttaagcccctacccgacggacaacgagtag

SEQ ID NO: 302564 - DNA, 567 bp, Artificial Sequence
  derived and/or modified sequence
atggccgccgaggagatgcactggcccgtgcccatgaaggccatcggcgctcaaaatctgctgactatgccagggggagtcgctaaggcagggtatctacacaagaaagggggcactcaactgcagctcctcaagtggcctcttcgattcgtgatcatccataaacgctgcgtgtattactttaaaagtagcacgtcagcatcaccccagggtgctttttcgttaagcgggtacaatcgagtgatgcgcgccgctgaagagacaacctccaacaacgtattccccttcaaaatcattcacatttctaagaagcaccgtacgtggtttttctccgcatctagtgaagaagaaagaaagtcctggatggccctgctaagaagagagatcggacattttcacgaaaaaaaggacctgccgctcgatacctctgattcctcctccgacactgacagtttctatggcgctgtcgaacgcccagtggatattagtctttccccctatccaacagacaacgaggattatgaacacgacgatgaggacgactcctacctagagccagactcttag

SEQ ID NO: 302565 - DNA, 585 bp, Artificial Sequence
  derived and/or modified sequence
atggccgccgaggagatgcactggcccgtgcccatgaaggccatcggcgcacaaaacctactgaccatgccaggaggggtggccaaggccggctatctccataagaagggaggcacgcaactgcagctcctgaagtggcccttgagatttgtcatcattcacaagcggtgtgtgtactatttcaagtcgtccactagtgcctccccccagggtgctttttccctgtctggatacaatagagttatgagggcggccgaagagaccaccagtaacaacgtgttccccttcaagataatacacatttcaaagaagcatcgcacatggttcttctcagcttcctccgaagaggagcggaagtcctggatggcgctactgagacgagagatcggacattttcacgaaaagaaagacttgcctctcgacacgtcggactcgagtagtgatactgacagtttctacggcgccgtcgagcggcctgtggacatatcattgtcaccttaccctaccgataacgaggattacgagcacgatgacgaggatgactcgtacctggaaccagatagcccagagcccgggcgcctatag

SEQ ID NO: 302566 - DNA, 411 bp, Artificial Sequence
  derived and/or modified sequence
atggccgccgaggagatgcactggcccgtgcccatgaaggccatcggcgcgcagaacttactcactatgccaggaggtgtggcaaaagccggctatttgcataagaaaggaggaacccagctacaactgctgaagtggcccctgcgatttgtcattattcacaagcggtgcgtttactactttaagtcctctacttcagcaagcccccagggggcattctcactctcggggtataatagagtgatgcgcgctgctgaagagacaaccagcaataatgtgtttccttttaaaattatccatatctctaaaaagcaccgcacttggttctttagtgcatcgtccgaagaagaacgtaagagctggatggctctcctgagacgagagatcggacacttccacgagaaaaagtag

SEQ ID NO: 302567 - DNA, 294 bp, Artificial Sequence
  derived and/or modified sequence
atggcggcagaagagatgcattggcccgtgcctatgaaggccatcggggctcagaacctgttgaccatgcccggaggggtggctaaagccggataccttcacaagaagggaggcactcagctccaacttctgaagtggcctctaaggttcgtgatcattcacaaacgatgtgtgtactacttcaagagcagcacaagcgcatcaccgcagggggcattttcattgagcggatacaaccgccagcctcgccctcaaccagcgcaagctctctcacagactgaagcgggaccctag

SEQ ID NO: 302568 - DNA, 429 bp, Artificial Sequence
  derived and/or modified sequence
atggccgcagaggaaatgcactggcctgtgccaatgaaagccatcggtgcacagaacctgttgactatgccaggaggtgttgctaaggctggctaccttcataaaaaaggcggtactcagctccaactgttgaaatggccgctgcgcttcgttataatccataaacgttgcgtttactacttcaaatctagcacaagtgcctcccctcagggcgcattttccctgtctggctataatcgcgttatgcgagccgcagaggagactacctctaacaacgtgtttccctttaagatcatacatatctctaaaaagcatcgtacctggttttttagcgcctctagtgaagaagagcgcaagtcatggatggctctgctgcgtcgcgagatcggccactttcatgagaagaaggatttaccgttagacacatag

SEQ ID NO: 302569 - DNA, 429 bp, Artificial Sequence
  derived and/or modified sequence
atggctgcagaagagatgcactggcccgttccaatgaaagccatcggtgcacaaaacctcctgacaatgcctggaggtgtagccaaggcaggatacctgcacaagaagggaggaacgcaactccagttacttaaatggccactgagatttgtgattatacacaagagatgcgtctactacttcaagagttctacatctgcctccccccagggcgctttttcacttagcggttataatagggtgatgagagccgcagaagagaccacgtcgaacaacgtgttcccttttaagatcatacacatttcaaagaaacataggacctggtttttctccgccagctctgaggaggaaaggaagtcatggatggccttgctcaggagagaaattggacactttcacgagaaaaaagatctgccgcttgacacttag

SEQ ID NO: 302570 - DNA, 519 bp, Artificial Sequence
  derived and/or modified sequence
atggccgctgaggagatgcactggccggtacctatgaaggccatcggagcgcagaatctactcacaatgcccggaggtgttgccaaggctgggtatctccacaagaagggtggcacacagctgcagctgctgaagtggccgttgcgattcgtcatcattcataagagatgcgtctactactttaaaagttctactagtgcttctcctcagggcgctttttccctctctggatataaccgagtaatgagggccgcagaggaaaccacaagtaataatgttttcccctttaaaattatccacattagtaagaaacacagaacctggttctttagtgccagctccgaagaggaaaggaagagttggatggccctcctgcgcagagaaataggccacttccacgagaagaaggacttacctctcgacaccagtgactcttcttcagatacggattctttctacggcgctgtggagcgcccagtggatatcagcttatccccctacccaaccgacaacgagtag

SEQ ID NO: 302571 - DNA, 567 bp, Artificial Sequence
  derived and/or modified sequence
atggccgcagaggagatgcactggccggtccctatgaaagccattggggctcagaatttgctgacaatgcctgggggtgtggcaaaggctggctacctgcataagaaggggggtacccagctgcagctgctgaagtggcctctgcgtttcgtgattatccataagcgatgcgtctactacttcaagagctctacctcagcctctccccagggtgccttctctctgtctggttacaaccgggtaatgagggcagccgaggagaccacttctaataatgtttttcccttcaagattatccacatcagtaagaaacatagaacctggtttttcagcgcctccagtgaagaggaacgaaagtcctggatggccctgttgcgtcgtgagattggacacttccacgaaaagaaggacctgcctctggacacatccgattctagctccgacactgattctttctatggggctgttgagagaccagttgatatttctttatcaccgtaccctaccgacaacgaggattacgagcatgatgacgaagatgactcatacttggaacccgacagctag

SEQ ID NO: 302572 - DNA, 585 bp, Artificial Sequence
  derived and/or modified sequence
atggcagcagaggaaatgcactggccggtacctatgaaagctatcggggctcagaatctgctcacaatgcctggtggggtagccaaagctggttaccttcataagaaaggaggtacacagctgcagttgctgaaatggccactgcggttcgtcattatccacaaaaggtgcgtctactactttaaaagttccacctcagcatcaccacagggcgctttcagcctgagcggttacaatcgggtgatgcgtgccgctgaagagactacttcgaacaatgtattccccttcaagatcattcacatttccaagaagcacagaacctggttcttctccgcttccagcgaagaggagcgaaagtcctggatggccctgctgcgcagggagattggtcacttccatgaaaagaaagacctgcctttggacacgtccgacagttcctcggataccgacagtttttacggcgctgtggagcgaccagtcgatatttctctgtctccctaccccactgataatgaggactacgagcatgatgatgaggatgactcttatcttgagccagacagccctgaaccaggtcgcctgtag

SEQ ID NO: 302573 - DNA, 411 bp, Artificial Sequence
  derived and/or modified sequence
atggcagctgaggaaatgcactggccggtgccgatgaaggccatcggggctcagaacttgttgactatgccgggaggggtagctaaggcagggtatctgcacaagaaggggggaacacagcttcaactgctgaagtggcctctgcggttcgtgatcattcacaagagatgcgtttattacttcaagtcatcaactagtgcatcaccacaaggggctttcagcctgagtggatataaccgcgtgatgagagctgccgaggaaaccacgtcaaataatgtttttccgtttaagatcattcacataagcaaaaagcaccgcacatggttctttagtgctagcagcgaagaagaacgtaagagctggatggccctcctacggagggaaataggccacttccatgagaaaaagtag

SEQ ID NO: 302574 - DNA, 414 bp, Artificial Sequence
  derived and/or modified sequence
gggcgcgggcgggacggagctgcggcggcggcgggtcccgcgggcgggagcgcctggcggccgagtcaagccgccgcctcgacccagggcccgcgggccaggagagcgctcggcggcttcatggcggctgaagagatgcattggcctgtccctatgaaggccattggtgcccagaacctgctaaccatgcctgggggcgtggccaaggctggctacctgcacaagaagggcggtacccagctgcagctgctgaaatggcccctgcgctttgtcatcatccacaaacgctgcgtctactacttcaagagtagcacctctgcctccccgcagggcgccttctccctgagtggctataaccggcagcccagaccccagccagcccaggccctgtcccaaacagaggctgggccctag

SEQ ID NO: 302575 - DNA, 727 bp, Artificial Sequence
  derived and/or modified sequence
cagaagcagcaggagtgagctgtgggcacagctgtggggcagccaggcgcgtcaggcctcacatgtctgggagatgtaggctgcctgggctggtggcccctgagccgcatggcctccctgggccccaggacaccggccccgagcaggtcacgaggacggagggccatgtgttgggtcagcaccatcagctcctgcccatgttaactcagccgacaccgcagcagcatggtgacaggtccccccagggtgtctgcctctacagaggaagggactgaagcacccagagagctggcagcttcatggcggctgaagagatgcattggcctgtccctatgaaggccattggtgcccagaacctgctaaccatgcctgggggcgtggccaaggctggctacctgcacaagaagggcggtacccagctgcagctgctgaaatggcccctgcgctttgtcatcatccacaaacgctgcgtctactacttcaagagtagcacctctgcctccccgcagggcgccttctccctgagtggctataaccgggtgatgcgggcggctgaggagaccacgtccaacaacgttttccccttcaagatcatccatatcagcaagaagcaccgcacgtggttcttctcggcctcctccgaggaggagcgcaagagctggatggccttgctgcgcagggagattggccacttccacgaaaagaaagacctgcccttggacaccag

SEQ ID NO: 302576 - DNA, 551 bp, Artificial Sequence
  derived and/or modified sequence
agcgcctggcggccgagtcaagccgccgcctcgacccagggcccgcgggccaggagagcgctcggcgggctgacccttggccctctgcctgccctgctggctggctcccactcatcctgcttcatggcggctgaagagatgcattggcctgtccctatgaaggccattggtgcccagaacctgctaaccatgcctgggggcgtggccaaggctggctacctgcacaagaagggcggtacccagctgcagctgctgaaatggcccctgcgctttgtcatcatccacaaacgctgcgtctactacttcaagagtagcacctctgcctccccgcagggcgccttctccctgagtggctataaccgggtgatgcgggcggctgaggagaccacgtccaacaacgttttccccttcaagatcatccatatcagcaagaagcaccgcacgtggttcttctcggcctcctccgaggaggagcgcaagagctggatggccttgctgcgcagggagattggccacttccacgaaaagaaagacctgcccttggacaccag

SEQ ID NO: 302577 - DNA, 557 bp, Artificial Sequence
  derived and/or modified sequence
actcgaggccagaaagggaagcccctttccagtgggcttcatggcggctgaagagatgcattggcctgtccctatgaaggccattggtgcccagaacctgctaaccatgcctgggggcgtggccaaggctggctacctgcacaagaagggcggtacccagctgcagctgctgaaatggcccctgcgctttgtcatcatccacaaacgctgcgtctactacttcaagagtagcacctctgcctccccgcagggcgccttctccctgagtggctataaccgggtgatgcgggcggctgaggagaccacgtccaacaacgttttccccttcaagatcatccatatcagcaagaagcaccgcacgtggttcttctcggcctcctccgaggaggagcgcaagagctggatggccttgctgcgcagggagattggccacttccacgaaaagaaagacctgcccttggacaccagcgactccagctcggacacagacagcttctacggcgcagttgagcggcctgtggatatcagcctttccccgtaccccacggacaatgaag

SEQ ID NO: 302578 - DNA, 876 bp, Artificial Sequence
  derived and/or modified sequence
acggggcctgggaaactccaaagccggcgtcaggtcatcgaggcctccgggctgattaggactaatggcgctcaggggtgcagcctcagcctccacccgccacccgtacccgccctgcctcaggacttcgttcctgctgtacccctgctggctgcctgtccccacaggtggctccttcctccccaccggaggagctgctcccaggcgggaccctgggggtggaatctctgaaatgccttcccctcgggaccctcaccgcgactggacttcgctcagcttcagaccctgggctgcagctgcctaatgagcttcatggcggctgaagagatgcattggcctgtccctatgaaggccattggtgcccagaacctgctaaccatgcctgggggcgtggccaaggctggctacctgcacaagaagggcggtacccagctgcagctgctgaaatggcccctgcgctttgtcatcatccacaaacgctgcgtctactacttcaagagtagcacctctgcctccccgcagggcgccttctccctgagtggctataaccgggtgatgcgggcggctgaggagaccacgtccaacaacgttttccccttcaagatcatccatatcagcaagaagcaccgcacgtggttcttctcggcctcctccgaggaggagcgcaagagctggatggccttgctgcgcagggagattggccacttccacgaaaagaaagacctgcccttggacaccagcgactccagctcggacacagacagcttctacggcgcagttgagcggcctgtggatatcagcctttccccgtaccccacggacaatgaagactatgagcacgacgatgaggatgactcctacctggagcctgactcc

SEQ ID NO: 302579 - DNA, 688 bp, Artificial Sequence
  derived and/or modified sequence
cttgaaattcatagaaccgggtgcaagacataacagccctctgtgtggcctcagatggcagagcagggtggcagcagctgccctggcaggaagagcatgctgcttcatggcggctgaagagatgcattggcctgtccctatgaaggccattggtgcccagaacctgctaaccatgcctgggggcgtggccaaggctggctacctgcacaagaagggcggtacccagctgcagctgctgaaatggcccctgcgctttgtcatcatccacaaacgctgcgtctactacttcaagagtagcacctctgcctccccgcagggcgccttctccctgagtggctataaccgggtgatgcgggcggctgaggagaccacgtccaacaacgttttccccttcaagatcatccatatcagcaagaagcaccgcacgtggttcttctcggcctcctccgaggaggagcgcaagagctggatggccttgctgcgcagggagattggccacttccacgaaaagaaagacctgcccttggacaccagcgactccagctcggacacagacagcttctacggcgcagttgagcggcctgtggatatcagcctttccccgtaccccacggacaatgaagactatgagcacgacgatgaggatgactcctacctggagcctgactccccggagcccggaaggctt

SEQ ID NO: 302580 - DNA, 609 bp, Artificial Sequence
  derived and/or modified sequence
aaatgctgctctgtgctgggcctgacacccagggtgcaggttgtttcatggtttgctagggagaagccgagtattcagaggtggccctgcggggaggcagcagggagcttcctcccagggatgcagctgaccttgcgctggagccagagagccctggcctctgaccacaggatgggagggcaggagcagtggaagcttcatggcggctgaagagatgcattggcctgtccctatgaaggccattggtgcccagaacctgctaaccatgcctgggggcgtggccaaggctggctacctgcacaagaagggcggtacccagctgcagctgctgaaatggcccctgcgctttgtcatcatccacaaacgctgcgtctactacttcaagagtagcacctctgcctccccgcagggcgccttctccctgagtggctataaccgggtgatgcgggcggctgaggagaccacgtccaacaacgttttccccttcaagatcatccatatcagcaagaagcaccgcacgtggttcttctcggcctcctccgaggaggagcgcaagagctggatggccttgctgcgcagggagattggccacttccacgaaaagaaaga

SEQ ID NO: 302581 - DNA, 294 bp, Artificial Sequence
  derived and/or modified sequence
atggccgccgaggagatgcactggcccgtgcccatgaaggccatcggcgcccagaacctgctgaccatgcccggcggcgtggccaaggccggctacctgcacaagaagggcggcacccagctgcagctgctgaagtggcccctgagattcgtgatcatccacaagagatgcgtgtactacttcaagagcagcaccagcgccagcccccagggcgccttcagcctgagcggctacaacagacagcccagaccccagcccgcccaggccctgagccagaccgaggccggcccctag

SEQ ID NO: 302582 - DNA, 429 bp, Artificial Sequence
  derived and/or modified sequence
atggccgccgaggagatgcactggcccgtgcccatgaaggccatcggcgcccagaacctgctgaccatgcccggcggcgtggccaaggccggctacctgcacaagaagggcggcacccagctgcagctgctgaagtggcccctgagattcgtgatcatccacaagagatgcgtgtactacttcaagagcagcaccagcgccagcccccagggcgccttcagcctgagcggctacaacagagtgatgagagccgccgaggagaccaccagcaacaacgtgttccccttcaagatcatccacatcagcaagaagcacagaacctggttcttcagcgccagcagcgaggaggagagaaagagctggatggccctgctgagaagagagatcggccacttccacgagaagaaggacctgcccctggacacctag

SEQ ID NO: 302583 - DNA, 519 bp, Artificial Sequence
  derived and/or modified sequence
atggccgccgaggagatgcactggcccgtgcccatgaaggccatcggcgcccagaacctgctgaccatgcccggcggcgtggccaaggccggctacctgcacaagaagggcggcacccagctgcagctgctgaagtggcccctgagattcgtgatcatccacaagagatgcgtgtactacttcaagagcagcaccagcgccagcccccagggcgccttcagcctgagcggctacaacagagtgatgagagccgccgaggagaccaccagcaacaacgtgttccccttcaagatcatccacatcagcaagaagcacagaacctggttcttcagcgccagcagcgaggaggagagaaagagctggatggccctgctgagaagagagatcggccacttccacgagaagaaggacctgcccctggacaccagcgacagcagcagcgacaccgacagcttctacggcgccgtggagagacccgtggacatcagcctgagcccctaccccaccgacaacgagtag

SEQ ID NO: 302584 - DNA, 567 bp, Artificial Sequence
  derived and/or modified sequence
atggccgccgaggagatgcactggcccgtgcccatgaaggccatcggcgcccagaacctgctgaccatgcccggcggcgtggccaaggccggctacctgcacaagaagggcggcacccagctgcagctgctgaagtggcccctgagattcgtgatcatccacaagagatgcgtgtactacttcaagagcagcaccagcgccagcccccagggcgccttcagcctgagcggctacaacagagtgatgagagccgccgaggagaccaccagcaacaacgtgttccccttcaagatcatccacatcagcaagaagcacagaacctggttcttcagcgccagcagcgaggaggagagaaagagctggatggccctgctgagaagagagatcggccacttccacgagaagaaggacctgcccctggacaccagcgacagcagcagcgacaccgacagcttctacggcgccgtggagagacccgtggacatcagcctgagcccctaccccaccgacaacgaggactacgagcacgacgacgaggacgacagctacctggagcccgacagctag

SEQ ID NO: 302585 - DNA, 585 bp, Artificial Sequence
  derived and/or modified sequence
atggccgccgaggagatgcactggcccgtgcccatgaaggccatcggcgcccagaacctgctgaccatgcccggcggcgtggccaaggccggctacctgcacaagaagggcggcacccagctgcagctgctgaagtggcccctgagattcgtgatcatccacaagagatgcgtgtactacttcaagagcagcaccagcgccagcccccagggcgccttcagcctgagcggctacaacagagtgatgagagccgccgaggagaccaccagcaacaacgtgttccccttcaagatcatccacatcagcaagaagcacagaacctggttcttcagcgccagcagcgaggaggagagaaagagctggatggccctgctgagaagagagatcggccacttccacgagaagaaggacctgcccctggacaccagcgacagcagcagcgacaccgacagcttctacggcgccgtggagagacccgtggacatcagcctgagcccctaccccaccgacaacgaggactacgagcacgacgacgaggacgacagctacctggagcccgacagccccgagcccggcagactgtag

SEQ ID NO: 302586 - DNA, 411 bp, Artificial Sequence
  derived and/or modified sequence
atggccgccgaggagatgcactggcccgtgcccatgaaggccatcggcgcccagaacctgctgaccatgcccggcggcgtggccaaggccggctacctgcacaagaagggcggcacccagctgcagctgctgaagtggcccctgagattcgtgatcatccacaagagatgcgtgtactacttcaagagcagcaccagcgccagcccccagggcgccttcagcctgagcggctacaacagagtgatgagagccgccgaggagaccaccagcaacaacgtgttccccttcaagatcatccacatcagcaagaagcacagaacctggttcttcagcgccagcagcgaggaggagagaaagagctggatggccctgctgagaagagagatcggccacttccacgagaagaagtag

SEQ ID NO: 302587 - protein, 713 aa, Artificial Sequence
  derived and/or modified sequence
MAGSFCWRMLGLVSKVGNRARCFSSMAASEEELLDFSGSELQFNSCSLHLSLHPFFNFLLGIHSCFVCKESKTDVKRCVVTQCGKFYHEACVKKYPLTVFESRGFRCPLHSCVSCHASNPSNPRPSKGKMMRCVRCPVAYHSGDACLAAGCSVIASNSIICTAHFTARKGKRHHAHVNVSWCFVCSKGGSLLCCESCPAAFHPDCLNIEMPDGSWFCNDCRAGKKLHFQDIIWVKLGNYRWWPAEVCHPKNVPPNIQKMKHEIGEFPVFFFGSKDYYWTHQARVFPYMEGDRGSRYQGVRGIGRVFKNALQEAEARFREIKLQREARETQESERKPPPYKHIKVNKPYGKVQIYTADISEIPKCNCKPTDENPCGFDSECLNRMLMFECHPQVCPAGEFCQNQCFTKRQYPETKIIKTDGKGWGLVAKRDIRKGEFVNEYVGELIDEEECMARIKHAHENDITHFYMLTIDKDRIIDAGPKGNYSRFMNHSCQPNCETLKWTVNGDTRVGLFAVCDIPAGTELTFNYNLDCLGNEKTVCRCGASNCSGFLGDRPKTSTTLSSEEKGKKTKKKTRRRRAKGEGKRQSEDECFRCGDGGQLVLCDRKFCTKAYHLSCLGLGKRPFGKWECPWHHCDVCGKPSTSFCHLCPNSFCKEHQDGTAFSCTPDGRSYCCEHDLGAASVRSTKTEKPPPEPGKPKGKRRRRRGWRRVTEGK

SEQ ID NO: 302588 - DNA, 2142 bp, Artificial Sequence
  derived and/or modified sequence
atggccggcagcttctgctggagaatgctgggcctggtgagcaaggtgggcaacagagccagatgcttcagcagcatggccgccagcgaggaggagctgctggacttcagcggcagcgagctgcagttcaacagctgcagcctgcacctgagcctgcaccccttcttcaacttcctgctgggcatccacagctgcttcgtgtgcaaggagagcaagaccgacgtgaagagatgcgtggtgacccagtgcggcaagttctaccacgaggcctgcgtgaagaagtaccccctgaccgtgttcgagagcagaggcttcagatgccccctgcacagctgcgtgagctgccacgccagcaaccccagcaaccccagacccagcaagggcaagatgatgagatgcgtgagatgccccgtggcctaccacagcggcgacgcctgcctggccgccggctgcagcgtgatcgccagcaacagcatcatctgcaccgcccacttcaccgccagaaagggcaagagacaccacgcccacgtgaacgtgagctggtgcttcgtgtgcagcaagggcggcagcctgctgtgctgcgagagctgccccgccgccttccaccccgactgcctgaacatcgagatgcccgacggcagctggttctgcaacgactgcagagccggcaagaagctgcacttccaggacatcatctgggtgaagctgggcaactacagatggtggcccgccgaggtgtgccaccccaagaacgtgccccccaacatccagaagatgaagcacgagatcggcgagttccccgtgttcttcttcggcagcaaggactactactggacccaccaggccagagtgttcccctacatggagggcgacagaggcagcagataccagggcgtgagaggcatcggcagagtgttcaagaacgccctgcaggaggccgaggccagattcagagagatcaagctgcagagagaggccagagagacccaggagagcgagagaaagccccccccctacaagcacatcaaggtgaacaagccctacggcaaggtgcagatctacaccgccgacatcagcgagatccccaagtgcaactgcaagcccaccgacgagaacccctgcggcttcgacagcgagtgcctgaacagaatgctgatgttcgagtgccacccccaggtgtgccccgccggcgagttctgccagaaccagtgcttcaccaagagacagtaccccgagaccaagatcatcaagaccgacggcaagggctggggcctggtggccaagagagacatcagaaagggcgagttcgtgaacgagtacgtgggcgagctgatcgacgaggaggagtgcatggccagaatcaagcacgcccacgagaacgacatcacccacttctacatgctgaccatcgacaaggacagaatcatcgacgccggccccaagggcaactacagcagattcatgaaccacagctgccagcccaactgcgagaccctgaagtggaccgtgaacggcgacaccagagtgggcctgttcgccgtgtgcgacatccccgccggcaccgagctgaccttcaactacaacctggactgcctgggcaacgagaagaccgtgtgcagatgcggcgccagcaactgcagcggcttcctgggcgacagacccaagaccagcaccaccctgagcagcgaggagaagggcaagaagaccaagaagaagaccagaagaagaagagccaagggcgagggcaagagacagagcgaggacgagtgcttcagatgcggcgacggcggccagctggtgctgtgcgacagaaagttctgcaccaaggcctaccacctgagctgcctgggcctgggcaagagacccttcggcaagtgggagtgcccctggcaccactgcgacgtgtgcggcaagcccagcaccagcttctgccacctgtgccccaacagcttctgcaaggagcaccaggacggcaccgccttcagctgcacccccgacggcagaagctactgctgcgagcacgacctgggcgccgccagcgtgagaagcaccaagaccgagaagcccccccccgagcccggcaagcccaagggcaagagaagaagaagaagaggctggagaagagtgaccgagggcaagtag

SEQ ID NO: 302589 - DNA, 2142 bp, Artificial Sequence
  derived and/or modified sequence
atggctggatcgttctgttggaggatgttagggctcgtaagtaaagttggcaatcgagctcgctgtttttcttccatggcagctagcgaagaggagttgctggacttcagcggtagtgaactccagttcaacagctgttccctgcatctgagcctgcatccgtttttcaacttccttctcggtattcacagctgcttcgtttgcaaggagtccaaaaccgatgtcaagagatgtgtcgtgacccagtgtggaaaattttaccatgaggcctgcgtgaaaaaataccccctaacagtgttcgagagtcggggcttccggtgccccctgcatagctgtgtcagctgccatgcttctaacccctcgaacccaagaccatccaagggcaagatgatgcgatgcgtcaggtgccctgtggcctaccatagtggcgatgcttgcctggctgccgggtgtagcgtgatcgcctccaacagcattatctgcacagctcacttcacagccagaaaggggaaaagacatcatgcgcatgtgaatgtgtcttggtgctttgtgtgcagcaagggtggatcattgttgtgctgtgaaagctgtcctgccgcctttcaccccgactgtctgaacatcgagatgccggacgggagctggttctgtaacgattgccgcgccgggaaaaaactgcacttccaggatatcatatgggtcaagctggggaactatagatggtggccagcagaagtgtgccaccctaagaatgtgccccccaatattcaaaaaatgaagcacgaaatcggcgaatttccagtattcttcttcgggtcaaaagattactactggacccaccaagccagagtcttcccatacatggagggagacagagggtcacgataccagggagtgcggggcataggacgggtgttcaaaaatgctttgcaggaagcggaggctcgcttccgcgagattaagttacagcgcgaggcccgggaaacacaggaaagcgaacgtaaaccccctccatataagcacatcaaggtcaacaaaccttacggcaaggttcagatttataccgcagacatttccgaaattccaaagtgcaactgtaagccaacggacgagaacccatgtggattcgactcagagtgtctgaaccgcatgctgatgtttgagtgtcacccacaagtttgccctgcaggtgagttctgccagaatcaatgttttactaaaaggcaatatcctgagaccaagataataaaaactgatggcaagggatggggtctggtggcaaaacgcgatattcggaagggtgaattcgtcaatgagtacgtaggcgagcttatcgatgaagaagaatgcatggcccggataaaacacgcccacgagaatgacattactcacttctatatgctgaccattgataaggaccggattatcgacgccggtccaaaggggaactactcccgattcatgaaccacagttgccagccgaattgtgagacgctgaaatggacagtgaatggtgatacgcgagtggggctgttcgctgtctgtgatatcccagccggcacggaactcacattcaattataacctggattgcttaggcaatgaaaagactgtgtgccgatgtggagccagcaattgcagcgggtttctgggcgatcgacctaaaacctctaccacattgagtagtgaggaaaaaggaaaaaagacgaagaagaagacgagaaggcgacgggcaaagggcgagggcaagcgacagtctgaggatgagtgcttcaggtgcggagacgggggtcagctcgttttgtgcgatcggaagttctgcaccaaggcataccatctgagttgtctggggctgggcaaacggccctttgggaaatgggaatgcccgtggcaccattgtgacgtctgtggcaagccgagtacaagcttttgccatctttgccctaactccttttgtaaggaacaccaggatggtactgctttctcatgtacacccgatggacgcagctactgttgcgaacacgatttgggcgcagcttccgttagaagcacaaaaaccgaaaagcctccgccagaacctggaaaaccaaagggtaagcgaaggaggaggcgcgggtggaggagagtgacagagggaaaatag

SEQ ID NO: 302590 - DNA, 2142 bp, Artificial Sequence
  derived and/or modified sequence
atggccggcagcttctgctggaggatgctgggcctggtgtccaaggtgggcaacagagcccgctgcttcagctccatggccgccagcgaggaggagctgctggacttcagcggcagcgagctgcagttcaacagctgcagcctgcacctgagcctgcaccccttcttcaacttcctgctgggcatccacagctgctttgtgtgcaaggagagcaagacagatgtgaagagatgtgtggtgacccagtgtgggaagttctaccacgaggcctgtgtgaagaagtaccccctgactgtgtttgagagccggggcttccgctgccccctgcacagctgtgtgtcctgccacgccagcaaccccagcaacccccggcccagcaagggcaagatgatgagatgtgtgcgctgccctgtggcctaccacagcggagatgcctgcctggccgccggctgcagcgtcatcgccagcaacagcatcatctgcacagcccacttcaccgccaggaagggcaagaggcaccacgcccacgtgaatgtgtcctggtgctttgtgtgcagcaaaggaggcagcctgctgtgctgtgagagctgcccagctgccttccacccagactgcctgaacatcgagatgccagatggctcctggttctgcaatgactgccgggccggcaagaagctgcacttccaggacatcatctgggtgaagctgggcaactaccgctggtggccagctgaggtgtgccaccccaagaatgtgccccccaacatccagaagatgaagcatgaaattggagagttccctgtgttcttcttcggcagcaaggactactactggacccaccaggcccgggtcttcccctacatggagggggaccggggcagccgctaccagggcgtgcggggcatcggccgggtcttcaagaatgccctgcaggaggccgaggcccgcttccgggagatcaagctgcagcgggaggcccgggagacccaggagagcgagaggaagcccccaccctacaagcacatcaaggtgaacaagccctacggcaaggtgcagatctacacagctgacatcagcgagatccccaagtgcaactgcaagcccacagatgagaacccctgtggctttgacagtgaatgtctgaacaggatgctgatgtttgagtgccacccccaggtgtgcccagctggggagttctgccagaaccagtgcttcaccaagaggcagtacccagagaccaagatcatcaagacagatggcaagggctggggcctggtggccaagagggacatcagaaaaggagaatttgtgaatgaatatgtgggggagctgattgatgaggaggagtgcatggcccgcatcaagcacgcccatgaaaatgacatcacccacttctacatgctgaccatcgacaaggaccgcatcattgatgctggccccaagggcaactacagccgcttcatgaaccacagctgccagcccaactgtgagaccctgaagtggacagtgaatggagacaccagggtgggcctgtttgctgtgtgtgacatcccagctggaacagagctgaccttcaactacaacctggactgcctgggcaatgagaagacagtgtgccgctgtggggccagcaactgcagcggcttcctgggggaccggcccaagaccagcaccaccctgagcagcgaggagaagggcaagaagaccaagaagaagaccaggagaagaagagccaagggggagggcaagaggcagagtgaagatgagtgcttccgctgtggagatggcggccagctggtgctgtgtgacaggaagttctgcaccaaggcctaccacctgagctgcctgggcctgggcaagaggccctttgggaagtgggagtgcccctggcaccactgtgatgtgtgtgggaagcccagcaccagcttctgccacctgtgccccaacagcttctgcaaggagcaccaggatggaacagccttcagctgcaccccagatggccgcagctactgctgtgaacatgacctgggcgccgcctctgtgcgcagcaccaagacagagaagcccccacctgagcccgggaagcccaagggcaagagaagaagaagaagaggctggaggagagtgacagagggcaagtag

SEQ ID NO: 302591 - DNA, 2142 bp, Artificial Sequence
  derived and/or modified sequence
atggccggcagcttctgctggcggatgctgggcctggtgagcaaggtgggaaaccgcgcccgctgcttctcgagcatggcggctagtgaggaagagctgctggacttttccggatccgagttgcagtttaattcatgctcactacaccttagtctgcaccccttcttcaatttcttactaggcattcattcctgtttcgtttgcaaggagagtaaaactgatgttaagcggtgtgtcgttacacaatgcggaaagttttaccatgaggcgtgtgttaagaagtaccccctaaccgtgttcgaatcccgaggatttcgttgtcctctgcattcttgtgtcagttgtcatgcaagcaacccatctaacccacgcccttcaaagggcaaaatgatgcgctgcgtaagatgccctgttgcctatcacagcggagacgcttgtctggccgctggatgtagtgtgattgcctccaactccataatttgcactgcacactttacagcacggaaaggcaaacggcaccatgcccatgtcaacgtgagttggtgttttgtgtgttcaaagggagggtctctgctttgctgcgaatcatgccccgctgcttttcacccagattgtcttaacatagagatgccagacggctcctggttttgtaacgattgtcgagccgggaaaaagctccatttccaggatatcatctgggtgaagctgggcaattaccgatggtggccagccgaggtctgtcaccctaagaatgtccccccaaacattcagaaaatgaagcatgagataggagaatttcccgtgttctttttcggctccaaagattactactggacgcaccaggctagagtatttccttatatggaaggggatcgaggctcgcgctatcagggtgtgagaggcatcggcagagtgttcaagaatgctctgcaggaagccgaggctcgctttagggaaatcaagctacaaagagaggctcgggaaacacaggaaagtgaaaggaaacccccaccgtacaagcatattaaggtgaacaaaccatacgggaaggtccagatatacaccgctgatatctcagagatcccaaaatgtaactgcaaacccaccgacgaaaatccctgtggctttgactctgaatgccttaataggatgctgatgttcgaatgccatccacaggtgtgcccagcgggggagttttgtcagaatcagtgtttcactaagaggcagtacccagagacaaagataattaaaacagacggcaagggctggggattggttgccaagagggatattcggaagggcgagtttgtgaacgagtatgtgggcgaattgatcgatgaggaagaatgtatggcgagaattaaacatgcacatgagaatgatatcacacacttttacatgttgactatcgataaggatcgaattattgatgctggccctaaggggaactacagccgattcatgaatcacagttgtcagcccaactgcgagacactcaagtggacggtgaatggggataccagggtcgggctgttcgcagtctgcgatatccccgccgggacagagctgaccttcaattacaatctcgactgtctggggaatgagaaaacagtgtgcagatgcggggcaagcaattgcagcggttttctaggtgaccgaccaaagacaagcacaaccttatcctccgaggaaaaggggaagaaaacaaagaaaaaaactagacgacgcagggcaaaaggggaaggcaagcgtcaatctgaagacgagtgcttccggtgcggggacggcggtcagcttgtgttgtgcgaccggaaattctgcacaaaggcataccacctatcctgtctgggtctgggcaagaggcctttcggaaagtgggagtgcccatggcatcactgtgatgtctgtgggaaaccctctacctccttttgccatctttgccccaacagcttttgtaaggaacatcaggatgggacagccttctcttgtacaccagacggacgaagctactgttgcgaacatgacttgggtgcagcgtcagtgagaagcacaaagacagaaaagcctccaccagagcctggaaaacccaaagggaaacgtagaagaaggcgcgggtggcgtagagtaaccgagggtaagtag

SEQ ID NO: 302592 - DNA, 2142 bp, Artificial Sequence
  derived and/or modified sequence
atggcagggtccttttgctggcgcatgctgggtctcgtgagcaaggttgggaaccgggcaaggtgtttctcatcaatggcggcatcagaggaggaactgctggatttctctggtagtgaactgcagtttaattcttgttcccttcatcttagccttcatcctttctttaatttcctgttggggatccactcctgcttcgtttgtaaagagagtaagactgatgtaaaacgctgtgtggttacccagtgcggcaaattctatcacgaagcctgtgtgaaaaagtacccgttgacagtgtttgaaagtagggggtttagatgcccactacacagctgcgtgtcctgccacgctagcaacccttccaacccgaggccatcaaagggcaagatgatgaggtgcgtccgctgcccagtggcgtaccattccggagacgcgtgtctggctgctgggtgttctgtgattgcttctaactctatcatctgcaccgcccatttcacggctcggaagggcaagcgccatcatgcacacgtcaatgtttcgtggtgctttgtgtgtagcaaaggtggaagtttactgtgttgcgagagttgccccgctgcctttcaccccgattgcctgaacattgagatgcccgacggttcttggttttgcaatgattgtcgcgctggtaagaaactgcatttccaggacatcatttgggtcaagcttggaaactataggtggtggcccgcagaggtgtgccaccctaagaatgtacccccaaatattcaaaagatgaaacatgagatcggagaatttcctgtcttcttctttggtagcaaggactactactggactcaccaggcaagagtgttcccctacatggagggtgaccgaggtagccggtatcagggtgtacgagggattggcagagtgttcaagaacgcactgcaggaagctgaggccagattccgcgaaatcaaactccagagggaagcaagagagacccaagagagtgagaggaagccccctccatataaacatatcaaagtgaacaaaccatatggcaaggtgcagatttatacagccgacatatcagagattcccaaatgcaactgtaaacctacggatgaaaacccctgtgggttcgacagcgaatgtttgaaccgaatgctcatgttcgagtgccaccctcaagtctgtccagccggagagttttgtcagaatcagtgtttcactaagcgtcagtaccccgagaccaagatcattaagacagatggtaagggctggggactcgtagctaagcgggacatccggaagggcgagttcgtcaacgaatacgttggcgaactgatcgatgaagaagagtgtatggctcgtatcaaacacgcccacgaaaatgacatcactcatttttacatgctgacaattgacaaggataggatcattgatgctggtcctaagggcaactacagtagatttatgaaccatagttgtcagcccaattgtgaaacgctcaagtggactgtgaacggcgacactagggttggtctcttcgctgtttgcgatatacctgcagggacagaacttacattcaactataatcttgactgcctgggcaatgaaaaaaccgtatgcaggtgcggcgcatccaattgcagtggctttctcggagaccgtccaaaaacaagcacaacactcagtagcgaagaaaaaggcaaaaaaaccaaaaagaaaaccaggcgacgacgcgctaaaggtgagggcaagcgccaatccgaggatgagtgtttccgatgcggcgacggaggacagctggtgctgtgcgaccgcaagttctgtacaaaggcctatcatctgagctgtctggggctcgggaagagaccgttcggaaaatgggagtgtccctggcatcactgcgatgtgtgtggcaagcccagtacctctttctgccatctctgtcctaatagtttctgtaaagagcaccaagacggcacagcatttagctgcacacccgacggtaggagttattgctgcgaacatgacctgggagcggcatccgtaagatccacgaagactgagaaaccccctccagaacctggtaagccaaagggaaaacggagaagaaggcgcggatggcggagagtgaccgagggaaagtag

SEQ ID NO: 302593 - DNA, 2666 bp, Artificial Sequence
  derived and/or modified sequence
cagctgtgtgagaagccgggcagcctcctgctctgtgaaggaccctgctgcggagctttccacctcgcctgccttgggctttcccggaggccagaagggaggttcacctgcagcgagtgtgcctcaggtgtcgcccggcacagtctggggtctgtgaggatgatgagaggacacctgcacagccgtggcccttcctgcctactcaccgggcccaaggagtctcctatctcacgtcagaacacttcctgggtcaggaagacacctggagagtctcccaggccatggcagccccacagcagcacctcacttatgggagtgtctgtctgcctgcccagaatgataagtgactgctccaccactggccagctgctctcaaggaggaaaggcctcttttcataggagccccttctttcaagcttcttgccagttagactgggcctccccagccaggctgcctagtaagattctcctgtatttcaggtgaagctggagctcagatcgcagcaaggtaatccttgatggctggatctttttgctggagaatgcttggactagtgagcaaggttggaaacagggccaggtgctttagcagcatggctgcctctgaagaggagttgcttgattttagtggctcagaactgcaatttaattcttgttctttgcacctctctctccaccccttctttaactttttgttagggattcactcatgtttcgtgtgtaaagagagcaagacagatgttaagcgctgtgtggtaactcagtgtggaaaattttaccatgaggcttgtgtgaaaaaataccctctgactgtatttgagagccgaggtttccgctgccccctccacagctgtgtgagctgccatgcttccaacccttcaaacccaaggccgtcaaaaggtaaaatgatgcggtgtgtccgctgccccgttgcctatcacagcggggatgcttgtctggcagcaggatgctcagtgatcgcctccaacagcatcatctgcactgcccacttcactgctcggaaggggaagcgacaccacgcccacgtcaacgtgagctggtgcttcgtgtgctccaaaggggggagccttctgtgctgtgagtcctgcccagcggccttccaccctgactgcctgaacatcgagatgcctgacggcagctggttctgcaatgactgcagggctgggaagaagctgcacttccaggatatcatttgggtgaaacttgggaactacagatggtggccggcagaagtttgccatcccaaaaatgttcccccaaatattcagaaaatgaagcacgagattggagaattccctgtgtttttctttgggtctaaagattattactggacgcatcaggcgcgagtgttcccgtacatggagggggaccggggcagccgctaccagggggtcagagggatcggaagagtcttcaaaaacgcactgcaagaagctgaagctcgttttcgtgaaattaagcttcagagggaagcccgagaaacacaggagagcgagcgcaagcccccaccatacaagcacatcaaggtgaataagccttacgggaaagtccagatctacacagcggatatttcagaaatccctaagtgcaactgcaagcccacagatgagaatccttgtggctttgattcggagtgtctgaacaggatgctgatgtttgagtgccacccgcaggtgtgtcccgcgggcgagttctgccagaaccagtgcttcaccaagcgccagtacccagagaccaagatcatcaagacagatggcaaagggtggggcctggtcgccaagagggacatcagaaagggagaatttgttaacgagtacgttggggagctgatcgacgaggaggagtgcatggcgagaatcaagcacgcacacgagaacgacatcacccacttctacatgctcactatagacaaggaccgtataatagacgctggccccaaaggaaactactctcgatttatgaatcacagctgccagcccaactgtgagaccctcaagtggacagtgaatggggacactcgtgtgggcctgtttgccgtctgtgacattcctgcagggacggagctgacttttaactacaacctcgattgtctgggcaatgaaaaaacggtctgccggtgtggagcctccaattgcagtggattcctcggggatagaccaaagacctcgacgaccctttcatcagaggaaaagggcaaaaagaccaagaagaaaacgaggcggcgcagagcaaaaggggaagggaagaggcagtcagaggacgagtgcttccgctgcggtgatggcgggcagctggtgctgtgtgaccgcaagttctgcaccaaggcctaccacctgtcctgcctgggccttggcaagcggcccttcgggaagtgggaatgtccttggcatcattgtgacgtgtgtggcaaaccttcgacttcattttgccacctctgccccaattcgttctgtaaggagcaccaggacgggacagccttcagctgcaccccggacgggcggtcctactgctgtgagcatgacttaggggcggcatcggtcagaagcaccaagactgagaagccccccccagagccagggaagccgaaggggaagaggcggcggcggaggggctggcggagagtcacagagggcaaatagcgccag

SEQ ID NO: 302594 - DNA, 246 bp, Artificial Sequence
  derived and/or modified sequence
atgactcgcacagagagccctgccacctggatgggtcaactgggggctgccgcttggatgcgcacacttagcccgcaggccgcacaggtgcttgtgcgaccgcttgcgcaagaagatgcagtcggggctgccgcagcagcaagaggtcggatgggcggttcctccacccgcgaagtgccaagggcacaccccgtgaccgggtgctctgcggagattatcaacaagaagtgtcaactggacctttag

SEQ ID NO: 302595 - protein, 132 aa, Artificial Sequence
  derived and/or modified sequence
MEPLTFRDVAIEFSPEEWKCLDPAQQNLYRDVMLENYRNLVSLAMCSHFTQDFLPVQGIEDSFHKLILRRYEKFSSLISSCRVISHGLSRGRNRATEKNDLLTTEEPVVKHRFDLQYPEEMWRNTVVQKGRK

SEQ ID NO: 302596 - DNA, 399 bp, Artificial Sequence
  derived and/or modified sequence
atggagcccctgaccttcagagacgtggccatcgagttcagccccgaggagtggaagtgcctggaccccgcccagcagaacctgtacagagacgtgatgctggagaactacagaaacctggtgagcctggccatgtgcagccacttcacccaggacttcctgcccgtgcagggcatcgaggacagcttccacaagctgatcctgagaagatacgagaagttcagcagcctgatcagcagctgcagagtgatcagccacggcctgagcagaggcagaaacagagccaccgagaagaacgacctgctgaccaccgaggagcccgtggtgaagcacagattcgacctgcagtaccccgaggagatgtggagaaacaccgtggtgcagaagggcagaaagtag

SEQ ID NO: 302597 - DNA, 399 bp, Artificial Sequence
  derived and/or modified sequence
atggaaccacttacgtttagggacgttgctatagaattcagtccagaggagtggaagtgtctggatccagcacaacagaacctttacagggatgtgatgcttgaaaactatcgcaaccttgtatctttagcgatgtgtagccactttacccaggactttctacctgtacagggaatcgaagacagctttcataagctgatcttgcgccgctatgagaaattcagcagtttaatttcttcttgtagagtgatttcccacggcctctcccgcggacgcaaccgagcgactgagaaaaacgatctcctcaccacggaggaaccagtggttaagcatagatttgatttacagtacccggaagagatgtggagaaataccgtggtccagaaaggacggaaatag

SEQ ID NO: 302598 - DNA, 399 bp, Artificial Sequence
  derived and/or modified sequence
atggagcccctgaccttcagagatgtggccatcgagttcagccctgaggagtggaagtgcctggaccctgcccagcagaacctgtacagagatgtgatgctggagaactacagaaacctggtgtccctggccatgtgcagccacttcacccaggacttcctgcctgtgcagggcatcgaggacagcttccacaagctgatcctgcggcgctatgagaagttcagcagcctcatcagcagctgcagggtcatcagccacggcctgagccggggcaggaacagagccacagagaagaatgacctgctgaccacagaggagcctgtggtgaagcacagatttgacctgcagtacccagaggagatgtggaggaacacagtggtgcagaagggcaggaagtag

SEQ ID NO: 302599 - DNA, 399 bp, Artificial Sequence
  derived and/or modified sequence
atggagcccctgaccttccgggacgtggccatcgagttcagccccgaagaatggaagtgcctcgatcccgcccagcagaatctctaccgcgacgtcatgctcgagaattaccgcaacttagtttcattggcaatgtgctcacattttacgcaagacttcttaccagtccagggcatcgaagacagctttcacaaactgatactgcgaagatacgaaaagttttcatcgctcatcagtagctgcagagtgatctctcatgggttatcaagagggaggaatcgcgcgacagaaaagaacgacttactcacaaccgaggagccagtggtcaagcacaggtttgatctacagtatcccgaagaaatgtggaggaataccgtggtgcagaaaggacgcaaatag

SEQ ID NO: 302600 - DNA, 399 bp, Artificial Sequence
  derived and/or modified sequence
atggagccccttacattcagggacgtggccattgaattcagccctgaggaatggaagtgcttggatccagcccagcagaacctctacagagacgtaatgctggaaaactatcgtaatctggtgtccttagctatgtgctcccattttacgcaagattttctgcctgttcagggcattgaggattccttccacaaactgatccttaggcggtacgaaaaattctcctccctgattagttcatgcagagtaatctcccatgggttatctcgaggcagaaatcgagccacagagaagaatgatcttctcaccacagaggagccagttgtgaagcatagattcgatctgcagtacccggaggaaatgtggaggaacaccgtcgtgcagaaggggagaaaatag

SEQ ID NO: 302601 - DNA, 144 bp, Artificial Sequence
  derived and/or modified sequence
atggcatccgtcttatcacgcagattaggcaagaggagcctgctcggcgcccgcgtgctgggccctagcgctagtgaaggaccttccgccgcacccccaagcgaacctctgttagaaggagcagctcctcagccattcacttag

SEQ ID NO: 302602 - DNA, 207 bp, Artificial Sequence
  derived and/or modified sequence
atgaagctgaatgagaagttcagcgagggctggaggaagcccaatgcctcctggaagagcagctgcagcaagaacagcagtgaccgggacaagctgagcctgccccacaagaagctggagcggggctcctggagggtgtggcagcccaggagcaccctgtgcaggaccctggacaagacagaggaggagcgggccaagcgggagtag

SEQ ID NO: 302603 - DNA, 3587 bp, Artificial Sequence
  derived and/or modified sequence
tgcggcggcgctgcctggcgtgtgcgcaaggagcgggcgcggagccggcgggcgggcggaggatagcgcgggcgcggcacctgcgggcccgagggtctggctgtcgcagcgccgggccgccccgactccgagcggctgctgagatgagtgcagtgtcgcagccccaggctgctcccagcccgctggagaagtcgcccagcacggcgatcctgtgcaacacgtgtgggaatgtgtgcaagggcgaggtgctgcgggtgcaggacaagtacttccacatcaagtgcttcgtctgtaaagcatgtggctgcgacctggccgagggcggcttcttcgtgcggcagggcgagtacatctgcacgctggactaccagaggctctacggcacccgctgcttcagctgcgaccagttcattgagggtgaggtggtgtcggcgctgggcaagacctaccaccccgactgcttcgtgtgtgccgtctgccggctgcccttcccccccggggaccgagtgaccttcaacgggaaggaatgcatgtgccagaagtgttccctgcccgtatcggtgggcagcagcgcgcacctgtcccagggcctccgaagttgtgggggctgcggcacagaaatcaagaatggccaggccctggtagccttggacaagcactggcacttgggctgttttaagtgcaagagctgtgggaagctcctgaatgccgagtacatcagcaaggatgggctgccctactgcgaagctgactatcacgccaagttcggcatccgctgtgacagctgtgagaaatacatcacggggcgcgtgctggaggccggagagaagcactaccacccttcctgcgcgctatgtgtcaggtgcggccagatgtttgcagaaggcgaagagatgtatcttcaaggttcctccatctggcatccggcgtgtcgacaagcagccagaactgaagacagaaacaaggaaaccagaacttcctcagagagcatcatttctgtccctgcttccagcacctcagggtctccgagccgtgtgatttatgccaagcttggtggtgagatcctggactacagggacttggcagcccttcctaaaagtaaggccatctatgacatcgaccgccccgacatgatctcctactcaccctacatcagccactctgcaggggacaggcagagctacggcgagtcccctcagttgctctcgccaacgccgaccgagggggatcaggatgaccggtcctacaagcagtgtcggacctccagcccaagctccactgggtcggttagcctcgggcgctacactccgacctcacggtcaccacagcactacagccgtccagacactggcgtaaaagataacatctataggaaaccccctatctacagacagcatgctgccaggcgatcggatggggaggatggaagcttggaccaggataacaggaagcagaagagcagctggctgatgctcaagggggatgcagacacaaggaccaattctccagacctggacacccagtccttgtcccacagcagcgggaccgacagagaccctctccaaaggatggcaggggacagctttcactcacgattcccctattccaaatctgaccctctcccaggacatggaaagaatggcttggaccagcggaatgccaatctggccccctgtggagcagacccggatgccagctggggcatgcgagaatacaagatctatccgtatgactccctcatcgtcacaaaccgaattcgcgtgaaactgcccaaagacgtggaccggacgagactggagagacacttgtcgcccgaggagttccaggaagtgtttgggatgagcatcgaggagtttgaccgcctggccctctggaagaggaatgaccttaagaagaaagcccttttgttctgacggctgccagcctgccccactggtgtgtgccgggcgccgaggccaggggcccctggcgagaaccgcacacacccctcccacacaccttgctctggcttctctgtgtccatggggtgggcgggagggggtcccccagcaggtgcggcccctgcacctgccggcgacactcctgccggtagtttagggccgagacggctagcttcacgccacccttccccgctgtggcttggtgtcagggagaggctgtagagtggctgtgtcgggcatcagatggagcacacaggtggctgcagcccagcccaccttcccagcgttctcgaggtgccctggccccggtgctgggcacgtgggggacagaggtggccgggacgtgagctgtgaggcttgttgatgatggttgctgacaccatcatcgggggtgggcacacggcccttcggagcctgggcagcctggcctcacaggcagactcgcagacggggcagtgagcgtctgggacagtgccaagagtggggtgtgtgatttttgcaggcgtctgtgatgggtctctttagggacaaatgtcaacaagggacaagacagggcaccttccgccagcgcccctccatgcgctgcgttcctcctccagatcgacccctagatgcctacacaatatctttaaagtaacacagaagtttttattttattaaaaagtatagcctacttaaacgcgagatgacatatatagagtttaattttacggtccctccgcaggggagcggcctccagccttattctccaccgctcggatctgtgtggtttcagtctgttcttggtgtggtcctcatacacagagctccctgtctagtttcttttctttttcttttttctttttctcgtcacacaggtaaccttaaagacagacccctctaaagaacgctttgtaaatacatgtgaggtatagccaccactgttttccttgctgttatttttccaagtcttggggagaaaacatcctcctctgatggccaaagccctggaatcaagggtttccacgtaccctgcctaatacccgacgtagctcttgatgcaccgtccttgtgctgtggctggcggtgtctcagcctgaaacataaaccccacatgccccaggagcgatgtgctccctgaaacagacaaccacacgctgttggggagagaaggatggagataggatggagataggatggagatgtggctcttctcatctttgaagccagcagggcatcccggagcaggaggctggccgggctccccaagcgaaggcgttggtgtctgtcattaggtgtgtgttagggtgcagcaccggccgtcacaggatgctgataagcgcgctgagaggtggatgaaacaccaaagtctgtttccccgtccgcagtgggtgttgcctctttgtgtgtgtcccgatgttcctgcctgtgagtcggccttactccgtttccttagcgcccatgacacgccaagtcccgtttcgcactcggcttctcacccgcccagctcggctagggagggggagtttttagcacctaatatgcttcctgccattgcgcaatctgagcctgagcaactggaaacccccatttctcattagtgcaatgtcatatctgatcccaggaagcctggaaaataaaagacgatgcattataacttgcggaagt

SEQ ID NO: 302604 - protein, 75 aa, Artificial Sequence
  derived and/or modified sequence
MYPICTVVVDGLPSESSSSSYPGPVSVSEMSLLHALGPVQTWLGQELEKCGIDAMIYTRYVLSLLLHDSYDYDLQ

SEQ ID NO: 302605 - DNA, 70 bp, Artificial Sequence
  derived and/or modified sequence
tgcaatcctagtctcagataaaacagacattaaaccaacaaagatcaaaagagacaaagaaggccattac

SEQ ID NO: 302606 - DNA, 1230 bp, Artificial Sequence
  derived and/or modified sequence
atgaacctggacagatgcaacagcatcgccgagccccagcacttcaccaccaccgtgaccagatgcagccccaccgtggccttcgtggagttccccagcagcccccagctgaagaacgacgtgagcgaggagaaggaccagaagaagcccgagaacgagatgagcggcaaggtggagctggtgctgagccagaaggtggtgaagcccaagagccccgagcccgaggccaccctgaccttccccttcctggacaagatgcccgaggccaaccagctgcacctgcccaacctgaacagccaggtggacagccccagcagcgagaagagccccgtgatgacccccttcaagttctgggcctgggaccccgaggaggagagaagaagacaggagaagtggcagcaggagcaggagagactgctgcaggagagataccagaaggagcaggacaagctgaaggaggagtgggagaaggcccagaaggaggtggaggaggaggagagaagatactacgaggaggagagaaagatcatcgaggacaccgtggtgcccttcaccgtgagcagcagcagcgccgaccagctgagcaccagcagcagcatgaccgagggcagcggcaccatgaacaagatcgacctgggcaactgccaggacgagaagcaggacagaagatggaagaagagcttccagggcgacgacagcgacctgctgctgaagaccagagagagcgacagactggaggagaagggcagcctgaccgagggcgccctggcccacagcggcaaccccgtgagcaagggcgtgcacgaggaccaccagctggacaccgaggccggcgccccccactgcggcaccaacccccagctggcccaggaccccagccagaaccagcagaccagcaaccccacccacagcagcgaggacgtgaagcccaagaccctgcccctggacaagagcatcaaccaccagatcgagagccccagcgagagaagaaagagcatcagcggcaagaagctgtgcagcagctgcggcctgcccctgggcaagggcgccgccatgatcatcgagaccctgaacctgtacttccacatccagtgcttcagatgcggcatctgcaagggccagctgggcgacgccgtgagcggcaccgacgtgagaatcagaaacggcctgctgaactgcaacgactgctacatgagaagcagaagcgccggccagcccaccaccctgtag

SEQ ID NO: 302607 - DNA, 1230 bp, Artificial Sequence
  derived and/or modified sequence
atgaacttagaccgttgtaactcgatcgctgagccacaacacttcacaaccaccgttactcggtgttcccccaccgttgcatttgttgagttccccagttccccgcagctcaagaatgatgtaagcgaagagaaggatcagaagaaacccgagaacgagatgagtggcaaagttgaactcgtgctcagccaaaaagtcgtgaaacctaaatcccccgaaccagaagccaccctgacgttcccgttcctcgacaagatgcctgaggcgaatcagctgcacttacctaacctaaattcccaggtggactctccatcctctgagaaaagccccgtgatgacccccttcaagttttgggcctgggacccggaagaagagcggagaagacaggagaagtggcagcaggaacaggaaaggttactgcaggagagataccagaaggagcaggataaactgaaagaagagtgggagaaggcgcagaaagaggtcgaggaagaggagcgccgatattacgaagaagaaagaaagataatagaagacaccgtggtcccgttcaccgtgtcctctagctccgccgatcaattgagcactagctcttcaatgactgagggctctgggacgatgaacaaaatagacttggggaattgtcaggatgagaagcaggatcggcgctggaagaagtcatttcagggggacgatagtgatctgctgttgaagactcgtgagagtgaccgcttggaagagaaaggaagcctgactgaaggcgctctcgctcacagcggaaaccccgtcagcaaaggagtgcacgaagatcaccaactagataccgaggcgggtgctcctcattgtgggacaaacccgcagctggcccaagaccccagtcagaaccagcaaaccagtaacccaacccattcctctgaggacgttaagcccaagacactgcccctggacaagtcaattaatcaccagatcgaaagtccaagtgaaagacgaaaatctatttctgggaaaaaactctgctccagctgcggcctgcccttaggaaagggtgcggcgatgataatagagaccctgaacctgtatttccatatccaatgtttcagatgcgggatttgtaaaggccagctgggagacgccgttagtgggacggacgtgcgaattcggaatggcctcctgaattgtaacgattgttacatgcgctcacgatcagccggacaaccaactacactgtag

SEQ ID NO: 302608 - DNA, 1230 bp, Artificial Sequence
  derived and/or modified sequence
atgaacctggaccgctgcaacagcattgctgagccccagcacttcaccaccaccgtgacccgctgcagccccaccgtggcctttgtggagttccccagcagcccccagctgaagaatgatgtgtctgaggagaaggaccagaagaagccagaaaatgagatgtctgggaaggtggagctggtgctgagccagaaggtggtgaagcccaagagccctgagcctgaggccaccctgaccttccccttcctggacaagatgcctgaggccaaccagctgcacctgcccaacctgaacagccaggtggacagccccagcagcgagaagagccctgtgatgacccccttcaagttctgggcctgggaccctgaggaggagcggcggcggcaggagaagtggcagcaggagcaggagcggctgctgcaggagcgctaccagaaggagcaggacaagctgaaggaggagtgggagaaggcccagaaggaggtggaggaggaggagcggcgctactatgaggaggagaggaagatcatcgaggacacagtggtgcccttcaccgtgagcagcagcagcgctgaccagctgagcaccagcagctccatgacagagggcagcggcaccatgaacaagattgacctgggcaactgccaggatgagaagcaggaccggcgctggaagaagagcttccagggagatgacagcgacctgctgctgaagacccgggagagtgaccggctggaggagaagggcagcctgacagagggcgccctggcccacagcggcaaccctgtgtccaaaggagtgcatgaggaccaccagctggacacagaagctggggccccccactgcggcaccaacccccagctggcccaggaccccagccagaaccagcagaccagcaaccccacccacagcagtgaagatgtgaagcccaagaccctgcccctggacaagagcatcaaccaccagatcgagagccccagcgagaggaggaagagcatcagcggcaagaagctgtgcagcagctgtggcctgcccctgggcaagggggccgccatgatcatcgagaccctgaacctgtacttccacatccagtgcttccgctgtggcatctgcaagggccagctgggagatgctgtgtctggaacagatgtgcgcatcagaaatggcctgctgaactgcaatgactgctacatgaggagccgctctgctggccagcccaccaccctgtag

SEQ ID NO: 302609 - DNA, 1706 bp, Artificial Sequence
  derived and/or modified sequence
atggttaatgttgctgtgaaaataggagcccatgctctttcttaaagctacccagttttattttgttttttaaaatatttatccctataatcataaagaatattgtgttcttccatataaatcatgctaaaaattgagggtaggattttgacacacagtaacagcaatagataagcgagaggtcaaaaacataaaaatagacgctgaaatggtaaagctcacatatagttaaaaatgaataaaatagtgccatgaatctggacagatgtaactccattgcagaaccacagcattttacaacaactgtgactcgatgcagcccgaccgtggcctttgtggaatttccctccagcccccagctgaagaatgatgtgtcggaagaaaaagaccagaagaaaccagaaaatgaaatgagtggaaaggtggagttggtgctgtcacaaaaggtggtaaagccaaaatctccagaacccgaagcaacgctgacatttccatttctggacaaaatgcctgaagccaaccaactacatttgccaaatctcaattctcaagtggattctccaagcagtgagaagtcacctgttatgacaccttttaagttctgggcatgggacccagaagaggagcgcaggcgacaggaaaaatggcaacaggaacaggaacgtttgctccaggagagataccagaaggagcaggacaagctgaaagaagagtgggaaaaggcccaaaaggaggtggaagaggaagaacgcagatactatgaggaggagcgtaagataattgaagacactgtggttccatttactgtttcttcaagttccgctgaccagctgtctacctcttcctccatgactgaaggcagtgggacaatgaataagatagacctgggaaactgtcaagatgaaaaacaagacagaagatggaagaaatcattccagggagatgacagtgacttattgctgaagactagggaaagtgatcgactggaggagaagggcagcctaactgaaggggccttggctcattctgggaaccctgtatcaaaaggagtccatgaagaccatcagctggataccgaggctggggccccacactgtggaacaaacccacagcttgctcaggatccatcccagaatcagcagacatcaaatccaacgcacagttcagaagatgtgaagccaaaaaccctcccgctggataaaagcattaaccatcagatcgagtctcccagtgaaaggcggaagtctataagtggaaagaagctgtgctcttcctgtgggcttcctttgggtaaaggagctgcaatgatcatcgagaccctcaatctctattttcacatccagtgtttcaggtgtggaatttgtaaaggccagcttggagatgcagtgagtgggacggatgttaggattcgaaatggtctcctgaactgtaatgattgctacatgcgatccagaagtgccgggcagcctacaacattgtgacacggctttcaagcttccggatcactcaccatttctttactgagagtgtcccctggcaactgcttaacaaaatcccaagctcaggggcttctcagcatttacctaatttctgaaaggctcttctgaaaggtggtatctgttctttcgtagcacagtgtttatgtttttcctgtttattgttttggttttttttttttttttgcatttgcacagtatacacaaaag

SEQ ID NO: 302610 - DNA, 1230 bp, Artificial Sequence
  derived and/or modified sequence
atgaacctggaccggtgcaacagcatcgccgagccccagcacttcacaacgacagtcactaggtgttcccccaccgtggcctttgtcgaatttccatcttctcctcagcttaagaacgacgtatccgaggagaaggaccagaaaaagcctgagaacgagatgtcgggcaaggtagagcttgtgctaagccagaaagtggtaaagcccaagtcacctgaacctgaggctactctcacatttcccttccttgataaaatgccagaggccaatcagcttcacctgccaaatcttaactcccaggtcgactccccgtcaagtgaaaaatcgcccgttatgaccccttttaagttttgggcatgggatcccgaggaggagcgccgtcgccaggagaaatggcaacaggagcaggaaagactacttcaggaaagatatcagaaggagcaggataagctgaaggaagagtgggagaaagcccagaaggaggtagaggaggaggagcggcgctattatgaggaggaaaggaaaattatcgaagataccgtcgtaccttttaccgtgagcagtagttctgccgaccaactctccacctcgtcttctatgaccgaaggcagcggaaccatgaacaaaatcgacctggggaactgtcaagacgagaagcaggataggaggtggaaaaaatcattccagggtgacgactcagacctgctactgaaaacccgcgagtcggatcgtcttgaagagaaaggttccctgactgagggtgctctggctcacagcggcaaccctgtgtccaagggcgtgcacgaggatcaccagctagacacagaggcgggagctccccactgcggtaccaacccccagctcgcccaggatcccagccagaaccagcaaaccagcaaccctacccacagttccgaggacgtgaagcccaaaaccctaccacttgataaaagcattaatcatcagatcgagagcccgtcagagaggcgcaagagtatcagtggaaagaagttgtgcagctcatgcggacttcctcttggtaaaggagcagccatgatcattgagaccctgaacctttattttcatatccagtgcttccggtgtgggatctgtaagggccagcttggggacgcagtcagcggcaccgacgtccgcatcaggaacgggctgttgaactgtaacgattgttacatgcggtctaggagcgccggacagccaactaccttgtag

SEQ ID NO: 302611 - DNA, 1230 bp, Artificial Sequence
  derived and/or modified sequence
atgaatctcgatcggtgcaactcaatagcggagcctcaacattttacgacaactgtgaccaggtgcagtcctaccgttgccttcgtggagttcccatcttcgcctcagttgaaaaacgacgtgtcagaagagaaggaccagaagaaaccagaaaatgagatgagtggaaaggtagaattggtactctcgcagaaggtcgtgaagcctaagtcccccgagcccgaggcgactctcaccttcccattcttagataaaatgcctgaggccaatcagctgcacctgcccaatctgaatagtcaggtcgattcaccgagtagtgagaaatcacccgtcatgacaccattcaagttctgggcatgggaccctgaggaggaaagacgcaggcaggagaagtggcagcaggagcaggagcggctgctgcaggagagataccaaaaagagcaagataagttgaaagaggaatgggagaaggctcagaaggaggttgaggaagaagagagaagatactacgaggaagagagaaaaattattgaagatacagtggttcctttcaccgtatcctccagcagcgcagatcaactgtccaccagttcctcgatgactgaaggttctgggactatgaacaaaattgacctcgggaattgtcaagacgagaagcaggatagaaggtggaagaaatcctttcagggggacgactcagacctgctgttgaagaccagggagtccgaccgccttgaagaaaagggcagcctgaccgaaggggctctcgcccactctgggaacccagtttctaaaggtgtgcacgaagaccaccagctggataccgaggccggagcgccacactgtggcaccaatccgcagctggcccaggatccaagccagaaccaacagacctccaatcccacacattcctccgaagacgttaagccgaagacactcccacttgataagtctattaatcaccagatcgagtcaccctccgaacgccgtaagtctatcagtggcaaaaagttatgctctagttgcggcttgccgctcgggaagggcgctgcgatgataattgagactctgaatctttatttccacatccaatgcttcaggtgcggcatatgtaaggggcaattgggcgatgcggtgagcggaaccgacgtgaggattcgaaacggcttgctcaactgcaacgattgctacatgagaagcagaagcgcgggacagccaactactttgtag

SEQ ID NO: 302612 - protein, 432 aa, Artificial Sequence
  derived and/or modified sequence
MEKENQKLQASENDLLNKRLKLDYEEITPCLKEVTTVWEKMLSTPGRSKIKFDMEKMHSAVGQGVPRHHRGEIWKFLAEQFHLKHQFPSKQQPKDVPYKELLKQLTSQQHAILIDLGRTFPTHPYFSAQLGAGQLSLYNILKAYSLLDQEVGYCQGLSFVAGILLLHMSEEEAFKMLKFLMFDMGLRKQYRPDMIILQIQMYQLSRLLHDYHRDLYNHLEEHEIGPSLYAAPWFLTMFASQFPLGFVARVFDMIFLQGTEVIFKVALSLLGSHKPLILQHENLETIVDFIKSTLPNLGLVQMEKTINQVFEMDIAKQLQAYEVEYHVLQEELIDSSPLSDNQRMDKLEKTNSSLRKQNLDLLEQLQVANGRIQSLEATIEKLLSSESKLKQAMLTLELERSALLQTVEELRRRSAEPSDREPECTQPEPTGD

SEQ ID NO: 302613 - DNA, 408 bp, Artificial Sequence
  derived and/or modified sequence
atggttccagccccacccttcctgggagtgctggaaaaccctgttcctcagtgggacctgtccattcttgggagtattagaatccgcgtttctcacaccgaagtgcaagggagtgggtcctctcgatcgcccgaggcgctcaggaaggagtcactggaggtagagtggaccctcgtcctactggcaatcccccctcgcatccaacctagtcagcaggacggcggaccacctaagtgctgcgacctgctgagagcagcccttttgggtaggcactgcccgttgtgtgtgcccgctggtgaagtctttagtcagaaaagagacaatgaacaggacaggtcagagtttattggccagaccttgaagcttctggtgaaacggaatgtctctttagaactgtcttgcagatag

SEQ ID NO: 302614 - protein, 856 aa, Artificial Sequence
  derived and/or modified sequence
  misc_feature (1)..(1): Xaa can be any naturally occurring amino acid
XCTNEALVDEIMMTLKQAFTVAAVQQTAKAPAQLCEGCPLQSLHKLCERIEGMNSSKTKLELQKHLTTLTNQEQATIFEEVQKLRPRNEQRENELIISFLRCLYEEKQKEHIHIGEMKQTSQMAAENIGSELPPSATRFRLDMLKNKAKRSLTESLESILSRGNKARGLQEHSISVDLDSSLSSTLSNTSKEPSVCEKEALPISESSFKLLGSSEDLSSDSESHLPEEPAPLSPQQAFRRRANTLSHFPIECQEPPQPARGSPGVSQRKLMRYHSVSTETPHERNISYRNALRKKLHSSSSVPNFLKFLAPVDENNTSDFMNTKRDFESKANHLGDSGGTPVKTRRHSWRQQIFLRVATPQKACDSSSRYEDYSELGELPPRSPLEPVCEDGPFGPPPEEKKRTSRELRELWQKAILQQILLLRMEKENQKLQASENDLLNKRLKLDYEEITPCLKEVTTVWEKMLSTPGRSKIKFDMEKMHSAVGQGVPRHHRGEIWKFLAEQFHLKHQFPSKQQPKDVPYKELLKQLTSQQHAILIDLGRTFPTHPYFSAQLGAGQLSLYNILKAYSLLDQEVGYCQGLSFVAGILLLHMSEEEAFKMLKFLMFDMGLRKQYRPDMIILQIQMYQLSRLLHDYHRDLYNHLEEHEIGPSLYAAPWFLTMFASQFPLGFVARVFDMIFLQGTEVIFKVALSLLGSHKPLILQHENLETIVDFIKSTLPNLGLVQMEKTINQVFEMDIAKQLQAYEVEYHVLQEELIDSSPLSDNQRMDKLEKTNSSLRKQNLDLLEQLQVANGRIQSLEATIEKLLSSESKLKQAMLTLELERSALLQTVEELRRRSAEPSDREPECTQPEPTGD

SEQ ID NO: 302615 - DNA, 2571 bp, Artificial Sequence
  derived and/or modified sequence
tgatgcaccaacgaggccctggtggacgagatcatgatgaccctgaagcaggccttcaccgtggccgccgtgcagcagaccgccaaggcccccgcccagctgtgcgagggctgccccctgcagagcctgcacaagctgtgcgagagaatcgagggcatgaacagcagcaagaccaagctggagctgcagaagcacctgaccaccctgaccaaccaggagcaggccaccatcttcgaggaggtgcagaagctgagacccagaaacgagcagagagagaacgagctgatcatcagcttcctgagatgcctgtacgaggagaagcagaaggagcacatccacatcggcgagatgaagcagaccagccagatggccgccgagaacatcggcagcgagctgccccccagcgccaccagattcagactggacatgctgaagaacaaggccaagagaagcctgaccgagagcctggagagcatcctgagcagaggcaacaaggccagaggcctgcaggagcacagcatcagcgtggacctggacagcagcctgagcagcaccctgagcaacaccagcaaggagcccagcgtgtgcgagaaggaggccctgcccatcagcgagagcagcttcaagctgctgggcagcagcgaggacctgagcagcgacagcgagagccacctgcccgaggagcccgcccccctgagcccccagcaggccttcagaagaagagccaacaccctgagccacttccccatcgagtgccaggagcccccccagcccgccagaggcagccccggcgtgagccagagaaagctgatgagataccacagcgtgagcaccgagaccccccacgagagaaacatcagctacagaaacgccctgagaaagaagctgcacagcagcagcagcgtgcccaacttcctgaagttcctggcccccgtggacgagaacaacaccagcgacttcatgaacaccaagagagacttcgagagcaaggccaaccacctgggcgacagcggcggcacccccgtgaagaccagaagacacagctggagacagcagatcttcctgagagtggccaccccccagaaggcctgcgacagcagcagcagatacgaggactacagcgagctgggcgagctgccccccagaagccccctggagcccgtgtgcgaggacggccccttcggccccccccccgaggagaagaagagaaccagcagagagctgagagagctgtggcagaaggccatcctgcagcagatcctgctgctgagaatggagaaggagaaccagaagctgcaggccagcgagaacgacctgctgaacaagagactgaagctggactacgaggagatcaccccctgcctgaaggaggtgaccaccgtgtgggagaagatgctgagcacccccggcagaagcaagatcaagttcgacatggagaagatgcacagcgccgtgggccagggcgtgcccagacaccacagaggcgagatctggaagttcctggccgagcagttccacctgaagcaccagttccccagcaagcagcagcccaaggacgtgccctacaaggagctgctgaagcagctgaccagccagcagcacgccatcctgatcgacctgggcagaaccttccccacccacccctacttcagcgcccagctgggcgccggccagctgagcctgtacaacatcctgaaggcctacagcctgctggaccaggaggtgggctactgccagggcctgagcttcgtggccggcatcctgctgctgcacatgagcgaggaggaggccttcaagatgctgaagttcctgatgttcgacatgggcctgagaaagcagtacagacccgacatgatcatcctgcagatccagatgtaccagctgagcagactgctgcacgactaccacagagacctgtacaaccacctggaggagcacgagatcggccccagcctgtacgccgccccctggttcctgaccatgttcgccagccagttccccctgggcttcgtggccagagtgttcgacatgatcttcctgcagggcaccgaggtgatcttcaaggtggccctgagcctgctgggcagccacaagcccctgatcctgcagcacgagaacctggagaccatcgtggacttcatcaagagcaccctgcccaacctgggcctggtgcagatggagaagaccatcaaccaggtgttcgagatggacatcgccaagcagctgcaggcctacgaggtggagtaccacgtgctgcaggaggagctgatcgacagcagccccctgagcgacaaccagagaatggacaagctggagaagaccaacagcagcctgagaaagcagaacctggacctgctggagcagctgcaggtggccaacggcagaatccagagcctggaggccaccatcgagaagctgctgagcagcgagagcaagctgaagcaggccatgctgaccctggagctggagagaagcgccctgctgcagaccgtggaggagctgagaagaagaagcgccgagcccagcgacagagagcccgagtgcacccagcccgagcccaccggcgactag

SEQ ID NO: 302616 - DNA, 2571 bp, Artificial Sequence
  derived and/or modified sequence
tagtgcacgaatgaagctttggtcgacgaaattatgatgaccctgaagcaggccttcacagtggcggcagtgcagcaaactgcgaaagcacccgcccaactctgtgagggctgtcccttacagtccttgcacaagctttgcgagaggattgaaggtatgaactccagcaaaaccaagctggaactgcagaagcatctcaccaccctgacaaaccaggagcaggccacaatttttgaagaagtccagaaactgcggccaagaaacgagcagcgcgaaaacgagcttatcatcagcttcttgaggtgtctatatgaggagaaacagaaagagcacatacatattggcgagatgaagcaaacatcccagatggcggctgagaatattggatccgaactacccccttccgctacgagattcaggctggacatgctaaaaaataaagctaagaggagcctgactgaatctctggagtccatcctgtctaggggaaataaagccagaggacttcaagagcatagcattagcgtcgaccttgactctagtctttcgtcaaccctgtccaacacaagcaaagaaccaagtgtatgcgagaaggaagccttgcctatctccgaatcatcgtttaagctcctgggcagcagtgaagacttgagctctgactctgaatcccaccttcccgaagagcctgcacccctgtccccacagcaggccttccgtcggagggcgaacacactatctcactttccaatagagtgccaggaaccgccccagcctgccaggggatccccaggcgtgtcccaaagaaaattgatgaggtatcactcagtgtctacagaaacaccccacgaacgaaatataagctacaggaacgctctcaggaaaaaactccattcttcaagctctgttcctaacttcctgaagtttttggcccccgtcgacgagaacaacactagcgacttcatgaatactaagcgcgattttgagagcaaagcgaatcacttaggagactctggcggaaccccagtcaaaacacgaagacactcctggcgccaacagattttcctgagggtagccactcctcagaaggcctgtgactcctccagtaggtatgaagattacagcgagctcggcgaactgccaccgcggagtccgctggagccagtctgcgaagacggcccgtttgggccccctcccgaagaaaagaaaagaacatctagagaactgcgagagttatggcagaaggccattctgcaacagattctactattaagaatggagaaggagaatcaaaagctacaggccagcgagaatgatctcctgaataaaagactgaaactggattacgaggaaatcaccccttgcctgaaagaggtcactactgtctgggagaagatgctgagcacgcccggaagaagcaagattaaattcgatatggaaaagatgcactcagccgtggggcagggggtgcctagacatcatcgcggcgagatctggaagttccttgctgagcagttccacctcaagcatcagttcccctccaagcagcagcctaaggatgtgccgtataaggaactcctgaaacaactcacctcacagcagcatgccattcttattgatctgggtcgaacatttcctacacatccttacttctcagcacaactaggcgctggacagctatcgctgtacaacattcttaaggcatactccttgctggaccaagaggtgggctattgtcagggtcttagcttcgtggcgggcattctcctgctgcatatgtccgaggaagaggcatttaagatgttgaagttcctaatgttcgacatggggcttaggaagcagtaccgtccagacatgatcatactccaaatccagatgtatcagttgtctcggctgctccatgactaccatcgggatctgtataatcacttggaagaacatgagatcggaccgtctctatacgccgccccatggtttctcacgatgtttgcctcacagttcccgctcgggtttgtggctcgggtgttcgacatgatttttctgcagggtaccgaagttatcttcaaggtggccctctcacttttaggcagccacaagccccttattctgcagcatgagaatttagagacaattgtggacttcattaaaagcacgctcccgaacttggggctagttcagatggagaagacaatcaatcaagtctttgaaatggatatcgccaaacagctccaagcttacgaagtcgagtaccacgtcctgcaagaagagttgatagacagtagccccctgtccgataaccaacgtatggataagctggaaaagactaactcctcacttcgcaagcagaacctcgatctgctggagcagctacaggtggccaacggccgcatccagtcgttggaagctacgatcgaaaagctgctcagcagcgagtcaaaactcaaacaggcaatgctaacgttagaactggaaaggtctgcccttctgcaaaccgtggaggaactacgcagaagatccgcagaacccagcgacagagaacccgagtgtacacagccggaaccaacgggcgactag

SEQ ID NO: 302617 - DNA, 2571 bp, Artificial Sequence
  derived and/or modified sequence
tgatgcaccaatgaggccctggtggatgagatcatgatgaccctgaagcaggccttcaccgtggccgctgtgcagcagacagccaaggccccagcccagctgtgtgagggctgccccctgcagagcctgcacaagctgtgtgagcgcatcgagggcatgaacagcagcaagaccaagctggagctgcagaagcacctgaccaccctgaccaaccaggagcaggccaccatctttgaggaggtgcagaagctgcggcccagaaatgagcagcgggagaatgaactcatcatctccttcctgcgctgcctgtatgaggagaagcagaaggagcacatccacatcggggagatgaagcagaccagccagatggctgctgagaacatcggcagcgagctgcccccatctgccacccgcttccggctggacatgctgaagaacaaggccaagaggagcctgacagagagcctggagagcatcctgagccggggcaacaaggcccggggcctgcaggagcacagcatctctgtggacctggacagcagcctgagcagcaccctgagcaacaccagcaaggagcccagcgtgtgtgagaaggaggccctgcccatcagcgagagcagcttcaagctgctgggcagcagcgaggacctgagcagtgacagcgagagccacctgcctgaggagcccgcccccctgagcccccagcaggccttcagaagaagagccaacaccctgagccacttccccatcgagtgccaggagcccccccagcctgcccggggcagccctggggtgtcccagaggaagctgatgagataccacagcgtgtccacagagacccctcatgagaggaacatctcctacagaaatgccctgaggaagaagctgcacagcagcagctctgtgcccaacttcctgaagttcctggcccctgtggatgagaacaacaccagtgacttcatgaacaccaagagggactttgagagcaaggccaaccacctgggggacagcggcggcacccctgtgaagaccaggaggcacagctggaggcagcagatcttcctgcgggtggccaccccccagaaggcctgtgacagcagcagccgctatgaggactacagcgagctgggggagctgccccccaggagccccctggagcctgtgtgtgaagatggccccttcggccccccacctgaggagaagaagaggaccagccgggagctgcgggagctgtggcagaaggccatcctgcagcagatcctgctgctgaggatggagaaggagaaccagaagctgcaggcctctgaaaatgacctgctgaacaagaggctgaagctggactatgaggagatcaccccctgcctgaaggaggtgaccaccgtgtgggagaagatgctgagcaccccaggccgcagcaagatcaagtttgacatggagaagatgcacagcgctgtgggccagggcgtgcccaggcaccacagaggagagatctggaagttcctggccgagcagttccacctgaagcaccagttccccagcaagcagcagcccaaggatgtgccctacaaggagctgctgaagcagctgaccagccagcagcacgccatcctgattgacctgggccgcaccttccccacccacccctacttcagcgcccagctgggcgccggccagctgagcctgtacaacatcctgaaggcctacagcctgctggaccaggaggtgggctactgccagggcctgagctttgtggccggcatcctgctgctgcacatgtctgaggaggaggccttcaagatgctgaagttcctgatgtttgacatgggcctgaggaagcagtacagaccagacatgatcatcctgcagatccagatgtaccagctgagccggctgctgcatgactaccaccgggacctgtacaaccacctggaggagcacgagatcggccccagcctgtatgctgccccctggttcctgaccatgtttgccagccagttccccctgggctttgtggcccgggtgtttgacatgatcttcctgcagggcacagaggtgatcttcaaggtggccctgagcctgctgggcagccacaagcccctcatcctgcagcacgagaacctggagaccatcgtggacttcatcaagagcaccctgcccaacctgggcctggtgcagatggagaagaccatcaaccaggtgtttgagatggacatcgccaagcagctgcaggcctatgaggtggagtaccacgtgctgcaggaggagctgattgacagcagccccctgagtgacaaccagaggatggacaagctggagaagaccaacagcagcctgaggaagcagaacctggacctgctggagcagctgcaggtggccaacggccgcatccagagcctggaggccaccatcgagaagctgctgagcagcgagagcaagctgaagcaggccatgctgaccctggagctggagaggtctgccctgctgcagacagtggaggagctgcggcggcgctctgctgagcccagcgaccgggagccagaatgtacccagcctgagcccaccggggactag

SEQ ID NO: 302618 - DNA, 2571 bp, Artificial Sequence
  derived and/or modified sequence
tgatgcaccaacgaggccctggtggacgagatcatgatgaccctgaaacaggcatttacagtggccgctgtgcaacagaccgctaaggcgcccgcgcagctgtgcgaaggctgtcccctccagagcttacataaactgtgcgagcgcatcgaagggatgaatagctccaagacaaaactcgagcttcagaagcatctcacaaccctcacaaaccaggagcaggccaccatcttcgaggaagttcagaaattgcggccaaggaatgagcagagggaaaatgagcttattattagcttcctgcgctgtctgtatgaggagaaacagaaggaacacattcacattggagagatgaagcagactagtcagatggctgccgagaatattggcagtgagctccccccatcggctacccgattccgcttagatatgctcaagaataaggccaagcgctcattaacagaaagtttggagtcaatcctgtctcgcggcaacaaggccagaggcttacaggaacactcaatttctgttgacttggatagcagtttgagcagcactctgagtaacacgtccaaagagccatcagtgtgtgaaaaggaagccctccccatatccgaaagctcattcaaactcctagggtcgtctgaggatctgtcctccgatagtgagtcccatctgcccgaggagcctgcaccactctctccccagcaggcctttcgccggagagctaacactctgtcacacttcccaattgaatgtcaggaacctccacagcccgcgcggggaagtcccggcgttagccagcgtaagctcatgaggtaccactcggtgagtactgagacaccacacgaaaggaacatatcctatcgcaacgctcttcggaagaaactccattcctcgtctagcgtccctaacttcctgaaatttcttgcccccgttgatgaaaacaacacctctgactttatgaacaccaagagagattttgagtccaaggccaatcatttgggagattctggagggacgcccgtcaaaacccgtagacactcatggcgccagcagatctttctccgagtcgccacaccgcaaaaagcatgcgacagtagctcaaggtacgaagattactcagagctaggcgagttgcccccaaggtcgcccctcgagcctgtttgcgaagacgggccttttggcccacctcctgaggagaagaagcggacgagccgagagctaagggaactgtggcagaaggctattcttcagcagatcttactcctgagaatggagaaggaaaatcaaaaattacaggctagtgaaaacgatctgctgaataagcgactcaagctggattacgaggagataacgccttgtctgaaagaggttaccactgtatgggagaaaatgttgagtacccccggcaggtcaaagatcaaatttgatatggaaaaaatgcactctgccgtgggtcagggcgtgcctaggcaccataggggcgagatttggaaattcttagcagagcagttccatctaaaacaccagttcccgtccaaacagcagcctaaagatgtgccatacaaggaactccttaagcaactgacatctcaacagcacgccatactgatcgacttaggcaggactttcccgacacatccctatttcagcgctcagttaggggctggacagctgtccctgtacaatatactgaaggcctactctctgctggatcaggaggtggggtactgccaaggactttctttcgtggctggaatcctgctcctccacatgtctgaggaggaggcctttaagatgctgaagtttctaatgttcgacatggggctgcggaaacaatacaggcctgacatgattatcctacagatccagatgtaccagctatctcggctcttgcacgattaccacagggacttatataaccacctggaggaacacgaaatcggtccatccctgtatgctgcgccatggtttctgacaatgtttgccagtcagttcccgctcggattcgtagctcgggtgtttgatatgatatttctgcaggggaccgaagtcatcttcaaggttgcactgtcactgcttgggagccataagcctctcattctgcagcacgaaaacctggagaccatcgtggactttataaagtctactctcccgaacctcggacttgtgcagatggagaagactattaaccaggttttcgagatggacattgccaagcagttacaggcatacgaggtggaataccacgtactgcaggaagaattgattgacagcagccccctgtccgacaatcagaggatggacaagcttgagaagactaattcaagccttcgaaagcagaacctggatctgctggaacaactgcaagtcgctaatggcagaatacagagcctggaggccaccatagagaagttgctatctagtgaaagcaagctgaagcaggcaatgctgactttggaactggagcggtctgctttgctgcagactgtggaggagcttcggagaagatccgccgaaccgagcgacagggagcccgaatgcacccaacctgagccaacaggtgattag

SEQ ID NO: 302619 - DNA, 2571 bp, Artificial Sequence
  derived and/or modified sequence
taatgcacaaatgaggccttggtggacgagataatgatgacccttaagcaggcgttcaccgtcgctgccgtgcagcagaccgcaaaggcacccgcacagctttgtgaaggatgccctctgcaatcactacacaagttgtgtgaaaggatcgagggcatgaattcctcaaagacaaagctcgagctgcagaagcacctgaccacgctgacgaatcaggagcaggctacgattttcgaagaggtgcagaaactgcggccaagaaatgagcagcgagaaaacgaactcatcatcagctttttgcgttgtctctatgaagaaaagcaaaaggagcatatacacattggggagatgaaacagacatcccaaatggccgcagagaacattggatccgagctgccccctagcgccacgaggtttcgtctcgatatgctgaaaaataaggccaagaggtcactgactgaatccttggaatcaattctgtctaggggaaacaaggcaaggggcctgcaagaacattccatatcagtagatctcgacagctctctgagttctacactgagcaatactagtaaggaacccagcgtgtgcgagaaagaggcactgcccatctccgagtcttcatttaaacttttgggatcgtccgaagatctgtcatccgactctgaatcacacttacccgaagagcccgcaccactgagcccccagcaggcctttaggcggcgtgccaacacgttatcccactttccaattgagtgtcaggaacccccacagcccgcaagaggcagccctggagtttctcagcgaaagcttatgcgctatcacagcgtgagcaccgaaactccccacgagcgaaatatttcctacagaaacgctctacggaagaagctgcatagctcctctagcgtccccaacttcctgaaattcttggcacctgtcgacgagaacaacaccagcgattttatgaacaccaagagggacttcgaatccaaagccaatcacctcggtgactctggtggtacccctgtcaaaacacggcgacactcttggcgccaacaaattttcctgagagtggccaccccccagaaagcatgcgactcaagtagcaggtatgaggattatagcgagcttggcgagctaccccctaggtcccccctggagccggtttgtgaggacggacctttcggaccccctcctgaagagaagaaacgcactagccgggagctgagggagctttggcagaaggccatactacagcaaattttgctgttgcgaatggaaaaagaaaaccagaagctccaagcttccgagaatgatctgctgaacaaaaggcttaaactggactacgaagagatcaccccctgtctaaaggaggttacaaccgtgtgggaaaagatgctgtcaacaccaggaaggagcaagataaagtttgacatggagaagatgcacagcgccgtgggtcagggtgtgccacggcaccatcggggtgagatatggaagttccttgccgagcagttccacctgaagcaccagttcccaagtaaacaacagcccaaagacgtcccttacaaggagctgctcaagcagctcacctcgcagcagcacgccattctgatcgacctgggcaggactttcccaacacatccctatttttcggcgcagctaggcgcagggcaactcagcctctacaacattctgaaggcctatagtctgctagatcaggaagtcggctattgccagggactatcttttgttgccggaatcctcctgcttcacatgtccgaagaagaggcttttaaaatgctaaagtttctgatgttcgacatgggcctgcgaaagcagtacagaccagacatgattatcctgcagatccagatgtatcagctgagcaggctgctgcacgactaccacagagatctctacaaccatctcgaagaacacgaaataggcccatcactttatgcagccccttggtttctgacaatgtttgcgtcacaattccccttgggcttcgtggcacgcgtctttgatatgattttcttgcaggggaccgaggtgatcttcaaggtggccctgagtctacttgggtctcacaagcccctgattctgcaacacgagaacttggaaaccatagttgactttatcaagtcaacacttccgaatttaggcctggtgcaaatggaaaagaccattaaccaggtgttcgagatggacatcgccaagcagctacaggcctatgaggtcgaataccacgttctgcaggaggaactcatcgacagttcacctctgtcggataatcagagaatggataaactagagaaaaccaacagctccctgaggaagcagaatttagacttgctggaacagttacaagtggctaacggaagaatccaatcactggaggcaactatcgaaaagctcttgagctcagaatcaaaactgaagcaggcaatgcttactctggagctcgaacggtcggccctcctacaaaccgttgaagaattaagacgcaggtccgctgagcccagtgatcgcgagccggaatgcactcagccagagccaactggtgactag

SEQ ID NO: 302620 - DNA, 2977 bp, Artificial Sequence
  derived and/or modified sequence
gtgcacaaatgaggctctggttgatgaaattatgatgaccctgaaacaggccttcacggtggccgcagtgcagcagacagctaaggcgccagcccagctgtgtgagggctgccccctgcaaagcctgcacaagctctgtgagaggatagagggaatgaattcttccaaaacaaaactagaactgcaaaagcacctgacgacattaaccaatcaggagcaggcgactatttttgaagaggttcagaaattgagaccgagaaatgagcagcgagagaatgaattgattatttcttttctgagatgtttatatgaagagaaacagaaagaacacatccatattggggagatgaagcagacatcgcagatggcagcagagaatattggaagtgaattaccacccagtgccactcgatttaggctagatatgctgaaaaacaaagcaaagagatctttaacagagtctttagaaagtattttgtcccggggtaataaagccagaggcctgcaggaacactccatcagtgtggatctggatagctccctgtctagtacattaagtaacaccagcaaagagccatctgtgtgtgaaaaggaggccttgcccatctctgagagctcctttaagctcctcggctcctcggaggacctgtccagtgactcggagagtcatctcccagaagagccagctccgctgtcgccccagcaggccttcaggaggcgagcaaacaccctgagtcacttccccatcgaatgccaggaacctccacaacctgcccgggggtccccgggggtttcgcaaaggaaacttatgaggtatcactcagtgagcacagagacgcctcatgaacgaaacatctcctaccgtaatgccctgcggaaaaaacttcattcttcttcctctgtgccaaattttctaaaatttctggctcctgtagatgaaaataacacctctgattttatgaacacaaaaagggactttgaatccaaagcaaaccatcttggtgattctggtgggactcctgtgaagacccggaggcattcctggaggcagcagatattcctccgagtagccaccccgcagaaggcgtgcgattcttccagcagatatgaagattattcagagctgggagagcttcccccacgatctcctttagaaccagtttgtgaagatgggccctttggccccccaccagaggaaaagaaaaggacatctcgtgagctccgagagctgtggcaaaaggctattcttcaacagatactgctgcttagaatggagaaggaaaatcagaagctccaagcctctgaaaatgatttgctgaacaagcgcctgaagctcgattatgaagaaattactccctgtcttaaagaagtaactacagtgtgggaaaagatgcttagcactccaggaagatcaaaaattaagtttgacatggaaaaaatgcactcggctgttgggcaaggtgtgccacgtcatcaccgaggtgaaatctggaaatttctagctgagcaattccaccttaaacaccagtttcccagcaaacagcagccaaaggatgtgccatacaaagaactcttaaagcagctgacttcccagcagcatgcgattcttattgaccttgggcgaacctttcctacacacccatacttctctgcccagcttggagcaggacagctatcgctttacaacattttgaaggcctactcacttctagaccaggaagtgggatattgccaaggtctcagctttgtagcaggcattttgcttcttcatatgagtgaggaagaggcgtttaaaatgctcaagtttctgatgtttgacatggggctgcggaaacagtatcggccagacatgattattttacagatccagatgtaccagctctcgaggttgcttcatgattaccacagagacctctacaatcacctggaggagcacgagatcggccccagcctctacgctgccccctggttcctcaccatgtttgcctcacagttcccgctgggattcgtagccagagtctttgatatgatttttcttcagggaacagaggtcatatttaaagtggctttaagtctgttgggaagccataagcccttgattctgcagcatgaaaacctagaaaccatagttgactttataaaaagcacgctacccaaccttggcttggtacagatggaaaagaccatcaatcaggtatttgaaatggacatcgctaaacagttacaagcttatgaagttgagtaccacgtccttcaagaagaacttatcgattcctctcctctcagtgacaaccaaagaatggataaattagagaaaaccaacagcagcttacgcaaacagaaccttgacctccttgaacagttgcaggtggcaaatggtaggatccaaagccttgaggccaccattgagaagctcctgagcagtgagagcaagctgaagcaggccatgcttaccttagaactggagcggtcggccctgctgcagacggtggaggagctgcggcggcggagcgcagagcccagcgaccgggagcctgagtgcacgcagcccgagcccacgggcgactgacagctctgcaggagagattgcaacaccatcccacactgtccaggccttaactgagagggacagaagacgctggaaggagagaaggaagcgggaagtgtgcttctcagggaggaaaccggcttgccagcaagtagattcttacgaactccaacttgcaattcagggggcatgtcccagtgttttttttgttgtttttagatactaaatcgtcccttctccagtcctgattactgtacacagtagctttagatggcgtggacgtgaataaatgcaacttatgttttcttgttggttcctttttgagtgtcactgtgtttgtaaagagcattcacaatacggtggaatttcaaaagctggaagagctcgagatcatgcctcaggcaaaggcgtgggtccatcgttcttccg

SEQ ID NO: 302621 - DNA, 496 bp, Artificial Sequence
  derived and/or modified sequence
acccaccggtctcccgaccagcgagcaagctttggacaaggccaaagagcattgggctgctggaagctggggcatcggcgcagccttcggggtgaacttacgtgctcgctgacaatgtccttaaagtcctggcatcctcagagcaagacaaaaagagtgggggcaagcgaaggtaacccccagtggggctctggaagtatggaggcccctctcctttcctccttccttccacctctggccagcgaggcagaactcacaggcaacacctggtttctgcacagatgcagctgcattttgaacctagaggaaagcatggacagcgactggggggcttggtggggggtgtcgctccctagaagggcaccttttctgatatatgggtcagatgggccttggtgcacacaggcaggcttcccaggatggggacattgacaaggaggcaacagtcctctctcctccactccagtgactaataaaagctaacatttatgtagca

SEQ ID NO: 302622 - DNA, 421 bp, Artificial Sequence
  derived and/or modified sequence
agaagtcacccggctgggggtgaacttacgtgctcgctgacaatgtccttaaagtcctggcatcctcagagcaagacaaaaagagtgggggcaagcgaaggtaacccccagtggggctctggaagtatggaggcccctctcctttcctccttccttccacctctggccagcgaggcagaactcacaggcaacacctggtttctgcacagatgcagctgcattttgaacctagaggaaagcatggacagcgactggggggcttggtggggggtgtcgctccctagaagggcaccttttctgatatatgggtcagatgggccttggtgcacacaggcaggcttcccaggatggggacattgacaaggaggcaacagtcctctctcctccactccagtgactaataaaagctaacatttatgta

SEQ ID NO: 302623 - DNA, 318 bp, Artificial Sequence
  derived and/or modified sequence
atgagcctgaagagctggcacccccagagcaagaccaagcgggtgggtgctagcgaaggcaatccacagtgggggtctggctcaatggaggctccactgttgtcaagttttctgccaccgttagcttccgaagctgagctcacgggtaatacatggtttctccacaggtgcagttgcatactcaatttggaggaatccatggactccgactggggcgcttggtggggagttagcctgcctaggagagcaccttttcttatttacggttctgacggtccatggtgcacacaggccggctttcccggctggggtcactag

SEQ ID NO: 302624 - DNA, 1299 bp, Artificial Sequence
  derived and/or modified sequence
atggagaaggagaaccagaagctgcaggccagcgagaacgacctgctgaacaagagactgaagctggactacgaggagatcaccccctgcctgaaggaggtgaccaccgtgtgggagaagatgctgagcacccccggcagaagcaagatcaagttcgacatggagaagatgcacagcgccgtgggccagggcgtgcccagacaccacagaggcgagatctggaagttcctggccgagcagttccacctgaagcaccagttccccagcaagcagcagcccaaggacgtgccctacaaggagctgctgaagcagctgaccagccagcagcacgccatcctgatcgacctgggcagaaccttccccacccacccctacttcagcgcccagctgggcgccggccagctgagcctgtacaacatcctgaaggcctacagcctgctggaccaggaggtgggctactgccagggcctgagcttcgtggccggcatcctgctgctgcacatgagcgaggaggaggccttcaagatgctgaagttcctgatgttcgacatgggcctgagaaagcagtacagacccgacatgatcatcctgcagatccagatgtaccagctgagcagactgctgcacgactaccacagagacctgtacaaccacctggaggagcacgagatcggccccagcctgtacgccgccccctggttcctgaccatgttcgccagccagttccccctgggcttcgtggccagagtgttcgacatgatcttcctgcagggcaccgaggtgatcttcaaggtggccctgagcctgctgggcagccacaagcccctgatcctgcagcacgagaacctggagaccatcgtggacttcatcaagagcaccctgcccaacctgggcctggtgcagatggagaagaccatcaaccaggtgttcgagatggacatcgccaagcagctgcaggcctacgaggtggagtaccacgtgctgcaggaggagctgatcgacagcagccccctgagcgacaaccagagaatggacaagctggagaagaccaacagcagcctgagaaagcagaacctggacctgctggagcagctgcaggtggccaacggcagaatccagagcctggaggccaccatcgagaagctgctgagcagcgagagcaagctgaagcaggccatgctgaccctggagctggagagaagcgccctgctgcagaccgtggaggagctgagaagaagaagcgccgagcccagcgacagagagcccgagtgcacccagcccgagcccaccggcgactag

SEQ ID NO: 302625 - DNA, 1299 bp, Artificial Sequence
  derived and/or modified sequence
atggagaaggagaatcagaagctacaggcttcagagaatgatctgctcaacaagaggttgaagttggactatgaggagatcacgccctgcctcaaagaagtcacgaccgtttgggaaaaaatgctgagtactcccggccgctcaaaaatcaaatttgacatggaaaagatgcacagtgcagtgggccaaggggttccaaggcaccaccgcggagagatatggaaattcctggccgagcagtttcatctaaagcaccagtttccgagcaaacagcaacccaaggacgtgccatataaggagctcctgaagcagctcacctcccaacaacatgccatcctgattgacctgggcaggacattccccacacacccttatttttcagctcagctaggagccgggcagctatccttgtacaacatcctgaaagcatactccttactagatcaggaggtaggctactgtcaaggtctgtcgtttgttgccgggatcctgcttttgcatatgagtgaggaagaagcctttaagatgctgaagtttctcatgtttgacatgggtctgcggaagcaatatcgcccagacatgattatccttcagattcagatgtatcagctgtcccgcctcctccacgattaccaccgcgacctttataaccatcttgaggaacacgagattggaccctcattgtacgcagcaccttggtttcttaccatgtttgcttcacagttccctcttggtttcgtggcacgggtgtttgatatgatatttctgcagggaaccgaagttattttcaaagttgcacttagtctgctgggctcacacaaaccccttattctgcagcatgagaacctggagacaattgttgattttattaaatccactcttccaaatttaggcctggtccagatggagaagacaattaaccaagtttttgaaatggacattgcaaagcagctccaagcttatgaagtcgagtatcatgtgcttcaggaagagctgatcgacagctccccactgagcgacaaccaacgtatggacaagcttgaaaagacaaattccagtctgcggaaacaaaacctggatctcctggagcagctccaggtggccaatgggagaatccaatcactggaagctaccattgagaagctgctgagcagcgaatctaagctgaagcaggctatgctgactttagaactcgaacggagcgcgttgcttcagactgtggaggagttgcgaaggagatcggcagaacccagtgatagggagcctgagtgtacccagcctgagccaacgggggattag

SEQ ID NO: 302626 - DNA, 1299 bp, Artificial Sequence
  derived and/or modified sequence
atggagaaggagaaccagaagctgcaggcctctgaaaatgacctgctgaacaagaggctgaagctggactatgaggagatcaccccctgcctgaaggaggtgaccaccgtgtgggagaagatgctgagcaccccaggccgcagcaagatcaagtttgacatggagaagatgcacagcgctgtgggccagggcgtgcccaggcaccacagaggagagatctggaagttcctggccgagcagttccacctgaagcaccagttccccagcaagcagcagcccaaggatgtgccctacaaggagctgctgaagcagctgaccagccagcagcacgccatcctgattgacctgggccgcaccttccccacccacccctacttcagcgcccagctgggcgccggccagctgagcctgtacaacatcctgaaggcctacagcctgctggaccaggaggtgggctactgccagggcctgagctttgtggccggcatcctgctgctgcacatgtctgaggaggaggccttcaagatgctgaagttcctgatgtttgacatgggcctgaggaagcagtacagaccagacatgatcatcctgcagatccagatgtaccagctgagccggctgctgcatgactaccaccgggacctgtacaaccacctggaggagcacgagatcggccccagcctgtatgctgccccctggttcctgaccatgtttgccagccagttccccctgggctttgtggcccgggtgtttgacatgatcttcctgcagggcacagaggtgatcttcaaggtggccctgagcctgctgggcagccacaagcccctcatcctgcagcacgagaacctggagaccatcgtggacttcatcaagagcaccctgcccaacctgggcctggtgcagatggagaagaccatcaaccaggtgtttgagatggacatcgccaagcagctgcaggcctatgaggtggagtaccacgtgctgcaggaggagctgattgacagcagccccctgagtgacaaccagaggatggacaagctggagaagaccaacagcagcctgaggaagcagaacctggacctgctggagcagctgcaggtggccaacggccgcatccagagcctggaggccaccatcgagaagctgctgagcagcgagagcaagctgaagcaggccatgctgaccctggagctggagaggtctgccctgctgcagacagtggaggagctgcggcggcgctctgctgagcccagcgaccgggagccagaatgtacccagcctgagcccaccggggactag

SEQ ID NO: 302627 - DNA, 1299 bp, Artificial Sequence
  derived and/or modified sequence
atggagaaggagaaccagaagctgcaggccagcgagaacgacctgctcaataaacggctcaagctagattacgaagagatcacgccatgtctcaaggaagtgaccactgtctgggagaaaatgctatccaccccgggtaggtctaagattaaattcgacatggagaaaatgcattcagctgtgggacagggagtgccaaggcaccaccgtggcgagatctggaaatttctggccgagcagttccatctaaaacatcagtttcctagcaagcagcagccgaaggatgtgccctacaaggaactgctgaagcagttaaccagccagcagcacgctatcttgatcgacctgggccgtacatttcccacacacccctacttctctgcgcaactgggtgccggacagctcagcctgtacaatattctgaaggcatatagtctgctggaccaagaagttggctattgtcagggtctgtcctttgtggcagggatcctgttacttcacatgagcgaggaggaagctttcaaaatgttgaagtttttgatgtttgatatgggactgcgcaaacaatatcgacctgacatgatcatacttcaaattcagatgtaccagctttcgcgcctgcttcacgactatcaccgtgatctgtataatcaccttgaggaacacgagatcggcccctctctgtacgctgccccttggttcttaaccatgttcgccagccaatttccgttggggttcgtagcccgggtgtttgacatgatcttcttgcagggaaccgaggtcatcttcaaagttgctctttctcttctaggttcccacaagccgctgatactacagcatgaaaacctagaaacgatcgtggacttcattaagtccaccctgcccaatctcggcctcgttcagatggagaagaccatcaaccaggtgttcgagatggacatagccaaacagctccaggcatatgaagtcgaataccacgtcttgcaggaggaactgatcgattccagtccgttgagcgacaaccagagaatggataagttggaaaagacaaatagtagccttcggaaacaaaatttggaccttctagagcaactgcaggtcgccaatggccgaatccagtcgctcgaggcaacaattgaaaaactgctcagctcggaatctaagttgaagcaggctatgctgactttggagctggagaggagcgctctcctgcagacagtggaagaactgcgccggcggtccgctgagccttcagaccgggaacctgagtgtacccaacccgaacccaccggggattag

SEQ ID NO: 302628 - DNA, 1299 bp, Artificial Sequence
  derived and/or modified sequence
atggaaaaggaaaaccagaagcttcaagcttccgagaatgacctcctgaataagcggttgaagctggactatgaggagattaccccatgcttgaaagaagtcacaactgtttgggagaaaatgttatcaacgcctgggcgttctaagatcaaatttgatatggagaagatgcactcagcagtggggcagggagtacctcggcatcacaggggggagatttggaagttcctggctgagcagttccaccttaagcatcagttccctagtaaacagcaaccaaaggatgtcccatataaggaactactgaaacagttgacgagccagcaacacgccattttgattgacttgggccgtaccttcccgacccacccatatttctctgcacaactcggcgcaggccagctgtctctgtacaatattctgaaagcctattccctgttggaccaggaggtaggctactgtcagggtctgtcatttgttgcagggatcctcttgttgcatatgtcagaggaggaggcttttaaaatgcttaagttcctcatgttcgacatgggcttgcgaaaacagtaccggccagacatgatcatcctccagattcaaatgtaccagttgtctcggctgctccatgactatcatcgcgacttatataatcatctggaggagcacgagataggacccagcctttatgccgcaccctggtttctcacaatgtttgcttcccagttccccctcggcttcgtggccagagtctttgatatgatttttctccagggcaccgaggtgattttcaaggttgcactgagcctgctaggatcacacaagcccctgattctgcagcatgagaaccttgagaccatcgtggattttattaagtctactttgccgaacctgggactggttcaaatggagaaaaccatcaaccaggtttttgaaatggatattgctaagcagcttcaagcatacgaagtggagtaccatgtgctccaggaagagctgattgattcctctcctctgagcgacaatcaaagaatggacaagctggagaagaccaacagctccctgcgaaagcagaacctggacctcttggaacagctccaggtggccaatggcagaatccagtctcttgaagctaccatcgagaagctcttgtcctctgagagcaagctgaagcaggcaatgctcaccctggagttggagagatccgctctcctgcagacggtggaagaactgcgcagaaggagcgccgagcctagtgaccgcgagccagagtgcacacagcccgagcccaccggcgattag

SEQ ID NO: 302629 - protein, 152 aa, Artificial Sequence
  derived and/or modified sequence
MKTKLNIYNMQFLLFVFLVWDPARLVLANIQEDEAKNNITIFTRILDRLLDGYDNRLRPGLGDSITEVFTNIYVTSFGPVSDTDMEYTIDVFFRQKWKDERLKFKGPMNILRLNNLMASKIWTPDTFFHNGKKSVAHNMTMPNKLLRIQDDG

SEQ ID NO: 302630 - protein, 137 aa, Artificial Sequence
  derived and/or modified sequence
MKTKLNIYNMQFLLFVFLVWDPARLVLANIQEDEAKNNITIFTRILDRLLDGYDNRLRPGLGDSITEVFTNIYVTSFGPVSDTDMEYTIDVFFRQKWKDERLKFKGPMNILRLNNLMASKIWTPDTFFHNGKKSVAH

SEQ ID NO: 302631 - protein, 511 aa, Artificial Sequence
  derived and/or modified sequence
MKTKLNIYNMQFLLFVFLVWDPARLVLANIQEDEAKNNITIFTRILDRLLDGYDNRLRPGLGDSITEVFTNIYVTSFGPVSDTDMEYTIDVFFRQKWKDERLKFKGPMNILRLNNLMASKIWTPDTFFHNGKKSVAHNMTMPNKLLRIQDDGTLLYTMRLTVQAECPMHLEDFPMDAHSCPLKFGSYAYTTSEVTYIWTYNASDSVQVAPDGSRLNQYDLLGQSIGKETIKSSTGEYTVMTAHFHLKRKIGYFVIQTYLPCIMTVILSQVSFWLNRESVPARTVFGVTTVLTMTTLSISARNSLPKVAYATAMDWFIAVCYAFVFSALIEFATVNYFTKRGWAWDGKSVVNDKSPSIKAEGITLTYNSVKAILQGAKLIWSKYIAFSWPSLFQEKTLEYLEKWMDCLTFKQSSKKEKASVMIQNNAYAVAVANYAPNLSKDPVLSTISKSATTPEPNKKPENKPAEAKKTFNSVSKIDRMSRIVFPVLFGTFNLVYWATYLNREPVLGVSP

SEQ ID NO: 302632 - DNA, 1562 bp, Artificial Sequence
  derived and/or modified sequence
ggcggtgatgaagacaaaattgaacatctacaacatgcagttcctgctttttgttttcttggtgtgggaccctgccaggttggtgctggctaacatccaagaagatgaggctaaaaataacattaccatctttacgagaattcttgacagacttctggatggttacgataatcggcttagaccaggactgggagacagtattactgaagtcttcactaacatctacgtgaccagttttggccctgtctcagatacagatatggaatatacaattgatgttttctttcgacaaaaatggaaagatgaacgtttaaaatttaaaggtcctatgaatatccttcgactaaacaatttaatggctagcaaaatctggactccagataccttttttcacaatgggaaaaaatcagtagctcataatatgacaatgccaaataagttgcttcgaattcaggatgatgggactctgctgtataccatgaggcttacagttcaagctgaatgcccaatgcacttggaggatttcccaatggatgctcattcatgtcctctgaaatttggcagctatgcatatacaacttcagaggtcacttatatttggacttacaatgcatctgattcagtacaggttgctcctgatggctctaggttaaatcaatatgacctgctgggccaatcaatcggaaaggagacaattaaatccagtacaggtgaatatactgtaatgacagctcatttccacctgaaaagaaaaattgggtattttgtgattcaaacctatctgccttgcatcatgactgtcattctctcccaagtttcattctggcttaacagagaatctgtgcctgcaagaactgtgtttggagtaacaactgtcctaacaatgacaactctaagcatcagtgctcggaattctctccccaaagtggcttatgcaactgccatggactggtttattgctgtttgttatgcatttgtgttctctgccctaattgaatttgcaactgttaattacttcaccaaaagaggatgggcttgggatgggaagagtgtagtaaatgacaagtccccttcaataaaagctgaaggcattacattaacatacaactcagtgaaagcaattcttcaaggagctaagctaatatggtccaagtatatagctttctcatggcccagtttattccaagaaaagactttagagtacttagagaagtggatggactgtttaaccttcaaacaatcttctaaaaaagaaaaggcttccgttatgatacagaacaacgcttatgcagtggctgttgccaattatgccccgaatctttcaaaagatccagttctctccaccatctccaagagtgcaaccacgccagaacccaacaagaagccagaaaacaagccagctgaagcaaagaaaactttcaacagtgttagcaaaattgacagaatgtccagaatagtttttccagttttgtttggtacctttaatttagtttactgggctacatatttaaacagagaacctgtattaggggtcagtccttgaattgagacccatgttatct

SEQ ID NO: 302633 - DNA, 1536 bp, Artificial Sequence
  derived and/or modified sequence
atgaaaaccaaactgaacatttataatatgcaattcctgttgttcgtcttcctggtttgggatcctgcaaggctcgtgctagctaatatccaagaggacgaggcaaagaataacatcactatatttacacggatcctagaccgccttctggatgggtatgataaccgccttaggcctggcctgggcgactctatcactgaagtatttacgaacatttatgtgacatcattcggcccggtgagtgacacagacatggagtacacgatagacgtgttctttaggcaaaagtggaaggacgagcgtctgaaatttaaggggccgatgaacattctgcgccttaacaacctcatggccagcaagatttggactccagacaccttctttcataatggcaaaaaaagcgttgctcacaatatgaccatgcccaacaagctcctgcgcattcaagatgatggcactctcctttacactatgcggttgacagtgcaagcagagtgcccaatgcacctggaggatttcccgatggatgcccatagctgccccttgaagttcggcagctatgcatatactaccagtgaagtaacttacatctggacttataatgcgagcgacagcgtgcaggtggccccagatggctcccgtctgaatcagtatgatcttctgggacagtctatcgggaaagagaccattaagtcttcgaccggcgagtatactgtgatgacagcacactttcacctgaagaggaaaatcggttactttgttattcaaacatacctaccctgtatcatgacagtcatattgtcccaagtgagcttctggctaaaccgcgagagcgttcctgccaggactgtgtttggcgttactactgtgttgacaatgaccaccctatccatcagtgcccgcaactctctcccaaaagtggcctatgcaaccgctatggattggtttatcgcagtctgttacgcctttgtcttcagtgccctcatcgagttcgccacagtcaattacttcaccaaacggggctgggcctgggacggtaaatcagtcgttaatgataagtcccctagcatcaaagccgaggggatcactctgacctacaactctgtgaaggccatattgcaaggcgcgaagctcatttggagtaagtacattgcattttcttggccatcactttttcaggaaaagactctggagtatctggagaaatggatggattgtttgacgttcaaacaaagttccaagaaggagaaggcaagtgtgatgatacaaaacaatgcatatgccgtggccgttgctaactatgcacctaatctgagcaaggatccagtactgagtacgatttcaaaaagcgccacgaccccagagccaaacaagaagcccgaaaataagcccgcggaagccaagaagacctttaattccgtgagcaagatcgaccggatgtccaggatcgtgtttccagtacttttcggtaccttcaacctggtgtactgggcaacttatctgaatagagagcccgtcctgggtgtctcgccctag

SEQ ID NO: 302634 - DNA, 1536 bp, Artificial Sequence
  derived and/or modified sequence
atgaagaccaagctgaacatctacaacatgcagttcctgctgtttgtgttcctggtgtgggaccctgcccggctggtgctggccaacatccaggaggatgaggccaagaacaacatcaccatcttcacccgcatcctggaccggctgctggatggctatgacaaccggctgcggcccggcctgggggacagcatcacagaggtgttcaccaacatctacgtgaccagctttggacctgtgtctgacacagacatggagtacaccattgatgtgttcttccggcagaagtggaaggatgagcggctgaagttcaagggccccatgaacatcctgcggctgaacaacctgatggccagcaagatctggaccccagacaccttcttccacaacgggaagaagtctgtggcccacaacatgaccatgcccaacaagctgctgcgcatccaggatgatggcaccctgctgtacaccatgaggctgactgtgcaggctgaatgtcccatgcacctggaggacttccccatggatgcccacagctgccccctgaagtttggcagctatgcctacaccaccagcgaggtgacctacatctggacctacaatgccagtgacagcgtgcaggtggccccagatggcagccggctgaaccagtatgacctgctgggccagagcatcggcaaggagaccatcaagagcagcactggagagtacacagtgatgacagcccacttccacctgaagaggaagattggctactttgtgatccagacctacctgccctgcatcatgaccgtcatcctgagccaggtgtccttctggctgaaccgggagagcgtgcctgccaggacagtgtttggagtgaccaccgtgctgaccatgaccaccctgagcatcagcgccaggaacagcctgcccaaggtggcctatgccacagccatggactggttcatcgctgtgtgctacgcctttgtgttcagcgccctgattgaatttgccaccgtgaactacttcaccaagaggggctgggcctgggatggcaagtctgtggtgaatgacaagagccccagcatcaaggccgagggcatcaccctgacctacaacagcgtgaaggccatcctgcagggcgccaagctgatctggagcaagtacatcgccttctcctggcccagcctcttccaggagaagaccctggagtacctggagaagtggatggactgcctgaccttcaagcagagcagcaagaaggagaaggcctctgtgatgatccagaacaatgcctatgctgtggccgtggccaactatgcccccaacctgagcaaggaccctgtgctgagcaccatcagcaagagcgccaccaccccagagcccaacaagaagccagagaacaagccagctgaggccaagaagaccttcaacagcgtgtccaagattgacaggatgagcagaattgtgtttcctgtgctgtttggcaccttcaacctggtgtactgggccacctacctgaaccgggagcctgtgctgggcgtgagcccctag

SEQ ID NO: 302635 - DNA, 1536 bp, Artificial Sequence
  derived and/or modified sequence
atgaagaccaagctgaacatctacaacatgcagttcctgctgttcgtgtttctggtctgggatcctgcaagattggttctagccaacattcaggaagatgaagccaagaataacatcacgatttttactagaatcctggatcgacttctggatggctatgataatcgtctcagaccggggctgggcgatagcatcacggaggtatttactaacatttatgttacaagcttcgggcccgttagcgacactgacatggagtacaccatagatgttttcttccggcagaagtggaaagatgagaggctcaaattcaaaggtcccatgaatatccttagactcaataatctgatggcctccaagatctggacccctgatacctttttccataacggtaagaagagtgttgctcacaacatgactatgcccaataaactcctcagaatccaggacgacggcactttgctttacaccatgcggctgacggtccaggccgagtgtcctatgcatctggaagactttcctatggatgcacacagctgtccgttaaagtttggcagctacgcttataccacttctgaggtgacttacatatggacatacaacgcctccgacagcgttcaggtggcccctgatgggtcccgtctcaaccagtatgatctgctgggtcagagtatcgggaaggagacaattaagagctctaccggagagtataccgtgatgacagcacattttcatctcaagcggaaaatcggatactttgtgatccagacgtacctgccatgcattatgacagtgatcctgtcccaggttagcttctggctcaacagggagagtgtgcccgcgaggacagtgtttggcgttactacagtgttgacaatgacaaccctctcaatctctgcacgcaactccctgccgaaggttgcttatgctactgctatggattggtttattgctgtttgttacgcgttcgtgttcagtgccctgattgaatttgccacggtcaattatttcaccaagcgagggtgggcatgggacggcaagagcgtcgttaatgacaagtccccatctattaaggcagagggcatcactcttacttacaatagtgtcaaggctattctgcagggggctaagctgatctggagcaaatatatagccttctcatggcccagcctgttccaggagaaaaccctagaatacctggaaaagtggatggattgcctcacctttaagcagagtagtaaaaaagagaaagccagcgtgatgatacagaacaacgcctacgctgtggccgtggcaaactacgctcccaatctgtcgaaagatcctgtcctgagtaccattagcaagtcagctactacacctgagcccaataaaaaacctgagaataagcctgctgaggcaaagaagactttcaattcggtctcgaagatcgaccgcatgagccgcatcgtgtttcccgtgcttttcggcacttttaatttggtgtactgggccacatacttgaatcgggagccagtcctgggggtgtctccttag

SEQ ID NO: 302636 - DNA, 1536 bp, Artificial Sequence
  derived and/or modified sequence
atgaagaccaagctcaacatttataacatgcagttcctgctgttcgtcttcctggtctgggaccccgcacgcctggtactggccaacattcaggaagacgaagctaagaacaacatcaccatttttacacggatattagatcgcctcctggacggttatgataaccggttaagaccaggcctaggcgattctatcaccgaggtatttacaaacatatacgtgacaagcttcggccctgtgtccgatactgatatggagtacactatcgatgtgttttttcgccagaagtggaaggacgaaagactgaaattcaagggaccgatgaatatcctgaggctaaacaacctcatggcaagtaagatttggacccccgataccttcttccacaacggcaagaaaagcgtcgcccataatatgactatgcctaataaactgctaagaattcaggatgacgggaccctgctgtacacgatgcgattaactgtgcaagcagaatgccctatgcacctggaagatttcccaatggatgcacactcctgcccactgaagttcggctcctatgcatacaccacatcggaagtgacatacatctggacatacaacgcatcagactccgtacaggtggccccagacgggagcaggctgaaccaatacgatctgctgggccagagtataggcaaagaaaccattaaatcctccaccggtgagtacacagtcatgacagcccatttccaccttaagaggaaaattggatatttcgtgatccagacttatcttccctgtattatgaccgtcattctcagccaagtgagcttttggcttaacagggaatcggtgccagcacggactgtctttggcgtcactaccgtgctgaccatgaccacattatcgataagcgccaggaactcactgcccaaagtggcttatgcgacagccatggattggtttattgctgtgtgttatgcattcgtattctccgctctaatcgagtttgctaccgtgaattacttcacaaagcgaggatgggcctgggatggaaaaagcgtggtgaacgacaaatctccgtctattaaagcggaaggtattactctgacatacaacagtgtcaaggctatcctccaaggggctaagcttatctggtcaaagtatattgcattcagctggccttctctcttccaggaaaaaaccctggaatatctagagaagtggatggactgccttacctttaagcagtcttctaagaaagagaaagcttctgtaatgatccaaaataatgcctatgcagttgctgtggccaattacgcgccaaacctgtcaaaggatcctgttttgagcacaatcagtaagtccgccaccacacctgaaccgaataagaaacctgagaataaaccagccgaagctaagaaaacatttaatagcgtgtcaaagatcgaccggatgtcccgtatcgtcttccccgtcctcttcgggacatttaatttagtatactgggcaacatacctgaacagggaacctgttctgggtgtcagcccatag

SEQ ID NO: 302637 - DNA, 1536 bp, Artificial Sequence
  derived and/or modified sequence
atgaagaccaagctgaacatctacaacatgcagttcctgctgttcgtgttcctggtgtgggaccccgccagactggtgctggccaacatccaggaggacgaggccaagaacaacatcaccatcttcaccagaatcctggacagactgctggacggctacgacaacagactgagacccggcctgggcgacagcatcaccgaggtgttcaccaacatctacgtgaccagcttcggccccgtgagcgacaccgacatggagtacaccatcgacgtgttcttcagacagaagtggaaggacgagagactgaagttcaagggccccatgaacatcctgagactgaacaacctgatggccagcaagatctggacccccgacaccttcttccacaacggcaagaagagcgtggcccacaacatgaccatgcccaacaagctgctgagaatccaggacgacggcaccctgctgtacaccatgagactgaccgtgcaggccgagtgccccatgcacctggaggacttccccatggacgcccacagctgccccctgaagttcggcagctacgcctacaccaccagcgaggtgacctacatctggacctacaacgccagcgacagcgtgcaggtggcccccgacggcagcagactgaaccagtacgacctgctgggccagagcatcggcaaggagaccatcaagagcagcaccggcgagtacaccgtgatgaccgcccacttccacctgaagagaaagatcggctacttcgtgatccagacctacctgccctgcatcatgaccgtgatcctgagccaggtgagcttctggctgaacagagagagcgtgcccgccagaaccgtgttcggcgtgaccaccgtgctgaccatgaccaccctgagcatcagcgccagaaacagcctgcccaaggtggcctacgccaccgccatggactggttcatcgccgtgtgctacgccttcgtgttcagcgccctgatcgagttcgccaccgtgaactacttcaccaagagaggctgggcctgggacggcaagagcgtggtgaacgacaagagccccagcatcaaggccgagggcatcaccctgacctacaacagcgtgaaggccatcctgcagggcgccaagctgatctggagcaagtacatcgccttcagctggcccagcctgttccaggagaagaccctggagtacctggagaagtggatggactgcctgaccttcaagcagagcagcaagaaggagaaggccagcgtgatgatccagaacaacgcctacgccgtggccgtggccaactacgcccccaacctgagcaaggaccccgtgctgagcaccatcagcaagagcgccaccacccccgagcccaacaagaagcccgagaacaagcccgccgaggccaagaagaccttcaacagcgtgagcaagatcgacagaatgagcagaatcgtgttccccgtgctgttcggcaccttcaacctggtgtactgggccacctacctgaacagagagcccgtgctgggcgtgagcccctag

SEQ ID NO: 302638 - DNA, 1498 bp, Artificial Sequence
  derived and/or modified sequence
cttttaatcagagttagtaatgtggacagtacaaaatcgagagagtctggggcttctctctttccctgtgatgattaccatggtctgttgtgcacacagcaccaatgaacccagcaacatgtcatacgtgaaagagacagtggacagattgctcaaaggatatgacattcgcttgcggccggacttcggaggattatacactcaccatgtatttccagcagtcttggaaagacaaaaggctttcttattctggaatcccactgaacctcaccctagacaatagggtagctgaccaactctgggtaccagacacctactttctgaatgacaagaaatcatttgtgcatggggtcacagtgaaaaatcgaatgattcgactgcatcctgatggaacagttctctatggactccgaatcacaaccacagctgcatgtatgatggatcttcgaagatatccattggatgagcagaactgcaccctggagatcgaaagttatggctataccactgatgacattgaattttactggaatggaggagaaggggcagtcactggtgttaataaaatcgaacttcctcaattttcaattgttgactacaagatggtgtctaagaaggtggagttcacaacaggagcgtatccacgactgtcactaagttttcgtctaaagagaaacattggttacttcattttgcaaacctacatgccttctacactgattacaattctgtcctgggtgtctttttggatcaactatgatgcatctgcagccagagtcgcactaggaatcacgacagtgcttacaatgacaaccatcagcacccacctcagggagaccctgccaaagatcccttatgtcaaagcgattgatatttatctgatgggttgctttgtgtttgtgttcctggctctgctggagtatgcctttgtaaattacatcttctttgggaaaggccctcagaaaaagggagctagcaaacaagaccagagtgccaatgagaagaataaactggagatgaataaagtccaggtcgacgcccacggtaacattctcctcagcaccctggaaatccggaatgagacgagtggctcggaagtgctcacgagcgtgagcgaccccaaggccaccatgtactcctatgacagcgccagcatccagtaccgcaagcccctgagcagccgcgaggcctacgggcgcgccctggaccggcacggggtacccagcaaggggcgcatccgcaggcgtgcctcccagctcaaagtcaagatccccgacttgactgatgtgaattccatagacaagtggtcccgaatgtttttccccatcaccttttctctttttaatgtcgtctattggctttactatgtacactgaggtctgttctaatggttccatttagactactttcctcttctattgttttttaaccttacaggtccccaacagcgatactgctgtttctcgaggtaagagattcagccatccaattggtttta

SEQ ID NO: 302639 - DNA, 1215 bp, Artificial Sequence
  derived and/or modified sequence
atgacttttgcctgtgggcgcactagcgaggactacactctcacaatgtatttccagcaaagctggaaagataaaagattaagctatagcggcattcccctcaatctcaccctggataatagggtggccgatcaactgtgggtgcccgatacctatttcttgaatgacaaaaaaagctttgtgcacggagttacggtgaagaacaggatgatcagactacatcccgatggcaccgtcttatatggccttaggatcaccacaactgctgcttgcatgatggatctacgcagatatcctctggacgagcaaaactgcacccttgaaatcgagtcgtacgggtataccactgatgatatcgaattctattggaatgggggagaaggggcagtcactggagtcaataagatcgagttgccccaattttcaattgtggactacaaaatggtatccaagaaagtggagttcacaactggggcctaccctagactgtccctcagttttcggttgaagagaaacattggctatttcatccttcagacgtacatgccctccacattaatcacaatcctgtcttgggtatcattttggataaattatgatgccagtgccgcccgtgtggccctgggcattacgacggtgctcacaatgacaacaatttctacacacctgagggaaactcttccaaaaataccttatgtcaaagccatcgatatctacctgatgggatgctttgtgtttgtttttttggcgctcttggagtatgcattcgtcaactacattttctttggcaaaggccctcagaagaaaggcgcgtcgaagcaagaccagagtgctaacgagaagaacaaattggaaatgaacaaggtgcaagtggacgctcatggtaacatcttgctctctaccttggagattcgtaatgagaccagtgggagcgaggtgctgacctccgtgtctgatcctaaggcaaccatgtactcatatgattccgcaagcatccagtacagaaaacccctttcttcacgggaagcatacggacgggcattggacaggcacggtgtgccaagcaagggtaggattcgacgtagagcatcccagttaaaggtcaaaatacctgacctcaccgatgttaacagtatcgataaatggtcccgcatgttcttccccattaccttctctttgtttaacgtggtttactggctgtattacgtacactag

SEQ ID NO: 302640 - DNA, 1215 bp, Artificial Sequence
  derived and/or modified sequence
atgacctttgcctgtggccgcaccagcgaggactacaccctgaccatgtacttccagcagagctggaaggacaagaggctgagctacagcggcatccccctgaacctgaccctggacaacagagtggccgaccagctgtgggtgcctgacacctacttcctgaatgacaagaagagctttgtgcacggcgtgacagtgaagaacaggatgatccggctgcacccagatggcaccgtgctgtatggcctgcgcatcaccaccacagctgcctgcatgatggacctgcggcgctaccccctggatgagcagaactgcaccctggagattgagagctatggctacaccacagatgacatcgagttctactggaatggaggagagggcgctgtgactggagtgaacaagattgagctgccccagttcagcatcgtggactacaagatggtgtccaagaaggtggagttcaccactggagcctacccccggctgagcctgtccttccggctgaagagaaatattggctacttcatcctgcagacctacatgcccagcaccctcatcaccatcctgtcctgggtgtccttctggatcaactatgatgccagcgctgcccgggtggccctgggcatcaccaccgtgctgaccatgaccaccatcagcacccacctgcgggagaccctgcccaagatcccctacgtgaaggccatcgacatctacctgatgggctgctttgtgtttgtgttcctggccctgctggagtatgcctttgtgaactacatcttcttcggcaagggcccccagaagaagggggccagcaagcaggaccagagcgccaatgagaagaacaagctggagatgaacaaggtgcaggtggatgcccacggcaacatcctgctgagcaccctggagatcagaaatgagaccagcggcagcgaggtgctgacctctgtgtctgaccccaaggccaccatgtacagctatgattctgccagcatccagtacaggaagcccctgagcagccgggaggcctacggccgggccctggacagacatggagtgcccagcaagggccgcatcagaagaagagccagccagctgaaggtgaagatcccagacctgacagatgtgaacagcattgacaagtggagcaggatgttcttccccatcaccttcagcctcttcaacgtggtgtactggctgtactacgtgcactag

SEQ ID NO: 302641 - DNA, 1215 bp, Artificial Sequence
  derived and/or modified sequence
atgaccttcgcctgcggccggaccagcgaggactacaccctgaccatgtactttcagcagtcttggaaagacaaaaggctgtcctacagcggcatccctctcaatttgaccctcgataacagagtggcagatcagctgtgggttcccgatacgtacttcctcaatgacaaaaaatctttcgtacatggggtcacggtgaagaataggatgatacgactgcatcccgacggtactgtcctctacggccttagaattacaaccacagccgcctgcatgatggatttgagacggtacccactcgacgaacagaactgtacattggagattgaatcatatggctatactactgatgatattgagttttattggaacggcggtgagggcgctgtcaccggcgtcaacaaaatcgagctgcctcagttttctattgttgattataagatggtgtccaagaaggtagaattcacaacgggagcttacccacgcctttccctgagttttagactgaagagaaatattggatactttattctccagacctacatgccaagtactttgattacgatcttatcctgggtgtctttttggatcaattatgacgcttctgccgcaagggttgcactgggaattactaccgtgcttacaatgacgaccatatcgacacacttgcgggagaccctccccaaaataccctatgtgaaggccatagacatatatttgatgggctgttttgtcttcgtgttcctcgcactcctggagtatgcattcgttaactatattttttttggaaaaggccctcaaaaaaagggtgcttccaagcaggaccagagcgcaaatgaaaagaataagttagagatgaacaaggtgcaggtggatgcccacggaaacattcttcttagcaccctggaaatccgaaacgaaacaagtggaagcgaagtcttgacatcggtaagtgatccgaaagctaccatgtacagctacgatagcgcttccatccagtacaggaaaccactgagttctcgagaagcctacggtagggcccttgacagacatggcgtgccctcgaaggggaggatccgacggcgcgcctcacagctgaaggtcaagatcccagatctcacagatgtgaattccatcgacaagtggtcccgcatgttcttccccatcaccttctctcttttcaatgtcgtctattggctgtactatgttcactag

SEQ ID NO: 302642 - DNA, 1215 bp, Artificial Sequence
  derived and/or modified sequence
atgaccttcgcttgcggaagaacatcggaggattatactctaacaatgtacttccagcagtcctggaaggacaaaagactgtcctacagtggcatccctcttaacctgacacttgataatagggtggccgaccagctgtgggttcccgatacatacttcctgaacgataagaagtcatttgttcacggcgtgacggtgaagaatcgcatgattcgcctccaccctgacggtactgtcctctatggactgagaatcaccaccaccgcagcatgtatgatggacttgcggcgttaccccctggacgaacagaattgcaccttggaaatagagtcttacgggtacaccactgatgatatagagttttattggaacggaggggagggagctgtcacgggtgtaaacaaaatagaactgccccagttcagcattgtcgactacaaaatggtgagcaagaaggtggagtttactactggggcttatccaaggttaagtctgtctttcagacttaagcggaacatcgggtactttatcctgcagacatacatgccgtctacacttattaccatcctgtcctgggttagcttctggattaactacgatgcctcagcagcccgtgtggccctgggaatcacgacagttctgaccatgaccactatctctacccacctgagggaaactttgcccaaaatcccatacgtgaaggccattgacatataccttatgggttgtttcgtgttcgtatttttggccctactcgaatacgcctttgtcaattacattttttttggcaaaggaccacagaagaagggagcatccaagcaggatcaaagtgccaacgagaaaaataagctggagatgaacaaagtccaagtggacgcgcatggtaacattttgctcagcaccctggagatccgcaacgagacttcgggatccgaggtgcttacctctgtcagcgatcctaaggccactatgtatagctacgatagtgcttccatacaatacaggaagcccttgtcttccagggaggcctatggtcgggctctcgaccgccacggagtgccctcaaaggggcgtatccgaaggagagcctcccagctgaaggtaaagatacctgatctgactgatgtgaacagtatcgataagtggagtaggatgttcttccccatcactttctctctgtttaacgtggtgtattggctgtattacgtccattag

SEQ ID NO: 302643 - DNA, 1215 bp, Artificial Sequence
  derived and/or modified sequence
atgaccttcgcctgcggcagaaccagcgaggactacaccctgaccatgtacttccagcagagctggaaggacaagagactgagctacagcggcatccccctgaacctgaccctggacaacagagtggccgaccagctgtgggtgcccgacacctacttcctgaacgacaagaagagcttcgtgcacggcgtgaccgtgaagaacagaatgatcagactgcaccccgacggcaccgtgctgtacggcctgagaatcaccaccaccgccgcctgcatgatggacctgagaagataccccctggacgagcagaactgcaccctggagatcgagagctacggctacaccaccgacgacatcgagttctactggaacggcggcgagggcgccgtgaccggcgtgaacaagatcgagctgccccagttcagcatcgtggactacaagatggtgagcaagaaggtggagttcaccaccggcgcctaccccagactgagcctgagcttcagactgaagagaaacatcggctacttcatcctgcagacctacatgcccagcaccctgatcaccatcctgagctgggtgagcttctggatcaactacgacgccagcgccgccagagtggccctgggcatcaccaccgtgctgaccatgaccaccatcagcacccacctgagagagaccctgcccaagatcccctacgtgaaggccatcgacatctacctgatgggctgcttcgtgttcgtgttcctggccctgctggagtacgccttcgtgaactacatcttcttcggcaagggcccccagaagaagggcgccagcaagcaggaccagagcgccaacgagaagaacaagctggagatgaacaaggtgcaggtggacgcccacggcaacatcctgctgagcaccctggagatcagaaacgagaccagcggcagcgaggtgctgaccagcgtgagcgaccccaaggccaccatgtacagctacgacagcgccagcatccagtacagaaagcccctgagcagcagagaggcctacggcagagccctggacagacacggcgtgcccagcaagggcagaatcagaagaagagccagccagctgaaggtgaagatccccgacctgaccgacgtgaacagcatcgacaagtggagcagaatgttcttccccatcaccttcagcctgttcaacgtggtgtactggctgtactacgtgcactag

SEQ ID NO: 302644 - protein, 403 aa, Artificial Sequence
  derived and/or modified sequence
MPEPLAPESYPESVCEEDVTLALKELDERCEEEEADFSGLSSQDEEEQDGFPEVQTSPLPSPFLSAIIAAFQPVAYDDEEEAWRCHVNQMLSDTDGSSAVFTFHVFSRLFQTIQRKFGEITNEAVSFLGDSLQRIGTKFKSSLEVMMLCSECPTVFVDAETLMSCGLLETLKFGVLELQEHLDTYNVKREAAEQWLDDCKRTFGAKEDMYRINTDAQELELCRRLYKLHFQLLLLFQAYCKLINQVNTIKNEAEVINMSEELAQLESILKEAESASENEEIDISKAAQTTIETAIHSLIETLKNKEFISAVAQVKAFRSLWPSDIFGSCEDDPVQTLLHIYFHHQTLGQTGSFAVIGSNLDMSEANYKLMELNLEIRESLRMVQSYQLLAQAKPMGNMVSTGF

SEQ ID NO: 302645 - DNA, 11688 bp, Artificial Sequence
  derived and/or modified sequence
gaagacctcgcagcacagccgggcgcccgtcgggctctgggagagagcgagagagaaatccggttaaaatcagagtcggagggaggtttaaccacagatcggttccgatcggattattccttaaaggggacgcgccattgtcaagagaacggagccaggggcccgagggcggggaccggcggcgctggaggagcgaggcagctgtactaggactgggaacggcctagaacattccatattctgcttcacacacggtgactcactcactactgctttgtaccagtgtgcccactcgagtgcctgtaaagtacaagctccagatcaaaaaagcttctagatggatcctttccaaacttggtgtcttttctacaaactctgtgcctcaacaaccatttctaagtgagctgaagccatttattggtatcttggatggttaacatctaaatgcttaattcctgaaaccactcaagagtcataggattagatgatccaagtcaccaagaaattactgtctcaagtgatacgcttcagcgccagtcagcaaagtaaataaatactgtgcttcttccaactttcattccacttggggaaaaaaaaatatcatcatgtcaaacattacgattgacccagatgtcaaacctggtgaatatgtcatcaagagcctctttgcagaatttgctgttcaagctgaaaagaaaattgaagttgtaatggccgaacccttggagaagctattgtccagatctcttcagaggggtgaagatcttcagtttgatcagttgataagctctatgagctcagtagcagagcactgtctcccttccttacttcgcaccttgtttgactggtacagacgccaaaatggaacggaagatgaatcttatgaatataggcctcggtctagcacaaagtctaagggggatgaacagcaacgtgaaagagattatcttcttgaaaggagggacttagcagtagacttcattttttgtttagttttagttgaagttctaaagcagattcctgttcatcctgtacccgatcccttagttcatgaagttctaaacttagcttttaagcactttaaacataaggaaggatattcaggaaccaacactgggaatgtgcatattattgctgatttatatgcagaggtgataggggttcttgcccaatcaaagtttcaggctgtaaggaagaagtttgtgacagaattaaaagaactgcgacaaaaggaacaaagcccacatgtggtacaaagtgtcatcagcttaataatgggaatgaaattttttcgagtaaaaatgtatcctgtagaagattttgaagcatcatttcaatttatgcaggaatgtgctcagtatttcttagaagtgaaagataaagatataaaacatgcacttgctggtttatttgtggagattcttatccctgtagctgctgctgttaaaaatgaagtgaatgttccctgtttgaaaaattttgtggagatgctttatcagactacttttgaactgagctcgagaaagaagcattcattggctttatatccactaattacctgccttttatgtgtcagtcagaaacaattttttttaaataactggcatattttcctacagaactgtttgtcacatttaaagaataaagatccgaaaatgtctcgagttgcactggaatctttgtatagattattgtgggtttatgtaattagaataaaatgtgaaagcaacactgtaactcaaagtcgtcttatgagcatagtgtcagcactttttccaaaaggctcacgaagtgtggttcctcgtgacacacctctcaatatatttgtgaagattattcagttcattgctcaggaacgcttggattttgcaatgaaagaaataatatttgatcttctcagtgttggaaaatctactaaaactttcaccattaatccagagagaatgaacataggtctcagagtcttccttgtaatagcagacagtttgcagcagaaagatggtgaaccacccatgccaacaacaggagttattcttccctcaggaaatactcttcgtgtaaagaaaatatttctcaataaaaccttgacagatgaagaagcaaaagtcataggaatgtcagtttactatcctcaagtaagaaaagcattagatagcatcctcagacatttggacaaagaagttgggagaccaatgtgtatgaccagtgtgcagatgtctaataaggagcctgaagacatgattacgggggaaagaaaacccaagattgatttgtttagaacttgtattgctgcgattccaaggttgattcctgacggtatgagcagaactgacctgattgaattgttagcaaggctcacaattcatatggatgaagaactgcgtgctctggctttcaatactctgcaggcactaatgcttgattttccagattggcgggaggatgttctttcaggatttgtttattttattgttcgtgaagtgactgatgtccatcccacacttcttgataatgccgtaaagatgttggtacaattaataaatcagtggaaacaagcagcccaaatgcataataaaaaccaggacactcagcatggtgtagctaatggagcttctcatccccctcctctggaaaggagcccatattccaatgtattccatgtggttgaaggctttgcgcttgtcattctctgtagcagtcgacctgccactaggagactagccgtcagtgtccttagagaaatacgggctttatttgcacttctggaaatacctaagggtgatgatgaattagccatagatgtgatggacaggctaagcccatccattcttgagagcttcatacatctcactggggctgatcagactactttgctctattgccctagctcgatagatttacaaactttagcagaatggaactcttctcctattagccaccagtttgatgtgattagtccatcacatatatggatatttgcacatgtgacccaaggccaagacccatggattataagtctctccagttttttaaagcaagaaaatcttcctaaacactgctctacagctgtgagctatgcttggatgtttgcatacacaagacttcagttgttgtcccctcaggtcgatataaatagccccatcaatgctaagaaagtaaataccaccacaagcagtgactcatacattggcctgtggagaaactatctgatcctttgctgcagtgcagcaacatcgtcatcttccacatctgcaggttctgtgagatgttctcctcctgagacgctggcgtctaccccagatagcggctatagcattgattctaaaattattggcatcccatccccttcatccttgtttaagcacatagttccaatgatgcgttctgagagcatggaaatcacagaatcccttgttctaggtcttggcaggaccaacccaggagcttttagggaactaatagaggaattacatcccataattaaagaagcactcgaaagaaggccagagaatatgaaacggcgcaggcgtcgagacattttacgagtacaactggtacgaatatttgaactgctggcagatgctggtgtcattagtcacagtgcaagtggtggccttgataatgaaacacattttctcaacaacactttattggaatatgtagatttaactagacaactcctggaagcagaaaatgaaaaagactctgacacactgaaggatatacgatgccattttagtgccttagtggcgaatattattcagaatgttccagtgcaccagagaagaagtatttttcctcaacagagccttcgtcacagtctatttatgctgttcagtcactgggcaggtccttttagcatcatgtttacgcccttggacagatacagtgatagaaatatgcaaattaatagacatcaatactgtgcgttaaaggctatgtctgctgtactgtgttgtggccctgttgcagataatgtaggactttcatcagatggctatttgtacaaatggttggataacattttggattctctggacaaaaaggttcaccagctgggctgtgaagcagttacgttgttactggagctgaaccctgatcagagcaacctgatgtactgggctgtggaccgctgctacacgggctccgggagggtggcggccggctgctttaaagccattgctaatgttttccagaacagggattatcaatgtgacacagtgatgcttctaaatctgatactgtttaaagcagctgattcttctagaagtatctatgaagttgctatgcaacttttacagattctggaaccgaagatgtttcgctatgctcacaaattggaggttcagagaacagatggagtactcagccagctgtctcctctaccacatctctattctgtttcatattatcagttgtccgaggaactagcaagggcgtatcctgagctaactctcgccatattctcagagataagccagagaatccagacagctcaccctgctgggcggcaggtgatgctgcactacctgctaccatggatgaacaacatcgagctggtggacttaaaacctctccccacagcaaggcgacatgatgaagatgaagatgattccttaaaagaccgagaacttatggtgactagtaggcgctggttacggggagaaggatggggatctccacaagccactgcaatggttttgaacaatctgatgtatatgacagcaaagtatggcgatgaactggcctggtcggaggtggagaatgtgtggaccacacttgcagatggctggcccaaaaacctgaaaataattttgcactttttgatcagcatttgtggggtgaatagcgaaccaagcctcttgccttacgtgaagaaggtcattgtatatttaggtagagataaaacaatgcagttgctagaagagctggtgagtgagcttcagctgaccgatcctgtcagttcaggggtcactcacatggataatcccccgtattatcgcatcacttccagctataaaatcccttctgtcacctcaggaactacttccagtagcaatacaatggtagctcccacagatggcaatcctgataataagcccattaaagagaatattgaagagagctatgtgcacctggacatttacagtggactaaacagtcatttgaatcggcaacatcacagactagaatcccgatacagtagcagctctggaggatcttatgaagaagaaaaaagtgattcaatgccactttattctaattggcgactgaaagtgatggagcataaccaaggagagccactgcccttcccaccagctggaggctgctggtcaccactggtggattacgtgcctgaaacgtcatcacctggattacctcttcacaggtgtaacatagcagtgatccttttgactgatctcatcattgatcatagtgtgaaggtggaatggggaagctacctccatcttcttcttcatgcaatttttatagggtttgaccactgccaccctgaggtgtatgaacattgtaaacgcctgcttctgcacttattaatagtaatgggacccaatagtaacatccgaactgttgcttctgtccttctcaggaacaaggagtttaatgagcccagggtgcttacagtcaaacaagttgcacacttagattataatttcacagcaggcattaacgattttatacctgattaccagccctcccctatgactgactcagggcttagctcaagttctacctcttctagtatcagcttaggaaataacagtgctgccatttcacatctgcacaccactatcctcaatgaggttgacatctcagtggagcaggatggaaaagtcaaaaccctcatggaattcattacctcaagaaaaagagggcccctttggaaccatgaggatgtttctgccaagaatcctagcataaagagtgctgaacagttaactacatttttgaaacatgtggtttctgtttttaagcagtcaagctcagaaggaattcatctggaacatcatcttagtgaagttgctctgcaaacagcactttcctgttcttctcgacactatgctgggagatcctttcagattttcagggccctaaagcagcctctcactgcaactacactttctgatgttctctccagacttgtagaaactgtaggggatccaggagaagatgcacagggatttgtgattgagcttcttctcacattggaatctgcaattgatactttggctgaaaccatgaagcattatgatcttctttctgccctttctcaaacctcatatcatgatcctataatgggaaacaagtatgcagctaacaggaaaagcactggacaactcaatctaagcacaagtcccattaatagtagcagttatttgggatataacagtaatgcaagaagtaactctttgagattaagtttgattggtgaccgacgaggtgaccggcggcggagtaacacactggatataatggatggacggataaaccatagcagtagtttagcaaggactagaagcctttcctctctaagagagaaaggaatgtatgacgtgcagtccactactgagcctaccaacttgatggccaccattttttggatagcagcatctttattagaatcagattatgaatatgaatacctcctggctctcaggcttctcaacaaactgcttatccatttgcctttggataaatcagagagtcgagagaagattgaaaatgtacaaagcaaattgaaatggactaattttccaggacttcagcagctcttccttaagggttttacctcagcatctacacaagaaatgaccgtgcacctcctcagtaaactcatttctgtctccaaacatacattggtggatccttcccaattgtcaggctttcctcttaacatcctttgcttattgcctcacttaatccagcattttgacagcccaactcagttttgcaaagaaacagctagtcgaatagcaaaggtttgtgcagaagaaaaatgcccaacacttgtcaatctggcacacatgatgagtttgtacagtacacacacgtattccagagactgttctaactggatcaatgtcgtgtgcagatacctgcatgactccttctcagatacaacatttaatcttgtgacttatcttgcagagctgttagagaaaggattgtccagtatgcagcaatcattactacagattatttatagtctattgagtcatattgacctgtctgcagccccagccaagcagtttaatctggagatcataaagattattggcaaatatgtacagagtccttactggaaggaagcccttaacatattaaagctggtggtgtcacgctctgcgagtcttgtcgtacccagtgatatccccaagacctatggaggagatacaggttctcctgaaatatccttcactaaaatttttaataatgtttctaaggagttgcctgggaagaccttagattttcattttgatatatctgagacaccaattattggaaacaaatatggtgatcagcacagtgcggctggaagaaatgggaaaccaaaagttattgctgtcactagaagtacttcctcaacttcttctggttctaattctaatgccttggttcctgttagttggaaaaggccacagttatcacagcgaagaacaagagaaaagctaatgaatgtgctttctctctgtggtccagaatctggcctcccaaagaacccatcagttgtattttcttctaatgaggatttggaagtcggtgaccaacagactagcctaatttctacaacagaagacataaatcaagaggaagaagtagctgtggaagataatagcagtgaacaacagtttggtgtttttaaggattttgactttttagatgttgaattggaagatgcagagggtgaaagtatggacaatttcaactggggagttcgcaggcgctcactggacagtattgacaaaggggacactccatccctccaggagtaccagtgctctagtagcacccccagcctgaacctcaccaatcaggaggatacagatgagtcctcggaagaagaagcggcacttacagcaagccagatactctcacgcacacagatgttaaacagtgattctgccactgatgaaacaataccagaccatcctgacttacttctccagtctgaagattccactggcagcatcacaacagaggaagtgcttcaaatcagggatgagaccccaactttggaggcttctctagataatgctaacagccggctgcctgaggatacaacttcagtattaaaggaggaacatgttacaacctttgaagatgaaggatcctatataattcaagaacagcaggaatctcttgtgtgtcaaggaattcttgatttagaagaaactgaaatgccagagcctctagctcctgaaagttaccccgagtcagtctgtgaagaggatgttaccttagctctgaaagagctagatgaaagatgtgaagaagaagaagcggatttctccggactgtctagtcaagatgaagaagagcaagatggttttccagaagtacagacgtcgcctctgccgtcaccatttctttctgccatcatagccgcctttcagcccgtggcatatgatgatgaagaggaagcctggcgctgccacgtcaatcagatgctgtctgacaccgacgggtcctctgcagtgtttacttttcatgtgttttctaggctgtttcagacaattcaaagaaagtttggagaaataactaatgaggcagtcagctttcttggtgatagtctgcaacgcattggtaccaaatttaaaagttccttggaagtgatgatgctgtgttcagaatgcccaacagtctttgtggatgctgaaacactgatgtcatgtggtttgctggaaacactcaagtttggtgttttggagttgcaagaacacctggatacatacaatgtgaaaagagaagccgctgagcagtggctagatgattgtaagaggacatttggtgccaaagaagacatgtataggataaacacagatgcacaagaattggagctctgccgaagattatacaaattgcattttcaattgctgcttctgttccaggcctactgtaaacttatcaaccaagtaaatacgataaaaaatgaagcagaggtcatcaacatgtcagaggaacttgcccaactggaaagtatcctcaaagaagctgagtccgcttccgaaaacgaagaaattgacatttccaaagctgcacaaactactatagaaactgccattcattctttaattgaaactttgaaaaataaagaatttatatcagctgtagcacaagtcaaagctttcagatctctctggcccagtgatatctttggcagttgtgaagatgaccctgtacagacactgttacatatatatttccatcatcagacgctgggccagacaggaagctttgcagttataggctctaacctggacatgtcagaagccaactacaaactgatggaacttaatctggaaataagagagtctctacgcatggtgcaatcataccaacttctagcacaggccaaaccaatgggaaatatggtgagcactggattctgagacacttcaggcctttaggaaagaaactaaactgaagatgatgaagaatattaaccaagcaccttttatggacccttgcattcactgataactttctggcagcatctactttttagtgtaactaatgtcaaactgtatcatcaaaaacaaagatctgaaagaaaaaaacatctgatattttaacagctgccaatatctcccacaataactgcgtgaagaaggaattttttaattacttaacctacgtgaaaagaaaagggctaaaagtgatgcctacaaatacattactttctggggaaagaaaagaattccaagaatgtttgcaataatggcctccaatactgaaacaaccaaaagcaggtgaaatgaggctgaaatcaaggctgtttcattttagctgaagacctgcaaagctgcttggatttctagcagttgaaaacctaacctgcaattgatgcttaatcatccatccacatgaacatgcagtcagctatacgcatcaagactcgtttgcaaaaaccattgatttttcagtatgtgggataagggtttgggtttttttgttttttggtctgtataaggaattatgtgtgtgtgagttgggatgtatggatatgtgatagtcatattttcaaggtatggatgtttggtgataacgtctcagagcatgcctaaaagagcactgcaagattatttttgaagaaatgttattttattagatctaactcttcatagtatgtaaatgttagaacattttaataatattttaaaactgggctttcccagtatttcaaaaagaaataatatatctgttaacgttattggaatgctgctcagttctctgatcagtgcttatgttatgattgttgataactaaccaaagtagatgcctgcagagactttaaaatgtaaaataaagatgtatgctgcctgtcagctattctcattagaaaagttttaacttattttactccatatagaaactgtagagactaaaaccagttattttcttgtacatttgtgccatgcactgttgttatacaagaataggtgtacaaagctaaagaaaaattgtggtcattgatgatggaatatatgacttgcaggctttgaagtctgcagaattcaagaaaagagctgcaaatgcatttttgtatctttattcaggactcacatgctttaccctaaagaaacctggggctaggggaaatgaaaggaagcctgaagactgactaccaaaacatgcaatatacttattcactgtctaagtctgtagtataacatgaactggagtctctatccttttctaaaatcgcattttgtaagaaaagaaagaaaaaaaaaaaaaaagaatgtagtcccacaactcctgatttgaaagaaacaccttgtattttttatatacatctcttatccactgtgacttttcttttaaactgggctctgtgattccagagtttagaatgtagaaatgaaatgcttagctttaccttttcttggggggtgtggaccctgccagaaatgtaattacgtatgctcaagtgcattaattgaaggcactgtgcacaccattggactgctgaccacagttaaacatttccagtaaaatttcgtaactggtcacagctcattcataatcactgtattttttgaccctgataaagacaattattttgatggtgttctggtactgtaattggtatcctttaaattatttaaaacttttgggtgtggggcaggcagagagggatggtgtccagagatacatcacactttacatcctatcttactgtcctctgtttttcttaccctccttacatcctttttgttaaaaataaaaagcattgtagctgttggtttgtgttgtattttaacaaagaatgaatgattacagtgtgcatcatttagaaacctttcaaatgttaccttcttgaattgccctagaaaagaacaaaattagttgactacccaaccaaacctttcagttgatatttgctttttgtgtttatttatatgtaactaagtctattaatataataaaaatgaatatacctgcagc

SEQ ID NO: 302646 - DNA, 7033 bp, Artificial Sequence
  derived and/or modified sequence
ccagagaatccagacagctcaccctgctgggcggcaggtgatgctgcactacctgctaccatggatgaacaacatcgagctggtggacttaaaacctctccccacagcaaggcgacatgatgaagatgaagatgattccttaaaagaccgagaacttatggtgactagtaggcgctggttacggggagaaggatggggatctccacaagccactgcaatggttttgaacaatctgatgtatatgacagcaaagtatggcgatgaactggcctggtcggaggtggagaatgtgtggaccacacttgcagatggctggcccaaaaacctgaaaataattttgcactttttgatcagcatttgtggggtgaatagcgaaccaagcctcttgccttacgtgaagaaggtcattgtatatttaggtagagataaaacaatgcagttgctagaagagctggtgagtgagcttcagctgaccgatcctgtcagttcaggggtcactcacatggataatcccccgtattatcgcatcacttccagctataaaatcccttctgtcacctcaggaactacttccagtagcaatacaatggtagctcccacagatggcaatcctgataataagcccattaaagagaatattgaagagagctatgtgcacctggacatttacagtggactaaacagtcatttgaatcggcaacatcacagactagaatcccgatacagtagcagctctggaggatcttatgaagaagaaaaaagtgattcaatgccactttattctaattggcgactgaaagtgatggagcataaccaaggagagccactgcccttcccaccagctggaggctgctggtcaccactggtggattacgtgcctgaaacgtcatcacctggattacctcttcacaggtgtaacatagcagtgatccttttgactgatctcatcattgatcatagtgtgaaggtggaatggggaagctacctccatcttcttcttcatgcaatttttatagggtttgaccactgccaccctgaggtgtatgaacattgtaaacgcctgcttctgcacttattaatagtaatgggacccaatagtaacatccgaactgttgcttctgtccttctcaggaacaaggagtttaatgagcccagggtgcttacagtcaaacaagttgcacacttagattataatttcacagcaggcattaacgattttatacctgattaccagccctcccctatgactgactcagggcttagctcaagttctacctcttctagtatcagcttaggaaataacagtgctgccatttcacatctgcacaccactatcctcaatgaggttgacatctcagtggagcaggatggaaaagtcaaaaccctcatggaattcattacctcaagaaaaagagggcccctttggaaccatgaggatgtttctgccaagaatcctagcataaagagtgctgaacagttaactacatttttgaaacatgtggtttctgtttttaagcagtcaagctcagaaggaattcatctggaacatcatcttagtgaagttgctctgcaaacagcactttcctgttcttctcgacactatgctgggagatcctttcagattttcagggccctaaagcagcctctcactgcaactacactttctgatgttctctccagacttgtagaaactgtaggggatccaggagaagatgcacagggatttgtgattgagcttcttctcacattggaatctgcaattgatactttggctgaaaccatgaagcattatgatcttctttctgccctttctcaaacctcatatcatgatcctataatgggaaacaagtatgcagctaacaggaaaagcactggacaactcaatctaagcacaagtcccattaatagtagcagttatttgggatataacagtaatgcaagaagtaactctttgagattaagtttgattggtgaccgacgaggtgaccggcggcggagtaacacactggatataatggatggacggataaaccatagcagtagtttagcaaggactagaagcctttcctctctaagagagaaaggaatgtatgacgtgcagtccactactgagcctaccaacttgatggccaccattttttggatagcagcatctttattagaatcagattatgaatatgaatacctcctggctctcaggcttctcaacaaactgcttatccatttgcctttggataaatcagagagtcgagagaagattgaaaatgtacaaagcaaattgaaatggactaattttccaggacttcagcagctcttccttaagggttttacctcagcatctacacaagaaatgaccgtgcacctcctcagtaaactcatttctgtctccaaacatacattggtggatccttcccaattgtcaggctttcctcttaacatcctttgcttattgcctcacttaatccagcattttgacagcccaactcagttttgcaaagaaacagctagtcgaatagcaaaggtttgtgcagaagaaaaatgcccaacacttgtcaatctggcacacatgatgagtttgtacagtacacacacgtattccagagactgttctaactggatcaatgtcgtgtgcagatacctgcatgactccttctcagatacaacatttaatcttgtgacttatcttgcagagctgttagagaaaggattgtccagtatgcagcaatcattactacagattatttatagtctattgagtcatattgacctgtctgcagccccagccaagcagtttaatctggagatcataaagattattggcaaatatgtacagagtccttactggaaggaagcccttaacatattaaagctggtggtgtcacgctctgcgagtcttgtcgtacccagtgatatccccaagacctatggaggagatacaggttctcctgaaatatccttcactaaaatttttaataatgtttctaaggagttgcctgggaagaccttagattttcattttgatatatctgagacaccaattattggaaacaaatatggtgatcagcacagtgcggctggaagaaatgggaaaccaaaagttattgctgtcactagaagtacttcctcaacttcttctggttctaattctaatgccttggttcctgttagttggaaaaggccacagttatcacagcgaagaacaagagaaaagctaatgaatgtgctttctctctgtggtccagaatctggcctcccaaagaacccatcagttgtattttcttctaatgaggatttggaagtcggtgaccaacagactagcctaatttctacaacagaagacataaatcaagaggaagaagtagctgtggaagataatagcagtgaacaacagtttggtgtttttaaggattttgactttttagatgttgaattggaagatgcagagggtgaaagtatggacaatttcaactggggagttcgcaggcgctcactggacagtattgacaaaggggacactccatccctccaggagtaccagtgctctagtagcacccccagcctgaacctcaccaatcaggaggatacagatgagtcctcggaagaagaagcggcacttacagcaagccagatactctcacgcacacagatgttaaacagtgattctgccactgatgaaacaataccagaccatcctgacttacttctccagtctgaagattccactggcagcatcacaacagaggaagtgcttcaaatcagggatgagaccccaactttggaggcttctctagataatgctaacagccggctgcctgaggatacaacttcagtattaaaggaggaacatgttacaacctttgaagatgaaggatcctatataattcaagaacagcaggaatctcttgtgtgtcaaggaattcttgatttagaagaaactgaaatgccagagcctctagctcctgaaagttaccccgagtcagtctgtgaagaggatgttaccttagctctgaaagagctagatgaaagatgtgaagaagaagaagcggatttctccggactgtctagtcaagatgaagaagagcaagatggttttccagaagtacagacgtcgcctctgccgtcaccatttctttctgccatcatagccgcctttcagcccgtggcatatgatgatgaagaggaagcctggcgctgccacgtcaatcagatgctgtctgacaccgacgggtcctctgcagtgtttacttttcatgtgttttctaggctgtttcagacaattcaaagaaagtttggagaaataactaatgaggcagtcagctttcttggtgatagtctgcaacgcattggtaccaaatttaaaagttccttggaagtgatgatgctgtgttcagaatgcccaacagtctttgtggatgctgaaacactgatgtcatgtggtttgctggaaacactcaagtttggtgttttggagttgcaagaacacctggatacatacaatgtgaaaagagaagccgctgagcagtggctagatgattgtaagaggacatttggtgccaaagaagacatgtataggataaacacagatgcacaagaattggagctctgccgaagattatacaaattgcattttcaattgctgcttctgttccaggcctactgtaaacttatcaaccaagtaaatacgataaaaaatgaagcagaggtcatcaacatgtcagaggaacttgcccaactggaaagtatcctcaaagaagctgagtccgcttccgaaaacgaagaaattgacatttccaaagctgcacaaactactatagaaactgccattcattctttaattgaaactttgaaaaataaagaatttatatcagctgtagcacaagtcaaagctttcagatctctctggcccagtgatatctttggcagttgtgaagatgaccctgtacagacactgttacatatatatttccatcatcagacgctgggccagacaggaagctttgcagttataggctctaacctggacatgtcagaagccaactacaaactgatggaacttaatctggaaataagagagtctctacgcatggtgcaatcataccaacttctagcacaggccaaaccaatgggaaatatggtgagcactggattctgagacacttcaggcctttaggaaagaaactaaactgaagatgatgaagaatattaaccaagcaccttttatggacccttgcattcactgataactttctggcagcatctactttttagtgtaactaatgtcaaactgtatcatcaaaaacaaagatctgaaagaaaaaaacatctgatattttaacagctgccaatatctcccacaataactgcgtgaagaaggaattttttaattacttaacctacgtgaaaagaaaagggctaaaagtgatgcctacaaatacattactttctggggaaagaaaagaattccaagaatgtttgcaataatggcctccaatactgaaacaaccaaaagcaggtgaaatgaggctgaaatcaaggctgtttcattttagctgaagacctgcaaagctgcttggatttctagcagttgaaaacctaacctgcaattgatgcttaatcatccatccacatgaacatgcagtcagctatacgcatcaagactcgtttgcaaaaaccattgatttttcagtatgtgggataagggtttgggtttttttgttttttggtctgtataaggaattatgtgtgtgtgagttgggatgtatggatatgtgatagtcatattttcaaggtatggatgtttggtgataacgtctcagagcatgcctaaaagagcactgcaagattatttttgaagaaatgttattttattagatctaactcttcatagtatgtaaatgttagaacattttaataatattttaaaactgggctttcccagtatttcaaaaagaaataatatatctgttaacgttattggaatgctgctcagttctctgatcagtgcttatgttatgattgttgataactaaccaaagtagatgcctgcagagactttaaaatgtaaaataaagatgtatgctgcctgtcagctattctcattagaaaagttttaacttattttactccatatagaaactgtagagactaaaaccagttattttcttgtacatttgtgccatgcactgttgttatacaagaataggtgtacaaagctaaagaaaaattgtggtcattgatgatggaatatatgacttgcaggctttgaagtctgcagaattcaagaaaagagctgcaaatgcatttttgtatctttattcaggactcacatgctttaccctaaagaaacctggggctaggggaaatgaaaggaagcctgaagactgactaccaaaacatgcaatatacttattcactgtctaagtctgtagtataacatgaactggagtctctatccttttctaaaatcgcattttgtaagaaaagaaagaaaaaaaaaaaaaaagaatgtagtcccacaactcctgatttgaaagaaacaccttgtattttttatatacatctcttatccactgtgacttttcttttaaactgggctctgtgattccagagtttagaatgtagaaatgaaatgcttagctttaccttttcttggggggtgtggaccctgccagaaatgtaattacgtatgctcaagtgcattaattgaaggcactgtgcacaccattggactgctgaccacagttaaacatttccagtaaaatttcgtaactggtcacagctcattcataatcactgtattttttgaccctgataaagacaattattttgatggtgttctggtactgtaattggtatcctttaaattatttaaaacttttgggtgtggggcaggcagagagggatggtgtccagagatacatcacactttacatcctatcttactgtcctctgtttttcttaccctccttacatcctttttgttaaaaataaaaagcattgtagctgttggtttgtgttgtattttaacaaagaa

SEQ ID NO: 302647 - DNA, 122 bp, Artificial Sequence
  derived and/or modified sequence
taacagtaccaaaaaacagtcataatcttcaagagcttaaatttagcatgaaaggaagacattcatcaaagaatcacacaaaggaatgtaaaattaaatggagattagtgccaggaaagagc

SEQ ID NO: 302648 - DNA, 1212 bp, Artificial Sequence
  derived and/or modified sequence
atgcccgagcccctggcccccgagagctaccccgagagcgtgtgcgaggaggacgtgaccctggccctgaaggagctggacgagagatgcgaggaggaggaggccgacttcagcggcctgagcagccaggacgaggaggagcaggacggcttccccgaggtgcagaccagccccctgcccagccccttcctgagcgccatcatcgccgccttccagcccgtggcctacgacgacgaggaggaggcctggagatgccacgtgaaccagatgctgagcgacaccgacggcagcagcgccgtgttcaccttccacgtgttcagcagactgttccagaccatccagagaaagttcggcgagatcaccaacgaggccgtgagcttcctgggcgacagcctgcagagaatcggcaccaagttcaagagcagcctggaggtgatgatgctgtgcagcgagtgccccaccgtgttcgtggacgccgagaccctgatgagctgcggcctgctggagaccctgaagttcggcgtgctggagctgcaggagcacctggacacctacaacgtgaagagagaggccgccgagcagtggctggacgactgcaagagaaccttcggcgccaaggaggacatgtacagaatcaacaccgacgcccaggagctggagctgtgcagaagactgtacaagctgcacttccagctgctgctgctgttccaggcctactgcaagctgatcaaccaggtgaacaccatcaagaacgaggccgaggtgatcaacatgagcgaggagctggcccagctggagagcatcctgaaggaggccgagagcgccagcgagaacgaggagatcgacatcagcaaggccgcccagaccaccatcgagaccgccatccacagcctgatcgagaccctgaagaacaaggagttcatcagcgccgtggcccaggtgaaggccttcagaagcctgtggcccagcgacatcttcggcagctgcgaggacgaccccgtgcagaccctgctgcacatctacttccaccaccagaccctgggccagaccggcagcttcgccgtgatcggcagcaacctggacatgagcgaggccaactacaagctgatggagctgaacctggagatcagagagagcctgagaatggtgcagagctaccagctgctggcccaggccaagcccatgggcaacatggtgagcaccggcttctag

SEQ ID NO: 302649 - DNA, 1212 bp, Artificial Sequence
  derived and/or modified sequence
atgcccgagccactcgcacccgagagttaccctgagtctgtgtgcgaagaagacgttacactggccctaaaggagctggatgaaaggtgcgaggaagaggaggctgatttcagcggcctgtccagtcaggacgaggaggagcaggacggcttccccgaagtacagacatcacctctcccaagcccgttcttgagcgcgatcatcgcggcctttcagccagttgcatatgacgacgaggaggaggcatggcgatgccacgtgaatcaaatgctgtccgacaccgacggatcatctgccgtgttcacatttcacgtcttttcaagactgttccagaccatccaacgtaaattcggagaaatcaccaatgaagccgtgtcattccttggggatagcttacagagaatcggaacaaagttcaaatcttctctcgaggttatgatgctttgtagtgaatgccctaccgtgtttgtggatgcggagacccttatgtcctgtggtttgcttgagacgctcaaatttggtgtgctggaacttcaggaacatctagacacctacaatgtcaagcgcgaggcagccgagcagtggttggacgattgcaaaaggacttttggggccaaggaggacatgtataggattaacacagatgcgcaagagctggagctgtgtcgacgactgtacaagctgcacttccagctcttgctgttatttcaggcctactgtaaactaatcaaccaggtgaacacaatcaagaatgaggctgaagtgatcaacatgtcggaagaacttgcccagctcgagagcattctgaaagaagcagaatctgcgtccgagaatgaggaaattgacatttcaaaagcagcacagaccacgatcgagacagcaattcattcgttgattgagacactgaaaaataaggagttcatctccgctgtcgctcaggtcaaggccttccgtagcctgtggccatcagacatctttgggtcatgcgaagacgacccggtacagaccctgctgcatatttattttcaccaccagacactgggccagactggctcttttgcagtgatcggctcgaacctggacatgagcgaggcaaactacaagttgatggagttgaacttggaaattcgcgaaagtttaagaatggtacaaagttatcaactgctggcccaggcaaaacccatgggcaatatggtcagtaccggattttag

SEQ ID NO: 302650 - DNA, 1212 bp, Artificial Sequence
  derived and/or modified sequence
atgcccgaacccttagcaccggagagctaccccgagtctgtctgcgaagaagacgtcaccctggccctgaaggaactggacgaacgatgcgaggaggaggaagctgactttagcggcctgtcctcacaggacgaagaggagcaagatgggtttccagaggttcagacaagccccctgccctcccccttcctaagcgccatcattgcagcctttcagcccgtggcctatgatgacgaagaggaggcttggaggtgtcacgtaaatcagatgctatccgataccgatggatcctctgctgtcttcacattccacgtgttttcccgcttatttcagacaatccaaagaaaatttggtgaaattacgaacgaggctgtgtcttttcttggtgactcactccagcgaatagggaccaagttcaagtcgagccttgaagttatgatgctgtgcagcgagtgtcctactgtttttgtagacgctgaaacactgatgtcgtgcggtctactagaaaccctcaaattcggggtgctggaactgcaggagcacctagacacatacaacgtcaaacgcgaggctgccgagcagtggctcgatgattgtaaacgcacgttcggggcaaaagaggatatgtatcggatcaataccgatgcccaggaactggagctgtgtcgccgactgtataaactgcactttcagctgctccttctatttcaagcctattgtaaacttataaatcaggtaaacactattaaaaacgaagccgaggttataaacatgagtgaggaactggcccagctagaaagcatcttgaaggaagcagagagcgcttctgagaatgaagagatcgatatttctaaggctgctcaaaccacaatcgagacagctatccatagcctgatcgaaacattgaagaacaaggaattcatctctgcagtcgctcaggtgaaagcctttcgctctctctggcctagtgatattttcggatcgtgcgaggacgaccccgtgcagactttgcttcacatctattttcatcaccaaacactaggacagaccggctccttcgctgttattggctctaatctagatatgagcgaagccaattacaagctgatggaactgaacttggaaatccgggagagcctcagaatggtgcagtcctaccagctgcttgcgcaggcaaagcctatgggaaacatggtatcaaccggtttctag

SEQ ID NO: 302651 - DNA, 1212 bp, Artificial Sequence
  derived and/or modified sequence
atgcctgagcccctggcccctgagagctacccagagagcgtgtgtgaagaagatgtgaccctggccctgaaggagctggatgagcgctgtgaggaggaggaggccgacttcagcggcctgagcagccaggatgaggaggagcaggacggcttccctgaggtgcagaccagccccctgcccagccccttcctgagcgccatcatcgccgccttccagcctgtggcctatgatgatgaggaggaggcctggcgctgccacgtgaaccagatgctgagtgacacagatggcagcagcgctgtgttcaccttccacgtgttcagccgcctcttccagaccatccagaggaagtttggagagatcaccaatgaggccgtgtccttcctgggggacagcctgcagagaattggcaccaagttcaagagcagcctggaggtgatgatgctgtgcagtgaatgtcccaccgtgtttgtggatgctgagaccctgatgagctgtggcctgctggagaccctgaagtttggagtgctggagctgcaggagcacctggacacctacaacgtgaagcgggaggccgctgagcagtggctggatgactgcaagaggacctttggagccaaggaggacatgtaccgcatcaacacagatgcccaggagctggagctgtgcagaagactctacaagctgcacttccagctgctgctgctcttccaggcctactgcaagctgatcaaccaggtgaacaccatcaagaatgaagctgaggtgatcaacatgtctgaggagctggcccagctggagagcatcctgaaggaggccgagagcgcctctgaaaatgaggagattgacatcagcaaggccgcccagaccaccattgaaacagccatccacagcctgattgagaccctgaagaacaaggagttcatctctgctgtggcccaggtgaaggccttccgcagcctgtggcccagcgacatcttcggcagctgtgaagatgatcctgtgcagaccctgctgcacatctacttccaccaccagaccctgggccagacaggcagctttgctgtgattggcagcaacctggacatgtctgaggccaactacaagctgatggagctgaacctggagatccgggagagcctgaggatggtgcagagctaccagctgctggcccaggccaagcccatgggcaacatggtgtccacaggcttctag

SEQ ID NO: 302652 - DNA, 1212 bp, Artificial Sequence
  derived and/or modified sequence
atgcccgagcccctggcccccgagagctaccccgagagcgtgtgcgaggaagacgtcacattggccctgaaggagctggacgagcggtgtgaagaagaggaggcggatttcagcggcctgagctcacaagatgaggaggagcaggacggatttcccgaagtacaaacgagccccctgccttccccattcctctccgccatcattgcagctttccagcccgttgcatacgatgatgaagaggaggcgtggcgttgccacgtcaatcagatgttgtccgacacggacggatctagtgccgtatttacatttcacgtcttcagtaggctgtttcagacaatccagaggaagttcggcgagatcaccaatgaggccgtttcttttctcggagattcattacagcggataggcaccaaattcaagtctagcttggaggtcatgatgctctgctccgagtgccctacagttttcgtggacgccgaaacattaatgtcttgcgggttattggagaccctaaagttcggagtgttggaattacaggagcacctggatacctataatgttaagcgggaggccgccgaacagtggcttgatgattgcaagaggactttcggcgcaaaagaagatatgtataggattaacaccgacgcacaagaactggagctgtgccgccgcctctacaagctgcacttccagcttctcttactttttcaggcttactgtaaattgatcaaccaggtaaacaccattaagaacgaagctgaagtgattaatatgagtgaagagctcgcccagttggaaagcatcttgaaagaggccgaaagcgcgtcagaaaatgaggaaattgacatcagtaaagccgcacagaccaccatcgagacagcaatacacagcctgatcgaaaccctcaagaataaggagtttatttccgcagtggcacaggtcaaggcttttcgcagcctatggccttctgacatattcggatcttgcgaggatgaccccgtccagacgctattacacatctacttccatcatcagacgctggggcagaccggcagctttgccgttatcgggtctaacctggacatgtcggaggccaattataagctcatggagctgaacctggagattagggagagcctgcgcatggtgcagtcctaccagctgctggctcaggcgaaacctatggggaatatggtgagtacaggcttctag

SEQ ID NO: 302653 - DNA, 1212 bp, Artificial Sequence
  derived and/or modified sequence
atgcccgagcccctggcccccgagagctaccccgagagcgtgtgcgaagaggacgtcactttggcgttgaaggagcttgatgagcgctgcgaagaggaggaggccgatttctcaggactctctagtcaggacgaagaggaacaggatggcttcccagaggtgcaaactagccctctcccatcacctttcctgagcgctattatcgccgcgttccagcccgtggcctacgacgacgaggaggaagcatggcggtgccatgttaaccagatgctgtcagacactgatggtagctccgccgttttcacctttcacgttttctcgagactgttccaaacaattcagcgaaagtttggcgaaatcactaatgaagcagtaagcttcctcggggatagtctccagagaattgggactaagttcaaatcttccctggaggtgatgatgctgtgttccgaatgtccaacggtattcgtggacgccgagacacttatgagttgcggcctgctcgaaacactgaagttcggagtgttagagctccaggagcacctcgatacgtacaacgtcaaaagagaagccgcagagcaatggttagatgattgcaaacgaacttttggggccaaagaggatatgtatcgaatcaacacggacgcccaagagctggagttgtgtcgccgcctgtataagctccattttcagttgctgctgctattccaggcctattgcaagctcattaatcaggtcaataccattaagaacgaagctgaagtgataaatatgtccgaggagttggctcaattggagtccatactcaaagaggccgagtctgcatccgaaaacgaggagattgacatcagcaaggccgctcagacgaccattgagacagccatccattctttgattgagactttgaaaaacaaagaatttatcagcgctgtcgctcaggtgaaagctttccgcagcctgtggccttccgacatctttggatcgtgcgaggacgaccctgtgcaaaccctactacatatttacttccatcatcagactctgggacaaaccggatctttcgccgtgattgggtcaaatcttgacatgtcggaggccaactataagcttatggagctgaatctggaaatccgtgaatcactgagaatggttcaaagctaccaattgctcgcccaagccaagcctatgggaaatatggtgtccactgggttctag

SEQ ID NO: 302654 - DNA, 1212 bp, Artificial Sequence
  derived and/or modified sequence
atgcccgaacccctggcgcctgaaagctatcccgaatccgtgtgcgaggaggatgtgaccttggccttgaaagaactcgacgaacgatgcgaggaggaagaggctgacttctctggactgtcaagccaggacgaagaggagcaggatggatttcccgaggtgcaaaccagtccgctgccctcacctttcctttcggccatcatcgctgctttccaaccagtggcttatgatgatgaagaagaggcttggcgatgtcatgtgaaccagatgctgtctgacacagatggatcctccgccgtcttcacctttcatgtgttttctcgcctcttccagactattcaacggaagtttggagagattacaaacgaggctgtgagcttcctcggggattccctgcagaggatcggcaccaaattcaaatcctccctggaggtaatgatgctctgttctgaatgtcccaccgtgttcgtggacgccgagacccttatgagctgtgggctgcttgagactttgaagtttggtgtcctcgagctacaggagcatttagacacctacaatgtcaaaagagaagcggcagagcagtggctggacgactgcaaaaggacatttggcgcaaaggaggacatgtaccggattaacacggatgcccaggaactggagctgtgtaggaggctttacaagctgcatttccagttacttcttctgttccaggcctactgcaaactaattaaccaggtcaataccatcaaaaatgaggccgaagtgattaacatgagtgaagagcttgcgcaactggagtccattctaaaggaggccgaatccgcttctgagaatgaggaaatcgacattagtaaagcagcccaaaccacgattgagacagccatacactccctcatcgaaacgctgaagaacaaggagttcattagcgctgtggcccaagtcaaagcttttcgatccctctggccttctgatatcttcggcagctgcgaggatgatccagtacagactttattgcatatctatttccaccatcagacgctgggccaaaccggaagcttcgctgtcattggctccaatcttgatatgagcgaagccaattacaagctgatggagctgaacttggaaattagggagtcccttcggatggtgcagtcctatcagctgctggctcaggccaagcccatgggtaatatggtatcgaccggcttctag

SEQ ID NO: 302655 - DNA, 1212 bp, Artificial Sequence
  derived and/or modified sequence
atgcctgaacccctggctccagaaagttaccctgagagcgtgtgtgaggaggatgtcaccttagccttgaaggaactcgatgagagatgcgaggaggaggaggcagatttttctggcttgtcttcccaagacgaggaagaacaagatggattcccagaagtacagacatccccactgccctccccttttctgagtgccatcattgccgcattccaacctgtggcctacgatgatgaggaagaggcttggaggtgtcacgtcaatcagatgctgagtgacaccgacggttccagcgcggtatttacattccacgtcttttcccggctgttccaaacaatccagcggaaatttggtgaaattacaaatgaggcagtgtcattcctgggtgattcattgcaacgcatcggaaccaagtttaaatcttccctcgaggtaatgatgctctgctccgaatgtccaaccgtgtttgttgacgcggagacgctgatgagctgtgggctcctggaaacgttgaagtttggagtgttggaactgcaggagcacctggacacctacaatgtgaagcgcgaggctgcagagcagtggctggatgattgtaagcgaacctttggagctaaagaagatatgtacagaataaacacagacgctcaggaactcgaattgtgtcgaaggctctataaactccattttcagctcctcctgttgtttcaggcgtactgcaaactcattaatcaggtgaacacgataaagaacgaagccgaggtgattaacatgtccgaggaactggctcagctcgaatctatcctcaaggaagcagaaagcgcttctgagaatgaagaaatagacatatctaaggccgcacagactaccattgagacggcaattcattctctgattgaaacgctcaaaaataaggagtttatttccgccgtggcgcaggttaaggccttcaggtctctgtggcccagcgacattttcgggtcttgcgaagatgacccggtgcaaaccctactgcacatttatttccaccatcagactctgggccaaactggctctttcgccgttatcgggagtaatctggatatgtcagaagcaaactataagctgatggagctaaatctagagattcgggaatccctaaggatggttcagagctaccagctacttgcacaagcaaagcccatgggtaatatggtctcaacagggttctag

SEQ ID NO: 302656 - protein, 728 aa, Artificial Sequence
  derived and/or modified sequence
  misc_feature (1)..(1): Xaa can be any naturally occurring amino acid
XDTLAVFMASSGTTDVTNRNSPATPPNTLNLRSSHNELLNAEIKHTETKNSTPPKCRKKYALTNIQAAMGLSDPAAQPLLGNGSANIKLVKNGENQLRKAAEQGQQDPNKNLSPTAVINITSEKLEGKEPHPQDSSSCEILPSQPRRTKSFLNYYADLETSARELEQNRGNHHGTAEEKSQPVQGQASTIIGNGDLLLQKPNRPQSSPEDGQVATVSSSPETKKDHPKTGAKTDCALHRIQNLAPSDEESSWTTLSQDSASPSSPDETADIWSDHSFQTDPDLPPGWKRVSDIAGTYYWHIPTGTTQWERPVSIPADLQGSRKGSLSSVTPSPTPENEDLHAATVNPDPSLKEFEGATLRYASLKLRNAPHPDDDDSCSINSDPEAKCFAVRSLGWVEMAEEDLAPGKSSVAVNNCIRQLSYCKNDIRDTVGIWGEGKDMYLILENDMLSLVDPMDRSVLHSQPIVSIRVWGVGRDNGRDFAYVARDKDTRILKCHVFRCDTPAKAIATSLHEICSKIMAERKNAKALACSSLQERANVNLDVPLQVDFPTPKTELVQKFHVQYLGMLPVDKPVGMDILNSAIENLMTSSNKEDWLSVNMNVADATVTVISEKNEEEVLVECRVRFLSFMGVGKDVHTFAFIMDTGNQRFECHVFWCEPNAGNVSEAVQAACMLRYQKCLVARPPSQKVRPPPPPADSVTRRVTTNVKRGVLSLIDTLKQKRPVTEMP

SEQ ID NO: 302657 - DNA, 2187 bp, Artificial Sequence
  derived and/or modified sequence
tgagacactctcgccgtctttatggcatcctctggtacaaccgacgtcaccaatcgcaatagcccggccacccctcctaatacattaaacctccgatcttcgcataacgagttacttaacgcagagatcaagcacaccgagacaaagaactccacccccccaaagtgtcgaaagaagtatgctctcaccaacatccaagctgcgatgggtctttctgaccccgcagcacagcctcttctcggcaatggcagcgccaatattaaattagtgaaaaacggagaaaatcaactgcgaaaggccgcagagcaaggccagcaagacccaaacaaaaatttaagtcctaccgctgtgataaacataaccagtgagaaactggagggcaaggagcctcaccctcaagacagctccagctgtgaaattctcccatctcaacctaggcggacaaagtcttttctgaactactacgccgacctcgagactagtgccagggagctagagcaaaaccgcggaaaccaccatggtactgctgaggagaagtctcagcctgtgcagggccaggcatctaccataatcggaaatggcgatctccttttgcaaaagcccaatcgtccccaatcatctcctgaagatggccaggttgctactgtgtcttcttcccccgagactaagaaggaccaccccaaaaccggcgctaagacagactgtgccctgcaccgcatccaaaacttagctccttctgacgaagaaagttcttggaccacactgtcccaggattccgcctcaccttcttctcccgatgagactgccgacatctggtcagaccattctttccagaccgatccggatctgcccccagggtggaagcgagtatccgacattgccggtacctactactggcatattcctaccggcaccacgcagtgggagcgccccgtctccataccagccgaccttcaaggatcacgcaagggcagcctgtcaagtgtcacacccagtcctaccccagagaatgaggacctgcacgcggccacagtcaaccccgatccaagtttgaaagagttcgaaggcgctactctgagatatgcctctctgaagctgagaaatgccccccaccccgatgatgacgactcttgttctataaacagtgatcctgaagctaagtgtttcgccgttcgaagtctgggatgggtggaaatggccgaggaggacctcgcccccggcaagagctcagtcgcggtgaataattgcatacggcagctgtcatattgtaagaacgacatccgagatactgtgggtatctggggagaaggtaaggatatgtatctgattttggagaacgacatgctaagtctggtggaccccatggataggtcagtactgcatagtcaacccattgtgtctatccgtgtctggggcgtgggccgggataatggccgcgatttcgcctacgtcgcccgcgacaaggatacgcggattctgaaatgtcatgtgtttaggtgcgacactcctgcaaaggccatcgccacttctctgcacgaaatctgttctaagataatggcagagaggaagaatgcaaaggcgctggcatgttcatcattacaggagcgagccaacgtcaatctcgacgtccctttacaggtggacttcccaacaccaaagaccgaactggtgcagaagtttcatgttcaatacctgggtatgctgccagtagataaacccgttggcatggatatcctgaactcggccatcgagaatctgatgacttcttcaaataaggaggactggctgtcagtcaacatgaacgtcgcagacgccaccgtgaccgtaatcagcgagaagaacgaggaggaagttctggtcgagtgtagggttcgcttcctttccttcatgggcgtcggcaaggacgtgcacacctttgcattcatcatggacacgggcaaccagcgcttcgaatgtcacgtgttttggtgcgaaccaaatgccgggaatgtctcagaagcagtgcaggctgcttgtatgctcaggtaccagaagtgcctcgtggcaagaccaccctcccagaaggtgcgacccccaccccccccggctgattcagtaacacgtagggtcactaccaacgtcaagaggggagtcctgagccttatcgacaccctgaagcaaaagaggcccgtcactgagatgccttag

SEQ ID NO: 302658 - DNA, 2187 bp, Artificial Sequence
  derived and/or modified sequence
tgagacaccctggccgtgttcatggccagcagcggcaccacagatgtgaccaacagaaacagccctgccaccccacccaacaccctgaacctgcggagcagccacaatgagctgctgaatgctgagatcaagcacacagagaccaagaacagcaccccacccaagtgcaggaagaagtatgccctgaccaacatccaggccgccatgggcctgagtgaccctgctgcccagcccctgctgggcaatggcagcgccaacatcaagctggtgaagaatggagagaaccagctgaggaaggctgctgagcagggccagcaggaccccaacaagaacctgagccccacagctgtgatcaacatcaccagcgagaagctggagggcaaggagccccacccccaggacagcagcagctgtgagatcctgcccagccagcccaggaggaccaagagcttcctgaactactatgctgacctggagaccagcgcccgggagctggagcagaacagaggcaaccaccacggcacagctgaggagaagagccagcctgtgcagggccaggccagcaccatcattggaaatggagacctgctgctgcagaagcccaaccggccccagagcagcccagaagatggccaggtggccaccgtgagcagcagccctgagaccaagaaggaccaccccaagacaggagccaagacagactgtgccctgcaccgcatccagaacctggcccccagtgatgaggagagctcctggaccaccctgagccaggacagcgccagccccagcagcccagatgaaacagctgacatctggagcgaccacagcttccagacagatcctgacctgcccccaggctggaagagggtgtctgacattgctggcacctactactggcacatccccaccggcaccacccagtgggagaggcctgtgtccatcccagctgacctgcagggcagcaggaagggcagcctgagctctgtgacccccagccccaccccagaaaatgaagacctgcacgccgccaccgtgaacccagaccccagcctgaaggagtttgagggcgccaccctgcgctatgccagcctgaagctgagaaatgccccccacccagatgatgatgacagctgcagcatcaacagcgaccctgaggccaagtgctttgctgtgcgcagcctgggctgggtggagatggccgaggaggacctggcccctgggaagagctctgtggccgtgaacaactgcatccggcagctgagctactgcaagaatgacatccgggacacagtgggcatctggggcgagggcaaggacatgtacctgatcctggagaatgacatgctgagcctggtggaccccatggacagatctgtgctgcacagccagcccatcgtgtccatccgggtgtggggcgtgggccgggacaatggccgggactttgcctacgtggcccgggacaaggacacccgcatcctgaagtgccacgtgttccgctgtgacaccccagccaaggccatcgccaccagcctgcacgagatctgcagcaagatcatggccgagaggaagaatgccaaggccctggcctgcagcagcctgcaggagcgggccaacgtgaacctggatgtgcccctgcaggtggacttccccacccccaagacagagctggtgcagaagttccacgtgcagtacctgggcatgctgcctgtggacaagcctgtgggcatggacatcctgaacagcgccatcgagaacctgatgaccagcagcaacaaggaggactggctgtctgtgaacatgaatgtggctgatgccaccgtgaccgtcatcagcgagaagaatgaggaggaggtgctggtggagtgccgggtgcgcttcctgtccttcatgggcgtgggcaaggatgtgcacacctttgccttcatcatggacaccggcaaccagagatttgaatgtcatgtgttctggtgtgagcccaatgctggaaatgtgtctgaggccgtgcaggccgcctgcatgctgcgctaccagaagtgcctggtggcccggccccccagccagaaggtgcggcccccacctcctcctgctgacagcgtgaccaggagagtgaccaccaacgtgaagaggggcgtgctgagcctgattgacaccctgaagcagaagaggcctgtgacagagatgccctag

SEQ ID NO: 302659 - DNA, 2187 bp, Artificial Sequence
  derived and/or modified sequence
tgagacaccctggccgtgttcatggccagcagcggcaccaccgacgtgaccaacagaaattcccctgccaccccgccaaacaccttgaatttacggagctctcacaacgagctgttaaacgccgaaatcaagcatacggaaaccaagaatagcactccgccgaagtgtagaaaaaagtatgctctgactaatatccaggccgccatggggctgagcgatcctgcagcccagccactcctcggtaacgggagcgcgaacattaagttagttaagaatggggagaatcagctgcggaaggccgctgaacaggggcagcaagatcctaacaagaacctgagcccaaccgccgttattaacataacctccgagaaactcgagggaaaagagccacatccccaggactctagctcatgtgagatcttgcctagccagccaaggcggaccaagagcttcctcaattattatgccgaccttgagaccagcgctagagagctcgaacaaaaccggggcaaccaccacggcactgccgaggagaaaagtcagcccgtacaggggcaggcctccaccataattggtaatggagacttactcctgcaaaagccaaacagaccacagagcagtcccgaagacggccaggtggcaacggtgtccagtagtcctgaaaccaagaaagatcaccccaagacaggtgccaagaccgactgcgcccttcacaggattcaaaacctggctccttctgatgaagaatcgtcctggacgaccctgtcacaggacagtgcctcaccctcgtccccggatgaaaccgccgatatatggagtgatcacagttttcagacagacccagacctgccccctggatggaagagggtgagtgatatagccggaacatattactggcacatccccactggtacgacccagtgggaacgtccagtcagtatcccagccgatctgcagggaagtcgcaagggctcactctccagcgtgacacctagccccacccctgaaaatgaggatctacatgctgcaactgtgaatcctgacccgtctttaaaggagtttgagggagcaaccctgcgctacgccagcttgaaacttcgtaatgcacctcaccctgacgatgatgatagctgtagtattaacagcgaccctgaggctaagtgctttgccgtacgttcactggggtgggtggaaatggccgaagaggacttggcccccggtaaaagcagtgtggctgtgaataattgcatccgccagctgagttattgcaagaatgacatccgggacaccgtcggcatctggggagaaggcaaagacatgtacctgatcttggagaatgacatgttatccttggtcgaccctatggatcggagcgttttgcactcccagcccatcgtgagcattagagtctggggtgtcggtagagacaacggcagagactttgcttacgtcgctcgcgacaaagacacccggatactgaagtgccacgtatttcgatgcgacacccccgctaaagctatagccacgagcctgcatgagatatgtagcaaaataatggctgagagaaagaatgctaaagctctagcttgtagctcgttgcaggagagggctaacgttaatttggacgtgccgctacaggttgactttcctacccctaagaccgaactcgtacaaaagtttcatgtgcagtatttgggaatgctgcctgtggacaagcctgtggggatggacattctcaactccgccatcgaaaatctcatgacgtcttctaacaaggaggactggctgtctgtcaacatgaatgttgcagatgccacagtgaccgtaatcagcgaaaaaaatgaggaggaagtgcttgtagaatgcagggtgagattcctaagtttcatgggggtcgggaaagatgtccacacctttgcatttatcatggacaccggtaaccagcgatttgaatgtcatgtcttttggtgtgagcctaatgccgggaatgtctctgaagccgtgcaggcagcctgtatgttgcgttatcaaaaatgccttgtggccaggcctccgtcacagaaggtccggccacctcccccacccgcagactcagtgacaagacgggtcactaccaacgttaagcgaggggtgctgtcattgatagatactctgaagcagaaacggcccgtgactgaaatgccttag

SEQ ID NO: 302660 - DNA, 2964 bp, Artificial Sequence
  derived and/or modified sequence
tgacaccttggcagtgtttatggccagcagcggaactacagacgtcacaaatcggaacagcccagccacaccaccaaacacccttaacctccgatcctcccacaatgaactgttgaacgctgaaataaaacacacagaaaccaagaacagcacacctcccaaatgcaggaaaaaatatgcactaactaacatccaggcggccatgggcctctcggatccagctgcacagcccctgctgggaaatggctctgccaacatcaagctggtgaaaaatggggagaaccagctccgtaaggctgcagagcaagggcagcaggaccccaacaaaaacctgagccccactgcagtcatcaacataacttctgagaagttagagggtaaagagccccacccacaggattcctcgagctgtgagattttaccctcccagcccaggagaactaagagcttcctaaattactatgcagatctggaaacctcagccagagaactagagcagaaccgaggcaatcaccatgggactgcggaagagaaatcccagccagtccagggccaggcctccaccatcattgggaatggcgatttgctgctgcagaaaccaaacagaccccagtccagccctgaagacggccaagtagccacagtgtcatccagcccagaaaccaagaaggatcatccgaaaacaggggccaaaaccgactgtgcactgcaccggatccagaacctggcaccgagcgatgaggagtccagctggacaacgttgtcccaagacagtgcctcacccagctccccggatgaaacagcagatatatggagtgatcactcatttcagactgatccagatttgccgcctggctggaaaagagtcagtgacattgccgggacctattattggcacatcccaacaggaacgactcagtgggaacggcccgtctccatcccagcagatctccagggttctaggaaagggtcacttagttctgtaacgccatctcccaccccagagaacgaggatttgcatgcagccactgttaacccggaccccagtttaaaagagtttgaaggagcaaccctacgctatgcatctttgaaactcagaaatgccccacaccctgatgatgatgattcttgtagtatcaacagtgacccagaagccaagtgttttgctgtgcgttctctgggatgggtagagatggcagaagaggacctcgcccccggtaaaagtagtgttgcggtcaacaactgcatcaggcaactttcctactgcaaaaatgacatccgagacacagtcgggatttggggagaggggaaagacatgtacctgatcctggagaatgacatgctcagcctggtggaccccatggaccgcagcgtgctgcactcgcagcccatcgtcagcatccgcgtgtggggcgtgggccgcgacaatggccgggattttgcttatgtagcaagagataaagatacaagaattttgaaatgtcatgtatttcgatgtgacacaccagcaaaagccattgccacaagtctccacgagatctgctccaagattatggctgaacggaagaatgccaaagcgctggcctgcagctccttacaggaaagggccaatgtgaacctcgatgtccctttgcaagtagattttccaacaccaaagactgagctggtccagaagttccacgtgcagtacttgggcatgttacctgtagacaaaccagtcggaatggatattttgaacagtgccatagaaaatcttatgacctcatccaacaaggaggactggctgtcagtgaacatgaacgtggctgatgccactgtgactgtcatcagtgaaaagaatgaagaggaagtcttagtggaatgtcgtgtgcgattcctgtccttcatgggtgttgggaaggacgtccacacatttgccttcatcatggacacggggaaccagcgctttgagtgccacgttttctggtgcgagcctaatgctggtaacgtgtctgaggcggtgcaggccgcctgcatgttacgatatcagaagtgcttggtagccaggccgccttctcagaaagttcgaccacctccaccgccagcagattcagtaaccagaagagtcacaaccaatgtaaaacgaggggtcttatccctcattgacactttgaaacagaaacgccctgtcaccgaaatgccatagctgcacatgcaaaaggactcggctatttacctgaagattgactagctacactaaagaaaatgaactccgccatccgaccttccatccagttgctgatgctttgtcttcagagaatttacccttaaccaagcagtgttagacaagcatgttctctcgtcttgccaccatcatgtgatatgaaaagaagcatgaataattttttttgctgtaagttacatcatgcgcagtggaaggtctttttcttattgtaaatattgtgaacattacttaacttcacacacacacagagaagagtgtggccccacccctcctagtgaactaacgctgcgtccttggaatgaatgatgcgtgagttagtttcactgtcttcttggctggacctgtcacaagcaacctttaagtcctacagcactttgccctgttttcaacattggagtaggcactgcatagcagataccattgaattgctgtaaaaataggatggcgagtttgtgttttaatttttcataaaattgaacctgttggttgacaaaattggctgttggcatcagtatagaaaccaactggcagctttccctgacaagctctttgacacatggacaccatttcatgtctacagctgtttgtgggatgttggaaaaaaatgaaacttcaaaattgatgaaaaactaaattcgaggaattaaaatcgaacaaaacatagcctttcttttccgatggttttcaaactgattatttttaaaagagattaataaaatcataatgcattttgggtggga

SEQ ID NO: 302661 - DNA, 2187 bp, Artificial Sequence
  derived and/or modified sequence
taagatacattagccgtgttcatggcgtcatccggtactactgacgtcacaaatagaaattctccggctacaccccctaacacgctcaacctgagaagttcacacaacgagttactcaatgcagagatcaagcataccgagactaagaactctacacctcccaagtgtcggaaaaagtacgcgttgacgaacattcaggcagcaatgggactgtccgaccccgcagctcagccccttctgggaaatggttctgcgaatatcaagttagtcaagaatggcgagaaccagcttcgcaaggcggcagaacagggtcaacaagacccgaacaagaacctgagccctaccgcggtgataaatatcacatctgagaaacttgaagggaaagagccccacccacaagactcaagttcttgtgagatcctaccctctcagcctcggagaactaagagttttctcaactactacgcagacctcgagacctctgcgcgagaactggaacagaatagagggaaccatcacgggactgctgaagagaaaagccagcctgtacaggggcaagctagtacgatcataggaaacggggacctcctactgcagaagcctaaccggcctcaatcatcacctgaagatggacaagtggctacagtttcctcctcaccggagacgaaaaaagaccatccaaaaacaggtgcgaagactgattgtgctctgcaccgtattcagaacctggctcccagcgatgaagagtcatcttggaccaccctatcccaggactccgcaagcccgagcagccccgatgagacagccgatatttggtcagaccattcattccagacagaccctgacctgccacccggatggaagcgagtatcagacattgccggaacttactattggcatatacccacaggcacgacacagtgggaacgccctgtgagtatcccagctgacctgcagggatctaggaaggggtctctgtcctcagtcacaccttctcctacccccgagaacgaggacctgcacgctgctactgtcaatcccgatccttccttgaaggagtttgagggagccaccctgcggtatgcatcacttaaactgcgaaacgccccacacccagatgatgatgactcttgcagtatcaacagtgatcccgaagccaagtgcttcgctgttagatccttgggttgggtggagatggcagaggaggacctcgccccaggcaaaagttccgtcgccgtcaacaattgtatccgccagttaagctattgtaagaacgacatccgcgacactgtgggcatctggggagagggaaaggacatgtatctgatactggaaaacgatatgctgtcactggtggaccccatggatagaagcgtactgcattcccagccaatcgtatcaataagggtctggggggtcggtagagacaatggcagggacttcgcgtacgtagcacgagacaaggatactcgtatcctaaagtgtcacgtgtttagatgtgacacaccggcaaaggcaatagccacatccctgcatgaaatctgttctaaaattatggccgagaggaagaacgctaaagccttggcttgtagttctctgcaagagcgtgccaatgtgaacctggacgtgccattgcaggtggacttccctacccccaagaccgagctggtacagaagttccacgtgcaatatctggggatgctgccagtggataagcccgtgggcatggatatcctcaactcagccatcgagaacctcatgacttcttccaacaaggaggactggctgtccgtgaacatgaacgtggccgacgcaaccgtcactgtgatttccgaaaaaaacgaagaggaagtcttagtagaatgcagagttcgatttttatcttttatgggggtaggtaaggacgtgcatacgtttgcattcatcatggataccggaaatcagcggttcgagtgtcatgtgttttggtgcgagcccaacgccggaaacgtctcagaagccgtgcaggctgcatgtatgctgcggtaccagaagtgtttggtcgctaggccacccagccagaaagtgagaccccctccacccccagccgatagtgtcactcgacgggtcacaacaaatgtcaagaggggggttctgtcgctcattgacacgctaaagcagaaacggcctgtgacagaaatgccctag

SEQ ID NO: 302662 - DNA, 2187 bp, Artificial Sequence
  derived and/or modified sequence
tgagacaccctggccgtgttcatggccagcagcggcaccaccgacgtgaccaacagaaacagccccgccaccccccccaacaccctgaacctgagaagcagccacaacgagctgctgaacgccgagatcaagcacaccgagaccaagaacagcaccccccccaagtgcagaaagaagtacgccctgaccaacatccaggccgccatgggcctgagcgaccccgccgcccagcccctgctgggcaacggcagcgccaacatcaagctggtgaagaacggcgagaaccagctgagaaaggccgccgagcagggccagcaggaccccaacaagaacctgagccccaccgccgtgatcaacatcaccagcgagaagctggagggcaaggagccccacccccaggacagcagcagctgcgagatcctgcccagccagcccagaagaaccaagagcttcctgaactactacgccgacctggagaccagcgccagagagctggagcagaacagaggcaaccaccacggcaccgccgaggagaagagccagcccgtgcagggccaggccagcaccatcatcggcaacggcgacctgctgctgcagaagcccaacagaccccagagcagccccgaggacggccaggtggccaccgtgagcagcagccccgagaccaagaaggaccaccccaagaccggcgccaagaccgactgcgccctgcacagaatccagaacctggcccccagcgacgaggagagcagctggaccaccctgagccaggacagcgccagccccagcagccccgacgagaccgccgacatctggagcgaccacagcttccagaccgaccccgacctgccccccggctggaagagagtgagcgacatcgccggcacctactactggcacatccccaccggcaccacccagtgggagagacccgtgagcatccccgccgacctgcagggcagcagaaagggcagcctgagcagcgtgacccccagccccacccccgagaacgaggacctgcacgccgccaccgtgaaccccgaccccagcctgaaggagttcgagggcgccaccctgagatacgccagcctgaagctgagaaacgccccccaccccgacgacgacgacagctgcagcatcaacagcgaccccgaggccaagtgcttcgccgtgagaagcctgggctgggtggagatggccgaggaggacctggcccccggcaagagcagcgtggccgtgaacaactgcatcagacagctgagctactgcaagaacgacatcagagacaccgtgggcatctggggcgagggcaaggacatgtacctgatcctggagaacgacatgctgagcctggtggaccccatggacagaagcgtgctgcacagccagcccatcgtgagcatcagagtgtggggcgtgggcagagacaacggcagagacttcgcctacgtggccagagacaaggacaccagaatcctgaagtgccacgtgttcagatgcgacacccccgccaaggccatcgccaccagcctgcacgagatctgcagcaagatcatggccgagagaaagaacgccaaggccctggcctgcagcagcctgcaggagagagccaacgtgaacctggacgtgcccctgcaggtggacttccccacccccaagaccgagctggtgcagaagttccacgtgcagtacctgggcatgctgcccgtggacaagcccgtgggcatggacatcctgaacagcgccatcgagaacctgatgaccagcagcaacaaggaggactggctgagcgtgaacatgaacgtggccgacgccaccgtgaccgtgatcagcgagaagaacgaggaggaggtgctggtggagtgcagagtgagattcctgagcttcatgggcgtgggcaaggacgtgcacaccttcgccttcatcatggacaccggcaaccagagattcgagtgccacgtgttctggtgcgagcccaacgccggcaacgtgagcgaggccgtgcaggccgcctgcatgctgagataccagaagtgcctggtggccagaccccccagccagaaggtgagacccccccccccccccgccgacagcgtgaccagaagagtgaccaccaacgtgaagagaggcgtgctgagcctgatcgacaccctgaagcagaagagacccgtgaccgagatgccctag

SEQ ID NO: 302663 - protein, 68 aa, Artificial Sequence
  derived and/or modified sequence
MSEVLPADSGVDTLAVFMASSGTTDVTNRNSPATPPNTLNLRSSHNELLNAEIKHTETKNSTPPKCRK

SEQ ID NO: 302664 - DNA, 207 bp, Artificial Sequence
  derived and/or modified sequence
atgtcagaggtgctcccagccgatagcggtgtcgacacactggcagtgttcatggcttcctcgggcactacagatgtcaccaaccggaactccccagcgacacctcctaatactcttaacctgcgctccagtcacaacgagctcctgaacgccgagatcaagcatacagaaacgaagaactccactccccctaaatgtaggaaatag

SEQ ID NO: 302665 - DNA, 207 bp, Artificial Sequence
  derived and/or modified sequence
atgtctgaggtgctgcctgctgacagcggcgtggacaccctggccgtgttcatggccagcagcggcaccacagatgtgaccaacagaaacagccctgccaccccacccaacaccctgaacctgcggagcagccacaatgagctgctgaatgctgagatcaagcacacagagaccaagaacagcaccccacccaagtgcaggaagtag

SEQ ID NO: 302666 - DNA, 207 bp, Artificial Sequence
  derived and/or modified sequence
atgagcgaggtgctgcccgccgacagcggcgtggacaccctggccgtttttatggcctcctcagggaccactgacgtgactaacaggaactcccccgcaacacccccaaataccctcaacttgcgttcttcccacaacgagttgttgaacgctgaaatcaaacacacagaaaccaagaactcaacgcctccaaagtgcaggaaatag

SEQ ID NO: 302667 - DNA, 604 bp, Artificial Sequence
  derived and/or modified sequence
ggagaagtggaatctcgtcagcgccgctccctgcgcgggactcgcggaacggcactgagcatgctcagttgccggagcccgttctggtctcaagtaggaagctagtgcgctgtaaccgcatctgatctgggcgctccgggaagggcgagactggagcagagccgctgggcgccggagccgaggcgagcgccgcgcgcaccactggttggagttgctgtgggtgagctgctgtggtctgtagccaagcatgctgtggtcggatctgcccagccgtggaacagaaacatttgctggatggaaaatccataaaagaaagctcctgtgaaaagctgaggctgacaataatttaagcaaaatcagatcgatctctttgggctgcctgacctccttgggtgcttgctattaattaacagactttgtggggaaaaaaaggagcttgccttctgagctttgtaccaaagacctgggaaaaatttcaaattataacctatttcctgcaccattgctgacgcctggtgatccatgtcagaagtacttccagctgactcaggtgttgacaccttggcagtgtttatggccagcagcggaactacagacgtcacaa

SEQ ID NO: 302668 - DNA, 639 bp, Artificial Sequence
  derived and/or modified sequence
ctcaagtaggaagctagtgcgctgtaaccgcatctgatctgggcgctccgggaagggcgagactggagcagagccgctgggcgccggagccgaggcgagcgccgcgcgcaccactggttggagttgctgtgggtgagctgctgtggtctgtagccaagcatgctgtggtcggatctgcccagccgtggaacagaaacatttgctggatggaaaatccataaaagaaagctcctgtgaaaagctgaggctgacaataatttaagcaaaatcagatcgatctctttgggctgcctgacctccttgggtgcttgctattaattaacagactttgtggggaaaaaaaggagcttgccttctgagctttgtaccaaagacctgggaaaaatttcaaattataacctatttcctgcaccattgctgacgcctggtgatccatgtcagaagtacttccagctgactcaggtgttgacaccttggcagtgtttatggccagcagcggaactacagacgtcacaaatcggaacagcccagccacaccaccaaacacccttaacctccgatcctcccacaatgaactgttgaacgctgaaataaaacacacagaaaccaagaacagcacacctcccaaatgcaggaaaa

SEQ ID NO: 302669 - DNA, 207 bp, Artificial Sequence
  derived and/or modified sequence
atgagtgaggtcttacctgcggacagcggggtagacacccttgcagtctttatggcgtccagtgggactacggacgtgacaaacagaaactcccccgctactcctcccaataccctcaatctccgatccagccataatgaactgttaaacgccgaaatcaagcacaccgaaacgaagaattctacaccgccaaagtgtaggaaatag

SEQ ID NO: 302670 - DNA, 207 bp, Artificial Sequence
  derived and/or modified sequence
atgagcgaggtgctgcccgccgacagcggcgtggacaccctggccgtgttcatggccagcagcggcaccaccgacgtgaccaacagaaacagccccgccaccccccccaacaccctgaacctgagaagcagccacaacgagctgctgaacgccgagatcaagcacaccgagaccaagaacagcaccccccccaagtgcagaaagtag

SEQ ID NO: 302671 - DNA, 198 bp, Artificial Sequence
  derived and/or modified sequence
atgagcgagcagaacatctgcaaccagaaggacaagagcaccctgccattctgtcaggctcacctttgcgaagagactactaacagactctgcgtcagcaataaagccgtgtacagccttgaatgcaaatgggctgaaagcgaaaaccgcgtgtctgagggacgttggggccgcggctgttttattggagtggggtag

SEQ ID NO: 302672 - protein, 770 aa, Artificial Sequence
  derived and/or modified sequence
MNVIYFPLHIFVVYSRAYTSLVLVGCTNLCAVLFARCLDDHLVSLRMSGSRKEFDVKQILKIRWRWFGHQASSPNSTVDSQQGEFWNRGQTGANGGRKFLDPCSLQLPLASIGYRRSSQLDFQNSPSWPMASTSEVPAFEFTAEDCGGAHWLDRPEVDDGTSEEENESDSSSCRTSNSSQTLSSCHTMEPCTSDEFFQALNHAEQTFKKMENYLRHKQLCDVILVAGDRRIPAHRLVLSSVSDYFAAMFTNDVREARQEEIKMEGVEPNSLWSLIQYAYTGRLELKEDNIECLLSTACLLQLSQVVEACCKFLMKQLHPSNCLGIRSFADAQGCTDLHKVAHNYTMEHFMEVIRNQEFVLLPASEIAKLLASDDMNIPNEETILNALLTWVRHDLEQRRKDLSKLLAYIRLPLLAPQFLADMENNVLFRDDIECQKLIMEAMKYHLLPERRPMLQSPRTKPRKSTVGTLFAVGGMDSTKGATSIEKYDLRTNMWTPVANMNGRRLQFGVAVLDDKLYVVGGRDGLKTLNTVECYNPKTKTWSVMPPMSTHRHGLGVAVLEGPMYAVGGHDGWSYLNTVERWDPQARQWNFVATMSTPRSTVGVAVLSGKLYAVGGRDGSSCLKSVECFDPHTNKWTLCAQMSKRRGGVGVTTWNGLLYAIGGHDAPASNLTSRLSDCVERYDPKTDMWTAVASMSISRDAVGVCLLGDKLYAVGGYDGQAYLNTVEAYDPQTNEWTQVFSHTFEDSKDHLVAIKQTIWRQNSLSEEFRSH

SEQ ID NO: 302673 - protein, 282 aa, Artificial Sequence
  derived and/or modified sequence
  misc_feature (1)..(1): Xaa can be any naturally occurring amino acid
XRTNMWTPVANMNGRRLQFGVAVLDDKLYVVGGRDGLKTLNTVECYNPKTKTWSVMPPMSTHRHGLGVAVLEGPMYAVGGHDGWSYLNTVERWDPQARQWNFVATMSTPRSTVGVAVLSGKLYAVGGRDGSSCLKSVECFDPHTNKWTLCAQMSKRRGGVGVTTWNGLLYAIGGHDAPASNLTSRLSDCVERYDPKTDMWTAVASMSISRDAVGVCLLGDKLYAVGGYDGQAYLNTVEAYDPQTNEWTQVFSHTFEDSKDHLVAIKQTIWRQNSLSEEFRSH

SEQ ID NO: 302674 - DNA, 2313 bp, Artificial Sequence
  derived and/or modified sequence
atgaacgttatttactttccacttcatatctttgttgtgtatagtcgggcctacacctccctggttcttgtggggtgcactaacctgtgcgctgtcttatttgccagatgtctggatgatcacttggtgtctctgagaatgtccggtagccgcaaagaatttgatgtgaaacagattctgaaaatccgctggcgctggttcggtcatcaggccagtagtcctaactcgactgtggatagtcagcagggcgagttctggaatagaggtcagactggagctaacggcggaaggaagttcctcgacccgtgcagcctgcagctgcctcttgcgtccattggataccgcaggtcatctcagctggactttcagaattcgccctcctggcctatggcctccacttcagaggtgccagcgtttgagttcacagcggaagactgtgggggcgctcattggctggatcgtcccgaagtcgatgacgggacctccgaggaagagaatgagtccgatagctcttcctgcagaacaagcaacagtagtcaaacactgagcagctgccacacaatggaaccttgcacctccgacgagtttttccaggccctcaaccacgccgagcagaccttcaaaaagatggagaattaccttagacataagcagctttgcgatgtgatcctggtggcaggtgaccgccggattccagcccaccgcctcgtgctgtcctcagtcagtgattattttgcagcgatgtttactaacgacgtacgggaggcgcgtcaggaagaaatcaaaatggaaggagtggaacccaactccctgtggtcgctaatccagtacgcctataccgggaggttggagttgaaggaggacaatattgagtgtttactaagcactgcctgtttgctgcaactttctcaagtggttgaggcctgttgtaaatttctcatgaaacaattacacccttcaaactgtcttggtatccgatccttcgcggatgcgcaggggtgtacagacctgcacaaggtggcacataattacactatggaacactttatggaggttattagaaaccaggaattcgttctgttacctgcctccgagatcgcaaagctactggcatccgacgacatgaatatccccaacgaagagacaattttgaatgcgctgttgacatgggtgagacacgatttggagcagcgaaggaaggacctgtccaaactgctggcatacatcaggctgcccctcctggctccccaatttctggccgacatggagaacaacgttctgttccgcgatgacatcgagtgtcaaaaactgattatggaagccatgaagtaccatctgctaccagagcgaagacctatgttgcagtctccaaggacaaagcccagaaagtcaacagtcggcacactttttgctgtgggaggcatggacagcacgaaaggcgcaaccagtattgaaaaatacgatcttagaaccaacatgtggacccctgtggccaacatgaacggccggcggctccagtttggtgtggccgtgttggatgacaagctgtatgtcgtgggtggacgggacggcctcaaaactttaaacaccgtcgagtgctacaaccccaaaacgaaaacatggtctgtgatgccccctatgtctactcaccgacatggccttggagttgccgtcctcgaaggaccgatgtatgctgtgggtggccatgatggatggtcatacttgaataccgtggaaaggtgggatccccaggcccggcagtggaactttgttgcgaccatgtcaacacctagaagtactgtgggggtggcggttctctctggaaagttgtatgccgtgggggggcgcgatggcagttcttgtctaaaatccgttgagtgtttcgatccgcatacgaacaagtggacactttgcgcacagatgtccaagcgaaggggcggggtgggcgtgacaacgtggaatggcctgctgtatgcaatcggagggcacgacgctcctgcctcaaacttaacctcacgactgtctgattgtgtggagcgctatgaccctaagacagacatgtggacagccgttgcgagtatgtcaatttcacgcgatgcggtgggcgtgtgcttgctcggtgataaactatatgccgtcgggggatatgatgggcaggcttacctgaacactgttgaggcatacgatccccagaccaacgaatggactcaggtgttctcccataccttcgaggacagcaaagatcatctcgtggcaatcaagcaaacaatttggagacagaactccctgtcggaagaatttcgctcccattag

SEQ ID NO: 302675 - DNA, 849 bp, Artificial Sequence
  derived and/or modified sequence
tagcggactaatatgtggacgcctgtggctaatatgaatggacgtcggctccagttcggtgtggctgttctggatgataaattgtacgtggtgggcggccgggatggcctgaaaaccttgaatactgtggaatgttataacccaaaaactaagacctggtccgtgatgcctccaatgtcgacccaccgccacggactgggtgtcgctgtgctagagggtcccatgtacgcagtgggaggccacgatggctggtcatatctgaataccgttgaacgctgggacccccaggctcggcagtggaatttcgttgcaaccatgtctacaccccggtcaaccgtgggcgtcgcggtactatcaggtaaactatatgctgtggggggaagagatggcagcagttgtctcaaaagcgtggaatgttttgacccccacaccaacaaatggaccttatgtgcacagatgagcaagaggagaggcggcgtcggggtcaccacttggaacggattactttacgcaattggtggccatgacgcccccgccagcaacctcacaagcaggttatcggactgtgtggagaggtatgaccctaagacagatatgtggactgctgttgctagcatgagtatttccagggatgctgtcggcgtttgcctgctgggtgataagctttatgccgttggcggctacgacggacaagcttatctcaatacagtcgaggcctacgacccccagacgaacgagtggacacaagttttttctcatacttttgaagacagcaaggatcacctggtggcgatcaaacagactatttggcgccaaaactcactgagtgaagaatttcgctctcactag

SEQ ID NO: 302676 - DNA, 2596 bp, Artificial Sequence
  derived and/or modified sequence
actgcaacggggatagtgttttctgtctctgtcatttgtggtttaagaaaaagggggtggtgttctgcatttgaaaggactttaatgaatgctgtcagtgtttgtgagacctaatggtcagtatgggaaaggagagccgggaaagtggtctagctgcttcaggataggtggatgagagtttgctctgattgaacggaatgttccaccgtgtttcatctttattcattatcctttgttctttaaaatctgatatattggcataaaagtaattgtagatatatatatgaatgtgatttattttcctttacatatttttgttgtgtacagcagggcatatacttctcttgtcttggttggatgcacaaatctgtgtgcagtgctttttgcccgttgcctagacgatcacttggtttctctgaggatgtctggttctcgtaaagagtttgatgtgaaacagattttgaaaatcagatggaggtggtttggtcatcaagcatcatctcctaattctacagttgacagccagcagggagaattttggaaccgaggacagactggagcaaacggtgggagaaagtttttagatccatgtagcctacaattgcctttggcttcaattggttaccgaaggtccagccaactggattttcagaattcaccttcttggccaatggcatccacctctgaagtccctgcatttgagtttacagcagaagattgtggcggtgcacattggctggatagaccagaagtggatgatggcactagtgaagaagaaaatgaatctgattccagttcatgcaggacttccaatagtagtcagacattatcatcctgtcatactatggagccatgtacatcagatgaatttttccaagcccttaatcatgccgagcaaacatttaaaaaaatggaaaactatttgagacataaacagttgtgtgatgtaattttagtcgctggtgatcgcagaattccagctcacagattggtgctctcctctgtctcagactattttgctgccatgtttactaatgatgtcagagaggcaagacaagaagaaataaaaatggaaggtgtagaaccaaattcgttgtggtccttgatccagtatgcttatacaggccgccttgaattaaaagaagataatattgagtgcctgttatctacagcttgccttcttcagctttcacaggttgtagaagcatgctgtaagtttttaatgaaacagcttcatccatccaactgtcttggaattcgttcttttgctgatgcccaaggttgtacagatttgcataaagtggctcacaattatactatggagcatttcatggaagtaatcagaaaccaggaatttgtattattaccagccagcgaaattgcaaagctcttggctagtgatgacatgaacattcctaatgaggagacaatattgaatgcacttcttacttgggtccgtcatgatttggaacagagacggaaagatctaagtaaacttttggcttatattaggctacctcttcttgcaccacagttcctggcagacatggaaaataatgtactttttcgggatgatatagaatgtcagaaactcattatggaagcaatgaagtaccatttattaccagagagacgacccatgttacaaagtcctcggacaaaacctaggaagtcaactgttggtacattatttgcagttgggggaatggattcaacaaaaggagcaacaagcattgaaaagtatgatctccgtacaaatatgtggactccagtagcaaatatgaatgggaggaggctacagttcggtgttgcagtgctagatgacaaactgtatgtggttggaggaagagatggactgaagactttgaatactgtagagtgctacaaccccaaaacaaaaacttggagtgtgatgccacctatgtccacacatagacatggccttggtgtggctgtactggaaggtcccatgtatgccgtaggaggacatgatggctggagctatctgaacacagtggaaagatgggaccctcaggctcgccagtggaattttgttgccactatgtctacccctaggagtacagtaggtgtggcagtactaagtggaaaactttatgcagttggtggtcgtgatggaagttcttgtctcaaatcagtagaatgttttgatcctcatactaataagtggacactgtgtgcacagatgtcaaaaaggagaggtggcgtaggagtgacgacctggaatggactgctgtatgctataggggggcacgatgctcccgcatccaacttgacttccagactctcagactgtgtggaaagatatgatcccaaaacagacatgtggactgcagtagcatccatgagcatcagcagagatgcagtgggggtctgtttacttggtgataagttatatgctgttggggggtatgatggacaggcataccttaatactgtggaggcttatgatccccagacaaatgagtggacccaggtattttcacatacttttgaggacagcaaagatcacctggtggccatcaagcagaccatctggaggcaaaactccttatctgaggaattcagaagtcattag

SEQ ID NO: 302677 - DNA, 909 bp, Artificial Sequence
  derived and/or modified sequence
ccgtacaaatatgtggactccagtagcaaatatgaatgggaggaggctacagttcggtgttgcagtgctagatgacaaactgtatgtggttggaggaagagatggactgaagactttgaatactgtagagtgctacaaccccaaaacaaaaacttggagtgtgatgccacctatgtccacacatagacatggccttggtgtggctgtactggaaggtcccatgtatgccgtaggaggacatgatggctggagctatctgaacacagtggaaagatgggaccctcaggctcgccagtggaattttgttgccactatgtctacccctaggagtacagtaggtgtggcagtactaagtggaaaactttatgcagttggtggtcgtgatggaagttcttgtctcaaatcagtagaatgttttgatcctcatactaataagtggacactgtgtgcacagatgtcaaaaaggagaggtggcgtaggagtgacgacctggaatggactgctgtatgctataggggggcacgatgctcccgcatccaacttgacttccagactctcagactgtgtggaaagatatgatcccaaaacagacatgtggactgcagtagcatccatgagcatcagcagagatgcagtgggggtctgtttacttggtgataagttatatgctgttggggggtatgatggacaggcataccttaatactgtggaggcttatgatccccagacaaatgagtggacccaggtattttcacatacttttgaggacagcaaagatcacctggtggccatcaagcagaccatctggaggcaaaactccttatctgaggaattcagaagtcattagactgccctattatctaaagccggcatcttgtactaggcttctttaccaaaaatgtatttaat

SEQ ID NO: 302678 - DNA, 2313 bp, Artificial Sequence
  derived and/or modified sequence
atgaatgtcatctacttccccctgcacatctttgtggtgtacagccgggcctacaccagcctggtgctggtgggctgcaccaacctgtgtgctgtgctgtttgcccgctgcctggatgaccacctggtgtccctgaggatgagcggcagcaggaaggagtttgatgtgaagcagatcctgaagatccgctggcgctggtttggccaccaggccagcagccccaacagcacagtggacagccagcagggcgagttctggaacagaggccagacaggagccaacggcggcaggaagttcctggacccctgcagcctgcagctgcccctggccagcatcggctacagaagaagcagccagctggacttccagaacagccccagctggcccatggccagcaccagcgaggtgcctgcctttgagttcaccgctgaggactgtggcggggcccactggctggacaggcctgaggtggatgatggcaccagcgaggaggagaatgaaagtgacagcagcagctgcaggaccagcaacagcagccagaccctgagcagctgccacaccatggagccctgcaccagtgatgagttcttccaggccctgaaccacgccgagcagaccttcaagaagatggagaactacctgcggcacaagcagctgtgtgatgtgatcctggtggccggggaccggcgcatcccagcccaccggctggtgctgagctctgtgtctgactactttgctgccatgttcaccaatgatgtgcgggaggcccggcaggaggagatcaagatggagggcgtggagcccaacagcctgtggagcctcatccagtatgcctacacaggccgcctggagctgaaggaggacaacattgaatgtctgctgagcacagcctgcctgctgcagctgagccaggtggtggaggcctgctgcaagttcctgatgaagcagctgcaccccagcaactgcctgggcatccgcagctttgctgatgcccagggctgcacagacctgcacaaggtggcccacaactacaccatggagcacttcatggaggtgatccggaaccaggagtttgtgctgctgcctgccagcgagatcgccaagctgctggccagtgatgacatgaacatccccaatgaggagaccatcctgaatgccctgctgacctgggtgagacatgacctggagcagaggaggaaggacctgagcaagctgctggcctacatccggctgcccctgctggccccccagttcctggccgacatggagaacaacgtgctcttcagagatgacatcgagtgccagaagctgatcatggaggccatgaagtaccacctgctgcctgagcggcggcccatgctgcagagccccaggaccaagcccaggaagagcacagtgggcaccctgtttgctgtgggcggcatggacagcaccaagggggccaccagcattgagaagtatgacctgcggaccaacatgtggacccctgtggccaacatgaatggaagaaggctgcagtttggagtggccgtgctggatgacaagctgtatgtggtgggcggcagagatggcctgaagaccctgaacacagtggagtgctacaaccccaagaccaagacctggagcgtgatgccacccatgagcacccaccgccacggcctgggcgtggccgtgctggagggccccatgtatgctgtgggcggccatgatggctggagctacctgaacacagtggagcgctgggacccccaggcccggcagtggaactttgtggccaccatgagcacccccaggagcacagtgggcgtggccgtgctgagcggcaagctgtatgctgtgggcggcagagatggcagcagctgcctgaagtctgtggagtgctttgacccccacaccaacaagtggaccctgtgtgcccagatgagcaagaggcggggcggcgtgggcgtgaccacctggaatggcctgctgtatgccatcggcggccatgatgccccagccagcaacctgaccagccggctgagtgactgtgtggagagatatgaccccaagacagacatgtggacagctgtggcctccatgagcatcagcagagatgctgtgggcgtgtgcctgctgggggacaagctgtatgctgtgggcggctatgatggccaggcctacctgaacacagtggaggcctatgacccccagaccaatgagtggacccaggtgttcagccacacctttgaggacagcaaggaccacctggtggccatcaagcagaccatctggaggcagaacagcctgtctgaggagttccgcagccactag

SEQ ID NO: 302679 - DNA, 849 bp, Artificial Sequence
  derived and/or modified sequence
tgaagaaccaacatgtggacccctgtggccaacatgaatggaagaaggctgcagtttggagtggccgtgctggatgacaagctgtatgtggtgggcggcagagatggcctgaagaccctgaacacagtggagtgctacaaccccaagaccaagacctggagcgtgatgccacccatgagcacccaccgccacggcctgggcgtggccgtgctggagggccccatgtatgctgtgggcggccatgatggctggagctacctgaacacagtggagcgctgggacccccaggcccggcagtggaactttgtggccaccatgagcacccccaggagcacagtgggcgtggccgtgctgagcggcaagctgtatgctgtgggcggcagagatggcagcagctgcctgaagtctgtggagtgctttgacccccacaccaacaagtggaccctgtgtgcccagatgagcaagaggcggggcggcgtgggcgtgaccacctggaatggcctgctgtatgccatcggcggccatgatgccccagccagcaacctgaccagccggctgagtgactgtgtggagagatatgaccccaagacagacatgtggacagctgtggcctccatgagcatcagcagagatgctgtgggcgtgtgcctgctgggggacaagctgtatgctgtgggcggctatgatggccaggcctacctgaacacagtggaggcctatgacccccagaccaatgagtggacccaggtgttcagccacacctttgaggacagcaaggaccacctggtggccatcaagcagaccatctggaggcagaacagcctgtctgaggagttccgcagccactag

SEQ ID NO: 302680 - DNA, 2313 bp, Artificial Sequence
  derived and/or modified sequence
atgaacgtgatctacttccccctgcacatcttcgtggtgtacagccgggcctacacgtcacttgttctggtggggtgcacaaatttatgcgcagtgctgttcgcaagatgtctcgacgatcacctggtcagcttgagaatgtccggatccaggaaagaattcgatgtgaagcagattttgaaaattcgctggcgctggttcggacatcaggcctcatctccaaatagcactgtggattctcagcaaggggagttctggaaccggggtcagacaggcgccaatggcggcagaaagtttctggatccttgtagtctgcagctgcctctggcctccatcggatacagacggtcttcccagcttgatttccagaatagcccctcttggcccatggcatcgacttcagaagttccagccttcgagtttacggctgaagattgtggaggcgctcattggctggaccgcccagaggtcgacgatggaacttcagaggaagaaaacgagtctgacagcagttcctgtcgaacaagcaactcatctcagaccctcagcagttgccacactatggaaccctgtacttctgatgaattctttcaggccctcaaccatgccgaacagacgtttaaaaaaatggaaaattacctacgtcacaagcagctttgcgacgttatcctggttgcgggcgatcgccggatccctgctcatcggttggtgttgtcaagtgtgtctgattactttgctgctatgttcacaaacgacgttagggaggctcggcaggaggagattaagatggagggggtggagccaaactccctatggtccctaatccagtacgcctacaccggaagactcgagctgaaggaagacaatatcgagtgcctgttgtctaccgcttgtctgctccagctcagccaggtcgtggaggcatgctgcaaattcttgatgaaacagttgcaccccagcaattgtttgggcatcaggtccttcgcagatgcccagggctgtacggatcttcacaaggtggctcacaattatacaatggaacattttatggaggtcataaggaatcaggagtttgtgctgctgccagcatcggagattgctaagttactggcgtccgacgacatgaatataccaaatgaggaaactatcttaaatgcattgctgacatgggtgcggcacgatttggaacagcggaggaaggatctctccaagctcctggcatatattaggctgcccctgctggcgcctcagtttctcgctgatatggaaaataacgttttgttccgtgatgacattgaatgccagaaacttatcatggaagccatgaaataccacctcctccctgagaggaggcctatgttgcagtcccctcgtacaaaaccacgcaaatcaaccgtcggaaccctctttgctgtggggggcatggattcaactaagggagcaaccagcatcgagaagtacgacctcagaaccaatatgtggacgccggtggctaacatgaatggccgaaggcttcagttcggagtcgccgtcctggatgacaagctgtacgtggttggcggccgggatggactgaaaactttaaatacagttgagtgctataatccaaaaaccaaaacttggagcgtgatgccccccatgtcaactcatagacacggattgggagtcgccgtgctggaggggccaatgtatgcggtcggcggtcacgacggttggtcttacctcaatacggtggagaggtgggacccacaggctaggcaatggaactttgtggccacaatgagtacaccacggtccaccgttggagtcgccgttctttcggggaaactctacgctgtgggaggtcgcgacggtagctcttgtctaaaaagtgtagaatgtttcgatccccacacaaacaagtggaccctgtgtgcccagatgtccaaacgcagaggcggagtcggggtgacaacgtggaatggtctgctgtacgccattggaggtcacgatgctccagcatcaaatcttacttctcggcttagtgactgtgtggagcgctacgaccctaagacagatatgtggaccgctgtagcatcaatgtctatttctcgcgatgcagtgggcgtgtgcctgttaggcgataaattgtacgccgtgggtggatatgacggccaggcctacttaaataccgtggaggcctacgacccccaaaccaacgagtggacacaggtattctcccatacctttgaagacagcaaagaccacctcgtcgccatcaagcagacaatttggcgccaaaactctctcagcgaggaattccgttctcactag

SEQ ID NO: 302681 - DNA, 849 bp, Artificial Sequence
  derived and/or modified sequence
tgacggaccaacatgtggacccccgtggccaacatgaacggccggagacttcagtttggggtggctgtattggacgacaagctgtatgtcgtcggcggccgggatggtctgaagacactgaacaccgtggaatgctataacccaaagaccaagacgtggagcgtaatgcctcctatgtcaacccaccggcacgggctgggagtggccgtcttggagggacccatgtacgccgtcgggggacatgatgggtggagctatttgaacacggtggaacgttgggacccccaagctcgccagtggaacttcgtggctacgatgtctaccccccggtccaccgtgggcgttgcagtgctttcaggtaaattatacgccgttggtggtagggatgggtcatcctgcttgaagtctgtggagtgttttgacccgcataccaacaagtggacactgtgcgcacagatgagtaaaagacgcggaggggtgggagtcaccacttggaacggcctgctgtacgctatcggtggacatgatgcccccgcatctaacttaacaagtaggttatccgactgtgttgagagatatgaccccaaaacagatatgtggaccgcagtggccagtatgtctatttcacgagacgccgtcggtgtatgccttctgggcgacaagttgtatgctgtgggtgggtatgatggccaggcctacctgaacaccgttgaagcatatgatccgcagaccaacgagtggacacaggttttttcccatactttcgaggacagcaaggaccacttagtagcaataaaacagactatctggagacaaaattccctgtctgaggagttccggtcccattag

SEQ ID NO: 302682 - DNA, 2313 bp, Artificial Sequence
  derived and/or modified sequence
atgaatgtcatctactttcctcttcacatctttgttgtgtactcccgggcttacacgtccctcgtgctggttgggtgtactaatctttgcgcagtactgtttgcaagatgcttagatgatcacctggtatctctgcgcatgagcggaagtcgcaaagaatttgatgtgaaacagattttgaagatcaggtggcgttggttcggacaccaagcctcaagtcccaactctacagtagactctcagcagggagagttctggaaccggggtcagacaggagctaatggagggaggaagttcctggatccctgctctctccagttacctctggcgagtattggctacaggcgatctagtcaactagattttcaaaacagcccctcgtggcctatggcttccaccagcgaagtacccgcattcgagttcacagcggaagattgtggcggagctcattggctcgacagacccgaggtggacgatggcacaagcgaggaagagaatgaaagtgattcttcctcatgccgtacttctaacagtagtcagacgctgagttcgtgtcatacaatggagccatgcacctcagacgagttctttcaggcactgaatcacgccgaacagacgttcaaaaagatggagaattacctcaggcacaaacagttgtgtgatgtgatcctggtcgccggtgatcggaggattcccgcacacagactcgtgctgtccagcgtatctgactattttgcagcaatgttcactaatgacgtgagggaagccaggcaggaggagataaagatggaaggcgtcgaaccaaacagcctgtggtcgctcattcagtatgcctacacaggacgtttagagctgaaggaagacaatattgagtgtttgctaagcacggcctgcctgctgcagctaagccaagtcgtggaggcatgctgcaagttcctcatgaagcagctgcacccctcaaactgtctggggatcaggtccttcgcagacgcccagggctgcaccgatctgcataaagtggcacataactatacaatggaacactttatggaggttattaggaatcaggaatttgtcctgctccccgcttctgagatcgccaagctgctggcttcagatgacatgaatattcccaacgaggagactattctgaatgctctgctgacctgggtcagacacgacctggaacagcgccgaaaggacctgtctaaactgctcgcctatattcgactgcccctcctggctcctcagttcctggccgacatggaaaacaatgtcctgtttagggatgatattgaatgtcagaaactcattatggaggccatgaaatatcatttgcttccagaacgacgaccaatgttgcaatccccgaggaccaagcccaggaagtcgacagtgggcactttattcgcagtgggcggaatggatagcactaaaggcgctactagtatcgaaaaatatgatctgaggaccaacatgtggaccccagtagccaatatgaatggacgcaggctgcagtttggcgtggcagtgctggacgacaagttatacgtggttggagggcgtgatggtcttaaaacattaaacacggtcgagtgttacaaccccaagacgaaaacgtggtcggtcatgcccccaatgagcacacatcgccatggactgggggtcgcggtattggaaggtcctatgtacgctgtggggggacacgatggttggtcctatctaaatacagttgaaaggtgggaccctcaggccaggcaatggaacttcgtcgccacgatgtcaacaccacgctcgaccgttggagtagccgtgcttagtggaaaactgtatgccgtgggtggcagggacgggtcctcctgtctaaagtccgttgagtgcttcgacccccacacaaacaagtggaccctttgtgctcagatgtcaaagagacggggaggcgtgggtgtgacaacttggaacggactcctgtatgccattggcggacatgatgctcctgcgagcaacttgacaagtaggctttccgactgtgtcgagaggtacgaccctaaaactgacatgtggacagcagtagcctcaatgagcatcagccgcgatgccgttggagtgtgcctgctcggtgacaagctatatgccgttggagggtacgacggacaggcttacctcaacaccgtggaggcctacgatcctcagactaacgagtggacccaagtcttctctcacacttttgaggattccaaagatcacctggtcgcgatcaaacagaccatttggcgccagaacagtctcagcgaggaattcagaagccattag

SEQ ID NO: 302683 - DNA, 849 bp, Artificial Sequence
  derived and/or modified sequence
tagaggacgaatatgtggacgcctgtggccaacatgaacggcagaaggttacagtttggggttgccgtgctcgacgacaaactgtacgtcgttggtggacgggacgggttgaaaacactaaatacagtggaatgttacaacccgaagacgaaaacttggagcgtgatgcctcctatgtcaacacaccgtcacggcctgggagttgcggtccttgaaggcccaatgtacgctgtcggaggacacgacggatggtcatacctcaatactgtcgagcgttgggatccgcaagccaggcagtggaattttgttgcaacaatgtcgacacccaggagcacagtgggagtcgcggtcctgtccggaaaactttacgccgtcggcggtcgggatggctcttcctgcctcaaaagtgtggagtgcttcgacccccacacaaataagtggaccttgtgtgcacagatgtccaaaaggagggggggtgtgggagtcactacctggaatggactcctatatgccatcggtggacacgatgccccagcaagtaatcttacatccaggttgtcggattgtgtcgagcgatacgatcctaaaacggatatgtggacagccgtcgccagtatgtccattagtcgagatgcagtcggagtctgtctcctcggcgataagctgtacgctgtggggggatatgacggtcaagcctatctgaatactgtcgaggcttacgatcctcaaacaaatgaatggacccaggtattttcccacacgttcgaggatagcaaagatcatctcgtcgccattaagcagactatctggaggcaaaactccctgtcagaggagttccgctcccactag

SEQ ID NO: 302684 - DNA, 2313 bp, Artificial Sequence
  derived and/or modified sequence
atgaacgtgatctacttccccctgcacatcttcgtggtgtacagcagagcctacaccagcctggtgctggtgggctgcaccaacctgtgcgccgtgctgttcgccagatgcctggacgaccacctggtgagcctgagaatgagcggcagcagaaaggagttcgacgtgaagcagatcctgaagatcagatggagatggttcggccaccaggccagcagccccaacagcaccgtggacagccagcagggcgagttctggaacagaggccagaccggcgccaacggcggcagaaagttcctggacccctgcagcctgcagctgcccctggccagcatcggctacagaagaagcagccagctggacttccagaacagccccagctggcccatggccagcaccagcgaggtgcccgccttcgagttcaccgccgaggactgcggcggcgcccactggctggacagacccgaggtggacgacggcaccagcgaggaggagaacgagagcgacagcagcagctgcagaaccagcaacagcagccagaccctgagcagctgccacaccatggagccctgcaccagcgacgagttcttccaggccctgaaccacgccgagcagaccttcaagaagatggagaactacctgagacacaagcagctgtgcgacgtgatcctggtggccggcgacagaagaatccccgcccacagactggtgctgagcagcgtgagcgactacttcgccgccatgttcaccaacgacgtgagagaggccagacaggaggagatcaagatggagggcgtggagcccaacagcctgtggagcctgatccagtacgcctacaccggcagactggagctgaaggaggacaacatcgagtgcctgctgagcaccgcctgcctgctgcagctgagccaggtggtggaggcctgctgcaagttcctgatgaagcagctgcaccccagcaactgcctgggcatcagaagcttcgccgacgcccagggctgcaccgacctgcacaaggtggcccacaactacaccatggagcacttcatggaggtgatcagaaaccaggagttcgtgctgctgcccgccagcgagatcgccaagctgctggccagcgacgacatgaacatccccaacgaggagaccatcctgaacgccctgctgacctgggtgagacacgacctggagcagagaagaaaggacctgagcaagctgctggcctacatcagactgcccctgctggccccccagttcctggccgacatggagaacaacgtgctgttcagagacgacatcgagtgccagaagctgatcatggaggccatgaagtaccacctgctgcccgagagaagacccatgctgcagagccccagaaccaagcccagaaagagcaccgtgggcaccctgttcgccgtgggcggcatggacagcaccaagggcgccaccagcatcgagaagtacgacctgagaaccaacatgtggacccccgtggccaacatgaacggcagaagactgcagttcggcgtggccgtgctggacgacaagctgtacgtggtgggcggcagagacggcctgaagaccctgaacaccgtggagtgctacaaccccaagaccaagacctggagcgtgatgccccccatgagcacccacagacacggcctgggcgtggccgtgctggagggccccatgtacgccgtgggcggccacgacggctggagctacctgaacaccgtggagagatgggacccccaggccagacagtggaacttcgtggccaccatgagcacccccagaagcaccgtgggcgtggccgtgctgagcggcaagctgtacgccgtgggcggcagagacggcagcagctgcctgaagagcgtggagtgcttcgacccccacaccaacaagtggaccctgtgcgcccagatgagcaagagaagaggcggcgtgggcgtgaccacctggaacggcctgctgtacgccatcggcggccacgacgcccccgccagcaacctgaccagcagactgagcgactgcgtggagagatacgaccccaagaccgacatgtggaccgccgtggccagcatgagcatcagcagagacgccgtgggcgtgtgcctgctgggcgacaagctgtacgccgtgggcggctacgacggccaggcctacctgaacaccgtggaggcctacgacccccagaccaacgagtggacccaggtgttcagccacaccttcgaggacagcaaggaccacctggtggccatcaagcagaccatctggagacagaacagcctgagcgaggagttcagaagccactag

SEQ ID NO: 302685 - DNA, 849 bp, Artificial Sequence
  derived and/or modified sequence
tgaagaaccaacatgtggacccccgtggccaacatgaacggcagaagactgcagttcggcgtggccgtgctggacgacaagctgtacgtggtgggcggcagagacggcctgaagaccctgaacaccgtggagtgctacaaccccaagaccaagacctggagcgtgatgccccccatgagcacccacagacacggcctgggcgtggccgtgctggagggccccatgtacgccgtgggcggccacgacggctggagctacctgaacaccgtggagagatgggacccccaggccagacagtggaacttcgtggccaccatgagcacccccagaagcaccgtgggcgtggccgtgctgagcggcaagctgtacgccgtgggcggcagagacggcagcagctgcctgaagagcgtggagtgcttcgacccccacaccaacaagtggaccctgtgcgcccagatgagcaagagaagaggcggcgtgggcgtgaccacctggaacggcctgctgtacgccatcggcggccacgacgcccccgccagcaacctgaccagcagactgagcgactgcgtggagagatacgaccccaagaccgacatgtggaccgccgtggccagcatgagcatcagcagagacgccgtgggcgtgtgcctgctgggcgacaagctgtacgccgtgggcggctacgacggccaggcctacctgaacaccgtggaggcctacgacccccagaccaacgagtggacccaggtgttcagccacaccttcgaggacagcaaggaccacctggtggccatcaagcagaccatctggagacagaacagcctgagcgaggagttcagaagccactag

SEQ ID NO: 302686 - protein, 187 aa, Artificial Sequence
  derived and/or modified sequence
PEDSEKKRTNYQAYRSYLNREGPKALGSKEIPKGAENCLEGLIFVITGVLESIERDEAKSLIERYGGKVTGNVSKKTNYLVMGRDSGQSKSDKAAALGTKIIDEDGLLNLIRTMPGKKSKYEIAVETEELGYSYVELNASDTRSKSSLKAIVAESLNNTSIKGFYSNGAASSVSTKHALIMDEVDGM

SEQ ID NO: 302687 - DNA, 564 bp, Artificial Sequence
  derived and/or modified sequence
cccgaggacagcgagaagaagagaaccaactaccaggcctacagaagctacctgaacagagagggccccaaggccctgggcagcaaggagatccccaagggcgccgagaactgcctggagggcctgatcttcgtgatcaccggcgtgctggagagcatcgagagagacgaggccaagagcctgatcgagagatacggcggcaaggtgaccggcaacgtgagcaagaagaccaactacctggtgatgggcagagacagcggccagagcaagagcgacaaggccgccgccctgggcaccaagatcatcgacgaggacggcctgctgaacctgatcagaaccatgcccggcaagaagagcaagtacgagatcgccgtggagaccgaggagctgggctacagctacgtggagctgaacgccagcgacaccagaagcaagagcagcctgaaggccatcgtggccgagagcctgaacaacaccagcatcaagggcttctacagcaacggcgccgccagcagcgtgagcaccaagcacgccctgatcatggacgaggtggacggcatgtag

SEQ ID NO: 302688 - DNA, 564 bp, Artificial Sequence
  derived and/or modified sequence
cccgaagattcagagaaaaaacgcaccaattatcaggcttatcgctcttacttgaacagggagggccctaaagcgttagggtctaaagaaatcccaaaaggagcggagaactgtttagaaggccttattttcgtaataaccggcgtgttggagagtatcgaaagggacgaagccaagtctctcatcgaacgctacggcggaaaagtgacggggaacgtaagcaagaagacaaactatctcgtgatgggcagagattctggccagtcaaaaagcgataaggccgcagctctgggtaccaaaataattgatgaggacggccttcttaacctgattcgtacaatgcctgggaagaagtctaaatacgaaattgctgtggagactgaggagttggggtattcatacgtagagctgaatgcctccgatacccggtctaaatcctccctgaaggcgatcgttgctgaaagcttgaacaacacgagtattaaaggcttctatagtaatggtgcagcctcgagtgtcagtaccaagcatgcccttattatggacgaagtggacggtatgtag

SEQ ID NO: 302689 - DNA, 564 bp, Artificial Sequence
  derived and/or modified sequence
cctgaggacagcgagaagaagaggaccaactaccaggcctaccgcagctacctgaaccgggagggccccaaggccctgggcagcaaggagatccccaagggagctgagaactgcctggagggcctcatcttcgtcatcactggagtgctggagagcattgaaagagatgaggccaagagcctcatcgagagatatggaggcaaggtgactggaaatgtgtccaagaagaccaactacctggtgatgggccgggacagcggccagagcaagagtgacaaggctgctgccctgggcaccaagatcattgatgaagatggcctgctgaacctgatccgcaccatgcctgggaagaagagcaaatatgaaattgctgtggagacagaggagctgggctacagctatgtggagctgaatgccagtgacaccaggagcaagagcagcctgaaggccatcgtggccgagagcctgaacaacaccagcatcaagggcttctacagcaatggagctgccagctctgtgtccaccaagcacgccctgatcatggatgaggtggatggcatgtag

SEQ ID NO: 302690 - DNA, 564 bp, Artificial Sequence
  derived and/or modified sequence
cccgaggacagcgagaagaagcggaccaactaccaggcctaccggtcttatctgaaccgtgaggggcccaaggccctgggcagcaaggaaattcccaagggggccgaaaactgcctggaaggcttaatttttgtgatcactggcgtactggagtctatcgaaagagatgaagcaaagagtttgatcgagcggtacggggggaaagtgacaggaaacgtttccaagaagacaaactatttagttatgggccgggattctggacagtccaagagcgataaagctgctgcgctgggaacaaaaatcatcgacgaagatggtctgctcaatctcattaggacgatgcccgggaaaaagtctaaatacgagatagctgtcgagacagaggagctcggttactcttatgtcgagttgaacgccagtgacacacggtctaagtcaagtctcaaggctatagtggctgagtccctgaataacacaagtatcaagggattctactcaaacggggctgcctcttccgtgtccactaagcacgcattgattatggatgaagtggatggaatgtag

SEQ ID NO: 302691 - DNA, 564 bp, Artificial Sequence
  derived and/or modified sequence
cctgaggacagcgaaaagaagagaactaactaccaggcataccggtcctatttgaatagggagggcccaaaagcccttggtagcaaggaaatacccaagggagccgagaattgtctggaaggcttgatcttcgtaattactggtgtcctggagtccatagagagggatgaggccaagtccctgatagaacgctacggaggaaaggtcacggggaacgtctccaagaaaactaactacctcgtgatgggtagagattcgggccaatccaaatctgacaaggcagccgcactagggacaaaaataatcgacgaggatggactgctcaatctgatccggacaatgcccggtaagaagtctaaatatgaaatagccgttgagacggaagaactgggctattcttatgtggagctgaatgcatcagacacacgaagtaagagttccctcaaagccatcgtcgcagaaagtctcaacaatacctctattaaaggcttttactccaacggagccgcttcatccgtcagtaccaaacatgcgctcataatggacgaagttgatgggatgtag

SEQ ID NO: 302692 - DNA, 561 bp, Artificial Sequence
  derived and/or modified sequence
cctgaagattctgaaaagaaacgcactaattatcaagcttatcgaagctacttaaatcgagaaggtcccaaggctctgggctccaaagaaataccaaagggagctgaaaattgcttggaaggccttatatttgtaatcacaggcgtgctggagtctattgaacgagatgaggccaagtctctaattgaacgttatgggggaaaagtaacaggaaatgtcagcaagaaaacaaattatcttgtcatgggtcgtgatagtggacagtccaagagtgataaggccgcagccttggggacaaaaattattgatgaagatggcctgttgaatctgattcggactatgccaggcaagaaatccaagtatgaaatagcagttgaaactgaggagttgggatacagctacgtggaactgaatgcaagtgacacccggagtaagagcagtttgaaggcgattgttgctgagtcactgaacaataccagcatcaaaggcttttattcaaatggagcagcctcttcagtaagcacgaaacatgctctcatcatggatgaagtagatggcatg

SEQ ID NO: 302693 - protein, 631 aa, Artificial Sequence
  derived and/or modified sequence
MNFNTILEEILIKRSQQKKKTSPLNYKERLFVLTKSMLTYYEGRAEKKYRKGFIDVSKIKCVEIVKNDDGVIPCQNKYPFQVVHDANTLYIFAPSPQSRDLWVKKLKEEIKNNNNIMIKYHPKFWTDGSYQCCRQTEKLAPGCEKYNLFESSIRKALPPAPETKKRRPPPPIPLEEEDNSEEIVVAMYDFQAAEGHDLRLERGQEYLILEKNDVHWWRARDKYGNEGYIPSNYVTGKKSNNLDQYEWYCRNMNRSKAEQLLRSEDKEGGFMVRDSSQPGLYTVSLYTKFGGEGSSGFRHYHIKETTTSPKKYYLAEKHAFGSIPEIIEYHKHNAAGLVTRLRYPVSVKGKNAPTTAGFSYEKWEINPSELTFMRELGSGLFGVVRLGKWRAQYKVAIKAIREGAMCEEDFIEEAKVMMKLTHPKLVQLYGVCTQQKPIYIVTEFMERGCLLNFLRQRQGHFSRDVLLSMCQDVCEGMEYLERNSFIHRDLAARNCLVSEAGVVKVSDFGMARYVLDDQYTSSSGAKFPVKWCPPEVFNYSRFSSKSDVWSFGVLMWEVFTEGRMPFEKYTNYEVVTMVTRGHRLYQPKLASNYVYEVMLRCWQEKPEGRPSFEDLLRTIDELVECEETFGR

SEQ ID NO: 302694 - DNA, 1896 bp, Artificial Sequence
  derived and/or modified sequence
atgaacttcaacaccatcctggaggagatcctgatcaagagaagccagcagaagaagaagaccagccccctgaactacaaggagagactgttcgtgctgaccaagagcatgctgacctactacgagggcagagccgagaagaagtacagaaagggcttcatcgacgtgagcaagatcaagtgcgtggagatcgtgaagaacgacgacggcgtgatcccctgccagaacaagtaccccttccaggtggtgcacgacgccaacaccctgtacatcttcgcccccagcccccagagcagagacctgtgggtgaagaagctgaaggaggagatcaagaacaacaacaacatcatgatcaagtaccaccccaagttctggaccgacggcagctaccagtgctgcagacagaccgagaagctggcccccggctgcgagaagtacaacctgttcgagagcagcatcagaaaggccctgccccccgcccccgagaccaagaagagaagaccccccccccccatccccctggaggaggaggacaacagcgaggagatcgtggtggccatgtacgacttccaggccgccgagggccacgacctgagactggagagaggccaggagtacctgatcctggagaagaacgacgtgcactggtggagagccagagacaagtacggcaacgagggctacatccccagcaactacgtgaccggcaagaagagcaacaacctggaccagtacgagtggtactgcagaaacatgaacagaagcaaggccgagcagctgctgagaagcgaggacaaggagggcggcttcatggtgagagacagcagccagcccggcctgtacaccgtgagcctgtacaccaagttcggcggcgagggcagcagcggcttcagacactaccacatcaaggagaccaccaccagccccaagaagtactacctggccgagaagcacgccttcggcagcatccccgagatcatcgagtaccacaagcacaacgccgccggcctggtgaccagactgagataccccgtgagcgtgaagggcaagaacgcccccaccaccgccggcttcagctacgagaagtgggagatcaaccccagcgagctgaccttcatgagagagctgggcagcggcctgttcggcgtggtgagactgggcaagtggagagcccagtacaaggtggccatcaaggccatcagagagggcgccatgtgcgaggaggacttcatcgaggaggccaaggtgatgatgaagctgacccaccccaagctggtgcagctgtacggcgtgtgcacccagcagaagcccatctacatcgtgaccgagttcatggagagaggctgcctgctgaacttcctgagacagagacagggccacttcagcagagacgtgctgctgagcatgtgccaggacgtgtgcgagggcatggagtacctggagagaaacagcttcatccacagagacctggccgccagaaactgcctggtgagcgaggccggcgtggtgaaggtgagcgacttcggcatggccagatacgtgctggacgaccagtacaccagcagcagcggcgccaagttccccgtgaagtggtgcccccccgaggtgttcaactacagcagattcagcagcaagagcgacgtgtggagcttcggcgtgctgatgtgggaggtgttcaccgagggcagaatgcccttcgagaagtacaccaactacgaggtggtgaccatggtgaccagaggccacagactgtaccagcccaagctggccagcaactacgtgtacgaggtgatgctgagatgctggcaggagaagcccgagggcagacccagcttcgaggacctgctgagaaccatcgacgagctggtggagtgcgaggagaccttcggcagatag

SEQ ID NO: 302695 - DNA, 1896 bp, Artificial Sequence
  derived and/or modified sequence
atgaatttcaacaccattttggaggagatcctgattaagaggagccagcagaagaaaaagacatctcccctgaattataaagaaaggctgttcgtgctgacaaagtctatgttgacctattatgagggacgggcagaaaagaagtaccgcaagggcttcattgatgtgagtaagataaaatgcgtggagatagttaagaacgatgacggcgtgataccatgtcagaacaaatacccctttcaggtggtgcacgatgccaataccctgtacatattcgctccatccccccagagtcgggacctgtgggttaaaaagcttaaggaagagatcaaaaacaataacaacatcatgataaagtatcatcctaagttttggacagacggttcttaccagtgttgccggcagaccgagaaactagcacccgggtgtgaaaagtacaatctgttcgaatcctccatccgcaaagctttgcctccggcccccgaaacaaagaagcggcgcccccctccaccaatcccactggaggaggaggacaatagcgaggaaatcgtagttgcaatgtacgattttcaggctgccgagggacacgatctccggttggaaagaggtcaggaatatctgatactggagaaaaacgacgtgcactggtggagggcgagggacaagtacggcaacgaaggctacatcccttccaactatgtgactgggaagaagagtaataatctggaccagtacgaatggtactgccggaatatgaacagaagcaaagcagaacaattactacgcagtgaggacaaggagggcggcttcatggttagggacagttcgcagcctgggctgtacacggtgagcctatataccaagttcggaggtgaggggtccagtggattccggcactaccacattaaagagaccacaacatctccaaagaagtattacctagctgaaaaacatgcctttggaagcatccccgaaattattgaataccacaaacacaatgccgccggcctggttactaggctgcggtaccccgtttcagtcaagggcaagaacgctcccactaccgctggttttagctatgaaaagtgggaaatcaaccccagcgagctgacattcatgcgagaactgggctccggtctctttggcgtggttcggctgggcaagtggcgcgctcagtacaaagtggccattaaggccatacgggagggagctatgtgtgaggaggactttattgaggaggccaaggtgatgatgaagcttacgcatcccaagctggtgcagctctacggagtctgtacacagcaaaagcccatatatatcgttactgaatttatggagaggggctgccttttaaattttctgcgccagcggcagggccacttctcaagagatgtactgctgtcaatgtgccaggatgtgtgcgagggaatggagtacttggaacgcaactctttcatccaccgtgacttagccgcaaggaactgcctggtgtccgaggctggagtggtgaaggtgtctgatttcggcatggccagatacgtcctcgacgaccagtacacctcaagctcaggggccaaatttcccgtcaaatggtgtccacccgaggttttcaattacagccggttttcgtcaaagtctgatgtctggagctttggtgtcctgatgtgggaggtgtttactgaaggcaggatgccttttgaaaagtacacaaattatgaagtcgtgaccatggtcactagaggacatagactctaccagccgaagctcgcctcaaattacgtttatgaagtgatgttgaggtgctggcaggagaagcccgagggacggccatccttcgaggacctgctgcgaaccatagatgagctggtggagtgtgaggagacattcggccggtag

SEQ ID NO: 302696 - DNA, 1896 bp, Artificial Sequence
  derived and/or modified sequence
atgaacttcaacaccatcctggaggagatcctgatcaagaggagccagcagaagaagaagaccagccccctgaactacaaggagcggctgtttgtgctgaccaagtccatgctgacctactatgagggccgggcagagaagaagtacaggaagggcttcattgatgtgtccaagatcaagtgtgtggagatcgtgaagaatgatgatggagtcatcccctgccagaacaagtaccccttccaggtggtgcatgatgccaacaccctgtacatctttgcccccagcccccagagccgggacctgtgggtgaagaagctgaaggaggagatcaagaacaacaacaacatcatgatcaagtaccaccccaagttctggacagatggcagctaccagtgctgccggcagacagagaagctggcccctggctgtgagaagtacaacctgtttgagagcagcatcaggaaggccctgcccccagcccctgagaccaagaagaggcggcccccaccacccatccccctggaggaggaggacaacagcgaggagatcgtggtggccatgtatgacttccaggccgctgagggccatgacctgcggctggagcggggccaggagtacctgatcctggagaagaatgatgtgcactggtggagggcccgggacaagtatggaaatgaaggctacatccccagcaactacgtgacaggcaagaagagcaacaacctggaccagtatgagtggtactgcaggaacatgaacagaagcaaggccgagcagctgctgcggtctgaggacaaggagggcggcttcatggtgcgggacagcagccagcccggcctgtacacagtgtccctgtacaccaagtttggaggagagggcagcagcggcttccgccactaccacatcaaggagaccaccaccagccccaagaagtactacctggccgagaagcacgccttcggcagcatccctgagatcatcgagtaccacaagcacaatgctgctggcctggtgacccggctgcgctaccctgtgtctgtgaagggcaagaatgcccccaccacagctggcttctcctatgagaagtgggagatcaaccccagcgagctgaccttcatgagggagctgggcagcggcctgtttggagtggtgcggctgggcaagtggagggcccagtacaaggtggccatcaaggccatccgggagggcgccatgtgtgaggaggacttcatcgaggaggccaaggtgatgatgaagctgacccaccccaagctggtgcagctgtatggagtgtgcacccagcagaagcccatctacatcgtgacagagttcatggagcggggctgcctgctgaacttcctgcggcagaggcagggccacttcagcagagatgtgctgctgtccatgtgccaggatgtgtgtgagggcatggagtacctggagaggaacagcttcatccaccgggacctggccgccaggaactgcctggtgtctgaggccggcgtggtgaaggtgtctgactttggcatggcccgctacgtgctggatgaccagtacaccagcagcagcggggccaagtttcctgtgaagtggtgccccccagaggtgttcaactacagccgcttcagcagcaagagtgatgtgtggagctttggagtgctgatgtgggaggtgttcacagagggccgcatgccctttgagaagtacaccaactatgaggtggtgaccatggtgacccggggccaccggctgtaccagcccaagctggccagcaactacgtgtatgaggtgatgctgcgctgctggcaggagaagccagagggccggcccagctttgaggacctgctgcggaccattgatgagctggtggagtgtgaggagacctttggaagatag

SEQ ID NO: 302697 - DNA, 1896 bp, Artificial Sequence
  derived and/or modified sequence
atgaacttcaacaccatcctggaggagatcctgatcaagcggagccagcaaaaaaagaagacgagtcctctgaattacaaggaacgactatttgttctcactaagtcaatgctgacgtactatgaagggcgtgcagagaagaagtataggaagggattcatcgatgtctcaaagatcaagtgcgttgagatagtaaagaatgacgacggtgtcattccctgccagaacaagtaccccttccaggtagtgcatgacgctaatactctgtatatcttcgcaccgagcccccagagcagagatttatgggtgaaaaaactaaaagaggagattaagaacaataataacattatgatcaagtaccatcccaagttctggaccgacgggagttaccagtgctgccgtcagactgagaagctggcacctggttgcgagaagtataatcttttcgagtctagcattcggaaggccctccctcccgcacctgaaaccaaaaaaagacgccccccgcctccaatccctctcgaagaagaggataactccgaggaaatcgtcgtcgctatgtatgactttcaggccgccgagggccacgatctgcgcttggagcgcggtcaagaatatctgatcctggaaaagaatgacgttcactggtggagggcccgtgataagtacggaaatgagggatacataccctcgaattacgtcactgggaaaaaatccaataatcttgatcaatacgaatggtactgccgcaatatgaataggagcaaagctgagcagctcctgagatctgaagataaggagggtggtttcatggtgagggattcctcccagcctgggttgtacaccgtttctctctacacaaaatttggaggggaggggtcctcaggattcagacattaccatatcaaggagacaaccacatcacccaaaaagtattacctcgctgaaaaacacgcgttcggatcaattcctgaaatcattgagtaccacaaacacaacgcagctggattggtcactcggctgcggtatcccgtgagcgttaagggaaaaaacgcccccaccacagctggattctcgtatgagaagtgggagattaacccaagcgaactgacatttatgagagagctcggctccggactctttggagttgtgcgactgggcaaatggagagctcagtacaaggtggcaattaaggcaataagagaaggggccatgtgcgaagaggatttcattgaggaggccaaagtcatgatgaaacttacccacccaaaactggtccagttgtacggtgtgtgcacacaacagaagcctatctacatcgtgacggagtttatggaacgggggtgtcttttgaactttcttcgacagaggcaaggacatttttcccgggacgttctgctaagtatgtgccaggatgtctgtgaggggatggaatatttggagcgtaacagtttcattcatcgcgatctcgcagcgagaaactgcttggtgtcagaggcgggtgtggtcaaggtgagcgacttcggcatggctaggtatgttctggacgatcaatacacatcatccagcggagccaagttccccgtcaagtggtgtcctccagaggttttcaactacagcaggttttcatctaagtcggacgtctggtcctttggggtgctcatgtgggaggtatttacggaggggcgcatgcccttcgaaaaatatactaattacgaggtggtgacgatggttacccggggtcatcggctgtaccagccaaagctggcatcgaattatgtgtatgaagtaatgcttcgatgttggcaggaaaagcccgaagggagaccctcattcgaggacctcttgcggacaattgacgaactcgtcgagtgcgaagaaactttcggacgatag

SEQ ID NO: 302698 - DNA, 1896 bp, Artificial Sequence
  derived and/or modified sequence
atgaattttaatactattcttgaggagattttaatcaaaaggtcacagcagaaaaagaaaacatccccactgaattataaagaacgtctctttgtgttgacaaagagcatgctcacctactacgagggaagagccgagaagaaataccgcaagggatttatcgacgtaagcaagatcaaatgcgtggagatcgtcaaaaacgacgatggcgtgattccctgccagaataagtacccttttcaggtggtgcacgacgctaacaccctctacattttcgcacccagcccccagtcacgtgacctttgggtgaaaaagcttaaagaagagattaagaataacaataacattatgatcaagtaccaccccaaattctggacggatggttcataccaatgctgtcgccagactgaaaagctggcacctggctgcgagaagtataacctgttcgagtcttctattcggaaagccctccctcccgcacctgaaaccaagaaaagacgcccacctccccctattcctctcgaagaagaagacaacagcgaagagatcgtggttgccatgtacgatttccaggcagctgaggggcacgacctgagacttgagagaggccaggagtacctgattctggaaaaaaacgatgtgcattggtggcgggctcgcgataaatatggtaacgaggggtacattcccagcaattatgtgaccggcaagaaatccaataatcttgatcagtatgaatggtactgtaggaacatgaatcgaagtaaagcagagcaactgctccggagcgaggataaggaaggaggcttcatggttcgcgatagcagtcaacctggcttgtatacggtctcactctacaccaagtttggcggtgaagggtccagtggtttcagacactaccacataaaggaaaccacgacgtcacccaaaaaatactacttggctgaaaaacatgcatttggtagtatccccgaaattatcgagtaccacaagcataatgcagctgggcttgtgacaaggttgcgctatccggtgagcgttaagggcaaaaacgcccctactactgcaggtttctcctacgagaaatgggagattaaccctagcgaactgacatttatgagagaactcggctccgggctcttcggcgtggtgaggctggggaagtggagagcacagtataaagtggccatcaaagccatcagagagggcgcaatgtgtgaagaagattttattgaagaggccaaggtgatgatgaagcttacacacccaaaattagtgcagctgtatggcgtgtgtacccagcagaaacctatctatattgtgactgagttcatggagcgcggatgtcttctcaattttctcaggcaacggcagggccacttcagcagggatgttttgctgagcatgtgtcaagacgtctgcgagggtatggaataccttgaacgaaattcttttattcaccgcgaccttgcagccagaaattgcctagtctctgaagctggagtcgttaaagttagtgattttggcatggctcgttatgttctcgatgaccagtataccagtagcagcggagctaaattcccagttaagtggtgtccgcctgaggtgttcaattatagccggttctcctccaagagcgatgtttggagtttcggagtcctgatgtgggaggtcttcacagagggtcggatgcccttcgagaagtacaccaactacgaggtcgtgacaatggttactcgagggcatcgactgtatcagccaaaactggcctccaactacgtctatgaggtgatgctgcggtgctggcaagaaaagccggaagggagaccctccttcgaggacctactgaggaccattgacgaactcgtggagtgtgaagagacattcggacggtag

SEQ ID NO: 302699 - DNA, 3687 bp, Artificial Sequence
  derived and/or modified sequence
gggcggggcggggcgctttgctctggactctggggcgctaggctccggactccgcggcgcagactgcacctcgcagtctccccaggtccgcccagcagccgcgcttcagccagaatactgggatcttcagtggcaggaggagtaatcagaagacggagatgaattttaacactattttggaggagattcttattaaaaggtcacagcagaaaaagaagacatcgcccttaaactacaaagagagactttttgtacttacaaagtccatgctaacctactatgagggtcgagcagagaagaaatacagaaaggggtttattgatgtttcaaaaatcaagtgtgtggaaatagtgaagaatgatgatggtgtcattccctgtcaaaataagtatccatttcaggttgttcatgatgctaacacactttacatttttgcacctagtccacaaagcagggacctgtgggtgaagaagttaaaagaagaaataaagaacaacaataatattatgattaaatatcatcctaaattctggacagatggaagttatcagtgttgtagacaaactgaaaaattagcacccggatgtgaaaaatacaatctttttgagagcagtataagaaaagcactacctccagcaccagaaacaaagaagcgaaggcctcccccaccaattccactagaagaagaagataatagtgaagaaatcgttgtagccatgtatgatttccaagcagcagaaggacatgatctcagattagagagaggccaagagtatctcattttagaaaagaatgatgttcattggtggagagcaagagataaatatgggaatgaaggatatatcccaagtaattacgtaacgggaaagaaatcaaacaacttagatcaatatgaatggtattgcagaaatatgaatagaagcaaggcagagcaactcctccgcagtgaagataaagaaggtggttttatggtaagggattccagtcaaccaggcttgtacacagtctccctttataccaagtttggaggagaaggttcatcgggttttaggcattatcatataaaggaaacaacaacatctccaaagaagtattacctagctgaaaaacatgcttttggctccattcctgagattattgaatatcataagcacaatgcagcaggacttgtcaccaggcttcggtacccagttagtgtgaaagggaagaatgcacccaccactgcaggattcagctatgagaaatgggagattaacccttcagaactgacctttatgagggaattgggaagtggactgtttggagtggtgaggcttggcaaatggcgagcccagtacaaagtcgcaatcaaagctattcgggaaggtgcaatgtgcgaggaggactttatagaagaagctaaagtgatgatgaaactgacacacccgaagttagtgcagctttatggtgtgtgcacccagcagaaaccaatatacattgttactgagttcatggaaaggggctgccttctgaatttcctccgacagagacaaggtcatttcagtagagacgtactgctgagcatgtgtcaggatgtgtgtgaagggatggagtatctggagagaaacagcttcatccacagagatctggctgccagaaattgtctagtaagtgaggcgggagttgtaaaagtatctgattttggaatggccaggtatgttctggatgatcagtacacaagttcttctggtgctaagtttcctgtgaagtggtgtccacctgaagtgtttaattacagccgcttcagcagcaaatcagatgtctggtcatttggtgttttaatgtgggaagtattcacggaaggcagaatgccttttgaaaaatacaccaattatgaagtggtaaccatggttactcgaggccaccgactctaccagccgaagttggcgtccaactatgtgtatgaggtgatgctgagatgttggcaggagaaaccagagggaaggccttctttcgaagatctgctgcgcacaatagatgaactagttgaatgtgaagaaacttttggaagataagtgatgtgtgaccagtggctcccagattcccaagcacaaggaaggatgggcattttgtggcttttaatttattgagcacttggacatgtagatcattttacttatacagtggaaacacataaataatttgcttctagaccagcctctgtctagacttgcttctagacagaatctcccagagtgtggaaatgttgccttagaaatggtgattaaaatcactcatttctattcattcctcaggcacttgagtgacagttgtttaccaggcactgtgtgtagccccagggtttggccattcaggggtgcacacatgggaccatgttagctgatgccagttgaaggccagggtatttgggaaggggaagggtattagagtcatgaccaagcaacccttctttttccctttgacttctacagaaatctgggcctgagacattgtctacaattgggttctagatacatcaggaacccatcttggataaataaatacctatcttttgttttgaaaacatctcagttttcaagactgctcttagtattacatgaacaatatttgtatgctgtatatattgtaaatatatataatatataaagttatatatttatgagaaacacgaattgtcttttaattgaaacttttaatcctgtagtataggagttcaccttcttaggactagagactgtgccttatagctgttaattcatttccccctgaacatcaaatatgcctgaagagaagaaagtctagattcttctatgagtaacgccccctcctcactcaggtaaatgtgtctggggatgcctgtccagcttaaccacgtgcatttggcctatgtaatcctgcccatggtggccgcagctaatcagaatcagatggaaaattaaaccgggtaatctacttctaagccttaagaatattccctgggacacagacactataattggaagtgctgagctctggggcagaaggatcaggtgaccttcgcaacaaagtttgcccccacctcacataggacccggaagcagcctgagctgtggcggaggatccaggaagctacggagagaagcagccagcatggtgttccgtgcctcccggacgtttttcaggaggcctggttggacttgggttcctggatggtgggattgttgtacagcctctcaggagaccctgctgtcaagactgtgtgtgtggatttctcacccttagaagctctactaagacatcaacggaattagggccttcctttttgccttgtgagcgccaaggaaaagaaactatctcggtcacgtgagcgccagcgaaaagaaactgtatcagtcatccagagaccgtttattgcccaacacgttattcttgctgttggtggggtaactagccgaggaagacacagcgccttcccttcaggagttgcgtctcctctgcaggccacgatggtctgctctggagcattgggtgaacacacaggctggctgctctgggcagcgccttcactctgaccctggagaaccatttcatttcatcctggtcagtctagagtctgtgcaccaggcagtccatccactgaaggctgtgtttattcttttcctgtgcccctcataatggaagaaagtaaactgcttatcccgagcctta

SEQ ID NO: 302700 - DNA, 243 bp, Artificial Sequence
  derived and/or modified sequence
gcatcatgccagggagccaagcgtcctgcccggccgttgctccgactgtgtgttccaggagtggtggctctgaggtgtgaccctgcccacgtttgggcccagccaggttcagccccccaataaggagggcagcttgataacacaaagaaaacagtgtcaacgagtactaccaagagaagaagacaagagttttatagcagaggcttcttagaagcttaaacccctgtcccaatgacgtcaagt

SEQ ID NO: 302701 - protein, 811 aa, Artificial Sequence
  derived and/or modified sequence
MRLIRNIYIFCSIVMTAEGDAPELPEERELMTNCSNMSLRKVPADLTPATTTLDLSYNLLFQLQSSDFHSVSKLRVLILCHNRIQQLDLKTFEFNKELRYLDLSNNRLKSVTWYLLAGLRYLDLSFNDFDTMPICEEAGNMSHLEILGLSGAKIQKSDFQKIAHLHLNTVFLGFRTLPHYEEGSLPILNTTKLHIVLPMDTNFWVLLRDGIKTSKILEMTNIDGKSQFVSYEMQRNLSLENAKTSVLLLNKVDLLWDDLFLILQFVWHTSVEHFQIRNVTFGGKAYLDHNSFDYSNTVMRTIKLEHVHFRVFYIQQDKIYLLLTKMDIENLTISNAQMPHMLFPNYPTKFQYLNFANNILTDELFKRTIQLPHLKTLILNGNKLETLSLVSCFANNTPLEHLDLSQNLLQHKNDENCSWPETVVNMNLSYNKLSDSVFRCLPKSIQILDLNNNQIQTVPKETIHLMALRELNIAFNFLTDLPGCSHFSRLSVLNIEMNFILSPSLDFVQSCQEVKTLNAGRNPFRCTCELKNFIQLETYSEVMMVGWSDSYTCEYPLNLRGTRLKDVHLHELSCNTALLIVTIVVIMLVLGLAVAFCCLHFDLPWYLRMLGQCTQTWHRVRKTTQEQLKRNVRFHAFISYSEHDSLWVKNELIPNLEKEDGSILICLYESYFDPGKSISENIVSFIEKSYKSIFVLSPNFVQNEWCHYEFYFAHHNLFHENSDHIILILLEPIPFYCIPTRYHKLKALLEKKAYLEWPKDRRKCGLFWANLRAAINVNVLATREMYELQTFTELNEESRGSTISLMRTDCL

SEQ ID NO: 302702 - DNA, 2436 bp, Artificial Sequence
  derived and/or modified sequence
atgagactgatcagaaacatctacatcttctgcagcatcgtgatgaccgccgagggcgacgcccccgagctgcccgaggagagagagctgatgaccaactgcagcaacatgagcctgagaaaggtgcccgccgacctgacccccgccaccaccaccctggacctgagctacaacctgctgttccagctgcagagcagcgacttccacagcgtgagcaagctgagagtgctgatcctgtgccacaacagaatccagcagctggacctgaagaccttcgagttcaacaaggagctgagatacctggacctgagcaacaacagactgaagagcgtgacctggtacctgctggccggcctgagatacctggacctgagcttcaacgacttcgacaccatgcccatctgcgaggaggccggcaacatgagccacctggagatcctgggcctgagcggcgccaagatccagaagagcgacttccagaagatcgcccacctgcacctgaacaccgtgttcctgggcttcagaaccctgccccactacgaggagggcagcctgcccatcctgaacaccaccaagctgcacatcgtgctgcccatggacaccaacttctgggtgctgctgagagacggcatcaagaccagcaagatcctggagatgaccaacatcgacggcaagagccagttcgtgagctacgagatgcagagaaacctgagcctggagaacgccaagaccagcgtgctgctgctgaacaaggtggacctgctgtgggacgacctgttcctgatcctgcagttcgtgtggcacaccagcgtggagcacttccagatcagaaacgtgaccttcggcggcaaggcctacctggaccacaacagcttcgactacagcaacaccgtgatgagaaccatcaagctggagcacgtgcacttcagagtgttctacatccagcaggacaagatctacctgctgctgaccaagatggacatcgagaacctgaccatcagcaacgcccagatgccccacatgctgttccccaactaccccaccaagttccagtacctgaacttcgccaacaacatcctgaccgacgagctgttcaagagaaccatccagctgccccacctgaagaccctgatcctgaacggcaacaagctggagaccctgagcctggtgagctgcttcgccaacaacacccccctggagcacctggacctgagccagaacctgctgcagcacaagaacgacgagaactgcagctggcccgagaccgtggtgaacatgaacctgagctacaacaagctgagcgacagcgtgttcagatgcctgcccaagagcatccagatcctggacctgaacaacaaccagatccagaccgtgcccaaggagaccatccacctgatggccctgagagagctgaacatcgccttcaacttcctgaccgacctgcccggctgcagccacttcagcagactgagcgtgctgaacatcgagatgaacttcatcctgagccccagcctggacttcgtgcagagctgccaggaggtgaagaccctgaacgccggcagaaaccccttcagatgcacctgcgagctgaagaacttcatccagctggagacctacagcgaggtgatgatggtgggctggagcgacagctacacctgcgagtaccccctgaacctgagaggcaccagactgaaggacgtgcacctgcacgagctgagctgcaacaccgccctgctgatcgtgaccatcgtggtgatcatgctggtgctgggcctggccgtggccttctgctgcctgcacttcgacctgccctggtacctgagaatgctgggccagtgcacccagacctggcacagagtgagaaagaccacccaggagcagctgaagagaaacgtgagattccacgccttcatcagctacagcgagcacgacagcctgtgggtgaagaacgagctgatccccaacctggagaaggaggacggcagcatcctgatctgcctgtacgagagctacttcgaccccggcaagagcatcagcgagaacatcgtgagcttcatcgagaagagctacaagagcatcttcgtgctgagccccaacttcgtgcagaacgagtggtgccactacgagttctacttcgcccaccacaacctgttccacgagaacagcgaccacatcatcctgatcctgctggagcccatccccttctactgcatccccaccagataccacaagctgaaggccctgctggagaagaaggcctacctggagtggcccaaggacagaagaaagtgcggcctgttctgggccaacctgagagccgccatcaacgtgaacgtgctggccaccagagagatgtacgagctgcagaccttcaccgagctgaacgaggagagcagaggcagcaccatcagcctgatgagaaccgactgcctgtag

SEQ ID NO: 302703 - DNA, 2436 bp, Artificial Sequence
  derived and/or modified sequence
atgagactgattaggaacatctacattttctgttccatagtgatgacagctgagggggacgcgccagaattacccgaagagagagaattaatgactaattgtagtaacatgtccctcagaaaggtccccgccgacctgacaccagctactacaactctcgatctgtcttacaacctcttgtttcagctccagtcgagcgacttccactccgtctctaagctccgcgttctgatcctttgtcacaacaggattcaacagctcgacttgaagaccttcgagttcaacaaagaattgaggtacctcgacctgagtaataacaggctgaaaagcgtgacatggtacctgcttgccggactgaggtatctggatctatcctttaatgatttcgatactatgcctatctgcgaggaagcgggcaatatgtcacacttagaaatacttgggttatctggcgccaaaatccaaaagtccgattttcagaagatagcccacctccacctgaacactgtcttcctgggatttcgaaccctccctcattacgaggaaggcagtcttcctatccttaatacaaccaaactgcatatagtgctacctatggacactaatttctgggtcctccttcgcgatggaatcaaaacctcaaaaatcttggagatgactaatattgatgggaaatcccagtttgtgtcgtacgaaatgcagcggaacctttccctcgaaaatgcaaagacctctgtgctcctactcaataaggtagacctgttgtgggacgatctctttctaatccttcagttcgtatggcacacaagcgttgagcacttccaaatcaggaacgtgacatttggaggtaaggcatacctcgatcacaattctttcgactactccaatacggtcatgcggaccatcaagcttgagcatgtacacttcagagtattttacattcagcaggacaaaatctacctcctgctcaccaagatggatatcgagaatctgaccatctccaacgcgcaaatgccacatatgcttttccctaattaccccacaaaatttcagtacctaaactttgccaataatattttaacggacgagctgttcaaaagaacaatacagttgccacacctgaagacacttatattgaatgggaataagctagaaactttgagcctggtctcatgcttcgcgaacaatacaccactcgagcatcttgacttatcccagaatctgctgcagcacaagaatgacgaaaattgctcgtggcccgagacagtcgtgaatatgaacttgagctacaacaagctttccgattccgtcttccggtgtctcccgaagagtattcagatccttgacctgaataacaatcagatccagaccgtaccaaaagagacgattcatctgatggcgctgagggagttaaacatagctttcaacttcctcaccgatttaccgggatgctctcatttctccagacttagtgtcctcaatatagaaatgaactttattctgtcaccatctcttgacttcgtccaatcatgccaggaggtaaaaacgttgaacgccggcagaaatccattccgatgcacttgtgaattgaaaaatttcatccagctcgagacatactcagaggtgatgatggtcggctggagcgatagctacacctgtgaataccccctgaaccttcgcggcacacgtctgaaggatgtccacctgcacgagcttagctgcaatactgctctgctgatagttacaatcgtggtgatcatgctcgtactgggactggccgtcgccttctgctgtttgcattttgacttgccctggtatcttcgcatgctcggacagtgcactcagacatggcatcgtgtcaggaagactacgcaggagcaacttaaacgtaatgtcaggtttcacgcctttatatcttattctgaacacgacagtttgtgggttaagaatgagctgatccccaatcttgagaaggaagatgggtctattctaatatgtctgtatgaaagctattttgacccgggaaagagcattagcgagaatattgtctctttcatagagaagtcctacaagtcaattttcgtgctcagccctaacttcgttcagaacgaatggtgccactacgaattctacttcgcacatcacaatctgtttcatgagaactcagatcacataatcctgatcttactggaacccatccccttttattgcatccctactcgatatcataagctcaaggccttgctggagaaaaaagcctacctggaatggcctaaggatagacgcaagtgcggattattctgggctaatcttagagccgcaatcaacgttaatgttcttgccaccagagagatgtatgaactgcagacttttactgagctcaatgaggagtcgaggggaagcacgatttcattaatgaggaccgattgtctttag

SEQ ID NO: 302704 - DNA, 2436 bp, Artificial Sequence
  derived and/or modified sequence
atgaggctgataaggaatatctacatcttctgttcaatagtgatgaccgccgagggcgacgctccagaacttcctgaagagagagagctgatgacgaattgctccaatatgtccctccggaaggttcctgccgatttgacccccgcaacaactaccttggacctttcgtacaacctcctgtttcagctccagtcctctgacttccactccgtctctaagctccgagtcctgatactctgccacaaccgcatacagcagctggatctgaagactttcgagtttaacaaagagctcagatatcttgacctcagcaataaccgcctcaagagcgtaacctggtacttgcttgccgggctgagatacttggatctgagtttcaacgatttcgacacgatgccaatttgtgaggaggctggaaacatgtcccaccttgagatactgggacttagtggagccaagatccagaagtctgatttccagaagattgcccacctacatcttaataccgtgtttttggggttcagaaccctgccacactatgaggaaggctccctgcctatcctcaataccaccaagctgcacattgtacttcctatggataccaatttctgggtgcttctccgcgacggaataaagacatccaaaatattggaaatgaccaacatagacggcaaaagtcaatttgtgtcatacgaaatgcagcggaacttatcactggagaacgctaaaacaagcgttctgctgctgaataaggttgacctgctatgggacgacctttttctcattttgcaatttgtctggcacaccagcgttgagcatttccagatccgcaatgtcacattcggcggcaaggcatatcttgatcataatagctttgattatagcaacactgtcatgaggaccattaagctggagcacgtgcattttcgggttttctatatacagcaggataaaatttaccttcttctgactaaaatggatatcgaaaacttgactatcagcaatgcacaaatgcctcatatgctatttcccaactacccaaccaaattccagtatctaaacttcgcaaataatattttaacagacgaactgttcaagcgaactatccaactgccgcatctgaagacgctgattctcaacggaaacaagctggagaccctctctctggtctcatgctttgcaaacaataccccattagaacatcttgacctctctcagaatttacttcagcacaagaatgacgaaaattgttcgtggcctgagaccgtggtaaatatgaacctgtcatataataagctgtcggactcagtgttccgctgtctgcccaaatctattcagatcctcgatctcaataataatcagatccagaccgtccccaaagagactattcatctaatggcgctgcgcgaactcaatatcgcttttaacttcctcaccgatctgcccggttgctcacactttagtcggctgtctgtgctgaatatcgaaatgaatttcatcctgagcccatcactggatttcgtgcagtcctgtcaggaggtgaaaacattaaatgccggccgcaacccctttcgctgtacctgtgagttaaaaaacttcattcaactggaaacttattctgaggtcatgatggtcggctggtctgattcatatacctgcgagtaccctctgaacttgcgaggcactcgattgaaagacgtgcatctgcacgaactgagctgtaatacagctctgctgattgtgactattgttgtcataatgctggttctcggtttagccgtggcattttgctgcctgcattttgacctcccgtggtacctgagaatgctcgggcagtgtacccagacctggcacagggtgagaaagaccacacaggagcagctgaagcggaacgtaaggttccacgcctttatttcctattctgagcatgactcactgtgggtgaagaacgaactcatcccaaatcttgaaaaggaggatgggtcaattctgatttgtctgtatgagtcctattttgaccctggcaaatccatttccgaaaacatagtaagcttcatcgaaaagagttataagagcatcttcgtcctctcaccaaacttcgtgcagaacgaatggtgtcattacgagttctactttgctcatcacaacctgttccacgaaaattctgatcatattatcctgatcctcttggagccgatccccttttattgcattcctacccgttaccacaaacttaaagctcttctggaaaagaaggcctatctggaatggcccaaagatcgtagaaagtgtggactattctgggccaacctgcgggcggcaatcaatgtcaacgtgctcgctactcgggagatgtacgagctgcagacctttactgagctcaacgaggaaagccgaggatctactatatccctcatgcgtacagattgtttgtag

SEQ ID NO: 302705 - DNA, 2436 bp, Artificial Sequence
  derived and/or modified sequence
atgaggttaattagaaatatctacattttctgcagcattgtgatgaccgcggaaggagacgcccctgagttaccagaagagcgagaactgatgactaattgcagcaacatgtccttacgtaaagtccctgcggatttgacgcctgccacaactacattggatctctcctacaatctcctgtttcagcttcagagctccgattttcactctgtaagtaagttaagagtcctgatactctgccacaataggatccaacagttggacctgaaaaccttcgagttcaataaggagctgcgttacctggacctttccaataatcgtctgaagtcagtcacttggtatttgctggcgggcctgcgatatctggatctgtcgttcaatgatttcgacaccatgccaatctgcgaagaggccggtaatatgagccatctggaaattctggggctttcaggcgcaaagatacaaaaatccgatttccagaaaatcgcgcatctgcacttgaacacagtgttcctaggttttcggacccttccgcattacgaagagggcagcctacccattctgaacaccaccaaactccacattgtactgcctatggataccaacttctgggttctgctgcgcgacgggattaagacgagcaagatcttagagatgacaaacattgacggaaagagccagttcgtgagctacgaaatgcagagaaacctttctctggagaatgctaagacatcggtgttgctgctgaataaggtcgacctgctgtgggatgatcttttccttattctccagttcgtctggcatacctccgtggaacacttccagatccgaaatgtaacatttggaggcaaggcatatctcgaccataattccttcgattactctaacaccgttatgcgcactattaagctcgaacatgtgcacttcagggtcttctatattcagcaggataagatttatctgctgttgaccaaaatggatatcgagaatctaaccatttctaatgctcaaatgccccatatgttgttcccaaattaccccacaaagttccaatacttgaactttgcaaataacattctgaccgacgaactattcaaacgtacgattcagctgcctcatttgaagactcttattctcaacggtaacaaactggaaacactgagtctggtatcatgcttcgctaataacacacctcttgaacatttggacttgtctcagaacctgcttcagcataagaacgatgaaaactgcagctggcccgagacggtggtgaatatgaatctctcctataataaactgagtgattccgtttttagatgcctgcctaaaagcattcagatcctggatttgaacaacaatcagattcagaccgtccccaaagaaacaatccatcttatggcactgagagagctgaacatcgcgttcaattttttgacagacctcccaggatgctcccacttttcgagactctctgtgctgaatatcgagatgaacttcatactctccccctcactggacttcgtccagagctgtcaggaggtgaaaacactgaacgccggtagaaacccattccggtgcacctgcgagcttaagaactttatacagctagaaacctactccgaggttatgatggtggggtggtccgatagctatacttgtgaatacccactgaatctgagaggcactaggctaaaagacgtccatctccacgaactttcctgtaacaccgctctgctaattgtcaccatcgtcgtgataatgttagtgcttggacttgcagttgctttctgctgcttacactttgatctgccttggtatctccgaatgctgggacagtgtacccagacatggcaccgtgtgagaaaaacgacacaggaacaactgaagcggaacgtcaggtttcatgctttcataagctattctgaacacgattctctatgggttaaaaacgaactgatcccgaatctcgagaaagaagacgggtcgattcttatctgcctttatgagtcttatttcgatccagggaagtctatttcagaaaacatcgtgagtttcattgaaaaatcatataagtcaatatttgttttgtctccaaactttgtccagaatgaatggtgccactacgagttctacttcgctcaccataatctgttccatgagaattctgaccacatcatattgattctactggagcccatccccttttactgtattcctacccggtaccataaattaaaagctctgctggaaaagaaagcctacctggaatggcccaaagataggcgaaaatgcggtctgttttgggcaaacctgagagccgccattaacgtgaatgtgctggcgactcgggagatgtatgaactgcagacctttacagagttgaacgaggagtcgcggggcagcaccatctccctaatgcgaactgactgtctgtag

SEQ ID NO: 302706 - DNA, 2436 bp, Artificial Sequence
  derived and/or modified sequence
atgagattgataagaaatatttatatcttttgttccattgtgatgacagccgaaggcgacgcacctgagctgccagaggagagggagcttatgaccaattgtagtaatatgtccttgagaaaggtgcccgccgatctgaccccagcgaccaccacattagacctttcgtataacctgctgtttcaattacaatctagcgatttccactccgtgtcgaagctgcgggtgctaattctctgccataaccggatacagcagttagatttgaaaacattcgagtttaataaggaactgcggtatctagatcttagcaacaaccgcctcaagtccgtcacgtggtatcttttggccggcctgcgctacctcgatctttccttcaatgacttcgacactatgccaatctgcgaggaggcggggaacatgtcgcaccttgaaattctgggcctgtccggggccaaaatccaaaagtccgattttcagaaaattgcgcacttgcatttaaataccgtatttctgggttttaggaccctaccccactatgaagaaggctccctgcctatcctcaacacaacgaagctccacatcgtgcttcctatggacaccaacttttgggtgttactccgcgatgggattaaaacttctaaaatcctcgagatgaccaacatcgatggcaagagtcaatttgtcagctatgagatgcagcggaatctgagcctggagaatgcaaagacgtctgtgcttctccttaataaagtcgacctcctgtgggatgatttgtttctcatactccagttcgtttggcatacctcagtggagcactttcagattaggaatgtgacgttcggcggtaaggcctatctggatcacaatagctttgactatagcaataccgtgatgagaaccattaagctggagcatgttcacttccgcgtgttttacattcagcaagacaaaatatatctgctgctgactaaaatggatatcgaaaatcttacgatctccaacgcgcagatgccccacatgctgttccccaattaccccacgaagttccagtatctaaactttgcgaacaacattctcaccgatgagctgttcaagagaactattcaactgccacacctcaagacactgattctgaacggcaacaagctcgagaccctttcgcttgtatcctgctttgccaacaacacacccctggagcaccttgacctctcacagaatttactccagcataaaaacgacgaaaattgcagttggcccgaaactgtggtgaatatgaacctttcctacaataaactgagcgatagtgtctttcgctgtctccctaaatctatacaaatactcgatttgaacaataaccaaatccaaactgtgcccaaggagaccattcatctgatggctcttcgtgagctcaatattgcattcaattttcttacagacttgcccggttgtagtcacttctcacgcctgagtgtgctcaacattgaaatgaattttatcctgtctccttcactagatttcgtgcagtcctgccaggaagtaaaaactctgaatgccggacgaaaccctttcagatgcacttgcgagcttaaaaattttattcagctggaaacctattcagaggtaatgatggttggctggtctgattcttatacatgcgaataccccctcaaccttcgcggcaccagactgaaggacgtgcatctgcatgaattatcctgcaatactgccctcttaattgtgactatcgtcgtaataatgttagtcctgggactcgctgttgcattctgttgtttgcattttgacctcccatggtacctgcgcatgttaggtcagtgtactcagacgtggcaccgagtgagaaagacaacccaggagcagctcaagcgcaacgtcaggtttcatgcatttataagttactctgagcacgacagcctgtgggtcaagaatgagctgattcctaacctggagaaggaggatgggtccatcttaatttgtctgtatgagagctatttcgaccccgggaagagcatatctgaaaacattgtctcttttatcgagaagagttataaatccattttcgtgttgagcccaaactttgtccaaaatgagtggtgtcattatgagttttactttgctcaccacaacctgttccatgagaattctgaccacatcatcttgattctgctagaacccatcccgttctactgcataccaaccaggtatcacaagctgaaagccctgctggaaaagaaggcttatcttgagtggcctaaagatcggagaaagtgcggattgttctgggctaatcttcgcgccgctattaacgtgaacgtccttgcaactagagagatgtacgagctgcagacatttacagagttgaacgaagagtctcggggcagcacaatcagcctcatgagaacagattgtctgtag

SEQ ID NO: 302707 - DNA, 2436 bp, Artificial Sequence
  derived and/or modified sequence
atgaggctcatccggaacatctacatcttctgcagcatcgtgatgacagcagaaggagatgcccctgagctgcctgaggagcgggagctgatgaccaactgcagcaacatgagcctgaggaaggtgcctgctgacctgaccccagccaccaccaccctggacctgagctacaacctgctcttccagctgcagagcagtgacttccacagcgtgtccaagctgcgggtgctgatcctgtgccacaaccgcatccagcagctggacctgaagacctttgagttcaacaaggagctgcgctacctggacctgagcaacaaccggctgaagtctgtgacctggtacctgctggccggcctgcgctacctggacctgtccttcaatgactttgacaccatgcccatctgtgaggaggccggcaacatgagccacctggagatcctgggcctgagcggggccaagatccagaagagtgacttccagaagatcgcccacctgcacctgaacacagtgttcctgggcttccgcaccctgccccactatgaggagggcagcctgcccatcctgaacaccaccaagctgcacatcgtgctgcccatggacaccaacttctgggtgctgctgagagatggcatcaagaccagcaagatcctggagatgaccaacattgatggcaagagccagtttgtgtcctatgagatgcagaggaacctgagcctggagaatgccaagacctctgtgctgctgctgaacaaggtggacctgctgtgggatgacctcttcctgatcctgcagtttgtgtggcacacctctgtggagcacttccagatcagaaatgtgacctttggaggcaaggcctacctggaccacaacagctttgactacagcaacacagtgatgaggaccatcaagctggagcacgtgcacttccgggtcttctacatccagcaggacaagatctacctgctgctgaccaagatggacatcgagaacctgaccatcagcaatgcccagatgccccacatgctgttccccaactaccccaccaagttccagtacctgaactttgccaacaacatcctgacagatgagctgttcaagaggaccatccagctgccccacctgaagaccctcatcctgaatggaaacaagctggagaccctgagcctggtgtcctgctttgccaacaacacccccctggagcacctggacctgagccagaacctgctgcagcacaagaatgatgagaactgctcctggccagagaccgtggtgaacatgaacctgagctacaacaagctgagtgacagcgtcttccgctgcctgcccaagagcatccagatcctggacctgaacaacaaccagatccagacagtgcccaaggagaccatccacctgatggccctgcgggagctgaacatcgccttcaacttcctgacagacctgcccggctgcagccacttcagccggctgtctgtgctgaacatcgagatgaacttcatcctgagccccagcctggactttgtgcagagctgccaggaggtgaagaccctgaatgccggcaggaaccccttccgctgcacctgtgagctgaagaacttcatccagctggagacctacagcgaggtgatgatggtgggctggagcgacagctacacctgtgagtaccccctgaacctgcggggcacccggctgaaggatgtgcacctgcacgagctgagctgcaacacagccctgctgattgtgaccatcgtggtgatcatgctggtgctgggcctggccgtggccttctgctgcctgcactttgacctgccctggtacctgaggatgctgggccagtgcacccagacctggcaccgggtgaggaagaccacccaggagcagctgaagagaaatgtgcgcttccacgccttcatctcctacagcgagcatgacagcctgtgggtgaagaatgagctgatccccaacctggagaaggaggatggcagcatcctgatctgcctgtatgagagctactttgaccccgggaagagcatcagcgagaacatcgtgtccttcatcgagaagagctacaagagcatctttgtgctgagccccaactttgtgcagaatgagtggtgccactatgagttctactttgcccaccacaacctcttccacgagaacagcgaccacatcatcctgatcctgctggagcccatccccttctactgcatccccacccgctaccacaagctgaaggccctgctggagaagaaggcctacctggagtggcccaaggacagaagaaaatgtggcctcttctgggccaacctgcgggccgccatcaacgtgaatgtgctggccacccgggagatgtatgagctgcagaccttcacagagctgaatgaggagagccggggcagcaccatcagcctgatgaggacagactgcctgtag

SEQ ID NO: 302708 - DNA, 2436 bp, Artificial Sequence
  derived and/or modified sequence
atgcggctgatccggaacatctacatcttctgcagcatcgtgatgaccgcagagggggatgctcccgagttgcccgaggagcgcgaactgatgacgaactgctctaatatgagcttaaggaaagtccctgccgatcttaccccagctacaacaacactggacctttcttataacctcctcttccagctccagagtagcgacttccacagcgtgtccaaattgagggtgctgattctgtgccataaccgaattcagcagttggacctgaaaacttttgagtttaacaaggagttgcgctacctcgatttgagtaacaacaggctgaaatctgtcacctggtatttacttgctgggctgcggtatttggacctgtctttcaacgactttgataccatgcccatctgcgaggaagccggaaacatgtcccacctcgagatattgggactgtctggtgcgaaaattcaaaaaagtgacttccaaaagatcgcccatctgcatttaaacacagtttttctaggcttcagaactttgccgcactacgaggaggggtccctcccaatcctgaacaccacaaaactgcacattgtgcttcctatggataccaacttttgggtactactccgggatggaatcaaaacttctaagattctggagatgaccaatattgacggcaaatcccagttcgtaagctacgaaatgcagaggaatttaagcctggaaaacgctaagaccagcgtacttttgctgaacaaagtcgatctcctatgggatgatctgtttctgatcttgcagttcgtctggcacacctcagtggagcatttccagatccgaaacgttaccttcggtggaaaggcctatcttgatcacaactctttcgattacagtaacaccgtgatgaggacaataaagctggaacatgtccatttcagagtgttctacatccagcaggataagatctacctcctgctaacaaagatggacatcgaaaatttgacaatctctaacgcccagatgcctcatatgttattccccaactatcccactaaattccagtacctaaatttcgccaacaacatccttaccgatgagctgtttaaaagaactattcagctgccccatctgaagacgttgatccttaatggcaacaagctcgaaaccttgtcactggttagctgcttcgcaaataatactcccttagaacacttggacctttctcagaatctgttgcagcataagaatgatgagaactgcagttggcctgaaactgtcgtcaacatgaacctgtcttacaacaaactttccgactccgtcttcaggtgtctccccaagagcattcagatactggatctgaacaacaaccaaattcagaccgtgcccaaagaaacaatccacctgatggccctcagagaattaaacatcgccttcaattttctcactgatctgccgggatgttctcatttctctcgtctttctgttctgaacatagagatgaactttatcttatctccatctctggactttgtccagagttgtcaagaggtcaaaacactcaatgctgggaggaatccttttcgctgtacctgcgaacttaagaactttatccaactggagacatattcggaggtgatgatggtgggttggagcgatagttatacctgtgagtaccctctcaacctgagaggaactagattgaaagatgttcatctgcacgaactcagttgtaacaccgcactcttgatcgtcacaatcgttgtgatcatgcttgtattgggcctggctgtggctttctgctgcctgcacttcgacttgccgtggtacctcaggatgctgggccagtgtactcaaacttggcaccgcgtgcgtaaaacaacacaggagcaattaaaaagaaatgtgagattccacgcctttatctcttacagtgagcacgacagtctttgggttaagaatgaattgattccaaacttagaaaaagaagatgggtcaatcctgatatgtctgtacgaatcatattttgaccctggaaagtctatctccgaaaacatcgtctcattcattgaaaaaagctataaatctattttcgttctctctcccaactttgtgcagaacgaatggtgccactatgagttctatttcgcccaccacaatctgttccatgaaaatagtgaccacatcattcttatcttgttagaacccatccccttctactgcattcctacaaggtatcataagctcaaggccctgcttgagaaaaaggcatatctagagtggcccaaggacaggcggaagtgcgggttgttttgggccaacctccgcgctgctattaacgtgaacgtgcttgccacccgggagatgtatgaactccagacctttacagagctcaacgaagaaagcagggggtcaacaatttcccttatgaggacagactgcttgtag

SEQ ID NO: 302709 - DNA, 2436 bp, Artificial Sequence
  derived and/or modified sequence
atgcggctgatccggaacatctacatcttctgcagcatcgtgatgaccgccgagggcgacgcccctgaattacctgaggaacgggagctcatgacgaactgcagtaacatgagcctgcgcaaggtgccggcagatttaacccccgcgactacaacgctcgatcttagctacaacctgctcttccaactccagtcctccgattttcattcagtcagtaaattgcgggtgttgatcctctgccataaccgcattcaacaattggacctgaaaaccttcgagtttaacaaggaattacggtacttggacctctctaacaataggttgaagtctgtgacatggtacctgctggcgggtctgcgctatttagacttgtcatttaacgatttcgatactatgcctatttgtgaggaggcaggaaatatgtctcatctagagattctgggtctcagtggggctaagatccaaaagtccgatttccagaagatcgcccacctacacctgaatacggtgttcttgggcttcaggacgcttcctcactatgaagaaggcagcttaccaattttgaacactacaaagcttcatatcgttctgccaatggataccaacttctgggtgctgctgcgggatgggattaagacgagtaagattctcgaaatgactaatattgatggcaaatcccagttcgtctcctatgagatgcagagaaatctatcccttgagaatgcaaaaacctcagtccttcttctgaacaaggttgatctgctttgggacgatctctttctgatactacaattcgtgtggcatacctctgtagagcacttccagatccggaacgtgacctttggcggcaaggcctatctggaccataatagtttcgattacagcaacaccgtcatgcggaccatcaaactggagcacgtgcacttccgcgtgttttatattcaacaagataagatctacttgctactgactaagatggacatcgagaatctcactatctcaaatgctcagatgcctcacatgctgttcccaaattaccccacaaaatttcagtacctaaattttgccaataacatcttgaccgacgaattattcaagcggactattcagctgccccacctcaagactctcatacttaatggcaataagctggaaactttgtcactagtgtcatgctttgcgaacaatacccctttagaacatctcgatctgtctcagaatctcttgcaacacaagaatgatgaaaattgctcttggccagaaaccgtggtcaatatgaatttgagctacaataagctgtccgattctgtcttcaggtgcttgccaaagagcattcagattctggatctgaataacaatcagatacaaactgtccccaaggagaccatccatctcatggcccttagggagcttaacatcgcctttaacttcctcaccgatttgcctggatgttcccacttcagtcggctgtccgtgctcaacattgagatgaatttcattctgtcccctagtcttgactttgtccaaagctgtcaggaggtgaagacattgaatgcaggacgcaatccctttcgatgcacatgtgagctgaagaatttcatccagctggagacctattctgaagttatgatggtgggatggtcggactcctacacctgtgagtatcctcttaacctgagaggtacaagattgaaggacgtgcacctgcacgaactctcttgtaacacagcactccttattgtcaccatagtcgtgatcatgttggtccttggacttgccgtcgctttctgctgtttgcacttcgatctaccttggtacctgcgaatgctggggcagtgtacccaaacttggcaccgagtacgcaagactacccaggaacaattgaagcggaatgtgcgattccacgccttcattagctattccgaacacgactccttgtgggtcaaaaacgaactgatcccaaacctagaaaaagaagacggctccatcttaatttgtctgtacgaatcttacttcgatcccggaaaatccattagtgagaatatcgtgtctttcatcgaaaagagctacaagagtatcttcgtcttgtcgcccaattttgttcagaacgagtggtgccactacgagttttattttgctcatcacaacctcttccatgaaaattcagaccacatcattctcattttgctggagcctatacccttttattgtatccccaccagatatcacaaactgaaagccctgctagaaaaaaaagcctacttagagtggcccaaagatcggaggaagtgtgggttgttctgggccaacctcagggccgcaataaatgttaatgtgctcgccacacgcgaaatgtatgagctgcagacgttcactgagctcaatgaagagtcccgcggctccacaatttccctgatgagaacagattgcctatag

SEQ ID NO: 302710 - DNA, 2436 bp, Artificial Sequence
  derived and/or modified sequence
atgcggctgatccggaacatctacatcttctgcagcatcgtgatgaccgcagaaggagacgcccccgaacttcccgaggagagagaactgatgacaaattgttccaacatgtccctgagaaaagtgcctgctgacctgacgccagctaccactacgctggatctcagttataacctgctcttccagctgcagtcaagtgattttcactctgtcagtaagctacgagtgctgatcttgtgccataatcgtatacagcagttggacctaaagactttcgagttcaataaggaactgcgctacctggatctctctaataatcgcctcaagagtgtgacctggtacctcctggccggcctacgatacctggatctgtcatttaatgatttcgataccatgccgatttgcgaggaagcaggaaacatgagccatcttgagatattgggtctgagcggggctaaaatccagaaatcggacttccagaaaatcgcacacctacatcttaacacagtgttccttggattcaggaccctgcctcactatgaggagggctcactccctattctgaatacaacgaaattacatattgtcctgcccatggacacaaatttctgggttcttttgcgggatggcatcaagaccagcaagatccttgaaatgacaaacatagacggcaaaagtcagttcgttagctacgaaatgcagcggaacctgtccctggagaacgccaagacttctgtcctactgctaaataaagtggatctgctatgggatgaccttttcctgattctgcaatttgtttggcacacatcggtcgagcactttcagattcgtaacgtaaccttcggggggaaagcctatctggaccataattctttcgattattctaacaccgtgatgcggaccatcaagctcgagcacgttcacttccgcgtgttctacatccagcaagataaaatttacctcctgctgacaaaaatggatattgagaatctgaccatcagcaatgcacagatgcctcacatgctgttccctaactaccccaccaaattccagtacctcaatttcgcaaacaatatcctgaccgatgagttgtttaagcggaccattcagctgccccacctaaagaccttgatcttgaacggaaacaaactggagacgttatccctggtgagctgttttgccaacaacactccactcgagcacctcgatctgtcccagaatctgctgcagcataagaacgacgagaattgctcatggcctgaaaccgtcgtaaatatgaatctgagctataacaagctctccgactctgtctttaggtgcttacccaagtctatccagattctagacctcaacaataaccaaattcagactgtgcctaaggagacgatccacttgatggctctgagggaactgaacatcgctttcaatttcttgaccgacctacctggctgcagccacttcagcagactaagtgtcctcaacatagaaatgaacttcatcctgtctcccagtctggactttgtgcagtcttgccaggaagttaagacactgaatgccgggcgaaaccctttcagatgtacctgcgagctgaaaaacttcatccagctcgagacatacagcgaagttatgatggtgggttggagcgactcctacacctgcgagtacccacttaacttgcggggaactcggttgaaagacgtccaccttcacgagctttcatgcaacacagccctcctgatcgttacgattgtcgttatcatgctggtactcggattggccgtggccttctgctgcttacatttcgatctgccttggtatctccgaatgctaggacagtgcactcagacctggcatagggttaggaagaccacccaggagcagctgaaacgaaatgtccggttccacgccttcatcagctattctgagcatgactcactctgggttaaaaatgaattaatcccgaatttggagaaggaagatgggtctattctcatttgcttgtacgaaagttacttcgatcccggaaagtcaatctcagaaaacatcgtgagctttattgaaaaaagctacaaatcaatttttgtgctgagtcccaatttcgtgcagaatgagtggtgtcactacgagttttactttgcccatcacaatctgttccatgagaattcggaccacattatactaatcctgctggagcccatcccattctactgcattccaaccagataccacaagctgaaggccctgctcgagaagaaagcctatcttgagtggccaaaggatcgaaggaaatgcgggctcttttgggccaatctccgagccgccatcaatgtcaatgttctggcgacccgtgagatgtatgagctccagacattcaccgaactgaacgaggagagtcgtggatccactatcagccttatgcgtactgattgtctgtag

SEQ ID NO: 302711 - DNA, 2436 bp, Artificial Sequence
  derived and/or modified sequence
atgcggctgatccggaacatctacatcttctgcagcatcgtgatgacagcggagggcgacgcacccgagctgcctgaagagagagagctgatgactaactgctccaacatgagtctgcgaaaagttcctgccgatctaaccccagctacaaccaccctcgacttaagctacaacttgctgttccaattacaaagctccgacttccatagtgtgtcaaaattgagagtgctgatcctatgccataaccggatccagcagcttgacttaaagacttttgaatttaacaaagagttgcggtacctcgacttaagcaataatcgcctgaaaagcgttacgtggtacctcctggccgggcttagatatctggatctgagtttcaacgactttgacaccatgcccatctgcgaggaggctgggaacatgtcacacctagagatcctgggtcttagtggggcaaaaattcaaaaatctgacttccaaaaaattgctcatctccacctaaatacagtgttccttggttttcgaaccctgccacactatgaagagggctcccttcccattcttaatacaaccaagctgcatatcgtcctgcccatggacacaaacttttgggtccttctgcgggacgggatcaaaacaagtaaaatcttggagatgactaacatcgatggcaagtcacagtttgtgtcctatgaaatgcagcgcaatctgtctcttgagaatgctaagacttcagtccttctgctgaacaaggtggatctgttatgggatgaccttttcctgattctccagttcgtctggcatacctctgtcgagcatttccaaatacggaatgttacattcggcggcaaagcatatctggaccataactcattcgactactctaacactgtgatgaggaccattaaactagagcacgtgcacttcagggtgttctatatccagcaggacaaaatctacctgcttctgactaagatggatatcgaaaatctcacaatcagcaacgcccagatgccccacatgctatttcctaattatcctaccaaatttcagtatcttaattttgcaaacaacatactgacagacgagctgttcaagaggacgatacaattgccgcaccttaagaccctgatccttaacgggaataaactcgagacacttagcttagtctcttgcttcgccaacaacacacctctcgaacatctggacctctctcagaatctgctgcagcacaagaacgacgagaactgtagctggccagaaactgttgtgaatatgaatctctcatacaataaattatctgactccgtctttcggtgcctgccgaagagcattcagattcttgatctgaacaacaaccaaattcaaacagtgcccaaggaaaccattcatcttatggccctgagagagcttaacatcgcgttcaactttctgactgacctgccagggtgcagtcacttctccagattgagtgtgctgaacatcgagatgaacttcatcctgtccccgagtttggactttgtccagtcatgtcaggaggtaaaaacactgaacgcagggaggaaccccttccgttgcacatgcgagctcaaaaattttatccagttagaaacttattcagaggtcatgatggtgggctggagtgattcgtacacctgtgaatatccccttaacctcagaggaactagactgaaagatgtccatctgcacgagctttcatgtaatactgctttacttatcgtaactattgttgtaattatgcttgttcttgggctagctgttgcgttttgctgtctccactttgacctgccttggtatctcagaatgctaggacagtgtacccaaacttggcaccgggttcgaaagactacccaggagcagctgaagaggaacgtgcgattccacgccttcatctcatactccgagcacgattcactctgggtgaaaaacgaacttatcccaaacctggagaaggaagacggcagcatactcatttgcctatacgagtcatacttcgaccccggaaagtccatttctgaaaatatcgtgagctttatcgaaaagagctacaagagtattttcgtactgagcccaaattttgtgcagaacgagtggtgccactacgaattctacttcgcacaccacaatctattccatgagaacagtgaccacattattctgatactgctcgagcctattcccttctactgtattcccacgagataccacaagctgaaagccctgctggagaagaaggcctatctagagtggcccaaagaccgaaggaaatgcggtttattctgggcgaatctgcgcgccgcaataaacgtgaacgtgctcgccacgcgagaaatgtatgagcttcagacatttacagagctgaatgaagaatcacgcggcagcaccatcagtcttatgagaacagactgcttgtag

SEQ ID NO: 302712 - DNA, 2436 bp, Artificial Sequence
  derived and/or modified sequence
atgaggctgataagaaatatttatatattctgcagtatagttatgactgccgagggagacgctcccgagttacctgaggagcgcgaattaatgacaaactgttcgaacatgtctctgaggaaggtacctgctgacttaacaccggctacgacaacactggacctcagttacaacctcttgtttcaactgcagtcctctgatttccattcagtaagcaagctccgcgtcctgattttgtgtcacaatcgcattcagcaattggacctcaaaaccttcgagttcaataaagaattgcgatatctagatttatctaacaaccgtctgaaatccgtcacttggtaccttttggccggtctgcgctaccttgatctgtccttcaatgattttgacactatgccaatttgcgaggaggccggtaatatgtctcatctcgagattttgggtcttagtggggctaagatccaaaaaagtgacttccaaaagatcgcacacctgcacctgaacactgtgtttcttgggtttcggactctgccccactatgaagaaggctctctccccattctgaatacgaccaagctccacatcgtactgcccatggatacgaatttctgggtcctgttgcgcgacggtattaaaacatctaagatcctggagatgacaaacatcgacgggaagtctcaatttgtttcatacgaaatgcagcgcaatttgagtctcgagaatgcaaaaacgtcagtgctactcctgaataaagtggacttgctttgggatgatctatttctaatattacagtttgtttggcacacctccgtggaacatttccagatccggaatgtgacgttcggtggcaaagcgtacctcgaccataactccttcgattatagtaatactgtaatgaggacgattaagttggagcatgtccactttagagtcttttacattcagcaggataaaatctacctactcctgacaaaaatggatatcgaaaacctgacaattagtaatgcacaaatgcctcatatgctgttcccgaattatccgacaaaatttcagtacctgaatttcgccaataatatcctcacagatgaactgtttaaacggactatccagctgccacatctcaaaaccctcattctgaacggcaataaattggagacgctcagtctcgtcagctgcttcgccaacaacacccctctggaacacctggatttatctcaaaacttgctgcagcacaaaaatgatgagaactgctcttggccggaaacagtggttaacatgaacttgtcctataacaagttgtccgactctgtctttcggtgtcttcctaagtcaatccagattctcgaccttaacaacaatcagattcagacagtgcccaaggagactattcacctgatggccctcagagagctgaacattgctttcaatttcctgacggacctgcccggttgttctcatttttcccgtctgagcgtcttgaacattgagatgaatttcattctgtccccgtccctggattttgttcagagttgtcaggaagtgaagaccctgaatgctggcagaaacccgttcagatgtacctgtgagctgaaaaacttcatccaattggagacgtacagcgaagtgatgatggtgggctggtccgatagttacacatgcgagtatccgctcaacttaagaggcacccgcttaaaggatgtccacttgcatgaactgtcctgtaataccgctctcctcatcgttacaatcgtcgtcatcatgctggtgttagggctcgccgtggcattctgttgtctgcactttgacctcccatggtatttgcggatgttagggcagtgcacccaaacctggcacagagtcaggaagacaacccaggagcagctcaaaaggaacgttagatttcacgcattcatctcttacagcgagcacgactcactttgggtgaaaaacgaacttatcccgaaccttgaaaaagaagacgggtccattctaatatgtctgtacgagagctactttgatccgggaaagtctatttccgagaatatcgtctccttcattgaaaagtcatacaaatcgatttttgtcctctctccaaatttcgtacagaacgagtggtgtcactacgagttttactttgctcaccataacctattccatgagaactctgatcacataatcctgattctgctcgaaccaatccctttttattgcatcccaactagatatcataaactgaaggctctgctggagaagaaggcctatttggagtggcccaaggatcggcgaaaatgcggcctgttctgggccaacctgagggcagccatcaatgtgaacgtcctggccacaagggagatgtatgagctgcagacttttactgagctgaacgaagaaagtcggggtagcaccatcagcctgatgaggaccgattgtctgtag

SEQ ID NO: 302713 - DNA, 2436 bp, Artificial Sequence
  derived and/or modified sequence
atgaggcttatccggaacatctacatcttctgttctatcgtgatgactgccgagggcgatgctcctgaattgccggaggaacgggagctgatgactaattgtagtaatatgtctttgagaaaagtccctgccgatttgactcctgccactaccacgctggatctcagctataatttgctatttcaactgcagtccagtgatttccatagtgtctcgaaactccgcgtgctgattctttgccacaacaggatacaacagctcgacctgaaaacgttcgaatttaacaaagagctcagatacctggacctatctaacaatagacttaagtctgtaacctggtatttgctggctggactgaggtatctcgacctgtcattcaacgactttgacactatgcctatctgcgaagaggccggaaacatgagccaccttgagattctcggactgtctggcgcaaaaatccagaaatccgattttcagaagattgcgcacctccatctgaacactgtctttctggggttccgcacgttaccacactatgaagaaggttcactgcctattctgaatacaacgaagctgcatattgtgttgcctatggatacaaacttctgggtgttgctgcgcgatggcatcaagacatcaaaaatcctggagatgactaacatcgatggaaaatcacaattcgtcagctacgaaatgcaacggaatctctcactggaaaatgcaaagacatccgtcttgctgcttaacaaggtcgacctgctctgggatgacttgttcctgattctgcaatttgtttggcacacctctgttgaacactttcagattcggaatgtcacctttggcggaaaggcttacttggatcacaactcttttgattattccaacacggtgatgaggaccattaagctcgaacatgtgcatttccgggttttctacatccagcaggacaagatctatttactcctcactaagatggacattgagaacctgaccatttctaacgctcagatgccacacatgttgtttccaaattatcccacaaaattccagtatctgaacttcgcaaataacatcctcaccgacgagctgttcaagagaaccatccagttaccgcacctcaagactttaatacttaatgggaataagctcgaaaccctgagcctggtttcatgctttgcaaataacacgcccctagagcacctcgatctgagccaaaatctgctccaacataaaaacgacgagaattgctcttggcctgagaccgtcgttaatatgaacctcagctataacaagctgagcgatagtgtctttcgatgcctgcctaaaagcatccagattctagacctaaataacaatcagatccagacggtgccaaaggagacgattcacctcatggcattacgagaactcaacattgctttcaatttcttaacagatctgcctggatgtagtcacttttcccgtctttccgtgttgaatattgagatgaattttattctgtcgccgagcctagactttgtgcaatcttgtcaggaagtgaagacactgaacgctggtcggaatcccttccggtgcacatgtgaactcaagaatttcattcagctcgaaacctacagcgaggtaatgatggtggggtggagcgatagttacacctgcgagtaccccttgaacctgcggggaaccaggctgaaggacgtacatctgcatgaactttcatgcaataccgcactactaattgtcacaattgtggttataatgctggtactcgggcttgcagttgcattctgctgcctgcactttgaccttccctggtacctgcgaatgctcgggcaatgtacacagacttggcaccgcgtccggaagacgacacaggaacagctgaagcgtaacgtccgtttccacgctttcatatcatacagcgagcatgacagtctgtgggtaaagaatgaactgattcccaacttggagaaagaagacggcagcatcctaatctgcctgtacgaatcctattttgacccaggcaaaagcatttctgaaaacatagtatcttttatagaaaagtcctacaaatccattttcgttttgtcccccaatttcgtgcagaacgaatggtgtcattatgaattctacttcgctcaccacaatctgtttcatgaaaattctgaccatatcatcctgatcctgctggagcccattcctttttactgtattcctaccaggtatcacaagctgaaagcactcctagagaagaaggcatatctggagtggcctaaggatcgcaggaagtgtggattgttttgggcaaacctgcgggcagctattaacgtgaatgtccttgccactcgagagatgtatgaactgcagacctttaccgaactgaacgaagagtcccggggatccactatctcactaatgaggactgattgcttgtag

SEQ ID NO: 302714 - DNA, 2436 bp, Artificial Sequence
  derived and/or modified sequence
atgcgcctcattcgcaatatctatattttttgctccatagtgatgactgctgagggcgatgctcccgagcttccagaggaacgggagctgatgaccaattgctccaatatgtcactgcgcaaggtgccagcggatctgacaccggctactactacactcgacctgtcatataatttgttatttcagctgcaaagcagtgacttccactccgtaagcaaactgagagtgttaattctgtgtcataacaggatccaacagctggatctgaaaacgttcgaatttaacaaagagctgaggtacctggatctgagcaataaccggctgaagagtgttacctggtatctcctagccggactgcggtatctggacttgagtttcaatgatttcgacacgatgcctatctgtgaggaggctggcaatatgtcacacctggagatcctgggcctttcgggcgctaaaatccagaagtctgatttccaaaaaattgctcatctgcacctcaacacagtgtttctcggctttaggacactcccgcactatgaagagggctctctgcccatactcaataccactaagctacacattgtcctcccaatggataccaatttttgggttttgctgagagatggtattaagacatctaagattttagaaatgacaaacattgatggaaagtctcagtttgtgagttacgaaatgcaacgaaacctgtccctggagaatgctaagacatccgtgttgttacttaacaaagtggacctgctgtgggacgacctttttctgattttgcagtttgtttggcatacttctgtggaacactttcagatacgaaacgtgacatttggaggaaaggcgtacctggaccacaactctttcgactacagcaataccgtgatgaggacaatcaaactggagcatgttcacttccgggttttctacatccagcaggataaaatttacctcttgctcaccaagatggacatcgagaacctgaccatttctaacgctcaaatgccccatatgctgttccccaattacccaaccaagttccaatacctcaatttcgcaaacaatatcctgacggatgagctgtttaaaaggacaatccagttgccacacctcaagacactgatcctgaacggaaacaaacttgagaccctctcacttgtctcatgttttgccaataataccccactggagcacctggacctgtctcagaacctactgcaacacaagaatgacgaaaattgtagttggcctgagacggtagtgaatatgaacctgagctacaataagttgtcagactcagtctttagatgcctaccaaaatccattcaaattctggacctgaacaacaaccaaatacagaccgtgccaaaggaaaccattcacctgatggctcttcgcgagcttaacatcgcctttaattttctcaccgatctgccgggatgcagtcacttcagcaggctgtctgtactaaacatcgaaatgaattttatcctgtcccccagccttgattttgtgcagagttgtcaagaggtgaaaacactcaacgccggtaggaatccctttcgctgcacctgcgagttaaagaactttattcaattggaaacatacagcgaggtcatgatggtgggatggtcagattcatatacctgcgagtacccactgaatctgcgcggaacccggctcaaagatgttcaccttcatgagcttagttgtaatactgctttactgatagtcactattgtcgtgattatgttagtgctgggcctcgccgtggctttctgctgccttcacttcgatctcccctggtatctccggatgctgggccagtgcacccagacttggcacagagtcagaaagaccactcaggagcagctgaagcgcaacgtgcggttccacgcctttatatcgtacagcgagcacgattccctctgggtgaagaatgagctaatcccgaacttagaaaaagaggacggaagtatactgatttgcttgtacgaaagctactttgatcccggaaagagtatctccgagaacattgttagtttcatcgagaagtcatataaatcaatatttgttttgtctcccaattttgtccaaaacgaatggtgtcactatgaattttacttcgctcaccataatctgttccacgaaaacagtgaccatatcatcctcatcctgctagagcctattccgttctattgtatacccacacgctatcataagctaaaggcccttctagagaagaaggcttatctggagtggcccaaagaccgccgaaagtgtggtttgttctgggccaacttgcgagccgctattaatgtgaacgtcctggcaaccagagaaatgtacgaattgcagacctttactgagctgaacgaggaatcccggggaagcacaatcagcttgatgcggacggactgtttatag

SEQ ID NO: 302715 - DNA, 2436 bp, Artificial Sequence
  derived and/or modified sequence
atgaggctcatccgcaatatctacattttctgttcgattgtgatgaccgctgagggggatgcccctgagctacccgaggaacgagaactgatgacgaattgcagtaacatgtccctcaggaaggtccccgctgacctgacgcctgcaacgaccacgttagacctgtcgtacaacctcctgttccagctgcagtcgtctgactttcactctgtctccaagctgcgcgtgcttatcctttgtcataacagaatacagcaattggacctgaagacctttgagttcaacaaagagctcagatacctggatctgagtaataatcgactcaaatcggtgacctggtatctgctcgcagggctccggtacctggacctgtctttcaacgacttcgacacgatgccaatctgcgaggaagccggtaatatgtctcatctcgaaattctaggtctgagcggtgccaagatccagaagtctgattttcagaaaatcgcacatctccacctgaatacggtttttcttggcttccggactctccctcactatgaagagggatctctgcctatccttaacaccaccaagcttcacattgtgctgccaatggatacgaacttctgggtgctcttgcgggatggaataaaaacatccaaaatcctggaaatgacgaacatcgatggaaaaagccaatttgttagctacgagatgcagcggaatctttctctggaaaacgccaagacaagcgtgctcctgttgaataaagtggatctcctgtgggacgatttgttccttatactgcaattcgtgtggcatactagtgtggaacatttccagatacggaatgtgacattcggagggaaagcgtatctcgaccacaactctttcgactattctaacacagtgatgaggactatcaaactggaacacgttcattttagagtgttctatatccagcaagacaaaatctatctgctcttgactaagatggatatcgaaaatttaacaataagcaatgcccagatgcctcacatgctcttccccaattacccaacaaaattccagtatctcaactttgctaataatatcttgaccgatgaactgttcaaacgtactatccagttgccgcaccttaaaacgctaatcctgaatgggaacaagctcgaaacactgtcccttgtgtcatgcttcgccaataacacgcccctggaacatctcgatctgagccagaatctgttgcagcataagaacgacgaaaactgttcttggcccgagacagtggtgaacatgaatttgtcatataataaactcagcgattctgtcttcaggtgcctgccgaagtccatccaaattctggatcttaacaacaatcagatacagacggtgcctaaggagactatccaccttatggcgctccgcgagctaaacatagccttcaatttcctgaccgatctcccaggctgttcccatttctcccgactatcagttctgaacatcgagatgaactttatcttgtcaccgtctctcgactttgtccaatcatgtcaagaagtgaagaccttaaacgcgggtaggaaccctttccgttgtacgtgcgagctgaaaaacttcattcaactggagacttatagcgaggtgatgatggtgggctggtccgactcctacacttgcgagtatccattgaatctcagaggaacgcgccttaaggacgtgcatctgcatgaattgtcctgcaataccgcactacttatcgtaactatagtggtgataatgcttgtgctgggcctggctgtggccttctgctgcctgcacttcgatctcccttggtacctgagaatgctgggtcaatgtacccagacgtggcatcgggttcggaagacgacacaggaacagcttaaacgaaatgttaggttccatgcttttatcagttattccgaacatgactcactgtgggtgaagaatgaactcatcccgaaccttgagaaggaagatggcagtattctgatctgcctgtatgaatcctactttgacccgggaaaatccatcagtgagaatattgtctccttcatcgaaaagtcctataagtctatcttcgttcttagtccgaacttcgttcagaacgaatggtgccactatgaattctacttcgctcaccacaatctcttccacgaaaacagtgaccacatcatcctaatcctcctggagccaattcccttttactgtatacctacccggtaccacaagctcaaagctcttctcgaaaaaaaggcgtacttagagtggccaaaagatcgtcgaaaatgtgggctattctgggccaatctgcgagcggcaattaacgtgaacgttctggccacccgcgagatgtacgagctgcagacatttaccgaattgaatgaggagagtagaggttccacaatcagccttatgagaacagattgcttatag

SEQ ID NO: 302716 - DNA, 3958 bp, Artificial Sequence
  derived and/or modified sequence
cgcacctgcagctctgctgagagagtgcaagccgtgggaattcagcagctgaatatcaagacctttgaattcaacaagaagttaagacatttatagttgtctaacaacagactgaagattgtggcttggtattcactggcaggtttcagacatttagatctttcttttaatgactaacaccatgcctatctgtggagaagctggcaacatgtcacacctggaaattgtttttcaacattaatactattatttggcagtaatccagattgcttttgccaccaacctgaagacatatagaggcagaaggacaggaataattctatttgtttcctgttttgaaacttccatctgtaaggctatcaaaaggagatgtgagagagggtattgagtctggcctgacaatgcagttcttaaaccaaaggtccattatgcttctcctctctgagaatcctgacttacctcaacaacggagacatggcacagtagccagcttggagacttctcagccaatgctctgagatcaagtcgaagacccaatatacagggttttgagctcatcttcatcattcatatgaggaaataagtggtaaaatccttggaaatacaatgagactcatcagaaacatttacatattttgtagtattgttatgacagcagagggtgatgctccagagctgccagaagaaagggaactgatgaccaactgctccaacatgtctctaagaaaggttcccgcagacttgaccccagccacaacgacactggatttatcctataacctcctttttcaactccagagttcagattttcattctgtctccaaactgagagttttgattctatgccataacagaattcaacagctggatctcaaaacctttgaattcaacaaggagttaagatatttagatttgtctaataacagactgaagagtgtaacttggtatttactggcaggtctcaggtatttagatctttcttttaatgactttgacaccatgcctatctgtgaggaagctggcaacatgtcacacctggaaatcctaggtttgagtggggcaaaaatacaaaaatcagatttccagaaaattgctcatctgcatctaaatactgtcttcttaggattcagaactcttcctcattatgaagaaggtagcctgcccatcttaaacacaacaaaactgcacattgttttaccaatggacacaaatttctgggttcttttgcgtgatggaatcaagacttcaaaaatattagaaatgacaaatatagatggcaaaagccaatttgtaagttatgaaatgcaacgaaatcttagtttagaaaatgctaagacatcggttctattgcttaataaagttgatttactctgggacgaccttttccttatcttacaatttgtttggcatacatcagtggaacactttcagatccgaaatgtgacttttggtggtaaggcttatcttgaccacaattcatttgactactcaaatactgtaatgagaactataaaattggagcatgtacatttcagagtgttttacattcaacaggataaaatctatttgcttttgaccaaaatggacatagaaaacctgacaatatcaaatgcacaaatgccacacatgcttttcccgaattatcctacgaaattccaatatttaaattttgccaataatatcttaacagacgagttgtttaaaagaactatccaactgcctcacttgaaaactctcattttgaatggcaataaactggagacactttctttagtaagttgctttgctaacaacacacccttggaacacttggatctgagtcaaaatctattacaacataaaaatgatgaaaattgctcatggccagaaactgtggtcaatatgaatctgtcatacaataaattgtctgattctgtcttcaggtgcttgcccaaaagtattcaaatacttgacctaaataataaccaaatccaaactgtacctaaagagactattcatctgatggccttacgagaactaaatattgcatttaattttctaactgatctccctggatgcagtcatttcagtagactttcagttctgaacattgaaatgaacttcattctcagcccatctctggattttgttcagagctgccaggaagttaaaactctaaatgcgggaagaaatccattccggtgtacctgtgaattaaaaaatttcattcagcttgaaacatattcagaggtcatgatggttggatggtcagattcatacacctgtgaataccctttaaacctaaggggaactaggttaaaagacgttcatctccacgaattatcttgcaacacagctctgttgattgtcaccattgtggttattatgctagttctggggttggctgtggccttctgctgtctccactttgatctgccctggtatctcaggatgctaggtcaatgcacacaaacatggcacagggttaggaaaacaacccaagaacaactcaagagaaatgtccgattccacgcatttatttcatacagtgaacatgattctctgtgggtgaagaatgaattgatccccaatctagagaaggaagatggttctatcttgatttgcctttatgaaagctactttgaccctggcaaaagcattagtgaaaatattgtaagcttcattgagaaaagctataagtccatctttgttttgtctcccaactttgtccagaatgagtggtgccattatgaattctactttgcccaccacaatctcttccatgaaaattctgatcatataattcttatcttactggaacccattccattctattgcattcccaccaggtatcataaactgaaagctctcctggaaaaaaaagcatacttggaatggcccaaggataggcgtaaatgtgggcttttctgggcaaaccttcgagctgctattaatgttaatgtattagccaccagagaaatgtatgaactgcagacattcacagagttaaatgaagagtctcgaggttctacaatctctctgatgagaacagattgtctataaaatcccacagtccttgggaagttggggaccacatacactgttgggatgtacattgatacaacctttatgatggcaatttgacaatatttattaaaataaaaaatggttattcccttcatatcagtttctagaaggatttctaagaatgtatcctatagaaacaccttcacaagtttataagggcttatggaaaaaggtgttcatcccaggattgtttataatcatgaaaaatgtggccaggtgcagtggctcactcttgtaatcccagcactatgggaggccaaggtgggtgacccacgaggtcaagagatggagaccatcctggccaacatggtgaaaccctgtctctactaaaaatacaaaaattagctgggcgtgatggtgcacgcctgtagtcccagctacttgggaggctgaggcaggagaatcgcttgaacccgggaggtggcagttgcagtgagctgagatcgagccactgcactccagcctggtgacagagcgagactccatctcaaaaaaaagaaaaaaaaaaaagaaaaaaatggaaaacatcctcatggccacaaaataaggtctaattcaataaattatagtacattaatgtaatataatattacatgccactaaaaagaataaggtagctgtatatttcctggtatggaaaaaacatattaatatgttataaactattaggttggtgcaaaactaattgtggtttttgccattgaaatggcattgaaataaaagtgtaaagaaatctataccagatgtagtaacagtggtttgggtctgggaggttggattacagggagcatttgatttctatgttgtgtatttctataatgtttgaattgtttagaatgaatctgtatttcttttataagtagaaaaaaaataaagatagtttttacagcct

SEQ ID NO: 302717 - DNA, 3059 bp, Artificial Sequence
  derived and/or modified sequence
gaatcatccacgcacctgcagctctgctgagagagtgcaagccgtgggggttttgagctcatcttcatcattcatatgaggaaataagtggtaaaatccttggaaatacaatgagactcatcagaaacatttacatattttgtagtattgttatgacagcagagggtgatgctccagagctgccagaagaaagggaactgatgaccaactgctccaacatgtctctaagaaaggttcccgcagacttgaccccagccacaacgacactggatttatcctataacctcctttttcaactccagagttcagattttcattctgtctccaaactgagagttttgattctatgccataacagaattcaacagctggatctcaaaacctttgaattcaacaaggagttaagatatttagatttgtctaataacagactgaagagtgtaacttggtatttactggcaggtctcaggtatttagatctttcttttaatgactttgacaccatgcctatctgtgaggaagctggcaacatgtcacacctggaaatcctaggtttgagtggggcaaaaatacaaaaatcagatttccagaaaattgctcatctgcatctaaatactgtcttcttaggattcagaactcttcctcattatgaagaaggtagcctgcccatcttaaacacaacaaaactgcacattgttttaccaatggacacaaatttctgggttcttttgcgtgatggaatcaagacttcaaaaatattagaaatgacaaatatagatggcaaaagccaatttgtaagttatgaaatgcaacgaaatcttagtttagaaaatgctaagacatcggttctattgcttaataaagttgatttactctgggacgaccttttccttatcttacaatttgtttggcatacatcagtggaacactttcagatccgaaatgtgacttttggtggtaaggcttatcttgaccacaattcatttgactactcaaatactgtaatgagaactataaaattggagcatgtacatttcagagtgttttacattcaacaggataaaatctatttgcttttgaccaaaatggacatagaaaacctgacaatatcaaatgcacaaatgccacacatgcttttcccgaattatcctacgaaattccaatatttaaattttgccaataatatcttaacagacgagttgtttaaaagaactatccaactgcctcacttgaaaactctcattttgaatggcaataaactggagacactttctttagtaagttgctttgctaacaacacacccttggaacacttggatctgagtcaaaatctattacaacataaaaatgatgaaaattgctcatggccagaaactgtggtcaatatgaatctgtcatacaataaattgtctgattctgtcttcaggtgcttgcccaaaagtattcaaatacttgacctaaataataaccaaatccaaactgtacctaaagagactattcatctgatggccttacgagaactaaatattgcatttaattttctaactgatctccctggatgcagtcatttcagtagactttcagttctgaacattgaaatgaacttcattctcagcccatctctggattttgttcagagctgccaggaagttaaaactctaaatgcgggaagaaatccattccggtgtacctgtgaattaaaaaatttcattcagcttgaaacatattcagaggtcatgatggttggatggtcagattcatacacctgtgaataccctttaaacctaaggggaactaggttaaaagacgttcatctccacgaattatcttgcaacacagctctgttgattgtcaccattgtggttattatgctagttctggggttggctgtggccttctgctgtctccactttgatctgccctggtatctcaggatgctaggtcaatgcacacaaacatggcacagggttaggaaaacaacccaagaacaactcaagagaaatgtccgattccacgcatttatttcatacagtgaacatgattctctgtgggtgaagaatgaattgatccccaatctagagaaggaagatggttctatcttgatttgcctttatgaaagctactttgaccctggcaaaagcattagtgaaaatattgtaagcttcattgagaaaagctataagtccatctttgttttgtctcccaactttgtccagaatgagtggtgccattatgaattctactttgcccaccacaatctcttccatgaaaattctgatcatataattcttatcttactggaacccattccattctattgcattcccaccaggtatcataaactgaaagctctcctggaaaaaaaagcatacttggaatggcccaaggataggcgtaaatgtgggcttttctgggcaaaccttcgagctgctattaatgttaatgtattagccaccagagaaatgtatgaactgcagacattcacagagttaaatgaagagtctcgaggttctacaatctctctgatgagaacagattgtctataaaatcccacagtccttgggaagttggggaccacatacactgttgggatgtacattgatacaacctttatgatggcaatttgacaatatttattaaaataaaaaatggttattcccttcatatcagtttctagaaggatttctaagaatgtatcctatagaaacaccttcacaagtttataagggcttatggaaaaaggtgttcatcccaggattgtttataatcatgaaaaatgtggccaggtgcagtggctcactcttgtaatcccagcactatgggaggccaaggtgggtgacccacgaggtcaagagatggagaccatcctggccaacatggtgaaaccctgtctctactaaaaatacaaaaattagctgggcgtgatggtgcacgcctgtagtcccagctacttgggaggctgaggcaggagaatcgcttgaacccgggaggtggcagttgcagtgagctgagatcgagccactgcactccagcctggtgacagagcgagactccatctc

SEQ ID NO: 302718 - DNA, 3462 bp, Artificial Sequence
  derived and/or modified sequence
gcttttgccaccaacctgaagacatatagaggcagaaggacaggaataattctatttgtttcctgttttgaaacttccatctgtaaggtaagtgttgaaagtcagatattggctccagggactttctatatccacaaatacaaaaattgaggggtaactccttgatatcaagtcaaaggctcacaatgtctggtaataaaacaaattactttcaattttcttgaaatcttcaggctatcaaaaggagatgtgagagagggtattgagtctggcctgacaatgcagttcttaaaccaaaggtccattatgcttctcctctctgagaatcctgacttacctcaacaacggagacatggcacagtagccagcttggagacttctcagccaatgctctgagatcaagtcgaagacccaatatacagggttttgagctcatcttcatcattcatatgaggaaataagtggtaaaatccttggaaatacaatgagactcatcagaaacatttacatattttgtagtattgttatgacagcagagggtgatgctccagagctgccagaagaaagggaactgatgaccaactgctccaacatgtctctaagaaaggttcccgcagacttgaccccagccacaacgacactggatttatcctataacctcctttttcaactccagagttcagattttcattctgtctccaaactgagagttttgattctatgccataacagaattcaacagctggatctcaaaacctttgaattcaacaaggagttaagatatttagatttgtctaataacagactgaagagtgtaacttggtatttactggcaggtctcaggtatttagatctttcttttaatgactttgacaccatgcctatctgtgaggaagctggcaacatgtcacacctggaaatcctaggtttgagtggggcaaaaatacaaaaatcagatttccagaaaattgctcatctgcatctaaatactgtcttcttaggattcagaactcttcctcattatgaagaaggtagcctgcccatcttaaacacaacaaaactgcacattgttttaccaatggacacaaatttctgggttcttttgcgtgatggaatcaagacttcaaaaatattagaaatgacaaatatagatggcaaaagccaatttgtaagttatgaaatgcaacgaaatcttagtttagaaaatgctaagacatcggttctattgcttaataaagttgatttactctgggacgaccttttccttatcttacaatttgtttggcatacatcagtggaacactttcagatccgaaatgtgacttttggtggtaaggcttatcttgaccacaattcatttgactactcaaatactgtaatgagaactataaaattggagcatgtacatttcagagtgttttacattcaacaggataaaatctatttgcttttgaccaaaatggacatagaaaacctgacaatatcaaatgcacaaatgccacacatgcttttcccgaattatcctacgaaattccaatatttaaattttgccaataatatcttaacagacgagttgtttaaaagaactatccaactgcctcacttgaaaactctcattttgaatggcaataaactggagacactttctttagtaagttgctttgctaacaacacacccttggaacacttggatctgagtcaaaatctattacaacataaaaatgatgaaaattgctcatggccagaaactgtggtcaatatgaatctgtcatacaataaattgtctgattctgtcttcaggtgcttgcccaaaagtattcaaatacttgacctaaataataaccaaatccaaactgtacctaaagagactattcatctgatggccttacgagaactaaatattgcatttaattttctaactgatctccctggatgcagtcatttcagtagactttcagttctgaacattgaaatgaacttcattctcagcccatctctggattttgttcagagctgccaggaagttaaaactctaaatgcgggaagaaatccattccggtgtacctgtgaattaaaaaatttcattcagcttgaaacatattcagaggtcatgatggttggatggtcagattcatacacctgtgaataccctttaaacctaaggggaactaggttaaaagacgttcatctccacgaattatcttgcaacacagctctgttgattgtcaccattgtggttattatgctagttctggggttggctgtggccttctgctgtctccactttgatctgccctggtatctcaggatgctaggtcaatgcacacaaacatggcacagggttaggaaaacaacccaagaacaactcaagagaaatgtccgattccacgcatttatttcatacagtgaacatgattctctgtgggtgaagaatgaattgatccccaatctagagaaggaagatggttctatcttgatttgcctttatgaaagctactttgaccctggcaaaagcattagtgaaaatattgtaagcttcattgagaaaagctataagtccatctttgttttgtctcccaactttgtccagaatgagtggtgccattatgaattctactttgcccaccacaatctcttccatgaaaattctgatcatataattcttatcttactggaacccattccattctattgcattcccaccaggtatcataaactgaaagctctcctggaaaaaaaagcatacttggaatggcccaaggataggcgtaaatgtgggcttttctgggcaaaccttcgagctgctattaatgttaatgtattagccaccagagaaatgtatgaactgcagacattcacagagttaaatgaagagtctcgaggttctacaatctctctgatgagaacagattgtctataaaatcccacagtccttgggaagttggggaccacatacactgttgggatgtacattgatacaacctttatgatggcaatttgacaatatttattaaaataaaaaatggttattcccttcatatcagtttctagaaggatttctaagaatgtatcctatagaaacaccttcacaagtttataagggcttatggaaaaaggtgttcatcccaggattgtttataatcatgaaaaatgtggccaggtgcagtggctcactcttgtaatcccagcactatgggaggccaaggtgggtgacccacgaggtcaagagatggagaccatcctggccaacatggtgaaaccctgtctctactaaaaatacaaaaattagctgggcgtgatggtgcacgcctgtagtcccagctacttgggaggctgaggcaggagaatcgcttgaacccgggaggtggcagttgcagtgagctgagatcgagccactgcactccagcctggtgacagagcgagactccatctcaaaaaaaagaaaaaaaaaaaagaaaaaaa

SEQ ID NO: 302719 - DNA, 2616 bp, Artificial Sequence
  derived and/or modified sequence
tgcttttgccaccaacctgaagacatatagaggcagaaggacaggaataattctatttgtttcctgttttgaaacttccatctgtaagggttttgagctcatcttcatcattcatatgaggaaataagtggtaaaatccttggaaatacaatgagactcatcagaaacatttacatattttgtagtattgttatgacagcagagggtgatgctccagagctgccagaagaaagggaactgatgaccaactgctccaacatgtctctaagaaaggttcccgcagacttgaccccagccacaacgacactggatttatcctataacctcctttttcaactccagagttcagattttcattctgtctccaaactgagagttttgattctatgccataacagaattcaacagctggatctcaaaacctttgaattcaacaaggagttaagatatttagatttgtctaataacagactgaagagtgtaacttggtatttactggcaggtctcaggtatttagatctttcttttaatgactttgacaccatgcctatctgtgaggaagctggcaacatgtcacacctggaaatcctaggtttgagtggggcaaaaatacaaaaatcagatttccagaaaattgctcatctgcatctaaatactgtcttcttaggattcagaactcttcctcattatgaagaaggtagcctgcccatcttaaacacaacaaaactgcacattgttttaccaatggacacaaatttctgggttcttttgcgtgatggaatcaagacttcaaaaatattagaaatgacaaatatagatggcaaaagccaatttgtaagttatgaaatgcaacgaaatcttagtttagaaaatgctaagacatcggttctattgcttaataaagttgatttactctgggacgaccttttccttatcttacaatttgtttggcatacatcagtggaacactttcagatccgaaatgtgacttttggtggtaaggcttatcttgaccacaattcatttgactactcaaatactgtaatgagaactataaaattggagcatgtacatttcagagtgttttacattcaacaggataaaatctatttgcttttgaccaaaatggacatagaaaacctgacaatatcaaatgcacaaatgccacacatgcttttcccgaattatcctacgaaattccaatatttaaattttgccaataatatcttaacagacgagttgtttaaaagaactatccaactgcctcacttgaaaactctcattttgaatggcaataaactggagacactttctttagtaagttgctttgctaacaacacacccttggaacacttggatctgagtcaaaatctattacaacataaaaatgatgaaaattgctcatggccagaaactgtggtcaatatgaatctgtcatacaataaattgtctgattctgtcttcaggtgcttgcccaaaagtattcaaatacttgacctaaataataaccaaatccaaactgtacctaaagagactattcatctgatggccttacgagaactaaatattgcatttaattttctaactgatctccctggatgcagtcatttcagtagactttcagttctgaacattgaaatgaacttcattctcagcccatctctggattttgttcagagctgccaggaagttaaaactctaaatgcgggaagaaatccattccggtgtacctgtgaattaaaaaatttcattcagcttgaaacatattcagaggtcatgatggttggatggtcagattcatacacctgtgaataccctttaaacctaaggggaactaggttaaaagacgttcatctccacgaattatcttgcaacacagctctgttgattgtcaccattgtggttattatgctagttctggggttggctgtggccttctgctgtctccactttgatctgccctggtatctcaggatgctaggtcaatgcacacaaacatggcacagggttaggaaaacaacccaagaacaactcaagagaaatgtccgattccacgcatttatttcatacagtgaacatgattctctgtgggtgaagaatgaattgatccccaatctagagaaggaagatggttctatcttgatttgcctttatgaaagctactttgaccctggcaaaagcattagtgaaaatattgtaagcttcattgagaaaagctataagtccatctttgttttgtctcccaactttgtccagaatgagtggtgccattatgaattctactttgcccaccacaatctcttccatgaaaattctgatcatataattcttatcttactggaacccattccattctattgcattcccaccaggtatcataaactgaaagctctcctggaaaaaaaagcatacttggaatggcccaaggataggcgtaaatgtgggcttttctgggcaaaccttcgagctgctattaatgttaatgtattagccaccagagaaatgtatgaactgcagacattcacagagttaaatgaagagtctcgaggttctacaatctctctgatgagaacagattgtctataaaatcccacagtccttgggaagttggggacc

SEQ ID NO: 302720 - protein, 356 aa, Artificial Sequence
  derived and/or modified sequence
MLSAITNVVQNTGKSVLTGGLDALEFIGKKTMNVLAESDPGFKRTKTLMERTVSLSQMLREAKEKEKQRLAQQLTMERTAHYGMLFDEYQGLSHLEALEILSNESESKVQSFLASLDGEKLELLKNDLISIKDIFAAKELENEENQEEQGLEEKGEEFARMLTELLFELHVAATPDKLNKAMKRAHDWVEEDQTVVSVDVAKVSEEETKKEEKEEKSQDPQEDKKEEKKTKTIEEVYMSSIESLAEVTARCIEQLHKVAELILHGQEEEKPAQDQAKVLIKLTTAMCNEVASLSKKFTNSLTTVGSNKKAEVLNPMISSVLLEGCNSTTYIQDAFQLLLPVLQVSHIQTSCLKAQP

SEQ ID NO: 302721 - protein, 169 aa, Artificial Sequence
  derived and/or modified sequence
MNKPLLDWERNFAAVLDGAKGHSDDDYDDPELRMEETWQSIKILPARPIKESEYADTHYFKVAMDTPLPLDTRTSISIGQPTWNTQTRLERVDKPISKDVRSQNIKGDASVRKNKIPLPPPRPLITLPKKYQPLPPEPESSRPPLSQRHTFPEVQRMPSQISLRDLSEP

SEQ ID NO: 302722 - protein, 428 aa, Artificial Sequence
  derived and/or modified sequence
MNRQGNRKTTKEGSNDLKFQNFSLPKNRSWPRINSATGQYQRMNKPLLDWERNFAAVLDGAKGHSDDDYDDPELRMEETWQSIKILPARPIKESEYADTHYFKVAMDTPLPLDTRTSISIGQPTWNTQTRLERVDKPISKDVRSQNIKGDASVRKNKIPLPPPRPLITLPKKYQPLPPEPESSRPPLSQRHTFPEVQRMPSQISLRDLSEVLEAEKVPHNQRKPESTHLLENQNTQEIPLAISSSSFTTSNHSVQNRDHRGGMQPCSPQRCQPPASCSPHENILPYKYTSWRPPFPKRSDRKDVQHNEWYIGEYSRQAVEEAFMKENKDGSFLVRDCSTKSKEEPYVLAVFYENKVYNVKIRFLERNQQFALGTGLRGDEKFDSVEDIIEHYKNFPIILIDGKDKTGVHRKQCHLTQPLPLTRHLLPL

SEQ ID NO: 302723 - protein, 392 aa, Artificial Sequence
  derived and/or modified sequence
MNPRGNRKTTKEGSNDLKFQNFSLPKNRSWPRINSATGQYQRMNKPLLDWERNFAAVLDGAKGHSDDDYDDPELRMEETWQSIKILPARPIKESEYADTHYFKVAMDTPLPLDTRTSISIGQPTWNTQTRLERVDKPISKDVRSQNIRPPLSQRHTFPEVQRMPSQISLRDLSESLEAKKVPHNQRKPESTHLLENQNTQEIPLAISSSSFTTSNHSVQNRDHRGGMQPCSPQRCQPPASCSPHENILPYKYTSWRPPFPKRSDRKDVQHNEWYIGEYSRQAVEEAFMKENKDGSFLVRDCSTKSKEEPYVLAVFYENKVYNVKIRFLERNQQFALGTGLRGDEKFDSVEDIIEHYKNFPIILIDGKDKTGVHRKQCHLTQPLPLTRHLLPL

SEQ ID NO: 302724 - DNA, 5599 bp, Artificial Sequence
  derived and/or modified sequence
ggctgcatttcacaggaaaccaagtctaaaacggacctatcaggaggttttctgctgaagggcactgcttagcatcgagaagaattcaacccaccgccttactaatttccagtgccccaaggtctctgcactgccgcccctcctcacaggagacggacacctcagcctagatcccttggtgctctccacgctgttcaggctgaattgaagatccctcttacccgccaggtgccaagaactatgaacaggcagggcaatagaaagacaactaaagaaggatccaacgatttgaaattccagaacttcagtctgccaaaaaacaggtcatggcctcgcatcaatagtgccacaggccagtaccagaggatgaacaagcctcttctagactgggaaagaaactttgctgcagtcctggatggagcaaaaggccacagtgatgatgactatgatgaccctgagcttcggatggaagagacatggcagtcgattaaaattttaccagcccggcctataaaggaatctgaatatgcagatacacactatttcaaggttgcaatggacactccccttccgttagacaccaggacctctatctccattggacagccgacctggaacacacagacgaggttggaaagagtggacaaacccatttccaaggacgtcagaagccaaaacattaaaggagatgcatccgtaagaaagaacaagattcctttaccacctcctcggcctctcataacacttccgaagaagtaccaacccttgccccctgagccggagagcagcaggccacctttatctcagagacacacctttccagaagtccagagaatgcccagtcagataagcttaagggacttaagtgaggtccttgaagcagaaaaagttcctcataaccagaggaagcctgaatcaactcatctgttagaaaaccaaaatactcaagagattccacttgccattagcagttcttcattcacgacaagcaaccacagtgtgcaaaacagagatcatagaggaggcatgcagccctgttctcctcagagatgccagcctccagccagctgcagccctcacgaaaatatactgccctataaatacacaagctggagaccacctttccccaaaaggtctgatagaaaggatgtccagcacaatgaatggtacattggagaatacagccgccaggcagtggaagaggcattcatgaaggagaacaaggatggtagtttcttggtccgagattgttccacaaaatccaaggaagagccctatgttttggctgtgttttatgagaacaaagtctacaatgtaaaaatacgcttcctggagaggaatcagcagtttgccctggggacaggactcagaggagatgagaagtttgattcagtagaagacatcatcgaacactacaagaattttcccattatactaattgatgggaaagataaaactggggtccacaggaaacagtgtcacctcactcagccactccctctcaccagacacctcttgcctctgtagcctggtctttgtgttatctttggtttactggattcagcgcttccattgttttcattgatttcaaaagtttattttctgtgccttcaagggacaacttttttaactttggagaaaagaaaaacactctataacagagagtggaaaatcactcacggttttgaaagttcaaaccacagagaaaatatttataacatgcaaaaaataaaaacattctagtaactggccactggaaaataaataaaaataaaaactagggttttaaaagtatcttctaaaaaacaacaacaaaaaatactataaacatagccattatgctcatgatacaggcgagcagcaaagggcaccagaagctgttgcttaaatgtttgcagtcagtgcaagacaagtctatgggaaattcccaaatctgtgctctttacaggacactgcgctgcctttatgtcagttgttgggccttacatatatacaatgtgtggatgatttcttacactaaagatgctgggctgggtgcggtgcctcatgcctgtaatcccagcactttgggaggctgaggtggacagatcacgaggtcaggagatcaagaccatcctggctaacatggtgaaaccccatgtctactaaaaatacaaaaaatcagctgggcgtggtggtgggtgcctgtagtcccagctactcgggaggctgaggcaggagaatggtgtgaacccgggaggcggagcttgcagtgagccgaaatcgcgccactgcactccaatccagcctggggacagagagactccgtctcaaaaaaaaaaaaaggtgttgggttggtgaatattagctctcttttattgtaatcctagaaattcaagtatagggaagaaatgtggtatggaaaaccagcaattgtgaatgtcaccttgaagacagaaactgaaaatcctctgactagggtgtgaaacggtcatgggaccagcctccagcatcatctgcttcaagtagctttaagtcaaatggaattaacacattcatagtacagagctcagattatatcctacactagccttcaggcaagcatatgtctgagggaaactaaaaattgtattaacaattccaattatggacttccattcaaagacagagaaaaactgtcctcaaattagtgctaattcttgcagtaacgttgcacaggccatgatattattccctgtagaggttaagaggatttaattttattattgttttacaataaagatgaggaaacagaggctcgaagtagctattgatcttactcaatatgagaagagagcccagattgtaatctgctttgcctggctccatgcaagctcatcttcccaggtacattctctgcgctgtgacattttacaatcaagttgaaaagctaatttaaaaaaaaagagagagagagagagaaagatagaaacaatttgaaaatacagatttaccaccttaaaataaataaactcttctagtgggaataagcttttttaaaaaacatactgtctgtcgaaaataacagtatatcatgatgtcaaatgctaccaaagcttacaaaggaaattcatagagtatttatgtaattgtagcattgatgcagaaagaaaaccaaaaataattaaaaggcaatagaagcaaatgaaaacaataaaaacaatgtgcaggattatctcttttgtaagacagcagacaatgagctctctgggaaaagctcttagcatctacccactatccaaatacctgctcaggtgttctcctttcacaaggtcaatgtgaagtgatgcctataagttacatcaggagcatttaatgaagaagctatttgtaaagctggaacttttgagacccagctgagcctatcgtagagtatgcctgcagaggattacatagaaccaagagacaagagtgtttaaattggagcttggatacgaaagaactcactggtccggtcaaagctaaaagctgtatggttgctggtcattctctactggaattcaacaagccagggacagtatggaaacaaggactttacagaagagctccaggctcacattaagaaggaatctgaccctcaccctaaaaagctattgggagattactgatacctccaactcactgattcattgaggccatgccattcaatgctatgttctcaagaaatgtctatgagtcctctcaaccattgctgttgataaaataggtgaatgtcaagtgggggttagcatttgataaggtgtacgtttgaaataatattttatcgtctcttgttcacaaatacaacatataattccaagaagaaaaaagaagtagaaattcagcatccttaagatgacagcaagaatgaggggaaaaggaagaaaaaaaagaaattaaacatcttgcaataaaaagcttacaatatttttgtgtatttgaacacttctgtaaaaaatataaaatggaaaatactgacatgggctgcttctggtgattggggtttgagggattgggtgtcgggttttctagaactcagacaccaggacaaagttagaagtgcaaacactgattggaggttaatgtttgagaaagataaaagggagaagaaacagaagtatgggtatggggtgggctttcaggctcccacctgtgagagggaagaggggaggtgtggggagtgaggagaaaaagcatgagattcagacacagctctgggagagttttggccagctcatagtgaggcccaaagcaaagtttgcccagagaggagacagtgttatgctgggcagtaatgtctgggtcttagtgccccatcctgttaagtcattgtctggggctatcctgggaaaaagaaaaacaacaaaaaaaaaagacctgcaaatgctgtggccaatccagaaggcgcagctggacgctgtccactaacttgctggccagcaagttatttcaatggagactcaagagacccacctctggcctgccacagcaacatcctgaattcactgttttcagtgttgattgtagtaaggacaatcacatttacattttgcttgtaatggatgattaaataataagagtatataaattcgattgtatttgtttcttacaacacttctgtaaagaagagagggcagctatttctaatgcattttataattgaggaaattgtacctcattggccaaaatctcacagtgacatagtcgcgactggaaccaaggtctccatatgcaattatcctattcatggtctacctgctttattagatctgtaattgaatattcaatgatttggatttggcatgcccaaattccagtgttttaatcccttttcaaccattacctcacgtttagtttaaaagtatcacttgatatctgatttcaatagagtaatagaattttagctttatccaattacagcatttatgctttccagatattttttggactaaataattctcattctgtataaatgtgcatagccctcatcattagtcatatattgtgttagcacctttgtgtactgcatgtgtattcattactaagcactattgtagatgttgaaaatagagcagtgaataagagagatagatgacaaataaatatacaaacaaataagataatctaagtcagtttcccattactggattggatttctattttaacacttatttctgagtacttgtggggtgatgccaacattaaatgttttgaggaagctcctttgagatggctttgaaaagtcctaagtgagaaaatttaaaattttcccaaacttatttatgtggggtgtgcatgtgtgtgcctgtgcctgtgtgcgtgtgtgtgtgtgtgtttttaagtaaccgcatcatggctgtaatcagttaagtctcctgttctaattactacggaggaatcaaatgaaccccattgtcgaatgtagccaattatgtatgtgtgtacacaaatacaaatttttatgatagcctatattgtatattagcattatatttgtatatcttttttattctgagcaatatttgttctagctaagcacatttacattcataatttacagccttactaatgtaaataaaagtaaatatgtaattgaatgtta

SEQ ID NO: 302725 - DNA, 773 bp, Artificial Sequence
  derived and/or modified sequence
aatttccagtgccccaaggtctctgcactgccgcccctcctcacaggagacggacacctcagcctagatcccttggtgctctccacgctgttcaggctgaattgaagatccctcttacccgccaggtgccaagaactatgaacaggcagggcaatagaaagacaactaaagaaggatccaacgatttgaaattccagaacttcagtctgccaaaaaacaggtcatggcctcgcatcaatagtgccacaggccagtaccagaggatgaacaagcctcttctagactgggaaagaaactttgctgcagtcctggatggagcaaaaggccacagtgatgatgactatgatgaccctgagcttcggatggaagagacatggcagtcgattaaaattttaccagcccggcctataaaggaatctgaatatgcagatacacactatttcaaggttgcaatggacactccccttccgttagacaccaggacctctatctccattggacagccgacctggaacacacagacgaggttggaaagagtggacaaacccatttccaaggacgtcagaagccaaaacattaaaggagatgcatccgtaagaaagaacaagattcctttaccacctcctcggcctctcataacacttccgaagaagtaccaacccttgccccctgagccggagagcagcaggccacctttatctcagagacacacctttccagaagtccagagaatgcccagtcagataagcttaagggacttaagtgagccttga

SEQ ID NO: 302726 - protein, 381 aa, Artificial Sequence
  derived and/or modified sequence
MPLKRNNSKYPPLELPSFYMTPSHRQVVFEGDSLPFQCMASYIDQDMQVLWYQDGRIVETDESQGIFVEKNMIHNCSLIASALTISNIQAGSTGNWGCHVQTKRGNNTRTVDIVVLESSAQYCPPERVVNNKGDFRWPRTLAGITAYLQCTRNTHGSGIYPGNPQDERKAWRRCDRGGFWADDDYSRCQYANDVTRVLYMFNQMPLNLTNAVATARQLLAYTVEAANFSDKMDVIFVAEMIEKFGRFTKEEKSKELGDVMVDIASNIMLADERVLWLAQREAKACSRIVQCLQRIATYRLAGGAHVYSTYSPNIALEAYVIKSTGFTGMTCTVFQKVAASDRTGLSDYGRRDPEGNLDKQLSFKCNVSNTFSSLALKGKFR

SEQ ID NO: 302727 - DNA, 1572 bp, Artificial Sequence
  derived and/or modified sequence
atttctgtaatcatctgatactcttaggatgccactgaagaggaataactctaaataccctccgcttgaattgccgtctttctacatgactccatctcatcgccaagttgtgtttgaaggagacagccttcctttccagtgcatggcttcatatattgatcaggacatgcaagtgttgtggtatcaggatgggagaatagttgaaaccgatgaatcgcaaggtatttttgttgaaaagaacatgattcacaactgctccttgattgcaagtgccctaaccatttctaatattcaggctggatctactggaaattggggctgtcatgtccagaccaaacgtgggaataatacgaggactgtggatattgtggtattagagagttctgcacagtactgtcctccagagagggtggtaaacaacaaaggtgacttcagatggcccagaacattggcaggcattactgcatatctgcagtgtacgcggaacacccatggcagtgggatatatcccggaaacccacaggatgagagaaaagcttggcgcagatgtgatagaggtggcttttgggcagatgatgattattctcgctgtcagtatgcaaatgatgtcactagagttctttatatgtttaatcagatgcccctcaatcttaccaatgccgtggcaacagctcgacagttactggcttacactgtggaagcagccaacttttctgacaaaatggatgttatatttgtggcagaaatgattgaaaaatttggaagatttaccaaggaggaaaaatcaaaagagctaggtgacgtgatggttgacattgcaagtaacatcatgttggctgatgaacgtgtcctgtggctggcgcagagggaagctaaagcctgcagtaggattgtgcagtgtcttcagcgcattgctacctaccggctagccggtggagctcacgtttattcaacatattcacccaatattgctctggaagcttatgtcatcaagtctactggcttcacggggatgacctgtaccgtgttccagaaagtggcagcctctgatcgtacaggactttcggattatgggaggcgggatccagagggaaacctggataagcagctgagctttaagtgcaatgtttcaaatacattttcgagtctggcactaaaggggaaattccggtgaatatggaattagaagaagagaggttagaagccaagaaaaagattgtacaataaattcttcaactatggaatgtttttagatggttaattgttcacttctttggtatatatatattttttactgaatgctgaataatttgttatttaaaaatcctcaataaagaaatctgaaaaaattcagtgatcagtcagcattttcagttgttcctatgtgttattattttttttttctaaatgtgtttcctagtctcaaggaaatttctgctaagtgtactgaatctaaacctctattatgtttgtataatttcattcttttgttgtgtggaggtttgaattcatcataaatcaccttaaagttccataagcccaaattaattatactcatatttatgatatgct

SEQ ID NO: 302728 - DNA, 1146 bp, Artificial Sequence
  derived and/or modified sequence
atgccactcaagagaaataactcaaaatacccccccctggagcttccatccttctatatgacgccgtcccacaggcaggtagtgttcgagggggattctctgccttttcagtgcatggcaagctacattgatcaggacatgcaggtgctttggtaccaggacgggcgcatcgtggagacggacgaaagtcaaggtatattcgtggagaagaatatgatccacaactgttcactcatcgcaagcgccctgaccattagcaacatacaagccggcagcacaggtaattggggctgccatgttcaaaccaagcgcggtaacaacacgcgcaccgtcgatatagtagtccttgaatcctcagctcagtattgcccccccgaacgggtggtgaataacaagggggatttcagatggcctagaacgctagcaggcattacggcctacctccagtgtacgagaaatactcacgggagcggcatctaccccgggaacccacaggacgagagaaaggcatggagaagatgcgatcgaggcgggttctgggctgatgacgactatagccgttgtcaatacgcaaacgacgtgacaagggttctgtacatgttcaaccaaatgcctctaaacctaaccaacgctgtggcaaccgcaagacagctgctggcttacacggtcgaggctgccaacttctctgataaaatggatgttatttttgtggccgagatgatcgaaaaattcggccggttcaccaaggaggagaagagcaaggaacttggggacgtcatggtggacatcgccagcaatataatgttggccgatgagagagtgctctggctcgcccaaagggaagcaaaagcttgttcgcgaatagtacagtgtttacaacgaattgccacataccgcctggccggtggagcccacgtttatagcacatacagtccaaacatcgctctggaggcctatgtgatcaagagtacaggcttcacaggcatgacctgcaccgttttccaaaaggttgctgcttccgataggaccggtctctccgattatgggagacgggatcccgagggcaacctggacaagcagctgtcttttaagtgtaatgtgtccaatactttcagttctctggctctcaagggaaaattccgttag

SEQ ID NO: 302729 - DNA, 1146 bp, Artificial Sequence
  derived and/or modified sequence
atgcccctgaagaggaacaacagcaagtacccacccctggagctgcccagcttctacatgacccccagccaccggcaggtggtgtttgaaggagacagcctgcccttccagtgcatggccagctacatcgaccaggacatgcaggtgctgtggtaccaggacggcagaattgtggagacagatgagagccagggcatctttgtggagaagaacatgatccacaactgcagcctgattgccagcgccctgaccatcagcaacatccaggccggcagcactggaaactggggctgccacgtgcagaccaagaggggcaacaacaccaggacagtggacatcgtggtgctggagagcagcgcccagtactgccccccagagcgggtggtgaacaacaagggggacttccgctggcccaggaccctggccggcatcacagcctacctgcagtgcaccaggaacacccacggcagcggcatctacccaggcaacccccaggatgagaggaaggcctggaggcgctgtgacagaggaggcttctgggcagatgatgactacagccgctgccagtatgccaatgatgtgaccagggtgctgtacatgttcaaccagatgcccctgaacctgaccaatgctgtggccacagcccggcagctgctggcctacacagtggaggccgccaacttcagtgacaagatggatgtgatctttgtggccgagatgattgagaagtttggccgcttcaccaaggaggagaagagcaaggagctgggagatgtgatggtggacatcgccagcaacatcatgctggctgatgagcgggtgctgtggctggcccagcgggaggccaaggcctgcagccgcatcgtgcagtgcctgcagagaattgccacctaccgcctggccggcggggcccacgtgtacagcacctacagccccaacatcgccctggaggcctacgtgatcaagagcacaggcttcaccggcatgacctgcaccgtcttccagaaggtggccgccagtgacagaacaggcctgagtgactatggccggcgggaccctgagggcaacctggacaagcagctgtccttcaagtgcaatgtgagcaacaccttcagcagcctggccctgaagggcaagttcagatag

SEQ ID NO: 302730 - DNA, 1146 bp, Artificial Sequence
  derived and/or modified sequence
atgcccctgaagcggaacaacagcaagtacccccccctggagctgcctagtttctacatgaccccaagtcaccgccaggtggtcttcgagggcgacagtttgccctttcaatgtatggcttcatacatcgatcaagacatgcaggtcctctggtaccaggacggcagaattgtggaaaccgatgaaagccagggtatctttgtcgagaagaacatgattcacaactgttcgcttatcgccagcgccttgacaatatccaatatacaggcggggagcaccggcaactgggggtgtcatgtgcagacaaagcgtggaaacaacacgcgcacagtagacatagtggtgttagagtctagcgcccagtactgtccccctgagcgtgtggttaataacaagggggactttcggtggcctcgcactctggcaggaattacagcctacctccaatgcaccaggaacacccacggctccggaatctacccgggaaatccccaggacgaaaggaaagcctggcgcaggtgcgacagaggtgggttctgggccgacgatgattactcccgctgtcagtacgcaaatgacgtgacgagggttctgtatatgttcaaccagatgccacttaatcttaccaatgccgtggccacagctcgccaactgctcgcatatactgtggaggcagccaatttcagcgataaaatggatgtaatatttgtcgcggaaatgatcgagaaattcgggaggttcacgaaggaggagaaaagcaaggagcttggcgatgttatggtcgacatagcttctaatattatgctggccgatgaacgcgtgctgtggctggcacagcgggaggccaaggcgtgttcccgaatcgtgcaatgcctccaacgcatcgctacatataggctcgcaggtggagctcacgtttattcaacctatagtcctaatattgcattagaggcttatgtgattaaaagcaccggttttactgggatgacctgtactgtctttcagaaggtggctgccagtgatcgcacagggctatccgattacggacggcgagatccagaaggcaacttagacaagcagttatcttttaagtgcaacgtatccaacacgttctcttctcttgccctgaagggcaagtttaggtag

SEQ ID NO: 302731 - DNA, 1146 bp, Artificial Sequence
  derived and/or modified sequence
atgcccctgaagagaaacaatagtaaatacccgcctctggaactgccttccttttatatgactccctcccacagacaggtagtattcgaaggagactcactgcccttccagtgtatggccagttatattgaccaggacatgcaggtgttgtggtatcaggacggcagaatcgtggagactgacgagagtcagggcatttttgtggagaaaaacatgatacataactgcagcctgatcgctagtgctctcacaatttcaaacattcaagcaggctccacaggaaactggggctgtcacgtccagacaaagaggggtaataacactagaactgtcgatatagtggtcctggaatcttccgcccagtattgccccccagagcgggtagtgaacaacaagggtgattttcgatggccacgaacgttggccggtattacagcttatttgcagtgcactcgtaacactcatggcagcggaatataccccggaaacccccaggatgagagaaaggcctggcggcgatgcgacagggggggtttctgggccgacgacgattactctagatgccaatacgcgaacgatgtaaccagggttctatatatgtttaatcagatgcccctcaacctgaccaacgcagtcgcgactgccagacagctgctggcctacactgtcgaggctgctaacttctcggacaagatggacgttattttcgtcgcagagatgatagaaaagttcggcaggtttacaaaagaggaaaagagcaaagaacttggcgacgtgatggtagacattgcttccaacatcatgctggccgatgagagagtgttgtggcttgcgcaaagagaagccaaagcttgtagccgtattgtgcaatgcctgcaacggatagccacctaccgcttggccggtggggcacacgtgtattctacctacagtcccaatatagcccttgaagcatacgtgatcaaatccacagggtttaccgggatgacctgcactgtgttccaaaaggtggcagccagcgatagaacgggcctgtcagattacggtagacgcgatcccgagggaaaccttgataaacagctgagttttaaatgtaacgtgtccaatacattcagcagcctggcgcttaagggaaaatttcgatag

SEQ ID NO: 302732 - DNA, 1146 bp, Artificial Sequence
  derived and/or modified sequence
atgcccctgaagagaaacaacagcaagtacccccccctggagctgcccagcttctacatgacccccagccacagacaggtggtgttcgagggcgacagcctgcccttccagtgcatggccagctacatcgaccaggacatgcaggtgctgtggtaccaggacggcagaatcgtggagaccgacgagagccagggcatcttcgtggagaagaacatgatccacaactgcagcctgatcgccagcgccctgaccatcagcaacatccaggccggcagcaccggcaactggggctgccacgtgcagaccaagagaggcaacaacaccagaaccgtggacatcgtggtgctggagagcagcgcccagtactgcccccccgagagagtggtgaacaacaagggcgacttcagatggcccagaaccctggccggcatcaccgcctacctgcagtgcaccagaaacacccacggcagcggcatctaccccggcaacccccaggacgagagaaaggcctggagaagatgcgacagaggcggcttctgggccgacgacgactacagcagatgccagtacgccaacgacgtgaccagagtgctgtacatgttcaaccagatgcccctgaacctgaccaacgccgtggccaccgccagacagctgctggcctacaccgtggaggccgccaacttcagcgacaagatggacgtgatcttcgtggccgagatgatcgagaagttcggcagattcaccaaggaggagaagagcaaggagctgggcgacgtgatggtggacatcgccagcaacatcatgctggccgacgagagagtgctgtggctggcccagagagaggccaaggcctgcagcagaatcgtgcagtgcctgcagagaatcgccacctacagactggccggcggcgcccacgtgtacagcacctacagccccaacatcgccctggaggcctacgtgatcaagagcaccggcttcaccggcatgacctgcaccgtgttccagaaggtggccgccagcgacagaaccggcctgagcgactacggcagaagagaccccgagggcaacctggacaagcagctgagcttcaagtgcaacgtgagcaacaccttcagcagcctggccctgaagggcaagttcagatag

SEQ ID NO: 302733 - DNA, 489 bp, Artificial Sequence
  derived and/or modified sequence
atgctgaggttccccacctgcttccccagttttagggtggtcggcgaaaagcagctgccacaagaaatcatcttccttgtgtggtcccctaagcgtgatcttattgccctcgcaaacactgctggcgaagtcctcctgcataggctcgctagtttccatagagtgtggtcctttccgcccaacgagaacacgggaaaagaagtaacctgtctggcctggcggcccgatgggaagctgttggcgtttgcgctggccgacactaagaagattgtcctgtgtgacgttgagaagccagaatccctgcatagcttttctgtcgaggcccctgtgtcgtgtatgcattggatggaggtgaccgtcgaatcctctgtgcttacatctttttacaacgcagaggacgagtccaacttgttattgcccaagctacccacattacccaaaaactattccaatacctctaagatctttagcgaagagaactcagattag

SEQ ID NO: 302734 - DNA, 489 bp, Artificial Sequence
  derived and/or modified sequence
atgctgcgcttccccacctgcttccccagcttccgggtggtgggggagaagcagctgccccaggagatcatcttcctggtgtggagccccaagagggacctgattgccctggccaacacagctggggaggtgctgctgcaccggctggccagcttccaccgggtgtggagcttccccccaaatgaaaatacaggcaaggaggtgacctgcctggcctggaggccagatggcaagctgctggcctttgccctggccgacaccaagaagatcgtgctgtgtgatgtggagaagccagagagcctgcacagcttctctgtggaggcccctgtgtcctgcatgcactggatggaggtgacagtggagagctctgtgctgaccagcttctacaatgcagaagatgagagcaacctgctgctgcccaagctgcccaccctgcccaagaactacagcaacaccagcaagatcttctctgaagaaaattctgactag

SEQ ID NO: 302735 - DNA, 489 bp, Artificial Sequence
  derived and/or modified sequence
atgctgcggttccccacctgcttccccagcttccgggtggtgggcgaaaagcaactcccccaggaaattattttcctggtctggtcgcccaaacgggatctcatcgccctggccaacaccgcaggggaggtgctgctccaccgactggcctcattccatagggtgtggtccttcccgcctaatgagaacacaggcaaagaggtcacttgcctggcttggagaccagacgggaaactcctggcctttgctctcgctgatactaagaaaattgtgctttgcgacgtggaaaagccagagtcgctccactcctttagtgttgaggcgcctgtgtcatgtatgcactggatggaagttacggtcgaaagctcagttcttacttctttctataatgccgaagacgagagcaacctgcttttgcctaaattaccaacactaccaaagaattatagcaacacatcgaagattttttccgaggagaactcagactag

SEQ ID NO: 302736 - DNA, 595 bp, Artificial Sequence
  derived and/or modified sequence
agtctgccggtggggactcttgcaggtacaggcgcggtcggggctcctcgtggagagccgggggctcctgccggcctctgactggggtgtcgttgcagggccgtccccatgttgcgttttccgacctgtttcccatccttccgggtggtgggagagaagcagctcccgcaggagattattttcctggtctggtcgcccaagcgggatctcattgctttggccaacacagctggcgaggttttacttcatcgactggcaagttttcatcgagtttggagttttccaccaaatgaaaatacaggaaaggaggtgacgtgtctggcatggagaccagatggcaaacttttggcctttgctcttgctgataccaagaaaattgttttgtgtgatgtagaaaaacctgagagcttacactctttttctgtggaggctccagtttcctgtatgcattggatggaagtgacagtagaaagcagtgttctcacatcattttataatgctgaggatgaatcaaatcttctcttacctaaactacctacactgccaaaaaactatagcaacacctcaaaaatatttagtgaagaaaattctgatg

SEQ ID NO: 302737 - DNA, 489 bp, Artificial Sequence
  derived and/or modified sequence
atgctgagattccctacttgtttcccgtcgtttagggttgtcggtgaaaaacagcttccacaagaaataatttttttagtctggtcaccaaaacgggacctcatcgccttggcaaacacagccggagaggtgctcctccacaggctggcctcatttcaccgggtgtggtcttttccacctaatgaaaataccggaaaggaagtgacatgcctggcttggaggccggacgggaagctcctggcatttgctctggcagacacaaagaagatagtcttatgcgatgtggaaaaacctgagagtctccactctttctcggtagaggccccagtgtcatgtatgcactggatggaagtgactgttgagagcagcgtactgacatcattctacaatgctgaggatgagagtaatcttctccttccgaaactcccaacgctcccaaaaaactatagcaacactagcaaaatctttagcgaggaaaattctgattag

SEQ ID NO: 302738 - DNA, 489 bp, Artificial Sequence
  derived and/or modified sequence
atgctgagattccccacctgcttccccagcttcagagtggtgggcgagaagcagctgccccaggagatcatcttcctggtgtggagccccaagagagacctgatcgccctggccaacaccgccggcgaggtgctgctgcacagactggccagcttccacagagtgtggagcttcccccccaacgagaacaccggcaaggaggtgacctgcctggcctggagacccgacggcaagctgctggccttcgccctggccgacaccaagaagatcgtgctgtgcgacgtggagaagcccgagagcctgcacagcttcagcgtggaggcccccgtgagctgcatgcactggatggaggtgaccgtggagagcagcgtgctgaccagcttctacaacgccgaggacgagagcaacctgctgctgcccaagctgcccaccctgcccaagaactacagcaacaccagcaagatcttcagcgaggagaacagcgactag

SEQ ID NO: 302739 - protein, 588 aa, Artificial Sequence
  derived and/or modified sequence
MNPREEKVKIITEEFIENDEDADMGRQNKNSKVRRQPRKKQPPTAVPKEMVSEKSHLGNPQEPVQEEPKTRLLSMTVRRGPRSLPPIPSTSRTGFAEFSMRGRMREKLQAARSKAESALLQEIPTPRPRRLRSPSKKELETEFGTEPGKEVERTQQEVDSQSYSRVKFHDSARKIKPKPQVPPGFPSAEEAYNFFTFNFDPEPEGSEEKPKARHRAGTNQEEEEGEEEEPPAQGGGKEMDEEELLNGDDAEDFLLGLDHVADDFVAVRPADYESIHDRLQMEREMLFIPSRQTVPTYKKLPENVQPRFLEDEGLYTGVRPEVARTNQNIMENRLLMQDPERRWFGDDGRILALPNPIKPFPSRPPVLTQEQSIKAELETLYKKAVKYVHSSQHVIRSGDPPGNFQLDIDISGLIFTHHPCFSREHVLAAKLAQLYDQYLARHQRNKAKFLTDKLQALRNAVQTGLDPEKPHQSLDTIQKTINEYKSEIRQTRKFRDAEQEKDRTLLKTIIKVWKEMKSLREFQRFTNTPLKLVLRKEKADQKADEEAYEAEIQAEISELLEEHTEEYAQKMEEYRTSLQQWKAWRKVQ

SEQ ID NO: 302740 - protein, 111 aa, Artificial Sequence
  derived and/or modified sequence
MNPREEKVKIITEEFIENDEDADMGRQNKNSKVRRQPRKKQPPTAVPKEMVSEKSHLGNPQEPVQEEPKTRLLSMTVRRGPRRELVVKKSLGRPGTVTHVCNPSTLEGRGG

SEQ ID NO: 302741 - DNA, 336 bp, Artificial Sequence
  derived and/or modified sequence
atgaacccccgcgaggagaaagtcaaaatcattaccgaagaattcatcgagaatgacgaggacgctgatatgggcaggcaaaacaagaacagcaaagtacgtcgccagccccgaaagaaacaacctccaaccgctgttccaaaggaaatggttagtgagaagagccacctcggcaacccccaggagcccgttcaggaggaacccaagactagactgctatctatgaccgtgagacgggggccccggagagagctggtcgtcaaaaaatctttgggacggcctggcacagttactcacgtctgcaacccatcaaccctcgaggggcgaggagggtag

SEQ ID NO: 302742 - DNA, 336 bp, Artificial Sequence
  derived and/or modified sequence
atgaacccccgggaggagaaggtgaagatcatcacagaggagttcattgaaaatgatgaagatgctgacatgggccggcagaacaagaacagcaaggtgcggcggcagcccaggaagaagcagcccccaacagctgtgcccaaggagatggtgtctgagaagagccacctgggcaacccccaggagcctgtgcaggaggagcccaagacccggctgctgtccatgacagtgcggcggggcccccggcgggagctggtggtgaagaagagcctgggccggcccggcaccgtgacccacgtgtgcaaccccagcaccctggagggccggggcggctag

SEQ ID NO: 302743 - DNA, 336 bp, Artificial Sequence
  derived and/or modified sequence
atgaacccccgggaggagaaggtgaagatcatcaccgaggagttcatagaaaacgacgaggatgctgacatggggcggcagaataaaaattccaaggtccggcggcagccaagaaagaaacagccccccaccgctgtcccaaaggagatggtgtctgaaaaatcacacctggggaaccctcaagaaccagtccaggaggagccaaaaacacgtctcttatctatgaccgtccggaggggtccacgacgcgaactggtggtgaaaaagtcactggggcgcccgggcactgtcacccacgtctgtaatccaagcacactggaaggccgagggggttag

SEQ ID NO: 302744 - DNA, 336 bp, Artificial Sequence
  derived and/or modified sequence
atgaaccccagggaagaaaaggtgaagatcatcactgaagagttcattgaaaacgatgaggacgcggacatgggtcgccagaataaaaactccaaggtacgccgtcagcctaggaaaaagcagccacctactgccgtgccaaaagagatggtcagtgagaagagccacctcggaaaccctcaagagccggtacaggaggagcctaagacacggctcttgtctatgactgtcaggcggggacctaggcgcgagttggtcgtgaaaaagtccttaggcaggcccggaacggttacgcacgtgtgtaacccaagcactctggagggacggggtggttag

SEQ ID NO: 302745 - DNA, 1474 bp, Artificial Sequence
  derived and/or modified sequence
gcagcttcccagggaggagcccaggggcatctccaacactcagcctttccctccggacccttttaaaagattcaacagcaccgtctctctccacttccatcctagaatgcagaatctgcaaagtgccttttgtaaagtttcttaagggacccatcccagccaaaatgaatcccagggaagaaaaagtaaaaataattacagaggagttcattgaaaatgatgaggatgcagacatgggaagacagaataagaactcaaaggttcgaagacagccaagaaagaaacagccaccaactgctgtccccaaggaaatggtgtccgaaaaatcccaccttggcaacccccaggagcctgtgcaggaggagcccaagacccgcctcctgagtatgacagtccggagaggcccacggagagagctggttgttaaaaagagcctgggcaggccaggcacggtgactcacgtctgtaatcccagcactttggaaggccgaggcgggtaaatcacctgaggttgggagttcaagaccagcctgaccaacatggagaaaccccatctctactaaaaatacaaaaaaattagccaggcgtggtggcgcatgcctgtaatcccagctacttgggaggctgaggcatgagaattgcttgaacctgggaggtggaggttgcagtgagccgagatcggagcactgcactccagcctaggcaacagagcaagactccatctcagaaaacaaacaaacaaaaaagagcctggaacctcctcccctctctcttgctccctctctcaccatgcgacacacctgtttccccttccccttctgacataagtgaaagcttcctaaggcctcaccagaggcagatgctggcaccatgcttattgcacagtctgcagaacagtgagccaaaataaacctcttttctttataaattacccagtctcagatattcctttatagcaatgcaaaatggactaacaatacataagttagggagtgttaattagaatggaaattaaatatgcagaaactcaaaggaagatgaaattgttagggaagacatatgtgttaacctagtgaggcttgaatcagatgtttggaagaaatgagggaggtttctgaggctcctggtgaccttgccattgaggacacatatacttctccccctacacacgccttttcttcttccccagtacaatgaacattaggaattacctgctcattgtagggaaaatgaccacccttcaggcattgcttttcatgaaaagtggattagacaagaggagaagtggttacactttttaattgttacataattgttagactgttttccctatggcaaagttgggaaataagtaactgttggaaactagaggcctttggaagcaagtagactcttagattggaaaaatgtggttctaatctaaaagcaatgatacaatgagagctgttatgaattaataaaaacagaaccaaaa

SEQ ID NO: 302746 - DNA, 336 bp, Artificial Sequence
  derived and/or modified sequence
atgaaccccagagaggagaaggtgaagatcatcaccgaggagttcatcgagaacgacgaggacgccgacatgggcagacagaacaagaacagcaaggtgagaagacagcccagaaagaagcagccccccaccgccgtgcccaaggagatggtgagcgagaagagccacctgggcaacccccaggagcccgtgcaggaggagcccaagaccagactgctgagcatgaccgtgagaagaggccccagaagagagctggtggtgaagaagagcctgggcagacccggcaccgtgacccacgtgtgcaaccccagcaccctggagggcagaggcggctag

SEQ ID NO: 302747 - protein, 865 aa, Artificial Sequence
  derived and/or modified sequence
MALVLGSLLLLGLCGNSFSGGQPSSTDAPKAWNYELPATNYETQDSHKAGPIGILFELVHIFLYVVQPRDFPEDTLRKFLQKAYESKIDYDKPETVILGLKIVYYEAGIILCCVLGLLFIILMPLVGYFFCMCRCCNKCGGEMHQRQKENGPFLRKCFAISLLVICIIISIGIFYGFVANHQVRTRIKRSRKLADSNFKDLRTLLNETPEQIKYILAQYNTTKDKAFTDLNSINSVLGGGILDRLRPNIIPVLDEIKSMATAIKETKEALENMNSTLKSLHQQSTQLSSSLTSVKTSLRSSLNDPLCLVHPSSETCNSIRLSLSQLNSNPELRQLPPVDAELDNVNNVLRTDLDGLVQQGYQSLNDIPDRVQRQTTTVVAGIKRVLNSIGSDIDNVTQRLPIQDILSAFSVYVNNTESYIHRNLPTLEEYDSYWWLGGLVICSLLTLIVIFYYLGLLCGVCGYDRHATPTTRGCVSNTGGVFLMVGVGLSFLFCWILMIIVVLTFVFGANVEKLICEPYTSKELFRVLDTPYLLNEDWEYYLSGKLFNKSKMKLTFEQVYSDCKKNRGTYGTLHLQNSFNISEHLNINEHTGSISSELESLKVNLNIFLLGAAGRKNLQDFAACGIDRMNYDSYLAQTGKSPAGVNLLSFAYDLEAKANSLPPGNLRNSLKRDAQTIKTIHQQRVLPIEQSLSTLYQSVKILQRTGNGLLERVTRILASLDFAQNFITNNTSSVIIEETKKYGRTIIGYFEHYLQWIEFSISEKVASCKPVATALDTAVDVFLCSYIIDPLNLFWFGIGKATVFLLPALIFAVKLAKYYRRMDSEDVYDDVETIPMKNMENGNNGYHKDHVYGIHNPVMTSPSQH

SEQ ID NO: 302748 - DNA, 2598 bp, Artificial Sequence
  derived and/or modified sequence
atggccttggtgctgggctctctactgctcttaggattgtgcgggaattccttcagcggagggcaacccagcagtaccgacgcgccaaaagcttggaattatgagctgcctgcaacgaattacgagactcaggattcccataaggcgggaccaatcggaatcttgttcgagctggtgcacatcttcctctatgttgtacagccccgggatttcccggaggatacactccggaagttcttgcagaaggcttacgagagcaagatcgactatgacaagccagagaccgtgattctcgggctgaaaatcgtctattacgaagctgggatcattctctgctgcgtgctaggtctgcttttcataatactcatgcccctcgttggctatttcttctgcatgtgtcgctgctgtaacaagtgtggtggcgagatgcaccagagacagaaggagaacggtccctttttgcgcaagtgctttgcgattagcttactcgtcatttgcattattattagcataggcattttctacggctttgttgctaatcaccaggtaaggacacggatcaaaagaagcagaaagctcgccgattctaactttaaagatctgcgcacacttttgaatgagacgccagagcaaattaagtacatcctggctcagtacaataccacaaaggacaaggcattcactgacctcaactctataaattccgtattgggaggcggcatcctagacaggttgcgccccaacatcatccccgttctggacgaaattaagagcatggctaccgccatcaaggaaaccaaggaggccttggagaatatgaattctaccctaaagtcacttcatcagcagtcgacccagctgtcctcctcgttgacgagcgtcaagactagtttacgttccagccttaacgacccactttgtttggtccaccccagctcagaaacttgcaacagcattcggcttagtctctctcaactgaactcaaaccctgagctccgccagctacctcctgtagacgccgaactggacaatgttaacaatgttcttcggactgatctcgacggcctagtacagcaagggtaccagtcactgaacgatatcccagacagagtgcagaggcagacaacgaccgtggttgccgggattaaaagggtgctcaattctattggctccgatatcgacaatgtaactcagaggctgcctatccaagatattctgtcagccttcagcgtgtatgttaacaatactgagagttacattcaccgcaatttacctactttagaggaatatgactcatattggtggttagggggactggtgatttgctccctactaacactgattgtcatattctactatctggggctgctatgtggcgtgtgcggatatgacagacatgccacacccacaactcggggatgcgtttcaaataccggcggagttttccttatggttggtgtgggcctctcatttctcttctgctggattctgatgattattgttgtactcacctttgtgttcggagccaatgtggagaagcttatctgcgaaccctacacttctaaggaattgttcagggtgttggataccccgtatctgctgaatgaggactgggaatattatttatcaggcaaactgtttaataaatcaaaaatgaaattaacctttgaacaggtctactcagattgcaagaaaaaccgcggtacttacggaaccttacatctgcagaatagcttcaatattagcgagcatctgaacattaacgaacatacaggcagcatcagttctgaattagagtctttgaaggtcaatctcaatatcttcctgctgggggcagcaggtaggaaaaacctacaggatttcgcagcttgcgggatcgaccgcatgaactacgacagctacctggcgcagaccgggaaaagcccagctggtgtgaatctgctgagcttcgcctatgacctggaggccaaagccaatagcctgccccctggcaatctcagaaatagcttaaagagggatgctcagaccatcaagacaatccatcagcagcgtgtcctacctatagaacaatctctgagcactctctatcagagcgtgaaaatcttacagaggaccggcaatggtctcttggaacgcgtcactagaattctggcatccctggacttcgcgcagaatttcatcacaaataatacgtcctccgtgatcattgaagagactaaaaagtacgggaggactatcattggatactttgaacactatctacagtggatcgaattcagtatttccgagaaggtagcctcctgcaaacccgtggcaacagcccttgacactgccgtcgacgtttttttgtgtagctacataatagacccactaaatctgttctggtttggcatcgggaaagccaccgtcttcctgttacctgcactgatcttcgcagtgaaactggcaaagtattaccgaagaatggactcagaggacgtatatgatgatgtggaaacaattccaatgaaaaacatggaaaacggaaacaatggctaccacaaagaccacgtgtacggcatacataatcctgtgatgacttcacctagccaacactag

SEQ ID NO: 302749 - DNA, 123 bp, Artificial Sequence
  derived and/or modified sequence
atggccctcgttctgggcagcctactcctgctgggactgtgcggcaattctttcagcgggggtcagccatcttccacagacgctccaaaagcttggaactatgagctgccagctacgaattag

SEQ ID NO: 302750 - DNA, 2598 bp, Artificial Sequence
  derived and/or modified sequence
atggccctcgtcctcgggtccctcctgctgcttgggctgtgtgggaactcattttctggtgggcaacctagttccactgacgcacctaaggcctggaattatgagctgccggccactaactacgagacacaggactcgcataaggccggacccatcggaatcctgttcgaactcgtccacatcttcctatacgttgtgcagccccgagatttccccgaggacactcttcgcaaatttctgcagaaggcttatgagtcaaaaattgactatgataagcccgaaactgtgatcctcggtcttaagatcgtttattacgaagctggaattatactatgttgcgttctgggccttctcttcatcatcctcatgccgctggttggctattttttctgcatgtgtcgctgctgtaataagtgtggcggggaaatgcaccagcggcaaaaggagaatggtcccttccttcgtaagtgctttgccatctccctgcttgtgatctgtattattattagcattggcattttctacggcttcgtagcaaaccatcaggtgcgaacacgaattaaaaggtcacggaaactggcagacagtaatttcaaagatctgagaacactgctcaacgagactcctgagcaaatcaagtacatacttgctcagtacaatactaccaaggacaaagcatttacagacctaaactccattaacagcgttttgggagggggcatcctggatcggttgagacctaatattattccagtgctcgatgagattaaatcaatggctacggctattaaagaaaccaaagaggcacttgagaacatgaattcaacgctgaaatccctgcatcagcaaagcacccagctctcaagttcactgactagcgtcaaaacaagcctgagatcatctcttaacgaccccctctgtttggtgcatccatcttccgaaacctgtaattctatacgcttaagcttatcccagttaaactcgaaccccgaactgcgccagctacccccggtcgacgccgagctggataatgttaacaatgtgttgagaactgaccttgacggactagtgcagcaggggtaccagtctctcaatgatattcccgatcgcgtgcagcgccagactacaactgttgtagccggcatcaagagagtgctcaattccatcggcagcgacatcgacaacgtcacgcagcgtctacccattcaggatatcttaagcgccttttcagtctatgtcaacaacactgaatcctacattcacagaaatttgccgacactcgaggagtacgattcctactggtggctgggtggactggtcatttgctccctgttaaccctaattgtaatcttttactatctaggactgttatgcggcgtatgcgggtatgaccgccacgccacccccaccacccgcgggtgtgtcagcaataccggtggcgtttttctgatggtgggagtgggcttaagcttcctgttttgctggattctgatgattattgtcgttctgacctttgtattcggggcaaatgtggaaaaactgatttgcgagccatatacctcaaaagagctgttccgtgtgctcgataccccctatctcctcaacgaagactgggagtattatttgagtggaaagctattcaacaaatctaaaatgaaactgactttcgaacaggtttactcagactgtaagaaaaacagagggacatatggaaccctccacctgcaaaactccttcaatataagtgagcacttaaacataaatgagcatactggctctatctcttctgagttggagagcttgaaagtaaatctgaatatttttctattgggcgctgccggtcgtaaaaacctccaggatttcgccgcttgcggcatcgacagaatgaactacgatagctatcttgcgcaaacggggaaatctccagccggtgtcaacctgttaagtttcgcctatgacctagaggcaaaggcgaacagtctaccccccggaaatctgagaaattccttgaagagagacgcgcagacgataaagactatccaccagcaacgcgtgttacctattgagcagtcactgtcaaccttataccagtcagtgaagattttgcagcggacggggaatggactcctcgaaagagtcaccagaattctcgctagcctggactttgcccagaactttataacaaacaacacctcatctgtgatcatcgaggaaacaaagaagtatggccggactataatcgggtatttcgagcactacctacagtggatcgaatttagcatcagtgaaaaagtcgcctcatgcaaaccggtcgccacggccctggatacggccgtggatgtctttctgtgttcctacattatagacccactaaacctgttttggttcggcatcggaaaggcgacagtgttcttattacctgcactcatatttgcggtaaaactggcaaagtattatcggaggatggattcagaagatgtgtacgacgacgtcgaaaccataccaatgaaaaatatggaaaatggcaataatggctaccacaaggatcatgtgtatggcatccacaatcccgtcatgacctctcctagccagcattag

SEQ ID NO: 302751 - DNA, 2598 bp, Artificial Sequence
  derived and/or modified sequence
atggccctggtgctgggcagcctgctgctgctgggcctgtgtggcaacagcttcagcggcggccagcccagcagcacagatgcccccaaggcctggaactatgagctgcctgccaccaactatgagacccaggacagccacaaggccggccccatcggcatcctgtttgagctggtgcacatcttcctgtatgtggtgcagccccgggacttccctgaggacaccctgaggaagttcctgcagaaggcctatgagagcaagattgattatgacaagccagagaccgtcatcctgggcctgaagatcgtgtactatgaagctggcatcatcctgtgctgcgtgctgggcctgctcttcatcatcctgatgcccctggtgggctacttcttctgcatgtgccgctgctgcaacaagtgtggcggggagatgcaccagaggcagaaggaaaatggccccttcctgaggaagtgctttgccatcagcctgctggtgatctgcatcatcatcagcatcggcatcttctacggctttgtggccaaccaccaggtgaggacccgcatcaagaggagcaggaagctggccgacagcaacttcaaggacctgcggaccctgctgaatgagaccccagagcagatcaagtacatcctggcccagtacaacaccaccaaggacaaggccttcacagacctgaacagcatcaacagcgtgctgggcggcggcatcctggaccggctgcggcccaacatcatccctgtgctggatgagatcaagtccatggccacagccatcaaggagaccaaggaggccctggagaacatgaacagcaccctgaagagcctgcaccagcagagcacccagctgagcagcagcctgacctctgtgaagaccagcctgcggagcagcctgaatgaccccctgtgcctggtgcaccccagcagcgagacctgcaacagcatccggctgagcctgagccagctgaacagcaaccctgagctgcggcagctgccccctgtggatgctgagctggacaacgtgaacaacgtgctgaggacagacctggatggcctggtgcagcagggctaccagagcctgaatgacatcccagacagagtgcagaggcagaccaccaccgtggtggccggcatcaagagggtgctgaacagcattggaagtgacatcgacaacgtgacccagaggctgcccatccaggacatcctgagcgccttctctgtgtatgtgaacaacacagagagctacatccacaggaacctgcccaccctggaggagtatgacagctactggtggctgggcggcctggtgatctgcagcctgctgaccctcatcgtcatcttctactacctgggcctgctgtgtggggtgtgtggctatgacagacatgccacccccaccacccggggctgtgtgagcaacacaggaggagtcttcctgatggtgggcgtgggcctgtccttcctgttctgctggatcctgatgatcatcgtggtgctgacctttgtgtttggagccaacgtggagaagctgatctgtgagccctacaccagcaaggagctgttccgggtgctggacaccccctacctgctgaatgaagactgggagtactacctgagcggcaagctgttcaacaagagcaagatgaagctgacctttgagcaggtgtacagcgactgcaagaagaacagaggcacctacggcaccctgcacctgcagaacagcttcaacatcagcgagcacctgaacatcaatgagcacacaggcagcatcagcagcgagctggagagcctgaaggtgaacctgaacatcttcctgctgggcgctgctggcaggaagaacctgcaggactttgctgcctgtggcatcgacaggatgaactatgacagctacctggcccagacaggcaagagccctgctggggtgaacctgctgagctttgcctatgacctggaggccaaggccaacagcctgcccccaggcaacctgaggaacagcctgaagagagatgcccagaccatcaagaccatccaccagcagagggtgctgcccatcgagcagagcctgagcaccctgtaccagagcgtgaagatcctgcagaggactggaaatggcctgctggagcgggtgacccgcatcctggccagcctggactttgcccagaacttcatcaccaacaacaccagcagcgtcatcatcgaggagaccaagaagtatggccgcaccatcatcggctactttgagcactacctgcagtggattgagttcagcatcagcgagaaggtggccagctgcaagcctgtggccacagccctggacacagctgtggatgtgttcctgtgcagctacatcatcgaccccctgaacctcttctggtttggcatcggcaaggccaccgtcttcctgctgcctgccctgatctttgctgtgaagctggccaagtactacagaaggatggacagtgaagatgtgtatgatgatgtggagaccatccccatgaagaacatggagaatggaaacaacggctaccacaaggaccacgtgtatggcatccacaaccctgtgatgaccagccccagccagcactag

SEQ ID NO: 302752 - DNA, 123 bp, Artificial Sequence
  derived and/or modified sequence
atggccctggtgctgggcagcctgctgctgctgggcctgtgtggcaacagcttcagcggcggccagcccagcagcacagatgcccccaaggcctggaactatgagctgcctgccaccaactag

SEQ ID NO: 302753 - DNA, 2598 bp, Artificial Sequence
  derived and/or modified sequence
atggccctggtgctgggcagcctgctgctgctgggcctgtgcggcaattcattttcgggcggtcagcccagtagcactgatgcccctaaggcttggaactacgaattaccagccactaattacgagacacaggatagccacaaggcagggccaataggaattctcttcgaacttgtgcacatatttctgtacgtggttcagcctagggatttcccagaggacaccctgagaaagttcctgcagaaggcctacgaaagcaagatcgactatgacaagcccgagacagtgattttggggctgaagattgtctactatgaagccggaatcattctgtgctgtgtgctggggttattatttatcatcctgatgccactcgtaggctacttcttttgcatgtgccgctgctgtaataagtgcggaggtgaaatgcatcagcgtcaaaaggaaaatggcccatttctgcggaaatgttttgcaatctcactgctggtgatatgtatcattatctcaatcgggatattctacggttttgtggcaaaccaccaagttcgcacgagaattaagagaagccgcaagctggccgattcgaattttaaagacttgagaaccctcctgaacgagacccccgaacaaattaaatacattctagcccagtacaacaccacaaaggataaggctttcacagatctcaatagcattaactctgtgcttggcggcggaattctggatagactgagacccaacatcatccccgtcctggacgaaatcaagtccatggcaactgctattaaggaaacgaaggaagcccttgagaacatgaattctactctcaaatcactccatcagcagagcacacaactctcctcgtctctgacctcagtgaagacgagtctgaggtcctctctgaatgaccccctgtgcctggttcacccatcttctgagacttgtaatagcattagactgagcctgagtcagctaaattccaaccctgagctgcggcaactaccacccgttgatgccgagctcgacaatgtcaacaacgtgttacggaccgatcttgacgggcttgtgcaacaagggtaccagtctcttaacgatattcccgaccgggtgcaaagacaaacaacaacagtagtcgcggggatcaagcgtgttctgaattccatcgggagtgacatcgataatgtgacccagcgactgcccatccaggacatactgagcgccttctcggtgtacgttaataacactgaatcgtacattcacaggaacctgcccaccctggaggaatacgatagctattggtggttgggagggctcgtcatttgttccctgcttactctgatcgtcatcttctactatttaggacttctgtgtggcgtgtgtgggtatgacagacatgcaacacccacaacccgtggatgtgtgagcaacacagggggagtttttctcatggtgggggtcgggcttagctttttgttctgctggatcctaatgatcatagtggttctaacatttgtctttggggcaaatgtcgaaaaacttatctgcgaaccctatacgagcaaggaactgttccgggtgctggatactccctatctgctcaacgaagactgggagtactacctctcgggaaagctgttcaataaaagcaaaatgaagctgacgttcgaacaagtgtattccgattgcaagaaaaatcgtgggacttacggaacactgcaccttcagaacagcttcaatataagcgagcatctgaatattaatgagcacactggctcgatctcatctgaactagaaagcctgaaggtgaatctgaatatattcctgcttggggccgccgggcgtaagaacctgcaggactttgccgcctgtggaatcgatcggatgaactacgattcttacctggcacaaaccggcaagtcaccagcaggcgtaaaccttctcagttttgcatatgatctcgaggccaaggccaactcccttccgccagggaacttgaggaacagtctcaagcgagacgctcaaacaatcaagactatacaccagcagagggtgctgccaatcgaacagagccttagcacgctgtaccaatctgtgaaaatattgcagcgcaccggcaatggcctgctggagcgcgttacacgcatcttggcgtcacttgatttcgcgcaaaattttattactaataacacgtcgagcgtaattatcgaggagaccaagaagtatgggaggacaattatcgggtatttcgagcattacctgcaatggattgaatttagtatttcagagaaggtcgcgagttgcaagccagtggcaacagcactggacacggcggtggatgtgtttctgtgttcctacatcatcgacccattgaacctcttctggtttgggattggtaaggccacagtgttcctcctcccagcacttatctttgcagtcaagctcgctaagtattacagaagaatggattctgaagacgtgtacgatgatgtcgagacaattcctatgaaaaatatggagaatggtaataacgggtaccataaagatcacgtctatggtattcataacccagttatgacttccccctcacagcattag

SEQ ID NO: 302754 - DNA, 123 bp, Artificial Sequence
  derived and/or modified sequence
atggccctggtgctgggcagcctgctgctgctgggcctgtgcggcaattcatttagtggcggacagcccagcagtactgacgcaccaaaagcatggaactacgaattgccagctacaaactag

SEQ ID NO: 302755 - DNA, 2598 bp, Artificial Sequence
  derived and/or modified sequence
atggccctggtgctgggcagcctgctgctgctgggcctgtgcggcaattccttcagtggtggacaaccttcatccaccgatgcgcctaaagcctggaattatgaactgcccgcgacaaactatgagactcaggatagccataaagccggaccaattggcattttattcgaacttgtacatatcttcctctatgtcgtccaaccgcgagattttccagaagatactcttcggaaatttctgcagaaagcatacgaatccaaaatcgactatgataagcctgaaacagtaatccttgggctgaagattgtatattatgaagcggggattattctctgctgcgttctcggactgctctttattattttgatgccgctcgtgggatatttcttctgcatgtgtcggtgctgtaataaatgcggaggggagatgcaccagagacagaaagaaaacggccccttcctaaggaagtgttttgctatctctctgttagtgatatgcattatcatcagcatcggcattttttacggatttgtcgctaaccaccaggtgagaacccgcattaaacggagcaggaaattggccgactccaacttcaaagatctgagaaccctgttgaacgaaacgcctgagcagattaagtatatcctagcgcagtacaataccacaaaagataaagcgttcactgatttgaactccatcaatagcgtgctcgggggtggaattctcgataggctgcgtcccaacattatcccagtgctggatgagataaagagcatggctaccgccattaaggaaacaaaggaagcccttgagaacatgaacagtaccttgaagtctctgcaccagcagtccactcaactgagctcaagtctcacttccgtgaagaccagcctgcgatcctcccttaacgatccactttgtctagtgcatccttcttctgaaacttgtaatagcattcggttgtctttgtcccagctcaattccaatccggaactaaggcagctgcccccggtcgatgcggaactggataacgtaaataacgtgctcagaaccgacctggatggactggtgcaacagggttatcagtcgctgaacgacattccggaccgggtgcagcgccagacaacaaccgtggtcgccggcataaagagggtgcttaacagcattgggagcgacatagataacgtgactcagcgcctgcctatccaggacattctatctgccttcagcgtgtacgtgaataataccgaatcctatatccacaggaatcttcctacactggaagaatacgatagctactggtggctcgggggcctggtaatttgcagtttacttaccctgattgtgattttttactacctcgggctactttgcggagtttgcgggtatgatcgccacgcgacaccgacaaccaggggttgcgtcagcaacaccggaggtgtcttccttatggtgggcgtgggcttgtccttcctgttttgctggattctaatgatcatcgtggttcttacctttgtttttggtgcaaacgtcgagaaactgatttgcgagccctatacgtcgaaggagctgttccgggtcctggatactccttacctgcttaacgaagattgggagtattacctgagcggaaaactgttcaacaagtctaaaatgaaactgacctttgagcaggtttacagcgattgtaagaaaaacagagggacttacggaaccttacatctacagaattcctttaacatatctgagcacctcaatattaatgaacatacgggctcaattagcagtgaactggagtccctcaaggttaacctcaacatatttttattgggcgccgccggccggaaaaacctgcaggacttcgctgcatgtgggattgaccgcatgaactatgattcataccttgcacaaacagggaagagccccgcaggggtgaacctgctctcgttcgcctacgatctagaagccaaggccaactccctcccgcctgggaatcttaggaacagtctcaagcgggatgcacagacaattaagaccattcaccaacaacgggtcctgccaatcgagcaatcactatccacactttatcagtcagttaaaatcctccaacgcacaggcaatgggctgctagaacgagttactaggatcctcgcttcccttgatttcgctcagaatttcatcacaaataacaccagttccgtgattatcgaggaaaccaagaagtacgggagaaccatcataggttatttcgaacattacctccagtggatcgagttttctatttccgagaaagtcgcatcttgcaagcccgtggcaaccgcactggacactgcggtggatgttttcctctgcagctacatcatagatccactcaatcttttctggtttggcatcggtaaggccaccgttttcctgctgcccgcactcatattcgcggtgaagctcgcaaaatactaccgacgtatggatagcgaggacgtgtacgatgacgtggaaactatcccaatgaaaaacatggagaacggtaacaacggctaccacaaggatcacgtgtacggcattcacaatccagtaatgacctctcctagccagcattag

SEQ ID NO: 302756 - DNA, 2598 bp, Artificial Sequence
  derived and/or modified sequence
atggctctggtcctcggctctctcctgctccttggcctgtgtggcaacagttttagtggaggacaaccaagttccacagacgcaccaaaggcatggaattacgaactgccagcaaccaattatgaaacacaggactctcacaaggccggaccaatcgggattctcttcgaactggtgcacatttttctttacgtggtgcaaccaagagatttccccgaggatactctgagaaaattcttgcaaaaagcctacgaatccaagattgattacgacaagcctgaaacagtgatcctcgggctcaaaatcgtctattatgaggctggaataattctgtgttgtgtcctcgggctactattcataatattaatgccgctggttggatacttcttctgtatgtgtcggtgttgtaataaatgtggaggagaaatgcatcagaggcagaaagagaacggcccttttttgagaaagtgttttgccatctccctcttggtgatttgcataatcattagcatcggaattttctatggatttgtggcaaatcatcaggtgcggactcgcatcaaaagatcccgtaaactggccgactctaactttaaggacttacgaaccctcctcaatgaaacccctgaacagattaaatacattctagcacagtacaacaccactaaggataaggcattcaccgatttgaacagcataaactctgtgctggggggagggattctggaccgcctgaggccaaacattattccagtgctcgatgagatcaagtctatggccaccgccatcaaagaaaccaaagaggcgctggagaatatgaatagcacactgaagtcacttcaccaacagtccactcagcttagctcgtctctgacctcagttaagacctctctgagatcatctctcaacgacccactttgtctggtacatccttctagtgagacctgcaactccatccggctatccctgtctcaattaaattccaatcccgagctacggcagctgccccctgttgacgcggaactcgacaacgtgaacaacgtgctcagaacagatctcgacggcctggtccagcaggggtatcagagcctgaatgacatcccagacagagtccagcgccaaaccactaccgtggtggctggcatcaagagagtgcttaattccataggaagtgatattgacaatgtaacccagcggctgcctatccaagacatcctgtctgcctttagcgtctacgtcaataacacagaatcttacatacaccgcaatctgcctacgttagaagaatatgacagttactggtggttgggtgggctcgttatatgttctctcctgactctgatcgtgattttctactacctgggattattatgtggcgtttgtggttacgaccggcacgccaccccgaccactagaggctgtgtgagcaataccgggggtgtgttcctgatggtaggagtcggcctaagttttttattttgttggatcttgatgatcattgtagtcctgacattcgtgttcggggctaatgtagaaaaactgatctgcgaaccctacactagcaaagaactctttcgagtgctagacacaccttaccttctgaatgaagactgggagtattacctgtcaggtaagctcttcaataaatccaaaatgaagctcacattcgagcaggtctactcggattgcaaaaaaaataggggtacatatgggacactgcaccttcagaattcattcaacatatctgagcatctcaacataaacgagcacaccggcagtatatcgagcgaattggagagcttgaaggtcaacttgaacatcttcttgctgggcgcagccggacgaaaaaacctccaggacttcgcagcatgtgggattgatcggatgaactacgacagttatctcgcacagactggaaaaagtcccgctggtgtgaatctgctgagtttcgcgtacgatttggaggccaaagccaattcattacctccaggaaaccttcggaattcactcaagcgggatgcgcagaccataaagacaattcaccagcagagggtcttgcccatcgagcaatctctgtctaccctgtatcagtccgttaaaatcttacaaaggaccgggaatggtctgctagagcgtgtgaccagaattcttgcatcattggatttcgctcaaaattttatcactaacaatacgtcctctgtcattatcgaagagacgaaaaaatacgggcgaactatcattggatacttcgagcactacctacaatggatagagttcagtatctcagagaaggtcgccagctgtaagcccgtcgctacagctctcgacacagccgtcgatgtgtttctctgtagctacatcattgacccattgaatctgttttggttcgggattggaaaagccaccgttttcctcctcccagcactgatcttcgctgttaaattagcaaaatactaccgcaggatggattcagaggacgtgtatgacgatgttgagaccatccctatgaagaacatggaaaacgggaataatggctatcataaggatcacgtgtatgggattcacaaccccgtcatgacctcacctagccagcattag

SEQ ID NO: 302757 - DNA, 123 bp, Artificial Sequence
  derived and/or modified sequence
atggccctcgtactgggtagcctgttactgctggggctctgcggtaatagtttttcaggcggacaaccatcttctaccgacgcccctaaagcctggaattatgaacttcctgcgacaaactag

SEQ ID NO: 302758 - DNA, 2598 bp, Artificial Sequence
  derived and/or modified sequence
atggcccttgtgttgggctctctgttattgctaggattgtgcggtaacagctttagcgggggtcagccttcctcaactgatgcccctaaagcatggaactatgaactgcccgctaccaattacgagacccaggactcccataaagcgggaccgattggaatattattcgaactcgtgcatatttttctgtatgtggttcagccacgtgattttcctgaggacacgcttaggaaatttctgcagaaagcctatgaaagtaagattgactatgacaaaccagagacagtgattctgggtttgaagatcgtttactatgaagctggtattatcctctgttgcgttcttggactcctgtttataatattgatgcctctggtcgggtatttcttctgcatgtgcaggtgctgcaataagtgcgggggagagatgcatcagcgtcagaaggagaatggcccattcctgagaaaatgctttgccatcagtctactggttatatgtattatcatcagtattggaattttctacgggtttgtagccaatcatcaggtgagaactcgcattaaaagaagccggaagttggccgattccaatttcaaagatctgcgcacattattgaacgagactccagaacagatcaagtacattttggcccagtacaataccacgaaagacaaagcattcaccgatctaaactccattaatagtgttctgggagggggaattctggatagacttcgcccaaacattatccctgtgctggacgaaatcaagtcgatggccacagccatcaaggagactaaggaagcccttgaaaacatgaatagcactctgaaatccttgcaccagcagagcactcagctctctagctccctgactagtgtcaaaacttccttgaggtccagcctaaatgacccactctgcttggtacacccttcctccgagacatgtaattccattcgcctctctctgtcccaactcaactctaaccctgaactccgtcagctgcccccagtggatgcagaacttgacaatgtcaacaacgtgctcaggactgacctggatgggctggtgcagcagggctaccagtcactgaatgacatccctgacagagtgcaaaggcagaccactaccgtggttgctggcatcaagagagtgctaaattctataggctctgatatagataacgtgactcagcggctccctattcaagacatcctgagtgcgttctcagtctacgtgaataatacagagagttacatccacagaaacctccccaccctggaagagtacgactcctactggtggttaggcggactggttatatgtagcctgcttacccttattgttatattctattatcttggcctgctgtgcggggtgtgtggctatgatcgccatgctacacccaccacaagaggctgcgtatcaaacactggcggagtgttcctgatggtgggggtgggattaagctttctcttctgttggatcctaatgattattgttgtattgacattcgtatttggagccaacgtagagaagctgatctgcgaaccctacactagtaaagaactattcagagtccttgacacaccttatctccttaatgaggactgggaatattatctcagcggcaaactttttaataagtccaaaatgaaattgactttcgaacaggtttacagcgactgtaaaaaaaacagagggacttacggcaccctccacctgcagaattcattcaacatttccgaacacttaaatatcaacgagcacacgggctccatcagtagcgagctcgaatccctcaaggtgaatctgaatatcttcctgctgggggctgccggtcgcaaaaatttacaggacttcgctgcatgcggtatagacaggatgaactatgattcgtatctggcgcagacgggaaaaagcccagcaggggtgaatttacttagtttcgcctatgacctggaagccaaagccaacagcctgcctcccggaaatctcagaaacagcctgaaaagagatgcacagaccattaagacgattcatcagcagcgggtcctgccaatcgagcaatcattatccactctttaccagagcgtcaagattctgcagaggactggtaacggcctcctggagcgggtcacgaggatcctggcatcccttgactttgcacagaactttatcaccaataatacaagctccgtcatcattgaggaaaccaaaaaatatgggcgaacaatcattggctacttcgaacactacctgcagtggatcgagtttagcatatcagaaaaggtggccagttgcaaaccagtggcaaccgcactggacacagccgtagacgtcttcctgtgctcttacattatcgatcctctgaacctgttttggtttggaatcggcaaggcaaccgtgttcctactgcctgctctgatttttgctgttaagcttgctaaatactatcgccgtatggactcagaagacgtgtacgacgatgtagagaccattccaatgaaaaacatggagaatggcaataacggttatcataaggatcatgtctatgggattcacaaccctgtcatgacgagccccagccagcattag

SEQ ID NO: 302759 - DNA, 3977 bp, Artificial Sequence
  derived and/or modified sequence
ggatggtgccttgagtgaatgacccccttggagaacattcttccgcatccctcgcctcaagccagcctcagacagaaaactgaagattcagcagatccagtgcttcctgctcctcttctgcccaggaacacgcttgccttccccaaggcttccagaagctctgaggcaggaggcaccaagttctacctcatgtttggaggatcttgctagctatggccctcgtactcggctccctgttgctgctggggctgtgcgggaactccttttcaggagggcagccttcatccacagatgctcctaaggcttggaattatgaattgcctgcaacaaattatgagacccaagactcccataaagctggacccattggcattctctttgaactagtgcatatctttctctatgtggtacagccgcgtgatttcccagaagatactttgagaaaattcttacagaaggcatatgaatccaaaattgattatgacaagccagaaactgtaatcttaggtctaaagattgtctactatgaagcagggattattctatgctgtgtcctggggctgctgtttattattctgatgcctctggtggggtatttcttttgtatgtgtcgttgctgtaacaaatgtggtggagaaatgcaccagcgacagaaggaaaatgggcccttcctgaggaaatgctttgcaatctccctgttggtgatttgtataataataagcattggcatcttctatggttttgtggcaaatcaccaggtaagaacccggatcaaaaggagtcggaaactggcagatagcaatttcaaggacttgcgaactctcttgaatgaaactccagagcaaatcaaatatatattggcccagtacaacactaccaaggacaaggcgttcacagatctgaacagtatcaattcagtgctaggaggcggaattcttgaccgactgagacccaacatcatccctgttcttgatgagattaagtccatggcaacagcgatcaaggagaccaaagaggcgttggagaacatgaacagcaccttgaagagcttgcaccaacaaagtacacagcttagcagcagtctgaccagcgtgaaaactagcctgcggtcatctctcaatgaccctctgtgcttggtgcatccatcaagtgaaacctgcaacagcatcagattgtctctaagccagctgaatagcaaccctgaactgaggcagcttccacccgtggatgcagaacttgacaacgttaataacgttcttaggacagatttggatggcctggtccaacagggctatcaatcccttaatgatatacctgacagagtacaacgccaaaccacgactgtcgtagcaggtatcaaaagggtcttgaattccattggttcagatatcgacaatgtaactcagcgtcttcctattcaggatatactctcagcattctctgtttatgttaataacactgaaagttacatccacagaaatttacctacattggaagagtatgattcatactggtggctgggtggcctggtcatctgctctctgctgaccctcatcgtgattttttactacctgggcttactgtgtggcgtgtgcggctatgacaggcatgccaccccgaccacccgaggctgtgtctccaacaccggaggcgtcttcctcatggttggagttggattaagtttcctcttttgctggatattgatgatcattgtggttcttacctttgtctttggtgcaaatgtggaaaaactgatctgtgaaccttacacgagcaaggaattattccgggttttggatacaccctacttactaaatgaagactgggaatactatctctctgggaagctatttaataaatcaaaaatgaagctcacttttgaacaagtttacagtgactgcaaaaaaaatagaggcacttacggcactcttcacctgcagaacagcttcaatatcagtgaacatctcaacattaatgagcatactggaagcataagcagtgaattggaaagtctgaaggtaaatcttaatatctttctgttgggtgcagcaggaagaaaaaaccttcaggattttgctgcttgtggaatagacagaatgaattatgacagctacttggctcagactggtaaatcccccgcaggagtgaatcttttatcatttgcatatgatctagaagcaaaagcaaacagtttgcccccaggaaatttgaggaactccctgaaaagagatgcacaaactattaaaacaattcaccagcaacgagtccttcctatagaacaatcactgagcactctataccaaagcgtcaagatacttcaacgcacagggaatggattgttggagagagtaactaggattctagcttctctggattttgctcagaacttcatcacaaacaatacttcctctgttattattgaggaaactaagaagtatgggagaacaataataggatattttgaacattatctgcagtggatcgagttctctatcagtgagaaagtggcatcgtgcaaacctgtggccaccgctctagatactgctgttgatgtctttctgtgtagctacattatcgaccccttgaatttgttttggtttggcataggaaaagctactgtatttttacttccggctctaatttttgcggtaaaactggctaagtactatcgtcgaatggattcggaggacgtgtacgatgatgttgaaactatacccatgaaaaatatggaaaatggtaataatggttatcataaagatcatgtatatggtattcacaatcctgttatgacaagcccatcacaacattgatagctgatgttgaaactgcttgagcatcaggatactcaaagtggaaaggatcacagatttttggtagtttctgggtctacaaggactttccaaatccaggagcaacgccagtggcaacgtagtgactcaggcgggcaccaaggcaacggcaccattggtctctgggtagtgctttaagaatgaacacaatcacgttatagtccatggtccatcactattcaaggatgactccctcccttcctgtctatttttgttttttacttttttacactgagtttctatttagacactacaacatatggggtgtttgttcccattggatgcatttctatcaaaactctatcaaatgtgatggctagattctaacatattgccatgtgtggagtgtgctgaacacacaccagtttacaggaaagatgcattttgtgtacagtaaacggtgtatataccttttgttaccacagagttttttaaacaaatgagtattataggactttcttctaaatgagctaaataagtcaccattgacttcttggtgctgttgaaaataatccattttcactaaaagtgtgtgaaacctacagcatattcttcacgcagagattttcatctattatactttatcaaagattggccatgttccacttggaaatggcatgcaaaagcaatcatagagaaacctgcgtaactccatctgacaaattcaaaagagagagagagatcttgagagagaaatgctgttcgttcaaaagtggagttgttttaacagatgccaattacggtgtacagtttaacagagttttctgttgcattacgataaacattaattggagtgcagctaacatgagtatcatcagactagtatcaagtgttctaaaatgaaatatgagaagatcctgtcacaattcttagatctggtgtccagcatggatgaaacctttgagtttggtccctaaatttgcatgaaagcacaaggtaaatattcatttgcttcaggagtttcatgttggatctgtcattatcaaaagtgatcagcaatgaagaactggtcggacaaaatttaacgttgatgtaatgaaattccagatgtaggcattccccccaggtcttttcatgtgcagattgcagttctgattcatttgaataaaaaggaacttggaaaacatg

SEQ ID NO: 302760 - DNA, 4006 bp, Artificial Sequence
  derived and/or modified sequence
gactagggcgggagcaggagcgggagccgggtgcacgggatggtgccttgagtgaatgacccccttggagaacattcttccgcatccctcgcctcaagccagcctcagacagaaaactgaagattcagcagatccagtgcttcctgctcctcttctgcccaggaacacgcttgccttccccaaggcttccagaagctctgaggcaggaggcaccaagttctacctcatgtttggaggatcttgctagctatggccctcgtactcggctccctgttgctgctggggctgtgcgggaactccttttcaggagggcagccttcatccacagatgctcctaaggcttggaattatgaattgcctgcaacaaattatgagacccaagactcccataaagctggacccattggcattctctttgaactagtgcatatctttctctatgtggtacagccgcgtgatttcccagaagatactttgagaaaattcttacagaaggcatatgaatccaaaattgattatgacaagccagaaactgtaatcttaggtctaaagattgtctactatgaagcagggattattctatgctgtgtcctggggctgctgtttattattctgatgcctctggtggggtatttcttttgtatgtgtcgttgctgtaacaaatgtggtggagaaatgcaccagcgacagaaggaaaatgggcccttcctgaggaaatgctttgcaatctccctgttggtgatttgtataataataagcattggcatcttctatggttttgtggcaaatcaccaggtaagaacccggatcaaaaggagtcggaaactggcagatagcaatttcaaggacttgcgaactctcttgaatgaaactccagagcaaatcaaatatatattggcccagtacaacactaccaaggacaaggcgttcacagatctgaacagtatcaattcagtgctaggaggcggaattcttgaccgactgagacccaacatcatccctgttcttgatgagattaagtccatggcaacagcgatcaaggagaccaaagaggcgttggagaacatgaacagcaccttgaagagcttgcaccaacaaagtacacagcttagcagcagtctgaccagcgtgaaaactagcctgcggtcatctctcaatgaccctctgtgcttggtgcatccatcaagtgaaacctgcaacagcatcagattgtctctaagccagctgaatagcaaccctgaactgaggcagcttccacccgtggatgcagaacttgacaacgttaataacgttcttaggacagatttggatggcctggtccaacagggctatcaatcccttaatgatatacctgacagagtacaacgccaaaccacgactgtcgtagcaggtatcaaaagggtcttgaattccattggttcagatatcgacaatgtaactcagcgtcttcctattcaggatatactctcagcattctctgtttatgttaataacactgaaagttacatccacagaaatttacctacattggaagagtatgattcatactggtggctgggtggcctggtcatctgctctctgctgaccctcatcgtgattttttactacctgggcttactgtgtggcgtgtgcggctatgacaggcatgccaccccgaccacccgaggctgtgtctccaacaccggaggcgtcttcctcatggttggagttggattaagtttcctcttttgctggatattgatgatcattgtggttcttacctttgtctttggtgcaaatgtggaaaaactgatctgtgaaccttacacgagcaaggaattattccgggttttggatacaccctacttactaaatgaagactgggaatactatctctctgggaagctatttaataaatcaaaaatgaagctcacttttgaacaagtttacagtgactgcaaaaaaaatagaggcacttacggcactcttcacctgcagaacagcttcaatatcagtgaacatctcaacattaatgagcatactggaagcataagcagtgaattggaaagtctgaaggtaaatcttaatatctttctgttgggtgcagcaggaagaaaaaaccttcaggattttgctgcttgtggaatagacagaatgaattatgacagctacttggctcagactggtaaatcccccgcaggagtgaatcttttatcatttgcatatgatctagaagcaaaagcaaacagtttgcccccaggaaatttgaggaactccctgaaaagagatgcacaaactattaaaacaattcaccagcaacgagtccttcctatagaacaatcactgagcactctataccaaagcgtcaagatacttcaacgcacagggaatggattgttggagagagtaactaggattctagcttctctggattttgctcagaacttcatcacaaacaatacttcctctgttattattgaggaaactaagaagtatgggagaacaataataggatattttgaacattatctgcagtggatcgagttctctatcagtgagaaagtggcatcgtgcaaacctgtggccaccgctctagatactgctgttgatgtctttctgtgtagctacattatcgaccccttgaatttgttttggtttggcataggaaaagctactgtatttttacttccggctctaatttttgcggtaaaactggctaagtactatcgtcgaatggattcggaggacgtgtacgatgatgttgaaactatacccatgaaaaatatggaaaatggtaataatggttatcataaagatcatgtatatggtattcacaatcctgttatgacaagcccatcacaacattgatagctgatgttgaaactgcttgagcatcaggatactcaaagtggaaaggatcacagatttttggtagtttctgggtctacaaggactttccaaatccaggagcaacgccagtggcaacgtagtgactcaggcgggcaccaaggcaacggcaccattggtctctgggtagtgctttaagaatgaacacaatcacgttatagtccatggtccatcactattcaaggatgactccctcccttcctgtctatttttgttttttacttttttacactgagtttctatttagacactacaacatatggggtgtttgttcccattggatgcatttctatcaaaactctatcaaatgtgatggctagattctaacatattgccatgtgtggagtgtgctgaacacacaccagtttacaggaaagatgcattttgtgtacagtaaacggtgtatataccttttgttaccacagagttttttaaacaaatgagtattataggactttcttctaaatgagctaaataagtcaccattgacttcttggtgctgttgaaaataatccattttcactaaaagtgtgtgaaacctacagcatattcttcacgcagagattttcatctattatactttatcaaagattggccatgttccacttggaaatggcatgcaaaagcaatcatagagaaacctgcgtaactccatctgacaaattcaaaagagagagagagatcttgagagagaaatgctgttcgttcaaaagtggagttgttttaacagatgccaattacggtgtacagtttaacagagttttctgttgcattacgataaacattaattggagtgcagctaacatgagtatcatcagactagtatcaagtgttctaaaatgaaatatgagaagatcctgtcacaattcttagatctggtgtccagcatggatgaaacctttgagtttggtccctaaatttgcatgaaagcacaaggtaaatattcatttgcttcaggagtttcatgttggatctgtcattatcaaaagtgatcagcaatgaagaactggtcggacaaaatttaacgttgatgtaatgaaattccagatgtaggcattccccccaggtcttttcatgtgcagattgcagttctgattcatttgaataaaaaggaacttgg

SEQ ID NO: 302761 - DNA, 2598 bp, Artificial Sequence
  derived and/or modified sequence
atggccctggtgctgggcagcctgctgctgctgggcctgtgcggcaacagcttcagcggcggccagcccagcagcaccgacgcccccaaggcctggaactacgagctgcccgccaccaactacgagacccaggacagccacaaggccggccccatcggcatcctgttcgagctggtgcacatcttcctgtacgtggtgcagcccagagacttccccgaggacaccctgagaaagttcctgcagaaggcctacgagagcaagatcgactacgacaagcccgagaccgtgatcctgggcctgaagatcgtgtactacgaggccggcatcatcctgtgctgcgtgctgggcctgctgttcatcatcctgatgcccctggtgggctacttcttctgcatgtgcagatgctgcaacaagtgcggcggcgagatgcaccagagacagaaggagaacggccccttcctgagaaagtgcttcgccatcagcctgctggtgatctgcatcatcatcagcatcggcatcttctacggcttcgtggccaaccaccaggtgagaaccagaatcaagagaagcagaaagctggccgacagcaacttcaaggacctgagaaccctgctgaacgagacccccgagcagatcaagtacatcctggcccagtacaacaccaccaaggacaaggccttcaccgacctgaacagcatcaacagcgtgctgggcggcggcatcctggacagactgagacccaacatcatccccgtgctggacgagatcaagagcatggccaccgccatcaaggagaccaaggaggccctggagaacatgaacagcaccctgaagagcctgcaccagcagagcacccagctgagcagcagcctgaccagcgtgaagaccagcctgagaagcagcctgaacgaccccctgtgcctggtgcaccccagcagcgagacctgcaacagcatcagactgagcctgagccagctgaacagcaaccccgagctgagacagctgccccccgtggacgccgagctggacaacgtgaacaacgtgctgagaaccgacctggacggcctggtgcagcagggctaccagagcctgaacgacatccccgacagagtgcagagacagaccaccaccgtggtggccggcatcaagagagtgctgaacagcatcggcagcgacatcgacaacgtgacccagagactgcccatccaggacatcctgagcgccttcagcgtgtacgtgaacaacaccgagagctacatccacagaaacctgcccaccctggaggagtacgacagctactggtggctgggcggcctggtgatctgcagcctgctgaccctgatcgtgatcttctactacctgggcctgctgtgcggcgtgtgcggctacgacagacacgccacccccaccaccagaggctgcgtgagcaacaccggcggcgtgttcctgatggtgggcgtgggcctgagcttcctgttctgctggatcctgatgatcatcgtggtgctgaccttcgtgttcggcgccaacgtggagaagctgatctgcgagccctacaccagcaaggagctgttcagagtgctggacaccccctacctgctgaacgaggactgggagtactacctgagcggcaagctgttcaacaagagcaagatgaagctgaccttcgagcaggtgtacagcgactgcaagaagaacagaggcacctacggcaccctgcacctgcagaacagcttcaacatcagcgagcacctgaacatcaacgagcacaccggcagcatcagcagcgagctggagagcctgaaggtgaacctgaacatcttcctgctgggcgccgccggcagaaagaacctgcaggacttcgccgcctgcggcatcgacagaatgaactacgacagctacctggcccagaccggcaagagccccgccggcgtgaacctgctgagcttcgcctacgacctggaggccaaggccaacagcctgccccccggcaacctgagaaacagcctgaagagagacgcccagaccatcaagaccatccaccagcagagagtgctgcccatcgagcagagcctgagcaccctgtaccagagcgtgaagatcctgcagagaaccggcaacggcctgctggagagagtgaccagaatcctggccagcctggacttcgcccagaacttcatcaccaacaacaccagcagcgtgatcatcgaggagaccaagaagtacggcagaaccatcatcggctacttcgagcactacctgcagtggatcgagttcagcatcagcgagaaggtggccagctgcaagcccgtggccaccgccctggacaccgccgtggacgtgttcctgtgcagctacatcatcgaccccctgaacctgttctggttcggcatcggcaaggccaccgtgttcctgctgcccgccctgatcttcgccgtgaagctggccaagtactacagaagaatggacagcgaggacgtgtacgacgacgtggagaccatccccatgaagaacatggagaacggcaacaacggctaccacaaggaccacgtgtacggcatccacaaccccgtgatgaccagccccagccagcactag

SEQ ID NO: 302762 - DNA, 123 bp, Artificial Sequence
  derived and/or modified sequence
atggccctggtgctgggcagcctgctgctgctgggcctgtgcggcaacagcttcagcggcggccagcccagcagcaccgacgcccccaaggcctggaactacgagctgcccgccaccaactag

SEQ ID NO: 302763 - protein, 58 aa, Artificial Sequence
  derived and/or modified sequence
MALVLGSLLLLGLCGNSFSGGQPSSTDAPKAWNYELPATNYETQDSHKAGPIGILFEL

SEQ ID NO: 302764 - protein, 830 aa, Artificial Sequence
  derived and/or modified sequence
MALVLGSLLLLGLCGNSFSGGQPSSTDAPKAWNYELPATNYETQDSHKAGPIGILFELVHIFLYVVQPRDFPEDTLRKFLQKAYESKIDYDKIVYYEAGIILCCVLGLLFIILMPLVGYFFCMCRCCNKCGGEMHQRQKENGPFLRKCFAISLLVICIIISIGIFYGFVANHQVRTRIKRSRKLADSNFKDLRTLLNETPEQIKYILAQYNTTKDKAFTDLNSINSVLGGGILDRLRPNIIPVLDEIKSMATAIKETKEALENMNSTLKSLHQQSTQLSSSLTSVKTSLRSSLNDPLCLVHPSSETCNSIRLSLSQLNSNPELRQLPPVDAELDNVNNVLRTDLDGLVQQGYQSLNDIPDRVQRQTTTVVAGIKRVLNSIGSDIDNVTQRLPIQDILSAFSVYVNNTESYIHRNLPTLEEYDSYWWLGGLVICSLLTLIVIFYYLGLLCGVCGYDRHATPTTRGCVSNTGGVFLMVGVGLSFLFCWILMIIVVLTFVFGANVEKLICEPYTSKELFRVLDTPYLLNEDWEYYLSGKLFNKSKMKLTFEQVYSDCKKNRGTYGTLHLQNSFNISEHLNINEHTGSISSELESLKVNLNIFLLGAAGRKNLQDFAACGIDRMNYDSYLAQTGKSPAGVNLLSFAYDLEAKANSLPPGNLRNSLKRDAQTIKTIHQQRVLPIEQSLSTLYQSVKILQRTGNGLLERVTRILASLDFAQNFITNNTSSVIIEETKKYGRTIIGYFEHYLQWIEFSISEKVASCKPVATALDTAVDVFLCSYIIDPLNLFWFGIGKATVFLLPALIFAVKLAKYYRRMDSEDVYDDSSWVTSVQC

SEQ ID NO: 302765 - DNA, 2493 bp, Artificial Sequence
  derived and/or modified sequence
atggctctcgtcctcggatccctcctgctgttggggctgtgtggtaacagcttcagcggaggtcagccctcctcaactgatgcgcctaaagcatggaattacgaacttccagcaacaaactacgagacccaggactcccataaggccggccccatcggcattctctttgagctcgtccacatctttctgtacgtggtgcagccacgcgattttcctgaagacacactgcgaaagttcttgcagaaagcatatgagtccaagatagactatgacaagatcgtttattacgaggccggtatcatactgtgttgtgtcctcgggctgttattcattatcctgatgcccctggttgggtacttcttttgcatgtgccgttgttgcaataaatgcggtggtgaaatgcaccagcgtcagaaggagaatggcccctttctgcgaaaatgctttgctatatcccttctggtgatttgcatcatcatttcaattgggatcttttacgggttcgtcgctaatcatcaagtccggacacgcatcaaacgcagcagaaagttggctgactctaactttaaagatcttcgtacccttctgaatgagacccccgagcagatcaagtacattctggcccagtataacacaactaaagacaaagctttcaccgacttgaactccattaattctgtgcttgggggcggcatactggaccggctccgccccaatatcatccccgtgcttgatgaaatcaagagtatggctacagccatcaaggagactaaggaggcactggaaaatatgaacagcacactcaaaagcttacaccagcagagcacccagcttagtagttctctgacgtccgtgaagacatctctgagatcaagcctgaatgaccccttgtgccttgtgcatcccagctcagagacttgtaactctatccgactgagcttgtctcagctgaacagtaatccagaactgcggcagctgccgccagtagacgctgaactggataacgtaaataatgtcttgcgtaccgatctagacgggctcgttcagcagggataccagtccctaaacgacattcccgaccgggtgcagcggcagactacgactgttgtggctggaattaagagggtgctaaacagcatcggcagcgacatcgataatgttacccagaggttgccgatccaggatattttatctgctttctctgtgtatgtcaacaataccgagagttacatccacagaaatctccctacattggaggaatatgactcctactggtggctgggaggccttgtaatttgtagtttgctgaccctgattgtgattttttactatttgggattgctctgcggggtctgtggctacgatcgccacgccacgcccacgaccaggggctgcgtctctaatacaggcggagtgtttctcatggttggggtgggcttatcatttctgttttgttggatactcatgatcatcgttgttttgacttttgtgttcggtgccaatgtagagaagcttatatgtgagccatacacaagcaaagagttatttcgggtactggacacaccctatttactaaatgaggattgggagtattatctgtccggcaaactgtttaataaaagcaagatgaagctcacgttcgagcaggtgtattccgattgtaaaaagaaccgtggtacatacggtaccttacacctgcaaaacagttttaacatctcggagcacttgaatatcaatgagcataccggtagtattagctctgagctggaatcactgaaggttaatctgaacatcttcctgctcggggcggcagggaggaaaaacctgcaggattttgcagcttgcggtatcgatcgcatgaactacgattcttatctggcccagaccggtaagtccccagcaggagtgaacctgttatcgttcgcctacgatctcgaggccaaggccaattcactgcctcctggcaaccttagaaacagtctgaagcgcgatgcacagactattaagacaatccatcagcaacgtgtgctgcctatcgagcagtccttgtctactctctatcaatctgtgaagattcttcagcgcacaggcaatggtctcctggaacgggttacgaggattcttgcatcactggacttcgcacaaaacttcattaccaataacacttctagtgtgataattgaggaaacgaagaagtacggccggacaatcatcggatatttcgagcactatttgcagtggatcgagttcagcataagcgagaaggtcgcttcttgcaagcccgtagcaacagcactcgatacagcggtagatgttttcctgtgtagctacattatcgatccgctaaatctgttctggttcggcatcggtaaggcaaccgtgttcctgctgcccgcactgatctttgctgtgaaactggcaaaatactaccgtagaatggacagcgaggacgtgtacgatgatagttcctgggtaacatccgtacagtgctag

SEQ ID NO: 302766 - DNA, 2493 bp, Artificial Sequence
  derived and/or modified sequence
atggccctggtgctgggcagcctgctgctgctgggcctgtgtggcaacagcttcagcggcggccagcccagcagcacagatgcccccaaggcctggaactatgagctgcctgccaccaactatgagacccaggacagccacaaggccggccccatcggcatcctgtttgagctggtgcacatcttcctgtatgtggtgcagccccgggacttccctgaggacaccctgaggaagttcctgcagaaggcctatgagagcaagattgattatgacaagatcgtgtactatgaggccggcatcatcctgtgctgcgtgctgggcctgctcttcatcatcctgatgcccctggtgggctacttcttctgcatgtgccgctgctgcaacaagtgtggcggggagatgcaccagaggcagaaggaaaatggccccttcctgaggaaatgttttgccatcagcctgctggtgatctgcatcatcatcagcatcggcatcttctacggctttgtggccaaccaccaggtgaggacccgcatcaagaggagcaggaagctggccgacagcaacttcaaggacctgcggaccctgctgaatgagaccccagagcagatcaagtacatcctggcccagtacaacaccaccaaggacaaggccttcacagacctgaacagcatcaacagcgtgctgggcggcggcatcctggaccggctgcggcccaacatcatccctgtgctggatgagatcaagtccatggccacagccatcaaggagaccaaggaggccctggagaacatgaacagcaccctgaagagcctgcaccagcagagcacccagctgagcagcagcctgacctctgtgaagaccagcctgcggagcagcctgaatgaccccctgtgcctggtgcaccccagcagcgagacctgcaacagcatccggctgagcctgagccagctgaacagcaaccctgagctgcggcagctgccccctgtggatgctgagctggacaacgtgaacaacgtgctgaggacagacctggatggcctggtgcagcagggctaccagagcctgaatgacatcccagacagagtgcagaggcagaccaccaccgtggtggccggcatcaagagggtgctgaacagcatcggcagtgacatcgacaacgtgacccagaggctgcccatccaggacatcctgagcgccttctctgtgtatgtgaacaacacagagagctacatccacaggaacctgcccaccctggaggagtatgacagctactggtggctgggcggcctggtgatctgcagcctgctgaccctgattgtcatcttctactacctgggcctgctgtgtggggtgtgtggctatgacagacatgccacccccaccacccggggctgtgtgagcaacacaggaggagtcttcctgatggtgggcgtgggcctgtccttcctgttctgctggatcctgatgatcatcgtggtgctgacctttgtgtttggagccaacgtggagaagctgatctgtgagccctacaccagcaaggagctgttccgggtgctggacaccccctacctgctgaatgaagactgggagtactacctgagcggcaagctgttcaacaagagcaagatgaagctgacctttgagcaggtgtacagcgactgcaagaagaacagaggcacctacggcaccctgcacctgcagaacagcttcaacatcagcgagcacctgaacatcaatgagcacacaggcagcatcagcagcgagctggagagcctgaaggtgaacctgaacatcttcctgctgggcgccgccggcaggaagaacctgcaggactttgctgcctgtggcatcgacaggatgaactatgacagctacctggcccagacaggcaagagccctgctggggtgaacctgctgagctttgcctatgacctggaggccaaggccaacagcctgcccccaggcaacctgaggaacagcctgaagagagatgcccagaccatcaagaccatccaccagcagagggtgctgcccatcgagcagagcctgagcaccctgtaccagagcgtgaagatcctgcagaggactggaaatggcctgctggagcgggtgacccgcatcctggccagcctggactttgcccagaacttcatcaccaacaacaccagcagcgtcatcatcgaggagaccaagaagtatggccgcaccatcatcggctactttgagcactacctgcagtggattgagttcagcatcagcgagaaggtggccagctgcaagcctgtggccacagccctggacacagctgtggatgtgttcctgtgcagctacatcatcgaccccctgaacctcttctggtttggaattggcaaggccaccgtcttcctgctgcctgccctgatctttgctgtgaagctggccaagtactacagaaggatggattctgaagatgtgtatgatgacagctcctgggtgacctctgtgcagtgctag

SEQ ID NO: 302767 - DNA, 2493 bp, Artificial Sequence
  derived and/or modified sequence
atggccctggtgctgggcagcctgctgctgctgggcctgtgcggcaattcgttttccggcgggcagccatcgagcaccgatgccccgaaagcttggaactatgagttgcctgccaccaactacgagacgcaagactctcataaagctggtcccatcgggatcctctttgagctggtacacatctttctgtatgtggtccagccccgggactttcccgaagacaccctgaggaagtttctacagaaggcctatgagagcaaaatcgactacgataaaattgtctactacgaggccggcattattctgtgctgtgtgctcggactcctcttcattattctgatgccattggtgggatattttttttgtatgtgcaggtgctgcaataagtgcgggggagagatgcatcagcgacagaaagaaaacggtccttttctccgcaagtgtttcgctatcagcttgctggtgatctgcatcattatttcaatcggtattttctatggattcgtggcgaaccatcaggtgaggactcgaattaaacgcagccgcaaactcgccgattcaaactttaaggacctgagaacactgctgaacgagacccctgaacagatcaaatacatactggcacagtacaacaccaccaaggacaaagcatttactgatttgaactctattaacagcgtcctggggggcggcattctggatagattacgaccaaacataattccagtgctggacgaaatcaaaagcatggcaaccgccataaaagagaccaaagaagcccttgagaacatgaacagcaccctgaagagcctgcatcaacagtccacgcagctctccagcagtttaacatctgtaaagaccagccttaggtcatccttgaatgacccactttgcctcgtgcatccctcgtctgagacctgcaattctattaggctgtccctcagccagctcaactcgaatcccgagttgcgacagctgcctcccgtagatgccgagttggacaacgtgaacaacgtcctgcggacagatttggacggcctcgtccagcagggctaccagagccttaatgatatccccgatcgggtgcagcgtcagacgactacagtcgtggccggtataaagagagtcctgaatagcatcggttcagatattgacaatgtcacacagagactcccaatccaagatattctgagcgccttcagtgtctatgtcaacaatactgaaagctatatccaccgtaacttgccaactctggaggagtacgatagctattggtggctggggggattggtgatttgcagcctcctcaccctgatagtaattttctattacctgggattgctgtgcggagtttgcgggtatgacagacacgccacgccaaccacaagaggatgtgtgtcaaataccggcggagtatttctgatggtgggcgttggcctgagcttcttgttctgctggattctcatgattatcgtggtgctgacctttgtgttcggagcaaatgtggaaaagcttatctgcgaaccatatacgtccaaagaactgttcagagtcctcgataccccctatcttctcaacgaggactgggaatattatttaagcgggaagctgtttaataagtcgaagatgaaactcacttttgaacaagtgtattcagattgcaaaaaaaataggggcacgtacggaactcttcacctgcagaattcattcaacataagtgaacatctcaatattaacgaacataccggctcgatttcttcagaactcgaaagtctaaaggtgaacttaaatatttttctgctcggtgcagctgggagaaagaatctccaggactttgctgcctgtggcatagataggatgaactatgacagctatctcgcgcagaccgggaaaagtccagcgggagttaatctactgtcattcgcgtatgacctggaggcaaaagccaattccttgccaccggggaatttgcgtaatagcctcaaacgggacgctcagaccattaagaccattcatcagcaaagagttctgcctatcgaacagtccctgtctacgctgtaccagagtgttaagatcttacagaggaccggtaacggcctgttggaaagagttacacgaatacttgcaagtttagacttcgcgcagaatttcatcaccaataatacaagttcagtcatcatagaagagactaaaaagtacggcagaaccattatcggatacttcgaacactatctccagtggatagaattcagcatttctgagaaggtagctagttgcaaacccgtggcaaccgcattagatacagctgtggacgtgttcctctgtagttacatcatagatcctctgaacctgttttggtttgggattggcaaggcgacagtgtttctcctaccggctctgatatttgccgtgaagctcgcaaagtactacagacgcatggactccgaagacgtgtacgatgacagctcttgggtaacctcagttcaatgctag

SEQ ID NO: 302768 - DNA, 2493 bp, Artificial Sequence
  derived and/or modified sequence
atggccctcgttctaggctccttgctccttttggggctgtgtggcaattcctttagtggcggacagccctcctctaccgatgccccaaaggcatggaattacgagctgccagctactaactacgaaacccaggatagccataaagcgggacccatcggcatactatttgagttggtgcacatcttcctttacgtggtgcagccccgagacttccccgaggacacactacggaagttcctgcaaaaggcctatgagtccaagatcgactatgataaaatagtgtactacgaagcgggtattattctctgttgcgtcctaggtttactgtttatcattctgatgcctctggtgggctacttcttttgcatgtgtaggtgttgtaataaatgtgggggagagatgcaccaaaggcagaaagagaacggcccattcctgcgaaagtgcttcgccatctccctcttggtgatctgcatcattatcagtattggtatcttctacgggtttgtggctaatcatcaggttaggaccagaatcaaacgatcccgcaaacttgccgatagtaacttcaaagatctcaggacactcctcaacgagaccccagagcagatcaaatacattctggctcagtataatacgactaaggacaaggctttcactgatctgaattcgatcaactccgtgctcggtggcggaattctggatcggctcagaccaaatattatccctgtcctggacgagataaaatccatggctactgcaatcaaggagaccaaggaggccctggagaatatgaactccaccctcaagagtctgcaccagcagtctactcagctcagcagcagcctgacttctgtcaaaacaagtttgagaagctctctgaacgatcccttatgtctggtccacccaagttctgagacctgtaattctataaggctcagtttaagtcagctaaactctaaccctgaattgagacaactacctcctgtggacgccgaactggataacgtgaacaacgtcttgcgaacagatctcgacggcctcgttcaacaggggtaccagtcacttaatgacatacctgaccgcgtccaaagacagactaccaccgtcgtcgccggtattaagagggtgctcaactctatcggctccgacatcgataacgttacacagaggttacctattcaggacatcttaagcgccttcagcgtgtacgtgaataataccgagagctatatccaccggaatctgcctaccttagaagagtatgactcatattggtggttgggtggtcttgttatctgctctttgctgactctcatcgtgattttttattatctcgggctgctgtgtggagtttgcggctatgacaggcacgctacaccaactaccagagggtgcgtgagcaacacaggaggagtcttcttgatggttggcgtgggcctgtcgttcctattttgttggatcctgatgatcatagttgtgctcaccttcgtgtttggtgcgaatgttgagaagctaatctgcgaaccttataccagtaaggaactcttccgggtgctggataccccctacctgctgaacgaagactgggagtattacctgagtgggaagctgtttaataagagtaaaatgaagctgacatttgagcaggtttacagtgactgcaagaagaacagaggaacctacggcaccctgcacttgcagaactccttcaacattagcgaacatctgaatataaatgaacacaccgggagtatctcgtcagaactagaatccttgaaggtgaacctgaacatctttctcctgggggctgccggaagaaagaatctgcaagattttgctgcatgcggcatagacagaatgaattatgactcctacctggctcagacaggcaagagcccagcaggggtcaacctcctttcattcgcttacgatctggaggcaaaggcaaactctttaccaccgggaaaccttaggaactcactgaagcgtgacgctcaaaccatcaagaccatccaccagcagcgtgtgctcccaattgagcaaagcttaagcactctttaccaatcagtaaaaattctgcaacgcactggaaacggcctgcttgagcgggtaacgcggatcttggcgtccctggactttgcccagaactttatcacaaataatacatcttctgtaatcatagaagaaaccaaaaagtatggcagaaccataatcgggtacttcgagcactatctgcagtggattgaattcagcatctcggaaaaagttgccagttgtaaacctgtcgccactgctctcgacaccgccgtagatgtatttctatgtagctatataattgaccctttgaacctgttctggttcgggattggcaaggcaacagtcttcctgctccctgctttgatttttgccgtgaagctggctaagtactatcgtcgcatggacagtgaggatgtctacgacgactccagctgggtgacatccgtgcagtgctag

SEQ ID NO: 302769 - DNA, 2773 bp, Artificial Sequence
  derived and/or modified sequence
gcgatctttaagtgactgaggcagatccccacgcggcacctggccatgctctcagctctcccgccgcgggatggtgccttgagtgaatgacccccttggagaacattcttccgcatccctcgcctcaagccagcctcagacagaaaactgaagattcagcagatccagtgcttcctgctcctcttctgcccaggaacacgcttgccttccccaaggcttccagaagctctgaggcaggaggcaccaagttctacctcatgtttggaggatcttgctagctatggccctcgtactcggctccctgttgctgctggggctgtgcgggaactccttttcaggagggcagccttcatccacagatgctcctaaggcttggaattatgaattgcctgcaacaaattatgagacccaagactcccataaagctggacccattggcattctctttgaactagtgcatatctttctctatgtggtacagccgcgtgatttcccagaagatactttgagaaaattcttacagaaggcatatgaatccaaaattgattatgacaagattgtctactatgaagcagggattattctatgctgtgtcctggggctgctgtttattattctgatgcctctggtggggtatttcttttgtatgtgtcgttgctgtaacaaatgtggtggagaaatgcaccagcgacagaaggaaaatgggcccttcctgaggaaatgctttgcaatctccctgttggtgatttgtataataataagcattggcatcttctatggttttgtggcaaatcaccaggtaagaacccggatcaaaaggagtcggaaactggcagatagcaatttcaaggacttgcgaactctcttgaatgaaactccagagcaaatcaaatatatattggcccagtacaacactaccaaggacaaggcgttcacagatctgaacagtatcaattcagtgctaggaggcggaattcttgaccgactgagacccaacatcatccctgttcttgatgagattaagtccatggcaacagcgatcaaggagaccaaagaggcgttggagaacatgaacagcaccttgaagagcttgcaccaacaaagtacacagcttagcagcagtctgaccagcgtgaaaactagcctgcggtcatctctcaatgaccctctgtgcttggtgcatccatcaagtgaaacctgcaacagcatcagattgtctctaagccagctgaatagcaaccctgaactgaggcagcttccacccgtggatgcagaacttgacaacgttaataacgttcttaggacagatttggatggcctggtccaacagggctatcaatcccttaatgatatacctgacagagtacaacgccaaaccacgactgtcgtagcaggtatcaaaagggtcttgaattccattggttcagatatcgacaatgtaactcagcgtcttcctattcaggatatactctcagcattctctgtttatgttaataacactgaaagttacatccacagaaatttacctacattggaagagtatgattcatactggtggctgggtggcctggtcatctgctctctgctgaccctcatcgtgattttttactacctgggcttactgtgtggcgtgtgcggctatgacaggcatgccaccccgaccacccgaggctgtgtctccaacaccggaggcgtcttcctcatggttggagttggattaagtttcctcttttgctggatattgatgatcattgtggttcttacctttgtctttggtgcaaatgtggaaaaactgatctgtgaaccttacacgagcaaggaattattccgggttttggatacaccctacttactaaatgaagactgggaatactatctctctgggaagctatttaataaatcaaaaatgaagctcacttttgaacaagtttacagtgactgcaaaaaaaatagaggcacttacggcactcttcacctgcagaacagcttcaatatcagtgaacatctcaacattaatgagcatactggaagcataagcagtgaattggaaagtctgaaggtaaatcttaatatctttctgttgggtgcagcaggaagaaaaaaccttcaggattttgctgcttgtggaatagacagaatgaattatgacagctacttggctcagactggtaaatcccccgcaggagtgaatcttttatcatttgcatatgatctagaagcaaaagcaaacagtttgcccccaggaaatttgaggaactccctgaaaagagatgcacaaactattaaaacaattcaccagcaacgagtccttcctatagaacaatcactgagcactctataccaaagcgtcaagatacttcaacgcacagggaatggattgttggagagagtaactaggattctagcttctctggattttgctcagaacttcatcacaaacaatacttcctctgttattattgaggaaactaagaagtatgggagaacaataataggatattttgaacattatctgcagtggatcgagttctctatcagtgagaaagtggcatcgtgcaaacctgtggccaccgctctagatactgctgttgatgtctttctgtgtagctacattatcgaccccttgaatttgttttggtttggcataggaaaagctactgtatttttacttccggctctaatttttgcggtaaaactggctaagtactatcgtcgaatggattcggaggacgtgtacgatgatagtagttgggtcacttctgttcagtgttga

SEQ ID NO: 302770 - DNA, 2493 bp, Artificial Sequence
  derived and/or modified sequence
atggccctggtgctgggcagcctgctgctgctgggcctgtgcggcaacagcttcagcggcggccagcccagcagcaccgacgcccccaaggcctggaactacgagctgcccgccaccaactacgagacccaggacagccacaaggccggccccatcggcatcctgttcgagctggtgcacatcttcctgtacgtggtgcagcccagagacttccccgaggacaccctgagaaagttcctgcagaaggcctacgagagcaagatcgactacgacaagatcgtgtactacgaggccggcatcatcctgtgctgcgtgctgggcctgctgttcatcatcctgatgcccctggtgggctacttcttctgcatgtgcagatgctgcaacaagtgcggcggcgagatgcaccagagacagaaggagaacggccccttcctgagaaagtgcttcgccatcagcctgctggtgatctgcatcatcatcagcatcggcatcttctacggcttcgtggccaaccaccaggtgagaaccagaatcaagagaagcagaaagctggccgacagcaacttcaaggacctgagaaccctgctgaacgagacccccgagcagatcaagtacatcctggcccagtacaacaccaccaaggacaaggccttcaccgacctgaacagcatcaacagcgtgctgggcggcggcatcctggacagactgagacccaacatcatccccgtgctggacgagatcaagagcatggccaccgccatcaaggagaccaaggaggccctggagaacatgaacagcaccctgaagagcctgcaccagcagagcacccagctgagcagcagcctgaccagcgtgaagaccagcctgagaagcagcctgaacgaccccctgtgcctggtgcaccccagcagcgagacctgcaacagcatcagactgagcctgagccagctgaacagcaaccccgagctgagacagctgccccccgtggacgccgagctggacaacgtgaacaacgtgctgagaaccgacctggacggcctggtgcagcagggctaccagagcctgaacgacatccccgacagagtgcagagacagaccaccaccgtggtggccggcatcaagagagtgctgaacagcatcggcagcgacatcgacaacgtgacccagagactgcccatccaggacatcctgagcgccttcagcgtgtacgtgaacaacaccgagagctacatccacagaaacctgcccaccctggaggagtacgacagctactggtggctgggcggcctggtgatctgcagcctgctgaccctgatcgtgatcttctactacctgggcctgctgtgcggcgtgtgcggctacgacagacacgccacccccaccaccagaggctgcgtgagcaacaccggcggcgtgttcctgatggtgggcgtgggcctgagcttcctgttctgctggatcctgatgatcatcgtggtgctgaccttcgtgttcggcgccaacgtggagaagctgatctgcgagccctacaccagcaaggagctgttcagagtgctggacaccccctacctgctgaacgaggactgggagtactacctgagcggcaagctgttcaacaagagcaagatgaagctgaccttcgagcaggtgtacagcgactgcaagaagaacagaggcacctacggcaccctgcacctgcagaacagcttcaacatcagcgagcacctgaacatcaacgagcacaccggcagcatcagcagcgagctggagagcctgaaggtgaacctgaacatcttcctgctgggcgccgccggcagaaagaacctgcaggacttcgccgcctgcggcatcgacagaatgaactacgacagctacctggcccagaccggcaagagccccgccggcgtgaacctgctgagcttcgcctacgacctggaggccaaggccaacagcctgccccccggcaacctgagaaacagcctgaagagagacgcccagaccatcaagaccatccaccagcagagagtgctgcccatcgagcagagcctgagcaccctgtaccagagcgtgaagatcctgcagagaaccggcaacggcctgctggagagagtgaccagaatcctggccagcctggacttcgcccagaacttcatcaccaacaacaccagcagcgtgatcatcgaggagaccaagaagtacggcagaaccatcatcggctacttcgagcactacctgcagtggatcgagttcagcatcagcgagaaggtggccagctgcaagcccgtggccaccgccctggacaccgccgtggacgtgttcctgtgcagctacatcatcgaccccctgaacctgttctggttcggcatcggcaaggccaccgtgttcctgctgcccgccctgatcttcgccgtgaagctggccaagtactacagaagaatggacagcgaggacgtgtacgacgacagcagctgggtgaccagcgtgcagtgctag

SEQ ID NO: 302771 - protein, 842 aa, Artificial Sequence
  derived and/or modified sequence
MALVLGSLLLLGLCGNSFSGGQPSSTDAPKAWNYELPATNYETQDSHKAGPIGILFELVHIFLYVVQPRDFPEDTLRKFLQKAYESKIDYDKPETVILGLKIVYYEAGIILCCVLGLLFIILMPLVGYFFCMCRCCNKCGGEMHQRQKENGPFLRKCFAISLLVICIIISIGIFYGFVANHQVRTRIKRSRKLADSNFKDLRTLLNETPEQIKYILAQYNTTKDKAFTDLNSINSVLGGGILDRLRPNIIPVLDEIKSMATAIKETKEALENMNSTLKSLHQQSTQLSSSLTSVKTSLRSSLNDPLCLVHPSSETCNSIRLSLSQLNSNPELRQLPPVDAELDNVNNVLRTDLDGLVQQGYQSLNDIPDRVQRQTTTVVAGIKRVLNSIGSDIDNVTQRLPIQDILSAFSVYVNNTESYIHRNLPTLEEYDSYWWLGGLVICSLLTLIVIFYYLGLLCGVCGYDRHATPTTRGCVSNTGGVFLMVGVGLSFLFCWILMIIVVLTFVFGANVEKLICEPYTSKELFRVLDTPYLLNEDWEYYLSGKLFNKSKMKLTFEQVYSDCKKNRGTYGTLHLQNSFNISEHLNINEHTGSISSELESLKVNLNIFLLGAAGRKNLQDFAACGIDRMNYDSYLAQTGKSPAGVNLLSFAYDLEAKANSLPPGNLRNSLKRDAQTIKTIHQQRVLPIEQSLSTLYQSVKILQRTGNGLLERVTRILASLDFAQNFITNNTSSVIIEETKKYGRTIIGYFEHYLQWIEFSISEKVASCKPVATALDTAVDVFLCSYIIDPLNLFWFGIGKATVFLLPALIFAVKLAKYYRRMDSEDVYDDVETIPMKNPSQH

SEQ ID NO: 302772 - DNA, 2529 bp, Artificial Sequence
  derived and/or modified sequence
atggcgctagtgctgggcagcctcctgctcttggggctctgcggcaatagtttctcgggaggacagccgagtagtactgatgcaccaaaagcctggaactacgagctcccagcgaccaactacgaaacacaggactcgcataaggcaggtcctatcggaatactcttcgagctggtccacatattcctctatgtggtacagccaagggattttcctgaagacaccctgcggaagttcctacagaaagcatatgagtctaaaatcgattatgataagccagaaacggtgattctcggcctgaagatcgtgtactatgaagcgggaattatcctatgctgcgtgctgggcctcctcttcatcatcttgatgcctcttgtgggatacttcttctgcatgtgtagatgctgcaacaaatgcggcggggaaatgcaccagcggcaaaaggaaaatggaccatttttaagaaagtgttttgctatctccttgttggttatctgcatcataatttcaattggaatcttctatggattcgtggcgaaccaccaggtacgcacccgtataaaaagaagcagaaagctcgcagatagtaacttcaaagacttgcgaactctactcaacgagacacctgagcagatcaaatatattttagcacagtacaacacaacgaaggataaagcctttacagacctgaatagcatcaattcagttctggggggcggtattcttgaccgcctgcggcctaacatcattccagtgctggacgagatcaagtccatggccacagccatcaaagagactaaggaggccctcgagaacatgaacagtactttgaagtccctgcaccagcagagtacccaactctcttcttcactgacatcagtgaaaacttcactaaggtcctcactaaatgatcctttgtgcctcgtccatccttcctctgagacctgtaattctattagactgtctcttagccagctgaattccaaccccgagttacgacaattgccccccgtcgacgccgaactcgataacgtcaataatgtgctgcgcactgaccttgacgggcttgtccaacagggctatcagtccctcaacgacattccggacagggtccagaggcagaccaccactgtcgtggcaggcatcaaaagagtgctcaactctattggttcagacatcgataacgtgacccagagactgccaatacaagacatactaagtgccttctcagtatatgtgaacaacacagaaagctacattcaccggaacctcccaactctggaggagtacgactcctattggtggctgggaggccttgtaatttgtagtttgctgaccttaatagttatcttttattacctcggtctcctttgcggagtatgtggctacgatcgccatgccaccccgacaactcggggatgcgtaagtaacaccggaggggtgttcctgatggtgggagtgggactcagttttttgttctgctggatcttgatgattatcgttgtgttaacctttgtgttcggagccaatgtagaaaagttaatatgtgaaccctacacttccaaagaactgttccgggtcctggataccccatatctgctcaatgaggattgggaatattatctgagcggcaagctattcaacaagtctaagatgaaactaacattcgagcaagtctactccgactgcaagaagaacaggggcacatatggtacactccaccttcagaatagtttcaatatttctgaacatctcaacatcaacgagcacactgggagcatctcctctgagctcgagtccctgaaagtcaacctcaatatcttccttttgggagcagcagggcggaaaaatctgcaagatttcgccgcctgcggtattgaccggatgaactacgactcctatctcgcccagacaggaaagagccctgcaggggttaatctccttagtttcgcttatgacctggaggcgaaggctaatagcctgccgccgggtaacctgcggaattctctaaaaagagatgcgcaaaccataaagaccattcatcagcagagagtgttaccaatcgagcagagcctgtctacgctgtatcagagcgtgaagatcctgcagcgcacaggtaacgggcttttggaacgcgtcacaagaattctggccagcctggattttgcacaaaattttatcacgaacaatacttcctccgtaattattgaagagaccaagaagtatggcagaaccataatagggtattttgagcactacctgcaatggatcgagttcagtatctctgagaaggtcgcctcttgcaaaccagttgctaccgccctggatacggccgttgacgttttcctgtgctcatatattatcgatcctctgaacttgttttggtttggaattggaaaagctaccgtcttccttctgcctgcactcatatttgcggtgaagctagcaaaatattatagacggatggatagtgaagatgtgtatgacgacgtcgagactattcctatgaagaacccatctcagcactag

SEQ ID NO: 302773 - DNA, 2529 bp, Artificial Sequence
  derived and/or modified sequence
atggccctggtgctgggcagcctgctgctgctgggcctgtgtggcaacagcttcagcggcggccagcccagcagcacagatgcccccaaggcctggaactatgagctgcctgccaccaactatgagacccaggacagccacaaggccggccccatcggcatcctgtttgagctggtgcacatcttcctgtatgtggtgcagccccgggacttccctgaggacaccctgaggaagttcctgcagaaggcctatgagagcaagattgattatgacaagccagagaccgtcatcctgggcctgaagatcgtgtactatgaagctggcatcatcctgtgctgcgtgctgggcctgctcttcatcatcctgatgcccctggtgggctacttcttctgcatgtgccgctgctgcaacaagtgtggcggggagatgcaccagaggcagaaggaaaatggccccttcctgaggaagtgctttgccatcagcctgctggtgatctgcatcatcatcagcatcggcatcttctacggctttgtggccaaccaccaggtgaggacccgcatcaagaggagcaggaagctggccgacagcaacttcaaggacctgcggaccctgctgaatgagaccccagagcagatcaagtacatcctggcccagtacaacaccaccaaggacaaggccttcacagacctgaacagcatcaacagcgtgctgggcggcggcatcctggaccggctgcggcccaacatcatccctgtgctggatgagatcaagtccatggccacagccatcaaggagaccaaggaggccctggagaacatgaacagcaccctgaagagcctgcaccagcagagcacccagctgagcagcagcctgacctctgtgaagaccagcctgcggagcagcctgaatgaccccctgtgcctggtgcaccccagcagcgagacctgcaacagcatccggctgagcctgagccagctgaacagcaaccctgagctgcggcagctgccccctgtggatgctgagctggacaacgtgaacaacgtgctgaggacagacctggatggcctggtgcagcagggctaccagagcctgaatgacatcccagacagagtgcagaggcagaccaccaccgtggtggccggcatcaagagggtgctgaacagcattggaagtgacatcgacaacgtgacccagaggctgcccatccaggacatcctgagcgccttctctgtgtatgtgaacaacacagagagctacatccacaggaacctgcccaccctggaggagtatgacagctactggtggctgggcggcctggtgatctgcagcctgctgaccctcatcgtcatcttctactacctgggcctgctgtgtggggtgtgtggctatgacagacatgccacccccaccacccggggctgtgtgagcaacacaggaggagtcttcctgatggtgggcgtgggcctgtccttcctgttctgctggatcctgatgatcatcgtggtgctgacctttgtgtttggagccaacgtggagaagctgatctgtgagccctacaccagcaaggagctgttccgggtgctggacaccccctacctgctgaatgaagactgggagtactacctgagcggcaagctgttcaacaagagcaagatgaagctgacctttgagcaggtgtacagcgactgcaagaagaacagaggcacctacggcaccctgcacctgcagaacagcttcaacatcagcgagcacctgaacatcaatgagcacacaggcagcatcagcagcgagctggagagcctgaaggtgaacctgaacatcttcctgctgggcgctgctggcaggaagaacctgcaggactttgctgcctgtggcatcgacaggatgaactatgacagctacctggcccagacaggcaagagccctgctggggtgaacctgctgagctttgcctatgacctggaggccaaggccaacagcctgcccccaggcaacctgaggaacagcctgaagagagatgcccagaccatcaagaccatccaccagcagagggtgctgcccatcgagcagagcctgagcaccctgtaccagagcgtgaagatcctgcagaggactggaaatggcctgctggagcgggtgacccgcatcctggccagcctggactttgcccagaacttcatcaccaacaacaccagcagcgtcatcatcgaggagaccaagaagtatggccgcaccatcatcggctactttgagcactacctgcagtggattgagttcagcatcagcgagaaggtggccagctgcaagcctgtggccacagccctggacacagctgtggatgtgttcctgtgcagctacatcatcgaccccctgaacctcttctggtttggcatcggcaaggccaccgtcttcctgctgcctgccctgatctttgctgtgaagctggccaagtactacagaaggatggacagtgaagatgtgtatgatgatgtggagaccatccccatgaagaaccccagccagcactag

SEQ ID NO: 302774 - DNA, 2529 bp, Artificial Sequence
  derived and/or modified sequence
atggccctggtgctgggcagcctgctgctgctgggcctgtgcggcaactcattctccggtggccaacctagtagcacagatgcgcctaaggcatggaactacgaattacccgccacaaattatgagacccaggacagtcataaagctgggccaataggcattctcttcgagttggtccacatctttctttacgtggtccaacctcgcgacttccccgaagatactttgcgaaaattcctgcagaaagcatatgaatcaaaaatagattacgataagcccgagaccgtaattttgggcctgaagattgtctactacgaagcaggaatcatcctgtgctgcgtattaggcctcttattcattatcctgatgccactggtgggatatttcttctgtatgtgccggtgctgtaataagtgtggaggagaaatgcaccaacgacaaaaggagaacggaccattcttaaggaaatgctttgctatcagcttactggtaatttgtattattatcagtatcggcatcttctatgggttcgtcgccaaccatcaggtgcgcacacggattaagaggtctcgcaagcttgcagattctaacttcaaagatctgcgaaccctgctgaacgaaaccccagagcagatcaagtatattctggctcagtataatacaacaaaggacaaggcattcacagatctaaattccatcaacagtgttcttggcggcggcattctcgataggctgagacccaacataatcccggtgttagacgagatcaaatctatggcgaccgctataaaagagaccaaagaagctttagaaaatatgaacagcactctgaaatcactgcaccagcagagtacgcagctgagtagcagcttgacctctgtgaagacctccttacggtctagcttgaatgaccctctctgcctggtgcacccgagctctgaaacttgtaactctataaggctgtcactctcacagctaaactcgaaccctgaactgaggcagctgccacccgttgatgccgagctggataatgtgaataatgtcctgagaactgatctcgacggactggtgcagcaagggtatcagtccctgaacgatatccccgaccgggttcaaagacagacaacaaccgtggttgcggggattaaaagggtgctcaatagcatcggcagtgatatcgataacgtgacccagagattgccaatccaagacatactgtcagctttttctgtgtatgttaataacacggagtcttacattcatcgcaatttgccaacgctcgaggagtacgacagctattggtggttaggaggcctggtcatatgtagcctcctgaccctgattgtaattttctattacctcggcttgctgtgcggagtctgtggctatgatcggcatgccactcccaccaccagggggtgtgtgtcaaataccggaggagtttttctaatggtcggcgtcggtctgagttttctcttctgttggatactgatgattatcgtggtcctcaccttcgtgttcggcgctaatgtagaaaagctgatctgtgagccctacacttccaaggagcttttccgcgtcctggacaccccgtacctcctaaacgaggactgggaatactatctctcggggaaattgtttaataaatcgaagatgaagcttactttcgaacaggtgtatagcgattgcaaaaagaatcgtggaacatatggcacacttcacttgcagaatagctttaacatctccgaacatctgaacattaacgagcacaccgggtccataagcagcgagctcgagtcgctcaaggtgaatcttaacatatttttgctgggagccgccggcaggaagaatctgcaagactttgcagcttgcggcatagatcggatgaattacgactcatacctcgcccagacgggtaagtccccggccggtgtcaatctgctttcctttgcatacgacctggaggccaaagccaatagcctaccccccggaaatctccggaacagcctgaagcgtgatgcccaaacaatcaagacgattcatcagcagagggtcctcccgatcgagcagagcctgagtaccctgtaccaatctgtcaagattcttcagagaactggcaatggcctcttggaacgggtcactagaatactcgccagcctcgactttgcccagaacttcatcacaaataacacaagcagtgtgataatagaggagacgaaaaagtacggcagaacgatcatcggctacttcgagcactacctgcagtggattgaattcagcatctctgaaaaggttgcatcttgcaaacccgtggcaactgccttggatacagcggtcgacgtctttctttgctcctacataattgatcctctgaacctgttttggtttggtatagggaaggccaccgtcttccttctgcccgccctgatttttgctgtcaaacttgctaagtactatcggcggatggactccgaagatgtgtatgatgatgtcgaaactatcccaatgaagaatccctcacaacactag

SEQ ID NO: 302775 - DNA, 2529 bp, Artificial Sequence
  derived and/or modified sequence
atggccctggtgctcggctccttgctactgctaggactatgtggcaattccttcagcggcggacaaccctcctccacagacgcaccgaaggcctggaattatgagttgcctgcaacaaactacgagacccaggatagtcacaaggcaggacctattggcatattgttcgaactcgtgcacattttcctgtacgtggtccagccacgggatttccctgaagatacactgcgtaagttcctccagaaggcttacgaatcgaagattgattacgacaagccagagacggtaatcttgggcctaaagattgtttactatgaggctggaataattctctgctgtgtgcttggactgctattcatcatcctaatgccactggtcggatactttttctgtatgtgccgatgttgtaacaagtgcggcggagaaatgcatcagcgccagaaggagaatggtccgttcttgcggaaatgttttgccatctcgctcctggtgatatgcattattatctccatcggcatattctatggattcgtcgccaaccatcaggtgcgcactcgaatcaagagatctcgaaaattagcagattccaacttcaaggatctccggacgctcctcaatgaaacgccggagcaaataaaatatattctggcccagtataataccaccaaggacaaggcctttactgatcttaatagcataaatagcgttctaggcggtgggatcctggataggcttagaccgaatattattccggtcctcgacgagattaaaagcatggctactgccatcaaggagaccaaggaagctctggaaaatatgaatagcaccctgaaaagtttgcatcagcagagtacccagctttcatcttctctgacgagtgtcaagacatctttgaggagttcactcaatgaccctctctgtctggtccatcccagctcggagacctgtaactctattagactctcactgtcgcagctgaactcgaacccggaactgcgccagctacctcctgttgatgcagagcttgataacgtgaacaacgtgctgaggactgatttagacggcttggtccagcaaggataccagagtctgaacgacatccctgacagggtgcaaaggcagacgaccacggtcgtggctggcatcaaaagggtcttgaacagtattggcagcgacatcgataatgttacccagaggttacctatacaggatattttatcggccttttcagtgtacgtcaataataccgagagttacatccaccggaacctccctaccttagaggagtacgacagctattggtggttaggaggattggtgatctgctccctgttgacattgattgtgattttttactatttaggcttactatgtggggtttgtggatacgatcggcatgctacacctaccacgcgaggctgtgtcagtaacactggcggtgtcttccttatggttggcgtgggcctctctttcctgttttgttggatcctgatgattatcgttgtcctaaccttcgtgtttggcgcaaacgtggaaaaactgatatgcgagccctatacctccaaggagttattcagagtgctggataccccttacttgctgaatgaagactgggagtattatttgtctggtaagctctttaacaaatcgaagatgaagttgacatttgaacaagtatattctgattgtaagaagaaccggggaacctacggcaccctgcatcttcagaacagctttaacatcagcgagcacctgaacattaacgagcacaccggatcaatctcgagcgagctcgaaagtttaaaagtaaacctgaacattttcctgctgggagctgccggtagaaagaatcttcaggactttgcagcttgtggaatagaccgtatgaactacgattcatacctcgcccagacaggtaaaagtcccgctggagtgaatttgctgagttttgcttacgatctcgaagccaaagcaaactcactccccccaggcaacctgcgtaattcccttaagcgcgatgctcagactataaagactattcaccagcagcgggtgctgcctatagagcagagcctctctaccctttaccagtctgtgaagatattacagaggactggcaacggactgttggaaagagtcactagaatcctagctagtctggacttcgcccagaacttcatcacaaacaacacttcatcggtaattatcgaagaaaccaagaagtacggaagaactattatcgggtacttcgagcactatctccaatggatagagttcagcattagcgaaaaagtcgctagctgcaagcccgtcgcaacagccctcgacactgctgtggacgtttttctttgctcttatataattgatcctcttaatctgttctggttcgggatcggtaaagccactgtcttcttactgccagcactgatctttgcggtcaagctcgccaagtactacaggcgcatggatagcgaggatgtctacgacgatgtcgagactatacctatgaagaatccatcacagcactag

SEQ ID NO: 302776 - DNA, 3908 bp, Artificial Sequence
  derived and/or modified sequence
ggatggtgccttgagtgaatgacccccttggagaacattcttccgcatccctcgcctcaagccagcctcagacagaaaactgaagattcagcagatccagtgcttcctgctcctcttctgcccaggaacacgcttgccttccccaaggcttccagaagctctgaggcaggaggcaccaagttctacctcatgtttggaggatcttgctagctatggccctcgtactcggctccctgttgctgctggggctgtgcgggaactccttttcaggagggcagccttcatccacagatgctcctaaggcttggaattatgaattgcctgcaacaaattatgagacccaagactcccataaagctggacccattggcattctctttgaactagtgcatatctttctctatgtggtacagccgcgtgatttcccagaagatactttgagaaaattcttacagaaggcatatgaatccaaaattgattatgacaagccagaaactgtaatcttaggtctaaagattgtctactatgaagcagggattattctatgctgtgtcctggggctgctgtttattattctgatgcctctggtggggtatttcttttgtatgtgtcgttgctgtaacaaatgtggtggagaaatgcaccagcgacagaaggaaaatgggcccttcctgaggaaatgctttgcaatctccctgttggtgatttgtataataataagcattggcatcttctatggttttgtggcaaatcaccaggtaagaacccggatcaaaaggagtcggaaactggcagatagcaatttcaaggacttgcgaactctcttgaatgaaactccagagcaaatcaaatatatattggcccagtacaacactaccaaggacaaggcgttcacagatctgaacagtatcaattcagtgctaggaggcggaattcttgaccgactgagacccaacatcatccctgttcttgatgagattaagtccatggcaacagcgatcaaggagaccaaagaggcgttggagaacatgaacagcaccttgaagagcttgcaccaacaaagtacacagcttagcagcagtctgaccagcgtgaaaactagcctgcggtcatctctcaatgaccctctgtgcttggtgcatccatcaagtgaaacctgcaacagcatcagattgtctctaagccagctgaatagcaaccctgaactgaggcagcttccacccgtggatgcagaacttgacaacgttaataacgttcttaggacagatttggatggcctggtccaacagggctatcaatcccttaatgatatacctgacagagtacaacgccaaaccacgactgtcgtagcaggtatcaaaagggtcttgaattccattggttcagatatcgacaatgtaactcagcgtcttcctattcaggatatactctcagcattctctgtttatgttaataacactgaaagttacatccacagaaatttacctacattggaagagtatgattcatactggtggctgggtggcctggtcatctgctctctgctgaccctcatcgtgattttttactacctgggcttactgtgtggcgtgtgcggctatgacaggcatgccaccccgaccacccgaggctgtgtctccaacaccggaggcgtcttcctcatggttggagttggattaagtttcctcttttgctggatattgatgatcattgtggttcttacctttgtctttggtgcaaatgtggaaaaactgatctgtgaaccttacacgagcaaggaattattccgggttttggatacaccctacttactaaatgaagactgggaatactatctctctgggaagctatttaataaatcaaaaatgaagctcacttttgaacaagtttacagtgactgcaaaaaaaatagaggcacttacggcactcttcacctgcagaacagcttcaatatcagtgaacatctcaacattaatgagcatactggaagcataagcagtgaattggaaagtctgaaggtaaatcttaatatctttctgttgggtgcagcaggaagaaaaaaccttcaggattttgctgcttgtggaatagacagaatgaattatgacagctacttggctcagactggtaaatcccccgcaggagtgaatcttttatcatttgcatatgatctagaagcaaaagcaaacagtttgcccccaggaaatttgaggaactccctgaaaagagatgcacaaactattaaaacaattcaccagcaacgagtccttcctatagaacaatcactgagcactctataccaaagcgtcaagatacttcaacgcacagggaatggattgttggagagagtaactaggattctagcttctctggattttgctcagaacttcatcacaaacaatacttcctctgttattattgaggaaactaagaagtatgggagaacaataataggatattttgaacattatctgcagtggatcgagttctctatcagtgagaaagtggcatcgtgcaaacctgtggccaccgctctagatactgctgttgatgtctttctgtgtagctacattatcgaccccttgaatttgttttggtttggcataggaaaagctactgtatttttacttccggctctaatttttgcggtaaaactggctaagtactatcgtcgaatggattcggaggacgtgtacgatgatgttgaaactatacccatgaaaaacccatcacaacattgatagctgatgttgaaactgcttgagcatcaggatactcaaagtggaaaggatcacagatttttggtagtttctgggtctacaaggactttccaaatccaggagcaacgccagtggcaacgtagtgactcaggcgggcaccaaggcaacggcaccattggtctctgggtagtgctttaagaatgaacacaatcacgttatagtccatggtccatcactattcaaggatgactccctcccttcctgtctatttttgttttttacttttttacactgagtttctatttagacactacaacatatggggtgtttgttcccattggatgcatttctatcaaaactctatcaaatgtgatggctagattctaacatattgccatgtgtggagtgtgctgaacacacaccagtttacaggaaagatgcattttgtgtacagtaaacggtgtatataccttttgttaccacagagttttttaaacaaatgagtattataggactttcttctaaatgagctaaataagtcaccattgacttcttggtgctgttgaaaataatccattttcactaaaagtgtgtgaaacctacagcatattcttcacgcagagattttcatctattatactttatcaaagattggccatgttccacttggaaatggcatgcaaaagcaatcatagagaaacctgcgtaactccatctgacaaattcaaaagagagagagagatcttgagagagaaatgctgttcgttcaaaagtggagttgttttaacagatgccaattacggtgtacagtttaacagagttttctgttgcattacgataaacattaattggagtgcagctaacatgagtatcatcagactagtatcaagtgttctaaaatgaaatatgagaagatcctgtcacaattcttagatctggtgtccagcatggatgaaacctttgagtttggtccctaaatttgcatgaaagcacaaggtaaatattcatttgcttcaggagtttcatgttggatctgtcattatcaaaagtgatcagcaatgaagaactggtcggacaaaatttaacgttgatgtaatgaaattccagatgtaggcattccccccaggtcttttcatgtgcagattgcagttctgattcatttgaataaaaaggaacttggaaaacatg

SEQ ID NO: 302777 - DNA, 2529 bp, Artificial Sequence
  derived and/or modified sequence
atggccctggtgctgggcagcctgctgctgctgggcctgtgcggcaacagcttcagcggcggccagcccagcagcaccgacgcccccaaggcctggaactacgagctgcccgccaccaactacgagacccaggacagccacaaggccggccccatcggcatcctgttcgagctggtgcacatcttcctgtacgtggtgcagcccagagacttccccgaggacaccctgagaaagttcctgcagaaggcctacgagagcaagatcgactacgacaagcccgagaccgtgatcctgggcctgaagatcgtgtactacgaggccggcatcatcctgtgctgcgtgctgggcctgctgttcatcatcctgatgcccctggtgggctacttcttctgcatgtgcagatgctgcaacaagtgcggcggcgagatgcaccagagacagaaggagaacggccccttcctgagaaagtgcttcgccatcagcctgctggtgatctgcatcatcatcagcatcggcatcttctacggcttcgtggccaaccaccaggtgagaaccagaatcaagagaagcagaaagctggccgacagcaacttcaaggacctgagaaccctgctgaacgagacccccgagcagatcaagtacatcctggcccagtacaacaccaccaaggacaaggccttcaccgacctgaacagcatcaacagcgtgctgggcggcggcatcctggacagactgagacccaacatcatccccgtgctggacgagatcaagagcatggccaccgccatcaaggagaccaaggaggccctggagaacatgaacagcaccctgaagagcctgcaccagcagagcacccagctgagcagcagcctgaccagcgtgaagaccagcctgagaagcagcctgaacgaccccctgtgcctggtgcaccccagcagcgagacctgcaacagcatcagactgagcctgagccagctgaacagcaaccccgagctgagacagctgccccccgtggacgccgagctggacaacgtgaacaacgtgctgagaaccgacctggacggcctggtgcagcagggctaccagagcctgaacgacatccccgacagagtgcagagacagaccaccaccgtggtggccggcatcaagagagtgctgaacagcatcggcagcgacatcgacaacgtgacccagagactgcccatccaggacatcctgagcgccttcagcgtgtacgtgaacaacaccgagagctacatccacagaaacctgcccaccctggaggagtacgacagctactggtggctgggcggcctggtgatctgcagcctgctgaccctgatcgtgatcttctactacctgggcctgctgtgcggcgtgtgcggctacgacagacacgccacccccaccaccagaggctgcgtgagcaacaccggcggcgtgttcctgatggtgggcgtgggcctgagcttcctgttctgctggatcctgatgatcatcgtggtgctgaccttcgtgttcggcgccaacgtggagaagctgatctgcgagccctacaccagcaaggagctgttcagagtgctggacaccccctacctgctgaacgaggactgggagtactacctgagcggcaagctgttcaacaagagcaagatgaagctgaccttcgagcaggtgtacagcgactgcaagaagaacagaggcacctacggcaccctgcacctgcagaacagcttcaacatcagcgagcacctgaacatcaacgagcacaccggcagcatcagcagcgagctggagagcctgaaggtgaacctgaacatcttcctgctgggcgccgccggcagaaagaacctgcaggacttcgccgcctgcggcatcgacagaatgaactacgacagctacctggcccagaccggcaagagccccgccggcgtgaacctgctgagcttcgcctacgacctggaggccaaggccaacagcctgccccccggcaacctgagaaacagcctgaagagagacgcccagaccatcaagaccatccaccagcagagagtgctgcccatcgagcagagcctgagcaccctgtaccagagcgtgaagatcctgcagagaaccggcaacggcctgctggagagagtgaccagaatcctggccagcctggacttcgcccagaacttcatcaccaacaacaccagcagcgtgatcatcgaggagaccaagaagtacggcagaaccatcatcggctacttcgagcactacctgcagtggatcgagttcagcatcagcgagaaggtggccagctgcaagcccgtggccaccgccctggacaccgccgtggacgtgttcctgtgcagctacatcatcgaccccctgaacctgttctggttcggcatcggcaaggccaccgtgttcctgctgcccgccctgatcttcgccgtgaagctggccaagtactacagaagaatggacagcgaggacgtgtacgacgacgtggagaccatccccatgaagaaccccagccagcactag

SEQ ID NO: 302778 - protein, 834 aa, Artificial Sequence
  derived and/or modified sequence
MALVLGSLLLLGLCGNSFSGGQPSSTDAPKAWNYELPATNYETQDSHKAGPIGILFELVHIFLYVVQPRDFPEDTLRKFLQKAYESKIDYDKPETVILGLKIVYYEAGIILCCVLGLLFIILMPLVGYFFCMCRCCNKCGGEMHQRQKENGPFLRKCFAISLLVICIIISIGIFYGFVANHQVRTRIKRSRKLADSNFKDLRTLLNETPEQIKYILAQYNTTKDKAFTDLNSINSVLGGGILDRLRPNIIPVLDEIKSMATAIKETKEALENMNSTLKSLHQQSTQLSSSLTSVKTSLRSSLNDPLCLVHPSSETCNSIRLSLSQLNSNPELRQLPPVDAELDNVNNVLRTDLDGLVQQGYQSLNDIPDRVQRQTTTVVAGIKRVLNSIGSDIDNVTQRLPIQDILSAFSVYVNNTESYIHRNLPTLEEYDSYWWLGGLVICSLLTLIVIFYYLGLLCGVCGYDRHATPTTRGCVSNTGGVFLMVGVGLSFLFCWILMIIVVLTFVFGANVEKLICEPYTSKELFRVLDTPYLLNEDWEYYLSGKLFNKSKMKLTFEQVYSDCKKNRGTYGTLHLQNSFNISEHLNINEHTGSISSELESLKVNLNIFLLGAAGRKNLQDFAACGIDRMNYDSYLAQTGKSPAGVNLLSFAYDLEAKANSLPPGNLRNSLKRDAQTIKTIHQQRVLPIEQSLSTLYQSVKILQRTGNGLLERVTRILASLDFAQNFITNNTSSVIIEETKKYGRTIIGYFEHYLQWIEFSISEKVASCKPVATALDTAVDVFLCSYIIDPLNLFWFGIGKATVFLLPALIFAVKLAKYYRRMDSEDVYDDPSQH

SEQ ID NO: 302779 - DNA, 2505 bp, Artificial Sequence
  derived and/or modified sequence
atggccttggtcctgggtagcctgttactgctcggtctctgtggtaattcttttagcggagggcagcccagctcaaccgatgccccaaaggcctggaactacgagctccccgccacgaactatgagactcaggactcacataaggcaggcccaatcggaattctgttcgaactggtgcacatcttcctgtacgtcgtgcaaccacgagacttcccagaggatacccttcgcaagttcctgcagaaggcctacgaatccaagattgattacgataaacccgaaaccgtgatcctcggcctgaaaattgtctactatgaagctggaattattctgtgctgcgttctgggtctgctgttcatcattctgatgcctcttgtggggtatttcttttgcatgtgccgatgctgtaataagtgcggcggagagatgcaccagaggcagaaggagaacggcccgttcctgagaaagtgttttgccatatctttgctggtcatttgtattatcatttccatcgggatcttctatggtttcgtggccaaccaccaagtcaggactaggataaaacgctcccggaaactggccgattcaaatttcaaggacctgcggactttattaaatgagacacccgaacagattaagtacatattggcccagtacaacactaccaaagataaggcgtttactgacctaaattcaattaacagcgtgctaggtggagggatcttggaccgtcttaggcccaacattatcccagtgctggacgaaattaagtctatggccacagcaatcaaggagacaaaagaggcccttgagaacatgaacagcacactcaagagcctccaccagcagagtacacaactgtctagtagcctcacttccgtgaaaacaagcctcaggtcttcactgaatgaccccttgtgcctcgtgcatccttcttcggagacttgtaattccatacgcctaagtctatcgcagctgaactctaaccccgaactccggcagttaccccctgtcgacgccgaactagacaatgtcaacaacgtgctgcggacggatcttgatggcttagtgcagcagggctatcaatctttgaacgacatccctgatcgggtgcagagacagacaactacagtcgtggccgggattaaaagagttctgaacagcattggtagtgatattgacaatgtcacccagagactccccattcaggatatcttatcggcgttctccgtgtacgtgaacaatactgaaagttacattcataggaacctgccaacgctggaggagtatgatagctactggtggctaggagggctcgtcatttgcagtcttctaactctgattgtgatcttctactacctaggcctcctgtgcggagtatgcggttacgaccgacatgctacgccaactactagaggctgtgtttctaatacgggtggcgtatttttgatggttggcgtcggtctaagcttcctgttctgctggatccttatgattattgttgtgctgacatttgtgttcggagcaaacgtcgagaaacttatctgcgaaccttatacaagcaaggaacttttccgagtgctagatacaccctatctactaaatgaggactgggaatattacctgagtgggaagctgttcaacaaaagtaaaatgaaactaacctttgagcaggtctatagtgactgcaaaaagaatcggggtacgtacgggaccctgcatttacagaactccttcaacatcagtgagcacctgaatattaatgagcacacgggttcaatttcctccgagctggaatcgcttaaggtgaacctcaacatcttcttactcggtgctgccgggcgcaaaaacctgcaagacttcgcagcctgcggcattgacagaatgaattatgactcttacctagctcagactggaaagtcgcccgccggagtaaacctcctgtccttcgcctatgatttagaggccaaagcgaattctttgccacctggaaatcttcggaacagcttgaaaagggatgcccagaccataaaaacgatccaccagcaacgggtgctcccgatcgagcagagcctgtccacactttaccaatctgtcaagatactacagcggacagggaatggtctgttggagcgagtaacccgcatactagcttcccttgactttgcacagaacttcataacaaacaataccagctctgtaatcattgaggagactaagaaatacgggagaaccattattggatatttcgagcactatctccagtggattgagtttagtatctctgagaaggtggccagttgcaaaccagtcgcaacagcactggacacagcagttgatgtcttcctgtgctcttatatcatcgaccccttgaacctgttctggttcgggatagggaaagcaactgtgttcctcttgccggccctgatcttcgctgtgaagctggcgaaatactatcgacggatggacagtgaggacgtctacgacgatccctcacagcactag

SEQ ID NO: 302780 - DNA, 2505 bp, Artificial Sequence
  derived and/or modified sequence
atggccctggtgctgggcagcctgctgctgctgggcctgtgtggcaacagcttcagcggcggccagcccagcagcacagatgcccccaaggcctggaactatgagctgcctgccaccaactatgagacccaggacagccacaaggccggccccatcggcatcctgtttgagctggtgcacatcttcctgtatgtggtgcagccccgggacttccctgaggacaccctgaggaagttcctgcagaaggcctatgagagcaagattgattatgacaagccagagaccgtcatcctgggcctgaagatcgtgtactatgaagctggcatcatcctgtgctgcgtgctgggcctgctcttcatcatcctgatgcccctggtgggctacttcttctgcatgtgccgctgctgcaacaagtgtggcggggagatgcaccagaggcagaaggaaaatggccccttcctgaggaagtgctttgccatcagcctgctggtgatctgcatcatcatcagcatcggcatcttctacggctttgtggccaaccaccaggtgaggacccgcatcaagaggagcaggaagctggccgacagcaacttcaaggacctgcggaccctgctgaatgagaccccagagcagatcaagtacatcctggcccagtacaacaccaccaaggacaaggccttcacagacctgaacagcatcaacagcgtgctgggcggcggcatcctggaccggctgcggcccaacatcatccctgtgctggatgagatcaagtccatggccacagccatcaaggagaccaaggaggccctggagaacatgaacagcaccctgaagagcctgcaccagcagagcacccagctgagcagcagcctgacctctgtgaagaccagcctgcggagcagcctgaatgaccccctgtgcctggtgcaccccagcagcgagacctgcaacagcatccggctgagcctgagccagctgaacagcaaccctgagctgcggcagctgccccctgtggatgctgagctggacaacgtgaacaacgtgctgaggacagacctggatggcctggtgcagcagggctaccagagcctgaatgacatcccagacagagtgcagaggcagaccaccaccgtggtggccggcatcaagagggtgctgaacagcattggaagtgacatcgacaacgtgacccagaggctgcccatccaggacatcctgagcgccttctctgtgtatgtgaacaacacagagagctacatccacaggaacctgcccaccctggaggagtatgacagctactggtggctgggcggcctggtgatctgcagcctgctgaccctcatcgtcatcttctactacctgggcctgctgtgtggggtgtgtggctatgacagacatgccacccccaccacccggggctgtgtgagcaacacaggaggagtcttcctgatggtgggcgtgggcctgtccttcctgttctgctggatcctgatgatcatcgtggtgctgacctttgtgtttggagccaacgtggagaagctgatctgtgagccctacaccagcaaggagctgttccgggtgctggacaccccctacctgctgaatgaagactgggagtactacctgagcggcaagctgttcaacaagagcaagatgaagctgacctttgagcaggtgtacagcgactgcaagaagaacagaggcacctacggcaccctgcacctgcagaacagcttcaacatcagcgagcacctgaacatcaatgagcacacaggcagcatcagcagcgagctggagagcctgaaggtgaacctgaacatcttcctgctgggcgctgctggcaggaagaacctgcaggactttgctgcctgtggcatcgacaggatgaactatgacagctacctggcccagacaggcaagagccctgctggggtgaacctgctgagctttgcctatgacctggaggccaaggccaacagcctgcccccaggcaacctgaggaacagcctgaagagagatgcccagaccatcaagaccatccaccagcagagggtgctgcccatcgagcagagcctgagcaccctgtaccagagcgtgaagatcctgcagaggactggaaatggcctgctggagcgggtgacccgcatcctggccagcctggactttgcccagaacttcatcaccaacaacaccagcagcgtcatcatcgaggagaccaagaagtatggccgcaccatcatcggctactttgagcactacctgcagtggattgagttcagcatcagcgagaaggtggccagctgcaagcctgtggccacagccctggacacagctgtggatgtgttcctgtgcagctacatcatcgaccccctgaacctcttctggtttggcatcggcaaggccaccgtcttcctgctgcctgccctgatctttgctgtgaagctggccaagtactacagaaggatggacagtgaagatgtgtatgatgaccccagccagcactag

SEQ ID NO: 302781 - DNA, 2505 bp, Artificial Sequence
  derived and/or modified sequence
atggccctggtgctgggcagcctgctgctgctgggcctgtgcggcaattcattctcaggtgggcagcctagcagtacagatgcaccaaaagcgtggaactacgagcttccagccaccaactatgaaacccaggactcgcataaggccggcccaatcggtatcctgttcgagctcgtacacatcttcttgtacgtcgtccagcccagggactttcccgaggacacactgcgaaaattcctgcagaaggcttatgagtctaaaattgactatgacaagcctgagacagtcatcctgggcctcaagatagtctattacgaagccgggatcatactttgctgtgttctggggttgttattcataatattaatgccactcgtgggctacttcttctgcatgtgtagatgctgtaacaaatgtggcggagagatgcatcagcgtcaaaaagagaacggtcccttcctgcgtaagtgttttgcaatctccttactcgttatctgcatcattatttccattggcatcttctatggattcgtggctaatcatcaagtgcgcacgcggatcaagcgctccagaaaacttgctgactctaatttcaaggacttgagaacactcttaaacgagacccccgagcaaatcaagtacattttagcacagtacaacacaacgaaggataaagcttttaccgacctcaattccatcaacagtgtgctcggggggggtatcctagacaggctgcgacccaatatcatcccagtgctggacgagatcaaaagcatggccacagccatcaaggaaacaaaggaagccctggaaaacatgaactcaactttgaagagcctacaccagcagagtacacagctgtcctcgtccctgacgagcgttaagaccagcctcaggtcgtccctgaatgatccgctctgcttggtccatccctctagcgaaacgtgcaatagtattagactgagcctgagtcaactgaattccaacccagaacttagacagcttccccctgtggacgctgaacttgacaacgtcaacaacgtgttgcgcacagatttagacgggttagtgcagcagggttaccagagcctaaacgacatcccagacagggtgcagcgccaaacaacaactgtggtggccggcatcaagagggtgctcaactctattggaagcgacatagataacgtcacgcagcgcctgccaatccaggacatactctcagcattcagtgtgtatgtgaacaatacggagagctatattcatcggaatctgcccacactggaggagtatgattcttattggtggctgggcggacttgtcatttgtagccttctcactctgatcgtgatcttctattatctgggcctgctctgtggagtctgtggttacgacaggcacgccacaccaactaccaggggttgcgtatccaataccggcggcgtgtttctcatggtcggagtgggcctgtcctttctcttctgttggatattgatgatcatcgtcgtgctcactttcgttttcggcgccaacgtagagaaattgatctgcgagccctacacaagtaaagaactgtttcgggtgttggacacaccctatctccttaatgaggactgggagtactatctgagcggtaagctctttaacaagagcaagatgaagctaacatttgagcaggtgtacagcgattgtaaaaaaaatcgcggaacctacggtactctgcatcttcagaatagctttaacatatctgaacacctgaatatcaacgagcacaccgggagtatcagcagcgagctggaatccctgaaagtcaaccttaacatttttcttctgggcgccgctggaagaaagaaccttcaggattttgctgcttgcggtattgatcgcatgaactacgactcctatctggcccagaccggcaagagtcccgctggagtgaacctgttgtctttcgcatacgatttagaagccaaagcaaatagtctccctccggggaatttacggaactctctaaaacgcgacgcccagacaattaaaacaatccaccagcaaagagtactccccatcgaacagtccctttcaacattataccagtcggtgaagatcctgcagcgtactggcaatggtctgctggagagagtgacaagaattttagcgtctctggactttgcccagaactttataactaacaacactagctccgtgatcatagaggagaccaagaaatacgggcggaccattattggatatttcgagcattatctccagtggatcgaatttagcatttctgagaaagtcgcaagctgcaagcccgtggccacggccttggacaccgccgttgatgtgttcctctgttcatacatcattgaccctctcaacctgttctggtttggaattgggaaagccacggtcttcctcctgcctgcactcatcttcgccgtaaagttggccaaatattaccgtaggatggactccgaagatgtgtacgacgacccaagccaacactag

SEQ ID NO: 302782 - DNA, 2505 bp, Artificial Sequence
  derived and/or modified sequence
atggccctggtcctcggatcgctcctcctgctgggcctatgtgggaattctttcagtgggggacagcctagctctactgacgctcccaaggcttggaactacgagctgcccgcaaccaactatgaaacacaggattcacacaaggctgggccaatcgggattctatttgagctggtgcatattttcctgtatgtggtgcagccacgggattttcccgaggacacgcttagaaagttcctgcagaaggcctacgaatcgaaaattgactatgataagcctgagaccgtcatcctaggattaaagatcgtgtactatgaggctggaatcatactgtgttgcgtccttggactgctgtttatcattctgatgccccttgtcggttattttttttgcatgtgccgatgctgtaataagtgtggcggagaaatgcatcagcgacagaaggagaacggacctttcttgcgcaagtgctttgccatcagcctgcttgttatttgtattatcatttccatcggaatattctacgggtttgtggccaatcaccaggttcgtacacgaattaagcgtagccgcaaattagctgattccaattttaaggatctgaggacactgctcaacgagacacctgaacagattaaatacatactggctcagtataacaccacgaaggacaaagctttcaccgatcttaatagcatcaattctgtgctaggaggcggtattttggataggctgcgcccaaatattatccccgtccttgacgaaatcaagagtatggccaccgcaattaaagagacaaaggaggcactcgagaacatgaactcaacccttaagtctctccaccagcagtccacacagctctcgagctctcttacatccgttaagacttctctcagatcatccttgaatgacccattatgtctggtgcatcctagctcggagacttgcaattccattaggctctcactgtcccagctcaactccaaccccgagctcagacagctgcccccagtcgatgctgagttggacaacgtgaacaacgtcttgcgcactgatctggatggcctggtccagcagggatatcagtcgctgaatgacattcctgatcgggtgcagaggcagacaactaccgtggtcgccggtatcaagagggtcctcaactcaatcggaagcgatatcgacaatgtgacacaaaggctgcccatccaggacattctgagtgcattctctgtctatgtcaacaacacagaaagctacatacacaggaatctgcccacactggaggagtatgacagttactggtggctcgggggtcttgtgatttgctccttgctcacactgatcgtgatattctattatttgggtctgctttgcggagtatgcggatacgacagacacgccaccccaaccacacggggatgcgtaagcaacaccggaggcgtttttctgatggttggcgtgggactttccttcctcttctgctggattctcatgataatagtggtccttacttttgtattcggagccaatgtcgagaagcttatctgtgagccctatacttcaaaagaactattccgcgtcttggacaccccatatcttctgaatgaagattgggagtattatttgtctggcaaactcttcaacaaatctaagatgaagctgaccttcgagcaggtgtactcagattgcaaaaagaatcggggaacctatggaacactgcatctacagaactcatttaatataagtgagcacctgaacattaatgagcacacaggttccatttcctctgagttagaaagcctcaaggtgaacttgaatatttttctgctgggggctgcgggtcgcaagaaccttcaggacttcgctgcttgcgggattgatagaatgaattacgattcctacttggcccagaccggaaaaagcccagctggcgtgaaccttctgagttttgcctacgaccttgaagcaaaagccaactcacttccccctggtaacctgcgcaatagtctgaaacgggacgcgcagacaatcaagacaattcatcagcaacgcgtgcttcccatcgagcagagcctttctaccctgtatcagtccgtgaagattctgcaaagaacaggcaacggactgcttgaacgcgtcacacggattctcgcgagtctggacttcgcccagaattttattacgaacaacacatcctctgtaataatcgaggaaaccaagaaatatggacggaccataatcggctacttcgagcactatctgcagtggatcgaatttagtatcagcgagaaagtggccagctgcaaacctgtcgccactgccctggacacagcggttgacgtgtttctgtgctcatatatcattgatcctctcaatctgttttggttcggcatcggtaaggccactgtattcttgctgcccgctctgatttttgccgtaaagctcgccaagtattaccgtcgcatggattcagaggatgtctatgatgatcctagtcaacactag

SEQ ID NO: 302783 - DNA, 3884 bp, Artificial Sequence
  derived and/or modified sequence
ggatggtgccttgagtgaatgacccccttggagaacattcttccgcatccctcgcctcaagccagcctcagacagaaaactgaagattcagcagatccagtgcttcctgctcctcttctgcccaggaacacgcttgccttccccaaggcttccagaagctctgaggcaggaggcaccaagttctacctcatgtttggaggatcttgctagctatggccctcgtactcggctccctgttgctgctggggctgtgcgggaactccttttcaggagggcagccttcatccacagatgctcctaaggcttggaattatgaattgcctgcaacaaattatgagacccaagactcccataaagctggacccattggcattctctttgaactagtgcatatctttctctatgtggtacagccgcgtgatttcccagaagatactttgagaaaattcttacagaaggcatatgaatccaaaattgattatgacaagccagaaactgtaatcttaggtctaaagattgtctactatgaagcagggattattctatgctgtgtcctggggctgctgtttattattctgatgcctctggtggggtatttcttttgtatgtgtcgttgctgtaacaaatgtggtggagaaatgcaccagcgacagaaggaaaatgggcccttcctgaggaaatgctttgcaatctccctgttggtgatttgtataataataagcattggcatcttctatggttttgtggcaaatcaccaggtaagaacccggatcaaaaggagtcggaaactggcagatagcaatttcaaggacttgcgaactctcttgaatgaaactccagagcaaatcaaatatatattggcccagtacaacactaccaaggacaaggcgttcacagatctgaacagtatcaattcagtgctaggaggcggaattcttgaccgactgagacccaacatcatccctgttcttgatgagattaagtccatggcaacagcgatcaaggagaccaaagaggcgttggagaacatgaacagcaccttgaagagcttgcaccaacaaagtacacagcttagcagcagtctgaccagcgtgaaaactagcctgcggtcatctctcaatgaccctctgtgcttggtgcatccatcaagtgaaacctgcaacagcatcagattgtctctaagccagctgaatagcaaccctgaactgaggcagcttccacccgtggatgcagaacttgacaacgttaataacgttcttaggacagatttggatggcctggtccaacagggctatcaatcccttaatgatatacctgacagagtacaacgccaaaccacgactgtcgtagcaggtatcaaaagggtcttgaattccattggttcagatatcgacaatgtaactcagcgtcttcctattcaggatatactctcagcattctctgtttatgttaataacactgaaagttacatccacagaaatttacctacattggaagagtatgattcatactggtggctgggtggcctggtcatctgctctctgctgaccctcatcgtgattttttactacctgggcttactgtgtggcgtgtgcggctatgacaggcatgccaccccgaccacccgaggctgtgtctccaacaccggaggcgtcttcctcatggttggagttggattaagtttcctcttttgctggatattgatgatcattgtggttcttacctttgtctttggtgcaaatgtggaaaaactgatctgtgaaccttacacgagcaaggaattattccgggttttggatacaccctacttactaaatgaagactgggaatactatctctctgggaagctatttaataaatcaaaaatgaagctcacttttgaacaagtttacagtgactgcaaaaaaaatagaggcacttacggcactcttcacctgcagaacagcttcaatatcagtgaacatctcaacattaatgagcatactggaagcataagcagtgaattggaaagtctgaaggtaaatcttaatatctttctgttgggtgcagcaggaagaaaaaaccttcaggattttgctgcttgtggaatagacagaatgaattatgacagctacttggctcagactggtaaatcccccgcaggagtgaatcttttatcatttgcatatgatctagaagcaaaagcaaacagtttgcccccaggaaatttgaggaactccctgaaaagagatgcacaaactattaaaacaattcaccagcaacgagtccttcctatagaacaatcactgagcactctataccaaagcgtcaagatacttcaacgcacagggaatggattgttggagagagtaactaggattctagcttctctggattttgctcagaacttcatcacaaacaatacttcctctgttattattgaggaaactaagaagtatgggagaacaataataggatattttgaacattatctgcagtggatcgagttctctatcagtgagaaagtggcatcgtgcaaacctgtggccaccgctctagatactgctgttgatgtctttctgtgtagctacattatcgaccccttgaatttgttttggtttggcataggaaaagctactgtatttttacttccggctctaatttttgcggtaaaactggctaagtactatcgtcgaatggattcggaggacgtgtacgatgacccatcacaacattgatagctgatgttgaaactgcttgagcatcaggatactcaaagtggaaaggatcacagatttttggtagtttctgggtctacaaggactttccaaatccaggagcaacgccagtggcaacgtagtgactcaggcgggcaccaaggcaacggcaccattggtctctgggtagtgctttaagaatgaacacaatcacgttatagtccatggtccatcactattcaaggatgactccctcccttcctgtctatttttgttttttacttttttacactgagtttctatttagacactacaacatatggggtgtttgttcccattggatgcatttctatcaaaactctatcaaatgtgatggctagattctaacatattgccatgtgtggagtgtgctgaacacacaccagtttacaggaaagatgcattttgtgtacagtaaacggtgtatataccttttgttaccacagagttttttaaacaaatgagtattataggactttcttctaaatgagctaaataagtcaccattgacttcttggtgctgttgaaaataatccattttcactaaaagtgtgtgaaacctacagcatattcttcacgcagagattttcatctattatactttatcaaagattggccatgttccacttggaaatggcatgcaaaagcaatcatagagaaacctgcgtaactccatctgacaaattcaaaagagagagagagatcttgagagagaaatgctgttcgttcaaaagtggagttgttttaacagatgccaattacggtgtacagtttaacagagttttctgttgcattacgataaacattaattggagtgcagctaacatgagtatcatcagactagtatcaagtgttctaaaatgaaatatgagaagatcctgtcacaattcttagatctggtgtccagcatggatgaaacctttgagtttggtccctaaatttgcatgaaagcacaaggtaaatattcatttgcttcaggagtttcatgttggatctgtcattatcaaaagtgatcagcaatgaagaactggtcggacaaaatttaacgttgatgtaatgaaattccagatgtaggcattccccccaggtcttttcatgtgcagattgcagttctgattcatttgaataaaaaggaacttggaaaacatg

SEQ ID NO: 302784 - DNA, 2505 bp, Artificial Sequence
  derived and/or modified sequence
atggccctggtgctgggcagcctgctgctgctgggcctgtgcggcaacagcttcagcggcggccagcccagcagcaccgacgcccccaaggcctggaactacgagctgcccgccaccaactacgagacccaggacagccacaaggccggccccatcggcatcctgttcgagctggtgcacatcttcctgtacgtggtgcagcccagagacttccccgaggacaccctgagaaagttcctgcagaaggcctacgagagcaagatcgactacgacaagcccgagaccgtgatcctgggcctgaagatcgtgtactacgaggccggcatcatcctgtgctgcgtgctgggcctgctgttcatcatcctgatgcccctggtgggctacttcttctgcatgtgcagatgctgcaacaagtgcggcggcgagatgcaccagagacagaaggagaacggccccttcctgagaaagtgcttcgccatcagcctgctggtgatctgcatcatcatcagcatcggcatcttctacggcttcgtggccaaccaccaggtgagaaccagaatcaagagaagcagaaagctggccgacagcaacttcaaggacctgagaaccctgctgaacgagacccccgagcagatcaagtacatcctggcccagtacaacaccaccaaggacaaggccttcaccgacctgaacagcatcaacagcgtgctgggcggcggcatcctggacagactgagacccaacatcatccccgtgctggacgagatcaagagcatggccaccgccatcaaggagaccaaggaggccctggagaacatgaacagcaccctgaagagcctgcaccagcagagcacccagctgagcagcagcctgaccagcgtgaagaccagcctgagaagcagcctgaacgaccccctgtgcctggtgcaccccagcagcgagacctgcaacagcatcagactgagcctgagccagctgaacagcaaccccgagctgagacagctgccccccgtggacgccgagctggacaacgtgaacaacgtgctgagaaccgacctggacggcctggtgcagcagggctaccagagcctgaacgacatccccgacagagtgcagagacagaccaccaccgtggtggccggcatcaagagagtgctgaacagcatcggcagcgacatcgacaacgtgacccagagactgcccatccaggacatcctgagcgccttcagcgtgtacgtgaacaacaccgagagctacatccacagaaacctgcccaccctggaggagtacgacagctactggtggctgggcggcctggtgatctgcagcctgctgaccctgatcgtgatcttctactacctgggcctgctgtgcggcgtgtgcggctacgacagacacgccacccccaccaccagaggctgcgtgagcaacaccggcggcgtgttcctgatggtgggcgtgggcctgagcttcctgttctgctggatcctgatgatcatcgtggtgctgaccttcgtgttcggcgccaacgtggagaagctgatctgcgagccctacaccagcaaggagctgttcagagtgctggacaccccctacctgctgaacgaggactgggagtactacctgagcggcaagctgttcaacaagagcaagatgaagctgaccttcgagcaggtgtacagcgactgcaagaagaacagaggcacctacggcaccctgcacctgcagaacagcttcaacatcagcgagcacctgaacatcaacgagcacaccggcagcatcagcagcgagctggagagcctgaaggtgaacctgaacatcttcctgctgggcgccgccggcagaaagaacctgcaggacttcgccgcctgcggcatcgacagaatgaactacgacagctacctggcccagaccggcaagagccccgccggcgtgaacctgctgagcttcgcctacgacctggaggccaaggccaacagcctgccccccggcaacctgagaaacagcctgaagagagacgcccagaccatcaagaccatccaccagcagagagtgctgcccatcgagcagagcctgagcaccctgtaccagagcgtgaagatcctgcagagaaccggcaacggcctgctggagagagtgaccagaatcctggccagcctggacttcgcccagaacttcatcaccaacaacaccagcagcgtgatcatcgaggagaccaagaagtacggcagaaccatcatcggctacttcgagcactacctgcagtggatcgagttcagcatcagcgagaaggtggccagctgcaagcccgtggccaccgccctggacaccgccgtggacgtgttcctgtgcagctacatcatcgaccccctgaacctgttctggttcggcatcggcaaggccaccgtgttcctgctgcccgccctgatcttcgccgtgaagctggccaagtactacagaagaatggacagcgaggacgtgtacgacgaccccagccagcactag

SEQ ID NO: 302785 - DNA, 1551 bp, Artificial Sequence
  derived and/or modified sequence
ggggaggtgggcaagatggcgcttgccgagtgattctcctcgaatacctcctgccggcgcggagacaccggggcgggggtcctgccgcaactacctcccttcctcctctcccccgcccccggagccttcatccttcccttccccccccacctcgaggggcgggcctggttcccgggacaccatgtcggactctgaggaggagagccaggaccggcaactgaaaatcgtcgtgctgggggacggcgcctccgggaagacctccttaactacgtgttttgctcaagaaacttttgggaaacagtacaaacaaactataggactggatttctttttgagaaggataacattgccaggaaacttgaatgttacccttcaaatttgggatataggagggcagacaataggaggcaaaatgttggataaatatatctatggagcacagttgatttggagcatatgcgaacaataaaacctgaaaaacacttacggttttgccaggaaaatggttttagtagccactttgtctcagccaagacaggagactctgtcttcctgtgctttcagaaagttgctgctgaaatccttgggatcaaattaaacaaagcagaaatagaacagtcacagagggtggtgaaggcagatattgtaaactacaaccaggaacctatgtcaaggactgttaaccctcctagaagctctatgtgtgcagttcagtgagcgcatttttcttttgtgttgatagttctggctgcccttcacctctgggtgggcccgaggacttctaggaacttgttttatcagtgaccatctctgtagttcagttaacactttactcccaacttgcttcatcattgctattgcctcacagtggcaggcagctccttggatttgaaagaattcaactttgggaccacacactttgaattcaaaatggaaaacccattccctggaattagactgcttcattgcaaaagaatgatgttgtttctttgtatgtccttgcttcttttttcattgatgtaaatttttttaacttaatatgaaaactctccaagtcttgatcatcagccaggattttgccacagcaatttcattctcttatcggaacttgtatgtgtcaaagtatacttcagagtgcaaacattaagcaagtaatatattttacctacagatacttatgaagacattctttcgctatcgtgagtaaaagtatataaagctgtttctaactgaaaatgcttgaaataagcctgtaatagaaatattttttcattttttaaaaaagggcctaaattgtttatattgtagtttgtaactcacaaagtaatatttgatattgtatttttattactgtatcgttgtcgttatgtattgtgtaatactcaggtttgaaggctttctgaattctgataaatgttcagctgatgctccacgtggaatttctcttgcaaactgcataagagtactcccgagaatgagttatgacattgtggatcagactgtacctgatgttcagatgtttttctttcacaaataaacttatttaaatta

SEQ ID NO: 302786 - protein, 790 aa, Artificial Sequence
  derived and/or modified sequence
MRTYRYFLLLFWVGQPYPTLSTPLSKRTSGFPAKKRALELSGNSKNELNRSKRSWMWNQFFLLEEYTGSDYQYVGKLHSDQDRGDGSLKYILSGDGAGDLFIINENTGDIQATKRLDREEKPVYILRAQAINRRTGRPVEPESEFIIKIHDINDNEPIFTKEVYTATVPEMSDVGTFVVQVTATDADDPTYGNSAKVVYSILQGQPYFSVESETGIIKTALLNMDRENREQYQVVIQAKDMGGQMGGLSGTTTVNITLTDVNDNPPRFPQSTYQFKTPESSPPGTPIGRIKASDADVGENAEIEYSITDGEGLDMFDVITDQETQEGIITVKKLLDFEKKKVYTLKVEASNPYVEPRFLYLGPFKDSATVRIVVEDVDEPPVFSKLAYILQIREDAQINTTIGSVTAQDPDAARNPVKYSVDRHTDMDRIFNIDSGNGSIFTSKLLDRETLLWHNITVIATEINNPKQSSRVPLYIKVLDVNDNAPEFAEFYETFVCEKAKADQLIQTLHAVDKDDPYSGHQFSFSLAPEAASGSNFTIQDNKDNTAGILTRKNGYNRHEMSTYLLPVVISDNDYPVQSSTGTVTVRVCACDHHGNMQSCHAEALIHPTGLSTGALVAILLCIVILLVTVVLFAALRRQRKKEPLIISKEDIRDNIVSYNDEGGGEEDTQAFDIGTLRNPEAIEDNKLRRDIVPEALFLPRRTPTARDNTDVRDFINQRLKENDTDPTAPPYDSLATYAYEGTGSVADSLSSLESVTTDADQDYDYLSDWGPRFKKLADMYGGVDSDKDS

SEQ ID NO: 302787 - DNA, 2373 bp, Artificial Sequence
  derived and/or modified sequence
atgcgtacttaccgctactttctactgttgttttgggtgggtcagccttacccaaccctcagcaccccattgagcaagagaacaagtgggttccccgccaaaaaacgggctcttgagctgtccggcaactccaaaaatgagctgaaccgctctaagaggagctggatgtggaatcagtttttcctgcttgaggaatacactggtagtgattaccaatacgtgggcaagctgcactctgatcaggatcggggcgatggctccctcaaatatatactgagcggtgacggcgcaggagacctgttcatcatcaacgagaatacaggcgacatccaggcaaccaagaggctggatagagaagagaagcctgtgtatatactgagggcacaggccataaaccgacggacaggacgacctgttgaacccgagagcgaatttataatcaagatacacgacatcaatgataatgaacctatctttactaaagaggtgtacacagcgaccgtacccgagatgtccgatgtggggacctttgtggtccaagtgaccgccacggacgcagacgaccccacctacggaaacagtgcgaaggttgtgtactcgatcctgcagggtcaaccctacttctccgtggaaagcgaaactgggataataaaaaccgctttactgaatatggaccgggagaaccgcgagcagtaccaggtagtgatccaggccaaggatatggggggtcagatgggaggattatctggcacgacaaccgtaaacatcaccctcacagacgtcaatgacaatccgcctcggtttccccagtctacctaccagttcaaaacgccagagtcaagcccacctggaacacctatcggacggattaaagcctctgacgctgatgtgggcgagaacgcagagattgagtattccatcaccgatggcgagggcttagacatgtttgacgttattacagatcaagagactcaggagggcatcattactgtgaagaagttgctggacttcgagaagaaaaaggtctacacgttgaaagtagaagctagcaacccttacgtggagcctcgattcttatatctggggcccttcaaggactccgctacggttcgcattgtggtggaagacgtcgatgaaccgcccgtgttctccaagctggcttacatcctccagattagagaggacgcccagatcaacacaacgatcggttccgtgacagcacaggatcctgatgctgcacgtaacccagtgaagtacagtgtagacaggcataccgacatggaccggattttcaatatcgactccggtaatggtagcatttttacaagcaagcttttggatcgggagaccctgctgtggcacaatatcacagtgatagcgactgagattaacaaccccaaacagtccagccgtgttccattgtatattaaagtgcttgacgtaaatgacaacgccccagaattcgccgaattttacgagacatttgtctgcgaaaaggcaaaggcagaccagctaattcagacactgcacgcagtggataaagacgatccatacagcggtcaccagttctccttttcactcgctcctgaggccgcctccgggagcaatttcactattcaggacaacaaagataacacagccgggattctgacaaggaagaacggctacaatcggcacgagatgagcacatatctgctgccagtggtcattagtgataatgactaccccgttcagtcgtccaccgggactgtgacagtaagagtgtgcgcttgtgaccatcatggcaacatgcagtcatgccacgcagaagctctgatccacccgacgggactgtcaaccggagccttagtcgcgattctgctgtgcatagtgattttacttgtcacagtagttctgtttgcagcactgagacggcaacggaaaaaagagcctctcattataagcaaggaagatataagggataatattgtgtcttacaatgacgagggaggcggggaggaggacacccaggcattcgacataggtactctgagaaacccagaggcgattgaggacaataaactgcggagggatatcgtcccggaggctttgtttctacccagaagaacccctacagcgcgcgataataccgatgtccgggacttcataaaccagcggctgaaggagaacgacacagaccccactgccccgccctacgatagcctcgcaacgtacgcctacgaggggaccgggagcgttgccgactccctctcttcactcgagtctgttaccacagacgcagaccaggactacgattatctcagcgattggggcccgcgtttcaaaaaactcgctgacatgtacggcggggtagactcagataaagacagttag

SEQ ID NO: 302788 - DNA, 2373 bp, Artificial Sequence
  derived and/or modified sequence
atgaggacctaccgctacttcctgctgctcttctgggtgggccagccctaccccaccctgagcacccccctgagcaagaggaccagcggcttccctgccaagaagagggccctggagctgagcggcaacagcaagaatgagctgaacagaagcaagaggtcctggatgtggaaccagttcttcctgctggaggagtacacaggcagtgactaccagtatgtgggcaagctgcacagcgaccaggacagaggagatggcagcctgaagtacatcctgtctggagatggagctggggacctcttcatcatcaatgaaaatactggagacatccaggccaccaagaggctggaccgggaggagaagcctgtgtacatcctgcgggcccaggccatcaacagaagaacaggccggcctgtggagcctgagagcgagttcatcatcaagatccatgacatcaatgacaatgagcccatcttcaccaaggaggtgtacacagccaccgtgcctgagatgtctgatgtgggcacctttgtggtgcaggtgacagccacagatgctgatgaccccacctacggcaacagcgccaaggtggtgtacagcatcctgcagggccagccctacttctctgtggagagcgagaccggcatcatcaagacagccctgctgaacatggacagagaaaatcgggagcagtaccaggtggtgatccaggccaaggacatgggcggccagatgggcggcctgagcggcaccaccaccgtgaacatcaccctgacagatgtgaatgacaaccccccacgcttcccccagagcacctaccagttcaagaccccagagagcagccccccaggcacccccatcggccgcatcaaggccagtgatgctgatgtgggagaaaatgctgagattgagtacagcatcacagatggagagggcctggacatgtttgatgtgatcacagaccaggagacccaggagggcatcatcaccgtgaagaagctgctggactttgagaagaagaaggtgtacaccctgaaggtggaggccagcaacccctacgtggagccccgcttcctgtacctgggccccttcaaggacagcgccaccgtgcgcatcgtggtggaggatgtggatgagccccctgtgttcagcaagctggcctacatcctgcagatccgggaggatgcccagatcaacaccaccatcggctctgtgacagcccaggaccctgatgctgccaggaaccctgtgaagtacagcgtggacagacacacagacatggaccgcatcttcaacattgattctggaaatggcagcatcttcaccagcaagctgctggaccgggagaccctgctgtggcacaacatcaccgtgattgccacagagatcaacaaccccaagcagagcagccgggtgcccctgtacatcaaggtgctggatgtgaatgacaatgcccctgagtttgctgagttctatgagacctttgtgtgtgagaaggccaaggctgaccagctgatccagaccctgcatgctgtggacaaggatgacccctacagcggccaccagttctccttcagcctggcccctgaggccgccagcggcagcaacttcaccatccaggacaacaaggacaacacagctggcatcctgaccaggaagaatggctacaacagacatgagatgagcacctacctgctgcctgtggtgatcagtgacaatgactaccctgtgcagagcagcactggaacagtgacagtgcgggtgtgtgcctgtgaccaccacggcaacatgcagagctgccacgccgaggccctgatccaccccaccggcctgagcactggagccctggtggccatcctgctgtgcatcgtcatcctgctggtgacagtggtgctgtttgctgccctgcggcggcagaggaagaaggagcccctcatcatcagcaaggaggacatccgggacaacatcgtgtcctacaatgatgaaggaggaggagaggaggacacccaggcctttgacatcggcaccctgaggaaccctgaggccatcgaggacaacaagctgcggcgggacatcgtgcctgaggccctcttcctgcccaggaggacccccacagcccgggacaacacagatgtgcgggacttcatcaaccagaggctgaaggaaaatgacacagaccccacagccccaccctatgacagcctggccacctacgcctatgagggcactggatctgtggccgacagcctgagcagcctggagagcgtgaccacagatgctgaccaggactatgactacctgagtgactggggcccccgcttcaagaagctggccgacatgtatggaggagtggacagcgacaaggacagctag

SEQ ID NO: 302789 - DNA, 2373 bp, Artificial Sequence
  derived and/or modified sequence
atgcggacctaccggtacttcctgctgctgttctgggtgggccagccctaccctaccctgagcacacctttaagcaaacgcacatctgggttcccggcaaaaaagcgggcattagaactgagcggaaactccaaaaacgaactaaatcgctctaaacgctcttggatgtggaatcagttctttctcctggaggagtacactggatcagactaccagtatgttggcaagctccattccgatcaggatcgcggtgatgggagcctaaaatatattttgagtggagacggggccggcgacctgttcatcataaacgagaacacaggggacatccaagcaaccaaacggctagacagagaagagaaaccagtttacattctgagagcacaagctatcaacagacgtactgggcggcccgtagagccggagagcgaatttataattaagattcatgatattaacgacaacgaacccatctttacgaaagaggtctatacagcaaccgtgccagagatgagtgacgtaggaacattcgtggtgcaggtcacagccacggacgccgacgatccaacctatggcaacagcgctaaagttgtctattccattttacagggacaaccctatttcagcgtggagagcgaaactggtatcatcaagacagccctgctaaacatggacagggagaacagggagcagtatcaggtggtgattcaggccaaagatatgggtgggcagatgggcggcctgtctggcactaccactgtgaacataactctaactgacgtcaacgataatccacctcggtttccccagagcacctaccagtttaagacaccagagagttctcctccgggtacacccattggccgaattaaggcttcagatgctgacgtgggtgaaaacgcagagatagaatactccatcactgatggcgagggattggatatgttcgatgttatcaccgatcaggaaacacaggaggggattatcaccgtgaagaagctcctcgattttgaaaagaagaaggtctacaccctcaaagtggaggcgagcaacccatatgtagaaccccgatttctttacctgggccctttcaaagatagcgcaacagtgaggatcgtggtggaagatgtcgatgaaccccccgtgttttcaaaactcgcgtacatactacagattagggaagacgctcagattaatacgactataggctctgtcactgcccaggaccccgacgctgcaaggaatcctgtcaagtatagtgtggaccgacacactgatatggataggatttttaacatcgattcaggtaatggctctatcttcacaagtaagctgctggacagagagacgctgctgtggcacaatatcaccgtgatcgcaaccgaaataaataatcccaaacagagcagccgggtccccctgtacattaaggtgctcgacgttaacgataacgctcccgagtttgcagagttttatgagacattcgtttgtgagaaggcaaaagctgaccagctcatccaaactctgcatgcggtggacaaggatgacccctatagtggccaccagtttagcttcagcctcgcccccgaggccgcatccgggagcaacttcactattcaggacaacaaggataatacagcagggatattgacgaggaaaaacgggtacaataggcacgaaatgtctacatacctgctgccagttgtgataagcgacaacgactacccagtgcagagcagtactggtaccgtgactgttcgcgtttgcgcatgcgaccaccacggaaatatgcagagctgccacgctgaagccttgatccatccaacaggcctgtcgacgggtgcccttgttgctattctgttgtgtatagtcatccttctggtgaccgtagtcctcttcgctgccctgcggcgacagcgcaaaaaagagcccttaatcatatcaaaggaggatataagggataacatcgtctcttacaatgatgaagggggaggtgaagaggatacccaggctttcgatatcggcacgttacggaatccagaggcaatcgaggacaataaacttcgtcgcgacatcgtgcctgaggccctctttctgccccgacgtaccccgactgcgcgcgacaacactgacgtgagggacttcattaaccagagactaaaggagaacgacaccgatcctacagctccgccctacgatagcctggcgacatatgcctatgaaggcactggatctgtagccgatagcctgtcctccctggaatccgtgaccacggatgccgatcaagactatgattatctttctgactggggtcctcggttcaaaaagctcgcggacatgtatggcggcgttgactcagataaggactcttag

SEQ ID NO: 302790 - DNA, 2373 bp, Artificial Sequence
  derived and/or modified sequence
atgcgcacttatcggtattttctgctgttattttgggtaggacagccttaccctactctgtcgacacccctgtccaagcgtacatccgggttccccgctaagaaaagagcattggagctgtctggaaatagtaagaatgagctcaatcgatccaaaagaagttggatgtggaaccagttcttcctgctcgaggagtatactgggtcggactatcagtatgtaggaaagctgcatagtgatcaagataggggtgacgggagtcttaagtacatattgagtggcgatggcgctggagaccttttcattattaatgagaacacgggcgacattcaagccaccaaacgactggatagggaagaaaagccggtgtacattttgagagcacaggcgatcaacagaagaactggcaggccagtggaacctgaatcagaatttatcataaagatacacgatatcaatgacaacgaacccatattcaccaaagaggtatacactgcaaccgttccggaaatgtcagacgtggggacattcgtggtgcaagtgactgccaccgatgcagatgacccgacctatggaaacagtgccaaagttgtatactccatcttacaaggccagccctacttctctgtagagtcagaaaccgggatcatcaagacagctctcctcaacatggatcgagaaaaccgtgagcaatatcaggtggtgatacaggccaaggatatgggcggacaaatgggaggactcagcggtaccactaccgtcaatattaccctcaccgacgtcaatgataaccctccgaggtttcctcagtcaacgtaccagtttaagacccccgagtccagcccgccaggaacccccattggcagaatcaaagcatccgacgcggatgtgggagagaatgccgagatcgagtactccattacagacggggaaggactcgatatgtttgatgttatcactgatcaggagactcaagaaggcatcatcaccgttaagaagcttctggattttgaaaagaaaaaggtatacaccctcaaggtggaggcttccaacccatacgtggagccccgtttcctgtatcttggacctttcaaagactccgctacggtcagaatcgtggttgaggatgtcgatgaacctcctgttttcagcaaactggcctacattctgcagatccgggaggacgcgcaaattaacacaacaattggaagtgtcacagctcaggatcccgatgcagctcggaatccagtgaagtatagcgtggatcggcacacagacatggaccgaatattcaatatcgattccggtaatggatctatttttacctccaagctcctagatagagagactcttctttggcacaacattacagtcatagccaccgaaatcaacaacccaaagcaaagttcccgcgttcctctgtatattaaagtcctggacgtcaatgacaatgccccagagttcgccgagttctacgagacttttgtctgcgagaaagctaaggccgaccagctgatacagactcttcatgccgtggataaagatgacccttattctgggcaccagttctcattttcattagcccctgaggccgcaagcggctcaaacttcacgatccaggacaacaaggataatactgccggaatccttactcgtaaaaatggctacaaccggcatgaaatgtctacatacttattgcccgtggttatatcagataatgactatccagttcaaagttccaccggcactgtgaccgtgagagtttgtgcatgcgatcaccatggcaatatgcagagctgtcacgctgaggctctgatacaccctaccgggttgtctactggtgctctggttgctattttgctatgcattgtcattctattagtgactgtggtcctttttgctgctctccggaggcagcgcaagaaggaaccactcataatttccaaagaagacattcgcgataacattgtgtcctacaatgatgaaggagggggagaggaagatacccaggctttcgatattggtacactgcgtaatcctgaggctattgaagataacaaactgaggagggacattgtgccggaagctctgttcctgccccgaaggaccccaactgccagagataatacggacgtgcgagattttattaatcagagacttaaggaaaatgatacagaccccaccgctcccccttacgactcgctagcaacatatgcctacgagggcaccggttccgtggcggacagccttagctccttagaatccgtcactaccgacgccgaccaagactatgactacctgtccgactgggggcctaggttcaagaaactagcggacatgtacggtggcgtggactccgacaaggatagctag

SEQ ID NO: 302791 - DNA, 8476 bp, Artificial Sequence
  derived and/or modified sequence
ttcgcatcccaagagctgcagtttcagccgcgacagcaagaacggcagagccggcgaccgcggcggcggcggcggcggaggcaggagcagcctgggcgggtcgcagggtctccgcgggcgcaggaaggcgagcagagatatcctctgagagccaagcaaagaacattaaggaaggaaggaggaatgaggctggatacggtgcagtgaaaaaggcacttccaagagtggggcactcactacgcacagactcgacggtgccatcagcatgagaacttaccgctacttcttgctgctcttttgggtgggccagccctacccaactctctcaactccactatcaaagaggactagtggtttcccagcaaagaaaagggccctggagctctctggaaacagcaaaaatgagctgaaccgttcaaaaaggagctggatgtggaatcagttctttctcctggaggaatacacaggatccgattatcagtatgtgggcaagttacattcagaccaggatagaggagatggatcacttaaatatatcctttcaggagatggagcaggagatctcttcattattaatgaaaacacaggcgacatacaggccaccaagaggctggacagggaagaaaaacccgtttacatccttcgagctcaagctataaacagaaggacagggagacccgtggagcccgagtctgaattcatcatcaagatccatgacatcaatgacaatgaaccaatattcaccaaggaggtttacacagccactgtccctgaaatgtctgatgtcggtacatttgttgtccaagtcactgcgacggatgcagatgatccaacatatgggaacagtgctaaagttgtctacagtattctacagggacagccctatttttcagttgaatcagaaacaggtattatcaagacagctttgctcaacatggatcgagaaaacagggagcagtaccaagtggtgattcaagccaaggatatgggcggccagatgggaggattatctgggaccaccaccgtgaacatcacactgactgatgtcaacgacaaccctccccgattcccccagagtacataccagtttaaaactcctgaatcttctccaccggggacaccaattggcagaatcaaagccagcgacgctgatgtgggagaaaatgctgaaattgagtacagcatcacagacggtgaggggctggatatgtttgatgtcatcaccgaccaggaaacccaggaagggattataactgtcaaaaagctcttggactttgaaaagaagaaagtgtatacccttaaagtggaagcctccaatccttatgttgagccacgatttctctacttggggcctttcaaagattcagccacggttagaattgtggtggaggatgtagatgagccacctgtcttcagcaaactggcctacatcttacaaataagagaagatgctcagataaacaccacaataggctccgtcacagcccaagatccagatgctgccaggaatcctgtcaagtactctgtagatcgacacacagatatggacagaatattcaacattgattctggaaatggttcgatttttacatcgaaacttcttgaccgagaaacactgctatggcacaacattacagtgatagcaacagagatcaataatccaaagcaaagtagtcgagtacctctatatattaaagttctagatgtcaatgacaacgccccagaatttgctgagttctatgaaacttttgtctgtgaaaaagcaaaggcagatcagttgattcagaccctgcatgctgttgacaaggatgacccttatagtggacaccaattttcgttttccttggcccctgaagcagccagtggctcaaactttaccattcaagacaacaaagacaacacggcgggaatcttaactcggaaaaatggctataatagacacgagatgagcacctatctcttgcctgtggtcatttcagacaacgactacccagttcaaagcagcactgggacagtgactgtccgggtctgtgcatgtgaccaccacgggaacatgcaatcctgccatgcggaggcgctcatccaccccacgggactgagcacgggggctctggttgccatccttctgtgcatcgtgatcctactagtgacagtggtgctgtttgcagctctgaggcggcagcgaaaaaaagagcctttgatcatttccaaagaggacatcagagataacattgtcagttacaacgacgaaggtggtggagaggaggacacccaggcttttgatatcggcaccctgaggaatcctgaagccatagaggacaacaaattacgaagggacattgtgcccgaagcccttttcctaccccgacggactccaacagctcgcgacaacaccgatgtcagagatttcattaaccaaaggttaaaggaaaatgacacggaccccactgccccgccatacgactccttggccacttacgcctatgaaggcactggctccgtggcggattccctgagctcgctggagtcagtgaccacggatgcagatcaagactatgattaccttagtgactggggacctcgattcaaaaagcttgcagatatgtatggaggagtggacagtgacaaagactcctaatctgttgcctttttcattttccaatacgacactgaaatatgtgaagtggctatttctttatatttatccactactccgtgaaggcttctctgttctacccgttccaaaagccaatggctgcagtccgtgtggatccaatgttagagacttttttctagtacacttttatgagcttccaaggggcaaatttttattttttagtgcatccagttaaccaagtcagcccaacaggcaggtgccggaggggaggacagggaacagtatttccacttgttctcagggcagcgtgcccgcttccgctgtcctggtgttttactacactccatgtcaggtcagccaactgccctaactgtacatttcacaggctaatgggataaaggactgtgctttaaagataaaaatatcatcatagtaaaagaaatgagggcatatcggctcacaaagagataaactacataggggtgtttatttgtgtcacaaagaatttaaaataacacttgcccatgctatttgttcttcaagaactttctctgccatcaactactattcaaaacctcaaatccacccatatgttaaaattctcattactcttaaggaatagaagcaaattaaacggtaacatccaaaagcaaccacaaacctagtacgacttcattccttccactaactcatagtttgttatatcctagactagacatgcgaaagtttgcctttgtaccatataaagggggagggaaatagctaataatgttaaccaaggaaatatattttaccatacatttaaagttttggccaccacatgtatcacgggtcacttgaaattctttcagctatcagtaggctaatgtcaaaattgtttaaaaattcttgaaagaattttcctgagacaaattttaacttcttgtctatagttgtcagtattattctactatactgtacatgaaagtagcagtgtgaagtacaataattcatattcttcatatccttcttacacgactaagttgaattagtaaagttagattaaataaaacttaaatctcactctaggagttcagtggagaggttagagccagccacacttgaacctaataccctgcccttgacatctggaaacctctacatatttatataacgtgatacatttggataaacaacattgagattatgatgaaaacctacatattccatgtttggaagacccttggaagaggaaaattggattcccttaaacaaaagtgtttaagattgtaattaaaatgatagttgattttcaaaagcattaattttttttcattgtttttaactttgctttcatgaccatcctgccatccttgactttgaactaatgataaagtaatgatctcaaactatgacagaaaagtaatgtaaaatccatccaatctattatttctctaattatgcaattagcctcatagttattatccagaggacccaactgaactgaactaatccttctggcagattcaaatcgtttatttcacacgctgttctaatggcacttatcattagaatcttaccttgtgcagtcatcagaaattccagcgtactataatgaaaacatccttgttttgaaaacctaaaagacaggctctgtatatatatatacttaagaatatgctgacttcacttattagtcttagggatttattttcaattaatattaattttctacaaataattttagtgtcatttccatttggggatattgtcatatcagcacatattttctgtttggaaacacactgttgtttagttaagttttaaataggtgtattacccaagaagtaaagatggaaacgttaaaagaagagaaatgtagtattttgggttacctgattagagtgaaaattttttacaatcatattattccttgtgtcttctgaatggtttccgattttataatggactgccctatatagtaacaagtatttcatgcttgagctatttcctgctttcagggtttcttttttctagttcttcatacacacacatacacacacacacacacacacacacacacacacacgaatgcaaacaaaaggctatatgaggtcttcactctaatgaattgatatgtatcatagtcacaggtaagtgttgaaaaaagcttagtaaagttagaagctacttactcatagcaatagaacagcaccttaatcacacgatttactgtaaaattaaagaggtctctatctgtatgtttcatgtcacgtaacaaattgaatcaaggaagatagtcctgtaaaaagaaaggtatcatctgaagttgaggattgacactagcagtttccaatgtttaaaggtaagatctgagttctcctaataagtaaaagtaagtagttctatagcagaatatctgagatgtaattggcaaggtattttatccctccctgcagatgacacagcataccaagaacaggttaatatgattacttatggaaataactttaatctcttatcataaaagctgatgatgaagtaaatttataggaaattggataatttgagactggggctaaatatttagtaccagggtactgtaagtatcaagttggagtgacgttttcctataattcagactctttgacatcgtggaaccaataagagtcatagttccatcattctccagcttcgtctcacttccttcccaccccacctgagtatcaggtcaaacatcattgcatgcgcaggttttttttttaattgctaggtcccaggcaacatgaaagattattggagaaaaaaataattttcagcccagttttttcattgtctgtttcctaattttagatgttggtgatgggaaagatggaaggagagtgggaagaagtaaaattttaatatttgtttcaatcactttgaaactaaaattcattaagcataaccagattgcttttgtgggttgtttcaaggacattgagagctttctgatgatatgtttttgccctctattcaaaagcaagagttcctttaaactactaagatattccctagaataagctgaatttaaaaaaacattaagccattgtttaaagccccttcacttcctggccacttacttctgaaaggcctaaaaaacatttgtgcccaaataagtaaataaaccaaatgggaaagaagcaaagattattccatagaaccacaagagagggaatgtgggcacagtaaatagatgtttctttcagaactttcctgcctttacagtttgtgtccataaagggatgttcagcaatgaaattactcccttttcagatggaacaaaacctgcccatttaattttaacgcagtataaaaaacgtgtggtttagtttttattttcagctcccaaagagttgtgcagaaaatcttaaaattttttttttttttttttttttttttttgagacagaatctcgctctgtcgcccaggctggaatgcagtggcgcgatctctgctcactacaagctccgcctcccgggttcacgccattctcctgcctcagcgcccccagtagctgggactacaggcacacaccaccacgcccggctaatttttgttgtattttttagtggagacagggtttcaccatgttagccaggatgatctccatctcctgacctcgtggtccgcccgcctcggcctcccaaagtgctgggattacaggcgtgagccaccgcgcccggccttaaaaattgaatctgtagcttaggccatccaaattttataaatccaaattaactttagaatgtttctattactttcacttttacatatataaattttaagtgtcctgattggctgaacaatatctcacatcaaatgctttgcctggaaatagatatcccactggggatagtggtgtgtaaactatgacttggacaattctatatactcaagcaccataaaaagtatgcagttgaaaagaaaatcaaagttgattcctgggtgccaactaaatattcaaatcaggtactcatccttatcagctaaattcattttcaccaggaacagaccaccaaataaattattttatcctaataactagttttgaagcagtgtaattactctggaagaaggctctaaaaagtcatgattcccccactattttgaaatgtatcctctaacaaggatcattatagtgtaatcttaatttttatgttttatcaagatgaaatcttgtttgaattgtgatattataaaaggggactcaaaaatccaagcagtctactgtgtttaaattaacaccacaaccttccttatcagattataagagtagaaaaattaacacttggtgtgtgaatcttcaggaaaatgagctatttcataagctcaaacaagcagcttccttttccagagaatatagaattatattatggtctccttaaatgtttagtagctcttatggtcacagcatttttaatctccctatggcatctttatggaataattttctaaagggtaattctctactaaaaatatcagaccccgaccatatttaatgtggagagcaataccctcttagaaagaaaatacattgactcatacacttgttaaaagttaataaagaaatagctcatttttaaagccggaagtttatggtctctgcatcgtcaatttaatttaagcattgctgagacaatctttaatctactcccctttttgtaataccttatttatggtgcattttcatttttatttgggggaaacgttagcccaacagagccggcagatgaaagtgttgaaaagaggtcaaatggaaacaaaggctcttacccgctgtatttcagacaggactgaggcacttagccgaggagccactgggttattagattaatttcaaaagagcttttacaagttgcttaattcctttttttttttttttttttttcaaaaacccatgaaccacaaactcaaatttctcctcaaatggggttaatctgacaaacgaggcatggacccagccttgtggaaaaagcattccacgctaatgagatcttggtctttcttgtgaggctacgttatttatgtaaatatgtctggaggcaccttctctaagcttttagttttctatgatctattagtttagtgtttattaaagaatcaaatgtatagaattaccaggcattcgtggggaatgctgtgtagcaaatgtaaaactgacctgctcggaagaaacgtaggaacgcttcaaacccactgtaatgtttggtttgagattattttcattgctttgagagtgaactgcctaagagtaggccttataataaatgctatgtgcgtcttcagtagttccaagctaaagcaatttggcattctcccactgtgatttgtgacttttaaacccacaaaataaaagctttttggtattgattgtttttaattaaaaatacttccaagtataaattgaaacggatgccacccttgaagatttactggcgggaatgctcactcttgtcgttttcctcagtatcgttcatgtctttggcaacaagaacacctgatgaaagcaagcaatgctcagttcccatcaacatttctagttagggggattctcataaccccacagtttacctgagaaagttttctgtgttagaagaatggggtcgagagtattaccttttagctcagtgtggccgggccttttgttgcagtcaaatggcaaatacgcactccttgaaatggcttcttttatttggttttgttttcttagacttataaatttgaaaagaatgcaatttaaaaagtgatttctcacaaagagtaaatatgccttttgcaaatcaatttttgtaacaagttatttatatgatattacttaataaactggtttttttctaa

SEQ ID NO: 302792 - DNA, 2373 bp, Artificial Sequence
  derived and/or modified sequence
atgagaacctacagatacttcctgctgctgttctgggtgggccagccctaccccaccctgagcacccccctgagcaagagaaccagcggcttccccgccaagaagagagccctggagctgagcggcaacagcaagaacgagctgaacagaagcaagagaagctggatgtggaaccagttcttcctgctggaggagtacaccggcagcgactaccagtacgtgggcaagctgcacagcgaccaggacagaggcgacggcagcctgaagtacatcctgagcggcgacggcgccggcgacctgttcatcatcaacgagaacaccggcgacatccaggccaccaagagactggacagagaggagaagcccgtgtacatcctgagagcccaggccatcaacagaagaaccggcagacccgtggagcccgagagcgagttcatcatcaagatccacgacatcaacgacaacgagcccatcttcaccaaggaggtgtacaccgccaccgtgcccgagatgagcgacgtgggcaccttcgtggtgcaggtgaccgccaccgacgccgacgaccccacctacggcaacagcgccaaggtggtgtacagcatcctgcagggccagccctacttcagcgtggagagcgagaccggcatcatcaagaccgccctgctgaacatggacagagagaacagagagcagtaccaggtggtgatccaggccaaggacatgggcggccagatgggcggcctgagcggcaccaccaccgtgaacatcaccctgaccgacgtgaacgacaacccccccagattcccccagagcacctaccagttcaagacccccgagagcagcccccccggcacccccatcggcagaatcaaggccagcgacgccgacgtgggcgagaacgccgagatcgagtacagcatcaccgacggcgagggcctggacatgttcgacgtgatcaccgaccaggagacccaggagggcatcatcaccgtgaagaagctgctggacttcgagaagaagaaggtgtacaccctgaaggtggaggccagcaacccctacgtggagcccagattcctgtacctgggccccttcaaggacagcgccaccgtgagaatcgtggtggaggacgtggacgagccccccgtgttcagcaagctggcctacatcctgcagatcagagaggacgcccagatcaacaccaccatcggcagcgtgaccgcccaggaccccgacgccgccagaaaccccgtgaagtacagcgtggacagacacaccgacatggacagaatcttcaacatcgacagcggcaacggcagcatcttcaccagcaagctgctggacagagagaccctgctgtggcacaacatcaccgtgatcgccaccgagatcaacaaccccaagcagagcagcagagtgcccctgtacatcaaggtgctggacgtgaacgacaacgcccccgagttcgccgagttctacgagaccttcgtgtgcgagaaggccaaggccgaccagctgatccagaccctgcacgccgtggacaaggacgacccctacagcggccaccagttcagcttcagcctggcccccgaggccgccagcggcagcaacttcaccatccaggacaacaaggacaacaccgccggcatcctgaccagaaagaacggctacaacagacacgagatgagcacctacctgctgcccgtggtgatcagcgacaacgactaccccgtgcagagcagcaccggcaccgtgaccgtgagagtgtgcgcctgcgaccaccacggcaacatgcagagctgccacgccgaggccctgatccaccccaccggcctgagcaccggcgccctggtggccatcctgctgtgcatcgtgatcctgctggtgaccgtggtgctgttcgccgccctgagaagacagagaaagaaggagcccctgatcatcagcaaggaggacatcagagacaacatcgtgagctacaacgacgagggcggcggcgaggaggacacccaggccttcgacatcggcaccctgagaaaccccgaggccatcgaggacaacaagctgagaagagacatcgtgcccgaggccctgttcctgcccagaagaacccccaccgccagagacaacaccgacgtgagagacttcatcaaccagagactgaaggagaacgacaccgaccccaccgcccccccctacgacagcctggccacctacgcctacgagggcaccggcagcgtggccgacagcctgagcagcctggagagcgtgaccaccgacgccgaccaggactacgactacctgagcgactggggccccagattcaagaagctggccgacatgtacggcggcgtggacagcgacaaggacagctag

SEQ ID NO: 302793 - protein, 789 aa, Artificial Sequence
  derived and/or modified sequence
MRTYHYIPLFIWTYMFHTVDTILLQEKPNSYLSSKKIAGLTKDDGKMLRRTKRGWMWNQFFLLEEYTGTDTQYVGKLHTDQDKGDGNLKYILTGDGAGSLFVIDENTGDIHAAKKLDREEKSLYILRAKAIDRKTGRQVEPESEFIIKIHDINDNEPKFTKDLYTASVPEMSGVGTSVIQVTATDADDANYGNSAKVVYSILQGQPYFSVDPESGIIKTALPDMSRENREQYQVVIQAKDMGGQMGGLSGTTTVNITLTDVNNNPPRFPQSTYQFNSPESVPLGTHLGRIKANDPDVGENAEMEYSIAEGDGADMFDVITDKDTQEGIITVKQNLDFENQMLYTLRVDASNTHPDPRFLHLGPFKDTAVVKISVEDIDEPPVFTKVSYLIEVDEDVKEGSIIGQVTAYDPDARNNLIKYSVDRHTDMDRIFGIHSENGSIFTLKALDRESSPWHNITVTATEINNPKQSSHIPVFIRILDINDHAPEFAMYYETFVCENAKPGQLIQTVSVMDKDDPPRGHKFFFEPVPEFTLNPNFTIVDNKDNTAGIMTRKDGYSRNKMSTYLLPILIFDNDYPIQSSTGTLTIRVCACDNQGNMQSCTAEALILSAGLSTGALVAILLCVLILLILVVLFAALKRQRKKEPLIISKDDVRDNIVTYNDEGGGEEDTQAFDIGTLRNPEAREDSKLRRDVMPETIFQIRRTVPLWENIDVQDFIHRRLKENDADPSAPPYDSLATYAYEGNDSIADSLSSLESLTADCNQDYDYLSDWGPRFKKLADMYGGDDSDRD

SEQ ID NO: 302794 - protein, 81 aa, Artificial Sequence
  derived and/or modified sequence
MRTYHYIPLFIWTYMFHTVDTILLQEKPNSYLSSKKIAGLTKDDGKMLRRTKRGWMWNQFFLLEEYTGTDTQYVGKLHTDQ

SEQ ID NO: 302795 - protein, 132 aa, Artificial Sequence
  derived and/or modified sequence
MRTYHYIPLFIWTYMFHTVDTILLQEKPNSYLSSKKIAGLTKDDGKMLRRTKRGWMWNQFFLLEEYTGTDTQYVGKLHTDQDKGDGNLKYILTGDGAGSLFVIDENTGDIHAAKKLDREEKSLYILRAKAID

SEQ ID NO: 302796 - DNA, 2370 bp, Artificial Sequence
  derived and/or modified sequence
atgagaacctaccactacatccccctgttcatctggacctacatgttccacaccgtggacaccatcctgctgcaggagaagcccaacagctacctgagcagcaagaagatcgccggcctgaccaaggacgacggcaagatgctgagaagaaccaagagaggctggatgtggaaccagttcttcctgctggaggagtacaccggcaccgacacccagtacgtgggcaagctgcacaccgaccaggacaagggcgacggcaacctgaagtacatcctgaccggcgacggcgccggcagcctgttcgtgatcgacgagaacaccggcgacatccacgccgccaagaagctggacagagaggagaagagcctgtacatcctgagagccaaggccatcgacagaaagaccggcagacaggtggagcccgagagcgagttcatcatcaagatccacgacatcaacgacaacgagcccaagttcaccaaggacctgtacaccgccagcgtgcccgagatgagcggcgtgggcaccagcgtgatccaggtgaccgccaccgacgccgacgacgccaactacggcaacagcgccaaggtggtgtacagcatcctgcagggccagccctacttcagcgtggaccccgagagcggcatcatcaagaccgccctgcccgacatgagcagagagaacagagagcagtaccaggtggtgatccaggccaaggacatgggcggccagatgggcggcctgagcggcaccaccaccgtgaacatcaccctgaccgacgtgaacaacaacccccccagattcccccagagcacctaccagttcaacagccccgagagcgtgcccctgggcacccacctgggcagaatcaaggccaacgaccccgacgtgggcgagaacgccgagatggagtacagcatcgccgagggcgacggcgccgacatgttcgacgtgatcaccgacaaggacacccaggagggcatcatcaccgtgaagcagaacctggacttcgagaaccagatgctgtacaccctgagagtggacgccagcaacacccaccccgaccccagattcctgcacctgggccccttcaaggacaccgccgtggtgaagatcagcgtggaggacatcgacgagccccccgtgttcaccaaggtgagctacctgatcgaggtggacgaggacgtgaaggagggcagcatcatcggccaggtgaccgcctacgaccccgacgccagaaacaacctgatcaagtacagcgtggacagacacaccgacatggacagaatcttcggcatccacagcgagaacggcagcatcttcaccctgaaggccctggacagagagagcagcccctggcacaacatcaccgtgaccgccaccgagatcaacaaccccaagcagagcagccacatccccgtgttcatcagaatcctggacatcaacgaccacgcccccgagttcgccatgtactacgagaccttcgtgtgcgagaacgccaagcccggccagctgatccagaccgtgagcgtgatggacaaggacgacccccccagaggccacaagttcttcttcgagcccgtgcccgagttcaccctgaaccccaacttcaccatcgtggacaacaaggacaacaccgccggcatcatgaccagaaaggacggctacagcagaaacaagatgagcacctacctgctgcccatcctgatcttcgacaacgactaccccatccagagcagcaccggcaccctgaccatcagagtgtgcgcctgcgacaaccagggcaacatgcagagctgcaccgccgaggccctgatcctgagcgccggcctgagcaccggcgccctggtggccatcctgctgtgcgtgctgatcctgctgatcctggtggtgctgttcgccgccctgaagagacagagaaagaaggagcccctgatcatcagcaaggacgacgtgagagacaacatcgtgacctacaacgacgagggcggcggcgaggaggacacccaggccttcgacatcggcaccctgagaaaccccgaggccagagaggacagcaagctgagaagagacgtgatgcccgagaccatcttccagatcagaagaaccgtgcccctgtgggagaacatcgacgtgcaggacttcatccacagaagactgaaggagaacgacgccgaccccagcgcccccccctacgacagcctggccacctacgcctacgagggcaacgacagcatcgccgacagcctgagcagcctggagagcctgaccgccgactgcaaccaggactacgactacctgagcgactggggccccagattcaagaagctggccgacatgtacggcggcgacgacagcgacagagactag

SEQ ID NO: 302797 - DNA, 2370 bp, Artificial Sequence
  derived and/or modified sequence
atgcggacctatcattatatcccgttgttcatttggacatatatgttccatacagtagatacaatcctgctgcaggagaagcccaacagctacctttcctccaaaaaaatcgcaggcctgactaaagacgacggaaaaatgctgcggagaaccaagagaggttggatgtggaatcagttttttctactcgaggaatataccggcactgacacccagtacgttggtaaactccacaccgatcaagacaagggagacggtaacctcaaatatatcctgaccggcgatggcgccggatcactattcgttatcgacgaaaatacgggagatatccacgccgccaagaaactggatagggaagagaaatccctctatattctgcgtgccaaagcaatcgacaggaagaccggaagacaggttgagccagaaagtgagtttattatcaagatacatgatattaacgacaacgagcccaagtttacaaaggatttgtataccgcatcagtacccgaaatgagtggcgtgggaacttctgtgattcaagtgaccgccacagatgccgacgatgccaattacggaaactcagccaaagttgtgtacagcattttgcagggccaaccctatttctctgttgaccctgagtcaggcatcattaagaccgctctgcctgatatgtcacgcgagaatcgcgagcaataccaggtggtgattcaggccaaagatatgggtgggcagatgggcggcctcagcgggaccactacagtgaacattaccctaaccgatgtaaataataacccaccacggttcccacaatcaacctatcaattcaattcacccgagagcgttccattgggcactcatttagggagaattaaagcaaatgatccagacgtgggagagaacgccgagatggaatacagtatcgccgagggagacggagcggatatgtttgatgttattaccgataaagacacacaggaaggaattattacagtcaagcaaaatctcgattttgaaaatcagatgctctacaccctaagggttgacgcaagcaatacacacccggatccacgcttcctccatctgggcccttttaaagacacagcagttgttaagatcagcgtagaagatatcgatgaacctccagtgtttactaaagtcagctacctgatcgaggtggatgaggatgtgaaggaggggagcattattggccaggtcaccgcctatgatccggatgcccggaataatcttataaagtacagtgtggatcgccacaccgacatggacaggatcttcggaatacactccgagaacgggtctatcttcactctgaaagctctggaccgcgagtcatccccctggcataacattacggtcacggcaaccgagataaacaatcccaagcagagtagccacattcccgtgtttatcaggatactggacatcaatgatcacgccccagagttcgcgatgtactacgagacattcgtatgtgaaaacgctaagcctggccagttgatccagacggtctctgtgatggataaagatgatccccctcgtggccacaaattcttttttgaaccggtccccgagtttaccctcaatcccaacttcacaatcgtcgataataaagataatacagccggtatcatgactagaaaagacgggtactcccgaaacaagatgagcacctaccttctgccaattctgatctttgacaacgattaccccatccagagtagcactgggaccctgacaatccgggtctgtgcgtgcgacaaccagggaaatatgcagtcttgcacggcagaggctctgattctgtccgctggcctgtccacaggtgccctggtggccattcttctctgcgtacttattctcctaatcctggtcgtgttatttgccgccttgaagcgccaacgtaaaaaagaaccactgatcatctctaaggatgatgtgcgggacaacattgtgacatacaatgacgaaggcggtggcgaggaggacacacaagccttcgacattggaaccctgaggaatcccgaagctagagaggactccaaactccgcagagatgtcatgcccgaaacaatcttccagatcagacggaccgtgcctctatgggaaaacatcgatgttcaagatttcatccacagacggttgaaagaaaatgacgcggacccctccgcacctccatatgactcactcgctacttatgcttacgaaggcaacgattccatagcagatagtctgtctagcttggagagtctcactgccgattgcaatcaagattatgattacctgtctgattggggaccccgcttcaaaaagctcgccgacatgtatggaggggacgattctgacagagattag

SEQ ID NO: 302798 - DNA, 2370 bp, Artificial Sequence
  derived and/or modified sequence
atgaggacctaccactacatccccctcttcatctggacctacatgttccacacagtggacaccatcctgctgcaggagaagcccaacagctacctgagcagcaagaagattgctggcctgaccaaggatgatggcaagatgctgcggaggaccaagaggggctggatgtggaaccagttcttcctgctggaggagtacacaggaacagacacccagtatgtgggcaagctgcacacagaccaggacaagggagatggcaacctgaagtacatcctgactggagatggagctggcagcctgtttgtgattgatgaaaatactggagacatccacgccgccaagaagctggaccgggaggagaagagcctgtacatcctgcgggccaaggccatcgacaggaagacaggccggcaggtggagcctgagagcgagttcatcatcaagatccatgacatcaatgacaatgagcccaagttcaccaaggacctgtacacagcctctgtgcctgagatgtctggagtgggcaccagcgtcatccaggtgacagccacagatgctgatgatgccaactacggcaacagcgccaaggtggtgtacagcatcctgcagggccagccctacttctctgtggaccctgagagcggcatcatcaagacagccctgcctgacatgagcagagaaaatcgggagcagtaccaggtggtgatccaggccaaggacatgggcggccagatgggcggcctgagcggcaccaccaccgtgaacatcaccctgacagatgtgaacaacaaccccccacgcttcccccagagcacctaccagttcaacagccctgagagcgtgcccctgggcacccacctgggccgcatcaaggccaatgaccctgatgtgggagaaaatgctgagatggagtacagcattgctgaaggagatggagctgacatgtttgatgtgatcacagacaaggacacccaggagggcatcatcaccgtgaagcagaacctggactttgagaaccagatgctgtacaccctgcgggtggatgccagcaacacccacccagacccccgcttcctgcacctgggccccttcaaggacacagctgtggtgaagatctctgtggaggacattgatgagccccctgtgttcaccaaggtgtcctacctgattgaggtggatgaagatgtgaaggagggcagcatcatcggccaggtgacagcctatgaccctgatgccaggaacaacctgatcaagtacagcgtggacagacacacagacatggaccgcatcttcggcatccacagtgaaaatggcagcatcttcaccctgaaggccctggaccgggagagcagcccctggcacaacatcaccgtgacagccacagagatcaacaaccccaagcagagcagccacatccctgtgttcatccgcatcctggacatcaatgaccacgcccctgagtttgccatgtactatgagacctttgtgtgtgaaaatgccaagccaggccagctgatccagacagtgtctgtgatggacaaggatgatcctccccggggccacaagttcttctttgagcctgtgcctgagttcaccctgaaccccaacttcaccatcgtggacaacaaggacaacacagctggcatcatgaccaggaaggatggctacagcaggaacaagatgagcacctacctgctgcccatcctgatctttgacaatgactaccccatccagagcagcacaggcaccctgaccatccgggtgtgtgcctgtgacaaccagggcaacatgcagagctgcacagctgaggccctgatcctgtctgctggcctgagcactggagccctggtggccatcctgctgtgtgtgctgatcctgctgatcctggtggtgctgtttgctgccctgaagaggcagaggaagaaggagcccctcatcatcagcaaggatgatgtgcgggacaacatcgtgacctacaatgatgaaggaggaggagaggaggacacccaggcctttgacatcggcaccctgaggaaccctgaggcccgggaggacagcaagctgcggagagatgtgatgcctgagaccatcttccagatcagaagaacagtgcccctgtgggagaacattgatgtgcaggacttcatccaccggcggctgaaggaaaatgatgctgaccccagcgccccaccctatgacagcctggccacctacgcctatgagggcaatgacagcattgctgacagcctgagcagcctggagagcctgacagctgactgcaaccaggactatgactacctgagtgactggggcccccgcttcaagaagctggccgacatgtatggaggagatgacagcgaccgggactag

SEQ ID NO: 302799 - DNA, 2370 bp, Artificial Sequence
  derived and/or modified sequence
atgcggacctaccactacatccccctgttcatctggacctacatgttccacacagttgacacgattttactccaagagaaacccaacagctacctgagctctaaaaagattgcaggtctgaccaaggacgacgggaagatgcttcgtagaacaaagcggggttggatgtggaatcaatttttcctgttggaggagtacaccgggacggacacccagtacgtagggaagctccatacagaccaggacaagggggacgggaatctgaaatacattttaacgggagatggagcaggcagcctgttcgtaattgatgaaaatactggcgatatccacgctgctaaaaaactggacagggaggaaaagtccctctacatactacgcgccaaagcaatcgataggaaaaccgggcgacaagttgaacccgaaagtgagtttataatcaaaattcacgacataaacgataacgagccgaaattcaccaaggacctgtatacagcttccgtcccagaaatgtccggcgtaggaacgtccgtgatccaagtaaccgcaacagatgccgatgatgcgaattacggaaattctgccaaggtcgtttattctattctgcagggacagccttacttctccgtggaccctgaatctggcatcattaaaaccgccttgccagatatgagccgcgagaaccgggagcagtaccaggtcgtcatccaggctaaagatatgggaggacaaatgggcggactttctggcacaaccaccgtcaatattacacttacagatgtaaacaataaccctccccgatttcctcagtcgacgtatcaattcaactcacccgaaagcgttccactgggtacacatctgggaagaataaaggcaaacgatcctgacgtgggcgaaaacgccgagatggagtactctattgcggagggtgatggcgccgacatgtttgacgttatcaccgacaaggatactcaagagggaattataacggtgaagcagaacttggactttgaaaatcagatgctctacacactgcgtgtagacgcttccaatactcaccccgaccctcggttcctccacctggggcccttcaaagacactgctgtcgtgaaaatcagtgtagaagatattgacgagcctccagttttcacaaaagtgagttaccttatagaggttgacgaggacgtgaaagaaggttccatcatcggccaggttacagcatatgacccagatgctcggaataacctcattaaatattctgtagaccggcacacggacatggatcgtatctttggcattcattccgagaacgggagcatttttaccctgaaggcattagatagggaaagttctccttggcataatatcaccgtgactgcaacagaaatcaataaccctaagcagagctctcatatcccggttttcatccgcattctggacatcaacgaccatgcccccgaatttgccatgtattatgaaacatttgtttgcgaaaacgcaaagcccggtcaattgatccagacagtgagtgtgatggacaaggacgaccctcctaggggtcacaaattctttttcgagcccgtccccgagttcacgctgaatccaaactttacaattgtggataacaaagacaacacggctggaattatgactagaaaggacggctattctaggaacaaaatgtccacctacctgttacccattctgatcttcgataatgattatccgatccagtcaagcacgggtacactaaccatccgcgtgtgcgcttgcgacaatcagggaaacatgcagtcatgcaccgctgaggcccttatcctgagtgctggactcagcaccggcgcccttgttgcaatcctgctgtgcgtactgatcctactcattctcgtagtgctctttgctgcactgaagcgccagcgcaagaaagagccgcttatcatctctaaggatgatgtgagagacaacatcgtcacttataacgacgaggggggaggcgaggaggatacacaagccttcgatattgggacacttaggaacccagaagcaagggaggactccaagctgcgccgggacgtcatgccagagaccatcttccagatacgccggaccgtgccactttgggagaacatagatgtacaggatttcattcacaggcggttgaaggaaaatgacgcggaccctagcgcccccccgtatgactcactcgccacttatgcttacgaagggaacgacagcattgcggattcgctttccagcctcgagagtttgacagcggattgcaatcaagactatgattatctctccgattggggcccccgatttaagaagctcgccgacatgtacggcggagacgatagcgatcgagactag

SEQ ID NO: 302800 - DNA, 2370 bp, Artificial Sequence
  derived and/or modified sequence
atgaggacctaccactacatcccgttgttcatctggacgtacatgtttcacaccgtggatactatacttttacaggagaagcctaattcttacctgtcctctaagaagatcgccggactcaccaaggacgatggcaaaatgttgaggcgtactaagcgaggctggatgtggaaccaattctttttgttggaagaatacaccggaactgatacacagtacgttggaaagcttcacaccgatcaggataagggcgatgggaatttaaaatacatcctcaccggcgatggggctggaagtctgttcgtgatcgatgaaaacactggggacattcatgccgctaagaagctggatcgggaagaaaagtccctctacattcttcgagccaaagcaatcgaccggaagacaggacgtcaggtcgaaccagagagtgagttcatcatcaagattcacgacatcaacgacaatgaacctaagtttacgaaggacctgtacaccgcatcggtccctgaaatgtccggcgtaggaaccagcgtgatacaggtcacagccacggatgccgatgacgccaattatggtaactcagctaaggttgtgtattcaattctccaagggcagccctattttagtgtagaccccgagtcaggaattatcaaaaccgccctgcccgatatgtctagggaaaatagagagcagtatcaggtagttatacaggcaaaggacatgggaggtcaaatgggaggtttatccggaactacgacagttaacatcaccttgacagacgtgaataacaatcctccccgattcccacagtccacctatcagttcaactctcccgagagcgttcccctgggcacgcatctcggtaggatcaaagctaatgatccagacgttggggagaacgcagagatggagtacagcattgctgagggcgacggtgccgacatgtttgatgtaatcacagacaaagacactcaggagggtattattacagttaaacagaatctggattttgaaaatcagatgctgtataccctacgagtcgacgcctccaatactcacccagaccctagattcttgcacctaggccctttcaaggacactgccgttgtaaaaatttccgtagaggatatcgacgaacctcctgtgtttacaaaagtcagttacctgatcgaagtcgacgaagacgtgaaggaaggctccatcattggacaggtgacagcatatgatccggacgcccgaaataacctaattaaatatagtgtcgaccgccacactgatatggacaggatctttgggatacacagtgaaaacggctcaatatttaccctaaaggctctcgacagggagagctcaccttggcacaatattacggtcacagccaccgaaattaacaaccccaaacagtcctcgcacattcccgtgttcatcagaatcctggacataaacgaccacgcacctgagttcgccatgtactacgagacgtttgtgtgtgaaaacgccaaacccggtcagctcattcagaccgtgtctgtcatggacaaagatgatcccccacgcggtcacaagttttttttcgagcccgtgccggagttcacgctcaacccgaactttaccatcgtcgacaacaaagacaatactgccggaattatgacacgaaaggatggctatagcagaaataagatgtccacttatctgcttccaatcctaatttttgataatgactatcctatccagtcgtctacaggcaccctcactattcgcgtctgcgcgtgcgacaaccaggggaatatgcagagctgcacggccgaggctctgatactgagtgcgggactgtctaccggagcgttagtggcaatcctgctgtgtgtgctgatcctgctaatcctggtggtgcttttcgccgctctgaaacgacaacgtaagaaggagcccttgataatctctaaggatgatgtgcgggataatatagtcacctacaatgacgaaggtggaggcgaggaggatacacaggccttcgatattggaacactcagaaaccctgaggcaagagaggactcgaaactcagacgcgatgtgatgcccgagaccatttttcaaatacgtcggacagtcccactctgggaaaacattgatgtccaagatttcatccatagacggctcaaggaaaatgatgcggatccctctgctcctccatacgattcactggccacttacgcttatgagggtaacgatagtatagccgactcactgtcttctctcgagtccctgaccgcggactgtaaccaagactatgactacctctccgactggggcccaagattcaagaagctggcggatatgtacgggggagacgactccgacagagattag

SEQ ID NO: 302801 - DNA, 246 bp, Artificial Sequence
  derived and/or modified sequence
atgcggacttaccattacatccccttgttcatctggacttacatgttccatacagtggatacaatcctcctccaggagaagcccaacagttatctttcatcaaagaagatcgcaggcctcaccaaggacgacggcaaaatgctgagacgcaccaaacgggggtggatgtggaatcaatttttcctgcttgaggaatataccggtactgatacacagtacgtggggaagctccacaccgatcagtag

SEQ ID NO: 302802 - DNA, 399 bp, Artificial Sequence
  derived and/or modified sequence
atgcggacttatcactatatccctctgttcatctggacatatatgtttcacactgtcgacacaatattgctgcaagagaaaccaaatagctatttgtcttcgaagaaaatagccggtctcactaaagacgacggcaagatgcttcggcgcaccaaaagaggctggatgtggaaccagtttttcctgctggaagagtacacaggcacagacacacagtacgtgggcaagttgcataccgatcaggataagggggatggcaatctgaaatacattctgacaggcgatggggctgggagcctctttgtgatcgatgagaataccggggacatccacgccgccaagaagttggatcgcgaagaaaagtctctgtatattcttagagccaaggctatcgactag

SEQ ID NO: 302803 - DNA, 246 bp, Artificial Sequence
  derived and/or modified sequence
atgaggacctaccactacatccccctcttcatctggacctacatgttccacacagtggacaccatcctgctgcaggagaagcccaacagctacctgagcagcaagaagattgctggcctgaccaaggatgatggcaagatgctgcggaggaccaagaggggctggatgtggaaccagttcttcctgctggaggagtacacaggaacagacacccagtatgtgggcaagctgcacacagaccagtag

SEQ ID NO: 302804 - DNA, 399 bp, Artificial Sequence
  derived and/or modified sequence
atgaggacctaccactacatccccctcttcatctggacctacatgttccacacagtggacaccatcctgctgcaggagaagcccaacagctacctgagcagcaagaagattgctggcctgaccaaggatgatggcaagatgctgcggaggaccaagaggggctggatgtggaaccagttcttcctgctggaggagtacacaggaacagacacccagtatgtgggcaagctgcacacagaccaggacaagggagatggcaacctgaagtacatcctgactggagatggagctggcagcctgtttgtgattgatgaaaatactggagacatccacgccgccaagaagctggaccgggaggagaagagcctgtacatcctgcgggccaaggccattgattag

SEQ ID NO: 302805 - DNA, 246 bp, Artificial Sequence
  derived and/or modified sequence
atgcggacctaccactacatccccctgttcatctggacctacatgtttcacacagtcgacaccattttgctacaggagaagcctaatagctatctgtccagcaagaaaatcgccgggctcaccaaggacgatggtaaaatgcttagacgaacgaaacgtggttggatgtggaaccagttctttctcctggaggaatacaccggcaccgatacgcagtacgtcggaaagctccataccgaccagtag

SEQ ID NO: 302806 - DNA, 399 bp, Artificial Sequence
  derived and/or modified sequence
atgcggacctaccactacatccccctgttcatctggacctacatgttccacacggtagacaccattctattgcaagagaaaccaaacagctatctcagttcaaaaaagatcgcgggtctgacaaaagacgacggaaaaatgcttagacggacaaagagaggttggatgtggaatcagttctttctcctggaagagtataccggcaccgatacccagtacgtgggcaaacttcacaccgatcaggacaagggggacggaaacctgaaatacatactcactggagacggggctggctctttattcgttattgatgagaataccggagacattcacgcggccaaaaaactggaccgagaagagaagtcactgtatattctgcgtgccaaagcgatcgactag

SEQ ID NO: 302807 - DNA, 246 bp, Artificial Sequence
  derived and/or modified sequence
atgcgaacgtatcactatatccccctgtttatttggacttacatgtttcacaccgtagacactattcttctgcaagagaagcccaacagctacttgtcctctaagaaaattgctgggttgacaaaagacgatggcaaaatgttgagacgaacgaagagaggctggatgtggaaccaattcttcctacttgaggagtatactgggaccgatacacagtatgtcggaaagctgcacaccgaccagtag

SEQ ID NO: 302808 - DNA, 399 bp, Artificial Sequence
  derived and/or modified sequence
atgcgaacttatcattacatccccctattcatttggacgtacatgtttcacaccgtggacacgatcctcctacaggagaagccaaactcatacctttcttctaagaaaatcgccggactcactaaggatgatggcaaaatgctgcggagaacgaaacggggttggatgtggaaccagttttttctgctggaagaatacacaggaaccgacacccaatatgtagggaaactccatactgaccaggacaaaggggatggaaatctcaaatatattctaaccggcgatggcgctggctcattattcgtcatcgatgaaaatacaggcgacatccacgccgcaaagaaactcgatcgtgaagaaaaaagcttatacatcctgcgagcgaaggctatcgattag

SEQ ID NO: 302809 - DNA, 3079 bp, Artificial Sequence
  derived and/or modified sequence
actgagatgcatgaagattcagctgtgaagatactataaaaagggaagagaaggaccgagacagaagcaacaacggaactgtcagtgcggagtagggctaaactcagttccattgttaagcaaggaaaaacaaacaatacattgaatttgacaacccactgaagttgcagataatgaggacttaccattatataccattattcatctggacctatatgttccatacagttgacaccatcctattacaagaaaaacctaacagttatttatcaagcaaaaagatagcgggtctgacaaaagatgacggtaaaatgctacgtcgcaccaagcgtggctggatgtggaatcagttcttcttattggaagagtacacaggtactgacacacaatatgtaggcaagcttcacactgaccaagataaaggagatggaaatttaaaatacatactaacaggagatggggctggcagtctatttgttatagatgaaaatacaggagacattcatgctgcaaagaaactagacagagaagaaaaatctctgtacattcttcgtgccaaggctatagacagaaaaactgggcggcaggtggaaccggaatcggaatttatcattaaaatacatgatatcaatgacaatgagccaaaatttacaaaagacttatacactgccagtgttcctgaaatgtctggagtcggtacatctgttatacaagtaactgcaacagatgcagatgacgccaactatggaaatagtgccaaagtggtctatagcatattgcaaggacagccatatttttcagtggacccagaatcaggcataataaaaactgcattaccagacatgagcagagaaaatagagagcagtaccaggttgttatacaggccaaagacatgggtggccagatgggaggcctttctggaaccaccacagtgaacatcacgctgacagatgtcaacaacaaccctcctcgatttccccagagtacgtatcaatttaattctcctgagtctgtacctcttggaactcatcttggaaggataaaagccaatgaccctgacgtgggggaaaatgcagaaatggagtatagcattgctgaaggagatggtgcagacatgttcgatgtcatcactgacaaggatacacaggaagggattataactgtcaaacagaatttagattttgaaaatcaaatgctctatactttaagagtggatgcaagtaacactcaccctgatccacgattcttacacctgggacctttcaaagatacagctgtggtcaaaatatctgtggaagatatagatgagcctcctgtgttcactaaagtctcttacttgatagaagtagatgaagatgtaaaggagggcagtatcattggacaggttacagcatacgatccagatgccaggaacaatttaataaagtactctgttgatcggcatactgatatggaccgtatttttggtattcactcagaaaatggttctattttcactttgaaagcccttgaccgggaatcatctccttggcataacatcactgttacagccacagaaataaataacccaaaacaaagtagccacatccctgtcttcatcagaattctagatataaatgaccatgctccggaatttgccatgtattatgaaacatttgtttgtgaaaatgcaaaacctgggcagttgattcagactgtcagtgtcatggataaggatgaccctccccgaggtcacaaattcttttttgaaccagtgccagaatttactctcaatccgaatttcaccattgtagataataaagataatacagcaggaatcatgactcggaaagatggctacagtcgcaacaaaatgagcacctacttattgccgattttaatctttgacaacgattatccaattcaaagcagcactggtacactcactatccgtgtgtgtgcctgcgataatcaaggaaacatgcaatcctgcaccgcagaagccctgatcctttcagccggcctgagcacgggagctctcgttgcgattctactctgtgtcctcatactgcttattttagtcgtgttgtttgctgcattgaagaggcaaagaaaaaaggaacctctgataatttcaaaagacgatgtccgggacaacattgtgacctacaacgatgaaggcggcggggaagaagatacccaagcttttgacattggcacattaaggaatccagaggcaagagaagacagtaaacttagacgggatgtaatgcctgaaactatttttcagataaggaggactgtgcctctgtgggaaaatattgatgtacaagattttatccatcgaagattaaaagaaaacgacgcagacccaagtgcacctccatatgattcgctggcaacgtatgcctatgaagggaatgattccatagcagattcgctcagttctttggaatctctcacagctgattgtaaccaagattatgattacctcagtgactgggggcctcgtttcaaaaaacttgccgatatgtatgggggtgatgatagtgaccgagactaagaggattgtttgacttaatcaatattagtggaagtactgtctatgttattagattgagtggcctgcattctcttcctgggaggaaatctttcaaaaattgaagttacaaacaatacgtagatgttgtcaagtagggatttgcttaatcagtaagtctttgtgaatgaatacgaatgatacagatttttaaaaaagtaataaccagttcaccctctttgcctaacaatctcggaaggaaaatatatcacatcaataatcaataaaaataagtaaaaggctttttgtgccttttcttaggtataataatttataaatgttttcttaactgactttcagtcacctttacaattaaactaaatattgtgcaaccgctttgtaaattaatatgaagaagatatatccctaatgaaataggaatgactattactgccatatttatttagttgaagaatgtctttgtgttaattcattcatatttttataaatgtatatttatatttttgtatttttatgaaataaactagtatttataaaac

SEQ ID NO: 302810 - DNA, 532 bp, Artificial Sequence
  derived and/or modified sequence
gagatgcatgaagattcagctgtgaagatactataaaaagggaagagaaggaccgagacagaagcaacaacggaactgtcagtgcggagtagggctaaactcagttccattgttaagcaaggtctcattctgtcgcccaggctggagtgtagtggcaggatcttggctcactgcaacgtctgcctcttgggttcaagtgattattgtgattcaacctcccaagtatctgggactacaggaaaaacaaacaatacattgaatttgacaacccactgaagttgcagataatgaggacttaccattatataccattattcatctggacctatatgttccatacagttgacaccatcctattacaagaaaaacctaacagttatttatcaagcaaaaagatagcgggtctgacaaaagatgacggtaaaatgctacgtcgcaccaagcgtggctggatgtggaatcagttcttcttattggaagagtacacaggtactgacacacaatatgtaggcaagcttcacactgaccaaga

SEQ ID NO: 302811 - DNA, 556 bp, Artificial Sequence
  derived and/or modified sequence
agacttaactggggaagcctctattgtccctagcatttaccctattgtgtccggaattggtgggttcttggtctcactgacttcaagaacgaagccgcgcaccctcacggaaaaacaaacaatacattgaatttgacaacccactgaagttgcagataatgaggacttaccattatataccattattcatctggacctatatgttccatacagttgacaccatcctattacaagaaaaacctaacagttatttatcaagcaaaaagatagcgggtctgacaaaagatgacggtaaaatgctacgtcgcaccaagcgtggctggatgtggaatcagttcttcttattggaagagtacacaggtactgacacacaatatgtaggcaagcttcacactgaccaagataaaggagatggaaatttaaaatacatactaacaggagatggggctggcagtctatttgttatagatgaaaatacaggagacattcatgctgcaaagaaactagacagagaagaaaaatctctgtacattcttcgtgccaaggctatagacag

SEQ ID NO: 302812 - DNA, 246 bp, Artificial Sequence
  derived and/or modified sequence
atgagaacctaccactacatccccctgttcatctggacctacatgttccacaccgtggacaccatcctgctgcaggagaagcccaacagctacctgagcagcaagaagatcgccggcctgaccaaggacgacggcaagatgctgagaagaaccaagagaggctggatgtggaaccagttcttcctgctggaggagtacaccggcaccgacacccagtacgtgggcaagctgcacaccgaccagtag

SEQ ID NO: 302813 - DNA, 399 bp, Artificial Sequence
  derived and/or modified sequence
atgagaacctaccactacatccccctgttcatctggacctacatgttccacaccgtggacaccatcctgctgcaggagaagcccaacagctacctgagcagcaagaagatcgccggcctgaccaaggacgacggcaagatgctgagaagaaccaagagaggctggatgtggaaccagttcttcctgctggaggagtacaccggcaccgacacccagtacgtgggcaagctgcacaccgaccaggacaagggcgacggcaacctgaagtacatcctgaccggcgacggcgccggcagcctgttcgtgatcgacgagaacaccggcgacatccacgccgccaagaagctggacagagaggagaagagcctgtacatcctgagagccaaggccatcgactag

SEQ ID NO: 302814 - protein, 168 aa, Artificial Sequence
  derived and/or modified sequence
MAKPQVVVAPVLMSKLSVNAPEFYPSGYSSSYTESYEDGCEDYPTLSEYVQDFLNHLTEQPGSFETEIEQFAETLNGCVTTDDALQELVELIYQQATSIPNFSYMGARLCNYLSHHLTISPQSGNFRQLLLQRCRTEYEVKDQAAKGDEVTRKRFHAFVLFLGELYLN

SEQ ID NO: 302815 - protein, 200 aa, Artificial Sequence
  derived and/or modified sequence
MAKPQVVVAPVLMSKLSVNAPEFYPSGYSSSYTESYEDGCEDYPTLSEYVQDFLNHLTEQPGSFETEIEQFAETLNGCVTTDDALQELVELIYQQATSIPNFSYMGARLCNYLSHHLTISPQSGNFRQLLLQRCRTEYEVKDQAAKGDEVTRKRFHAFVLFLGELYLNLEIKGTNGQVTRADILQVGLRELLNALFSNPM

SEQ ID NO: 302816 - protein, 95 aa, Artificial Sequence
  derived and/or modified sequence
MAKPQVVVAPVLMSKLSVNAPEFYPSGYSSSYTESYEDGCEDYPTLSEYVQDFLNHLTEQPGSFETEIEQFAETLNGCVTTDDALQELVELIYQQ

SEQ ID NO: 302817 - DNA, 726 bp, Artificial Sequence
  derived and/or modified sequence
tattttcattggacagcactgatgcaagatgaaaaagagggcagagttacactgaaaggtagcacattttcttgaaatttctggaggggaaggttaacgggaagagaacgaagcttgttaaacgtaggtgtgacctactgtggtaaacacctagggtgaattaaagaggggacacatattttgattccgtttctactcccttcccccgatgctaacggagcaggtgacagtctcccagggaccactcctcagcagtccgcgggtctcggccggagccgagtcattgaacacacctgtgcgccagcgaaccctggcgcagggtccacgccccctccccccgtgtttttatttcccgggcgtcaactgtcggtctcgcacgtctctcctgagaactaccgagtaggtcgggataaaatcccacagcagaactcggagtcagcaatggctaagccccaggtggttgtagctcctgtattaatgtctaagctgtctgtgaatgcccctgaattttacccttcaggttattcttccagttacacagaatcctatgaggatggttgtgaggattatcctactctatcagaatatgttcaggattttttgaatcatcttacagagcagcctggcagttttgaaactgaaattgaacagtttgcagagaccctgaatggttgtgttacaacagatgatgctttgcaagaacttgtggaactcatctatcaacag

SEQ ID NO: 302818 - DNA, 612 bp, Artificial Sequence
  derived and/or modified sequence
atggagaacctcaaccgcgtgttgctggagaacgtcctccccgcccacgtggctgagcacttcctcgcgagaagcctgaagaacgaggaattgtaccaccagtcttacgattgcgtgtgtgttatgtttgcctccattcccgacttcaaagagttctatacagagtctgacgttaacaaagaaggcctcgaatgcttacgccttcttaatgagattattgccgacttcgacgacctgctgtcgaagcccaagtttagtggggtggaaaagatcaaaaccatcgggtcgacctatatggccgctaccggactgtcggccgtgccgtcccaggagcattctcaggagcccgagagacagtatatgcatattggtactatggtggagttcgctttcgccctggtgggaaagcttgatgcaatcaacaagcacagcttcaatgattttaaactgcgagtcggggttaccgaagagacttcactcgtgctgcaaactctgggttatacctgcacctgtagaggaattatcaacgtgaaaggcaaaggagacttgaagacttacttcgtcaataccgaaatgtcccgcagcctatcacagagtaacgtagcttcctag

SEQ ID NO: 302819 - DNA, 612 bp, Artificial Sequence
  derived and/or modified sequence
atggagaacctgaacagagtgctgctggagaatgtgctgcctgcccacgtggccgagcacttcctggcccggagcctgaagaatgaggagctgtaccaccagagctatgactgtgtgtgtgtgatgtttgccagcatcccagacttcaaggagttctacacagaaagtgatgtgaacaaggagggcctggagtgcctgcggctgctgaatgagatcatcgctgactttgatgacctgctgagcaagcccaagttcagcggcgtggagaagatcaagaccatcggcagcacctacatggccgccaccggcctgtctgctgtgcccagccaggagcacagccaggagcctgagcggcagtacatgcacatcggcaccatggtggagtttgcctttgccctggtgggcaagctggatgccatcaacaagcacagcttcaatgacttcaagctgcgggtgggcgtgacagaggagaccagcctggtgctgcagaccctgggctacacctgcacctgccggggcatcatcaacgtgaagggcaagggggacctgaagacctactttgtgaacacagagatgagccgcagcctgagccagagcaatgtggccagctag

SEQ ID NO: 302820 - DNA, 612 bp, Artificial Sequence
  derived and/or modified sequence
atggagaacctgaaccgggtgctgctggagaacgtgctgcccgcccatgtggcagagcatttcctcgcccgctctttaaagaacgaggagctgtatcaccagtcttatgactgcgtttgcgtcatgttcgccagcattccagacttcaaggagttttacaccgagagcgatgtgaacaaagagggccttgaatgtcttagattactgaatgaaatcatagccgactttgatgacctgctcagcaagccaaagtttagtggagtcgagaagattaaaacaattggatccacctacatggcagccactggccttagcgccgtcccctcacaggaacattcacaggagcccgagcggcagtacatgcatatcggcactatggtggagtttgcattcgctctggtaggaaagctggacgctatcaacaagcactctttcaacgattttaagctgagggtgggagtgaccgaggaaacttctttggtgcttcagacccttggatatacctgcacatgtagaggcatcattaacgtaaagggaaagggcgatttgaaaacctattttgtaaatacagaaatgtctaggtccctgtctcaaagcaacgtggcctcttag

SEQ ID NO: 302821 - DNA, 612 bp, Artificial Sequence
  derived and/or modified sequence
atggagaacctcaatcgggtgttactggagaatgttctgccagctcatgtggccgagcactttcttgccagatccctcaagaacgaggaactctaccaccagagctacgactgcgtatgcgtgatgttcgccagcatccctgactttaaggaattctataccgaaagcgacgtgaataaggagggtctggagtgcctccggttgctgaatgagatcatcgccgactttgacgacctgctctctaagcccaaattcagcggtgttgaaaagataaagaccattggctctacatacatggctgcgaccggtctgtctgcagttcccagccaagagcattcccaggagccagagaggcagtatatgcatatagggaccatggtggagtttgcctttgcccttgtggggaagcttgacgccatcaataagcactctttcaacgactttaaactgagggtaggggtgactgaggagacctctttggttttacagacacttggatatacatgcacatgtcgcggaatcatcaatgtaaagggcaagggtgatctgaaaacctacttcgtgaacaccgaaatgagtcgatctctgtcccagagtaatgtggccagttag

SEQ ID NO: 302822 - DNA, 612 bp, Artificial Sequence
  derived and/or modified sequence
atggagaacctgaacagagtgctgctggagaacgtgctgcccgcccacgtggccgagcacttcctggccagaagcctgaagaacgaggagctgtaccaccagagctacgactgcgtgtgcgtgatgttcgccagcatccccgacttcaaggagttctacaccgagagcgacgtgaacaaggagggcctggagtgcctgagactgctgaacgagatcatcgccgacttcgacgacctgctgagcaagcccaagttcagcggcgtggagaagatcaagaccatcggcagcacctacatggccgccaccggcctgagcgccgtgcccagccaggagcacagccaggagcccgagagacagtacatgcacatcggcaccatggtggagttcgccttcgccctggtgggcaagctggacgccatcaacaagcacagcttcaacgacttcaagctgagagtgggcgtgaccgaggagaccagcctggtgctgcagaccctgggctacacctgcacctgcagaggcatcatcaacgtgaagggcaagggcgacctgaagacctacttcgtgaacaccgagatgagcagaagcctgagccagagcaacgtggccagctag

SEQ ID NO: 302823 - protein, 542 aa, Artificial Sequence
  derived and/or modified sequence
MSPCPEEAAMRREVVKRIETVVKDLWPTADVQIFGSFSTGLYLPTSDIDLVVFGKWERPPLQLLEQALRKHNVAEPCSIKVLDKATVPIIKLTDQETEVKVDISFNMETGVRAAEFIKNYMKKYSLLPYLILVLKQFLLQRDLNEVFTGGISSYSLILMAISFLQLHPRIDARRADENLGMLLVEFFELYGRNFNYLKTGIRIKEGGAYIAKEEIMKAMTSGYRPSMLCIEDPLLPGNDVGRSSYGAMQVKQVFDYAYIVLSHAVSPLARSYPNRDAESTLGRIIKVTQEVIDYRRWIKEKWGSKAHPSPGMDSRIKIKERIATCNGEQTQNREPESPYGQRLTLSLSSPQLLSSGSSASSVSSLSGSDVDSDTPPCTTPSVYQFSLQAPAPLMAGLPTALPMPSGKPQPTTSRTLIMTTNNQTRFTIPPPTLGVAPVPCRQAGVEGTASLKAVHHMSSPAIPSASPNPLSSPHLYHKQHNGMKLSMKGSHGHTQGGGYSSVGSGGVRPPVGNRGHHQYNRTGWRRKKHTHTRDSLPVSLSR

SEQ ID NO: 302824 - DNA, 1629 bp, Artificial Sequence
  derived and/or modified sequence
atgagcccctgtccagaagaggccgcaatgcgccgggaggtagtgaagagaatagaaacagtcgtcaaagacctatggcccacggctgatgttcagattttcgggtcattttccacaggcctgtatctgccaacctctgacatagatttggttgttttcggcaagtgggaacgcccacccctccaactgctggagcaggcactgcgaaagcacaacgtggccgagccctgctcaataaaggtgctcgacaaagctaccgttccaataattaagctgactgaccaagaaacagaggtaaaagttgatatctctttcaacatggaaacaggagtccgcgcggcggagttcatcaagaactatatgaagaaatattccctccttccttacctcatcttggtactcaagcagttcctgctccagagggaccttaatgaagtctttaccggcggcatttcttcttatagtcttatattgatggcgataagttttttgcaactgcatccccgcatcgacgcccgcagggccgacgaaaacctcgggatgctgttggtggagtttttcgagctgtatgggaggaattttaactacctgaaaactggaattcggataaaggaaggaggggcatacatcgctaaggaggaaattatgaaggcaatgacatcagggtacaggcccagcatgttgtgcattgaagatcctttgctgcctggaaatgacgtggggagaagctcttatggcgctatgcaggttaagcaagtgttcgattatgcatacatagtcctgtctcatgctgtgtcgcccttggcccgctcatatccaaaccgcgatgccgagagtaccctcggacgcatcatcaaggtgactcaggaggtgatcgactaccggagatggatcaaagaaaagtggggtagcaaggcccatccttccccaggaatggatagccggatcaagatcaaagagcgtatagctacgtgtaacggcgaacaaacacagaaccgcgagcctgagtctccttatggccagaggctgacactgtccctgtcttccccccagctgctgagcagtggcagctcggcctcgagcgtaagcagtctgagcgggtccgacgtggatagtgacacacctccatgtactaccccctcagtttaccaattttccttacaagcgcctgcccctctgatggctggcctgccgactgctctcccgatgccttccgggaaaccccagccgacaacgtcgcgtacactcatcatgaccactaataaccaaactaggtttacaatccctcccccaactcttggcgttgctccagtcccatgtagacaggccggagtggaagggaccgcttccctgaaagccgtgcaccacatgtcaagtcctgctatcccctccgcctcacctaatccgctcagctcaccccacttgtaccacaaacagcataacggaatgaagttatctatgaaggggtcgcacggccatacccaagggggagggtacagtagcgttggttcaggaggagtccgaccccctgtggggaaccggggtcaccatcagtataacaggacagggtggcgccggaagaaacatacccatactagggactctttgcctgtatcattgtcccggtag

SEQ ID NO: 302825 - DNA, 1629 bp, Artificial Sequence
  derived and/or modified sequence
atgagcccctgcccagaggaggccgccatgagaagagaggtggtgaagagaattgagaccgtggtgaaggacctgtggcccacagcagatgtgcagatcttcggcagcttcagcacaggcctgtacctgcccaccagtgacatcgacctggtggtgtttgggaagtgggagaggcctcccctgcagctgctggagcaggccctgaggaagcacaacgtggccgagccctgcagcatcaaggtgctggacaaggccaccgtgcccatcatcaagctgacagaccaggagacagaggtgaaggtggacatctccttcaacatggagactggagtgcgggctgctgagttcatcaagaactacatgaagaagtacagcctgctgccctacctgatcctggtgctgaagcagttcctgctgcagagggacctgaatgaggtgttcaccggcggcatcagcagctacagcctcatcctgatggccatctccttcctgcagctgcaccccagaattgatgccaggagagcagatgagaacctgggcatgctgctggtggagttctttgagctgtatggcaggaacttcaactacctgaagacaggcatccgcatcaaggagggcggggcctacatcgccaaggaggagatcatgaaggccatgaccagcggctaccggcccagcatgctgtgcatcgaggaccccctgctgcctggaaatgatgtgggccgcagcagctatggagccatgcaggtgaagcaggtgtttgattatgcctacatcgtgctgagccatgctgtgagccccctggcccggagctaccccaacagagatgctgagagcaccctgggccgcatcatcaaggtgacccaggaggtgattgactaccgccgctggatcaaggagaagtggggcagcaaggcccaccccagccctggcatggacagccgcatcaagatcaaggagcgcatcgccacctgcaatggagagcagacccagaaccgggagcctgagagcccctacggccagaggctgaccctgagcctgagcagcccccagctgctgagcagcggcagcagcgccagctctgtgagcagcctgagcggcagtgatgtggacagcgacaccccaccctgcaccaccccatctgtgtaccagttcagcctgcaggccccagcccccctgatggccggcctgcccacagccctgcccatgcccagcggcaagccccagcccaccaccagcaggaccctcatcatgaccaccaacaaccagacccgcttcaccatccccccacccaccctgggcgtggcccctgtgccctgccggcaggccggcgtggagggcacagccagcctgaaggctgtgcaccacatgagcagccctgccatccccagcgccagccccaaccccctgagcagcccccacctgtaccacaagcagcacaacggcatgaagctgtccatgaagggcagccacggccacacccagggcggcggctacagctctgtgggcagcggcggcgtgcggccccctgtgggcaacagaggccaccaccagtacaacagaacaggctggaggaggaagaagcacacccacacccgggacagcctgcctgtgtccctgagcaggtag

SEQ ID NO: 302826 - DNA, 1629 bp, Artificial Sequence
  derived and/or modified sequence
atgagcccctgccccgaggaggccgccatgcggcgggaggtggtgaaacggatagagaccgtcgtgaaggacctgtggcctacagctgacgtgcagatctttggttctttttccacaggactctatttaccaacaagcgatattgatctcgtcgtctttggcaagtgggaacggccacccctgcaactcctcgagcaagctctgaggaaacacaacgtggcagaaccatgctccatcaaggtactcgacaaagctacagtgcctattataaaactgactgatcaggagacagaggtgaaagtggatatcagttttaacatggagactggagttcgagccgctgagtttatcaagaactatatgaagaaatactcgctgctgccatacctgatcctagtgctcaagcagtttttactccagcgtgatcttaacgaagttttcacagggggcatttcgtcgtatagcctaatccttatggcgatcagttttctccaactgcatccgaggatcgatgccagacgagctgatgaaaatctgggaatgctgttggtggaattctttgagttgtacggcaggaatttcaattacctgaagaccggcattcggatcaaggagggtggggcctacatcgcaaaagaagagatcatgaaagccatgacgtcagggtataggccatctatgctctgtatagaggaccctctcctgccaggtaatgatgtaggaagaagttcttatggtgccatgcaggtaaaacaggtttttgactatgcctacatagtcttgagccacgccgtgagcccactggccagatcctatcctaaccgcgatgctgagagtactcttggccgcatcataaaagtcacgcaggaggtgatcgactaccgacggtggataaaagagaagtgggggtctaaggcacatccttcaccaggcatggactcgaggattaagatcaaggaacgaatcgcaacttgtaacggcgagcagacacagaatcgggagcccgagtccccgtacggccagcggttaactctgagcctttcctccccgcagcttctatccagcggctcatctgcttcatcagttagcagtctgagcggatccgacgttgattccgataccccgccctgcaccacgccaagcgtgtaccagttttccctacaggcccctgccccgttaatggccggcctccctaccgcactgcccatgcccagcggcaagcctcagcccaccaccagcagaactctcattatgactacaaataatcagacccgattcaccatccccccccccaccttaggggtcgcgcctgtgccatgccgccaggccggcgttgaagggaccgccagtctgaaggccgtacatcatatgagctcgcccgctattccaagtgccagtccgaacccactgagcagtccgcatctttaccacaagcagcataatgggatgaaattgagtatgaagggcagccatgggcacacacaaggtgggggctattcctcagtgggtagcgggggagtccgaccgcccgtagggaaccggggtcaccaccagtataatcgcacaggctggcggcggaagaaacacacccacacacgagacagcttgccagtgagtctaagccgatag

SEQ ID NO: 302827 - DNA, 1629 bp, Artificial Sequence
  derived and/or modified sequence
atgtcaccatgtcccgaggaggctgccatgcgcagagaggtcgtgaagcgcatagagactgtcgtcaaagatctgtggcccaccgcagatgtgcagatttttggatcattctctactgggctttatctaccgacttcggatatcgacctggtagtgttcggaaaatgggagagacctcctttgcagctgttggaacaggcgcttcgcaagcacaatgtggccgaaccatgtagcatcaaagtccttgacaaggccactgtccccattattaagttaacagaccaagaaacggaagttaaagtggatataagtttcaatatggagacaggcgtcagagctgctgaatttatcaagaactacatgaaaaagtacagcctccttccatatcttatactggtattgaagcagtttctcttacaacgggatcttaatgaggtttttaccggagggatttcttcttactccctcatactaatggccatcagcttccttcagctgcacccgcgtatcgatgctcgcagagccgacgaaaatctgggcatgctactggtggagtttttcgagctgtacggcagaaacttcaactatctgaaaaccgggatccggatcaaggaagggggagcgtatatcgccaaggaggaaatcatgaaagcgatgacatctggctatcggccaagtatgctgtgtattgaggaccctcttctgccagggaatgatgtggggcgtagcagttacggcgctatgcaggtcaagcaggtgttcgactacgcctacattgttctgagccatgccgtgtccccgcttgctcgatcgtaccccaacagggatgctgagtcgacgttgggacgcattatcaaggtcacacaggaggtcatagactatagaaggtggatcaaggagaagtgggggtctaaagcccacccaagtcctggtatggattctaggataaaaattaaagagcggattgccacgtgtaacggcgaacagacccagaatcgtgaaccggagtctccttacggtcagcgcctgaccctttccctatctagtccccagctgttgagcagcggctcatctgcttccagtgttagttccttgtcagggtccgacgtggactctgacacccctccctgcaccacgccaagcgtgtatcagtttagtttacaggccccagctccgctaatggctggcctcccgactgccctccccatgccctccggtaagccacagccaaccacatctcgaacccttatcatgaccaccaacaaccagacacgttttaccatcccacctcctacattaggagttgctcccgttccatgcagacaagccggagtggaaggtaccgctagcctgaaggctgtgcatcatatgagttctcctgctatcccttccgcttcacccaatcctctcagtagtccccacctgtatcacaagcaacacaacggcatgaaattgtctatgaagggcagtcacggtcacactcagggcggtggttacagcagtgttggcagtggaggggtgcggccacccgtgggcaatcgaggccaccatcagtacaaccggacagggtggagaaggaagaagcacacacacacacgcgactccctccccgtcagtctttcaaggtag

SEQ ID NO: 302828 - DNA, 1629 bp, Artificial Sequence
  derived and/or modified sequence
atgagcccctgccccgaggaggccgccatgagaagagaggtggtgaagagaatcgagaccgtggtgaaggacctgtggcccaccgccgacgtgcagatcttcggcagcttcagcaccggcctgtacctgcccaccagcgacatcgacctggtggtgttcggcaagtgggagagaccccccctgcagctgctggagcaggccctgagaaagcacaacgtggccgagccctgcagcatcaaggtgctggacaaggccaccgtgcccatcatcaagctgaccgaccaggagaccgaggtgaaggtggacatcagcttcaacatggagaccggcgtgagagccgccgagttcatcaagaactacatgaagaagtacagcctgctgccctacctgatcctggtgctgaagcagttcctgctgcagagagacctgaacgaggtgttcaccggcggcatcagcagctacagcctgatcctgatggccatcagcttcctgcagctgcaccccagaatcgacgccagaagagccgacgagaacctgggcatgctgctggtggagttcttcgagctgtacggcagaaacttcaactacctgaagaccggcatcagaatcaaggagggcggcgcctacatcgccaaggaggagatcatgaaggccatgaccagcggctacagacccagcatgctgtgcatcgaggaccccctgctgcccggcaacgacgtgggcagaagcagctacggcgccatgcaggtgaagcaggtgttcgactacgcctacatcgtgctgagccacgccgtgagccccctggccagaagctaccccaacagagacgccgagagcaccctgggcagaatcatcaaggtgacccaggaggtgatcgactacagaagatggatcaaggagaagtggggcagcaaggcccaccccagccccggcatggacagcagaatcaagatcaaggagagaatcgccacctgcaacggcgagcagacccagaacagagagcccgagagcccctacggccagagactgaccctgagcctgagcagcccccagctgctgagcagcggcagcagcgccagcagcgtgagcagcctgagcggcagcgacgtggacagcgacacccccccctgcaccacccccagcgtgtaccagttcagcctgcaggcccccgcccccctgatggccggcctgcccaccgccctgcccatgcccagcggcaagccccagcccaccaccagcagaaccctgatcatgaccaccaacaaccagaccagattcaccatccccccccccaccctgggcgtggcccccgtgccctgcagacaggccggcgtggagggcaccgccagcctgaaggccgtgcaccacatgagcagccccgccatccccagcgccagccccaaccccctgagcagcccccacctgtaccacaagcagcacaacggcatgaagctgagcatgaagggcagccacggccacacccagggcggcggctacagcagcgtgggcagcggcggcgtgagaccccccgtgggcaacagaggccaccaccagtacaacagaaccggctggagaagaaagaagcacacccacaccagagacagcctgcccgtgagcctgagcagatag

SEQ ID NO: 302829 - DNA, 45 bp, Artificial Sequence
  derived and/or modified sequence
atgcctatcacccaggacaatgcagtgttacacctcccactttag

SEQ ID NO: 302830 - DNA, 45 bp, Artificial Sequence
  derived and/or modified sequence
atgcccatcacccaggacaatgctgtgctgcacctgcccctgtag

SEQ ID NO: 302831 - DNA, 45 bp, Artificial Sequence
  derived and/or modified sequence
atgccaatcacccaagacaacgccgttctgcacttgccactgtag

SEQ ID NO: 302832 - DNA, 45 bp, Artificial Sequence
  derived and/or modified sequence
atgcccatcacccaggacaacgccgtgctgcacctgcccctgtag

SEQ ID NO: 302833 - protein, 14 aa, Artificial Sequence
  derived and/or modified sequence
MPITQDNAVLHLPL

SEQ ID NO: 302834 - protein, 1086 aa, Artificial Sequence
  derived and/or modified sequence
MANLLKTVVTGCSCPLLSNLGSCKGLRVKKDFLRTFYTHQELWCKAPVKPGIPYKQLTVGVPKEIFQNEKRVALSPAGVQNLVKQGFNVVVESGAGEASKFSDDHYRVAGAQIQGAKEVLASDLVVKVRAPMVNPTLGVHEADLLKTSGTLISFIYPAQNPELLNKLSQRKTTVLAMDQVPRVTIAQGYDALSSMANIAGYKAVVLAANHFGRFFTGQITAAGKVPPAKILIVGGGVAGLASAGAAKSMGAIVRGFDTRAAALEQFKSLGAEPLEVDLKESGEGQGGYAKEMSKEFIEAEMKLFAQQCKEVDILISTALIPGKKAPVLFNKEMIESMKEGSVVVDLAAEAGGNFETTKPGELYIHKGITHIGYTDLPSRMATQASTLYSNNITKLLKAISPDKDNFYFDVKDDFDFGTMGHVIRGTVVMKDGKVIFPAPTPKNIPQGAPVKQKTVAELEAEKAATITPFRKTMSTASAYTAGLTGILGLGIAAPNLAFSQMVTTFGLAGIVGYHTVWGVTPALHSPLMSVTNAISGLTAVGGLALMGGHLYPSTTSQGLAALAAFISSVNIAGGFLVTQRMLDMFKRPTDPPEYNYLYLLPAGTFVGGYLAALYSGYNIEQIMYLGSGLCCVGALAGLSTQGTARLGNALGMIGVAGGLAATLGVLKPGPELLAQMSGAMALGGTIGLTIAKRIQISDLPQLVAAFHSLVGLAAVLTCIAEYIIEYPHFATDAAANLTKIVAYLGTYIGGVTFSGSLIAYGKLQGLLKSAPLLLPGRHLLNAGLLAASVGGIIPFMVDPSFTTGITCLGSVSALSAVMGVTLTAAIGGADMPVVITVLNSYSGWALCAEGFLLNNNLLTIVGALIGSSGAILSYIMCVAMNRSLANVILGGYGTTSTAGGKPMEISGTHTEINLDNAIDMIREANSIIITPGYGLCAAKAQYPIADLVKMLTEQGKKVRFGIHPVAGRMPGQLNVLLAEAGVPYDIVLEMDEINHDFPDTDLVLVIGANDTVNSAAQEDPNSIIAGMPVLEVWKSKQVIVMKRSLGVGYAAVDNPIFYKPNTAMLLGDAKKTCDALQAKVRESYQK

SEQ ID NO: 302835 - protein, 199 aa, Artificial Sequence
  derived and/or modified sequence
MANLLKTVVTGCSCPLLSNLGSCKGLRVKKDFLRTFYTHQELWCKAPVKPGIPYKQLTVGVPKEIFQNEKRVALSPAGVQNLVKQGFNVVVESGAGEASKFSDDHYRVAGAQIQGAKEVLASDLVVKVRAPMVNPTLGVHEADLLKTSGTLISFIYPAQNPELLNKLSQRKTTVLAMDQVPRVTIAQGYDALSSMANIA

SEQ ID NO: 302836 - protein, 217 aa, Artificial Sequence
  derived and/or modified sequence
MANLLKTVVTGCSCPLLSNLGSCKGLRVKKDFLRTFYTHQELWCKAPVKPGIPYKQLTVGVPKEIFQNEKRVALSPAGVQNLVKQGFNVVVESGAGEASKFSDDHYRVAGAQIQGAKEVLASDLVVKVRAPMVNPTLGVHEADLLKTSGTLISFIYPAQNPELLNKLSQRKTTVLAMDQVPRVTIAQGYDALSSMANIAGYKAVVLAANHFGRFFTG

SEQ ID NO: 302837 - DNA, 3261 bp, Artificial Sequence
  derived and/or modified sequence
atggccaatctgctgaaaactgttgtcaccggatgctcttgtcccctcctgagcaatctcggctcttgtaagggcctgagagttaaaaaggactttctgcggaccttctacacgcatcaggaattgtggtgcaaagccccagttaaaccaggcatcccctataaacagttgacagttggcgtccccaaggagatcttccagaacgagaagcgagtggccctttctcctgctggcgtccagaatctcgtgaaacaggggtttaacgtggttgttgaaagtggagcaggggaggctagtaagttttcagacgatcactatagagtggccggtgcccaaattcagggggccaaagaggtgctcgcttcggatctcgtggtcaaggtgagggcgccaatggtgaaccctactttgggtgtgcatgaagccgacctgttaaaaacctcgggtaccttgatcagctttatataccccgcacaaaacccagaactactgaataagctttcgcaaagaaagaccactgttctcgctatggaccaggtcccacgcgttaccatcgcacagggctatgatgctctctcgagtatggcaaatattgcgggatataaggcggttgtgcttgctgccaatcactttgggagattcttcacaggccagatcaccgctgccgggaaagtccctccagccaaaattctgattgtgggaggcggcgtcgccgggctggccagcgccggagcagctaagtcaatgggcgccatcgtcagaggattcgacactagggctgctgctctggagcagttcaaaagtctaggcgctgagcctctggaagtagatctaaaggagtcgggcgaagggcagggaggctacgccaaggaaatgtctaaggagtttattgaggcagaaatgaagcttttcgctcagcagtgtaaggaggttgatatcctgatctcaaccgccctgatccccgggaaaaaagcccctgtgctattcaataaagaaatgatcgagtctatgaaagagggatcagtggttgtcgaccttgccgcagaagcaggaggtaatttcgaaacaaccaaacctggagaactgtacattcacaagggtattactcacataggttacaccgatcttcccagcaggatggcaacccaggcttctacactgtacagcaacaacatcactaagctcctaaaagccatcagtcctgacaaggacaatttttacttcgatgtcaaggatgatttcgattttggcacgatgggacacgtcatcaggggaaccgtggtcatgaaggacggcaaggtgatcttcccggctcccacacccaaaaatattccacaaggagctcccgtaaaacagaaaactgtggccgaacttgaagccgagaaggcggctactatcacaccttttcgaaaaaccatgagcacagcttctgcctacactgcaggtctgacaggcatccttggactgggcatcgcagcaccaaacctcgccttcagccagatggtgaccacctttggactggccggcatcgtgggctatcataccgtgtggggggtgactcctgctcttcacagccccctaatgagcgtgaccaatgcaatctcgggactcaccgctgtgggaggattggcacttatgggcggtcatctgtacccatctacaacgagccagggcctcgccgccctggcggccttcatctcgtcagtcaacatcgccggggggtttttagtcacccaacgcatgttggacatgttcaagagacctactgatccccccgagtacaattacctgtacttgctgcctgcaggtactttcgtggggggatatctggcggcattatacagcggatataacattgagcagatcatgtatctgggttccggcctgtgttgcgttggcgctctcgccggactgtcaacgcagggtacggctaggctgggcaacgcactgggcatgatcggcgtggctggcggtctggctgccactctgggagtcctcaagcctggtcctgagctgctagcccagatgtcgggcgcaatggcacttgggggaactattgggcttaccattgctaagcgaattcagatttccgatttaccccaactggtagcagcattccactcactggtggggctggccgcagtgttgacctgcatcgccgaatatattattgaatatccgcacttcgcaacagacgcagctgctaatctcactaagatcgttgcttatctcgggacatatattggaggagtgacatttagtgggagcctcattgcatacgggaagctgcaggggctgctgaaatccgcgccgctgctcctcccgggccgacacctgctcaacgcaggattgctcgctgcctctgtgggcggtattatcccatttatggtggacccaagtttcacaacagggataacatgcctggggtccgtgagtgctctgtcagctgttatgggcgtgacattgacagcagcaatcggaggggccgacatgccagtcgtaattacagtccttaattcatatagtggttgggcactgtgtgctgagggctttctattgaacaacaatctattgaccatcgtaggagctcttatcggatcctctggtgcaatcctgtcgtacattatgtgcgtggcgatgaatcggtctcttgcaaacgtgatcctgggcggttatggcacaactagcactgccggaggcaaacctatggagatctcgggtacccacactgaaatcaacctggacaatgctatcgatatgattagagaggcaaactcgatcataatcactccgggctacgggttgtgcgccgctaaagcccaatatcccatagccgatctcgtgaaaatgctgaccgagcagggcaagaaggttaggtttgggattcaccccgttgcgggacgcatgccgggccaactgaacgtccttctggccgaagcgggggtcccctacgacattgtccttgagatggatgaaatcaaccatgactttcctgatacagacttggtcctggtgattggcgccaatgacacagtaaattccgcagcccaggaagacccaaattcaattatcgctggcatgccagtcctggaagtctggaagagcaaacaggttatcgtgatgaagcgaagcttgggagtcggatacgcggcggtcgataaccctattttttacaagccgaacactgcgatgctgctcggcgacgctaagaagacttgtgacgctctgcaagcaaaagtgagagaaagctatcagaagtag

SEQ ID NO: 302838 - DNA, 3261 bp, Artificial Sequence
  derived and/or modified sequence
atggccaacctgttgaagacagtagtcactggttgctcatgcccattactttctaacctcggaagctgtaaggggctgagggtcaagaaggactttcttagaactttctatactcatcaggagctgtggtgcaaagcaccagtgaagcctggtatcccatacaagcagcttacggtcggcgtgcctaaggagattttccagaacgaaaagcgggttgccctgtcaccggccggcgtgcagaatctggtgaaacagggttttaatgtcgttgtggaatccggtgccggtgaggcctctaagttttccgatgaccactaccgtgttgctggcgctcagatccagggggccaaggaagtgttggcctctgatctggtggtgaaagttagagcccccatggtcaaccccacattaggggttcacgaagcagacctgctgaagaccagcgggactttaatcagcttcatctaccccgcccaaaatcctgagttgctgaacaaactaagccagcggaagactacggtgctggcaatggaccaggtccctagggtgaccatagcacagggttacgacgcattaagttcaatggcgaacattgctgggtacaaggccgtcgttttggccgcgaatcacttcggtcgcttcttcactggtcagatcaccgccgcaggaaaggtgccgccggctaaaattctcatcgtgggcggtggtgtggctggcctggccagcgccggtgccgctaagtccatgggcgcgatcgtgcggggatttgacacaagggccgctgcactagagcagtttaagtctcttggggcagagccactcgaggttgacctgaaagaatccggggaaggacaggggggatatgctaaggagatgtccaaggagtttattgaggccgaaatgaaactgtttgcccaacaatgcaaggaagtagacattctcatctcaacggccctgattcccggcaagaaggccccagtcctctttaacaaggagatgatcgagtccatgaaggagggatcagtcgtggtcgaccttgccgccgaagcgggcggcaattttgagactacaaaaccaggagaattgtatatccacaaaggcattacacacatcggatatactgacctcccttcgcgcatggctacccaggctagtactctgtactccaacaacattactaaactattgaaagccatttccccagataaagacaatttttactttgacgtaaaggacgactttgattttgggacgatgggacatgtgattaggggcactgtcgtgatgaaggacggcaaggtcattttcccagcgcccacacccaaaaatatccctcagggggcaccagtaaagcagaaaacagtagccgagctcgaggccgagaaagctgccaccattacaccattcagaaaaaccatgtcgactgcttcagcctacacggccgggctcacaggaattctgggcctcggaattgccgctcctaatctggcgttttcccagatggtcacaacgttcggtcttgcaggaattgttgggtaccacaccgtctggggcgtgacccctgcattacactccccactaatgtccgtgacaaacgccatctctggcctgacggctgtaggggggctcgctctgatgggaggccacttgtacccatccactacaagtcagggcctcgctgctctcgccgcgtttatctcctccgtcaatatagccggagggttcctggttactcagcggatgctggatatgttcaagcggcccaccgatccgcccgagtataattacctgtacctactcccagctgggacattcgtcggaggatatttggccgctttgtacagcggatacaacattgagcagattatgtacctcggctccggcctttgttgcgtgggggctcttgcgggcctcagcacacagggcaccgctcggctgggaaatgccttgggtatgattggtgtcgccgggggtctggctgctacgctgggcgtgctaaaacctgggcccgaactgttagcccagatgagcggcgccatggccctgggggggaccatcggcctgactattgccaaaaggatccagatcagcgacctgccacagctcgtggccgcattccactccctggtgggactggccgcggtattaacttgcatcgccgaatacatcatagagtacccccactttgctacggacgcagctgctaacctaactaagattgtagcttatctgggtacttatattggcggagtgaccttctcaggctccctcattgcatacggaaagctccaaggcctgctgaaatctgctccactgcttctgcctggcaggcaccttctcaatgctgggttgttggctgcctctgtaggcggcataatacccttcatggtagatccaagcttcaccaccgggatcacctgcctcggctctgtgtctgcattatccgcggtgatgggtgtcacgttaacggcagccatcggcggagcagacatgccagtcgtgatcactgtgctcaattcatactcaggatgggcgttgtgtgctgaagggttcctgctgaataataatttattaacaatcgtaggtgcactgatcggatccagtggcgctatcttgagttatatcatgtgtgttgctatgaaccgcagtctcgccaatgtcatcctgggcggatatggcacaactagcacagctggcgggaaaccaatggaaatcagtggcactcacaccgaaataaaccttgacaacgccattgacatgatcagggaggccaacagcattatcataacacccggctacgggctctgtgccgctaaggcccaatacccaatcgcggacctcgtgaaaatgttaactgagcagggcaaaaaggtccggttcgggatccatccagtggccgggcgtatgccaggccagctgaacgtgctcctcgcagaggctggagttccctacgacatcgtccttgaaatggatgagattaaccacgacttcccagacaccgatctggtcctggtgattggcgccaatgacactgtcaattcggctgctcaggaggacccaaatagcattattgctggaatgcctgtcctggaggtttggaaatccaaacaagtgatagtcatgaagcgaagtcttggtgtcggctacgccgccgtggataacccgatcttttacaaacctaacacagctatgttactgggcgatgcgaagaagacatgcgatgctttacaggccaaggtgcgggagtcctatcagaagtag

SEQ ID NO: 302839 - DNA, 600 bp, Artificial Sequence
  derived and/or modified sequence
atggccaacctgctaaaaactgttgtcacgggatgttcctgcccactgctgtcaaacctggggtcatgtaaggggctacgcgtcaagaaagattttcttcgaactttttatacgcaccaggaactttggtgtaaagctcccgtgaaacccggaataccttataagcagttgaccgtaggcgtgcctaaggagatcttccagaatgaaaagagggtcgccctgagcccagcgggagtccagaacctggtcaagcaaggttttaatgtggtcgtcgagtctggcgccggcgaagcatccaaattctcagacgatcattatagggtcgccggtgcccaaatacagggtgcaaaagaggtgctagcctctgacctagtggtcaaagtcagggcaccaatggttaatcccactctgggcgtacatgaggcggatcttctaaagaccagcggaacactgatttcctttatttacccggctcagaatccggagctgctcaacaagctaagccaacgcaagacaaccgttttggccatggatcaggtgcctagggtgactattgctcaaggatatgatgctctctcaagcatggccaacatcgcctag

SEQ ID NO: 302840 - DNA, 654 bp, Artificial Sequence
  derived and/or modified sequence
atggctaatctattaaagaccgtggtgacagggtgttcatgcccactgctctccaacctagggtcatgtaaggggctgagagttaaaaaagattttctgaggactttttacacccatcaagagctgtggtgcaaggcacccgtgaaaccaggaatcccatacaaacagcttaccgtcggagtgcctaaagaaatctttcaaaatgagaagcgtgttgctttaagccccgctggagtgcagaacctagtaaaacagggattcaatgtggtcgtagaatctggcgccggcgaagcatcaaagttctctgacgaccattaccgcgttgccggggcccagatccagggcgccaaggaggttctggcttccgacctggtggttaaagtacgggctcccatggtcaaccctacactcggagtgcatgaagccgatctccttaaaaccagcggcactcttataagctttatttacccagctcagaaccctgaactgctgaacaaactgtcgcagcgcaagacaacggtcctcgcaatggaccaggtaccacgggtgacaattgcacagggctacgacgcactgtcaagcatggcaaatattgccgggtacaaggcagttgtgttggcagcaaaccacttcggaaggttttttaccggatag

SEQ ID NO: 302841 - DNA, 3261 bp, Artificial Sequence
  derived and/or modified sequence
atggccaacctgctgaagacagtggtgacaggctgcagctgccccctgctgagcaacctgggcagctgcaagggcctgcgggtgaagaaggacttcctgcggaccttctacacccaccaggagctgtggtgcaaggcccctgtgaagccaggcatcccctacaagcagctgactgtgggcgtgcccaaggagatcttccagaatgagaagagggtggccctgagccctgctggggtgcagaacctggtgaagcagggcttcaacgtggtggtggagagcggggccggggaggccagcaagttcagtgatgaccactacagagtggccggggcccagatccagggcgccaaggaggtgctggccagtgacctggtggtgaaggtgcgggcccccatggtgaaccccaccctgggcgtgcatgaggccgacctgctgaagaccagcggcaccctcatctccttcatctacccagcccagaaccctgagctgctgaacaagctgagccagaggaagaccaccgtgctggccatggaccaggtgccccgggtgaccatcgcccagggctatgatgccctgagctccatggccaacattgctggctacaaggctgtggtgctggccgccaaccacttcggccgcttcttcaccggccagatcacagctgctgggaaggtgcccccagccaagatcctgattgtgggcggcggcgtggccggcctggccagcgctggagctgccaagtccatgggcgccatcgtgcggggctttgacaccagggctgctgccctggagcagttcaagagcctgggcgctgagcccctggaggtggacctgaaggagagcggggagggccagggcggctacgccaaggagatgagcaaggagttcattgaagctgagatgaagctgtttgcccagcagtgcaaggaggtggacatcctgatcagcacagccctgatccctgggaagaaggcccctgtgctcttcaacaaggagatgattgagagcatgaaggagggctctgtggtggtggacctggccgctgaggccggcggcaactttgagaccaccaagccaggagagctgtacatccacaagggcatcacccacatcggctacacagacctgcccagcaggatggccacccaggccagcaccctgtacagcaacaacatcaccaagctgctgaaggccatcagcccagacaaggacaacttctactttgatgtgaaggatgactttgattttggcaccatgggccacgtgatccggggcaccgtggtgatgaaggatggcaaggtgatcttccctgcccccacccccaagaacatcccccagggcgcccctgtgaagcagaagacagtggccgagctggaggccgagaaggccgccaccatcacccccttcaggaagaccatgagcacagccagcgcctacacagctggcctgaccggcatcctgggcctgggcattgctgcccccaacctggccttcagccagatggtgaccaccttcggcctggccggcatcgtgggctaccacacagtgtggggcgtgaccccagccctgcacagccccctgatgtctgtgaccaatgccatcagcggcctgacagctgtgggcggcctggccctgatgggcggccacctgtaccccagcaccaccagccagggcctggccgccctggccgccttcatcagctctgtgaacattgctgggggcttcctggtgacccagaggatgctggacatgttcaagaggcccacagatcctcctgagtacaactacctgtacctgctgcctgctggcacctttgtgggcggctacctggccgccctgtacagcggctacaacatcgagcagatcatgtacctgggcagcggcctgtgctgcgtgggcgccctggccggcctgagcacccagggcacagcccggctgggcaatgccctgggcatgattggagtggccggcggcctggccgccaccctgggcgtgctgaagccaggccctgagctgctggcccagatgtctggggccatggccctgggcggcaccatcggcctgaccatcgccaagaggatccagatcagtgacctgccccagctggtggccgccttccacagcctggtgggcctggccgctgtgctgacctgcatcgccgagtacatcatcgagtacccccactttgccacagatgctgctgccaacctgaccaagatcgtggcctacctgggcacctacatcggcggcgtgaccttcagcggcagcctcatcgcctacggcaagctgcagggcctgctgaagagcgcccccctgctgctgcccggccgccacctgctgaatgccggcctgctggccgcctctgtgggcggcatcatccccttcatggtggaccccagcttcaccaccggcatcacctgcctgggctctgtgtctgccctgtctgctgtgatgggcgtgaccctgacagctgccatcggcggcgctgacatgcctgtggtgatcaccgtgctgaacagctacagcggctgggccctgtgtgccgagggcttcctgctgaacaacaacctgctgaccatcgtgggcgccctgattggcagcagcggggccatcctgagctacatcatgtgtgtggccatgaacagaagcctggccaacgtcatcctgggcggctacggcaccaccagcacagctgggggcaagcccatggagatcagcggcacccacacagagatcaacctggacaatgccatcgacatgatccgggaggccaacagcatcatcatcaccccaggctacggcctgtgtgccgccaaggcccagtaccccatcgctgacctggtgaagatgctgacagagcagggcaagaaggtgcgcttcggcatccaccctgtggccggccgcatgcctggccagctgaatgtgctgctggccgaggccggcgtgccctatgacatcgtgctggagatggatgagatcaaccacgacttcccagacacagacctggtgctggtgattggagccaatgacacagtgaacagcgctgcccaggaggaccccaacagcatcatcgccggcatgcctgtgctggaggtgtggaagagcaagcaggtgattgtgatgaagaggagcctgggcgtgggctacgccgctgtggacaaccccatcttctacaagcccaacacagccatgctgctgggagatgccaagaagacctgtgatgccctgcaggccaaggtgcgggagagctaccagaagtag

SEQ ID NO: 302842 - DNA, 600 bp, Artificial Sequence
  derived and/or modified sequence
atggccaacctgctgaagacagtggtgacaggctgcagctgccccctgctgagcaacctgggcagctgcaagggcctgcgggtgaagaaggacttcctgcggaccttctacacccaccaggagctgtggtgcaaggcccctgtgaagccaggcatcccctacaagcagctgactgtgggcgtgcccaaggagatcttccagaatgagaagagggtggccctgagccctgctggggtgcagaacctggtgaagcagggcttcaacgtggtggtggagagcggggccggggaggccagcaagttcagtgatgaccactacagagtggccggggcccagatccagggcgccaaggaggtgctggccagtgacctggtggtgaaggtgcgggcccccatggtgaaccccaccctgggcgtgcatgaggccgacctgctgaagaccagcggcaccctcatctccttcatctacccagcccagaaccctgagctgctgaacaagctgagccagaggaagaccaccgtgctggccatggaccaggtgccccgggtgaccatcgcccagggctatgatgccctgagctccatggccaacatcgcctag

SEQ ID NO: 302843 - DNA, 654 bp, Artificial Sequence
  derived and/or modified sequence
atggccaacctgctgaagacagtggtgacaggctgcagctgccccctgctgagcaacctgggcagctgcaagggcctgcgggtgaagaaggacttcctgcggaccttctacacccaccaggagctgtggtgcaaggcccctgtgaagccaggcatcccctacaagcagctgactgtgggcgtgcccaaggagatcttccagaatgagaagagggtggccctgagccctgctggggtgcagaacctggtgaagcagggcttcaacgtggtggtggagagcggggccggggaggccagcaagttcagtgatgaccactacagagtggccggggcccagatccagggcgccaaggaggtgctggccagtgacctggtggtgaaggtgcgggcccccatggtgaaccccaccctgggcgtgcatgaggccgacctgctgaagaccagcggcaccctcatctccttcatctacccagcccagaaccctgagctgctgaacaagctgagccagaggaagaccaccgtgctggccatggaccaggtgccccgggtgaccatcgcccagggctatgatgccctgagctccatggccaacattgctggctacaaggctgtggtgctggccgccaaccacttcggccgcttcttcaccggctag

SEQ ID NO: 302844 - DNA, 3261 bp, Artificial Sequence
  derived and/or modified sequence
atggccaacctgctgaagaccgtggtgaccggctgcagctgcccccttctgtccaacttaggctcatgtaagggccttcgcgtcaagaaggattttctgcgtaccttctacacccaccaggagctgtggtgtaaggcaccagtaaagccaggaatcccctataaacaattgaccgtgggggtgcccaaggagatctttcagaatgagaagcgggtagcgctttcaccggcaggcgttcagaacctggtgaaacaaggtttcaacgtcgtggtggagagcggtgcaggcgaggcctctaaattctccgatgatcattatagggtggctggggcccagattcagggggccaaagaggtgctcgcaagcgacttagttgttaaggttcgcgccccaatggtcaaccctaccttgggcgtccatgaggccgacctgctgaagacatccggtactttgatctccttcatctaccctgcccagaaccctgagttattaaataagctgtcccagcgaaaaactaccgtcctcgccatggaccaagtcccacgagtgaccatagctcagggatatgacgcgctttcctccatggctaacatcgctggttataaggcagtggtgctcgcagcaaaccatttcgggaggtttttcactggccaaatcacggccgctggcaaggttccacctgcgaagatcctcattgtgggagggggagtggctgggctcgcttcagctggtgccgctaagtccatgggggccattgtgcggggctttgacacccgggctgccgccctggaacagtttaagtctctgggcgctgagcccctggaagtggacctgaaagagtctggcgagggccaaggcggctatgcaaaggaaatgtctaaagagttcatcgaggcggaaatgaagctgttcgcccaacagtgtaaggaggtcgatatcctgatttccaccgcccttatccccgggaaaaaagccccagtgctgttcaacaaagaaatgatcgaaagcatgaaggaaggcagtgtggtcgtggacctagccgccgaggcaggtggcaattttgagacaaccaagcctggtgagctgtatatccataaggggattacacacatcggttacaccgatctcccgtccagaatggctacacaagcatccactctctacagtaacaatataaccaagctattgaaagctatttcaccagataaggataacttttacttcgatgtgaaggatgattttgacttcggaaccatgggccacgttatcagaggcacagtggtgatgaaggacggcaaggtgatatttccagctcctacccctaagaatatcccccaaggcgcgcctgtgaagcagaaaaccgtggccgaactggaggcagaaaaggccgctacgatcaccccgttccgcaagactatgagcacagcctccgcctataccgcaggtttgactgggattctgggccttggcatagcagcgccaaatctggcatttagccagatggtgaccacattcgggctcgcaggcatcgtaggataccacaccgtttggggcgttacccccgctctgcacagccctctaatgtcagtgactaacgctatctctggccttaccgcagtcggcggcttggccctaatgggaggacacttgtacccaagcactacctcccagggactggccgccttagccgccttcatttcttcagtgaatatcgccggtggcttccttgtgacccaaaggatgctggacatgttcaaaaggcctaccgatccgcccgaatataactacctctatttactgccagccggcacgttcgttggcggttatctggcggcactctattccggatacaacattgagcagatcatgtatcttggctcaggactctgctgtgtcggtgcactggcaggactcagcactcagggcaccgcaaggctcggcaatgccctggggatgatcggtgtggcggggggcttggcagctactctaggagtgctgaaacccggtcctgagctgctggcacagatgtcaggcgcgatggcgctgggcggcaccatcggtttgactatagccaagcggatacagatctcagatctcccacaactcgtggccgcttttcacagtttggtcgggttggccgcagttctcacgtgtattgcggaatatataattgaatacccacatttcgctaccgatgccgccgcaaatttgaccaaaatcgttgcatatctcggcacttacatcggcggtgtcacattctctgggagccttatcgcatacggcaagctgcagggattgctcaaaagcgcaccacttcttctgcctggccgccatctgctcaatgcagggctgctggccgcctccgtgggcggcattatcccatttatggttgacccaagtttcaccactggcatcacttgcctgggttccgtttcggccttgtcagctgtaatgggagtgaccctgacagcagccattggtggggccgatatgcctgtagtgatcacagttctgaacagttattcaggttgggcgttgtgcgccgagggctttcttcttaacaataacctattgaccatcgttggcgctctgatcggaagtagcggcgccattttgtcatacataatgtgtgtcgccatgaacagaagccttgctaacgtcattctgggcgggtatggcactacatctaccgcaggcgggaagcctatggagatctctgggacacacacagaaattaacctggacaacgccatagatatgattcgtgaggctaactcaataattatcactccagggtacggtctgtgcgcggctaaggcgcaatatcccatcgctgaccttgttaaaatgctgaccgaacaaggaaagaaagtgcgcttcgggatccaccccgtggccggaaggatgccggggcagctgaacgtgctgctggcagaggccggagtaccctatgacatcgtactcgagatggacgagattaaccatgacttccccgatacagacttggttttggttatcggcgctaatgatacagtgaattcagctgcccaggaagatcccaattccatcatcgcaggaatgcctgtcctggaggtgtggaaatctaagcaggtaatagtgatgaaaagaagcctgggcgtcgggtacgccgcagtggacaatcccatcttctataagcccaacaccgccatgttactgggagacgccaaaaaaacttgtgacgctctgcaggcgaaagtgcgggagtcgtaccaaaagtag

SEQ ID NO: 302845 - DNA, 3261 bp, Artificial Sequence
  derived and/or modified sequence
atggccaacctgctgaagaccgtggtgaccggctgcagctgccccctgctgtctaatttaggtagctgtaagggactgagagtgaagaaagattttctgagaaccttttacacccaccaggaactgtggtgcaaggcacccgtcaagcccggaatcccgtacaagcagctgactgttggagtgcctaaagagatcttccagaacgagaaacgcgtggcgctcagccccgctggagtgcagaatttagtgaaacaggggtttaacgttgtcgtggaatcgggagctggcgaagcaagcaagtttagcgatgaccactaccgggtggcaggagctcaaatacagggagcaaaggaggtgctggcttcagacttggtagttaaagtgcgggcaccaatggtgaaccctaccctgggagtgcatgaagcagatttgctgaaaacaagcgggacactgattagcttcatctaccctgctcagaaccccgaactgctgaacaagctgagccagcgcaagactaccgtgctggccatggatcaggttcctcgcgttacaatagcacagggctacgatgcattatcatccatggctaatatcgcgggctataaggcagtcgttttggccgcgaatcactttggacgcttctttaccggacagatcactgccgccggcaaggttccccctgccaagattctgatcgtcggggggggagtcgccggcctcgccagtgctggcgccgccaaaagcatgggggccatcgtcagaggctttgacactagggcagcagccctcgagcaatttaagagcctgggtgccgaacccctggaagtggacctgaaggagtctggagaggggcaggggggatatgcaaaggaaatgtccaaagagtttatcgaagccgagatgaagctattcgcacagcagtgtaaagaggttgatattctgatctccactgcgctgatccccgggaaaaaggcacctgtactgtttaacaaagaaatgatcgagtcgatgaaagagggttctgtagtggtggacctggctgctgaggccggaggaaactttgagactactaaacctggggagttgtacatccacaaaggcattacccatatcggatatactgacctgccatctcggatggccacacaagcctccaccctttactccaataatattactaagctcctaaaggctatctctcccgacaaagataacttctacttcgacgtgaaggatgactttgacttcggaactatgggacatgtcatccgaggaactgtggtgatgaaggatggtaaagtgatcttccccgctccaacgcctaaaaatatcccacagggtgcacccgtcaagcagaaaactgtggctgagctagaggcagagaaggcagcaacgatcacgcccttcaggaaaactatgtctacagccagcgcctataccgcaggactaacaggtatcctgggtttgggaattgcggcccccaacctcgccttctcacagatggtcaccaccttcggcctggctgggatagtcggttatcacacagtatggggggtgactcccgccctgcattcccccctgatgtcagttactaacgctatatccgggctcacagcggttggtgggctcgccttaatgggtggccatctttacccctccacaactagccaagggctcgccgctttggcagcatttatttccagtgtgaacattgccgggggcttcctggtaacccagcgaatgctcgatatgttcaagagaccaacagacccccccgagtacaactacctgtacttgctcccggctggaacctttgtcggcggatatctagctgccctctattctgggtataacatcgagcagatcatgtacttagggagcgggctgtgttgtgtgggggcccttgcgggactgtccactcagggaacggctaggctcggaaatgcattaggtatgatcggcgtggccggcggcttagctgcgaccctcggcgtacttaagcccgggccagagctgctagctcagatgtcaggcgcaatggccctgggcggaaccatcggtttgaccatagctaaacgaatccaaatatccgacctgccacagctggtcgccgccttccactccttagtgggtctcgccgcagtgcttacatgtatcgcagagtatatcatcgaatatcctcatttcgcgacggacgcagccgctaatttgacaaagatagttgcctacctggggacatatattggaggcgttactttctccgggagtctgattgcatacggcaagctccagggcctgttaaaaagcgcccctctgctgctgcccggtagacatcttttaaacgcaggcctcctcgcggcctctgtgggcggcatcatcccctttatggtggacccatccttcactactggaatcacatgtctggggagtgttagcgccctctcagctgtaatgggagtgaccttaactgctgcaataggaggcgcagacatgcccgtcgtgattacagttctgaacagctactcaggctgggctctgtgcgctgaaggctttctgctcaataacaatttgctgaccatcgtcggcgcactaataggcagttcgggggccattctgtcttatataatgtgcgtggccatgaaccggtcactcgccaatgtcatcctaggggggtatgggaccactagcaccgcgggtggaaagcccatggaaatctctggcactcatacggaaattaatctggacaacgccattgacatgatccgcgaggctaatagcatcatcataacccctggttacggcctgtgtgccgcgaaggcccaatacccaattgccgatctggtgaagatgctgaccgagcagggaaaaaaggtcagatttggaattcatcctgtagcagggcgcatgcctggccagctgaacgtccttcttgccgaggcaggagtgccctacgacattgtactggagatggatgagataaatcatgactttccagacacagacttggtgttggtcataggcgcgaatgacacagttaactccgctgcacaggaagatcccaactcaataatcgctggtatgcccgtactggaggtttggaaatccaagcaggtaatcgtgatgaaaagatcattgggggtgggctatgcagcagttgataaccctatcttctataaacctaatacagctatgctgctgggtgatgcaaaaaagacttgcgatgcattgcaggctaaagttcgggagtcctatcagaagtag

SEQ ID NO: 302846 - DNA, 600 bp, Artificial Sequence
  derived and/or modified sequence
atggccaacctgctgaagaccgtggtgaccggctgcagctgccccttgctctcaaatcttggatcttgtaaaggcctgagggtcaagaaagacttcttgaggaccttctacacccaccaggaactgtggtgtaaggctccagtcaagccggggattccctataagcagctgacagtaggggttcctaaagagatctttcagaacgaaaagcgggtagccctgtctccggccggagtgcagaaccttgttaagcagggatttaacgtagtggtggaatctggggcaggcgaagcaagcaagtttagcgacgatcactatagggtcgccggtgcacagatacagggggctaaggaggtgcttgctagcgacctggttgtgaaggtgagagcccctatggtgaaccctaccttaggcgtgcacgaagccgacctgctgaagacctctgggaccctgatcagctttatttatcctgcccagaatccggagctcctgaataagctgtcacagcgaaagaccaccgtcctagcaatggaccaagtacccagagtcactatagcccaggggtacgacgccctgagttccatggccaatatcgcatag

SEQ ID NO: 302847 - DNA, 654 bp, Artificial Sequence
  derived and/or modified sequence
atggccaacctgctgaagaccgtggtgaccggctgcagctgccccctgttgtctaacctggggtcctgcaagggcctgcgagttaagaaggacttcctgagaacgttctacacgcatcaagaactgtggtgcaaggctccagttaagcctggaatcccttacaagcagctgacggtgggagtgcctaaagagatattccaaaacgagaagcgtgtggccctgtcccctgcaggcgtccaaaaccttgtgaagcagggattcaatgtcgttgtggagtccggggccggcgaggcttcaaagtttagtgacgaccattatcgggtggctggtgcacagatccagggagccaaagaagtcctggcctcggatctcgtggtcaaggtgagggcaccaatggtgaaccccactttgggggtgcacgaggcggacctcctcaaaacaagcggcacccttataagtttcatttaccccgcgcagaacccagagcttctcaataaactttctcagcggaaaactactgtcttggctatggatcaggtgccaagggtgacgatcgcccaggggtacgacgctctgtcctccatggctaacatagccggctataaggccgtggttctggccgccaatcatttcggaagatttttcactggttag

SEQ ID NO: 302848 - DNA, 6483 bp, Artificial Sequence
  derived and/or modified sequence
gatttttcctagcgagctggaggaaaggcaggtacccggagtggagttatattacctgtttctttgttctgatgggaccccagagaggacatcacgctttgtaactggttcttcaaggggagaagcaaatgtgtccctgaaaacttcagctgccgcgtttggcaccagtgatttgccttcaaggaaactggggagtcagaaaattgggaactcatatcaacatggcaaacctattgaaaacagtggtgactggctgctcgtgtcctctacttagcaatttggggtcctgtaagggtctacgtgtgaagaaggattttttacgaacattttatactcaccaagaactgtggtgtaaagcgcctgtaaaaccaggaattccatataagcaactgactgttggagtccccaaagagatattccaaaatgagaagcgagtggcattgtctcctgctggtgttcagaacttggtcaagcagggttttaatgttgtcgtggaatcgggtgcgggcgaagcttccaagttctcagatgatcactatagagtggcaggtgcccaaatccaaggggcaaaggaagtgctggcttctgatttggtggtcaaagtgcgagcccctatggttaatccaacattaggtgttcatgaagctgaccttttaaagacatcaggaacgctgattagttttatttacccagcccaaaatccagagttgctaaataaactttcccaaagaaaaactacagttctggcaatggaccaggttccaagagtcacaattgctcagggatatgatgcgctaagctccatggccaacattgcgggttataaggctgttgtcctagcagcaaatcattttggacgtttttttactggtcagatcacagctgctggaaaagttcctccagctaagattctgatagttggtggtggtgttgctgggcttgcttctgcaggcgcagcaaagtcgatgggtgcaattgttcgaggatttgacacaagagctgcagctttggaacagttcaagtctcttggtgctgagcccttggaggtggacttgaaggaatctggtgagggacaaggaggatatgcaaaagagatgtccaaagagttcattgaagctgaaatgaaactctttgctcaacaatgcaaggaggtagacatccttatcagcacagcacttattccaggtaaaaaagctccagttttatttaataaagaaatgattgagtcaatgaaggaaggttcagttgttgtggatttagctgctgaggctggtggaaactttgaaaccactaagccaggagaactctacattcataagggaattactcacataggctacacagacctgcccagccgaatggccactcaggccagcaccctatattccaacaacatcaccaaactcctgaaggccatcagcccggacaaagataatttttattttgatgtgaaagatgactttgactttggtacgatgggtcatgtcattagaggaactgtagtgatgaaagatggtaaagtgattttcccagctcccacaccgaaaaatattcctcaaggtgccccagtaaaacagaagacagtggctgagctggaagctgaaaaagcagctaccattacacccttcaggaagacaatgtcaacggcttctgcatatacagcaggtctcacagggatactgggtttgggcattgcggctcccaatctagccttttctcagatggtgaccacttttggcttggctggcattgtggggtatcataccgtctggggagtgacccctgctctccactcaccactgatgtctgtgacaaatgcaatctcagggctgactgcagttggtgggttggcactgatgggaggacatttgtatccttccacaacttctcagggccttgctgctcttgctgcattcatatcctctgtcaacattgcaggtggctttctggtgactcagagaatgctggacatgttcaagcgtcccactgaccccccagaatacaactacctgtacctgctccctgccggcacctttgttggtggatatttagctgccctctacagtggttataacattgaacagatcatgtacctaggctcgggtttgtgctgtgtcggtgccttggctggcctctccacccagggaacagcacgtcttggcaatgcactgggcatgattggggttgctggaggactggcagccaccctcggagtcctaaaaccgggcccagaattactagctcagatgtctggagcgatggctttgggtggtaccattggattgacaattgccaaacgcatccagatttctgatttacctcaattagttgctgcttttcacagtttagtgggtttggcagctgtacttacttgcatagctgagtacattatagaatatccacattttgctacggatgcagcagcaaatctcaccaagattgtggcctacctcggcacttacattggtggcgtcacctttagtgggtctctcattgcctatggaaaattgcagggtctcctgaaatctgcccctctcctactgcctggaaggcacttactcaatgcaggcttactggctgctagtgtgggcgggataatcccattcatggtggacccaagctttactactggcatcacctgtctgggttcagtgtctgctctctctgctgtcatgggtgtgactttgacagctgctattgggggtgctgacatgcccgtcgttatcactgtgctgaacagctactcaggctgggccctgtgtgcagagggcttcctgctcaacaacaatctgctgaccatcgtgggtgcactcataggctcgtctggtgctatcctgtcatacatcatgtgtgtggcaatgaatcgctccctggctaatgtgattcttggaggctatggcaccacttcaacagctggtggaaaacccatggaaatttctggcacacatacggaaatcaaccttgacaatgcaattgacatgattcgagaagctaatagcattattattacaccaggctatggtctctgtgcagccaaagctcaataccccattgctgatttggtaaagatgctcactgagcaaggcaaaaaagtcaggtttggaattcacccagttgcaggccgaatgcctggtcagcttaatgtgctgctggctgaggctggtgtgccatatgacattgtgttggaaatggatgagatcaaccatgattttccagatactgatttggtccttgtaattggagctaatgacactgttaattcagcagctcaagaagatcccaactctattattgcaggcatgccagtccttgaggtctggaaatcaaagcaggtgattgttatgaagaggtctttgggtgttggctatgctgcagtggacaatccaatcttctacaaacctaacacggccatgcttctaggtgatgccaagaaaacatgtgacgcgctccaggcgaaagttagagaatcctatcagaagtaaatattaaggatcaagctgttagctaataatgccacctctgcagttttgggaacaggcaaataaagtatcagtatacatggtgatgtacatctgtagcaaagctcttggagaaaatgaagactgaagaaagcaaagcaaaaactgtatagagagatttttcaaaagcagtaatccctcaattttaaaaaaggattgaaaattctaaatgtctttctgtgcatattttttgtgttaggaatcaaaagtattttataaaaggagaaagaacagcctcattttagatgtagtcctgttggattttttatgcctcctcagtaaccagaaatgttttaaaaaactaagtgtttaggatttcaagacaacattatacatggctctgaaatatctgacacaatgtaaacattgcaggcacctgcattttatgttttttttttcaacaaatgtgactaatttgaaacttttatgaacttctgagctgtccccttgcaattcaaccgcagtttgaattaatcatatcaaatcagttttaattttttaaattgtacttcagagtctatatttcaagggcacattttctcactactattttaatacattaaaggactaaataatctttcagagatgctggaaacaaatcatttgctttatatgtttcattagaataccaatgaaacatacaacttgaaaattagtaatagtatttttgaagatcccatttctaattggagatctctttaatttcgatcaacttataatgtgtagtactatattaagtgcacttgagtggaattcaacatttgactaataaaatgagttcatcatgttggcaagtgatgtggcaattatctctggtgacaaaagagtaaaatcaaatatttctgcctgttacaaatatcaaggaagacctgctactatgaaatagatgacattaatctgtcttcactgtttataatacggatggattttttttcaaatcagtgtgtgttttgaggtcttatgtaattgatgacatttgagagaaatggtggctttttttagctacctctttgttcatttaagcaccagtaaagatcatgtctttttatagaagtgtagattttctttgtgactttgctatcgtgcctaaagctctaaatataggtgaatgtgtgatgaatactcagattatttgtctctctatataattagtttggtactaagtttctcaaaaaattattaacacatgaaagacaatctctaaaccagaaaaagaagtagtacaaattttgttactgtaatgctcgcgtttagtgagtttaaaacacacagtatcttttggttttataatcagtttctattttgctgtgcctgagattaagatctgtgtatgtgtgtgtgtgtgtgtgtgcgtttgtgtgttaaagcagaaaagacttttttaaaagttttaagtgataaatgcaatttgttaattgatcttagatcactagtaaactcagggctgaattataccatgtatattctattagaagaaagtaaacaccatctttattcctgccctttttcttctctcaaagtagttgtagttatatctagaaagaagcaattttgatttcttgaaaaggtagttcctgcactcagtttaaactaaaaataatcatacttggattttatttatttttgtcatagtaaaaattttaatttatatatatttttatttagtattatcttattctttgctatttgccaatcctttgtcatcaattgtgttaaatgaattgaaaattcatgccctgttcattttattttactttattggttaggatatttaaaggatttttgtatatataatttcttaaattaatattccaaaaggttagtggacttagattataaattatggcaaaaatctaaaaacaacaaaaatgatttttatacattctatttcattattcctctttttccaataagtcatacaattggtagatatgacttattttatttttgtattattcactatatctttatgatatttaagtataaataattaaaaaaatttattgtaccttatagtctgtcaccaaaaaaaaaaaattatctgtaggtagtgaaatgctaatgttgatttgtctttaagggcttgttaactatcctttattttctcatttgtcttaaattaggagtttgtgtttaaattactcatctaagcaaaaaatgtatataaatcccattactgggtatatacccaaaggattataaatcatgctgctataaagacacatgcacacgtatgtttattgcagcactattcacaatagcaaagacttggaaccaacccaaatgtccatcaatgatagacttgattaagaaaatgtgcacatatacaccatggaatactatgcagccataaaaaaggatgagttcatgtcctttgtagggacatggataaagctggaaaccatcattctgagcaaactattgcaaggacagaaaaccaaacactgcatgttctcactcataggtgggaattgaacaatgagaacacttggacacaaggtggggaacaccacacaccagggcctgtcatggggtggggggagtggggagggatagcattaggagatatacctaatgtaaatgatgagttaatgggtgcagcacaccaacatggcacatgtatacatatgtagcaaacctgcacgttgtgcacatgtaccctagaacttaaagtataattaaaaaaaaaaagaaaacagaagctatttataaagaagttatttgctgaaataaatgtgatctttcccattaaaaaaataaagaaattttggggtaaaaaaacacaatatattgtattcttgaaaaattctaagagagtggatgtgaagtgttctcaccacaaaagtgataactaattgaggtaatgcacatattaattagaaagattttgtcattccacaatgtatatatacttaaaaatatgttatacacaataaatacatacattaaaaaataagtaaatgta

SEQ ID NO: 302849 - DNA, 4310 bp, Artificial Sequence
  derived and/or modified sequence
cgaggtgggagcggagctgcagtcacgtggccgcccgccgccgcggagttggggctgttcttccgggttggaggcgcagcgccgcggggcccaagcccgggtctgccagcgcgacgtcctctcgcggccctcagggcacagcccaaggctgtcagcctcccggcccagtgatttgccttcaaggaaactggggagtcagaaaattgggaactcatatcaacatggcaaacctattgaaaacagtggtgactggctgctcgtgtcctctacttagcaatttggggtcctgtaagggtctacgtgtgaagaaggattttttacgaacattttatactcaccaagaactgtggtgtaaagcgcctgtaaaaccaggaattccatataagcaactgactgttggagtccccaaagagatattccaaaatgagaagcgagtggcattgtctcctgctggtgttcagaacttggtcaagcagggttttaatgttgtcgtggaatcgggtgcgggcgaagcttccaagttctcagatgatcactatagagtggcaggtgcccaaatccaaggggcaaaggaagtgctggcttctgatttggtggtcaaagtgcgagcccctatggttaatccaacattaggtgttcatgaagctgaccttttaaagacatcaggaacgctgattagttttatttacccagcccaaaatccagagttgctaaataaactttcccaaagaaaaactacagttctggcaatggaccaggttccaagagtcacaattgctcagggatatgatgcgctaagctccatggccaacattgcgggttataaggctgttgtcctagcagcaaatcattttggacgtttttttactggtcagatcacagctgctggaaaagttcctccagctaagattctgatagttggtggtggtgttgctgggcttgcttctgcaggcgcagcaaagtcgatgggtgcaattgttcgaggatttgacacaagagctgcagctttggaacagttcaagtctcttggtgctgagcccttggaggtggacttgaaggaatctggtgagggacaaggaggatatgcaaaagagatgtccaaagagttcattgaagctgaaatgaaactctttgctcaacaatgcaaggaggtagacatccttatcagcacagcacttattccaggtaaaaaagctccagttttatttaataaagaaatgattgagtcaatgaaggaaggttcagttgttgtggatttagctgctgaggctggtggaaactttgaaaccactaagccaggagaactctacattcataagggaattactcacataggctacacagacctgcccagccgaatggccactcaggccagcaccctatattccaacaacatcaccaaactcctgaaggccatcagcccggacaaagataatttttattttgatgtgaaagatgactttgactttggtacgatgggtcatgtcattagaggaactgtagtgatgaaagatggtaaagtgattttcccagctcccacaccgaaaaatattcctcaaggtgccccagtaaaacagaagacagtggctgagctggaagctgaaaaagcagctaccattacacccttcaggaagacaatgtcaacggcttctgcatatacagcaggtctcacagggatactgggtttgggcattgcggctcccaatctagccttttctcagatggtgaccacttttggcttggctggcattgtggggtatcataccgtctggggagtgacccctgctctccactcaccactgatgtctgtgacaaatgcaatctcagggctgactgcagttggtgggttggcactgatgggaggacatttgtatccttccacaacttctcagggccttgctgctcttgctgcattcatatcctctgtcaacattgcaggtggctttctggtgactcagagaatgctggacatgttcaagcgtcccactgaccccccagaatacaactacctgtacctgctccctgccggcacctttgttggtggatatttagctgccctctacagtggttataacattgaacagatcatgtacctaggctcgggtttgtgctgtgtcggtgccttggctggcctctccacccagggaacagcacgtcttggcaatgcactgggcatgattggggttgctggaggactggcagccaccctcggagtcctaaaaccgggcccagaattactagctcagatgtctggagcgatggctttgggtggtaccattggattgacaattgccaaacgcatccagatttctgatttacctcaattagttgctgcttttcacagtttagtgggtttggcagctgtacttacttgcatagctgagtacattatagaatatccacattttgctacggatgcagcagcaaatctcaccaagattgtggcctacctcggcacttacattggtggcgtcacctttagtgggtctctcattgcctatggaaaattgcagggtctcctgaaatctgcccctctcctactgcctggaaggcacttactcaatgcaggcttactggctgctagtgtgggcgggataatcccattcatggtggacccaagctttactactggcatcacctgtctgggttcagtgtctgctctctctgctgtcatgggtgtgactttgacagctgctattgggggtgctgacatgcccgtcgttatcactgtgctgaacagctactcaggctgggccctgtgtgcagagggcttcctgctcaacaacaatctgctgaccatcgtgggtgcactcataggctcgtctggtgctatcctgtcatacatcatgtgtgtggcaatgaatcgctccctggctaatgtgattcttggaggctatggcaccacttcaacagctggtggaaaacccatggaaatttctggcacacatacggaaatcaaccttgacaatgcaattgacatgattcgagaagctaatagcattattattacaccaggctatggtctctgtgcagccaaagctcaataccccattgctgatttggtaaagatgctcactgagcaaggcaaaaaagtcaggtttggaattcacccagttgcaggccgaatgcctggtcagcttaatgtgctgctggctgaggctggtgtgccatatgacattgtgttggaaatggatgagatcaaccatgattttccagatactgatttggtccttgtaattggagctaatgacactgttaattcagcagctcaagaagatcccaactctattattgcaggcatgccagtccttgaggtctggaaatcaaagcaggtgattgttatgaagaggtctttgggtgttggctatgctgcagtggacaatccaatcttctacaaacctaacacggccatgcttctaggtgatgccaagaaaacatgtgacgcgctccaggcgaaagttagagaatcctatcagaagtaaatattaaggatcaagctgttagctaataatgccacctctgcagttttgggaacaggcaaataaagtatcagtatacatggtgatgtacatctgtagcaaagctcttggagaaaatgaagactgaagaaagcaaagcaaaaactgtatagagagatttttcaaaagcagtaatccctcaattttaaaaaaggattgaaaattctaaatgtctttctgtgcatattttttgtgttaggaatcaaaagtattttataaaaggagaaagaacagcctcattttagatgtagtcctgttggattttttatgcctcctcagtaaccagaaatgttttaaaaaactaagtgtttaggatttcaagacaacattatacatggctctgaaatatctgacacaatgtaaacattgcaggcacctgcattttatgttttttttttcaacaaatgtgactaatttgaaacttttatgaacttctgagctgtccccttgcaattcaaccgcagtttgaattaatcatatcaaatcagttttaattttttaaattgtacttcagagtctatatttcaagggcacattttctcactactattttaatacattaaaggactaaataatctttcagagatgctggaaacaaatcatttgctttatatgtttcattagaataccaatgaaacatacaacttgaaaattagtaatagtatttttgaagatcccatttctaattggagatctctttaatttcgatcaacttataatgtgtagtactatattaagtgcacttgagtggaattcaacatttgactaataaaatgagttcatcatgttggc

SEQ ID NO: 302850 - DNA, 707 bp, Artificial Sequence
  derived and/or modified sequence
cccttgggtcctctctgttacagaagttctgatttttcctagcgagctggaggaaagtgatttgccttcaaggaaactggggagtcagaaaattgggaactcatatcaacatggcaaacctattgaaaacagtggtgactggctgctcgtgtcctctacttagcaatttggggtcctgtaagggtctacgtgtgaagaaggattttttacgaacattttatactcaccaagaactgtggtgtaaagcgcctgtaaaaccaggaattccatataagcaactgactgttggagtccccaaagagatattccaaaatgagaagcgagtggcattgtctcctgctggtgttcagaacttggtcaagcagggttttaatgttgtcgtggaatcgggtgcgggcgaagcttccaagttctcagatgatcactatagagtggcaggtgcccaaatccaaggggcaaaggaagtgctggcttctgatttggtggtcaaagtgcgagcccctatggttaatccaacattaggtgttcatgaagctgaccttttaaagacatcaggaacgctgattagttttatttacccagcccaaaatccagagttgctaaataaactttcccaaagaaaaactacagttctggcaatggaccaggttccaagagtcacaattgctcagggatatgatgcgctaagctccatggccaacattgcg

SEQ ID NO: 302851 - DNA, 754 bp, Artificial Sequence
  derived and/or modified sequence
ctctgttacagaagttctgatttttcctagcgagctggaggaaaggcagtgatttgccttcaaggaaactggggagtcagaaaattgggaactcatatcaacatggcaaacctattgaaaacagtggtgactggctgctcgtgtcctctacttagcaatttggggtcctgtaagggtctacgtgtgaagaaggattttttacgaacattttatactcaccaagaactgtggtgtaaagcgcctgtaaaaccaggaattccatataagcaactgactgttggagtccccaaagagatattccaaaatgagaagcgagtggcattgtctcctgctggtgttcagaacttggtcaagcagggttttaatgttgtcgtggaatcgggtgcgggcgaagcttccaagttctcagatgatcactatagagtggcaggtgcccaaatccaaggggcaaaggaagtgctggcttctgatttggtggtcaaagtgcgagcccctatggttaatccaacattaggtgttcatgaagctgaccttttaaagacatcaggaacgctgattagttttatttacccagcccaaaatccagagttgctaaataaactttcccaaagaaaaactacagttctggcaatggaccaggttccaagagtcacaattgctcagggatatgatgcgctaagctccatggccaacattgcgggttataaggctgttgtcctagcagcaaatcattttggacgtttttttactggtc

SEQ ID NO: 302852 - DNA, 3261 bp, Artificial Sequence
  derived and/or modified sequence
atggctaacctcctgaagactgtggttaccggctgttcttgtcctttgctctctaatctcggatcatgtaaagggctgcgtgtcaagaaggatttcctgcgcactttttatactcatcaggagctgtggtgtaaggcccctgttaagccaggcatcccctacaagcagttgaccgtgggcgtgcccaaagaaatcttccagaacgagaagagagtcgcattaagtccagctggagtccagaaccttgtaaagcaggggtttaatgttgtggtcgagtcgggtgccggagaggccagcaagttcagcgacgaccattaccgcgtggcaggtgcccaaatacagggagcaaaagaagtgctggcctccgacttagtggtgaaggtgcgcgcacccatggtcaaccccaccctgggggttcatgaagcagacttgctgaagacgagtggcactctcatatcattcatataccctgcccagaatccggagctgctcaacaaacttagccagcgcaagaccaccgtgcttgccatggatcaggttccaagagtgacaatcgcacaagggtatgacgcattgtctagtatggccaatatcgccggatacaaggctgtggtactggccgctaaccattttggaaggttctttactgggcagatcacagctgccggaaaggtgccgcctgccaaaatactgatcgtcgggggtggggttgccggtcttgccagcgccggtgccgctaaatccatgggggcaatcgtcaggggttttgatacacgggctgcagccctagagcaattcaaatccctcggtgccgaaccgcttgaagtcgacctgaaggaatccggagaaggacagggtggttatgccaaagaaatgagtaaagaatttatcgaagctgagatgaagttattcgctcaacagtgcaaggaagtcgatatcctcataagcacagctttgattccagggaagaaagctcctgtgttgttcaacaaagaaatgatagaaagtatgaaagaggggagcgtggtggtggacctagctgccgaggcaggtgggaatttcgaaacgacaaagccaggtgaattgtatattcacaagggcatcacacatataggctacaccgatctacctagtcgtatggcgacacaggccagtacattatactccaataacattaccaaactactgaaagcaatcagcccagacaaagacaacttttacttcgatgttaaagatgacttcgactttggtacaatgggccatgtgatccgaggtaccgttgtgatgaaggatgggaaagtgatatttcccgctccaacaccaaagaatatccctcaaggtgctcctgtgaagcaaaagaccgtggccgagctggaagccgagaaggcagcaacaatcacccctttccgcaaaaccatgtctaccgccagcgcctataccgcagggctgaccggaatccttggactgggcatagcggcaccaaatcttgcattctcccagatggtgacgacctttggactggccggtatcgttggctaccatactgtatggggtgtgactccagctctgcacagccctctcatgtctgtgactaatgctatctctggactcactgccgtcggtggtttggctctgatgggcggtcacctgtatcctagcacgacttcacagggactggctgccctggctgcttttatcagttctgtgaacatcgcgggtgggtttctcgtgacacagcggatgcttgatatgtttaagcggccaacggatcccccagagtacaactacttgtacctgttacccgcaggcacatttgtcggagggtaccttgccgcattgtatagtggatacaatatcgagcaaataatgtatttaggcagcggactttgctgcgtaggcgctctggcgggtctatcgacacagggtactgctcgcctgggaaacgctctgggcatgattggtgtcgcgggtgggctggccgcaacccttggagtgctgaaaccgggtccggagttgctcgctcaaatgagcggggcaatggcactcgggggtactattggcctcaccatagctaagcgcatccagatcagcgacctgccccagttggtggccgcattccattctctggtggggctggccgctgtgctgacttgcatcgcggaatatattatcgagtatcctcatttcgcaactgacgccgctgctaacctgaccaaaattgtcgcttacctagggacttacattggtggcgttacgtttagcggatccctgatcgcctacggaaagttgcaggggctgttgaaaagcgcgccattgctactgcccggtcgccacttactaaatgccggactgcttgccgcttccgttggaggaatcataccattcatggtagacccgtcatttacgactgggatcacctgcttgggatccgtgagtgctctgtccgcagttatgggcgtgaccctgaccgccgctatcgggggtgcagacatgcccgtcgtaattaccgtacttaacagttacagcgggtgggctctgtgcgcagaagggtttcttctcaacaataatctgctcaccattgtcggcgctctgataggatcgtctggtgcgattcttagttatattatgtgtgtggccatgaacagatctctggcaaatgtgattcttggcggatatgggacgacctctacagcaggcggaaaaccaatggagatctctgggacccatacggagataaatctggataatgctatcgatatgatcagagaagccaactccattattatcacccccggttatggattatgtgccgctaaggctcagtaccctattgcagatctcgttaaaatgctcaccgagcaaggaaagaaggtaaggtttgggatccaccctgtggcgggacgtatgcccggacagctgaacgttctgctcgccgaggccggtgtaccatacgatatcgtgctggagatggatgaaattaatcacgacttcccagacacagacttggtcctggttataggagccaacgatacagtgaattctgccgctcaagaagatcctaatagtataatcgcaggaatgcccgtcctggaggtgtggaagagcaaacaggtcatagtgatgaagagaagcttgggcgtgggatatgctgctgtggataatccaatcttttataagcctaataccgctatgctgcttggcgacgcaaagaagacctgcgacgctcttcaggcaaaagtccgggaatcttaccagaaatag

SEQ ID NO: 302853 - DNA, 3261 bp, Artificial Sequence
  derived and/or modified sequence
atggccaacttacttaagactgtcgtaaccggctgctcctgtcccctcctgagtaacctgggctcttgcaagggcttgagggtcaagaaggacttcttaagaaccttttatactcatcaggagctgtggtgtaaagccccagtaaaacctgggattccttacaaacagcttactgttggggtaccaaaggagatcttccaaaatgagaaaagagtcgcactcagtccagccggagtgcaaaacctggtgaaacagggtttcaacgtggtcgtggagagcggagcaggagaagctagcaaatttagtgatgaccactatagggtggctggagcgcagatccagggtgctaaggaggtgctggccagcgatctggtggttaaagtgagggctcctatggtcaatcctacactgggggtgcacgaggctgacctgctcaaaacgtccggaacactcatttctttcatataccctgcccagaatccagagttactcaacaaactttcgcagcgcaagaccaccgtgttagccatggatcaagtccctcgggttactatcgcacagggatatgatgcccttagctctatggccaacatcgcaggttataaagcagtggttcttgctgctaatcactttgggaggttttttacaggacagattacagcagccggaaaagtccccccagccaaaatcttaatagtgggcggaggagtggcaggcctagcctcagcaggcgcagccaagagcatgggtgctattgtgagaggattcgacacacgggctgcggctctagagcagtttaagagtttaggcgcagagcccttagaggtggatctgaaggaaagtggggaaggccagggcggatacgccaaagagatgtccaaagagtttatcgaggccgagatgaaacttttcgcccagcaatgcaaggaagtcgacattctgatttcaaccgctctgatccccggaaagaaagctcctgttctgtttaacaaggaaatgattgagtcgatgaaggagggttctgtcgtggtggacctcgctgcagaagcgggtggtaattttgagactacgaagccgggagaactgtacatacacaaaggaatcacacacattggatatacagacttaccctctcgcatggcaacccaggcatccaccctgtactctaataacatcactaaactactcaaagccatctcaccggacaaggataacttctatttcgacgtgaaggacgactttgatttcggaacaatggggcacgtcattagagggaccgtggtcatgaaagatggcaaagtgatctttccagcacctacacccaagaatatcccccagggagccccagtgaaacaaaagaccgtggcagagctggaagccgagaaagctgccaccatcaccccgtttcggaagactatgagcaccgcgagcgcttatacagccggattaactggaatcctgggcttaggcatagcagctccaaacctggccttttctcagatggttacaacttttggactagccggaattgtcgggtaccataccgtatggggtgtcacgccagcccttcatagccccctcatgagtgtaaccaatgccatctcgggcctgaccgctgtgggaggcttggcgctgatgggtggacatctgtatccgagcacaacaagtcagggtctagctgcgctggctgccttcattagtagcgtcaatattgccggtggattcctcgtaactcagcggatgcttgatatgtttaagaggccgacggaccctcccgagtacaattacttgtacctcctgcctgctggcacgtttgtaggcggttatcttgccgctctgtactccggatacaatatcgagcaaatcatgtacctaggatcaggcctgtgttgtgtgggcgctcttgccggtttaagcacccagggaactgcgaggttagggaacgccctggggatgattggcgttgcaggcggtttagctgccacgttgggcgtccttaagcccggtccagagttacttgcacagatgagcggcgctatggcactgggcggaaccatcgggcttaccattgccaagcgtatccaaatctcagatcttcctcagctggtggctgcttttcattccctcgtaggtctcgccgctgtgctgacatgtattgctgagtacatcatagagtaccctcattttgctacagacgctgcagctaacctcaccaagatcgtcgcatatcttgggacttacattggaggggtcaccttttccggcagcctgattgcttatggaaagctgcagggcctgctgaaatcagctcccctgctgttgccagggagacacctactgaatgcaggactactagccgctagtgtgggtggtataatcccttttatggtcgatccgagcttcaccactggcatcacttgcttgggctccgtgagcgctctgtctgcagtcatgggtgtgacactcaccgccgcaatcggcggagcagatatgcccgttgtgatcacagtgctgaatagctacagcggatgggcactgtgcgcagaggggtttcttctcaacaacaatctgcttaccattgtcggtgcactgattggaagttcaggggctatcctgtcttatattatgtgcgtcgccatgaataggtcactagctaacgtaattctgggagggtacgggaccacctcaactgctggcggaaagccaatggagatcagcgggacccacaccgagatcaaccttgacaacgcgatcgatatgatccgtgaggctaattccatcatcatcacccctgggtatggcctctgtgccgctaaagctcagtatcccattgcggatttggtaaagatgctcacggagcagggaaagaaggtacggttcggtattcacccagtcgccggaagaatgccaggacagttgaatgtgctcctcgccgaagcaggagtcccgtacgatattgtgttggagatggacgagattaaccacgacttcccggatacagacctggtactcgtcatcggggctaacgatacagtcaactcggccgctcaggaggatccaaattccatcatcgccggaatgccggtcctcgaggtgtggaagagcaagcaggtaatagttatgaagaggagcttaggggttggatacgccgcagtggacaaccctatattttataaacccaacaccgccatgcttctgggagatgccaagaagacctgcgatgccctccaggccaaggttcgtgaatcttatcaaaaatag

SEQ ID NO: 302854 - DNA, 600 bp, Artificial Sequence
  derived and/or modified sequence
atggccaatctgctcaagacagtagttacaggttgtagttgccctctcctctcgaacctggggtcttgtaaaggcctccgggtgaaaaaagatttcctaaggactttctatacccaccaggaactctggtgcaaggctccagtgaagcccggaatcccttataagcagttaactgtgggggtgcccaaggagatcttccaaaacgaaaagagggtggcgctcagtcctgctggcgtacagaacctggtcaaacaggggttcaacgtggtcgtcgagtcgggggctggagaagcttcaaagttctccgacgaccactaccgggtggccggagctcagatacagggcgcaaaggaagtattggctagtgacctcgtagtgaaagtacgcgctccaatggttaatccgacattgggagtgcatgaggccgacctccttaagacttcaggcactctaataagttttatctatcccgctcaaaatcctgagcttctgaacaagctgtcacagcgtaagacaacagtgcttgctatggaccaggtcccacgagttacaattgctcaggggtatgacgctctgagttctatggcaaatatagcttag

SEQ ID NO: 302855 - DNA, 654 bp, Artificial Sequence
  derived and/or modified sequence
atggccaacttgctgaaaactgtcgttacagggtgctcttgtccactgctgagtaacctcggctcttgtaagggactgcgagtgaaaaaggattttctgcgaaccttttatactcaccaggagctttggtgtaaagcaccggtgaagcccggtatcccctataagcagctgaccgttggagtgcctaaggaaattttccagaatgagaagcgcgtcgcattgtcccctgcaggcgtgcaaaatttagtgaaacagggctttaatgttgtggtggaatctggggctggagaggcctctaagttttccgacgaccactaccgcgtcgctggcgcacagatacaaggagctaaagaagtccttgcctcagacttggttgtaaaggtcagggccccaatggtcaaccccactctcggagtgcatgaagccgatttgctgaaaaccagtgggacactgataagtttcatttatcccgctcagaaccctgagctgttaaataaactgagtcagagaaagacgacagttctggccatggaccaagtaccaagggtgactattgcccaagggtacgatgctctgtctagtatggccaatattgcagggtataaggctgtcgtcctggccgcaaaccacttcggcaggttctttactggttag

SEQ ID NO: 302856 - DNA, 3261 bp, Artificial Sequence
  derived and/or modified sequence
atggccaacctgctgaagaccgtggtgaccggctgcagctgccccctgctgagcaacctgggcagctgcaagggcctgagagtgaagaaggacttcctgagaaccttctacacccaccaggagctgtggtgcaaggcccccgtgaagcccggcatcccctacaagcagctgaccgtgggcgtgcccaaggagatcttccagaacgagaagagagtggccctgagccccgccggcgtgcagaacctggtgaagcagggcttcaacgtggtggtggagagcggcgccggcgaggccagcaagttcagcgacgaccactacagagtggccggcgcccagatccagggcgccaaggaggtgctggccagcgacctggtggtgaaggtgagagcccccatggtgaaccccaccctgggcgtgcacgaggccgacctgctgaagaccagcggcaccctgatcagcttcatctaccccgcccagaaccccgagctgctgaacaagctgagccagagaaagaccaccgtgctggccatggaccaggtgcccagagtgaccatcgcccagggctacgacgccctgagcagcatggccaacatcgccggctacaaggccgtggtgctggccgccaaccacttcggcagattcttcaccggccagatcaccgccgccggcaaggtgccccccgccaagatcctgatcgtgggcggcggcgtggccggcctggccagcgccggcgccgccaagagcatgggcgccatcgtgagaggcttcgacaccagagccgccgccctggagcagttcaagagcctgggcgccgagcccctggaggtggacctgaaggagagcggcgagggccagggcggctacgccaaggagatgagcaaggagttcatcgaggccgagatgaagctgttcgcccagcagtgcaaggaggtggacatcctgatcagcaccgccctgatccccggcaagaaggcccccgtgctgttcaacaaggagatgatcgagagcatgaaggagggcagcgtggtggtggacctggccgccgaggccggcggcaacttcgagaccaccaagcccggcgagctgtacatccacaagggcatcacccacatcggctacaccgacctgcccagcagaatggccacccaggccagcaccctgtacagcaacaacatcaccaagctgctgaaggccatcagccccgacaaggacaacttctacttcgacgtgaaggacgacttcgacttcggcaccatgggccacgtgatcagaggcaccgtggtgatgaaggacggcaaggtgatcttccccgcccccacccccaagaacatcccccagggcgcccccgtgaagcagaagaccgtggccgagctggaggccgagaaggccgccaccatcacccccttcagaaagaccatgagcaccgccagcgcctacaccgccggcctgaccggcatcctgggcctgggcatcgccgcccccaacctggccttcagccagatggtgaccaccttcggcctggccggcatcgtgggctaccacaccgtgtggggcgtgacccccgccctgcacagccccctgatgagcgtgaccaacgccatcagcggcctgaccgccgtgggcggcctggccctgatgggcggccacctgtaccccagcaccaccagccagggcctggccgccctggccgccttcatcagcagcgtgaacatcgccggcggcttcctggtgacccagagaatgctggacatgttcaagagacccaccgacccccccgagtacaactacctgtacctgctgcccgccggcaccttcgtgggcggctacctggccgccctgtacagcggctacaacatcgagcagatcatgtacctgggcagcggcctgtgctgcgtgggcgccctggccggcctgagcacccagggcaccgccagactgggcaacgccctgggcatgatcggcgtggccggcggcctggccgccaccctgggcgtgctgaagcccggccccgagctgctggcccagatgagcggcgccatggccctgggcggcaccatcggcctgaccatcgccaagagaatccagatcagcgacctgccccagctggtggccgccttccacagcctggtgggcctggccgccgtgctgacctgcatcgccgagtacatcatcgagtacccccacttcgccaccgacgccgccgccaacctgaccaagatcgtggcctacctgggcacctacatcggcggcgtgaccttcagcggcagcctgatcgcctacggcaagctgcagggcctgctgaagagcgcccccctgctgctgcccggcagacacctgctgaacgccggcctgctggccgccagcgtgggcggcatcatccccttcatggtggaccccagcttcaccaccggcatcacctgcctgggcagcgtgagcgccctgagcgccgtgatgggcgtgaccctgaccgccgccatcggcggcgccgacatgcccgtggtgatcaccgtgctgaacagctacagcggctgggccctgtgcgccgagggcttcctgctgaacaacaacctgctgaccatcgtgggcgccctgatcggcagcagcggcgccatcctgagctacatcatgtgcgtggccatgaacagaagcctggccaacgtgatcctgggcggctacggcaccaccagcaccgccggcggcaagcccatggagatcagcggcacccacaccgagatcaacctggacaacgccatcgacatgatcagagaggccaacagcatcatcatcacccccggctacggcctgtgcgccgccaaggcccagtaccccatcgccgacctggtgaagatgctgaccgagcagggcaagaaggtgagattcggcatccaccccgtggccggcagaatgcccggccagctgaacgtgctgctggccgaggccggcgtgccctacgacatcgtgctggagatggacgagatcaaccacgacttccccgacaccgacctggtgctggtgatcggcgccaacgacaccgtgaacagcgccgcccaggaggaccccaacagcatcatcgccggcatgcccgtgctggaggtgtggaagagcaagcaggtgatcgtgatgaagagaagcctgggcgtgggctacgccgccgtggacaaccccatcttctacaagcccaacaccgccatgctgctgggcgacgccaagaagacctgcgacgccctgcaggccaaggtgagagagagctaccagaagtag

SEQ ID NO: 302857 - DNA, 600 bp, Artificial Sequence
  derived and/or modified sequence
atggccaacctgctgaagaccgtggtgaccggctgcagctgccccctgctgagcaacctgggcagctgcaagggcctgagagtgaagaaggacttcctgagaaccttctacacccaccaggagctgtggtgcaaggcccccgtgaagcccggcatcccctacaagcagctgaccgtgggcgtgcccaaggagatcttccagaacgagaagagagtggccctgagccccgccggcgtgcagaacctggtgaagcagggcttcaacgtggtggtggagagcggcgccggcgaggccagcaagttcagcgacgaccactacagagtggccggcgcccagatccagggcgccaaggaggtgctggccagcgacctggtggtgaaggtgagagcccccatggtgaaccccaccctgggcgtgcacgaggccgacctgctgaagaccagcggcaccctgatcagcttcatctaccccgcccagaaccccgagctgctgaacaagctgagccagagaaagaccaccgtgctggccatggaccaggtgcccagagtgaccatcgcccagggctacgacgccctgagcagcatggccaacatcgcctag

SEQ ID NO: 302858 - DNA, 654 bp, Artificial Sequence
  derived and/or modified sequence
atggccaacctgctgaagaccgtggtgaccggctgcagctgccccctgctgagcaacctgggcagctgcaagggcctgagagtgaagaaggacttcctgagaaccttctacacccaccaggagctgtggtgcaaggcccccgtgaagcccggcatcccctacaagcagctgaccgtgggcgtgcccaaggagatcttccagaacgagaagagagtggccctgagccccgccggcgtgcagaacctggtgaagcagggcttcaacgtggtggtggagagcggcgccggcgaggccagcaagttcagcgacgaccactacagagtggccggcgcccagatccagggcgccaaggaggtgctggccagcgacctggtggtgaaggtgagagcccccatggtgaaccccaccctgggcgtgcacgaggccgacctgctgaagaccagcggcaccctgatcagcttcatctaccccgcccagaaccccgagctgctgaacaagctgagccagagaaagaccaccgtgctggccatggaccaggtgcccagagtgaccatcgcccagggctacgacgccctgagcagcatggccaacatcgccggctacaaggccgtggtgctggccgccaaccacttcggcagattcttcaccggctag

SEQ ID NO: 302859 - protein, 783 aa, Artificial Sequence
  derived and/or modified sequence
MAKYNTGGNPTEDVSVNSRPFRVTGPNSSSGIQARKNLFNNQGNASPPAGPSNVPKFGSPKPPVAVKPSSEEKPDKEPKPPFLKPTGAGQRFGTPASLTTRDPEAKVGFLKPVGPKPINLPKEDSKPTFPWPPGNKPSLHSVNQDHDLKPLGPKSGPTPPTSENEQKQAFPKLTGVKGKFMSASQDLEPKPLFPKPAFGQKPPLSTENSHEDESPMKNVSSSKGSPAPLGVRSKSGPLKPAREDSENKDHAGEISSLPFPGVVLKPAASRGGPGLSKNGEEKKEDRKIDAAKNTFQSKINQEELASGTPPARFPKAPSKLTVGGPWGQSQEKEKGDKNSATPKQKPLPPLFTLGPPPPKPNRPPNVDLTKFHKTSSGNSTSKGQTSYSTTSLPPPPPSHPASQPPLPASHPSQPPVPSLPPRNIKPPFDLKSPVNEDNQDGVTHSDGAGNLDEEQDSEGETYEDIEASKEREKKREKEEKKRLELEKKEQKEKEKKEQEIKKKFKLTGPIQVIHLAKACCDVKGGKNELSFKQGEQIEIIRITDNPEGKWLGRTARGSYGYIKTTAVEIDYDSLKLKKDSLGAPSRPIEDDQEVYDDVAEQDDISSHSQSGSGGIFPPPPDDDIYDGIEEEDADDGFPAPPKQLDMGDEVYDDVDTSDFPVSSAEMSQGTNVGKAKTEEKDLKKLKKQEKEEKDFRKKFKYDGEIRVLYSTKVTTSITSKKWGTRDLQVKPGESLEVIQTTDDTKVLCRNEEGKYGYVLRSYLADNDGEIYDDIADGCIYDND

SEQ ID NO: 302860 - DNA, 4750 bp, Artificial Sequence
  derived and/or modified sequence
accactgaccgggacaaaaccctgccaggcatcagaaagctccgcagttcttgagttccacatgcagagcagatgcgacagctagaagtgagtagggcccagaccctggcccaggaagatccactaaaggaggccatccttccgccttcttctgcaggagtcaggatggaaaggcagatgtaaagtccctcatggcgaaatataacacggggggcaacccgacagaggatgtctcagtcaatagccgacccttcagagtcacagggccaaactcatcttcaggaatacaagcaagaaagaacttattcaacaaccaaggaaatgccagccctcctgcaggacccagcaatgtacctaagtttgggtccccaaagccacctgtggcagtcaaaccttcttctgaggaaaagcctgacaaggaacccaagcccccgtttctaaagcccactggagcaggccaaagattcggaacaccagccagcttgaccaccagagaccccgaggcgaaagtgggatttctgaaacctgtaggccccaagcccatcaacttgcccaaagaagattccaaacctacatttccctggcctcctggaaacaagccatctcttcacagtgtaaaccaagaccatgacttaaagccactaggcccgaaatctgggcctactcctccaacctcagaaaatgaacagaagcaagcgtttcccaaattgactggggttaaagggaaatttatgtcagcatcacaagatcttgaacccaagcccctcttccccaaacccgcctttggccagaagccgcccctaagtaccgagaactcccatgaagacgaaagccccatgaagaatgtgtcttcatcaaaagggtccccagctcccctgggagtcaggtccaaaagcggccctttaaaaccagcaagggaagactcagaaaataaagaccatgcaggggagatttcaagtttgccctttcctggagtggttttgaaacctgctgcgagcaggggaggcccaggtctctccaaaaatggtgaagaaaaaaaggaagataggaagatagatgctgctaagaacaccttccagagcaaaataaatcaggaagagttggcctcagggactcctcctgccaggttccctaaggccccttctaagctgacagtgggggggccatggggccaaagtcaggaaaaggaaaagggagacaagaattcagccaccccgaaacagaagccattgcctcccttgtttaccttgggtccacctccaccaaaacccaacagaccaccaaatgttgacctgacgaaattccacaaaacctcttctggaaacagtactagcaaaggccagacgtcttactcaacaacttccctgccaccacctccaccatcccatccggccagccaaccaccattgccagcatctcacccatcacaaccaccagtcccaagcctacctcccagaaacattaaacctccgtttgacctaaaaagccctgtcaatgaagacaatcaagatggtgtcacgcactctgatggtgctggaaatctagatgaggaacaagacagtgaaggagaaacatatgaagacatagaagcatccaaagaaagagagaagaaaagggaaaaggaagaaaagaagaggttagagctggagaaaaaggaacagaaagagaaagaaaagaaagaacaagaaataaagaagaaatttaaactaacaggccctattcaagtcatccatcttgcaaaagcttgttgtgatgtcaaaggaggaaagaatgaactgagcttcaagcaaggagagcaaattgaaatcatccgcatcacagacaacccagaaggaaaatggttgggcagaacagcaaggggttcatatggctatattaaaacaactgctgtagagattgactatgattctttgaaactgaaaaaagactctcttggtgccccttcaagacctattgaagatgaccaagaagtatatgatgatgttgcagagcaggatgatattagcagccacagtcagagtggaagtggagggatattccctccaccaccagatgatgacatttatgatgggattgaagaggaagatgctgatgatggtttccctgctcctcctaaacaattggacatgggagatgaagtttacgatgatgtggatacctctgatttccctgtttcatcagcagagatgagtcaaggaactaatgttggaaaagctaagacagaagaaaaggaccttaagaagctaaaaaagcaggaaaaagaagaaaaagacttcaggaaaaaatttaaatatgatggtgaaattagagtcctatattcaactaaagttacaacttccataacttctaaaaagtggggaaccagagatctacaggtaaaacctggtgaatctctagaagttatacaaaccacagatgacacaaaagttctctgcagaaatgaagaagggaaatatggttatgtccttcggagttacctagcggacaatgatggagagatctatgatgatattgctgatggctgcatctatgacaatgactagcactcaactttggtcattctgctgtgttcattaggtgccaatgtgaagtctggattttaattggcatgttattgggtatcaagaaaattaatgcacaaaaccacttattatcatttgttatgaaatcccaattatctttacaaagtgtttaaagtttgaacatagaaaataatctctctgcttaattgttaactcagaagactacattagtgagatgtaagaattattaaatattccatttccgctttggctacaattatgaagaagttgaaggtacttcttttagaccaccagtaaataatcctccttcaaaaaataaaaataaaagaaaaaggaaaatcattcaggaagaaatgacctgtctaaaaaaacctaaggaagaataataatataagaaaggaaatttaaaaacattccacaagaagaaaaattattgtttatacttctacttatggttatatcttatattctctattcaagtgacctgtcttttaaaaaggcagtgctgtcttacctcttgctagtgggttaaatgttttcaaaaattatagcagtagtagaagttttgtataaaatttgtccttatttgttaattgtatataaatgttaattatttgatacgaatgttatgcatttagtatgcacattgaagtctaaactgtagaagagtctaaaacaagttctctttttgcagattcacatactaatggtttaattctgtgctctgtttaaagtactattataactagagtagatctgaatgaggataaccctaaaatcatgaggaatggaagaatggaccttgaaactacctaggcttttatgcatggcacctctttataatgaagacactttttaaagtttttgtttttgtttcaattaccgctagatttttttttctctttttttaaaatccattttactggaaagttggccagcagagggagtagaaattattaaaattctagtgtttggattgggcccttctctaacagtacatactcattcccaaagcaatccaaaaacaaaatgtgaaccatttgggtttcaaatgttaagaacactaaatagcatgatttaaaaaatgaaaaatgctaacacccaagaaaagaagatattaagtgctttttaacaactcctagagtacaaaatgagtacatcataatgctggctcttctactaatgaaccatcgagtgatattgaataaattatttatcttctcagtttccttatctgtaaattacaatattagactaagtaagtttttccaactcttcactaccaattaccttaggcttttataatgctccgcctacttcagtcccatgtttcagaagcttttgtctattttttaaactcattgattaaataatgattaatgcattctccacattttaatattgcaaaggcccattggagtttctgaagtggctccacagaattgaaataatttcaaataactgtaaaggaactgaaaatcttcacagagatgaagtggggtttccattaggtgctttgaaatttgataacaaatcatcaacttccactggtcaatatatagattttgggtgtctgaggccccaagattagatgccactaatctccaaagattccctccaattatgaaatattttaatgtctacttttagagagcactagccagtatatgaccatgtgattaatttcttttcacactagataaaattacctggttcaaaagtggtttttgtttattaaatttggtaataaatatatataatacacagacaggatagtttttatgctgaagtttttggccagctttagtttgaggactccttgataagcttgctaaactttcagagtgccctgagacacttccagccatccctcctcctgccttcattggggcagacttgcattgcagtctgacagtaattttttttctgattgagaattatgtaaattcagtacaatgtcagtttttaaaagtcaaagttagatcaagagaatatttcagagttttggtttacacatcaagaaacagacacacatacctaggaaagatttacacaatagataatcatcttaatgtgaaagatatttgaagtattaattttaatatattaaatatgatttctgttatagtcttctgtatggaattttgtcacttaagatgagctgcaaataaataataccttcaatggataaccttgcctcctacttc

SEQ ID NO: 302861 - DNA, 2578 bp, Artificial Sequence
  derived and/or modified sequence
cttttgtctctcagctattttttgttccctatgtttgtaggatggaaaggcagatgtaaagtccctcatggcgaaatataacacggggggcaacccgacagaggatgtctcagtcaatagccgacccttcagagtcacagggccaaactcatcttcaggaatacaagcaagaaagaacttattcaacaaccaaggaaatgccagccctcctgcaggacccagcaatgtacctaagtttgggtccccaaagccacctgtggcagtcaaaccttcttctgaggaaaagcctgacaaggaacccaagcccccgtttctaaagcccactggagcaggccaaagattcggaacaccagccagcttgaccaccagagaccccgaggcgaaagtgggatttctgaaacctgtaggccccaagcccatcaacttgcccaaagaagattccaaacctacatttccctggcctcctggaaacaagccatctcttcacagtgtaaaccaagaccatgacttaaagccactaggcccgaaatctgggcctactcctccaacctcagaaaatgaacagaagcaagcgtttcccaaattgactggggttaaagggaaatttatgtcagcatcacaagatcttgaacccaagcccctcttccccaaacccgcctttggccagaagccgcccctaagtaccgagaactcccatgaagacgaaagccccatgaagaatgtgtcttcatcaaaagggtccccagctcccctgggagtcaggtccaaaagcggccctttaaaaccagcaagggaagactcagaaaataaagaccatgcaggggagatttcaagtttgccctttcctggagtggttttgaaacctgctgcgagcaggggaggcccaggtctctccaaaaatggtgaagaaaaaaaggaagataggaagatagatgctgctaagaacaccttccagagcaaaataaatcaggaagagttggcctcagggactcctcctgccaggttccctaaggccccttctaagctgacagtgggggggccatggggccaaagtcaggaaaaggaaaagggagacaagaattcagccaccccgaaacagaagccattgcctcccttgtttaccttgggtccacctccaccaaaacccaacagaccaccaaatgttgacctgacgaaattccacaaaacctcttctggaaacagtactagcaaaggccagacgtcttactcaacaacttccctgccaccacctccaccatcccatccggccagccaaccaccattgccagcatctcacccatcacaaccaccagtcccaagcctacctcccagaaacattaaacctccgtttgacctaaaaagccctgtcaatgaagacaatcaagatggtgtcacgcactctgatggtgctggaaatctagatgaggaacaagacagtgaaggagaaacatatgaagacatagaagcatccaaagaaagagagaagaaaagggaaaaggaagaaaagaagaggttagagctggagaaaaaggaacagaaagagaaagaaaagaaagaacaagaaataaagaagaaatttaaactaacaggccctattcaagtcatccatcttgcaaaagcttgttgtgatgtcaaaggaggaaagaatgaactgagcttcaagcaaggagagcaaattgaaatcatccgcatcacagacaacccagaaggaaaatggttgggcagaacagcaaggggttcatatggctatattaaaacaactgctgtagagattgactatgattctttgaaactgaaaaaagactctcttggtgccccttcaagacctattgaagatgaccaagaagtatatgatgatgttgcagagcaggatgatattagcagccacagtcagagtggaagtggagggatattccctccaccaccagatgatgacatttatgatgggattgaagaggaagatgctgatgatggtttccctgctcctcctaaacaattggacatgggagatgaagtttacgatgatgtggatacctctgatttccctgtttcatcagcagagatgagtcaaggaactaatgttggaaaagctaagacagaagaaaaggaccttaagaagctaaaaaagcaggaaaaagaagaaaaagacttcaggaaaaaatttaaatatgatggtgaaattagagtcctatattcaactaaagttacaacttccataacttctaaaaagtggggaaccagagatctacaggtaaaacctggtgaatctctagaagttatacaaaccacagatgacacaaaagttctctgcagaaatgaagaagggaaatatggttatgtccttcggagttacctagcggacaatgatggagagatctatgatgatattgctgatggctgcatctatgacaatgactagcactcaactttggtcattctgctgtgttcattaggtgccaatgtgaagtctggattttaattggcatgttattgggtatcaagaaaattaatgcacaaaaccacttattatcatttgttatgaaatcccaattatctttacaaagtgtttaaagtttga

SEQ ID NO: 302862 - protein, 21 aa, Artificial Sequence
  derived and/or modified sequence
MAKYNTGGNPTEDVSVNSRPF

SEQ ID NO: 302863 - protein, 22 aa, Artificial Sequence
  derived and/or modified sequence
MAKYNTGGNPTEDVSVNSRPFR

SEQ ID NO: 302864 - protein, 747 aa, Artificial Sequence
  derived and/or modified sequence
MAKYNTGGNPTEDVSVNSRPFRVTGPNSSSGIQARKNLFNNQGNASPPAGPSNVPKFGSPKPPVAVKPSSEEKPDKEPKPPFLKPTGAGQRFGTPASLTTRDPEAKVGFLKPVGPKPINLPKEDSKPTFPWPPGNKPSLHSVNQDHDLKPLGPKSGPTPPTSENEQKQAFPKLTGVKGKFMSASQDLEPKPLFPKPAFGQKPPLSTENSHEDESPMKNVSSSKGSPAPLGVRSKSGPLKPAREDSENKDHAGEISSLPFPGVVLKPAASRGGPGLSKNGEEKKEDRKIDAAKNTFQSKINQEELASGTPPARFPKAPSKLTVGGPWGQSQEKEKGDKNSATPKQKPLPPLFTLGPPPPKPNRPPNVDLTKFHKTSSGNSTSKGQTSYSTTSLPPPPPSHPASQPPLPASHPSQPPVPSLPPRNIKPPFDLKSPVNEDNQDGVTHSDVVIPLDHEQDSEGETYEDIEASKEREKKREKEEKKRLELEKKEQKEKEKKEQEIKKKFKLTGPIQVIHLAKACCDVKGGKNELSFKQGEQIEIIRITDNPEGKWLGRTARGSYGYIKTTAVEIDYDSLKLKKDSLGAPSRPIEDDQEVYDDVAEQDDISSHSQSGSGGIFPPPPDDDIYDGIEEEDADDGSTLQVQEKSNTWSWGILKMLKGKDDRKKSIREKPKVSDSDNNEGSSFPAPPKQLDMGDEVYDDVDTSDFPVSSAEMSQGTNVGKAKTEEKDLKKLKKQEKEEKDFRKKFKK

SEQ ID NO: 302865 - DNA, 525 bp, Artificial Sequence
  derived and/or modified sequence
atggccaagtacaacaccggcggcaaccccaccgaggacgtgagcgtgaacagcagacccttcagagtgaccggccccaacagcagcagcggcatccaggccagaaagaacctgttcaacaaccagggcaacgccagcccccccgccggccccagcaacgtgcccaagttcggcagccccaagccccccgtggccgtgaagcccagcagcgaggagaagcccgacaaggagcccaagccccccttcctgaagcccaccggcgccggccagagattcggcacccccgccagcctgaccaccagagaccccgaggccaaggtgggcttcctgaagcccgtgggccccaagcccatcaacctgcccaaggaggacagcaagcccaccttcccctggccccccggcaacaagcccagcctgcacagcgtgaaccaggaccacgacctgaagcccctgggccccaagagcggccccaccccccccaccagcgagaacgagcagaagcaggccttccccaagctgacctag

SEQ ID NO: 302866 - DNA, 348 bp, Artificial Sequence
  derived and/or modified sequence
atggccaagtacaacaccggcggcaaccccaccgaggacgtgagcgtgaacagcagacccttcagagtgaccggccccaacagcagcagcggcatccaggccagaaagaacctgttcaacaaccagggcaacgccagcccccccgccggccccagcaacgtgcccaagttcggcagccccaagccccccgtggccgtgaagcccagcagcgaggagaagcccgacaaggagcccaagccccccttcctgaagcccaccggcgccggccagagattcggcacccccgccagcctgaccaccagagaccccgaggccaaggtgggcttcctgaagcccgtgggcccctag

SEQ ID NO: 302867 - DNA, 525 bp, Artificial Sequence
  derived and/or modified sequence
atggccaagtataacacaggaggtaatcctaccgaagacgtcagcgtgaattcccgaccctttcgcgtgaccggacctaactcttctagcgggattcaggccagaaagaatctgtttaataatcaaggtaatgccagtccccctgcaggcccctccaacgtgcctaagtttgggtcaccaaaacctcctgtcgctgtgaaaccgagttcagaggagaaacctgacaaagagcccaaaccaccatttctcaagccgaccggcgctggccagagatttggcacaccggcgtcactgaccactcgggatcccgaggctaaagtaggtttcctcaaaccagttggccccaaacctataaacctgcctaaggaagacagcaagcccaccttcccatggccccctggtaacaaaccaagtttacacagcgtcaaccaagatcatgatttgaaacccttggggccaaagagcggaccaacccccccaaccagcgaaaacgagcagaaacaggctttccctaaacttacttag

SEQ ID NO: 302868 - DNA, 348 bp, Artificial Sequence
  derived and/or modified sequence
atggccaaatacaatacgggaggcaatcccactgaggatgtttccgtgaactcaagaccgtttagagtcactggtcctaactcttcctcaggaattcaggcacgcaagaaccttttcaataatcaggggaacgcgtccccaccggccggtccctccaatgtcccaaaattcgggtccccaaagccccccgtggccgttaagccctccagcgaggagaagccagacaaggagcctaaacctccttttctgaagcccacaggtgcaggacagcggtttggcacccccgcaagcctgaccacccgggaccccgaagctaaggtcgggttcctgaaacccgtggggccgtag

SEQ ID NO: 302869 - DNA, 525 bp, Artificial Sequence
  derived and/or modified sequence
atggccaagtacaacacaggaggcaaccccacagaagatgtgtctgtgaacagccggcccttccgggtgacaggccccaacagcagcagcggcatccaggccaggaagaacctcttcaacaaccagggcaatgccagccccccagctggccccagcaatgtgcccaagtttggcagccccaagccccctgtggccgtgaagcccagcagcgaggagaagccagacaaggagcccaagccacccttcctgaagcccaccggggccggccagcgcttcggcaccccagccagcctgaccacccgggaccctgaggccaaggtgggcttcctgaagcctgtgggccccaagcccatcaacctgcccaaggaggacagcaagcccaccttcccctggcccccaggcaacaagcccagcctgcacagcgtgaaccaggaccatgacctgaagcccctgggccccaagagcggccccaccccacccaccagtgaaaatgagcagaagcaggccttccccaagctgacctag

SEQ ID NO: 302870 - DNA, 348 bp, Artificial Sequence
  derived and/or modified sequence
atggccaagtacaacacaggaggcaaccccacagaagatgtgtctgtgaacagccggcccttccgggtgacaggccccaacagcagcagcggcatccaggccaggaagaacctcttcaacaaccagggcaatgccagccccccagctggccccagcaatgtgcccaagtttggcagccccaagccccctgtggccgtgaagcccagcagcgaggagaagccagacaaggagcccaagccacccttcctgaagcccaccggggccggccagcgcttcggcaccccagccagcctgaccacccgggaccctgaggccaaggtgggcttcctgaagcctgtgggcccctag

SEQ ID NO: 302871 - DNA, 525 bp, Artificial Sequence
  derived and/or modified sequence
atggccaagtacaacaccggcggcaaccccaccgaggacgtgagcgtgaactcccgcccattcagagtcacggggccaaacagcagctctgggatccaggccagaaagaatctatttaacaatcagggaaatgcttcacctccagctggcccatcaaacgttccaaagtttggatcccctaaacctcccgtggctgtcaaaccttcttccgaagaaaagcccgacaaagaaccgaaacctccatttctgaagcctaccggcgccggccagagatttgggacaccagctagtctcacaactcgggaccccgaggccaaagtgggcttcctaaaacctgtgggtccaaagcccattaacctgcctaaagaggatagtaagccaacctttccttggccccctggcaataagccctctcttcactccgtaaaccaggaccatgatctgaagcctctgggcccaaaatccggtcctacaccacccacatctgagaatgaacaaaaacaggcatttcccaaactgacatag

SEQ ID NO: 302872 - DNA, 348 bp, Artificial Sequence
  derived and/or modified sequence
atggccaagtacaacaccggcggcaaccccaccgaggacgtgagcgtgaacagccggcctttccgggtgacgggacccaatagctccagtggtatacaagccagaaagaacttatttaataaccagggtaatgcttccccgcctgctgggcctagtaacgtgcccaaattcggctctcccaagccgcctgttgccgtcaagccaagcagtgaggagaagcccgataaggagccaaagcccccattcctcaagccaaccggcgccgggcagcgttttggaactccagcatctctgaccacaagagatcccgaggccaaggtggggtttcttaagcctgtaggaccctag

SEQ ID NO: 302873 - DNA, 525 bp, Artificial Sequence
  derived and/or modified sequence
atggcaaagtataatactggcggtaatcctacagaagacgttagtgtaaattccagaccgttccgcgtcacgggacccaattcaagcagcggaatacaggctagaaaaaatctattcaataaccagggcaatgccagcccccctgccggtccttctaatgtgcccaagttcggtagccctaagccccctgtggctgtcaagcccagctcagaagagaagccggacaaagagcccaagccccctttcctcaagcctactggcgctggccagcgctttgggactcctgcgtctttgaccacaagggatcccgaggcgaaggtggggtttctgaaacccgtgggtcctaagcccatcaatctgccgaaagaggattcaaaaccaacattcccgtggcccccaggaaacaaacctagtctgcacagcgtcaatcaagaccacgatctgaagcctcttggcccaaagtccggaccaacaccacccacatctgagaatgagcagaagcaggcatttcccaagctgacctag

SEQ ID NO: 302874 - DNA, 348 bp, Artificial Sequence
  derived and/or modified sequence
atggccaagtacaacactggtgggaatccaactgaggatgtgtcagtgaactctaggccattccgcgttactggaccgaacagcagtagcgggattcaggcccgtaagaatttatttaacaatcagggcaatgcaagcccaccagcaggtccctcgaacgttcctaaatttgggtcgcctaagcccccagttgcggttaagcccagctcagaggaaaagccggacaaggagccaaagcctccttttctgaagcccaccggcgcaggccagagattcggaacccccgcatcactcaccacgcgggacccggaagcaaaagtcggctttcttaaacccgtgggaccgtag

SEQ ID NO: 302875 - DNA, 688 bp, Artificial Sequence
  derived and/or modified sequence
atcagaaagctccgcagttcttgagttccacatgcagagcagatgcgacagctagaagtgagtagggcccagaccctggcccaggaagatccactaaaggaggccatccttccgccttcttctgcaggagtcagggggcgtgtaaaggtgatttgttcgccaagaaaagcacttttagtaaagcacagatgttaatctagatcatggaaaagtgccacacactagatttagcacataagcaaggagtctctagaacactcagaagaaaatgaatgaatccatgaatgaatggacaagtgagagcccagagcagctgaagccatgaagtgctttggaaagagaagcgtgcctgggaaaagagagtggctgagtgctaagagcagggtgaacaccatggaaaacttgaaattgaaaacatcacaattttaatgagaaaaagcgcaacccaaagtgaagagcaccattataacaaaggatggaaaggcagatgtaaagtccctcatggcgaaatataacacggggggcaacccgacagaggatgtctcagtcaatagccgacccttcagagtcacagggccaaactcatcttcaggaatacaagcaagaaagaacttattcaacaaccaaggaaatgccagccctcctgcaggacccagcaatgtacctaagtttgggtccccaaagccac

SEQ ID NO: 302876 - DNA, 589 bp, Artificial Sequence
  derived and/or modified sequence
gcagttcttgagttccacatgcagagcagatgcgacagctagaagtgagtagggcccagaccctggcccaggaagatccactaaaggaggccatccttccgccttcttctgcaggagtcagggggcgtgtaaaggtgatttgttcgccaagaaaagcacttttagtaaagcacagatgttaatctagatcatggaaaagtgccacacactagatttagcacataagcaaggagtctctagaacactcagaagaaaatgaatgaatccatgaatgaatggacaagtgagagcccagagcagctgaagccatgaagtgctttggaaagagaagcgtgcctgggaaaagagagtggctgagtgctaagagcagggtgaacaccatggaaaacttgaaattgaaaacatcacaattttaatgagaaaaagcgcaacccaaagtgaagagcaccattataacaaaggtcatgcaggctgagtgaattatcctaaacaaatgatggaaaggcagatgtaaagtccctcatggcgaaatataacacggggggcaacccgacagaggatgtctcagtcaatagccgacccttcagag

SEQ ID NO: 302877 - DNA, 676 bp, Artificial Sequence
  derived and/or modified sequence
aatacaattagagaaccataaagggcaaacatattaaaagagcttaattttgtagtgtggcctgcaggcttccagaaaaaaacaggagatcagtgagctagcagcagagaagccttcctggaaaaggatggaaaggcagatgtaaagtccctcatggcgaaatataacacggggggcaacccgacagaggatgtctcagtcaatagccgacccttcagagtcacagggccaaactcatcttcaggaatacaagcaagaaagaacttattcaacaaccaaggaaatgccagccctcctgcaggacccagcaatgtacctaagtttgggtccccaaagccacctgtggcagtcaaaccttcttctgaggaaaagcctgacaaggaacccaagcccccgtttctaaagcccactggagcaggccaaagattcggaacaccagccagcttgaccaccagagaccccgaggcgaaagtgggatttctgaaacctgtaggccccaagcccatcaacttgcccaaagaagattccaaacctacatttccctggcctcctggaaacaagccatctcttcacagtgtaaaccaagaccatgacttaaagccactaggcccgaaatctgggcctactcctccaacctcagaaaatgaacagaagcaagcgtttcccaaattgactg

SEQ ID NO: 302878 - DNA, 583 bp, Artificial Sequence
  derived and/or modified sequence
gcacattcactatccaagctgcaccatcttcggggtcattgtgtgccaggcatatcaactcttttcaataaaaatgtttttctagccacttcccagcactcgcagcatgaagctcacaccagaagtttccagagatcaccccagaggtgataagatctcgcccgcccttccgtcccaggatagtgtgattgcgggaccatggaatttacaaggatggaaaggcagatgtaaagtccctcatggcgaaatataacacggggggcaacccgacagaggatgtctcagtcaatagccgacccttcagagtcacagggccaaactcatcttcaggaatacaagcaagaaagaacttattcaacaaccaaggaaatgccagccctcctgcaggacccagcaatgtacctaagtttgggtccccaaagccacctgtggcagtcaaaccttcttctgaggaaaagcctgacaaggaacccaagcccccgtttctaaagcccactggagcaggccaaagattcggaacaccagccagcttgaccaccagagaccccgaggcgaaagtgggatttctgaaacctgtaggccc

SEQ ID NO: 302879 - protein, 973 aa, Artificial Sequence
  derived and/or modified sequence
MVKGKTNEWNKNDDRLLQAVENGDAEKVASLLGKKGASATKHDSEGKTAFHLAAAKGHVECLRVMITHGVDVTAQDTTGHSALHLAAKNSHHECIRKLLQSKCPAESVDSSGKTALHYAAAQGCLQAVQILCEHKSPINLKDLDGNIPLLLAVQNGHSEICHFLLDHGADVNSRNKSGRTALMLACEIGSSNAVEALIKKGADLNLVDSLGYNALHYSKLSENAGIQSLLLSKISQDADLKTPTKPKQHDQVSKISSERSGTPKKRKAPPPPISPTQLSDVSSPRSITSTPLSGKESVFFAEPPFKAEISSIRENKDRLSDSTTGADSLLDISSEADQQDLLSLLQAKVASLTLHNKELQDKLQAKSPKEAEADLSFDSYHSTQTDLGPSLGKPGETSPPDSKSSPSVLIHSLGKSTTDNDVRIQQLQEILQDLQKRLESSEAERKQLQVELQSRRAELVCLNNTEISENSSDLSQKLKETQSKYEEAMKEVLSVQKQMKLGLVSPESMDNYSHFHELRVTEEEINVLKQDLQNALEESERNKEKVRELEEKLVEREKGTVIKPPVEEYEEMKSSYCSVIENMNKEKAFLFEKYQEAQEEIMKLKDTLKSQMTQEASDEAEDMKEAMNRMIDELNKQVSELSQLYKEAQAELEDYRKRKSLEDVTAEYIHKAEHEKLMQLTNVSRAKAEDALSEMKSQYSKVLNELTQLKQLVDAQKENSVSITEHLQVITTLRTAAKEMEEKISNLKEHLASKEVEVAKLEKQLLEEKAAMTDAMVPRSSYEKLQSSLESEVSVLASKLKESVKEKEKVHSEVVQIRSEVSQVKREKENIQTLLKSKEQEVNELLQKFQQAQEELAEMKRYAESSSKLEEDKDKKINEMSKEVTKLKEALNSLSQLSYSTSSSKRQSQQLEALQQQVKQLQNQLAECKKQHQEVISVYRMHLLYAVQGQMDEDVQKVLKQILTMCKNQSQKK

SEQ ID NO: 302880 - DNA, 2922 bp, Artificial Sequence
  derived and/or modified sequence
atggttaagggaaagaccaacgagtggaacaagaatgatgatagattattacaagccgtagaaaatggcgacgccgagaaggtggcttccctgctgggcaagaaaggggcatcagccactaaacacgatagcgagggaaaaacagcctttcatctcgctgcagccaaggggcacgtggagtgcctccgagtgatgataacccatggagtcgacgtgaccgctcaggacacaaccggtcacagcgcccttcaccttgccgcaaaaaattcacatcatgagtgtatcagaaaactacttcagagcaagtgtccagccgagtctgtggactcttccggtaagaccgcgcttcattacgccgcagctcaaggctgtctccaggccgtgcagatcttatgcgagcacaagtccccgattaacctcaaagacttggacggcaacattcctctgttgttagccgttcagaatgggcattcagaaatatgccattttctcctggaccacggcgcagacgtaaattcccgaaacaagagtgggcggactgccctcatgctagcatgcgagattggcagttcgaatgccgtggaggcgctgattaagaagggggctgacctcaacctggtggatagtctcggctacaacgcgctacactactcgaaattatctgaaaacgcaggaatccagtccctcttgttgagtaagatatcccaggacgcagatttaaagactcccaccaagcccaagcagcacgaccaggtatccaaaataagtagcgaacgaagtggtacgcccaaaaaacggaaagcgcctccaccacccatttcaccgacccagctttccgatgtatcatcacctaggagcataacgagtacacctctgtcaggcaaggaaagcgtattcttcgctgaaccgccctttaaggctgaaatatccagcataagggagaataaagatcgcctcagcgattcaaccacaggggccgacagcctgctcgatataagctccgaagcggatcagcaggacctgctgtctttactccaggcaaaggttgcctccctcacactacacaataaggagctgcaggacaagcttcaggcgaagtctccaaaagaagccgaggccgacctcagttttgacagctatcatagcactcagacggatctaggtcctagtctgggaaagccaggcgagactagtcctcccgattcaaaaagcagcccaagtgtcctcatacactctctgggtaaatccacgaccgataatgatgtcagaattcagcagttgcaggagattcttcaagaccttcagaaacgtctggagtcctctgaagcagagcgcaagcagctgcaggtggaattacagagccgacgggctgagctggtgtgtctcaataataccgaaatctctgagaactcctctgacctgtctcagaaacttaaggaaacccagtcaaaatacgaagaagcaatgaaggaggtgctgagcgttcagaagcagatgaagttgggattggtttcaccagaatccatggacaattacagccactttcatgagttacgcgtgactgaggaagaaatcaatgtgctcaagcaagatctccagaatgcacttgaagagagtgagaggaacaaggagaaggtgagggaactcgaagaaaaattggtcgagcgcgagaagggaacagttataaaaccacctgtggaagagtatgaagaaatgaaatcctcatattgctcagtgatcgagaatatgaacaaagaaaaagcctttctgttcgaaaagtaccaggaggcccaagaagaaattatgaaacttaaggatacgctcaaatcgcagatgacccaggaggctagcgacgaagcagaggacatgaaggaggccatgaaccgaatgattgatgagcttaataaacaggtgtcagagctgtcgcagctttacaaagaggcacaggcggagttggaagattatcggaagagaaaaagcctggaagatgtgaccgcggagtacatacataaggcagagcacgaaaagctgatgcagctgactaacgttagccgagctaaggccgaggatgctcttagcgaaatgaagagccagtactccaaggtgcttaacgagcttacccagctgaaacaactggttgatgcccagaaagagaattcagtcagcatcactgaacatctgcaggtgatcaccacgctgcgcacagctgctaaggaaatggaggaaaagatttctaacctaaaagaacacctcgcctctaaagaggtagaggtggccaaactcgaaaagcaattgctcgaagagaaggccgctatgaccgatgccatggtccccaggtcctcctacgagaagttgcagtcttcactcgaatccgaggtaagtgttctggcctccaaactgaaggagtccgtgaaggagaaggaaaaggtacactctgaggtagttcaaatacgctctgaggtatcacaagtcaaacgagagaaggaaaacattcagaccctcctgaagtccaaggaacaggaggtgaacgagctgttacagaagtttcagcaggctcaggaagagctcgctgaaatgaagcggtatgcagaatcgagcagcaagttggaagaggataaagacaagaagatcaacgagatgtcaaaagaggtaaccaagctgaaagaggcactaaattcgctctcacaactttcgtatagcaccagcagcagcaagcggcaaagtcagcaactagaggccctgcagcagcaggtgaagcagcttcagaaccaactcgctgaatgcaagaagcagcatcaggaggttatctccgtctacaggatgcatttgctgtacgctgtgcagggccagatggatgaggacgttcaaaaagttttgaaacagatactcacaatgtgtaagaatcagtcccagaagaaatag

SEQ ID NO: 302881 - DNA, 2922 bp, Artificial Sequence
  derived and/or modified sequence
atggtgaagggcaagaccaatgagtggaacaagaatgatgaccggctgctgcaggccgtggagaatggagatgctgagaaggtggccagcctgctgggcaagaagggggccagcgccaccaagcatgacagcgagggcaagacagccttccacctggccgccgccaagggccacgtggagtgcctgcgggtgatgatcacccacggcgtggatgtgacagcccaggacaccaccggccacagcgccctgcacctggccgccaagaacagccaccacgagtgcatcaggaagctgctgcagagcaagtgcccagctgagagcgtggacagcagcggcaagacagccctgcactatgctgctgcccagggctgcctgcaggccgtgcagatcctgtgtgagcacaagagccccatcaacctgaaggacctggatggcaacatccccctgctgctggccgtgcagaatggccacagcgagatctgccacttcctgctggaccatggagcagatgtgaacagcaggaacaagagcggccgcacagccctgatgctggcctgtgagatcggcagcagcaatgctgtggaggccctgatcaagaagggagctgacctgaacctggtggacagcctgggctacaatgccctgcactacagcaagctgtctgaaaatgccggcatccagagcctgctgctgagcaagatcagccaggatgctgacctgaagacccccaccaagcccaagcagcacgaccaggtgtccaagatcagcagcgagaggagcggcacccccaagaagaggaaggcccctcctccacccatcagccccacccagctgagtgatgtgagcagccccaggagcatcaccagcacccccctgagcggcaaggagagcgtcttctttgctgagccccccttcaaggccgagatcagcagcatccgggagaacaaggaccggctgagtgacagcaccaccggggctgacagcctgctggacatcagcagcgaggccgaccagcaggacctgctgagcctgctgcaggccaaggtggccagcctgaccctgcacaacaaggagctgcaggacaagctgcaggccaagagccccaaggaggccgaggccgacctgagctttgacagctaccacagcacccagacagacctgggccccagcctgggcaagccaggagagaccagccccccagacagcaagagcagccccagcgtgctgatccacagcctgggcaagagcaccacagacaatgatgtgcgcatccagcagctgcaggagatcctgcaggacctgcagaagaggctggagagcagcgaggccgagaggaagcagctgcaggtggagctgcagagcagaagagctgagctggtgtgcctgaacaacacagagatcagcgagaacagcagtgacctgagccagaagctgaaggagacccagagcaaatatgaggaggccatgaaggaggtgctgtctgtgcagaagcagatgaagctgggcctggtgtccccagagagcatggacaactacagccacttccacgagctgcgggtgacagaggaggagatcaacgtgctgaagcaggacctgcagaatgccctggaggagagcgagaggaacaaggagaaggtgcgggagctggaggagaagctggtggagcgggagaagggcaccgtcatcaagccccctgtggaggagtatgaggagatgaagagcagctactgcagcgtgattgagaacatgaacaaggagaaggccttcctgtttgagaagtaccaggaggcccaggaggagatcatgaagctgaaggacaccctgaagagccagatgacccaggaggccagtgatgaagctgaggacatgaaggaggccatgaacaggatgattgatgagctgaacaagcaggtgtctgagctgagccagctgtacaaggaggcccaggccgagctggaggactacaggaagaggaagagcctggaggatgtgacagctgagtacatccacaaggccgagcacgagaagctgatgcagctgaccaacgtgtcccgggccaaggcagaagatgccctgtctgagatgaagagccagtacagcaaggtgctgaatgagctgacccagctgaagcagctggtggatgcccagaaggagaacagcgtgtccatcacagagcacctgcaggtgatcaccaccctgaggacagctgccaaggagatggaggagaagatcagcaacctgaaggagcacctggccagcaaggaggtggaggtggccaagctggagaagcagctgctggaggagaaggccgccatgacagatgccatggtgcccaggagcagctatgagaagctgcagagcagcctggagagcgaggtgtctgtgctggccagcaagctgaaggagagcgtgaaggagaaggagaaggtgcacagcgaggtggtgcagatccgctctgaggtgtcccaggtgaagcgggagaaggagaacatccagaccctgctgaagagcaaggagcaggaggtgaatgagctgctgcagaagttccagcaggcccaggaggagctggccgagatgaagagatatgcagagagcagcagcaagctggaggaggacaaggacaagaagatcaatgagatgagcaaggaggtgaccaagctgaaggaggccctgaacagcctgagccagctgagctacagcaccagcagcagcaagaggcagagccagcagctggaggccctgcagcagcaggtgaagcagctgcagaaccagctggccgagtgcaagaagcagcaccaggaggtgatctctgtgtacaggatgcacctgctgtatgctgtgcagggccagatggatgaagatgtgcagaaggtgctgaagcagatcctgaccatgtgcaagaaccagagccagaagaagtag

SEQ ID NO: 302882 - DNA, 2922 bp, Artificial Sequence
  derived and/or modified sequence
atggtgaagggcaagaccaacgagtggaacaagaacgacgaccggctgctgcaggctgtggagaatggcgatgccgagaaggtggcctccctgctcggtaagaaaggggcaagtgccacgaaacatgatagcgagggaaaaaccgccttccatctggcagccgcaaaaggccatgtggagtgcttgcgggtcatgattacacacggtgttgatgtgacagctcaggacaccactggacacagtgcactgcacttggctgcaaagaacagtcaccacgagtgcatccgcaaactcctacagagtaaatgtccagctgagtctgtcgactcttcgggaaagacggccctccactacgcggctgcccagggatgtctgcaggccgttcaaatcctgtgtgaacacaagagcccaatcaatctcaaagacctggatgggaacattcccttattgctcgctgtgcagaacgggcactccgagatttgtcactttctgctggatcatggtgccgacgtgaatagtcggaacaagtcaggcaggaccgcgctgatgttggcatgcgagatcgggagctccaatgcagttgaggcactcattaaaaagggcgctgacttaaacttagtagatagcctgggatacaacgctctgcactattctaagctttctgaaaatgctggcatacagtccctgctgctgagcaaaatctcacaggatgcagaccttaaaacccccaccaaacctaaacagcacgaccaggtatcgaagatatcctccgagcgttcaggtacccctaaaaagaggaaggcacctccgccaccaatcagccctacacagctctccgatgtttctagccccaggtctatcacatccactcctctctccggtaaagagtccgtcttctttgccgagcccccgttcaaagccgagatcagctctattagggagaataaggaccgcctgagcgactcaaccacaggtgcagatagcctcctggatatcagcagcgaagcagatcagcaagatctactgtcactgctgcaggctaaggttgcttccctcaccttgcacaacaaagaactgcaggacaagcttcaagcaaagtccccaaaagaggccgaagccgatctctccttcgacagctaccactctacacaaacggacctcggtccttccctggggaagccaggcgaaacttccccccctgatagcaaatcgtctcccagtgtgctgatacactctctggggaaatccaccaccgataatgacgtgcggattcagcagctgcaggaaatattacaggatctccagaagcgactagaaagcagcgaagccgagcgtaagcagctgcaagtcgagctgcagagcagaagagcagagcttgtctgtctgaacaacaccgaaattagtgagaactcatcagacctgagccaaaaactgaaagagacacaaagcaagtatgaggaggctatgaaggaggtgctctctgtccagaagcagatgaaactcgggcttgtatcgcctgagagcatggacaattactctcatttccatgaactccgggtaaccgaagaggaaatcaacgtgctcaaacaggatctccagaacgccttagaagagtcggaaagaaacaaggaaaaagtccgagagttggaggagaagctggtggaaagggagaagggcacagtgattaaaccccccgtcgaagaatacgaggaaatgaaatcctcttactgttctgtaatcgaaaacatgaataaagaaaaagcctttctgttcgagaaataccaagaagcccaagaggagatcatgaagctcaaggacactcttaagagccagatgactcaagaagctagcgatgaagctgaggatatgaaagaagctatgaacagaatgatcgacgaactgaataaacaggtgtccgagctgtcccagctctataaggaggcccaggcagaactggaggactataggaagaggaagtcactagaagatgtgacggctgagtatatccataaagccgaacacgagaaacttatgcaactgaccaatgtcagccgagctaaagcagaagacgccctgtctgaaatgaagagccaatactcaaaggttttgaacgaattgacccagctcaagcagctcgtcgacgcccagaaggagaattctgtgtctattaccgagcacttgcaggtgatcacaacactacgaaccgctgcaaaagaaatggaggagaaaatcagcaacctgaaagagcacttagcgtccaaagaggtggaagtggccaaactggaaaaacagctgctagaggagaaggcagctatgaccgacgccatggtacccagatcaagctatgaaaagctgcaatccagtttggaatctgaggtatccgtcttagcgtccaaactgaaagagagcgtgaaagagaaagaaaaagttcatagtgaggtggtccagatacgcagtgaagtctcccaggtgaagcgggaaaaggagaatatccagactctcctcaaaagcaaggagcaggaagtgaatgaactgctccagaagtttcaacaggcccaggaggaactggccgagatgaagagatatgccgaaagctcaagtaaacttgaggaagacaaggataagaagatcaatgaaatgagcaaggaggttacaaagcttaaggaagctctcaactcgctctcccaactgagctatagcacaagtagtagtaagcgacagtctcaacagttagaggcactgcagcagcaagtgaagcaactgcagaatcagctggccgagtgtaaaaagcagcaccaggaggtgatcagcgtttataggatgcatttgctctatgcggtgcagggccagatggacgaggatgtccagaaagtgcttaagcagattctgactatgtgcaagaatcagtcccagaagaagtag

SEQ ID NO: 302883 - DNA, 2922 bp, Artificial Sequence
  derived and/or modified sequence
atggtcaaaggtaagaccaatgaatggaacaaaaacgacgataggctcttgcaggcagtggaaaatggggatgctgaaaaggtagcgtcactgctgggcaaaaaaggtgcctccgccaccaaacacgatagtgagggtaagaccgccttccatctcgcagccgctaaaggtcatgtggagtgtttaagagttatgatcactcatggggtggatgtgacagcgcaagacaccacaggtcactccgctcttcacctggccgctaagaatagccatcatgaatgtattcggaagttactgcaaagcaagtgccctgccgaaagtgtggattctagcggaaagacggccctgcactatgccgctgcccaggggtgtttgcaggcggtgcagattttgtgtgagcacaaatctcctattaacctcaaagacctggacgggaacatcccactccttcttgccgtacagaacgggcactctgaaatctgtcatttcctgttagaccacggagccgacgtcaattctagaaataaaagcggtcgtaccgcgctcatgcttgcatgtgagatcggaagctctaacgcagtcgaggccctgatcaagaaaggcgcagacctgaatctcgttgactcattgggctacaatgcactgcactatagcaagttaagcgagaacgccggaattcagagcctgctgctcagcaaaatctctcaggatgctgacctgaagacccccactaagcccaagcagcatgatcaggtgtccaagatttcttcagaaaggtcaggcacgcctaaaaaacggaaggctccccctccccctatatcccccacacagctgtctgacgtctcgtcccctaggtcaatcacctcgactcctttgtcaggcaaggaatccgtcttttttgcggaaccgccttttaaagccgaaatcagctctataagggaaaataaagatcggttgtcagattccacgacaggggcagattcattactggacatctcaagcgaggctgatcagcaggatttactgtccttgcttcaagccaaggttgcctcactaacactgcataacaaggaactgcaggacaagctgcaagcgaagtcccctaaagaggctgaagccgatctctcttttgacagctatcatagcactcaaactgacctgggccctagtctaggtaagcctggcgaaacgagcccacccgactccaaatcctctccctctgtcctgattcactctctgggcaaaagtacgactgacaacgatgtgaggatacaacagttgcaggagatcctccaggacctgcaaaagcggctggaaagcagcgaagccgaacgcaaacagctgcaggtggagttacagtctagaagggctgagttagtgtgtctgaacaatacggaaatctcagaaaacagctcagatttgagccagaagttgaaggaaacacagtccaaatacgaagaagccatgaaagaggttcttagtgtccaaaaacagatgaagttgggattggtctcccctgagagcatggataactatagccatttccacgaacttagggtaactgaagaggaaatcaacgttctgaagcaagatctgcaaaatgccctggaggaatctgaaaggaacaaggagaaggttcgcgagctcgaggagaagctggtggagcgtgaaaagggcacagtaatcaagccacccgtggaagaatatgaagaaatgaagtcatcatactgctcggtgatcgagaatatgaataaagagaaagcattccttttcgagaagtatcaggaagctcaggaagagataatgaagttgaaagataccctgaaaagccagatgactcaggaagcttctgacgaggccgaagacatgaaagaggctatgaaccggatgatagacgagctgaacaagcaggtgagtgaactgtctcagctgtataaggaagcccaggccgagttggaggactatcgtaagcgcaagagtctcgaagatgtaactgccgagtacatccacaaggctgagcacgagaagcttatgcaactcactaatgtgtcccgagcaaaagccgaagatgccttgagcgaaatgaagtcgcaatactccaaggtcctgaacgagctgacacagctcaagcagctcgtcgacgcgcagaaggagaactccgtttcaattacggagcatctgcaagtgattacgacacttaggactgccgcaaaggagatggaggagaaaatatctaacctgaaagagcatcttgccagtaaagaggttgaagtggctaagctggagaaacagttacttgaggagaaagcggctatgaccgacgctatggtgccgagaagtagctatgaaaaactacaaagttctctggaatcagaagtctcggtcctcgcctctaagttaaaagagagtgtcaaagagaaagaaaaagttcattcagaggtagttcagatacgaagtgaggtcagccaagttaaacgagaaaaggaaaacattcagactctactgaagagtaaggagcaagaggtgaatgaacttctccagaaatttcagcaggctcaggaagagttggccgaaatgaagcgatatgccgagtcatcctcaaagctcgaggaggacaaggacaagaaaatcaatgagatgtcaaaagaggtcaccaagctgaaagaggccctgaatagtctgagccaactgtcatactccacctcctccagcaagcgacagtcccagcaactggaggcattgcagcagcaggtcaagcaattgcagaatcaattagcggagtgtaagaaacagcaccaagaggttatctcagtgtataggatgcacttattgtacgccgtgcaagggcaaatggacgaggacgtgcagaaagttctcaagcagatcctcacgatgtgtaagaaccagtctcaaaaaaagtag

SEQ ID NO: 302884 - DNA, 4768 bp, Artificial Sequence
  derived and/or modified sequence
atggtgaaggggaagaccaatgagtggaacaagaatgatgaccggctactgcaggccgtggagaatggagatgcggagaaggtggcctcactgctcggcaagaagggggccagtgccaccaaacacgacagtgagggcaagaccgctttccatcttgctgctgcaaaaggacacgtggaatgcctcagggtcatgattacacatggtgtggatgtgacagcccaagatactaccggacacagcgccttacatctcgcagccaagaacagccaccatgaatgcatcaggaagctgcttcagtctaaatgcccagccgaaagtgtcgacagctctgggaaaacagctttacattatgcagcggctcagggctgccttcaagctgtgcagattctctgcgaacacaagagccccataaacctcaaagatttggatgggaatataccgctgcttcttgctgtacaaaatggtcacagtgagatctgtcactttctcctggatcatggagcagatgtcaattccaggaacaaaagtggaagaactgctctcatgctggcctgtgagattggcagctctaacgctgtggaagccttaattaaaaagggtgcagacctaaaccttgtagattctcttggatacaatgccttacattattccaaactctcagaaaatgcaggaattcaaagccttctattatcaaaaatctctcaggatgctgatttaaagaccccaacaaaaccaaagcagcatgaccaagtctctaaaataagctcagaaagaagtggaactccaaaaaaacgcaaagctccaccacctcctatcagtcctacccagttgagtgatgtctcttccccaagatcaataacttcgactccactatcgggaaaggaatcggtattttttgctgaaccacccttcaaggctgagatcagttctatacgagaaaacaaagacagactaagtgacagtactacaggtgctgatagcttattggatataagttctgaagctgaccaacaagatcttctctctctattgcaagcaaaagttgcttcccttaccttacacaataaggagttacaagataaattacaggccaaatcacccaaggaggcggaagcagacctaagctttgactcataccattccacccaaactgacttgggcccatccctgggaaaacctggtgaaacctctcccccagactccaaatcatctccatctgtcttaatacattctttaggtaaatccactactgacaatgatgtcagaattcagcaactgcaagagattttgcaagatctacagaagagattagagagctctgaagcagagagaaaacagctacaggtcgaactccaatcccgaagggcagaactggtatgcttaaacaacactgagatttcagagaacagctctgacctcagccagaaacttaaagaaactcagagcaaatacgaggaggctatgaaagaagtccttagtgtgcagaagcagatgaaactcggtcttgtctcacctgaaagcatggataattattcacatttccacgagctgagggtcacggaagaggaaataaatgtgctaaagcaggatctgcagaatgcattagaagaaagtgaaagaaataaagagaaagtgagagagttagaggaaaaactggtagagagggagaaaggtacagtgattaagccacctgtggaagagtacgaggaaatgaaaagttcatattgctctgttattgagaatatgaataaggagaaagcatttttgtttgagaaataccaagaagcccaagaagaaatcatgaaattaaaagacacactaaaaagtcagatgacacaggaagccagtgatgaagctgaggacatgaaagaagccatgaataggatgatagatgaactcaataaacaggtgagcgagctgtcacagctgtacaaagaagcccaggctgagctggaggattacaggaagaggaaatctctagaggatgtcacagctgaatatatccataaagcagagcatgagaaactgatgcaattgacaaacgtgtccagggctaaagcagaagatgcactgtctgaaatgaagtctcagtattcaaaagtgttgaatgagttgacccagctcaaacaactggtggatgcacaaaaagagaactctgtctctatcacagaacatttgcaagtgataaccacgctgcggactgcagcaaaagagatggaagaaaaaataagcaatcttaaggaacaccttgcaagcaaggaagtggaagtagcaaagctggagaaacaactcttagaagagaaagctgctatgactgatgcaatggtacctcggtcttcctatgaaaaactccagtcatccttagagagtgaagtgagtgtgttggcatcgaaattaaaggaatctgtgaaagagaaagagaaggtccattcagaggttgtccagattagaagtgaggtctcacaggtgaaaagagaaaaggaaaatattcagactctcttgaaatccaaagagcaagaagtaaatgaacttctgcaaaaattccagcaagctcaggaagaacttgcagaaatgaaaagatacgctgagagctcttcaaaactggaggaagataaagataaaaagataaatgagatgtcgaaggaagtcaccaaattgaaggaggccttgaacagcctctcccagctctcctactcaacaagctcatccaaaaggcagagtcagcagctggaggcgctgcagcagcaagtcaaacagctccagaaccagctggcggaatgcaagaaacaacaccaggaggtcatatcagtttacagaatgcatcttctgtatgctgtgcagggccagatggatgaagatgtccagaaagtactgaagcaaatccttaccatgtgtaaaaaccagtctcaaaagaagtaaagtggattccttggcaggacactgccccttgtcatctgtctttgtgttagatccagagttgtcggcagccgctgccattgttctcattcgtggtatgcactgtggcctagcgtagcttcttccctttccaaaggtttctgaggacttctcccaggagaagactgcccgcctcagaactgcttagagacttcaaaccagcagaggtgaaagtccctgtcatcccttcagattccagagctgggatcagccatgcccagaggtctggtcctgatgctggcaggggggccccctcctccatccctgactggctgagtggctttatcaccaccgagtgatgtgctgaggcctcctgcagtgaatgctccttccattcctgtactcgggcagtgccattcagcacaggagagctctttttgcctttggctttcaattccaaaacatgatttaatttctaactaaattagtatggcactagttatgaagtatctgcttaaaacccttcatcatgatatcctgtggatttaaaaactctaattccatgttttcttcccatctgccttatatatctcatcaccctgcttatcaatattcagtttgatgagcactattaactaaaatatgaaacttaaaaacaaaagcaagttgtccttaaaagttctttttttaagtaaattgttgacatactgcaaattttctatgcaaacttgcctcctgctgttatctgtgaagctcaggaaatccaaacatttgtgtttcaacaagggacagtaaactgtgtgtttacagccaaaagaaatgcctcatagttcttaacctcaacttttgtagaagtatttttttctctgtaatatttttattggctcataaagatgttttcatatctgaactcctaaataagtgaaattacagtagattatattaacaaaatactttttaggtagccatgcttgagactttttaaaaatataactttttccttaaagttttcagctatagcaaaaggtagttatgtatgccagacctaatatgagctgccaccaacacccctagaactttcagccatggtgtcttcagaattgtagcgcatttctgaatctagcaaatcctccttttacccgttgaatgttttgaatgccctgactctaccagcgcccataaatgatctctagaaggactgttagtaccaatctgtttttcaactttgaagctaaaaaccctgatatggtaatattatggtgcatagcagaggtctcggaaaaaaaatatttctgttcactttactttcaggttaaaaatgtttctaacacgcttgcaacttcccttatggcattaatcttgttgagggagagagacagaatcctggactctccaaagtatttaactgaaagtagggcctgctctgacagggcccatgtcccacaaggctgcttggcctcagtgggtgcttggctgtgctggatgatatgttgatctgtattggataaggaccaatgacagcaaagcaaaaatggctttaaagcttggtgttacttttcttaagttgtttaattatagttaagcaatttcaaaaatgctccaaagaaatgtgaaaggaccttttgtcacagcacttcagaaaatacacaacagccccttctgcccccgcacagaaatgctgcagagtatataaaacttgagacatttttgtaggatgcctgacgaggtgtagccttttatcttgtttccggatgcatatttattacgagtactctggttaaatattgaaaagttatatgctgtagtttttagtattttgtctttgtaatttacagaagttattggagaaaataaacttgtttcattttgc

SEQ ID NO: 302885 - DNA, 2922 bp, Artificial Sequence
  derived and/or modified sequence
atggtgaagggcaagaccaacgagtggaacaagaacgacgacagactgctgcaggccgtggagaacggcgacgccgagaaggtggccagcctgctgggcaagaagggcgccagcgccaccaagcacgacagcgagggcaagaccgccttccacctggccgccgccaagggccacgtggagtgcctgagagtgatgatcacccacggcgtggacgtgaccgcccaggacaccaccggccacagcgccctgcacctggccgccaagaacagccaccacgagtgcatcagaaagctgctgcagagcaagtgccccgccgagagcgtggacagcagcggcaagaccgccctgcactacgccgccgcccagggctgcctgcaggccgtgcagatcctgtgcgagcacaagagccccatcaacctgaaggacctggacggcaacatccccctgctgctggccgtgcagaacggccacagcgagatctgccacttcctgctggaccacggcgccgacgtgaacagcagaaacaagagcggcagaaccgccctgatgctggcctgcgagatcggcagcagcaacgccgtggaggccctgatcaagaagggcgccgacctgaacctggtggacagcctgggctacaacgccctgcactacagcaagctgagcgagaacgccggcatccagagcctgctgctgagcaagatcagccaggacgccgacctgaagacccccaccaagcccaagcagcacgaccaggtgagcaagatcagcagcgagagaagcggcacccccaagaagagaaaggccccccccccccccatcagccccacccagctgagcgacgtgagcagccccagaagcatcaccagcacccccctgagcggcaaggagagcgtgttcttcgccgagccccccttcaaggccgagatcagcagcatcagagagaacaaggacagactgagcgacagcaccaccggcgccgacagcctgctggacatcagcagcgaggccgaccagcaggacctgctgagcctgctgcaggccaaggtggccagcctgaccctgcacaacaaggagctgcaggacaagctgcaggccaagagccccaaggaggccgaggccgacctgagcttcgacagctaccacagcacccagaccgacctgggccccagcctgggcaagcccggcgagaccagcccccccgacagcaagagcagccccagcgtgctgatccacagcctgggcaagagcaccaccgacaacgacgtgagaatccagcagctgcaggagatcctgcaggacctgcagaagagactggagagcagcgaggccgagagaaagcagctgcaggtggagctgcagagcagaagagccgagctggtgtgcctgaacaacaccgagatcagcgagaacagcagcgacctgagccagaagctgaaggagacccagagcaagtacgaggaggccatgaaggaggtgctgagcgtgcagaagcagatgaagctgggcctggtgagccccgagagcatggacaactacagccacttccacgagctgagagtgaccgaggaggagatcaacgtgctgaagcaggacctgcagaacgccctggaggagagcgagagaaacaaggagaaggtgagagagctggaggagaagctggtggagagagagaagggcaccgtgatcaagccccccgtggaggagtacgaggagatgaagagcagctactgcagcgtgatcgagaacatgaacaaggagaaggccttcctgttcgagaagtaccaggaggcccaggaggagatcatgaagctgaaggacaccctgaagagccagatgacccaggaggccagcgacgaggccgaggacatgaaggaggccatgaacagaatgatcgacgagctgaacaagcaggtgagcgagctgagccagctgtacaaggaggcccaggccgagctggaggactacagaaagagaaagagcctggaggacgtgaccgccgagtacatccacaaggccgagcacgagaagctgatgcagctgaccaacgtgagcagagccaaggccgaggacgccctgagcgagatgaagagccagtacagcaaggtgctgaacgagctgacccagctgaagcagctggtggacgcccagaaggagaacagcgtgagcatcaccgagcacctgcaggtgatcaccaccctgagaaccgccgccaaggagatggaggagaagatcagcaacctgaaggagcacctggccagcaaggaggtggaggtggccaagctggagaagcagctgctggaggagaaggccgccatgaccgacgccatggtgcccagaagcagctacgagaagctgcagagcagcctggagagcgaggtgagcgtgctggccagcaagctgaaggagagcgtgaaggagaaggagaaggtgcacagcgaggtggtgcagatcagaagcgaggtgagccaggtgaagagagagaaggagaacatccagaccctgctgaagagcaaggagcaggaggtgaacgagctgctgcagaagttccagcaggcccaggaggagctggccgagatgaagagatacgccgagagcagcagcaagctggaggaggacaaggacaagaagatcaacgagatgagcaaggaggtgaccaagctgaaggaggccctgaacagcctgagccagctgagctacagcaccagcagcagcaagagacagagccagcagctggaggccctgcagcagcaggtgaagcagctgcagaaccagctggccgagtgcaagaagcagcaccaggaggtgatcagcgtgtacagaatgcacctgctgtacgccgtgcagggccagatggacgaggacgtgcagaaggtgctgaagcagatcctgaccatgtgcaagaaccagagccagaagaagtag

SEQ ID NO: 302886 - DNA, 633 bp, Artificial Sequence
  derived and/or modified sequence
atgaagctctgggacgtggtggcagtgtgtctggttctgctgcataccgcatccgctttcccgctgccagcaggtaaaagacctcctgaagcccctgctgaagataggagcttgggcagacgccgggcgccttttgccctgtcctccgattccaacatgcctgaggactaccccgatcaatttgatgacgtgatggactttattcaagcaaccattaaacgactgaagcgtagcccagataagcaaatggcagtgctccctcggcgtgagagaaatagacaagccgcagcagcaaacccagagaactcgaggggaaagggcagacgtggacaacggggcaagaacagaggttgtgtgctgactgcaatccacctcaacgtcactgacttggggctgggatacgaaactaaagaggaactgattttccggtattgctcggggtcttgtgacgcagcagaaactacttacgacaaaattcttaagaacctttcaagaaaccgacgactcgtcagcgacaaggtcggacaagcatgttgtaggcctatagccttcgatgatgatctttccttcctggacgacaatttggtctaccatattcttagaaaacattctgccaagagatgcggttgtatt

SEQ ID NO: 302887 - DNA, 633 bp, Artificial Sequence
  derived and/or modified sequence
atgaaattgtgggatgttgtcgcagtgtgtctcgtcctccttcatactgcgtctgccttcccgctgccagccggcaaacgtcctcccgaggcccccgctgaagaccgctctctgggccgtaggcgggcacccttcgccctaagctccgatagcaatatgcctgaagactatcctgatcagttcgacgacgtgatggattttatacaggctactatcaagagactgaaaaggtcccccgacaagcagatggcagtgctgccccgtcgtgagcggaatagacaggccgccgctgcaaatcccgagaattctcgggggaaagggcggcgtggccagcgcgggaaaaacagaggctgtgttctcaccgctattcatcttaatgtgactgatctgggacttgggtatgagacaaaggaggaactgatcttccgatattgtagcgggagttgcgatgcggctgaaacaacctatgacaagattctgaagaacctcagcaggaataggcgattagtgagcgataaggtgggccaggcctgttgcaggcccattgcctttgatgacgaccttagtttcctcgatgacaatctggtgtaccacattttgagaaaacactccgcgaaacgctgcggatgcata

SEQ ID NO: 302888 - DNA, 633 bp, Artificial Sequence
  derived and/or modified sequence
atgaaattatgggacgttgtagccgtttgtctggtgctcttgcacaccgcatctgctttccctctgcccgccggaaagcggccacctgaagccccagcagaggaccggagtctcggaaggcggagagctccctttgcgttgtcgagcgacagcaatatgcctgaggattacccagatcagtttgacgacgtgatggacttcatacaggcaactatcaaaagactgaagaggagtcccgacaagcagatggcggtgctgcctaggcgagaaaggaataggcaggcagctgcagccaaccccgagaacagccgagggaaggggcggaggggacaacgagggaagaatcgaggctgcgtacttactgcgattcacctcaacgttacagatcttggtttagggtatgaaaccaaggaagaactaatttttcggtactgttccgggtcctgcgacgcagccgagactacctatgataaaatccttaaaaatctctcgcgtaatagaagactggtttcagataaggttggacaggcctgctgccgacctattgcttttgatgatgacctctcttttctggatgacaacctggtgtatcacatactgcggaagcatagtgcgaaacggtgtggctgtatt

SEQ ID NO: 302889 - DNA, 633 bp, Artificial Sequence
  derived and/or modified sequence
atgaaactgtgggacgtggtagccgtgtgtctcgtgctgttgcacacagcatctgcttttccgctacccgccggcaagcggcctccggaggctcccgcagaggatagatcccttggacgacgcagggctcccttcgctttgtctagcgactctaatatgcccgaggactatcctgatcagttcgatgacgtcatggatttcattcaagcaaccatcaagaggctcaaaaggagtcccgataagcagatggccgtgctcccgaggcgggagcgtaaccgccaggccgctgctgccaaccctgagaactcgagaggtaagggccgtcgcgggcagcgcggcaagaatcgcggttgcgtgctgacagccatccacttaaatgtgaccgacctcggcctcggatatgagaccaaggaggagctgattttccggtattgtagcgggtcttgcgatgcagctgagacaacttacgacaagatcctcaaaaatttatcccgcaacagaagactggtgagcgataaggtgggtcaggcctgttgccgtcctattgcttttgacgatgatttatctttcctggacgataatttagtatatcacattctccgaaaacatagtgctaagagatgtgggtgtata

SEQ ID NO: 302890 - DNA, 633 bp, Artificial Sequence
  derived and/or modified sequence
atgaagctctgggatgtcgtggcagtgtgtctggtgcttttgcacactgcatccgcatttcccttgcctgccggaaaacgtcctccggaggcacccgcagaagatcggagcctcgggagaaggagagctccattcgccttgtcatcggattcgaacatgcccgaggattaccccgaccagtttgatgatgttatggacttcatccaggcgaccattaaacgactgaagcgatcccctgacaagcagatggcagtgttgccgagacgcgaaagaaaccggcaagccgcggcagcaaatccagaaaactcgagaggaaagggcagacgcgggcaacgaggcaaaaaccggggatgcgtgttgaccgctatacatctgaatgtcaccgatcttggactgggttacgagactaaggaagaactgatctttagatactgttcaggttcgtgtgacgcagccgaaactacttatgacaagattcttaagaacctgtcccggaatagacggcttgtgtccgataaggtcggacaagcgtgttgcagacccattgcttttgacgacgacctctcattcctcgatgataacttggtgtaccatattcttagaaaacatagcgccaagcgctgcggttgcatt

SEQ ID NO: 302891 - DNA, 633 bp, Artificial Sequence
  derived and/or modified sequence
atgaagctttgggacgtggtcgcggtgtgtttggtgttgctgcacacagctagtgctttccctctgccagcaggaaaaagacctcccgaggcccctgccgaggataggagtctcggacgacgcagggcaccattcgcattgtcatcagactctaacatgcctgaggattatcccgatcaattcgacgatgtgatggacttcattcaggcgaccattaagcgtctgaagagaagtccagacaagcaaatggctgtcctgccgcgtcgtgagaggaacagacaggccgccgcggcaaaccccgagaacagcagggggaagggccggcgcgggcagagggggaaaaacagaggttgtgtgctgactgccattcatttaaacgtcaccgatctggggctcgggtacgaaactaaagaagagctgatctttcgctactgttcaggctcctgcgacgctgccgagaccacctatgacaaaatccttaagaatcttagtcgaaataggcgtctggtgtccgacaaggtgggccaggcctgttgccggccaatcgccttcgacgacgacctttccttcctggatgataacttggtatatcatattctccgcaaacactccgctaagaggtgcggttgtatt

SEQ ID NO: 302892 - DNA, 633 bp, Artificial Sequence
  derived and/or modified sequence
atgaagctgtgggacgtggtggccgtctgcctcgtactcctccacaccgcaagcgcatttcctttaccagccggaaagcggccacccgaagcaccagccgaggatcggtcactaggcagacgacgtgccccttttgctctgtctagcgatagtaacatgcctgaagattaccccgaccagttcgatgatgttatggatttcatccaagctacaatcaagcggcttaagagaagcccagataagcagatggccgtcttgccacgtcgggagcgtaaccgacaggctgcggctgccaaccctgagaattcacgaggcaaagggaggcggggacaacggggcaagaatagagggtgtgtcttgaccgcaatacatttgaatgttacagatctcggtcttggctatgagaccaaggaagagttgatctttcggtactgttcaggttcctgcgacgcggctgaaactacctacgacaagatcctcaagaatttatcgagaaaccgccgtctcgtttcagacaaggtgggacaggcatgctgtcgccccatcgccttcgatgatgatctgagcttccttgacgataatctggtgtatcatattctgcgcaagcactcagcaaagagatgcggatgtatt

SEQ ID NO: 302893 - DNA, 633 bp, Artificial Sequence
  derived and/or modified sequence
atgaagctgtgggatgtggtggcagtgtgcctggtcctgttgcacaccgcatcagccttcccactgccggcgggcaaacgacctccagaggcgcccgcggaagatcgcagcctgggtcgccgccgcgcacccttcgccctgtcgtcagatagcaatatgccggaggactatccggaccagttcgacgatgtcatggatttcatccaagcaaccattaagcgcttgaagcggtcgccagacaagcaaatggccgtgctgccacggagggagcgaaaccggcaggcggccgccgctaacccggagaattcgcgaggaaaaggacggcggggacagagaggaaagaatagaggctgcgtgttgactgctatccatctcaacgtcaccgatctggggttgggttacgaaaccaaggaagagctcattttccggtactgctccgggtcatgtgacgccgctgaaacgacttacgacaagatactgaagaacttgagtcgcaaccgacggcttgtttccgacaaagtcggacaggcatgctgtcgccctatcgcttttgacgacgacctctcgtttcttgatgacaatctcgtctaccacatcctgcgaaagcatagcgccaaacggtgcggctgcatt

SEQ ID NO: 302894 - DNA, 633 bp, Artificial Sequence
  derived and/or modified sequence
atgaagctgtgggacgtcgtggcagtgtgcctggtgctgcttcatactgctagcgcatttccactgcctgcggggaagaggccgcccgaagcaccagcagaggatcggtcgcttggccggcggcgtgccccgtttgcacttagctccgattcgaatatgcccgaggactaccctgatcagtttgatgatgtgatggacttcatccaggctactattaagcgccttaagagatcccctgacaaacaaatggccgtactccctcgccgagaacgtaaccgccaagcggctgcggcgaaccccgaaaactcacgtggtaaaggtcgcagagggcagcggggcaagaatagaggatgtgtgcttaccgccattcacctcaacgtgaccgacttgggccttggatatgaaacgaaggaggaactgatttttcgatactgctcgggtagttgtgacgcagccgaaactacctacgacaaaattctgaaaaacctgtcgcgaaatcggcgccttgtgtccgataaggtcggacaagcatgttgtcgtccaatcgcattcgacgatgatctctccttccttgatgataatctggtgtaccacatcctgcgtaagcattcagcaaagcgttgtggatgtatt

SEQ ID NO: 302895 - DNA, 633 bp, Artificial Sequence
  derived and/or modified sequence
atgaaactgtgggacgtggttgcagtttgtctggtccttctgcacaccgcatccgcctttcctctgcccgcaggcaagcggcccccagaagcgccagcagaggatcggagccttggccgcagacgggcacccttcgcactttcgtcggattcgaatatgcccgaagattacccggatcagtttgacgatgtgatggactttattcaagcaactattaagaggcttaagcgcagcccagataagcagatggccgtgctgcctcgtcgggaaagaaatagacaagccgccgcagcgaatcctgagaactcccgtggtaaaggtaggcgggggcaaaggggtaaaaacagggggtgtgtgctgaccgccatccatcttaatgtgaccgatctcggattgggatacgaaaccaaggaggaactgattttccgctactgtagcggatcctgcgacgcagcggagacgacttacgataagattctgaaaaacctttccagaaatagacgcttggtgtcggataaagtcggacaggcctgttgtagacctattgctttcgacgatgatctgtcttttcttgatgacaatcttgtgtaccatatcctcagaaagcattctgctaagaggtgtggatgtatt

SEQ ID NO: 302896 - DNA, 633 bp, Artificial Sequence
  derived and/or modified sequence
atgaaactctgggacgtggtagctgtctgcctcgtcctgcttcacaccgcatctgccttcccactccccgccggcaagcggcctcctgaagctcctgcggaagataggtccctgggtcgtagacgtgctcctttcgccctctcttctgactctaacatgcctgaagactatccggaccagtttgacgatgtgatggactttatccaagccaccattaagaggctgaaaagatcccccgataagcagatggcagtgctgccgaggagagaacggaatcgacaggccgccgctgcaaatccagaaaactcaagagggaaagggcgtcgaggtcagagggggaaaaacaggggatgcgtgttaaccgcaattcacttgaatgttacggacctgggcctgggttacgagaccaaagaagaactcattttcagatattgcagcggttcgtgcgacgccgctgaaacgacatacgataagatactaaaaaacctgagtcgaaatcgaagactcgtttcagacaaagtgggccaggcatgttgtcgcccaatcgcgttcgatgacgacctgtcctttctcgacgataaccttgtataccatatcctgcgaaagcatagtgctaagagatgtggctgcata

SEQ ID NO: 302897 - DNA, 633 bp, Artificial Sequence
  derived and/or modified sequence
atgaaattgtgggacgttgttgctgtctgtctggtgttgttgcacacagcttccgctttccccctccccgcaggaaaaagaccacctgaagccccggcggaagatagatccctgggccgcagaagggcaccctttgctctgtcatcagactcaaacatgccagaagactatcccgatcagtttgacgatgtgatggattttatccaggcaactatcaaacggctcaaacggagtccagataagcaaatggccgtgcttccgcggagagagcggaatcggcaagcggcagcagctaatcctgagaattcaaggggaaagggtcgcaggggccaaagaggcaaaaaccgaggttgcgtattaaccgcaatccacttaaatgttacagatttaggcctagggtacgagaccaaagaggagctcatcttccgttactgcagtggtagctgtgacgctgcagagacaacatacgataaaattttgaaaaacttgtcccgcaaccgccggctggtgagcgacaaggtaggccaggcctgctgcaggcctattgctttcgatgacgatttgagtttccttgacgacaacctggtataccacatactgcggaaacacagcgctaaacgctgtggctgtatc

SEQ ID NO: 302898 - DNA, 633 bp, Artificial Sequence
  derived and/or modified sequence
atgaagctgtgggatgtggtcgctgtctgcctggtgcttttgcatacggcatccgctttcccattgcccgcgggaaagcggcctcccgaggcacctgccgaggaccgctccttgggcagacggcgcgccccgttcgcactgtcgtcggattccaacatgccggaagattacccagatcaatttgatgacgtcatggatttcatccaggcaactatcaagagacttaaacgctcaccggataagcaaatggcggtgctgccgcgtagagagaggaatagacaggccgcggcggcgaatccggaaaatagtaggggaaagggccgcagaggtcaaagagggaagaacagagggtgtgtgctcaccgcgatccatctgaacgtgacggacctcggtctgggatacgagactaaagaagaactgattttcaggtactgctcagggtcgtgcgatgccgccgaaaccacgtatgacaaaatcctcaaaaatctgagccggaatagacggttggtgtcagacaaggtgggccaagcgtgctgtcggcctattgcctttgacgacgatctgtcatttctggacgacaacctggtctaccacatcctgcgcaagcactccgccaagagatgcggatgcatc

SEQ ID NO: 302899 - DNA, 633 bp, Artificial Sequence
  derived and/or modified sequence
atgaaactgtgggacgtggttgctgtctgcttggtgcttctccacaccgcctccgccttcccccttcctgccggcaagaggccgccggaggctccggctgaagatcgttctctcggtcggaggcgcgcccctttcgccctctccagcgactccaacatgccggaggactacccggatcagttcgacgacgtcatggacttcatccaggcaaccatcaagcgactcaagcgctctcctgacaaacagatggctgtcctcccaagacgcgagcgcaatcgtcaagcagctgctgcgaaccctgagaactccagaggtaaaggcaggcgaggccagcgtggaaaaaacaggggctgcgtactgaccgctattcacttgaacgtgaccgatctgggtctgggctacgagactaaagaggagctgatttttcgatactgtagcggctcttgcgatgcggctgagactacctacgacaagatcctgaagaacctatcccgcaaccgcaggttggtgtcagacaaggtcggtcaggcctgttgccgccctatcgcctttgacgatgacctatctttcttggacgacaacctcgtttatcacatattgaggaagcactctgctaagcgttgcggttgtatt

SEQ ID NO: 302900 - DNA, 633 bp, Artificial Sequence
  derived and/or modified sequence
atgaagctgtgggatgtcgtggctgtgtgcttggtgcttctgcatacagcatccgcgtttccgcttcccgcaggcaaaaggcccccggaggcgcctgccgaggatagaagccttggtaggcgccgtgccccatttgccctgagctctgattctaatatgccagaggattaccctgaccagtttgacgacgttatggactttatccaggcgaccatcaaacgtctgaagcggtcccccgataaacagatggccgtgttaccccggcgcgaacggaaccgacaagcggccgcggccaatcctgagaactcccgcggcaagggaaggcgggggcagcgggggaaaaaccgagggtgcgttttgactgccatccatttgaacgtgacagacctcgggctgggatacgaaacaaaggaagaactcattttccgctactgctccggaagttgcgatgctgccgagacaacctacgataagattctcaagaacctatccagaaatcgtcggctggtcagcgacaaggtgggccaggcctgctgccggcctattgcgttcgacgacgatctgagctttctggacgataacttagtgtatcacatcttgcgcaagcatagtgctaagcggtgtgggtgcatc

SEQ ID NO: 302901 - DNA, 633 bp, Artificial Sequence
  derived and/or modified sequence
atgaagctgtgggacgtggttgccgtttgcctggttctactgcataccgcaagcgcttttcccttgcccgccggcaaaaggccaccagaagccccagccgaagacaggtcccttggacgtcgccgggcgcccttcgccctctcaagcgattctaacatgccggaagactaccccgatcagtttgatgacgtgatggattttattcaagctaccattaagaggttaaaaaggtcacctgacaaacagatggccgttctgccacgacgggagagaaataggcaagccgccgccgcaaatccggagaattctaggggaaaaggtaggaggggtcagagaggaaagaacaggggctgcgtgctaaccgcaattcacctgaatgtgactgacttgggccttgggtacgaaaccaaggaagaactcatttttagatattgcagtgggagttgtgatgctgctgagacaacttacgataagatcctgaagaacctcagtagaaataggcggctggttagcgataaggtgggccaggcatgctgccgacctattgcatttgatgatgacctgtcattcctggacgacaacttagtgtatcacattctgagaaaacattcagcgaaacgatgtgggtgtata

SEQ ID NO: 302902 - DNA, 633 bp, Artificial Sequence
  derived and/or modified sequence
atgaagctttgggacgtagtagcagtctgcctggtgctgcttcacacagcctctgcctttcctctaccggcgggcaaaagaccacctgaggcgccagctgaggaccgttcactcggtagacgtagagcaccgtttgctttatcctctgactcaaacatgcccgaggactaccccgatcagttcgacgatgtcatggactttattcaggccacaattaagaggctcaaacggtcccccgacaagcagatggccgtactacccagacgggagcggaatcggcaggccgctgcagccaaccccgagaacagtcgaggtaaaggcaggcgagggcagaggggtaagaatagggggtgtgttctcaccgcaattcacctgaacgtgacagacctgggcctgggttacgaaaccaaagaagagctcatctttcgctactgtagcggatcctgtgacgcagccgaaactacttatgataaaatactgaaaaacctgtcccgaaacaggcgattagtctctgataaggtggggcaagcatgttgtcggcctattgctttcgacgacgacttgagctttttggacgataacctggtgtaccacattctgcgaaagcatagcgcaaagcgttgcggttgtatc

SEQ ID NO: 302903 - DNA, 633 bp, Artificial Sequence
  derived and/or modified sequence
atgaaactgtgggacgtggtggcggtatgcttggttctgctgcacacggcatcggccttccctctgccggccggaaaaagaccgccagaggcccctgccgaggatagatccctgggacggcgtagagcgccgttcgccctgtcatcagactcgaatatgccggaggactaccctgaccagtttgacgatgtcatggacttcatccaagcaactataaagagacttaagcgctcgccagataagcaaatggccgtgctgccgagacgcgaacgcaaccggcaggcagctgcagccaatccggaaaattccaggggcaaaggaaggaggggccagagaggcaagaaccgaggctgtgtgctcactgccatccacctgaacgtgaccgacctgggcctcggctatgagactaaggaagaattgattttcagatactgctcaggaagctgcgatgccgctgaaaccacgtacgacaaaatcctcaagaacctgtcaagaaatcggcgactcgtctcggataaggtgggacaggcttgctgccgcccgatcgcttttgatgatgatctgtccttcttggacgacaatctcgtgtaccatattctgcggaagcattccgctaagcggtgtgggtgtatc

SEQ ID NO: 302904 - DNA, 633 bp, Artificial Sequence
  derived and/or modified sequence
atgaagctgtgggacgtggttgcggtttgcctggtgctgctccatacggcgtccgcgttccctctccctgccggcaagaggccgcccgaggctccagccgaggaccgctcactcggtcggcgtagagccccgttcgctctgtcctcagattccaatatgcctgaagattatccagatcagtttgacgacgtgatggacttcatacaggcaacgattaagcggctcaagcgaagcccagataagcagatggccgtgctcccgcggcgggagagaaacaggcaggcagccgctgctaatccggagaacagcaggggtaaaggacggcgcggacaacgggggaagaatcgcggatgtgtcttgactgcaatccatctgaatgtcactgatctcgggctgggatacgaaaccaaagaagaactgatcttcagatactgctcaggatcttgcgatgcagcagaaactacctacgacaaaattctgaagaacctttcgcgcaaccggcgactcgtttctgacaaggtgggacaagcatgctgccgaccgatcgcatttgacgacgacctgtccttcttggatgacaaccttgtctaccacatcctgcgcaaacacagcgcgaagcggtgtggttgcatc

SEQ ID NO: 302905 - DNA, 633 bp, Artificial Sequence
  derived and/or modified sequence
atgaagctgtgggatgttgtggcagtatgcctggttctgctgcacacggcctcagcctttcctcttccggctggcaaaaggccgcctgaagctcccgccgaggacagaagcttaggacgacgccgagctccctttgccctctcatccgatagtaacatgccagaggattaccctgaccagttcgatgacgtgatggatttcattcaggcgactattaagagactgaagagatccccggataagcagatggccgttttaccccggcgggagcgtaaccgccaggcagcagcagccaaccctgagaactcacggggcaaaggccgtcggggccagagagggaagaatcgaggctgcgtacttacagccatccatctcaacgtgaccgatctggggctggggtacgaaaccaaagaggaacttatctttcgatactgtagcggcagctgtgatgccgccgaaacaacctacgataagatactaaagaatctttccaggaaccgacgtctcgtgtctgacaaggtgggccaagcctgttgccggccaatcgccttcgatgacgatttgtcattcttggatgacaatctggtctatcatattctccgtaagcattccgctaagcgatgtggctgtatt

SEQ ID NO: 302906 - DNA, 633 bp, Artificial Sequence
  derived and/or modified sequence
atgaagttgtgggatgttgtcgcagtttgtcttgttttattgcacaccgcctcagcatttccgctccccgctggaaagcgacctccggaagctccagctgaagatagaagcctaggtcgtaggcgcgctccttttgcattgtcttccgactccaatatgcctgaggactaccccgatcaatttgatgacgtgatggatttcattcaagctaccatcaagcgattaaagaggtctcctgacaaacaaatggcggtattgccacgtcgagagaggaaccgacaagctgcggctgcaaacccggaaaacagtcgaggcaagggtagacgtggacagcggggtaaaaaccgtggatgtgtactaaccgcaattcatcttaatgtcactgacttgggacttggttatgagaccaaagaagaacttattttcagatactgctcaggttcgtgcgatgctgcagaaacgacatacgataaaattttgaaaaatctctcaaggaacaggcgccttgtttctgataaagttggacaggcgtgttgccgtccgattgcattcgatgatgatctgtcgttcttggatgacaatttagtttatcacatcttgcgtaaacattctgccaaaagatgcggttgcata

SEQ ID NO: 302907 - DNA, 633 bp, Artificial Sequence
  derived and/or modified sequence
atgaagctttgggacgtcgtcgccgtctgccttgttctgctgcataccgcctctgcttttccactgcctgcagggaaaagaccaccggaggccccagcggaagacagatccctcggtcgaaggcgggccccgttcgcattgtcttctgatagtaacatgcctgaggattacccagaccagttcgatgacgtcatggatttcattcaagcaacaataaagaggctgaagcgatctcctgacaaacagatggctgtcctgccccggcgcgagagaaaccgccaagccgcggcagcgaatcccgaaaacagccgagggaaaggacgccgcgggcaaagaggcaaaaatcgtggctgcgttctgactgcaatccatttgaatgttacagatctcggcctgggatacgaaaccaaagaggaactgattttccgctattgctcgggatcttgtgacgcggctgagactacatacgataagattctgaaaaacctgagtcggaatcgacgtctagtgtctgataaggtcggacaagcttgttgtaggcctatagcatttgacgatgacttatctttccttgacgacaatctggtgtatcacatactgcggaaacatagcgctaagagatgtggctgcatc

SEQ ID NO: 302908 - DNA, 633 bp, Artificial Sequence
  derived and/or modified sequence
atgaagttgtgggacgtggtggctgtctgcctcgtgctgctccacactgcctccgcgttccctttgccggccggaaagaggccgccggaggcccccgcagaggaccgctcgttgggacgtcgcagagcaccattcgcgctttcatctgattcgaacatgccagaagattacccggaccagtttgatgatgtcatggatttcattcaggccaccattaagcggctgaagcggtcaccagataagcagatggctgttctgcccagaagagaacgcaataggcaggccgcagccgctaaccccgaaaacagcaggggcaaaggacggagaggtcagcgcggtaagaacaggggatgtgtgctgaccgctatccacctgaacgtcactgacctgggcctgggatatgagactaaagaagaactgatcttccggtactgcagcgggtcatgcgacgctgcagaaactacgtacgataagatcctgaaaaacctgtcgcggaataggcgacttgtgtcagacaaagtcggtcaggcgtgttgcagacctattgctttcgatgatgatctctccttcttggacgacaacttggtgtaccacatcctgagaaaacactccgcgaagcgctgcggatgtatc

SEQ ID NO: 302909 - DNA, 633 bp, Artificial Sequence
  derived and/or modified sequence
atgaaattgtgggatgtggtggcggtgtgcctggtgctcctccacacggcctccgcgttccctctgccggctgggaagcggccgccggaagccccagccgaggataggagcctgggccgccggagagctccgttcgccctctcgtccgactctaatatgccggaggactatccagatcaattcgacgacgtgatggacttcatccaggccactatcaagcggctgaaacgctcaccggacaagcaaatggcagtgcttccccgccgggaacggaatcggcaggcagccgccgctaatccagagaactcacgcggtaagggacggcggggccaacgaggaaagaaccgcggctgcgtacttaccgccatccacttgaacgtgactgacttgggattggggtacgaaaccaaggaggagcttatctttcgctactgctccggatcgtgtgatgcagctgaaaccacctacgacaagatcctgaagaatctgtcgaggaaccgcagactggtgagcgacaaggtgggacaagcatgctgcagacctatcgcgttcgatgacgacctgtcctttctggacgacaatctggtgtaccatattctccgcaagcactcggcaaagcgatgcggatgcatt

SEQ ID NO: 302910 - DNA, 633 bp, Artificial Sequence
  derived and/or modified sequence
atgaagttgtgggatgttgtggcagtttgtcttgtgctacttcataccgcaagtgcgttccctctgccagccggaaaacgaccacctgaagcacctgccgaggaccgttcccttggaaggaggagggcaccattcgccctttcttctgattctaacatgcctgaagattatcccgatcaattcgatgatgttatggactttattcaggcaactatcaaaagattgaaacgtagtccagacaaacagatggctgtgttgccaagaagagaaagaaacagacaagctgctgccgctaacccggagaattcaagagggaagggccgtcgtggtcaacgggggaaaaaccgaggatgcgtgctcactgcgatacacctgaacgtgacagatctgggtttggggtatgagaccaaggaagagctcatctttcgttattgttctgggagttgtgacgctgccgaaaccacctatgataagattttaaagaacctcagccgtaatcgccgccttgtttcagacaaggtgggtcaggcttgctgccgacctatagcattcgacgatgatcttagcttccttgatgacaaccttgtatatcatattctgagaaagcatagcgcaaagcgttgtggttgcatc

SEQ ID NO: 302911 - DNA, 633 bp, Artificial Sequence
  derived and/or modified sequence
atgaagctatgggatgtggtcgcagtctgcctggtcctgcttcacaccgccagcgcctttccactgcctgctggtaaacggcctccggaagcaccagccgaagatcgtagtctgggcaggaggagggcgcccttcgcactgagttcagattcaaacatgccagaagactaccccgaccaattcgacgacgtcatggactttatccaggcaacgatcaagcgtcttaagcgaagtcccgacaaacagatggctgttctgccgaggcgagaacgcaaccgacaggccgcagccgccaatcctgaaaactcgcgcggcaagggacgaaggggccagcgcggcaaaaacaggggatgcgtgctgactgcgattcatttgaacgtgactgatcttggcctgggttacgagaccaaagaggagttaatatttcgttattgtagcggctcatgtgacgctgccgaaactacctacgacaagatactgaaaaatctttctaggaatcggcggctggtctcggacaaagtcggtcaggcttgctgcagaccgatagcctttgatgatgacttgagcttccttgatgacaaccttgtctaccatatcctacggaaacactccgctaaacgctgtggctgcatt

SEQ ID NO: 302912 - DNA, 633 bp, Artificial Sequence
  derived and/or modified sequence
atgaagctgtgggatgttgtggccgtgtgcctcgtcttgctgcatacagcatcagctttcccactgcccgcaggaaaacgtccacctgaggcccccgctgaagaccgcagtctgggccgtcgccgcgctcccttcgcattgtctagcgattctaacatgcctgaagattacccagaccagttcgatgacgtgatggatttcatccaggccactatcaagcgcctcaaacgttcacccgacaagcagatggcagtgctgcctcgtagagaaagaaaccgtcaagctgcagccgctaaccccgagaatagtaggggaaagggtcgcagaggccaaaggggcaagaaccgtggttgcgtccttacagctatccatttgaacgtaaccgacctcggcctgggttacgaaaccaaggaggagctgatctttcgttactgctctggatcctgcgatgccgccgaaaccacctatgacaagatcctgaaaaacttgtcacgcaacagacgtctggttagcgataaagttggtcaggcctgctgtcgccccattgcctttgacgatgacctttctttcctggatgacaaccttgtgtatcatatactgcgtaagcactccgccaaacgctgcggctgcatc

SEQ ID NO: 302913 - DNA, 633 bp, Artificial Sequence
  derived and/or modified sequence
atgaagctgtgggatgtggtcgcagtgtgcctggtgctgctgcacaccgcgtctgcattcccgctgccagcaggtaaaagaccgcctgaggcaccagcagaagatcgctcgttgggcagaagaagagcacccttcgctctgtcaagcgatagtaacatgccagaagattatcctgatcagtttgatgacgtcatggacttcatccaagctaccataaaacggctcaaacggtccccggacaagcagatggcagtgctccctaggagagaaagaaatcgacaagccgcagcggcgaaccctgaaaattcgcgaggcaagggacggcgtggtcagcgcggaaaaaacagggggtgtgtgctgacggccattcatcttaacgtgactgatctgggtctgggatacgaaaccaaggaggaacttatctttcgctactgttctggatcatgtgatgcggctgaaactacctacgataagatcctgaagaacctctcccgcaatagaaggcttgtgtcggacaaggtcggacaagcatgttgccgcccgattgcatttgacgacgatctctcctttcttgacgataacctcgtataccacatacttagaaagcattcggcaaaaagatgtggttgcatc

SEQ ID NO: 302914 - DNA, 633 bp, Artificial Sequence
  derived and/or modified sequence
atgaaactttgggacgttgtcgcagtatgtcttgtgctgctgcacactgcaagcgcatttccgctgccagccggtaaaaggcctcctgaggctccggcggaggatcgatcgctgggccgtcgacgggccccatttgccctgtcgtcggattcaaatatgccagaggactatcctgatcaatttgacgatgtgatggatttcatccaggcaaccataaagcgtctcaagaggagtccagacaaacagatggcagtgttgccacgccgtgagaggaacagacaagcagccgcagctaaccccgaaaatagccgcgggaagggtcgccgcggacaaagaggaaagaatagagggtgcgtgcttactgcaattcatctcaatgtcaccgaccttggcctcggttacgagactaaagaagaattgatcttccgctactgtagcggctcgtgtgacgccgcagaaactacctacgacaaaatcctgaaaaacctttcaagaaacaggcggcttgtctcagataaggtggggcaagcatgttgcaggccaatcgcctttgatgatgatttgtccttccttgatgataatctcgtgtaccatattcttaggaagcactccgccaagcgatgtggttgcatt

SEQ ID NO: 302915 - DNA, 633 bp, Artificial Sequence
  derived and/or modified sequence
atgaaattgtgggatgtcgtcgccgtgtgcctcgtgcttctacataccgccagcgcattccctctgcctgccggaaagcgaccccccgaggctccagcagaggacagatctctggggcgtaggcgggctccttttgctctgtccagcgattctaacatgcccgaagattatccagatcagtttgatgacgtaatggacttcatccaggctaccatcaaaagattgaaacggtcccccgacaagcagatggccgtgctcccccggcgagagcggaatcggcaggccgccgccgctaacccagaaaactctaggggcaaagggcgacgggggcagagaggcaaaaacaggggctgtgtgttaaccgcaatacacctgaatgtaaccgatctcggcctcggatatgagacaaaagaggagctgatcttccggtactgtagtggatcctgcgacgccgcagagaccacctacgacaaaatcctgaagaatctgtccaggaacagacgcctggtgtccgataaggtcggtcaggcttgctgccggcccatagccttcgatgatgacctgagcttcctagatgacaacctggtttaccacattctgcggaaacacagcgccaagaggtgcggctgcatc

SEQ ID NO: 302916 - DNA, 633 bp, Artificial Sequence
  derived and/or modified sequence
atgaagctgtgggacgtggtcgcggtgtgtctggtgcttctccatactgcatcggcgttcccgctgcccgcaggaaagcggccgccggaggcccctgctgaggaccgctccctgggacggagacgcgcgccattcgcgctctccagcgactccaacatgcctgaggattatccggatcagttcgacgacgtgatggatttcatccaagcaactatcaagaggttgaagcggagcccggataagcagatggccgtcctgccaaggcgggagcggaacaggcaggccgccgcagcgaacccggagaactcgaggggcaagggcagacggggacaacgcggaaaaaaccgcggatgcgtgcttaccgctatccacctgaatgtcaccgatctcgggctgggctacgagacgaaggaagaacttatcttccgctactgcagcggatcctgcgatgctgctgaaaccacgtacgacaagattctgaaaaacctttcacgcaatcggcggctcgtctccgataaggtgggacaggcctgctgccggcctattgcattcgacgacgatctgtcctttctcgacgataatctggtctaccacatcctgaggaagcatagcgccaagcggtgcggatgcatt

SEQ ID NO: 302917 - DNA, 633 bp, Artificial Sequence
  derived and/or modified sequence
atgaagctatgggatgtggttgctgtttgcctggtcctgctgcatactgccagtgcgtttccactgcccgccggcaagcgcccgcccgaggcccccgcagaggatcggagtcttggtcggcgcagggcgcctttcgctctttctagtgacagcaatatgccggaagactaccccgaccaattcgatgacgtcatggacttcatccaggcgaccattaagaggctgaaacgatccccagataagcagatggcagttctgcctcgtcgtgaaaggaacagacaggctgctgccgctaacccagagaattcacgggggaagggcagaaggggccagcgaggcaaaaaccggggatgcgttctgaccgctattcatctgaatgtaactgacttgggattagggtatgagaccaaggaggagctgattttccggtattgcagcggttcctgtgatgctgcagagactacctacgataaaatcctgaaaaatttgtctagaaacagacggcttgtctcagataaagtgggacaagcgtgctgcagaccaattgccttcgatgacgacctgtccttcctcgatgacaatctggtgtaccacatcctgcggaagcactctgccaaaagatgtgggtgcatc

SEQ ID NO: 302918 - DNA, 633 bp, Artificial Sequence
  derived and/or modified sequence
atgaaactctgggatgtggtggcagtgtgtttggttcttctgcatacggcatctgcgtttcctcttcccgccggtaagaggccacctgaagcacctgcagaagatcggtcccttggacggcgaagggcgccttttgcactctcttccgacagcaacatgccagaggattacccagaccaatttgatgacgttatggacttcattcaagctaccatcaaacggcttaagagatcgccggataagcagatggcggtgcttcctagaagagagcggaacagacaggccgccgccgctaacccagagaactcgagaggaaagggtcgtagaggacagagagggaaaaacagaggctgtgtcctcactgcgattcatctcaacgtcacggatctgggacttggatacgaaaccaaggaagaactgatctttagatactgttcgggctcatgtgatgcagctgaaactacgtatgataagattctcaagaatttgtcacggaaccggaggctggtgtccgataaagtgggtcaagcctgctgtagacccatcgctttcgatgatgacctgtccttccttgatgacaacctggtgtaccatatccttcgaaagcatagcgcaaagcggtgcggttgtatt

SEQ ID NO: 302919 - DNA, 633 bp, Artificial Sequence
  derived and/or modified sequence
atgaagctctgggacgttgtggcagtctgccttgtcctgcttcacactgcctccgcctttcctctccctgcaggaaagcggcctccggaagcacctgctgaggaccggagcctgggccgcaggagggccccttttgcactgagctccgactcaaacatgccagaggattacccagatcagtttgacgacgtaatggacttcatacaggcaacgatcaagcggctgaagcgcagccccgataaacagatggctgtgctgccccgacgggaaagaaaccgacaggctgctgcagcaaaccctgagaatagccgaggtaaaggacgacgcggccagcgcggcaagaataggggttgtgtattgaccgctatacaccttaacgtgacggatctcggattgggttatgagaccaaggaagagctgatcttccgatattgctctggatcttgtgatgcagccgagacaacatacgataagatcctcaagaacttgtcaaggaataggaggcttgtcagcgataaagtcgggcaggcatgttgtcgccccattgcctttgatgacgatctgtcttttctggacgacaacctggtgtatcatatcctgcgaaaacacagtgcaaagcgctgtgggtgcatc

SEQ ID NO: 302920 - DNA, 633 bp, Artificial Sequence
  derived and/or modified sequence
atgaagttgtgggacgtggtggccgtgtgccttgtgcttttgcatactgccagcgccttccccctccctgctggaaagcggccaccggaggcccccgccgaggataggtctctcgggcgcagaagagcaccattcgcactgagttcagacagcaacatgcccgaggattaccctgaccagttcgatgatgtcatggactttatacaagctaccattaaaaggctgaagcggtctccagacaagcagatggccgtcctacccagacgagagcgtaacagacaggccgccgcagccaaccctgaaaattcaagagggaagggaaggaggggccagaggggcaaaaataggggctgtgtgctcacagcaattcacctcaacgtgaccgatttgggattaggatatgagacaaaggaggagctcatttttaggtattgctcaggtagctgcgatgccgccgaaacaacctacgacaagatattgaagaacctgagccgaaaccggcgactcgtgtccgacaaggtgggccaggcttgctgcaggcctatcgcctttgatgacgatctgagcttcctggacgacaatctggtctatcacattttacggaaacactcggccaagaggtgtggctgcatc

SEQ ID NO: 302921 - DNA, 633 bp, Artificial Sequence
  derived and/or modified sequence
atgaaactgtgggacgtggtagctgtgtgcctggtgctactgcacactgccagtgcattcccactcccagccgggaaacgccccccagaagcccccgctgaagaccgcagtctaggaagaaggagagcccctttcgccctgagttccgattccaacatgccagaagattacccagatcagttcgatgatgtgatggattttattcaggccacaatcaaaagactgaaaagatctcctgataagcagatggccgtgttgccccgccgggaacgaaatcgccaggctgccgcagccaaccccgagaattcccggggaaagggacggcggggacagcgagggaaaaacaggggatgcgtgctcactgccatccacctcaatgtgactgatctggggttagggtacgaaacaaaagaagagctgatatttcggtactgctctggaagttgcgatgctgccgaaactacatatgacaaaatactgaaaaacttgtcccgcaatagacggctcgtgtccgataaagtcgggcaggcctgttgtcggcccatcgcctttgatgatgatctctcctttctagatgataatttagtctatcacatcctgcggaagcatagtgcgaaacgctgcgggtgtatc

SEQ ID NO: 302922 - DNA, 633 bp, Artificial Sequence
  derived and/or modified sequence
atgaaactgtgggacgtggttgcagtgtgtctggtcctcttgcataccgcgtccgcgtttcctctgccagcaggaaaaagacctcctgaagcccccgcagaggatcggagccttggaagaaggcgcgctccatttgcactttcgagcgactcgaacatgcccgaggactacccggaccagttcgacgatgtgatggacttcatccaagcaacgattaagcggcttaagagatccccagacaagcaaatggctgtgctccctcggcgtgagagaaatcgccaggcagccgccgccaatcctgaaaattctcgaggtaaaggtagaagaggccagcgcggcaagaatcgaggatgcgtgctgactgcaatccacctgaacgtgaccgatctgggactgggatacgaaaccaaggaggagctgatatttcgctactgttccggttcatgtgatgcggccgagacgacttacgacaagatcctgaaaaatctctcccggaacagacgtctcgtgtcagataaggttggccaggcttgttgccgtcctattgcctttgatgacgatctctccttcctcgatgacaatctcgtctatcatattctcaggaaacattctgccaaaaggtgtggatgtatc

SEQ ID NO: 302923 - DNA, 633 bp, Artificial Sequence
  derived and/or modified sequence
atgaagctctgggacgtggtggccgtgtgtctggtgctgctccatactgcctccgcttttcctctgccggcggggaagaggccgccagaagctccagccgaggaccgatcactgggacggcgcagagctccgtttgccttgtcgagcgattccaatatgccagaggactacccggaccaattcgatgacgtgatggactttatccaggcgactatcaagcggctcaaaaggagcccagataagcagatggccgtgttgccgcggcgcgaaagaaaccggcaggcagcggccgcgaaccctgaaaactcccgaggaaaaggacgacggggccagcggggaaaaaaccggggctgtgtcttgaccgcaatccacctgaacgtcactgatctgggtctggggtacgaaaccaaggaagagctcattttccgctactgctcaggctcttgcgacgcagcagagactacctacgacaagatactcaagaatttgtcgcgcaatagacgcctggtcagcgataaggtcggacaagcatgttgccgcccgatcgcattcgatgatgacctttcgtttctggacgacaatctcgtctaccacattttgcggaaacattccgccaaacggtgcggatgcatc

SEQ ID NO: 302924 - DNA, 633 bp, Artificial Sequence
  derived and/or modified sequence
atgaaactgtgggacgtggtggcggtctgcctcgtgctgctgcatacagctagtgcatttcccttgcctgccgggaagcgcccccctgaggctcctgccgaagaccgaagcctggggagaaggcgggccccattcgctttgtcttctgatagtaatatgcctgaagactaccccgatcagttcgacgacgtgatggatttcattcaggctacaatcaaacggcttaagagaagccccgataagcagatggctgtcctgcctcgcagagaaagaaatcgtcaggccgcggctgccaaccccgagaatagccgcggcaaaggccgtcgtggacagagaggcaagaaccgcggatgtgtcctgacagctatccaccttaacgttaccgacctgggtctaggctacgaaactaaggaggagttgatcttcaggtactgctcaggatcctgcgacgccgctgaaacgacttacgacaaaatactgaaaaacttgtcacgcaacagacggttagtcagtgataaggtaggccaggcgtgttgtcggcctatcgcatttgatgacgatctctcgtttcttgatgataacttggtgtatcatatcctgcgcaaacactcggctaagagatgcggctgtatc

SEQ ID NO: 302925 - DNA, 633 bp, Artificial Sequence
  derived and/or modified sequence
atgaaactctgggacgtcgttgcggtgtgcctcgtccttctgcacactgcctcagcgttcccactgccagccggtaaaagaccgcctgaggctcccgcggaagatcgatcgcttggacggcgccgcgccccttttgcactgagctccgactcaaacatgccggaggactacccggaccaattcgatgacgtgatggattttatccaggcgacgattaagagattgaagcgctcgccggacaagcagatggccgtgctgcccaggcgtgagagaaatcggcaagccgctgcagccaacccggaaaatagccgcgggaagggcagacgcggccagaggggaaagaaccggggctgtgtgctcactgcaattcatctgaacgtcaccgatctcggactgggatacgaaaccaaagaagagctgatcttcagatattgctccggatcttgcgacgccgccgaaaccacttacgacaagatcctcaagaacttgtcgcggaacaggcggctggtgtcggacaaggtggggcaggcatgttgccgcccaatcgctttcgacgatgacctgtccttcttggatgataatctggtgtaccacatcctccgcaagcatagcgcgaaacggtgcggatgcatc

SEQ ID NO: 302926 - DNA, 633 bp, Artificial Sequence
  derived and/or modified sequence
atgaaactgtgggacgtggtggcggtgtgcctcgtcttgctgcacaccgccagcgccttccccttgcctgctgggaagaggccgccagaagcgccagccgaagacagaagcctgggcagaagacgcgccccgtttgcactgtcctccgacagcaatatgccggaggattaccccgaccagttcgatgacgtcatggactttatccaagccaccatcaaacggctgaagcggtcgcctgataagcagatggcggtgctcccgcgccgggaaaggaaccgacaagctgcggccgcgaaccctgaaaactcgcgcggaaaaggaagaagagggcagcggggtaaaaatcgtggatgtgtgctgaccgccattcaccttaacgtcaccgacctgggccttgggtacgaaaccaaagaagaattgattttcagatactgctcgggttcgtgcgacgccgcagaaactacttacgacaagatcctgaagaatctgtcgagaaacagaaggctggtgtcggacaaggtggggcaggcttgctgcagaccgatcgctttcgacgacgacctgtcgttcctcgacgataacctcgtctaccatattctgcgcaaacactcagcgaagcggtgcggatgcatc

SEQ ID NO: 302927 - DNA, 633 bp, Artificial Sequence
  derived and/or modified sequence
atgaagctgtgggacgtggttgcagtgtgccttgtcctgctgcatactgcatcggcattccccctgccagctgggaagcgcccgccagaagcccctgccgaagatcggtcactcggtcgtcgtagagccccatttgcactgtcctcagatagcaacatgccggaagattaccctgatcagtttgacgatgtgatggactttatacaagcaaccatcaagcggctgaagagatccccggacaaacaaatggcggtgctgccacgacgagagaggaatcggcaggcagcagcagcaaatccagagaactcgagaggcaaagggcgccgcggacaacgggggaaaaaccgcggatgcgtcctgaccgcgatccatcttaatgtgacggatcttgggctgggatacgaaactaaggaggaacttatctttcgctactgttcggggagctgtgacgcagccgaaacgacctacgacaagatccttaagaatctgtccagaaataggaggctggtgtccgacaaggtgggtcaagcatgttgtcgacccatcgcatttgacgatgatctgtcgttccttgatgacaatctggtttaccacattcttcggaaacattcggcaaagagatgtggttgtatc

SEQ ID NO: 302928 - DNA, 633 bp, Artificial Sequence
  derived and/or modified sequence
atgaagctgtgggatgtggtggcagtctgtctggtgttgcttcataccgcatccgcgtttcctctcccagcaggaaagcgaccaccagaagcaccagcagaggaccgttcgttgggaagaaggagagcaccttttgccctgtcctccgattcaaacatgcctgaagattaccctgaccagtttgacgatgtcatggatttcatacaggccacgattaaacgtcttaagcgcagccccgacaaacaaatggcggtccttccacgaagagaacgtaacaggcaagccgcggccgcaaaccccgaaaactcgcggggcaagggacggagaggtcagcgcggtaagaaccggggctgcgtgcttaccgcaattcatctgaacgtgacggatttgggcctcggttacgaaactaaggaggaactcatctttcgatactgtagcggatcctgtgacgcagcagaaaccacctacgacaagattctcaaaaacttgtcgcgcaatcgtagacttgtgtccgataaggtgggccaggcgtgttgcagacctattgcatttgatgatgacctgtcgttcctggacgacaacctcgtctatcatattctgcggaagcattcggcaaagagatgtggatgtata

SEQ ID NO: 302929 - DNA, 633 bp, Artificial Sequence
  derived and/or modified sequence
atgaaattgtgggacgtggtggcggtgtgcctggttttgctgcataccgcatcagcatttcccctgccagcagggaagcgccctcccgaggctcccgccgaggaccgctctctgggtaggcggcgggcacccttcgcgcttagcagtgatagtaatatgccagaggactaccctgaccagtttgacgacgttatggactttattcaggctacaataaaacgcctgaaacgaagccctgataagcagatggccgtcttgcctcggcgggagcggaacaggcaggcagcagccgccaatccagaaaactctagaggcaaggggagaagaggacagagggggaagaaccgcggatgcgtcttgactgctatccatttgaacgtgacggatttgggtcttggatacgaaaccaaggaagaactcatattcagatattgttctggctcatgtgacgcagctgagacaacctacgataagatcttgaaaaacctgtctcggaatcggcggctggtgtctgacaaggtcggccaggcttgctgcagaccgatcgcctttgacgacgatctgagctttctggatgataatcttgtgtaccacatcttgcggaaacactctgccaagcgctgcggctgtatc

SEQ ID NO: 302930 - DNA, 633 bp, Artificial Sequence
  derived and/or modified sequence
atgaagctgtgggatgtggtggccgtctgcctggtgctgctccataccgcttcagctttccctctccctgcaggcaagaggccgccagaagctccagctgaagatcgctcattgggccggagacgcgccccctttgctctttcgagcgatagcaatatgcctgaagattaccctgaccagttcgacgacgtcatggactttatccaggccactatcaagcggctgaaacgctcgccagataagcagatggccgtgctgccacggcgcgagaggaaccgacaggcggcagccgcgaacccagaaaatagccggggtaaggggcgccggggacaacggggcaagaatcggggctgtgtgctgaccgccatccacctcaacgtgactgatcttgggctgggctatgaaaccaaagaggaactgatattcagatactgttcgggatcttgcgatgcggctgagactacctacgacaaaatcctgaaaaatctctcccgcaaccgccggctggtgtcggacaaggtgggacaagcctgttgccgcccgatcgcgttcgatgatgacctgagcttcctggatgacaacctggtgtaccacatcctgcggaagcacagcgccaaacgatgcggatgcatc

SEQ ID NO: 302931 - DNA, 633 bp, Artificial Sequence
  derived and/or modified sequence
atgaaattatgggacgtggttgcggtctgtctcgttttgctccacaccgcctcagcattccccctgccagccgggaagcggccccccgaggcacccgcagaggatagaagtcttgggcgcaggcgggccccttttgccctgtcttctgattcaaacatgcctgaggactatcctgaccagtttgacgatgtcatggatttcattcaggccacgatcaaacgactgaagcgttcccctgacaagcaaatggcggtcctaccgagaagagaaaggaaccgtcaggctgccgccgctaaccctgagaatagcagagggaagggtcggagaggccagagaggcaaaaaccgggggtgcgttctgacagccattcacttgaacgttacagacttgggtttggggtacgagaccaaagaagaactgatctttaggtactgtagcggatcatgcgacgccgctgagactacctatgacaagattctcaagaacctctctaggaatcgacggcttgtgagcgataaggtcggacaggcctgttgcaggccgatagccttcgacgacgacctgagttttttggacgacaaccttgtgtatcatattctccgtaaacatagcgcaaagaggtgcggatgcatt

SEQ ID NO: 302932 - DNA, 633 bp, Artificial Sequence
  derived and/or modified sequence
atgaaattgtgggacgtggtggccgtgtgcctggtcttgcttcacacggcaagcgctttccccttacccgctggaaagaggccacccgaagctccagctgaagatcgctccctggggagacgtcgcgctcccttcgcactttcatccgatagcaacatgcctgaggattaccccgatcagtttgacgatgtgatggattttatacaggccactattaagcgccttaagcggtcgccagacaaacagatggccgtgctgccccgccgtgagagaaacagacaggcagctgccgctaatccggaaaattcacgaggcaaagggagacgtgggcagagagggaagaatcgggggtgcgtcctaaccgccatacacctgaacgtgacagacttgggcttgggctatgagaccaaggaagagctgatcttccgttattgttctggctcctgcgacgcagcagagacgacatacgacaaaattctcaagaacttatctcggaaccgacggctggtgagcgacaaggtagggcaggcatgttgtcggccaattgcctttgatgacgatttgagttttctggacgataatcttgtgtatcatatattgagaaaacactccgcaaagcggtgcggatgtatc

SEQ ID NO: 302933 - DNA, 633 bp, Artificial Sequence
  derived and/or modified sequence
atgaagctgtgggatgtggtggccgtgtgtctggtgttgctgcataccgccagcgcatttccacttccggctggtaaacgacctccagaggcaccggcggaagatagaagcctcggtaggaggcgcgccccatttgcactgtcgtcagactcgaacatgcctgaggactacccggatcaatttgatgatgtcatggatttcatccaagcgactatcaagagacttaagcggagcccagacaagcaaatggcagttctccctagacgggaaagaaaccggcaggccgccgctgcaaacccagaaaactcccgaggtaaggggagaaggggacagaggggaaagaaccgaggatgcgtgctgactgctattcacctcaatgttaccgatcttggtcttggctacgaaactaaggaagagctgatttttcggtactgttcaggctcatgcgatgcagcagagactacttacgacaaaattctcaagaacttgtctcgcaatcgccgtctcgtcagcgataaagtgggacaggcgtgttgccgcccaatagccttcgatgatgacctcagtttcctggatgataaccttgtgtaccacattctccggaagcactcagcaaaacgatgtggttgtatc

SEQ ID NO: 302934 - DNA, 633 bp, Artificial Sequence
  derived and/or modified sequence
atgaaactttgggatgtcgtcgcagtgtgtctggtgttgctgcatactgcatccgcattccctctgcctgcgggaaagcgccctcccgaggcccccgcagaagatcgttccctcggccggaggagggccccttttgcactttccagcgatagcaacatgcccgaggactaccctgaccagttcgatgacgtcatggatttcatacaggcaactatcaagcgcctgaagcgatcacctgataagcagatggcagtccttccacgaagagaacgtaatcgccaagcagcagcagcgaaccctgagaattcaagaggaaaggggcggcgtggacagagaggaaagaatcggggatgtgtgttgactgcaatccaccttaacgttaccgatctgggattgggctatgaaaccaaggaggaactgatcttcagatactgttccgggtcctgtgacgcggccgaaaccacctacgataagatcctgaagaatctttctcgaaacagacggcttgtgtcggacaaggtgggtcaagcatgctgtcgccctatagcgtttgacgatgatttgtcattcctcgatgataaccttgtctaccacattctgcgcaagcattcggcaaaaagatgcggttgtatt

SEQ ID NO: 302935 - DNA, 633 bp, Artificial Sequence
  derived and/or modified sequence
atgaaactgtgggacgtcgtggctgtgtgtctggttctgctacacacagcctcagcattcccactccctgcgggcaagcggccaccagaggctcccgcggaggaccgctcgcttggacggcggcgagctccattcgccttgagctcggacagcaatatgcctgaggattacccagatcaattcgatgacgtgatggatttcattcaggcgaccatcaagcgacttaaacgctccccagacaagcagatggcggtgcttccgcgaagggaacgtaatcggcaagctgcagcggcgaatcctgagaattcgcgagggaagggtcgccgcggacagaggggtaaaaaccgaggttgtgtgctcacggccatccacctgaacgtgacggacctcggtctgggctatgagacgaaggaggagctgatcttccgctactgcagcggatcgtgtgatgccgccgagacaacttatgataagatccttaagaacctgagccgcaatcgccgtctggtctctgacaaggtgggccaggcttgctgtcgacccatcgcgttcgatgatgatctcagctttttggatgataacctggtctaccatattctgcgcaagcactccgccaagcgctgcggttgcata

SEQ ID NO: 302936 - DNA, 633 bp, Artificial Sequence
  derived and/or modified sequence
atgaagctatgggatgtcgttgctgtctgcctcgtgctgctccataccgcctctgcttttcccctgccagccggcaaaaggcctcctgaagcccccgcagaggatcggtcacttgggaggcgcagggcgccctttgccctgagctctgattccaacatgcctgaagactaccctgaccagtttgatgacgtgatggacttcatccaggccaccattaagcgactgaaacggtcccccgacaagcagatggctgtgctgcctaggcgtgagcgtaaccgacaggcagcggccgcaaatcccgaaaacagccgcggcaaaggccgtagggggcagaggggcaagaatcgaggatgcgtgctgacagcaattcatctgaacgttactgacctgggattggggtacgagaccaaggaagagctaattttccggtactgcagcgggtcttgtgacgctgccgagacgacttacgacaaaatccttaagaacctgtcgaggaaccggagactggtcagtgacaaagtcggccaagcctgctgccggccaatcgctttcgacgatgatctttctttcctagacgacaatttagtgtaccatattctgaggaaacattctgctaaaagatgcggctgtatc

SEQ ID NO: 302937 - DNA, 633 bp, Artificial Sequence
  derived and/or modified sequence
atgaaactgtgggacgttgtggctgtttgtctggttctgcttcataccgcaagcgcttttccccttcctgcagggaaacggccccccgaggcacctgccgaagatcgctccttgggcagacgccgcgctccattcgcattgagtagcgactcaaacatgcctgaagactaccccgatcagttcgacgacgtgatggactttatccaggcaaccatcaagcgattgaaaaggtctccagataaacagatggccgtactaccccgaagggaacggaatcggcaagccgccgcagcgaatcctgagaattctcgcggaaaaggcaggcggggccaacgtggaaagaatcgggggtgtgtgctgacagctatacacctgaacgtaacagatcttggcctcgggtacgagactaaagaggagctgatctttaggtactgctcaggcagctgtgatgccgccgagaccacatacgataagatccttaagaacttgagcagaaatcgtcgccttgtatctgacaaggtgggccaggcctgctgtaggcccattgcttttgatgatgacctgagctttctggacgacaacttagtgtaccacatcctgcgaaagcatagcgccaagcggtgtggctgtatt

SEQ ID NO: 302938 - DNA, 633 bp, Artificial Sequence
  derived and/or modified sequence
atgaaactgtgggacgtggtcgccgtctgcttggttctgcttcatacggcatctgcgtttccattgcccgcagggaaaagacccccagaagccccagcagaagacagatcgctggggcgacggcgggcacccttcgccctgtccagtgactccaacatgccggaagactacccagatcagtttgacgatgtgatggatttcattcaagcaaccataaagaggctcaaaagatcgcctgacaagcagatggctgtgctcccgcgtagagagcgcaacaggcaggccgccgctgccaatcccgaaaacagccgcggcaagggacgacgtggacagaggggtaagaacaggggatgcgtgctgaccgcaatacacttaaacgtgacagatctcggactgggatacgaaaccaaagaagagctaatatttcgctattgttctggaagctgtgatgcagcggagaccacgtacgacaaaatcctgaagaatctgtcccggaatagaagactcgtgagtgataaagttgggcaggcatgctgtcgtcccatcgcttttgatgatgacctaagcttcctggatgataaccttgtctaccatattctgcggaaacattcggccaagcggtgtgggtgtatt

SEQ ID NO: 302939 - DNA, 633 bp, Artificial Sequence
  derived and/or modified sequence
atgaagctttgggatgtggtagcagtgtgtcttgtgctgttacacaccgcaagcgcctttccattacccgcggggaaacggcccccagaagccccagcagaggacagatccttgggaagacggagggcacccttcgctctgtcatctgactctaacatgcccgaagactacccagaccaattcgacgacgtgatggacttcatccaagcgacaatcaaacgactgaaaaggtcccccgataagcagatggcggtgctgccacgacgtgaacgtaatagacaggccgccgcagccaaccccgagaattcaagaggaaagggtaggaggggccagcgtggtaagaatcgcggatgcgtgctgactgcaattcacttgaacgtgaccgacctgggactgggatatgaaaccaaagaggagctgatctttcgctactgctcgggctcttgtgatgccgctgagaccacttacgataagatcttaaagaatctctcccgcaacagaaggctcgtctctgacaaggttgggcaggcctgttgccgtcctatcgcctttgatgatgacctgtccttcctagacgacaatcttgtatatcatatactccgaaaacattccgctaagcgttgcggctgtata

SEQ ID NO: 302940 - DNA, 633 bp, Artificial Sequence
  derived and/or modified sequence
atgaagttgtgggatgtggtggcagtttgtctggtgctgcttcatacggcttccgccttcccactgccggctggtaagcggccacccgaagcgcctgcagaggatagaagtctgggcagacggcgcgctccattcgccctgtcatccgattccaacatgccggaggattatcccgatcaattcgacgacgtgatggacttcatccaggcaacaattaaacggcttaagaggagccctgacaagcagatggctgtgttgccaagacgggagaggaaccggcaagccgccgcagccaatccggagaatagccgaggcaaagggagaagaggtcaacgaggaaagaaccgcggatgtgtgctcacggccattcatctgaacgtgacagacctcggacttggttacgagacaaaggaggagctgatcttccggtattgttccggttcctgtgacgctgccgagacaacatacgacaaaatcctgaaaaacctctccaggaacaggagactggtctccgacaaagtaggccaggcatgttgcagacccattgccttcgacgatgacctgagttttctcgatgacaacctggtataccatattctgagaaagcactcagctaaacgctgcggttgcata

SEQ ID NO: 302941 - DNA, 633 bp, Artificial Sequence
  derived and/or modified sequence
atgaaactctgggacgtggtggctgtgtgtctcgttctgctccatactgcatccgcctttcctcttccagcgggcaaacgcccacccgaagcacctgcagaggacaggtcccttggaaggcggcgcgctccgtttgcattgagcagcgattcaaacatgcctgaggactaccctgatcagttcgatgatgtgatggatttcattcaggcaacgataaaacgactcaaaagatcgccagataagcagatggcggtactccctcggagggaaagaaacagacaagcagcagctgcaaatccggagaattcgagaggtaagggacgcagaggccaaagggggaagaaccgcggatgcgtccttaccgctattcacctgaacgtcaccgatcttgggctcggctatgagactaaagaagagcttatcttcagatactgttccggttcgtgtgacgcagctgagacgacctacgataagatcctgaaaaatctttcccgcaataggcgtctggtgtccgataaagtggggcaggcctgttgcagacctatagcatttgacgacgatctgtcatttctggacgataacctggtttaccatattctgcgaaagcacagcgcaaagcgctgcggatgtatt

SEQ ID NO: 302942 - DNA, 633 bp, Artificial Sequence
  derived and/or modified sequence
atgaaactttgggatgtcgtagctgtctgtcttgttttactgcataccgcatcggcgtttcctctgccagcgggcaagagacctccggaagcgcccgcagaagacagaagcttaggacgccgacgcgctccgttcgcactgagcagcgattcgaatatgcctgaagactacccagatcaattcgatgatgtcatggactttatccaagcgacaatcaaacgcttgaaacgctctccagacaagcaaatggctgtcttacctaggcgcgaaagaaatcggcaggcagctgccgctaacccggaaaacagcagaggcaaaggtagacgaggacagcgtggcaaaaacagagggtgcgttttaacagcaatccacctaaacgtaacggatcttggtcttggctatgaaacaaaagaagaattaatctttcgctattgcagcggctcttgcgatgcagcagaaacgacgtatgacaaaattctcaagaatttgtctcgcaatagacgtttggtctcagataaagtcggccaggcatgctgtcgcccgatcgcgtttgatgacgacctctcctttctcgacgacaacttggtctaccatattttacgcaagcactctgcgaaaagatgcggatgtatc

SEQ ID NO: 302943 - DNA, 633 bp, Artificial Sequence
  derived and/or modified sequence
atgaagctgtgggatgtggtcgcagtgtgtcttgtgcttctgcacactgcctcagcctttccgctgccggcaggcaagcgtcctcctgaagccccagcagaagatagatcgttgggacggcgccgcgcaccctttgcactgtcatcggattcaaatatgcctgaggattacccagatcagttcgacgatgtgatggatttcattcaggcgaccattaagcgcttgaagcgctcgcctgataaacaaatggcagtcctccctaggagagagcgcaacagacaagcagcagcagcaaatccagaaaactctaggggcaagggtcggcgcggccagagggggaagaatagaggttgtgtccttactgctatccatctcaatgtgaccgatctcggactcggctacgagactaaggaggagctcatcttcaggtactgttcgggttcatgtgacgcggcagaaaccacctatgacaagatccttaagaatctgtcaagaaaccggcgcctggtgtccgacaaggtcggtcaggcgtgctgccgccccattgcttttgacgacgatcttagctttcttgatgataacctggtgtaccacatactgcggaaacactcggcaaaaagatgcggttgcata

SEQ ID NO: 302944 - DNA, 633 bp, Artificial Sequence
  derived and/or modified sequence
atgaagctttgggatgtagttgcagtatgcttagttttgttacatactgcaagtgcattcccattaccagcaggtaagcgaccaccagaagcaccagctgaagatcgttctttaggaagaagaagagctccttttgctttatctagtgactctaatatgccagaagattacccagatcaatttgatgatgtaatggattttatacaagctactataaagagacttaagcgtagtccagataaacaaatggctgttttaccaagaagagaaagaaatagacaagctgctgcagctaatccagaaaatagtcgaggaaagggaagacgtggacaacgtggaaaaaatcgagggtgtgttttaacagctattcatcttaatgttactgaccttggattaggatatgaaacaaaggaagaattaatttttagatattgttcaggatcttgtgacgcagctgaaacaacttatgacaaaattttaaagaatttatcaagaaatagaagacttgtatcagataaagttggacaagcctgttgtagaccaatagcatttgatgatgatttaagttttcttgatgacaatcttgtttatcatattcttagaaaacattcagcaaaaagatgtggatgtatc

SEQ ID NO: 302945 - DNA, 633 bp, Artificial Sequence
  derived and/or modified sequence
atgaaactgtgggacgtcgttgctgtctgtctggtgcttttgcacacagcctccgcttttcctctgcccgcaggaaaaagaccacctgaagccccagccgaagatagatctctcggtcgaaggcgggctcctttcgctctgtcctccgacagcaatatgcccgaggattaccccgaccagtttgatgacgtgatggactttattcaggctacaattaagagattgaagcgaagcccagacaaacaaatggctgtcttgcctagacgtgagaggaaccgccaggccgctgcagcaaaccccgaaaactcccggggcaaggggcgcagaggccagagggggaaaaatcgaggatgtgttcttaccgccatacatttaaatgtcaccgacctgggactgggctacgaaacaaaggaggagttgatctttagatattgtagcggatcttgtgacgctgccgagactacctatgataagatattaaagaacctctcccgcaaccgccggttggtatccgataaagttggacaggcatgttgtagacccattgctttcgatgatgatctttcgttccttgacgacaatcttgtctatcacatactgcggaaacattccgcgaagcggtgcggttgtatc

SEQ ID NO: 302946 - DNA, 633 bp, Artificial Sequence
  derived and/or modified sequence
atgaagctatgggacgtggtggctgtgtgcctggttttgctgcatacggccagcgcattccctctgccggctggaaagagacctccagaagcacctgccgaggaccgcagcctgggacgccgtcgcgcaccatttgccctgagcagcgacagcaatatgcctgaggattatcctgaccaatttgacgatgtcatggattttattcaggcaacgattaagcgcttgaagcgcagtccggacaagcaaatggcggtgttacctcgtcgcgagcgcaatcgccaagctgccgcggcaaatccagagaactctcgtggtaaagggcggcgcggtcaacgcggcaagaatagaggatgtgttctgacagcgattcatctcaacgttaccgacctgggcctgggctatgagacaaaagaggaactgatcttccgctattgtagcggatcctgtgatgcagccgaaacgacctacgataagattctgaagaacctgagcaggaatcgccgtctggtttccgataaagttggccaggcgtgttgtcgcccaatcgcctttgatgacgatctttcattcctcgatgataacttggtgtaccacatactgcgtaaacacagcgcgaagcgttgcgggtgcatc

SEQ ID NO: 302947 - DNA, 633 bp, Artificial Sequence
  derived and/or modified sequence
atgaaactatgggatgtagtagcggtatgtctagttctattacatacggcgtcggcgtttccgctaccggcgggtaaacgaccgccggaagcgccggcggaagatcgttcgctaggtcgacgtcgtgcgccgtttgcgctatcgtcggattcgaatatgccggaagattatccggatcaatttgatgatgttatggattttatacaagcgacgataaaacgattaaaacgttcgccggataaacaaatggcggtactaccgcgacgtgaacgtaatcgtcaagcggcggcggcgaatccggaaaattcgcgtggtaaaggtcgtcgtggtcaacgaggtaaaaatcgtggttgtgttctaacggcgatacatctaaatgtaacggatttaggtttaggttatgaaacgaaagaagaactaatatttcgttattgttcgggttcgtgtgatgcggcggaaacgacgtatgataaaatattaaaaaatctatcgcgtaatcgtcgtctagtatcggataaagttggtcaagcgtgttgtcgtccgatagcgtttgatgatgatttatcgtttctagatgataatttagtatatcatatattacgaaaacattcggcgaaacgttgtggttgtata

SEQ ID NO: 302948 - DNA, 633 bp, Artificial Sequence
  derived and/or modified sequence
atgaaactctgggacgtcgttgccgtgtgcctggtgcttctccacaccgcgtccgcgttcccactcccggcgggaaagcggccgccggaagcgcctgcggaggatcggtccctcggtcggcggcgggccccgttcgcattgtcgtcagactcgaacatgccggaggattacccggatcagttcgacgacgtgatggacttcatccaggccaccatcaaacggctgaagagatccccggataagcagatggcagtgctcccaaggcgcgaacgcaacagacaagcagcagcggcgaatccggaaaactcgagaggcaagggccgccggggacagcgcggaaagaacagaggctgtgtgcttaccgccattcatctcaatgtgaccgatctcggtctgggatacgagactaaggaggagctgatcttccgctactgctcggggagctgcgatgccgctgaaacgacctacgacaaaatcctcaagaacctctcaagaaaccgccgcctggtcagcgacaaggtggggcaagcctgttgcaggcctatcgcgttcgacgacgatctgagcttcctggacgataacctggtttaccacatcctgcggaaacattccgcgaagagatgcggatgtatc

SEQ ID NO: 302949 - DNA, 633 bp, Artificial Sequence
  derived and/or modified sequence
atgaagttgtgggatgtcgtggcggtgtgcttggtgctcctccacactgcatcggcgttccccctccctgcgggaaaaagaccgccggaggctccagcagaggatcggagcctggggcggcggagggccccgttcgcgctgtccagcgattcgaatatgcctgaggactacccggatcagttcgacgacgtcatggatttcatccaggcgaccatcaagcgattgaagaggtccccggacaagcaaatggcggtgctgccgcgccgcgagcggaacaggcaggccgccgcggccaatcccgagaattcgcgcgggaagggacgccgcggccagcggggaaagaaccgcggttgcgtgctcactgccatacatctgaatgtcactgatctgggccttggatacgaaactaaggaagagcttatcttccgctactgctcaggaagctgcgatgctgcggaaactacctacgacaaaatcctgaaaaatctgtcccggaacagacgactggtgtcggacaaggtgggacaagcgtgttgccggccgatcgcttttgatgacgacctgtcgtttctggacgataatcttgtgtaccatatcctcagaaagcatagcgcgaagcggtgtggatgcatt

SEQ ID NO: 302950 - DNA, 633 bp, Artificial Sequence
  derived and/or modified sequence
atgaaactgtgggatgtcgtagctgtctgtctggtgcttctgcatacagcatccgcgtttcccctcccagccggaaaacgccctccagaagcaccagctgaagataggagtttaggacgacggcgggctccattcgccctcagtagtgacagtaacatgcccgaagattatcccgatcagttcgatgatgtgatggattttatacaggcaactatcaaacgcctgaaacggagtcccgataaacagatggccgttctacctaggagagaacggaatcggcaggctgccgctgcaaacccagaaaactcaaggggaaaagggagacggggacagagaggaaaaaatagagggtgtgtgcttactgccatacacctgaatgtgacagatctggggcttggatatgaaacaaaggaagaactaatcttccgatattgttcagggtcctgtgatgctgccgaaactacttatgataaaattctcaaaaatctgtctagaaatcgaaggctcgtgtccgataaagtggggcaggcatgctgtcggcccatcgccttcgatgatgacctgtcattcttagacgacaacctggtttatcatattctccggaaacactctgctaaaaggtgtgggtgtata

SEQ ID NO: 302951 - DNA, 633 bp, Artificial Sequence
  derived and/or modified sequence
atgaaactttgggacgtcgtggccgtgtgtctggtgctgctgcatacagcctcagcatttcccctgccagccggaaaaaggccaccagaggccccagctgaagatagaagcttgggaagaaggcgggcccccttcgctttgagctcagacagtaacatgccggaggactatcccgatcagtttgatgatgtgatggattttatccaagctacgatcaagcgcctcaaacgatcaccagacaagcagatggccgttttgccgcgaagggagcgcaataggcaggcagccgcagccaaccctgagaacagtcggggtaagggtcgccggggacagcgggggaaaaaccgaggctgtgttttgactgcgatccacttgaatgtcaccgaccttgggctgggatacgagactaaggaggaactcatctttcgctattgcagtggctcatgcgatgccgctgaaacaacctacgacaagatcctaaagaacctatctaggaatcggcgtctcgtctccgacaaagtgggccaagcatgctgtcgcccaattgcttttgatgacgatctctcctttcttgatgacaacctcgtctatcacatccttcgaaagcacagcgctaagcgttgtggatgcatc

SEQ ID NO: 302952 - DNA, 633 bp, Artificial Sequence
  derived and/or modified sequence
atgaagctgtgggatgttgtggccgtgtgtctcgtgcttctgcataccgcaagcgcattcccgcttcctgctggcaagaggcctcccgaagcgcccgcagaggatagatcactgggccggaggagagcccccttcgccctctcgtccgattccaatatgccagaagactatcctgaccaatttgacgacgtaatggattttatccaggctacaatcaagcgcctgaaacgctctccagataagcagatggctgtgcttccgcggagagagcggaaccggcaagccgccgcagctaacccagaaaactcaaggggtaaagggaggcgcggccagcgtggcaagaatagaggctgtgtgttgaccgcaatacatttgaacgtaaccgatctaggtctaggctacgagacgaaagaggagttgatatttagatattgcagcgggtcctgtgatgcagccgaaactacatatgataagatcttaaagaatctttctcgcaacagacgccttgtttccgataaagttggacaggcatgctgcagacctattgcttttgacgatgacttaagttttttggatgacaatctcgtgtaccatattctccgaaaacactccgcgaagcgttgcgggtgcatt

SEQ ID NO: 302953 - DNA, 633 bp, Artificial Sequence
  derived and/or modified sequence
atgaagctgtgggatgtggtggccgtctgcctcgtactgctgcacacagcttctgcgttcccgctgccggctggtaagaggccccctgaggcgcctgctgaggaccgctccctcggtaggagacgcgccccctttgctttgtcctccgactctaacatgcccgaggactacccagatcagtttgacgatgttatggacttcattcaagccactatcaaacgcctgaagagatcacccgacaaacagatggccgttctcccgaggagggaaaggaacagacaagccgctgctgctaatcccgagaatagtcgcggaaagggaaggcgcggacaacgcggtaaaaataggggctgtgtgctcacagctattcatctcaacgtcactgaccttggcctcggttatgagactaaggaggaactcatcttcaggtactgctccggatcatgtgacgcagccgagaccacatacgacaagatattgaagaatctctcacgcaaccgccgccttgtctccgacaaagtgggtcaagcatgttgccgcccaatcgcctttgatgacgatctgtcatttttggacgataacctcgtctaccacattctgaggaagcactctgcaaagcgctgcggatgtatc

SEQ ID NO: 302954 - DNA, 633 bp, Artificial Sequence
  derived and/or modified sequence
atgaaactttgggacgtggtcgcggtgtgcctggtgctgctgcataccgcttcagccttccctctgccggcgggtaaacgcccgccagaagcccctgccgaagatagatccctcggacggcggcgcgcccctttcgcgctcagctcggactcgaatatgccagaggactaccccgaccagttcgatgacgtgatggactttatccaagccactatcaaacgccttaaacgctccccggataagcagatggccgtgctgccgcgaagagaacgcaaccggcaggccgccgcggctaacccagagaacagccgcggaaaaggaaggagaggacagcggggcaagaacagaggatgcgtgctgactgccatccatctgaatgtgactgacctgggcctgggatatgaaacgaaggaggagctcatctttcgctactgctccgggtcatgcgacgcagcggaaaccacttacgataagatccttaagaatctctcccgcaatcggcgcctcgtgagcgacaaagtcgggcaagcgtgttgccggccaatcgcattcgacgacgacctgtcgtttctcgacgataacctggtgtaccacatcctgagaaaacatagcgcgaagcgctgcggatgtatc

SEQ ID NO: 302955 - DNA, 633 bp, Artificial Sequence
  derived and/or modified sequence
atgaagctgtgggacgtcgtcgccgtgtgcttagtgctgctgcacaccgcaagtgctttccccttgccagccggaaaacgccctcccgaggcacctgcagaggatcggtcgctcggcagaagaagagctcctttcgccctgtcctccgactcaaatatgcctgaggattacccagatcagttcgacgacgtcatggatttcattcaagcaacaataaagagactgaaacggtctcccgacaagcagatggctgttctgccacgcagagagaggaataggcaggctgccgcagctaatcccgagaacagtaggggcaaaggccgccggggtcagcgaggaaaaaacaggggttgcgtgctgacagcgatccacctcaatgttaccgacctcggactgggctacgagaccaaggaggagttgattttccgatattgttcaggtagctgcgatgccgccgagactacgtatgacaagatcctgaaaaatttgagtagaaacaggcggctagtatctgacaaagtcggacaggcatgctgtaggcctatcgcttttgatgacgatctcagctttctggatgataatctcgtgtatcacatccttcgcaagcacagcgccaaaaggtgtggctgtatt

SEQ ID NO: 302956 - DNA, 633 bp, Artificial Sequence
  derived and/or modified sequence
atgaaactgtgggatgttgtggcagtatgtctggtgttgcttcatacggcaagcgcatttccattacccgcaggcaaaagaccgccagaggctccagccgaggatcggtcgttagggcgcagacgagctcccttcgccctctcttccgacagtaatatgccagaagattatccagatcaatttgacgatgtgatggactttattcaggcaacgattaagcgactgaaacggtcacccgataaacagatggctgtcctaccccggagagagagaaacaggcaggcagccgccgccaatccagaaaactctagaggcaaggggcggcggggccagagaggtaaaaataggggatgcgtcttaacagcaatccatctcaacgtgaccgacctcgggctaggatatgagacaaaagaggagctcatatttaggtactgtagtgggtcatgtgatgccgccgagacgacttacgacaagatcctgaaaaacctgtcgaggaataggcggctagtgagtgacaaagtggggcaagcatgttgcaggcccatcgccttcgatgacgatctctctttcctggatgacaacttggtgtaccacatcctgaggaaacattctgcgaaacgctgtggttgtatc

SEQ ID NO: 302957 - DNA, 633 bp, Artificial Sequence
  derived and/or modified sequence
atgaaattgtgggatgtggtcgcagtgtgtctggttcttttgcacaccgcgtcagcattcccgctccctgctggaaaaagaccacctgaggcacctgcagaggatagatcacttggacggcggcgggctccgtttgcccttagctcggattcgaatatgccagaagattacccagaccagtttgatgacgtgatggatttcatccaagcgaccattaagcggcttaagaggagtcccgacaaacagatggcagtgcttcccaggcgtgaacgaaaccgacaagcagcggctgcgaaccctgaaaattccagaggaaaggggagacgaggtcaaagagggaagaaccgcggatgtgtgttgactgccattcacctgaacgtcaccgacctgggtcttggatacgaaacgaaagaagaactgatattcagatattgttcgggatcctgcgacgcagcagagactacctacgacaaaatccttaagaatctgtcacgcaaccggcgactggtgagtgataaggtaggccaggcttgttgccggccaatagcatttgatgatgatctgagctttcttgatgataacctcgtctaccatattctgagaaagcattccgccaagcggtgtggctgcatt

SEQ ID NO: 302958 - DNA, 633 bp, Artificial Sequence
  derived and/or modified sequence
atgaaattgtgggatgtggtggctgtgtgtttagtgctgctgcacaccgcctccgccttccctttacccgccggaaagaggccaccagaagcgcctgccgaagaccgcagcttgggcaggcgacgcgcaccatttgcacttagttctgacagtaacatgcccgaggactacccggaccagtttgatgatgttatggacttcattcaggcaacaattaagagactaaagcgctcacctgataagcagatggcagtcctgccaaggcgcgagcggaatcggcaagctgcagcagcaaatcccgagaacagtcggggcaaaggaaggcgcggtcagcgaggcaagaacagaggatgtgtgctaaccgctatccatctgaatgtgacggatttaggtttaggctacgagacgaaggaggagctcattttcaggtattgttccggcagctgcgacgcggccgaaactacatatgacaagattctgaagaacttgagccgcaacaggcgtctcgtgagcgataaagtgggtcaagcttgctgtaggcccattgccttcgatgatgatctgagcttcctggatgataacctggtctatcacatcctccgaaaacattctgcaaaacgctgtggctgtatt

SEQ ID NO: 302959 - DNA, 633 bp, Artificial Sequence
  derived and/or modified sequence
atgaagttgtgggacgttgtcgccgtatgcctcgtgctccttcacacggcaagtgccttcccactgccagcgggcaagcgacctcctgaggcgccagcagaggatcgctcactcggccgccggcgagccccttttgcattgtcctcggattccaatatgcccgaagactatcctgatcagtttgatgacgttatggatttcattcaggcaaccattaagaggctgaaaaggagcccggataagcagatggctgtgttgcctcgaagggagcggaataggcaagctgccgccgctaatccggaaaatagcaggggaaaggggaggcgaggacaaaggggaaaaaatcgagggtgtgtacttacagcaatccacctaaatgtaacggatctcggacttggctacgaaactaaggaagagctcatcttccgatattgctcgggttcctgtgatgctgcggaaacaacctatgacaaaatactgaagaacctgagcaggaataggcgcctggtctcagacaaggtcggccaggcgtgctgtaggccaatcgcttttgacgacgacctctcttttttggatgacaacctggtctaccatatcctgcgtaagcattctgccaagcgatgtggatgcatt

SEQ ID NO: 302960 - DNA, 633 bp, Artificial Sequence
  derived and/or modified sequence
atgaaactttgggacgtggtggcagtgtgtctggtgctgttacacaccgcaagcgcattccccctgccagccggcaaacgaccgcctgaggcccccgccgaggatcgctccctggggcgcagacgggctcccttcgccttgtcctccgacagtaacatgcccgaagactatcctgaccagtttgatgacgtgatggatttcatacaagcaacaatcaaacggttaaagaggtcaccagataaacagatggccgtcctcccccgtagagaacggaatcggcaggctgccgccgccaaccctgagaatagtagaggcaaggggagacgaggccaacgcggaaaaaatcgcggatgcgtgctaacagccattcacctaaacgtgactgatttaggactcggctatgaaacgaaggaagagctcatcttccggtactgttcgggatcatgtgacgccgctgagacaacttacgacaagattttaaaaaacctaagtcgaaaccggcgtctggtgtccgacaaggttggccaggcttgctgccgcccgatcgcatttgatgatgacctgtcatttctggacgacaatttagtctatcatattctccggaaacatagcgctaagcgctgtggctgcata

SEQ ID NO: 302961 - DNA, 633 bp, Artificial Sequence
  derived and/or modified sequence
atgaagttgtgggacgtggtcgccgtgtgcctggtgctcctgcatactgcgtcggccttcccgctcccggctggcaagcgaccgcccgaggctccagcagaagatcggtcactgggaaggcgtcgcgcgcctttcgccctgtcgtcggatagcaacatgccggaggactacccggatcagtttgatgacgtgatggatttcatccaggccactatcaaacgcctcaagcggagcccagacaagcagatggctgttctgccgcggagggagcggaacagacaggcggcggccgccaacccggagaactcacggggaaagggtaggagaggacagcgcgggaagaacaggggctgcgtgctcactgccatccatcttaacgtgaccgatctgggactcgggtacgaaacgaaggaagaactcattttccggtactgctcaggctcctgcgatgccgcagaaaccacgtacgacaagattcttaagaacctctcccggaatcgccgccttgtgtcagataaggtgggacaggcttgctgccggccgatcgcatttgacgacgacctgtccttcctggacgacaatctggtgtaccacatcctgcggaagcacagcgctaagcgctgcggatgtatt

SEQ ID NO: 302962 - DNA, 633 bp, Artificial Sequence
  derived and/or modified sequence
atgaaactttgggacgtggtggccgtgtgtttggtccttcttcacacggcatccgcattccctctgccagccggaaagaggcctccggaagctccagcagaagatcgcagcctgggacggagacgcgccccttttgcactctcctccgattcgaacatgccagaggactaccccgaccagtttgatgacgtgatggatttcattcaggcgaccattaagcgcctcaaaagatcacccgataagcagatggcagtgcttccaagacgtgagcgcaaccggcaagcagcagctgcgaacccagaaaattccagaggaaagggaaggcgcggccaaagaggaaaaaaccgtgggtgtgtgcttaccgcaatccatcttaatgtcacggacctcggtcttggttacgaaaccaaggaggaactgatttttcgttactgttctggttcgtgcgatgcggcggagactacttacgacaaaatcctcaaaaatctgtcccgaaataggagacttgtgtcggataaagtcggccaggcatgttgcaggcccattgcatttgacgacgacctttcattcctggatgacaacctcgtctaccatatcctgagaaaacattccgcgaagagatgcggttgcatt

SEQ ID NO: 302963 - DNA, 633 bp, Artificial Sequence
  derived and/or modified sequence
atgaagctttgggatgtggtggctgtttgtctggtgctattgcacactgcttcagcttttccccttcccgccgggaaacggccccccgaagcccccgcggaagacaggagcctgggccggagaagagcacccttcgctctctctagcgattcgaatatgcccgaagattaccctgaccaatttgatgacgtgatggactttatccaggcaactattaaacgcctgaagaggagtccggacaagcagatggccgtgctcccacgtagggagcgaaacaggcaggcagctgccgccaaccctgaaaactcccgcggcaaagggcggcgaggacaaagggggaagaaccggggatgtgtgttgaccgcaatccatttaaatgtgaccgatctggggcttggctatgagactaaggaggaactcatctttcggtactgctcaggatcatgtgatgccgctgaaactacctacgataaaatcctcaagaacctttcacgcaacagaaggcttgtctctgacaaagttggccaggcctgctgccgccctatcgcctttgacgatgacttatcttttctcgacgacaacttggtctatcatatcttgaggaagcactccgctaaacgctgtggatgcatt

SEQ ID NO: 302964 - DNA, 633 bp, Artificial Sequence
  derived and/or modified sequence
atgaaactgtgggacgtcgtggctgtctgtcttgtccttctccataccgcttcggcgttcccactgccggccggaaaacgcccgccagaagcccctgctgaggacagaagcctgggccggcgccgcgcgccgttcgcgctgtcaagcgactcaaatatgccagaagattaccctgatcaattcgacgacgtgatggactttatacaggcgaccatcaaaaggctgaagagatccccggataagcagatggcggtgctgccgcggcgagaaaggaaccgccaggccgccgccgcaaaccccgagaactcgagaggtaagggaaggagggggcagcgaggaaaaaaccgcggatgcgtgctcacggcaattcacctcaacgttaccgacctgggactcggttatgagactaaggaagaacttatcttcagatactgctcaggctcctgcgacgctgctgagactacctacgacaagatactgaagaatctctcgcgcaatcggaggctggtgtccgacaaagtggggcaagcctgttgccgcccgatcgccttcgatgacgatctgtcgtttctggacgataacttggtctaccacattcttagaaagcatagcgcaaagaggtgcggttgcatc

SEQ ID NO: 302965 - DNA, 633 bp, Artificial Sequence
  derived and/or modified sequence
atgaaactttgggacgtggtggccgtctgcctggtgcttctccataccgcatcggccttcccactgccagcgggcaaacgccctcctgaggcacctgccgaggatcgcagccttgggagacgccgagctccatttgcactctcgagcgattccaacatgccggaagattaccctgatcaatttgacgatgtcatggactttatccaggcaaccattaaacgtctgaaacgatccccagataaacagatggcggtcctccctcgtcgcgagagaaatcgccaggccgcagcagcaaacccagaaaactcgagaggtaagggtcggcgtggccaacgaggaaagaacagaggatgtgtgcttactgccattcaccttaacgttacggatctcggactcgggtacgaaactaaggaagagttgatatttcgctactgctccggttcctgtgacgcagcagaaactacctacgacaagatcttgaaaaatctgtcaagaaaccgacggctcgtgtccgacaaagtgggtcaggcttgttgcaggcctatagcatttgacgacgatctttcgttccttgacgacaatctggtctaccatattctccggaagcacagcgcaaagagatgtgggtgcatc

SEQ ID NO: 302966 - DNA, 633 bp, Artificial Sequence
  derived and/or modified sequence
atgaagctgtgggacgtggtggcagtatgtctggtgctgttgcacacggcatcagccttcccattgcccgcaggcaaacggcccccggaggcccccgctgaggaccgcagcttaggaagacgccgtgctcccttcgccctaagtagtgactcaaatatgccagaagattacccagatcaattcgatgatgtgatggacttcatacaggcaaccatcaagaggcttaagagaagccccgacaagcagatggcggtgttgccacgcagagaaaggaaccggcaagctgccgctgcaaaccctgagaactctaggggcaagggcagacgaggacagcgaggtaagaatcgaggatgcgtgctgacagccattcatttgaacgtcaccgacctggggttgggttacgagacaaaagaagagctgatttttaggtattgttcagggtcctgtgacgcagctgaaactacctatgataagattctgaagaacctcagtcggaaccgtcgcctggtgtctgacaaagtcgggcaggcatgctgccgccctattgcattcgatgacgatttatcattcctagacgacaacctggtgtaccacatcttgcgcaagcatagcgcgaaacggtgtggctgtatt

SEQ ID NO: 302967 - DNA, 633 bp, Artificial Sequence
  derived and/or modified sequence
atgaaactttgggacgtggtcgcggtttgtctcgtcttgcttcatactgcatctgctttccctctgcctgcgggtaaacggcctcccgaagcacctgcagaggacagatcgctgggtagacgccgggccccgtttgcgctctcatcggactcaaatatgccggaggactacccagatcagtttgatgacgtcatggatttcatccaagccaccatcaaacgcctcaaaagaagcccggataagcaaatggctgtgctgcctcgccgggaacggaacagacaggcagccgctgcgaaccccgaaaattcacgcggcaagggacgcaggggacagcgggggaagaaccgcggatgcgtgttgaccgctatccatctgaatgtgaccgatctgggattgggatacgaaaccaaagaagaactcatcttcagatattgctcgggctcctgcgacgcggccgaaaccacttacgacaagatcctgaaaaatctctcccgcaaccggaggctcgtgtccgataaagtgggacaggcatgctgcaggccaatcgccttcgatgatgacttgagcttcctcgatgataacctggtgtaccatatcctcagaaagcattccgcgaagaggtgcggatgcatt

SEQ ID NO: 302968 - DNA, 633 bp, Artificial Sequence
  derived and/or modified sequence
atgaagctgtgggatgtggtggccgtctgtctcgtcctcctgcataccgcgtctgcctttccgctgccagccggcaagcggccaccggaagctccggctgaggaccgatcacttggtcggcgccgtgctcccttcgccttgtcatcagactcgaacatgccagaggattaccctgaccagttcgacgacgtcatggatttcatccaggctaccatcaaacgcctgaaacgttcgcccgacaaacagatggccgtgcttccgcgccgggagaggaacagacaggccgcagccgcaaacccggaaaattcccgggggaagggccgcagggggcaacggggcaagaatagaggatgcgtgctgactgcgattcatctcaacgtgaccgatctcggattgggatacgaaacgaaggaggagctgatttttcgctactgcagcggatcgtgcgatgcggcggagactacctacgacaagatcctcaagaatctctcacggaacagaaggttggtgtcggataaggtgggacaggcctgttgccggcctatcgcatttgacgatgacctgtcgttcctggacgataatcttgtgtaccacatcctgcgcaagcattcagcgaagcggtgtggatgcatc

SEQ ID NO: 302969 - DNA, 633 bp, Artificial Sequence
  derived and/or modified sequence
atgaagctttgggatgttgtggcagtgtgcctggtgcttcttcatacagcctcagccttccctcttccagcaggaaaacgccctcctgaagcaccggctgaagatcgttccctgggcaggagaagggccccttttgcgctttccagtgactctaacatgccagaggattaccctgaccagtttgacgatgtcatggacttcattcaggcaaccatcaaaaggctcaaacgctctcccgataaacagatggccgtgttaccgcggagggaacggaaccggcaagctgcagccgccaacccagagaacagcaggggaaagggaagaaggggccagagagggaaaaatcgcggatgcgttctcaccgcgatacacctcaatgtgaccgatctcggactgggttatgaaaccaaggaggagctcatttttagatactgcagtggctcttgcgacgcagcagagaccacctacgacaaaattcttaaaaaccttagccgaaacaggagattggtcagcgataaggttggccaagcgtgctgccgacctattgcctttgacgacgacttgagcttccttgacgataatttagtttaccacattctacgcaaacactccgctaagcggtgtggatgtatc

SEQ ID NO: 302970 - DNA, 633 bp, Artificial Sequence
  derived and/or modified sequence
atgaaactatgggacgtggtggcagtgtgcttggtgctgctccacacagcctcggccttccctcttccagcaggaaaaagacccccggaggcacccgcagaggatagatcgttaggccgcagacgtgccccatttgcacttagcagcgacagtaatatgccagaagactatcccgatcagtttgacgatgtgatggacttcattcaagcgacaatcaaaaggctaaagcgctccccagataagcagatggccgtcctgccgaggcgcgaacgcaatagacaggcggctgccgcaaacccagagaactcacgcggaaaggggcgacggggccagagaggcaagaatagaggatgtgttctgaccgcgatacaccttaatgtgactgatctcggtctcggttacgaaaccaaagaggaactcatcttccgatactgctcgggctcctgcgacgccgctgagactacttacgacaagattctaaagaatcttagtcgtaacagacgactagtgtcagataaagtgggtcaggcttgctgcagacctattgctttcgacgacgacctttctttcctggacgataaccttgtgtatcacatcttgcggaagcattccgccaaacgatgcggatgcatc

SEQ ID NO: 302971 - DNA, 633 bp, Artificial Sequence
  derived and/or modified sequence
atgaagctctgggacgtcgtggccgtgtgcctcgtgcttcttcatactgcgtcagccttccctctgccggctggaaaaagacccccggaggcgccggcggaagatcgctccctgggtcgccggagggcaccattcgcgctgtcctccgacagcaatatgccagaggattacccagaccagttcgacgacgtaatggatttcattcaggctaccattaagagactcaagagatctccggacaagcaaatggctgtcctcccccgccgcgaacgcaacaggcaagccgccgccgctaaccccgaaaactcccgcgggaaagggcggcggggacagcggggaaagaatcgcggttgcgttctgacggcaatccaccttaatgtgactgatctgggcctcggatatgaaaccaaggaggaactgatctttcgctactgctcgggatcgtgcgacgccgccgaaacgacctacgacaaaattctcaaaaatctcagccgtaaccgacggctggtgtcggacaaagtgggacaggcatgttgtcgcccgatagctttcgacgatgatttgtcattcctcgatgacaacctcgtgtaccacatcctccgcaaacactcggcaaagcggtgtgggtgcatc

SEQ ID NO: 302972 - DNA, 779 bp, Artificial Sequence
  derived and/or modified sequence
gggaaataagagagaaaagaagagtaagaagaaatataagagccaccatgaagctgtgggacgtggtcgccgtgtgcctcgtcttgttgcataccgcgtcggcattccccctcccagcggggaagaggccaccggaggcaccggctgaagatcggtccctgggccgacgaagagcccccttcgccctctcgtcggactccaacatgcccgaggattaccctgaccagttcgacgacgtgatggactttatccaggcgacgatcaaaagactcaagagaagcccggataaacaaatggcggtgcttcctcgccgggagcggaataggcaggccgcagccgctaacccggagaactcacgcggaaaagggaggaggggacagcgcggaaagaaccgcgggtgcgtcttgactgcgatccacttgaacgtgacagatctgggacttgggtacgaaacgaaagaggaactgatcttccggtattgttccggtagctgcgacgcagccgaaacaacgtacgacaagatccttaagaatctcagccgcaataggcggcttgtatcagacaaagtaggacaggcgtgttgcagacccattgcgtttgatgatgacttgtcgtttctggatgataatcttgtatatcacattttgcgaaagcattcagcgaaaagatgtggttgcatttaatgagctgccttctgcggggcttgccttctggccatgcccttcttctctcccttgcacctgtacctcttggtctttgaataaagcctgagtaggaag

SEQ ID NO: 302973 - DNA, 636 bp, Artificial Sequence
  derived and/or modified sequence
atgaagctgtgggacgtggtggccgtgtgcctggtgctgctgcacaccgccagcgccttccccctgcccgccggcaagagaccccccgaggcccccgccgaggacagaagcctgggcagaagaagagcccccttcgccctgagcagcgacagcaacatgcccgaggactaccccgaccagttcgacgacgtgatggacttcatccaggccaccatcaagagactgaagagaagccccgacaagcagatggccgtgctgcccagaagagagagaaacagacaggccgccgccgccaaccccgagaacagcagaggcaagggcagaagaggccagagaggcaagaacagaggctgcgtgctgaccgccatccacctgaacgtgaccgacctgggcctgggctacgagaccaaggaggagctgatcttcagatactgcagcggcagctgcgacgccgccgagaccacctacgacaagatcctgaagaacctgagcagaaacagaagactggtgagcgacaaggtgggccaggcctgctgcagacccatcgccttcgacgacgacctgagcttcctggacgacaacctggtgtaccacatcctgagaaagcacagcgccaagagatgcggctgcatctag

SEQ ID NO: 302974 - DNA, 636 bp, Artificial Sequence
  derived and/or modified sequence
atgaagctatgggacgtagtagctgtctgtctcgtgcttttgcacacagcctccgcattccccctgccagccggcaagcgcccccccgaggccccagcagaagaccgatccctcggcagaaggagagctcctttcgctctgtctagcgatagcaatatgcccgaggactatccggaccaattcgacgacgtaatggacttcatacaggccacaatcaagcgcctcaagcgatcaccagacaaacagatggctgtgctgccaagaagggaaaggaaccggcaggcagcagctgccaaccccgagaactccaggggtaaggggaggcgggggcaaaggggtaaaaataggggctgtgtgctgacggccatccacctgaacgtaacagatctgggactgggctatgaaacaaaagaagagctgatttttagatactgttccggatcatgtgacgccgccgaaaccacatatgataagattctgaaaaatctgagccggaatcgacgacttgtgagcgataaggtgggacaggcctgttgtaggccaatcgctttcgatgacgacctctcctttttggatgataaccttgtatatcatatcttacgaaaacactccgcaaagcgctgtggctgcatctag

SEQ ID NO: 302975 - DNA, 636 bp, Artificial Sequence
  derived and/or modified sequence
atgaagctgtgggatgtggtggccgtgtgcctggtgctgctgcacacagccagcgccttccccctgcctgctgggaagaggcctcctgaggccccagctgaggacaggagcctgggcagaagaagagccccctttgccctgagcagtgacagcaacatgcctgaggactacccagaccagtttgatgatgtgatggacttcatccaggccaccatcaagaggctgaagaggagcccagacaagcagatggctgtgctgccccggcgggagaggaaccggcaggccgctgctgccaaccctgagaacagccggggcaagggccggcggggccagaggggcaagaacagaggctgtgtgctgacagccatccacctgaatgtgacagacctgggcctgggctatgagaccaaggaggagctgatcttccgctactgcagcggcagctgtgatgctgctgagaccacctatgacaagatcctgaagaacctgagcaggaacagaaggctggtgtctgacaaggtgggccaggcctgctgccggcccatcgcctttgatgatgacctgtccttcctggatgacaacctggtgtaccacatcctgaggaagcacagcgccaagagatgtggctgcatctag

SEQ ID NO: 302976 - DNA, 636 bp, Artificial Sequence
  derived and/or modified sequence
atgaagctgtgggacgtggtggccgtgtgcctggtgctgctgcacaccgccagtgccttccctctcccagcaggtaaacgacccccagaggcaccggcagaagatcgcagcctgggtagacgtcgagcccctttcgctctttcctccgactcaaatatgcctgaggattatcccgaccagtttgatgatgtcatggatttcattcaagctaccatcaaacgtctgaaacgctctccagacaagcaaatggccgtgctccctcgccgggagcgaaatcggcaggctgcagcagcaaacccagagaacagcagaggcaagggtaggagaggacagcggggcaagaaccggggctgcgtgctgacagccatacacctcaacgtgacagacttgggcctgggctacgagactaaagaagagctcatattccgctactgttccggttcctgcgacgcagctgagaccacttacgataaaatcctaaaaaatttgtcccgcaaccgccgactggtatccgataaggtcgggcaagcttgctgtcggcccatcgcatttgatgatgacctctcttttcttgacgataacttggtgtaccacatcctgagaaagcacagcgccaaacgctgcggctgcatttag

SEQ ID NO: 302977 - DNA, 636 bp, Artificial Sequence
  derived and/or modified sequence
atgaagttgtgggatgtagtggccgtgtgtctagtcttattgcacactgccagcgcattccctcttcccgcagggaagcggccacctgaagcccctgcggaggatcggtccttgggacgacgcagggcgcctttcgccttgtcgtcagattctaatatgcccgaagactacccagaccagttcgatgacgtcatggatttcatccaagcaaccatcaagcgcctgaagcgttcccctgacaaacaaatggctgtgctcccaaggcgggagcgtaatcgtcaggctgccgcagctaaccccgaaaacagtagggggaagggaagaagaggccaaagaggaaagaaccgcggatgtgtactgactgcaattcacctcaacgtgaccgatctggggttgggatatgagacaaaggaggagttaatctttagatactgctcaggttcgtgtgatgctgctgagactacttacgataaaatcttgaagaatctgagtcggaaccgcagattagtaagcgataaagtgggccaggcgtgttgccggcctattgcatttgacgatgacctgtccttcttggacgataacctcgtctaccacatcctgcgcaaacacagcgctaagagatgtggctgtatctag

SEQ ID NO: 302978 - DNA, 636 bp, Artificial Sequence
  derived and/or modified sequence
atgaaattatgggacgtagtggccgtgtgtttagtcctgctccacacagcttctgctttccccttgcccgcaggcaaacggcctcccgaagctcccgccgaagaccggagcctcggcagacggagggcgccctttgccctaagtagcgactccaacatgccagaagattacccagaccagtttgatgacgttatggactttatccaagctacaataaagcgactgaagagatcacctgacaagcagatggccgtgctgccccgccgggaacgtaatagacaggctgcagcagcaaaccctgagaactcccgcggtaagggtaggagagggcagagaggtaagaaccgaggctgtgtcctcacagcaattcacctaaacgtaacagatctagggctgggctacgaaaccaaagaggagttgatattcaggtactgctcaggaagctgtgatgctgccgaaacaacatacgacaaaattttgaaaaatttgtcacgtaaccgacgcctcgtttccgacaaagtgggccaggcctgctgcagaccaattgcgtttgacgacgatctcagctttctcgatgataaccttgtttaccacattctcaggaagcactctgccaagagatgcggctgcatttag

SEQ ID NO: 302979 - DNA, 636 bp, Artificial Sequence
  derived and/or modified sequence
atgaagttatgggatgtagtcgcagtttgcttggtcttactccacacggctagcgcattccctttacccgccggcaaaagacctcccgaggctccagctgaggatcgatctttaggaagacggagagctccctttgcactcagctcagactcaaacatgccggaggactatcctgatcagttcgatgatgttatggactttattcaagccacaatcaagcggcttaagcgatccccagacaaacagatggcggtcctgcctcgcagagagagaaacagacaagcagcggcagctaacccggagaacagccgcgggaaaggccgacggggacagagaggcaagaatagggggtgcgtgcttactgcaatccacttaaatgtgacagaccttggtcttggatatgagactaaagaggaactcatctttcgatattgctcaggaagctgtgatgcagctgaaaccacttacgataaaattttgaagaacctttccagaaatagacggctggtatctgacaaggtgggtcaagcctgttgtaggcctattgcttttgatgacgacttgagctttcttgacgataatctggtttaccacattttgcgcaagcattctgcaaaacgatgtggctgtatctag

SEQ ID NO: 302980 - RNA, 779 nt, Artificial Sequence
  derived and/or modified sequence
gggaaauaagagagaaaagaagaguaagaagaaauauaagagccaccaugaagcugugggacguggucgccgugugccucgucuuguugcauaccgcgucggcauucccccucccagcggggaagaggccaccggaggcaccggcugaagaucggucccugggccgacgaagagcccccuucgcccucucgucggacuccaacaugcccgaggauuacccugaccaguucgacgacgugauggacuuuauccaggcgacgaucaaaagacucaagagaagcccggauaaacaaauggcggugcuuccucgccgggagcggaauaggcaggccgcagccgcuaacccggagaacucacgcggaaaagggaggaggggacagcgcggaaagaaccgcgggugcgucuugacugcgauccacuugaacgugacagaucugggacuuggguacgaaacgaaagaggaacugaucuuccgguauuguuccgguagcugcgacgcagccgaaacaacguacgacaagauccuuaagaaucucagccgcaauaggcggcuuguaucagacaaaguaggacaggcguguugcagacccauugcguuugaugaugacuugucguuucuggaugauaaucuuguauaucacauuuugcgaaagcauucagcgaaaagaugugguugcauuuaaugagcugccuucugcggggcuugccuucuggccaugcccuucuucucucccuugcaccuguaccucuuggucuuugaauaaagccugaguaggaag

SEQ ID NO: 302981 - RNA, 636 nt, Artificial Sequence
  derived and/or modified sequence
augaaauuaugggacguaguggccguguguuuaguccugcuccacacagcuucugcuuuccccuugcccgcaggcaaacggccucccgaagcucccgccgaagaccggagccucggcagacggagggcgcccuuugcccuaaguagcgacuccaacaugccagaagauuacccagaccaguuugaugacguuauggacuuuauccaagcuacaauaaagcgacugaagagaucaccugacaagcagauggccgugcugccccgccgggaacguaauagacaggcugcagcagcaaacccugagaacucccgcgguaaggguaggagagggcagagagguaagaaccgaggcuguguccucacagcaauucaccuaaacguaacagaucuagggcugggcuacgaaaccaaagaggaguugauauucagguacugcucaggaagcugugaugcugccgaaacaacauacgacaaaauuuugaaaaauuugucacguaaccgacgccucguuuccgacaaagugggccaggccugcugcagaccaauugcguuugacgacgaucucagcuuucucgaugauaaccuuguuuaccacauucucaggaagcacucugccaagagaugcggcugcauuuag

SEQ ID NO: 302982 - RNA, 636 nt, Artificial Sequence
  derived and/or modified sequence
augaaguuaugggauguagucgcaguuugcuuggucuuacuccacacggcuagcgcauucccuuuacccgccggcaaaagaccucccgaggcuccagcugaggaucgaucuuuaggaagacggagagcucccuuugcacucagcucagacucaaacaugccggaggacuauccugaucaguucgaugauguuauggacuuuauucaagccacaaucaagcggcuuaagcgauccccagacaaacagauggcgguccugccucgcagagagagaaacagacaagcagcggcagcuaacccggagaacagccgcgggaaaggccgacggggacagagaggcaagaauagggggugcgugcuuacugcaauccacuuaaaugugacagaccuuggucuuggauaugagacuaaagaggaacucaucuuucgauauugcucaggaagcugugaugcagcugaaaccacuuacgauaaaauuuugaagaaccuuuccagaaauagacggcugguaucugacaaggugggucaagccuguuguaggccuauugcuuuugaugacgacuugagcuuucuugacgauaaucugguuuaccacauuuugcgcaagcauucugcaaaacgauguggcuguaucuag

SEQ ID NO: 302983 - DNA, 4293 bp, Artificial Sequence
  derived and/or modified sequence
ccgcgctctctgatcagaggcgaagctcggaggtcctacaggtatggatctctggcagctgctgttgaccttggcactggcaggatcaagtgatgctttttctggaagtgaggattcttctaaggagcctaaattcaccaagtgccgttcacctgagcgagagactttttcatgccactggacagatgaggttcatcatggtacaaagaacctaggacccatacagctgttctataccagaaggaacactcaagaatggactcaagaatggaaagaatgccctgattatgtttctgctggggaaaacagctgttactttaattcatcgtttacctccatctggataccttattgtatcaagctaactagcaatggtggtacagtggatgaaaagtgtttctctgttgatgaaatagtgcaaccagatccacccattgccctcaactggactttactgaacgtcagtttaactgggattcatgcagatatccaagtgagatgggaagcaccacgcaatgcagatattcagaaaggatggatggttctggagtatgaacttcaatacaaagaagtaaatgaaactaaatggaaaatgatggaccctatattgacaacatcagttccagtgtactcattgaaagtggataaggaatatgaagtgcgtgtgagatccaaacaacgaaactctggaaattatggcgagttcagtgaggtgctctatgtaacacttcctcagatgagccaatttacatgtgaagaagatttctactttccatggctcttaattattatctttggaatatttgggctaacagtgatgctatttgtattcttattttctaaacagcaaaggattaaaatgctgattctgcccccagttccagttccaaagattaaaggaatcgatccagatctcctcaaggaaggaaaattagaggaggtgaacacaatcttagccattcatgatagctataaacccgaattccacagtgatgactcttgggttgaatttattgagctagatattgatgagccagatgaaaagactgaggaatcagacacagacagacttctaagcagtgaccatgagaaatcacatagtaacctaggggtgaaggatggcgactctggacgtaccagctgttgtgaacctgacattctggagactgatttcaatgccaatgacatacatgagggtacctcagaggttgctcagccacagaggttaaaaggggaagcagatctcttatgccttgaccagaagaatcaaaataactcaccttatcatgatgcttgccctgctactcagcagcccagtgttatccaagcagagaaaaacaaaccacaaccacttcctactgaaggagctgagtcaactcaccaagctgcccatattcagctaagcaatccaagttcactgtcaaacatcgacttttatgcccaggtgagcgacattacaccagcaggtagtgtggtcctttccccgggccaaaagaataaggcagggatgtcccaatgtgacatgcacccggaaatggtctcactctgccaagaaaacttccttatggacaatgcctacttctgtgaggcagatgccaaaaagtgcatccctgtggctcctcacatcaaggttgaatcacacatacagccaagcttaaaccaagaggacatttacatcaccacagaaagccttaccactgctgctgggaggcctgggacaggagaacatgttccaggttctgagatgcctgtcccagactatacctccattcatatagtacagtccccacagggcctcatactcaatgcgactgccttgcccttgcctgacaaagagtttctctcatcatgtggctatgtgagcacagaccaactgaacaaaatcatgccttagcctttctttggtttcccaagagctacgtatttaatagcaaagaattgactggggcaataacgtttaagccaaaacaatgtttaaaccttttttgggggagtgacaggatggggtatggattctaaaatgccttttcccaaaatgttgaaatatgatgttaaaaaaataagaagaatgcttaatcagatagatattcctattgtgcaatgtaaatattttaaagaattgtgtcagactgtttagtagcagtgattgtcttaatattgtgggtgttaatttttgatactaagcattgaatggctatgtttttaatgtatagtaaatcacgctttttgaaaaagcgaaaaaatcaggtggcttttgcggttcaggaaaattgaatgcaaaccatagcacaggctaattttttgttgtttcttaaataagaaacttttttatttaaaaaactaaaaactagaggtgagaaatttaaactataagcaagaaggcaaaaatagtttggatatgtaaaacatttattttgacataaagttgataaagattttttaataatttagacttcaagcatggctattttatattacactacacactgtgtactgcagttggtatgacccctctaaggagtgtagcaactacagtctaaagctggtttaatgttttggccaatgcacctaaagaaaaacaaactcgttttttacaaagcccttttatacctccccagactccttcaacaattctaaaatgattgtagtaatctgcattattggaatataattgttttatctgaatttttaaacaagtatttgttaatttagaaaactttaaagcgtttgcacagatcaacttaccaggcaccaaaagaagtaaaagcaaaaaagaaaacctttcttcaccaaatcttggttgatgccaaaaaaaaatacatgctaagagaagtagaaatcatagctggttcacactgaccaagatacttaagtgctgcaattgcacgcggagtgagttttttagtgcgtgcagatggtgagagataagatctatagcctctgcagcggaatctgttcacacccaacttggttttgctacataattatccaggaagggaataaggtacaagaagcattttgtaagttgaagcaaatcgaatgaaattaactgggtaatgaaacaaagagttcaagaaataagtttttgtttcacagcctataaccagacacatactcatttttcatgataatgaacagaacatagacagaagaaacaaggttttcagtccccacagataactgaaaattatttaaaccgctaaaagaaactttctttctcactaaatcttttataggatttatttaaaatagcaaaagaagaagtttcatcattttttacttcctctctgagtggactggcctcaaagcaagcattcagaagaaaaagaagcaacctcagtaatttagaaatcattttgcaatcccttaatatcctaaacatcattcatttttgttgttgttgttgttgttgagacagagtctcgctctgtcgccaggctagagtgcggtggcgcgatcttgactcactgcaatctccacctcccacaggttcaggcgattcccgtgcctcagcctcctgagtagctgggactacaggcacgcaccaccatgccaggctaatttttttgtattttagcagagacggggtttcaccatgttggccaggatggtctcgatctcctgacctcgtgatccacccgactcggcctcccaaagtgctgggattacaggtgtaagccaccgtgcccagccctaaacatcattcttgagagcattgggatatctcctgaaaaggtttatgaaaaagaagaatctcatctcagtgaagaatacttctcattttttaaaaaagcttaaaactttgaagttagctttaacttaaatagtatttcccatttatcgcagaccttttttaggaagcaagcttaatggctgataattttaaattctctctcttgcaggaaggactatgaaaagctagaattgagtgtttaaagttcaacatgttatttgtaatagatgtttgatagattttctgctactttgctgctatggttttctccaagagctacataatttagtttcatataaagtatcatcagtgtagaacctaattcaattcaaagctgtgtgtttggaagactatcttactatttcacaacagcctgacaacatttctatagccaaaaatagctaaatacctcaatcagtctcagaatgtcattttggtactttggtggccacataagccattattcactagtatgactagttgtgtctggcagtttatatttaactctctttatgtctgtggattttttccttcaaagtttaataaatttattttcttgg

SEQ ID NO: 302984 - DNA, 606 bp, Artificial Sequence
  derived and/or modified sequence
atgatgcaggggaacacctgtcatcggatgagttttcatcctgggcgtgggtgccctcggggtcggggagggcatggggctagaccctccgccccaagtttcagaccccagaacttacgcttgctgcatccccagcaacccccagtgcaataccagtacgagcccccctctgccccctccacaaccttctctaactccccggctcccaatttcttgccccctaggcctgatttcgtgcccttccctcctccaatgccacctagcgcacaagggcccttaccaccatgtcccattcggcctccttttccgaatcatcagatgagacatccattccctgtccctccatgttttccaccaatgccaccacctatgccgtgccctaataatcccccagtaccgggcgcgccccctggccaaggaacgtttcccttcatgatgcctcccccaagcatgcctcatcccccacctcccccagtaatgccccaacaggtaaactaccaatacccgcccggttattcccaccacaacttcccaccaccgagcttcaactctttccagaacaacccaagcagctttttgcccagcgctaacaacagttccagctag

SEQ ID NO: 302985 - DNA, 606 bp, Artificial Sequence
  derived and/or modified sequence
atgatgcagggcaacacctgccacaggatgtccttccaccctggccggggctgcccccggggccggggcggccatggagcccggcccagcgcccccagcttccggccccagaacctgcggctgctgcacccccagcagccccctgtgcagtaccagtatgagcccccatctgcccccagcaccaccttcagcaacagccctgcccccaacttcctgccccccaggccagactttgtgcccttccccccacccatgccacccagcgcccagggccccctgcccccctgccccatccggccccccttccccaaccaccagatgaggcaccccttccctgtgcccccctgcttcccccccatgcccccacccatgccctgccccaacaacccccctgtgcctggggcccctcctggccagggcaccttccccttcatgatgcccccacccagcatgccccaccccccacctcctcctgtgatgccccagcaggtgaactaccagtacccacctggctacagccaccacaacttccccccacccagcttcaacagcttccagaacaaccccagcagcttcctgcccagcgccaacaacagcagcagctag

SEQ ID NO: 302986 - DNA, 606 bp, Artificial Sequence
  derived and/or modified sequence
atgatgcagggcaacacctgccaccggatgagcttccaccccggccgaggatgcccgaggggaagaggtggtcatggtgcccggccatccgccccatccttccggcctcagaacctaagactgctccacccacagcagcccccagtccaatatcagtatgagcctccatctgcaccgtcaacaaccttctctaactcgccagcaccaaacttcttgccaccgaggcccgatttcgttccttttcccccacccatgcctccctcagcccagggacctttgcctccttgtccaatcaggcccccctttcctaaccaccaaatgagacacccgttcccagtacccccgtgcttcccaccaatgccccccccaatgccatgccccaacaatccaccagttccaggtgctcccccgggacagggtacctttcctttcatgatgcccccaccttctatgccacacccaccacccccgccagtgatgccgcagcaagtgaattatcagtaccccccgggatatagccatcacaacttccctcctccctcttttaattcattccagaacaatcctagctcatttctgccatcagcaaataatagctcctcttag

SEQ ID NO: 302987 - DNA, 606 bp, Artificial Sequence
  derived and/or modified sequence
atgatgcaaggcaatacctgtcaccggatgtcgttccaccctggccgaggatgccccagaggcagaggcggacatggagctagaccaagcgctccatcctttcgccctcagaatctccgtctgttgcaccctcagcagccccctgtgcaataccagtacgaacctcccagcgctccatcaaccacttttagcaactcgccggctcctaattttttgccaccacgccctgactttgtccctttcccccctcctatgccccctagcgcccagggtccacttcccccatgcccaatcagaccacccttccccaatcaccaaatgcgacatccttttcctgttccaccatgcttcccgcctatgcctcctcccatgccttgccctaacaaccctcccgttcccggtgccccaccaggccaggggacattccctttcatgatgccacccccatccatgccgcatcccccaccacctcccgtcatgccgcagcaagtgaattaccagtaccctccgggatactcccaccacaactttccgccaccgtcctttaatagtttccagaacaatccttcttctttcctgcctagcgcgaacaactctagtagctag

SEQ ID NO: 302988 - DNA, 606 bp, Artificial Sequence
  derived and/or modified sequence
atgatgcagggcaacacctgccacagaatgagcttccaccccggcagaggctgccccagaggcagaggcggccacggcgccagacccagcgcccccagcttcagaccccagaacctgagactgctgcacccccagcagccccccgtgcagtaccagtacgagccccccagcgcccccagcaccaccttcagcaacagccccgcccccaacttcctgccccccagacccgacttcgtgcccttccccccccccatgccccccagcgcccagggccccctgcccccctgccccatcagaccccccttccccaaccaccagatgagacaccccttccccgtgcccccctgcttcccccccatgcccccccccatgccctgccccaacaacccccccgtgcccggcgccccccccggccagggcaccttccccttcatgatgcccccccccagcatgccccaccccccccccccccccgtgatgccccagcaggtgaactaccagtacccccccggctacagccaccacaacttccccccccccagcttcaacagcttccagaacaaccccagcagcttcctgcccagcgccaacaacagcagcagctag

SEQ ID NO: 302989 - DNA, 860 bp, Artificial Sequence
  derived and/or modified sequence
gctttcgttgacgcgccaatcaccgcgcacaaggccctgcggtgggctgaagagttttccctcccttggcccagctttctcaggttgcttttcccggggatgtgaaggatacagaaatgactgtgaatcaacccatatcatcaaggagctgataatctagtggaagagttagacgtgtgcatacttcactatgatatgaggcagtctctgagcttatattctctgtggaagatgtgacatatccaggcggaacatcatgatgcagggaaacacatgtcacagaatgtcgttccacccgggacgagggtgtccccgaggacgaggaggacatggagccagaccctcagcaccatcctttaggccccaaaatctgaggctgcttcaccctcagcagcctcctgtgcaatatcaatatgaacctccaagtgccccttccaccactttctcaaactctccagcccccaattttctccctccacgaccagactttgtacccttccccccacccatgcctccgtcagcgcaaggccctcttcccccctgcccaatcaggccgcctttccccaaccaccagatgaggcaccccttcccagttcctccttgttttcctcccatgccaccaccaatgccttgtcctaataaccccccagtccctggggcacctcctggacaaggcactttccccttcatgatgccccctccctccatgcctcatcccccgccccctccagtcatgccgcagcaggttaattatcagtaccctccgggctattctcaccacaacttcccacctcccagttttaatagtttccagaacaaccctagttctttcctgcccagtgctaataacagcagtagtc

SEQ ID NO: 302990 - protein, 96 aa, Artificial Sequence
  derived and/or modified sequence
MPGSLPLNAEACWPKDVGIVALEIYFPSQYVDQAELEKYDGVDAGKYTIGLGQAKMGFCTDREDINSLCMTVVQNLMERNNLSYDCIGRLEVGTET

SEQ ID NO: 302991 - DNA, 291 bp, Artificial Sequence
  derived and/or modified sequence
atgcctggcagcctgccacttaatgccgaggcgtgctggccgaaggatgtaggcattgtggccctggagatctacttcccttcgcaatatgtggaccaggccgaactggagaaatatgatggcgttgatgccggtaagtacaccatcgggcttgggcaggccaaaatgggcttctgtactgatcgggaagatatcaacagcctgtgcatgacagtggtgcaaaacctgatggaaagaaataatcttagttatgactgcattggaagactagaggtcggcacagaaacatag

SEQ ID NO: 302992 - DNA, 291 bp, Artificial Sequence
  derived and/or modified sequence
atgcctggcagcctgcccctgaatgctgaggcctgctggcccaaggatgtgggcatcgtggccctggagatctacttccccagccagtatgtggaccaggccgagctggagaagtatgatggagtggatgctgggaagtacaccatcggcctgggccaggccaagatgggcttctgcacagaccgggaggacatcaacagcctgtgcatgacagtggtgcagaacctgatggagaggaacaacctgtcctatgactgcatcggccgcctggaggtgggcacagagacctag

SEQ ID NO: 302993 - DNA, 291 bp, Artificial Sequence
  derived and/or modified sequence
atgcccggcagcctgcccctgaacgccgaggcctgctggcccaaggacgtgggcattgtggctctagagatctatttcccctcccaatacgtggaccaggcagaacttgagaagtacgatggcgtggatgccgggaagtacacaataggcctcgggcaagcgaaaatgggattctgtacggatagagaggacataaactccctctgcatgaccgtggtacaaaatcttatggagagaaacaatttatcttacgactgcatcggcagacttgaggttggaaccgaaacgtag

SEQ ID NO: 302994 - DNA, 291 bp, Artificial Sequence
  derived and/or modified sequence
atgcccggaagcctgcccttaaatgccgaggcatgctggcctaaggacgtcggtattgtcgcgcttgagatttattttcccagtcagtacgtcgatcaggccgaactggagaagtatgacggggttgacgccggaaagtacacgatcggcctgggccaagcgaaaatgggtttctgtactgaccgagaagatataaacagcctgtgcatgacagtggtccaaaatctgatggaacgaaacaaccttagttatgactgtattgggagactggaggtgggtacagagacttag

SEQ ID NO: 302995 - DNA, 500 bp, Artificial Sequence
  derived and/or modified sequence
tttgcccgggaggatggggcaccgtgagcggggccgggcgggggttccctcgtgagggacctgaggccgaccgtagcggatctgagaagatccgagaacacaggcgagtcgcggaggggagaacgcgagagggcgttgaggtctaggtattctaacgacagaggagttggaggtgccagagaggcagctgtgaccgcctagagctctttcaccatgcctggatcacttcctttgaatgcagaagcttgctggccaaaagatgtgggaattgttgcccttgagatctattttccttctcaatatgttgatcaagcagagttggaaaaatatgatggtgtagatgctggaaagtataccattggcttgggccaggccaagatgggcttctgcacagatagagaagatattaactctctttgcatgactgtggttcagaatcttatggagagaaataacctttcctatgattgcattgggcggctggaagttggaacagagac

SEQ ID NO: 302996 - DNA, 291 bp, Artificial Sequence
  derived and/or modified sequence
atgcccggcagcctgcccctgaacgccgaggcctgctggcccaaggacgtgggcatcgtggccctggagatctacttccccagccagtacgtggaccaggccgagctggagaagtacgacggcgtggacgccggcaagtacaccatcggcctgggccaggccaagatgggcttctgcaccgacagagaggacatcaacagcctgtgcatgaccgtggtgcagaacctgatggagagaaacaacctgagctacgactgcatcggcagactggaggtgggcaccgagacctag

SEQ ID NO: 302997 - protein, 1097 aa, Artificial Sequence
  derived and/or modified sequence
MMDIYVCLKRPSWMVDNKRMRTASNFQWLLSTFILLYLMNQVNSQKKGAPHDLKCVTNNLQVWNCSWKAPSGTGRGTDYEVCIENRSRSCYQLEKTSIKIPALSHGDYEITINSLHDFGSSTSKFTLNEQNVSLIPDTPEILNLSADFSTSTLYLKWNDRGSVFPHRSNVIWEIKVLRKESMELVKLVTHNTTLNGKDTLHHWSWASDMPLECAIHFVEIRCYIDNLHFSGLEEWSDWSPVKNISWIPDSQTKVFPQDKVILVGSDITFCCVSQEKVLSALIGHTNCPLIHLDGENVAIKIRNISVSASSGTNVVFTTEDNIFGTVIFAGYPPDTPQQLNCETHDLKEIICSWNPGRVTALVGPRATSYTLVESFSGKYVRLKRAEAPTNESYQLLFQMLPNQEIYNFTLNAHNPLGRSQSTILVNITEKVYPHTPTSFKVKDINSTAVKLSWHLPGNFAKINFLCEIEIKKSNSVQEQRNVTIKGVENSSYLVALDKLNPYTLYTFRIRCSTETFWKWSKWSNKKQHLTTEASPSKGPDTWREWSSDGKNLIIYWKPLPINEANGKILSYNVSCSSDEETQSLSEIPDPQHKAEIRLDKNDYIISVVAKNSVGSSPPSKIASMEIPNDDLKIEQVVGMGKGILLTWHYDPNMTCDYVIKWCNSSRSEPCLMDWRKVPSNSTETVIESDEFRPGIRYNFFLYGCRNQGYQLLRSMIGYIEELAPIVAPNFTVEDTSADSILVKWEDIPVEELRGFLRGYLFYFGKGERDTSKMRVLESGRSDIKVKNITDISQKTLRIADLQGKTSYHLVLRAYTDGGVGPEKSMYVVTKENSVGLIIAILIPVAVAVIVGVVTSILCYRKREWIKETFYPDIPNPENCKALQFQKSVCEGSSALKTLEMNPCTPNNVEVLETRSAFPKIEDTEIISPVAERPEDRSDAEPENHVVVSYCPPIIEEEIPNPAADEAGGTAQVIYIDVQSMYQPQAKPEEEQENDPVGGAGYKPQMHLPINSTVEDIAAEEDLDKTAGYRPQANVNTWNLVSPDSPRSIDSNSEIVSFGSPCSINSRQFLIPPKDEDSPKSNGGGWSFTNFFQNKPND

SEQ ID NO: 302998 - protein, 126 aa, Artificial Sequence
  derived and/or modified sequence
MMDIYVCLKRPSWMVDNKRMRTASNFQWLLSTFILLYLMNQVNSQKKGAPHDLKCVTNNLQVWNCSWKAPSGTGRGTDYEVCIENRSRSCYQLEKTSIKIPALSHGDYEITINSLHDFGSSTSKFT

SEQ ID NO: 302999 - protein, 75 aa, Artificial Sequence
  derived and/or modified sequence
MMDIYVCLKRPSWMVDNKRMRTASNFQWLLSTFILLYLMNQVNSQKKGAPHDLKCVTNNLQVWNCSWKAPSGTGR

SEQ ID NO: 303000 - DNA, 3294 bp, Artificial Sequence
  derived and/or modified sequence
atgatggatatctatgtgtgtctgaaacgccctagttggatggtcgacaataaacgaatgaggactgccagcaacttccagtggctgctgtcaactttcattctgttgtacttaatgaatcaagtgaatagccagaagaaaggcgccccacacgatctgaagtgcgtcacgaataacctgcaggtgtggaactgctcttggaaggcaccatctggcactggtaggggtactgactacgaggtgtgtattgagaatcggtctagaagctgttaccagctggagaagacttctatcaaaatccctgccttaagtcacggtgattacgagatcacgattaattcgctgcatgactttggcagttcgacaagcaagttcaccctaaacgaacagaatgttagcttgattcccgatacccctgagatcttaaacttaagcgccgacttttcgaccagtaccctgtatcttaaatggaacgaccgaggatctgtctttcctcaccgcagcaacgtaatatgggagataaaggtgctgagaaaggaaagcatggagctcgtgaagctcgttacacataataccaccctcaatggcaaggacaccctgcatcattggtcttgggcaagtgatatgcctctggagtgcgctatccatttcgttgagataaggtgctatattgataatctccattttagcgggctagaggagtggagcgactggagccctgtgaagaatatctcctggatccctgattcccagaccaaagtgtttccgcaagataaagtcattctcgtcggctcagatatcacattttgctgtgtgtcccaagagaaagtactgagcgctctgataggacatacaaattgtccactgattcatctcgacggggaaaatgtggcaatcaagataagaaatataagtgtttctgcgtcttctggcaccaatgtggtctttaccacagaggataatatcttcggtacggtgattttcgcaggctacccacctgacacaccccaacagttgaactgtgaaactcacgacctgaaggagatcatctgtagttggaaccccgggagggttacagcactggtcggacctcgcgcgacctcatataccttggtcgaaagtttctccgggaaatacgtgcgactgaaaagagctgaagctcctactaacgagtcataccagctattatttcagatgcttcccaatcaggagatttataactttaccttaaatgcccataatcctctgggtagatcacagagtacaattttggtgaatatcacagagaaagtgtaccctcacacccccacaagttttaaagtgaaggatattaactccacagccgtcaaactgagctggcacctccccggaaattttgccaaaataaatttcctgtgtgaaatcgaaatcaaaaaatccaatagcgttcaagaacaacgaaacgttacgataaagggcgtagaaaacagttcctatctggtggcactagacaagctgaacccttatactctttacacctttagaatccggtgcagcacggagaccttttggaagtggtctaagtggtccaacaaaaaacagcacctcactacggaggcctcaccaagtaaaggccctgatacgtggcgcgaatggtcgagcgacggaaaaaacctgattatttactggaagcccctcccaattaacgaggcaaacgggaaaatcctgagctataatgtgagctgttccagcgacgaagaaacacagtccctatccgagatcccagacccacagcacaaagctgaaattcgactggataagaacgactacatcatcagcgttgtcgctaaaaactccgtgggctcatcccctcctagcaagatcgcctcaatggagatccccaacgatgacctgaagatcgagcaggtggttggcatgggaaaaggaatcctgctgacatggcactatgacccgaacatgacctgcgactacgtaatcaagtggtgcaacagttccaggtccgaaccgtgtttaatggactggcgcaaggtgccgtccaacagtacggagaccgtcatcgaatctgacgaatttcgccccggcataaggtacaacttttttctgtatggctgccggaaccagggttatcaacttctcaggtctatgatcggctacattgaggagctggcaccgatagtagctcctaattttaccgtcgaggatacttccgctgacagtatactggttaagtgggaggatatacctgtagaagaacttaggggattcttgcggggctaccttttttactttgggaaaggcgagcgcgatacaagcaaaatgagagtgctggaaagtgggaggtcggacatcaaagtgaaaaacataacagatatttctcagaagacacttcgtatcgcggatctacaaggcaaaacatcgtatcatctggttctgagagcttatactgatggtggtgtcggccccgagaagtcgatgtacgtggtgacaaaagagaatagtgtggggctaatcattgccatactgatccctgtggccgtggcagtgatcgttggcgtcgttaccagtattctgtgctacagaaaaagggaatggattaaggaaacattctaccctgatatccccaaccctgaaaattgcaaggctcttcagttccagaagagtgtgtgcgagggatctagcgccctgaagaccttggagatgaacccctgcaccccaaataacgtcgaggttttagaaacccgaagcgccttccctaagatcgaggacactgagattatcagccctgtcgcagagaggccagaggacaggtccgacgccgagcccgaaaatcacgtcgtggtgagctattgcccaccaattatagaagaggagatccccaatcctgctgccgatgaggcaggcggaactgcacaggtgatttacatcgacgtccaaagtatgtatcagcctcaggcaaaacccgaagaggagcaagagaacgatcctgtgggcggcgctggctacaaacctcagatgcacctccccatcaactctaccgtggaggatatcgccgcggaagaggacctggacaagaccgctggctatcgtccacaggccaacgttaatacttggaacctggtaagccctgactcccctcgcagcattgatagcaatagcgaaattgtgtctttcggatctccgtgctccattaactccaggcaatttctcattcctcccaaggacgaggattcgcctaagagtaatggcggcgggtggagcttcactaacttcttccagaacaagcctaacgattag

SEQ ID NO: 303001 - DNA, 3294 bp, Artificial Sequence
  derived and/or modified sequence
atgatggacatctacgtgtgcctcaaaaggcccagctggatggtggacaataaaaggatgagaacagcctcaaatttccaatggctcctgtcgacattcattcttctgtacctgatgaaccaggttaacagtcagaaaaagggcgccccgcatgacctgaagtgtgtcaccaacaacttacaggtgtggaattgttcctggaaggccccgagcgggacgggacggggaaccgattacgaggtgtgcattgagaacaggagcagatcatgttaccagctcgaaaagaccagtataaagattccggccctgagccatggagattatgagataacgatcaatagccttcatgatttcggctcctccacgagtaagttcactctaaatgagcaaaacgtttccctgatccctgacacccctgagatcctgaacttatcggccgatttctctacctccacactgtacctcaaatggaatgacaggggcagtgtgttcccccacagatctaacgtcatctgggagattaaggttctgaggaaggaaagcatggagctggtgaaactggtcactcacaatacaactctaaacggtaaggataccttgcatcactggagctgggctagcgatatgcccttggaatgtgccatccattttgttgaaatccggtgttatatcgacaatctgcattttagcggtctcgaagagtggtctgattggtcccccgtgaagaacatatcatggataccagactcccagacaaaggtctttccccaggacaaagtgatactggtcggaagcgatatcaccttctgctgcgtgagccaggaaaaggttctctctgccctcattggccacaccaactgcccactcatacacctagacggagaaaacgtggccatcaaaattcgaaacatatccgtcagtgcttcctccgggaccaacgtcgttttcacgacagaagacaatatcttcggcacagtcatctttgctggttacccacctgacacaccccaacagctcaactgtgagactcatgacctcaaagagatcatttgcagctggaatcctggacgagtaactgctttggtcgggccccgggcaacgtcatatacacttgttgagtcattctctggcaaatatgtgcgactgaagagggccgaggcgccgaccaacgagtcctaccagttactgttccagatgctccccaatcaggagatctacaattttaccttaaacgcccacaaccccctgggaagatcccagtccaccattctggtgaacattacagagaaggtgtacccgcatacccctacctccttcaaggtgaaagacatcaattccaccgccgtcaagctcagctggcatttacccggcaattttgccaagattaactttttgtgtgagatcgaaataaaaaagagcaacagtgttcaggagcagaggaatgtgacaatcaaaggcgtcgaaaatagcagttacctcgtggcattggataagttgaacccatataccttgtatacctttagaatcagatgttctactgagaccttctggaagtggtctaagtggtcaaataaaaaacaacacttgacaaccgaagccagccccagcaagggaccagacacttggcgggagtggtcttccgatgggaaaaacctaattatttactggaagcccctgcctattaatgaagccaatggaaagattctttcttacaatgtcagttgctcgtctgacgaggaaactcaaagcttatccgaaatccccgatccacagcacaaggctgaaatacgcttagataagaatgactatataatttctgtcgttgctaaaaattctgtcggatcctctcccccctccaagatagccagcatggaaattccaaacgatgacttaaagattgagcaggtcgttggtatgggtaaaggtattctgctgacctggcactatgatccaaatatgacttgcgattacgtaatcaagtggtgtaactcctctcgatcagaaccatgtctgatggactggcgcaaagttcctagcaattcgacagaaaccgtaattgagagtgacgagtttcgaccagggatccgctataatttcttcttatacggctgtcgaaaccagggataccaactgctgcgttccatgatcggatacattgaagagttagcccccatagtcgcacccaatttcactgtggaggatacatctgccgacagcatcttggtgaaatgggaggacatccccgtagaagaactccgcggcttcctccgcggctatttattctactttggcaaaggggaacgggacacctctaagatgcgggttctcgaaagcgggcgctctgacataaaagttaagaatataacagacatcagccaaaaaaccctgcgaattgctgatctgcagggaaaaacctcctaccacctagtccttcgcgcatatacagacgggggagttggccccgaaaaatccatgtatgtagtgaccaaggagaactctgtcggcctgatcatagccatcctgatccctgtcgcagtggccgtgatcgttggagttgtgacttctatcttatgttatcgcaagcgcgaatggatcaaggaaacgttttaccccgatattcctaacccagagaactgtaaggcactccaatttcagaagagcgtgtgtgagggatcttccgctttgaagaccctggagatgaatccctgtacacctaacaacgtggaagtgcttgaaacgaggagtgcctttccaaaaatcgaagatactgaaatcatttcccccgtggcagagcggccagaagataggtctgatgcagaaccagaaaaccatgtggtggtgtcctattgcccacccatcatcgaggaggagatcccaaatcctgccgcagacgaggctgggggaactgctcaggtcatttatatagatgtgcagtcaatgtaccaaccacaagcaaagcctgaagaggagcaagaaaacgatcccgttgggggcgccggttacaagccccagatgcacctgcctattaatagcactgtcgaagacatcgccgcagaggaggatctcgacaaaaccgctgggtatcgaccccaggcaaatgttaacacatggaacctggtttctcccgactcaccccggtctatcgactccaatagcgagatagtaagcttcggaagcccttgcagcattaattctcgacaattcctgatccctccaaaggatgaagactcccccaagagcaatggtggcgggtggagctttaccaacttttttcagaacaagcctaacgactag

SEQ ID NO: 303002 - DNA, 381 bp, Artificial Sequence
  derived and/or modified sequence
atgatggatatctatgtgtgtctcaagagacctagctggatggtcgacaataagcggatgcgaactgcctccaactttcagtggctcctttcgacgttcattctgctctacttgatgaaccaggtgaattctcagaaaaagggagcccctcatgacttgaagtgtgtcacaaataaccttcaagtttggaattgtagttggaaagcacccagcgggacgggccgcggaactgactatgaggtctgcatcgaaaaccggtcccggagttgctatcagctggaaaagacttccataaagattccggccctgagccacggggactatgagattaccattaacagtctgcatgattttggatcttccacttccaaattcacctag

SEQ ID NO: 303003 - DNA, 228 bp, Artificial Sequence
  derived and/or modified sequence
atgatggacatctacgtgtgcctaaaacgacctagttggatggtggacaacaagagaatgcgcactgcctctaactttcaatggttgctctccacatttatccttttgtatctgatgaatcaggttaactctcagaagaagggagcgcctcatgatcttaaatgcgtgactaacaacctccaggtatggaattgttcatggaaagccccttctggtaccggccgatag

SEQ ID NO: 303004 - DNA, 3294 bp, Artificial Sequence
  derived and/or modified sequence
atgatggacatctacgtgtgcctgaagaggcccagctggatggtggacaacaagaggatgaggacagccagcaacttccagtggctgctgagcaccttcatcctgctgtacctgatgaaccaggtgaacagccagaagaagggggcccctcatgacctgaagtgtgtgaccaacaacctgcaggtgtggaactgctcctggaaggcccccagcggcaccggccggggcacagattatgaggtgtgcatcgagaacagaagccgcagctgctaccagctggagaagaccagcatcaagatcccagccctgagccatggagactatgagatcaccatcaacagcctgcatgactttggcagcagcaccagcaagttcaccctgaatgagcagaatgtgtccctcatcccagacaccccagagatcctgaacctgtctgctgacttcagcaccagcaccctgtacctgaagtggaatgaccggggcagcgtcttcccccacaggagcaatgtcatctgggagatcaaggtgctgaggaaggagagcatggagctggtgaagctggtgacccacaacaccaccctgaatggcaaggacaccctgcaccactggagctgggccagtgacatgcccctggagtgtgccatccactttgtggagatccgctgctacatcgacaacctgcacttcagcggcctggaggagtggagcgactggagccctgtgaagaacatctcctggatcccagacagccagaccaaggtgttcccccaggacaaggtgatcctggtgggcagtgacatcaccttctgctgcgtgtcccaggagaaggtgctgagcgccctgattggccacaccaactgccccctcatccacctggatggagaaaatgtggccatcaagatccggaacatctctgtgtctgccagcagcggcaccaacgtggtgttcaccacagaggacaacatctttggaacagtcatctttgctggctaccccccagacaccccccagcagctgaactgtgagacccatgacctgaaggagatcatctgctcctggaaccctggccgggtgacagccctggtgggcccccgggccaccagctacaccctggtggagagcttcagcggcaagtatgtgcggctgaagagagctgaggcccccaccaatgaaagctaccagctgctcttccagatgctgcccaaccaggagatctacaacttcaccctgaatgcccacaaccccctgggccgcagccagagcaccatcctggtgaacatcacagagaaggtgtacccccacacccccaccagcttcaaggtgaaggacatcaacagcacagctgtgaagctgtcctggcacctgcccggcaactttgccaagatcaacttcctgtgtgaaattgagatcaagaagagcaacagcgtgcaggagcagagaaatgtgaccatcaagggcgtggagaacagcagctacctggtggccctggacaagctgaacccctacaccctgtacaccttccgcatccgctgcagcacagagaccttctggaagtggagcaagtggagcaacaagaagcagcacctgaccacagaggccagccccagcaaaggaccagacacctggagggagtggagcagtgatggcaagaacctgatcatctactggaagcccctgcccatcaatgaggccaacgggaagatcctgagctacaacgtgtcctgcagcagtgatgaggagacccagagcctgtctgagatcccagacccccagcacaaggccgagatccggctggacaagaatgactacatcatctctgtggtggccaagaacagcgtgggcagcagcccccccagcaagatcgcctccatggagatccccaatgatgacctgaagattgagcaggtggtgggcatgggcaagggcatcctgctgacctggcactatgaccccaacatgacctgtgactatgtgatcaagtggtgcaacagcagccgctctgagccctgcctgatggactggaggaaggtgcccagcaacagcacagagaccgtcatcgagagtgatgagttccggcccggcatccgctacaacttcttcctgtatggctgcaggaaccagggctaccagctgctgcgctccatgattggctacatcgaggagctggcccccatcgtggcccccaacttcaccgtggaggacaccagcgctgacagcatcctggtgaagtgggaggacatccctgtggaggagctgcggggcttcctgcggggctacctgttctactttggaaaaggagagcgggacaccagcaagatgagggtgctggagagcggccgcagtgacatcaaggtgaagaacatcacagacatcagccagaagaccctgagaattgctgacctgcagggcaagaccagctaccacctggtgctgcgggcctacacagatggcggcgtgggccctgagaagtccatgtatgtggtgaccaaggaaaattctgtgggcctcatcatcgccatcctgatccctgtggccgtggccgtgattgtgggcgtggtgaccagcatcctgtgctacaggaagcgggagtggatcaaggagaccttctacccagacatccccaaccctgagaactgcaaggccctgcagttccagaagtctgtgtgtgagggcagcagcgccctgaagaccctggagatgaacccctgcacccccaacaacgtggaggtgctggagaccaggtctgccttccccaagattgaggacacagagatcatcagccctgtggccgagaggcctgaggacagaagtgatgctgagcctgagaaccacgtggtggtgtcctactgcccccccatcatcgaggaggagatccccaacccagctgctgatgaggccggcggcacagcccaggtgatctacattgatgtgcagagcatgtaccagccccaggccaagccagaggaggagcaggagaatgaccctgtgggcggggccggctacaagccccagatgcacctgcccatcaacagcacagtggaggacattgctgctgaggaggacctggacaagacagctggctaccggccccaggccaacgtgaacacctggaacctggtgtccccagacagccccaggagcattgacagcaacagcgagatcgtgtcctttggcagcccctgcagcatcaacagccggcagttcctgatcccccccaaggatgaggacagccccaagagcaatggaggcggctggagcttcaccaacttcttccagaacaagcccaatgactag

SEQ ID NO: 303005 - DNA, 381 bp, Artificial Sequence
  derived and/or modified sequence
atgatggacatctacgtgtgcctgaagaggcccagctggatggtggacaacaagaggatgaggacagccagcaacttccagtggctgctgagcaccttcatcctgctgtacctgatgaaccaggtgaacagccagaagaagggggcccctcatgacctgaagtgtgtgaccaacaacctgcaggtgtggaactgctcctggaaggcccccagcggcaccggccggggcacagattatgaggtgtgcatcgagaacagaagccgcagctgctaccagctggagaagaccagcatcaagatcccagccctgagccatggagactatgagatcaccatcaacagcctgcatgactttggcagcagcaccagcaagttcacctag

SEQ ID NO: 303006 - DNA, 228 bp, Artificial Sequence
  derived and/or modified sequence
atgatggacatctacgtgtgcctgaagaggcccagctggatggtggacaacaagaggatgaggacagccagcaacttccagtggctgctgagcaccttcatcctgctgtacctgatgaaccaggtgaacagccagaagaagggggcccctcatgacctgaagtgtgtgaccaacaacctgcaggtgtggaactgctcctggaaggcccccagcggcactggaagatag

SEQ ID NO: 303007 - DNA, 10089 bp, Artificial Sequence
  derived and/or modified sequence
aatcctaaccctctctcccagaacgtgtctctgctgcaaggcaccgggccctttcgctctgcagaactgcacttgcaagaccattatcaactcctaatcccagctcagaaagggagcctctgcgactcattcatcgccctccaggactgactgcattgcacagatgatggatatttacgtatgtttgaaacgaccatcctggatggtggacaataaaagaatgaggactgcttcaaatttccagtggctgttatcaacatttattcttctatatctaatgaatcaagtaaatagccagaaaaagggggctcctcatgatttgaagtgtgtaactaacaatttgcaagtgtggaactgttcttggaaagcaccctctggaacaggccgtggtactgattatgaagtttgcattgaaaacaggtcccgttcttgttatcagttggagaaaaccagtattaaaattccagctctttcacatggtgattatgaaataacaataaattctctacatgattttggaagttctacaagtaaattcacactaaatgaacaaaacgtttccttaattccagatactccagagatcttgaatttgtctgctgatttctcaacctctacattatacctaaagtggaacgacaggggttcagtttttccacaccgctcaaatgttatctgggaaattaaagttctacgtaaagagagtatggagctcgtaaaattagtgacccacaacacaactctgaatggcaaagatacacttcatcactggagttgggcctcagatatgcccttggaatgtgccattcattttgtggaaattagatgctacattgacaatcttcatttttctggtctcgaagagtggagtgactggagccctgtgaagaacatttcttggatacctgattctcagactaaggtttttcctcaagataaagtgatacttgtaggctcagacataacattttgttgtgtgagtcaagaaaaagtgttatcagcactgattggccatacaaactgccccttgatccatcttgatggggaaaatgttgcaatcaagattcgtaatatttctgtttctgcaagtagtggaacaaatgtagtttttacaaccgaagataacatatttggaaccgttatttttgctggatatccaccagatactcctcaacaactgaattgtgagacacatgatttaaaagaaattatatgtagttggaatccaggaagggtgacagcgttggtgggcccacgtgctacaagctacactttagttgaaagtttttcaggaaaatatgttagacttaaaagagctgaagcacctacaaacgaaagctatcaattattatttcaaatgcttccaaatcaagaaatatataattttactttgaatgctcacaatccgctgggtcgatcacaatcaacaattttagttaatataactgaaaaagtttatccccatactcctacttcattcaaagtgaaggatattaattcaacagctgttaaactttcttggcatttaccaggcaactttgcaaagattaattttttatgtgaaattgaaattaagaaatctaattcagtacaagagcagcggaatgtcacaatcaaaggagtagaaaattcaagttatcttgttgctctggacaagttaaatccatacactctatatacttttcggattcgttgttctactgaaactttctggaaatggagcaaatggagcaataaaaaacaacatttaacaacagaagccagtccttcaaaggggcctgatacttggagagagtggagttctgatggaaaaaatttaataatctattggaagcctttacccattaatgaagctaatggaaaaatactttcctacaatgtatcgtgttcatcagatgaggaaacacagtccctttctgaaatccctgatcctcagcacaaagcagagatacgacttgataagaatgactacatcatcagcgtagtggctaaaaattctgtgggctcatcaccaccttccaaaatagcgagtatggaaattccaaatgatgatctcaaaatagaacaagttgttgggatgggaaaggggattctcctcacctggcattacgaccccaacatgacttgcgactacgtcattaagtggtgtaactcgtctcggtcggaaccatgccttatggactggagaaaagttccctcaaacagcactgaaactgtaatagaatctgatgagtttcgaccaggtataagatataattttttcctgtatggatgcagaaatcaaggatatcaattattacgctccatgattggatatatagaagaattggctcccattgttgcaccaaattttactgttgaggatacttctgcagattcgatattagtaaaatgggaagacattcctgtggaagaacttagaggctttttaagaggatatttgttttactttggaaaaggagaaagagacacatctaagatgagggttttagaatcaggtcgttctgacataaaagttaagaatattactgacatatcccagaagacactgagaattgctgatcttcaaggtaaaacaagttaccacctggtcttgcgagcctatacagatggtggagtgggcccggagaagagtatgtatgtggtgacaaaggaaaattctgtgggattaattattgccattctcatcccagtggcagtggctgtcattgttggagtggtgacaagtatcctttgctatcggaaacgagaatggattaaagaaaccttctaccctgatattccaaatccagaaaactgtaaagcattacagtttcaaaagagtgtctgtgagggaagcagtgctcttaaaacattggaaatgaatccttgtaccccaaataatgttgaggttctggaaactcgatcagcatttcctaaaatagaagatacagaaataatttccccagtagctgagcgtcctgaagatcgctctgatgcagagcctgaaaaccatgtggttgtgtcctattgtccacccatcattgaggaagaaataccaaacccagccgcagatgaagctggagggactgcacaggttatttacattgatgttcagtcgatgtatcagcctcaagcaaaaccagaagaagaacaagaaaatgaccctgtaggaggggcaggctataagccacagatgcacctccccattaattctactgtggaagatatagctgcagaagaggacttagataaaactgcgggttacagacctcaggccaatgtaaatacatggaatttagtgtctccagactctcctagatccatagacagcaacagtgagattgtctcatttggaagtccatgctccattaattcccgacaatttttgattcctcctaaagatgaagactctcctaaatctaatggaggagggtggtcctttacaaacttttttcagaacaaaccaaacgattaacagtgtcaccgtgtcacttcagtcagccatctcaataagctcttactgctagtgttgctacatcagcactgggcattcttggagggatcctgtgaagtattgttaggaggtgaacttcactacatgttaagttacactgaaagtgttcatgtgcttttaatgtagtctaaaagccaaagtatagtgactcagaatcctcaatccacaaaactcaagattgggagctctttgtgatcaagccaaagaattctcatgtactctaccttcaagaagcatttcaaggctaatacctacttgtacgtacatgtaaaacaaatcccgccgcaactgttttctgttctgttgtttgtggttttctcatgtgtatacttggtggaattgtaagtggatttgcaggccagggagaaaatgtccaagtaacaggtgaagtttatttgcctgacgtttactcctttctagatgaaaaccaagcacagattttaaaacttctaagattattctcctctatccacagcattcacaaaaattaatataatttttaatgtagtgacagcgatttagtgttttgtttgataaagtatgcttatttctgtgcctactgtataatggttatcaaacagttgtctcaggggtacaaactttgaaaacaagtgtgacactgaccagcccaaatcataatcatgttttcttgctgtgataggttttgcaagccttttcattattttttagcttttatgcttgcttccattatttcagttggttgccctaatatttaaaatttacacttctaagactagagacccacattttttaaaaatcattttattttgtgatacagtgacagctttatatgagcaaattcaatattattcataagcatgtaattccagtgacttactatgtgagatgactactaagcaatatctagcagcgttagctgtccatatagttctgattggatttcgttcctcctgaggagaccatgccgttgagcttggctacccaggcagtggtgatctttgacaccttctggtggatgttcctcccactcatgagtcttttcatcatgccacattatctgatccagtcctcacatttttaaatataaaactaaagagagaatgcttcttacaggaacagttacccaagggctgtttcttagtaactgtcataaactgatctgaatccatgggcatacctgtgttgcaggtgcagcaattgcttggtgagctgtgcagaattgattgccttcagcacagcatcctctgcccacccttgtttctcataagcgatgtctggagtgattgtggttcttggaaaagcagaaggaaaaactaaaaagtgtatcttgtattttccctgccctcaggttgcctatgtattttaccttttcatatttaaggcaaaagtacttgaaaattttaagtgtccgaataagatatgtcttttttgtttgttttttttggttgtttgtttgttttttatcatctgagattctgtaatgtatttgcaaataatggatcaattaattttttttgaagctcatattgtatctttttaaaaaccatgttgtggaaaaaagccagagtgacaagtgacaaaatctatttaggttctctgtgtatgaatcctgattttaactgctaggattcagctaaatttctgagctttatgatctgtggaaatttggaatgaaatgcaattcattttgtacatacatagtatattaaaactatataatagttcatagaaatgttcagtaatgaaaaatatatccaatcagagccatccctaaagagtgttctcttgtcttcctttgtatcctctttggctccttcccttagcttccaccccagacatcagacctggggctgccttctctccctgccaaagcttgctgttagcattgtctgcttgccctcaactcctgccttgttccctgttgaaatgtatcaatcccgtactttatctctccaggacaaggataagtgtggctacagtaaaagtttattgctctaaacggcgctaacctgagataatgagaaaaggccagaagagattgtttgatctctgtctgtcaatatatatgcatttcaactgtgaccatctggatccagggccctttctaacctatataacgactcatttgtttggttaatgatgaatatcactggggctcttaagtcctttcgttctatccaagacttcattgtttttttctgtatgaaaaaagtgcagaatatcactcacctttcccctacttttggatcccctacacgaggatcactagcttaatgagaagcagagtaacgctattaagtctgggcaagctccttataagttgctgtgtgcttaaaagaatgtgatttatgtctggggccaaagcagttttccttcttttccctcattgaattcaagacagctagacccttgtgtagatcccaggatattacctctactccccccaacctgtgtgtgtagggagagtaacaacacgggaagaggggagggaagttggaaggagattggtcacatgttcagttgtctgagatactggtaaatgtgcgctgtttgtcaatgaaggttgcatgcctgcatttacaaggtggtctcatactgattgtgctctgtccagttagattcgtggcttctcccttggaagctacaattaaggactagttagaagcagaggctagatgtgttctctccagcccttactaactgggaaaataattgagaaatccctcttttcctcagtgaaagcccagtcattggttagaaaaatctaattgtcaaactagcattatgttccatcatatctgtgggatagtaattcatgtaagacacatttttacctctcttacaagtcaattcacttacaagccagtttcaaatcaagcttcccttgcgaggaatggagatcattatggggcttattatgactacatttcttttatgagtgaccattttaaataattaatattttatttaatattaaattattaaagacttagctagacttttaacattagatgaaccttgtgaatcatatattgcatagattagcacatgtatgcaatctaggtcatcaatttgttgaatttatacagccctagatttgagattgtggccctgagtatctggatagttgagttgtgtgtttatgtgcttatatgatagaggtgctttgttcctgcagcttagaaacagaagcagccattcactgagaagcttaagagaggaagtatcaacctcattttccaaaccagcattactttcaccgctcgtggatctgaaagattacatttagaacatttagtactattacactctcagaaactgtggtaaaaagtcacattttcaaaacttcatgcatattgtattcttgttggaaataagtcctatagtttcttaattgtcttcatgccgtccatatttaacaaacattgcaagtcctttttatatttgggtaattatttgtaatttagtgaaggagactaggggatgttttcttccaaagggaatttaaaatcaattttatggtattttgaaagtaaaatactccttaacgtgtcaatatttttaaaatgttatctcgaagttttctattgctcaggtatataatctaataaaattttttgtttgctctaaggttatttttgctattctctattttgaattatgttaaaatttgtgtgcattttatgaaatgccttttttcttattttgaaagtgtaaaattgggcatctcagagtaaaatgtgggattattagctacaaagactaggcacatcgtgaaagctcagtaactaattttcttgactgagtcctatcccagagtgtcacagattcaacagaattttcctgaagggtgatacacaccaaaatctagcttgtgtggatctgagactattgactcaaagattcaaatctacttcggaagtgactccacggtttgagtgaaaactgaggaaggactcatgcctgtatatcactagatatcttatttctccataattttaagtgttcataatttcttcttctttgatgggtgtgcaactggggcatgtttgtaccagccagcatgtgttctgcccaacagtgtgtccgtgtgtgaggttaactgattcagaactcattctcttgataaactatttcttgaaagcatttattttaagtctttatttcctgctgaaatgaagtttcatgctgtcatgcccatcttatttattctagaagaaaattttcatagaagaaaatgatttatggccaaagttacagaacattcatcttttagacttagccttagaatatcattggaaattacttggcttgaatttggttcgtttttatctttatggattatgtaccagggctattaataatacttaaaccccttattttgctatggtggttagatttttttattccttttcaattagtgctattaattattacatggtcgtattcatgcttattacagatgaactatttttagtgccagtgtaaaggattaagaataacattcaattagttggctatttcaggctttattgtacatggtaatgtttcagggagtgtgatttggtctagaatatatccagatccttgtaattatgatattgggttatgacaggattctattatttttagctatgaatggtgcttatttttccctatattaggaatgttaatatttggattatcagagtccatgttataaacagaatttacctatgcaagacaaattctaactgtgcaacattttcatgagaattaaaagttgtgtgttaaggggaaaaccctctgaatgtttttatgtgtaagtgcctaaagaaccgtagaaacagtacatcaaaagctcttataaaagaaaaactgattgaacattagccagaaacaaaatatgatttacatttttttttttggttgctgggactgaataccctaaaaactaagagatgtgagtggggaaaatgtctaattgataagaaagttgatttatattatatttacatgcatcttctaagattgcctttacagtagccaatcagaactttaaaaaaaaaaaagctaacaacatagatcctatgtgttgcccttaagactaaaatactttgcacacgtgattgaatggctcacttaagttgttgaatttccttatacatttaaagtgtacttccgttaagaattattccattttaaatgggtaactttcagcttccgaactattttcctaaacattccagttgtgtattataaaagatcaaaatatctctaggtggtagtacaattttcatttataacgtggaaaagttaactgttaggtttaacattagtattagtgtttttgcaattgctcatagaaaagaacactgaataatggttttcatacaatttttgtaaaacattcttctcccagtttgattccaaatgcttttccccaaattgtctaatatatcataagctagtgtttccttgtatttaatttttccttccaacacaatatttaggaaaaatatgaataacattgtgagtagcgggagacaacacgaaaaagaaacctttcattgttgtggaggggtaggtgttatgtgattgatgcccttcctggcgtttgttttatcctgttattttctcaaaaaagagcacggctttttcttaaatacatttaaattcagaattgcttgcaaaagattggcctggatagatagacatcctagatttaagatagtaccatcttaaaagtatgttgaaaggtaaaataaatcatttcaaaatacttaactttcctaataaggatgttaggttttcttctctttcattagctggccataagtcaaggtccttataacactaggaaattacctttttttactttcaaaattgcattatagtgaattactgtttacaaaatacacatactgtgaacagatataagtttctgtcttttataaggtttgtagaatgaatgtttttttaaagtgagtattatatgttaaatattttaagttttttataaatactagtaactgtttactaatttttgtttggtcaaatgcttgtaaatgtagctgaaagaagatagggagaaactgcggatcccaaactgttccctttttcatttcttgaaatgttaccactacagacatttttttaaggtgaataaacagttgtgatgtgctgtacctaaaatcatgtttaatcgtataaggaaacatttcaatacacttatacaggaagaaaactatagatgaagtacatgtgtgtgattcagtctgattcacagaattctgagagtaatatggaataaaacaactccacttagatgataactgaagcatttcctgccttgtgaaaatttggattttaaattgctgttagaatgggaaatttggacactttatatcattgtataatttcagaatttagtttctgtatcttttggaaaacatgattatagcaaaaacatagaaaataatctattactaaaacaccataaatgtaaaactagtatgcttggctgttaactctaaagatgttacttatgtctgtttttaaaacatgcatgtatttaacaattttatcatagtattgtcatggaaaaaataaatatattttcttacatctta

SEQ ID NO: 303008 - DNA, 4253 bp, Artificial Sequence
  derived and/or modified sequence
agtcccggctggagcgactcggccgtggcggtggccgttaccgttgcctctgggaggctctggcggcggcggcggcccgcggggttcgcggagcgcagcgggccgcccttcgcccgtggccgcctcaagcagcctcgcgccgacacaggggaggcgagacggcggctgcggaggcggcggcgcattgtgcccggccccctccttggcggctcctgcccccgggcggctgtgggatctgggcagccccggggcggcggccgaggctacagagccggcggcaggggatggcaagatagcggcgcgggagcgtaccgactgactgcattgcacagatgatggatatttacgtatgtttgaaacgaccatcctggatggtggacaataaaagaatgaggactgcttcaaatttccagtggctgttatcaacatttattcttctatatctaatgaatcaagtaaatagccagaaaaagggggctcctcatgatttgaagtgtgtaactaacaatttgcaagtgtggaactgttcttggaaagcaccctctggaacaggccgtggtactgattatgaagtttgcattgaaaacaggtcccgttcttgttatcagttggagaaaaccagtattaaaattccagctctttcacatggtgattatgaaataacaataaattctctacatgattttggaagttctacaagtaaattcacactaaatgaacaaaacgtttccttaattccagatactccagagatcttgaatttgtctgctgatttctcaacctctacattatacctaaagtggaacgacaggggttcagtttttccacaccgctcaaatgttatctgggaaattaaagttctacgtaaagagagtatggagctcgtaaaattagtgacccacaacacaactctgaatggcaaagatacacttcatcactggagttgggcctcagatatgcccttggaatgtgccattcattttgtggaaattagatgctacattgacaatcttcatttttctggtctcgaagagtggagtgactggagccctgtgaagaacatttcttggatacctgattctcagactaaggtttttcctcaagataaagtgatacttgtaggctcagacataacattttgttgtgtgagtcaagaaaaagtgttatcagcactgattggccatacaaactgccccttgatccatcttgatggggaaaatgttgcaatcaagattcgtaatatttctgtttctgcaagtagtggaacaaatgtagtttttacaaccgaagataacatatttggaaccgttatttttgctggatatccaccagatactcctcaacaactgaattgtgagacacatgatttaaaagaaattatatgtagttggaatccaggaagggtgacagcgttggtgggcccacgtgctacaagctacactttagttgaaagtttttcaggaaaatatgttagacttaaaagagctgaagcacctacaaacgaaagctatcaattattatttcaaatgcttccaaatcaagaaatatataattttactttgaatgctcacaatccgctgggtcgatcacaatcaacaattttagttaatataactgaaaaagtttatccccatactcctacttcattcaaagtgaaggatattaattcaacagctgttaaactttcttggcatttaccaggcaactttgcaaagattaattttttatgtgaaattgaaattaagaaatctaattcagtacaagagcagcggaatgtcacaatcaaaggagtagaaaattcaagttatcttgttgctctggacaagttaaatccatacactctatatacttttcggattcgttgttctactgaaactttctggaaatggagcaaatggagcaataaaaaacaacatttaacaacagaagccagtccttcaaaggggcctgatacttggagagagtggagttctgatggaaaaaatttaataatctattggaagcctttacccattaatgaagctaatggaaaaatactttcctacaatgtatcgtgttcatcagatgaggaaacacagtccctttctgaaatccctgatcctcagcacaaagcagagatacgacttgataagaatgactacatcatcagcgtagtggctaaaaattctgtgggctcatcaccaccttccaaaatagcgagtatggaaattccaaatgatgatctcaaaatagaacaagttgttgggatgggaaaggggattctcctcacctggcattacgaccccaacatgacttgcgactacgtcattaagtggtgtaactcgtctcggtcggaaccatgccttatggactggagaaaagttccctcaaacagcactgaaactgtaatagaatctgatgagtttcgaccaggtataagatataattttttcctgtatggatgcagaaatcaaggatatcaattattacgctccatgattggatatatagaagaattggctcccattgttgcaccaaattttactgttgaggatacttctgcagattcgatattagtaaaatgggaagacattcctgtggaagaacttagaggctttttaagaggatatttgttttactttggaaaaggagaaagagacacatctaagatgagggttttagaatcaggtcgttctgacataaaagttaagaatattactgacatatcccagaagacactgagaattgctgatcttcaaggtaaaacaagttaccacctggtcttgcgagcctatacagatggtggagtgggcccggagaagagtatgtatgtggtgacaaaggaaaattctgtgggattaattattgccattctcatcccagtggcagtggctgtcattgttggagtggtgacaagtatcctttgctatcggaaacgagaatggattaaagaaaccttctaccctgatattccaaatccagaaaactgtaaagcattacagtttcaaaagagtgtctgtgagggaagcagtgctcttaaaacattggaaatgaatccttgtaccccaaataatgttgaggttctggaaactcgatcagcatttcctaaaatagaagatacagaaataatttccccagtagctgagcgtcctgaagatcgctctgatgcagagcctgaaaaccatgtggttgtgtcctattgtccacccatcattgaggaagaaataccaaacccagccgcagatgaagctggagggactgcacaggttatttacattgatgttcagtcgatgtatcagcctcaagcaaaaccagaagaagaacaagaaaatgaccctgtaggaggggcaggctataagccacagatgcacctccccattaattctactgtggaagatatagctgcagaagaggacttagataaaactgcgggttacagacctcaggccaatgtaaatacatggaatttagtgtctccagactctcctagatccatagacagcaacagtgagattgtctcatttggaagtccatgctccattaattcccgacaatttttgattcctcctaaagatgaagactctcctaaatctaatggaggagggtggtcctttacaaacttttttcagaacaaaccaaacgattaacagtgtcaccgtgtcacttcagtcagccatctcaataagctcttactgctagtgttgctacatcagcactgggcattcttggagggatcctgtgaagtattgttaggaggtgaacttcactacatgttaagttacactgaaagtgttcatgtgcttttaatgtagtctaaaagccaaagtatagtgactcagaatcctcaatccacaaaactcaagattgggagctctttgtgatcaagccaaagaattctcatgtactctaccttcaagaagcatttcaaggctaatacctacttgtacgtacatgtaaaacaaatcccgccgcaactgttttctgttctgttgtttgtggttttctcatgtgtatacttggtggaattgtaagtggatttgcaggccagggagaaaatgtccaagtaacaggtgaagtttatttgcctgacgtttactcctttctagatgaaaaccaagcacagattttaaaacttctaagattattctcctctatccacagcattcacaaaaattaatataatttttaatgtagtgacagcgatttagtgttttgtttgataaagtatgcttatttctgtgcctactgtataatggttatcaaacagttgtctc

SEQ ID NO: 303009 - DNA, 760 bp, Artificial Sequence
  derived and/or modified sequence
ggagcgactcggccgtggcggtggccgttaccgttgcctctgggaggctctggcggcggcggcggcccgcggggttcgcggagcgcagcgggccgcccttcgcccgtggccgcctcaagcagcctcgcgccgacacaggggaggcgagacggcggctgcggaggcggcggcgcattgtgcccggccccctccttggcggctcctgcccccgggcggctgtgggatctgggcagccccggggcggcggccgaggctacagagccggcggcaggggatggcaagatagcggcgcgggagcgtaccgtgatcggagcagctatttcctcttcaagaattgaattgagacttctttgctttgtaataggactgactgcattgcacagatgatggatatttacgtatgtttgaaacgaccatcctggatggtggacaataaaagaatgaggactgcttcaaatttccagtggctgttatcaacatttattcttctatatctaatgaatcaagtaaatagccagaaaaagggggctcctcatgatttgaagtgtgtaactaacaatttgcaagtgtggaactgttcttggaaagcaccctctggaacaggccgtggtactgattatgaagtttgcattgaaaacaggtcccgttcttgttatcagttggagaaaaccagtattaaaattccagctctttcacatggtgattatgaaataacaataaattctctacatgattttggaagttctacaagtaaattcac

SEQ ID NO: 303010 - DNA, 574 bp, Artificial Sequence
  derived and/or modified sequence
caaacgcgtccggcatacagcgtaaacatcttcagaccgtgattctgcgccatcaaacgctctccagctaatttcatttggtgattactctgctagaaaaccgaggccaagtgaaactgcggaaatgggaacaatgtacggaggaaaaatctcaccccattaagagatccgtttcttctccgcacaaataagcccaccccgcctccgaggcaagactagatggctccaggatactctcggcgcgcccgctggccatctcgggcaggggagccccacacccggcaggaggaccaggacgcgagcggcggcgcctcggccctgggctgtttaggactgactgcattgcacagatgatggatatttacgtatgtttgaaacgaccatcctggatggtggacaataaaagaatgaggactgcttcaaatttccagtggctgttatcaacatttattcttctatatctaatgaatcaagtaaatagccagaaaaagggggctcctcatgatttgaagtgtgtaactaacaatttgcaagtgtggaactgttcttggaaagcaccctctggaacaggccg

SEQ ID NO: 303011 - DNA, 3294 bp, Artificial Sequence
  derived and/or modified sequence
atgatggacatctacgtgtgcctgaagcggcccagctggatggtggacaataagcggatgagaacagcatcgaatttccagtggctactgagcacatttatcctcctctacttaatgaaccaggtcaattcacagaagaagggggccccgcacgatttgaagtgcgtcaccaacaatctccaagtgtggaactgctcctggaaggcgccctcaggcaccggccgcggaaccgactacgaggtttgcatagaaaatcgctctaggtcttgctatcagctggaaaaaacttcaataaagattccggccctgagtcatggcgactacgagattacgattaacagcttacatgattttgggagctctacctccaagttcaccctaaacgaacaaaacgtgtctttaataccagacacaccggaaattctcaatctgtcggccgatttttcaaccagcactctgtatctcaaatggaacgataggggctctgtgtttccacataggtcaaacgttatttgggagattaaggtgctccgtaaagaatcaatggagctggtcaagctggttacccataacactactctgaacggcaaggacacattacaccactggagctgggcctcagatatgcccctggagtgtgccatccacttcgtggagatccgatgttatatcgataacctccacttttctgggctcgaggagtggagtgattggtcgcccgtcaagaatatctcttggattccagatagtcagaccaaggtcttcccacaggataaagtgatcctggtcggatcagatatcaccttttgctgtgtgtctcaggaaaaggtcctgtctgcccttataggacacacgaattgcccactgatccatctagatggggagaacgtagccatcaaaatccggaacatttccgtgtccgcaagctctggtaccaatgttgtattcacaacggaggataacatctttggcacagtgatatttgcaggttaccctcccgacactccgcagcaactgaactgcgagacgcacgatcttaaggaaataatatgcagttggaatcctggaagggtgactgcactggttggacctagggcaacatcgtacacactagtggagtccttttccggaaaatacgtgcgtcttaagcgagctgaggctcctactaacgagtcttatcaactcctctttcagatgctacctaatcaagagatttataacttcacacttaatgcccataaccccctcggacggtcacagtccaccattctcgtgaacatcactgagaaggtttacccccacacacccacatcttttaaggtaaaagacataaattctacggctgtgaagttgtcctggcacctacctggcaatttcgccaagataaactttctgtgcgagatcgagattaagaaatctaacagtgtgcaggagcagaggaacgtgactattaagggcgtggagaattcatcctacctggtcgcactcgacaaattaaacccatataccttgtacacatttagaattagatgttcaacggagactttttggaagtggtcaaagtggtccaataaaaaacagcacctaactacagaggccagcccaagcaaagggccggatacctggcgcgaatggtcttccgatggcaagaacctgatcatctactggaagcctttgccaatcaacgaagccaacggcaaaatcctgtcatacaatgtgtcatgtagttccgacgaggaaacccagtctctgagtgaaatcccagatccccagcacaaagcagagatcagactcgacaagaacgattatatcatctcggtcgttgcaaaaaattcagttggtagctctccgccaagcaaaatcgccagcatggagattcccaatgacgaccttaaaatcgagcaggttgttggtatgggaaaggggatcctcttgacctggcattatgaccccaatatgacatgcgactatgtgattaagtggtgcaactcaagtaggtccgagccatgtctgatggattggcgcaaagtgcccagcaacagtaccgagaccgtgatcgaaagcgacgagtttcgcccaggcatcagatacaatttcttcctctatggctgcagaaatcagggctaccagttgctgcgatcaatgattggctacatcgaagagctggcccccatcgtggctcctaattttaccgtggaggacacttcggctgacagcattttagttaagtgggaggacattccggtggaagagttgcgcggattcctgcgggggtacctcttttatttcggcaagggtgaaagagacacatctaaaatgcgagtgctggagagtggacggtctgacataaaagtgaagaacattacagatatctcacaaaagactctgaggatcgctgacctacaggggaaaaccagttaccacctggtcctgcgcgcctacacagacggaggagtcggtccagagaagtccatgtatgtcgtgactaaggagaacagtgtcggcctgattatagccatcctgataccggtcgctgtggcagtaatcgtgggggtagtgacctccatcttgtgctatagaaagagggagtggattaaggagactttttatcctgatatacctaatcctgagaattgcaaggctctccagttccaaaaatccgtgtgcgagggctcctctgccctaaaaaccttggagatgaacccttgcacgcctaacaatgttgaggttctcgagactagatcagccttccccaagatcgaggatactgaaataataagtcccgtggccgagagacccgaggaccggagtgacgctgaacctgagaatcacgtggtcgtctcatattgccctcctataattgaggaagaaattccgaaccctgcagccgatgaggcaggcgggaccgcccaagtaatctacattgacgtgcagtccatgtaccagccacaggccaagcctgaggaagagcaggaaaatgacccagtaggaggtgccggttacaagccgcaaatgcacctccctatcaactctaccgtcgaggacatcgcggctgaggaggatctcgacaaaacagctgggtaccggcctcaagccaacgtcaacacttggaacctcgtatccccagacagccctagatccatcgactctaattcagagatagtaagttttgggtctccctgctccatcaatagcagacagtttcttatcccgcccaaagacgaggacagtcccaaatctaatggcggcggttggtcttttacaaacttttttcaaaacaaacctaatgattag

SEQ ID NO: 303012 - DNA, 3294 bp, Artificial Sequence
  derived and/or modified sequence
atgatggacatctacgtgtgcctgaagcggcccagctggatggtggacaacaaacgcatgcgtaccgccagcaactttcaatggctgttatccaccttcatattgctgtatcttatgaaccaggtgaattcgcagaagaaaggagccccacacgatctgaagtgtgtgaccaataacttgcaggtctggaattgttcttggaaggcgcccagcggtacgggcagaggtacagattacgaagtgtgcatcgagaatcggtcccggtcatgttaccagcttgaaaaaacgtctatcaaaattcccgccctatcccacggggattacgaaatcacaataaattccttgcacgactttggaagcagcacatcaaaatttacactaaacgagcaaaacgtctctctgattcccgatactcccgagatcctgaatctcagtgctgactttagcactagcaccctgtacctgaaatggaacgacagaggatccgtattcccgcacaggtccaacgttatctgggaaatcaaagttctgcggaaggagtcaatggagctggtaaaactcgtcacgcacaatacaactttaaacggaaaggacactctgcatcattggtcgtgggcttccgacatgcctctcgaatgcgcaattcacttcgtggagattagatgctatattgacaatctccacttcagtggtttggaggaatggtctgactggtctcctgttaagaacatttcctggatcccagatagtcagaccaaggtctttccgcaggataaggtcattcttgtgggtagcgacatcactttttgttgtgtctcacaggagaaggttctgtctgcactcataggtcacacaaactgtcctcttattcacttagatggtgagaacgttgctatcaaaatccgcaatatctcagtgtcagcaagctctggcacgaacgttgtgtttactactgaagacaatattttcggcacagtgattttcgcgggctatccccccgatacaccccagcagctcaactgtgagacccacgatcttaaagaaattatatgcagttggaaccccggaagggttaccgcgctcgtgggcccccgtgccacatcttacacccttgtagagtcatttagcggcaaatacgttagactgaaacgcgccgaagcacccacaaatgagtcctatcaactgctttttcagatgcttccaaaccaagagatctacaactttacactgaatgctcacaatccccttggtcggagtcagtctacgatcttggtgaacattacggaaaaggtttacccccacaccccaacatcttttaaggtgaaggacattaattctaccgcagttaagctgagctggcacctaccgggcaacttcgctaagataaacttcctgtgtgaaatcgaaatcaagaagagcaatagtgtgcaggagcagcggaacgtgacaatcaaaggcgtggagaattcctcatatctggtggccctggacaagctgaatccatatactctatatacttttcggatccgctgttccaccgagacattttggaagtggtcgaagtggtcgaataaaaaacagcatctgacaacagaggcctccccatcgaagggaccagacacctggagagagtggtcctccgatggcaaaaatttaatcatctattggaaacctctccctattaatgaggccaatggaaaaattctcagttataatgtgagctgctcttcagatgaggaaacacagagtttgtccgaaattcccgatccgcagcataaagctgaaattcggctggacaagaacgattacatcatcagcgttgtcgctaagaactcggtcggatcttcacctcctagcaaaattgctagcatggagatacctaatgacgacttgaaaattgagcaggtggtcgggatggggaaagggatcctattgacgtggcattacgacccaaatatgacctgtgactatgtgatcaaatggtgtaattcttcgcgaagcgagccctgcttaatggactggcggaaggtgccatccaattccaccgagacagtgattgagtctgatgagttccgtcccggaatccgctacaatttctttctgtacggttgccgaaaccagggctatcagctgctgcgctctatgattggctatatcgaggagctggctcccatcgtcgctcctaacttcacggtagaagatacgagcgccgacagcatcttggtgaagtgggaagatatcccagtcgaagagctacgtggttttcttagaggttatctattttactttggaaagggggaaagagacacttctaagatgagggtgttagagagcggcaggtctgatatcaaggtcaaaaatatcaccgatatcagccaaaagacgctcagaattgccgatcttcagggcaagacttcttatcacttggtgttaagagcatacacagacggtggggtggggccggagaagtcgatgtatgtggtcaccaaggaaaactccgtcggactgatcatcgccatcctaattcccgtggctgtggccgtgatagtgggagtggttacctctatcctgtgttaccgaaagagggaatggattaaggaaaccttctacccagatattccaaatcccgagaactgcaaggccctccaatttcagaagtcagtgtgtgagggatctagtgccctgaaaacattggagatgaatccttgcacaccgaataatgtcgaagtcctcgagactcggtctgcctttcctaaaatcgaagatacagaaatcatatcccccgtggcagaacgccctgaagatcgcagcgatgccgaaccggagaaccacgtggtggtgtcctactgccctcccatcatcgaggaggagatccccaatcctgcagccgacgaggcaggtggcacagcacaggtcatatacatcgacgtccaatcaatgtaccagcctcaggccaagcccgaagaagagcaggaaaacgatcccgtggggggagccgggtacaaaccgcagatgcatctgcccatcaattccaccgttgaggacatagccgctgaggaggatttagacaagaccgctggctatcggccccaggccaatgtgaacacttggaatcttgtttctcctgacagcccccgcagcatcgactccaactcagagatcgtttcttttggctctccatgctcgattaattcacggcagttcctcatacctcccaaggacgaagactctcctaagtctaacggtggcggctggagcttcaccaacttctttcagaacaagccaaatgactag

SEQ ID NO: 303013 - DNA, 381 bp, Artificial Sequence
  derived and/or modified sequence
atgatggacatctacgtgtgcctgaagcggcccagctggatggtggacaataagcgaatgcgaacagcaagcaatttccagtggttactgagcacttttatactgctgtatctaatgaaccaagtaaactcccagaaaaaaggagccccgcacgatctaaagtgtgtgaccaacaacttacaggtgtggaactgctcatggaaggcccccagcggcacaggccggggaaccgattatgaggtgtgtattgagaaccggtcacgctcgtgttatcaacttgagaagacgtctattaagatcccagctctgtcccatggagattatgaaattacaataaatagtctccacgacttcggcagcagcacctcaaaattcacttag

SEQ ID NO: 303014 - DNA, 228 bp, Artificial Sequence
  derived and/or modified sequence
atgatggacatctacgtgtgcctgaagcggcccagctggatggtggataacaaacggatgcgaacggcgagtaacttccaatggctgctcagtactttcattctcttgtatctcatgaaccaggtgaacagccagaaaaagggagcccctcatgaccttaaatgtgtgactaacaacttacaggtttggaactgttcctggaaggctccgtccggcacgggtcgttag

SEQ ID NO: 303015 - DNA, 3294 bp, Artificial Sequence
  derived and/or modified sequence
atgatggacatatacgtgtgtctcaaacgtccatcctggatggtagataacaagcgaatgcggaccgcaagcaatttccaatggctcctatctacattcatcttgttgtacttaatgaatcaagtgaattctcaaaagaaaggagcccctcatgatctgaagtgcgtcaccaacaacctgcaggtgtggaactgttcttggaaggcgccatccggtactggcaggggcactgattacgaagtttgtatagagaaccgaagtcggtcttgttatcaacttgagaaaacttccataaagatccccgctctatctcatggggattatgagataactataaatagtctacatgatttcggctcctccactagcaaatttacgcttaacgagcagaacgtgagtctcattcccgacacacctgagatactgaacctctctgcagacttctccacatcaaccttatacctgaagtggaacgatcgcggaagcgtgttcccacatcgatccaacgtcatatgggagattaaggttcttagaaaagaatccatggaacttgtgaagctcgttacacataacaccacccttaatggtaaagataccctgcatcattggtcctgggctagtgatatgccccttgagtgcgcgatacattttgtggaaatccgttgttatatcgacaacttacatttctccgggcttgaggagtggagtgattggtccccagtcaagaatatttcatggatccctgatagtcagacaaaggtcttcccccaagataaggtgattctggtgggcagtgatattacattctgttgcgtctcgcaggagaaggtcctgtctgcccttatcgggcacacgaattgccccttgatacacctagacggagagaacgttgcaatcaagatcaggaatatctctgtgagtgcttcttcaggcaccaacgtagtgttcactactgaagacaacatcttcggtaccgtgatcttcgcaggctaccctccagatacaccacagcagttgaactgcgagactcatgatctgaaggaaatcatctgctcctggaatccaggcagggtgaccgccctggttgggcctcgagccactagttatacgcttgttgagtcatttagcggcaaatacgttcgacttaagagagccgaggccccaaccaacgaatcttaccaattgctctttcaaatgctgcccaatcaggaaatctacaacttcacgctgaatgcgcacaaccctcttggcagatcccagtctaccattctagtgaacatcaccgagaaggtctacccacacactcccacttcattcaaagtcaaggatattaactctacagctgtgaaactgtcatggcatttacccggaaatttcgccaagatcaactttttgtgcgaaatcgagatcaagaagagtaattccgtacaggagcagcgcaacgtaaccataaaaggcgtagaaaactcttcctacctcgtggcactagacaaactaaacccttatactctctatacgttccgcatacgttgctctacagagaccttctggaagtggtctaagtggagcaacaagaagcagcatctcaccaccgaagctagcccaagcaaggggccagatacttggcgggagtggtcttctgatgggaaaaatctgattatttattggaagccccttcccatcaatgaagcgaacggaaagattttaagttacaacgtgtcatgttcctccgacgaggagacacagtccttgtctgagatccctgatccgcagcacaaggcagagatcaggttggataagaacgattacataatcagcgtagtggcgaagaactctgttggctcttccccaccctccaagattgcgtcaatggaaatcccaaatgacgatctgaaaatcgagcaggtcgtcggaatgggcaaaggaatcctcttgacatggcattatgaccccaatatgacatgtgactatgtgatcaaatggtgtaattcttcacgcagtgaaccttgcttgatggactggcgtaaggttccatcaaattccaccgagactgtgatagagtccgacgagtttagaccaggcataaggtacaacttctttttgtatggctgtcgcaatcagggttatcaactgctgaggtcgatgatcggctatattgaggagctcgcgccaatcgtcgcccctaacttcactgtcgaagatacatccgcagactcaatcctggtgaagtgggaggacattcctgttgaagaactaaggggattcctccgcggttacctcttctatttcggaaagggtgaaagagataccagtaaaatgcgagttctggaatcaggcagatccgatatcaaggttaaaaatattactgatatttcccagaaaacgctacgtatcgcagacctccagggcaaaacctcataccatctggtattacgcgcttacacagacgggggagtgggtcccgagaagagcatgtatgtagttaccaaggagaactcggtgggtctcataatcgcaatcctaatcccagtggcggtcgcagttatcgttggtgtcgtcacaagtattctgtgctataggaagcgcgaatggatcaaagaaactttctatcctgacatccctaaccctgaaaattgcaaagccttgcagttccagaagtcggtgtgtgaaggatcaagcgccctgaaaactctggaaatgaacccgtgcacaccaaataatgtcgaagtcctcgaaactaggagtgcctttccaaagatcgaagataccgaaatcatatctcctgtcgcagaaagacctgaagataggagcgacgcagaacccgaaaaccacgtagttgtttcatattgtcctccgattatagaggaagagatccccaatccagcagcagatgaagcgggtggaaccgcgcaggtgatctatatcgacgttcagtccatgtatcagccccaggcaaagccagaagaggaacaggaaaacgacccagtgggtggagccggatacaagcctcagatgcacctgccgatcaattccacagtcgaggacatagctgcagaggaagacttggacaaaacagccggttacagaccccaggcgaacgtgaatacatggaacctggtgagtccagacagcccccgatcaatcgactctaacagtgagatagttagctttgggagcccatgttctatcaactcacgacagttcctcataccgcctaaggacgaagacagccctaaaagcaacgggggagggtggtcctttacaaatttttttcagaacaagcccaacgattag

SEQ ID NO: 303016 - DNA, 3294 bp, Artificial Sequence
  derived and/or modified sequence
atgatggacatatatgtgtgcctcaagcgcccatcatggatggttgataacaagaggatgagaacagcttctaatttccagtggctcctatcgactttcatactgctctatttaatgaaccaggttaactctcaaaaaaagggagcccctcatgacctgaaatgcgtaacgaataacctccaggtgtggaactgctcctggaaggcccctagtggaacgggcaggggaaccgattacgaggtatgcattgagaataggagcaggagctgctaccagctcgaaaaaactagcattaagatcccagcgcttagccatggggactacgagattaccattaacagtctgcatgattttggctcttcgacatcaaaatttacacttaacgaacagaatgtgtcgctgattcctgacacaccagaaattctgaacctgagtgccgatttcagtactagtaccctttacctcaaatggaacgatagagggtcggtgttccctcaccggtcaaacgtgatctgggagataaaagtgctgcgcaaagaaagtatggaactagtcaaactagtcacacacaacacaaccctgaatggcaaagacactctccatcattggtcttgggcatccgacatgcccctagaatgcgcgatccactttgtagagatccgttgctatattgacaacctccatttttccggtctggaggaatggtctgactggtcccccgttaagaatatctcctggatacctgactcccagacgaaggtgttcccccaggacaaggtcatcctggtgggcagcgatatcaccttttgttgtgtaagtcaggaaaaggtgctgagcgccctgatcggtcatacgaattgtccattgattcatcttgatggtgagaacgttgccataaaaattcgcaacatttccgtgagcgccagctccggtacaaacgtcgtctttacgaccgaagacaacatttttgggacggtcatcttcgcgggttaccctcccgacacgccccagcagttaaattgcgagacacacgatctgaaggaaatcatctgcagttggaatccaggtcgagtgactgcgctggtggggccacgcgctacaagctatacgctggtagagagttttagtggaaaatacgttagactaaagcgcgctgaggctcctaccaatgagagctaccaactgttattccaaatgcttccgaatcaggagatctacaactttactctgaacgcccataatcctctgggaagatctcagtccacaatattagtaaatatcactgaaaaggtgtacccccatacccctacatcctttaaagtgaaagacattaactctacagctgtgaaactgtcctggcacctgcctggcaacttcgcaaagattaacttcctgtgtgaaatcgagattaaaaagtctaactctgtgcaggagcagagaaatgtgactattaaaggtgtagaaaattcgtcttatctcgtggccttggacaagttaaatccttataccttgtatacatttaggatccggtgtagcactgaaacattctggaaatggtcaaagtggtctaacaagaagcagcacctgaccaccgaggcctcgcctagtaaagggccagatacatggcgggagtggagctctgacggcaagaatttaatcatctactggaagccactgccaataaatgaagcgaatgggaagatcctatcctataacgtttcttgctctagcgatgaggaaacccagtcactttccgaaatccctgatcctcagcataaagctgagattcgcctggataagaacgactacattattagcgtcgtcgccaagaattctgtgggcagctcacctcccagcaagattgcatctatggaaattcccaatgatgaccttaagatcgaacaggtggtgggtatgggaaaaggtattctgcttacttggcattacgatcctaatatgacatgtgattacgtgattaagtggtgtaattctagccgcagtgaaccatgtttgatggattggcgcaaagtaccctccaactctaccgagaccgttattgaaagcgatgagtttcgacccggaatacgatacaatttcttcttgtacggctgtcgcaatcagggttatcagctactccggtcaatgatcggctacattgaagaacttgcccctattgtggcacccaactttacagtggaagatacatctgccgattctatcctggttaagtgggaggatatacccgttgaggaattaagggggttcctgcgaggttatctgttttattttggaaagggtgagagagatactagtaagatgcgtgtcctcgagtccggtcggtccgacatcaaggtgaagaacataacggatatctcccagaaaaccctgcgaatcgcggacctgcagggaaagacatcttaccacctggtgttgcgcgcatacaccgatgggggagttggccctgagaaaagcatgtacgtcgtcactaaagaaaattccgtcggactcattattgctattctgatccctgttgctgtggccgtcattgtaggagtcgtgacgtctattctgtgttataggaagcgtgagtggatcaaagaaacattttacccggatatacccaacccagagaattgtaaagctctccagtttcagaagtccgtgtgtgagggctcttccgctctgaagactttagagatgaacccctgtacccccaacaatgtagaggtgctggagactcgtagtgcctttcctaagattgaggatactgaaatcatatcccctgtggcggaaagacctgaggataggagcgacgctgagcccgaaaatcacgtggtagtctcatactgtccccctatcatagaagaagagatccccaatccagctgcagatgaagcgggaggtacggcccaggtcatttatatcgacgtacagtcgatgtaccagccccaggccaagcccgaagaagaacaggaaaatgacccagttgggggagccggatacaaaccacagatgcacctgccaataaattcgacagttgaggatatcgcagccgaggaagacttagacaagacagcgggatacaggccacaggccaacgtgaacacctggaacttggtctcacctgacagtcctcgatctatcgattcaaattcagagattgtgagttttgggtctccttgctccattaattccaggcagtttttaatcccacccaaagatgaggattctcctaagtcgaacggcggtggttggagttttacaaattttttccagaacaaacccaatgactag

SEQ ID NO: 303017 - DNA, 381 bp, Artificial Sequence
  derived and/or modified sequence
atgatggacatttacgtgtgtcttaagagacctagctggatggttgacaacaagcggatgcgaaccgcatcaaacttccagtggttgctttcgacattcatcctgctctacttaatgaatcaggtgaacagtcagaaaaaaggtgcaccccatgacctcaaatgcgtgactaataacctgcaggtgtggaactgtagctggaaggccccatctgggacagggagaggcacggactacgaggtgtgcatcgaaaacaggtcacggtcctgttatcagcttgagaagacttcaataaaaattccagctttatctcacggcgattacgaaatcaccatcaattcccttcatgattttggatcctcgactagcaagtttacctag

SEQ ID NO: 303018 - DNA, 228 bp, Artificial Sequence
  derived and/or modified sequence
atgatggatatttacgtgtgtcttaaacgcccatcttggatggtagacaacaagagaatgcggacggcaagcaattttcaatggctgctcagcacgttcatactactctacttaatgaaccaggtcaacagtcagaagaaaggtgccccacacgacctaaagtgtgttacaaacaatctccaggtgtggaactgttcctggaaagctcctagtggcacaggtcgttag

SEQ ID NO: 303019 - DNA, 3294 bp, Artificial Sequence
  derived and/or modified sequence
atgatggacatctacgtgtgcctgaagagacccagctggatggtggacaacaagagaatgagaaccgccagcaacttccagtggctgctgagcaccttcatcctgctgtacctgatgaaccaggtgaacagccagaagaagggcgccccccacgacctgaagtgcgtgaccaacaacctgcaggtgtggaactgcagctggaaggcccccagcggcaccggcagaggcaccgactacgaggtgtgcatcgagaacagaagcagaagctgctaccagctggagaagaccagcatcaagatccccgccctgagccacggcgactacgagatcaccatcaacagcctgcacgacttcggcagcagcaccagcaagttcaccctgaacgagcagaacgtgagcctgatccccgacacccccgagatcctgaacctgagcgccgacttcagcaccagcaccctgtacctgaagtggaacgacagaggcagcgtgttcccccacagaagcaacgtgatctgggagatcaaggtgctgagaaaggagagcatggagctggtgaagctggtgacccacaacaccaccctgaacggcaaggacaccctgcaccactggagctgggccagcgacatgcccctggagtgcgccatccacttcgtggagatcagatgctacatcgacaacctgcacttcagcggcctggaggagtggagcgactggagccccgtgaagaacatcagctggatccccgacagccagaccaaggtgttcccccaggacaaggtgatcctggtgggcagcgacatcaccttctgctgcgtgagccaggagaaggtgctgagcgccctgatcggccacaccaactgccccctgatccacctggacggcgagaacgtggccatcaagatcagaaacatcagcgtgagcgccagcagcggcaccaacgtggtgttcaccaccgaggacaacatcttcggcaccgtgatcttcgccggctacccccccgacaccccccagcagctgaactgcgagacccacgacctgaaggagatcatctgcagctggaaccccggcagagtgaccgccctggtgggccccagagccaccagctacaccctggtggagagcttcagcggcaagtacgtgagactgaagagagccgaggcccccaccaacgagagctaccagctgctgttccagatgctgcccaaccaggagatctacaacttcaccctgaacgcccacaaccccctgggcagaagccagagcaccatcctggtgaacatcaccgagaaggtgtacccccacacccccaccagcttcaaggtgaaggacatcaacagcaccgccgtgaagctgagctggcacctgcccggcaacttcgccaagatcaacttcctgtgcgagatcgagatcaagaagagcaacagcgtgcaggagcagagaaacgtgaccatcaagggcgtggagaacagcagctacctggtggccctggacaagctgaacccctacaccctgtacaccttcagaatcagatgcagcaccgagaccttctggaagtggagcaagtggagcaacaagaagcagcacctgaccaccgaggccagccccagcaagggccccgacacctggagagagtggagcagcgacggcaagaacctgatcatctactggaagcccctgcccatcaacgaggccaacggcaagatcctgagctacaacgtgagctgcagcagcgacgaggagacccagagcctgagcgagatccccgacccccagcacaaggccgagatcagactggacaagaacgactacatcatcagcgtggtggccaagaacagcgtgggcagcagcccccccagcaagatcgccagcatggagatccccaacgacgacctgaagatcgagcaggtggtgggcatgggcaagggcatcctgctgacctggcactacgaccccaacatgacctgcgactacgtgatcaagtggtgcaacagcagcagaagcgagccctgcctgatggactggagaaaggtgcccagcaacagcaccgagaccgtgatcgagagcgacgagttcagacccggcatcagatacaacttcttcctgtacggctgcagaaaccagggctaccagctgctgagaagcatgatcggctacatcgaggagctggcccccatcgtggcccccaacttcaccgtggaggacaccagcgccgacagcatcctggtgaagtgggaggacatccccgtggaggagctgagaggcttcctgagaggctacctgttctacttcggcaagggcgagagagacaccagcaagatgagagtgctggagagcggcagaagcgacatcaaggtgaagaacatcaccgacatcagccagaagaccctgagaatcgccgacctgcagggcaagaccagctaccacctggtgctgagagcctacaccgacggcggcgtgggccccgagaagagcatgtacgtggtgaccaaggagaacagcgtgggcctgatcatcgccatcctgatccccgtggccgtggccgtgatcgtgggcgtggtgaccagcatcctgtgctacagaaagagagagtggatcaaggagaccttctaccccgacatccccaaccccgagaactgcaaggccctgcagttccagaagagcgtgtgcgagggcagcagcgccctgaagaccctggagatgaacccctgcacccccaacaacgtggaggtgctggagaccagaagcgccttccccaagatcgaggacaccgagatcatcagccccgtggccgagagacccgaggacagaagcgacgccgagcccgagaaccacgtggtggtgagctactgcccccccatcatcgaggaggagatccccaaccccgccgccgacgaggccggcggcaccgcccaggtgatctacatcgacgtgcagagcatgtaccagccccaggccaagcccgaggaggagcaggagaacgaccccgtgggcggcgccggctacaagccccagatgcacctgcccatcaacagcaccgtggaggacatcgccgccgaggaggacctggacaagaccgccggctacagaccccaggccaacgtgaacacctggaacctggtgagccccgacagccccagaagcatcgacagcaacagcgagatcgtgagcttcggcagcccctgcagcatcaacagcagacagttcctgatcccccccaaggacgaggacagccccaagagcaacggcggcggctggagcttcaccaacttcttccagaacaagcccaacgactag

SEQ ID NO: 303020 - DNA, 381 bp, Artificial Sequence
  derived and/or modified sequence
atgatggacatctacgtgtgcctgaagagacccagctggatggtggacaacaagagaatgagaaccgccagcaacttccagtggctgctgagcaccttcatcctgctgtacctgatgaaccaggtgaacagccagaagaagggcgccccccacgacctgaagtgcgtgaccaacaacctgcaggtgtggaactgcagctggaaggcccccagcggcaccggcagaggcaccgactacgaggtgtgcatcgagaacagaagcagaagctgctaccagctggagaagaccagcatcaagatccccgccctgagccacggcgactacgagatcaccatcaacagcctgcacgacttcggcagcagcaccagcaagttcacctag

SEQ ID NO: 303021 - DNA, 228 bp, Artificial Sequence
  derived and/or modified sequence
atgatggacatctacgtgtgcctgaagagacccagctggatggtggacaacaagagaatgagaaccgccagcaacttccagtggctgctgagcaccttcatcctgctgtacctgatgaaccaggtgaacagccagaagaagggcgccccccacgacctgaagtgcgtgaccaacaacctgcaggtgtggaactgcagctggaaggcccccagcggcaccggcagatag

SEQ ID NO: 303022 - DNA, 3279 bp, Artificial Sequence
  derived and/or modified sequence
atggcagcttactcatggtggagacagccatcgtggatggtagacaataaaagatcgaggatgactccaaacctgccatggctcctgtcagctctgaccctcctgcatctgacgatgcatgcaaacggtctgaagagaggggtacaagacttgaaatgcacaaccaacaacatgcgagtgtgggactgcacgtggccagctcccctcggggtcagccctggaactgttaaagatatttgcattaaagacaggttccattcttgtcacccattagagacaacaaacgttaaaattccagctctttcacctggtgatcacgaagtcacaataaattatctaaatggctttcagagtaaattcacgttgaatgaaaaagatgtctctttaattccagagactcccgagatcctggatttgtctgctgacttcttcacctcctccttactactgaagtggaacgacagagggtctgctctgcctcacccctccaatgccacctgggagattaaggttctacagaatccaaggacggaaccagtagcactcgtgttactcaacacaatgctgagtggtaaagataccgttcagcactggaactggacctcagacctgcccttgcaatgtgccactcactcggtgagcattcgatggcacattgactcgcctcatttctccggttacaaagagtggagtgactggagcccgctgaagaacatctcctggattcgtaatacagagactaatgtttttcctcaagacaaagtggtgctcgcaggctcaaacatgacaatttgttgtatgagtccaacgaaagtgctttcaggacagatcggcaatacccttcgtcctctcatccatctgtacgggcaaaccgttgcgatccatatcctgaacatccccgtttctgaaaacagtggcacaaacatcattttcatcacagacgacgatgtgtacggaacggtggtctttgcaggctatcctcccgatgttcctcagaagctgagctgtgagacacatgacttaaaagagattatatgtagctggaatccaggaaggataactggactggtgggcccacgaaatacagaatacaccctgtttgaaagcatttcaggaaaatcggcagtatttcacaggattgaaggacttacaaacgagacctaccggttaggcgtgcaaatgcatcccggccaagaaatccataacttcaccctgactggtcgcaatccactggggcaggcacagtcagcagtggtcatcaatgtgactgagagagttgctcctcatgatccgacttcgttgaaagtgaaggacatcaattcaacagttgttacattttcttggtatttaccaggaaattttacaaagattaatcttttatgtcaaattgaaatttgtaaagctaattccaagaaagaagtgaggaatgccacaatcagaggagccgaggattcaacttaccatgttgctgtagacaaattaaatccatacactgcatacactttccgggttcgttgttcttccaagactttctggaagtggagcaggtggagtgatgagaagcgacatctaaccacagaagccactccttcaaagggaccagacacttggagagagtggagttctgatggaaaaaatctaatcgtctactggaagcctttacctattaatgaagctaatggaaaaatactttcctacaatgtttcgtgttcattgaacgaggagacacagtcagttttggagatcttcgatcctcaacacagagcagagatacagcttagtaaaaatgactacatcatcagtgtggtggcaagaaattctgctggctcatcaccaccttcgaaaatagctagtatggaaatcccaaatgacgacatcacagtagagcaagcggtggggctaggaaacaggatcttcctcacctggcgtcacgaccccaacatgacttgtgactacgtaattaaatggtgcaactcatctcggtctgagccctgcctcctggactggagaaaggttccttcaaacagcacggagactgtcatagagtctgatcagtttcagccaggagtaagatacaacttttacctctatgggtgcactaaccagggataccaactgttacgttccataattggatacgtagaagaactggctcccattgtcgcgccaaatttcaccgtggaagatacgtcggcagactcgatattagtgaaatgggacgacatccccgtggaagagctccgaggcttcctaagagggtatttattttactttcagaaaggagagagagatacgcccaagacgaggagcttggagccacatcattctgacatcaagctaaagaacatcactgacatatcccagaagacactgaggattgctgaccttcagggtaaaaccagttaccatctggtcctgcgagcctatacacatggtggtctgggcccagagaagagcatgtttgtggtgaccaaggaaaactctgtgggattgattattgccatcctcatcccagtgactgtggctgtcattgttggcgtggtaacgagcatcctttgctatcggaagcgagaatggattaaggaaacattctacccagatattcccaatccagaaaactgtaaggcgctacagtttcagaagagcgtctgcgagggaagcaatgctcttaagacattggaaatgaacccctgtaccccgaacaacgttgaagtcctggaatctcggtcgatagtccctaaaatagaagatacagaaataatttccccagttgctgagcgtcctggggaaagatctgaggtggaccctgagaaccatgtggtcgtgtcttactgcccacccatcatcgaggaggaaataacgaaccccgcggccgatgaagtgggaggggcttcccaggtcgtgtacatcgatgtgcagtccatgtatcagccgcaagccaaagcagaggaagagcaggacgtggatcctgtggtggtggcaggctataagccacagatgcgccttcccatcagccccgctgtggaagacacagcagcagaagatgaagagggtaagaccgccggttacagacctcaggccaatgtaaacacttggaatttggtctctccagattccccgaggtccacagacagcaacaacgaagttgtctcttttggaagtccgtgctccatcaattccaggcaattcttgattcctcctaaagacgaagactctcctaaatctaatggaggagggtggtcctttacaaacttcttccagaacaaaccaaatgactaa

SEQ ID NO: 303023 - protein, 58 aa, Artificial Sequence
  derived and/or modified sequence
MRRFLLLYATQQGQAKAIAEEICEQAVVHGFSADLHCISESDKVSVIQNTPTFAMGGR

SEQ ID NO: 303024 - protein, 156 aa, Artificial Sequence
  derived and/or modified sequence
MRRFLLLYATQQGQAKAIAEEICEQAVVHGFSADLHCISESDKYDLKTETAPLVVVVSTTGTGDPPDTARKFVKEIQNQTLPVDFFAHLRYGLLGLGDSEYTYFCNGGKIIDKRLQELGARHFYDTGHADDCVGLELVVEPWIAGLWPALRKHFRS

SEQ ID NO: 303025 - protein, 41 aa, Artificial Sequence
  derived and/or modified sequence
MRRFLLLYATQQGQAKAIAEEICEQAVVHGFSADLHCISES

SEQ ID NO: 303026 - protein, 112 aa, Artificial Sequence
  derived and/or modified sequence
MRRFLLLYATQQGQAKAIAEEICEQAVVHGFSADLHCISESDKYDLKTETAPLVVVVSTTGTGDPPDTARKFVKEIQNQTLPVDFFAHLRYGLLGLGDSEYTYFCNGGKIID

SEQ ID NO: 303027 - DNA, 177 bp, Artificial Sequence
  derived and/or modified sequence
atgcggcgattcctgctcctttatgccacgcaacagggacaggctaaggctattgccgaagagatctgtgaacaggccgtggtgcacggtttttctgccgacctccactgcattagtgaatctgataaagtttcggttattcagaacacaccgacttttgcgatgggcggaaggtag

SEQ ID NO: 303028 - DNA, 471 bp, Artificial Sequence
  derived and/or modified sequence
atgaggcggttcctccttttatacgcaacacaacagggccaggccaaagcaatagcagaggaaatctgcgaacaggcagtcgtgcatggattctccgccgatttacattgcatatcagaatctgacaaatacgatttaaaaacggaaacagcccccttggtggtcgttgtttcgaccactgggaccggggacccgcctgatacagccagaaaatttgttaaagaaattcagaaccagacattgcccgtggacttcttcgcacacctacggtatggcctgctggggctgggtgattcagagtatacttatttctgcaacggtggcaagattatagacaagcggctccaggaactaggagctcggcacttctacgacaccgggcacgctgatgattgtgtcggcctagaattagttgtggagccgtggatcgctgggctctggccagctttgcgaaaacatttccgaagctag

SEQ ID NO: 303029 - DNA, 126 bp, Artificial Sequence
  derived and/or modified sequence
atgagaaggttcctgttactctacgctacccaacagggacaggcaaaggctatcgcagaggagatttgcgaacaggctgttgtgcacggcttctccgcagatctgcactgtataagcgaatcgtag

SEQ ID NO: 303030 - DNA, 339 bp, Artificial Sequence
  derived and/or modified sequence
atgcgaagattcctcttgctctatgcaacacaacaggggcaagccaaggcaatagctgaagagatttgtgaacaggctgtcgtccacgggttcagtgcagacttacactgcatttcagagtccgacaagtatgaccttaagaccgagactgcccccttagtggttgtagtctcgactacaggcactggggacccacccgataccgctaggaaatttgtcaaagagattcagaaccagaccctgcctgtcgacttctttgcccacctgcgttatggtctcttgggccttggagattcagagtatacgtatttctgcaacgggggaaagataattgattag

SEQ ID NO: 303031 - DNA, 177 bp, Artificial Sequence
  derived and/or modified sequence
atgaggcgcttcctgctgctgtatgccacccagcagggccaggccaaggccatcgccgaggagatctgtgagcaggccgtggtgcacggcttctctgctgacctgcactgcatcagcgagagtgacaaggtgtctgtcatccagaacacccccacctttgccatgggcggccgctag

SEQ ID NO: 303032 - DNA, 471 bp, Artificial Sequence
  derived and/or modified sequence
atgaggcgcttcctgctgctgtatgccacccagcagggccaggccaaggccatcgccgaggagatctgtgagcaggccgtggtgcacggcttctctgctgacctgcactgcatcagcgagagtgacaagtatgacctgaagacagaaacagcccccctggtggtggtggtgtccaccaccggcaccggggaccccccagacacagccaggaagtttgtgaaggagatccagaaccagaccctgcctgtggacttctttgcccacctgcgctatggcctgctgggcctgggggacagcgagtacacctacttctgcaatggaggcaagatcatcgacaagaggctgcaggagctgggcgcccggcacttctatgacaccggccatgctgatgactgtgtgggcctggagctggtggtggagccctggattgctggcctgtggccagccctgaggaagcacttccgctcctag

SEQ ID NO: 303033 - DNA, 126 bp, Artificial Sequence
  derived and/or modified sequence
atgaggcgcttcctgctgctgtatgccacccagcagggccaggccaaggccatcgccgaggagatctgtgagcaggccgtggtgcacggcttctctgctgacctgcactgcatcagcgagagctag

SEQ ID NO: 303034 - DNA, 339 bp, Artificial Sequence
  derived and/or modified sequence
atgaggcgcttcctgctgctgtatgccacccagcagggccaggccaaggccatcgccgaggagatctgtgagcaggccgtggtgcacggcttctctgctgacctgcactgcatcagcgagagtgacaagtatgacctgaagacagaaacagcccccctggtggtggtggtgtccaccaccggcaccggggaccccccagacacagccaggaagtttgtgaaggagatccagaaccagaccctgcctgtggacttctttgcccacctgcgctatggcctgctgggcctgggggacagcgagtacacctacttctgcaatggaggcaagatcattgattag

SEQ ID NO: 303035 - DNA, 177 bp, Artificial Sequence
  derived and/or modified sequence
atgcggcggttcctgctgctgtacgccacccagcagggccaggccaaggctatcgctgaggaaatctgcgagcaggcagtcgtccacggattttccgctgatctgcattgcattagcgaatccgacaaggtgtctgttatccaaaacacacccacctttgcaatgggggggcgatag

SEQ ID NO: 303036 - DNA, 471 bp, Artificial Sequence
  derived and/or modified sequence
atgcggcggttcctgctgctgtacgccacccagcagggccaggccaaggccattgccgaggagatttgcgagcaggcagtcgtgcacggcttttccgctgatcttcactgtattagcgaatccgacaaatatgatctcaaaaccgaaacagctccactcgtagttgtggtctcaaccaccggtacgggcgacccccctgacacagctagaaagtttgtcaaggagatacagaaccaaacactccctgtggacttttttgctcatctaagatatggcctgctggggcttggcgacagcgagtatacttatttttgtaatgggggaaaaatcattgataagagattgcaggaactcggcgctcgacacttctacgacacaggacacgctgacgactgcgtgggactcgaactcgtcgtcgaaccctggattgccggtctctggccagccctgaggaagcatttccgctcttag

SEQ ID NO: 303037 - DNA, 126 bp, Artificial Sequence
  derived and/or modified sequence
atgcggcggttcctgctgctgtacgccacccagcagggccaggccaaggcaatcgccgaagaaatttgcgagcaggccgttgtccatggctttagtgccgatttacactgtatcagtgagagctag

SEQ ID NO: 303038 - DNA, 339 bp, Artificial Sequence
  derived and/or modified sequence
atgcggcggttcctgctgctgtacgccacccagcagggccaggccaaggctattgctgaggagatttgcgagcaagctgtagtccatggcttttcagccgacttgcactgtatctctgaatccgacaagtatgacctgaaaactgaaacagccccccttgtggtggtcgtatccacgacaggcacaggggatccccccgatacggccaggaagttcgtaaaggaaatccagaatcagaccctcccagtggattttttcgcccatcttcgatacggactgcttggtctcggtgattcagaatacacttacttttgtaatggtggaaaaatcatcgattag

SEQ ID NO: 303039 - DNA, 177 bp, Artificial Sequence
  derived and/or modified sequence
atgaggcggttcctactgttgtatgccactcagcagggccaggctaaggccatcgctgaagaaatctgtgaacaggctgtagtccatggcttttccgccgatcttcactgcatctctgaaagcgataaggttagcgtgattcagaatacacctacattcgccatggggggaagatag

SEQ ID NO: 303040 - DNA, 471 bp, Artificial Sequence
  derived and/or modified sequence
atgaggaggtttttgcttctctatgccacccaacaggggcaggctaaagcgattgcagaggagatatgcgaacaggcagttgtgcacggcttctcagccgacctccactgtatttcagaatcggataagtacgatctgaagaccgaaaccgccccactggtggtcgtggtcagtacaaccggcacaggggaccctccggatacggctaggaagtttgtcaaagagattcagaatcagacactacccgtggacttttttgcgcacttgcgttacggtcttctggggttaggggattctgaatatacctacttctgcaatgggggaaagataattgacaagcggctgcaggaactgggagcccgacacttttatgacaccgggcacgcagacgattgcgtggggcttgagttggtggtggaaccatggatagccggtctgtggcctgcgctgcgaaaacactttcgatcttag

SEQ ID NO: 303041 - DNA, 126 bp, Artificial Sequence
  derived and/or modified sequence
atgcgcagattcctcttgctgtacgcgacgcagcaaggccaggcaaaggccattgcggaagaaatttgcgagcaagcggtggtccatggattctcagctgatctccattgcatcagcgagagctag

SEQ ID NO: 303042 - DNA, 339 bp, Artificial Sequence
  derived and/or modified sequence
atgcggaggttcctcctcctctacgccacacaacaggggcaggccaaggcgatcgccgaagaaatctgtgaacaggcagtcgtgcatggcttttcagcagaccttcactgcatctccgaatctgacaaatatgaccttaaaaccgagaccgcgcctctggtggtggtcgtcagtactacaggcacaggcgacccgcctgatacggcacgcaaattcgtcaaggagattcaaaaccagacactgcccgttgacttcttcgctcacctccggtatggtctccttggcctgggcgactccgaatatacgtacttctgcaatggtggcaagatcattgactag

SEQ ID NO: 303043 - DNA, 567 bp, Artificial Sequence
  derived and/or modified sequence
gtcggctacggttcccggattccggccgctcgccctgcactaatctcctgggagaggcggcccggggcggggtttcactgttacatgccttgaagtgatgaggaggtttctgttactatatgctacacagcagggacaggcaaaggccatcgcagaagaaatatgtgagcaagctgtggtacatggattttctgcagatcttcactgtattagtgaatccgataagtatgacctaaaaaccgaaacagctcctcttgttgttgtggtttctaccacgggcaccggagacccacccgacacagcccgcaagtttgttaaggaaatacagaaccaaacactgccggttgatttctttgctcacctgcggtatgggttactgggtctcggtgattcagaatacacctacttttgcaatggggggaagataattgataaacgacttcaagagcttggagcccggcatttctatgacactggacatgcagatgactgtgtaggtttagaacttgtggttgagccgtggattgctggactctggccagccctcagaaagcattttaggtcaag

SEQ ID NO: 303044 - DNA, 628 bp, Artificial Sequence
  derived and/or modified sequence
tcccggattccggccgctcgccctgcactaatctcctgggagaggcggcccggggcgggggtgggcagccggcttgcgcccgtggttcccacgcccttcggcctccgggggtcgccgcgggcgcgggctggggctcggacttggcctttggcctttggctttggtgtccccgggagcgtgtccttgggctcggcgtcggcctctgccgcgggaggcccctgggcggcgtggggtctctcctcatgttctgcctttggttctaggcgctttccaggcctagggaaaccgcactcggggacgcggggaactggggaacatgccgggttggggcggcgcgctccggggaacccgggacgttccgagcgcccacccggcgggacgcggccgtgagttctgcccgcggccgtgagctctgcccaccgcctccgcgccgcttccggggctgctggggcccgggcctccgctgagagtcgtgggaagtttcactgttacatgccttgaagtgatgaggaggtttctgttactatatgctacacagcagggacaggcaaaggccatcgcagaagaaatatgtgagcaagctgtggtacatggattttctgcagatcttcactgtattagtgaatcc

SEQ ID NO: 303045 - DNA, 520 bp, Artificial Sequence
  derived and/or modified sequence
taggatcaaataagaaccaagaatcctatcattttaatatagtttttacttttatctttttttaaaaagaggaaaccaaaagctatttaagactgttgtgaatgatactgtggctcaagttttgttcaggttcttggcttgtgccacatcgtttttcagtttcactgttacatgccttgaagtgatgaggaggtttctgttactatatgctacacagcagggacaggcaaaggccatcgcagaagaaatatgtgagcaagctgtggtacatggattttctgcagatcttcactgtattagtgaatccgataagtatgacctaaaaaccgaaacagctcctcttgttgttgtggtttctaccacgggcaccggagacccacccgacacagcccgcaagtttgttaaggaaatacagaaccaaacactgccggttgatttctttgctcacctgcggtatgggttactgggtctcggtgattcagaatacacctacttttgcaatggggggaagataattgat

SEQ ID NO: 303046 - DNA, 177 bp, Artificial Sequence
  derived and/or modified sequence
atgagaagattcctgctgctgtacgccacccagcagggccaggccaaggccatcgccgaggagatctgcgagcaggccgtggtgcacggcttcagcgccgacctgcactgcatcagcgagagcgacaaggtgagcgtgatccagaacacccccaccttcgccatgggcggcagatag

SEQ ID NO: 303047 - DNA, 471 bp, Artificial Sequence
  derived and/or modified sequence
atgagaagattcctgctgctgtacgccacccagcagggccaggccaaggccatcgccgaggagatctgcgagcaggccgtggtgcacggcttcagcgccgacctgcactgcatcagcgagagcgacaagtacgacctgaagaccgagaccgcccccctggtggtggtggtgagcaccaccggcaccggcgacccccccgacaccgccagaaagttcgtgaaggagatccagaaccagaccctgcccgtggacttcttcgcccacctgagatacggcctgctgggcctgggcgacagcgagtacacctacttctgcaacggcggcaagatcatcgacaagagactgcaggagctgggcgccagacacttctacgacaccggccacgccgacgactgcgtgggcctggagctggtggtggagccctggatcgccggcctgtggcccgccctgagaaagcacttcagaagctag

SEQ ID NO: 303048 - DNA, 126 bp, Artificial Sequence
  derived and/or modified sequence
atgagaagattcctgctgctgtacgccacccagcagggccaggccaaggccatcgccgaggagatctgcgagcaggccgtggtgcacggcttcagcgccgacctgcactgcatcagcgagagctag

SEQ ID NO: 303049 - DNA, 339 bp, Artificial Sequence
  derived and/or modified sequence
atgagaagattcctgctgctgtacgccacccagcagggccaggccaaggccatcgccgaggagatctgcgagcaggccgtggtgcacggcttcagcgccgacctgcactgcatcagcgagagcgacaagtacgacctgaagaccgagaccgcccccctggtggtggtggtgagcaccaccggcaccggcgacccccccgacaccgccagaaagttcgtgaaggagatccagaaccagaccctgcccgtggacttcttcgcccacctgagatacggcctgctgggcctgggcgacagcgagtacacctacttctgcaacggcggcaagatcatcgactag

SEQ ID NO: 303050 - protein, 246 aa, Artificial Sequence
  derived and/or modified sequence
MALYLNGATVVAGFGGALGYLLGAIDWAHLELGRLLGTEFQVMFFFSALVLTLCFTVHLCSISEAPLTEVAKGIPPQQTPQDPPLSSDGMYEYGSIEKVKNGYVNPELAMQGAKNKNHAEQTRRAMTLKSLLRALVNMPPHYRYLCISHLIGWTAFLSNMLFFTDFMGQIVYRGDPYSAHNSTEFLIYERGVEVGCWGLCINSVFSSLYSYFQKVLVSYIGLKGLYFTGYLLFGLGTGFIGLFPNV

SEQ ID NO: 303051 - DNA, 1416 bp, Artificial Sequence
  derived and/or modified sequence
atgggcagcaacagcggccaggccggcagacacatctacaagagcctggccgacgacggccccttcgacagcgtggagccccccaagagacccaccagcagactgatcatgcacagcatggccatgttcggcagagagttctgctacgccgtggaggccgcctacgtgacccccgtgctgctgagcgtgggcctgcccagcagcctgtacagcatcgtgtggttcctgagccccatcctgggcttcctgctgcagcccgtggtgggcagcgccagcgaccactgcagaagcagatggggcagaagaagaccctacatcctgaccctgggcgtgatgatgctggtgggcatggccctgtacctgaacggcgccaccgtggtggccggcttcggcggcgccctgggctacctgctgggcgccatcgactgggcccacctggagctgggcagactgctgggcaccgagttccaggtgatgttcttcttcagcgccctggtgctgaccctgtgcttcaccgtgcacctgtgcagcatcagcgaggcccccctgaccgaggtggccaagggcatccccccccagcagaccccccaggacccccccctgagcagcgacggcatgtacgagtacggcagcatcgagaaggtgaagaacggctacgtgaaccccgagctggccatgcagggcgccaagaacaagaaccacgccgagcagaccagaagagccatgaccctgaagagcctgctgagagccctggtgaacatgcccccccactacagatacctgtgcatcagccacctgatcggctggaccgccttcctgagcaacatgctgttcttcaccgacttcatgggccagatcgtgtacagaggcgacccctacagcgcccacaacagcaccgagttcctgatctacgagagaggcgtggaggtgggctgctggggcctgtgcatcaacagcgtgttcagcagcctgtacagctacttccagaaggtgctggtgagctacatcggcctgaagggcctgtacttcaccggctacctgctgttcggcctgggcaccggcttcatcggcctgttccccaacgtgtacagcaccctggtgctgtgcagcctgttcggcgtgatgagcagcaccctgtacaccgtgcccttcaacctgatcaccgagtaccacagagaggaggagaaggagagacagcaggcccccggcggcgaccccgacaacagcgtgagaggcaagggcatggactgcgccaccctgacctgcatggtgcagctggcccagatcctggtgggcggcggcctgggcttcctggtgaacaccgccggcaccgtggtggtggtggtgatcaccgccagcgccgtggccctgatcggctgctgcttcgtggccctgttcgtgagatacgtggactag

SEQ ID NO: 303052 - DNA, 741 bp, Artificial Sequence
  derived and/or modified sequence
atggccctgtacctgaacggcgccaccgtggtggccggcttcggcggcgccctgggctacctgctgggcgccatcgactgggcccacctggagctgggcagactgctgggcaccgagttccaggtgatgttcttcttcagcgccctggtgctgaccctgtgcttcaccgtgcacctgtgcagcatcagcgaggcccccctgaccgaggtggccaagggcatccccccccagcagaccccccaggacccccccctgagcagcgacggcatgtacgagtacggcagcatcgagaaggtgaagaacggctacgtgaaccccgagctggccatgcagggcgccaagaacaagaaccacgccgagcagaccagaagagccatgaccctgaagagcctgctgagagccctggtgaacatgcccccccactacagatacctgtgcatcagccacctgatcggctggaccgccttcctgagcaacatgctgttcttcaccgacttcatgggccagatcgtgtacagaggcgacccctacagcgcccacaacagcaccgagttcctgatctacgagagaggcgtggaggtgggctgctggggcctgtgcatcaacagcgtgttcagcagcctgtacagctacttccagaaggtgctggtgagctacatcggcctgaagggcctgtacttcaccggctacctgctgttcggcctgggcaccggcttcatcggcctgttccccaacgtgtag

SEQ ID NO: 303053 - DNA, 1416 bp, Artificial Sequence
  derived and/or modified sequence
atgggctctaattccggtcaggcaggccgccatatctataaatctctcgccgatgatggaccttttgattctgtagagcctcccaagcgtcctacaagccgacttattatgcacagcatggcaatgttcggtagggagttctgttacgctgttgaagctgcttacgttacccctgttctgctctccgtggggctgcctagctccctctactccatcgtttggttcctttccccgatcctggggtttctacttcagcctgtcgtggggagcgcatcagatcactgccgatctcggtgggggcgccggaggccctatatcttgaccctaggtgtcatgatgctggtgggtatggcgttgtacctgaatggagctacagtcgttgccgggtttgggggcgcactcggttatctactaggcgcaattgactgggcacaccttgaactgggaagactgctggggactgaattccaggtcatgtttttcttctccgcattggtgctgactctgtgtttcactgtgcacctgtgtagcatcagcgaagcccctcttacagaggtcgccaagggaatcccgccacaacagacgccccaggatcctcccctctcgagcgacggcatgtatgaatacgggtcaatagagaaggtgaagaacggctacgttaacccagaactcgctatgcaaggcgcaaaaaacaaaaaccacgccgagcagactcgaagggcaatgaccttgaagtctctgcttcgggcccttgtgaacatgcctcctcactacagatacctgtgcatctcacatctgatcggctggaccgcgtttctaagcaatatgctttttttcactgattttatgggacagattgtttatcgtggagatccttactctgcacacaatagtaccgagttccttatctacgagcgtggggtcgaagttgggtgctggggcttatgcatcaattccgtgttttccagtctgtattcctacttccagaaggtgctcgtctcttacatcggactgaagggcctgtattttaccggttatctcctgttcgggctgggaacagggttcataggcctctttccaaatgtctactctaccctggtgctgtgctcgctcttcggagttatgtcatccaccctttacaccgtccctttcaatctgattaccgaataccaccgtgaagaggaaaaggaaagacagcaggcccctggaggggaccccgataactccgtcagaggaaagggcatggattgcgcgacattgacctgtatggtccagctggcccagattctggtaggtggcggcctcgggtttctggttaataccgcagggacagtcgtggtggttgtgatcacagccagtgcggtggccctgatcggctgctgcttcgtggccctctttgtgcgctatgtggactag

SEQ ID NO: 303054 - DNA, 741 bp, Artificial Sequence
  derived and/or modified sequence
atggccttgtatctgaacggtgccactgtggtcgccggctttggcggggccttaggttatctgctcggcgcaatcgactgggcacatttagagctggggagattactgggaacagagtttcaggttatgtttttctttagcgccctagtccttaccctgtgtttcactgttcacttgtgcagcatatctgaggctccccttacagaggtagccaagggaattccaccccagcaaacacctcaggatcctccactcagctctgatggaatgtatgaatacggatccatcgaaaaggtgaagaatggatatgtgaacccagaacttgccatgcaaggcgccaaaaacaagaatcacgcagagcagaccagacgggccatgacactgaaatccttacttcgcgccctagtcaacatgccaccgcactacagatatctttgtatttctcatcttatagggtggaccgcctttttaagcaacatgctcttctttacagacttcatgggacagattgtgtaccgtggcgatccatattcagcgcacaactctactgagttcttaatttacgagaggggcgtcgaggtcggatgttggggcctctgcattaattcagtgtttagctcgttgtatagttacttccagaaggtcctcgtttcctatatcggcctaaaagggctttactttacaggctatttgctctttggccttggaaccggcttcatcggtttatttccaaatgtgtag

SEQ ID NO: 303055 - DNA, 1416 bp, Artificial Sequence
  derived and/or modified sequence
atgggcagcaacagcggccaggccggccgccacatctacaagagcctggctgatgatggcccctttgacagcgtggagccccccaagaggcccaccagccgcctcatcatgcacagcatggccatgtttggccgggagttctgctatgctgtggaggccgcctacgtgacccctgtgctgctgtctgtgggcctgcccagcagcctgtacagcatcgtgtggttcctgagccccatcctgggcttcctgctgcagcctgtggtgggcagcgccagtgaccactgccgcagccgctggggcagaagaagaccctacatcctgaccctgggcgtgatgatgctggtgggcatggccctgtacctgaatggagccaccgtggtggccggctttggaggagccctgggctacctgctgggcgccatcgactgggcccacctggagctgggccgcctgctgggcacagagttccaggtgatgttcttcttcagcgccctggtgctgaccctgtgcttcaccgtgcacctgtgcagcatcagcgaggcccccctgacagaggtggccaagggcatccccccccagcagaccccccaggacccccccctgagcagtgatggcatgtatgaatatggcagcattgagaaggtgaagaatggctacgtgaaccctgagctggccatgcagggcgccaagaacaagaaccacgccgagcagacccggcgggccatgaccctgaagagcctgctgcgggccctggtgaacatgccaccccactaccgctacctgtgcatcagccacctgattggctggacagccttcctgagcaacatgctgttcttcacagacttcatgggccagatcgtgtacagaggagacccctacagcgcccacaacagcacagagttcctgatctatgaaagaggagtggaggtgggctgctggggcctgtgcatcaacagcgtcttcagcagcctgtacagctacttccagaaggtgctggtgtcctacatcggcctgaagggcctgtacttcaccggctacctgctgtttggcctgggcaccggcttcatcggcctcttccccaacgtgtacagcaccctggtgctgtgcagcctgtttggagtgatgagcagcaccctgtacacagtgcccttcaacctgatcacagagtaccaccgggaggaggagaaggagcggcagcaggcccctggaggagaccctgacaacagcgtgcggggcaagggcatggactgtgccaccctgacctgcatggtgcagctggcccagatcctggtgggcggcggcctgggcttcctggtgaacacagctggcaccgtggtggtggtggtgatcacagccagcgctgtggccctgattggctgctgctttgtggccctgtttgtgcgctacgtggactag

SEQ ID NO: 303056 - DNA, 741 bp, Artificial Sequence
  derived and/or modified sequence
atggccctgtacctgaatggagccaccgtggtggccggctttggaggagccctgggctacctgctgggcgccatcgactgggcccacctggagctgggccgcctgctgggcacagagttccaggtgatgttcttcttcagcgccctggtgctgaccctgtgcttcaccgtgcacctgtgcagcatcagcgaggcccccctgacagaggtggccaagggcatccccccccagcagaccccccaggacccccccctgagcagtgatggcatgtatgaatatggcagcattgagaaggtgaagaatggctacgtgaaccctgagctggccatgcagggcgccaagaacaagaaccacgccgagcagacccggcgggccatgaccctgaagagcctgctgcgggccctggtgaacatgccaccccactaccgctacctgtgcatcagccacctgattggctggacagccttcctgagcaacatgctgttcttcacagacttcatgggccagatcgtgtacagaggagacccctacagcgcccacaacagcacagagttcctgatctatgaaagaggagtggaggtgggctgctggggcctgtgcatcaacagcgtcttcagcagcctgtacagctacttccagaaggtgctggtgtcctacatcggcctgaagggcctgtacttcaccggctacctgctgtttggcctgggcaccggcttcatcggcctcttccccaacgtgtag

SEQ ID NO: 303057 - DNA, 1416 bp, Artificial Sequence
  derived and/or modified sequence
atgggcagcaacagcggccaggccggccggcacatctacaagagcctggccgacgacggaccctttgacagtgtcgagccaccaaagcggccaacaagcagattgattatgcactcaatggccatgttcggacgggagttttgctatgccgtggaggccgcttatgtgacccctgtactgctttccgtcggcctccctagttccctgtacagcatcgtgtggtttctgtctcctatactgggattccttctccaacctgtagttggcagtgcatctgaccattgtcggagtagatgggggcgtaggcgcccctacattttgacccttggggtgatgatgctcgtggggatggctctgtatctgaatggggccaccgtcgtagctggatttggtggggctttgggctacttgctaggggcaattgattgggcccatcttgagctcggtcggctcttaggcaccgagttccaggtcatgtttttttttagtgccctcgtactgactttgtgcttcacggtgcacctttgttcgatcagcgaagcccccctcaccgaggtggccaaaggcatacctccccagcagacaccgcaggacccacctctgagctccgacggcatgtatgagtacggcagtatcgagaaagtcaagaacggttatgtgaaccctgaactcgccatgcaaggagccaagaacaagaatcatgctgagcaaaccagacgcgctatgacgctcaagtcccttctgcgcgccctcgttaatatgccaccacattatcggtatctgtgtatctcccatttgatcgggtggactgcattcctgtcaaacatgttattttttacggacttcatgggccaaatagtctataggggcgatccctacagcgctcacaactctactgagttccttatttatgaacgtggcgtggaggtcgggtgctggggtttgtgtattaatagtgtcttcagtagcctgtacagttacttccaaaaagtcctggtcagctatatcggtctaaaaggactgtacttcaccggatatctcctgttcggccttggaacaggatttatcgggctgtttccgaacgtttatagtaccttggttttatgcagcctgttcggtgtgatgtcctccacgctatacaccgtgccgttcaaccttattactgaataccatcgagaggaagaaaaagaacgccagcaagcacctggcggggaccccgataacagcgtcagaggcaaaggcatggattgcgcgacacttacttgcatggtgcagctggcccagattttagttggaggggggctgggcttcctcgtgaacaccgctggcacagttgtcgtggtcgtcattacagcctccgccgtcgccctgattggatgctgcttcgtagcacttttcgttcggtacgtggattag

SEQ ID NO: 303058 - DNA, 741 bp, Artificial Sequence
  derived and/or modified sequence
atggccctgtacctgaacggcgccaccgtggtggccggcttcggcggtgcactggggtatctgcttggcgctatcgattgggctcacctggagctcggaagactcttagggacggagttccaggtaatgttctttttctccgcgctcgttctcacactctgctttacagtgcatttatgcagcatctccgaagcgcctttaaccgaagttgctaaaggaatccccccccaacagacaccgcaggacccaccccttagtagtgatggcatgtatgaatacgggtctatcgaaaaagttaagaacgggtacgtgaatccagagctggctatgcagggagcaaaaaacaagaaccacgcagaacagacacggcgagccatgaccctgaaatcccttctgagggcactggtcaacatgccacctcactatcgctacctgtgcatctcacacctgattgggtggactgcgtttctttcaaatatgctcttcttcaccgacttcatgggacagatagtatacagaggcgacccttattctgcccataacagcacagaatttctgatctatgaaagaggcgtcgaagtgggctgctgggggttgtgtattaacagtgtgtttagctcgctgtactcatactttcagaaggtgttggtgagttacattggactgaagggcttatatttcaccggctatctcctgttcgggctgggtacgggctttattggccttttccctaatgtttag

SEQ ID NO: 303059 - DNA, 1416 bp, Artificial Sequence
  derived and/or modified sequence
atgggctccaactccggacaggcgggaaggcacatttataagtccctcgctgacgatggccctttcgattccgtagagcctccaaagcgacctacctcaaggctaatcatgcactctatggccatgttcggccgtgaattctgctacgccgttgaggcagcctatgtgaccccagtgctcctgagcgtggggctaccttcaagcctgtactcaatagtgtggtttctcagtccgatcttggggtttcttcttcagccagtcgtcggttccgcctcagaccactgccggtctagatggggaagacgacggccttatatacttactctgggcgtcatgatgcttgtgggaatggccctgtatctaaacggggctacagtggtcgccggattcggcggtgccttggggtatctgctcggagcaatcgactgggcacatcttgagctgggaagactattggggacggagttccaagtgatgttctttttctccgccttggtcttgacgctgtgcttcacggtgcatctatgcagtatctccgaggcaccactgacagaggtcgcgaagggtatccccccacagcaaaccccccaagatcctcccctgagctcagatggaatgtacgagtacggttccatcgagaaggtgaaaaacgggtatgtgaaccccgagctggcaatgcagggtgcaaagaacaaaaatcacgcagagcaaacgcggcgagccatgaccctcaaaagtctactgcgagcgttggtgaacatgccgcctcattatcgctatctgtgcatcagccatctgatcggttggactgcttttctgtcaaacatgttgttctttaccgattttatggggcagatagtttataggggagatccttactccgctcacaatagtactgagttcctcatttatgagaggggggtggaggttgggtgttggggactgtgcatcaacagcgtgttttctagtttatattcatatttccagaaagtccttgtctcatacattggcctaaagggcctttattttactgggtatctgttattcggcctgggcaccgggtttataggactctttcctaatgtgtattctactttggttctttgctccctctttggagttatgtcctcaacactttacacagtgccctttaacttgatcactgagtatcatcgggaggaagaaaaagagagacaacaggctccgggtggggaccccgataattccgtcagaggcaagggaatggactgcgctacgttaacctgcatggtccaactggctcagattttagtcggcggaggactgggattccttgtgaacacagcagggactgtcgtggtagtggtcatcacggctagcgccgtcgcccttataggctgttgttttgtggcgctgttcgtgagatatgtggattag

SEQ ID NO: 303060 - DNA, 741 bp, Artificial Sequence
  derived and/or modified sequence
atggcgttgtacttaaacggggctacggtcgtcgccggatttggaggtgcactgggatacctgctcggtgctattgattgggcccacctggagcttgggcgactgctaggaacagaatttcaagtgatgttcttcttcagtgccctcgtgttgactctgtgcttcactgtgcatttgtgttcaattagcgaagcccctcttacagaagttgccaagggcatccctcctcaacagacccctcaggatcccccattgtcaagtgatggcatgtacgagtacggcagcatcgagaaagttaagaacgggtatgtgaaccctgagctcgctatgcagggagctaaaaacaaaaaccatgctgagcagacccggagagccatgactctaaagagtttattgagagccctggtcaacatgccaccccactataggtatttatgcatttcacatttgatcgggtggaccgcctttctctccaatatgctctttttcaccgactttatgggccagatcgtctacaggggcgacccttattccgcacataattctactgagttcttgatatatgagcgaggcgtggaggtggggtgctggggattgtgcatcaactctgtatttagtagcctctattcttatttccaaaaggtcctagttagctatattggtctgaaggggctttatttcaccggatacctcctgttcggcctcggcactgggtttataggcctattccccaacgtgtag

SEQ ID NO: 303061 - DNA, 1537 bp, Artificial Sequence
  derived and/or modified sequence
gccaggctccacgtcaaatccagtttgaaacacagaccctaggaccacgcaggaggtggtgggctcgcaggaaggttcctctcccagtggccatgggtagcaacagtgggcaggctggccgccacatctataaatccctagctgatgatggcccctttgactctgtggagccgcctaaaagacccaccagcagactcatcatgcacagcatggccatgttcggaagagagttctgctacgcggtggaggcagcgtatgtgaccccagtcctgctcagcgtaggtctgcccagcagcctgtacagcattgtgtggttcctcagccccatcctgggattcctgctgcagcccgtggtcggatcggccagcgaccactgccggtccaggtggggccgccggagaccctacatcctcaccctgggagtcatgatgctcgtgggcatggctctgtacctcaatggggctactgttgtagcaggttttggaggtgccctgggttaccttttgggtgctatagactgggcccatctggagctgggaagactgttgggtacagaattccaggtcatgttcttcttctctgcattggtgctcactttgtgttttactgttcatctgtgcagtatctctgaagccccacttacagaggttgcaaagggcattcccccacagcaaacccctcaggaccctccattgtcatcagatggaatgtacgagtatggttctatcgagaaagttaaaaatggttacgtaaatccagagctggcaatgcagggagcaaaaaacaaaaatcatgctgaacagactcgcagggcaatgacattaaagtcactgctgagagcactggtgaacatgcctcctcactaccgctacctttgcatcagccacctcattggatggacagccttcctgtccaacatgctgttcttcacagatttcatgggccagattgtgtaccgcggggatccctatagtgcacacaactccacagagtttctcatctacgaaagaggagtcgaggttggatgttggggcttgtgcatcaactccgtgttttcctcactttattcttactttcagaaagttttggtatcctacattggattaaagggtctttacttcacgggatatttgctgtttggcctggggacgggatttattgggctcttcccgaatgtctactccaccctggtcctgtgcagcctgtttggtgtaatgtccagcaccctgtacactgtgccctttaacctcattactgagtaccaccgcgaggaagaaaaggagaggcagcaggccccaggaggggacccagacaacagcgtgagagggaagggcatggactgcgccaccctcacatgcatggtgcagctggctcagatcctggtcggaggtggcctgggctttctggtcaacacagccgggaccgttgtcgtcgtggtgatcacagcgtctgcggtggcactgataggctgttgctttgtcgctctctttgttagatatgtggattaggtcaataaagagacaatgaccctaacctc

SEQ ID NO: 303062 - DNA, 740 bp, Artificial Sequence
  derived and/or modified sequence
gcatggctctgtacctcaatggggctactgttgtagcaggttttggaggtgccctgggttaccttttgggtgctatagactgggcccatctggagctgggaagactgttgggtacagaattccaggtcatgttcttcttctctgcattggtgctcactttgtgttttactgttcatctgtgcagtatctctgaagccccacttacagaggttgcaaagggcattcccccacagcaaacccctcaggaccctccattgtcatcagatggaatgtacgagtatggttctatcgagaaagttaaaaatggttacgtaaatccagagctggcaatgcagggagcaaaaaacaaaaatcatgctgaacagactcgcagggcaatgacattaaagtcactgctgagagcactggtgaacatgcctcctcactaccgctacctttgcatcagccacctcattggatggacagccttcctgtccaacatgctgttcttcacagatttcatgggccagattgtgtaccgcggggatccctatagtgcacacaactccacagagtttctcatctacgaaagaggagtcgaggttggatgttggggcttgtgcatcaactccgtgttttcctcactttattcttactttcagaaagttttggtatcctacattggattaaagggtctttacttcacgggatatttgctgtttggcctggggacgggatttattgggctcttcccgaatgtc

SEQ ID NO: 303063 - DNA, 102 bp, Artificial Sequence
  derived and/or modified sequence
attattaagtacctcctgttatattctttcctttgcgtcttgatcaagtgccaagattcattcaaaatctattgcttcccctgctacccattttacaattag

SEQ ID NO: 303064 - DNA, 102 bp, Artificial Sequence
  derived and/or modified sequence
atcatcaagtacctgctgctgtacagcttcctgtgtgtgctgatcaagtgccaggacagcttcaagatctactgcttcccctgctaccccttctacaactag

SEQ ID NO: 303065 - DNA, 102 bp, Artificial Sequence
  derived and/or modified sequence
atcatcaagtacctgctgctgtacagcttcctgtgcgtgctgatcaagtgccaggactcctttaagatctattgctttccatgttatcccttttataactag

SEQ ID NO: 303066 - DNA, 102 bp, Artificial Sequence
  derived and/or modified sequence
atcatcaagtatcttttgctgtactcctttctatgtgttctgatcaaatgccaagacagtttcaagatatattgttttccctgctaccctttctacaactag

SEQ ID NO: 303067 - DNA, 99 bp, Artificial Sequence
  derived and/or modified sequence
atcatcaaatacctactattgtacagttttttgtgtgtgctgataaaatgtcaggattcttttaagatatattgttttccttgttatcctttttataat

SEQ ID NO: 303068 - DNA, 102 bp, Artificial Sequence
  derived and/or modified sequence
atcatcaagtacctgctgctgtacagcttcctgtgcgtgctgatcaagtgccaggacagcttcaagatctactgcttcccctgctaccccttctacaactag

SEQ ID NO: 303069 - protein, 622 aa, Artificial Sequence
  derived and/or modified sequence
MKENVASATVFTLLLFLNTCLLNGQLPPGKPEIFKCRSPNKETFTCWWRPGTDGGLPTNYSLTYHREGETLMHECPDYITGGPNSCHFGKQYTSMWRTYIMMVNATNQMGSSFSDELYVDVTYIVQPDPPLELAVEVKQPEDRKPYLWIKWSPPTLIDLKTGWFTLLYEIRLKPEKAAEWEIHFAGQQTEFKILSLHPGQKYLVQVRCKPDHGYWSAWSPATFIQIPSDFTMNDTTVWISVAVLSAVICLIIVWAVALKGYSMVTCIFPPVPGPKIKGFDAHLLEKGKSEELLSALGCQDFPPTSDYEDLLVEYLEVDDSEDQHLMSVHSKEHPSQGMKPTYLDPDTDSGRGSCDSPSLLSEKCEEPQANPSTFYDPEVIEKPENPETTHTWDPQCISMEGKIPYFHAGGSKCSTWPLPQPSQHNPRSSYHNITDVCELAVGPAGAPATLLNEAGKDALKSSQTIKSREEGKATQQREVESFHSETDQDTPWLLPQEKTPFGSAKPLDYVEIHKVNKDGALSLLPKQRENSGKPKKPGTPENNKEYAKVSGVMDNNILVLVPDPHAKNVACFEESAKEAPPSLEQNQAEKALANFTATSSKCRLQLGGLDYLDPACFTHSFH

SEQ ID NO: 303070 - protein, 103 aa, Artificial Sequence
  derived and/or modified sequence
MKENVASATVFTLLLFLNTCLLNGQLPPGKPEIFKCRSPNKETFTCWWRPGTDGGLPTNYSLTYHREGETLMHECPDYITGGPNSCHFGKQYTSMWRTYIMMV

SEQ ID NO: 303071 - protein, 62 aa, Artificial Sequence
  derived and/or modified sequence
MKENVASATVFTLLLFLNTCLLNGQLPPGKPEIFKCRSPNKETFTCWWRPGTDGGLPTNYSL

SEQ ID NO: 303072 - protein, 111 aa, Artificial Sequence
  derived and/or modified sequence
MKENVASATVFTLLLFLNTCLLNGQLPPGKPEIFKCRSPNKETFTCWWRPGTDGGLPTNYSLTYHREGETLMHECPDYITGGPNSCHFGKQYTSMWRTYIMMVNATNQMGS

SEQ ID NO: 303073 - protein, 288 aa, Artificial Sequence
  derived and/or modified sequence
MKENVASATVFTLLLFLNTCLLNGQLPPGKPEIFKCRSPNKETFTCWWRPGTDGGLPTNYSLTYHREGETLMHECPDYITGGPNSCHFGKQYTSMWRTYIMMVNATNQMGSSFSDELYVDVTYIVQPDPPLELAVEVKQPEDRKPYLWIKWSPPTLIDLKTGWFTLLYEIRLKPEKAAEWEIHFAGQQTEFKILSLHPGQKYLVQVRCKPDHGYWSAWSPATFIQIPSDFTMNDTTVWISVAVLSAVICLIIVWAVALKGYSMVTCIFPPVPGPKIKGFDAHLLEVTP

SEQ ID NO: 303074 - protein, 120 aa, Artificial Sequence
  derived and/or modified sequence
MKENVASATVFTLLLFLNTCLLNGQLPPGKPEIFKCRSPNKETFTCWWRPGTDGGLPTNYSLTYHREGETLMHECPDYITGGPNSCHFGKQYTSMWRTYIMMVNATNQMGSSFSDELYVD

SEQ ID NO: 303075 - protein, 309 aa, Artificial Sequence
  derived and/or modified sequence
MKENVASATVFTLLLFLNTCLLNGQLPPGKPEIFKCRSPNKETFTCWWRPGTDGGLPTNYSLTYHREGETLMHECPDYITGGPNSCHFGKQYTSMWRTYIMMVNATNQMGSSFSDELYVDVTYIVQPDPPLELAVEVKQPEDRKPYLWIKWSPPTLIDLKTGWFTLLYEIRLKPEKAAEWEIHFAGQQTEFKILSLHPGQKYLVQVRCKPDHGYWSAWSPATFIQIPSDFTMNDTTVWISVAVLSAVICLIIVWAVALKGYSMVTCIFPPVPGPKIKGFDAHLLEDRLCTPGRCCVSTGLTDLDYSCST

SEQ ID NO: 303076 - DNA, 1869 bp, Artificial Sequence
  derived and/or modified sequence
atgaaggagaacgtggccagtgctacagtgttcacgctgttgttgttcctgaacacttgtctgttaaacgggcagcttccaccaggaaagcctgaaattttcaagtgtagaagcccaaacaaggaaacttttacatgctggtggcggcccggcactgacggcggactccctacaaattacagccttacataccacagagagggtgaaactctgatgcacgagtgcccagattatatcactggcggcccaaattcttgtcatttcggcaagcagtacacaagtatgtggagaacttacatcatgatggttaacgctacgaaccaaatgggtagttctttctctgacgagctatacgtagacgttacttatattgtgcagccagatccaccactggagctcgccgtcgaagtgaagcagccagaggacagaaaaccatacctgtggattaagtggtctccccccacactcatagatctgaagacaggttggtttacgttactgtacgagatcagactaaagcctgagaaagccgccgagtgggagatccattttgcggggcagcagactgagtttaagatcctctctcttcacccaggccagaaatacttggtgcaggtccgttgcaaacccgaccacggttactggtccgcttggtcacctgcaacatttattcaaatcccctccgatttcactatgaatgacacgacagtgtggatcagtgtagcggtactatctgcggttatttgccttatcattgtctgggcagtagctctcaagggatatagcatggtcacgtgcatttttccgcccgttcctggccctaaaatcaaaggctttgacgcgcacctgctggagaagggtaagagcgaagaactgttatcggcgctgggatgccaggattttccccccactagcgattacgaggatttgctcgtggagtatctggaagtggatgacagtgaagaccaacacttgatgtcagtgcactctaaggaacacccatcccagggaatgaagcccacctacttagacccagatactgattccggtcgcgggagctgtgattccccatcccttctgagcgaaaagtgtgaggagccacaggcgaacccatcaaccttttatgatccagaggtgattgagaaaccagagaacccagaaaccacgcacacctgggatccgcagtgtatatccatggagggcaagataccttacttccacgccgggggttccaagtgctcaacctggcctttgccccaaccaagccagcacaatcccagatcctcctaccacaatattactgacgtgtgtgaactggccgtcgggcctgccggggcaccagcaacactgctaaacgaagccggtaaagacgcactgaaaagcagccaaaccatcaagtcacgcgaagaagggaaggcgactcaacaacgagaggtagaatcgttccacagcgagaccgaccaggacacgccttggctcctgccacaagagaaaacacccttcggttcagccaagccactggactatgttgaaatccataaggtaaacaaggacggcgccctgtcgctcctccctaagcaacgggaaaactccggcaaaccaaaaaagccgggaaccccagaaaataataaggagtatgccaaggtatcgggtgttatggacaacaatattctggtgctggtgccagatccacacgccaaaaacgtcgcttgttttgaggagtctgccaaggaagcgcctccctcattggaacagaatcaggctgaaaaggcactggccaacttcaccgccacaagcagtaagtgccggctgcagctcggcgggctggattacttggacccagcatgctttacgcactccttccattag

SEQ ID NO: 303077 - DNA, 105 bp, Artificial Sequence
  derived and/or modified sequence
atgaaggagaacgtcgcgtctgcaacggttttcactctgctactgtttctgaatacctgtctgttaaacggtcaacttccgccgggcaagcccgagatcttctag

SEQ ID NO: 303078 - DNA, 1869 bp, Artificial Sequence
  derived and/or modified sequence
atgaaggaaaatgtggccagcgccaccgtcttcaccctgctgctcttcctgaacacctgcctgctgaatggccagctgcccccaggcaagccagagatcttcaagtgccgcagccccaacaaggagaccttcacctgctggtggaggcctggaacagatggcggcctgcccaccaactacagcctgacctaccaccgggagggggagaccctgatgcatgagtgcccagactacatcaccggcggccccaacagctgccactttgggaagcagtacacctccatgtggaggacctacatcatgatggtgaatgccaccaaccagatgggcagcagcttcagtgatgagctgtatgtggatgtgacctacatcgtgcagcctgacccccccctggagctggccgtggaggtgaagcagcctgaggacaggaagccctacctgtggatcaagtggagcccccccaccctgattgacctgaagacaggctggttcaccctgctgtatgagatccggctgaagccagagaaggctgctgagtgggagatccactttgctggccagcagacagagttcaagatcctgagcctgcaccctggccagaagtacctggtgcaggtgcgctgcaagccagaccacggctactggagcgcctggagccctgccaccttcatccagatccccagcgacttcaccatgaatgacaccaccgtgtggatctctgtggccgtgctgtctgctgtgatctgcctgatcatcgtgtgggccgtggccctgaagggctacagcatggtgacctgcatcttcccccctgtgcccggccccaagatcaagggctttgatgcccacctgctggagaagggcaagtctgaggagctgctgagcgccctgggctgccaggacttcccccccaccagtgactatgaggacctgctggtggagtacctggaggtggatgacagcgaggaccagcacctgatgtctgtgcacagcaaggagcaccccagccagggcatgaagcccacctacctggaccctgacacagattctggccggggcagctgtgacagccccagcctgctgtctgagaagtgtgaggagccccaggccaaccccagcaccttctatgaccctgaggtgattgagaagccagagaaccctgagaccacccacacctgggacccccagtgcatctccatggagggcaagatcccctacttccacgccggcggcagcaagtgcagcacctggcccctgccccagcccagccagcacaaccccaggagcagctaccacaacatcacagatgtgtgtgagctggccgtgggccctgctggggccccagccaccctgctgaatgaggccggcaaggatgccctgaagagcagccagaccatcaagagccgggaggagggcaaggccacccagcagcgggaggtggagagcttccacagcgagacagaccaggacaccccctggctgctgccccaggagaagaccccatttggaagtgccaagcccctggactatgtggagatccacaaggtgaacaaggatggagccctgagcctgctgcccaagcagagagaaaattctgggaagcccaagaagccaggcaccccagagaacaacaaggagtatgccaaggtgtctggagtgatggacaacaacatcctggtgctggtgcctgacccccacgccaagaatgtggcctgctttgaggagagcgccaaggaggccccacccagcctggagcagaaccaggccgagaaggccctggccaacttcaccgccaccagcagcaaatgtcggctgcagctgggcggcctggactacctggaccctgcctgcttcacccacagcttccactag

SEQ ID NO: 303079 - DNA, 105 bp, Artificial Sequence
  derived and/or modified sequence
atgaaggaaaatgtggccagcgccaccgtcttcaccctgctgctcttcctgaacacctgcctgctgaatggccagctgcccccaggcaagccagagatcttctag

SEQ ID NO: 303080 - DNA, 1869 bp, Artificial Sequence
  derived and/or modified sequence
atgaaggagaacgtggccagcgccaccgtgttcaccctgctgctgtttctcaatacctgccttcttaatggacaactaccccctggcaaacctgagatctttaaatgcagatcacccaacaaggaaacatttacctgttggtggcggccagggacagatggagggctgccaaccaactattccctgacatatcatcgcgaaggagagacactgatgcacgaatgtcctgactacatcacaggcggcccaaactcatgtcactttggcaagcagtatacctcgatgtggcggacatacattatgatggtgaatgccacaaaccagatggggagttccttctccgatgagctttacgtcgacgtgacttacatcgtccagcccgaccctcccctggaactcgcggttgaagtgaagcaacctgaggatcgcaagccatacttatggatcaagtggtcaccaccaactctgatcgacttaaagacagggtggttcactctattgtacgaaattcgactgaagccagagaaagctgccgagtgggagattcactttgcgggccagcagacggagtttaagattctgagtcttcatcctgggcaaaagtatctcgtgcaggtgcgctgcaaacctgatcatggctactggtccgcctggtccccagccaccttcatccaaatcccctcagattttactatgaatgacactacagtgtggatcagtgtggccgtgctaagcgcagtgatatgtttaataattgtgtgggcagtcgcactgaagggctattcgatggtgacctgtattttccctcctgtaccgggtcctaaaattaagggattcgatgcccatctgttggagaaaggcaaaagcgaagagctcctaagcgccctagggtgtcaagacttcccacccacatccgactacgaagatctcctggttgaataccttgaagtagacgatagcgaagaccagcatctgatgagtgtgcactctaaagaacatccttctcaaggaatgaaaccaacctatctcgaccccgatacagactctggacgtggtagttgcgacagccccagtctgttatctgagaagtgcgaggagccacaggcaaatcccagcactttctacgaccctgaagtcatcgagaaacccgagaatccggagactacgcatacctgggacccccagtgtattagtatggaggggaagataccctactttcacgcgggagggtccaagtgctctacttggcccttgcctcagccctcacagcacaatcctcgatccagctaccataacattacagatgtctgtgagctggctgtgggcccggccggcgcacctgcgactctccttaatgaggcaggcaaggatgctctcaaatcttctcagactatcaagagcagagaggaaggtaaagccacacaacagagggaagtggagagttttcatagcgaaaccgatcaagatactccctggctcttaccccaggagaagacacctttcggctccgctaaacccctggattacgtggagatacacaaggtgaataaggatggggccttgtctctgctcccaaaacagcgagagaattcagggaagcctaaaaaacctgggacaccagaaaataataaggagtacgccaaggtttcgggagttatggataacaatatccttgtcctggtgcccgacccccatgctaagaacgtggcttgtttcgaggagtcagccaaggaggcacccccctccttggaacagaaccaagctgagaaggctctcgctaattttacagcaacttcttccaagtgcaggctccagctcggtggtctcgattacctggatccagcctgtttcacacactcatttcactag

SEQ ID NO: 303081 - DNA, 105 bp, Artificial Sequence
  derived and/or modified sequence
atgaaggagaacgtggccagcgccaccgtgttcaccctgctgctgttcctgaatacatgtctcctgaatggacaactgcctcccgggaagccagagattttctag

SEQ ID NO: 303082 - DNA, 1869 bp, Artificial Sequence
  derived and/or modified sequence
atgaaggagaatgttgcgagcgctaccgtgtttaccttgctgcttttcctcaacacctgccttctgaatggacagcttccaccagggaaacccgaaattttcaagtgcagatctcctaacaaagagaccttcacttgttggtggcggccaggaactgatggcggactccctaccaactattctctgacatatcaccgcgaaggtgagacactgatgcatgagtgtccagattacattaccgggggaccgaatagttgccacttcggcaagcaatatacttccatgtggcgcacatatataatgatggtgaatgcgaccaatcagatgggatcctctttttctgacgagctctacgttgacgtaacatacatcgtccaacctgaccctccattagagctggcggtggaagtcaagcagcccgaggatcgaaaaccttatctttggataaaatggagcccccctacactaatagatctaaagactggctggttcaccctgctgtatgagatccgcctgaaacccgagaaagctgcagagtgggagatccacttcgccggtcagcagactgagtttaaaatcttatctttgcatccagggcaaaaatacttggtccaagtgcgctgtaaacccgaccacggatattggagtgcgtggagccctgccacctttattcagattccgtccgactttaccatgaacgatacaaccgtctggatttctgtggcagtgctgagtgctgtcatttgcctgatcattgtgtgggctgtcgccctcaagggctattctatggtgacatgcatatttccgcctgtgcctggtcctaagattaaaggcttcgatgctcacctactcgaaaaagggaaaagcgaagagcttctatcagctcttggttgtcaagactttcctcctacatctgattatgaggatctcctggtcgagtaccttgaggtggatgattcggaggaccagcacctgatgtcagtccactcaaaagagcacccttcacagggtatgaagccaacttacctagatcctgataccgatagtggccgtggatcttgtgacagtccctctcttttgtcagagaaatgcgaggagcctcaggctaatccaagcactttttatgaccctgaagtgattgaaaaacccgaaaaccccgagacaacacacacatgggatccccagtgtatctccatggagggtaagatcccatatttccatgcaggtggaagcaaatgtagcacttggcccttgccacaacctagtcaacacaacccacgatcttcttatcataacataaccgacgtctgcgagctggccgtcgggccagccggtgctcccgcaacactgctgaacgaagcaggtaaagacgccttaaagtcttcccagacaattaagagtcgcgaggaagggaaggccactcagcagagagaggtagaatctttccactcagaaaccgaccaggataccccctggctcctgccgcaggagaaaacaccatttggctcagcgaagcccctggattatgtggagatccataaagtcaacaaggacggagccttaagtctgttgccaaagcaacgcgagaatagtggcaagcccaagaaacccggtacccccgaaaataataaagagtacgcgaaagtctctggtgttatggacaataacatcttggtgcttgttcctgacccgcacgccaaaaacgttgcatgcttcgaagagtctgccaaagaggctcctccttcgcttgagcagaaccaagccgagaaggcattggctaattttactgcaacaagtagtaaatgccgcctccaattaggcggactggattacttggaccccgcttgctttactcactcctttcattag

SEQ ID NO: 303083 - DNA, 105 bp, Artificial Sequence
  derived and/or modified sequence
atgaaggagaatgtcgcctccgcgaccgtgtttaccttgttactcttcctgaatacctgcctgctcaacggccagctgcctcctggtaagcccgaaatcttttag

SEQ ID NO: 303084 - DNA, 11680 bp, Artificial Sequence
  derived and/or modified sequence
atgctgaagaaaatcactgttttgcctccagcaaggaacataaatgttgcaacactgactcctcctctcatgaagaaagagtgaacaagtgcaccgagttgagcttcttctcacagagccaccgggctggggaccggggagcggaggctgaaatccccagacgccggttttctgggctgggctttctgccttactcactccttctccctctttctggattttaccgaccgttcgcgaaacagctttccacacaatggagcttcatgtcctcgtgcaggaagtactcatcgactgatgtggcagactttgctccctggcaaaactaaagaactctcctattcatggaggcgaacactgaggatgctttccacatgaaccctgaagtgaacttctgatacatttcctgcagcaagagaaggcagccaacatgaaggaaaatgtggcatctgcaaccgttttcactctgctactttttctcaacacctgccttctgaatggacagttacctcctggaaaacctgagatctttaaatgtcgttctcccaataaggaaacattcacctgctggtggaggcctgggacagatggaggacttcctaccaattattcactgacttaccacagggaaggagagacactcatgcatgaatgtccagactacataaccggtggccccaactcctgccactttggcaagcagtacacctccatgtggaggacatacatcatgatggtcaatgccactaaccagatgggaagcagtttctcggatgaactttatgtggacgtgacttacatagttcagccagaccctcctttggagctggctgtggaagtaaaacagccagaagacagaaaaccctacctgtggattaaatggtctccacctaccctgattgacttaaaaactggttggttcacgctcctgtatgaaattcgattaaaacccgagaaagcagctgagtgggagatccattttgctgggcagcaaacagagtttaagattctcagcctacatccaggacagaaataccttgtccaggttcgctgcaaaccagaccatggatactggagtgcatggagtccagcgaccttcattcagatacctagtgacttcaccatgaatgatacaaccgtgtggatctctgtggctgtcctttctgctgtcatctgtttgattattgtctgggcagtggctttgaagggctatagcatggtgacctgcatctttccgccagttcctgggccaaaaataaaaggatttgatgctcatctgttggagaagggcaagtctgaagaactactgagtgccttgggatgccaagactttcctcccacttctgactatgaggacttgctggtggagtatttagaagtagatgatagtgaggaccagcatctaatgtcagtccattcaaaagaacacccaagtcaaggtatgaaacccacatacctggatcctgacactgactcaggccgggggagctgtgacagcccttcccttttgtctgaaaagtgtgaggaaccccaggccaatccctccacattctatgatcctgaggtcattgagaagccagagaatcctgaaacaacccacacctgggacccccagtgcataagcatggaaggcaaaatcccctattttcatgctggtggatccaaatgttcaacatggcccttaccacagcccagccagcacaaccccagatcctcttaccacaatattactgatgtgtgtgagctggctgtgggccctgcaggtgcaccggccactctgttgaatgaagcaggtaaagatgctttaaaatcctctcaaaccattaagtctagagaagagggaaaggcaacccagcagagggaggtagaaagcttccattctgagactgaccaggatacgccctggctgctgccccaggagaaaaccccctttggctccgctaaacccttggattatgtggagattcacaaggtcaacaaagatggtgcattatcattgctaccaaaacagagagagaacagcggcaagcccaagaagcccgggactcctgagaacaataaggagtatgccaaggtgtccggggtcatggataacaacatcctggtgttggtgccagatccacatgctaaaaacgtggcttgctttgaagaatcagccaaagaggccccaccatcacttgaacagaatcaagctgagaaagccctggccaacttcactgcaacatcaagcaagtgcaggctccagctgggtggtttggattacctggatcccgcatgttttacacactcctttcactgatagcttgactaatggaatgattggttaaaatgtgatttttcttcaggtaacactacagagtacgtgaaatgctcaagaatgtagtcagactgacactactaaagctcccagctcctttcatgctccatttttaaccacttgcctctttctccagcagctgattccagaacaaatcattatgtttcctaactgtgatttgtagatttactttttgctgttagttataaaactatgtgttcaatgaaataaaagcacactgcttagtattcttgagggacaatgccaataggtatatcctctggaaaaggctttcatgatttggcatgggacagacggaaatgaaattgtcaaaattgtttaccatagaaagatgacaaaagaaaattttccacataggaaaatgccatgaaaattgcttttgaaaaacaactgcataacctttacactcctcgtccattttattaggattacccaaatataaccatttaaagaaagaatgcattccagaacaaattgtttacataagttcctataccttactgacacattgctgatatgcaagtaagaaataatgcctccaattttttcttaaaatagtttagatatgttaagcatggattttccccctaaattctactctaaagcttctataaaatatagtttggaaataaaaatgttcttacacaaggggcaaatgaatttcatgtgaatccctttaggatgttttcctccttcatttcagcatgatagataatttattatacaccttagtctttccttagttaaaaaaaaattccctaaagactaacttgaaaagaaaaccacagcaggatgctaatggaattactgccttactgtacatacaaattctactttaatataaacccataagtttaactgtatttttgaagactatttttctatgacttaggtaaaataaaagactattttctattttcccagtacagctgtttatgtattcagtgggtacagtattttctgctgcaaggttataatgtgtatttacagtacatagtagtatataaagttcccgtttgtggagtaaaatgccataccaacccaaagcccactgtgaaatatgaagtgaatgacaaaattcagttttcaacgcaatatagtatagtttatctgattcttttgatctccaggacactttaaacaactgctaccaccaccaccaacctagggatttaggattctccacagaccagaaattatttctcctttgagtttcaggctcctctgggactcctgttcatcaatgggtgaatcttcctaaagctaccataaaaagggagggcgacgatttctaacagctgtttaaaagagagaggttttgcttttgtgagaaatcttgggccacaaaaaaattttaagcaaagccaggagttagtgtctctctgaagtaaattcaattgcaaaatcttggcagaggcagaaatggctcatatcagaagtgtccaaataaaagttctgggaaactaggtatttgcttcccagagcaatgggaatagctccaaaggtcagagtaaggtaatgagaatctcccggtcaattccagtgccaggcttcctgaaagaagtcaaagcttggatcctcattttaaagggcgcatccatgactcatctagcagcccctctctatttttcccttcacttgatggtaaatccattctatatgtccatttactagctggacatagagaacttgagctcacctctgggagttaaatattccaccccaactatcccatattgatagcaactggactcagaggtccccctcctgtttgaaagtgaacacattgccaatgttttgagaatggcaaaagcaatagatacgaagctccatttttctaatatataaacaatatcatgtgagtaagggaagcgtgtgggaaagttgtccaagctcattcagtcccctaaatcctcgatactttaactgtctgagaaccaactgcataggcatcacctgggcagtgtttgaaaattccatttgcagaatcttaagcatcagaatctgcattttactaagatccccaaatgattcaattgcacactgaagtttgagaagcattgttctagacaaccatttccactaaaggttattttagttcatagtaacaatcctcttttggaaaggacagatcaagtctgtttgacttgcaatgaacaacactgcatgtaagcaggcaaaaaaagaaacatatcagtagtttaagattcacattatgctgaatcttatatgaattcacataaaagaatgacctgcaaaactacgcacaacttctgaaaggccaaggaatataatctaccttgagagacattaaccaaagacagtcaccctcaaagccaatgcagactaaatctttcctaacatagtctattctctaagaatagagaagatatgtatcagtcactcttatagtctgaaaacctaaacataaaagtaatctgcttttgacatataattttgtataatacgtatgaaaaaatgtgacagctaaggacttgaattaaatccctaaaaaacaattagccactcattaggccaagactttaattctatgatcaattagcactgtttatctgaattaagcttttttgtggtctaacaaaaagtttttttgtggtctatcaaggagacagctgttcaaatggaaggatacatgtggggcaggggggcggtgaagagacctagattctggtcctaactgctttgccttggagagattaattcccccctctaagcctcagtttcctctgaagatgttggaccagataacctctaaggtcctttgaaactgactccttgattccatgactcactgaatatttttctgcaaagataatcccaaccaatgccttctatcctaatctaacaaaaaattgctcttcatcatagaaatacaaagtaatcttcagtgatgtgctctttatactttgctttttaaaccgtccattccagttggtcttaatatattgcacaagtattttataagtgaaatgtgtacagaatcatattctaagattatgtgcaaatatatgtgtagaaagaggcatttaaaaaaagaggcaggagattgagaagagacatattgaatgaggcactaatctttagaaaaatgatcttttactgaatcaagccatgctcattccttgctgaatccaacagccccaaatctcttttcttatatttggctgttaatttttttccttgcaccatcctagattgttaacaaccattgcacagttggctcatgtatccttacactctgagttataataagttgtatttttataaacaaatacctaaatattcaagttttaaggcgcatggaaactgaatctaggcaacgggtgatttgtgtagcttacaacctgaacagcaagatgttccaattcattctaacagatgtgtataagcacaagttatatcagctgtgtcagatatttaacagatcctacatttattagctatataacagactctacattttcctaagtgcctaagaccaatcctggtagtcacttaagtacaaaagactcactttaactggcttggtctgaaggggtcaatcctttactgcctgtacaagatctgggcagttttgctctgtgtcttgtgatgacccagctgaatgtgaaaagcctatgagttattgagcaaccagaggtccctgcattccaagttgcagtttagctctggggaaactctggctttctctttcctcaagtgtccaccactgcccatcatttgcagaaagacttggccctgcctttagcaacttccctatctccttagagtagacaagaaagaaacagatttgtgcacattttacaaagtgccttcctctatttttttttaaagttttcattttgcaaggaaaaatgtattgattagaaagtaacatttgccttatagggattatatatatatatagatatagatatagatatgtatgaatggagagatgagaagaagccagaaagggcacaacaaaatggtctaagggccaaccagcaatgttcagtgaatgtttacgtattgtttaattgaatcaacacagagctgttgtgaatagtgtgacttactttgcctgataagaaattgaggctggctgtgatttggggataaacctgccaccctgtgatttgagactctccataccaaaacttattgatacatttttgaatgtcattggcttacatgcctaaacctgaagagaacaatgcatgcacattggaactttgtacacaaacagaaaaatataaatgactttgaattaccatcccaagcattgctaacgtagatgtgccattgacgaaagtctcatgtgttcttgagtgaacaaatttccttttcttcctttttggctcaagcacaataatgctgtcactgagacagtgactgagcactcaatgtccaagactaaatcacatcaccacgactaagtaggcactatgtcctgggatgagtcttttaaactctggccatcaggttccttacttgttaaataagtaggttggcctaaaaggtttctaagacctctcatgatctaggtaaaatccagggtttcaggtcagtgtccctggtgcagtgcaagaaagccttgctgacacacccttggcctgaagcagtgagcacatgagattgtgtgacaacgcttcagagaaaaacagagatctgttcctccaactcagattgatttaacatccttgcttctccttttccttcctggctttacatatttgtagggtttttactccttctccagagcctactattttcctaagagttagtagcaaccataggatccacaagaaatgaaattattcatcaacaatgactttggcactgcaaaagactgagtcaaaggttaaatcagtcacacagatatccaaggccaagttgaagatcacaagtatatcccatttagagatttgcatacttagagattaagcccatgttcattaattatttagttaattcaaaagccattaataaatccatgcccagcctacgcaacatagtaagacccagtctctacaaaaattttaaaaattagccagccatggtgacacgtacctgtagtcctagacacttgggaaggtgaagccagaggattgcttgagcccaggaggtcgaggctgcagtgaaccgtgattgtgtcactgcactccagcctgggtgagagagcaagaccttgtctcaataaataaacccaagttacttcgatgactagatactggaggtctgaaggagaagctttaaaaatacagattgattgcttcagagaaatcctatttataattatgatctgaacttattctatgattagcaaatatatcatctgaaaataaaacaggagttctctccccagacttttgtttttcaggatggtgagttttggtctgggaccctcatggcacccattttgataaaaggaaaaagatagtaaaacaggaaataggaagtttccagagatttgggcatctcaggattccatgaaatgctgagactaacccactaaatccaaattttattggctatggtaaatctaaatctgttcagtgttctgaacagattttatgagtttatgtctaagagtttatgtctaagagaggtacataattcacaaacactatcatgctggcagctgttttgtccacatcaattcccttgatttaatgctctgatttcaatttagaaagtactgagacatgtaaagtctcaaaataggaaaaacctatcctgtttataaggtgtggtcaataaatagaccacagataatcttagtctattaattaactctcagatcatcttagactattaattaacattctgcttgctgctgattaaaaagaaaaaaaccctaaaaccttcagcaactgaagtagtaatataaaaaataacctttaatagttatggtcaaattacgcttcacttggataaacctcaaaatgtagtctgagtttttttgtgcacacttcacaaatcctgggggaaaaatcttttttccacgttatctgaaaaactatatggcgaagataccgctgaaaaataatttgttttatgaaattcctgaaaagctaattttgaattttttaaagtaactacctcccttttgtgtcctaatgtccttccttcaaagctgcttatagtttagaaatgaaagatgtcatgtctcatgctttgactggttttcggtggcatatttgatgtatttgccaagtggcattactgactttacagtaactgttacattattttgtactatattgctttatgtggttcaaaaatagtatatgccatattgaaatatgtaatcctcatgttgtgaaactcatcatgtaatacaatgaaaatcattacttaataacttacaatttatccatatgtagtttcaatatgattgtgtctatgactgtaaaacaaactgaaaaaatatgtaatgtatttctgttgaaagcgtgaatgtactaattttttcctaatcttgtctagaagaaagattctatgtcattcattgtacagctgctctggggtgttacacatttaaagtacaatccaacagttgtttgaaagtcagcctctcggctttgtttcatgtgactgctgacacttctcaagtgttctttgcataatgaggctggattttgtgcttcatcgttcattttaaacaattgaaaagtctcatgtggaaaccaaagcaatctagaaccagcctgttgggtgactgtgtcttctgtaaagccatattgaagtgaagttatacataatagcataaggttccacattttcaaagctaccactacctctgcttttcctctttccctagaaaatgccaagcaaaattccccaacactaagtgagaaattagaagtaattgttttataattaagttgctgggttttttttttaacaccttctaattcatcactttgtagggttatgcaagagtttctgaataaccattcttacatgtttatattttataaaaaccggctgcaagaaagattcagaaagaatacttagtaagtcatcatatgaaaaaccaacaaaaccatagagtgcagattttttcctaactataagtcacctcatagttgtccaaagccatgataatgatatctcttacaaattgacttctgtaacccccctagaaataacccttttccttatttgattttagtcatcaaacatagtatgatatgggaaaagtcagccatttaccagaaattatcttattttgattttaaaaactcatttctatatgtagttattgtaatgtctatttttttagacttaaagatttatagaagactatagttatctgatttgttattttgcatttttcattctgtaaatctttgcttatggcacattgtgctctctgttttccatggttttattcatttatctcctcctattttgaggggacaacatgggtagttaaatctttgtcaatagtattggagataacactaactgctattatcataacatcttcatttttactgcatgccaaaaccaatgcctgccaaacaaaatcttagacatcccaatataatatgttagttatatttctattcacatcattattgaaaatacccagctcagtgcctggcttaataaatgtttaattcccttacctactcttgctctatttttttatttgaaatggagatgagcaaaataacacattcatggctgaagcaattttttggacatttcttgttaccaaaagatctataatcaggacattgtttatgtaagttggacaaaaaaaattcttcccctttatgtccacccttcctatgattgcaagacaaaatttccctcctttacctcatccctataacatgggaggctgagaaaaatgaggggagatggaaccagatacaaggagatccaataagagaagcttatttaaatattgtgaaataaaggaagaaccaaagcatttttttaagtggggaatccttttgaacagttattatttatccatattattaacaacatcttttctgacaaaatccatcagatgaagtgtaaatggataatcttttaatggatctaaacctagaaagtttcacttactgttcatgtccgtgttccagaattgtgaaatggtgtgtggttttgctttccaagttcttctctgcctcctcttaattctctaattccatgtcttacagaagaatgagaaatttctttcttacttgagtatcatgctctaaaaaacttggcttcagtcacagaaacgctggctctcctgtgcttatattgaagccaactgcctttaattcttgggccctcttatatttttaaggtgcaaaatttgaagtctcagtcaccagacacaggttctatacaattaatgatgagctggagaagtaatatgtagctaatttttcaaaagcattgaatatactttccggaaagaaaacagaaattaaatattgccacatcttgccagaatcccatctgacaccttaactttgtcaggtttcctacaacttgctaatcaagttttatacattctaaatctccccagtttctttggggctggaagatgcaacttccatttaatagaaactttgaaatcttggggtaagggagcagtggggggactagggagaaggataagaaatagaattattgaaaagcccccaccagggaccttcctggccagaatatgcagagtaattcctgctggcttcacctttgaaagtccctcgaaactatgcagatgaaactgagtctgtttttgatattgtcagatgtattctaccttggaagtcccaacacctaaactggaattcttgtatttacatctcctccactgtcccccacaccacccctcaattcctgctgcccctgctaatgttaagcatttttctcttgttatcatcaggttcacattaaaaacagatacttacaaactgacttgaagcacagatacttttacgaatgtgataaaatattttcttaagaaaaggaaagaggatgtgggtcaaataaaacaccgcatggatgttgattggtgaatactggtgtaagaaaagggagctcaggaatttttattactgtatttgtaaatgagtttgaaggaatttgtaaatgccactggtacatttttaaggtgacacatttgctccttataaagttattaaaaattacagggtaagcttaaatgacgtttgccagtagttttactttatataatcaatattgatattgttgctgaactatgtaactttatgatgcatttttcagtcccttttcagagcaaatgcttttgcaatggtagtaatgtttagtttaaattgacttaataaattattacctgagcaa

SEQ ID NO: 303085 - DNA, 1869 bp, Artificial Sequence
  derived and/or modified sequence
atgaaggagaacgtggccagcgccaccgtgttcaccctgctgctgttcctgaacacctgcctgctgaacggccagctgccccccggcaagcccgagatcttcaagtgcagaagccccaacaaggagaccttcacctgctggtggagacccggcaccgacggcggcctgcccaccaactacagcctgacctaccacagagagggcgagaccctgatgcacgagtgccccgactacatcaccggcggccccaacagctgccacttcggcaagcagtacaccagcatgtggagaacctacatcatgatggtgaacgccaccaaccagatgggcagcagcttcagcgacgagctgtacgtggacgtgacctacatcgtgcagcccgacccccccctggagctggccgtggaggtgaagcagcccgaggacagaaagccctacctgtggatcaagtggagcccccccaccctgatcgacctgaagaccggctggttcaccctgctgtacgagatcagactgaagcccgagaaggccgccgagtgggagatccacttcgccggccagcagaccgagttcaagatcctgagcctgcaccccggccagaagtacctggtgcaggtgagatgcaagcccgaccacggctactggagcgcctggagccccgccaccttcatccagatccccagcgacttcaccatgaacgacaccaccgtgtggatcagcgtggccgtgctgagcgccgtgatctgcctgatcatcgtgtgggccgtggccctgaagggctacagcatggtgacctgcatcttcccccccgtgcccggccccaagatcaagggcttcgacgcccacctgctggagaagggcaagagcgaggagctgctgagcgccctgggctgccaggacttcccccccaccagcgactacgaggacctgctggtggagtacctggaggtggacgacagcgaggaccagcacctgatgagcgtgcacagcaaggagcaccccagccagggcatgaagcccacctacctggaccccgacaccgacagcggcagaggcagctgcgacagccccagcctgctgagcgagaagtgcgaggagccccaggccaaccccagcaccttctacgaccccgaggtgatcgagaagcccgagaaccccgagaccacccacacctgggacccccagtgcatcagcatggagggcaagatcccctacttccacgccggcggcagcaagtgcagcacctggcccctgccccagcccagccagcacaaccccagaagcagctaccacaacatcaccgacgtgtgcgagctggccgtgggccccgccggcgcccccgccaccctgctgaacgaggccggcaaggacgccctgaagagcagccagaccatcaagagcagagaggagggcaaggccacccagcagagagaggtggagagcttccacagcgagaccgaccaggacaccccctggctgctgccccaggagaagacccccttcggcagcgccaagcccctggactacgtggagatccacaaggtgaacaaggacggcgccctgagcctgctgcccaagcagagagagaacagcggcaagcccaagaagcccggcacccccgagaacaacaaggagtacgccaaggtgagcggcgtgatggacaacaacatcctggtgctggtgcccgacccccacgccaagaacgtggcctgcttcgaggagagcgccaaggaggccccccccagcctggagcagaaccaggccgagaaggccctggccaacttcaccgccaccagcagcaagtgcagactgcagctgggcggcctggactacctggaccccgcctgcttcacccacagcttccactag

SEQ ID NO: 303086 - DNA, 105 bp, Artificial Sequence
  derived and/or modified sequence
atgaaggagaacgtggccagcgccaccgtgttcaccctgctgctgttcctgaacacctgcctgctgaacggccagctgccccccggcaagcccgagatcttctag

SEQ ID NO: 303087 - protein, 103 aa, Artificial Sequence [sequence omitted]

SEQ ID NO: 303088 - DNA, 590 bp, Artificial Sequence
  derived and/or modified sequence
cagtgcgcagacgcaggggtcggcgccggattcaccacaacatggcaaatctttttataaggaaaatggtgaaccctctgctctatctcagtcgtcacacggtgaagcctcgagccctctccacatttctatttggatccattcgaggtgcagcccccgtggctgtggaacccggggcagcagtgcgctcacttctctcacccggcctcctgccccatctgctgcctgcgctggggttcaaaaacaagactgtccttaagaagcgctgcaaggactgttacctggtgaagaggcggggtcggtggtacgtctactgtaaaacccatccgaggcacaagcagagacagatgtagaccctttccctccagagtcacgcacatactcgtcatcgcatcacttgggagaatggttgtatcttatggaaggaattatcacatcaaggagtcaggggaaagtgactggaagcaaacgccctaaaagttacccatcacgtttcagtgtaaatgagtaactatagaagacattgcgttatcttatttccaaaacgttccaactaaaaaacattttcctattaaaatagaccttccgaa

SEQ ID NO: 303089 - DNA, 665 bp, Artificial Sequence
  derived and/or modified sequence
gccacgtgacccccccccccgccgccatcttccttcctggcagcagcgtccgcgtgccagtgcgcagacgcaggggtcggcgccgggtgagagcgtgcggccggattcaccacaacatggcaaatctttttataaggaaaatggtgaaccctctgctctatctcagtcgtcacacggtgaagcctcgagccctctccacatttctatttggatccattcgaggtgcagcccccgtggctgtggaacccggggcagcagtgcgctcacttctctcacccggcctcctgccccatctgctgcctgcgctggggttcaaaaacaagactgtccttaagaagcgctgcaaggactgttacctggtgaagaggcggggtcggtggtacgtctactgtaaaacccatccgaggcacaagcagagacagatgtagaccctttccctccagagtcacgcacatactcgtcatcgcatcacttgggagaatggttgtatcttatggaaggaattatcacatcaaggagtcaggggaaagtgactggaagcaaacgccctaaaagttacccatcacgtttcagtgtaaatgagtaactatagaagacattgcgttatcttatttccaaaacgttccaactaaaaaacattttcctattaaaatagaccttccgaa

SEQ ID NO: 303090 - DNA, 595 bp, Artificial Sequence
  derived and/or modified sequence
atgcgcacggcttctggcggcgccaaacacccgattcaccacaacatggcaaatctttttataaggaaaatggtgaaccctctgctctatctcagtcgtcacacggtgaagcctcgagccctctccacatttctatttggatccattcgaggtgcagcccccgtggctgtggaacccggggcagcagtgcgctcacttctctcacccggcctcctgccccatctgctgcctgcgctggggttcaaaaacaagactgtccttaagaagcgctgcaaggactgttacctggtgaagaggcggggtcggtggtacgtctactgtaaaacccatccgaggcacaagcagagacagatgtagaccctttccctccagagtcacgcacatactcgtcatcgcatcacttgggagaatggttgtatcttatggaaggaattatcacatcaaggagtcaggggaaagtgactggaagcaaacgccctaaaagttacccatcacgtttcagtgtaaatgagtaactatagaagacattgcgttatcttatttccaaaacgttccaactaaaaaacattttcctattaaaatagaccttccgaat

SEQ ID NO: 303091 - DNA, 686 bp, Artificial Sequence
  derived and/or modified sequence
gccacgtgacccccccccccgccgccatcttccttcctggcagcagcgtccgcgtgccagtgcgcagacgcaggggtcggcgccgggtgagagcgtgcggccgggtaagggagccgtcttctcagattcaccacaacatggcaaatctttttataaggaaaatggtgaaccctctgctctatctcagtcgtcacacggtgaagcctcgagccctctccacatttctatttggatccattcgaggtgcagcccccgtggctgtggaacccggggcagcagtgcgctcacttctctcacccggcctcctgccccatctgctgcctgcgctggggttcaaaaacaagactgtccttaagaagcgctgcaaggactgttacctggtgaagaggcggggtcggtggtacgtctactgtaaaacccatccgaggcacaagcagagacagatgtagaccctttccctccagagtcacgcacatactcgtcatcgcatcacttgggagaatggttgtatcttatggaaggaattatcacatcaaggagtcaggggaaagtgactggaagcaaacgccctaaaagttacccatcacgtttcagtgtaaatgagtaactatagaagacattgcgttatcttatttccaaaacgttccaactaaaaaacattttcctattaaaatagaccttccgaa

SEQ ID NO: 303092 - protein, 194 aa, Artificial Sequence
  derived and/or modified sequence
MEHAAQPWRWQRRRGWRRSACWPRSPTCSAPWAARSSRAIVRRTQCTAATRCPATGSECRRGPPGWCRSCPRWPCRSTSTPASPPRVSAARPTASSWPCSSSTTGIGNVGMQALAVCLHPKCQPMVPIVCPDLNHDSKTQREIAGIRCSYSLLGNTAASRRIPTSLMTQHLNAHLLANTCFAVNQYEVFLGVLA

SEQ ID NO: 303093 - protein, 212 aa, Artificial Sequence
  derived and/or modified sequence
MEHAAQPWRWQRRRGWRRSACWPRSPTCSAPWAARSSRAIVRRTQCTAATRCPATGSECRRGPPGWCRSCPRWPCRSTSTPASPPRVSAARPTASSWPCSSSTTGIGFGLWLTGMLINIHSDHILRNLRKPGDTGYKIPRGGLFEYVTAANYFGEIMEWCGYALASWSVQGAAFAFFTFCFLSGRAKEHHEWYLRKFEEYPKFRKIIIPFLF

SEQ ID NO: 303094 - DNA, 585 bp, Artificial Sequence
  derived and/or modified sequence
atggagcacgccgcccagccctggagatggcagagaagaagaggctggagaagaagcgcctgctggcccagaagccccacctgcagcgccccctgggccgccagaagcagcagagccatcgtgagaagaacccagtgcaccgccgccaccagatgccccgccaccggcagcgagtgcagaagaggcccccccggctggtgcagaagctgccccagatggccctgcagaagcaccagcacccccgccagcccccccagagtgagcgccgccagacccaccgccagcagctggccctgcagcagcagcaccaccggcatcggcaacgtgggcatgcaggccctggccgtgtgcctgcaccccaagtgccagcccatggtgcccatcgtgtgccccgacctgaaccacgacagcaagacccagagagagatcgccggcatcagatgcagctacagcctgctgggcaacaccgccgccagcagaagaatccccaccagcctgatgacccagcacctgaacgcccacctgctggccaacacctgcttcgccgtgaaccagtacgaggtgttcctgggcgtgctggcctag

SEQ ID NO: 303095 - DNA, 639 bp, Artificial Sequence
  derived and/or modified sequence
atggagcacgccgcccagccctggagatggcagagaagaagaggctggagaagaagcgcctgctggcccagaagccccacctgcagcgccccctgggccgccagaagcagcagagccatcgtgagaagaacccagtgcaccgccgccaccagatgccccgccaccggcagcgagtgcagaagaggcccccccggctggtgcagaagctgccccagatggccctgcagaagcaccagcacccccgccagcccccccagagtgagcgccgccagacccaccgccagcagctggccctgcagcagcagcaccaccggcatcggcttcggcctgtggctgaccggcatgctgatcaacatccacagcgaccacatcctgagaaacctgagaaagcccggcgacaccggctacaagatccccagaggcggcctgttcgagtacgtgaccgccgccaactacttcggcgagatcatggagtggtgcggctacgccctggccagctggagcgtgcagggcgccgccttcgccttcttcaccttctgcttcctgagcggcagagccaaggagcaccacgagtggtacctgagaaagttcgaggagtaccccaagttcagaaagatcatcatccccttcctgttctag

SEQ ID NO: 303096 - DNA, 585 bp, Artificial Sequence
  derived and/or modified sequence
atggaacacgctgcccagccctggagatggcaacggagaagagggtggcgacgctccgcgtgctggcctagaagtcccacttgctcagctccctgggccgcacgctcttcccgcgccatcgttagaagaactcaatgcacagccgctacacggtgtcccgccacgggttctgaatgtagacgggggccaccaggctggtgtcggagttgccctcggtggccatgccgcagtacttccacaccagcttccccccctagagtgagcgccgctaggccaacagctagtagctggccttgctccagtagcactaccggaatcggaaacgtgggcatgcaagcccttgccgtgtgtctacatcctaagtgtcagcccatggtcccaattgtctgcccagacctgaatcacgacagcaaaactcaacgagaaatagctggcattcgctgctcatattcactgctggggaacactgccgccagccgaaggataccaacttccttgatgactcaacatctgaacgcacacctgctggccaatacctgttttgcagtaaatcagtacgaggtatttttgggagtccttgcctag

SEQ ID NO: 303097 - DNA, 639 bp, Artificial Sequence
  derived and/or modified sequence
atggaacacgctgcacagccttggcgctggcagcgcagacgagggtggcgccggtctgcctgctggccaaggtccccaacctgttctgccccttgggctgcgcgctcttctagagccattgtccgtagaacgcagtgtaccgccgcaaccagatgccccgccaccggctctgagtgtcggagaggccccccggggtggtgtagaagctgtccacgctggccctgtaggtcgactagtacccccgcatccccccctagagtcagcgctgccagacctacagcttcatcatggccgtgctccagctctacaacagggatcgggttcggcttgtggcttaccggcatgttgatcaacattcacagcgaccatattcttcgtaatctgcgcaaacctggggacaccggttacaaaattcctagagggggcctcttcgaatatgtcacagctgctaattacttcggggagatcatggagtggtgtggttatgctcttgccagctggtccgtgcagggcgcagctttcgcctttttcacattttgcttcctttccgggagagccaaagagcaccacgagtggtatctaaggaagtttgaggaataccccaaattcagaaaaatcattatcccctttcttttttag

SEQ ID NO: 303098 - DNA, 585 bp, Artificial Sequence
  derived and/or modified sequence
atggagcacgccgcccagccctggcgctggcagaggagaagaggctggaggagaagtgcctgctggcccaggagccccacctgcagcgccccctgggccgcccggagcagccgggccatcgtgcggaggacccagtgcacagctgccacccgctgcccagccactggaagtgagtgccggcggggccccccaggctggtgccgcagctgcccccgctggccctgccgcagcaccagcaccccagccagccccccccgggtgtctgctgcccggcccacagccagctcctggccctgcagcagcagcaccaccggcattggaaatgtgggcatgcaggccctggccgtgtgcctgcaccccaagtgccagcccatggtgcccatcgtgtgcccagacctgaaccacgacagcaagacccagcgggagattgctggcatccgctgcagctacagcctgctgggcaacacagctgccagccgccgcatccccaccagcctgatgacccagcacctgaatgcccacctgctggccaacacctgctttgctgtgaaccagtatgaggtgttcctgggcgtgctggcctag

SEQ ID NO: 303099 - DNA, 639 bp, Artificial Sequence
  derived and/or modified sequence
atggagcacgccgcccagccctggcgctggcagaggagaagaggctggaggagaagtgcctgctggcccaggagccccacctgcagcgccccctgggccgcccggagcagccgggccatcgtgcggaggacccagtgcacagctgccacccgctgcccagccactggaagtgagtgccggcggggccccccaggctggtgccgcagctgcccccgctggccctgccgcagcaccagcaccccagccagccccccccgggtgtctgctgcccggcccacagccagctcctggccctgcagcagcagcaccaccggcatcggcttcggcctgtggctgaccggcatgctgatcaacatccacagcgaccacatcctgaggaacctgaggaagccaggggacaccggctacaagatcccccggggcggcctgtttgaatatgtgacagctgccaactactttggagagatcatggagtggtgtggctacgccctggcctcctggagcgtgcagggcgccgcctttgccttcttcaccttctgcttcctgagcggccgggccaaggagcaccacgagtggtacctgaggaagtttgaggagtaccccaagttcaggaagatcatcatccccttcctgttctag

SEQ ID NO: 303100 - DNA, 585 bp, Artificial Sequence
  derived and/or modified sequence
atggagcacgccgcccagccctggcggtggcagcggcggcggggctggaggcggagtgcttgttggccaagatcccccacatgtagcgcaccatgggctgcccgaagctcaagggccatcgtgcgacgaactcagtgcactgctgcgacgcgttgtcccgctacagggagcgagtgtcgtagaggaccacctgggtggtgcaggagttgcccgcgatggccctgtcggagcacctcaacgcctgcctcccctcccagagtgagcgctgcccgccctaccgctagttcttggccctgcagtagcagcactactggcatcgggaatgtgggtatgcaagccctggctgtctgtctccaccctaaatgtcaaccgatggtgcccatcgtatgcccggacctgaaccatgactccaagacccaaagagaaattgcgggtatcagatgctcatatagccttctgggcaataccgccgctagccggagaattccaactagcctgatgacccagcacctcaatgcccacttgctggcgaatacatgctttgcagtgaaccagtatgaggtttttctgggagttctggcctag

SEQ ID NO: 303101 - DNA, 639 bp, Artificial Sequence
  derived and/or modified sequence
atggagcacgccgcccagccctggcggtggcagcggcggcggggctggcgacgtagtgcatgctggcccagaagccctacttgttcagccccatgggccgcacgctcaagcagggctattgtcagacggacccagtgcaccgcagctacgaggtgtcctgccaccggcagcgaatgtagacgggggcctccaggctggtgtcgctcatgtccgcggtggccctgccggtccacaagcaccccagcttctccacctagagtgtcagctgcccgccccacagcatcttcatggccatgtagttctagtacgactggcattggtttcggattatggctaacgggaatgctgattaatatccatagcgatcacattctcaggaacctgagaaaaccaggggacacaggctacaagataccacgcggcgggctgtttgaatatgtgacagcggcaaactacttcggggagatcatggagtggtgtggttatgccctagcaagctggtctgtgcaaggggctgcattcgccttttttaccttctgtttcctctctggacgggcaaaagaacaccacgagtggtatctgcggaaatttgaggagtacccaaagtttcgcaagatcatcattccatttctgttttag

SEQ ID NO: 303102 - DNA, 585 bp, Artificial Sequence
  derived and/or modified sequence
atggaacatgctgcacagccttggagatggcaaaggagacgtggctggagaagatcagcctgctggccccgaagccctacatgttcggccccttgggctgccagatcgtctagagcaatcgtgcgcagaacacagtgtaccgccgctacaaggtgcccggctacggggagcgaatgccgacgagggcctccgggatggtgtcgcagctgtcctagatggccctgtaggtcaacctctactcccgcatctccacctagagtgagcgccgcaaggccgactgcttctagctggccctgctcctctagcacaacagggatcgggaacgtcggtatgcaagcattagccgtttgcctgcacccaaaatgccagcctatggtccccatcgtctgccctgatcttaatcacgatagtaagactcagagagagatcgccggaatcagatgctcctacagtctgttgggaaacacagccgcttccaggcggatccctacatctttaatgacccaacacttaaatgctcacctcctcgccaatacatgcttcgctgtgaatcagtatgaagtgtttcttggggttctggcatag

SEQ ID NO: 303103 - DNA, 639 bp, Artificial Sequence
  derived and/or modified sequence
atggaacacgccgcacagccatggagatggcaaaggaggagggggtggagacgctctgcctgctggcccagatccccaacctgtagcgcgccatgggctgccagatccagtagagctatcgttagacggactcaatgcaccgccgctacacggtgtccagccactggctctgagtgtaggagggggccaccaggttggtgtagatcatgccctcgatggccatgtagaagcacttcaacaccagcgtccccacctagggtcagcgccgcaagacccactgctagctcctggccctgcagctcctcaacaacaggaattggcttcggcctgtggctgactggcatgttaatcaacatccatagcgaccacattctgaggaacctccggaaacctggagataccggttataagatacctcggggaggcctgttcgaatacgtgaccgcagccaactatttcggggaaatcatggaatggtgcggatacgctctggcaagttggagtgtccaaggtgccgcatttgcgttcttcactttctgctttctatcgggcagggccaaagaacaccacgaatggtatctgaggaagttcgaggaatatcctaagtttagaaaaatcataattcccttccttttctag

SEQ ID NO: 303104 - DNA, 935 bp, Artificial Sequence
  derived and/or modified sequence
actccggtagccgcccctccggtagccgcccctcctgcccccgcgccgccgccctatatgttgcccgccgcggcctctggggcatggagcacgctgcccagccctggcgatggcaacggcgacgggggtggcggaggagcgcctgctggccgcgctcgcctacctgcagtgcgccgtgggctgcgcggtcttcgcgcgcaatcgtcagacgaactcagtgtacggccgccacgcgctgcccagccacaggctccgagtgccggcgcgggccgcctgggtggtgcaggagctgccctcgctggccctgccgctctaccagtacgccagcgagtccgccccgcgtctccgcagcgcgcccaactgcatcctcctggccatgttcctcgtccactacgggcatcggttttggcttgtggttaacgggcatgttgataaacatccattcagatcatatcctaaggaatctcagaaaaccaggagatactggatacaaaataccaaggggaggcttatttgaatacgtaactgcagccaactattttggagaaatcatggagtggtgtggctatgccctggccagctggtctgtccaaggcgcggcttttgctttcttcacgttttgttttttatctggtagagcaaaagagcatcatgagtggtacctccggaaatttgaagagtatccaaagttcagaaaaattataattccatttttgttttaagtgcgtttttcatgaaattatcttcaacttgaagctttccaatggcgcttctctatggactttgtaaataagttatatctttgtaattttcctgctactttatcattttcaagatgtcctctaggaattttttttctagtaattttgcaatctacctaataagtacctaaatacgctgaaatggaggttgaatatcctactgtgtaacaggtc

SEQ ID NO: 303105 - protein, 596 aa, Artificial Sequence
  derived and/or modified sequence
MLPSQAQGLLWWVFPLFPASSLSYPPVSYRADGLARNTFLKACSESSSSSNISTMLVTHDYTAVKEDEINVYQGEVVQILASNQQNMFLVFRAATDQCPAAEGWIPGFVLGHTSAVIVENPDGTLKKSTSWHTALRLRKKSEKKDKDGKREGKLENGYRKSREGLSNKVSVKLLNPNYIYDVPPEFVIPLSEVTCETGETVVLRCRVCGRPKASITWKGPEHNTLNNDGHYSISYSDLGEATLKIVGVTTEDDGIYTCIAVNDMGSASSSASLRVLGPGMDGIMVTWKDNFDSFYSEVAELGRGRFSVVKKCDQKGTKRAVATKFVNKKLMKRDQVTHELGILQSLQHPLLVGLLDTFETPTSYILVLEMADQGRLLDCVVRWGSLTEGKIRAHLGEVLEAVRYLHNCRIAHLDLKPENILVDESLAKPTIKLADFGDAVQLNTTYYIHQLLGNPEFAAPEIILGNPVSLTSDTWSVGVLTYVLLSGVSPFLDDSVEETCLNICRLDFSFPDDYFKGVSQKAKEFVCFLLQEDPAKRPSAALALQEQWLQAGNGRSTGVLDTSRLTSFIERRKHQNDVRPIRSIKNFLQSRLLPRV

SEQ ID NO: 303106 - protein, 2500 aa, Artificial Sequence
  derived and/or modified sequence
MLDRLHSTRQHLHQMWHVRKLKLDQCFQLRLFEQDAEKMFDWITHNKGLFLNSYTEIGTSHPHAMELQTQHNHFAMNCMNVYVNINRIMSVANRLVESGHYASQQIRQIASQLEQEWKAFAAALDERSTLLDMSSIFHQKAEKYMSNVDSWCKACGEVDLPSELQDLEDAIHHHQGIYEHITLAYSEVSQDGKSLLDKLQRPLTPGSSDSLTASANYSKAVHHVLDVIHEVLHHQRQLENIWQHRKVRLHQRLQLCVFQQDVQQVLDWIENHGEAFLSKHTGVGKSLHRARALQKRHEDFEEVAQNTYTNADKLLEAAEQLAQTGECDPEEIYQAAHQLEDRIQDFVRRVEQRKILLDMSVSFHTHVKELWTWLEELQKELLDDVYAESVEAVQDLIKRFGQQQQTTLQVTVNVIKEGEDLIQQLRDSAISSNKTPHNSSINHIETVLQQLDEAQSQMEELFQERKIKLELFLQLRIFERDAIDIISDLESWNDELSQQMNDFDTEDLTIAEQRLQHHADKALTMNNLTFDVIHQGQDLLQYVNEVQASGVELLCDRDVDMATRVQDLLEFLHEKQQELDLAAEQHRKHLEQCVQLRHLQAEVKQVLGWIRNGESMLNAGLITASSLQEAEQLQREHEQFQHAIEKTHQSALQVQQKAEAMLQANHYDMDMIRDCAEKVASHWQQLMLKMEDRLKLVNASVAFYKTSEQVCSVLESLEQEYKREEDWCGGADKLGPNSETDHVTPMISKHLEQKEAFLKACTLARRNADVFLKYLHRNSVNMPGMVTHIKAPEQQVKNILNELFQRENRVLHYWTMRKRRLDQCQQYVVFERSAKQALEWIHDNGEFYLSTHTSTGSSIQHTQELLKEHEEFQITAKQTKERVKLLIQLADGFCEKGHAHAAEIKKCVTAVDKRYRDFSLRMEKYRTSLEKALGISSDSNKSSKSLQLDIIPASIPGSEVKLRDAAHELNEEKRKSARRKEFIMAELIQTEKAYVRDLRECMDTYLWEMTSGVEEIPPGIVNKELIIFGNMQEIYEFHNNIFLKELEKYEQLPEDVGHCFVTWADKFQMYVTYCKNKPDSTQLILEHAGSYFDEIQQRHGLANSISSYLIKPVQRITKYQLLLKELLTCCEEGKGEIKDGLEVMLSVPKRANDAMHLSMLEGFDENIESQGELILQESFQVWDPKTLIRKGRERHLFLFEMSLVFSKEVKDSSGRSKYLYKSKLFTSELGVTEHVEGDPCKFALWVGRTPTSDNKIVLKASSIENKQDWIKHIREVIQERTIHLKGALKEPIHIPKTAPATRQKGRRDGEDLDSQGDGSSQPDTISIASRTSQNTLDSDKLSGGCELTVVIHDFTACNSNELTIRRGQTVEVLERPHDKPDWCLVRTTDRSPAAEGLVPCGSLCIAHSRSSMEMEGIFNHKDSLSVSSNDASPPASVASLQPHMIGAQSSPGPKRPGNTLRKWLTSPVRRLSSGKADGHVKKLAHKHKKSREVRKSADAGSQKDSDDSAATPQDETVEERGRNEGLSSGTLSKSSSSGMQSCGEEEGEEGADAVPLPPPMAIQQHSLLQPDSQDDKASSRLLVRPTSSETPSAAELVSAIEELVKSKMALEDRPSSLLVDQGDSSSPSFNPSDNSLLSSSSPIDEMEERKSSSLKRRHYVLQELVETERDYVRDLGYVVEGYMALMKEDGVPDDMKGKDKIVFGNIHQIYDWHRDFFLGELEKCLEDPEKLGSLFVKHERRLHMYIAYCQNKPKSEHIVSEYIDTFFEDLKQRLGHRLQLTDLLIKPVQRIMKYQLLLKDFLKYSKKASLDTSELERAVEVMCIVPRRCNDMMNVGRLQGFDGKIVAQGKLLLQDTFLVTDQDAGLLPRCRERRIFLFEQIVIFSEPLDKKKGFSMPGFLFKNSIKVSCLCLEENVENDPCKFALTSRTGDVVETFILHSSSPSVRQTWIHEINQILENQRNFLNALTSPIEYQRNHSGGGGGGGSGGSGGGGGSGGGGAPSGGSGHSGGPSSCGGAPSTSRSRPSRIPQPVRHHPPVLVSSAASSQAEADKMSGTSTPGPSLPPPGAAPEAGPSAPSRRPPGADAEGSEREAEPIPKMKVLESPRKGAANASGSSPDAPAKDARASLGTLPLGKPRAGAASPLNSPLSSAVPSLGKEPFPPSSPLQKGGSFWSSIPASPASRPGSFTFPGDSDSLQRQTPRHAAPGKDTDRMSTCSSASEQSVQSTQSNGSESSSSSNISTMLVTHDYTAVKEDEINVYQGEVVQILASNQQNMFLVFRAATDQCPAAEGWIPGFVLGHTSAVIVENPDGTLKKSTSWHTALRLRKKSEKKDKDGKREGKLENGYRKSREGLSNKVSVKLLNPNYIYDVPPEFVIPLSEVTCETGETVVLRCRVCGRPKASITWKGPEHNTLNNDGHYSISYSDLGEATLKIVGVTTEDDGIYTCIAVNDMGSASSSASLRVLGPGMDGIMVTWKDNFDSFYSEVAELGRANWNNWSPY

SEQ ID NO: 303107 - protein, 255 aa, Artificial Sequence
  derived and/or modified sequence
MALEDRPSSLLVDQGDSSSPSFNPSDNSLLSSSSPIDEMEERKSSSLKRRHYVLQELVETERDYVRDLGYVVEGYMALMKEDGVPDDMKGKDKIVFGNIHQIYDWHRDFFLGELEKCLEDPEKLGSLFVKHERRLHMYIAYCQNKPKSEHIVSEYIDTFFEDLKQRLGHRLQLTDLLIKPVQRIMKYQLLLKDFLKYSKKASLDTSELERAVEVMCIVPRRCNDMMNVGRLQGFDGRVVALCHRFKETFREICWF

SEQ ID NO: 303108 - DNA, 768 bp, Artificial Sequence
  derived and/or modified sequence
atggccctggaggacagacccagcagcctgctggtggaccagggcgacagcagcagccccagcttcaaccccagcgacaacagcctgctgagcagcagcagccccatcgacgagatggaggagagaaagagcagcagcctgaagagaagacactacgtgctgcaggagctggtggagaccgagagagactacgtgagagacctgggctacgtggtggagggctacatggccctgatgaaggaggacggcgtgcccgacgacatgaagggcaaggacaagatcgtgttcggcaacatccaccagatctacgactggcacagagacttcttcctgggcgagctggagaagtgcctggaggaccccgagaagctgggcagcctgttcgtgaagcacgagagaagactgcacatgtacatcgcctactgccagaacaagcccaagagcgagcacatcgtgagcgagtacatcgacaccttcttcgaggacctgaagcagagactgggccacagactgcagctgaccgacctgctgatcaagcccgtgcagagaatcatgaagtaccagctgctgctgaaggacttcctgaagtacagcaagaaggccagcctggacaccagcgagctggagagagccgtggaggtgatgtgcatcgtgcccagaagatgcaacgacatgatgaacgtgggcagactgcagggcttcgacggcagagtggtggccctgtgccacagattcaaggagaccttcagagagatctgctggttctag

SEQ ID NO: 303109 - DNA, 768 bp, Artificial Sequence
  derived and/or modified sequence
atggccctagaagataggccttccagcctgctggtggatcagggtgatagcagctcgcctagtttcaatcccagtgacaatagcctgctcagcagtagctctccaattgacgagatggaggaaaggaaatctagctctctcaagcgaaggcactatgtgcttcaggagctggttgaaacggaacgagattatgtaagagatctgggctatgtagttgaaggctatatggctctcatgaaggaggacggagtgccagatgatatgaagggaaaagataagatcgttttcggcaatatccatcaaatctacgactggcatcgggacttctttctcggtgaactggaaaaatgcctggaagacccggaaaagctaggatccctgtttgtgaaacatgagaggcgactccatatgtacattgcctactgccagaacaaacctaagtccgaacacattgtttcggagtacatagatacctttttcgaagatctgaaacagagacttggccacaggttgcaactcactgacctcctgatcaagcccgtgcaaagaataatgaaataccagctgttacttaaggactttctgaaatacagcaagaaggccagtttggacacaagcgagctggagagggccgtcgaggtcatgtgtatcgtacctcgccgctgcaatgacatgatgaacgtcgggaggctgcagggatttgatggacgggtggtcgccctgtgtcatcgctttaaggaaacgttccgcgagatctgctggttctag

SEQ ID NO: 303110 - DNA, 768 bp, Artificial Sequence
  derived and/or modified sequence
atggccctggaggaccggcccagcagcctgctggtggaccagggcgacagcagcagccccagcttcaaccccagcgacaacagcctgctgagcagcagcagccccattgatgagatggaggagaggaagagcagcagcctgaagagaagacactacgtgctgcaggagctggtggagacagagcgggactatgtgcgggacctgggctacgtggtggagggctacatggccctgatgaaggaggatggagtgcctgatgacatgaagggcaaggacaagatcgtgtttggaaacatccaccagatctatgactggcaccgggacttcttcctgggggagctggagaagtgcctggaggaccctgagaagctgggcagcctgtttgtgaagcatgaaagaaggctgcacatgtacatcgcctactgccagaacaagcccaagtctgagcacatcgtgtctgagtacatcgacaccttctttgaggacctgaagcagaggctgggccaccggctgcagctgacagacctgctgatcaagcctgtgcagaggatcatgaagtaccagctgctgctgaaggacttcctgaagtacagcaagaaggccagcctggacaccagcgagctggagagagctgtggaggtgatgtgcatcgtgccccggcgctgcaatgacatgatgaatgtgggccgcctgcagggctttgatggccgggtggtggccctgtgccaccgcttcaaggagaccttccgggagatctgctggttctag

SEQ ID NO: 303111 - DNA, 768 bp, Artificial Sequence
  derived and/or modified sequence
atggccctggaggaccggcccagcagcctgctggtggaccagggcgatagtagttctccttcttttaacccgagcgataacagcttactttcttccagcagtccaatagacgaaatggaggagcgcaaatcaagctctttgaaaaggcgacattacgtgctccaggaactagtggagaccgaaagggattacgtgcgggacctgggctatgtggttgaggggtacatggctttgatgaaggaggatggcgtgcctgacgatatgaagggtaaggacaaaattgtgtttggcaacattcaccagatatacgattggcacagggatttttttcttggggaattggaaaagtgtctggaagatcccgagaagcttgggtcactgtttgttaagcacgagagaaggctgcatatgtacattgcatattgccagaataagcccaagagcgaacacatagtgagcgaatatattgacacattttttgaggaccttaaacagagactaggccacaggttgcagctgaccgacctgctcatcaagcctgtgcagcgcatcatgaagtatcagctgctgttgaaggacttcttgaaatacagtaagaaagcgtccctcgatacgtctgagctggaacgtgctgtagaagtaatgtgcatcgtcccgcgccgctgcaatgacatgatgaatgtgggccggctgcagggattcgacgggagggtagtggcgctgtgccaccgatttaaggaaactttccgcgaaatatgctggttttag

SEQ ID NO: 303112 - DNA, 768 bp, Artificial Sequence
  derived and/or modified sequence
atggccttggaagatcgtccttcctcactcctggtcgaccagggggattcatcatccccgagctttaatccttctgacaattcactcctctcttcatcttcaccgattgatgagatggaggagcggaaaagttcctccctgaaacggaggcactatgtcttacaggaactagttgagacagagcgcgactatgtcagggatctgggatacgtcgtggagggatatatggccctcatgaaggaggacggagtgccggatgatatgaaaggaaaagacaagatagttttcgggaacatccaccagatctatgactggcaccgagacttcttcctgggtgagctggaaaaatgccttgaagacccggaaaagctcggctccctcttcgtgaaacacgaacgcagattgcacatgtatatcgcttactgccagaataaaccgaagtctgaacatattgtgtctgaatacatcgacacatttttcgaagacctgaaacagaggctgggccaccgccttcagctgaccgacttacttatcaaaccagttcaaagaatcatgaagtatcagttgctgcttaaggactttctgaaatactctaagaaagcttccctggatacctcagaactggaaagggccgtcgaggtcatgtgtattgtgcccagacggtgcaacgatatgatgaatgtgggcagactgcagggcttcgatgggagagtggtcgcactatgtcataggttcaaggaaactttcagagagatctgttggttctag

SEQ ID NO: 303113 - DNA, 1547 bp, Artificial Sequence
  derived and/or modified sequence
gagtgcagccgagctcgtcagtgcaattgaggaactcgtgaaaagcaagatggcactggaggatcgccccagctcactccttgttgaccagggagatagtagcagcccttccttcaacccttcggataattcccttctctcttcctcctcgcccattgatgagatggaagaaaggaaatccagctctttaaagagaagacactacgttttgcaagaactagtggagacagagcgtgactatgtgcgggaccttggctatgtggttgagggctacatggcacttatgaaagaagatggtgttcctgatgacatgaaaggaaaagacaaaattgtgttcggcaacatccatcagatttacgactggcacagagacttttttttaggagagttagagaagtgccttgaagatccagaaaaactaggatccctttttgttaaacacgagagaaggttgcacatgtacatagcttattgtcaaaataaaccaaagtctgagcacattgtctcagaatacattgataccttttttgaggacttaaagcagcgtcttggccacaggttacagctcacagatctgttgatcaaaccagtgcagagaatcatgaagtatcagctgttactgaaggacttcctcaagtattccaaaaaggccagcctggatacatcagaattagagagagctgtggaagtcatgtgcatagtacccaggcggtgcaacgacatgatgaacgtggggcggctgcaaggattcgacggtagggtcgtagccctgtgccatcggttcaaagagacttttcgtgaaatttgttggttttgaggactgtaaaagtgatttcatactctgaatataaaactggataatagggtaatgttttaaaatttattatgctattattcagaatgccaaagtattattttttttcccaaaatcagtctggacatttactactttttagactttttgacgttgaactttctgtataaaaattggctgggttttgagcttttggtaagaaataaaagccgattaagcactggccgccccgcggctggtacccaatgcccgagtcactgtggcagcattcgcactggtgtggggagtcctttcaactcaaggaggctgggtttctgggcaccctcgaagttttctggatgtctttttatctttctcgtgtgaactgcactacaaaagagaccagcccgcttcccaagccagccagacacctgggtcttgagccataaactggcgtagttaagctttgcagcttccagtgtattttatttattcttttgttgggtttttgtttgtttcttcttgtaaaattgtacagaaactttttaaaagaaattggattcgaaactggatgtgtattcgtaacctcataatttttatttgtgtattgtttcttttattatttcagttaaatttttacattattttgcatgtatatttctttgtacagagaccttacatgtttacacagtatgatgtgatgtaaatattttattttgccatcagttattttaaaaaattaaacatatttgcc

SEQ ID NO: 303114 - DNA, 147 bp, Artificial Sequence
  derived and/or modified sequence
atgtccgattttcccgtccattccaaatatttccttataagcagcctgcaagtgcttaagatgcacaaaaaagacttcaccagtcaggtgctgctccgcatttacttcgacttgatctgcatgctagttaagctgcacgtcctgtag

SEQ ID NO: 303115 - DNA, 1461 bp, Artificial Sequence
  derived and/or modified sequence
atgaaggtgatctcgctcttcatcctggttggatttatcggggaatttcaatccttctcttctgcctcttcccccgtgaattgccagtgggacttttacgccccttggtctgaatgcaacgggtgtaccaaaacccaaacacgcaggcgcagtgtggctgtgtatggacagtacggcggtcagccctgtgtgggcaacgcctttgagacccagagttgcgagccaactagaggatgccctacagaggaaggctgcggcgagagatttcgctgcttcagcggacagtgtatctccaaatccctggtgtgtaacggcgactccgactgcgatgaggatagcgccgacgaggataggtgcgaggattctgagaggcgaccctcttgcgacattgataagccaccacccaacatcgagctcaccggcaatggatataacgagctgactgggcaattcagaaacagggtactcttttacgtggatagcgaaaaacttaagcaaaacgactttaactcagtagaggaaaagaagtgcaagtcttccgggtggcattttgtcgtgaagtttagcagtcacgggtgtaaagagcttgaaaatgccctgaaggccgcttcaggcacacagaataatgtgctcagaggtgagccttttattcgcggtgggggtgcaggattcatctccggcctctcttatctcgaactggacaatcccgccggcaataagcggagatattccgcgtgggcagaatcagtcacgaatctgccgcaggtgatcaaacagaagctcacccccctttacgagctcgttaaggaagtaccctgcgcctcggtgaagaaactgtatctgaagtgggcactagaagaatatctggacgagtttgatccatgccattgcaggccatgccagaacggcgggctggccaccgtcgaggggacccactgtctctgccactgtaagccttacaccttcggtgccgcatgcgaacagggagtgttggttggcaatcaagcaggcggtgtagacgggggctggtcttgctggagtagttggagtccctgtgtccaaggcaaaaagactcgcagcagagaatgcaataacccgccacctagcgggggcgggaggtcctgtgtgggcgaaacaactgaatccacccagtgcgaagacgaggaactcgagcatttgagattactcgagccacattgctttccacttagcctggttccaactgaattctgcccctccccaccagctcttaaagatgggttcgtgcaggatgagggaacaatgttccctgtaggcaagaacgtcgtatatacttgtaacgagggttattccctgatcggcaaccccgtggccagatgtggcgaggacctgagatggttagtcggtgaaatgcattgccagaacggcaagataagtaactggatgaaggtgaacgagactctcttggtggaacaccactag

SEQ ID NO: 303116 - DNA, 1032 bp, Artificial Sequence
  derived and/or modified sequence
atgaaagttataagcctgttcatccttgtcggcttcatcggggagttccagagtttttctagtgcatctagcccagtgaactgtcagtgggacttttacgctccttggtcagagtgtaacggttgcactaagactcagacacgcagacggagcgtggcagtgtatggccagtatggtggccaaccctgcgtgggaaatgcttttgagacccagtcgtgtgagccaacccggggctgccccaccgaagaggggtgtggggaacgttttagatgtttcagcggacaatgtatatcaaaaagcctggtgtgtaacggtgattcggattgcgacgaagatagtgcagatgaggataggtgcgaggattcagagaggagaccaagctgcgatatagacaaaccccctccaaatattgagctgaccgggaatggatataatgagctgactggccaattccgaaaccgagtgatcaacaccaaatctttcggaggacagtgccgcaaagtgttttccggcgacgggaaggacttttatcggctgagcgggaatgtgctgtcttacacgtttcaagtgaagatcaacaacgacttcaattatgagttctacaactccacttggagctacgtgaaacatacgtctacagaacacacctcctcgtctcgcaaaaggtctttcttccgaagtagtagctcatcttctagatcgtacacctctcataccaatgagattcataagggcaagagctatcaactgctggtcgttgagaacaccgtagaagtggcacaattcatcaacaataatcctgagtttttgcaactcgccgaaccattttggaaagaactttcccacttgcccagcctttacgactatagtgcttatagaaggcttatcgaccagtacggaacgcattacttgcagagcgggtctctgggaggcgagtaccgagtactgttttacgtagactctgaaaagctgaaacagaatgacttcaactccgtggagaaaaaaaaaaagaaaaagaagaaaaaaaagtag

SEQ ID NO: 303117 - DNA, 1461 bp, Artificial Sequence
  derived and/or modified sequence
atgaaggtgatcagcctcttcatcctggtgggcttcatcggggagttccagagcttcagcagcgccagcagccctgtgaactgccagtgggacttctacgccccctggagcgagtgcaatggctgcaccaagacccagaccaggagaagatctgtggccgtgtatggccagtatggaggccagccctgtgtgggcaatgcctttgagacccagagctgtgagcccacccggggctgccccacagaggagggctgtggggagcgcttccgctgcttcagcggccagtgcatcagcaagagcctggtgtgcaatggagacagcgactgtgatgaagattctgcagatgaggacagatgtgaggacagcgagcggcggcccagctgtgacatcgacaagcccccacccaacatcgagctgactggaaatggctacaatgagctgaccggccagttcaggaacagagtgctcttctacgtggacagcgagaagctgaagcagaatgacttcaacagcgtggaggagaagaagtgcaagagcagcggctggcactttgtggtgaagttcagcagccacggctgcaaggagctggagaatgccctgaaggccgccagcggcacccagaacaacgtgctgcggggggagcccttcatccggggcggcggggccggcttcatcagcggcctgagctacctggagctggacaacccagctggcaacaagaggcgctacagcgcctgggccgagagcgtgaccaacctgccccaggtgatcaagcagaagctgacccccctgtatgagctggtgaaggaggtgccctgtgcctctgtgaagaagctgtacctgaagtgggccctggaggagtacctggatgaatttgacccctgccactgccggccctgccagaatggaggcctggccaccgtggagggcacccactgcctgtgccactgcaagccctacaccttcggggccgcctgtgagcagggcgtgctggtgggcaaccaggccggcggcgtggatggcggctggagctgctggagctcctggagcccctgtgtgcagggcaagaagaccaggagccgggagtgcaacaaccccccaccttctgggggcggccgcagctgtgtgggggagaccacagagagcacccagtgtgaagatgaggagctggagcacctgcggctgctggagccccactgcttccccctgagcctggtgcccacagagttctgccccagccccccagccctgaaggatggctttgtgcaggatgagggcaccatgtttcctgtgggcaagaatgtggtgtacacctgcaatgaaggctacagcctcatcggcaaccctgtggcccgctgtggggaggacctgcgctggctggtgggggagatgcactgccagaatggcaagatcagcaactggatgaaggtgaatgagaccctgctggtggagcaccactag

SEQ ID NO: 303118 - DNA, 1032 bp, Artificial Sequence
  derived and/or modified sequence
atgaaggtgatcagcctcttcatcctggtgggcttcatcggggagttccagagcttcagcagcgccagcagccctgtgaactgccagtgggacttctacgccccctggagcgagtgcaatggctgcaccaagacccagaccaggagaagatctgtggccgtgtatggccagtatggaggccagccctgtgtgggcaatgcctttgagacccagagctgtgagcccacccggggctgccccacagaggagggctgtggggagcgcttccgctgcttcagcggccagtgcatcagcaagagcctggtgtgcaatggagacagcgactgtgatgaagattctgcagatgaggacagatgtgaggacagcgagcggcggcccagctgtgacatcgacaagcccccacccaacatcgagctgactggaaatggctacaatgagctgaccggccagttcaggaacagagtcatcaacaccaagagctttggaggccagtgcaggaaggtgttttctggagatggcaaggacttctaccgcctgtctggaaatgtgctgagctacaccttccaggtgaagatcaacaatgacttcaactatgagttctacaacagcacctggagctatgtgaagcacaccagcacagagcacaccagcagcagcaggaagaggagcttcttccgcagcagcagcagcagcagccgcagctacaccagccacaccaatgagatccacaagggcaagagctaccagctgctggtggtggagaacacagtggaggtggcccagttcatcaacaacaaccctgagttcctgcagctggccgagcccttctggaaggagctgagccacctgcccagcctgtatgactacagcgcctacagaaggctgattgaccagtatggcacccactacctgcagagcggcagcctgggcggggagtacagagtgctcttctacgtggacagcgagaagctgaagcagaatgacttcaacagcgtggagaagaagaagaagaagaagaagaagaagaagtag

SEQ ID NO: 303119 - DNA, 1461 bp, Artificial Sequence
  derived and/or modified sequence
atgaaggtgatcagcctgttcatcctggtgggcttcatcggcgagttccagagcttcagctctgcatccagtccagtgaactgtcagtgggacttctacgcgccctggagcgaatgtaatgggtgcacaaagacgcagacaaggaggagatctgtcgcagtctacggtcagtatggtgggcagccctgcgtcggaaacgcgttcgagacccagtcatgcgagccgaccaggggctgtccaaccgaagaaggctgtggcgagcggtttcgatgcttttctggacagtgcatttcaaagtccttggtgtgcaacggcgattcggactgcgacgaagatagcgccgatgaagaccggtgcgaagattctgagcggaggccttcttgtgatatagataaaccccccccaaacatagagctgaccggcaatggatacaacgaacttacagggcaattccgaaaccgcgtgttgttttacgtcgactccgagaagctgaaacaaaacgactttaattcagtggaggaaaagaaatgcaaatcatccgggtggcacttcgtggtcaaattctcatcccacggctgcaaagaattggagaacgcactcaaggccgccagtggcacgcagaataacgtcctccggggcgagccatttatccgaggcgggggcgccggattcatatccggactatcatacctggaactggacaatccggcaggaaacaaaaggcggtatagcgcatgggcagaaagtgtcacaaaccttccacaggtcattaaacaaaaattgaccccgctatatgaacttgtgaaggaggtgccctgcgcatccgtaaagaaactttacctgaagtgggcgctggaagaatacctggatgagtttgacccatgtcattgcagaccgtgtcaaaatgggggacttgccactgttgaaggtacacactgtctctgccactgtaaaccctacacatttggcgcagcctgcgaacagggcgtcctggtgggaaaccaggccggcggtgtagatggaggatggtcatgctggtcttcatggagcccctgcgtgcaggggaagaaaacacgttctcgagagtgtaacaaccccccaccttctggtggcggtcggtcctgtgtcggtgagacaactgaatccacccaatgcgaagacgaagaacttgagcacctgagactgttagagcctcactgcttcccattatcattggtgcctaccgaattctgccccagcccccccgccctgaaggacgggttcgtgcaggacgaaggcacaatgttcccggtaggtaagaacgtggtctacacttgtaatgaaggatattctctaattggaaatcccgttgcaagatgcggggaggaccttaggtggctcgtcggagagatgcactgccagaacgggaagataagcaactggatgaaggtgaacgagaccctcctcgtggaacatcactag

SEQ ID NO: 303120 - DNA, 1032 bp, Artificial Sequence
  derived and/or modified sequence
atgaaggtgatcagcctgttcatcctggtgggcttcatcggcgagtttcaatcctttagctccgccagttcccctgtgaattgccagtgggacttctacgccccctggagcgaatgcaacggctgtacaaaaacccagacacggcggagaagcgtggcagtatacgggcagtatggcggacaaccctgtgtggggaacgccttcgaaacccagagttgcgagcctacaagagggtgccctaccgaagagggctgcggtgaacgcttccgctgcttttcgggacagtgcatcagcaaaagtctcgtgtgtaatggcgattccgactgtgacgaggatagtgctgacgaagacagatgtgaagattctgaacgccgcccatcatgcgatattgacaaacctccacctaatattgaactgactggcaacggatataacgagttgactgggcagtttcgcaatagggtgatcaacacaaagagttttggcggacaatgccgcaaagtgttctctggcgacggaaaggacttttatcgcctgtctggaaacgtcctcagctacacattccaggtgaagataaataacgacttcaactatgaattttataacagcacctggtcatatgtgaagcatactagcaccgaacacacaagttccagccgcaaacgcagtttctttaggtcttcaagttctagctcacggtcctacacctcgcacaccaatgaaatccataaggggaaaagttaccagctgctggtagtcgaaaacactgtggaggtggcacagtttattaacaataacccagagttcctccaactggctgagcctttctggaaagagctatctcatctgccctcgttgtacgattacagtgcctatagacggcttatcgatcagtacggcacgcactacctgcagtccgggtcacttggaggcgagtacagagtcctcttctacgtggacagtgagaagctcaagcaaaatgattttaactccgttgagaaaaagaagaagaaaaagaaaaaaaagaaatag

SEQ ID NO: 303121 - DNA, 1461 bp, Artificial Sequence
  derived and/or modified sequence
atgaaggtcatttcgctgtttatcctggtaggcttcatcggcgaatttcaatccttttcaagcgcttcctctcccgtgaactgccaatgggacttctatgcaccttggagcgagtgcaatggctgcacaaaaacccagaccaggcgcaggtccgtagcggtgtacggccagtacgggggacaaccctgtgtgggcaatgccttcgaaacccagagttgtgaacccaccagaggttgtcctaccgaggaaggctgcggggaacgctttagatgtttttccggccagtgcatctctaaatctttggtgtgtaatggagactctgactgtgatgaggacagcgcggatgaagatagatgtgaggatagcgagagacgcccatcctgtgatatcgataagccaccgcctaacattgagcttactgggaacggttacaacgagctcacggggcagttcaggaaccgggtgctgttttacgttgattcagagaagctcaagcaaaatgacttcaactcagtcgaagaaaaaaaatgcaagtctagcggatggcacttcgtcgtcaagttctcatcacatggctgtaaggaactggagaacgccctcaaggcagccagcggtacgcaaaataacgtgctgcggggtgaaccattcatccgaggaggtggcgctggctttatttctggcctttcctatctggagctggacaatcctgccggaaataaacgtcgatactccgcctgggccgaatccgtgaccaaccttccccaggtcatcaagcagaaactgacccctctgtacgaacttgtgaaggaggtgccctgcgccagcgtgaaaaaactctacctgaaatgggcccttgaagagtacctggatgagttcgatccgtgccattgtaggccgtgccagaatggcggtctggctactgttgagggcactcactgtttgtgccattgcaagccttacaccttcggcgctgcttgcgaacagggagtcttagtcggaaaccaagccggaggggttgacggcggatggtcttgttggagctcttggtccccctgcgtccaggggaagaagacccgctctagagagtgcaacaatccccctccaagcggaggaggacgctcttgcgtcggagagacaactgaatcgacacagtgtgaagacgaggaactggagcacctccggttgctagagccgcattgttttccactgagccttgtgcccacagagttttgtccctccccacccgctcttaaggacgggttcgtccaggacgaggggactatgtttcctgtgggcaaaaacgtcgtctatacatgtaatgaggggtattctcttattggcaacccagtggcacgatgcggggaagatctgcgttggctggtgggggagatgcactgtcagaacgggaagatctcaaactggatgaaggtaaacgagaccttacttgtggagcaccactag

SEQ ID NO: 303122 - DNA, 1032 bp, Artificial Sequence
  derived and/or modified sequence
atgaaggtgatatcgctcttcatcctagtgggttttattggcgagtttcagagcttctcatctgctagctcacccgtgaattgccagtgggatttttacgctccatggagcgagtgtaacggctgcactaaaacacagacacgccgaagaagcgtggctgtttatggccaatatggcggacagccttgcgttggaaatgcgttcgagacccaatcctgtgaacccacccgtggttgccctactgaggagggttgcggagaacgattcagatgtttcagcggtcagtgcattagtaagtccttagtgtgcaatggtgactcagattgcgacgaggactccgccgacgaggataggtgcgaggactctgaacgtcgcccaagttgtgacatagataagcctcctcctaatattgagcttactgggaacggctacaacgaattgactgggcaattccgaaatcgcgtgatcaacacaaaaagcttcggaggacagtgtcggaaagtgttcagtggcgacggcaaagacttctaccggttatcaggtaacgttctgagttataccttccaggtgaagattaacaatgattttaactacgaattttataactctacatggagctacgtcaaacatacatccacagaacatacgtcttcatctcggaaacggtccttctttaggagctcctcatcctcttcacgcagttatactagccataccaacgagatccataagggaaagagttaccagcttctcgtggttgaaaatacagtcgaggtggcccagttcatcaataataatccagaattcctccagctggccgaacccttttggaaggagctctctcacctgccatctctttacgattactcagcttaccggagattaatagaccagtatggcacacactatctgcagagcggttcattagggggagagtatcgagtgctgttttatgtggactccgagaagctgaagcagaacgacttcaattctgtcgaaaaaaagaaaaagaagaaaaaaaagaaaaaatag

SEQ ID NO: 303123 - DNA, 1575 bp, Artificial Sequence
  derived and/or modified sequence
agggagaggcagagaggcaggcagcctgctgggctcttcctgctgttgaaaacttacccggcccttacagaggaaatcttcctcctctcttctgccctgaatgttttcccaaacatgaaggtgataagcttattcattttggtgggatttataggagagttccaaagtttttcaagtgcctcctctccagtcaactgccagtgggacttctatgccccttggtcagaatgcaatggctgtaccaagactcagactcgcaggcggtcagttgctgtgtatgggcagtatggaggccagccttgtgttggaaatgcttttgaaacacagtcctgtgaacctacaagaggatgtccaacagaggagggatgtggagagcgtttcaggtgcttttcaggtcagtgcatcagcaaatcattggtttgcaatggggattctgactgtgatgaagacagtgctgatgaagacagatgtgaggactcagaaaggagaccttcctgtgatatcgataaacctcctcctaacatagaacttactggaaatggttacaatgaactcactggccagtttaggaacagagttctattttatgtggactcagaaaaattaaaacaaaatgattttaattcagtcgaagaaaagaaatgtaaatcctcaggttggcattttgtcgttaaattttcaagtcatggatgcaaggaactggaaaacgctttaaaagctgcttcaggaacccagaacaatgtattgcgaggagaaccgttcatcagagggggaggtgcaggcttcatatctggccttagttacctagagctggacaatcctgctggaaacaaaaggcgatattctgcctgggcagaatctgtgactaatcttcctcaagtcataaaacaaaagctgacacctttatatgagctggtaaaggaagtaccttgtgcctctgtgaaaaaactatacctgaaatgggctcttgaagagtatctggatgaatttgacccctgtcattgccggccttgtcaaaatggtggtttggctactgttgaggggacccattgtctgtgccattgcaaaccgtacacatttggtgcggcgtgtgagcaaggagtcctcgtagggaatcaagcaggaggggttgatggaggttggagttgctggtcctcttggagcccctgtgtccaagggaagaaaacaagaagccgtgaatgcaataacccacctcccagtgggggtgggagatcctgcgttggagaaacgacagaaagcacacaatgcgaagatgaggagctggagcacttgaggttgcttgaaccacattgctttcctttgtctttggttccaacagaattctgtccatcacctcctgccttgaaagatggatttgttcaagatgaaggtacaatgtttcctgtggggaaaaatgtagtgtacacttgcaatgaaggatactctcttattggaaacccagtggccagatgtggagaagatttacggtggcttgttggggaaatgcattgtcagaacggcaaaatatccaactggatgaaagttaatgaaactctcctggtggaacatcactag

SEQ ID NO: 303124 - DNA, 1143 bp, Artificial Sequence
  derived and/or modified sequence
agggagaggcagagaggcaggcagcctgctgggctcttcctgctgttgaaaacttacccggcccttacagaggaaatcttcctcctctcttctgccctgaatgttttcccaaacatgaaggtgataagcttattcattttggtgggatttataggagagttccaaagtttttcaagtgcctcctctccagtcaactgccagtgggacttctatgccccttggtcagaatgcaatggctgtaccaagactcagactcgcaggcggtcagttgctgtgtatgggcagtatggaggccagccttgtgttggaaatgcttttgaaacacagtcctgtgaacctacaagaggatgtccaacagaggagggatgtggagagcgtttcaggtgcttttcaggtcagtgcatcagcaaatcattggtttgcaatggggattctgactgtgatgaagacagtgctgatgaagacagatgtgaggactcagaaaggagaccttcctgtgatatcgataaacctcctcctaacatagaacttactggaaatggttacaatgaactcactggccagtttaggaacagagtcatcaataccaaaagttttggtggtcaatgtagaaaggtgtttagtggggatggaaaagatttctacaggctgagtggaaatgtcctgtcctatacattccaggtgaaaataaataatgattttaattatgaattttacaatagtacttggtcttatgtaaaacatacgtcgacagaacacacatcatctagtcggaagcgctccttttttagatcttcatcatcttcttcacgcagttatacttcacataccaatgaaatccataaaggaaagagttaccaactgctggttgttgagaacactgttgaagtggctcagttcattaataacaatccagaatttttacaacttgctgagccattctggaaggagctttcccacctcccctctctgtatgactacagtgcctaccgaagattaatcgaccagtacgggacacattatctgcaatctgggtcgttaggaggagaatacagagttctattttatgtggactcagaaaaattaaaacaaaatgattttaattcagtcgaaaaaaaaaaaaaaaaaaaaaaaaaaaagaaa

SEQ ID NO: 303125 - DNA, 1461 bp, Artificial Sequence
  derived and/or modified sequence
atgaaggtgatcagcctgttcatcctggtgggcttcatcggcgagttccagagcttcagcagcgccagcagccccgtgaactgccagtgggacttctacgccccctggagcgagtgcaacggctgcaccaagacccagaccagaagaagaagcgtggccgtgtacggccagtacggcggccagccctgcgtgggcaacgccttcgagacccagagctgcgagcccaccagaggctgccccaccgaggagggctgcggcgagagattcagatgcttcagcggccagtgcatcagcaagagcctggtgtgcaacggcgacagcgactgcgacgaggacagcgccgacgaggacagatgcgaggacagcgagagaagacccagctgcgacatcgacaagcccccccccaacatcgagctgaccggcaacggctacaacgagctgaccggccagttcagaaacagagtgctgttctacgtggacagcgagaagctgaagcagaacgacttcaacagcgtggaggagaagaagtgcaagagcagcggctggcacttcgtggtgaagttcagcagccacggctgcaaggagctggagaacgccctgaaggccgccagcggcacccagaacaacgtgctgagaggcgagcccttcatcagaggcggcggcgccggcttcatcagcggcctgagctacctggagctggacaaccccgccggcaacaagagaagatacagcgcctgggccgagagcgtgaccaacctgccccaggtgatcaagcagaagctgacccccctgtacgagctggtgaaggaggtgccctgcgccagcgtgaagaagctgtacctgaagtgggccctggaggagtacctggacgagttcgacccctgccactgcagaccctgccagaacggcggcctggccaccgtggagggcacccactgcctgtgccactgcaagccctacaccttcggcgccgcctgcgagcagggcgtgctggtgggcaaccaggccggcggcgtggacggcggctggagctgctggagcagctggagcccctgcgtgcagggcaagaagaccagaagcagagagtgcaacaaccccccccccagcggcggcggcagaagctgcgtgggcgagaccaccgagagcacccagtgcgaggacgaggagctggagcacctgagactgctggagccccactgcttccccctgagcctggtgcccaccgagttctgccccagcccccccgccctgaaggacggcttcgtgcaggacgagggcaccatgttccccgtgggcaagaacgtggtgtacacctgcaacgagggctacagcctgatcggcaaccccgtggccagatgcggcgaggacctgagatggctggtgggcgagatgcactgccagaacggcaagatcagcaactggatgaaggtgaacgagaccctgctggtggagcaccactag

SEQ ID NO: 303126 - DNA, 1032 bp, Artificial Sequence
  derived and/or modified sequence
atgaaggtgatcagcctgttcatcctggtgggcttcatcggcgagttccagagcttcagcagcgccagcagccccgtgaactgccagtgggacttctacgccccctggagcgagtgcaacggctgcaccaagacccagaccagaagaagaagcgtggccgtgtacggccagtacggcggccagccctgcgtgggcaacgccttcgagacccagagctgcgagcccaccagaggctgccccaccgaggagggctgcggcgagagattcagatgcttcagcggccagtgcatcagcaagagcctggtgtgcaacggcgacagcgactgcgacgaggacagcgccgacgaggacagatgcgaggacagcgagagaagacccagctgcgacatcgacaagcccccccccaacatcgagctgaccggcaacggctacaacgagctgaccggccagttcagaaacagagtgatcaacaccaagagcttcggcggccagtgcagaaaggtgttcagcggcgacggcaaggacttctacagactgagcggcaacgtgctgagctacaccttccaggtgaagatcaacaacgacttcaactacgagttctacaacagcacctggagctacgtgaagcacaccagcaccgagcacaccagcagcagcagaaagagaagcttcttcagaagcagcagcagcagcagcagaagctacaccagccacaccaacgagatccacaagggcaagagctaccagctgctggtggtggagaacaccgtggaggtggcccagttcatcaacaacaaccccgagttcctgcagctggccgagcccttctggaaggagctgagccacctgcccagcctgtacgactacagcgcctacagaagactgatcgaccagtacggcacccactacctgcagagcggcagcctgggcggcgagtacagagtgctgttctacgtggacagcgagaagctgaagcagaacgacttcaacagcgtggagaagaagaagaagaagaagaagaagaagaagtag

SEQ ID NO: 303127 - DNA, 2040 bp, Artificial Sequence
  derived and/or modified sequence
tgctctaaagcaaatgttatcactgagtcattgccatctgcagaatcagaacctgttgaaattgaggtagagattgccgaagccattgaagtggaagatgaaggcatcgaaacattagaggaagtggcttctgccaagcagtccgtaaagtacatacagagcacaggttcctctgatgattctgctctagcactgttggcagatattaccagcaagtaccgtcaaggtgacagaaaagggcagattaaagaagatggctgtccatctgaccccacgagcaaacaggtagaaggtattgaaattgtggaacttcagctgtcacatgtgaaggacttgttccattgtgagaaatgtaaccgttcatttaaattgttttaccattttaaggagcacatgaaatcacactccactgagagtttcaagtgtgaaatatgcaataaacgatatcttcgagagagcgcatggaaacagcacctaaattgttaccaccttgaagaaggtggagtcagtaagaagcaaagaactgggaaaaaaattcatgtatgtcagtactgtgagaaacagtttgaccattttggacattttaaagaacatcttcgaaaacatacaggtgaaaaaccttttgaatgtccaaattgtcatgaacgatttgctagaaatagcactctgaaatgtcacctcactgcatgccaaactggagtaggggcaaaaaaaggaaggaagaagctctacgaatgccaggtctgcaacagtgtgtttaacagctgggaccagttcaaagatcacttggtaatacacactggagataaacccaaccattgtactttatgtgatttgtggtttatgcaaggaaatgaattaaggaggcatctcagtgatgctcacaatatttcagagcgtctagtaacggaagaagttctttcagtagaaacacgtgtgcaaactgaacctgtaacatcaatgactattatagaacaagttgggaaggtgcatgtgctaccattgcttcaggttcaggtggattcagcacaagtgactgtggaacaagtccatccagatctgctccaggacagccaggtgcacgattcacacatgagtgagcttccagagcaggtccaagtgagttatctagaagtgggccgaattcagactgaagaaggtactgaagtacatgtagaggagctgcatgttgaacgggtcaatcaaatgccagtggaagtacaaactgaacttctagaagcagatttggaccacgtgaccccagaaatcatgaaccaagaggagagagagtctagccaagcagatgctgctgaggctgccagggaagatcacgaagatgctgaggatttagagaccaagccaacagtggattctgaagcagaaaaggcagagaatgaggacagaacagctctgccagttttagaatgaaattacacatgaatatatttttaaatttacttgttgggtttttgaactgattatgggcagtttgactgtccttaattaagcctaacagacaagtggaccaaagttaagctgtttcctgttgtgctgaactgttgtccgttgaaacacattgattcccctccccctacttattgccacagaggagggatcttttccataactgaaggggagttttgagaagtatatttctggaaacttaaatggattatattcttattatatagttgggtacgaatgtatctattttcattgtggtaaaagttcttccttttctctttcccaggtcatgttcttcctcaaattttttccatattgtaaaatcaaacttaaatcattagaatacaagtttatgtattctaatgcatgttagaaaattgaataatataggaaacacaaggctgcatgatgaaaagtgcattgttactgtgcagttaaattttggcttctggctttctttagtttgaacaaacgttcttgtctaccccagtagtcacagatgccatctttgcaacagaaagagtggtggtggcaaaatttctagaatgttctttagagcacactggggtaccggat

SEQ ID NO: 303128 - protein, 619 aa, Artificial Sequence
  derived and/or modified sequence
MPSQIGDRKWLHGLQAALQNFLKGYPAIVRQLHSAGRGKSDTSQKKPKELLESLLQADIVKFAHFLLDVMNVLSILSCVNKNRNSSIADIFATLESMLEMLQMYQTRLGPKERMVDSATHFHGNCLRGKENISAVRNIVLTHLIKRLQGCFRDASQNVVRATVIGSFKLWPTKINQEFGEKEVSILTAHYEPVLEAANVKLSEVDTEWSMLKLEIYARFQNIRKLTWDFVNSIYLHKYPNILTLVDLVLTLPASSAEAEHGFSQMKWTKSHMHAKIKAESIIGNKAFTDILIDLVTLNLGTNNFPSNWMHLTQPELQELTSLLTVNSEFVDWRKFLLVTSMPWPIPLEEELLETLQKFKAVDKEQLGTITFEQYMQAGLWFTGDEDIKIPENPLEPLPFNRQEHLIEFFFRLFADYEKDPPQLDYTQMLLYFACHPDTVEGVYRALSVAVGTHVFQQVKASIPSAEKTSSTDAGPAEEFPEPEENAAREERKLKDDTEKREQKDEEIPENANNEKMSMETLLKVFKGGSEAQDSNRFASHLKIENIYAEGFIKTFQDLGAKNLEPIEVAVLLKHPFIQDLISNYSDYKFPDIKIILQRSEHVQGSDGERSPSRHTEEKK

SEQ ID NO: 303129 - DNA, 1860 bp, Artificial Sequence
  derived and/or modified sequence
atgcccagccagatcggcgacagaaagtggctgcacggcctgcaggccgccctgcagaacttcctgaagggctaccccgccatcgtgagacagctgcacagcgccggcagaggcaagagcgacaccagccagaagaagcccaaggagctgctggagagcctgctgcaggccgacatcgtgaagttcgcccacttcctgctggacgtgatgaacgtgctgagcatcctgagctgcgtgaacaagaacagaaacagcagcatcgccgacatcttcgccaccctggagagcatgctggagatgctgcagatgtaccagaccagactgggccccaaggagagaatggtggacagcgccacccacttccacggcaactgcctgagaggcaaggagaacatcagcgccgtgagaaacatcgtgctgacccacctgatcaagagactgcagggctgcttcagagacgccagccagaacgtggtgagagccaccgtgatcggcagcttcaagctgtggcccaccaagatcaaccaggagttcggcgagaaggaggtgagcatcctgaccgcccactacgagcccgtgctggaggccgccaacgtgaagctgagcgaggtggacaccgagtggagcatgctgaagctggagatctacgccagattccagaacatcagaaagctgacctgggacttcgtgaacagcatctacctgcacaagtaccccaacatcctgaccctggtggacctggtgctgaccctgcccgccagcagcgccgaggccgagcacggcttcagccagatgaagtggaccaagagccacatgcacgccaagatcaaggccgagagcatcatcggcaacaaggccttcaccgacatcctgatcgacctggtgaccctgaacctgggcaccaacaacttccccagcaactggatgcacctgacccagcccgagctgcaggagctgaccagcctgctgaccgtgaacagcgagttcgtggactggagaaagttcctgctggtgaccagcatgccctggcccatccccctggaggaggagctgctggagaccctgcagaagttcaaggccgtggacaaggagcagctgggcaccatcaccttcgagcagtacatgcaggccggcctgtggttcaccggcgacgaggacatcaagatccccgagaaccccctggagcccctgcccttcaacagacaggagcacctgatcgagttcttcttcagactgttcgccgactacgagaaggaccccccccagctggactacacccagatgctgctgtacttcgcctgccaccccgacaccgtggagggcgtgtacagagccctgagcgtggccgtgggcacccacgtgttccagcaggtgaaggccagcatccccagcgccgagaagaccagcagcaccgacgccggccccgccgaggagttccccgagcccgaggagaacgccgccagagaggagagaaagctgaaggacgacaccgagaagagagagcagaaggacgaggagatccccgagaacgccaacaacgagaagatgagcatggagaccctgctgaaggtgttcaagggcggcagcgaggcccaggacagcaacagattcgccagccacctgaagatcgagaacatctacgccgagggcttcatcaagaccttccaggacctgggcgccaagaacctggagcccatcgaggtggccgtgctgctgaagcaccccttcatccaggacctgatcagcaactacagcgactacaagttccccgacatcaagatcatcctgcagagaagcgagcacgtgcagggcagcgacggcgagagaagccccagcagacacaccgaggagaagaagtag

SEQ ID NO: 303130 - DNA, 1860 bp, Artificial Sequence
  derived and/or modified sequence
atgccatcgcaaatcggagatcgtaaatggctgcatggactgcaggctgctcttcagaacttccttaagggttatccagccattgtccgtcagctgcatagcgctggccgcggaaaatctgatacatcacagaagaaacccaaggaactgctagagtccctgttgcaggccgacatcgtgaagtttgcacatttccttctggacgttatgaacgtattgtctattctcagttgtgtcaataaaaaccgaaactcaagcatagccgacatcttcgctaccctcgagtccatgttagagatgctccagatgtaccagacccgcttgggtcctaaggaacgaatggtggacagtgccacgcacttccacggcaactgccttagagggaaggagaatatttcagccgtgaggaatattgttcttacacacctcatcaaaagactgcagggctgcttccgggatgcctcccaaaacgtggtccgggcaacagtcatcgggtccttcaaactgtggcctacgaagatcaaccaggaatttggtgagaaggaggtgtctatattaacagctcattacgaaccagtgctagaggccgccaacgtaaagttaagcgaggtcgatacggaatggagtatgctgaaactggaaatctatgcgcggtttcagaacattaggaagctgacctgggactttgtgaatagcatttatcttcataaatatcctaacatattaaccttggtcgatctagttctaacactgcctgcatcttctgccgaggctgagcacggttttagtcagatgaaatggactaaaagccacatgcatgctaaaataaaagctgaaagcattataggtaataaggcattcaccgacattctcattgatttggtcacgctgaatcttgggacgaacaatttcccgagtaattggatgcacctgactcagcctgagctccaggagctgacatcattgttgacagttaacagcgagtttgttgactggagaaagtttctgctcgtaacttctatgccctggccgatccccctcgaggaagagctgttggaaacactgcaaaagtttaaggccgttgacaaagagcagcttggcaccatcacttttgaacagtatatgcaagcaggtctctggtttacaggtgacgaggacattaagatccccgagaaccccctcgagccactcccgttcaatagacaggagcatctgatcgagttcttcttcaggttatttgcagattacgagaaggatcctccccagttggactatacccagatgctcctatacttcgcctgtcatccagatactgtggagggagtttatcgtgcactgagcgtggccgtgggaacccacgtgtttcaacaggtaaaggcatccattccatccgccgaaaagacctcctcaaccgatgccggccccgccgaggaattccctgagccggaagagaacgcagctcgggaggaacgcaaactcaaggatgacacagaaaaacgggagcagaaggacgaggagatacccgagaacgccaataatgaaaaaatgagcatggaaacgcttctaaaggtgtttaaaggcggttccgaggctcaggatagcaacaggttcgccagccaccttaaaatagagaacatatatgcagagggcttcatcaagacatttcaggacttgggggccaaaaatctggaacctatcgaggtggccgttttgctcaagcaccctttcattcaggatctgattagcaattatagcgattacaagttcccagatattaagattatactacagcggtctgaacacgtgcagggctctgacggcgagcgctccccgtcgaggcataccgaggagaagaagtag

SEQ ID NO: 303131 - DNA, 1860 bp, Artificial Sequence
  derived and/or modified sequence
atgcccagccagattggagacaggaagtggctgcacggcctgcaggccgccctgcagaacttcctgaagggctacccagccatcgtgcggcagctgcacagcgctggccggggcaagagtgacaccagccagaagaagcccaaggagctgctggagagcctgctgcaggccgacatcgtgaagtttgcccacttcctgctggatgtgatgaatgtgctgagcatcctgagctgtgtgaacaagaacagaaacagcagcattgctgacatctttgccaccctggagagcatgctggagatgctgcagatgtaccagacccggctgggccccaaggagaggatggtggacagcgccacccacttccacggcaactgcctgcggggcaaggagaacatctctgctgtgaggaacatcgtgctgacccacctgatcaagaggctgcagggctgcttcagagatgccagccagaatgtggtgcgggccaccgtcatcggcagcttcaagctgtggcccaccaagatcaaccaggagtttggagagaaggaggtgtccatcctgacagcccactatgagcctgtgctggaggccgccaacgtgaagctgtctgaggtggacacagagtggagcatgctgaagctggagatctatgcccgcttccagaacatcaggaagctgacctgggactttgtgaacagcatctacctgcacaagtaccccaacatcctgaccctggtggacctggtgctgaccctgcctgccagcagcgctgaggccgagcacggcttcagccagatgaagtggaccaagagccacatgcacgccaagatcaaggccgagagcatcatcggcaacaaggccttcacagacatcctgattgacctggtgaccctgaacctgggcaccaacaacttccccagcaactggatgcacctgacccagcctgagctgcaggagctgaccagcctgctgactgtgaacagcgagtttgtggactggaggaagttcctgctggtgacctccatgccctggcccatccccctggaggaggagctgctggagaccctgcagaagttcaaggctgtggacaaggagcagctgggcaccatcacctttgagcagtacatgcaggccggcctgtggttcaccggagatgaggacatcaagatccctgagaaccccctggagcccctgcccttcaaccggcaggagcacctgattgagttcttcttccggctgtttgctgactatgagaaggaccccccccagctggactacacccagatgctgctgtactttgcctgccacccagacacagtggagggcgtgtaccgggccctgtctgtggccgtgggcacccacgtgttccagcaggtgaaggccagcatccccagcgctgagaagaccagcagcacagatgctggccctgctgaggagttccctgagcctgaggagaatgctgcccgggaggagaggaagctgaaggatgacacagagaagcgggagcagaaggatgaggagatcccagaaaatgccaacaatgagaagatgtccatggagaccctgctgaaggtgttcaagggcggcagcgaggcccaggacagcaacagatttgccagccacctgaagattgagaacatctatgcagagggcttcatcaagaccttccaggacctgggcgccaagaacctggagcccatcgaggtggccgtgctgctgaagcaccccttcatccaggacctgatcagcaactacagcgactacaagttcccagacatcaagatcatcctgcagaggagtgaacatgtgcagggcagtgatggagagaggagccccagccgccacacagaggagaagaagtag

SEQ ID NO: 303132 - DNA, 1860 bp, Artificial Sequence
  derived and/or modified sequence
atgcccagccagatcggcgaccggaagtggctgcacggcctgcaggcggctctacaaaattttttgaaagggtatcctgcaattgtgcggcagctccactcagcagggcgggggaagtcagatactagccagaagaagcctaaagagctgctcgaaagcctcttacaagcagatatagtgaagttcgcccattttctgctggatgttatgaatgtacttagcattctcagttgcgtgaataagaatcggaattcgagcattgccgatattttcgccacactggagtccatgcttgaaatgctgcagatgtatcagacccgactaggtcccaaagagcggatggtagactctgccacacatttccatggtaactgcctgagaggcaaggagaacattagtgctgtcaggaatattgttctgacacacctcattaaaagactacaaggctgtttccgggatgcgagccaaaatgttgtaagagctactgttatcggaagtttcaagttgtggccgacaaagattaaccaggaatttggtgaaaaggaggtgtcaatcctgaccgcacattatgagcccgtgctcgaagccgccaatgttaagctcagtgaggtggacactgagtggtctatgctgaagttggaaatatacgcccggtttcagaacatccgcaaattgacttgggattttgttaattctatttacctgcataagtatcctaacattctgactttggtggacctggtcctgaccctgcccgcttcatccgccgaggcagaacacggtttctctcaaatgaagtggactaaatcccatatgcatgcgaagatcaaagctgagtccatcattggcaataaggcttttaccgatatcctgattgatctggtcacccttaacctgggtacaaacaactttccatcaaattggatgcatttgacccagccggaacttcaggagttaacctctttgctaaccgtaaattcagaatttgtggattggagaaaatttctattggtgacgtcaatgccttggcccattccattggaggaagagttgctggagacactgcagaagtttaaggctgttgataaagaacagcttgggaccatcaccttcgaacagtacatgcaagccggactgtggtttactggcgatgaggacattaaaattcctgaaaaccctctcgaaccactgccctttaatcgacaggaacacctgatcgagttctttttccgtctgttcgccgactacgagaaagatcccccccagcttgactatacacagatgctgctgtactttgcctgccacccagatacagttgaaggtgtctatcgcgctctctcagtcgccgtcggcacgcacgtctttcagcaggttaaggcgagcatcccgtcagccgagaagacttctagcacagatgcaggaccagccgaagagttccccgagcccgaagagaatgcagccagagaggagcggaagctgaaggatgacaccgagaaacgcgagcagaaggacgaagagattcccgaaaatgcaaacaacgagaaaatgtctatggaaaccctgctgaaggtgtttaaagggggctccgaggctcaggactccaaccgattcgcgtctcacctgaagatagaaaacatctacgccgaggggtttataaagacatttcaggacttgggagctaaaaacctggaaccgatcgaggtcgcagtgctgctcaagcatcccttcattcaagatctgatctccaattacagtgactacaaattcccagacataaagattatactacaacgtagtgaacacgtgcaaggatccgacggcgagcgcagtccttcacgccatacagaggagaaaaaatag

SEQ ID NO: 303133 - DNA, 1860 bp, Artificial Sequence
  derived and/or modified sequence
atgccctctcagattggagacagaaaatggctccatggtcttcaggccgcactccagaacttcctgaagggttatccagccattgtccggcaattacatagtgccggaaggggcaaaagcgacacctctcagaagaaacctaaggaactgctggaatcattacttcaggctgatatcgtaaagttcgcacactttttgttagacgtcatgaacgttttaagcatcctatcttgtgtgaacaagaacagaaatagctccatagcggacattttcgccacacttgagagcatgcttgagatgctacaaatgtaccaaactcggcttgggccaaaggagcgaatggtggacagtgcaactcactttcacggcaactgtctgagaggtaaggagaacattagtgcagtaaggaacatagtgctcacacacttgattaagcggcttcaggggtgttttagagatgctagccagaacgttgtaagggctactgtcattgggagcttcaagttgtggcctacaaagatcaaccaggagttcggtgaaaaggaggtctcgatcctcacagctcattatgaaccagtcctagaagctgcaaatgtgaagttgtctgaggtagacacagagtggagtatgctcaaacttgaaatatatgctcgcttccagaatattagaaaacttacctgggactttgtgaattcgatatacctacataagtatcccaacattctaactctggtggacctcgtcctcaccctccccgcttcaagcgccgaggcagaacacggcttctcccaaatgaaatggacgaagagtcacatgcacgcaaaaatcaaagccgaatccatcatcggtaataaagcatttaccgatattctgatcgatctcgtgactctgaaccttggaaccaacaactttccttcgaactggatgcacctgacacagcccgaactccaggagctgacctctcttctcacagtgaatagcgagttcgtggactggagaaagtttctactggtgacctcaatgccatggcctatcccactggaggaggagcttctggagacactacaaaagtttaaggctgttgacaaggaacagctggggacaataacctttgagcaatacatgcaggccggtctctggtttacaggggatgaggatatcaagatacccgaaaatccactagagcctctgccctttaatcggcaagagcacctcatcgagtttttctttcgccttttcgccgattacgagaaggaccccccacagctggattatacgcagatgctgctgtacttcgcttgccatcccgacaccgtggaaggcgtgtaccgcgcactttctgtggccgtaggcacccatgtgtttcagcaggtgaaagcgtccataccatctgctgagaaaacttctagtactgatgcaggacctgcagaagagttcccagagccagaagagaacgcagctagagaggagaggaaactgaaagacgacactgaaaaacgggagcagaaggacgaagagatacctgaaaacgctaacaatgagaagatgtcaatggagactctgcttaaggtttttaagggaggatctgaggcgcaggattccaatcgatttgctagccatctgaaaatagagaatatttacgcagaaggtttcattaaaacgttccaggatcttggcgcaaaaaacttagagccaattgaggtagcagtactgttgaagcaccccttcattcaggacctcatcagcaactactccgactataagtttcctgacataaaaatcattctgcagcgctctgaacatgtacaagggagtgatggagaacgtagtccctcaagacacactgaggagaaaaaatag

SEQ ID NO: 303134 - DNA, 2141 bp, Artificial Sequence
  derived and/or modified sequence
aattcagaatgaactttatttaagccaagaagacttcttcattaatggcaatataaaagtcttcccagatcctcccccatcaatacgtcctccacctgtagaaaaggaagaagatggtaccctgaccattgaacagcttgacagtcttcgagatcagttcttagatatggcacctaaagagtgctctgagaactgctttcaaaggccttcaccttcgacctgtgatgccttctcaaataggagacaggaagtggcttcatggattacaggcagccctccagaactttctcaagggatatcctgcaattgttcggcaactgcactcagcaggcagaggcaaaagtgacaccagtcaaaagaaacccaaagaacttctggagtcccttctccaagctgacattgttaaatttgcccacttcttgttggatgtcatgaatgtccttagcattctgtcctgtgtcaataagaatagaaattcctcaattgctgacatatttgccactttagagtcaatgctggaaatgctccaaatgtatcaaacaagactagggccaaaagaacgcatggtggattcagccacacactttcatggtaactgcctcagagggaaagaaaacatttctgctgtgagaaacattgttttaacacatcttatcaagagacttcaaggctgtttcagagatgccagccaaaatgtggtgagggctaccgtgattggaagttttaaattgtggcccacaaagataaatcaagaatttggagaaaaagaggtatccatcctgactgcacattatgaaccagtattagaagctgccaatgtgaaacttagtgaagtggatactgaatggagcatgttgaaattagagatttatgccagatttcagaacattcgaaaattgacctgggattttgtgaattccatttacttacacaagtatccaaatatcctgacactagtcgacctagtgttgacccttcctgcaagttcagctgaagcagaacatggctttagtcagatgaaatggaccaagtcacatatgcatgcaaaaatcaaggctgaaagcataataggaaataaagcatttactgacattctgatcgatttggtgaccctgaaccttggcacaaacaactttcctagtaattggatgcaccttacccaacctgaattacaggaattaacatctttattaacagtcaactccgagttcgtggactggcggaagttcctgttagtaacctcaatgccttggcccattcccttggaggaggagctccttgagacccttcagaagttcaaggctgtggataaggagcagttgggcaccatcacttttgagcagtatatgcaggctggtctgtggtttacaggagatgaagatataaaaattccagaaaatcctcttgaaccccttccatttaataggcaggagcatcttatagagtttttctttaggctatttgctgactatgagaaggatccaccccagcttgactacacacagatgctgctttactttgcttgccacccagacaccgtggaaggagtctacagggccctcagtgtggctgttggaactcatgtcttccaacaagtcaaagcttccattccaagtgcagaaaagacctcctcaactgatgcaggtccagctgaggaatttcctgaacctgaggaaaatgctgcaagagaagaaaggaaattaaaagacgacacggagaaaagggaacagaaggatgaagaaatccctgaaaatgcaaacaatgaaaagatgtccatggaaacactactcaaagtgttcaaagggggaagtgaagcacaggactccaatagatttgccagccacctaaagatagagaacatttatgcagagggcttcataaaaacatttcaagacctaggtgccaagaacctggagccaattgaagtcgctgttctcttgaagcatccttttattcaagacctgatttcaaattattcagactataagtttcctgatattaaaataattctccaaaggagtgaacatgtacaaggaagtgatggagagagatcaccttcaagacatacagaggaaaagaaatgaagacaaaagagtgtgatttttttaattctgcaataaatcttccaaaaattaaatgtg

SEQ ID NO: 303135 - protein, 1509 aa, Artificial Sequence
  derived and/or modified sequence
MPCAQRSWLANLSVVAQLLNFGALCYGRQPQPGPVRFPDRRQEHFIKGLPEYHVVGPVRVDASGHFLSYGLHYPITSSRRKRDLDGSEDWVYYRISHEEKDLFFNLTVNQGFLSNSYIMEKRYGNLSHVKMMASSAPLCHLSGTVLQQGTRVGTAALSACHGLTGFFQLPHGDFFIEPVKKHPLVEGGYHPHIVYRRQKVPETKEPTCGLKDSVNISQKQELWREKWERHNLPSRSLSRRSISKERWVETLVVADTKMIEYHGSENVESYILTIMNMVTGLFHNPSIGNAIHIVVVRLILLEEEEQGLKIVHHAEKTLSSFCKWQKSINPKSDLNPVHHDVAVLLTRKDICAGFNRPCETLGLSHLSGMCQPHRSCNINEDSGLPLAFTIAHELGHSFGIQHDGKENDCEPVGRHPYIMSRQLQYDPTPLTWSKCSEEYITRFLDRGWGFCLDDIPKKKGLKSKVIAPGVIYDVHHQCQLQYGPNATFCQEVENVCQTLWCSVKGFCRSKLDAAADGTQCGEKKWCMAGKCITVGKKPESIPGGWGRWSPWSHCSRTCGAGVQSAERLCNNPEPKFGGKYCTGERKRYRLCNVHPCRSEAPTFRQMQCSEFDTVPYKNELYHWFPIFNPGYVDIGLIPKGARDIRVMEIEGAGNFLAIRSEDPEKYYLNGGFIIQWNGNYKLAGTVFQYDRKGDLEKLMATGPTNESVWIQLLFQVTNPGIKYEYTIQKDGLDNDVEQQMYFWQYGHWTECSVTCGTGIRRQTAHCIKKGRGMVKATFCDPETQPNGRQKKCHEKACPPRWWAGEWEACSATCGPHGEKKRTVLCIQTMVSDEQALPPTDCQHLLKPKTLLSCNRDILCPSDWTVGNWSECSVSCGGGVRIRSVTCAKNHDEPCDVTRKPNSRALCGLQQCPSSRRVLKPNKGTISNGKNPPTLKPVPPPTSRPRMLTTPTGPESMSTSTPAISSPSPTTASKEGDLGGKQWQDSSTQPELSSRYLISTGSTSQPILTSQSLSIQPSEENVSSSDTGPTSEGGLVATTTSGSGLSSSRNPITWPVTPFYNTLTKGPEMEIHSGSGEEREQPEDKDESNPVIWTKIRVPGNDAPVESTEMPLAPPLTPDLSRESWWPPFSTVMEGLLPSQRPTTSETGTPRVEGMVTEKPANTLLPLGGDHQPEPSGKTANRNHLKLPNNMNQTKSSEPVLTEEDATSLITEGFLLNASNYKQLTNGHGSAHWIVGNWSECSTTCGLGAYWRRVECSTQMDSDCAAIQRPDPAKRCHLRPCAGWKVGNWSKCSRNCSGGFKIREIQCVDSRDHRNLRPFHCQFLAGIPPPLSMSCNPEPCEAWQVEPWSQCSRSCGGGVQERGVFCPGGLCDWTKRPTSTMSCNEHLCCHWATGNWDLCSTSCGGGFQKRTVQCVPSEGNKTEDQDQCLCDHKPRPPEFKKCNQQACKKSADLLCTKDKLSASFCQTLKAMKKCSVPTVRAECCFSCPQTHITHTQRQRRQRLLQKSKEL

SEQ ID NO: 303136 - DNA, 699 bp, Artificial Sequence
  derived and/or modified sequence
atgccatgcgcccagagatcttggctggcaaatctgtctgtagtagctcaactcttgaacttcggcgcattatgctacggccgccagccacaaccaggcccagtcagattcccagaccgccgccaggaacacttcattaaagggttgcctgagtatcacgttgtaggacctgtgcgggtggatgctagtggacactttctatcttatggcttacactacccaatcacatcaagtagacgcaaaagggacctggacgggtcagaagactgggtgtattacaggattagtcatgaagaaaaagatctcttcttcaatctaaccgttaaccagggatttttatctaattcttacatcatggaaaagcgctacgggaacctttctcatgttaagatgatggcaagtagtgctccactttgccatctgtccggtacagtgctgcagcaggggaccagggtggggactgccgcattgtcagcttgccatggccttacagggtttttccagctgccacacggagatttctttattgagcccgttaaaaagcaccccctggtggagggcgggtatcatccccacatcgtttaccgtaggcagaaggtacctgagacaaaggaacctacgtgtggactcaagggtatcgtgacacacatgtcatcatgggtggaagagagcgtgcttttcttttggctcttctactag

SEQ ID NO: 303137 - DNA, 699 bp, Artificial Sequence
  derived and/or modified sequence
atgccctgtgcccagaggtcctggctggccaacctgtctgtggtggcccagctgctgaactttggagccctgtgctacggccggcagccccagcccggccctgtgcgcttcccagaccggcggcaggagcacttcatcaagggcctgcctgagtaccacgtggtgggccctgtgcgggtggatgccagcggccacttcctgtcctatggcctgcactaccccatcaccagcagcaggaggaagagggacctggatggcagcgaggactgggtgtactaccgcatcagccatgaggagaaggacctcttcttcaacctgactgtgaaccagggcttcctgagcaacagctacatcatggagaagagatatggcaacctgagccacgtgaagatgatggccagcagcgcccccctgtgccacctgagcggcaccgtgctgcagcagggcaccagggtgggcacagctgccctgagcgcctgccacggcctgaccggcttcttccagctgccccatggagacttcttcatcgagcctgtgaagaagcaccccctggtggagggcggctaccacccccacatcgtgtaccgccggcagaaggtgcctgagaccaaggagcccacctgtggcctgaagggcatcgtgacccacatgagctcctgggtggaggagagcgtgctcttcttctggctgttctactag

SEQ ID NO: 303138 - DNA, 699 bp, Artificial Sequence
  derived and/or modified sequence
atgccctgcgcccagcggagctggctggccaacctgagcgtggtggcccagttgctgaactttggcgccctgtgttacggcagacaaccacaacctggcccagtcaggtttccagaccgtagacaggagcattttatcaaagggctgcctgagtatcatgtggttggcccagtcagagtagacgccagtggccattttctgagctacggcctacactaccctataacctcatccagaaggaaacgggacttggacggttccgaagactgggtctactaccgcatcagccacgaagagaaggacctgttctttaatctcaccgtgaaccaaggtttcctgtccaattcttatattatggagaaacggtacggtaatctatcacatgtgaagatgatggcaagctccgctcctttatgtcatctgagtggcactgttcttcaacagggaactcgcgtgggtacagcggctctgagcgcatgtcacgggctcacaggcttctttcagctgcctcatggggacttcttcatagaacccgtgaagaaacatccactggtggagggaggctatcaccctcatattgtatataggagacaaaaggtacctgaaactaaggaaccaacctgcgggcttaagggaatagtaacccatatgtcttcatgggtggaggagtccgtgctgttcttttggcttttctactag

SEQ ID NO: 303139 - DNA, 699 bp, Artificial Sequence
  derived and/or modified sequence
atgccttgcgcacagagatcatggctggctaatttgagcgtagtagcccagctgcttaacttcggagcactatgctacggccgacagccacaacccggaccagtgaggttccctgaccgtaggcaggaacattttatcaagggattgccagaatatcatgtggttgggcctgtccgtgtggacgcgtccggacatttcctgtcatacggcctgcattatccgatcacttcctctcgtcgcaagagagacttggacggttctgaggactgggtgtattaccggatcagccatgaggaaaaagatctgttctttaatctaacagtcaatcagggcttcctgtcaaacagctacattatggagaaacggtatggcaatctgagtcatgtgaagatgatggcttcctccgcgccactctgccatctttctggcacggtattgcagcagggtacaagagtgggcacagcggctctgtctgcatgccacggattgacgggcttcttccagttgcctcacggagattttttcatcgaaccggtcaagaaacaccccctcgtcgagggaggctaccacccacatatcgtctaccgcaggcaaaaggttcctgagacaaaggaacctacctgtggcctgaagggtattgtgactcacatgagttcctgggtggaggagagtgtgctgtttttttggctgttttattag

SEQ ID NO: 303140 - DNA, 699 bp, Artificial Sequence
  derived and/or modified sequence
atgccctgcgcccagagaagctggctggccaacctgagcgtggtggcccagctgctgaacttcggcgccctgtgctacggcagacagccccagcccggccccgtgagattccccgacagaagacaggagcacttcatcaagggcctgcccgagtaccacgtggtgggccccgtgagagtggacgccagcggccacttcctgagctacggcctgcactaccccatcaccagcagcagaagaaagagagacctggacggcagcgaggactgggtgtactacagaatcagccacgaggagaaggacctgttcttcaacctgaccgtgaaccagggcttcctgagcaacagctacatcatggagaagagatacggcaacctgagccacgtgaagatgatggccagcagcgcccccctgtgccacctgagcggcaccgtgctgcagcagggcaccagagtgggcaccgccgccctgagcgcctgccacggcctgaccggcttcttccagctgccccacggcgacttcttcatcgagcccgtgaagaagcaccccctggtggagggcggctaccacccccacatcgtgtacagaagacagaaggtgcccgagaccaaggagcccacctgcggcctgaagggcatcgtgacccacatgagcagctgggtggaggagagcgtgctgttcttctggctgttctactag

SEQ ID NO: 303141 - DNA, 1003 bp, Artificial Sequence
  derived and/or modified sequence
gcttaaaaaagcacagggagatcgcgggcagctttgcagtcgctgccttctcgcgcctgaccatgcacccctgcatcttcctgctgggccacaggcgagcgctttatttctggagctgagggctaaaacttttttgacttttcttctcctcaacatctgaatcatgccatgtgcccagaggagctggcttgcaaacctttccgtggtggctcagctccttaactttggggcgctttgctatgggagacagcctcagccaggcccggttcgcttcccggacaggaggcaagagcattttatcaagggcctgccagaataccacgtggtgggtccagtccgagtagatgccagtgggcattttttgtcatatggcttgcactatcccatcacgagcagcaggaggaagagagatttggatggctcagaggactgggtgtactacagaatttctcacgaggagaaggacctgttttttaacttgacggtcaatcaaggatttctttccaatagctacatcatggagaagagatatgggaacctctcccatgttaagatgatggcttcctctgcccccctctgccatctcagtggcacggttctacagcagggcaccagagttgggacggcagccctcagtgcctgccatggactgactggatttttccaactaccacatggagactttttcattgaacccgtgaagaagcatccactggttgagggagggtaccacccgcacatcgtttacaggaggcagaaagttccagaaaccaaggagccaacctgtggattaaagggtattgtgactcacatgtcctcctgggttgaagaatctgttttgttcttttggttgttttattaaaacatgacctattcttactcaagtctcttatctcctctgtattcttttttttttaatatcttcatgacattcaaatctcttctgtattctcttgccagaaagtgtacattctttttgcttgtataaaccctttcacttgtc

SEQ ID NO: 303142 - DNA, 303 bp, Artificial Sequence
  derived and/or modified sequence
atgcggcctaagcatctgcaggggatcgctcccgaggtgttccgcactcccacagggagccatgggcagatgccagggcaaccactccagagggggcacgccctggacatccgcccacccctgcgacctcaccccctgattagcggacatgctttgagaggggacagatggcaaacccctgctctagcactggggcccgcactttgtggtttcgtgcccgcacactgggtactcaccgtgccccccccacagcggccgagcataccatcgagaagcgcggacacttgccctgcgtctaggtag

SEQ ID NO: 303143 - DNA, 183 bp, Artificial Sequence
  derived and/or modified sequence
atggccctgccctgcggcatgggcaccgcctggtacctggacagcaccgagaatgctcttactgtgaatgttccaagggctcagaatcataaggcctcccacaactccatgtggaagcttggatcacatttttattgtatcttacttgtgacaaaagaccctccaggatttaccatggtatag

SEQ ID NO: 303144 - DNA, 1176 bp, Artificial Sequence
  derived and/or modified sequence
atgtcagggcaaccgccacctcctcctccccagcagcagcagcaacagcagcagctgagcccacccccgcctgcagcactggccccggtgtccggagttgtgctccctgcgccccctgccgtgtccgccggctcttcgccggccggaagcccgggcggaggagcagggggagagggactgggcgcagccgcggcggcactgcttttgcacccacccccgcccccaccgccggcaactgctgcaccacctccacctccacctccaccccccccacccgcttccgcggccgctcccgcatctgggccaccggcgccccccgggctcgccgccggccctggtcccgctggaggcgccccaactccagctctggtggctggcagctccgccgctgctcccttcccgcacggggattccgccctgaacgagcaagagaaagagttacagaggcgtctcaagcgactttatcccgcagtggacgaacaggaaaccccactgcctcggtcttggagccctaaggacaaattcagttacattggtctctcacagaacaacttgagggtgcactacaagggccacggaaagacccctaaggacgccgcttcagtccgtgctactcaccctatacctgctgcctgcggaatctactatttcgaagttaagatagttagtaaaggtcgggacggctacatggggattggactcagtgctcagggcgtgaatatgaatcggttgcctggttgggacaaacattcttatggatatcacggagacgatggacatagtttttgctcctccggcactggtcagccttacggccctactttcaccaccggggacgtgattggatgttgtgtgaacctgatcaataatacttgtttctacaccaaaaatggccacagtttagggattgcctttaccgacttacccccactcgattaccctgtgtcaccccgcccgtttagctcaccatctatgtctccatcacatggcatgaacattcacaatctcgcatccggtaaaggatcgacagctcattttagtgggtttgaaagttgtagtaacggggtgatatctaataaggctcaccagagctattgtcattcaaacaagcaccaatccagcaatgagtgtacacggaccaagcagtacaaatatgttaaaatcaccgcctcttag

SEQ ID NO: 303145 - DNA, 1176 bp, Artificial Sequence
  derived and/or modified sequence
atgagcggccagcccccacctcctccaccccagcagcagcagcagcagcagcagctgagccccccacctcctgctgccctggcccctgtgtctggagtggtgctgcctgcccccccagctgtgtctgctggcagcagccctgctggcagccctgggggcggggccggcggggagggcctgggcgctgctgctgctgccctgctgctgcaccccccacctcctcctcctccagccacagctgcccctcctcctcctcctcctcctcctcctcctccagccagcgctgctgccccagccagcggccccccagcccctcctggcctggccgccggccctggccctgctggaggagcccccaccccagccctggtggccggcagcagcgctgctgcccccttcccccatggagacagcgccctgaatgagcaggagaaggagctgcagaggcggctgaagaggctgtacccagctgtggatgagcaggagacccccctgcccaggtcctggagccccaaggacaagttctcctacatcggcctgagccagaacaacctgcgggtgcactacaagggccacggcaagacccccaaggatgctgcctctgtgcgggccacccaccccatcccagctgcctgtggcatctactactttgaggtgaagatcgtgtccaagggcagagatggctacatgggcatcggcctgagcgcccagggcgtgaacatgaaccggctgcccggctgggacaagcacagctatggctaccatggagatgatggccacagcttctgcagcagcggcaccggccagccctacggccccaccttcaccactggagatgtgattggctgctgcgtgaacctgatcaacaacacctgcttctacaccaagaatggccacagcctgggcatcgccttcacagacctgccccccctggactaccctgtgagcccccggcccttcagcagccccagcatgagccccagccacggcatgaacatccacaacctggccagcggcaagggcagcacagcccacttcagcggctttgagagctgcagcaatggagtcatcagcaacaaggcccaccagagctactgccacagcaacaagcaccagagcagcaatgaatgtaccaggaccaagcagtacaagtatgtgaagatcacagccagctag

SEQ ID NO: 303146 - DNA, 1176 bp, Artificial Sequence
  derived and/or modified sequence
atgagcggccagcccccccccccccccccccagcagcagcagcagcagcagcaattgagccccccgccgccggcagctctggctccagtatctggagtggtgctgcccgcccccccagctgtgtcggcgggcagtagccctgcagggtctcctggtgggggagctggaggggaggggctgggtgctgcagctgcggccttgttactacacccccctccacctcccccgccagctacggcggctcccccacctccacccccaccgccccctcccccggcatctgctgctgccccagcatcgggcccccctgccccaccagggctcgccgccggtccagggcccgccggcggtgctcccacgcctgcactggtcgctggatcgagcgccgctgccccattccctcacggcgatagcgctttgaacgagcaggaaaaggaactccagaggaggctaaaaaggctataccctgcggtcgacgagcaggaaaccccactgcccaggtcatggtcccctaaagataaattcagttacatcggtctgagccagaacaatctacgtgtgcactacaagggacacggaaagacacctaaagacgcagcaagcgtccgagccacccacccaatccctgcggcctgcggaatctactacttcgaagtcaagatcgtaagcaaaggccgggacggctatatgggcatcgggctctcggcacagggtgtcaacatgaaccgactgcctggatgggataagcactcctacggatatcacggcgatgatgggcattccttctgtagctccggaaccgggcaaccttacggacccactttcaccaccggcgacgtcatcggatgctgcgtgaacctgatcaacaatacttgcttctacactaaaaatggtcactctctgggaatcgcctttacagacctgcctccgcttgattacccggtgtctcctcgacctttttcttctccctcaatgtcgccctctcatggcatgaacatacacaacctcgcgtcaggtaaagggtctacagcccatttctccggttttgagtcctgttctaatggagtaatcagcaacaaagcgcaccaaagctattgtcatagcaacaagcaccaatcatccaacgagtgcacacgcaccaagcaatacaaatacgtgaagattaccgcatcttag

SEQ ID NO: 303147 - DNA, 1176 bp, Artificial Sequence
  derived and/or modified sequence
atgtccggacaaccaccacctccgccaccccagcaacagcagcagcagcaacagctttccccgcctccacccgctgctctggcacccgtctccggcgtggtacttccagccccaccggcagtgagtgctgggagcagtccagccggatcccctggcggaggagccggaggtgagggcctgggcgctgcagccgctgcactcttgctccacccgcctcccccaccaccacctgcgaccgctgccccaccccctccacctcctccaccccctccaccagcaagtgctgcagcaccagcttccggacctccagccccacccggactagccgcaggccctggccctgccggaggagctccaacccccgcactcgtggctggttcctccgctgcagcaccatttcctcatggggattccgcccttaacgagcaggaaaaggaactccagcggaggctgaagaggctgtaccctgccgtggacgagcaggaaacccccctccctaggagttggtcacctaaggacaaatttagctatatcggcctgtctcagaacaatctacgggtccactataaaggacatggtaagacccctaaggacgccgcttccgtcagagccactcatccaatccctgccgcatgcggcatttattatttcgaagtcaagatcgtctctaagggcagagatggttacatgggcattggtctttccgctcagggtgtgaatatgaaccggctccctggatgggataaacacagctacgggtaccacggagacgatgggcacagtttctgtagcagcggtaccggccagccctatggaccgactttcacaacaggagacgtaatcggatgttgcgtgaatctgattaataacacttgtttctatacgaaaaatgggcactccttgggtatagcttttaccgacctccctcccttggattacccagtcagtcctagaccttttagcagcccctctatgagccctagtcacggcatgaatatccacaacctggccagtggaaagggaagtaccgcacatttctctggattcgaatcttgtagcaacggcgtcatctcgaacaaggcacaccagtcgtactgtcacagcaataagcatcaatctagtaacgagtgtacccgaaccaaacaatacaagtacgtaaaaattacagcttcatag

SEQ ID NO: 303148 - DNA, 1392 bp, Artificial Sequence
  derived and/or modified sequence
ccaacgttctctcccggcctcccgggcccgccgcctactcccgcgtctccgagctcctcaaccgccgcggtctccctgggcgcgcggcccgccgcctgcttccggggcgggcggactgggcgcctggtgccggcggccgcagcgacagcgcccccgggaagcagaggaggaaggagagaagaggtggaggtggccgcaggctgagtcgcggccgggatgtccgggcagccgccgccgccgccgccgcagcagcagcaacagcagcagcagctgtcgccgccaccgccggcggccttggccccagtctccggagtcgtcctgccggcgcccccggccgtcagcgccggctcttctccggccggctcgcccggcggcggtgcgggcggcgaaggcttaggggccgcggcggccgccctgctcctccaccctccgccgccgccgcccccggccaccgcggccccgccgcccccgccgccgcccccgcctccccctgcctcagcggctgcccccgccagcgggccgcccgctcccccgggccttgcagcgggccccggcccggctggaggagccccgaccccagctctggtggcgggcagcagcgccgcggcccccttccctcacggggactcggccctgaacgagcaggagaaggagttgcagcggcggctgaagcgtctctacccggccgtggacgaacaagagacgccgctgcctcggtcctggagcccgaaggacaagttcagctacatcggcctctctcagaacaacctgcgggtgcactacaaaggtcatggcaaaaccccaaaagatgccgcgtcagttcgagccacgcatccaataccagcagcctgtgggatttattattttgaagtaaaaattgtcagtaagggaagagatggttacatgggaattggtctttctgctcaaggtgtgaacatgaatagactaccaggttgggataagcattcatatggttaccatggggatgatggacattcgttttgttcttctggaactggacaaccttatggaccaactttcactactggtgatgtcattggctgttgtgttaatcttatcaacaatacctgcttttacaccaagaatggacatagtttaggtattgctttcactgacctaccgcctttagattatcctgttagtcctcgaccttttagtagtccaagtatgagccccagccatggaatgaatatccacaatttagcatcaggcaaaggaagcaccgcacatttttcaggttttgaaagttgtagtaatggtgtaatatcaaataaagcacatcaatcatattgccatagtaataaacaccagtcatccaacgaatgtaccagaactaaacagtataaatatgtcaagatcacagcaagttaa

SEQ ID NO: 303149 - DNA, 1176 bp, Artificial Sequence
  derived and/or modified sequence
atgagcggccagcccccccccccccccccccagcagcagcagcagcagcagcagctgagcccccccccccccgccgccctggcccccgtgagcggcgtggtgctgcccgccccccccgccgtgagcgccggcagcagccccgccggcagccccggcggcggcgccggcggcgagggcctgggcgccgccgccgccgccctgctgctgcaccccccccccccccccccccccgccaccgccgcccccccccccccccccccccccccccccccccccgccagcgccgccgcccccgccagcggcccccccgccccccccggcctggccgccggccccggccccgccggcggcgcccccacccccgccctggtggccggcagcagcgccgccgcccccttcccccacggcgacagcgccctgaacgagcaggagaaggagctgcagagaagactgaagagactgtaccccgccgtggacgagcaggagacccccctgcccagaagctggagccccaaggacaagttcagctacatcggcctgagccagaacaacctgagagtgcactacaagggccacggcaagacccccaaggacgccgccagcgtgagagccacccaccccatccccgccgcctgcggcatctactacttcgaggtgaagatcgtgagcaagggcagagacggctacatgggcatcggcctgagcgcccagggcgtgaacatgaacagactgcccggctgggacaagcacagctacggctaccacggcgacgacggccacagcttctgcagcagcggcaccggccagccctacggccccaccttcaccaccggcgacgtgatcggctgctgcgtgaacctgatcaacaacacctgcttctacaccaagaacggccacagcctgggcatcgccttcaccgacctgccccccctggactaccccgtgagccccagacccttcagcagccccagcatgagccccagccacggcatgaacatccacaacctggccagcggcaagggcagcaccgcccacttcagcggcttcgagagctgcagcaacggcgtgatcagcaacaaggcccaccagagctactgccacagcaacaagcaccagagcagcaacgagtgcaccagaaccaagcagtacaagtacgtgaagatcaccgccagctag

SEQ ID NO: 303150 - protein, 221 aa, Artificial Sequence
  derived and/or modified sequence
MNLSIAIPAMVNNTAPPSQPNASTERPSTDSQGYWNETLKEFKAMDCSPGWSLPIRAMIKSLPLWAILVSYFCEYWLFYTIMAYTPTYISSVLQANLRDSGILSALPFVVGCICIILGGLLADFLLSRKILRLITIRKLFTAIGKGETGHRGERGKLRAAFSLLCVCPPTPGVLFPSVILVSLPWVRSSHSMTMTFLVLSSAISSFCESGALVNFLDIAPR

SEQ ID NO: 303151 - DNA, 666 bp, Artificial Sequence
  derived and/or modified sequence
atgaatctctctattgctatacctgcgatggttaataacaccgctcctccgagccagccgaacgcctctaccgagaggcctagtacagacagtcaggggtattggaacgagacgcttaaggaattcaaagctatggactgctccccaggctggtcactgcctatccgcgccatgatcaaaagcttgcccctgtgggcaatcctggtgagctacttctgcgagtattggcttttctacacaataatggcctatacgcctacttacatttcatctgttctgcaagctaacctccgcgattccgggattctgtccgcacttcccttcgtcgtcggttgtatttgtattatcttggggggtctgctggccgactttctgttgtcacgtaagatactcaggctgattacaattagaaagctgtttaccgcgatcgggaagggagagaccggacaccgaggagaacgagggaagctgagagcagccttcagcctcttgtgcgtatgtccaccaacccctggtgtgctgtttcctagcgttattctggtatctttgccttgggtacgttctagccatagcatgacaatgacatttctcgtgctcagctcagccatttcctctttttgcgaatctggggccctcgtgaactttcttgatattgctccacgctag

SEQ ID NO: 303152 - DNA, 666 bp, Artificial Sequence
  derived and/or modified sequence
atgaacctgagcatcgccatcccagccatggtgaacaacacagccccacccagccagcccaatgccagcacagagcggcccagcacagacagccagggctactggaatgagaccctgaaggagttcaaggccatggactgcagccctggctggagcctgcccatccgggccatgatcaagagcctgcccctgtgggccatcctggtgtcctacttctgtgagtactggctgttctacaccatcatggcctacacccccacctacatcagctctgtgctgcaggccaacctgcgggacagcggcatcctgagcgccctgccctttgtggtgggctgcatctgcatcatcctgggcggcctgctggccgacttcctgctgagcaggaagatcctgcggctcatcaccatcaggaagctgttcaccgccatcggcaaaggagagaccggccacagaggagagcggggcaagctgcgggccgccttcagcctgctgtgtgtgtgcccccccaccccaggagtgctcttccccagcgtcatcctggtgtccctgccctgggtgcgcagcagccacagcatgaccatgaccttcctggtgctgagcagcgccatcagcagcttctgtgagagcggggccctggtgaacttcctggacatcgcccccaggtag

SEQ ID NO: 303153 - DNA, 666 bp, Artificial Sequence
  derived and/or modified sequence
atgaacctgagcatcgccatccccgccatggtgaacaacaccgcccccccgtcccagcccaatgcttctacggaacgtccatccactgactctcaaggatactggaatgaaaccttaaaggaattcaaagccatggattgctcaccagggtggagccttccaatcagggcaatgattaagagcctgccgttgtgggcaatcctggtaagctatttctgcgagtattggcttttctacacaattatggcttacacccccacatatatttctagtgtcctgcaagccaacttacgcgacagcggcattttgagtgcactgccattcgttgtcgggtgcatctgcataatcctgggtggcttactagcggattttctgctgagtagaaagatccttcgcctcattaccatccgcaagttgttcaccgctattggcaagggggagaccggccacaggggagaacgaggtaagttgagagcagccttttcactcctgtgcgtgtgccccccaacccctggagtgctctttccatccgtgattttggtatccctaccatgggtacggtcttcccattctatgacgatgacctttcttgtactgagtagtgcaattagcagcttctgcgagtccggggcgctggtgaattttctagacattgcaccccggtag

SEQ ID NO: 303154 - DNA, 666 bp, Artificial Sequence
  derived and/or modified sequence
atgaacttatccattgccatcccagctatggtcaataacacagctcctccttcccaaccaaacgccagcactgagcggccaagcacagatagtcaggggtattggaatgagactttgaaggaattcaaagctatggactgcagtccgggatggagcttgcctatcagagctatgatcaagagcctccctctttgggccatccttgtgagctacttctgcgagtactggttgttttatacaataatggcctataccccaacatacatttcttcagtgctgcaggctaatttgcgggattccggcattttaagtgcactgcctttcgtcgtggggtgcatctgtattattctgggaggcctgttagcagacttcctcctaagccgtaagatcttacgactgataaccattaggaaactgtttacagctattggcaaaggcgagacgggccaccgcggagaacgcggtaagttacgtgccgcatttagcctattgtgcgtttgcccacccacacccggagtactgtttcctagcgtaatactggtctcacttccctgggtgagatccagccacagcatgactatgacctttctagtcttgtcatctgccatcagctcattttgtgagtctggggcactagtcaattttctcgacatcgctcctcggtag

SEQ ID NO: 303155 - DNA, 2331 bp, Artificial Sequence
  derived and/or modified sequence
tcagtaagtaaatgccagtccctaggaagagagaaccaaaatgtctaccggaccagatgtcaaggctacagtgggggacatttccagtgatggcaatttaaacgtggctcaagaggaatgctccaggaaagggatagtggatgaattcttcccgctgttgtcaaactaatgtatatggactcaaccacagggatatccccagagctcctatggaacactagcaaattttgtgtttttgttcagtccgacatgggctggccctcatcttgcagctctgtaatttttcaatttacacccaacaaatgaacttgagcattgccatcccagctatggtgaacaacacagccccacctagccagcccaatgcttccacagaacggccctccactgactcccagggctactggaatgaaactctaaaagaatttaaagcaatggactgttcaccaggctggtctcttcccattagggctatgatcaaatccttaccactctgggccattttagtctcttatttctgtgaatactggcttttttataccattatggcgtacacaccaacgtacatcagctcggtacttcaagccaacctcagagatagtgggatcctgtctgccttgccgtttgttgttggatgtatctgcattatccttggaggtctactggcagactttcttctctccagaaaaatcctcagactcatcaccatcaggaaactcttcactgccattggtaagggagagactggacacaggggtgaacgtgggaagctcagagcagccttcagtttactctgtgtttgtcctcctaccccaggggttctcttcccatccgtgatcctcgtgtccctgccctgggtcagatccagccacagcatgaccatgaccttcttggtgctgtcttctgccatcagcagcttctgtgaatcaggagcccttgttaacttcttggatattgctcctcggtagggacctcttttgcctcatcctttcagacactcaattcaagtctagcagccctaaatctactctgatgtgaaagtaaaatgtggcaggtacaacaggttgcaggaaatgtcagcaccagctctacatcctacatctaaataattcctggaagagactcaaagctggtggaccattgtgaacttagtttttctgggcgtgaacaagaggagtcagtggccatgctcagagtcaactgagggagactcacacaaacctctctctgttgaggaatgcagcacttgcctaaggcggaatcactgaaagaaatcttgagattctatagggtatgctcatgaaaatctttaatgaaggcaaaggacacaggactgcaggagaaatatctgtctctgatacagtaaaaacagttgactgagacttccaaacatagctcccagggtgctgtcccagtcaacaggacatccttcatcttcagataatgaaccaccaagaaatgtgagagatgcccttgtcacaggggagccgacgtctcatctggtgaggggtcttttatacccacggagggtataaaagttacaagatcagactcaacagcagaagccaaaacaacaacaacaacaacaacaacaacaacaacaacaacaacaaaaaccttacaaaccaggtgcagaccatcaatctgaccatcttgcataaacaatgttgacaagttaatagaggttacccccttgggagtaccagtccctagcacaggattatactaatcattggtcagtacatttcattcaggtttcaccaaggcttacacaattccagtcatctccagaggtacactggctttctcaaaggactattgcaagtctttgcacacatagctggagccatctctcctactgctgctggatttttcatcagtcaggattcagagtttggttggagaaatgtcttcttgctttcagctgctgttaacatatcgggcctggttttctacctcatctttggccgagcagatgtgcaggactgggctaaagagcagacattcacccacctctgagcaaaccgagagatgtgctagatcctggtgcttagttcatcattgttttccctcacagacatttctctttcatgcctgcttgactgataagccattagctagaccctgactatgtaacgctaaagattttaccatgcctggaaattttacaggggaagaaaacacgctagttatttaactgcaagctactaaaagcataggtgtgttgagatttctgtgttctccactcttccactgttatcctagtaaaagcatcaggggctggggacaatttctttccaaagcaaaagaggaagccagaccttgggaccg

SEQ ID NO: 303156 - DNA, 666 bp, Artificial Sequence
  derived and/or modified sequence
atgaacctgagcatcgccatccccgccatggtgaacaacaccgccccccccagccagcccaacgccagcaccgagagacccagcaccgacagccagggctactggaacgagaccctgaaggagttcaaggccatggactgcagccccggctggagcctgcccatcagagccatgatcaagagcctgcccctgtgggccatcctggtgagctacttctgcgagtactggctgttctacaccatcatggcctacacccccacctacatcagcagcgtgctgcaggccaacctgagagacagcggcatcctgagcgccctgcccttcgtggtgggctgcatctgcatcatcctgggcggcctgctggccgacttcctgctgagcagaaagatcctgagactgatcaccatcagaaagctgttcaccgccatcggcaagggcgagaccggccacagaggcgagagaggcaagctgagagccgccttcagcctgctgtgcgtgtgcccccccacccccggcgtgctgttccccagcgtgatcctggtgagcctgccctgggtgagaagcagccacagcatgaccatgaccttcctggtgctgagcagcgccatcagcagcttctgcgagagcggcgccctggtgaacttcctggacatcgcccccagatag

SEQ ID NO: 303157 - protein, 267 aa, Artificial Sequence
  derived and/or modified sequence
MSTGPDVKATVGDISSDGNLNVAQEECSRKGFCSVRHGLALILQLCNFSIYTQQMNLSIAIPAMVNNTAPPSQPNASTERPSTDSQGYWNETLKEFKAMSGILSALPFVVGCICIILGGLLADFLLSRKILRLITIRKLFTAIGVLFPSVILVSLPWVRSSHSMTMTFLVLSSAISSFCESGALVNFLDIAPRYTGFLKGLLQVFAHIAGAISPTAAGFFISQDSEFGWRNVFLLSAAVNISGLVFYLIFGRADVQDWAKEQTFTHL

SEQ ID NO: 303158 - DNA, 804 bp, Artificial Sequence
  derived and/or modified sequence
atgtccaccgggcccgacgtgaaggcaaccgtaggcgacatcagttcagacggcaacctgaatgttgctcaggaggaatgcagtcgcaagggcttctgcagtgttcggcacgggttagcccttatattacaactgtgtaacttttccatatacacccagcaaatgaatctgtcgatcgccattcccgcaatggttaacaacaccgcaccaccttcccagcccaacgcttcaaccgaaaggccatctacagactcgcagggttactggaatgagacactgaaagaattcaaggcaatgtccggtattctgagcgctctgcctttcgttgttgggtgtatttgtattatcttgggtggattgctggcagattttctgctgagtcgcaaaatactccgcctgattactattcggaagctcttcacagcaatcggcgttctctttccatccgttattctggtgagtctgccctgggttcggagcagccattctatgacaatgaccttccttgtgctatcaagcgcgataagttctttctgcgaaagtggcgccctcgtgaactttctggacattgcaccccgctacactggttttttgaagggactgctgcaggtcttcgcccacattgctggcgcaatttccccgactgcagccggcttttttatctcacaggatagcgagttcggctggcgaaacgtgtttctgttaagcgctgccgtgaatatcagcggcctggttttttaccttatcttcggtcgcgccgacgtacaagattgggccaaagagcagacttttacccatttatag

SEQ ID NO: 303159 - DNA, 804 bp, Artificial Sequence
  derived and/or modified sequence
atgagcactggaccagatgtgaaggccaccgtgggggacatcagcagtgatggcaacctgaatgtggcccaggaggagtgcagcaggaagggcttctgcagcgtgagacatggcctggccctgatcctgcagctgtgcaacttcagcatctacacccagcagatgaacctgagcatcgccatcccagccatggtgaacaacacagccccacccagccagcccaatgccagcacagagcggcccagcacagacagccagggctactggaatgagaccctgaaggagttcaaggccatgagcggcatcctgagcgccctgccctttgtggtgggctgcatctgcatcatcctgggcggcctgctggccgacttcctgctgagcaggaagatcctgcggctcatcaccatcaggaagctgttcaccgccatcggcgtgctcttccccagcgtcatcctggtgtccctgccctgggtgcgcagcagccacagcatgaccatgaccttcctggtgctgagcagcgccatcagcagcttctgtgagagcggggccctggtgaacttcctggacatcgccccccgctacacaggcttcctgaagggcctgctgcaggtgtttgcccacatcgccggggccatcagccccacagctgctggcttcttcatcagccaggacagcgagtttggctggagaaatgtgttcctgctgtctgctgctgtgaacatcagcggcctggtgttctacctgatcttcggccgggcagatgtgcaggactgggccaaggagcagaccttcacccacctgtag

SEQ ID NO: 303160 - DNA, 804 bp, Artificial Sequence
  derived and/or modified sequence
atgagcaccggccccgacgtgaaggccaccgtgggcgacatcagctcagatggcaatctcaatgtggcccaggaggagtgcagtcgcaagggtttctgcagtgtgcggcatggcttggcgctgatcctacagctttgtaatttctcaatctatacccaacagatgaatctttccatcgccatcccggcaatggttaacaacaccgccccccccagccagccgaacgcctctacggagaggcccagtacggactcccagggctactggaatgaaacactcaaagaatttaaagctatgtcggggatcctctccgcccttccttttgtggtggggtgcatttgcattatcttgggagggctgcttgccgacttcttgctcagccgaaagatcctgaggttgattacgatcaggaagctgtttactgctatcggtgtgctgttcccatctgtcattttggtttcactgccttgggtgagaagctcacatagtatgacgatgactttcctggtattgagctccgcaatttcaagcttctgcgaaagcggcgccttagtgaactttctcgacatcgcaccacgatacaccggctttctgaagggtctgctgcaggtctttgcccacatcgcaggagccatatcccccaccgccgccgggttctttatatcgcaggattccgaatttggctggcgcaatgtgttcctgctgagtgccgcggtcaatatcagtggcctcgttttctatcttattttcggccgcgctgatgttcaggactgggctaaagagcaaacctttacccacttgtag

SEQ ID NO: 303161 - DNA, 804 bp, Artificial Sequence
  derived and/or modified sequence
atgtccaccggccctgatgttaaggctaccgtgggggacattagctcagatgggaatctgaacgtagcacaggaggaatgttcgcgtaaaggtttttgctccgtcagacatggcctggctctgatcctccagctctgcaatttttctatctatacgcaacagatgaacctcagtatagcaattcccgcaatggtgaataacaccgcccctccatcacagccgaatgcaagcacggagcgcccttctacagattctcagggatattggaatgagacccttaaggaattcaaggccatgtccggcatattatcggcgctgccatttgtagtcgggtgtatctgtattatcctgggtggccttctcgctgactttctcttaagcaggaagattctgagattgatcaccattagaaagctgtttaccgccattggtgtgctgttcccctctgtcattctggttagtctgccctgggtgcgatcatcgcatagcatgacgatgacattcctggtgctaagtagcgcaatatcatccttttgtgagtctggcgctctggtaaactttttagacattgcacccagatacacagggttcttgaaagggctccttcaagtcttcgcccacattgcaggggcaatcagcccaacagccgctgggttttttattagccaggattccgagttcggttggcggaacgtgtttttgttaagcgctgccgtgaacatcagtgggctagttttctacctcatctttgggagagccgacgtgcaagactgggcaaaggagcagactttcacccacctgtag

SEQ ID NO: 303162 - DNA, 1664 bp, Artificial Sequence
  derived and/or modified sequence
ttatttgaaaggaatgaggatcctgcactcttcctccctcagtaagtaaatgccagtccctaggaagagagaaccaaaatgtctaccggaccagatgtcaaggctacagtgggggacatttccagtgatggcaatttaaacgtggctcaagaggaatgctccaggaaaggtttttgttcagtccgacatgggctggccctcatcttgcagctctgtaatttttcaatttacacccaacaaatgaacttgagcattgccatcccagctatggtgaacaacacagccccacctagccagcccaatgcttccacagaacggccctccactgactcccagggctactggaatgaaactctaaaagaatttaaagcaatgagtgggatcctgtctgccttgccgtttgttgttggatgtatctgcattatccttggaggtctactggcagactttcttctctccagaaaaatcctcagactcatcaccatcaggaaactcttcactgccattggggttctcttcccatccgtgatcctcgtgtccctgccctgggtcagatccagccacagcatgaccatgaccttcttggtgctgtcttctgccatcagcagcttctgtgaatcaggagcccttgttaacttcttggatattgctcctcggtacactggctttctcaaaggactattgcaagtctttgcacacatagctggagccatctctcctactgctgctggatttttcatcagtcaggattcagagtttggttggagaaatgtcttcttgctttcagctgctgttaacatatcgggcctggttttctacctcatctttggccgagcagatgtgcaggactgggctaaagagcagacattcacccacctctgagcaaaccgagagatgtgctagatcctggtgcttagttcatcattgttttccctcacagacatttctctttcatgcctgcttgactgataagccattagctagaccctgactatgtaacgctaaagattttaccatgcctggaaattttacaggggaagaaaacacgctagttatttaactgcaagctactaaaagcataggtgtgttgagatttctgtgttctccactcttccactgttatcctagtaaaagcatcaggggctggggacaatttctttccaaagcaaaagaggaagccagaccttgggaccgagaactgagaatcacaagggagttgcgcccaacatgcagaacatgaatcctctgagctgtcctcaaaagaaagccccaaacaacagaaagcatagtgttttccattgttggtgaaaaatgtcaaggaggaaagaacaataatgattccatcatgataagaggaatgaacgtgtctgcaactaatgggagcaagatagtacactttaactctttcagacaacttgcattctgtggatgccagctttggaatcagagccgcctctggaatacctgtgcttccagagttagcttttggacagttaccttctttctggccatcttgacttctgccccacatctgctttttggctttgtgcagatctttaacatgttagtgaacagacattgcccagtgtctcttctagcccctccaacagttcttcatgtagcactgcttttggacagtgacccatgatatctgccttcgtttg

SEQ ID NO: 303163 - DNA, 804 bp, Artificial Sequence
  derived and/or modified sequence
atgagcaccggccccgacgtgaaggccaccgtgggcgacatcagcagcgacggcaacctgaacgtggcccaggaggagtgcagcagaaagggcttctgcagcgtgagacacggcctggccctgatcctgcagctgtgcaacttcagcatctacacccagcagatgaacctgagcatcgccatccccgccatggtgaacaacaccgccccccccagccagcccaacgccagcaccgagagacccagcaccgacagccagggctactggaacgagaccctgaaggagttcaaggccatgagcggcatcctgagcgccctgcccttcgtggtgggctgcatctgcatcatcctgggcggcctgctggccgacttcctgctgagcagaaagatcctgagactgatcaccatcagaaagctgttcaccgccatcggcgtgctgttccccagcgtgatcctggtgagcctgccctgggtgagaagcagccacagcatgaccatgaccttcctggtgctgagcagcgccatcagcagcttctgcgagagcggcgccctggtgaacttcctggacatcgcccccagatacaccggcttcctgaagggcctgctgcaggtgttcgcccacatcgccggcgccatcagccccaccgccgccggcttcttcatcagccaggacagcgagttcggctggagaaacgtgttcctgctgagcgccgccgtgaacatcagcggcctggtgttctacctgatcttcggcagagccgacgtgcaggactgggccaaggagcagaccttcacccacctgtag

SEQ ID NO: 303164 - DNA, 72 bp, Artificial Sequence
  derived and/or modified sequence
gtgagactggcctggggcttcgtgagcgccctgggcagcttccacaccgccgaccccgagggcgccgcctag

SEQ ID NO: 303165 - DNA, 72 bp, Artificial Sequence
  derived and/or modified sequence
gtgcgtctcgcttgggggttcgtttcagccctagggtctttccataccgccgacccagaaggtgcagcatag

SEQ ID NO: 303166 - DNA, 72 bp, Artificial Sequence
  derived and/or modified sequence
gtgcggctggcctggggctttgtgtctgccctgggcagcttccacacagctgaccctgagggcgccgcctag

SEQ ID NO: 303167 - DNA, 72 bp, Artificial Sequence
  derived and/or modified sequence
gtgcggctggcctggggcttcgtgagcgccctgggcagcttccacacagccgatcctgaaggggcagcttag

SEQ ID NO: 303168 - DNA, 72 bp, Artificial Sequence
  derived and/or modified sequence
gtgcgactggcctggggtttcgtgagcgctttaggctcattccacacggctgacccagaaggggctgcctag

SEQ ID NO: 303169 - DNA, 69 bp, Artificial Sequence
  derived and/or modified sequence
gtgaggctggcttggggcttcgtctcggctctgggctccttccacacggctgaccctgaaggagcagcc

SEQ ID NO: 303170 - protein, 243 aa, Artificial Sequence
  derived and/or modified sequence
MRGESYFIGMRSPGQQGHVPEDGGLFLLCCIDRDWAVTRCFAEEAFQAITDFNDLPNSLFACNVHQSVFEGEESKEKFEGLFRTYDDCVTFQLFKSFRRVRINFSNPKSAARARIELHETQFRGKKLKLYFAQVQTPETDGDKLHLAPPQPAKQFLISPPSSPPVGWQPINDATPVLNYDLLYAVAKLGPGEKYELHAGTESTPSVVVHVCDSDIEEEEDPKTSPKPKIIQTRRPGLPPSVSN

SEQ ID NO: 303171 - DNA, 732 bp, Artificial Sequence
  derived and/or modified sequence
atgaggggggagtcgtacttcattggtatgcgatctcccggccagcaaggacacgtgcctgaggatggcgggttgttcttgctgtgctgtatcgatagagactgggctgtcacaagatgttttgctgaggaagcttttcaagctataaccgatttcaacgacctaccaaactccctttttgcgtgcaacgttcatcagtccgttttcgagggggaagaatctaaggaaaagttcgagggtctgtttagaacctatgacgattgcgtcacatttcagctgtttaaatccttcagaagggtgaggattaacttctccaatcccaagtccgccgccagggcgaggatcgaattgcacgaaacccagtttcggggtaagaagcttaaactgtatttcgctcaggtgcagacacctgagaccgacggtgacaagctgcacttggctcctccccagcctgcaaaacagttcctcatatctccaccctccagcccaccagtcggctggcagcccatcaacgatgccacccctgtcctgaactacgatctgctctatgccgtggctaagctgggacccggagagaaatacgaactacatgcaggaactgagagtacgccctccgtggttgtgcacgtctgcgactctgacatcgaagaggaggaggacccaaaaacgtccccgaagccaaaaattatacagacaagacgccccggcctcccgccttcagtgagtaactag

SEQ ID NO: 303172 - DNA, 732 bp, Artificial Sequence
  derived and/or modified sequence
atgcggggagaatcctacttcatcggcatgcgatcacccggacagcaaggccacgttcctgaggatggcgggctcttcctgctctgttgtatcgacagggactgggcagtgacacggtgcttcgctgaagaagccttccaagcgatcaccgatttcaacgacctgcccaacagtctcttcgcctgcaatgttcaccagagtgttttcgaaggcgaggagtcaaaggagaagttcgaggggctgtttagaacatatgatgactgtgtgacctttcagctgttcaaaagctttagaagggttaggataaacttcagcaaccccaaaagcgctgctagagctcgaatcgagctgcacgaaactcaattccgggggaaaaagctcaaattgtactttgcacaggtccagacccccgagacggacggagacaagctgcaccttgctccaccccagcccgctaaacaattcctgatatctcctccatcttccccacccgttggttggcagcctattaacgacgccacgcctgtgcttaactatgaccttctatatgccgtggcaaagctgggccccggggaaaagtacgagttacacgctggaaccgaatctaccccgtcagtggtagtgcatgtctgcgactctgatatcgaagaggaagaggaccccaagactagtccaaagccgaagatcattcagacacgtaggcccggcttgccaccttctgtgagcaattag

SEQ ID NO: 303173 - DNA, 732 bp, Artificial Sequence
  derived and/or modified sequence
atgaggggggaatcctactttatcggtatgagatcccctggccagcagggacatgtccccgaagatggaggcctgtttctcctgtgctgcatcgaccgcgactgggctgtcaccagatgcttcgctgaagaagcctttcaagcaatcacagacttcaacgacttgccaaactccctatttgcttgcaatgttcatcaaagtgtcttcgaaggagaagagtccaaagagaagtttgaaggcctgttcagaacttacgatgactgcgttacgtttcaactgtttaagtcgtttcgtcgggtgaggattaattttagcaatcccaaatctgccgctagggcgcgaattgagctgcatgagacacagtttcggggaaagaagttgaaactatactttgcacaggtgcagactcccgagacagacggggataagctgcatctcgcccctccccaaccagccaagcagtttctgatttccccccctagcagtcccccggtgggctggcaaccaattaatgacgctactcctgtcttgaactacgacttgctctatgcggtcgccaagttggggccaggtgaaaagtacgaattgcacgcaggaacagagtccactcccagtgtagtggtccatgtttgtgacagcgacattgaggaggaggaagaccccaagactagtccaaagccaaagattatccagactcgaagaccaggattgcccccaagcgtgagcaactag

SEQ ID NO: 303174 - DNA, 732 bp, Artificial Sequence
  derived and/or modified sequence
atgagaggagagagctacttcatcggcatgaggagccctggccagcagggccacgtgcctgaagatggcggcctcttcctgctgtgctgcatcgaccgggactgggccgtgacccgctgctttgctgaggaggccttccaggccatcacagacttcaatgacctgcccaacagcctgtttgcctgcaatgtgcaccagagcgtgtttgaaggagaggagagcaaggagaagtttgagggcctcttccgcacctatgatgactgtgtgaccttccagctgttcaagagcttccggcgggtgcgcatcaacttcagcaaccccaagtctgctgcccgggccagaattgagctgcacgagacccagttccggggcaagaagctgaagctgtactttgcccaggtgcagaccccagagacagatggagacaagctgcacctggccccaccccagcctgccaagcagttcctgatcagcccccccagcagcccccctgtgggctggcagcccatcaatgatgccacccctgtgctgaactatgacctgctgtatgctgtggccaagctgggccctggagagaagtatgagctgcacgccggcacagagagcaccccatctgtggtggtgcacgtgtgtgacagcgacatcgaggaggaggaggaccccaagaccagccccaagcccaagatcatccagaccaggaggcctggcctgccccccagcgtgagcaactag

SEQ ID NO: 303175 - DNA, 732 bp, Artificial Sequence
  derived and/or modified sequence
atgcggggcgagagctacttcatcggcatgcggagccccggccagcaggggcacgtcccggaggacggcggtctgtttctgctttgctgtattgatagagattgggctgtaacccggtgttttgcagaagaagcattccaggccataactgacttcaatgaccttccaaacagtctgtttgcatgtaatgttcaccagtccgtattcgagggtgaggaatccaaggagaagttcgagggcctttttagaacatatgacgactgcgtgacattccagttgtttaagtcatttaggagagtccgtatcaacttcagcaaccctaagtccgccgccagggcacgtattgagcttcatgaaacccagttccgtggaaagaaactcaaactttactttgcacaggttcaaacccccgaaaccgatggggacaagcttcacctggctcctccacagcccgcaaagcagtttttgataagtcccccaagctctcccccggtggggtggcagccaattaatgacgcgacccctgtgctcaattacgatttgctgtacgcagttgcaaagcttggcccaggtgagaaatacgagttgcatgcaggtaccgaaagtacaccatccgtggtggtgcatgtgtgcgactctgacatcgaggaagaagaggacccaaaaacgtctcctaaaccaaaaataattcagaccagaaggcccggtctgcctccatccgtctccaactag

SEQ ID NO: 303176 - DNA, 732 bp, Artificial Sequence
  derived and/or modified sequence
atgcggggcgagagctacttcatcggcatgcggagccccggccagcaggggcacgtgcccgaagacggcggcttgtttctgctttgctgcatagatagagactgggccgtcaccaggtgctttgcagaggaggccttccaggctatcaccgacttcaatgacctcccaaactctctgtttgcgtgcaacgttcaccagagcgtcttcgagggggaagagtctaaggagaaattcgaaggcctctttcgcacttatgacgattgtgtcacttttcagctttttaagagcttccgaagggtcaggatcaacttttctaaccccaagtcggctgcaagagctcggattgagctgcatgagacgcaattccgcggaaaaaagctgaaactctactttgctcaggtgcagacaccagagactgacggagacaaactgcatctggccccaccacaacccgccaaacagttcttaatcagccccccctcttctcctcccgtcggttggcagcctatcaatgatgcgactcccgtgctcaactacgatctgttgtacgccgtcgcgaagctgggacccggggaaaagtatgaactgcatgcaggcaccgagagtaccccctccgtagtcgtccatgtgtgcgattctgacattgaggaggaagaggatcctaaaaccagtcccaagcccaagatcatccagacccgtcgccctggactgcccccaagcgtgtctaactag

SEQ ID NO: 303177 - DNA, 732 bp, Artificial Sequence
  derived and/or modified sequence
atgcggggcgagagctacttcatcggcatgcggagccccggccagcaggggcatgtccctgaggacggagggttatttcttctttgctgtatagatcgcgactgggccgtcacacgctgtttcgccgaagaggccttccaagcaattactgactttaacgatctgcccaattcattgttcgcatgcaacgtccatcagagtgtgttcgaaggagaggagtccaaggaaaagttcgaggggctctttcgtacctatgatgactgtgtgactttccagctgtttaagagcttccgacgcgtcagaatcaatttttcgaacccaaagtcagcggcgcgcgccagaattgagctgcatgaaacccagtttagaggcaagaaactcaagctctacttcgcccaagtgcaaacccccgagacagacggggataagttgcatcttgcccctccccaaccagctaagcagtttctgatttctcctccctcatccccccccgtgggctggcagccaattaatgacgccacaccagttctcaactatgatctcctctatgcagttgctaaactggggccaggagaaaaatatgagctgcacgccggaacagaaagcaccccctcggtggtggtacacgtctgtgattcagatatcgaggaagaagaagatcctaagacttcacctaagcccaagattattcaaacacgccgcccaggactcccaccttctgtcagcaactag

SEQ ID NO: 303178 - DNA, 732 bp, Artificial Sequence
  derived and/or modified sequence
atgagaggtgagtcttatttcattggaatgaggtcacccggacaacaggggcacgttcccgaggacggaggtctgttccttctctgttgtattgacagagattgggccgttacgagatgttttgccgaggaggcattccaagccataaccgatttcaacgatctgcctaacagcctgttcgcctgcaatgtgcatcagtctgtgttcgagggcgaggagtcgaaggaaaagtttgaaggcttgttcagaacctatgacgactgtgtgacttttcaactgttcaagtccttccgcagggtccgcatcaacttctcaaacccaaagagcgcagcgagagcgagaatcgaattgcacgagacccaattccgaggtaagaaattgaaactctattttgctcaagtgcagacccccgagaccgatggtgataaactccacctggcccctcctcagccagcgaaacagttcctgatatctccgccttccagccccccagtcgggtggcagcccattaacgacgccactcctgtgcttaactacgatcttctgtacgccgtcgctaaactcgggccaggggaaaagtacgaacttcatgcgggtactgaatctacacccagtgtggttgtgcatgtctgtgacagcgatatagaggaggaagaggacccgaagacatcccctaagccaaagattattcagacacgaaggccaggccttcctccaagcgtcagcaactag

SEQ ID NO: 303179 - DNA, 732 bp, Artificial Sequence
  derived and/or modified sequence
atgcgaggcgagtcctactttataggcatgaggagccctggacagcaaggtcacgttccagaggacgggggactctttctgctgtgttgtattgatcgtgattgggccgtcactcgctgctttgctgaggaagcctttcaggccatcactgactttaatgacctcccaaactcacttttcgcctgtaatgtgcaccagtcggtgtttgagggagaagaaagtaaggaaaaattcgagggcctgttccgcacatatgacgattgcgtcacctttcagttgttcaaatcttttagaagagtgcgaattaacttctccaacccaaagtcagcagccagagcacgtatcgaactgcacgaaactcagttcagaggaaagaaactgaagctgtatttcgcccaggtgcaaactccagaaactgacggtgataagctgcacctcgcccctcctcagccggctaaacagttcctcataagtcccccttcctctccccctgttggttggcagccgatcaacgacgctactcccgtactaaactacgacctgctgtacgcagttgcgaagctgggtccaggcgaaaaatatgaactccacgcaggcacagagtctacgccaagcgtggtggtccacgtatgtgattcagatattgaggaggaggaggatcccaagactagcccgaaaccaaagattattcagaccaggaggcctgggctcccgccatctgtctccaactag

SEQ ID NO: 303180 - DNA, 732 bp, Artificial Sequence
  derived and/or modified sequence
atgcgaggcgaatcatatttcattggtatgcggtcccccggacagcagggacacgtgccggaagacggcggtctgttccttctctgctgtatcgaccgtgattgggccgtcacccgctgcttcgcagaggaggcatttcaggctatcactgattttaatgaccttccaaactctctgttcgcatgcaacgtgcaccaatccgtgttcgagggcgaagaaagcaaagagaagttcgaggggctatttaggacctacgatgactgcgtgacctttcaattgtttaagagtttcaggcgagttagaataaacttcagtaaccctaagtcagccgctcgagcccgaatcgaactacacgaaactcagttccgcggaaagaagttgaagttatatttcgcacaggtacagaccccagaaaccgatggagataaactgcatcttgcaccgccacagcccgcaaaacagtttcttatttcacctccaagctctccacctgtcggctggcagccaatcaatgatgcgactccggtccttaactacgatttgctctatgctgtagcgaagctcggtccgggtgaaaagtacgagcttcatgcaggcacggagtctaccccctctgtcgtggtacatgtgtgtgactccgacattgaggaagaagaagatcccaagacaagcccgaagccaaagatcattcaaacgcggagaccaggcctcccgccttctgtgagcaattag

SEQ ID NO: 303181 - DNA, 3240 bp, Artificial Sequence
  derived and/or modified sequence
ccagagggcgccagcgcccaccaagcgcagaagcccgggaggaccatccaggggctccccgacatttcctcagttagccagagtcggggggctcagacatctggaatgaggggagaatcatacttcatcggaatgaggagcccagggcagcagggacacgtccctgaagatggaggacttttcttactgtgctgcatagacagggactgggctgtcactcgttgttttgcagaagaagcctttcaagcaatcactgacttcaatgacctccccaactcgttgtttgcgtgcaatgttcaccagtcagtgtttgaaggagaagagagcaaggaaaaatttgagggactgtttcggacttatgatgactgtgtgacgttccagctatttaagagtttcagacgtgtccgtataaacttcagcaatcctaaatctgcagcccgagctaggatagagcttcatgaaacccaattcagagggaaaaaattaaagctctactttgcacaggttcagactccagagacagatggagacaaactgcacttggctccaccccagcctgccaaacagtttctcatctcgcccccttcctccccacctgttggctggcagcccatcaacgatgccacgccagtcctcaactatgacctcctctatgctgtggccaaactaggaccaggagagaagtatgagctccatgcagggactgagtccaccccaagtgtcgtcgtgcacgtgtgcgacagtgacatagaggaagaagaggacccaaagacttccccaaagccaaaaatcatccaaactcggcgtcctggcctgccaccctccgtgtccaactgagctgcctgctccttctcgataatagccgtctcctctttatcatgctttttccccctgttgtttgtcaaaaaaaattgcctttaaattcctgggtgtttggttgtttgagattccttccttgttatcaagcctctcggacaaaagggctaggaaaaggtgatatgtctcctgatcatatcatacccattaagtataacccattatttagaaggttctagggaaaaaagtagtattttcttattaaacaatcagcacagcctatatctttgttctctcatgttgatccaagccagagacatcagtaacaaatagcacctgtgttgtttgtgagctgtttcagtcccagtcctgatgtgtgtgcgttgttctctcctggccacttaaataggaccatatgtaaacttgactttgactgcatgagatatccctatctggtctcactcagtcctctgcatcccaacattcccaggacatgcatgatcaccagcatttattttcattatttgaggatatcttataactcacagattgtcagcatccagccatgtcctatctagattaggaaaatgatcagaatattccagctcaacaagtctgggtatattcactattgtgagtcaatacaccatagctctgttgaaattcctggaggcaaaattgaccttggccccaaagatattcctcaatagatttcaaacaccactcccctgtagaactctcccagcctcgttggggaggcttgtccagggtgatagagactgatttcagacaaacctatttattacaaaagtttcatggtgtctgaatgattgttttctctctttgtatatttgtacaaatgtttcagctgtgcttttaaaaaatctggatgttttttatttagtgattgttcgacaattagctgcttcaaaacataatgtgcattgcttatgaatgccttcatatactaatacagatactctgataatattacactctaataaggataatgctgaattttgaaaggacacaaaacatctaatgccaatatatacatgattagccaacatctttgctatcaagaccacttgtttttaaataaagatgcaagtgtcagttgtagattattgggatgaagctaaatccccagaatgcagcagcagctgagcatgttaaaatggggaaggatgatagctacatgtatgccggtcctactcacgcgacacccgtgtgctcaaaaaagttatttgtttttgttacgtgtgatttttctatttctctagcccaaagtgcattacagaagatacacctatagaaccattaccttctgctatgtgtgccaggcctcatctactcctgtacattaatgaattactttagatgcaaacgcagattacaatggagtggggaagtactttcattacccaagcctcagaaaaacacacaagaacaataacacagcaaacagattgagggattgttgtggtttttgactaaggtgtatgttagtttcatcagaaacttaaaacatagactgatcactcagaaattaaagtccgttttactgtgaatatagcaatatagtactggacacagtactggtgaaactgaggagagcattgcttgtaaaatcctgagtttccataaggaaaatgaaaactccttttaaaaataaaatctgaggagtgtacaataagcatatgctttgactttcctttgctgtggaggtttttggtttttcattgatgataaacgactacagacttagtagtggagaaatggtgtcctctagtggaagaaatagtaggctccgctattcagatgcagagcactgcagcatccagcctttcaaagctgactcttctcaatcatctgtgggtcatttgacttgattttttaagctaccctgaatttccagaatgcaggttctaaagaaatctagatgagagaaagtatttgaaaatgatttttaaatgttttttaaaagacacatctgacatttttaacaacttagtaaaagttgaaatgaccattctgtgtagtcataaaagaaacacaatgaagtgtatggcctctggagttagtcttagtaaaacttattgctctgtgtcaatgttaacctgtctcagatcaagtaattctttcactaggttgggtttggggaggggggaaaagaggggcttttcctaggagaacgataagaaatggaaagactccttgaagtgttgcaagggaacctcctagcactgtgaaagtcagaatcgcctcagcatttccatgacgcacattatgcaaatctctttagcactattttaagtttgaaaactttaacaatgaaggggaaggggaagatttccaccaactgaatcatttgtgcacgtgtatagctcaaagagcttagacttcaaatatatctggtgaatg

SEQ ID NO: 303182 - DNA, 3327 bp, Artificial Sequence
  derived and/or modified sequence
agagggaggcggggcgcgccgcgccgcgtacggccccacgcaaaggcccgcgggcaccgcgccgcccccacgcgctcgcaccggcgggcaggtgagcaggcagcgccgcgcgctagcagctggcccccgtagacgccccagccgccgcctccgcctccgcctccgccggcgcatcgcggacgcccagcaggaatgaggggagaatcatacttcatcggaatgaggagcccagggcagcagggacacgtccctgaagatggaggacttttcttactgtgctgcatagacagggactgggctgtcactcgttgttttgcagaagaagcctttcaagcaatcactgacttcaatgacctccccaactcgttgtttgcgtgcaatgttcaccagtcagtgtttgaaggagaagagagcaaggaaaaatttgagggactgtttcggacttatgatgactgtgtgacgttccagctatttaagagtttcagacgtgtccgtataaacttcagcaatcctaaatctgcagcccgagctaggatagagcttcatgaaacccaattcagagggaaaaaattaaagctctactttgcacaggttcagactccagagacagatggagacaaactgcacttggctccaccccagcctgccaaacagtttctcatctcgcccccttcctccccacctgttggctggcagcccatcaacgatgccacgccagtcctcaactatgacctcctctatgctgtggccaaactaggaccaggagagaagtatgagctccatgcagggactgagtccaccccaagtgtcgtcgtgcacgtgtgcgacagtgacatagaggaagaagaggacccaaagacttccccaaagccaaaaatcatccaaactcggcgtcctggcctgccaccctccgtgtccaactgagctgcctgctccttctcgataatagccgtctcctctttatcatgctttttccccctgttgtttgtcaaaaaaaattgcctttaaattcctgggtgtttggttgtttgagattccttccttgttatcaagcctctcggacaaaagggctaggaaaaggtgatatgtctcctgatcatatcatacccattaagtataacccattatttagaaggttctagggaaaaaagtagtattttcttattaaacaatcagcacagcctatatctttgttctctcatgttgatccaagccagagacatcagtaacaaatagcacctgtgttgtttgtgagctgtttcagtcccagtcctgatgtgtgtgcgttgttctctcctggccacttaaataggaccatatgtaaacttgactttgactgcatgagatatccctatctggtctcactcagtcctctgcatcccaacattcccaggacatgcatgatcaccagcatttattttcattatttgaggatatcttataactcacagattgtcagcatccagccatgtcctatctagattaggaaaatgatcagaatattccagctcaacaagtctgggtatattcactattgtgagtcaatacaccatagctctgttgaaattcctggaggcaaaattgaccttggccccaaagatattcctcaatagatttcaaacaccactcccctgtagaactctcccagcctcgttggggaggcttgtccagggtgatagagactgatttcagacaaacctatttattacaaaagtttcatggtgtctgaatgattgttttctctctttgtatatttgtacaaatgtttcagctgtgcttttaaaaaatctggatgttttttatttagtgattgttcgacaattagctgcttcaaaacataatgtgcattgcttatgaatgccttcatatactaatacagatactctgataatattacactctaataaggataatgctgaattttgaaaggacacaaaacatctaatgccaatatatacatgattagccaacatctttgctatcaagaccacttgtttttaaataaagatgcaagtgtcagttgtagattattgggatgaagctaaatccccagaatgcagcagcagctgagcatgttaaaatggggaaggatgatagctacatgtatgccggtcctactcacgcgacacccgtgtgctcaaaaaagttatttgtttttgttacgtgtgatttttctatttctctagcccaaagtgcattacagaagatacacctatagaaccattaccttctgctatgtgtgccaggcctcatctactcctgtacattaatgaattactttagatgcaaacgcagattacaatggagtggggaagtactttcattacccaagcctcagaaaaacacacaagaacaataacacagcaaacagattgagggattgttgtggtttttgactaaggtgtatgttagtttcatcagaaacttaaaacatagactgatcactcagaaattaaagtccgttttactgtgaatatagcaatatagtactggacacagtactggtgaaactgaggagagcattgcttgtaaaatcctgagtttccataaggaaaatgaaaactccttttaaaaataaaatctgaggagtgtacaataagcatatgctttgactttcctttgctgtggaggtttttggtttttcattgatgataaacgactacagacttagtagtggagaaatggtgtcctctagtggaagaaatagtaggctccgctattcagatgcagagcactgcagcatccagcctttcaaagctgactcttctcaatcatctgtgggtcatttgacttgattttttaagctaccctgaatttccagaatgcaggttctaaagaaatctagatgagagaaagtatttgaaaatgatttttaaatgttttttaaaagacacatctgacatttttaacaacttagtaaaagttgaaatgaccattctgtgtagtcataaaagaaacacaatgaagtgtatggcctctggagttagtcttagtaaaacttattgctctgtgtcaatgttaacctgtctcagatcaagtaattctttcactaggttgggtttggggaggggggaaaagaggggcttttcctaggagaacgataagaaatggaaagactccttgaagtgttgcaagggaacctcctagcactgtgaaagtcagaatcgcctcagcatttccatgacgcacattatgcaaatctctttagcactattttaagtttgaaaactttaacaatgaaggggaaggggaagatttccaccaactgaatcatttgtgcacgtgtatagctcaaagagcttagacttcaaatatatctggtgaatg

SEQ ID NO: 303183 - DNA, 732 bp, Artificial Sequence
  derived and/or modified sequence
atgaggggagaatcatacttcatcggaatgaggagcccagggcagcagggacacgtccctgaagatggaggacttttcttactgtgctgcatagacagggactgggctgtcactcgttgttttgcagaagaagcctttcaagcaatcactgacttcaatgacctccccaactcgttgtttgcgtgcaatgttcaccagtcagtgtttgaaggagaagagagcaaggaaaaatttgagggactgtttcggacttatgatgactgtgtgacgttccagctatttaagagtttcagacgtgtccgtataaacttcagcaatcctaaatctgcagcccgagctaggatagagcttcatgaaacccaattcagagggaaaaaattaaagctctactttgcacaggttcagactccagagacagatggagacaaactgcacttggctccaccccagcctgccaaacagtttctcatctcgcccccttcctccccacctgttggctggcagcccatcaacgatgccacgccagtcctcaactatgacctcctctatgctgtggccaaactaggaccaggagagaagtatgagctccatgcagggactgagtccaccccaagtgtcgtcgtgcacgtgtgcgacagtgacatagaggaagaagaggacccaaagacttccccaaagccaaaaatcatccaaactcggcgtcctggcctgccaccctccgtgtccaactga

SEQ ID NO: 303184 - DNA, 732 bp, Artificial Sequence
  derived and/or modified sequence
atgagaggcgagagctacttcatcggcatgagaagccccggccagcagggccacgtgcccgaggacggcggcctgttcctgctgtgctgcatcgacagagactgggccgtgaccagatgcttcgccgaggaggccttccaggccatcaccgacttcaacgacctgcccaacagcctgttcgcctgcaacgtgcaccagagcgtgttcgagggcgaggagagcaaggagaagttcgagggcctgttcagaacctacgacgactgcgtgaccttccagctgttcaagagcttcagaagagtgagaatcaacttcagcaaccccaagagcgccgccagagccagaatcgagctgcacgagacccagttcagaggcaagaagctgaagctgtacttcgcccaggtgcagacccccgagaccgacggcgacaagctgcacctggcccccccccagcccgccaagcagttcctgatcagcccccccagcagcccccccgtgggctggcagcccatcaacgacgccacccccgtgctgaactacgacctgctgtacgccgtggccaagctgggccccggcgagaagtacgagctgcacgccggcaccgagagcacccccagcgtggtggtgcacgtgtgcgacagcgacatcgaggaggaggaggaccccaagaccagccccaagcccaagatcatccagaccagaagacccggcctgccccccagcgtgagcaactag

SEQ ID NO: 303185 - protein, 439 aa, Artificial Sequence
  derived and/or modified sequence
MDGKPATRKGPDFCSLRYGLALIMHFSNFTMITQRVSLSIAIIAMVNTTQQQGLSNASTEGPVADAFNNSSISIKEFDTKASVYQWSPETQGIIFSSINYGIILTLIPSGYLAGIFGAKKMLGAGLLISSLLTLFTPLAADFGVILVIMVRTVQGMAQGMAWTGQFTIWAKWAPPLERSKLTTIAGSGSAFGSFIILCVGGLISQALSWPFIFYIFGSTGCVCCLLWFTVIYDDPMHHPCISVREKEHILSSLAQQPSSPGRAVPIKAMVTCLPLWAIFLGFFSHFWLCTIILTYLPTYISTLLHVNIRDSGVLSSLPFIAAASCTILGGQLADFLLSRNLLRLITVRKLFSSLGLLLPSICAVALPFVASSYVITIILLILIPGTSNLCDSGFIINTLDIAPRYASFLMGISRGFGLIAGIISSTATGFLISQVGPVY

SEQ ID NO: 303186 - DNA, 1320 bp, Artificial Sequence
  derived and/or modified sequence
atggatggcaagcctgccacaaggaaaggcccagacttttgctcactgcgctatggcctggcccttatcatgcacttctcaaactttacgatgatcacacagcgagtgagcctgagcatcgccatcatcgccatggtgaatactacccagcagcaaggcttatcgaacgccagcaccgagggacccgtggcagatgccttcaacaacagtagcatatcaatcaaggaattcgacacaaaggccagcgtataccaatggtcgcccgaaacccaggggattatcttttcgtctataaactacggaatcattctgactctgattccctcaggatacttggccggaatttttggtgcgaaaaagatgctgggagccggactcctaatttctagccttctgaccctcttcacgccacttgcggcagactttggggtcatactggtgatcatggtgaggactgttcagggtatggcccagggaatggcctggactggacagtttaccatctgggccaaatgggcccctccactagagcggtcgaagctgacaacaatagcgggtagcggtagcgctttcggcagcttcatcattctgtgcgtcggagggttgatctctcaggcattatcctggcccttcattttctacatattcggctctaccggttgtgtgtgttgtctgctctggttcactgtgatatatgacgacccaatgcaccatccctgtatctccgttcgagagaaagaacacatactgagctctctagcacaacagccaagctccccgggtcgcgccgtacccattaaggctatggtaacctgcctgcccttgtgggccatatttttaggttttttcagccatttctggctgtgcactattatcctgacctatctgcccacctacatctctaccctcctgcatgtcaacatccgggactccggtgtgctctcttctctgcccttcatcgcagccgcctcctgcaccatcctggggggacagcttgcagatttcctactgtcaaggaacctcctccgcctcattaccgtaaggaagctgtttagtagcctggggctccttctgccatccatttgcgctgtggctctgcctttcgtggccagcagctatgtaattactatcattttgctcatcctgatccctgggacttcaaatctctgcgactctggcttcatcattaacactttggatatagctccaagatacgcttcattcctgatgggtatctctagaggttttggcctgatcgctggcatcattagcagtactgcaactggatttttaattagtcaggttggcccggtctattag

SEQ ID NO: 303187 - DNA, 1320 bp, Artificial Sequence
  derived and/or modified sequence
atggatggcaagccagccaccaggaaaggaccagacttctgcagcctgcgctatggcctggccctgatcatgcacttcagcaacttcaccatgatcacccagagggtgtccctgagcatcgccatcatcgccatggtgaacaccacccagcagcagggcctgagcaatgccagcacagagggccctgtggctgatgccttcaacaacagcagcatcagcatcaaggagtttgacaccaaggcctctgtgtaccagtggagccctgagacccagggcatcatcttcagcagcatcaactacggcatcatcctgaccctcatccccagcggctacctggccggcatctttggagccaagaagatgctgggcgccggcctgctgatcagcagcctgctgaccctcttcacccccctggccgctgactttggagtcatcctggtgatcatggtgaggacagtgcagggcatggcccagggcatggcctggacaggccagttcaccatctgggccaagtgggccccacccctggagaggagcaagctgaccaccatcgccggcagcggcagcgccttcggcagcttcatcatcctgtgtgtgggcggcctcatcagccaggccctgtcctggcccttcatcttctacatcttcggcagcacaggctgtgtgtgctgcctgctgtggttcaccgtcatctatgatgaccccatgcaccacccctgcatctctgtgcgggagaaggagcacatcctgagcagcctggcccagcagcccagcagccctggccgggctgtgcccatcaaggccatggtgacctgcctgcccctgtgggccatcttcctgggcttcttcagccacttctggctgtgcaccatcatcctgacctacctgcccacctacatcagcaccctgctgcacgtgaacatccgggacagcggcgtgctgagcagcctgcccttcatcgccgccgccagctgcaccatcctgggcggccagctggccgacttcctgctgagcaggaacctgctgcggctcatcaccgtgaggaagctgttcagcagcctgggcctgctgctgcccagcatctgtgctgtggccctgccctttgtggccagcagctatgtgatcaccatcatcctgctgatcctgatccctggcaccagcaacctgtgtgacagcggcttcatcatcaacaccctggacatcgcccccaggtatgccagcttcctgatgggcatcagccggggcttcggcctgattgctggcatcatcagcagcacagccaccggcttcctgatcagccaggtgggccctgtgtactag

SEQ ID NO: 303188 - DNA, 1320 bp, Artificial Sequence
  derived and/or modified sequence
atggacggcaagcccgccacccggaagggccccgacttctgcagcctgcggtacgggttggccttgattatgcactttagcaattttaccatgattactcagcgcgttagcctatcaattgctatcattgccatggtgaatacaacccaacagcagggcctgagcaacgcctcgaccgaagggcctgtggcggacgcctttaacaactccagtattagcattaaagagtttgacacaaaggcctctgtttatcagtggtctccagaaacccagggcatcattttctctagtatcaattatggtatcattctgaccctcatcccctcagggtacctagccggaatctttggagcaaaaaagatgcttggtgccggcctactcatttccagtctcctcacactctttacccccttggctgcagatttcggagtgatactggttatcatggtgcgcaccgtccaggggatggcacaggggatggcttggactggacagttcacaatctgggccaagtgggcccctcccttggagcgaagcaaactgacaaccatcgctggttctggctcagctttcggttccttcattattctctgtgtgggaggattgatttcccaggctctgtcatggccctttattttttatatcttcggctccacaggttgcgtgtgctgcctgctgtggtttactgtaatatacgatgaccctatgcatcacccgtgcatctccgtcagggagaaggagcatattcttagttctttggcgcaacagccctcaagcccagggagggcagtccctataaaagctatggtgacctgcctgcccctgtgggccattttccttggcttttttagccacttctggctatgcactatcatcttaacttacctgcccacctacatctctacattactgcacgtgaacatccgggatagtggagtgctgagtagtctgccgttcatcgctgccgcttcatgcacgattctgggcgggcagcttgctgatttcctgttgagccggaaccttctgcgcctcatcacagtgaggaaactgttttcttctctaggactgctgctgccatctatatgcgccgtggccctgccttttgtggccagctcatacgtcattaccattatcctgctgatcctcatcccaggtactagtaacctttgcgattcagggtttataattaataccctagatatcgcaccacgttacgcttccttcctcatgggaatcagccgtgggtttggactgattgctggcattattagttcaacagcaaccgggtttcttataagtcaggtcggcccagtttactag

SEQ ID NO: 303189 - DNA, 1320 bp, Artificial Sequence
  derived and/or modified sequence
atggacggcaaacccgcaacacgaaaaggccctgatttctgctcactgcgctacgggctcgctctcattatgcatttctccaattttacgatgataactcagcgggtatcattgtctattgcgattatcgccatggtgaacaccactcaacagcagggcctttcaaacgcctctacagaaggcccagtggcggacgcttttaacaacagtagtatctctataaaggagtttgacactaaggcatccgtgtatcagtggtctccagagacccagggcataatcttttcttcaattaattatgggatcatcctgacattaattccgtcagggtacctcgctgggatctttggggcaaagaagatgttaggcgctggcctgttgattagcagccttcttaccctgttcacccccctggctgctgactttggcgtgatcctggtgatcatggtgagaactgtgcaaggtatggctcagggcatggcttggaccgggcagtttaccatctgggctaaatgggccccacctctggaaaggagcaagctgaccacaattgccggtagcggaagcgccttcggatcattcatcatactgtgtgtgggtgggctgatttcccaggccttgtcgtggccattcatcttctatatcttcggatcgacgggctgcgtgtgttgcctcctgtggttcacagtcatttatgacgaccccatgcaccatccctgtatcagcgtcagagaaaaagaacacatcctatcatctctggctcagcaaccgtctagtccaggacgcgctgtgcccataaaggccatggtgacgtgtctccccttgtgggctatttttctgggcttcttcagccacttctggctgtgcaccattattcttacgtatctacctacctacattagcactctgctgcatgtcaacatcagagacagtggggtgttaagctcccttccgtttatagcagcagcctcttgcaccatattagggggacagctcgccgattttctactgtcccgcaatttgctgcggctgattacggtgcgcaaattattttcttcactggggctgctcttgccgagtatctgtgctgtggccctgcccttcgtggcctccagctacgtcatcaccatcattctgctaatacttatccctgggacatccaatttatgcgactcgggattcataattaacactctggacatcgccccacgatacgctagtttcctgatgggcattagcaggggttttggcctgattgctggaatcatttctagtacggccacaggctttctgatctcccaagtcggacccgtgtattag

SEQ ID NO: 303190 - DNA, 1493 bp, Artificial Sequence
  derived and/or modified sequence
accatttcccacagaagctaaatggacgggaagcctgccaccaggaaaggtccagatttctgttcattacgctatgggctggctcttatcatgcacttctcaaacttcaccatgataacgcagcgtgtgagtctgagcattgcgatcatcgccatggtgaacaccactcagcagcaaggtctatctaatgcctccactgaggggcctgttgcagatgccttcaataactccagcatatccatcaaggaatttgatacaaaggcctctgtgtatcaatggagcccagaaactcagggtatcatctttagctccatcaactatgggataatactgactctgatcccaagtggatatttagcagggatatttggagcaaaaaaaatgcttggtgctggtttgctgatctcttcccttctcaccctctttacaccactggctgctgacttcggagtgattttggtcatcatggttcggacagtccagggcatggcccagggaatggcatggacaggtcagtttactatttgggcaaagtgggctcctccacttgaacgaagcaagctcaccaccattgcaggatcagggtcagcatttggatccttcatcatcctctgtgtggggggactaatctcacaggccttgagctggccttttatcttctacatctttggtagcactggctgtgtctgctgtctcctatggttcacagtgatttatgatgaccccatgcatcacccgtgcataagtgttagggaaaaggagcacatcctgtcctcactggctcaacagcccagttctcctggacgagctgtccccataaaggcgatggtcacatgcctaccactttgggccattttcctgggttttttcagccatttctggttgtgcaccatcatcctaacatacctaccaacgtatatcagtactctgctccatgttaacatcagagatagtggagttctgtcctccctgccttttattgctgctgcaagctgtacaattttaggaggtcagctggcagatttccttttgtccaggaatcttctcagattgatcactgtgcgaaagctcttttcatctcttgggctcctccttccatcaatatgtgctgtggccctgccctttgtggcctccagttacgtgataaccattattttgctgatacttattcctgggaccagtaacctatgtgactcagggtttatcatcaacaccttagatatcgcccccagatatgcaagtttcctcatgggaatctcaaggggatttgggctcatcgcaggaatcatctcttccactgccactggattcctcatcagtcaggttgggccagtttattgaacatcttcaagtggcaggattttgagtctggttggaggaatgtctttttcctgtctgctgcagtcaacatgtttggcctggtcttttacctcacgtttggacaagcagaacttcaagactgggccaaagagaggacccttacccgcctctga

SEQ ID NO: 303191 - DNA, 1320 bp, Artificial Sequence
  derived and/or modified sequence
atggacggcaagcccgccaccagaaagggccccgacttctgcagcctgagatacggcctggccctgatcatgcacttcagcaacttcaccatgatcacccagagagtgagcctgagcatcgccatcatcgccatggtgaacaccacccagcagcagggcctgagcaacgccagcaccgagggccccgtggccgacgccttcaacaacagcagcatcagcatcaaggagttcgacaccaaggccagcgtgtaccagtggagccccgagacccagggcatcatcttcagcagcatcaactacggcatcatcctgaccctgatccccagcggctacctggccggcatcttcggcgccaagaagatgctgggcgccggcctgctgatcagcagcctgctgaccctgttcacccccctggccgccgacttcggcgtgatcctggtgatcatggtgagaaccgtgcagggcatggcccagggcatggcctggaccggccagttcaccatctgggccaagtgggccccccccctggagagaagcaagctgaccaccatcgccggcagcggcagcgccttcggcagcttcatcatcctgtgcgtgggcggcctgatcagccaggccctgagctggcccttcatcttctacatcttcggcagcaccggctgcgtgtgctgcctgctgtggttcaccgtgatctacgacgaccccatgcaccacccctgcatcagcgtgagagagaaggagcacatcctgagcagcctggcccagcagcccagcagccccggcagagccgtgcccatcaaggccatggtgacctgcctgcccctgtgggccatcttcctgggcttcttcagccacttctggctgtgcaccatcatcctgacctacctgcccacctacatcagcaccctgctgcacgtgaacatcagagacagcggcgtgctgagcagcctgcccttcatcgccgccgccagctgcaccatcctgggcggccagctggccgacttcctgctgagcagaaacctgctgagactgatcaccgtgagaaagctgttcagcagcctgggcctgctgctgcccagcatctgcgccgtggccctgcccttcgtggccagcagctacgtgatcaccatcatcctgctgatcctgatccccggcaccagcaacctgtgcgacagcggcttcatcatcaacaccctggacatcgcccccagatacgccagcttcctgatgggcatcagcagaggcttcggcctgatcgccggcatcatcagcagcaccgccaccggcttcctgatcagccaggtgggccccgtgtactag

SEQ ID NO: 303192 - DNA, 1570 bp, Artificial Sequence
  derived and/or modified sequence
agagaacaggtcccagataccgagtccgcaactccaaacatcgcgattaataggaggcctctggtctctgcctgccctgggtgctcatggaaccagctgctgctctgcacttctccctgccagcctccctcctcctcctcctgctcctcctccttctcagcctgtgtgcactggtctcagcccagtttactgtcgtggggccagctaatcccatcctggccatggtgggagaaaacactacattacgctgccatctgtcacccgagaaaaatgctgaggacatggaggtgcggtggttccggtctcagttctcccccgcagtgtttgtgtataagggtgggagagagagaacagaggagcagatggaggagtaccggggaagaatcacctttgtgagcaaagacatcaacaggggcagcgtggccctggtcatacataacgtcacagcccaggagaatgggatctaccgctgttacttccaagaaggcaggtcctacgatgaggccatcctacgcctcgtggtggcagaatcctttatgcccagcgcatctccctggatggtggccctagctgtcatcctgaccgcatctccctggatggtgtccatgactgtcatcctggctgttttcatcatcttcatggctgtcagcatctgttgcatcaagaaacttcaaagggaaaaaaagattctgtcaggggaaaagaaagttgaacaagaggaaaaagaaattgcacagcaacttcaagaagaattgcgatggagaagaacattcttacatgctgggtatgagctgcctgggatcaggggaccttcatggaaacggccactacatggggaacccccttcagctttctgagacttctctggggaccaggaaccacacaatccccagggttcctgagaccccaggcataaacctgagacttcctctgcagctgatgtggtcctggatccagacaccgctcatcccgagctcttcctgtcagaggaccggagaagtgtgaggcggggcccctacaggcagagagtgcctgacaacccagagagattcgacagtcagccttgtgtcctgggatgggagagcttcgcctcagggaaacattactgggaggtggaggtggaaaacgtgatggtgtggactgtgggggtctgcagacacagtgttgagaggaaaggggaggtcctgctgattcctcagaatggcttctggaccctggagatgtttggaaaccaataccgggccctgtcctcccctgagaggattctccctttgaaggagtccctttgccgggtgggcgtcttcctggactatgaagctggagatgtctccttctacaacatgagggacagatcgcacatctacacatgtccccgttcagcctttactgtgcctgtgaggcccttcttcaggttagggtctgatgacagccccatcttcatctgccctgcactcacaggagccagtggggtcatggtgcctgaagagggcctgaaacttcacagagtggggacccaccagagcctatagaatcaattccttggactcacagccatgcagataagccctgg

SEQ ID NO: 303193 - DNA, 3759 bp, Artificial Sequence
  derived and/or modified sequence
atgccaaaaattaatagttttaattataatgatcctgttaatgatagaacaattttatatattaaaccaggcggttgtcaagaattttataaatcatttaatattatgaaaaatatttggataattccagagagaaatgtaattggtacaaccccccaagattttcatccgcctacttcattaaaaaatggagatagtagttattatgaccctaattatttacaaagtgatgaagaaaaggatagatttttaaaaatagtcacaaaaatatttaatagaataaataataatctttcaggagggattttattagaagaactgtcaaaagctaatccatatttagggaatgataatactccagataatcaattccatattggtgatgcatcagcagttgagattaaattctcaaatggtagccaagacatactattacctaatgttattataatgggagcagagcctgatttatttgaaactaacagttccaatatttctctaagaaataattatatgccaagcaatcacggttttggatcaatagctatagtaacattctcacctgaatattcttttagatttaatgataatagtatgaatgaatttattcaagatcctgctcttacattaatgcatgaattaatacattcattacatggactatatggggctaaagggattactacaaagtatactataacacaaaaacaaaatcccctaataacaaatataagaggtacaaatattgaagaattcttaacttttggaggtactgatttaaacattattactagtgctcagtccaatgatatctatactaatcttctagctgattataaaaaaatagcgtctaaacttagcaaagtacaagtatctaatccactacttaatccttataaagatgtttttgaagcaaagtatggattagataaagatgctagcggaatttattcggtaaatataaacaaatttaatgatatttttaaaaaattatacagctttacggaatttgatttagcaactaaatttcaagttaaatgtaggcaaacttatattggacagtataaatacttcaaactttcaaacttgttaaatgattctatttataatatatcagaaggctataatataaataatttaaaggtaaattttagaggacagaatgcaaatttaaatcctagaattattacaccaattacaggtagaggactagtaaaaaaaatcattagattttgtaaaaatattgtttctgtaaaaggcataaggaaatcaatatgtatcgaaataaataatggtgagttattttttgtggcttccgagaatagttataatgatgataatataaatactcctaaagaaattgacgatacagtaacttcaaataataattatgaaaatgatttagatcaggttattttaaattttaatagtgaatcagcacctggactttcagatgaaaaattaaatttaactatccaaaatgatgcttatataccaaaatatgattctaatggaacaagtgatatagaacaacatgatgttaatgaacttaatgtatttttctatttagatgcacagaaagtgcccgaaggtgaaaataatgtcaatctcacctcttcaattgatacagcattattagaacaacctaaaatatatacatttttttcatcagaatttattaataatgtcaataaacctgtgcaagcagcattatttgtaagctggatacaacaagtgttagtagattttactactgaagctaaccaaaaaagtactgttgataaaattgcagatatttctatagttgttccatatataggtcttgctttaaatataggaaatgaagcacaaaaaggaaattttaaagatgcacttgaattattaggagcaggtattttattagaatttgaacccgagcttttaattcctacaattttagtattcacgataaaatcttttttaggttcatctgataataaaaataaagttattaaagcaataaataatgcattgaaagaaagagatgaaaaatggaaagaagtatatagttttatagtatcgaattggatgactaaaattaatacacaatttaataaaagaaaagaacaaatgtatcaagctttacaaaatcaagtaaatgcaattaaaacaataatagaatctaagtataatagttatactttagaggaaaaaaatgagcttacaaataaatatgatattaagcaaatagaaaatgaacttaatcaaaaggtttctatagcaatgaataatatagacaggttcttaactgaaagttctatatcctatttaatgaaattaataaatgaagtaaaaattaataaattaagagaatatgatgagaatgtcaaaacgtatttattgaattatattatacaacatggatcaatcttgggagagagtcagcaagaactaaattctatggtaactgataccctaaataatagtattccttttaagctttcttcttatacagatgataaaattttaatttcatattttaataaattctttaagagaattaaaagtagttcagttttaaatatgagatataaaaatgataaatacgtagatacttcaggatatgattcaaatataaatattaatggagatgtatataaatatccaactaataaaaatcaatttggaatatataatgataaacttagtgaagttaatatatctcaaaatgattacattatatatgataataaatataaaaattttagtattagtttttgggtaagaattcctaactatgataataagatagtaaatgttaataatgaatacactataataaattgtatgagagataataattcaggatggaaagtatctcttaatcataatgaaataatttggacattgcaagataatgcaggaattaatcaaaaattagcatttaactatggtaacgcaaatggtatttctgattatataaataagtggatttttgtaactataactaatgatagattaggagattctaaactttatattaatggaaatttaatagatcaaaaatcaattttaaatttaggtaatattcatgttagtgacaatatattatttaaaatagttaattgtagttatacaagatatattggtattagatattttaatatttttgataaagaattagatgaaacagaaattcaaactttatatagcaatgaacctaatacaaatattttgaaggatttttggggaaattatttgctttatgacaaagaatactatttattaaatgtgttaaaaccaaataactttattgataggagaaaagattctactttaagcattaataatataagaagcactattcttttagctaatagattatatagtggaataaaagttaaaatacaaagagttaataatagtagtactaacgataatcttgttagaaagaatgatcaggtatatattaattttgtagccagcaaaactcacttatttccattatatgctgatacagctaccacaaataaagagaaaacaataaaaatatcatcatctggcaatagatttaatcaagtagtagttatgaattcagtaggaaataattgtacaatgaattttaaaaataataatggaaataatattgggttgttaggtttcaaggcagatactgtagttgctagtacttggtattatacacatatgagagatcatacaaacagcaatggatgtttttggaactttatttctgaagaacatggatggcaagaaaaataa

SEQ ID NO: 303194 - DNA, 1185 bp, Artificial Sequence
  derived and/or modified sequence
atggcaaatatgcagggactcgtggagaggttagaaagagcggttagccgcttggagagtctgtccgcagaatcacaccgacctcccggcaactgtggagaagtgaatggcgtgattgccggtgtggccccttctgtggaagccttcgataaactgatggactcaatggttgctgagttcctcaagaatagccgaatcctggcaggcgatgtggagacccatgccgaaatggtgcactctgcctttcaggcccaaagggccttcctcctgatggccagtcagtatcaacagcctcatgaaaatgatgtagctgccctgttgaagcccatttctgaaaaaatacaggagatccagaccttcagggagaggaacaggggaagcaacatgtttaatcacctgtcggcggtgtcagaaagtatacccgcgctgggttggatcgctgttagtcccaaaccacccccactgcctccaccaggaccgcctcccctattcgagaacgagggaaagaaggaggagtcatccccttcgaggagcgcactgttcgcccagcttaaccagggtgaggctattacaaaagggctccggcacgtgacggatgatcaaaagacatataagaatcccagtttgagagcccaaggcggccagacccagtcacccacaaagtctcacacaccatcgcccactagtcctaaaagctacccatcacagaagcatgcaccagtcttggagttggaaggaaagaagtggcgcgtggagtatcaagaggacagaaacgatctagttataagcgagacagaactgaagcaggtggcatatatcttcaaatgcgagaagagtacaatccagattaaaggaaaagtgaattccattatcatcgacaactgcaagaaactgggactcgtctttgataatgtggtgggaatcgtagaggtcataaatagccaggacatccagatccaagtcatggggcgggttccaaccatttccatcaacaagaccgaggggtgtcacatttacctatctgaggacgctcttgactgcgagatcgtgtccgcaaaaagctctgagatgaatattctcattcctcaagatggtgactacagggaatttcctatccctgaacagttcaagacggcctgggatggttcaaagctcattaccgagccggcggagatcatggcctag

SEQ ID NO: 303195 - DNA, 1185 bp, Artificial Sequence
  derived and/or modified sequence
atggccaacatgcagggcctggtggagcggctggagagagctgtgtcccggctggagagcctgtctgctgagagccaccggcccccaggcaactgtggggaggtgaatggagtgattgctggggtggcccccagcgtggaggcctttgacaagctgatggacagcatggtggccgagttcctgaagaacagccgcatcctggccggagatgtggagacccatgctgagatggtgcacagcgccttccaggcccagagggccttcctgctgatggccagccagtaccagcagccccatgaaaatgatgtggccgccctgctgaagcccatcagcgagaagatccaggagatccagaccttccgggagaggaacagaggcagcaacatgttcaaccacctgtctgctgtgtctgagagcatcccagccctgggctggattgctgtgagccccaagcccccacccctgcccccacctggccccccacccctgtttgaaaatgaaggcaagaaggaggagagcagccccagccgcagcgccctgtttgcccagctgaaccagggcgaggccatcaccaagggcctgcggcacgtgacagatgaccagaagacctacaagaaccccagcctgcgggcccagggcggccagacccagagccccaccaagagccacacccccagccccaccagccccaagagctaccccagccagaagcacgcccctgtgctggagctggagggcaagaagtggagggtggagtaccaggaggacagaaatgacctggtgatcagcgagacagagctgaagcaggtggcctacatcttcaagtgtgagaagagcaccatccagatcaagggcaaggtgaacagcatcatcatcgacaactgcaagaagctgggcctggtgtttgacaacgtggtgggcatcgtggaggtgatcaacagccaggacatccagatccaggtgatgggccgggtgcccaccatcagcatcaacaagacagagggctgccacatctacctgtctgaagatgccctggactgtgaaattgtgtctgccaagagcagcgagatgaacatcctgatcccccaggatggagactaccgggagttccccatccctgagcagttcaagacagcctgggatggcagcaagctgatcacagagcctgctgagatcatggcctag

SEQ ID NO: 303196 - DNA, 1185 bp, Artificial Sequence
  derived and/or modified sequence
atggccaacatgcagggcctggtggagcggctggagcgggccgtgtccaggctcgagagtctgtctgctgagagccaccgcccaccaggaaattgtggcgaggtgaatggcgttattgctggagtggctccctcggtggaagccttcgacaagctcatggactccatggtggctgagtttttgaaaaatagtaggattctggctggcgacgtggagacacacgcagaaatggtgcactcagcttttcaggcccagcgcgcatttctcctgatggcctcacagtatcagcagccgcacgagaatgacgtcgctgctctgcttaaaccaatttctgaaaagatccaggaaattcagactttccgcgagcggaacaggggatcaaatatgtttaaccacctgagtgctgtcagtgagagcattcccgccttgggctggatcgccgttagtcccaagcctccgcccttgcctccaccaggcccccccccgctgttcgaaaacgaggggaaaaaagaggaatccagcccctctcggagcgctctgtttgcacagttaaatcaaggagaggccatcactaagggcctcaggcatgtaacagacgatcagaaaacatataagaatccttcactccgagcccaaggcggacagacccagtcacctacaaaatcccacacgcccagtcccacgtctccaaaaagctatccgtcccaaaagcacgctcctgtgctggaactggaggggaaaaagtggcgtgtggaataccaggaggacagaaatgatcttgtgattagcgagactgaactgaaacaggtagcctatatttttaagtgcgaaaaaagtaccattcagatcaaaggaaaagttaatagcattatcatcgataattgcaaaaagctgggtctggtgtttgacaacgtggtcgggattgtcgaagtgattaactcccaagacattcagatccaggtcatgggccgtgtgccgacaattagtatcaacaagactgaaggctgtcacatctatctcagcgaggatgccttggattgcgagatagtctctgccaagtcatcagaaatgaatatactgatacctcaagacggggactatcgggaatttccaatccctgaacagttcaagaccgcatgggacggcagcaagctaattactgagcccgccgaaattatggcctag

SEQ ID NO: 303197 - DNA, 1185 bp, Artificial Sequence
  derived and/or modified sequence
atggctaacatgcaaggacttgttgaacgactcgagcgggcagttagcagactggaatctctgtctgctgaaagtcatcgtcctcctggcaattgcggcgaggtgaacggcgttatcgctggcgtggccccatcggtggaagcattcgacaaattgatggactcaatggtggccgagttcctgaagaacagtcgaatccttgcaggtgacgtggaaactcacgccgagatggtgcacagcgcctttcaggcacagagggccttcctcctgatggcttcacagtaccagcagccccacgagaatgatgtggccgctcttcttaagcctatttcagagaagatccaggaaatacagacctttcgggagagaaatcggggaagcaacatgtttaatcacctctcggctgtgagcgagagcatccctgctctcggttggattgccgtcagccctaaaccgcctcctctcccgccacctggacctccccctttattcgagaatgaaggaaaaaaagaggagtcgtccccctctagaagcgctctgtttgcccagctgaaccagggcgaagcaattacgaagggcctaagacacgtcacggatgaccagaagacctacaagaatcctagtttgcgcgctcagggagggcaaacacagagcccaaccaagtcgcacacaccctcacccacaagtccaaaaagctatccatcacagaagcacgcacctgtcttagagctcgagggcaagaagtggagagtcgagtatcaagaggatcgcaatgatctggtcatctctgaaacagagctgaaacaggtcgcttatatcttcaaatgcgagaaatctacaattcaaatcaaaggcaaagtgaattccattatcattgacaactgcaaaaaactgggactggtattcgacaatgtcgtgggaatcgtggaagtgataaacagccaggatattcagatacaggttatgggacgggtccctacaattagtattaacaagactgagggctgccacatatacttgtccgaagatgctctggattgcgaaatagtgtcagccaaatcatctgagatgaacattcttataccgcaggacggcgactatagggagtttcccatcccagagcaattcaagacagcctgggatggttcaaaactcatcaccgaaccagccgagatcatggcgtag

SEQ ID NO: 303198 - DNA, 2686 bp, Artificial Sequence
  derived and/or modified sequence
gactctcccctggagcagcgtgactgacaccggctcctattcagctgggaggagggagaggggaggagaaggggagggccgcgggaggagggtacgagtggccgaccacggatttgcattgccgaggacgggaccccagggcagcgaagcagaatggccaacatgcagggactggtggaaagactggaacgagctgtcagccgcctggagtcgctgtctgcagagtcccacaggccccctgggaactgcggggaagtcaatggtgtcattgcaggtgtggcaccctccgtggaagcctttgacaagctgatggacagtatggtggccgagtttttaaagaacagtaggatccttgctggggacgtggagacccatgcagaaatggtgcacagtgctttccaggcccagcgggctttccttctgatggcctctcagtaccaacaaccccacgagaatgacgtggccgcacttctgaaacccatatcggaaaagattcaggaaatccaaactttcagagagagaaaccgggggagtaacatgtttaatcatctttcggccgtcagcgaaagcatccctgcccttggatggatagctgtgtctcccaaacctcctcctctgcctcctccagggccacctccacttttcgagaatgaaggcaaaaaagaggaatcttctccttcacgctcagctttatttgcccaacttaaccagggagaagcaattacaaaagggctccgccatgtcacagatgaccagaagacatacaaaaatcccagcctgcgggctcaaggagggcaaactcaatctcccaccaaaagtcacactccaagtcccacatctcctaaatcttatccttctcaaaaacatgccccagtgttggagttggaaggaaagaaatggagagtggagtaccaagaggacaggaatgaccttgtgatttcagagactgagctgaaacaagtggcttacattttcaaatgcgaaaaatcaactattcagataaaagggaaagtaaactccattataattgacaactgtaaaaaactcggcctggtgtttgacaatgtggtgggcattgtggaagtgatcaactcccaggacattcaaatccaggtaatggggagagtgccaacaatttccattaataagacagaaggttgccacatatacctcagtgaagatgcattagactgtgagatcgtgagcgccaagtcatctgaaatgaacatacttatccctcaggatggtgattatagagaatttcccattcctgaacagttcaagacagcatgggatggatccaagttaatcactgaacctgcagaaattatggcctaacttcctgagagaccgaaccccctcacctgaatccccctctatcaaacaaacaaaaaagcagcagtaaagagctagaagttgcagtagcccctactgctttagctttggcctccaacgattctgtgctatagatacagcactgtttctggcacgcctcgtgggcattttgaaatatttaacgtttcctcatgatttgcctttgtgtgtgattttagttccacatgatgacttgtgaacattagggatttaaaggaaaaaaaaaaagaattctgttcccctcatatcatgaacacagtaactgataggtaaaaagactgcatgattcacttttacacttatatttcattgctagttaaaaaataaaacctttgagaatctaagatgtacatttttaccttttaggcaatttcaatataatgtagaagtagtagtgtgccctgaaaaatgtacacgttttttcttattgttaccacatgttcacctttatcagcgtggatactgtcagcatgagtacatatttcaacccacgcttgtaaaagacataagagtttataaaggaccaaattcagttccttggtccttggaagacctatattctctgtagttactgaaaaccgaaagtcaattctaattattcatcttacatatttttccaccatgtcatttgaaaacttgcttttcttctgcataagagattcttatgccaaaaacattaaacagaagaaatcattttttttgctatgtaatacctcgcaactttgctctaaaatcaagctcagttattattttccaagtttgaacatgttaaatatcagatgccttgtaaattatgtctttaacgttttcttatagactaatttcctcttttccacctgccagacttgctaaccaagctcgaaaatgaacatgaaaaagccatacatgtattatttctcctaaaacctaaggcattatctgttggtttggcttgctgctcctattttgtagtcttgatagtagatgcttcttcagcgtaagagtagctatgatattcctttttatcttttcagtacatagtgctgaaaaatctgcaacttcttggatcatatttaatgaattatagtataatgcttgcaggcccagtacaagcatatatattgtgcctcttacagcctttggaatacattgtttccattttttaaatatcttctatatccatatagtattcaaattattaatgctcatgtaccaaggttttgctataaaagttttgtctgtatgaataatgtggctttagtaaataatcatttttcaactgtaaacttattctgaaataaagtaaaattctaattgtttaaatactgtgatg

SEQ ID NO: 303199 - DNA, 1185 bp, Artificial Sequence
  derived and/or modified sequence
atggccaacatgcagggcctggtggagagactggagagagccgtgagcagactggagagcctgagcgccgagagccacagaccccccggcaactgcggcgaggtgaacggcgtgatcgccggcgtggcccccagcgtggaggccttcgacaagctgatggacagcatggtggccgagttcctgaagaacagcagaatcctggccggcgacgtggagacccacgccgagatggtgcacagcgccttccaggcccagagagccttcctgctgatggccagccagtaccagcagccccacgagaacgacgtggccgccctgctgaagcccatcagcgagaagatccaggagatccagaccttcagagagagaaacagaggcagcaacatgttcaaccacctgagcgccgtgagcgagagcatccccgccctgggctggatcgccgtgagccccaagcccccccccctgcccccccccggccccccccccctgttcgagaacgagggcaagaaggaggagagcagccccagcagaagcgccctgttcgcccagctgaaccagggcgaggccatcaccaagggcctgagacacgtgaccgacgaccagaagacctacaagaaccccagcctgagagcccagggcggccagacccagagccccaccaagagccacacccccagccccaccagccccaagagctaccccagccagaagcacgcccccgtgctggagctggagggcaagaagtggagagtggagtaccaggaggacagaaacgacctggtgatcagcgagaccgagctgaagcaggtggcctacatcttcaagtgcgagaagagcaccatccagatcaagggcaaggtgaacagcatcatcatcgacaactgcaagaagctgggcctggtgttcgacaacgtggtgggcatcgtggaggtgatcaacagccaggacatccagatccaggtgatgggcagagtgcccaccatcagcatcaacaagaccgagggctgccacatctacctgagcgaggacgccctggactgcgagatcgtgagcgccaagagcagcgagatgaacatcctgatcccccaggacggcgactacagagagttccccatccccgagcagttcaagaccgcctgggacggcagcaagctgatcaccgagcccgccgagatcatggcctag

SEQ ID NO: 303200 - DNA, 852 bp, Artificial Sequence
  derived and/or modified sequence
atggatctgtggccgggcgcctggatgctgctcttactcttgttccttctgctcctttttctcctgcccactctgtggttctgctcaccctccgcaaaatacttttttaaaatggctttttacaatggctggatcctatttctggctgttctggctatccccgtgtgtgcggtgagaggcaggaatgtggaaaatatgaagattctcaggctcatgctgctgcacatcaagtatctttacggcattagggtcgaggtgcgcggggcgcatcactttccaccctctcagccatatgtagtagtatctaatcaccagagctccctcgacctgctgggcatgatggaggttcttccagggcggtgtgtgccgatcgccaaaagagagcttctgtgggctgggagtgcaggcctggcctgctggctggcgggcgtgatctttatcgaccgcaaacggacaggcgatgccatcagcgtgatgtcagaggttgcccagacactacttacccaggacgtgcgcgtgtgggtcttccctgaaggcacaagaaatcataacggctctatgcttcccttcaagcgcggggcctttcacctggccgtgcaagcacaggtgcccattgtgcctatcgttatgtcctcatatcaggacttctactgcaaaaaggagcgcagattcacatccggccagtgtcaggtccgtgttttgcccccggtgccaactgaaggcctgactccagacgacgtacccgcactggccgaccgcgtaaggcattcaatgctgacagtgttccgtgaaatctccactgatggacgtgggggaggagactatctcaagaagccaggcggcggcggctag

SEQ ID NO: 303201 - DNA, 852 bp, Artificial Sequence
  derived and/or modified sequence
atggatttgtggccaggcgcttggatgttacttttgttactgtttcttctgctgttattccttttgccaaccctatggttttgtagcccttctgcaaaatacttctttaaaatggcattctacaatgggtggatcctgttcctcgcggtgctggccattccagtgtgcgctgtacgggggcggaacgtagagaatatgaagattctgcggctgatgctgctgcatatcaagtacctttatggaattcgggtggaggtgcgaggcgcacaccatttcccaccttcccagccttatgtagtggtgagcaatcatcaatccagcctggacctgctgggcatgatggaggtgctgccaggccggtgcgtgcctattgctaagagagagcttctctgggcaggaagcgccgggctggcatgctggttggctggagttatttttattgatagaaaacgtactggcgatgccatctctgtcatgagcgaagtggcccagacccttctgacacaggatgtgagggtctgggtgtttcccgaaggcactagaaatcataacggcagtatgttacctttcaaaagaggcgcctttcatctcgctgtgcaggcacaagtgcctatcgtgcccattgtgatgtcgtcataccaggacttttactgcaagaaggaaaggagatttactagtgggcagtgccaggtgagggtcctgccaccagtgcctaccgagggcctgactcctgatgacgtgccagcgctggccgacagagtgagacacagcatgctcacggtgtttcgggagatatcaacggacggcagggggggaggggactaccttaaaaaacctggaggcgggggttag

SEQ ID NO: 303202 - DNA, 852 bp, Artificial Sequence
  derived and/or modified sequence
atggatctgtggcctggtgcttggatgcttttacttctgctttttctgcttctccttttcctacttccaactctctggttttgttcccccagtgcaaaatactttttcaagatggccttttataacggttggatcttattccttgcagtcctggccatcccagtgtgtgcggtgcggggtcgcaacgtagagaacatgaagatactacggttgatgctgctgcatatcaaatatctgtacggtataagggtggaggttaggggggcccatcatttccccccttctcagccgtatgttgtggtttctaatcatcaatccagtcttgatctcctggggatgatggaagttctcccgggtcggtgtgtgccgattgccaagcgggagctgctttgggcaggatccgccggactggcttgttggctggctggggtgatcttcatcgaccggaagagaacaggcgacgctattagtgtgatgagcgaagtggcccagacactgctgacccaggatgtgcgtgtgtgggtttttcccgaaggcacccgaaaccataacggatccatgctaccatttaagcggggggcatttcacctggctgttcaagctcaggttcctatcgttccgatcgtaatgtccagttaccaagacttttactgtaagaaggaacggcggtttacgtcaggacagtgccaggtccgcgtactcccacccgtccctaccgagggactgaccccggatgacgtgccggcactggcagaccgcgttcgtcacagcatgctgaccgtcttccgagagatcagcaccgacgggcggggcgggggtgattacttaaagaaacctggcgggggaggctag

SEQ ID NO: 303203 - DNA, 852 bp, Artificial Sequence
  derived and/or modified sequence
atggacctgtggcccggagcatggatgctgttactcctcctcttccttctgttgctcttccttttgcctacgctgtggttctgtagtccatcagccaagtacttcttcaaaatggctttttacaacgggtggattttgtttctcgcggtcctcgcaattcctgtgtgcgcggtaaggggtaggaacgtggaaaatatgaaaatcctccgactcatgttactgcatatcaagtacctgtacggcattagagttgaggtccgaggtgctcaccacttcccgccctcacagccctacgtcgtagtaagtaaccaccagagcagcctggatttactcggcatgatggaagtgctgcctggacggtgtgtccctatcgcaaaaagggagcttctgtgggcaggttccgcaggcttagcctgttggctggccggagtgatatttatcgaccgtaaacgtactggagacgcaatcagcgtcatgagtgaggtcgcccagacgctcttgacacaagatgttcgggtgtgggtgtttccagagggcactaggaatcacaacggaagcatgttacctttcaaacgtggcgccttccacctcgcggttcaggcgcaggtcccaatcgtgcctatcgtgatgagcagttaccaggatttttactgcaagaaagagcgcaggtttaccagcggtcagtgccaggtcagggttctgccccctgtaccaactgagggcctgacccccgatgacgttcccgctctggccgaccgggtgcgccactcaatgctgaccgtgtttagagaaatctccaccgatggaaggggcggcggtgactatcttaagaagcccggcggcgggggctag

SEQ ID NO: 303204 - DNA, 852 bp, Artificial Sequence
  derived and/or modified sequence
atggacctgtggcccggggcttggatgctcttgttactgctgtttctcttgctcttatttctcctcccaaccctctggttttgttccccttctgccaaatacttttttaagatggccttctacaacggctggatcctatttctggccgtgctcgcaatccccgtgtgcgcagtccgagggaggaacgtcgagaatatgaaaatcctacgcctcatgctgctccatatcaagtacctctacggaattagagttgaggtacgaggtgcacatcatttccccccctcccagccttatgttgtggtgagtaaccatcaatccagtcttgacttactcgggatgatggaagtgctgccgggtaggtgtgtgcccattgctaaaagagaacttctgtgggctggaagtgctgggctggcatgttggctggctggcgtcattttcattgataggaagcgaactggcgatgcaattagcgtgatgagtgaagtggctcagactctactcacacaggacgtaagggtgtgggtgtttccagaaggaactcggaatcacaatggctccatgctgcctttcaagagaggtgctttccatttggctgttcaggcgcaggtgccaatcgtgccaatagttatgtcatcctatcaggacttctattgcaaaaaggaacgtaggttcacctccggacagtgtcaggtccgcgtcctcccaccggtccctactgaggggctcactcctgatgatgtgcccgccctggccgaccgagtgaggcatagcatgttaaccgtgttccgcgaaatctcaacagacggacgcggggggggggactatctgaagaaaccaggaggcggtggatag

SEQ ID NO: 303205 - DNA, 852 bp, Artificial Sequence
  derived and/or modified sequence
atggatttgtggcctggggcatggatgctgctgcttctgctttttctgctgctgctgttcttgctgccgacgttatggttctgtagccccagtgccaaatactttttcaaaatggccttctataacggctggatactttttctggccgttttggcgatcccagtctgtgcggttagggggcgtaacgtagagaatatgaagatactccgcctaatgctgctacacattaagtacttatacggaatccgggttgaggttaggggtgcccatcacttcccgccgagtcaaccatacgtggttgtgagcaatcatcagagctccctggatttactggggatgatggaggtgctgccaggacgatgcgtgcctattgctaaacgagaactgctctgggccggcagcgctggccttgcttgctggctggccggcgtaatttttatcgaccgaaagaggaccggggacgctatctcggtgatgagtgaagtggcccagactctgctgacgcaagacgttcgcgtgtgggtgtttcccgagggcactcgaaatcacaatgggagcatgctgcccttcaagaggggggctttccacctggcagtccaggcacaggttcccatcgttcctattgtgatgtctagctatcaggatttctactgcaagaaagagcgccgatttacaagcggccagtgtcaggtgcgcgtcttgcccccagttccaaccgagggacttacaccagatgacgtgccagcgttagccgaccgtgttaggcactcgatgttgaccgtcttcagggagatctctacggacggacgcggcgggggagactacctcaagaaacccggaggaggtggctag

SEQ ID NO: 303206 - DNA, 852 bp, Artificial Sequence
  derived and/or modified sequence
atggacctctggcctggcgcatggatgctgctacttctgctctttctcttgctgctgttcctcctccctactctgtggttctgcagtcccagcgctaagtactttttcaagatggcattctataatgggtggattctctttctggccgtactggcaattccggtgtgcgccgtccggggcaggaatgtagaaaacatgaaaatcttgaggcttatgctgctgcatataaagtatctgtacggtattagggtcgaagtcaggggcgcacatcactttccacccagccagccctacgtagttgttagcaaccatcagtcctccctggatcttctgggcatgatggaagtcctgcctggtcgatgcgtccccattgccaaaagagaattgctgtgggctgggagtgccgggctggcttgctggttggcgggagtgattttcatcgatagaaaaagaaccggcgatgccatctcggtcatgtctgaggttgcccagaccctgttgacgcaagacgtgcgcgtctgggttttcccagaaggaacaaggaaccacaacggctccatgcttccttttaagagaggcgcctttcatctggcagtccaggcacaggtgcctattgtgcccatcgtgatgagctcctaccaggacttctactgcaagaaagagaggcggttcaccagcgggcagtgccaggttagggtactgccccccgtgcccactgaagggctgacccctgacgatgttcccgccctcgccgatagggtaagacactccatgcttaccgtgtttagagaaatttctactgatggccgggggggaggggactacttgaagaagccagggggcggcggttag

SEQ ID NO: 303207 - DNA, 852 bp, Artificial Sequence
  derived and/or modified sequence
atggacctgtggcccggcgcctggatgcttctgctgcttctgttcttactgctcctgttcttgctccctaccctgtggttttgctctccatcagcaaaatacttctttaaaatggccttctataacggatggatcttgttcttggccgtgcttgcaattccagtctgcgccgtgaggggaaggaacgtggagaatatgaagatacttcgactgatgcttctccacatcaaatacttgtacggcattcgcgttgaagtcagaggagcgcatcacttccctcccagccaaccgtacgtcgtcgtctctaatcaccagtcgtccttagacctgctgggaatgatggaagtactccctggccggtgtgtaccaattgctaaacgcgagctactatgggcaggtagtgcaggtttggcatgctggctggctggggttatattcattgatcgcaaaaggacaggtgacgcaatatccgtgatgtcagaggtagcccaaacccttcttacgcaggacgtgcgcgtttgggtgtttcccgaagggactcgcaaccataatggtagtatgctcccattcaaacgaggggctttccatcttgccgtgcaggcacaggtgcccatcgtaccaattgtcatgagctcctaccaggatttctattgtaagaaggaacgtaggttcactagcggtcaatgccaagttagggtcctgccacctgtgcccacggagggccttaccccagacgacgtgccagccctggctgacagggtccggcacagcatgctgaccgttttcagggaaatctcaacagacggccgaggcggaggcgactacctgaaaaagcctggtggcggcggttag

SEQ ID NO: 303208 - DNA, 852 bp, Artificial Sequence
  derived and/or modified sequence
atggacctgtggccaggagcctggatgttgctacttttactgtttctcctgctcctttttctgctgcctaccttgtggttttgcagccccagtgccaagtactttttcaagatggcattctacaatggatggattttatttctcgccgtcctggcaatcccagtctgtgccgtgcgtggaagaaatgtcgaaaacatgaagatccttagactgatgctcctgcacataaagtatctgtatggtatacgagttgaggtgagaggcgcccatcattttcctccaagccagccttatgtcgtcgtgagcaaccatcaatcgtcattggaccttttagggatgatggaagtactaccagggagatgcgtgcccatcgctaagcgtgagctgctatgggccgggtcagcaggtcttgcctgctggctggccggggttatatttatagacaggaagaggacaggcgatgctatttctgtcatgtccgaagtggctcagactctgctgacccaggatgtgagagtctgggtatttcctgagggtactcggaatcataatggctcgatgctcccttttaaacgaggtgccttccatctcgctgttcaggcacaggttccgattgtgcccatagtcatgagtagctatcaggatttctactgtaagaaggagcgtcggttcacgtcgggccaatgtcaggtacgagtcctccccccagtaccgactgagggtctcacccccgatgacgtcccggcccttgccgaccgggtgaggcactctatgctgactgtatttagagagatcagcaccgatggaagaggaggcggagactatctgaagaaacccggaggcggtggttag

SEQ ID NO: 303209 - DNA, 852 bp, Artificial Sequence
  derived and/or modified sequence
atggacctttggccaggtgcatggatgctgttgctgctcttgtttttactactcttgtttctgctgcccacattgtggttttgttcccccagtgcaaagtatttctttaaaatggccttttacaatggatggatactgttccttgcagtcctggcaatccccgtgtgtgccgtaaggggccgcaatgttgagaatatgaaaattctccgcttgatgctgctccacatcaagtatttatacggcattcgcgtggaggttcgaggagcccaccactttcctccctcacagccttatgtcgtggtgagtaaccaccagagtagtctcgacctcttggggatgatggaagtgctgcccgggaggtgtgtgcctatcgccaaacgagaactgctctgggccggctctgctggactcgcatgctggctagctggggtaatttttattgaccgcaaaagaacaggcgacgccatctcagtgatgagtgaggtagcgcagacactccttactcaggatgtccgggtgtgggtctttccagagggaacaaggaatcacaacggaagcatgctgccatttaagaggggcgccttccacctggccgtgcaggctcaggtgccaatcgtaccaatcgtgatgtcatcctaccaggacttctattgcaagaaggagaggcgctttacatccggacagtgccaggtgagggtcctgccgcctgtcccaaccgagggacttacacccgatgacgtgccagccctggctgatagagtgcgacacagtatgctgaccgtctttagagagatcagtacagacggccgaggggggggagactatctgaaaaagcccgggggtggcgggtag

SEQ ID NO: 303210 - DNA, 852 bp, Artificial Sequence
  derived and/or modified sequence
atggatctgtggcccggcgcctggatgctcctccttcttctgtttttgttgctcctgtttctgctgccaacgttgtggttttgctcgccctccgcgaaatatttctttaaaatggctttctataatggctggattctgttcttggctgtattggccattcctgtatgcgccgtacggggaagaaacgtagaaaacatgaagatcttgaggttgatgctcctgcatattaaatacctgtatggcatccgagttgaggtcagaggggcacatcacttccccccctcccagccttacgtcgtggttagcaaccatcagtcttctctcgacctgctcgggatgatggaagtcctgcccggtcgttgcgtaccgatagctaagcgcgaactgctctgggccggttctgccggcctggcatgttggctagctggtgtgatctttattgaccgcaaaaggaccggcgacgctatttcggtcatgtctgaggtcgctcagacactactcacacaggatgtccgggtgtgggtgttcccagaaggcactaggaatcataacggctcaatgctacctttcaagcggggcgccttccacctggcagtacaagcccaggtccccatcgtgccaatagtaatgagcagctatcaggatttttactgcaagaaagagcgtaggttcacttcaggccaatgtcaggtgcgggtattaccgccggtaccaacagagggattgacccccgacgatgtcccggcactggcagatagagtgcgccacagtatgctcaccgtgttccgggaaatttccacagacgggcggggcggaggtgactacctgaagaaacccggtggcggagggtag

SEQ ID NO: 303211 - DNA, 852 bp, Artificial Sequence
  derived and/or modified sequence
atggacctgtggcccggcgcctggatgcttctgttactcctgttccttctgctcctgttcctgttgccaacactctggttttgcagtccctccgcgaagtatttcttcaagatggccttttataatggctggattctattccttgcagtgttggctatacccgtctgtgctgtgcgcggcagaaatgtggagaacatgaagattctcagactgatgctgctccacatcaagtatctctacggcatcagagtagaagtgcggggcgcacatcattttcctccctctcagccctacgtagtagtgtccaaccatcagagctctctagatctcctaggcatgatggaagtccttccagggcgctgcgtgcccattgccaagagagaactgctatgggccggctcggccgggctagcctgctggctagccggagtgattttcattgaccggaaacggaccggagacgctattagcgtgatgtcagaggtggcgcaaacattactcacccaggatgtgcgtgtgtgggttttcccagagggtacccgaaaccataatggatctatgctgcccttcaaaagaggagcgttccatttagctgtccaggctcaggtgccgatagtaccaatcgtcatgtctagctaccaggacttctattgtaagaaagagaggaggtttaccagtggccaatgtcaggtgcgtgttctgcctcccgtgcccaccgaggggctaacacccgacgatgtccccgcgcttgcagacagagtgagacatagcatgttgactgttttcagagaaatttcaacagatggacgaggtggcggggactacctcaaaaaacctggagggggaggatag

SEQ ID NO: 303212 - DNA, 516 bp, Artificial Sequence
  derived and/or modified sequence
atgatggaggtgctgcctggtagatgcgttcccattgctaagcgagagctcctgtgggcgggcagcgcagggctggcctgttggttggcaggagtgatcttcatcgaccgcaagagaaccggggatgcaatttctgtcatgtcagaagtggctcagacactgctcacccaggatgtgagggtctgggtcttcccagagggaacacggaatcataatggttctatgctcccatttaagcgcggtgctttccatctagccgtgcaggcccaggtccctatcgtccccattgtgatgtcttcttaccaagatttctactgcaaaaaagaaagaaggtttacgtctggtcagtgccaagttcgcgttctgccaccagttcccaccgaaggcttgacgccagacgacgttcctgccttggctgatcgcgtaaggcatagcatgctcacagtgttcagagaaatctccaccgatggtaggggcggcggcgattacctcaagaagcctgggggcgggggctag

SEQ ID NO: 303213 - DNA, 852 bp, Artificial Sequence
  derived and/or modified sequence
atggatctgtggcctggcgcatggatgcttctacttttactctttctcctactcttatttcttctgcctactttgtggttttgtagtccaagtgccaagtacttttttaagatggcattctataacggctggatccttttcctggctgtgctcgctattccggtgtgtgctgtgaggggacgcaacgtcgagaacatgaaaattctccgtctcatgctgctccatattaagtacctctacggcattcgcgtggaggtgcgcggcgcccaccactttccaccctcacagccgtacgtggtcgtcagcaaccaccagtctagcctggacctgctggggatgatggaggtgctgcccggacgctgcgtgcccattgctaaacgagaactcctctgggcagggtctgctgggctcgcatgttggctggccggggtcatctttatcgaccggaagcggaccggagacgctatctcagtcatgagcgaggtggcccagaccctcctcacacaggacgtgagagtgtgggttttcccagaaggcacccggaaccataatgggagtatgctaccttttaaacgaggggccttccatctggctgtccaggcacaggtcccaattgttcccatagttatgtcttcatatcaggatttttactgtaaaaaggagcgacgttttacgtcgggtcagtgccaagtgcgggtgttaccaccagtgccgacagaggggctgacaccggatgacgtcccagcccttgctgatagggtgagacatagcatgttaactgtattccgagaaatctccactgatgggcgcggggggggcgactacctcaagaaacctggaggcggcggctag

SEQ ID NO: 303214 - DNA, 852 bp, Artificial Sequence
  derived and/or modified sequence
atggacctctggcctggcgcctggatgctgctgttattactttttctactactcctctttcttctccccacgctgtggttttgtagcccaagcgccaagtatttctttaagatggctttctacaacggttggatactcttcttggcagtgttggctattcccgtgtgtgcagtcaggggacgaaacgtggagaacatgaagatcttgaggctgatgctgctgcatataaagtacctgtacggcatcagagtggaagtgagaggggctcaccatttcccgccttctcagccctatgtggtggtctctaaccatcagtcctctctagacctgctgggaatgatggaagtgctgcctgggcgctgcgtgccaatagctaaaagagaactactgtgggccggcagtgcagggttggcatgctggctggcgggtgttatctttatagaccgaaagaggacaggagatgcaatctccgtgatgagcgaagttgctcagacacttctgacgcaggatgtgagggtgtgggtgttccctgaggggacccggaaccataatggatcaatgttgcctttcaagcgcggtgcatttcatctagctgttcaggcccaggttcccatcgtacccatcgtaatgagctcctaccaggacttttactgtaagaaagagcggcgctttacatctggtcagtgtcaggtgagggttctgcctcctgtccccaccgagggcttaacacccgacgatgtaccagcacttgcagaccgcgtgagacactctatgctcacagtattcagggaaatctcaaccgatggtcgggggggaggcgactacctgaagaagccgggaggcggcgggtag

SEQ ID NO: 303215 - DNA, 852 bp, Artificial Sequence
  derived and/or modified sequence
atggatctttggcccggtgcctggatgttattactgttactttttcttttgttactctttctcctgcccaccttatggttctgcagtccaagcgccaagtactttttcaagatggccttttacaatggttggattcttttccttgctgtgctcgccatccccgtctgcgcagtaagaggcaggaacgttgagaatatgaagattttgcgtcttatgctcctccatattaagtacctctatgggatcagggttgaggttcggggtgcacatcattttccccccagccaaccttatgtagtggtctcgaatcaccagtcctcgttggatctactgggtatgatggaagtgctgcctggcagatgcgtcccgatcgccaagcgcgaactactgtgggccggtagcgcggggctggcgtgctggctggccggcgtgatctttatcgatcggaagaggaccggcgacgccatctccgttatgagtgaggtcgcacagaccctccttacccaggacgtgagggtttgggtgtttcctgagggcacacgcaaccacaacgggagcatgctcccttttaagaggggcgcgttccaccttgccgtgcaggcgcaggtgcctattgtcccaattgtgatgtcctcataccaggacttctactgcaagaaagagcggagattcacctctggccagtgtcaggtccgggtcctgccccccgtgccaacggaggggttgactccagatgacgttccagctcttgccgacagggtgcggcattcaatgttgacggttttccgggagataagtacggacggaaggggtggtggggattacctgaagaagcctggcggcggagggtag

SEQ ID NO: 303216 - DNA, 852 bp, Artificial Sequence
  derived and/or modified sequence
atggacctgtggcccggcgcgtggatgctgctcctcctcctgtttctgctcctgctcttcctgctacctactttatggttttgtagtccttctgcgaagtatttttttaaaatggcgttttataatgggtggatcctgtttctcgcagtcctggcaatacccgtctgtgctgtgcgcggacggaatgtggagaatatgaaaatattaaggctgatgctccttcacattaagtatctatacgggataagggtggaagtccgtggggctcaccattttccacctagccagccttacgtcgtggtctccaatcatcaatccagcttggatcttcttggcatgatggaggtgctgccgggccgctgtgtgcccattgccaaacgcgagctcctgtgggcaggatccgcgggactggcgtgttggctggctggtgtcattttcatagaccgaaagaggacgggcgatgccattagtgtcatgagcgaagtggcacagacattgctgacgcaggatgtccgggtgtgggtcttcccagagggaaccaggaaccacaatggctccatgctccctttcaagcggggggcattccacttggccgtacaggcccaggtgcccattgtgccaatcgtaatgtcctcctaccaggacttctactgtaagaaggagcgtcgctttacaagtgggcaatgtcaagtgcgcgtgttgcctcctgtccccaccgagggactaaccccggacgacgttcctgcgctggcagatcgggtgcggcatagcatgctgacagtgttccgtgagatcagcaccgatggaagaggcgggggtgattacttaaaaaagccaggtggtggaggttag

SEQ ID NO: 303217 - DNA, 852 bp, Artificial Sequence
  derived and/or modified sequence
atggatctgtggcccggcgcctggatgctactcttattgctctttcttcttctgctctttttgctgcccaccctgtggttctgctccccctcagcgaaatatttttttaagatggcgttctacaacggctggattctatttctggccgtgttggccattcctgtgtgcgctgtgagagggaggaacgttgaaaacatgaagattctccgtctgatgctgctgcatatcaagtacctttacggcattagggttgaggtcagaggcgctcatcatttccctccaagccagccatacgtcgtggtgagcaaccatcaatcctctttggacctgctaggaatgatggaggtgctccctggaagatgtgtcccaatcgcgaaacgcgagttgctgtgggcaggttccgctggtctggcctgctggcttgctggcgtcatatttattgatcggaagcggactggtgatgcaattagcgtgatgagcgaagtggcccagacactgctcacacaggatgtacgggtctgggtattccctgagggtacccgcaaccataatggctctatgctcccttttaaaagaggtgcgtttcacctggcagtgcaggctcaggtgccgatcgtccccattgtcatgtccagttatcaggacttctattgtaaaaaagaacgacgattcacaagcggtcagtgtcaggtacgggtcttgccccctgttcccactgagggtctcacccctgacgatgtgccagcccttgcagacagggttcgacacagcatgttaacagttttccgtgagatttcaacagatggccgaggcggcggcgattatctgaagaagccaggaggaggcgggtag

SEQ ID NO: 303218 - DNA, 852 bp, Artificial Sequence
  derived and/or modified sequence
atggatctgtggccaggggcttggatgctcctgctcctcttgttcttgctccttctattcctactccctacactgtggttttgttctccgtcagcaaagtacttttttaagatggccttttacaatgggtggatattgttccttgcagtgctcgctataccagtatgtgccgtaaggggcagaaatgtcgagaatatgaaaattttacggctgatgctgctccacataaaatacctctacgggatcagagtggaagtgagaggtgctcaccatttcccgccttctcagccctacgtcgttgtgtcaaaccaccagagtagcttagacttgctgggcatgatggaggtgttacctggacgatgcgtcccaattgccaagagggagctcctgtgggcaggatctgccggcctggcttgctggctggcgggtgttatcttcatcgaccgcaagagaacgggagacgcaatcagcgtgatgtctgaagtggcgcaaaccctgctgacccaagacgtcagagtgtgggtgtttcctgagggcacacggaaccataatggatccatgctacctttcaagcggggtgctttccacctcgcagtgcaggcccaagtgccgattgtgcccatcgtgatgtcgtcataccaggatttttactgcaaaaaagagcgtcgcttcacatccggacagtgtcaggtacgcgtactcccacctgtaccgacagaaggccttaccccagatgatgtaccagcgcttgctgaccgcgttcgccattctatgctgactgtgttccgggagatctctaccgacggtcgcgggggtggcgactacttaaaaaagccgggcggcggcgggtag

SEQ ID NO: 303219 - DNA, 852 bp, Artificial Sequence
  derived and/or modified sequence
atggatctgtggcctggggcctggatgctcttattactgttatttctgcttttgctgttcctccttcctacactgtggttctgcagcccttctgccaaatacttcttcaagatggccttctataatggttggatcttattccttgcagtactggccattccggtttgcgcggttcgcggaagaaacgtggagaacatgaagatcctgcggctgatgcttcttcatatcaaatacttgtacgggatacgcgtggaagtcagaggcgcccaccattttcctccaagccagccctacgtcgtggtcagcaatcatcaaagttcattggatctgctaggcatgatggaggtcctgcccgggcgttgtgtcccgatcgcgaaacgagagttgctgtgggccggcagtgctgggctcgcttgctggctggccggcgtgattttcatcgacaggaagagaaccggggacgccatttccgtgatgagtgaggttgcacagacactcctgactcaggatgtgagggtgtgggtattccctgaggggactcggaaccacaatgggtccatgctcccgtttaaacggggcgcatttcacctcgctgtgcaggcgcaggtaccaattgtccctatcgtaatgtccagctatcaggatttctactgcaagaaggaacgcaggtttacaagtggccaatgccaggtgcgagtgctcccccctgtgcctaccgagggactcactcctgacgacgtgcctgcccttgctgacagagtgagacatagcatgctgaccgtttttcgggagatcagtactgacggacgggggggaggcgattatctaaagaaacccggtggggggggttag

SEQ ID NO: 303220 - DNA, 852 bp, Artificial Sequence
  derived and/or modified sequence
atggatctatggcccggtgcctggatgctactgctgctgctgttcctcctcctgttgtttcttctacccactctctggttttgtagcccgagtgccaaatacttcttcaagatggctttttataatggctggattctattcttggctgtcctcgccataccagtgtgtgccgtgcgcggccggaatgtggagaatatgaagatcctaagactgatgctcctccacattaaatatctttacggcattcgcgtcgaggtcagaggcgctcatcattttcccccttcacagccgtatgtcgtggtgtctaaccaccagagttccctcgatcttttggggatgatggaggtcttacccggaagatgtgtgccaattgcaaagcgcgagctcctgtgggctggctctgccggacttgcgtgctggctggccggagttatctttattgatcgcaaacgcaccggagacgccatatcggtcatgtccgaagtggcccagaccctattgacccaggatgtcagggtgtgggtttttccggagggaacccgaaatcacaacggcagcatgctcccctttaaaaggggcgcctttcacctggctgtgcaagctcaggtgccaatcgtgccaatcgtgatgtcctcataccaggatttttattgtaaaaaagagaggcgctttacatcagggcaatgccaggtgcgcgtgctgccccccgtgcctacagaaggcctcacccccgacgatgtgcccgccctcgctgatcgcgtgcgccatagcatgctgaccgtgttccgcgaaatatcaactgatggccgcggagggggcgactatttaaagaagccaggcgggggtggctag

SEQ ID NO: 303221 - DNA, 852 bp, Artificial Sequence
  derived and/or modified sequence
atggatctctggcctggagcctggatgctgcttctcctattgtttctcctcctgttgtttcttctgcctaccctgtggttttgttcgccatctgcaaaatactttttcaagatggcattttataatgggtggatcctcttcttagccgtgctggccatccctgtgtgcgcagtccggggcagaaacgtggagaacatgaagatccttagacttatgctgctgcacatcaaatacctgtatggtatccgcgtagaggtgcggggtgcccaccattttcccccaagccagccatacgtcgtcgtgtccaaccaccagagttcactggatcttcttggtatgatggaggtgcttccaggcaggtgtgtgcccatagctaagagagagttactctgggctggctctgcgggcctagcctgctggctcgcaggggttatttttattgataggaagcgaacaggggacgccatcagtgtgatgtctgaagtcgcccagactctgctgacccaagacgtaagagtgtgggtttttcccgaaggtaccaggaaccacaacgggagcatgctgccattcaagcggggagcattccacctggctgtccaggcacaagtgcctatcgtacccatcgtgatgtcatcatatcaggacttttactgcaaaaaagagcggcgatttacctctggtcagtgccaggttcgtgtactgcctccggtacctacagagggattgactccagacgacgtgcccgccctggcagatagggtacgccacagtatgttaacagtcttccgggaaatcagtacggacggtaggggaggtggcgactatcttaaaaagccagggggcggcgggtag

SEQ ID NO: 303222 - DNA, 852 bp, Artificial Sequence
  derived and/or modified sequence
atggacctctggcctggtgcatggatgctgctgctactgctatttttactcctcctgttcctgctgccaactctgtggttttgcagcccttccgcaaagtattttttcaaaatggccttttacaacgggtggattctatttctggccgtcttagccattcccgtgtgcgctgtgcgcggcaggaatgtcgaaaacatgaagattctgcgtctgatgcttctgcatatcaagtatctgtatggcattcgggttgaggttcgcggcgctcaccactttccgccctcccagccgtatgtagtcgtctccaatcatcaatcctcactggaccttctgggtatgatggaggtactgccaggtcggtgtgtgcccattgctaagagagagctgctgtgggcaggctcagctgggctggcctgctggttagccggtgtgattttcattgaccggaagcggactggcgacgctatctctgtgatgtccgaggtggcccagactttattaactcaggatgttcgcgtttgggtgtttcccgaggggacgagaaaccataacggatctatgctgcccttcaagcgcggagcttttcacctcgccgtccaggcccaagtgcccattgttcctatcgtgatgtccagctatcaggatttttattgtaagaaagagcggagattcacctccggacaatgccaggtgcgcgttctaccacccgtgcctacagaagggctcacgcccgatgacgtccccgccctggcggaccgggtgagacacagcatgctcaccgtttttagagagatctctaccgacgggcggggtgggggcgactacttgaagaagccaggagggggcggctag

SEQ ID NO: 303223 - DNA, 852 bp, Artificial Sequence
  derived and/or modified sequence
atggatctgtggccaggcgcttggatgttgctcttgttgctgtttttattgctgctctttctccttcctacgctttggttctgcagcccatcagccaagtatttctttaagatggcgttctacaacggctggatactgttcttagcggttctggccataccagtgtgcgcagtacgcggccgcaatgtcgagaatatgaaaattttgcgtttgatgctccttcacattaagtacctctacggcatccgggtggaggtcaggggtgcgcaccatttcccgccttcgcagccatacgttgtggtgagcaatcaccagagctccttggatctcctgggaatgatggaagtactccctgggaggtgtgtacctatcgccaagagagagcttctgtgggccgggagcgccggcctcgcttgttggctggccggtgttatcttcattgataggaagaggacgggggatgctataagtgtaatgtctgaagtggcccagaccctcctgacacaagatgtcagagtctgggtgtttccagaaggaaccagaaaccataacggcagcatgctgcccttcaagcggggagccttccatctcgccgtccaggcccaagtgcccattgttccaatcgtcatgtcttcttaccaggatttctactgcaagaaggagcgtcggtttaccagcggacaatgtcaagtgcgcgtgctgccccctgtcccaactgaagggctcacgcccgatgacgttcccgcccttgcagaccgggttcgccatagcatgctcacagtgtttagagaaatcagcactgatgggcgcggtgggggtgattacctgaaaaagcccgggggtggcggctag

SEQ ID NO: 303224 - DNA, 852 bp, Artificial Sequence
  derived and/or modified sequence
atggacctttggcctggagcatggatgctcctgttgcttttattcctgcttctgctgtttctgttaccgacactctggttctgctccccaagcgctaaatacttctttaagatggctttctataatggatggatcctttttcttgccgtactggctatacccgtatgtgctgtccgcggcaggaatgtcgagaatatgaaaattctgcgtctgatgctactgcatatcaaatacctctacggcatccgggtggaggtgcgcggagcccaccactttcccccatcacaaccctacgtcgttgtctcgaaccaccagtcgtccctggacctacttggcatgatggaagtcctgcccggcagatgtgtgccaatcgccaagcgggaattgttgtgggccggctcagccgggctcgcatgctggctggccggggtgatctttatcgacagaaagcgcactggagacgccatatctgtcatgtctgaagtggctcagaccctactgacgcaggacgtaagggtatgggtgtttcctgagggcaccagaaaccataatggcagcatgcttcccttcaagcggggtgctttccacttggccgtgcaagcacaggtacccattgttccgatcgtgatgtcttcttaccaggatttctactgtaagaaggagcgccggttcactagcggtcagtgtcaggtccgggtgctaccacctgtgccaacagaggggctgacccctgacgacgtccctgccttagcagatagggtgaggcacagtatgctcactgtctttcgtgaaatttcaacggatgggcgtgggggaggtgactacttgaaaaaaccaggggggggagggtag

SEQ ID NO: 303225 - DNA, 852 bp, Artificial Sequence
  derived and/or modified sequence
atggacttgtggcccggagcctggatgttgctgttgctgctgttccttttactcctgtttttactgccgaccctgtggttctgtagcccgtccgcaaagtatttctttaaaatggcattctacaatgggtggattctctttctggccgtgctggccataccagtgtgcgctgtgagaggccgcaacgtggaaaacatgaagatcctgcgactgatgcttttacatatcaaatatttatacggaatccgggtggaggttcgcggtgcccaccacttcccccccagtcagccatatgttgtggtgtcgaatcaccaaagctccctcgacctgctagggatgatggaggttcttcctgggagatgtgtgcccatcgccaagcgggagctcctttgggctgggtcggctggactggcatgttggctcgcgggggtgatcttcatagaccggaagcgtactggcgatgccatatctgtaatgtctgaagtagcccagaccctgcttacgcaagacgtgcgagtgtgggtcttccccgaggggacaaggaaccacaacgggagtatgctcccttttaaacgcggcgctttccatctggccgtgcaggcccaggtgcctatagtgcctatagtgatgtcttcataccaggatttctactgcaaaaaagaaaggagattcaccagtggccagtgtcaagtcagagtactgccaccggttcccacagaagggctgacaccagatgacgtgcctgcactggcagacagagtccgccattctatgctcacggtctttcgagagatttcgaccgatggaaggggggggggggattacctgaaaaaacccggtggtggcggatag

SEQ ID NO: 303226 - DNA, 852 bp, Artificial Sequence
  derived and/or modified sequence
atggacctatggccaggtgcttggatgctcttgttgctgctgtttctgctcctcctattcctcttacctactctctggttttgctcaccaagtgctaagtacttctttaaaatggccttttataatggctggattttgttcctggctgtcttggcaatcccggtctgtgctgttcggggcagaaatgtcgagaacatgaagatcctacggctcatgctgctgcatataaaatacctgtatgggatccgagtggaggtgcgaggtgctcatcattttccgcccagccagccttacgtagtcgtgtcaaaccaccagtcttccctggaccttctgggaatgatggaggtactgcccgggaggtgtgtgccaatagcaaaaagagaactgctgtgggccggctccgctggcctggcctgttggctggccggagtgattttcatagacagaaagcgcaccggggatgccattagtgtaatgagcgaagtggcacaaaccctgttgacccaggacgtgcgtgtctgggtcttccccgaggggacaagaaaccacaacggctccatgctcccatttaaaaggggggcctttcacctcgctgtgcaagctcaggtcccaattgtgcctatcgtcatgtcttcgtaccaggatttctactgtaaaaaagagaggcgctttacgagcggccagtgtcaggtgagggtactgcccccggtaccaacggaggggctcactcctgatgatgtgccagccctggccgatagagtaagacactcaatgttgaccgtctttagggaaatcagcactgatggccggggcggaggagattatctgaaaaaacctggcggagggggctag

SEQ ID NO: 303227 - DNA, 852 bp, Artificial Sequence
  derived and/or modified sequence
atggacctctggccaggggcatggatgctcctcctgcttcttttcttgctcctgctgtttctcttgcctaccctatggttctgctctccgtccgccaaatacttttttaagatggctttctacaatggctggatcctgtttctagcagtactagcgatacccgtctgtgcagtgagaggacgcaacgtcgaaaacatgaaaattttacggttaatgctcctgcatattaaatacctctatggaatccgggtagaggtgcggggggcccatcatttccctccttctcaaccctacgtggtggtatcaaatcatcagagtagccttgatctgctcggcatgatggaagtgctgcccgggagatgcgtcccaatcgcgaagagggaactactgtgggcaggaagcgcaggtcttgcctgctggctggcaggagtcatcttcatcgacaggaagagaacaggggatgccatctctgtgatgagcgaggtcgcccagacattactgacccaagatgtaagagtctgggtatttcccgagggcaccaggaatcacaacggaagtatgctgcctttcaaacggggagctttccacctcgcagtgcaggcccaagtgcccatcgtgccgatcgtgatgagctcctaccaggatttctattgtaaaaaagagagacgctttacctccggtcagtgtcaagtgcgtgtactgccccctgtacccaccgagggactgacacctgatgatgtgcccgcattggccgacagggtgaggcattccatgctgaccgtgtttagagaaatttccaccgatggcaggggcgggggagactatcttaaaaaacccggcgggggcggctag

SEQ ID NO: 303228 - DNA, 852 bp, Artificial Sequence
  derived and/or modified sequence
atggacttatggcccggcgcctggatgttactcctgctcttattccttctcctgcttttcctgctccctacactgtggttctgttctccgtcagcgaaatacttcttcaaaatggcgttctacaacggttggattctgttccttgctgtgctggcgatcccagtttgtgcagtcagagggcgaaacgtagagaatatgaaaattcttcgactgatgctcctccatatcaagtatctgtatggaatcagagttgaagttcgcggagcacaccattttcctccgagccagccatacgtggtcgtctctaatcaccagtccagcctggaccttctaggcatgatggaagttctcccaggtcgatgtgtgcctatagccaagcgggagctcctctgggctggatcggccgggctggcgtgttggctcgcaggtgtgatcttcatcgaccgcaagcgtaccggggatgccatatcagttatgagcgaggtcgcacagactctgctgactcaggacgtccgagtgtgggtgtttcccgagggcacacggaaccataatggctcgatgttgcccttcaaaaggggggcttttcatttggcagtccaggcacaggtaccgattgtaccgatcgtaatgtcaagctaccaagacttctattgcaaaaaagagcgaagattcacctctggccagtgccaggtgcgtgtactgccccctgtgccgaccgaagggctgactcccgatgatgttccagccctggcagacagagtccggcacagtatgttgaccgtgttccgcgaaatctctaccgatggtcgaggggggggggattatctgaagaaacctggcggcggtggctag

SEQ ID NO: 303229 - DNA, 852 bp, Artificial Sequence
  derived and/or modified sequence
atggacctatggccaggcgcctggatgcttctgcttcttctctttttgctgctactgttcctgctgccaacgctttggttttgtagtccctctgccaaatatttcttcaagatggccttctacaacggctggatcctttttctcgccgtgctggccatacctgtgtgcgcagtccgcgggaggaacgtggaaaatatgaaaattctcagacttatgttgctgcatataaagtacttgtacggtattcgtgtcgaggttcggggggcgcaccatttcccacccagccaaccatacgtcgtggtcagtaaccatcagtcgagtctcgacctcttaggcatgatggaagtgctgcccggacgctgcgttcccatcgcaaaacgcgagctcttgtgggccggtagtgcagggcttgcttgttggttagccggcgtgattttcattgatcgtaagagaactggggatgcgatctctgtcatgtctgaagtcgctcagacactgttgacgcaggacgtccgcgtgtgggtctttcctgagggcacccggaatcacaatggcagcatgctgcccttcaaaagaggggctttccacttagctgtgcaagcccaagtcccgattgtgcccattgttatgtccagctatcaggacttctactgcaaaaaagaaagaaggtttacgtccggccaatgccaggtgcgggttttgccccccgtgcctacagagggcctaactccggatgacgttcctgcattggccgatagggtccggcattctatgttaacagtattccgcgagatttccaccgacggaagaggcggtggggactatcttaagaagcctggggggggaggatag

SEQ ID NO: 303230 - DNA, 852 bp, Artificial Sequence
  derived and/or modified sequence
atggacctgtggcctggggcatggatgctgttgctcctgctgtttctgctgctgctgtttttactgcccacactgtggttctgctcacccagcgcgaaatacttcttcaagatggccttctacaatggttggatactttttttagcagttcttgccatacccgtttgtgctgtccgcggtaggaacgtcgaaaacatgaagatcctgagacttatgttgttgcatattaagtatctgtatggaatcagggtcgaagttcgcggggcccaccactttccaccgagtcagccgtatgttgttgttagtaaccaccagagctccctggatctcctgggcatgatggaggttctgccagggcgatgtgtgcccatagccaagagggaactcctgtgggccgggagcgcgggattggcttgctggctggcgggtgtgatatttatcgacaggaagcggacaggcgatgcgatttccgtgatgagtgaggtggcgcagacactgttgacccaggacgtgagggtctgggtattccccgagggaactagaaaccataatggttcaatgttgcccttcaagagaggcgcctttcacctggcggtgcaagcacaggtaccaatcgtgcccatcgtgatgtcatcttaccaggacttctactgtaagaaagagcgccgtttcacttcagggcagtgccaagtgcgagtgttgccacccgtccctactgaaggtttgacccctgacgatgttcccgcgttagccgaccgtgtacgacactcaatgctgacagtgttcagagagatctcgactgatggacgagggggcggtgattacttgaagaaaccaggtggcggtgggtag

SEQ ID NO: 303231 - DNA, 852 bp, Artificial Sequence
  derived and/or modified sequence
atggacctgtggcctggggcgtggatgttattgctactgcttttcctcctcctgttatttctattgccgacgttatggttctgctcgcctagcgccaaatacttcttcaagatggctttttacaacggttggatactgtttttggcagtacttgccatccctgtttgcgctgtgcggggaagaaatgtagagaatatgaagatcctaaggctcatgctgctccacattaaatacctgtatgggattcgcgtggaagtacggggggcacatcacttccccccatcacagccttatgtggtcgtatcaaaccaccagagctctctcgacctcctaggcatgatggaagtgctgcccgggcggtgcgtgccaattgcaaaacgcgaattactgtgggccggaagcgcgggccttgcctgttggctggctggcgtcatcttcatcgataggaagcgaaccggcgacgcaatcagcgtcatgagcgaggtagctcaaaccttactcacgcaagatgttcgagtctgggtgtttccagaaggtacccgcaaccacaatggcagtatgctgccatttaagcgaggtgcatttcacttggccgtgcaggcacaggtgccaatcgtacccatcgttatgtcctcgtaccaggacttctactgtaagaaggaacggcggttcacttccgggcagtgtcaggttcgggtgcttccaccagtgccgaccgaggggctcaccccggacgatgtgcctgctcttgccgaccgggtgaggcattccatgttgactgtatttcgagagatttctaccgatggacggggcggcggggattacctcaaaaagccgggcggcggtgggtag

SEQ ID NO: 303232 - DNA, 852 bp, Artificial Sequence
  derived and/or modified sequence
atggacctctggcctggcgcttggatgctcctccttctactgtttcttcttctgctattccttcttccgacactgtggttttgttccccaagcgcaaaatacttttttaagatggctttctataacggctggatcctgttcctcgcggtgcttgctattcctgtctgcgccgtgaggggccgaaacgtggagaacatgaaaattctccgcctcatgctgctccatattaagtacctgtacgggattcgcgtcgaggtcagaggggcgcatcatttcccaccctcacaaccatacgtggtcgtttccaatcaccagagctcactcgatttactgggaatgatggaagtcctgcctggaagatgtgttccaatcgctaagcgagagctcctttgggccggctctgctgggctggcctgctggctagccggagtaatctttattgaccggaaaagaactggcgacgcaatcagtgttatgagtgaagttgctcagaccctgctcacgcaggacgttcgagtttgggtgttcccagagggtacaagaaatcacaacggctcaatgctacccttcaaacgcggagctttccatcttgcggtgcaggcacaagtgccaattgtaccaattgtgatgtcaagctaccaggatttttattgtaagaaggaacgacggttcacgtccgggcagtgtcaggtgcgggtcctaccacccgtgcccacggaaggtctgaccccagatgacgtccccgccttggctgacagagtccgccactcaatgctgaccgtgtttagagaaatatccacagatgggaggggaggaggggactacttaaaaaagcctggtgggggtggctag

SEQ ID NO: 303233 - DNA, 852 bp, Artificial Sequence
  derived and/or modified sequence
atggatctgtggcctggagcgtggatgttgctgctcctccttttcctgttactgctgtttttgctgccgaccctttggttttgcagtccttccgccaagtacttttttaaaatggccttctataatggatggattctgttcttagccgttttggcgatacccgtgtgtgcggtgagaggacggaatgtcgaaaacatgaagatcttacgtctgatgttactccatataaagtacctgtacggcatcagagtggaggtgaggggcgctcatcatttcccccccagccagccttatgtggttgtcagcaatcaccagagttcactcgatctgctgggcatgatggaggtgctgcccgggcgttgtgtgccaatcgctaaaagggagctgctgtgggcggggagcgccggcctggcttgctggctggccggggtcattttcattgatcggaaaaggacgggggacgctatctctgtcatgtccgaggtcgcccagactttactaactcaggacgttcgggtgtgggttttccccgaggggacacggaaccacaatgggagcatgctgccttttaaacgaggggcctttcacctggcagtccaggctcaggtgccaattgtccccatagtgatgtcatcttatcaagacttctactgtaagaaggagcgccgctttacttccggtcagtgccaggtcagagtgctgccacctgtgcctacagaggggctgacccccgatgacgttcccgctcttgcagacagggtcaggcacagtatgctaacagtgtttcgggagattagcacagatggacgtggcggcggggattacctcaagaaacccggcggtgggggttag

SEQ ID NO: 303234 - DNA, 852 bp, Artificial Sequence
  derived and/or modified sequence
atggatctgtggcccggtgcttggatgctgttgcttctgctctttctgctactgctatttttgctgcccacgctatggttctgttctccctccgctaaatacttttttaagatggccttctacaacggctggattctatttctggccgtcctcgcaattccagtctgcgccgtgcggggtagaaacgttgagaacatgaagatcctccgactcatgttgctgcacatcaagtacctttacggcatccgagtggaggtgcgcggggcccatcactttccacctagtcaaccgtacgttgtcgtcagcaatcaccaatcctccctagacttattgggaatgatggaggtgctccccggtagatgcgtgccaatcgctaagcgcgaattactgtgggcaggcagcgccggcctggcttgctggctcgccggggtaattttcatagatcgcaagagaactggcgatgcaattagtgtaatgagtgaggtcgcacagaccctgctgacacaggacgtgcgcgtatgggtgtttcctgaaggtacccgaaaccacaacggatctatgctccctttcaaaagaggcgctttccaccttgcagtgcaggcccaggtgcccatcgtgcccattgtcatgtcttcatatcaggacttctattgtaagaaggagaggcggtttacctccggccaatgtcaagttagggtattacctcccgtgccaactgaggggcttacacccgatgacgtacccgcgctagccgatcgcgtgagacacagcatgctaaccgtgtttagagaaatctcgaccgacggacggggaggcggagattatctgaagaaaccaggaggtggaggctag

SEQ ID NO: 303235 - DNA, 852 bp, Artificial Sequence
  derived and/or modified sequence
atggatttgtggcctggagcctggatgcttctgcttctcctctttctgttgttgctctttctgctgccaactctgtggttttgcagtccttccgccaaatatttctttaagatggctttctataacggctggattctgtttctagcagtcttggccatcccggtgtgcgcagtgcgaggaaggaatgtggagaacatgaagattctgagactgatgctactgcatatcaaatatctctatgggatcagagtggaagtcagaggtgcacaccattttccaccttcgcaaccatacgtagtggttagcaatcatcagtccagcctggacctcttagggatgatggaggtcctgcctgggaggtgtgtacctattgcaaagagagagctactgtgggcaggctctgccgggcttgcatgctggctagcgggggtgatttttatagatagaaagaggactggggatgctatctcagtgatgtctgaggtggctcaaaccttactcacacaagatgtccgtgtctgggtgtttcccgaggggactagaaaccacaacggttcaatgctgccctttaagagaggcgctttccatctggctgtacaggctcaggtgccaatcgtccccatcgtgatgtccagttatcaggacttttattgcaagaaagagcgccgttttacttccggacagtgtcaagtgcgtgtgctgccacccgtaccaaccgaagggctgacccctgatgatgttcccgccctcgctgatagagtcaggcactcgatgttgacagtgttcagagaaatctctacagacggccggggcggcggcgattatttaaagaaacctggcggcggaggctag

SEQ ID NO: 303236 - DNA, 852 bp, Artificial Sequence
  derived and/or modified sequence
atggacctgtggcccggggcctggatgcttctgttgctgctatttctgctcttgctcttcctgttgcccaccctttggttctgcagccctagcgccaagtacttcttcaaaatggctttttataatgggtggattctttttctggcggtgttggctataccagtttgcgcggtgaggggacggaacgtggagaatatgaagatcctcagactaatgctcctccatatcaagtacctctacggtattcgagtagaggtgcgaggggctcatcacttccctccctctcagccgtacgtcgtggtcagcaatcaccagagcagccttgacctgctaggaatgatggaggtgttgcccggaaggtgcgtgccgatagccaagcgggagttactttgggccgggtctgctggtctggcctgttggctcgcaggcgtcatttttattgaccgcaagagaacaggtgacgcaatttctgtcatgtccgaggtggcgcagacattattgacacaagacgtgagggtttgggtgttcccggaaggaaccagaaatcacaacggctcaatgctgccctttaagaggggcgcatttcatctggctgtgcaggcgcaggtgcccatcgttcccattgtcatgagctcttaccaggatttttactgtaaaaaggaacggcgctttacatcgggacaatgccaggtaagggtgctaccgcctgtccctacagaaggcttaaccccagacgatgtcccagccctggctgacagggtgcgccattccatgctgaccgtcttcagggagatcagtactgatggcaggggaggtggggactatctcaaaaagcccggtgggggagggtag

SEQ ID NO: 303237 - DNA, 852 bp, Artificial Sequence
  derived and/or modified sequence
atggatctgtggccgggcgcctggatgttactgcttctcctatttctcctgttactgttcttactccctacactctggttttgctcacctagtgctaagtatttttttaagatggcattctacaatggctggatcctcttcttggccgtcctggccatccccgtatgcgcagtgcggggccggaacgtggaaaacatgaaaatcctaagactgatgctccttcacattaaatatctgtacggcatcagggtggaagtgagaggcgcccaccacttccctcccagtcagccatatgtagtggtatcgaaccaccagtcatccctcgatctactggggatgatggaggtgctgcccggtaggtgcgttccaattgccaaacgggaactgctctgggccggcagcgccggtctcgcatgttggcttgcgggagtgattttcatcgaccggaaacggaccggcgacgcaatttcggtgatgtctgaggtggcacagaccctcctgactcaggacgtgcgcgtgtgggtcttccctgaagggacccgcaatcacaacggatctatgctgccattcaagcgaggcgcctttcatctcgcagtccaggctcaagtgcccatcgtacctatcgttatgagcagctatcaggacttttactgcaaaaaggagagaaggtttacaagtgggcagtgtcaggtgcgtgtcctgccgccagtacccactgaaggcctcactcctgacgatgtgcccgcactggccgaccgcgttagacattccatgctgaccgtgtttcgtgagatctccacagacggcagaggcggcggtgactatttgaaaaagcctggtggtgggggatag

SEQ ID NO: 303238 - DNA, 852 bp, Artificial Sequence
  derived and/or modified sequence
atggatctttggccaggggcatggatgttgctcttgctgctgttcctcctgcttctgttcttgcttcccactctttggttctgctctccgtcggccaagtatttttttaagatggccttttataatgggtggatcttatttctggctgttctagctatcccagtgtgcgcggtacgcggacggaatgtggagaacatgaagatacttcgactgatgctgctgcatatcaaatatctgtatggaattcgagtcgaagtcagaggtgcccaccattttcccccttcacaaccgtatgttgtggtcagcaaccatcagtcgtccctggacctgttggggatgatggaagtgttgcccggacgatgcgttccaatagctaagcgagagctactgtgggctgggtcagcaggtctagcctgttggctggccggggtcatttttatcgatcgcaagcgcacaggggatgcaataagcgtgatgtccgaggtagctcagacattgctgacccaggatgttcgtgtatgggtcttccctgaaggtacccgaaatcacaatggctctatgctgccgtttaagagaggtgcctttcacttggctgtgcaggcccaggtacctattgtcccaatcgtgatgtctagctatcaagacttctattgcaaaaaagaaaggcgcttcacaagtggacagtgtcaggtccgggtactaccccccgttccaaccgaaggtctgacccctgatgacgttcccgcgctggctgatagagtgcggcattccatgttgacggtcttccgcgaaatctctacagacggtcgaggaggcggggattatctgaagaagccaggcggaggaggttag

SEQ ID NO: 303239 - DNA, 852 bp, Artificial Sequence
  derived and/or modified sequence
atggatctgtggccaggagcctggatgctgctcctcctgctctttctgctactgttatttctcttgccgaccctgtggttttgctccccatctgctaaatatttttttaaaatggccttctacaacggttggattttgtttctcgccgtcttggccatacccgtgtgcgcagtacgcggacgcaacgtggagaatatgaagattctgagattaatgcttttacatatcaaatatctttacggaatcagggtggaggtcagaggtgcacatcactttccgccaagccagccctatgtcgtcgtgagcaaccatcagtcttctctcgaccttttgggaatgatggaagtcctgccaggaaggtgcgtgccaatagccaagagggaactgctctgggctggatccgccgggttagcttgctggctagccggagtcatctttatcgatcgcaagcgcaccggagatgccatctctgtgatgtctgaggttgctcagactctacttacacaggacgtcagagtgtgggtgttcccagaggggacccgaaaccacaacggaagcatgttgccttttaaaaggggcgcattccatcttgcagttcaggcacaggtgcccatagtacccatcgtgatgagttcttaccaggatttctattgtaagaaggaacggcgattcacttccggccaatgtcaggtccgcgtgctaccccccgtgcccaccgaaggcttgactcccgacgacgtgccagcgctagccgatcgggtccgtcactccatgctcacagtgttccgcgagatctctacggatggacgtggcggtggcgattacctcaagaagccaggaggcggtggttag

SEQ ID NO: 303240 - DNA, 852 bp, Artificial Sequence
  derived and/or modified sequence
atggatctgtggccaggagcctggatgctcctcctgcttctgtttttgctgctgctcttcctgctgcccaccctctggttctgtagtccaagcgcgaaatacttttttaagatggccttttacaacggttggatactgtttctggctgtcctcgccatccctgtctgcgctgtgcggggccgaaatgtggagaatatgaaaatcctgcgcctcatgctgctgcacatcaagtatttatatggcatccgtgtggaagttcgcggtgctcatcacttccctccgtcacagccatacgtggtagtctcaaaccaccagtcaagtctggatttgcttggcatgatggaagtgctcccaggaaggtgcgtgcctatcgctaaacgcgaattgctttgggccggcagcgcagggctggcctgttggctcgctggcgtcattttcatcgataggaaaagaactggggatgctatttccgttatgagcgaggtggcacaaaccctattgacacaggacgtaagggtttgggtgttccctgaaggcacacggaaccataatgggtctatgttgccattcaagcggggcgcatttcacttagcagttcaggcacaggtgccaatcgtgcccatcgttatgtcaagctatcaggatttctactgcaagaaagaaagaagattcacatcaggacagtgccaggtaagggtgcttccacccgtgcctactgaggggctcacaccggacgacgtgcctgcgctagctgaccgcgtgaggcactctatgcttacagtattccgcgaaatcagcacagatggccgcgggggcggggattacctgaagaaaccgggtggcggaggatag

SEQ ID NO: 303241 - DNA, 852 bp, Artificial Sequence
  derived and/or modified sequence
atggacctctggcctggcgcctggatgctgttactgctgctctttctgcttttattattcctgctgcccacgttatggttctgtagtccttcagctaaatatttctttaagatggccttttataacggctggatcctgttcctggctgttctggctattccagtgtgcgcagtccgaggccgtaacgtagaaaacatgaagattctacggctcatgctgcttcacattaaatatctttatgggatccgagtcgaagttcggggagctcatcacttccctcctagccagccttatgtcgtggtgagcaaccaccagagttccttggatctgctggggatgatggaagttctgcccgggcggtgcgtgccgatcgctaaaagggagctactgtgggccggttccgccgggttagcgtgttggctggctggggttatctttattgaccgcaagcgaaccggagatgccattagtgtcatgagcgaggtggcacagaccttactcactcaggatgtgcgcgtgtgggtctttcctgagggtacaaggaatcacaacggcagcatgttaccatttaagagaggcgcgttccacctggcagtacaggctcaggtgcccattgttcctatcgtgatgtcttcttaccaagatttctactgcaagaaggagcggaggtttaccagtggacaatgtcaggtacgtgtgctgcctcctgtcccaactgaggggctgacacccgacgacgttcctgccctggccgatagggttcgccactccatgctaacagtattcagagagatttccaccgatggacgaggaggaggggactatctcaagaagcccggaggtggcgggtag

SEQ ID NO: 303242 - DNA, 852 bp, Artificial Sequence
  derived and/or modified sequence
atggacttgtggccgggggcgtggatgctgctgttactgctcttcctgcttctcctcttcctgctgcccacactctggttttgtagcccttccgccaaatatttcttcaaaatggcattttacaatggatggattctgtttctggccgtactagcaatcccagtttgcgcggttaggggccgaaacgtggagaatatgaagattctgagactgatgctgttgcatatcaaatacctgtacgggattcgggtcgaagtgagaggcgcccatcatttcccgccaagccagccctatgtagtagtgtccaaccaccagtcctctctggatctgttgggcatgatggaagtgttaccagggcgatgcgtccctatagctaaacgagaactgctgtgggcagggtcggcaggactggcctgctggcttgcgggagtgatctttatagataggaaaaggacaggcgatgccatctcagtgatgagcgaagttgctcagaccctgctgacacaggacgtccgggtttgggtatttcccgaaggaacacgcaatcacaatggaagtatgctgccttttaagcgaggcgccttccatctggctgtgcaggcccaggttcctatcgtgcccattgttatgtcatcttaccaggacttttactgcaagaaggagaggcggttcacctccggccagtgccaggttagggtcctccctcctgtgcccactgaggggctgacccccgacgacgtgccggccctggcagatcgtgttcgccactcgatgcttactgtgttccgggaaatcagcaccgatggacgagggggcggcgactatcttaagaagccaggagggggaggatag

SEQ ID NO: 303243 - DNA, 276 bp, Artificial Sequence
  derived and/or modified sequence
cacagcgcatctactccaattttgacacacagccatcccgcccaggggatgatggaagttctgcctgggagatgcgtgcccattgctaaacgcgaactcctgtgggcaggaagcgctggccttgcctgttggctggctggggtgattttcattgatcgaaagcgaaccggtgatgccatcagcgtcatgagtgaggtggcccagactctgctcactcaggatgtgtcccaccccggattgttattgcaagaaggggcatccctgcacctggggtag

SEQ ID NO: 303244 - DNA, 276 bp, Artificial Sequence
  derived and/or modified sequence
cactcggcctcaacgccaatcctgacgcactctcatccggctcaaggcatgatggaagtgcttccagggcggtgcgtgccaatcgctaaacgcgagctgctttgggctggttccgccggcttagcctgttggctcgctggagtcatattcatcgatagaaaaaggaccggtgacgctatctccgtcatgtccgaagtagcccagacactcctgacccaggacgtgtcccacccaggtctgcttctgcaggagggagcgtccctgcacctgggctag

SEQ ID NO: 303245 - DNA, 276 bp, Artificial Sequence
  derived and/or modified sequence
cacagcgcatctacacctattctcacacactctcaccccgcgcaggggatgatggaagtactacctggccggtgcgtgccaatagcaaagagggaattgttatgggccgggtctgcaggactcgcgtgctggttagcaggcgtgatattcatagacagaaaacgcaccggagatgccatctccgtgatgtcagaagtggctcagacccttctcacacaggatgtaagccatccgggcctgctgttgcaagagggcgcatctcttcatctcggatag

SEQ ID NO: 303246 - DNA, 516 bp, Artificial Sequence
  derived and/or modified sequence
atgatggaggtgctgccagggcgctgcgtcccgatagcaaaacgagaactactatgggcagggagtgcgggcctggcttgttggctggccggcgtcatttttatcgaccgaaagagaactggagacgccatcagcgtcatgtccgaggtggcccaaacactgctgacccaggacgttagagtgtgggtgtttccagaggggaccaggaaccataatggtagcatgctcccctttaagcgcggcgccttccatttagccgtgcaagctcaagtgcccatagttccaatagtgatgtcatcttaccaggatttttattgcaaaaaggaacgccgattcacatcaggccagtgtcaggttcgcgtgctgcctcccgtgcccactgaaggtttaacaccagacgatgtccctgctctggcggatcgggtgagacacagcatgttaacagtgttccgcgaaattagtacagatggcaggggcggcggtgactatctaaagaagcccggagggggcggctag

SEQ ID NO: 303247 - DNA, 516 bp, Artificial Sequence
  derived and/or modified sequence
atgatggaggttctgcccgggaggtgcgtacccatcgctaagcgagagctgctttgggcaggatccgcgggtctggcctgctggcttgccggcgtgatcttcatcgaccgaaagagaaccggcgacgccatcagcgtgatgtctgaagtggcacaaacgttgcttacacaggatgtcagagtttgggtgttcccagaaggcactaggaatcacaatggctcaatgctcccatttaaaagaggcgctttccatcttgcagtgcaggcgcaggtgcctattgtgcctatagtgatgtcctcctatcaggatttttactgtaagaaggaacggcgctttactagcggccagtgccaagtgcgggtcctgccccctgtccctaccgaaggcttgaccccggacgacgttccagccctggcggacagggtgcgacattcgatgctgaccgtgttcagagagattagtaccgatggaaggggggggggcgactatcttaagaaaccaggcggcgggggatag

SEQ ID NO: 303248 - DNA, 276 bp, Artificial Sequence
  derived and/or modified sequence
cactcagcatcaaccccgattctgacccattcccaccccgctcaagggatgatggaggtgctcccagggcgatgtgttcctattgcaaaaagggagttgttgtgggctgggtcggccggactggcttgttggctggctggagttatattcattgaccgaaaaagaacgggtgatgccatcagcgtcatgagtgaagtcgcccaaactctacttacgcaggacgtcagccaccccggcttgctgctgcaggaaggtgcctccctccatctgggatag

SEQ ID NO: 303249 - DNA, 276 bp, Artificial Sequence
  derived and/or modified sequence
catagcgctagtacacctattttgacgcatagtcatccagcgcaaggaatgatggaggttctccctggacgttgcgtccccatcgcaaagagggaactactgtgggcgggatccgcaggtctcgcatgctggttagccggcgttatatttatagaccgcaaaagaaccggggacgccatctctgtgatgtcagaagtagctcaaaccctattaacacaagacgtctcccaccctggtttgctgttgcaagagggggcgtcattacatctcggctag

SEQ ID NO: 303250 - DNA, 276 bp, Artificial Sequence
  derived and/or modified sequence
cattctgcctctactccaattttaactcacagtcacccggctcagggtatgatggaggtgcttccaggtcgctgtgtgcccatcgctaagcgggagctcctgtgggcaggcagtgccggactcgcgtgttggcttgctggggtcatcttcattgaccgaaaaagaacgggcgatgcaattagtgtaatgtccgaagttgctcagacactgttgacccaggatgtgtctcatccaggcctgttacttcaggaaggagctagcctccacctcggatag

SEQ ID NO: 303251 - DNA, 516 bp, Artificial Sequence
  derived and/or modified sequence
atgatggaggtgcttccagggaggtgtgttcctattgcaaagcgcgagttgctgtgggcggggtccgccggcctcgcctgttggctagctggtgtaatctttatagatcgcaagaggactggcgacgcaatatcagttatgtcagaagtagcccaaaccctcctgacccaggacgtgcgggtgtgggtctttccagaaggtaccagaaaccataatggatcaatgctgccattcaagcggggggccttccacctcgcagtccaggctcaagttcccatcgtacccatcgttatgtcatcttaccaagatttttactgcaagaaggagcggcggtttacctctgggcagtgccaagtacgagtgctacctcctgtcccaaccgaagggctcaccccagacgatgtacccgctctggccgatcgggtccgacacagtatgctgaccgtatttcgggaaatcagtacagatgggcggggggggggcgactatcttaaaaaacccgggggaggcgggtag

SEQ ID NO: 303252 - DNA, 516 bp, Artificial Sequence
  derived and/or modified sequence
atgatggaggtcttgccggggcgctgcgtgccaattgcaaagcgagaactactatgggcaggatccgccgggctggcatgctggctggctggcgtgatctttatcgatcggaagaggacaggagacgccatctctgttatgagtgaagtggctcagacattgcttacacaggacgtcagagtctgggtctttcccgaggggacaagaaaccataacggatctatgctgccatttaagcggggcgcgttccatttggccgtccaagcccaggtgcctatcgtccccattgtgatgtcatcttatcaggatttttactgtaaaaaggagcgccgcttcacctcggggcagtgtcaggtgagagtgttgcctcctgtccccacagagggtctgacaccagacgatgttccagctctagccgaccgagtcagacatagcatgctcacagttttcagagaaattagcactgatggcagaggaggtggcgattacctgaaaaagcctggtgggggcggatag

SEQ ID NO: 303253 - DNA, 276 bp, Artificial Sequence
  derived and/or modified sequence
cacagcgcctcaacccccatactgacccactcacacccagctcagggcatgatggaagtacttccgggccggtgcgtccccattgcaaagagagagttactctgggccggcagcgccggcctggcttgttggttagcaggtgtgatatttatcgatagaaaacgaacaggcgacgcaataagtgttatgagcgaggttgctcagaccctgcttacgcaggatgtctcccaccccggcctcctccttcaagaaggcgctagcctccatctagggtag

SEQ ID NO: 303254 - DNA, 516 bp, Artificial Sequence
  derived and/or modified sequence
atgatggaggtgctgccaggccgttgtgtaccaatcgccaaacgcgaacttctctgggcaggatccgctgggctggcatgctggctcgccggtgttattttcattgatagaaagagaacaggcgacgctatttcggttatgtccgaggtggcccagacccttctgacacaggatgttcgtgtctgggtgttccccgaggggacacgaaaccataacggaagcatgctccccttcaagaggggggctttccatctggccgtgcaagctcaggtgcctatcgtaccaatcgtcatgtcctcctaccaggacttctactgcaaaaaggagcgccggttcacaagtggacaatgccaagtgagggtgctgccccccgtgcctacagaaggtcttacgcccgatgatgttccagccttggctgatcgggtgcgtcattccatgctcaccgttttcagggagatatctacagatggacggggaggtggggactatttgaagaagccgggaggaggcgggtag

SEQ ID NO: 303255 - DNA, 516 bp, Artificial Sequence
  derived and/or modified sequence
atgatggaagtactgcctgggcggtgtgttccaatcgctaaacgcgagctcctgtgggctgggagcgcagggcttgcctgttggctcgccggggtgatcttcatcgaccggaaaaggacaggtgacgcaatctctgttatgtcggaggttgcccagaccctgcttacccaggatgtcagagtctgggtttttcccgaggggacgcggaaccataatgggtcaatgttaccttttaagcggggcgccttccacctcgccgtgcaggcccaggtaccgatagtgccaatcgtcatgagcagttatcaagatttttattgcaaaaaagagcgtagattcacaagcgggcaatgtcaagtaagggtgcttccccctgtgccaaccgagggactcaccccggatgatgtccccgccctggcagaccgggtcaggcattccatgttaactgtgttcagggagattagtacagatggcagaggcgggggcgattacctcaagaagcccggcgggggtggctag

SEQ ID NO: 303256 - DNA, 852 bp, Artificial Sequence
  derived and/or modified sequence
atggacctgtggccaggggcctggatgctgctgctgctgctcttcctgctgctgctcttcctgctgcccaccctgtggttctgcagccccagcgccaagtacttcttcaagatggccttctacaacggctggatcctcttcctggccgtgctggccatccctgtgtgtgctgtgcggggcagaaatgtggagaacatgaagatcctgcggctgatgctgctgcacatcaagtacctgtatggcatccgggtggaggtgcggggggcccaccacttcccccccagccagccctacgtggtggtgagcaaccaccagagcagcctggacctgctgggcatgatggaggtgctgcccggccgctgtgtgcccatcgccaagcgggagctgctgtgggccggcagcgctggcctggcctgctggctggccggggtcatcttcatcgacaggaagaggactggagatgccatctctgtgatgtctgaggtggcccagaccctgctgacccaggatgtgcgggtgtgggtgtttcctgagggcaccaggaaccacaacggctccatgctgcccttcaagagaggagccttccacctggccgtgcaggcccaggtgcccatcgtgcccatcgtgatgagcagctaccaggacttctactgcaagaaggagcggcgcttcaccagcggccagtgccaggtgcgggtgctgccccctgtgcccacagagggcctgaccccagatgatgtgcctgccctggccgacagagtgcgccacagcatgctgaccgtcttccgggagatcagcacagatggccggggcggcggggactacctgaagaagccaggcggcggcggctag

SEQ ID NO: 303257 - DNA, 516 bp, Artificial Sequence
  derived and/or modified sequence
atgatggaggtgctgcccggccgctgtgtgcccatcgccaagcgggagctgctgtgggccggcagcgctggcctggcctgctggctggccggggtcatcttcatcgacaggaagaggactggagatgccatctctgtgatgtctgaggtggcccagaccctgctgacccaggatgtgcgggtgtgggtgtttcctgagggcaccaggaaccacaacggctccatgctgcccttcaagagaggagccttccacctggccgtgcaggcccaggtgcccatcgtgcccatcgtgatgagcagctaccaggacttctactgcaagaaggagcggcgcttcaccagcggccagtgccaggtgcgggtgctgccccctgtgcccacagagggcctgaccccagatgatgtgcctgccctggccgacagagtgcgccacagcatgctgaccgtcttccgggagatcagcacagatggccggggcggcggggactacctgaagaagccaggcggcggcggctag

SEQ ID NO: 303258 - DNA, 276 bp, Artificial Sequence
  derived and/or modified sequence
cacagcgccagcacccccatcctgacccacagccacccagcccagggcatgatggaggtgctgcccggccgctgtgtgcccatcgccaagcgggagctgctgtgggccggcagcgctggcctggcctgctggctggccggggtcatcttcatcgacaggaagaggactggagatgccatctctgtgatgtctgaggtggcccagaccctgctgacccaggatgtgagccaccctggcctgctgctgcaggagggcgccagcctgcacctgggctag

SEQ ID NO: 303259 - DNA, 991 bp, Artificial Sequence
  derived and/or modified sequence
agagagacagcagaaagggagggagggagggtgctggggggacagccccccaccattcctaccgctatgggcccaacctcccactcccacctcccctccatcggccggggctaggacacccccaaatcccgtcgcccccttggcaccgacaccccgacagagacagagacacagccatccgccaccaccgctgccgcagcctggctggggagggggccagccccccaggccccctacccctctgaggtggccagaatggatttgtggccaggggcatggatgctgctgctgctgctcttcctgctgctgctcttcctgctgcccaccctgtggttctgcagccccagtgccaagtacttcttcaagatggccttctacaatggctggatcctcttcctggctgtgctcgccatccctgtgtgtgccgtgcgaggacgcaacgtcgagaacatgaaggatgatggaggtactgccaggccgctgtgtgcccattgccaagcgcgagctactgtgggctggctctgccgggctggcctgctggctggcaggagtcatcttcatcgaccggaagcgcacgggggatgccatcagtgtcatgtctgaggtcgcccagaccctgctcacccaggacgtgagggtctgggtgtttcctgagggaacgagaaaccacaatggctccatgctgcccttcaaacgtggcgccttccatcttgcagtgcaggcccaggttcccattgtccccatagtcatgtcctcctaccaagacttctactgcaagaaggagcgtcgcttcacctcgggacaatgtcaggtgcgggtgctgcccccagtgcccacggaagggctgacaccagatgacgtcccagctctggctgacagagtccggcactccatgctcactgttttccgggaaatctccactgatggccggggtggtggtgactatctgaagaagcctgggggcggtgggtgaaccctggctctgagctct

SEQ ID NO: 303260 - DNA, 852 bp, Artificial Sequence
  derived and/or modified sequence
atggacctgtggcccggcgcctggatgctgctgctgctgctgttcttattgctgctgtttttgctccccacgctttggttctgtagtccgagtgccaaatatttcttcaaaatggcattctacaacgggtggattctgttccttgctgtgctggcaatccccgtctgcgcggtgaggggccgcaatgttgaaaacatgaagattctgcgcctgatgctgctgcacatcaagtatctctatggtatacgggtcgaagtcaggggggctcatcatttccccccgagccagccttacgttgtagtgagtaatcaccagtctagtctagacctgttaggcatgatggaggttctgcccgggcgttgtgtgcccatcgccaagcgggaactgctctgggcagggtctgctggcctggcttgttggctggccggggtgatctttattgacagaaagcgcaccggagatgccatttccgtaatgtctgaagtagcccagacccttcttactcaggacgtcagggtttgggtattccccgaagggacacgaaatcataatggtagcatgctgccttttaaacgaggtgctttccacctggccgtgcaggcccaggtgccaatcgtccccatcgtcatgagtagttatcaggacttctattgcaagaaggaaaggaggtttacctccggccaatgtcaggtcagggtgcttcctcctgtgcccacggagggtctgacacccgacgacgtgccagcccttgctgatcgcgtccggcacagcatgctaaccgtctttcgcgaaattagtacagacggacggggcggtggcgactaccttaagaaacccgggggaggaggttag

SEQ ID NO: 303261 - DNA, 852 bp, Artificial Sequence
  derived and/or modified sequence
atggacctgtggcccggcgcctggatgctgctgctgctgctgttcctgcttctactctttctcctgcctacgctttggttctgcagtcccagcgctaaatatttcttcaagatggcattctataacgggtggattctattcctagccgtgctggcgatacccgtatgcgcagttcgagggagaaacgttgaaaacatgaaaattctgcgcctgatgctcctccacataaaatacctgtatggaatccgcgtggaggttcggggagcccaccatttccctcccagccaaccctacgttgtcgtctcgaaccaccagtcgtctctcgatttgttggggatgatggaagttttgcccgggcggtgtgtcccaatagctaagagagagttgctgtgggcaggctcagccggcctcgcatgctggttggctggtgtgattttcattgaccggaagaggacaggcgatgctatttccgtgatgtccgaggtggcacagacgcttttaacgcaggacgttagagtgtgggtcttcccagaggggacacgtaaccacaatggcagtatgctgcccttcaagcgcggtgcttttcatctggcagtccaagcccaagtcccaatagtccccatcgtcatgtcaagttaccaggacttctactgcaaaaaggagagaaggtttacctccgggcagtgccaggttcgtgttcttccgccagtaccaacagagggattaacaccagacgacgtgcctgctctggctgacagagttaggcatagtatgcttacggttttcagggagatctccaccgacggtagaggtggtggggattacttgaaaaaaccgggagggggggggtag

SEQ ID NO: 303262 - DNA, 852 bp, Artificial Sequence
  derived and/or modified sequence
atggacctgtggcccggcgcctggatgctgctgctgctgctgttcctgcttttgttgtttctgcttccaacgctctggttttgtagcccctctgcaaagtatttctttaagatggccttctacaatggatggatcctcttcttagccgtgctggcgatacccgtctgcgcagtgcgaggaagaaacgtggaaaatatgaagattctgcggctcatgcttctccacatcaagtatctgtatggcatcagagtggaggtcaggggtgcacatcacttcccaccctcccagccttacgtggtggttagcaatcatcaaagctccctggacttgctgggaatgatggaagttctgcccggccggtgcgttcccatcgctaaacgcgaattactgtgggcaggctcagccggactggcatgctggctggcaggggtcattttcatcgacagaaagcgaaccggggacgccatttccgttatgtcggaggtggcccaaacacttctgactcaggacgttcgagtgtgggtgttcccagagggtaccaggaaccacaatggatctatgctgccatttaagcgcggtgccttccatctggccgtccaggcccaggtgcctatcgtgcccatcgttatgagcagttaccaagatttctattgcaagaaggagagaagatttacaagcggtcagtgtcaggttcgagtgctccctcctgttccgacggaaggcttaactcctgacgatgtacccgccctagccgatcgagtgaggcactcgatgttaaccgtgttcagagagataagtacagacggcagggggggcggagactacttgaagaagcccggaggggggggctag

SEQ ID NO: 303263 - DNA, 852 bp, Artificial Sequence
  derived and/or modified sequence
atggacctgtggcccggcgcctggatgctgctgctgctgctgttcctacttcttttgttcctgttgccaaccctgtggttctgctcacccagcgccaagtattttttcaaaatggcgttttacaacggctggatcctcttccttgcagtgctggctatcccagtgtgcgccgtacggggacgcaacgtggagaacatgaaaattctcagattgatgcttctgcatattaagtatctctacggaatcagggttgaagtgaggggggctcatcattttccaccttctcaaccctatgtcgtcgtgtccaatcaccaatctagcctcgatctccttgggatgatggaagtcctgcccgggcggtgcgtgccaatagccaaacgcgagctgctgtgggctggatccgccggcctcgcctgctggcttgccggggtgatcttcatcgatcgcaagaggaccggcgacgcaatctctgtgatgtccgaagttgcccaaacgctcctgacccaagacgttagggtttgggtcttccccgaggggaccagaaaccataatggctctatgttgcctttcaagaggggcgctttccatttagccgtacaagcgcaagtccccattgtgccgatcgtcatgtcctcctaccaagatttctactgtaagaaggagaggcgatttacttccggccaatgccaggtcagagtccttccacccgtcccgactgagggactgacgcccgatgatgtccccgctctcgctgaccgtgtgaggcactccatgctaacagtgtttagagagatttctaccgatggtagaggagggggggactaccttaaaaaaccgggcggaggcgggtag

SEQ ID NO: 303264 - DNA, 852 bp, Artificial Sequence
  derived and/or modified sequence
atggacctgtggcccggcgcctggatgctgctgctgctgctgttcctcctgttgctattccttctacccacactctggttctgctctcccagcgccaagtatttcttcaagatggcattctataatggttggatcctctttcttgctgtcctggccattcctgtgtgcgccgtgcgcgggagaaatgtggaaaacatgaagatcttgagacttatgctactgcatattaagtacctgtatggtatccgggtggaggtgaggggagctcatcactttcctccttcccagccatacgtagtagtgtcgaaccaccagtctagtctggacctgttgggaatgatggaggtgctgccaggtagatgcgtgcccatcgctaaaagggagctcctgtgggccgggtccgcagggctggcctgctggctggcaggcgttatcttcattgataggaagcgaacaggcgacgctatctccgtcatgtccgaagtcgcccagaccctcctgactcaagacgtgagagtgtgggtcttccccgagggcacaagaaatcataatggttctatgctccctttcaagcggggggccttccacctagctgttcaggcccaagtacccatcgtgcccatagtcatgtccagctatcaggatttctactgcaagaaggagagaagattcacctccgggcagtgtcaggtgagagtcctgcctccagttccaaccgagggactgacacccgatgacgtaccggccctcgccgatcgggtgagacactcaatgctgaccgtctttcgggagatttctactgacggtcggggagggggggactatctgaagaaacctggcggcggtggctag

SEQ ID NO: 303265 - DNA, 852 bp, Artificial Sequence
  derived and/or modified sequence
atggacctgtggcccggcgcctggatgctgctgctgctgctgttccttctgctgttattcctgctccctacactttggttttgcagtccgagtgcaaagtacttcttcaagatggctttctataatggatggatcctgtttctggctgtgttagccatacccgtgtgtgctgtgcggggccgcaacgtggagaatatgaagatcttacgcctaatgctgctacacatcaagtacctgtatggtattcgggttgaggtgaggggcgcccatcactttcccccctctcaaccctatgtggtggtatcaaatcaccaatcttctctcgacttattagggatgatggaagtactcccaggaaggtgtgtgccgatagccaagagggagctgctctgggccggctcggcaggacttgcatgttggttggcaggggtgatattcattgacagaaagaggaccggcgatgccatttcagtgatgtctgaggtcgcccagacactgctgacacaggacgtgagggtttgggtgttccccgagggcacccggaatcacaatggaagtatgctcccattcaagaggggcgcattccatttggctgtgcaggcacaggtgccaattgttccaattgttatgtcaagctaccaggatttctattgtaagaaagaaaggcgtttcaccagtggccagtgccaggtgcgcgtgctgcctcctgttccaactgaggggctcactcccgatgacgtacccgcgttagcagatcgcgtacgacattccatgttgaccgtgttcagagagatcagcaccgacgggcgtggaggtggggattacctaaaaaagccaggcggtggcggatag

SEQ ID NO: 303266 - DNA, 852 bp, Artificial Sequence
  derived and/or modified sequence
atggacctgtggcccggcgcctggatgctgctgctgctgctgttcctcctcctcttattcctccttcccactctgtggttttgttcgccatcagctaagtacttttttaaaatggctttctacaatgggtggattttgttcctggccgttctcgccattccggtctgcgccgtccgcggccggaatgttgaaaacatgaagattctgaggttaatgttgcttcatatcaaatatctgtatgggatccgtgtggaagttcggggtgctcaccatttcccgccctctcagccatatgtggtggtatctaatcatcaaagttcactggatttgctgggcatgatggaagtgctgccaggcaggtgtgtcccgattgccaaacgcgagctgctttgggccggtagcgccggactggcctgttggcttgccggcgttattttcattgatcggaaacggacgggagatgccatcagcgtcatgtctgaggtcgctcagaccctgctgacacaagacgtgcgggtatgggtgtttccagagggtacgagaaaccataacggcagtatgctcccattcaaaaggggcgctttccacctggccgttcaggcccaggtgcccattgtgcctatcgtgatgagctcttaccaggacttctattgcaagaaggagcgacgctttacttccggccaatgtcaggtacgagtgttgccccctgtaccgacagagggcctcactccggatgacgtccccgctctggcagatcgcgtcaggcactcaatgctgaccgttttcagagagatctctactgatgggcggggtggaggagactacctgaaaaagccaggtggtggcgggtag

SEQ ID NO: 303267 - DNA, 852 bp, Artificial Sequence
  derived and/or modified sequence
atggacctgtggcccggcgcctggatgctgctgctgctgctgttccttctactcctcttcttactacctaccctctggttttgctctccctcagccaaatacttctttaaaatggctttctataatggatggattttattcctcgccgtcctggctattcctgtctgtgcggtgcggggaaggaatgtagagaatatgaaaattctgcgtctaatgcttctgcatataaagtacctgtacggtatccgcgtagaagtcagaggagcccaccactttccccctagtcagccttacgtggtcgtctctaatcatcagagttctctggaccttctggggatgatggaagtactgcctggtagatgcgtgcctatcgcgaaaagggagctactgtgggccggctcagccggcctggcctgttggctggccggggttatcttcatcgatcgcaagagaaccggggatgctatcagcgttatgtcagaggtggcacagacattacttacgcaggacgttcgggtgtgggtttttcctgaggggacgcggaatcataatggatcgatgctgcccttcaagaggggtgctttccacctggccgtacaggctcaagtcccaatcgttcctattgtcatgagctcttaccaggacttttattgtaagaaagagagacggtttacaagcggccagtgtcaggtgcgcgtgctacctcccgtgcctaccgaggggctcaccccagacgacgtgcctgcgctagccgaccgtgttcgtcattccatgctgaccgtctttcgtgaaatcagcaccgacggccgaggcggcggggactaccttaagaaacccggtggtgggggctag

SEQ ID NO: 303268 - DNA, 852 bp, Artificial Sequence
  derived and/or modified sequence
atggacctgtggcccggcgcctggatgctgctgctgctgctgttcttgctcctgctttttctcctgccaacactctggttttgttctccaagtgcaaaatatttctttaagatggctttctataatggttggatactctttctggcggtactcgccattcccgtatgtgcagtacgggggaggaatgtcgagaatatgaagatactgagactaatgctgttacatatcaagtatctctatgggatcagggtggaagtgcgcggagcacaccatttccctccaagccagccttacgtggtcgtgtccaatcatcaaagtagtctcgacctgctgggaatgatggaagtgctgcctggtcgatgcgttcctatcgctaaacgcgagctcctttgggcgggaagcgcagggcttgcttgttggctggcaggagtgatatttattgatagaaaaagaaccggtgatgccattagcgtgatgagcgaggtagcacagaccctccttacgcaggacgtccgggtgtgggtctttcctgaaggcaccagaaatcacaacggctccatgctgccattcaaacgcggggcgttccacctggcagttcaggcgcaggtgccgatcgtgccaatcgtgatgtcatcataccaagatttctactgtaagaaggagagacggttcacgagtgggcagtgtcaggtgcgggtcctccctcctgttcctaccgaaggcctgacacccgacgacgtgcccgccctggctgaccgagtgagacacagtatgctaacagtattccgggagatatccacagacgggcgcggcggtggcgattacctcaagaagcctgggggcggagggtag

SEQ ID NO: 303269 - DNA, 852 bp, Artificial Sequence
  derived and/or modified sequence
atggacctgtggcccggcgcctggatgctgctgctgctgctgttcctgctcctgctgtttctgctaccgaccctctggttttgtagcccttcagcaaaatacttcttcaagatggctttctataacggttggattttatttttggcggtactggcaattcccgtttgtgcggtgcggggcagaaatgtggagaacatgaaaatcctacgtttgatgctgttacatatcaagtatctctacggcatacgagtggaggttcgcggcgcgcaccattttcctccatctcagccttatgttgtcgtttccaaccaccagtcctccctggacctgctgggtatgatggaggtgctgccaggtagatgcgtgcccatcgctaaaagagagttgttgtgggccggctcggcagggcttgcttgttggcttgcaggggttattttcattgaccgaaagcgcactggggatgcaatctccgtcatgtccgaagtggcccaaactctgttaacgcaggatgtgcgggtgtgggtctttccagagggcacccgtaatcataatggtagtatgctcccattcaagaggggagctttccacctggcagtgcaggcgcaggtccctattgtgccaatcgtgatgtcctcctaccaagatttctactgtaagaaggaaaggcgcttcacgagtggccagtgccaggtgcgggttctgcctcccgtgccaaccgagggcctcactccggatgatgtgcctgctttggctgatcgagtgcgccattcaatgctgacagtgttcagggaaatctcgaccgacggtaggggaggtggagattacctgaaaaagccaggtggaggcggttag

SEQ ID NO: 303270 - DNA, 852 bp, Artificial Sequence
  derived and/or modified sequence
atggacctgtggcccggcgcctggatgctgctgctgctgctgttccttttactgctgtttctgctgcccactctgtggttctgttcgccctcggcaaagtatttctttaaaatggccttttacaatggttggatcctgttcctggctgtcctcgccatccctgtgtgcgcggtgcgtggtcgcaatgtggaaaacatgaaaatccttagacttatgctcctccacatcaagtacctttacggaatacgggtcgaggtccggggagcacaccattttccaccctcccaaccatatgtggtcgtgagcaatcatcagagttcactcgatttgctgggcatgatggaggttctgccaggaagatgtgtaccaattgcaaagcgggagctgctgtgggctggaagtgcgggacttgcctgttggctggctggcgtcatatttatcgatcgcaagcggacaggagatgccattagcgtgatgagcgaagtcgcacagacactacttacacaggatgttagagtgtgggttttcccagaaggtacaaggaatcataacggttccatgctcccttttaagcgtggcgcctttcatctcgctgtacaggcgcaggtgcccattgtacctatcgtcatgtcctcatatcaggatttctactgcaagaaggaaagacggtttacttcggggcaatgccaggtgcgggtgctccccccagtaccgactgaggggctcacaccagacgacgtccctgccctggctgaccgcgttagacatagcatgctaacagtgttccgggaaataagcactgacgggcgtggcgggggggattacctgaaaaaacccggaggcggaggctag

SEQ ID NO: 303271 - DNA, 852 bp, Artificial Sequence
  derived and/or modified sequence
atggacctgtggcccggcgcctggatgctgctgctgctgctgttcctcctgttgctctttctattgcccaccctttggttttgctcaccttccgcaaaatatttttttaagatggccttttacaatggttggattctttttctcgctgtgttagcgatcccagtgtgcgccgtacggggccggaatgtggagaacatgaagatactacggctgatgctccttcatattaagtacctctacgggatccgggtggaggtaagaggcgctcaccactttcctccaagtcagccctatgttgtggtcagcaaccaccagagcagcttggacctgctggggatgatggaggtgctgcctggtaggtgcgttcccatcgctaaaagggagttgctatgggctggaagcgcaggattggcttgctggttagccggcgtgattttcatcgacaggaaacgtacgggagacgcaatatcagtgatgtccgaggttgctcaaactctattgacccaagacgtgagagtatgggtgttccccgaaggtaccagaaaccataatggatcaatgctgccattcaagaggggcgccttccacttagccgtgcaggcacaggtgcccatcgttccaatagtgatgtcctcgtatcaggatttttattgtaagaaagaacggaggttcacatccggccagtgccaggtgcgcgtgcttccccccgtgccgaccgaaggccttacacccgacgacgtaccagcattggccgatagggtgcgtcactcaatgctgaccgtcttccgcgagattagtactgacggtcgaggggggggggattatctcaaaaaacccggcgggggcggctag

SEQ ID NO: 303272 - DNA, 516 bp, Artificial Sequence
  derived and/or modified sequence
atgatggaggtgctgcccggccggtgcgtgcccatcgccaagcgggagctgctttgggccgggtctgccggcctggcttgttggctcgccggagtgatctttatcgataggaagcgaacaggggatgcgatcagcgtgatgagcgaggtggcccaaacacttttgacccaggacgttagggtatgggtatttcccgaaggcaccaggaaccataacgggagtatgctcccctttaaacgaggggcgtttcaccttgcagtgcaagcacaggtcccaattgttcccattgttatgagtagctaccaagacttctactgcaaaaaagaaagaaggtttacgtcaggacagtgccaggtgcgcgtcctgcccccagtgccaactgagggcctcacacccgatgatgtgcctgcacttgccgaccgtgtgcgccatagcatgctgactgtcttccgggaaatatctacagacggacggggcggcggggattacctcaagaagccagggggtggaggttag

SEQ ID NO: 303273 - DNA, 852 bp, Artificial Sequence
  derived and/or modified sequence
atggacctgtggcccggcgcctggatgctgctgctgctgctgttcttgctcctgctgtttcttttgcctacgctgtggttctgcagtccttcagctaaatacttttttaagatggccttctataatggatggatccttttcctcgccgttctggccatacccgtgtgcgccgtacgaggcaggaacgtcgaaaatatgaaaatactgaggctaatgttgctccacattaagtatctatacggcatcagggtcgaggttcgtggagctcaccacttccccccgtcacagccctacgtagtcgtgtccaatcaccagtcttctctagatctcttaggcatgatggaggtgctccctgggaggtgtgtgccaatagccaagcgggagcttctttgggccggttctgcaggcctcgcctgctggctggccggagttattttcatcgatcggaagcggactggggatgccattagcgtgatgagtgaggtggcccagaccctgttgacacaggacgtgcgggtttgggtgtttcctgaaggaacgcgcaaccacaacggctctatgttgccattcaagcgcggcgccttccacctagctgttcaggctcaggtacccatcgttccgattgtcatgagcagctaccaggatttttattgcaaaaaggagcgcagattcacatcaggtcagtgccaggtgcgggtgttaccccctgttccaaccgaagggttaacacctgacgatgtgcccgccctggccgacagggtgcgccactcaatgctcaccgtatttcgcgagatctccacagatggaagaggaggcggcgattatctgaaaaagcccggggggggcggatag

SEQ ID NO: 303274 - DNA, 852 bp, Artificial Sequence
  derived and/or modified sequence
atggacctgtggcccggcgcctggatgctgctgctgctgctgttcttattgctcctttttctcctgcccaccttgtggttctgctcgccttccgccaaatacttttttaagatggctttctacaacggatggatcctcttcctcgccgtgctggccatccccgtctgcgcagtgcggggccgtaacgtggagaacatgaaaattttaaggctgatgctgctacacatcaaatacctctatgggataagggtcgaagtgcgaggagctcatcatttcccaccctcacaaccttacgtcgtggtgagcaaccatcagtcgtccttggacctgctgggaatgatggaagtcctgccaggtcgctgtgtgcctattgcgaaacgcgagctcctgtgggccggaagcgccgggctggcatgctggcttgccggggtcatttttatcgaccggaaacggactggtgacgccataagcgtgatgtccgaggtggcccagacactcctgacacaggatgttcgcgtgtgggtgttcccggaggggaccagaaatcataacggctctatgctgccttttaaaagaggcgcatttcacctggctgttcaggcacaggtgccaatcgtgcccatcgtgatgtctagctaccaagacttctactgcaaaaaggaacgcagatttacctccggacagtgtcaggtgcgggtgttacccccagtgcccacagaggggctcacaccagacgatgtccccgctctggcagacagagtgcggcactcaatgctcactgtctttagggaaatctccactgacggcagaggaggtggggactatctgaagaagcccggtggcggcggatag

SEQ ID NO: 303275 - DNA, 852 bp, Artificial Sequence
  derived and/or modified sequence
atggacctgtggcccggcgcctggatgctgctgctgctgctgttcctgttgttgctgttcttactgcccacactctggttttgctctccatctgctaagtacttctttaaaatggccttctacaacggttggattttgttcttggcagtattggccatacctgtgtgcgctgtgagaggccgcaacgtggagaatatgaagatactgagacttatgctcttacacatcaagtatctctacggcattcgtgtcgaagtgagaggagctcatcactttccaccttcgcagccttacgtggtggtaagtaatcaccagagctccctcgacctgctcggtatgatggaggtgctgcccggccggtgtgtacctattgcaaaaagggagcttctgtgggccggtagcgcaggcttggcctgttggttggccggagtgatctttatcgatagaaagaggacaggcgacgcaatctccgtgatgagtgaggtggcccagactctgcttacccaggatgtccgtgtttgggtcttcccagagggcacacggaatcataacgggtccatgctcccatttaagaggggggccttccacctggcagtgcaagctcaagtacccattgtgcctatcgtgatgtcttcttatcaagacttttactgtaaaaaagaacggcgctttacttcaggacagtgtcaggttcgagtgttgcctccggtccccacagagggactgactcccgatgatgtgcccgcacttgctgatcgagtgaggcattccatgctgactgtgttccgggaaatttctactgacggtcgaggaggtggagactatctcaaaaagccaggaggtgggggctag

SEQ ID NO: 303276 - DNA, 852 bp, Artificial Sequence
  derived and/or modified sequence
atggacctgtggcccggcgcctggatgctgctgctgctgctgttcctcctcctgctttttttgctccccaccctgtggttttgttccccttcagccaagtacttttttaagatggcattttacaatggctggattttatttctggcagtgctggcgatccctgtttgcgcggtgcgtggcagaaacgtggaaaatatgaagatcctgcgactgatgctcctgcatatcaaatacttatacggaatccgtgtggaggttcgcggagcacaccatttcccaccttcacagccttatgtggtcgtatctaaccaccagtcttcccttgatttactgggaatgatggaggttctgcccggccggtgtgtgcctatcgctaaacgcgagctactgtgggccgggtccgccggtctagcatgctggctcgctggagtaatttttatcgaccggaagaggacaggagatgctattagtgtaatgagcgaggtagctcagacgctcctcactcaagacgtgcgcgtctgggtcttccccgagggcacgagaaatcacaatggttcgatgttaccttttaagagaggagcttttcatctggcggtccaggcccaggtcccgatcgtgcctattgtgatgtcaagttaccaggacttttattgcaaaaaggaacgaagattcacgagcgggcagtgtcaagtacgcgtgctgcctcccgttccgaccgagggcctcacacccgacgatgtcccagccttagccgacagagtgcggcattcaatgttgacggtatttagggaaatcagcacagatgggcgtggagggggagattacctcaagaagccaggaggtggaggctag

SEQ ID NO: 303277 - DNA, 852 bp, Artificial Sequence
  derived and/or modified sequence
atggacctgtggcccggcgcctggatgctgctgctgctgctgttcctgctgttactctttcttcttccaaccttatggttctgctccccatccgccaagtactttttcaagatggcgttttataatggctggattctgttcctggcggttctggctattcccgtctgcgcggtacggggaagaaatgtggaaaacatgaaaattctgcgtctgatgctcctgcatataaagtacttatacggaattcgggtggaggtgagaggagcgcaccattttccaccctcgcagccatacgtcgtagtttcaaatcaccagtcttcccttgatttactgggcatgatggaggttctcccgggacgctgcgtacccattgccaaacgcgagttgctttgggcggggtccgccggactggcctgttggctggctggcgtcatcttcatcgaccgtaagagaacaggggatgccatctcagtcatgtccgaagtggcccagactctgctcacccaagatgtgagggtctgggtgtttcctgagggaacaaggaaccacaatggcagcatgttgccgttcaagaggggggcctttcatctcgctgtgcaagcccaagtgcccatagtgccgatcgttatgagcagctatcaggacttctattgcaagaaagagcgccgcttcacctctggtcagtgtcaagtccgcgtactgccacccgtgcctacagagggattgacacctgatgatgtgcctgctttggccgatcgcgtgcgtcattctatgctcacagtgtttcgcgaaatcagcacagacggccggggtggtggagattatcttaagaagcccggtggaggtggctag

SEQ ID NO: 303278 - DNA, 852 bp, Artificial Sequence
  derived and/or modified sequence
atggacctgtggcccggcgcctggatgctgctgctgctgctgttcttgctcttgttgtttcttctgcctactctatggttctgtagtccatccgcaaagtacttctttaagatggcattctacaatggctggatcctttttctggccgttctggcaatcccagtgtgcgctgtgcggggacggaacgtagagaacatgaagatcctgagacttatgctgcttcacatcaagtacctgtacggaattagggtagaagttaggggcgcccatcacttcccgccatcccagccctatgtggtcgtcagtaatcatcagagcagcctcgacctcttagggatgatggaggtattgccgggaaggtgcgtcccgatagctaagcgagaattactttgggccggtagcgccggtctggcctgttggctggccggggtcatcttcattgataggaagagaaccggcgacgcaattagcgtgatgagtgaagtcgcccagacacttctgacccaggacgtccgggtctgggtgttccccgagggcactcgaaaccataacggatcaatgctgcccttcaagcggggcgcctttcacctggccgtccaggctcaggtgcccatcgtgcccatcgttatgtcatcatatcaggacttttactgtaagaaggagaggaggttcaccagcggacagtgtcaggttcgcgttctgccccctgtcccaacagaaggcttgactcctgatgatgtgcctgctctcgcagacagggtgaggcactccatgctgactgtgttccgcgagatctctaccgatggcaggggcgggggcgactatcttaaaaaacccggcggtggcgggtag

SEQ ID NO: 303279 - DNA, 852 bp, Artificial Sequence
  derived and/or modified sequence
atggacctgtggcccggcgcctggatgctgctgctgctgctgttcctgctgttactgtttttattgccaactttgtggttttgcagtccttctgcaaagtatttttttaagatggccttctataatggctggatccttttcctggcggtgctagctatccctgtctgtgctgttcggggaaggaatgtggagaatatgaagatcctccgtctgatgctcctccatatcaagtatctttacgggatcagagtggaggtccggggagcccatcatttccccccttctcagccgtatgtggtggtctccaaccaccagtcatccttagaccttctcggaatgatggaagtgctccccgggcgatgcgtgcccatagctaaaagagagctgctgtgggccggaagtgctggcctggcttgctggcttgcaggcgttatttttatcgaccggaagcgcaccggggatgcaattagtgtaatgagcgaggtagctcagacgctgctcacccaggatgtcagagtgtgggtcttccccgaaggcacacggaatcacaacggctccatgctgcccttcaagcgcggagccttccacctagccgtccaagcgcaggttcccatcgttccgatcgttatgagtagctatcaggatttctattgtaaaaaggaaaggaggttcacttccggtcagtgccaggttagggtgctacctccagtgccaaccgaaggtctcaccccggacgatgtgcccgcactcgccgacagagtgcgacactctatgttgacagtcttccgcgagattagcacggacggtaggggggggggagattaccttaagaagcctggcggaggcgggtag

SEQ ID NO: 303280 - DNA, 852 bp, Artificial Sequence
  derived and/or modified sequence
atggacctgtggcccggcgcctggatgctgctgctgctgctgttccttttactgttgttcctgctgcctactctgtggttttgctcaccttctgccaagtactttttcaaaatggccttttataatggctggatcctctttctcgccgtgctggcaatacctgtgtgcgctgtgcgtggcagaaacgtggagaatatgaagatacttcgactgatgctgctgcatatcaagtatctgtacggcatccgcgtagaggtccgtggcgctcaccatttccccccctcccagccttatgtggttgtgtcaaaccaccagtctagtttggaccttctaggcatgatggaggtactgccgggccgttgtgttcctatagctaagagggagcttctgtgggccggatccgcgggactggcgtgctggctggctggggtcatctttattgatagaaaacggactggcgacgcaatctctgtgatgagcgaagtagcccagacattgctgacacaggacgtgcgggtttgggtattcccggagggtaccaggaatcataatggctcaatgctccccttcaagcgcggtgcgttccacctcgctgtgcaggctcaggtgcccatcgtaccgatcgtgatgtctagctaccaagacttctattgcaaaaaagagcgaaggtttaccagcgggcaatgccaggtcagggtgctgcctccggttcctactgaaggcctcacacctgatgatgtccccgctctagctgaccgcgttcgacactctatgcttaccgtgtttagagaaatctctaccgacgggcggggtggcggagactatctgaagaagcccgggggcggcggctag

SEQ ID NO: 303281 - DNA, 852 bp, Artificial Sequence
  derived and/or modified sequence
atggacctgtggcccggcgcctggatgctgctgctgctgctgttccttctcctgctgtttctgcttcctacgttatggttttgctctccgtcagctaagtacttcttcaagatggctttctacaacggctggattctttttctagctgttctagcgatccccgtgtgcgctgttagaggacgtaatgtggaaaacatgaagatactgcgtctgatgcttctccatattaaatacctttacgggatacgtgtcgaggtacggggcgctcatcacttccctcccagccagccatatgtggttgtcagtaatcatcaatcttcacttgaccttcttgggatgatggaggttttgcctggacgatgcgtgcctattgcgaaaagggagctgctctgggccggcagtgccggcctggcatgttggttagcaggggtcattttcatagacaggaagcggacaggcgacgctatcagcgtcatgagcgaggtggcccagacccttttgacacaagatgtccgggtctgggtctttcctgagggaactagaaaccataacggaagcatgttaccttttaagagaggagcctttcatctggctgttcaggctcaggtgccaatcgttccaatcgtcatgtctagctatcaggatttttactgcaaaaaagagaggcgctttacctcgggacagtgtcaggtccgagtactgcctccagtgcccaccgaaggactgactccagacgatgtgccggcacttgccgatagagtgaggcacagtatgcttaccgtgtttcgggagatcagtacggacggccgaggcggaggcgattacctcaagaaacctggaggaggcggttag

SEQ ID NO: 303282 - DNA, 852 bp, Artificial Sequence
  derived and/or modified sequence
atggacctgtggcccggcgcctggatgctgctgctgctgctgttcctgcttttgctatttttgttgccgaccctctggttctgttcccccagtgcgaagtattttttcaagatggcattctacaacggctggattctctttctggcggtgctagctatcccggtgtgtgccgtgcgcggtcgaaacgttgagaacatgaagattctcaggctcatgctgcttcacatcaaatatttgtacgggatccgggttgaagtaagaggtgcccaccatttcccaccttcgcagccctacgtggtggtatcaaatcatcaatcttctctggacctacttggaatgatggaagtgttgccagggcggtgtgtgcctatcgcaaaacgcgagcttctttgggcaggcagcgccgggctggcttgctggttagccggggttattttcatcgacagaaaacgaacaggagacgcaatctctgtaatgtcagaagtcgcccagaccctgttgactcaggacgtccgggtgtgggtgttcccggaaggtactcgaaatcacaacggctcgatgctccccttcaagcggggtgcttttcacctggccgtacaagcacaggtgcccatagtccccatcgttatgtcctcatatcaggatttttactgcaaaaaagaacgacgattcacatcaggacagtgccaagtcagagtgttgccgcctgtacctacagaggggctgacacctgacgatgtgcccgcgctggctgatcgggtgaggcacagcatgttaacagtgtttcgcgagatctccactgatgggcgcggagggggcgactatcttaagaaacctggaggcggtggatag

SEQ ID NO: 303283 - DNA, 852 bp, Artificial Sequence
  derived and/or modified sequence
atggacctgtggcccggcgcctggatgctgctgctgctgctgttccttctgctgttattcctactcccaaccttgtggttttgctctcctagtgcgaaatacttcttcaagatggcattctataatggatggatccttttccttgccgtactggccatcccggtctgcgctgttcgcggccgcaacgtagagaatatgaagattctgaggttaatgcttctgcatattaaatacctttacggtatcagagtggaggtgcgaggggcccatcactttcctccttcacaaccatacgtggtcgtcagcaaccaccaaagctctttagaccttctgggaatgatggaggtactgcccggacggtgtgtacccattgctaaaagagagcttctgtgggcaggatccgctggattagcctgctggttagccggggtcatatttatcgatcggaagaggacaggagacgccataagcgtcatgtctgaggtagcacagacccttttgactcaggatgtgcgggtgtgggtttttcctgaaggtacaaggaatcataacgggagtatgttgccattcaaaagaggagcttttcacctggctgttcaggcccaagtccctatcgtgccaatcgttatgagtagctatcaagacttctactgcaagaaggagcgacgcttcacgtcaggacaatgccaagtgcgggttctgccaccggttccaaccgaaggccttactcccgatgacgtacctgccctggccgatagagtgagacactccatgctcaccgtctttagggaaatcagtaccgatggtagggggggaggggattacctgaaaaaacccgggggaggcggatag

SEQ ID NO: 303284 - DNA, 852 bp, Artificial Sequence
  derived and/or modified sequence
atggacctgtggcccggcgcctggatgctgctgctgctgctgttcctcctgcttctattcctgttgccgacactgtggttctgctcaccgagtgcgaagtacttcttcaaaatggcattctataatggttggattctgttcttagcagtcctggccatccctgtgtgtgctgtgagagggagaaacgtcgaaaacatgaaaatcctgcgcctcatgcttctccatataaagtacttgtatggcattcgggtggaagttcgtggggctcatcatttccctccaagtcagccctatgtggtagtgagcaatcaccaatcatcactggatctgctaggaatgatggaagttctgcctggaagatgcgtccccatagcgaagagagagctgctctgggccggttcagcgggcttggcctgctggctggctggtgtgatctttattgacaggaaacgcactggtgacgcgatatctgtgatgtccgaggttgcccagacattgctgacccaggacgtacgggtttgggtgtttcccgagggcactcgcaatcacaatggctctatgctcccctttaaaaggggggcgtttcacttagcagtccaggcgcaagtgcccatcgtgcccatagtgatgagctcctaccaagacttttactgcaaaaaggagcggcgatttacaagtgggcagtgccaggtgagggtgttgcctccggtgccaaccgagggcttgaccccggatgatgtacccgctcttgctgatagggtgaggcacagcatgctgaccgtatttcgcgaaatctctacagacgggaggggcggaggagactacctgaagaaacctggcggaggaggatag

SEQ ID NO: 303285 - DNA, 852 bp, Artificial Sequence
  derived and/or modified sequence
atggacctgtggcccggcgcctggatgctgctgctgctgctgttcctcctcttactgtttctgttgcctaccttatggttctgcagtccgagtgctaaatatttcttcaagatggccttctataacgggtggatcttatttctggctgtgttggccatacctgtctgcgccgtacgcggacggaatgtggaaaatatgaagatactgcgccttatgcttctacacataaaatacttgtatggcattagagtggaggtcagaggtgcgcatcacttccccccaagtcagccctatgttgtggtctccaaccaccagtcctcattggacctgctcgggatgatggaagtgctgcctgggagatgtgtgcccattgcgaaacgggaactcctctgggctgggtctgctgggctggcatgctggctggctggcgtcatatttatcgatcgcaaaagaaccggtgacgcgatctcagttatgtctgaggtggcccaaacgctgcttactcaggacgttagggtatgggtgtttccagagggcacacggaatcataatggatcaatgctccccttcaagcgcggagcttttcacttagcagtgcaggcgcaggtacccattgtgcctatcgtgatgtcaagctaccaggatttctactgtaagaaggagcgccgtttcacatctgggcagtgtcaggttcgcgtgctgcctcctgtgcctaccgaaggcctgaccccagacgatgtccccgccctggccgacagggtgagacactccatgttgacggtgttcagagagatctctacagatgggaggggcggaggcgattacctgaagaagccaggaggtgggggttag

SEQ ID NO: 303286 - DNA, 852 bp, Artificial Sequence
  derived and/or modified sequence
atggacctgtggcccggcgcctggatgctgctgctgctgctgttccttttgctgctcttcctgctgccgaccttgtggttctgctctcccagtgctaagtacttcttcaaaatggccttttacaatgggtggattctattccttgccgttctggctatacccgtttgcgctgtgagggggaggaatgtcgagaacatgaagatcctgcgtctgatgctgcttcacattaaatatctctatggcatccgggtggaggtccggggcgcacatcacttccctccctctcaaccttacgtcgtcgtatcaaatcaccagtcctctttagacctgctgggcatgatggaggtgctgccaggccgctgtgtgcctatagctaagcgtgagctcctttgggcaggatctgccgggcttgcctgctggctggctggggtgatctttattgatagaaagcggactggagatgctatctctgttatgtctgaagtggctcagacgctcctgactcaggacgtgcgcgtttgggttttccctgaggggacccggaaccacaacggcagcatgctgcctttcaaaagaggggccttccatttagctgtgcaggcgcaggtgccgatcgtccccattgtgatgtcctcatatcaggacttttattgcaagaaagaacggaggttcaccagtgggcaatgccaggtgagagtcctgccgcctgtcccaacagaagggctgacacctgatgacgtcccagctctggcagaccgcgttcggcactctatgctcacggtgttccgcgagatttccaccgacgggcgcggtgggggggactaccttaagaagcctggggggggagggtag

SEQ ID NO: 303287 - DNA, 852 bp, Artificial Sequence
  derived and/or modified sequence
atggacctgtggcccggcgcctggatgctgctgctgctgctgttcctgcttctcctgtttctgttacccaccctctggttttgctcccctagcgctaagtattttttcaagatggcattttacaatgggtggattctgtttctggccgtgcttgcgattcccgtctgtgccgtgagggggagaaacgttgagaacatgaagattctgcgactgatgctgctacatataaagtatctgtatggaatcagagtcgaggtccggggagcccaccacttcccgccgtctcagccctatgtggtggtgtccaaccaccagagctccttggacttactcggaatgatggaagtgctccctggacgctgtgttccaatcgccaagagggagctgctgtgggcaggcagtgcaggcctcgcatgttggctagccggagtgattttcatcgatcgaaaaagaactggagatgccatttcagtcatgagcgaagtggcccagacacttctgacacaggacgttcgcgtgtgggtgtttccagaaggcactcgcaaccacaacgggagtatgctcccattcaaacgaggagccttccatttagctgtgcaggcccaagtaccaatcgttcctatcgtgatgtcatcctatcaggacttctactgcaagaaggagcggaggttcaccagcgggcagtgccaggtgcgcgtgctccccccagtcccaaccgaaggtctcactcccgatgatgtaccagcactcgcagacagagtgagacacagcatgcttaccgtcttcagagaaatttcgaccgatgggcgaggggggggcgattatctcaaaaagccggggggcggcgggtag

SEQ ID NO: 303288 - DNA, 852 bp, Artificial Sequence
  derived and/or modified sequence
atggacctgtggcccggcgcctggatgctgctgctgctgctgttcctgcttcttctgttcttgctgcctaccctatggttttgctctccatcagcgaagtatttcttcaagatggctttctacaacggttggatcctcttcttggccgtcttggccatccctgtctgcgcagtgcggggaaggaacgtggaaaacatgaagatattgaggttgatgcttttacatatcaaatatttgtacggaattcgggttgaagtgagaggtgcccatcacttccctccatctcagccttatgtggtcgtatcaaaccatcaaagtagccttgatttgctgggtatgatggaggtgctccctggcaggtgcgtcccgatcgcaaagcgagaactgttatgggccggcagcgcaggtttggcatgttggttagctggagtgatctttatagaccgtaagcgcaccggtgatgcgatctcagtaatgtccgaggtggcccagaccctgttgacacaggacgtgagagtgtgggtctttcccgagggaacaaggaatcataacggctccatgcttccgttcaaacgcggcgcgttccacctggcagtgcaggctcaggtgccaatcgtgcctattgtgatgtctagctatcaggacttttattgtaaaaaagaacgcaggttcacttccgggcagtgtcaggtccgcgtgttgcctcccgtgcccaccgagggcctgaccccggatgacgtgcctgccttggcagacagagtgagacacagcatgctcacagtcttccgggagatttctacggacggccgcggtggtggagattacctcaagaagcccggcggaggtggctag

SEQ ID NO: 303289 - DNA, 852 bp, Artificial Sequence
  derived and/or modified sequence
atggacctgtggcccggcgcctggatgctgctgctgctgctgttcctacttcttctgtttctgctcccaacgctgtggttctgcagcccaagcgccaagtatttttttaagatggctttttacaacgggtggatcctctttctggccgtgcttgctataccagtctgcgccgttagaggaagaaatgtggaaaacatgaaaattttaagactgatgctgctacacatcaagtacttgtacggaatccgcgttgaggtccggggggcccaccacttccctccaagtcagccatacgtggtcgtgagcaaccaccagtccagcctcgaccttttgggcatgatggaggttcttcccgggcggtgcgtccctattgccaaaagagagctgctgtgggcaggcagtgccggcctggcctgttggttggcaggcgttatctttattgatcggaaaaggacaggtgacgccatttcagtgatgtcagaagtagcacagacccttttaacccaggacgttagagtgtgggtatttcccgagggcaccagaaatcacaatggttccatgctccccttcaagcgaggcgctttccatcttgctgtacaggcccaggtgcctattgttcccatcgtcatgtcatcataccaggatttctactgtaagaaagaaaggcgcttcacctccggccagtgccaggtgagagtattgcctccagttcctacagaaggactcaccccagatgacgtacccgccctggccgatagagttagacattccatgctcacagtcttccgtgagatctcaaccgacgggcgaggtgggggagactatttaaagaagcctggaggagggggatag

SEQ ID NO: 303290 - DNA, 852 bp, Artificial Sequence
  derived and/or modified sequence
atggacctgtggcccggcgcctggatgctgctgctgctgctgttcttgctgttgctgtttttattgccgaccttatggttctgctccccgagtgccaagtacttcttcaaaatggccttctacaacggttggatcctttttttggccgtcctggccatcccagtatgcgcagtgcggggcaggaacgtggagaatatgaagattttgaggctaatgcttctccacatcaagtacttgtacgggattagagtcgaagttcgaggggcacatcactttccaccaagccaaccctacgtggttgtgtccaaccaccagagcagtctggatttgttgggcatgatggaagtgttgccaggccgttgtgtccccattgcaaagagagagctgttatgggccggctcagcggggctggcttgctggctggctggggtcatattcatagacaggaagcgaaccggagacgctatcagcgttatgtccgaagtggctcagacactgctaacacaggacgtacgtgtgtgggtgttccccgaagggacccgcaatcacaacggcagcatgctgcctttcaagcgaggcgctttccacttggccgtgcaagcccaggtgccaatcgtccctatcgtcatgagctcttaccaagatttttactgtaaaaaggaacgacggttcactagtggacagtgtcaggtgcgcgtcctgcctcctgttccgacggaaggcttaacgcctgacgacgtgcccgcgctcgcagaccgtgtacgacactcaatgcttaccgtgtttagggagatatccactgatggcaggggcggcggagattaccttaaaaagcctgggggcggcggctag

SEQ ID NO: 303291 - DNA, 852 bp, Artificial Sequence
  derived and/or modified sequence
atggacctgtggcccggcgcctggatgctgctgctgctgctgttcctgctgctgctctttctgctcccaacactatggttttgttcacccagcgccaaatacttttttaagatggctttttataacgggtggatcttgtttctcgccgttctcgccatccccgtgtgcgcagttcggggacggaatgttgaaaatatgaagatcctgagactgatgcttctgcatatcaagtatctgtacggaattcgagtggaagtgcgtggtgctcatcactttcccccatcgcaaccgtatgttgtggtatcaaatcaccagagctctctggatttgctgggcatgatggaagttctacctggccgatgcgtacccatcgccaagcgcgaattgctatgggcgggaagtgccggcctggcatgttggctcgctggcgtcatatttattgaccgaaaacggaccggagatgccatctcagtgatgtctgaggtggcacagacgctgctgacccaggacgttagagtgtgggtgtttcctgagggaacccgcaaccataatggttctatgctgcccttcaagagaggtgcctttcaccttgccgtgcaagcacaagtgcctattgtgccaattgttatgagtagttaccaggatttctactgtaagaaggagcggcggttcacctctggccagtgccaggtcagggtgttacccccagtgcctaccgaggggttaactccagacgatgtaccagccctggcagacagggtgcgacattccatgctcacagtattccgtgaaatttccaccgacggccgaggtggcggcgattatctgaagaagcccggtggcgggggatag

SEQ ID NO: 303292 - DNA, 852 bp, Artificial Sequence
  derived and/or modified sequence
atggacctgtggcccggcgcctggatgctgctgctgctgctgttcctgctgttattattcttgctcccaaccctgtggttttgcagcccatccgctaaatacttttttaagatggcgttctataacgggtggatcctgttccttgctgtgctggccatccccgtgtgcgctgtgaggggccgtaatgtagaaaatatgaagattctccggctcatgctgttgcacataaagtacctatacggcattcgcgtggaagtgcgcggagcccatcattttcctccctctcagccatatgtcgtagtttccaatcaccaatccagcttggacctgctggggatgatggaggtgctgcccgggcgctgcgtccccatcgccaaacgagaactgctgtgggccggcagcgccggcctggcatgttggctcgctggcgtcatttttatcgatcgcaagcgaactggcgacgcaatcagcgtcatgtccgaagtggcccagactcttcttacacaggacgtccgagtttgggtgtttccggaaggtacgcgaaatcacaacggttcaatgttgccctttaaacgcggtgctttccaccttgccgtgcaggcacaggtgcctattgtccctattgtcatgtcgtcttatcaggatttctattgtaaaaaagagaggcgattcaccagtggccaatgtcaggtgagggtgctacctcctgtacctactgaaggattgacacccgatgacgtgccggccctagccgacagagttcgtcattcaatgctgacagtgtttagggagattagcaccgacggcaggggtggcggggattatctgaagaaacctggcggcggaggttag

SEQ ID NO: 303293 - DNA, 852 bp, Artificial Sequence
  derived and/or modified sequence
atggacctgtggcccggcgcctggatgctgctgctgctgctgttcctgctcctgctcttcctgctgccgacactgtggttttgtagcccatcagccaagtatttcttcaagatggcattttataatggctggattctcttcctcgccgtactggcaatcccggtgtgtgctgtccggggacgcaatgtggagaacatgaaaatcttgaggctgatgttgctgcacatcaagtacctctacgggatcagagtcgaggtgcggggcgctcatcatttcccacccagccagccatacgttgtggtctccaatcaccagtctagcctggatctgttgggaatgatggaagtcctaccagggcggtgcgtccccattgccaaacgcgagctcctttgggccgggagtgccggcctggcctgctggctggccggtgtcatattcatcgaccggaaacggaccggggacgccattagcgttatgtctgaggtggcccagaccctgcttacacaggacgttagagtgtgggtcttcccagagggcacccgtaaccacaatggtagtatgctgccgtttaagaggggtgcttttcatcttgctgttcaagcacaagttcctattgtgcctattgtaatgtcttcttaccaagacttttattgtaagaaagaaaggcgctttacaagtggacagtgccaggttagggtgctgccaccagtccccacagagggcttgacacctgacgacgtgcccgcactcgcagatcgcgtccggcactccatgctgacagttttccgcgaaatttcaaccgatggcaggggtggcggcgactatctgaaaaagcccgggggaggcgggtag

SEQ ID NO: 303294 - DNA, 852 bp, Artificial Sequence
  derived and/or modified sequence
atggacctgtggcccggcgcctggatgctgctgctgctgctgttcttgctgttactttttctgctgccaaccctgtggttttgtagcccttctgcaaaatacttctttaagatggccttctacaacggctggattctcttcctggccgtcctggccatcccagtgtgtgccgtcagagggcggaacgtagagaatatgaaaatcttgcgtcttatgctgctccacattaaatacctatatgggatcagggtggaggtcagaggcgcccatcacttcccgccttcccagccttacgtggtcgtgtcaaatcaccaatcatccctcgatttgctcggcatgatggaggtactgccgggacgatgcgttcccatcgcaaaacgagagctattgtgggcaggctccgctggcttagcctgctggctcgccggagtgattttcattgataggaagcgcaccggggacgccatttccgtcatgagcgaggtcgcccagaccctgcttacccaggacgtgcgcgtgtgggtgttccctgaaggcacccgcaaccacaatggctccatgttgccatttaagaggggcgcattccaccttgcagtccaggcacaggtacccatagtgccaatcgttatgtcttcctaccaggacttttactgcaagaaagagcgcaggttcacatccggccagtgccaggtcagagtgctgcctccggtcccgaccgagggcctgacccccgacgacgtgccagcccttgccgatcgcgtgaggcattctatgctcaccgtatttagggagatttctactgacgggcggggagggggagactacctgaagaagcctggcgggggcggctag

SEQ ID NO: 303295 - DNA, 852 bp, Artificial Sequence
  derived and/or modified sequence
atggacctgtggcccggcgcctggatgctgctgctgctgctgttcttattactgctgttcctgttgcccactctgtggttctgtagcccctctgccaaatatttcttcaaaatggcattctacaacggctggatcctgttcctcgcagtacttgctattccagtatgcgccgtgcgcggtagaaacgtggagaacatgaagatcctgcgcctgatgttgctgcatataaaatatctctacggaattcgggtggaggtgcggggtgcacaccacttccccccatcccagccctacgtggtggtgagcaaccatcagtcatcactggacttgctcggcatgatggaggtgttaccgggtagatgcgttccaatagccaaacgggagctgttgtgggccggatccgctggcttggcctgttggctggccggcgtaatctttattgatagaaagcgcactggcgacgctatttctgtgatgagtgaggttgcccaaaccctactgactcaagatgtgcgggtttgggtgttccctgaaggcacacggaaccacaatggcagcatgctccccttcaagcggggagcattccatctggctgtccaggcacaggttccaatcgtgcccatagtaatgtctagctaccaggacttttattgtaagaaagaacgaagatttacgtcagggcagtgccaggtgcgggtgctccccccagtcccgacagaagggttgacaccagatgacgtgccagcactggcagatcgggtgaggcactccatgctgaccgtgttcagagaaattagcaccgatggcaggggaggtggagactatctgaaaaagcccggaggtgggggctag

SEQ ID NO: 303296 - DNA, 852 bp, Artificial Sequence
  derived and/or modified sequence
atggacctgtggcccggcgcctggatgctgctgctgctgctgttcctcctactgcttttcctcctcccgacactctggttttgctcacccagtgcaaaatatttcttcaagatggcattctacaacggatggattctgttcctggcagttttggccatccccgtctgtgcagtgcgtggcaggaacgttgaaaatatgaaaatactgcgccttatgttattgcacattaagtatttatatgggattagggtggaggtccggggagcacaccatttccctcccagccagccatatgtggtcgtgagtaaccatcagtctagccttgatttgttaggaatgatggaggtgctccctggccgctgtgtaccaatagcgaaaagggagctcctttgggctggcagtgctgggctggcctgctggttagctggggtgatcttcattgacaggaagaggactggtgacgctattagcgttatgagtgaggtggcacagacactcctgacacaggacgtcagagtgtgggtgttccccgagggcaccagaaatcacaatggatccatgctgcccttcaaaaggggggccttccacctcgccgtgcaggcccaagtgccaatcgtcccgattgttatgagcagctatcaggatttctactgcaaaaaagagaggaggttcaccagcggtcagtgccaggttcgcgtgctaccacctgtgcctacggaaggacttacgcccgatgacgtgccagccctggccgacagggttcgccattcgatgttgacagtattcagagaaatctccaccgatggccgcggaggtggggattacctgaaaaagccggggggcggtggctag

SEQ ID NO: 303297 - DNA, 852 bp, Artificial Sequence
  derived and/or modified sequence
atggacctgtggcccggcgcctggatgctgctgctgctgctgttcctgctcctactcttcctgctgccaaccctctggttttgcagtccaagtgctaaatatttcttcaagatggctttttataatggatggatcttgtttctcgcagtcctagccatccctgtgtgcgcggtacgtggaaggaacgtggaaaacatgaaaatcctcagattgatgctgctgcatatcaaatatttatacgggatcagagtggaggtccgtggcgcacatcacttcccacccagtcagccgtacgtagtggtatccaaccaccaatcatcgttagacttgctcggaatgatggaagtgctccctggcagatgcgtgccaatcgctaaaagagagctgctttgggctggctccgctgggctggcttgttggctggccggagtcatctttatcgatcggaaacgcaccggagacgccattagtgtaatgtcagaggtagcacagaccctgctcacacaggatgtccgagtctgggtattccccgaaggcaccaggaatcacaacggatcaatgctccccttcaagcgcggagcgtttcacctggccgttcaggctcaggtgcctatagtgccaatcgtgatgtccagctatcaggatttttattgcaaaaaggaacgcagatttacatccggtcaatgtcaggtgagggtgttgccaccagttcctactgaaggcttgacacctgatgatgtgcccgccctagccgatagagttaggcatagtatgctgacagtattcagggaaatttctacagatggaaggggaggcggtgactaccttaagaaaccaggcgggggaggctag

SEQ ID NO: 303298 - DNA, 852 bp, Artificial Sequence
  derived and/or modified sequence
atggacctgtggcccggcgcctggatgctgctgctgctgctgttcctgcttctcctgtttcttctgcccacgctttggttctgctctccttcagcaaaatatttttttaagatggctttttataacggatggatccttttcctggcagtcctcgcgattcccgtgtgtgcagtgcggggaagaaatgtggagaacatgaaaatactccgcctcatgctgctacatatcaagtacctgtacggcatccgtgtcgaggtccggggagcccatcactttcccccttcgcagccgtatgtggtagtctctaaccatcaatctagcctcgatcttcttggaatgatggaggtgctgcctgggagatgtgttcctatagctaagagggagctgttgtgggccggatctgctggactcgcgtgttggttggccggagtcatttttattgatcggaaacgcactggtgacgccattagcgtgatgtcagaagttgcccagacattgctgactcaggacgtgcgggtgtgggtgttccctgagggtactcgcaaccataatggaagcatgctgccgttcaaaagaggtgcatttcacttagctgttcaggcccaagtgcctatagtacccatcgtcatgtctagctaccaggatttttattgtaaaaaagagcgccggttcacttccggccagtgccaggtccgggttctaccccccgtcccgactgaaggactgacccctgacgacgtacctgcacttgcagatcgagtcaggcactctatgctgaccgtgttccgggagattagtaccgatggccgcggcggcggcgactatctgaagaagcctggcggtggcggctag

SEQ ID NO: 303299 - DNA, 852 bp, Artificial Sequence
  derived and/or modified sequence
atggacctgtggcccggcgcctggatgctgctgctgctgctgttcctgttactgctctttctcctgccaacactgtggttttgttcaccctccgcaaagtattttttcaagatggctttttataatgggtggattttgtttcttgccgtgttggcaatccccgtatgcgcggtgagaggcaggaatgttgagaacatgaagatcctgcgactaatgctgctgcacatcaagtacttgtatggcattagagttgaagtacgcggtgcccaccactttccaccttcccaaccatacgttgtcgtatctaaccatcagtcatctctagacctgcttggaatgatggaagtgctcccaggaagatgcgtgcccatagctaaaagggaattactgtgggccggctcagccggtcttgcatgttggctagctggcgtgatttttattgaccggaaacgcacaggcgacgccatttcagtgatgtcagaggtggctcaaacactgctgacacaggacgtccgtgtttgggttttccccgaggggacccggaatcacaacggatcaatgctgcccttcaaaaggggcgctttccatctcgctgtacaggcccaagtcccaatagtgccaattgtcatgagttcttatcaggacttctattgtaaaaaggagcggcggtttacttccggccagtgccaagtgcgcgtgttgccacccgtgcctactgagggccttactcccgacgacgtccctgctctcgcggacagggttagacacagtatgttgacggttttccgagagatatctactgatgggcggggcgggggtgactacctgaagaaacctggcggtgggggttag

SEQ ID NO: 303300 - DNA, 852 bp, Artificial Sequence
  derived and/or modified sequence
atggacctgtggcccggcgcctggatgctgctgctgctgctgttcttattgcttctgtttctgctgcccactctgtggttctgctcgccatccgctaagtatttcttcaagatggccttctataacgggtggatattattcctcgcagttcttgccatacctgtctgtgctgtgcggggaagaaacgtggagaatatgaagattcttcgccttatgctgctccacatcaaatacctgtacggcattagagtagaggtcaggggggcccatcattttcctccaagccagccatatgttgtggtatcgaatcaccagagcagtctagatctgttgggtatgatggaagttttaccaggccggtgcgtccctatcgcgaagcgggagctgctttgggccggatctgctggactggcgtgttggctggctggagtaatctttatagaccgcaaaaggaccggggacgcaattagcgtgatgagcgaggttgcccagacactgctcacgcaggatgtccgtgtgtgggttttccccgagggcaccaggaatcataacgggtccatgttgccgtttaaacggggagcctttcatctcgctgtgcaggctcaagtgcccattgtgcccattgtcatgtctagctatcaggacttctattgcaagaaggagcggagatttacctctggacagtgccaggtgcgggtgttgcctcccgtgcccactgagggccttacccctgacgacgtccccgcccttgcagacagggtgagacactccatgttgaccgtgttccgcgaaatcagcacggacggacggggaggcggcgactatctgaaaaaaccaggagggggcgggtag

SEQ ID NO: 303301 - DNA, 852 bp, Artificial Sequence
  derived and/or modified sequence
atggacctgtggcccggcgcctggatgctgctgctgctgctgttcctattgttgttgtttttgttgcccaccctgtggttttgtagtccgagcgctaaatatttcttcaaaatggctttttataacgggtggatcctttttctggccgtacttgcaattcccgtttgcgccgtcagaggccggaatgtcgagaatatgaaaatcctccgtctgatgttgcttcatattaaatacttgtacggaatacgcgttgaggtgaggggagcacaccactttccacccagccaaccgtatgtcgtagtgtccaatcatcaaagctcactggatctgctggggatgatggaagtgcttccagggcgttgcgtgcccattgctaaacgggaattgctctgggccggtagcgctggtctcgcgtgttggctagctggggtgattttcatcgacaggaagcgaaccggcgatgccatctctgtgatgtccgaggtcgcgcaaacgctactgacgcaggatgtacgcgtctgggtctttcccgaggggactagaaaccacaacggatctatgcttcctttcaagcgcggcgccttccatctggcagtgcaggcccaggtcccaatcgtccccatcgtgatgagtagttaccaagacttctactgcaagaaggaacgacggtttacgtctggccaatgccaggtgagggttttgccacccgttccgaccgaggggttgactcctgacgacgttcctgccctcgctgaccgggtgaggcactctatgctgaccgtgtttcgggagatttctacggacggtaggggtggcggggactatctaaaaaagccaggaggaggtggttag

SEQ ID NO: 303302 - DNA, 852 bp, Artificial Sequence
  derived and/or modified sequence
atggacctgtggcccggcgcctggatgctgctgctgctgctgttcctacttctgctttttcttttgccaactctgtggttttgctcccccagcgctaaatacttttttaagatggctttctacaatgggtggatactgttcttggccgtgctagctattccagtctgcgctgtaaggggcaggaacgtcgaaaacatgaagatattacgtctcatgttgctgcacatcaaatatctttacggtatcagagtcgaggtgcgcggtgctcaccatttcccccctagtcagccgtacgtcgtcgttagtaaccaccaatcctcgttagacctgttggggatgatggaagttctgcctgggcgctgtgtccctatagccaaacgcgaactgttgtgggccggatcagccggcctcgcctgctggcttgccggcgtcattttcatcgatcggaaacggacaggcgacgcgatttcggtgatgtctgaagtcgcccaaacgctgctgactcaggatgtgcgcgtgtgggtatttccagaaggcacacggaatcacaatggcagcatgcttcccttcaagagaggcgcctttcacctggcggtccaagctcaagtgcccattgtgcccatcgtgatgtcctcataccaggatttctattgtaagaaagagcgaaggttcacatccggccagtgtcaggtgcgcgttttgccaccggtaccgacggagggccttactccagacgacgtgcccgccctagctgatcgggtaagacacagcatgctgacggtctttcgggagatctccacagatggcagaggcggcggtgactacctcaagaagcccggagggggaggctag

SEQ ID NO: 303303 - DNA, 276 bp, Artificial Sequence
  derived and/or modified sequence
cacagcgccagcacccccatcctgacccacagccaccccgcccagggcatgatggaggtccttcctggccgatgcgtcccgatcgccaaaagagagcttctttgggccgggtcagccggattggcctgctggcttgctggggtcattttcatagaccggaagcgcaccggggatgcaatctccgtgatgtccgaagtagcccagaccctgcttacccaagacgtttctcatccggggcttctgcttcaggagggagctagtctccacctcggatag

SEQ ID NO: 303304 - DNA, 276 bp, Artificial Sequence
  derived and/or modified sequence
cacagcgccagcacccccatcctgacccacagccaccccgcccaggggatgatggaggtcttgccagggcggtgtgtgccaatcgcaaaaagagagctcctgtgggcgggctctgctggtcttgcttgttggctggctggcgtaatattcatcgacagaaagaggactggtgacgcgatctccgtaatgagcgaagtggctcaaaccctacttacacaggatgtttcccatcctggcttgttgcttcaggaaggggcatcattacatttgggctag

SEQ ID NO: 303305 - DNA, 276 bp, Artificial Sequence
  derived and/or modified sequence
cacagcgccagcacccccatcctgacccacagccaccccgcccagggtatgatggaggtcctgccaggacgatgtgttcccatcgccaaaagggagctgctttgggctgggagtgctggcttagcctgctggctagctggtgtcatcttcatcgataggaagcggacgggggatgccatctccgtgatgagtgaagtggcccaaacgcttttaacccaggacgtcagtcatcccggcctgctcctacaggagggggcatcactccatttaggttag

SEQ ID NO: 303306 - DNA, 516 bp, Artificial Sequence
  derived and/or modified sequence
atgatggaggtgctgcccggccggtgcgtgcccatcgccaagcgggagctcctgtgggcaggttcagccgggttggcctgctggcttgcgggtgttatcttcattgaccgtaaacggacgggagacgccatatctgttatgtcagaggtggcacaaacactcctgactcaggacgtgcgagtgtgggtttttcctgaaggaacgcgcaaccacaacgggtctatgctgccattcaaacgcggcgcttttcacctcgctgttcaagctcaggtcccaatcgtgcccatcgtaatgagctcctatcaggatttttattgcaagaaggaacgaaggttcacttctggacagtgtcaagtacgggtcctgccgcctgtccccaccgagggcctgacacctgacgatgtcccagccctggccgacagggtccgccactccatgctcacagtgttccgagaaatttcaacagacggccgaggtggaggagactatctaaagaagccagggggaggcggatag

SEQ ID NO: 303307 - DNA, 516 bp, Artificial Sequence
  derived and/or modified sequence
atgatggaggtgctgcccggccggtgcgtgcccatcgccaagcgggaacttttatgggccgggagcgccggactcgcctgttggcttgcaggggtcatttttatcgatcggaagcgcacaggagacgccatatccgtcatgtccgaggtggcccagactctactcactcaggatgtgagagtttgggtattccccgagggcacacggaaccacaatggctctatgcttccgttcaagcgtggcgcctttcacttggcagttcaggctcaggtcccgatcgttcctattgtcatgtctagctatcaggacttttattgcaaaaaagagcggcgatttacgtccggacagtgtcaggtgagggtgcttccccctgtcccgaccgagggcttgaccccggatgacgtcccagctctcgcggatcgtgtgaggcacagcatgctgacggtgttccgcgagatctctaccgacgggagaggtgggggcgattacctgaaaaagcccgggggggggggctag

SEQ ID NO: 303308 - DNA, 276 bp, Artificial Sequence
  derived and/or modified sequence
cacagcgccagcacccccatcctgacccacagccaccccgcccagggaatgatggaggtgctgcctggccgatgcgtcccaatagcaaaaagagagctactgtgggctggaagcgcagggctcgcatgctggctggcaggggtgatctttatagacaggaaaaggactggtgacgccatatccgttatgtcagaagttgcgcaaacactgttaacacaggatgtttcccacccggggctacttctccaggagggagccagcttacacctggggtag

SEQ ID NO: 303309 - DNA, 276 bp, Artificial Sequence
  derived and/or modified sequence
cacagcgccagcacccccatcctgacccacagccaccccgcccaggggatgatggaggttctgccaggcaggtgtgtgccgatcgccaagcgcgaactgctgtgggccggcagtgcagggctggcctgttggctcgctggagtgattttcattgacaggaagcggaccggggacgccatcagtgtcatgagcgaggttgcccagaccttgctgacccaggatgtcagtcatcctggtctcctactgcaggaaggagcctccctgcatctgggctag

SEQ ID NO: 303310 - DNA, 276 bp, Artificial Sequence
  derived and/or modified sequence
cacagcgccagcacccccatcctgacccacagccaccccgcccagggtatgatggaagtgcttccaggaagatgtgtgcctattgcaaagagggaactactttgggccggcagcgcggggttggcatgctggttagccggggtgatctttatcgacaggaaacggacaggagacgccatatcggtcatgtccgaggttgcacagactctcctgacccaggatgtcagccatcccggcctcctcctccaggagggtgcaagtctccacctgggatag

SEQ ID NO: 303311 - DNA, 516 bp, Artificial Sequence
  derived and/or modified sequence
atgatggaggtgctgcccggccggtgcgtgcccatcgccaagcgggaattactttgggctgggagtgcaggcctggcatgctggctcgccggggttattttcattgacaggaagcgaactggcgacgcaatatccgtgatgtcggaagtggcacagactctattgactcaggacgttagagtttgggtgtttcctgagggcacacgcaatcacaatgggagcatgttacctttcaagcggggcgcttttcatctggccgtccaagcccaggtgcctattgttccgattgtgatgtcatcttaccaagatttctattgtaagaaggagagacggttcacttcaggacagtgccaagtgagggtgcttccacctgtacccaccgagggcctgactccagatgacgtgcctgctcttgccgatcgcgttaggcactcgatgcttacggtgttccgcgagatctccacggatggccggggcgggggtgactacctgaagaaacccggtggtgggggctag

SEQ ID NO: 303312 - DNA, 516 bp, Artificial Sequence
  derived and/or modified sequence
atgatggaggtgctgcccggccggtgcgtgcccatcgccaagcgggaattgctgtgggccgggagcgcgggtctcgcctgctggttggccggagtgatattcatcgatcggaaaagaacgggtgacgccatctccgtgatgagtgaagtggctcagacattacttacacaggatgttcgtgtatgggtgttccccgagggaacccggaatcataacggctccatgctccccttcaaacgcggagcctttcacctggccgtgcaagctcaggtccccattgttccaatagtgatgtcatcttatcaggacttctactgcaaaaaagagaggcgcttcacttccggacaatgtcaggtgcgggtactgccgcctgtgcccaccgaagggctgaccccagacgacgtaccggcccttgcagaccgggtacgccattccatgttaactgttttccgcgagatcagcaccgacgggcgcggcggaggagattatctcaagaagcctggcgggggggggtag

SEQ ID NO: 303313 - DNA, 276 bp, Artificial Sequence
  derived and/or modified sequence
cacagcgccagcacccccatcctgacccacagccaccccgcccaggggatgatggaggtcctccctggacggtgcgtcccgatcgctaagagggagctactctgggctggctcggccggccttgcctgctggctcgctggagtgatttttatcgaccggaaaagaacgggcgacgcaatttcagtgatgagcgaggtggctcaaaccctgttaacccaggatgtcagccacccaggactgctgttacaggagggggcctccttgcacctggggtag

SEQ ID NO: 303314 - DNA, 516 bp, Artificial Sequence
  derived and/or modified sequence
atgatggaggtgctgcccggccggtgcgtgcccatcgccaagcgggagctgctgtgggcaggaagcgcaggcctagcctgctggttggcgggcgtgatttttatcgatcggaaacgcacgggcgacgcaatttctgttatgtccgaagtggctcagactctcctaacccaggatgtccgtgtgtgggtgttccccgaaggaacccgcaaccataacggctccatgctgcccttcaaacggggcgcctttcatcttgcagtccaagcccaggtacccattgttccaattgtgatgtcatcataccaagacttttattgtaaaaaagagcgccgcttcacatctggccagtgccaggttcgcgtccttcctccagtacctactgaaggactgactcccgacgatgtgcccgccctggccgatcgcgtcaggcactcaatgttgacggtcttccgcgagatatcaaccgacggaagggggggcggcgattaccttaaaaagccaggtggagggggatag

SEQ ID NO: 303315 - DNA, 516 bp, Artificial Sequence
  derived and/or modified sequence
atgatggaggtgctgcccggccggtgcgtgcccatcgccaagcgggagttgctgtgggccggatccgcaggtttagcttgctggctggcaggggtgattttcattgatcgcaaacgcaccggggacgcaatctccgtgatgtccgaggttgcccagactcttctcacccaggatgtgagggtctgggtgttcccagagggaacccgcaatcataatggtagcatgttgccatttaagaggggcgccttccacctggccgtgcaggcacaggtcccaatcgtcccgatagtaatgtcaagttaccaggatttctactgcaaaaaggagcgacgttttacttccgggcaatgccaagttagggttctccccccggtccccaccgagggcctgacccctgacgacgttcccgctctggcggaccgggtgaggcactccatgttgaccgtctttcgggaaatcagtaccgacggccgcggcggcggggactatctgaaaaaacctggtggtggagggtag

SEQ ID NO: 303316 - DNA, 276 bp, Artificial Sequence
  derived and/or modified sequence
cactctgcctccaccccgatcctcacccactcccaccctgcccaagggatgatggaggtactgccaggccgctgtgtgcccattgccaagcgcgagctactgtgggctggctctgccgggctggcctgctggctggcaggagtcatcttcatcgaccggaagcgcacgggggatgccatcagtgtcatgtctgaggtcgcccagaccctgctcacccaggacgtgagtcatcctggacttctactgcaagaaggagcgtcgcttcacctcgggtga

SEQ ID NO: 303317 - DNA, 852 bp, Artificial Sequence
  derived and/or modified sequence
atggatctgtggcccggtgcgtggatgttgctattactcctgttcttacttctattattcctgctgcccacgctgtggttttgctcgcctagcgccaagtacttttttaaaatggctttctacaacggatggatcctatttctagcagtactggccattcctgtttgtgccgtccggggacgcaacgtagaaaatatgaaaattctgcgcctgatgctgctccacatcaaatacctgtacggtattagggtagaagtccggggagctcatcattttccgccatcccagccctatgtggtcgtgagtaatcaccagtcatccctggatttgctcggtatgatggaggtgttgccaggcagatgtgtgcccattgccaagagagagctgttgtgggcgggtagcgctgggcttgcatgctggttggcaggcgtgatttttatagataggaagagaacaggggatgctattagcgttatgagcgaggtggcccagaccctgttgactcaggacgtgcgcgtctgggtgtttcctgaaggaacacgtaaccataacggcagcatgcttccgttcaagagaggcgctttccacctcgccgtgcaagcacaggtgccaatagtcccaatagttatgtcctcataccaggatttttactgtaaaaaggaacgcagattcacttccggtcagtgtcaggtgagggtgctcccgccagtgcctactgaggggctgacacctgacgacgtccccgcactggccgatagagttagacactcaatgcttactgtgttccgggaaataagtacggacgggcgaggaggtggagactacttgaaaaagcctggcggtggaggctag

SEQ ID NO: 303318 - DNA, 852 bp, Artificial Sequence
  derived and/or modified sequence
atggatctgtggcccggtgcgtggatgctgctcttactgttatttctgctgctgctgtttcttcttcccaccttatggttctgctccccgagcgctaaatattttttcaagatggccttctataatggatggatattgttcctggcagtgctcgctattcccgtttgtgcagtgagaggcagaaatgtcgagaatatgaagattctccggcttatgctgctgcacattaaatatctatacggaataagggttgaggtgagaggggcacaccactttcccccatcacagccttatgtcgtcgttagtaaccaccagtcgtccctggacttactgggaatgatggaggtcctgccaggacgctgtgtgcccatagccaaaagggaactgctctgggccggatccgctggcctggcttgttggcttgccggagtgatcttcatcgaccggaaacggacaggtgatgccatcagcgtcatgtctgaggttgctcagaccctgctgacacaggatgtccgagtgtgggttttccccgaagggacacgaaatcataatggcagcatgcttccctttaaacgtggggcatttcaccttgccgtccaggcccaagttcccattgttcctattgttatgagcagttaccaagatttctattgcaagaaagagaggcgattcacctctggtcagtgccaggtcagagtcctgccaccggttccaacagagggactgacgcctgacgatgttccagccctcgccgacagagtgaggcatagcatgctgactgtctttagagaaatttcaaccgatgggagagggggaggcgactatctgaagaagccgggaggaggtggctag

SEQ ID NO: 303319 - DNA, 852 bp, Artificial Sequence
  derived and/or modified sequence
atggacttgtggcctggagcatggatgcttttactgcttctctttctgcttcttctattcctgctccccaccctgtggttctgctcccccagcgctaaatacttctttaaaatggctttttataacgggtggatccttttcctcgctgttttggccataccagtctgcgccgtgagagggaggaatgtagaaaatatgaagatacttaggttgatgttgttacatatcaagtatctgtatggcatccgtgtcgaagtacgaggcgcacatcatttcccaccctcacagccctacgtcgttgtttccaaccatcagagtagcctagatctgctcggtatgatggaggtgctcccgggtcggtgtgtacctattgccaagcgggagctcttatgggcaggaagcgccggtctggcatgctggctagcaggtgtgatcttcattgacagaaaacgtacaggcgatgcaatatccgtcatgtcagaggtcgcccagaccctgctcacacaagatgtaagggtatgggtgtttcccgagggcacgcgcaaccataacggaagcatgctcccttttaaaaggggcgctttccacctagcggtccaggcccaggtccccatagtgcccatcgtcatgagttcctaccaggatttttactgcaagaaagagcgcagatttacctccggccagtgtcaggtccgagtgctcccacctgtgcctacagaaggactgacccccgacgatgtacctgcgttggccgatcgagtgcggcattcaatgctcaccgtcttccgagagatctcaactgacggacggggtggaggcgattacctgaaaaaacctggtggtggcggatag

SEQ ID NO: 303320 - DNA, 852 bp, Artificial Sequence
  derived and/or modified sequence
atggatctttggcctggcgcttggatgttgcttctgctcttgtttctgctgctgctgtttctattgccgaccctgtggttctgcagccccagcgctaagtatttttttaaaatggccttctataatggatggatactctttttagcagttctggccatccccgtgtgtgctgtccggggtaggaacgtggagaatatgaaaattctccgccttatgttgttacatattaagtatctctacggcatccgggtagaagtacggggagcacaccacttcccaccaagtcagccttatgtggttgtctcaaaccaccagtcatccctcgatctgctgggaatgatggaggttctgcctggtagatgcgtgcctattgcgaagagagagctgttgtgggcagggagtgccggtcttgcctgctggctagcaggagtcatatttattgataggaagcgtacgggtgacgcaatctctgttatgtcggaagttgctcagaccctgctgacccaggatgtgagggtgtgggtgttccccgagggcacaagaaatcacaacggcagcatgctcccattcaaaaggggagcattccatcttgctgttcaggctcaagttcccatcgttcccatcgtgatgagcagctaccaagacttctactgtaaaaaggagaggaggttcacgtcgggacagtgccaggttagagtgctgcctccagtgccaacggaggggctgacacccgacgatgtgcctgcgcttgccgaccgagtgcgccattctatgctgaccgtctttcgagagatatctaccgatggccgaggcggtggcgactacctgaaaaaaccagggggtgggggttag

SEQ ID NO: 303321 - DNA, 852 bp, Artificial Sequence
  derived and/or modified sequence
atggatttgtggcctggcgcatggatgctgctactcctcctatttctgctgctgctgtttctcctgccgactctctggttttgttctccctctgccaaatacttcttcaagatggccttctacaatgggtggattctgttcctggcggtcctggccataccggtgtgcgccgttagaggccgtaacgtcgagaatatgaagattttgcgcctgatgctactgcacattaaatatttgtacggaattcgagtagaggtgcgcggagctcatcacttcccccctagccagccgtacgtagtggttagcaatcatcagtccagcctcgatctgctggggatgatggaagtactgcccggtcggtgcgtaccgatagcgaagcgcgaactgttatgggcgggaagcgcgggtttggcctgctggctggcgggagtgatctttattgatcgcaagagaactggcgacgcaatatcggtcatgagcgaggtcgctcaaaccctgttaacccaggatgtgagagtgtgggtattcccggaaggaacaaggaatcataacggctccatgctgccttttaaacggggagccttccacttagctgtgcaggcccaggttccaattgtgcctatcgtgatgtcgtcctaccaagacttttactgcaaaaaagaaaggcgatttacttccgggcagtgccaggtccgcgtgttgcctcccgtgcccacggagggattaacccccgacgacgtgcccgctcttgccgacagggtgaggcactctatgctcacagtgttcagagaaatttcaacggatggacgcggaggcggagattacctgaaaaaacccggagggggtggctag

SEQ ID NO: 303322 - DNA, 852 bp, Artificial Sequence
  derived and/or modified sequence
atggacctatggccaggtgcctggatgttacttcttcttttattcctgcttttgctgtttctgttgccaaccctttggttttgcagcccctccgcaaagtacttctttaaaatggctttttacaacgggtggattctgttcttggcagtgctggcaataccggtgtgcgccgtcagagggaggaacgtggagaacatgaaaatattgcgtctgatgttgcttcacatcaagtatctgtatggtatccgcgtcgaagtgcgcggagcccatcattttcccccatcccagccttacgtagtggtatcgaaccaccagtcaagcttagacttgctcggtatgatggaagttctgcccggacgatgtgtccccatagccaagcgcgaactcctgtgggctggctcagcgggtttagcttgctggctagccggagttatcttcatagataggaaacggaccggggacgccattagcgtaatgagcgaggtggcccagaccctgttaactcaagacgtgcgagtttgggtatttcctgagggcacacgtaatcacaatggttcaatgctgcctttcaaacgtggcgctttccatctggctgtgcaggctcaggtgccaatcgtccccattgtgatgtcctcttatcaggacttctactgcaagaaagaacgcagatttacgtccggccagtgtcaggtgcgggttctgccgccagtccctactgaaggcttaacgccagatgatgttccagcccttgcagatcgcgtacgacattctatgctgacagtgtttagggaaattagtacagacgggagaggcggaggcgattatttaaagaaacccggaggaggaggttag

SEQ ID NO: 303323 - DNA, 852 bp, Artificial Sequence
  derived and/or modified sequence
atggacctatggccgggtgcttggatgctcctgctattgctgttccttctgttactatttctgctacccactctatggttttgttccccctccgcaaagtatttttttaaaatggccttttacaacggatggatactgtttctcgctgttctcgccattccagtgtgtgcagtccggggacgaaatgttgagaatatgaagattctgcgactgatgctccttcacataaagtacttgtatgggatcagagttgaagtcagaggtgctcaccatttccccccaagccagccgtacgtggtcgtgagtaatcatcagtcatccctggacctgctgggaatgatggaggtgctgcccggaagatgtgtgcctatagcaaaacgggaacttctttgggcaggttctgctggactggcttgctggctcgccggtgtcatattcatcgatcggaagagaaccggtgacgcgatcagtgttatgtccgaggtcgcgcagactctgttaacacaggatgttagagtgtgggtgttcccagaaggaacgcgaaaccataatgggtctatgctgccatttaagcgtggcgcatttcatcttgcagtccaggcccaggtacctatcgtgcccatagtgatgagtagctaccaggatttttactgcaagaaagagcgacgattcacgtcgggtcagtgccaggtgcgggtactccctcctgtccccactgagggccttacacctgacgatgtgcctgcgctggccgaccgcgtccgccattcaatgctgacggtgttcagagagattagcacagacgggagaggcggaggcgactatctgaagaaacccggtggaggaggctag

SEQ ID NO: 303324 - DNA, 852 bp, Artificial Sequence
  derived and/or modified sequence
atggatctgtggccaggtgcttggatgctgttgctgctgctgttcctcctccttcttttcctgctgccaacactttggttttgtagcccatcggctaagtactttttcaagatggctttctataatggctggatcctctttctggcagtgctggccattcctgtttgcgctgtgagggggagaaatgttgaaaatatgaagattcttagacttatgctcctgcacattaagtacttatatggaattcgagtcgaggtgcgtggagcccatcactttcctcctagtcagccctacgtggtggtgtccaaccatcaatcttccctggatttgttgggcatgatggaagtgctgccaggacgatgtgtaccaattgccaagagggaattgttgtgggcgggttcagcaggcctggcttgctggctggctggggtgatatttatagataggaagcgcaccggtgatgccatatctgtgatgtcagaagtagcacaaaccttgctgacccaagacgtgagggtgtgggtttttcccgaaggaacaaggaaccataatggcagcatgttgccctttaagcgcggagccttccatcttgccgttcaggcacaggtcccaattgtcccaatagtgatgagcagctaccaggacttctactgcaaaaaagagcgtagattcacctctggccagtgtcaggtgcgcgtcctgccccctgtgcctaccgaaggccttactccggatgacgtcccggcactcgcggaccgcgtcagacatagcatgcttacagtttttcgggaaatttcaacagacggccgtgggggaggtgattacttaaagaagccaggagggggagggtag

SEQ ID NO: 303325 - DNA, 852 bp, Artificial Sequence
  derived and/or modified sequence
atggatttatggccaggagcctggatgctccttctgctgctgtttttgctgctgctctttctgcttcctaccctctggttttgctctccgagcgccaaatattttttcaaaatggctttttataatggctggattctcttcctggctgtgcttgctatcccggtatgcgctgtccggggaaggaacgttgagaacatgaagatacttcgcttgatgctcttgcatattaaatacctttatggcattcgtgtggaagttcgaggagcccaccatttccccccatctcagccctatgtagtggtgtccaatcaccagtcttctctggacctcctgggcatgatggaggtgcttcccggtagatgtgtgcctatagccaaaagggaattgctgtgggccggttcagctgggttggcctgctggctagcgggtgtgattttcatcgacagaaaacgaactggcgacgcaatcagcgtcatgtctgaggtggcacaaactctgctgacacaggatgttcgcgtctgggttttccccgagggtactaggaatcacaatggatcaatgctgccctttaaacggggtgcatttcacctggcggttcaggcccaggtgccgatcgtgccaatcgtgatgagcagttaccaggatttctactgcaagaaagaacgccgattcacatcaggtcaatgtcaggtcagggtcctgcctcctgtgccaacagagggacttactccggatgatgtccctgctttggctgacagggtgcggcatagtatgttgactgtctttagagagatttcgaccgatgggaggggcggaggagactaccttaagaaaccagggggtggcggatag

SEQ ID NO: 303326 - DNA, 852 bp, Artificial Sequence
  derived and/or modified sequence
atggacctgtggcccggtgcatggatgctcctactgctgctgtttctcctcttgttatttctgcttcctaccttgtggttctgttctccatctgctaagtacttcttcaaaatggctttctacaatgggtggatcctgtttttagctgtattggctattccggtctgtgctgtccgtgggaggaacgtggagaatatgaagattctgcgcctgatgctactgcatatcaaatatttgtacgggattagagtggaagtccgcggagcccaccacttcccaccatctcagccctatgtcgtggtgagtaatcaccaaagtagtttagatttactcggaatgatggaggtgctccccggtcgctgtgtacccattgccaagcgagaactattatgggcaggctcagccggtctcgcgtgctggttggcgggtgtaattttcattgaccgaaaaaggaccggggatgctatcagcgtcatgagcgaggtcgcacagacgttactcacacaggacgttcgtgtttgggtctttccagaggggacccggaaccataatgggagtatgttgccatttaagaggggtgcatttcatctagccgtgcaggcacaagtgccaattgttcctattgtcatgagcagctatcaggacttttattgcaaaaaggaacggcgattcacgtccgggcagtgccaggtgagagtgctaccccctgtcccgactgaaggtctcacgccagacgatgtgcccgcactcgctgaccgggtcagacatagtatgctgaccgtctttagggaaatcagtaccgacggcagggggggaggggactaccttaaaaagcctggcggtggcggttag

SEQ ID NO: 303327 - DNA, 852 bp, Artificial Sequence
  derived and/or modified sequence
atggacctgtggcccggagcctggatgctgcttctgctactcttcctcctgctcctgttcctacttcccaccctgtggttttgctctcctagcgccaaatacttcttcaagatggcgttctataacgggtggatcctgtttcttgcggtcctagccatacctgtgtgcgcagttagaggacgcaatgtcgagaacatgaagatcctacggcttatgctgctacacattaagtacttgtacgggattcgcgtggaagtacggggtgctcaccatttcccaccaagccagccctatgtcgtggtctctaaccatcagtcctccctggacttgttaggaatgatggaggtcctcccagggcgttgtgtccccatcgccaaacgcgaactcttgtgggctggctcggccggacttgcctgttggctggctggagtgatttttatcgacaggaagcgaacgggggatgccatctccgttatgtcagaggtagcccagaccctgcttacacaagatgtgagagtgtgggtcttccccgaagggacccggaaccataatggatccatgctacccttcaagcggggtgcttttcatctcgcagtgcaggcccaggtaccgatcgttcccattgtcatgagttcctaccaggacttttactgtaagaaagagagaaggttcacctcgggccagtgccaggtgcgcgtgctgcctcccgtgcctacagagggactgacgcctgacgatgtacccgctctagccgaccgagtccgtcattcaatgttgactgtgtttagggagatatccacagatgggcgtggaggcggtgattacctcaaaaagcctggcggtggaggctag

SEQ ID NO: 303328 - DNA, 852 bp, Artificial Sequence
  derived and/or modified sequence
atggatctatggccaggggcttggatgttgctactgctgttatttctacttctgctgttcctgctccccaccctgtggttttgtagcccatctgcgaaatatttttttaagatggctttttataatggctggatcctctttctggccgtgctggcaatccccgtgtgcgccgtccgagggaggaacgtcgaaaatatgaagattctccgcctgatgttgctgcacatcaaatacctgtatggcatcagggttgaggtacggggtgcccaccatttcccaccatcacagccttatgttgtggtgtcgaatcaccaatcctcgttggacctgctggggatgatggaggtcttgcccggacggtgtgtcccaatcgccaagagagaactgctttgggcaggctccgctggtcttgcatgctggttagctggggtgatattcatagatagaaagaggacgggcgacgctatctccgtgatgtcagaagtggcacagaccttgctaactcaagatgtcagggtctgggtgttcccagagggaacccggaatcacaacggatctatgctgccttttaaacgcggtgcttttcaccttgccgtccaggctcaggtaccaattgtcccgattgtgatgtcgagctaccaagatttctactgtaaaaaggagagaaggttcacaagtggccagtgtcaagtcagagtgctccctccagtgcccacagagggcctgacccctgacgacgtgcctgccctcgccgatcgggtacggcactctatgctgaccgtgtttagagagataagtaccgatggacggggtgggggagattacctcaaaaagccgggtggtgggggatag

SEQ ID NO: 303329 - DNA, 516 bp, Artificial Sequence
  derived and/or modified sequence
atgatggaggtgttgcccggacgctgcgtgcccatagccaagagagagctactgtgggccggttctgcaggattagcttgttggctggcaggcgtgattttcatcgacagaaagcggacaggagacgccatttcagtgatgagtgaggttgcccaaactctgttaacacaagatgttcgtgtgtgggtgtttccagaggggacccggaaccacaacggttcaatgcttccattcaagaggggggcatttcacctggccgtacaagcacaggtgccaattgtcccaatagtaatgtcctcctaccaggatttctattgcaagaaagagaggcggtttacctccgggcagtgccaggtccgtgtgctgccccctgtgccaactgagggactcacgcccgacgatgtccctgccctggccgacagagtgcggcacagcatgctcacagtctttagggaaatcagcaccgacggccgtggtgggggagactacctgaagaagcccggtggcggaggctag

SEQ ID NO: 303330 - DNA, 852 bp, Artificial Sequence
  derived and/or modified sequence
atggatctctggcccggtgcttggatgcttttgctattgttatttcttctattgcttttcctgttgcccaccctgtggttctgcagcccgtctgctaagtatttcttcaagatggccttctacaacgggtggattctctttttggctgttcttgcaatcccggtgtgcgcggtaaggggccgtaacgttgagaatatgaagatcctgcggttaatgctgcttcatatcaagtatttatacggcatccgcgtagaggttaggggagctcatcacttccctccgtctcagccctacgtggtcgtgagcaaccaccagagcagtctcgatctattgggcatgatggaggtgctgccgggtaggtgtgtgcctatcgctaaacgggaactgctgtgggccggaagtgccggacttgcctgttggttggccggagtgatttttatcgatcgcaagagaacaggcgatgctattagcgtcatgagcgaggtcgcccaaaccctgctaacacaagatgtccgagtgtgggtatttccagaaggtacacggaatcataatggctcaatgctgcctttcaagcggggtgccttccatctggcagtccaggcccaggttcctattgtccctatcgttatgagctcatatcaggacttttactgcaaaaaggaacggcgtttcaccagcggacagtgtcaagtccgcgtgctccctccggtgcctacagagggcctgacccccgatgacgtgcctgccctggcggatagagtgaggcattccatgttaacggtgttcagagaaatttctaccgatggcaggggagggggagattaccttaagaagcccggtggcggtggctag

SEQ ID NO: 303331 - DNA, 852 bp, Artificial Sequence
  derived and/or modified sequence
atggacctatggccgggtgcctggatgctgttgctcctgctctttctattattactgtttctgttgcctactctatggttctgttcgccctctgctaaatacttcttcaaaatggctttctacaatgggtggattctgtttctggcggttctcgctatacccgtgtgtgcagtgcgcggacggaatgtggaaaatatgaaaattcttaggttgatgctcctgcacatcaagtacctttacggaatccgagtggaagtgaggggcgcacaccattttcctccgtctcaaccctatgttgtggtctccaaccaccagtcaagcctagaccttctcggaatgatggaagtgttgcccggtcgctgcgtccctattgctaagagagagctactgtgggccggatcagccggattagcatgttggctagctggcgttatcttcatagacagaaaaagaaccggagacgctatcagtgtgatgtcagaggtggcacagaccctgttaactcaggatgtgcgggtgtgggttttcccggaaggtacaaggaatcacaatggctctatgctccccttcaagagaggagccttccaccttgccgtccaggcccaggttcccatcgttccaatcgtaatgtcatcttatcaggatttttattgcaaaaaagaacgtcgatttacatccgggcagtgtcaggtccgcgtcctccctcccgtgcccactgaaggactaactccagacgatgtccccgctctggcggatcgggtccgccattccatgctcacagtgttcagggaaatcagcaccgacggacggggaggaggcgactacctcaaaaagcccggtgggggtggctag

SEQ ID NO: 303332 - DNA, 852 bp, Artificial Sequence
  derived and/or modified sequence
atggatctgtggcctggagcctggatgcttctcctcctgctgttcctcctcttactctttctgttgcctactttgtggttttgttccccgagcgccaaatactttttcaagatggccttctataacgggtggattctgttccttgccgtacttgcaattcccgtgtgtgcagtgagagggaggaatgtggaaaatatgaagatcctcaggctgatgctccttcatattaagtatctgtacggaatccgggtggaggtaaggggtgcccaccactttcccccaagtcagccttatgtggtggtgagcaatcatcagagctccctggacctcttgggcatgatggaggtgctaccaggacgttgcgtgccaattgcaaaacgagaactgctgtgggcaggaagtgcaggactggcttgctggctggcgggtgttatttttatcgaccgcaagaggactggcgacgctatctctgtgatgtcagaggtagcccagacccttttgacacaagacgttcgcgtgtgggttttccccgaaggaactagaaatcataacggaagcatgctgcccttcaagagaggggcattccacctggctgtgcaagcacaggtgcccatagtgccaatcgtgatgagttcctatcaggatttctactgcaagaaggagagacgatttacatccggccagtgccaggtccgcgtgttaccccctgtgcctaccgaagggttaaccccagacgacgtacccgctctggccgaccgggtgcgccacagtatgctcacggtttttagagagatctctacagatggcagagggggaggtgattatctcaagaaaccagggggaggaggctag

SEQ ID NO: 303333 - DNA, 852 bp, Artificial Sequence
  derived and/or modified sequence
atggatctgtggcctggagcctggatgctgctgctcctgctcttcctgttacttctgtttctcttgcccactctgtggttttgtagtccatccgctaaatatttctttaaaatggcgttttacaacggctggatcctgttcttggctgtgcttgcgatcccagtatgcgctgtgagagggaggaatgtggagaacatgaaaatcttgcggcttatgttactgcatattaaatatctttacggcattagggtggaggtccggggagcccatcacttccctccttcccaaccttacgtcgtggtgagcaaccaccagtccagtttggacctgttggggatgatggaggtcttgcccggacggtgtgtgccaattgccaagcgtgaactcctttgggccggatctgcagggctggcatgttggctggccggagtgatttttatcgatcgcaagcggaccggcgatgcgatttcagtcatgagcgaagttgcacagacactgctgacacaggatgtgcgggtttgggtgttcccagaagggactcgcaatcacaacggctcaatgttgcctttcaagcgcggagctttccacctcgcagtgcaggctcaggtgcctatcgtgcccattgttatgtcgagctaccaggatttctattgtaagaaggagcgccgattcacatccggacaatgtcaagtacgtgtcctgccccctgtgccaactgagggcctgacaccagatgacgtgcctgccctggcagacagagtacgtcactcaatgctgaccgtgttccgtgagatctccaccgatggacgcggtggtggcgactatctgaagaagccaggcggtggtgggtag

SEQ ID NO: 303334 - DNA, 852 bp, Artificial Sequence
  derived and/or modified sequence
atggacttgtggcccggagcttggatgcttcttctcctgttattcctcctgctgctttttctgctgcctacactgtggttctgctcaccctccgccaaatatttcttcaagatggctttctacaatggatggatcctgttcctggccgtgctcgccatacctgtctgcgccgtgcggggacggaatgttgagaacatgaagatcctgcggttaatgctcctgcacattaagtacctgtacggaattcgagtggaagttcgcggtgcccatcatttcccaccaagccaaccatacgtagtcgtctctaatcatcaaagcagccttgacctcttggggatgatggaagttctgccagggagatgcgtgcctatagccaagagggaactcttatgggcagggagcgcagggctggcctgttggctcgcaggggtgatatttatcgatagaaaacgcactggggacgccatctcagtgatgagcgaagttgcgcagacgctgcttactcaggacgtccgggtctgggtctttcctgaaggcacacgaaaccacaatgggtctatgttgccattcaagcgaggtgcttttcacctggcggtgcaagctcaagtgccgatcgtgcctatcgtgatgtctagctatcaggatttttactgcaaaaaggaacgtcgatttacaagcggccagtgccaggtcagagtgcttcccccagtgccaaccgagggactaacacccgacgacgtccctgctctcgcagatcgggtgaggcatagtatgcttaccgtcttcagggagatttccactgacggaagaggcggtggcgattatctcaaaaagcccggaggcggaggctag

SEQ ID NO: 303335 - DNA, 852 bp, Artificial Sequence
  derived and/or modified sequence
atggatctctggcctggcgcatggatgctattgttgcttctctttcttctacttctttttctgctcccgaccttatggttttgctctccttcagcgaagtacttcttcaaaatggctttctacaacgggtggatcttattcctcgctgttctggccatcccagtgtgcgccgtgcgcggtcgtaacgtggaaaatatgaaaattttgaggctgatgttgctgcacataaaatatctgtacggcatccgcgtggaagtgcggggagcacatcactttcccccttcccaaccctacgtggtagtttccaaccatcagagctcactagatcttttgggaatgatggaagtgctcccgggaaggtgtgtgccaatagcaaaaagggaactcctgtgggctggatctgcagggctggcctgttggcttgccggagtgatatttatcgatcgcaagcgcacaggagacgccattagcgtaatgtcagaggttgcacagaccctgctgacccaggatgttcgcgtgtgggtgtttcctgaaggtacacgaaaccacaacggatccatgctccccttcaaaaggggtgcctttcatctcgccgtccaagctcaagtccctatcgttcccatagtgatgtccagttatcaggacttctattgcaagaaagaaaggaggttcacgtcaggacaatgtcaagtccgcgttctgccgccagtcccaacagaaggccttaccccagacgatgtgccagcgctcgcagaccgtgtccggcacagtatgctgacagtgttccgggagatttcaacggatgggaggggtggaggcgactatctgaaaaaacccggaggaggcggatag

SEQ ID NO: 303336 - DNA, 852 bp, Artificial Sequence
  derived and/or modified sequence
atggacctgtggccaggtgcatggatgctgttgctgctgcttttccttttgctcctgtttctgctgcctacactctggttttgtagcccctccgccaaatacttctttaagatggccttctataatggttggattctctttttggcagtgcttgcaatacccgtatgcgccgttaggggacgcaacgtggaaaatatgaagatcctccgtctaatgcttttgcacatcaaatacctctatgggattagggtggaagtgcgaggcgctcatcacttccccccatctcaaccctacgtagtagtatctaaccatcaaagctctttagacctactgggtatgatggaggttcttcccggaagatgtgtgcccatagccaaacgagaacttttgtgggcagggagtgctgggctggcttgttggcttgcgggagtgatatttattgatcggaagaggacgggggatgccatttcagtcatgtccgaggtcgcgcagactcttttaactcaggatgtgagagtatgggtttttccagagggcacaagaaatcataacggaagcatgcttccttttaaacgcggagcttttcaccttgccgtgcaggcccaggttcctattgtgcccatcgtgatgtccagctatcaagacttttactgcaagaaggagagaaggttcacaagtgggcagtgccaggtccgtgtgctccccccagtgcccacggagggattgacccctgacgacgtgccggcactggcggaccgggtgcggcactcaatgctgaccgtatttcgagagatctcgacagacggaaggggcggaggcgattatctgaagaagccagggggaggcggatag

SEQ ID NO: 303337 - DNA, 852 bp, Artificial Sequence
  derived and/or modified sequence
atggacctgtggcctggagcatggatgttgctacttctgttgttcctgcttttactctttctgctgccaacactatggttctgctcaccctctgcgaagtattttttcaaaatggcgttctacaacggctggattctgtttctcgccgtcttagccattccagtgtgtgccgtgcgaggccgaaatgtagaaaatatgaagatccttagattaatgctgctccatatcaagtacctatatggaatccgcgtggaagtgcgcggagcgcaccactttccgccttctcagccctatgtggtggtttcaaaccatcagtctagcctggacctactgggtatgatggaagttctcccagggagatgcgttccaattgctaagcgcgagctcctgtgggcaggatctgcagggctggcctgctggcttgccggagtcatctttattgacaggaagagaacaggggatgccatcagcgtgatgagtgaagtagcccagacactgcttacgcaggatgtccgggtctgggtgtttcctgagggaacacgcaatcacaatggatcaatgctccccttcaagaggggagccttccacctggctgtgcaggctcaggtcccaattgttcccatcgttatgagcagctaccaggacttttactgcaaaaaggagagaagatttaccagtgggcaatgtcaagtacgtgttctcccacctgtaccaaccgaggggcttacccctgacgacgttcccgcacttgccgatcgcgttcggcattccatgcttacggtgttccgcgagatcagcacagacggaagggggggtggagattacctcaagaagcccggaggcggtggttag

SEQ ID NO: 303338 - DNA, 852 bp, Artificial Sequence
  derived and/or modified sequence
atggatctgtggcccggtgcttggatgctgctgttacttctattcctgctgctcctgtttctgttacccactctgtggttctgttctccatccgcgaaatatttctttaagatggccttctataacggatggatcttatttctcgccgtactcgcgattcccgtgtgcgcagtgcgcggtagaaacgtggagaatatgaaaatcctacgccttatgcttctccatatcaaatacctttatggcatcagggttgaagttagaggcgcacatcatttccccccaagtcagccttatgtggtcgtgtcaaaccatcagtcttctctggatctcttgggcatgatggaagtgttacccggaaggtgcgtacctatagcgaagcgggaattactgtgggccggatcagccggtttggcctgttggctcgcaggagtcattttcattgaccgaaagcggacaggagacgctataagcgtgatgagcgaggtggcgcagactttactgactcaggacgtcagggtgtgggtgttcccagagggaactcgcaaccacaatggttctatgctccccttcaagcgcggagctttccaccttgccgtgcaagcccaagtccccattgtgcctattgtcatgagtagctaccaggacttctattgcaaaaaagaacggaggtttacctccggacagtgtcaagtgcgcgtgctccctcccgtccctactgaagggctgacacctgatgacgtcccagctctggcagatcgagtgagacatagcatgctgaccgtgtttagggagataagcaccgatggaagaggtgggggagactatctgaagaaacctggagggggaggctag

SEQ ID NO: 303339 - DNA, 852 bp, Artificial Sequence
  derived and/or modified sequence
atggatctatggcctggagcctggatgctgttgctgctcctgttcctactgttgctattcctccttcctacactgtggttctgctcccccagtgcaaaatacttctttaaaatggcattctacaacggatggatcttgttcttggctgtgctggccattcctgtgtgtgcagtaagaggacggaatgtggagaacatgaaaattctaaggcttatgctgctccatatcaaatacctgtatgggatccgcgtggaggtaagaggcgctcatcacttcccgccttctcagccgtatgtggtcgtgagcaaccatcagtcctccttggatctcttgggaatgatggaggtgcttccaggcaggtgtgtgcctatagccaagcgggagctgctgtgggctggaagcgcgggactggcatgttggcttgctggtgtgatatttattgatagaaaaagaacgggcgatgctattagtgtaatgtcagaagtggcgcagacactactgactcaagatgtcagggtgtgggtgttccccgagggtactagaaaccacaatggctctatgctacccttcaagcggggagcttttcatctggccgtgcaggctcaagtccccatcgtgccaattgtaatgagttcgtatcaggacttctactgcaaaaaagagaggcgcttcaccagtgggcagtgccaggtgcgggtgctcccgccagtgcccaccgagggtctgaccccggatgatgtgccggcactggcagatcgagttaggcacagcatgttgacagtcttccgggaaatctcaaccgatggacgtgggggtggcgactatcttaagaagcctggagggggaggttag

SEQ ID NO: 303340 - DNA, 852 bp, Artificial Sequence
  derived and/or modified sequence
atggacctgtggccaggtgcctggatgctcctcctgctgctatttctactgctgctgttcttattgcccaccctgtggttttgttcaccatccgccaaatacttctttaaaatggcgttctacaatggatggattttatttcttgccgtattagctatccccgtatgtgccgttaggggacgcaacgtcgaaaatatgaaaatcctgaggttgatgctgctgcatatcaagtatctgtacggcatccgagtggaagtgcgtggggcacaccatttccccccaagtcagccctacgtcgtggttagcaaccaccaaagcagcttagatctgttgggcatgatggaggtgctgcccggacggtgcgttccgatagctaaacgggaactgttgtgggccggatctgcaggtctagcttgttggctcgcaggggtgatttttatcgacaggaaaaggactggagacgccatatctgtgatgtctgaagtcgcccagacactgcttacccaggacgtgagggtatgggtatttccggaagggactagaaaccacaacggctccatgctgccctttaaacgaggtgcttttcacctcgcggttcaagcccaagtgccaattgtacctattgtaatgagcagttaccaggatttctattgcaaaaaggagcgcaggttcacaagtgggcagtgccaggttagggtgttaccgcctgttcccaccgaggggctgacccctgacgacgtgcctgccctggcggaccgcgtcagacattccatgcttacagtatttagagaaatctccaccgacggccgtggagggggagattacttgaaaaagccaggaggagggggttag

SEQ ID NO: 303341 - DNA, 852 bp, Artificial Sequence
  derived and/or modified sequence
atggatctgtggcccggagcctggatgttgttgctgctgctctttctgctcctgctgtttctgctgccgactctgtggttctgttcgccttcagccaagtacttttttaaaatggcgttttacaatgggtggatcctctttcttgcagtacttgcaatcccggtttgcgccgtgcgtgggagaaatgttgagaatatgaaaatcctccggctcatgcttctccacatcaaatatttatatggcattcgcgttgaggtgaggggcgctcatcacttccctccttcccagccctatgtggtcgtgagcaaccatcagtctagtctggatctgctcggcatgatggaagtgctgcctggaaggtgtgtgcctattgccaagagggaactgctctgggcagggtctgccggactggcctgctggctggcaggagtaatttttatcgatcggaaaagaactggggacgctatctctgtgatgtctgaggtggcacagaccctgctgacccaagatgtgagagtctgggtcttcccggaggggactagaaaccacaatgggtccatgctaccgtttaagcgcggagccttccatctggcagttcaggcacaggtgcctatcgtaccaattgtcatgagctcttaccaagacttctattgtaagaaggaaaggaggtttacctccggacagtgtcaggtgcgagttctcccccctgtacctacagagggcttgacaccggacgatgttccagcactggctgatcgggtgaggcattcaatgctgacagtctttcgcgaaatatcaactgacgggaggggaggtggagattacctgaagaagcctggaggcggtggatag

SEQ ID NO: 303342 - DNA, 852 bp, Artificial Sequence
  derived and/or modified sequence
atggatctgtggccaggcgcatggatgctcctcctgcttctcttcttgctgctccttttcctccttcctaccctctggttctgcagcccttccgccaagtattttttcaagatggccttctacaacggctggattctattcctggccgtcctcgccattcctgtctgcgcagtgagaggaagaaatgtggagaatatgaaaatcttacgactgatgctgctgcacattaagtatctttatggcattagggtggaggtgaggggcgcacaccatttcccaccttcccagccttatgtcgtagtatcaaatcatcagtctagcctggatctgttggggatgatggaggtgcttcccggtcgctgcgtgccaatcgcaaagagagagctgttgtgggcagggtctgccggtctagcttgttggttagccggagttatctttattgaccggaagcggaccggagatgctatctccgtaatgagtgaggttgcacagacattgctaactcaggatgttagggtgtgggtgtttcctgaaggtaccaggaaccataacggttccatgttgccttttaaacgcggtgcttttcatctcgcggtgcaggcccaggtgccaatcgtgcccatagtgatgtcctcctaccaggacttttactgtaagaaagagcgaagatttacgtccggacagtgtcaagtcagagtattgccccctgttccgaccgagggactcactcccgacgatgtgcctgcattagctgatcgtgtgagacattccatgctcactgtgttcagagaaataagcacagacgggagaggcggaggtgattacctgaagaagccaggcggtgggggttag

SEQ ID NO: 303343 - DNA, 852 bp, Artificial Sequence
  derived and/or modified sequence
atggacctgtggcccggagcctggatgctgttgctcctcctttttcttctgctgctctttctgctgcccacactgtggttctgctccccctcagctaagtatttttttaaaatggctttctacaatgggtggatcctcttccttgcagtcctggccatccccgtgtgcgccgtcaggggcaggaacgtggagaacatgaaaatacttcgtctcatgctcttgcatattaagtacctatacgggatccgtgtcgaagtgagaggtgcacatcactttccgcctagtcagccttatgtggtcgtctccaatcaccagtcttcactggacttactgggtatgatggaagtgctacccggacgatgcgtgcccatcgctaagcgagaattgttgtgggctggctccgccggattggcctgctggctggctggggtaatcttcatcgatcgaaagaggaccggggacgcgatctcagtaatgtctgaagttgcgcagaccttgctgacccaagacgtgagggtctgggtgttccctgaggggactagaaaccacaacggcagtatgcttccatttaagcggggagcattccatttggcggtccaagctcaggtgcccatagtccctatcgttatgagttcataccaggacttttactgtaagaaagagcgcagattcaccagtggacagtgccaagtcagagtactccccccagtgcccaccgaagggcttactccagacgacgtgcctgccctggctgatagggtacggcactctatgctcaccgtctttcgtgaaattagcaccgacggcaggggagggggtgattatctgaaaaagcctggaggaggcggatag

SEQ ID NO: 303344 - DNA, 852 bp, Artificial Sequence
  derived and/or modified sequence
atggatctgtggcccggagcatggatgctcctccttcttttgttcctcctgcttttattcctcctgccaacactatggttctgcagtccaagtgcaaagtactttttcaagatggctttttacaatgggtggattctgtttctggcagtgcttgcaattcccgtatgtgccgtgcggggaagaaatgtggagaatatgaaaatcttgcgtctcatgctgctgcacatcaagtacctgtacggcatcagggtcgaggtacggggagcccaccactttcctccctcacagccatatgtagtggtctcaaatcatcagtcctcattagacctcctggggatgatggaagtgctgcctggcagatgcgttccgattgctaaacgagaactgctttgggctgggagtgccggtctggcctgctggctcgccggagtgatattcatcgacaggaagcgaaccggtgatgccatcagtgttatgtcggaagttgcccagactctccttactcaggacgtccgcgtgtgggtcttccctgaaggtacaaggaatcacaacggcagcatgcttcccttcaaaagaggagcgttccatttagcagtccaggcgcaggttcccattgtaccgatagtgatgagctcatatcaagatttttactgcaaaaaagagcggagatttacatctggccagtgtcaggttcgggttcttccaccagtgccaactgaaggcctgactcctgacgatgtgccagccctggctgatagagtacggcactccatgcttaccgtgttccgtgagatctcgactgatggtagaggcggaggggattacctcaagaagccaggcggtggcggttag

SEQ ID NO: 303345 - DNA, 852 bp, Artificial Sequence
  derived and/or modified sequence
atggacttatggcctggagcatggatgctgctcctattgctgttcttgctgctattgttcttgctccccaccctctggttctgttcacccagtgccaagtatttctttaagatggccttctacaatggatggattctttttctggctgtgctggccatccctgtgtgtgccgtcaggggcaggaacgtggaaaatatgaagatccttcgactcatgttactccacatcaaatatttatatggcattcgtgtagaagtgcggggtgcccaccactttcccccttcccaaccatatgtggtggtgtctaatcaccaaagttccctggatctcctcggaatgatggaggtcctgcctggcaggtgtgtgcctatcgccaaacgcgagctcctgtgggcaggcagtgcgggtcttgcgtgctggctcgcaggcgtgatttttatcgaccggaagagaactggagacgcaataagcgtgatgtctgaggtcgctcagacccttctaacccaggatgtgcgagtgtgggtcttcccagagggaacacgcaatcacaacgggagtatgctcccttttaaacgaggagcgtttcacctggccgtacaggctcaggtccctattgtccccattgtgatgagcagctaccaagatttctactgtaagaaagagcgacgctttactagtggacagtgccaggtgcgagttcttccaccagttccaaccgaggggcttacccctgacgacgtcccagctttggcagaccgtgttaggcatagcatgctaaccgtcttccgggagatttccactgacggccgaggcggaggtgactacttgaagaaaccaggaggcggtggttag

SEQ ID NO: 303346 - DNA, 852 bp, Artificial Sequence
  derived and/or modified sequence
atggacttgtggcccggtgcatggatgctgctgctgctcctgtttttgctcttgctatttctactccccaccctctggttttgctcccctagcgccaaatatttcttcaaaatggccttctacaacggatggatcctctttctggctgtgttagccatacctgtgtgtgcagtgcgcggtagaaacgtagagaacatgaaaatcctaaggcttatgcttttacacataaagtacttgtacgggattcgagtggaggtacggggtgctcatcattttccaccctctcaaccatatgtggtcgtctctaaccaccaaagttctttggacttactcggcatgatggaggtgctaccgggaaggtgtgtgccaattgccaagagagagctcctgtgggctgggagcgccggactcgcttgctggctggcgggagtgatttttatagaccgcaagcgtacaggtgatgctatctcagtcatgagcgaggtggcccagactctgctgacccaggatgtgcgggtgtgggtatttccagagggaacccggaaccataacggcagcatgcttccgttcaagcgaggggcatttcaccttgccgtgcaggctcaggtgcctatcgtgccaatagttatgtcgagttatcaagatttttactgcaagaaagaaaggcgattcacaagcgggcaatgtcaggtacgagttctaccccctgtgcccactgagggcctcacccccgacgacgtaccagcccttgcagacagggtgaggcactccatgctgaccgtgttcagagaaatttctacagacgggaggggtggaggcgactatctgaagaagcctggaggtggcggatag

SEQ ID NO: 303347 - DNA, 852 bp, Artificial Sequence
  derived and/or modified sequence
atggacctgtggccaggcgcatggatgttgctcctattactgttcctcctactgctctttttactacctaccctgtggttctgctcaccttccgcaaagtatttcttcaagatggccttctacaacgggtggattttatttttggccgtcctggccatcccagtatgtgctgtgagaggaagaaacgtcgaaaatatgaagattcttaggttgatgctgctgcatatcaaatacctgtatgggattagggtggaagtaagaggagctcaccacttcccgccttcacagccttacgtggtggtgagcaatcatcagtcaagtctggatctactcggaatgatggaagtgctccccggaagatgcgtacccattgcgaaaagggaattgctgtgggccggatcagcgggattagcatgttggctggcaggggtcattttcatcgacagaaagcgcacaggcgacgccattagtgtgatgagcgaggttgctcagactctgttgacgcaggacgtccgagtttgggtctttcctgagggcaccaggaatcacaacgggtcgatgttgccatttaaacggggagccttccacttggctgtgcaggctcaggtgcctattgtcccaattgtgatgtcgagctaccaagacttttattgcaagaaagaaaggagattcacgagtgggcaatgccaagtacgagtgctgcccccagttccgacagaaggactcacaccagacgatgtgcccgctctggccgacagagttagacacagtatgctcactgtattccgggagataagcaccgatggcaggggtggcggagattacctcaagaaacccggtggcggaggctag

SEQ ID NO: 303348 - DNA, 852 bp, Artificial Sequence
  derived and/or modified sequence
atggatctttggcccggagcctggatgctcctgcttttactttttctactgctgctgttcctcctgccaaccctgtggttctgttctccttctgctaagtattttttcaaaatggcgttctataatggctggatactctttttggccgtgctcgcaattccagtgtgtgccgtcagaggtcgtaatgttgagaatatgaagatcttgagattgatgctattgcatatcaaatatctgtacggaataagagtggaagtgcggggtgctcatcacttccccccatctcagccctatgttgtggtatctaaccatcaatctagtctagacctgctgggcatgatggaagtgctgcccggaagatgtgtgccaatcgccaagagggaattgttatgggcaggatctgccggactcgcatgctggctggccggagtgatattcatcgaccgtaaacgcacgggcgacgcaatatcggttatgtcagaggtcgcacagactctgctgacacaggacgtcagggtgtgggttttcccagagggtactcgtaatcacaacgggtcgatgcttccattcaagcgcggagcattccatctggcagtgcaggcgcaggtgcccatagtcccaattgtgatgagcagctaccaggatttctattgcaaaaaggagagaagattcacgagtgggcagtgtcaggtgcgcgtgttacctccagtccctaccgagggattgactcctgacgatgtgccagccctggcggatcgcgtgcgtcattccatgttaactgtgttccgcgagataagcacggatgggaggggcggaggagactacctgaagaaaccaggcggtggaggatag

SEQ ID NO: 303349 - DNA, 852 bp, Artificial Sequence
  derived and/or modified sequence
atggacctctggcccggagcatggatgttgctgctcctactctttctactactactatttttgctccctacgctgtggttttgctctcccagcgctaaatacttcttcaaaatggcattttataacggctggatactattcctggccgttctggccatacctgtgtgcgcagtgagaggcaggaacgtggaaaacatgaaaattctgagactaatgttgctgcacatcaaatacctttacggcatcagggtggaggtgcgaggcgctcaccatttcccgccaagccagccctacgtggtggttagtaaccaccagtcatccttagacttactgggcatgatggaagtgctcccaggtagatgcgtccccatcgccaaaagggaactcttatgggctggttcggccggactcgcctgctggcttgcaggggtgatctttatcgataggaagcgcactggagatgccatttctgtaatgagcgaggtggcccaaactctgttgacccaggacgtccgcgtgtgggtgttcccagaaggcacccgcaaccataacggatccatgctacctttcaagcgtggagcatttcatctggccgtgcaagcccaagtgcccattgtgccaatcgtgatgtctagctaccaggacttttactgcaagaaggaaagacgtttcactagcggtcagtgccaggtgcgcgtcctgcctccagtgcccaccgaaggacttacgcctgatgatgttccagccctagcggaccgggtgcggcattctatgttgactgtattcagagagatctccacagacggacggggaggtggtgattatctgaagaagccaggcggaggcggatag

SEQ ID NO: 303350 - DNA, 852 bp, Artificial Sequence
  derived and/or modified sequence
atggacctttggccaggcgcatggatgctgttactgctgcttttccttctgcttttgtttctgctgccaaccctctggttctgcagccctagcgccaaatactttttcaagatggccttctacaatggttggatcctctttctcgccgtcttggcaattcctgtgtgtgccgtgcggggtcgtaacgtggagaacatgaaaattctgaggttaatgcttctgcatatcaagtacttatatggcatccgagtcgaggtcagaggcgctcatcatttcccgccatcccagccttatgtggtcgtgagcaatcatcagagcagcctcgaccttttgggaatgatggaggtgctccccggacgctgtgtgccaattgccaagcgcgaactgctatgggccggatccgccggtcttgcttgctggcttgccggagtgattttcattgatcgcaagcgcacaggagacgccatctcagtgatgagtgaggttgctcagaccttactaacacaggatgttagagtttgggtgtttcctgagggaacccgcaaccataatgggagcatgttacctttcaagaggggagcttttcacttggctgtccaggcacaggtacctattgtgcccattgtaatgtccagctatcaagacttctactgtaagaaagagcgtaggtttacatccggccagtgccaggtaagggtgcttccaccagtgccaacagaaggcctaacccctgacgacgtccccgctctcgcagatagggttagacattctatgttaactgtgttcagagaaatcagcacagatggacgcggaggaggcgattacctgaaaaaacctggaggaggaggctag

SEQ ID NO: 303351 - DNA, 852 bp, Artificial Sequence
  derived and/or modified sequence
atggatctgtggcctggcgcatggatgttattgctgctgctttttttgctgcttctcttcctcctacccaccctgtggttttgctctccttctgccaagtattttttcaagatggcattctacaacggatggattctattcctcgccgtcctggccattcctgtctgcgctgtgagaggaaggaatgtcgaaaacatgaaaatcctcagacttatgctgttgcacatcaaatatctgtacggcattcgtgtcgaggtcagaggtgcccaccacttcccaccctctcagccttacgttgttgtctctaatcaccagagttcccttgatctgctcggaatgatggaggtcctccccggtcgctgcgtgcctatcgctaaacgcgagctgctctgggcaggctccgcaggcttagcatgctggcttgccggagtaatattcatcgaccgcaaacggacgggtgacgccatcagtgtcatgtcagaggtagcccagaccctccttacccaggacgtgagggtgtgggtgtttcccgaggggacccgaaaccacaatgggtccatgctcccctttaaaagaggagcatttcacctggcagtccaggcacaggtacccatcgttccaatcgttatgtcctcatatcaggacttttattgtaaaaaagaacggcgattcaccagcggacagtgtcaggtgagagttttaccacctgtcccaactgaaggactgactccggacgatgtgcctgctctagccgatcgggtccgccactctatgttgactgtatttcgggagatttcgactgatgggagggggggaggagattacttaaagaagccagggggaggcggatag

SEQ ID NO: 303352 - DNA, 852 bp, Artificial Sequence
  derived and/or modified sequence
atggatctgtggcctggagcctggatgctgctccttttactgtttctcctgctgttgtttctcttgccaacgctctggttctgctctccaagtgccaagtacttctttaagatggccttctataatggctggatactcttcttagcagttctcgccatccctgtgtgcgccgtcagaggtcgtaatgtcgaaaatatgaagattctcagactcatgctgctccacataaagtacctctatggaataagagtggaagtaaggggcgcacaccacttccccccaagccagccatacgtagttgtgtccaatcaccaaagctcactggatttgctggggatgatggaggtactacccggacggtgtgtcccaatcgccaagcgggaattgctgtgggcgggatccgcagggttggcatgttggctggcaggcgtgattttcatagatagaaaacggactggggatgctataagtgttatgagcgaagtagcgcaaactctgctgacgcaagacgtgagggtgtgggtcttccctgaagggacgcgaaatcacaatggaagcatgctgccattcaagagaggagcctttcacctcgcggtgcaggcccaagtccctatcgtccctatagttatgtcctcatatcaggatttctattgcaagaaagaacgcaggtttacgagcgggcagtgccaggtcagagtgctcccgccagtccccactgaaggcctaacccccgacgacgtgcctgccctcgcggatagagtccgccattcgatgcttacagtgtttagagaaatttccacggacggaaggggcggaggcgattacttgaagaaaccgggtggagggggatag

SEQ ID NO: 303353 - DNA, 852 bp, Artificial Sequence
  derived and/or modified sequence
atggatctgtggccaggggcttggatgctgctcctcctgctttttctactgctcctctttctcctccccaccctttggttctgcagtccttcagctaagtatttttttaagatggccttttataacggatggatattatttctggccgtgctggctatcccagtttgtgcagttaggggaaggaacgtggagaatatgaagattctgcggctgatgctgcttcacatcaaatacctctacggcattcgcgtcgaagtcagaggagcccaccacttccctccaagccagccatatgtggttgtttcaaaccaccaaagctccctggatctcctcggcatgatggaggttctaccaggacggtgcgtgccgatcgccaaaagagagttgctgtgggcgggaagcgccggactcgcctgttggctggccggtgtgattttcatcgatcggaagagaacaggagacgcgattagcgtgatgagtgaagtcgcccaaaccctgttgactcaagatgtcagggtctgggtcttcccggagggcacccgcaaccacaacggatctatgttgccgttcaagcgcggtgccttccaccttgctgtgcaagcacaggtgcctatcgttcccatcgtgatgtctagctatcaggatttttattgtaaaaaagagagaaggttcacctctggacagtgtcaggtgcgggtgttaccccctgttcccacagagggcctcactcctgacgatgtgcccgcactcgcagacagggtgaggcacagtatgctgacagtcttcagagagatcagcacagacggacgtggaggcggagactacctcaagaagccaggcggaggcggatag

SEQ ID NO: 303354 - DNA, 852 bp, Artificial Sequence
  derived and/or modified sequence
atggacctgtggcctggggcatggatgcttttattgctcctctttctactgctcttatttctcttgcccacattatggttttgtagtccctcggctaagtacttttttaaaatggctttctacaatgggtggatcctgttcctggctgtcctcgcaatccctgtgtgtgcggtgagaggtcgcaacgtcgagaacatgaagattttgagattaatgctgctgcacattaaatatctgtacggcatcagagtggaggtccggggtgcgcaccattttcccccttcccagccttatgtcgtcgtgagcaatcatcaatcttctctggatctgctgggcatgatggaagtactacctgggagatgtgtgcctatcgctaaaagagaactgctttgggcaggctccgccggtctcgcctgctggctggccggagtcatcttcatcgaccgcaagcgaacaggagacgcaatcagcgtgatgtcagaggtggcccagaccctgctgactcaagacgtgcgcgtgtgggtgttccctgagggaaccaggaatcacaacgggtccatgctgcctttcaagcgcggtgcgttccacctagcagttcaggcccaggtacccattgttcctattgtgatgtcctcctaccaagatttttattgcaaaaaagaacggaggttcaccagcggacagtgccaggtccgagtgcttccccctgtcccaaccgagggtctgactcctgatgacgtccccgctttggccgatagagttcgtcattccatgctcaccgtgttccgcgaaatcagtaccgatggcagggggggaggcgactatttaaagaaacctggaggaggaggttag

SEQ ID NO: 303355 - DNA, 852 bp, Artificial Sequence
  derived and/or modified sequence
atggatctgtggcctggagcctggatgcttctgctgctcctgttcttactgctcctgttcttactccccactctctggttctgctcaccctctgccaagtacttctttaagatggctttttataacgggtggattctgtttcttgccgtgctggcaatcccggtgtgtgccgtgagaggccgaaatgttgaaaacatgaagattcttcgccttatgctcctgcacattaagtacctgtacggcattagagtggaagtgagaggcgctcaccactttcccccttctcaaccgtatgttgtcgtgagcaaccaccagtcttctttagatttgttaggcatgatggaggtcttgcccggtcgttgcgtgccgatcgcaaaaagggaactcctatgggccggatctgccggtcttgcttgctggctcgctggggttatattcattgaccgaaagcggaccggagatgcgattagcgtcatgtccgaggtggcccagaccctgctaacccaggacgttagagtctgggtttttcctgaagggacaaggaaccataatggctccatgttgccttttaagcgcggtgccttccacctggcagtgcaggcacaggtacctattgtacccattgtgatgagcagctaccaggacttttattgcaagaaggagaggcggttcacatctggccagtgtcaggttagggttctgccaccagtgcccaccgagggcctcactccagacgacgtcccggctctcgccgatagagtgaggcactcaatgctgaccgtgttccgggagatttcaacagacgggaggggcggaggagattacctgaaaaagccgggtggcggaggatag

SEQ ID NO: 303356 - DNA, 852 bp, Artificial Sequence
  derived and/or modified sequence
atggatctctggcccggtgcatggatgttgctgctgttattgttcctgctcctcctttttttgctgcctacattatggttttgctctccaagcgcaaaatattttttcaagatggctttctataacggatggatcctatttctggccgtcctcgcaataccagtctgtgctgtgcgtggtagaaacgtggaaaacatgaaaatcctgagattaatgctcctccacatcaaatatctctatgggattcgtgtggaagttaggggtgcccaccactttcccccaagccagccatacgtggtcgtgagcaaccatcagagctctctggacttactcgggatgatggaagtcctgccgggacgctgcgtgccaatcgctaagcgcgagctgctttgggctggaagcgcgggactcgcatgttggctggccggagtcattttcatcgacagaaaaagaactggcgacgccattagtgtcatgtccgaagtcgcccagaccctgctaacacaggacgtgcgggtgtgggtgttcccagaggggacacgcaaccacaatggctccatgttgcctttcaagcgcggagcgttccacttagcagtgcaggcccaagtgcccattgtccccatcgtgatgagctcttatcaagatttctattgtaaaaaagaacgaagattcacatccggccagtgccaggttcgagtcttgcctcctgtccctactgagggcctcacaccggatgatgttccagccctcgcggaccgagtgcgacacagcatgctgacagtgttccgcgagatcagcaccgacggccgaggcggaggagattatctcaaaaagccaggtggcggaggttag

SEQ ID NO: 303357 - DNA, 852 bp, Artificial Sequence
  derived and/or modified sequence
atggatctatggcccggagcctggatgctgctcctgctgctgttcctgctcctcctatttcttctgcccaccctctggttttgttcccccagtgcaaagtacttcttcaagatggccttttataatggttggatcctgttcctggcggtcctggcaattcctgtgtgcgctgtgcggggacgtaatgtcgagaacatgaagatccttcgcctgatgctactccacatcaaatacctgtatggcattcgagtagaagtacggggtgcccaccactttcccccatctcagccttatgtggtggtgagcaaccatcaatcatctcttgatctcctgggcatgatggaggtgctgcctgggagatgtgtgccgattgcgaaacgtgagttactctgggctggaagcgcgggtctggcctgttggttggccggagtcatcttcatcgataggaagcgtaccggcgatgcaatttcagtcatgtcggaggtggcgcagacattattaacccaggacgtaagggtgtgggtcttcccagagggcacccgcaaccataacgggagcatgctcccattcaaacggggtgcatttcacctggccgttcaagctcaggtcccgatcgtgccaatagtgatgagctcttaccaggacttctactgcaaaaaggagcgccgattcacatcaggacagtgccaggtcagagtactcccacctgttcctaccgaggggctgacccctgacgatgttcctgctctggccgatagagtccgccatagcatgctgaccgtctttagggagattagtaccgatggtcggggaggaggagactatctgaaaaagcctggtgggggtggatag

SEQ ID NO: 303358 - DNA, 852 bp, Artificial Sequence
  derived and/or modified sequence
atggacttgtggcccggagcatggatgttacttctcctgctcttcctcctgctgctctttcttctcccaaccctttggttctgttctccatccgccaaatatttttttaaaatggcgttttataatgggtggatcttattcctcgctgtcctggccatacccgtgtgcgctgtgcgaggcagaaatgtcgagaatatgaagatacttcgcctgatgctgcttcatattaagtatctgtatggcatacgcgtggaggtccgcggtgctcaccatttcccgccttcgcagccatacgtggtggtatccaaccatcagagctctctcgatttgctcggaatgatggaggtcctaccaggcaggtgcgtgcctatcgcgaagcgtgaactgttgtgggctggaagcgcgggactggcttgctggctcgcaggcgtgattttcatcgatcgaaagcgtactggggatgctatttccgtcatgtccgaggtggcccagaccctcctcacgcaggacgtgcgtgtgtgggtattccccgaaggaactcgcaaccacaacggttcaatgctgcctttcaagagaggagcatttcacctggccgtccaggcacaagtgcctattgttcccatagttatgagctcgtaccaggacttttactgtaaaaaagagaggcggttcacctcaggtcaatgccaggttcgggtgctcccccctgtgccaacagaaggcctcaccccggacgacgtgccagcgttagctgatcgtgtgcgccactccatgctgactgttttcagagagattagcaccgatggcagaggagggggagactatctgaaaaagccgggtggcggaggttag

SEQ ID NO: 303359 - DNA, 852 bp, Artificial Sequence
  derived and/or modified sequence
atggatttatggcctggcgcatggatgttactgctccttctattcctattgttgctgttcttgttacccacactttggttttgctctccaagcgccaaatacttttttaaaatggccttttataatggctggatcctgttcctcgcagttctggctattccagtgtgtgcagtgcgaggcaggaatgtcgaaaatatgaagattctgcggcttatgctattacatatcaagtacctgtacggtatacgagttgaggttcgcggtgctcaccactttcccccttctcagccttacgtcgtcgttagcaaccaccagagctcattagatttgttgggaatgatggaagtgctgccaggtaggtgtgtcccaatcgccaaaagagagttgttgtgggctggcagtgccggactcgcctgctggcttgcgggagtcattttcattgaccgaaagcgtacaggcgacgccatcagcgtcatgtccgaggttgcccaaacgctcctgactcaggacgtgcgtgtttgggtattccctgagggaacacgaaaccataacggttctatgttgccatttaagcggggtgccttccacctggcagtgcaggctcaggtgcctatagtacccatagtcatgtcgagttaccaggacttctactgcaagaaggagaggcgcttcacctcaggtcaatgccaggtgcgcgttctgcctcccgtacctaccgagggcctgacacccgatgatgtgcccgctctggccgatagagtgaggcacagtatgctgaccgtattccgggagatatccaccgacggtcggggagggggtgactacctgaaaaagccaggtggaggaggctag

SEQ ID NO: 303360 - DNA, 276 bp, Artificial Sequence
  derived and/or modified sequence
cacagcgcatcaacccccattttaactcacagtcatccggctcagggaatgatggaggtgctgcccggacggtgcgtccctatcgctaaacgagagctgctatgggccggttccgccggtctcgcctgctggctggccggtgtcattttcatagacaggaaaagaactggcgatgcaatctctgtcatgagcgaagtggctcagaccctgctcacgcaagacgttagccatcccggacttctactacaggagggcgcttctctgcacctcgggtag

SEQ ID NO: 303361 - DNA, 276 bp, Artificial Sequence
  derived and/or modified sequence
cattctgcaagcacacctattttgacccactctcaccctgcacagggcatgatggaagtccttccaggtcgatgtgtgcctatcgccaagcgcgagctgctatgggcaggcagcgccggactggcctgctggctcgctggagtgatctttatcgatcggaaacgtactggcgacgcaatttccgtaatgtccgaggtcgctcagaccctgctcacccaagacgtgagccatcctggacttctcctgcaggaaggggcaagcttgcacctgggatag

SEQ ID NO: 303362 - DNA, 276 bp, Artificial Sequence
  derived and/or modified sequence
cacagtgcctccacccccatcctaacccactcgcatccggcacaaggaatgatggaagtacttccaggcaggtgcgttccaattgccaagcgggaattgctctgggcaggttctgctgggctagcctgctggttggcgggtgtgatttttattgaccgaaaacgcaccggagacgccattagcgtgatgtcagaagtggcgcaaactctcctaacgcaggatgtgtcacaccccggtctgctcctgcaagaaggagcaagtttgcatcttggctag

SEQ ID NO: 303363 - DNA, 516 bp, Artificial Sequence
  derived and/or modified sequence
atgatggaggtgttaccaggacgctgtgtgccaatagccaaacgtgaattactgtgggctggcagcgctgggctggcttgttggctggcaggggtgatcttcatcgacaggaagaggaccggagacgccatcagcgtgatgtccgaagtcgctcagacattgctgacccaagacgtgagagtctgggtctttccagaggggacacgcaaccacaacggcagtatgttgccattcaagagaggagcatttcatcttgccgtgcaggcacaagtgccaatcgtgcccattgtgatgagctcctaccaagacttttactgtaagaaggaacggagattcaccagcggccagtgccaagtgcgcgtgctccctccagtccctaccgaggggttaacacctgacgacgtgcccgctctagccgaccgggtgcgccactctatgctcaccgtttttagggaaatctctacagatggacgcggtgggggagattacctgaagaaacctggcggtgggggatag

SEQ ID NO: 303364 - DNA, 516 bp, Artificial Sequence
  derived and/or modified sequence
atgatggaggtcttgcccggtcgctgtgttccaattgcgaagagagagctcctttgggctggctcggccggactggcctgctggctggccggagtgattttcatcgataggaagaggactggcgatgctattagtgtgatgagcgaagtggctcagaccctactaacccaggacgtgcgagtgtgggtattcccagaaggcacccgcaaccacaacggtagcatgctgcctttcaaaaggggcgcattccacctcgcggttcaggcccaggttccgatcgtcccaattgtgatgtccagttatcaagacttttactgcaaaaaagagcggagatttacatccgggcaatgtcaagtgcgcgtgctccccccagtgcccacagaagggctaacacctgatgatgtgcccgctctcgctgatagagtacgtcactctatgttgaccgtgttcagggagatctctaccgatggccgtgggggaggcgactacctgaagaaacccggtggtggtggatag

SEQ ID NO: 303365 - DNA, 276 bp, Artificial Sequence
  derived and/or modified sequence
catagcgcaagcactccaattttaacccactcccatcccgctcagggtatgatggaggtgctgcccggacggtgtgttccaatcgcaaaacgggaactgttgtgggcgggtagcgccggactggcctgctggttagcaggagtcatctttatcgatcgcaagagaacaggggacgcaattagtgtgatgagcgaagttgcccagaccttactgactcaggatgtaagtcaccctggcctgctcctccaggagggagcctccctccacttgggatag

SEQ ID NO: 303366 - DNA, 276 bp, Artificial Sequence
  derived and/or modified sequence
cacagcgcgtccacgcctatattgacccacagccaccctgcgcaaggtatgatggaggtgcttcccggacgatgcgtccctatcgctaagcgcgagcttttatgggcagggtccgccggtctcgcttgttggctggcaggtgtcatcttcattgatcggaagagaaccggcgatgcaatttccgtcatgtcagaggttgcacaaactttacttacccaggacgtaagtcaccctggtctgctcctgcaggaaggagcctccctgcacctgggctag

SEQ ID NO: 303367 - DNA, 276 bp, Artificial Sequence
  derived and/or modified sequence
cacagcgcgtccaccccaattctcacccacagtcatcccgctcaagggatgatggaggtgttaccgggacgctgcgtgccaattgctaagagagagctcctgtgggcaggtagcgcagggctggcatgttggcttgccggagttatctttatcgaccgtaagcgaaccggagacgccatcagcgtaatgtccgaagtagcccagactctgttgacccaggacgtgagtcacccgggactgctgctgcaggaaggcgcttctcttcacctgggttag

SEQ ID NO: 303368 - DNA, 516 bp, Artificial Sequence
  derived and/or modified sequence
atgatggaggtactcccagggaggtgtgtgccgattgcaaagcgagagctgttatgggcagggtctgctggattggcttgctggctggctggggtgattttcatcgatagaaaacgcaccggcgacgcgatatccgtcatgtctgaggtggcccagacgctgttgactcaggacgtgagggtctgggttttccctgaagggacacgaaatcacaacggctctatgctgccatttaagagaggcgctttccacctcgctgtgcaggcgcaggtcccaatcgtgcctatcgttatgagcagttaccaagacttttattgcaaaaaggagcgaagatttaccagcggacagtgccaggtgcgggttcttccccctgtgcccacagagggactgacccccgacgacgtaccagctctggcggacagagtccgccactcaatgcttaccgtcttccgggagataagcaccgacgggaggggagggggagattatttaaagaaaccgggtggaggcggttag

SEQ ID NO: 303369 - DNA, 516 bp, Artificial Sequence
  derived and/or modified sequence
atgatggaggtcttgcccggacgatgcgtgcccatcgccaaacgcgaactgttatgggcagggtccgccggactggcttgctggctagcaggcgttatctttatcgaccgaaagcgcacaggtgacgcaatttctgtgatgtccgaggttgctcagaccctgctgacacaggacgtaagagtgtgggtcttcccggaaggaacgcgaaaccacaatggctcaatgctccccttcaaacggggagctttccacctcgccgttcaggctcaggtcccaattgtgcccatagttatgtcctcctatcaggatttttactgtaaaaaagaacgcaggttcacttccggccagtgtcaggtgagagtgctgcccccagtgcccactgagggccttacccctgatgatgtgcctgccctcgctgatagggtgaggcattccatgttgactgtctttagggagatctcaacagacggccgagggggaggggactatttaaaaaaacccggtggagggggttag

SEQ ID NO: 303370 - DNA, 276 bp, Artificial Sequence
  derived and/or modified sequence
catagtgctagcaccccaattcttactcactcacatccggctcagggaatgatggaagtgctgccaggcagatgtgttccaatcgccaaacgcgaattgctgtgggcgggtagcgctgggctcgcgtgttggctcgccggagttatatttattgatcgcaagagaactggcgacgctatcagtgtcatgagcgaggtggcccagactctacttacccaggatgtatcacatcctggtcttttgctacaagagggagcctctctgcacctggggtag

SEQ ID NO: 303371 - DNA, 516 bp, Artificial Sequence
  derived and/or modified sequence
atgatggaggttctgcctggacgctgtgtgccgattgccaaaagggaactgctctgggctggctcggccggactggcgtgctggttggcgggtgtgattttcatcgacaggaagcggacaggagatgctatatccgtgatgtccgaggtcgcccagactcttttgactcaagacgttcgtgtttgggtgtttcccgaagggacccgaaaccacaacggcagtatgttgccattcaagaggggggcatttcatctggccgtgcaggcacaggtccccatcgtgcccatcgtaatgtctagttatcaggatttctattgtaaaaaagagcgacggttcacttctgggcagtgccaggtgcgagtgctgcctcccgtgccgaccgagggtctgaccccagacgatgtgcctgccctcgctgatcgtgtccggcatagtatgctgacagtgttcagagagatttctacggacggcagggggggtggcgactacctgaaaaagcctggtggcggaggctag

SEQ ID NO: 303372 - DNA, 516 bp, Artificial Sequence
  derived and/or modified sequence
atgatggaggtgctgcccggacgatgtgtgcctatcgccaaaagagagctgctgtgggccggatccgcaggacttgcctgttggctggcgggagtgatcttcattgaccggaagagaacaggcgatgctatttcagtaatgagcgaggtggcccagacactactgacgcaagatgtgagagtttgggtgtttcccgagggaacaaggaaccacaacggcagcatgctccccttcaagcggggtgccttccacctcgctgtccaagcccaagtgcccatagttcccattgtgatgtccagctaccaggacttttattgtaaaaaagaaaggcggtttactagcggccaatgccaggtccgcgtgctgccgcctgtccctacagaagggctcaccccagacgacgttcctgcgcttgcagatcgagtgaggcactctatgctgacagtgtttcgggaaatttcaacagatggcagggggggtggagactaccttaaaaagccaggcggaggtgggtag

SEQ ID NO: 303373 - DNA, 852 bp, Artificial Sequence
  derived and/or modified sequence
atggacctgtggcccggcgcctggatgctgctgctgctgctgttcctgctgctgctgttcctgctgcccaccctgtggttctgcagccccagcgccaagtacttcttcaagatggccttctacaacggctggatcctgttcctggccgtgctggccatccccgtgtgcgccgtgagaggcagaaacgtggagaacatgaagatcctgagactgatgctgctgcacatcaagtacctgtacggcatcagagtggaggtgagaggcgcccaccacttcccccccagccagccctacgtggtggtgagcaaccaccagagcagcctggacctgctgggcatgatggaggtgctgcccggcagatgcgtgcccatcgccaagagagagctgctgtgggccggcagcgccggcctggcctgctggctggccggcgtgatcttcatcgacagaaagagaaccggcgacgccatcagcgtgatgagcgaggtggcccagaccctgctgacccaggacgtgagagtgtgggtgttccccgagggcaccagaaaccacaacggcagcatgctgcccttcaagagaggcgccttccacctggccgtgcaggcccaggtgcccatcgtgcccatcgtgatgagcagctaccaggacttctactgcaagaaggagagaagattcaccagcggccagtgccaggtgagagtgctgccccccgtgcccaccgagggcctgacccccgacgacgtgcccgccctggccgacagagtgagacacagcatgctgaccgtgttcagagagatcagcaccgacggcagaggcggcggcgactacctgaagaagcccggcggcggcggctag

SEQ ID NO: 303374 - DNA, 516 bp, Artificial Sequence
  derived and/or modified sequence
atgatggaggtgctgcccggcagatgcgtgcccatcgccaagagagagctgctgtgggccggcagcgccggcctggcctgctggctggccggcgtgatcttcatcgacagaaagagaaccggcgacgccatcagcgtgatgagcgaggtggcccagaccctgctgacccaggacgtgagagtgtgggtgttccccgagggcaccagaaaccacaacggcagcatgctgcccttcaagagaggcgccttccacctggccgtgcaggcccaggtgcccatcgtgcccatcgtgatgagcagctaccaggacttctactgcaagaaggagagaagattcaccagcggccagtgccaggtgagagtgctgccccccgtgcccaccgagggcctgacccccgacgacgtgcccgccctggccgacagagtgagacacagcatgctgaccgtgttcagagagatcagcaccgacggcagaggcggcggcgactacctgaagaagcccggcggcggcggctag

SEQ ID NO: 303375 - DNA, 276 bp, Artificial Sequence
  derived and/or modified sequence
cacagcgccagcacccccatcctgacccacagccaccccgcccagggcatgatggaggtgctgcccggcagatgcgtgcccatcgccaagagagagctgctgtgggccggcagcgccggcctggcctgctggctggccggcgtgatcttcatcgacagaaagagaaccggcgacgccatcagcgtgatgagcgaggtggcccagaccctgctgacccaggacgtgagccaccccggcctgctgctgcaggagggcgccagcctgcacctgggctag

SEQ ID NO: 303376 - protein, 563 aa, Artificial Sequence
  derived and/or modified sequence
MTVLEITLAVILTLLGLAILAILLTRWARCKQSEMYISRYSSEQSARLLDYEDGRGSRHAYSTQSDTSYDNRERSKRDYTPSTNSLVSMASKFSLGQTELILLLMCFILALSRSSIGSIKCLQTTEEPPSRTAGAMMQFTAPIPGATGPIKLSQKTIVQTPGPIVQYPGSNAGPPSAPRGPPMAPIIISQRTARIPQVHTMDSSGKITLTPVVILTGYMDEELAKKSCSKIQILKCGGTARSQNSREENKEALKNDIIFTNSVESLKSAHIKEPEREGKGTDLEKDKIGMEVKVDSDAGIPKRQETQLKISEMSIPQGQGAQIKKSVSDVPRGQESQVKKSESGVPKGQEAQVTKSGLVVLKGQEAQVEKSEMGVPRRQESQVKKSQSGVSKGQEAQVKKRESVVLKGQEAQVEKSELKVPKGQEGQVEKTEADVPKEQEVQEKKSEAGVLKGPESQVKNTEVSVPETLESQVKKSESGVLKGQEAQEKKESFEDKGNNDKEKERDAEKDPNKKEKGDKNTKGDKGKDKVKGKRESEINGEKSKGSKRAKANTGRKYNKKVEE

SEQ ID NO: 303377 - protein, 563 aa, Artificial Sequence
  derived and/or modified sequence
MTVLEITLAVILTLLGLAILAILLTRWARRKQSEMYISRYSSEQSARLLDYEDGRGSRHAYSTQSDTSYDNRERSKRDYTPSTNSLVSMASKFSLGQTELILLLMCFILALSRSSIGSIKCLQTTEEPPSRTAGAMMQFTAPIPGATGPIKLSQKTIVQTLGPIVQYPGSNAGPPSAPRGPPMAPIIISQRTARIPQVHTMDSSGKITLTPVVILTGYMDEELAKKSCSKIQILKCGGTARSQNSREENKEALKNDIIFTNSVESLKSAHIKEPEREGKGTDLEKDKIGMEVKVDSDAGIPKRQETQLKISEMSIPQGQGAQIKKSVSDVPRGQESQVKKSESGVPKGQEAQVTKSGLVVLKGQEAQVEKSEMGVPRRQESQVKKSQSGVSKGQEAQVKKRESVVLKGQEAQVEKSELKVPKGQEGQVEKTEADVPKEQEVQEKKSEAGVLKGPESQVKNTEVSVPETLESQVKKSESGVLKGQEAQEKKESFEDKGNNDKEKERDAEKDPNKKEKGDKNTKGDKGKDKVKGKRESEINGEKSKGSKRAKANTGRKYNKKVEE

SEQ ID NO: 303378 - protein, 563 aa, Artificial Sequence
  derived and/or modified sequence
MTVLEITLAVILTLLGLAILAILLTRWARRKQSEMYISRYSSEQSARLLDYEDGRGSRHAYSTQSDTSYDNRERSKRDYTPSTNSLVSMASKFSLGQTELILLLMCFILALSRSSIGSIKCLQTTEEPPSRTAGAMMQFTAPIPGATGPIKLSQKTIVQTLGPIVQYPGSNAGPPSAPRGPPMAPIIISQRTARIPQVHTMDSSGKITLTPVVILTGYMDEELAKKSCSKIQILKCGGTARSQNSREENKEALKNDIIFTNSVESLKSAHIKEPEREGKGTDLEKDKIGMEVKVDSDAGIPKRQETQLKISEMSVPQGQGAQIKKSVSDVPRGQESQVKKSESGVPKGQEAQVTKSGLVVLKGQEAQVEKSEMGVPRRQESQVKKSQSGVSKGQEAQVKKRESVVLKGQEAQVEKSELKVPKGQEGQVEKTEADVPKEQEVQEKKSEAGVLKGPESQVKNTEVSVPETLESQVKKSESGVLKGQEAQEKKESFEDKGNNDKEKERDAEKDPNKKEKGDKNTKGDKGKDKVKGKRESEINGEKSKGSKRAKANTGRKYNKKVEE

SEQ ID NO: 303379 - protein, 563 aa, Artificial Sequence
  derived and/or modified sequence
MTVLEITLAVILTLLGLAILAILLTRWARRKQSEMYISRYSSEQSARLLDYEDGRGSRHAYSTQSDTSYDNRERSKRDYTPSTNSLVSMASKFSLGQTELILLLMCFILALSRSSIGSIKCLQTTEEPPSRTAGAMMQFTAPIPGATGPFKLSQKTIVQTLGPIVQYPGSNAGPPSAPRGPPMAPIIISQRTARIPQVHTMDSSGKITLTPVVILTGYMDEELAKKSCSKIQILKCGGTARSQNSREENKEALKNDIIFTNSVESLKSAHIKEPEREGKGTDLEKDKIGMEVKVDSDAGIPKRQETQLKISEMSVPQGQGAQIKKSVSDVPRGQESQVKKSESGVPKGQEAQVTKSGLVVLKGQEAQVEKSEMGVPRRQESQVKKSQSGVSKGQEAQVKQRESVVLKGQEAQVEKSELKVPKGQEGQVEKTEADVPKEQEVQEKKSEAGVLKGPESQVKNTEVSVPETLESQVKKSESGVLKGQEAQEKKESFEDKGNNDKEKERDAEKDPNKKEKGDKNTKGDKGKDKVKGKRESEINGEKSKGSKRAKANTGRKYNKKVEE

SEQ ID NO: 303380 - protein, 563 aa, Artificial Sequence
  derived and/or modified sequence
MTVLEITLAVILTLLGLAILAILLTRWARRKQSEMHISRYSSEQSARLLDYEDGRGSRHAYSTQSDTSCDNRERSKRDYTPSTNSLVSMASKFSLGQTELILLLMCFILALSRSSIGSIKCLQTTEELPSRTAGAMMQFTAPIPGATGPIKLSQKTIVQTPGPIVQYPGPNAGPPSAPRGPPMAPIIISQRTARIPQVHTMDSSGKITLTPVVILTGYMDEELAKKPCSKIQILKCGGTARSQNSREENKEALKNDIIFTNSVESLKSAHIKEPEREGKGTDLEKDKIGMEVKVDSDAGIPKRQETQLKISEMSIPQGQGAQIKKSVSDVPRGQESQVKKSESGVPKGQEAQVTKSGLVVLKGQEAQVEKSEMGVPRRQESQVKKSQSGVSKGQEAQVKKRESVVLKGQEAQVEKSELKVPKGQEGQVEKTEADVPKEQEVQEKKSEAGVLKGPESQVKNTEVSVPETLESQVKKSESGVLKGQEAQEKKESFEDKGNNDKEKERDAEKDPNKKEKGDKNTKGDKGKDKVKGKRESEINGEKSKGSKRAKANTGRKYNKKVEE

SEQ ID NO: 303381 - DNA, 2148 bp, Artificial Sequence
  derived and/or modified sequence
ctgctccacacaatttctcagtgatcctctgcatctctgcctacaagggcctccctgacacccaagttcatattgctcagaaacagtgaacttgagtttttcgttttatcttgatctctctctgacaaagaaatccagatgatgcgagacctgatgaagacaatacatggaaaatgacagtcttggaaataactttggctgtcatcctgactctactgggacttgccatcctggctattttgttaacaagatgggcacgatgtaagcaaagtgaaatgtatatctccagatacagttcagaacaaagtgctagacttctggactatgaggatggtagaggatcccgacatgcatattcaacacaaagtgacacttcatatgataaccgagagagatccaaaagagattacacaccatcaaccaactctctagtgtctatggcatctaagttctccctgggacaaacagaactcattcttcttttgatgtgttttattttagcactgtctcgatcaagtattggtagtataaaatgtttacaaacaactgaagaacctccttccagaactgcaggagccatgatgcaattcacagcccctattcccggagctacaggacctatcaagctctctcaaaaaaccattgtgcaaactccaggacctattgtacaatatcctggatccaatgctggtccaccttcagcaccccgcggtccacccatggcacccataataatttcacagagaaccgcaagaatacctcaagttcacactatggacagttctggaaaaatcacactgactcctgtggttatattaacaggttacatggatgaagaacttgcaaaaaaatcttgttccaaaatccagattctaaaatgtggaggcactgcaaggtctcagaatagccgagaagaaaacaaggaagcactaaagaatgacatcatatttacgaattctgtagaatccttgaaatcagcacacataaaggagccagaaagagaaggaaaaggcactgatttagagaaagacaaaataggaatggaggtcaaggtagacagtgacgctggaataccaaaaagacaggaaacccaactaaaaatcagtgagatgagtataccacaaggacagggagcccaaataaagaaaagtgtgtcagatgtaccaagaggacaggagtcccaagtaaagaagagtgagtcaggtgtcccaaaaggacaagaagcccaagtaacgaagagtgggttggttgtactgaaaggacaggaagcccaggtagagaagagtgagatgggtgtgccaagaagacaggaatcccaagtaaagaagagtcagtctggtgtctcaaagggacaggaagcccaggtaaagaagagggagtcagttgtactgaaaggacaggaagcccaggtagagaagagtgagttgaaggtaccaaaaggacaagaaggccaagtagagaagactgaggcagatgtgccaaaggaacaagaggtccaagaaaagaagagtgaggcaggtgtactgaaaggaccagaatcccaagtaaagaacactgaggtgagtgtaccagaaacactggaatcccaagtaaagaagagtgagtcaggtgtactaaaaggacaggaagcccaagaaaagaaggagagttttgaggataaaggaaataatgataaagaaaaggagagagatgcagagaaagatccaaataaaaaagaaaaaggtgacaaaaacacaaaaggtgacaaaggaaaggacaaagttaaaggaaagagagaatcagaaatcaatggtgaaaaatcaaaaggctcgaaaagggcgaaggcaaatacaggaaggaagtacaacaaaaaagtggaagagtaaggataaattttttaaaggcccataagacaagtgattattatgattcccatactccagatacaaaccatatcccagccattgcctaaacagattacaattataaaatccctttcatcttcatatcacagtttctgctcttcagaagtttcaccctttttaatctctcagccacaaacctcagtttccaaatatttgttttataagttaagacgtatatgattccgtcaagaaagactggatactttctgaagtaaaacattttaattaaagaaatatatagtaa

SEQ ID NO: 303382 - DNA, 2148 bp, Artificial Sequence
  derived and/or modified sequence
ctgctccacacaatttctcagtgatcctctgcatctctgcctacaagggcctccctgacacccaagttcatattgctcagaaacagtgaacttgagtttttcgttttaccttgatctctctctgacaaagaaatccagatgatgcgagacctgatgaagacaatacatggaaaatgacagtcttggaaataactttggctgtcatcctgactctactgggacttgccatcctggctattttgttaacaagatgggcacgatgtaagcaaagtgaaatgtatatctccagatacagttcagaacaaagtgctagacttctggactatgaggatggtagaggatcccgacatgcatattcaacacaaagtgacacttcatatgataaccgagagagatccaaaagagattacacaccatcaaccaactctctagtgtctatggcatctaagttctccctgggacaaacagaactcattcttcttttgatgtgttttattttagcactgtctcgatcaagtattggtagtataaaatgtttacaaacaactgaagaacctccttccagaactgcaggagccatgatgcaattcacagcccctattcccggagctacaggacctatcaagctctctcaaaaaaccattgtgcaaactccaggacctattgtacaatatcctggatccaatgctggtccaccttcagcaccccgcggtccacccatggcacccataataatttcacagagaaccgcaagaatacctcaagttcacactatggacagttctggaaaaatcacactgactcctgtggttatattaacaggttacatggatgaagaacttgcaaaaaaatcttgttccaaaatccagattctaaaatgtggaggcactgcaaggtctcagaatagccgagaagaaaacaaggaagcactaaagaatgacatcatatttacgaattctgtagaatccttgaaatcagcacacataaaggagccagaaagagaaggaaaaggcactgatttagagaaagacaaaataggaatggaggtcaaggtagacagtgacgctggaataccaaaaagacaggaaacccaactaaaaatcagtgagatgagtataccacaaggacagggagcccaaataaagaaaagtgtgtcagatgtaccaagaggacaggagtcccaagtaaagaagagtgagtcaggtgtcccaaaaggacaagaagcccaagtaacgaagagtgggttggttgtactgaaaggacaggaagcccaggtagagaagagtgagatgggtgtgccaagaagacaggaatcccaagtaaagaagagtcagtctggtgtctcaaagggacaggaagcccaggtaaagaagagggagtcagttgtactgaaaggacaggaagcccaggtagagaagagtgagttgaaggtaccaaaaggacaagaaggccaagtagagaagactgaggcagatgtgccaaaggaacaagaggtccaagaaaagaagagtgaggcaggtgtactgaaaggaccagaatcccaagtaaagaacactgaggtgagtgtaccagaaacactggaatcccaagtaaagaagagtgagtcaggtgtactaaaaggacaggaagcccaagaaaagaaggagagttttgaggataaaggaaataatgataaagaaaaggagagagatgcagagaaagatccaaataaaaaagaaaaaggtgacaaaaacacaaaaggtgacaaaggaaaggacaaagttaaaggaaagagagaatcagaaatcaatggtgaaaaatcaaaaggctcgaaaagggcgaaggcaaatacaggaaggaagtacaacaaaaaagtggaagagtaaggataaattttttaaaggcccataagacaagtgattattatgattcccatactccagatacaaaccatatcccagccattgcctaaacagattacaattataaaatccctttcatcttcatatcacagtttctgctcttcagaagtttcaccctttttaatctctcagccacaaacctcagtttccaaatatttgttttataagttaagacgtatatgattccgtcaagaaagactggatactttctgaagtaaaacattttaattaaagaaatatatagtaa

SEQ ID NO: 303383 - DNA, 1692 bp, Artificial Sequence
  derived and/or modified sequence
atgaccgtgctggagatcaccctggccgtgatcctgaccctgctgggcctggccatcctggccatcctgctgaccagatgggccagatgcaagcagagcgagatgtacatcagcagatacagcagcgagcagagcgccagactgctggactacgaggacggcagaggcagcagacacgcctacagcacccagagcgacaccagctacgacaacagagagagaagcaagagagactacacccccagcaccaacagcctggtgagcatggccagcaagttcagcctgggccagaccgagctgatcctgctgctgatgtgcttcatcctggccctgagcagaagcagcatcggcagcatcaagtgcctgcagaccaccgaggagccccccagcagaaccgccggcgccatgatgcagttcaccgcccccatccccggcgccaccggccccatcaagctgagccagaagaccatcgtgcagacccccggccccatcgtgcagtaccccggcagcaacgccggcccccccagcgcccccagaggcccccccatggcccccatcatcatcagccagagaaccgccagaatcccccaggtgcacaccatggacagcagcggcaagatcaccctgacccccgtggtgatcctgaccggctacatggacgaggagctggccaagaagagctgcagcaagatccagatcctgaagtgcggcggcaccgccagaagccagaacagcagagaggagaacaaggaggccctgaagaacgacatcatcttcaccaacagcgtggagagcctgaagagcgcccacatcaaggagcccgagagagagggcaagggcaccgacctggagaaggacaagatcggcatggaggtgaaggtggacagcgacgccggcatccccaagagacaggagacccagctgaagatcagcgagatgagcatcccccagggccagggcgcccagatcaagaagagcgtgagcgacgtgcccagaggccaggagagccaggtgaagaagagcgagagcggcgtgcccaagggccaggaggcccaggtgaccaagagcggcctggtggtgctgaagggccaggaggcccaggtggagaagagcgagatgggcgtgcccagaagacaggagagccaggtgaagaagagccagagcggcgtgagcaagggccaggaggcccaggtgaagaagagagagagcgtggtgctgaagggccaggaggcccaggtggagaagagcgagctgaaggtgcccaagggccaggagggccaggtggagaagaccgaggccgacgtgcccaaggagcaggaggtgcaggagaagaagagcgaggccggcgtgctgaagggccccgagagccaggtgaagaacaccgaggtgagcgtgcccgagaccctggagagccaggtgaagaagagcgagagcggcgtgctgaagggccaggaggcccaggagaagaaggagagcttcgaggacaagggcaacaacgacaaggagaaggagagagacgccgagaaggaccccaacaagaaggagaagggcgacaagaacaccaagggcgacaagggcaaggacaaggtgaagggcaagagagagagcgagatcaacggcgagaagagcaagggcagcaagagagccaaggccaacaccggcagaaagtacaacaagaaggtggaggagtag

SEQ ID NO: 303384 - DNA, 1692 bp, Artificial Sequence
  derived and/or modified sequence
atgacagttctcgagatcaccctggctgttattctgacactgctaggcctggctatcctcgctatcctcctgacaagatgggctcggtgtaagcagagtgagatgtatatttcgaggtactcaagtgagcaatcagcaaggcttctggattacgaggacgggaggggtagtaggcatgcttatagcacccagtccgatacgtcctatgataacagggagcgttctaaacgggattacacccccagcaccaatagtttggtttctatggctagcaagttctctttggggcagaccgagctgattttattattgatgtgctttatacttgcattatcccgttcctccataggatctattaaatgtttgcagaccactgaggagcccccctcaagaaccgcaggtgccatgatgcagttcacagcaccaattccaggagctaccggaccaattaagttatcccagaagacaatcgtccagaccccgggacccatagttcagtatccggggtctaatgctggccctccttctgctcctcgtgggccccccatggcccctattatcatttcacagcgtacagcaaggatcccccaggtgcacaccatggacagctcaggtaaaataaccctcacacccgtggtcatcctgaccggctacatggatgaggaactggccaagaagagttgctctaagatccagattctgaagtgcggagggacagcacgaagtcagaattctcgcgaggaaaataaagaagctttgaagaatgatatcatcttcaccaacagcgtcgaaagtctcaaatccgcccacatcaaggagccagagcgggagggcaaaggaaccgacctagaaaaggacaaaatcggaatggaggttaaggtggatagtgatgccggtatcccaaagcgccaggagacccagctgaaaataagcgagatgtccatcccacagggacagggtgcacaaataaaaaaatccgtgtccgacgtcccccgcggccaggagtcgcaggtcaaaaagagtgagtctggagtgcctaagggtcaggaagctcaggtgacaaagagtggcctcgtggtgctaaaaggacaagaggcccaggtcgagaagagcgagatgggtgtgcccaggcgccaggaaagccaggttaaaaagtcccagagtggtgtctctaaggggcaggaagcacaggtgaaaaaaagggagagcgtcgttctgaagggccaagaggcgcaggtcgaaaagagcgaactgaaggtgccaaaggggcaggagggccaggtcgagaagactgaggcagatgttcctaaagaacaagaggttcaggaaaagaagagtgaggctggcgtgcttaagggacccgagtctcaagttaagaataccgaagtttctgtgcccgaaaccctcgaatctcaggttaagaagtcggagtcaggggtgttgaaaggacaagaggctcaggaaaaaaaagagtctttcgaggacaagggcaataatgacaaagagaaggaaagggacgccgaaaaagatccaaacaagaaggaaaagggggataaaaataccaagggagacaaaggaaaggacaaggtcaaaggcaaacgggaaagcgaaataaatggcgagaaatcgaaggggagcaagcgcgcgaaggcgaataccggccgcaaatataacaaaaaagtggaggagtag

SEQ ID NO: 303385 - DNA, 1692 bp, Artificial Sequence
  derived and/or modified sequence
atgaccgtcctggaaattactctcgccgtgatcctcacactgctgggtctggcaatcctggccatcctcctgacccgatgggcaagatgtaaacagtcggagatgtatatttctagatacagctctgagcagagcgcccgattgctggactacgaagatggccgcggttctcggcatgcctacagcacccaatcggatacctcgtatgacaaccgcgagagaagcaagcgggactatacaccaagtacgaacagtctggtgtctatggcttcaaaattctctctcggacagactgagctgatcttgctgctgatgtgtttcatactcgccctgtctagaagcagcatcgggtcaattaagtgcttgcagactaccgaggagcctcccagtaggaccgccggtgcgatgatgcagttcaccgcaccgattccgggcgctaccggcccaatcaagttgtctcagaaaaccatcgtgcagactcctggccccatcgtgcagtacccaggctctaacgctggcccaccatctgcaccccgcggacctcccatggcccccatcatcatttcacaacgaactgcccgcatccctcaggtccacacgatggacagttcgggtaaaattaccctcacacctgtggtcatcctcacaggatacatggacgaagaattagccaaaaaaagttgctcaaaaattcaaattctcaaatgcggcggaactgcacggtcccaaaatagccgggaggaaaacaaagaagccttaaagaacgatatcattttcaccaattccgtggaatccctgaagagtgcgcatatcaaggaaccagagcgggagggcaagggcactgatttggaaaaggataaaattggcatggaggtgaaagtggacagtgacgctggtataccaaaaagacaagagacacagttgaaaatctcagagatgtctatacctcagggccagggggctcagatcaagaagagtgttagcgacgtgccgcgcgggcaggaatctcaggtgaagaaaagtgagtccggggtcccaaaaggacaggaagctcaggtgacgaaatccggcctagtcgttctgaagggacaggaggcccaggtcgaaaagtccgagatgggagttcctagaaggcaggagtcccaggttaagaaatcacagtcaggcgtgtctaaagggcaggaggcacaggtgaaaaaaagggaatccgttgttctcaagggccaggaagcccaggtcgagaaaagtgaattaaaagtgccaaaagggcaggaagggcaggtggagaaaactgaggcggatgtccctaaggagcaggaggtgcaggagaagaaaagcgaggctggagtgcttaagggaccagagtcacaggtgaagaatactgaggtttcagtgccagagactctggagagccaggtgaagaaatctgaatctggggtactgaaaggtcaggaagcccaagagaagaaggagagctttgaggacaaggggaacaatgacaaagagaaggagagagacgctgaaaaagatcccaacaaaaaggagaagggcgataaaaacactaaaggcgacaaaggtaaagacaaggtgaaaggcaagcgcgaaagtgaaattaacggggagaagagtaagggttctaagcgtgctaaggccaacacgggacgcaaatacaataagaaggtagaggaatag

SEQ ID NO: 303386 - DNA, 1692 bp, Artificial Sequence
  derived and/or modified sequence
atgacagtgctggagatcaccctggccgtcatcctgaccctgctgggcctggccatcctggccatcctgctgacccgctgggcccgctgcaagcagagcgagatgtacatcagccgctacagcagcgagcagagcgcccggctgctggactatgaagatggccggggcagcagacatgcctacagcacccagagcgacaccagctatgacaaccgggagaggagcaagagggactacacccccagcaccaacagcctggtgtccatggccagcaagttcagcctgggccagacagagctgatcctgctgctgatgtgcttcatcctggccctgagccgcagcagcatcggcagcatcaagtgcctgcagaccacagaggagccccccagcaggacagctggggccatgatgcagttcaccgcccccatccctggggccaccggccccatcaagctgagccagaagaccatcgtgcagaccccaggccccatcgtgcagtacccaggcagcaatgccggcccccccagcgccccccggggcccccccatggcccccatcatcatcagccagaggacagcccgcatcccccaggtgcacaccatggacagcagcggcaagatcaccctgacccctgtggtgatcctgaccggctacatggatgaggagctggccaagaagagctgcagcaagatccagatcctgaagtgtggcggcacagcccggagccagaacagccgggaggagaacaaggaggccctgaagaatgacatcatcttcaccaacagcgtggagagcctgaagagcgcccacatcaaggagcctgagcgggagggcaaaggaacagacctggagaaggacaagattggcatggaggtgaaggtggacagtgatgctggcatccccaagaggcaggagacccagctgaagatcagcgagatgagcatcccccagggccagggcgcccagatcaagaagtctgtgtctgatgtgccccggggccaggagagccaggtgaagaagtctgagagcggcgtgcccaagggccaggaggcccaggtgaccaagagcggcctggtggtgctgaagggccaggaggcccaggtggagaagtctgagatgggcgtgccccggcggcaggagagccaggtgaagaagagccagagcggcgtgtccaagggccaggaggcccaggtgaagaagcgggagagcgtggtgctgaagggccaggaggcccaggtggagaagtctgagctgaaggtgcccaagggccaggagggccaggtggagaagacagaagcagatgtgcccaaggagcaggaggtgcaggagaagaagtctgaggccggcgtgctgaagggccctgagagccaggtgaagaacacagaggtgtctgtgcctgagaccctggagagccaggtgaagaagtctgagagcggcgtgctgaagggccaggaggcccaggagaagaaggagagctttgaggacaagggcaacaatgacaaggagaaggagagagatgctgagaaggaccccaacaagaaggagaagggggacaagaacaccaagggggacaagggcaaggacaaggtgaagggcaagcgggagagcgagatcaatggagagaagagcaagggcagcaagagggccaaggccaacacaggcaggaagtacaacaagaaggtggaggagtag

SEQ ID NO: 303387 - DNA, 1692 bp, Artificial Sequence
  derived and/or modified sequence
atgaccgtgctggagatcaccctggccgtgatcctgaccctgctgggtttggccattctggctattctgctgacccggtgggcccgatgcaaacaatccgaaatgtatatttcacgttatagctctgagcagtcggctcgcctgctcgattatgaggacggccgaggatctcgtcatgcctatagtacccagtccgatacttcttacgacaacagggagaggagcaagagggattatacccccagcaccaattcattagtgtctatggcgtcaaagttttctcttggtcaaaccgaactgatactgctgctgatgtgctttatcctcgccctgtctagatccagtatcggttccataaaatgcctgcagactaccgaggagccacccagccggactgctggtgcaatgatgcagttcactgcacccatcccgggcgcgaccggcccaatcaaactgtcgcaaaaaaccatagtgcagacccccggccccatagtccaatatccaggctcaaatgcgggtccgccgtctgcaccacgcgggcccccaatggcacccattattatttcacagaggactgcgaggattccacaagttcacacaatggatagcagcgggaaaatcaccctgacccctgtggtgatcctcacaggctatatggacgaggagctcgcgaagaagtcttgtagcaagattcaaatactcaaatgcggtgggacagcaaggagtcagaactccagggaggaaaataaggaagctctcaagaacgacataatttttaccaacagcgtcgagagcctgaagtccgctcatattaaggaaccagagcgggaagggaaaggtacagatctagagaaagataagatcggcatggaggttaaagtggacagtgatgcagggatccctaagcgccaggagactcaactgaaaatatcagagatgtccataccccagggtcagggggcacagatcaagaaaagcgtctcagacgtcccacgagggcaagaaagtcaggtaaaaaaatccgagagtggcgtgccaaaaggccaggaagcccaggtcactaagtccgggctggtggtcctcaaagggcaagaagcccaggtggagaagagcgaaatgggtgtgcctagacgccaggaatctcaggtaaagaaatcccagtctggcgtgtctaagggacaggaagctcaggtaaagaagagagaatccgtggtgttgaaggggcaagaggcccaggtggaaaagtctgagttgaaggtaccaaagggacaggaagggcaggtggagaagacggaagcagacgtgcctaaagagcaggaagtacaggagaagaaaagcgaggcaggagtgttaaagggtcccgagtcacaggtgaagaatactgaggtgagtgtgcccgagactctcgagagccaggtcaaaaagtccgagagtggggtcctgaaaggccaagaagcccaggagaagaaagagagctttgaagataaggggaataacgacaaggagaaggagagagacgcagaaaaagacccaaacaaaaaggaaaaaggggacaagaacacaaagggtgataaggggaaagataaggtgaagggcaaacgcgagagcgagatcaacggcgagaaatctaagggatctaagcgtgccaaggccaataccggaaggaagtacaacaagaaggtggaggaatag

SEQ ID NO: 303388 - DNA, 1692 bp, Artificial Sequence
  derived and/or modified sequence
atgaccgtgctggagatcaccctggccgtgatcctgaccctgctgggcctggcaatacttgccatactactcacccggtgggctcgttgcaaacaaagcgaaatgtatatttcccgatactccagtgagcagtctgcgcggctgctggactacgaggatgggagggggtcgcgccatgcctactcgacgcagagcgatacaagctacgacaacagagaaagaagcaaacgcgactacacaccatcaaccaatagcctggtatcaatggcttcaaaattttcccttggccagacagaactcatcttgctcctcatgtgttttattttggccctctcgcgttctagcatcggctctattaagtgtttgcaaacaaccgaggagccacctagtaggaccgccggcgctatgatgcagttcactgcccccatccctggtgcgaccggccctattaaattgtctcagaagactattgtacagactcccggtcctatcgttcagtatccgggatctaatgccggcccgccatcagcacccaggggaccgcccatggccccaatcatcatttcccagcggacagcccgtattccccaggttcacacaatggacagctctgggaagatcaccctgacccccgtggtgatcctaactggctacatggatgaagaactcgccaaaaagtcttgcagtaaaatccaaattctaaagtgcggcggcactgccaggtcccagaacagtagagaggagaacaaggaagctctgaaaaatgacatcatattcactaactcagtggagagtctgaaatctgcacatatcaaagagcctgaacgcgaaggtaaaggaacagatctggagaaggacaagattggtatggaggttaaagttgactccgatgccgggattccgaagaggcaggaaacacagcttaaaatttcagagatgagtatacctcagggccagggagctcaaattaaaaagtctgtcagcgacgtgccgaggggacaggaatcgcaagtaaaaaaatccgaatccggcgtacctaaaggacaggaggcacaggtgactaagagtggactcgttgttttaaaaggccaggaagcacaggttgagaagtctgaaatgggggttccgcgccggcaggagagccaggtgaaaaagagtcagtccggggtttctaaagggcaggaagcccaggttaagaagagagagtcagtggtgctgaagggccaggaggcccaagttgagaagtctgagctcaaagtgcctaagggacaggagggacaggtggagaaaaccgaagctgatgtgccaaaggagcaggaggtacaagaaaaaaaatcagaggccggcgttttaaaggggccggagtctcaggttaaaaatactgaagtgtctgtgcctgaaaccctggagagccaggtgaagaagtctgagtctggagtgctcaagggacaggaagcccaggagaagaaagagagtttcgaggacaagggcaataacgacaaagaaaaagagagggacgcggagaaggacccaaacaagaaggagaagggggataagaatactaaaggagataaagggaaagacaaggttaagggtaagcgggaatctgagataaacggagagaaatctaaaggatccaagcgagccaaggcgaacactggacgtaagtataacaagaaggtggaggaatag

SEQ ID NO: 303389 - DNA, 1692 bp, Artificial Sequence
  derived and/or modified sequence
atgaccgtcttagagattaccctagcggtgatcttgactctcctgggactggcgatccttgcaattttgctgacccgctgggctcggtgtaagcagagcgaaatgtacattagtaggtattcttccgaacaatcagccagacttctggactacgaagatggtagagggtccaggcacgcatattccacccagtcagacacgagttatgataatcgggagcgaagtaagcgcgactacacgccaagcacaaactctcttgtcagtatggcctccaagttctccctcggacagactgaacttatactgcttctcatgtgttttattctcgcactgagccgatcttcaatcggcagcattaaatgtttacagacgacagaagaacctccctccagaacagccggtgctatgatgcagttcacggcacccatcccaggcgctaccggcccaatcaaactgtcacagaaaaccatcgtgcagacccctggcccaatcgtgcagtatccaggctccaacgccggaccaccatcagctccacgcggaccccctatggctccaataattatctcacaacgcactgcaaggatcccccaggttcacacaatggatagttcaggaaagatcacgctgacccccgtggtgattctgactggatacatggatgaagagttggcaaagaaatcttgcagcaagattcagatcctgaagtgcggcggaacagccagatctcagaatagccgagaggaaaataaggaggcccttaagaatgacattatctttaccaatagcgtggagagcttgaaaagcgcgcacatcaaagaaccagagagggagggaaagggaaccgacctagagaaggataaaatagggatggaggtcaaggtagattcagacgccggaatcccaaaacgccaggagacgcagctgaaaatttctgagatgtccattccgcagggacaaggcgcacagataaaaaagagtgtgtccgatgtacccagagggcaggaatcgcaggttaaaaagtccgagtctggagtaccaaagggccaggaggcccaagtgactaagtccggtctggtggtactaaaggggcaggaagcacaggtggaaaaaagcgaaatgggcgtgccacgaaggcaagagagccaggtcaaaaaaagtcagtctggggttagcaagggccaggaagcccaggtcaagaagcgagagagcgtggtgttgaaaggccaggaagcccaggtggagaaatctgagttgaaggtgcccaaggggcaagagggacaggtcgaaaagaccgaggccgatgtgcctaaagaacaagaggtccaggagaaaaagtccgaggccggtgttttgaagggcccagagtcacaggttaaaaacacggaggtgagtgttcctgaaacactggagagccaagtgaaaaagagcgagagtggcgtcctgaagggtcaagaagcccaggagaagaaagagagtttcgaggacaaagggaataacgataaagagaaagaaagggatgctgagaaggatcctaacaaaaaagaaaagggagataaaaacaccaaaggcgataaaggtaaggacaaggtgaagggaaaaagagagtctgaaatcaacggggagaagagcaagggatcaaaacgggctaaagctaacacaggtcggaagtacaacaagaaagtggaagagtag

SEQ ID NO: 303390 - DNA, 1692 bp, Artificial Sequence
  derived and/or modified sequence
atgaccgttctggagattaccctggcagttatattaacgttattgggacttgccatcctggccattttgcttactcgctgggctaggtgtaagcagtcagaaatgtacattagtcggtatagttccgaacagtctgctcgcctgcttgactacgaagatgggaggggctcaagacatgcctacagtactcagagcgacacttcctatgataacagagaaaggtcaaagagggactacactccatcaacgaattccctggtctcgatggcttcaaagttcagcctgggccagacagaacttatactcctcctcatgtgtttcatcctagccctctccaggtctagtattggttccatcaaatgcctgcagaccactgaggaaccaccctcgcggactgccggagctatgatgcagttcacagcacccattcccggagcaacaggacctattaagctaagtcagaaaacaatagtacagaccccgggaccgatcgtgcagtatcccggtagcaatgcgggaccaccgtctgccccacggggacctcccatggcccctatcattatctctcagaggacagcccgaattccacaggtgcatactatggacagcagtgggaagattactctcacgcctgtagtcatcctgactggctacatggatgaggagttggcaaagaaaagttgttcaaaaatccaaattctgaaatgcggtggcacagcaagaagtcagaactcgagagaggagaataaagaagcactcaaaaatgacatcatcttcaccaatagtgtggaaagcctgaagagcgcccatatcaaggaacctgaaagagagggaaaggggactgacctcgagaaggacaagatagggatggaggtcaaggttgatagtgatgcaggaatccctaagcgccaggagacccagttgaaaatttcagaaatgtcaattccccaaggccaaggggctcaaatcaagaagagtgtgtctgatgttcctcgtggacaggagagccaggttaagaagtctgaatccggggtgccgaagggacaggaggcgcaagtaaccaagagtgggttggtggtccttaagggacaggaggctcaggtcgagaaatctgaaatgggggtgcctcgcagacaggagagccaggtgaaaaagagccagtccggcgtgagtaagggacaggaagcacaggtcaagaaacgcgagtccgttgtcctgaaaggtcaggaggcccaggtcgagaaatccgagcttaaagtgcctaaggggcaggagggacaggtggaaaagactgaggctgacgtgcccaaggaacaggaagtgcaggaaaagaagtcagaggctggggtactgaagggaccggagtcacaagtgaagaatactgaagtctccgtgccagagaccctggagtcccaggtgaagaaatccgaatccggcgtcctgaagggacaggaagcccaggaaaagaaagagtcgttcgaagataagggcaataatgataaagaaaaagagagggacgccgagaaggaccctaataagaaggaaaaaggtgacaagaacacgaaaggtgataaaggaaaagacaaggtcaagggcaagcgtgaatctgaaatcaacggagagaaaagcaaagggtccaagcgagcaaaggctaatactggtaggaagtataacaaaaaggttgaggaatag

SEQ ID NO: 303391 - DNA, 2148 bp, Artificial Sequence
  derived and/or modified sequence
ctgctccacacaatttctcagtgatcctctgcatctctgcctacaagggcctccctgacacccaagttcatattgctcagaaacagtgaacttgagtttttcgttttaccttgatctctctctgacaaagaaatccagatgatgcgagacctgatgaagacaatacatggaaaatgacagtcttggaaataactttggctgtcatcctgactctactgggacttgccatcctggctattttgttaacaagatgggcacgacgtaagcaaagtgaaatgtatatctccagatacagttcagaacaaagtgctagacttctggactatgaggatggtagaggatcccgacatgcatattcaacacaaagtgacacttcatatgataaccgagagagatccaaaagagattacacaccatcaaccaactctctagtgtctatggcatctaagttctccctgggacaaacagaactcattcttcttttgatgtgttttattttagcactgtctcgatcaagtattggtagtataaaatgtttacaaacaactgaagaacctccttccagaactgcaggagccatgatgcaattcacagcccctattcccggagctacaggacctatcaagctctctcaaaaaaccattgtgcaaactctaggacctattgtacaatatcctggatccaatgctggtccaccttcagcaccccgcggtccacccatggcacccataataatttcacagagaaccgcaagaatacctcaagttcacactatggacagttctggaaaaatcacactgactcctgtggttatattaacaggttacatggatgaagaacttgcaaaaaaatcttgttccaaaatccagattctaaaatgtggaggcactgcaaggtctcagaatagccgagaagaaaacaaggaagcactaaagaatgacatcatatttacgaattctgtagaatccttgaaatcagcacacataaaggagccagaaagagaaggaaaaggcactgatttagagaaagacaaaataggaatggaggtcaaggtagacagtgacgctggaataccaaaaagacaggaaacccaactaaaaatcagtgagatgagtataccacaaggacagggagcccaaataaagaaaagtgtgtcagatgtaccaagaggacaggagtcccaagtaaagaagagtgagtcaggtgtcccaaaaggacaagaagcccaagtaacgaagagtgggttggttgtactgaaaggacaggaagcccaggtagagaagagtgagatgggtgtgccaagaagacaggaatcccaagtaaagaagagtcagtctggtgtctcaaagggacaggaagcccaggtaaagaagagggagtcagttgtactgaaaggacaggaagcccaggtagagaagagtgagttgaaggtaccaaaaggacaagaaggccaagtagagaagactgaggcagatgtgccaaaggaacaagaggtccaagaaaagaagagtgaggcaggtgtactgaaaggaccagaatcccaagtaaagaacactgaggtgagtgtaccagaaacactggaatcccaagtaaagaagagtgagtcaggtgtactaaaaggacaggaagcccaagaaaagaaggagagttttgaggataaaggaaataatgataaagaaaaggagagagatgcagagaaagatccaaataaaaaagaaaaaggtgacaaaaacacaaaaggtgacaaaggaaaggacaaagttaaaggaaagagagaatcagaaatcaatggtgaaaaatcaaaaggctcgaaaagggcgaaggcaaatacaggaaggaagtacaacaaaaaagtggaagagtaaggataaattttttaaaggcccataagacaagtgattattatgattcccatactccagatacaaaccatatcccagccattgcctaaacagattacaattataaaatccctttcatcttcatatcacagtttctgctcttcagaagtttcaccctttttaatctctcagccacaaacctcagtttccaaatatttgttttataagttaagacgtatatgattccgtcaagaaagactggatactttctgaagtaaaacattttaattaaagaaatatatagtaa

SEQ ID NO: 303392 - DNA, 2148 bp, Artificial Sequence
  derived and/or modified sequence
ctgctccacacaatttctcagtgatcctctgcatctctgcctacaagggcctccctgacacccaagttcatattgctcagaaacagtgaacttgagtttttcgttttaccttgatctctctctgacaaagaaatccagatgatgcgagacctgatgaagacaatacatggaaaatgacagtcttggaaataactttggctgtcatcctgactctactgggacttgccatcctggctattttgttaacaagatgggcacgacgtaagcaaagtgaaatgtatatctccagatacagttcagaacaaagtgctagacttctggactatgaggatggtagaggatcccgacatgcatattcaacacaaagtgacacttcatatgataaccgagagagatccaaaagagattacacaccatcaaccaactctctagtgtctatggcatctaagttctccctgggacaaacagaactcattcttcttttgatgtgttttattttagcactgtctcgatcaagtattggtagtataaaatgtttacaaacaactgaagaacctccttccagaactgcaggagccatgatgcaattcacagcccctattcccggagctacaggacctatcaagctctctcaaaaaaccattgtgcaaactctaggacctattgtacaatatcctggatccaatgctggtccaccttcagcaccccgcggtccacccatggcacccataataatttcacagagaaccgcaagaatacctcaagttcacactatggacagttctggaaaaatcacactgactcctgtggttatattaacaggttacatggatgaagaacttgcaaaaaaatcttgttccaaaatccagattctaaaatgtggaggcactgcaaggtctcagaatagccgagaagaaaacaaggaagcactaaagaatgacatcatatttacgaattctgtagaatccttgaaatcagcacacataaaggagccagaaagagaaggaaaaggcactgatttagagaaagacaaaataggaatggaggtcaaggtagacagtgacgctggaataccaaaaagacaggaaacccaactaaaaatcagtgagatgagtgtaccacaaggacagggagcccaaataaagaaaagtgtgtcagatgtaccaagaggacaggagtcccaagtaaagaagagtgagtcaggtgtcccaaaaggacaagaagcccaagtaacgaagagtgggttggttgtactgaaaggacaggaagcccaggtagagaagagtgagatgggtgtgccaagaagacaggaatcccaagtaaagaagagtcagtctggtgtctcaaagggacaggaagcccaggtaaagaagagggagtcagttgtactgaaaggacaggaagcccaggtagagaagagtgagttgaaggtaccaaaaggacaagaaggccaagtagagaagactgaggcagatgtgccaaaggaacaagaggtccaagaaaagaagagtgaggcaggtgtactgaaaggaccagaatcccaagtaaagaacactgaggtgagtgtaccagaaacactggaatcccaagtaaagaagagtgagtcaggtgtactaaaaggacaggaagcccaagaaaagaaggagagttttgaggataaaggaaataatgataaagaaaaggagagagatgcagagaaagatccaaataaaaaagaaaaaggtgacaaaaacacaaaaggtgacaaaggaaaggacaaagttaaaggaaagagagaatcagaaatcaatggtgaaaaatcaaaaggctcgaaaagggcgaaggcaaatacaggaaggaagtacaacaaaaaagtggaagagtaaggataaattttttaaaggcccataagacaagtgattattatgattcccatactccagatacaaaccatatcccagccattgcctaaacagattacaattataaaatccctttcatcttcatatcacagtttctgctcttcagaagtttcaccctttttaatctctcagccacaaacctcagtttccaaatatttgttttataagttaagacgtatatgattccgtcaagaaagactggatactttctgaagtaaaacattttaattaaagaaatatatagtaa

SEQ ID NO: 303393 - DNA, 1692 bp, Artificial Sequence
  derived and/or modified sequence
atgaccgtgctggagatcaccctggccgtgatcctgaccctgctgggcctggccatcctggccatcctgctgaccagatgggccagaagaaagcagagcgagatgtacatcagcagatacagcagcgagcagagcgccagactgctggactacgaggacggcagaggcagcagacacgcctacagcacccagagcgacaccagctacgacaacagagagagaagcaagagagactacacccccagcaccaacagcctggtgagcatggccagcaagttcagcctgggccagaccgagctgatcctgctgctgatgtgcttcatcctggccctgagcagaagcagcatcggcagcatcaagtgcctgcagaccaccgaggagccccccagcagaaccgccggcgccatgatgcagttcaccgcccccatccccggcgccaccggccccatcaagctgagccagaagaccatcgtgcagaccctgggccccatcgtgcagtaccccggcagcaacgccggcccccccagcgcccccagaggcccccccatggcccccatcatcatcagccagagaaccgccagaatcccccaggtgcacaccatggacagcagcggcaagatcaccctgacccccgtggtgatcctgaccggctacatggacgaggagctggccaagaagagctgcagcaagatccagatcctgaagtgcggcggcaccgccagaagccagaacagcagagaggagaacaaggaggccctgaagaacgacatcatcttcaccaacagcgtggagagcctgaagagcgcccacatcaaggagcccgagagagagggcaagggcaccgacctggagaaggacaagatcggcatggaggtgaaggtggacagcgacgccggcatccccaagagacaggagacccagctgaagatcagcgagatgagcatcccccagggccagggcgcccagatcaagaagagcgtgagcgacgtgcccagaggccaggagagccaggtgaagaagagcgagagcggcgtgcccaagggccaggaggcccaggtgaccaagagcggcctggtggtgctgaagggccaggaggcccaggtggagaagagcgagatgggcgtgcccagaagacaggagagccaggtgaagaagagccagagcggcgtgagcaagggccaggaggcccaggtgaagaagagagagagcgtggtgctgaagggccaggaggcccaggtggagaagagcgagctgaaggtgcccaagggccaggagggccaggtggagaagaccgaggccgacgtgcccaaggagcaggaggtgcaggagaagaagagcgaggccggcgtgctgaagggccccgagagccaggtgaagaacaccgaggtgagcgtgcccgagaccctggagagccaggtgaagaagagcgagagcggcgtgctgaagggccaggaggcccaggagaagaaggagagcttcgaggacaagggcaacaacgacaaggagaaggagagagacgccgagaaggaccccaacaagaaggagaagggcgacaagaacaccaagggcgacaagggcaaggacaaggtgaagggcaagagagagagcgagatcaacggcgagaagagcaagggcagcaagagagccaaggccaacaccggcagaaagtacaacaagaaggtggaggagtag

SEQ ID NO: 303394 - DNA, 1692 bp, Artificial Sequence
  derived and/or modified sequence
atgaccgtgctggagatcaccctggccgtgatcctgaccctgctgggcctggccatcctggccatcctgctgaccagatgggccagaagaaagcagagcgagatgtacatcagcagatacagcagcgagcagagcgccagactgctggactacgaggacggcagaggcagcagacacgcctacagcacccagagcgacaccagctacgacaacagagagagaagcaagagagactacacccccagcaccaacagcctggtgagcatggccagcaagttcagcctgggccagaccgagctgatcctgctgctgatgtgcttcatcctggccctgagcagaagcagcatcggcagcatcaagtgcctgcagaccaccgaggagccccccagcagaaccgccggcgccatgatgcagttcaccgcccccatccccggcgccaccggccccatcaagctgagccagaagaccatcgtgcagaccctgggccccatcgtgcagtaccccggcagcaacgccggcccccccagcgcccccagaggcccccccatggcccccatcatcatcagccagagaaccgccagaatcccccaggtgcacaccatggacagcagcggcaagatcaccctgacccccgtggtgatcctgaccggctacatggacgaggagctggccaagaagagctgcagcaagatccagatcctgaagtgcggcggcaccgccagaagccagaacagcagagaggagaacaaggaggccctgaagaacgacatcatcttcaccaacagcgtggagagcctgaagagcgcccacatcaaggagcccgagagagagggcaagggcaccgacctggagaaggacaagatcggcatggaggtgaaggtggacagcgacgccggcatccccaagagacaggagacccagctgaagatcagcgagatgagcgtgccccagggccagggcgcccagatcaagaagagcgtgagcgacgtgcccagaggccaggagagccaggtgaagaagagcgagagcggcgtgcccaagggccaggaggcccaggtgaccaagagcggcctggtggtgctgaagggccaggaggcccaggtggagaagagcgagatgggcgtgcccagaagacaggagagccaggtgaagaagagccagagcggcgtgagcaagggccaggaggcccaggtgaagaagagagagagcgtggtgctgaagggccaggaggcccaggtggagaagagcgagctgaaggtgcccaagggccaggagggccaggtggagaagaccgaggccgacgtgcccaaggagcaggaggtgcaggagaagaagagcgaggccggcgtgctgaagggccccgagagccaggtgaagaacaccgaggtgagcgtgcccgagaccctggagagccaggtgaagaagagcgagagcggcgtgctgaagggccaggaggcccaggagaagaaggagagcttcgaggacaagggcaacaacgacaaggagaaggagagagacgccgagaaggaccccaacaagaaggagaagggcgacaagaacaccaagggcgacaagggcaaggacaaggtgaagggcaagagagagagcgagatcaacggcgagaagagcaagggcagcaagagagccaaggccaacaccggcagaaagtacaacaagaaggtggaggagtag

SEQ ID NO: 303395 - DNA, 1692 bp, Artificial Sequence
  derived and/or modified sequence
atgacagtccttgagatcaccttagccgtgatcctgactcttctaggcttggccatattagccatccttcttactaggtgggcccgaaggaaacagtccgaaatgtacatttctcggtactctagcgaacagtcggcccggctgctcgattatgaggacggccgaggcagcagacacgcatactctacccagtccgatacctcttatgataacagagagcgttctaaaagagactacacccccagtacaaacagtttggtgtccatggcctctaaattttccttaggacaaaccgagctgatccttctgttgatgtgcttcatcctggccctcagtagatcttctataggaagcattaagtgtctgcaaactaccgaggagccaccgtctagaaccgccggagccatgatgcagttcacggcccctatcccaggagcgactggacctattaagctctcccaaaagaccatcgtgcagaccctcgggccaatcgttcagtacccgggctccaacgctgggcctccctccgcccctcgcgggccccctatggcacccattatcatatcacagaggaccgctcgaattcctcaggtgcacacaatggatagcagtggaaagattaccctgactccggtagtcatcctgactggatatatggatgaagaactagcgaaaaaatcgtgttccaagatccagatcctcaagtgcgggggcaccgctaggtcacagaattcccgggaggagaataaagaggcgctcaagaatgatataatattcactaactcggtcgagtccttaaaatccgctcacattaaggaaccggaaagggaaggcaaaggcacggatttagaaaaggataagataggcatggaggtgaaagtcgattccgacgccgggatcccaaaacgccaagagactcagcttaaaatctctgagatgtctattcctcagggccaaggggcccaaattaaaaagagtgtttcagacgtcccacgtggccaggagagccaagtgaagaagtctgagtcaggcgtgcctaagggacaagaagctcaggttactaagagtggcctagttgtattgaagggccaggaagcacaggtagaaaaatccgaaatgggggtccctaggagacaggagtcacaagtcaaaaagagccagtcgggggtctccaaggggcaggaggctcaggtcaagaagcgggagagtgttgtattaaagggtcaggaggcccaagtcgagaagagcgaattgaaggtgccgaaggggcaggagggacaggttgagaagaccgaggccgacgtgcctaaagaacaggaagtgcaggagaagaaatcggaagccggggtgttgaaggggcctgagtcgcaggtgaaaaataccgaggtgagtgtccccgaaacccttgagtcacaagtcaagaaaagcgaatctggcgtgctgaagggacaggaagcgcaggagaaaaaagagtccttcgaggataagggcaataatgacaaggaaaaggagcgggatgctgagaaagaccccaacaagaaggaaaaaggcgacaagaatactaagggggataagggaaaggataaggtaaagggcaaacgggagagcgagataaacggcgaaaagagtaagggatccaaacgggccaaggccaatacgggtaggaagtataacaagaaggtggaggagtag

SEQ ID NO: 303396 - DNA, 1692 bp, Artificial Sequence
  derived and/or modified sequence
atgactgtgctcgaaattactctggccgtcattttaaccctcttgggtctggcaatactagccatcctactcactcgttgggctaggcggaaacaatccgaaatgtacattagtagatattctagcgagcaaagcgcccgattgcttgactacgaagacgggagggggtctaggcacgcttactcaactcaaagtgacacctcgtacgacaacagagagcgatccaagcgagattacaccccctcgacaaatagtctggtgtcaatggccagtaaattttcccttgggcagacagaattgattttacttctgatgtgcttcatactggctctctcccgcagctcaatcggtagtatcaaatgtctgcagacaacagaagaacctccaagcagaacagctggcgctatgatgcagttcactgcccctattcccggagcaacggggccaatcaaactgagccagaagactatcgtgcagacactcggaccaattgtccagtaccccggttctaacgcgggaccacctagtgcgcctcgtgggcccccaatggcccctataattattagtcagcggactgcacgcatcccccaggtccacaccatggatagcagcggcaagataaccctgacccccgttgtcatcctcacagggtatatggatgaggagctggcaaagaaatcttgttcaaagatccagatcctcaaatgcggggggactgcaagatcgcagaacagcagagaagaaaataaggaggccctgaagaatgacatcattttcaccaatagcgtagagagcctaaaatcggcccacataaaagagcccgagcgggagggcaagggcacagatctggagaaagataagatcggcatggaggttaaggttgattctgatgccggcattcccaaacggcaggaaactcaacttaagatttccgagatgagcgtgccacaaggccagggggcccagatcaaaaagtctgtctccgatgtgccgaggggccaggaatcccaggttaagaagagtgaaagcggagtgcccaagggccaggaggcccaggtgactaaaagcggcctggtggtgcttaaagggcaggaagcacaggtcgagaagtcagagatgggcgttcccaggcgtcaggagagccaggtgaaaaagtctcagagcggtgtaagtaagggccaggaagcgcaggtgaaaaagagggagtcagtggtgctgaaaggccaggaagcccaggttgaaaagtccgaactgaaagtgcctaaaggccaggaaggacaagtcgaaaaaaccgaagcagatgtgccaaaggaacaggaggtgcaggagaagaagagtgaggcaggcgtactgaaaggtcccgagagccaggtgaaaaacacagaagtgtcagttcctgagaccctggaaagccaggtgaagaagtctgagtccggagtgctgaagggccaggaagcacaggaaaagaaggaaagctttgaggacaagggcaacaacgacaaagagaaggaacgagatgcggaaaaggacccaaacaagaaggagaagggcgataaaaatactaaaggagataagggcaaagacaaagtgaagggaaagcgagagtcagaaataaatggcgaaaaaagcaagggctctaagagggcgaaggccaacacaggcagaaaatacaataagaaagttgaagagtag

SEQ ID NO: 303397 - DNA, 1692 bp, Artificial Sequence
  derived and/or modified sequence
atgacagtgctggagatcaccctggccgtcatcctgaccctgctgggcctggccatcctggccatcctgctgacccgctgggcccggaggaagcagagcgagatgtacatcagccgctacagcagcgagcagagcgcccggctgctggactatgaagatggccggggcagcagacatgcctacagcacccagagcgacaccagctatgacaaccgggagaggagcaagagggactacacccccagcaccaacagcctggtgtccatggccagcaagttcagcctgggccagacagagctgatcctgctgctgatgtgcttcatcctggccctgagccgcagcagcatcggcagcatcaagtgcctgcagaccacagaggagccccccagcaggacagctggggccatgatgcagttcaccgcccccatccctggggccaccggccccatcaagctgagccagaagaccatcgtgcagaccctgggccccatcgtgcagtacccaggcagcaatgccggcccccccagcgccccccggggcccccccatggcccccatcatcatcagccagaggacagcccgcatcccccaggtgcacaccatggacagcagcggcaagatcaccctgacccctgtggtgatcctgaccggctacatggatgaggagctggccaagaagagctgcagcaagatccagatcctgaagtgtggcggcacagcccggagccagaacagccgggaggagaacaaggaggccctgaagaatgacatcatcttcaccaacagcgtggagagcctgaagagcgcccacatcaaggagcctgagcgggagggcaaaggaacagacctggagaaggacaagattggcatggaggtgaaggtggacagtgatgctggcatccccaagaggcaggagacccagctgaagatcagcgagatgagcatcccccagggccagggcgcccagatcaagaagtctgtgtctgatgtgccccggggccaggagagccaggtgaagaagtctgagagcggcgtgcccaagggccaggaggcccaggtgaccaagagcggcctggtggtgctgaagggccaggaggcccaggtggagaagtctgagatgggcgtgccccggcggcaggagagccaggtgaagaagagccagagcggcgtgtccaagggccaggaggcccaggtgaagaagcgggagagcgtggtgctgaagggccaggaggcccaggtggagaagtctgagctgaaggtgcccaagggccaggagggccaggtggagaagacagaagcagatgtgcccaaggagcaggaggtgcaggagaagaagtctgaggccggcgtgctgaagggccctgagagccaggtgaagaacacagaggtgtctgtgcctgagaccctggagagccaggtgaagaagtctgagagcggcgtgctgaagggccaggaggcccaggagaagaaggagagctttgaggacaagggcaacaatgacaaggagaaggagagagatgctgagaaggaccccaacaagaaggagaagggggacaagaacaccaagggggacaagggcaaggacaaggtgaagggcaagcgggagagcgagatcaatggagagaagagcaagggcagcaagagggccaaggccaacacaggcaggaagtacaacaagaaggtggaggagtag

SEQ ID NO: 303398 - DNA, 1692 bp, Artificial Sequence
  derived and/or modified sequence
atgacagtgctggagatcaccctggccgtcatcctgaccctgctgggcctggccatcctggccatcctgctgacccgctgggcccggaggaagcagagcgagatgtacatcagccgctacagcagcgagcagagcgcccggctgctggactatgaagatggccggggcagcagacatgcctacagcacccagagcgacaccagctatgacaaccgggagaggagcaagagggactacacccccagcaccaacagcctggtgtccatggccagcaagttcagcctgggccagacagagctgatcctgctgctgatgtgcttcatcctggccctgagccgcagcagcatcggcagcatcaagtgcctgcagaccacagaggagccccccagcaggacagctggggccatgatgcagttcaccgcccccatccctggggccaccggccccatcaagctgagccagaagaccatcgtgcagaccctgggccccatcgtgcagtacccaggcagcaatgccggcccccccagcgccccccggggcccccccatggcccccatcatcatcagccagaggacagcccgcatcccccaggtgcacaccatggacagcagcggcaagatcaccctgacccctgtggtgatcctgaccggctacatggatgaggagctggccaagaagagctgcagcaagatccagatcctgaagtgtggcggcacagcccggagccagaacagccgggaggagaacaaggaggccctgaagaatgacatcatcttcaccaacagcgtggagagcctgaagagcgcccacatcaaggagcctgagcgggagggcaaaggaacagacctggagaaggacaagattggcatggaggtgaaggtggacagtgatgctggcatccccaagaggcaggagacccagctgaagatcagcgagatgtctgtgccccagggccagggcgcccagatcaagaagtctgtgtctgatgtgccccggggccaggagagccaggtgaagaagtctgagagcggcgtgcccaagggccaggaggcccaggtgaccaagagcggcctggtggtgctgaagggccaggaggcccaggtggagaagtctgagatgggcgtgccccggcggcaggagagccaggtgaagaagagccagagcggcgtgtccaagggccaggaggcccaggtgaagaagcgggagagcgtggtgctgaagggccaggaggcccaggtggagaagtctgagctgaaggtgcccaagggccaggagggccaggtggagaagacagaagcagatgtgcccaaggagcaggaggtgcaggagaagaagtctgaggccggcgtgctgaagggccctgagagccaggtgaagaacacagaggtgtctgtgcctgagaccctggagagccaggtgaagaagtctgagagcggcgtgctgaagggccaggaggcccaggagaagaaggagagctttgaggacaagggcaacaatgacaaggagaaggagagagatgctgagaaggaccccaacaagaaggagaagggggacaagaacaccaagggggacaagggcaaggacaaggtgaagggcaagcgggagagcgagatcaatggagagaagagcaagggcagcaagagggccaaggccaacacaggcaggaagtacaacaagaaggtggaggagtag

SEQ ID NO: 303399 - DNA, 1692 bp, Artificial Sequence
  derived and/or modified sequence
atgaccgtgctggagatcaccctggccgtgatcctgaccctgctggggctggcaattctcgccatcctgctgacaaggtgggcacggcgcaagcagtctgagatgtatatctcacgttattcgtctgagcagtccgctagattactggactatgaggacggtcgtggctctcggcacgcctatagtacgcagtcggatacaagctacgataaccgtgagcggtctaagcgggattatacgccgtccaccaactctttagtttcaatggcctccaagttctcattgggtcagacagagttaatactcctgcttatgtgttttatcttagcattatccaggagctcgattgggagcatcaagtgcctgcaaactaccgaggagccacctagcagaacagccggcgcgatgatgcagttcaccgccccaatccctggagctactgggccaatcaagctcagccagaagacgatcgtgcagactctgggcccaatcgtacagtatccaggctccaacgctggtccccccagtgctcctcgcgggccgcccatggcacccatcataatttcccagcgcacggcacgcattccacaggttcacaccatggactcatccggcaaaattacactgacccccgtagtcatactgactggctatatggatgaagagcttgcaaagaagagttgcagtaagatccagattcttaagtgcggaggcactgccaggtcccagaatagtcgggaggaaaataaagaagccctcaagaatgacatcatatttaccaactctgtcgagtccctgaagtcagcacacattaaagagccggagcgcgagggaaaaggcacggacctcgagaaagacaagattgggatggaggtcaaggtggacagcgatgccggtatccctaagagacaggagacccagctgaaaatttcagaaatgtccatcccacaaggtcagggtgctcagatcaagaagagtgtgagcgacgttcctagaggtcaggagtctcaagtgaaaaaatctgagagcggcgtgcccaagggacaggaggcacaggttaccaagagcggacttgtcgtcctgaaaggccaggaagcacaggtggagaagagcgaaatgggggtgccgagacggcaagagagtcaggtgaaaaagtcacagagtggggtgagtaagggtcaggaagctcaggttaagaagcgggagagcgtggttttgaaggggcaggaggcccaggtcgaaaaatccgagctcaaggtcccgaaggggcaagaaggacaagtggagaaaacggaagccgatgtgccaaaggagcaggaggttcaggagaaaaaatccgaggcgggagtgcttaaaggaccagagtcacaggttaaaaacaccgaggtgtccgtgcctgagactttagagtctcaggttaagaaaagtgaatctggtgtgcttaaggggcaggaggctcaggaaaaaaaagaaagctttgaggacaaggggaacaatgacaaagaaaaagagcgagatgccgagaaggatccaaataaaaaggagaaaggtgacaagaacacgaagggtgacaaaggtaaagataaggttaaggggaagagagaatcagaaattaacggcgagaaatcgaagggctccaaacgtgcaaaggctaacactggccggaagtacaacaaaaaagtagaggaatag

SEQ ID NO: 303400 - DNA, 1692 bp, Artificial Sequence
  derived and/or modified sequence
atgaccgtgctggagatcaccctggccgtgatcctgaccctgctgggactcgccattctggccatcctgttgacccgctgggctcgccggaagcagtctgagatgtatatctccagatactcttccgagcagagtgccaggctcctggactatgaagatggtcgggggagtcgccatgcctactccactcagtcggacaccagctacgataacagagaaaggtctaaaagagactacactccgtctaccaattctttagtcagcatggcctccaagtttagcctgggccagacggagttgatcctgctgctgatgtgtttcatcctggctttgtccagatctagcattggtagtatcaaatgcttgcaaacaaccgaagaacccccctccaggaccgctggagcgatgatgcagttcacagcacccatacctggggccaccggacctataaaactatcccagaagactattgttcagacactggggcctatcgttcagtaccctgggagtaatgccgggccacctagcgcgcctcgcggtccaccaatggcacctataatcatctcgcaaaggaccgcacgcatcccccaggtacatactatggactcctccgggaaaatcacgctcacccccgtcgtcattctgacaggttacatggacgaggagctggccaaaaaatcttgctcaaagatacagatcttgaagtgtggaggaaccgctaggtcacagaattccagggaagaaaacaaggaagctctgaagaatgatatcatttttaccaactctgtggagagcttgaaatcggcccatattaaggaaccagagcgtgagggcaaagggacagatctggaaaaggataagattggtatggaggttaaagtcgactctgatgccggcatacccaaacggcaggagacccaactaaagattagtgaaatgagcgtgcctcaaggacagggtgctcagattaagaaatcagtttcggacgtgcctcggggtcaagaaagccaggtgaaaaagagcgagtcgggagttcccaaggggcaggaagcacaggtcaccaagtctgggctcgttgtccttaagggccaggaagcccaggttgagaagtcagaaatgggggtcccacgaaggcaggagtcccaagtcaaaaaatctcagtctggcgtctctaagggccaggaggcacaggtcaagaaacgggagagcgtcgtactcaaaggccaggaggcacaggttgaaaagtccgaactgaaggtgccaaagggccaggaaggacaggtggaaaagaccgaggcagacgtccccaaggagcaggaagtgcaggagaaaaaatctgaggccggggttctgaaaggacctgaaagccaggtgaaaaatactgaagttagtgtcccggagacactggagagtcaggtcaagaagagcgagtcaggcgtgctaaaaggccaagaagcccaggaaaagaaggaatcttttgaggacaaaggaaacaacgataaggagaaagagcgggacgcggagaaggaccctaataagaaagagaagggcgacaaaaacaccaagggtgacaagggtaaggataaggtgaaggggaagagagagtcagagattaacggtgagaagtccaagggaagcaaacgcgccaaagctaatactgggagaaagtataataaaaaggtggaagagtag

SEQ ID NO: 303401 - DNA, 1692 bp, Artificial Sequence
  derived and/or modified sequence
atgactgtgctcgaaatcacacttgctgtgatactgaccctccttggccttgctatccttgctattctcctgaccagatgggcaagaagaaaacagtctgagatgtacatctcccgatattcgtccgaacagtctgctaggctgttggactatgaggacggaagagggagtcgacatgcctactctactcaatcagacacctcttacgacaatcgcgaacgatctaaacgggattatacaccttctaccaattctttagtttctatggcaagcaaattttcccttggccaaacagagcttattctcctgctcatgtgcttcatcctcgctctatccagatctagcatagggtccattaagtgtctgcagactacagaagagccgccatcccgcactgccggagcaatgatgcagttcaccgctcctatccccggtgccacaggccctataaaattatctcagaagaccattgtgcagactctcggacccattgtacagtaccccggaagtaacgccggtccaccttctgctccaaggggccctcctatggcacccatcatcatctcacagagaactgcacgaattcctcaagtgcataccatggacagtagcggcaagatcacactcaccccagtggtgatcttaactggctacatggatgaagaactggcaaaaaaatcctgctctaaaatacagattctgaaatgtggtggtacagccagaagtcagaatagccgggaagagaataaagaagctctgaaaaacgacattattttcacgaactcagtggaaagcttgaaaagcgcacacataaaggaacccgaaagagaaggcaagggcaccgacctggaaaaggataaaatcggaatggaggtgaaagtcgattctgacgcgggaatccccaagcggcaggagacccagctaaagatcagcgagatgagcatcccccagggacagggagcccagattaagaaatcagtgtctgacgtgcccagagggcaggaaagtcaggttaagaaaagcgagtctggtgtgcccaaaggacaggaggcacaggtaactaagtcaggattggtggtgctgaaggggcaggaggcccaggtggagaagagcgaaatgggggttcctcggaggcaggaaagccaggtgaagaagagtcagtcaggggtgtcaaaggggcaagaggctcaggtaaaaaaaagagaatctgttgtgctgaaaggacaagaggcccaggtcgaaaaatccgagctcaaagtgcccaaaggccaagaaggccaagtggaaaagactgaagccgacgttcctaaagaacaggaagtgcaggagaaaaagtcagaagccggagtgctcaagggtcctgaatcccaggtaaaaaacacagaagtcagcgtgccagaaaccttggagtctcaagttaaaaaaagtgagagtggagtgctgaagggacaggaagctcaggagaaaaaggagtccttcgaggacaaggggaataacgataaggagaaagaacgggatgcagagaaggaccccaataaaaaggagaagggcgataaaaatactaagggggataagggcaaggataaagttaaggggaagcgggagtcagaaatcaatggagaaaaaagtaagggttcaaaacgtgccaaagctaatacaggaaggaaatataacaagaaagtagaagaatag

SEQ ID NO: 303402 - DNA, 1692 bp, Artificial Sequence
  derived and/or modified sequence
atgaccgttctggagatcacactggccgtgattctcacactgctgggcttggccattctggcaatacttttgactcgctgggctagaagaaagcaaagtgaaatgtacatatccagatactcttccgagcagtccgccagactgttggactacgaagatggcagaggcagcagacacgcctactcaacccaatcagatacatcgtatgacaaccgagagcgcagtaagagagactacacgccatccactaactctcttgtgtcaatggccagcaaattcagcctggggcagactgagctgattctgttgcttatgtgcttcatcctggctctgagccgttcctcaatcgggtccattaagtgtttgcagacgaccgaggagcccccatcgagaacggccggagcgatgatgcagtttactgccccaattccaggagccaccggaccgattaagctctcccaaaaaaccattgtccagaccctcggaccaattgtgcaataccctggttccaacgcaggtccacccagcgctcccagggggccacccatggcaccaatcatcatatcccagcgaacggccagaatccctcaagtgcacaccatggacagcagcgggaagattactctgacccctgtggttattttaactggatacatggatgaggagctcgctaagaagagctgtagtaaaatccaaattctcaaatgcggcggtacagccagatcccaaaactctagggaggagaacaaagaagcccttaagaacgacataatcttcaccaatagcgtggaaagtctaaaaagcgctcatataaaagagcccgagcgtgaaggtaaagggacagatctggagaaggataaaatcgggatggaggtcaaggtggactcagatgccggaatccccaaacgccaggagacacagcttaagatctccgagatgagcgttcctcagggacagggagcccagattaagaaatctgtgtctgatgtgccgagaggtcaagaaagccaagtgaagaagtccgagagcggggtgccaaagggacaggaagctcaagtaacaaagagcggcctggtggtgttaaagggacaagaggcccaggtcgagaagtctgagatgggcgtgccacggcgtcaggagtcacaggtcaagaagtctcagtctggggtttccaaaggacaggaggcccaggtgaaaaagagagaaagtgtggtcctgaaagggcaggaagctcaggttgagaaatctgagcttaaggttcccaaagggcaggagggccaggtcgagaaaacggaggccgatgtgcccaaggagcaggaagtacaggagaaaaagtcggaagccggtgttctgaagggccctgagtcccaggtgaagaatactgaagtttcagttcccgaaaccttggaatcccaggtgaagaagtctgaaagtggtgtcctcaagggacaagaagcccaagagaaaaaggagtcattcgaagacaaagggaacaacgacaaagaaaaggagcgagatgccgagaaggaccccaacaaaaaggagaagggggacaagaacaccaaaggtgacaagggaaaggataaagtgaagggcaagcgggaatccgagattaacggtgagaagtctaagggatcgaaacgggctaaggccaacactggacgaaaatacaataaaaaagtggaagagtag

SEQ ID NO: 303403 - protein, 567 aa, Artificial Sequence [sequence omitted]

SEQ ID NO: 303404 - DNA, 1897 bp, Artificial Sequence
  derived and/or modified sequence
tttgcttaggtctgatcaatctgctccacacaatttctcagtgatcctctgcatctctgcctacaagggcctccctgacacccaagttcatattgctcagaaacagtgaacttgagtttttcgttttaccttgatctctctctgacaaagaaatccagatgatgcgagacctgatgaagacaatacatggaaaatgacagtcttggaaataactttggctgtcatcctgactctactgggacttgccatcctggctattttgttaacaagatgggcacgatgtaagcaaagtgaaatgtatatctccagatacagttcagaacaaagtgctagacttctggactatgaggatggtagagttgaatgccaccatggacaacaaaaggaaacatctcacaggaaaacagaaagaaaattaaggagagagaggaagagaatcaccaatgaaagaagacttatagggacagaaaaatctttacctcaaggatccatgagtagtataaaatgtttacaaacaactgaagaacctccttgtaaaggaatggggaaggtgatacaggcaaagcaactattaaatatatcttggcctcttgctgtctcattatcaaaacctctctgcattattcatgatgtactggaaagttttaagactatcaatttacaatcccctgcaggatttcaagcagttaccagtcactgcaaaaagggaagagataaattcagaaaaattttagtttacaaaaaaggaaccagtatcaaggggaaaaaaatagaaataaagagaaaatacttgatatctaaatcacgcccttttgttgtatgctcagttatattaacaggttacatggatgaagaacttgcaaaaaaatcttgttccaaaatccagattctaaaatgtggaggcactgcaaggtctcagaatagccgagaagaaaacaaggaagcactaaagaatgacatcatatttacgaattctgtagaatccttgaaatcagcacacataaaggagccagaaagagaaggaaaaggcactgatttagagaaagacaaaataggaatggaggtcaaggtagacagtgacgctggaataccaaaaagacaggaaacccaactaaaaatcagtgatgagtataccacaaggacagggagcccaaataaagaaaagtgtgtcagatgtaccaagaggacaggacaagtaaagaagagtgagtcaggtgtcccaaaaggacaagaagcccaagtaacgaagagtgggttggttgtactgaaaggacaggaagcccaggtagagaagagtgagatgggtgtgccaagaagacaggaatcccaagtaaagaagagtcagtctggtgtctcaaagggacaggaagcccaggtaaagaagagggagtcagttgtactgaaaggacaggaagcccaggtagagaagagtgagttgaaggtaccaaaaggacaagaaggccaagtagagaagactgaggcagatgtgccaaaggaacaagaggtccaagaaaagaagagtgaggcaggtgtactgaaaggaccagaatcccaagtaaagaacactgaggtgagtgtaccagaaacactggaatcccaagtaaagaagagtgagtcaggtgtactaaaaggacaggaagcccaagaaaagaaggagagttttgaggataaaggaaataatgataaagaaaaggagagagatgcagagaaagatccaaataaaaaagaaaaaggtgacaaaaacacaaaaggtgacaaaggaaaggacaaagttaaaggaaagagagaatcagaaatcaatggtgaaaaatcaaaaggctcgaaaaggaggcaaatacaggaaggaagtacaacaaaaaagtggaagagtaaggataaattttttaaaggcccataa

SEQ ID NO: 303405 - DNA, 1897 bp, Artificial Sequence
  derived and/or modified sequence
tttgcttaggtctgatcaatctgctccacacaatttctcagtgatcctctgcatctctgcctacaagggcctccctgacacccaagttcatattgctcagaaacagtgaacttgagtttttcgttttatcttgatctctctctgacaaagaaatccagatgatgcgagacctgatgaagacaatacatggaaaatgacagtcttggaaataactttggctgtcatcctgactctactgggacttgccatcctggctattttgttaacaagatgggcacgatgtaagcaaagtgaaatgtatatctccagatacagttcagaacaaagtgctagacttctggactatgaggatggtagagttgaatgccaccatggacaacaaaaggaaacatctcacaggaaaacagaaagaaaattaaggagagagaggaagagaatcaccaatgaaagaagacttatagggacagaaaaatctttacctcaaggatccatgagtagtataaaatgtttacaaacaactgaagaacctccttgtaaaggaatggggaaggtgatacaggcaaagcaactattaaatatatcttggcctcttgctgtctcattatcaaaacctctctgcattattcatgatgtactggaaagttttaagactatcaatttacaatcccctgcaggatttcaagcagttaccagtcactgcaaaaagggaagagataaattcagaaaaattttagtttacaaaaaaggaaccagtatcaaggggaaaaaaatagaaataaagagaaaatacttgatatctaaatcacgcccttttgttgtatgctcagttatattaacaggttacatggatgaagaacttgcaaaaaaatcttgttccaaaatccagattctaaaatgtggaggcactgcaaggtctcagaatagccgagaagaaaacaaggaagcactaaagaatgacatcatatttacgaattctgtagaatccttgaaatcagcacacataaaggagccagaaagagaaggaaaaggcactgatttagagaaagacaaaataggaatggaggtcaaggtagacagtgacgctggaataccaaaaagacaggaaacccaactaaaaatcagtgatgagtataccacaaggacagggagcccaaataaagaaaagtgtgtcagatgtaccaagaggacaggacaagtaaagaagagtgagtcaggtgtcccaaaaggacaagaagcccaagtaacgaagagtgggttggttgtactgaaaggacaggaagcccaggtagagaagagtgagatgggtgtgccaagaagacaggaatcccaagtaaagaagagtcagtctggtgtctcaaagggacaggaagcccaggtaaagaagagggagtcagttgtactgaaaggacaggaagcccaggtagagaagagtgagttgaaggtaccaaaaggacaagaaggccaagtagagaagactgaggcagatgtgccaaaggaacaagaggtccaagaaaagaagagtgaggcaggtgtactgaaaggaccagaatcccaagtaaagaacactgaggtgagtgtaccagaaacactggaatcccaagtaaagaagagtgagtcaggtgtactaaaaggacaggaagcccaagaaaagaaggagagttttgaggataaaggaaataatgataaagaaaaggagagagatgcagagaaagatccaaataaaaaagaaaaaggtgacaaaaacacaaaaggtgacaaaggaaaggacaaagttaaaggaaagagagaatcagaaatcaatggtgaaaaatcaaaaggctcgaaaaggaggcaaatacaggaaggaagtacaacaaaaaagtggaagagtaaggataaattttttaaaggcccataa

SEQ ID NO: 303406 - DNA, 1704 bp, Artificial Sequence
  derived and/or modified sequence
atgaccgtgctggagatcaccctggccgtgatcctgaccctgctgggcctggccatcctggccatcctgctgaccagatgggccagatgcaagcagagcgagatgtacatcagcagatacagcagcgagcagagcgccagactgctggactacgaggacggcagagtggagtgccaccacggccagcagaaggagaccagccacagaaagaccgagagaaagctgagaagagagagaaagagaatcaccaacgagagaagactgatcggcaccgagaagagcctgccccagggcagcatgagcagcatcaagtgcctgcagaccaccgaggagcccccctgcaagggcatgggcaaggtgatccaggccaagcagctgctgaacatcagctggcccctggccgtgagcctgagcaagcccctgtgcatcatccacgacgtgctggagagcttcaagaccatcaacctgcagagccccgccggcttccaggccgtgaccagccactgcaagaagggcagagacaagttcagaaagatcctggtgtacaagaagggcaccagcatcaagggcaagaagatcgagatcaagagaaagtacctgatcagcaagagcagacccttcgtggtgtgcagcgtgatcctgaccggctacatggacgaggagctggccaagaagagctgcagcaagatccagatcctgaagtgcggcggcaccgccagaagccagaacagcagagaggagaacaaggaggccctgaagaacgacatcatcttcaccaacagcgtggagagcctgaagagcgcccacatcaaggagcccgagagagagggcaagggcaccgacctggagaaggacaagatcggcatggaggtgaaggtggacagcgacgccggcatccccaagagacaggagacccagctgaagatcagcgacgagtacaccaccagaaccggcagccccaacaaggagaagtgcgtgagatgcaccaagagaaccggccaggtgaagaagagcgagagcggcgtgcccaagggccaggaggcccaggtgaccaagagcggcctggtggtgctgaagggccaggaggcccaggtggagaagagcgagatgggcgtgcccagaagacaggagagccaggtgaagaagagccagagcggcgtgagcaagggccaggaggcccaggtgaagaagagagagagcgtggtgctgaagggccaggaggcccaggtggagaagagcgagctgaaggtgcccaagggccaggagggccaggtggagaagaccgaggccgacgtgcccaaggagcaggaggtgcaggagaagaagagcgaggccggcgtgctgaagggccccgagagccaggtgaagaacaccgaggtgagcgtgcccgagaccctggagagccaggtgaagaagagcgagagcggcgtgctgaagggccaggaggcccaggagaagaaggagagcttcgaggacaagggcaacaacgacaaggagaaggagagagacgccgagaaggaccccaacaagaaggagaagggcgacaagaacaccaagggcgacaagggcaaggacaaggtgaagggcaagagagagagcgagatcaacggcgagaagagcaagggcagcaagagaagacagatccaggagggcagcaccaccaagaagtggaagagcaaggacaagttcttcaagggcccctag

SEQ ID NO: 303407 - DNA, 1704 bp, Artificial Sequence
  derived and/or modified sequence
atgactgtgctggagatcacgcttgccgtcatactgacactcctagggctcgctattctggccatcctcttgacccgttgggctaggtgcaaacaaagtgaaatgtatatcagcaggtatagttccgaacagtcagcacggcttctcgactatgaggacgggcgcgttgagtgtcaccatggccagcagaaagagaccagccaccggaaaaccgagcggaagctgcggagggagagaaaaagaataaccaacgaacgacgactcataggcactgagaagtcactgccccaaggtagtatgagttccatcaagtgtttacagacgacagaagaacccccctgcaagggaatgggaaaggtgatccaagctaaacaattactgaatatcagctggccactcgccgtcagtctttccaagcctctttgtataattcacgatgtgctggagagcttcaagacaataaacctgcagagcccagccgggttccaggccgtgacatctcactgcaaaaaagggagagataaatttagaaagatattagtctataagaaggggacgtcaattaagggcaagaaaattgaaatcaagcgcaaatacttgatttcgaaatcccgtcccttcgtggtgtgctcagtcattctgaccgggtacatggacgaagaactggccaagaagagctgctctaaaatccagattttgaaatgtggcgggacagctaggtcacagaattcccgcgaagaaaataaggaggctcttaagaacgatattatattcactaatagtgttgagtctctaaagtcagctcacattaaggagccagagcgtgagggcaagggaaccgacctggaaaaggataaaatagggatggaggtgaaggtggatagtgatgcgggtattcctaagcgacaggaaacacagctgaagatcagtgacgaatacacgacacggactggcagcccaaacaaagaaaaatgcgtccgctgtactaaacggactgggcaggtaaaaaaaagcgagtctggagttcctaaaggacaggaggctcaggtgacaaaaagtgggttagttgtgctgaaggggcaggaggcccaagtggaaaaaagtgagatgggggtaccccggcggcaagaatcccaggtgaaaaagagccaatccggcgtttcaaaggggcaggaagcccaggtcaaaaagagggagtctgttgtgttgaaagggcaggaagcccaagtggagaaatctgagctgaaagtgccaaaaggccaggagggccaagtcgagaagacagaagccgacgtcccaaaagagcaagaggtccaagagaagaaatcagaagccggtgtgctgaaggggcctgagtcccaggtgaagaacacggaggtgagcgtgccagaaacgctggagtcacaggtcaaaaagtcagagagtggggtcctgaaggggcaggaagcccaagagaagaaagaatccttcgaggacaaaggaaataatgacaaagagaaagaaagggacgccgagaaagatccgaacaaaaaagaaaaaggagacaaaaacactaaaggagataagggaaaggataaagtgaagggaaaaagagagtccgagatcaacggagaaaagtccaagggaagtaagcgtcgtcaaatccaggaggggagcaccacgaagaagtggaaaagcaaggacaaattcttcaaagggccatag

SEQ ID NO: 303408 - DNA, 1704 bp, Artificial Sequence
  derived and/or modified sequence
atgactgtgctggaaataacactggccgttatactgacactgttgggactcgcaatcctcgccattctgctaacacgctgggcgcgctgtaagcagtctgaaatgtacatctctcgctactcttccgagcagagtgcacgcctcctagactacgaggatgggagagttgagtgtcaccacggtcaacagaaagaaacctctcataggaaaactgagcgtaagctcaggagggagcgcaagaggatcacaaatgaaagaaggttaataggcaccgagaaaagcctcccacaggggtcaatgtcctccatcaagtgtctgcagacgacagaagaaccaccttgcaagggaatgggaaaggtcatccaggctaagcagttgctcaatattagctggccccttgccgtgtcactttcgaagcccctgtgtattatccacgacgttcttgagagcttcaaaaccattaaccttcagtcccctgccgggttccaggctgtgacttcacactgtaaaaagggacgagacaaattcaggaagatcctggtctataagaaaggaaccagtattaaaggaaagaaaatcgagatcaaacgaaaatacctgatttccaagagccggcctttcgttgtctgtagcgtgatactaactggctacatggatgaggagcttgccaagaaatcatgctctaaaattcagatcctgaaatgcggcggtaccgctcggtcccagaacagccgggaggaaaataaggaggcactgaaaaacgatataattttcacaaattcggtagaatctctgaaatctgcgcacatcaaggaacccgaaagagagggaaagggaaccgacctggaaaaagataaaattgggatggaagtaaaagtggatagcgatgctggcatccctaaaaggcaggagacccagcttaaaattagtgacgagtacaccacacgcactggttctcctaataaggagaaatgtgtcagatgcacaaagagaaccggccaagtgaaaaagtctgagtctggggtgccaaagggccaggaagcccaagtcacaaagagcggcctggtggtgcttaaagggcaggaggcacaggtcgagaagagtgagatgggagtaccccgccggcaggaatcacaggtgaagaaatcgcagtctggagtcagtaaggggcaggaggcccaagtaaagaagcgagagtccgtcgtgctcaaggggcaagaagcacaggttgagaaatccgaacttaaagtaccaaagggtcaagagggacaggtggagaagaccgaggccgatgtgccaaaagaacaggaggtacaggagaagaagtcagaagcaggagtcttaaaagggcctgagtctcaggtgaagaacactgaggtgtcagtgcctgagactttagaatcccaggtgaaaaagagtgagtcaggcgtgctgaagggacaggaggcccaggagaaaaaggagagctttgaagacaaaggcaacaatgataaagagaaagagcgcgacgcagagaaagaccccaataaaaaggaaaaaggcgataaaaatactaagggcgataaaggcaaggacaaggtcaaaggcaaaagggaaagtgaaataaacggagagaagagcaaaggaagcaagagacgccagattcaggagggtagcaccacaaaaaagtggaaaagcaaggacaagttctttaaggggccttag

SEQ ID NO: 303409 - DNA, 1704 bp, Artificial Sequence
  derived and/or modified sequence
atgacagtgctggagatcaccctggccgtcatcctgaccctgctgggcctggccatcctggccatcctgctgacccgctgggcccgctgcaagcagagcgagatgtacatcagccgctacagcagcgagcagagcgcccggctgctggactatgaagatggccgggtggagtgccaccacggccagcagaaggagaccagccacaggaagacagagaggaagctgcggcgggagaggaagaggatcaccaatgaaagaaggctgattggaacagagaagagcctgccccagggctccatgagcagcatcaagtgcctgcagaccacagaggagcccccctgcaagggcatgggcaaggtgatccaggccaagcagctgctgaacatctcctggcccctggccgtgtccctgagcaagcccctgtgcatcatccatgatgtgctggagagcttcaagaccatcaacctgcagagccctgctggcttccaggccgtgaccagccactgcaagaagggccgggacaagttcaggaagatcctggtgtacaagaagggcaccagcatcaagggcaagaagattgagatcaagaggaagtacctgatcagcaagagccggccctttgtggtgtgcagcgtcatcctgaccggctacatggatgaggagctggccaagaagagctgcagcaagatccagatcctgaagtgtggcggcacagcccggagccagaacagccgggaggagaacaaggaggccctgaagaatgacatcatcttcaccaacagcgtggagagcctgaagagcgcccacatcaaggagcctgagcgggagggcaagggcacagacctggagaaggacaagattggcatggaggtgaaggtggacagtgatgctggcatccccaagaggcaggagacccagctgaagatcagtgatgagtacaccaccaggacaggcagccccaacaaggagaagtgtgtgcgctgcaccaagaggacaggccaggtgaagaagtctgagagcggcgtgcccaagggccaggaggcccaggtgaccaagagcggcctggtggtgctgaagggccaggaggcccaggtggagaagtctgagatgggcgtgccccggcggcaggagagccaggtgaagaagagccagagcggcgtgtccaagggccaggaggcccaggtgaagaagcgggagagcgtggtgctgaagggccaggaggcccaggtggagaagtctgagctgaaggtgcccaagggccaggagggccaggtggagaagacagaagcagatgtgcccaaggagcaggaggtgcaggagaagaagtctgaggccggcgtgctgaagggccctgagagccaggtgaagaacacagaggtgtctgtgcctgagaccctggagagccaggtgaagaagtctgagagcggcgtgctgaagggccaggaggcccaggagaagaaggagagctttgaagataaaggaaataatgacaaggagaaggagagagatgctgagaaggaccccaacaagaaggagaagggggacaagaacaccaagggggacaagggcaaggacaaggtgaagggcaagcgggagagcgagatcaacggggagaagagcaagggcagcaagaggcggcagatccaggagggcagcaccaccaagaagtggaagagcaaggacaagttcttcaagggcccctag

SEQ ID NO: 303410 - DNA, 1704 bp, Artificial Sequence
  derived and/or modified sequence
atgaccgtgctggagatcaccctggccgtgatcctgaccctgctgggactcgcaatcctggccatcctactcacccggtgggcgcgctgtaaacagtctgaaatgtacattagcagatattccagcgaacagtccgcaaggctcctcgactacgaggacggtagagttgagtgtcatcatggacagcagaaggaaacaagccaccgcaaaacggagagaaagttgcgaagagagagaaagcggattactaatgagcggagactgatcggaacagagaaatcccttccacagggcagtatgagctccatcaagtgcttacaaacaaccgaggagcctccatgcaaaggtatgggcaaagtgatccaggcaaagcagcttctcaatatcagctggcctctcgccgtgtcgttgtcaaaacctctgtgtatcattcacgacgtactggagtcattcaagactatcaatctgcagagccccgccggattccaggccgtcaccagtcactgtaaaaaggggagggacaagttcaggaaaatcctggtgtacaagaagggcacctcgattaagggcaagaagatcgaaattaagagaaaatacctcatcagcaagagccggcccttcgtggtttgctcagtcattctcaccgggtatatggacgaagaactggctaagaagagctgtagtaaaatccaaatcctgaagtgcggaggcactgctcggagtcagaattctagggaagagaacaaagaagcattgaagaacgacatcatcttcactaattccgtcgaatctctcaagtccgcgcatatcaaggagcccgaacgagagggcaaaggcaccgatttggagaaggataagataggaatggaagttaaggttgatagcgacgcagggattcccaaaaggcaagagacccagctgaaaatcagcgacgagtacacgacccgcactggcagccccaacaaagagaaatgtgtcaggtgtaccaagcggaccggtcaggtgaagaagtctgagagtggagtacctaagggacaagaagcccaagttaccaagagcgggctggtcgtccttaaaggacaggaggcgcaggtggagaagtctgagatgggcgtgccacggaggcaggaatcccaagtcaagaaatcccagtctggggtctccaaaggtcaagaggcacaagtgaaaaagcgagagtctgtggtcctgaaaggccaggaggcccaggtggaaaaaagcgagttgaaagtgccaaaaggtcaggagggccaggttgaaaaaacagaagccgatgttccgaaggagcaggaggtgcaagagaagaagtccgaagcaggggtccttaaaggccccgagtctcaagtcaagaacaccgaagtcagtgtacctgaaactcttgaaagccaggttaagaagtctgagagtggtgttctaaaaggccaagaggctcaggaaaagaaagagtctttcgaagataaaggcaataatgataaggaaaaggaacgcgatgctgaaaaagaccccaataagaaggaaaaaggcgacaagaataccaagggggataagggaaaggataaggtcaaaggtaagcgggaatctgagattaacggggaaaaaagtaagggatcaaagaggcgtcagatccaggagggaagcactacaaagaagtggaagtccaaggacaagtttttcaagggcccatag

SEQ ID NO: 303411 - DNA, 1704 bp, Artificial Sequence
  derived and/or modified sequence
atgaccgtgctggagatcaccctggccgtgatcctgaccctgctgggcctggcaatcctcgccattctgttaacaagatgggcccggtgcaaacaaagtgagatgtacatctctcggtattccagcgaacagtccgcacgactcttggactatgaggatggcagagtagagtgtcatcacgggcagcaaaaggagacctcccataggaagactgaacgcaagttacgtcgcgagcggaaaaggatcacaaacgaacggcggctgattgggacggaaaagtccctgccacagggcagtatgagtagtataaagtgtctgcagacaaccgaagagcctccttgtaaaggcatgggtaaggtgattcaggcaaagcagctcttgaacatctcctggccgctggccgtcagcctttcgaaacccctgtgcatcatacatgatgttctcgaaagcttcaagactataaaccttcagagtccagcgggattccaggccgtgactagtcactgcaagaaggggcgagacaagttcagaaaaattcttgtatataagaagggaacatctattaagggaaaaaaaattgagatcaaaaggaagtatctaatctccaagagtaggcccttcgtcgtctgttctgtgatcctaaccgggtatatggacgaggaactggcgaaaaaaagctgcagcaagattcagatcctgaagtgcggcggaaccgcccgatcacagaatagtcgagaggagaacaaggaggctttgaagaacgacatcatatttacaaacagcgtggaaagcctgaagtctgctcatataaaggagcctgaacgggaaggaaaggggaccgacctcgagaaggacaagatcggcatggaggtgaaggttgactccgatgccggcattcctaaaagacaggagacccaacttaaaattagtgacgagtacactaccaggacaggctctccaaacaaggaaaagtgcgtaaggtgcacgaaaagaacagggcaggtgaagaaatcagaatctggcgtcccaaagggccaggaggctcaagttacgaagagtggccttgtagtactgaagggccaggaagctcaggttgagaagagtgagatgggcgtgcccaggaggcaagagtctcaggttaagaagtctcagagcggcgtgtcaaaaggccaggaagctcaagtaaaaaagagggagtccgtcgtacttaagggtcaggaggcacaggttgagaaaagcgaattgaaagtgcctaagggccaagaaggacaggtggagaaaactgaggccgacgtgccgaaggagcaagaggtgcaggagaagaaatccgaagctggcgtgcttaaggggcccgagagtcaggtgaaaaataccgaagtgagcgttccagagactctcgaaagccaagtgaagaaatcagaaagcggcgttttgaaggggcaggaggcacaggaaaagaaagaatcctttgaggacaaaggaaataatgataaggagaaagagcgtgatgccgaaaaagatccgaataaaaaggagaagggagataaaaacacaaagggtgacaaggggaaagacaaggtgaagggaaagagagagtcagaaattaatggggagaagtcaaaaggcagcaagaggcggcagattcaagagggctccacaacaaagaagtggaaaagtaaggataagttttttaaaggtccctag

SEQ ID NO: 303412 - DNA, 1704 bp, Artificial Sequence
  derived and/or modified sequence
atgactgtcctggaaattacgctggccgtgattctgaccctgcttggactggctattctggcgattttattgacccgatgggcccgttgcaagcagtcagagatgtatatctccagatacagtagcgaacaaagtgccagactactggactacgaagacggcagagtagagtgccaccacggtcaacaaaaggagacatctcatcgcaagaccgagcgaaaattacggagagaaagaaagaggattacaaatgaaaggcggctgatcggaactgagaagtccctaccacagggaagtatgtcgagcattaagtgcttgcagactactgaggagcctccctgtaaggggatggggaaagtcatccaggccaagcagttgttaaacatctcctggcccctggctgtgtccctctcgaaaccactttgcattatccacgatgttctggagtcgttcaagactattaatctgcagagtccggcagggtttcaggcggtcacatcccattgtaagaaaggtcgcgataagttccggaagatacttgtatataagaaggggacatctatcaagggcaagaaaattgaaatcaagagaaagtaccttatttccaagtctcgaccgttcgtggtctgctctgtgattctgacaggttacatggatgaagaactcgcaaagaagagttgcagcaaaatccagattttgaagtgcggcggaacagccagaagccaaaatagccgcgaggagaacaaggaagccctaaagaatgacattatctttactaattcagtggaaagcttaaagtccgcccacatcaaggaaccggagagagaggggaagggtaccgatcttgagaaagacaaaatcggcatggaagtgaaggtggattccgatgctggcatccccaagcgccaggagacacagctgaaaatcagtgacgagtacaccactagaacgggctcccctaataaagagaagtgcgtgcgctgcacgaagcgaacgggtcaggtgaagaagagtgaatctggggtgccaaaagggcaagaggcacaagtcacgaagtctggtctggtcgttctgaaaggacaagaagcccaggtagagaaaagcgagatgggggtgcccaggcgacaggagagtcaggttaaaaaatcacagagcggggtgtcaaaagggcaggaagctcaggtgaagaagcgggaatctgtggttttaaagggtcaggaggcccaggtcgagaaatctgagcttaaggtgcctaagggccaagaagggcaagtggaaaagactgaggcagatgtacctaaagaacaggaggtgcaagagaagaagtccgaggcaggggttttgaaggggccagaatcccaggtaaaaaataccgaggtgagcgtgcctgaaaccctcgagtcacaggtcaaaaaatcagaatccggcgttctgaagggacaggaggcccaggaaaagaaagagtctttcgaagacaagggaaacaacgacaaggaaaaggaacgcgatgcagaaaaagatccaaataagaaggagaagggagacaaaaatacgaaaggcgataagggaaaggacaaggtaaagggcaagcgcgagtctgagatcaacggtgaaaaatcaaaggggagcaagagacgccaaattcaagagggatcaactaccaaaaagtggaagtctaaggacaagttctttaaaggcccttag

SEQ ID NO: 303413 - DNA, 1704 bp, Artificial Sequence
  derived and/or modified sequence
atgacagttctggaaattacgctggctgtcatcttgactctgctgggactggctattctggcaatactgctgacgagatgggccaggtgcaagcagtctgagatgtatataagcagatactcctcagagcagagcgctcgtctgcttgattacgaggacggccgtgtcgaatgccatcacggccaacagaaggagacaagccaccgaaagactgaacgcaaacttaggcgcgagaggaagcggatcaccaacgaaaggaggttaattggaactgagaaaagcttacctcagggatcgatgtcttccattaagtgtctgcagaccaccgaagagcccccttgtaaaggtatgggtaaggttatccaggcgaagcagctgcttaacatctcttggcctctcgctgtcagtctttctaagcccctctgtattattcatgatgtgttggaatccttcaagacgatcaacttacaatcacccgctgggtttcaggctgtcacttcccattgcaaaaaggggcgtgacaaattccggaaaattctcgtgtacaaaaagggtacatctattaagggcaaaaaaatcgagatcaagcggaagtaccttatctctaaaagtcgccctttcgtagtgtgtagtgttatcctcaccggatatatggacgaggaacttgctaagaagagctgttccaaaattcaaatcctgaagtgtggaggcacggcaaggtcacagaattcccgcgaagagaacaaagaggctctgaagaacgacattattttcactaactcagtggagagcctcaaatccgcacacatcaaggaacctgaacgagaggggaaggggactgatttggaaaaggataagataggcatggaagtcaaagtggatagtgatgccggtattccgaaaagacaagaaacacaactcaagataagcgacgaatataccacaaggaccgggagtcccaataaggaaaaatgtgtccggtgcactaaaaggactgggcaagttaagaaatccgagtccggagttccaaaggggcaggaagctcaggtcactaagtccgggctggtcgtgctgaagggacaggaagcgcaggtggagaaatccgagatgggcgtgccccgtagacaggagtctcaggttaagaaaagccaatctggcgtctccaaaggccaggaggcacaagtcaagaagcgagaaagcgtagttctgaaaggccaggaagcacaggtggaaaaatcagagctcaaagtgcctaagggacaggagggacaagtggaaaagactgaggccgatgtccctaaggaacaagaggtgcaggagaaaaagtccgaagcgggtgtcctaaaaggccctgagagtcaggtgaagaatactgaggtgtcagtgccagaaaccctggagtcacaagtgaagaaaagtgagagtggagtgttaaagggccaggaggcccaggagaagaaagagtcatttgaggataaaggcaataatgataaggaaaaggaacgagacgccgagaaggatccgaacaagaaagaaaaaggagacaaaaacacgaagggcgacaaaggtaaggacaaggtgaaggggaaacgcgaaagcgagatcaatggcgagaaatccaagggcagcaagaggagacagatccaggaggggagcactaccaagaaatggaagtcaaaagacaagttctttaaaggcccttag

SEQ ID NO: 303414 - protein, 547 aa, Artificial Sequence
  derived and/or modified sequence
MTVLEITLAVILTLLGLAILAILLTRWARCKQSEMYISRYSSEQSARLLDYEDGRGSRHAYSTQSERSKRDYTPSTNSLALSRSSIALPQGSMSSIKCLQTTEEPPSRTAGAMMQFTAPIPGATGPIKLSQKTIVQTPGPIVQYPGSNAGPPSAPRGPPMAPIIISQRTASQLAAPIRIPQVHTMDSSGKITLTPVVILTGYMDEELAKKSCSKIQILKCGGTARSQNSREENKEALKNDIIFTNSVESLKSAHIKEPEREGKGTDLEKDKIGMEVKVDSDAGIPKRQETQLKISEMSIPQGQGAQIKKSVSDVPRGQESQVKKSESGVPKGQEAQVTKSGLVVLKGQEAQVEKSEMGVPRRQESQVKKSQSGVSKGQEAQVKKRESVVLKGQEAQVEKSELKVPKGQEGQVEKTEADVPKEQEVQEKKSEAGVLKGPESQVKNTEVSVPETLESQVKKSESGVLKGQEAQEKKESFEDKGNNDKEKERDAEKDPNKKEKGDKNTKGDKGKDKVKGKRESEINGEKSKGSKRAKANTGRKYNKKVEE

SEQ ID NO: 303415 - protein, 547 aa, Artificial Sequence
  derived and/or modified sequence
MTVLEITLAVILTLLGLAILAILLTRWARRKQSEMHISRYSSEQSARLLDYEDGRGSRHAYSTQSERSKRDYTPSTNSLALSRSSIALPQGSMSSIKCLQTTEELPSRTAGAMMQFTAPIPGATGPIKLSQKTIVQTPGPIVQYPGPNAGPPSAPRGPPMAPIIISQRTASQLAAPIRIPQVHTMDSSGKITLTPVVILTGYMDEELAKKPCSKIQILKCGGTARSQNSREENKEALKNDIIFTNSVESLKSAHIKEPEREGKGTDLEKDKIGMEVKVDSDAGIPKRQETQLKISEMSIPQGQGAQIKKSVSDVPRGQESQVKKSESGVPKGQEAQVTKSGLVVLKGQEAQVEKSEMGVPRRQESQVKKSQSGVSKGQEAQVKKRESVVLKGQEAQVEKSELKVPKGQEGQVEKTEADVPKEQEVQEKKSEAGVLKGPESQVKNTEVSVPETLESQVKKSESGVLKGQEAQEKKESFEDKGNNDKEKERDAEKDPNKKEKGDKNTKGDKGKDKVKGKRESEINGEKSKGSKRAKANTGRKYNKKVEE

SEQ ID NO: 303416 - DNA, 2076 bp, Artificial Sequence
  derived and/or modified sequence
acacaatttctcagtgatcctctgcatctctgcctacaagggcctccctgacacccaagttcatattgctcagaaacagtgaacttgagtttttcgttttatcttgatctctctctgacaaagaaatccagatgatgcgagacctgatgaagacaatacatggaaaatgacagtcttggaaataactttggctgtcatcctgactctactgggacttgccatcctggctattttgttaacaagatgggcacgatgtaagcaaagtgaaatgtatatctccagatacagttcagaacaaagtgctagacttctggactatgaggatggtagaggatcccgacatgcatattcaacacaaagtgagagatccaaaagagattacacaccatcaaccaactctctagcactgtctcgatcaagtattgctttacctcaaggatccatgagtagtataaaatgtttacaaacaactgaagaacctccttccagaactgcaggagccatgatgcaattcacagcccctattcccggagctacaggacctatcaagctctctcaaaaaaccattgtgcaaactccaggacctattgtacaatatcctggatccaatgctggtccaccttcagcaccccgcggtccacccatggcacccataataatttcacagagaaccgcaagtcagctggcagcacctataagaatacctcaagttcacactatggacagttctggaaaaatcacactgactcctgtggttatattaacaggttacatggatgaagaacttgcaaaaaaatcttgttccaaaatccagattctaaaatgtggaggcactgcaaggtctcagaatagccgagaagaaaacaaggaagcactaaagaatgacatcatatttacgaattctgtagaatccttgaaatcagcacacataaaggagccagaaagagaaggaaaaggcactgatttagagaaagacaaaataggaatggaggtcaaggtagacagtgacgctggaataccaaaaagacaggaaacccaactaaaaatcagtgagatgagtataccacaaggacagggagcccaaataaagaaaagtgtgtcagatgtaccaagaggacaggagtcccaagtaaagaagagtgagtcaggtgtcccaaaaggacaagaagcccaagtaacgaagagtgggttggttgtactgaaaggacaggaagcccaggtagagaagagtgagatgggtgtgccaagaagacaggaatcccaagtaaagaagagtcagtctggtgtctcaaagggacaggaagcccaggtaaagaagagggagtcagttgtactgaaaggacaggaagcccaggtagagaagagtgagttgaaggtaccaaaaggacaagaaggccaagtagagaagactgaggcagatgtgccaaaggaacaagaggtccaagaaaagaagagtgaggcaggtgtactgaaaggaccagaatcccaagtaaagaacactgaggtgagtgtaccagaaacactggaatcccaagtaaagaagagtgagtcaggtgtactaaaaggacaggaagcccaagaaaagaaggagagttttgaggataaaggaaataatgataaagaaaaggagagagatgcagagaaagatccaaataaaaaagaaaaaggtgacaaaaacacaaaaggtgacaaaggaaaggacaaagttaaaggaaagagagaatcagaaatcaatggtgaaaaatcaaaaggctcgaaaagggcgaaggcaaatacaggaaggaagtacaacaaaaaagtggaagagtaaggataaattttttaaaggcccataagacaagtgattattatgattcccatactccagatacaaaccatatcccagccattgcctaaacagattacaattataaaatccctttcatcttcatatcacagtttctgctcttcagaagtttcaccctttttaatctctcagccacaaacctcagtttccaaatatttgttttataagttaagacgtatatgattccgtcaagaaagactggatactttctgaagtaaaacattttaatt

SEQ ID NO: 303417 - DNA, 1644 bp, Artificial Sequence
  derived and/or modified sequence
atgaccgtgctggagatcaccctggccgtgatcctgaccctgctgggcctggccatcctggccatcctgctgaccagatgggccagatgcaagcagagcgagatgtacatcagcagatacagcagcgagcagagcgccagactgctggactacgaggacggcagaggcagcagacacgcctacagcacccagagcgagagaagcaagagagactacacccccagcaccaacagcctggccctgagcagaagcagcatcgccctgccccagggcagcatgagcagcatcaagtgcctgcagaccaccgaggagccccccagcagaaccgccggcgccatgatgcagttcaccgcccccatccccggcgccaccggccccatcaagctgagccagaagaccatcgtgcagacccccggccccatcgtgcagtaccccggcagcaacgccggcccccccagcgcccccagaggcccccccatggcccccatcatcatcagccagagaaccgccagccagctggccgcccccatcagaatcccccaggtgcacaccatggacagcagcggcaagatcaccctgacccccgtggtgatcctgaccggctacatggacgaggagctggccaagaagagctgcagcaagatccagatcctgaagtgcggcggcaccgccagaagccagaacagcagagaggagaacaaggaggccctgaagaacgacatcatcttcaccaacagcgtggagagcctgaagagcgcccacatcaaggagcccgagagagagggcaagggcaccgacctggagaaggacaagatcggcatggaggtgaaggtggacagcgacgccggcatccccaagagacaggagacccagctgaagatcagcgagatgagcatcccccagggccagggcgcccagatcaagaagagcgtgagcgacgtgcccagaggccaggagagccaggtgaagaagagcgagagcggcgtgcccaagggccaggaggcccaggtgaccaagagcggcctggtggtgctgaagggccaggaggcccaggtggagaagagcgagatgggcgtgcccagaagacaggagagccaggtgaagaagagccagagcggcgtgagcaagggccaggaggcccaggtgaagaagagagagagcgtggtgctgaagggccaggaggcccaggtggagaagagcgagctgaaggtgcccaagggccaggagggccaggtggagaagaccgaggccgacgtgcccaaggagcaggaggtgcaggagaagaagagcgaggccggcgtgctgaagggccccgagagccaggtgaagaacaccgaggtgagcgtgcccgagaccctggagagccaggtgaagaagagcgagagcggcgtgctgaagggccaggaggcccaggagaagaaggagagcttcgaggacaagggcaacaacgacaaggagaaggagagagacgccgagaaggaccccaacaagaaggagaagggcgacaagaacaccaagggcgacaagggcaaggacaaggtgaagggcaagagagagagcgagatcaacggcgagaagagcaagggcagcaagagagccaaggccaacaccggcagaaagtacaacaagaaggtggaggagtag

SEQ ID NO: 303418 - DNA, 1644 bp, Artificial Sequence
  derived and/or modified sequence
atgactgtgctggaaattaccctcgctgtgatcctcacactgctggggctggcgattcttgctattttattgactcgatgggcacggtgcaaacaatccgaaatgtacatttctaggtactctagcgaacaatctgcccgcctcctggactacgaagacggtcgcgggtccaggcatgcttatagtactcaaagtgagcgttccaaaagggattacacaccaagtacgaattcacttgccctctcaaggtcaagcattgctttaccacagggcagtatgtctagcatcaagtgcctgcagactacagaggagccgccttctagaactgccggagctatgatgcagttcacagctcccattcccggcgccacagggcctattaagctctctcaaaagacgatagtccagaccccaggaccaatagtgcagtatcccggctctaatgctgggcctccaagcgctcctcggggtccgccaatggctccaatcattatctcccagcgtaccgcctctcagctcgcagcgccgattcggattccgcaggttcacaccatggactcaagtgggaagattacactgacacccgtagtgattttaaccggctacatggatgaggagctcgctaagaaatcctgcagtaaaattcagatcttgaagtgcggtggaactgcccggagccagaattcccgggaggagaataaagaggcgctgaaaaacgacattatatttaccaactccgtggagtccctgaaatccgcccacatcaaggagccagagcgggagggaaagggtacagaccttgaaaaggacaaaattggtatggaagtaaaggtggattccgatgctggcatccctaaaagacaggagacacagctgaaaatctcagagatgagcattccccagggtcagggggcccagatcaagaagtctgtttctgatgtacctaggggccaggagtctcaggtcaagaagagcgaaagtggtgtgcccaaaggtcaggaggcacaagttacaaagtccgggctagtggtgctcaaagggcaggaggcccaagttgagaagtccgaaatgggcgtccccagacgccaggaaagtcaggttaaaaagtctcagtccggggttagcaaaggccaggaagctcaagtgaagaaaagggagagtgtcgtgctgaaaggccaggaggctcaggttgaaaaatccgagctcaaggtcccaaagggtcaggaggggcaggttgagaagacagaggcagacgttcctaaggagcaagaggttcaggagaagaaatcagaggctggcgtcctaaaggggcccgaaagccaggtgaagaataccgaggtgtctgttccggaaaccctcgagagtcaagttaaaaagtctgaatccggagtcctgaaagggcaggaggcccaggagaagaaagagagctttgaagataaaggtaacaatgataaagaaaaggaaagggacgccgaaaaggatcccaataagaaagagaagggagataagaacacaaaaggagacaaaggaaaagacaaagtgaagggtaagcgcgagagcgagataaacggagaaaaatcaaagggcagcaagcgggctaaggcaaacactggtagaaagtacaacaaaaaagtggaggagtag

SEQ ID NO: 303419 - DNA, 1644 bp, Artificial Sequence
  derived and/or modified sequence
atgacagtgctggagatcaccctggccgtcatcctgaccctgctgggcctggccatcctggccatcctgctgacccgctgggcccgctgcaagcagagcgagatgtacatcagccgctacagcagcgagcagagcgcccggctgctggactatgaagatggccggggcagcagacatgcctacagcacccagagcgagaggagcaagagggactacacccccagcaccaacagcctggccctgagccgcagcagcatcgccctgccccagggctccatgagcagcatcaagtgcctgcagaccacagaggagccccccagcaggacagctggggccatgatgcagttcaccgcccccatccctggggccaccggccccatcaagctgagccagaagaccatcgtgcagaccccaggccccatcgtgcagtacccaggcagcaatgccggccccccatctgccccccggggcccccccatggcccccatcatcatcagccagaggacagccagccagctggccgcccccatccgcatcccccaggtgcacaccatggacagcagcggcaagatcaccctgacccctgtggtgatcctgaccggctacatggatgaggagctggccaagaagagctgcagcaagatccagatcctgaagtgtggcggcacagcccggagccagaacagccgggaggagaacaaggaggccctgaagaatgacatcatcttcaccaacagcgtggagagcctgaagagcgcccacatcaaggagcctgagcgggagggcaaaggaacagacctggagaaggacaagattggcatggaggtgaaggtggacagtgatgctggcatccccaagaggcaggagacccagctgaagatcagcgagatgagcatcccccagggccagggcgcccagatcaagaagtctgtgtctgatgtgccccggggccaggagagccaggtgaagaagtctgagagcggcgtgcccaagggccaggaggcccaggtgaccaagagcggcctggtggtgctgaagggccaggaggcccaggtggagaagtctgagatgggcgtgccccggcggcaggagagccaggtgaagaagagccagagcggcgtgtccaagggccaggaggcccaggtgaagaagcgggagagcgtggtgctgaagggccaggaggcccaggtggagaagtctgagctgaaggtgcccaagggccaggagggccaggtggagaagacagaagcagatgtgcccaaggagcaggaggtgcaggagaagaagtctgaggccggcgtgctgaagggccctgagagccaggtgaagaacacagaggtgtctgtgcctgagaccctggagagccaggtgaagaagtctgagagcggcgtgctgaagggccaggaggcccaggagaagaaggagagctttgaggacaagggcaacaatgacaaggagaaggagagagatgctgagaaggaccccaacaagaaggagaagggggacaagaacaccaagggggacaagggcaaggacaaggtgaagggcaagcgggagagcgagatcaatggagagaagagcaagggcagcaagagggccaaggccaacacaggcaggaagtacaacaagaaggtggaggagtag

SEQ ID NO: 303420 - DNA, 1644 bp, Artificial Sequence
  derived and/or modified sequence
atgaccgtgctggagatcaccctggccgtgatcctgaccctgctgggacttgcgattttggcaatcttgttgactagatgggcaaggtgcaagcagtctgagatgtacatttctaggtatagtagtgaacaatccgccaggttgctagattatgaggatggtagaggctctagacacgcgtattcaacacagtccgaacgcagcaagcgcgattatacccccagcacaaactcgctcgccctcagtcgttcgtctatcgccctgcctcaaggaagtatgtcgagcatcaaatgcctgcaaacaaccgaagagcccccttcccgcaccgccggcgctatgatgcagtttacagcccctatccccggagctaccgggccaattaaactgtctcagaagacaattgtgcaaacccctgggcctatcgttcagtatccagggtcaaacgctggcccaccctccgccccaaggggtccacccatggccccaatcatcatttcccaacggaccgctagccagttagcagcccctattcggataccccaggtacatactatggacagctcgggcaaaatcaccctcacccctgtagtcatcttgaccgggtatatggatgaagaacttgccaagaagtcctgtagcaaaatacagattttgaagtgtgggggaacagctcggtctcaaaatagccgagaggaaaataaggaggccctgaagaatgatatcatctttacaaacagcgtagaatcactcaagtccgcacacatcaaagagcccgagcgggagggtaagggaactgatttggagaaggacaagattgggatggaggtgaaggtcgattccgatgcagggatcccaaaacgtcaagaaactcagcttaagatatccgaaatgtccatacctcagggacagggtgcccagattaaaaagagtgtttccgacgtacctcgtggacaggagtcacaggtgaaaaaatctgagagcggggttcccaagggccaggaggcacaggtgaccaagtcgggcctggtggtcctgaaggggcaggaggctcaggtcgaaaagtccgaaatgggggtcccccgccgacaggagtcccaagtgaaaaaatcccaatcaggagtgagtaaggggcaggaggcacaagtcaagaaaagggaatctgtggtgctaaagggacaggaagctcaagttgagaaatctgagttgaaagtgccaaaaggacaggagggtcaggtggagaaaaccgaggcagatgtgcccaaggaacaagaagtccaagagaaaaagtctgaggctggggttctgaaaggtcctgaatcccaggtaaagaacactgaagtgtccgtgcccgagacactcgagtctcaagttaagaaatcggagtcaggcgttctaaaggggcaggaagctcaggagaagaaagagtcatttgaagataaggggaacaacgataaggagaaagaacgagacgctgaaaaggaccccaacaagaaagagaaaggtgataaaaatactaagggcgacaagggtaaagacaaagtgaaaggcaagagggaatcagagataaacggggagaaatctaagggcagtaaaagagcgaaggcaaacaccggacgaaagtacaacaagaaagtggaagagtag

SEQ ID NO: 303421 - DNA, 1644 bp, Artificial Sequence
  derived and/or modified sequence
atgaccgtcctcgagatcacacttgctgtcatactgacattgttgggccttgctatcttggccatcctcctgaccaggtgggcaagatgtaagcaatccgaaatgtatatttcgcgctacagcagtgaacagtcagcaagactccttgattatgaggatggtaggggaagtagacacgcttacagcacccagagcgagcgctcaaaacgagattacacgcctagcactaattctctggccctaagtcgatcaagtatcgccctaccacaaggatcaatgtcatcaatcaagtgcctacaaaccacagaggagccaccctcccgcactgccggagcgatgatgcagtttactgcacctatcccaggcgctaccggaccaatcaagttaagccaaaaaactattgtgcagacacccggaccaatcgtacaatacccgggttcaaatgctggaccaccttccgcccctcggggtcctcccatggcaccgattattatttctcaacgaaccgcctctcagctggctgccccaatacgcattccacaagtacatacaatggacagttcaggcaaaataacattgacccctgttgttattcttaccggatacatggatgaggagctagccaagaaatcatgttccaagatacagattctcaagtgcgggggaacggcacgaagccagaatagcagagaggagaacaaggaagcactgaagaatgatatcatcttcacgaattcagtagagtctctgaagtcagcccatatcaaagagccagaaagggagggcaaaggaacagacctggagaaagacaagatagggatggaggtaaaagtggatagcgacgcagggattcccaaacgacaagaaacccagcttaagatttccgagatgtccatcccccagggccagggggctcaaataaagaaatctgtgtctgacgtccccaggggacaggaatctcaggtcaaaaaatccgaatccggtgtgcccaaaggtcaggaggcccaggtaacaaagtcaggacttgtggttctgaagggacaggaggctcaggtcgagaaaagcgaaatgggagtcccaaggcgacaggagagccaggtgaaaaaatctcagtccggcgtctccaagggtcaggaggcccaggtcaagaagagggagtcggttgtactcaaaggccaggaggcgcaagtggagaagtcagagcttaaggtacctaagggtcaggaagggcaggtggaaaagacagaggctgacgtcccaaaagagcaagaagtgcaggaaaagaagagcgaggctggcgtgctgaagggcccagaatcccaggtgaaaaatacagaggtctccgtccccgagaccctcgaaagccaggtcaagaagtctgaaagcggcgtgctcaagggccaggaagctcaggaaaagaaagagtcatttgaggacaaaggcaacaacgataaggaaaaggaacgagatgcggagaaggatccaaataagaaggagaagggcgataagaataccaagggcgataaggggaaggataaagtaaaggggaaacgagaatcagaaatcaacggcgagaaatccaaaggcagcaagagggctaaagccaacaccgggcgaaaatacaacaagaaggtggaagagtag

SEQ ID NO: 303422 - DNA, 2076 bp, Artificial Sequence
  derived and/or modified sequence
acacaatttctcagtgatcctctgcatctctgcctacaagggcctccctgacacccaagttcatattgctcagaaacagtgaacttgagtttttcgttttatcttgatctctctctgacaaagaaatccagatgatgcgagacctgatgaagacaatacatggaaaatgacagtcttggaaataactttggctgtcatcctgactctactgggacttgccatcctggctattttgttaacaagatgggcacgacgtaagcaaagtgaaatgcatatctccagatacagttcagaacaaagtgctagacttctggactatgaggatggtagaggatcccgacatgcatattcaacacaaagtgagagatccaaaagagattacacaccatcaaccaactctctagcactgtctcgatcaagtattgctttacctcaaggatccatgagtagtataaaatgtttacaaacaactgaagaacttccttccagaactgcaggagccatgatgcaattcacagcccctattcccggagctacaggacctatcaagctctctcaaaaaaccattgtgcaaactccaggacctattgtacaatatcctggacccaatgctggtccaccttcagcaccccgcggtccacccatggcacccataataatttcacagagaaccgcaagtcagctggcagcacctataagaatacctcaagttcacactatggacagttctggaaaaatcacactgactcctgtggttatattaacaggttacatggatgaagaacttgcaaaaaaaccttgttccaaaatccagattctaaaatgtggaggcactgcaaggtctcagaatagccgagaagaaaacaaggaagcactaaagaatgacatcatatttacgaattctgtagaatccttgaaatcagcacacataaaggagccagaaagagaaggaaaaggcactgatttagagaaagacaaaataggaatggaggtcaaggtagacagtgacgctggaataccaaaaagacaggaaacccaactaaaaatcagtgagatgagtataccacaaggacagggagcccaaataaagaaaagtgtgtcagatgtaccaagaggacaggagtcccaagtaaagaagagtgagtcaggtgtcccaaaaggacaagaagcccaagtaacgaagagtgggttggttgtactgaaaggacaggaagcccaggtagagaagagtgagatgggtgtgccaagaagacaggaatcccaagtaaagaagagtcagtctggtgtctcaaagggacaggaagcccaggtaaagaagagggagtcagttgtactgaaaggacaggaagcccaggtagagaagagtgagttgaaggtaccaaaaggacaagaaggccaagtagagaagactgaggcagatgtgccaaaggaacaagaggtccaagaaaagaagagtgaggcaggtgtactgaaaggaccagaatcccaagtaaagaacactgaggtgagtgtaccagaaacactggaatcccaagtaaagaagagtgagtcaggtgtactaaaaggacaggaagcccaagaaaagaaggagagttttgaggataaaggaaataatgataaagaaaaggagagagatgcagagaaagatccaaataaaaaagaaaaaggtgacaaaaacacaaaaggtgacaaaggaaaggacaaagttaaaggaaagagagaatcagaaatcaatggtgaaaaatcaaaaggctcgaaaagggcgaaggcaaatacaggaaggaagtacaacaaaaaagtggaagagtaaggataaattttttaaaggcccataagacaagtgattattatgattcccatactccagatacaaaccatatcccagccattgcctaaacagattacaattataaaatccctttcatcttcatatcacagtttctgctcttcagaagtttcaccctttttaatctctcagccacaaacctcagtttccaaatatttgtttcataagttaagacgtatatgattccgtcaagaaagactggatactttctgaagtaaaacattttaatt

SEQ ID NO: 303423 - DNA, 1644 bp, Artificial Sequence
  derived and/or modified sequence
atgaccgtgctggagatcaccctggccgtgatcctgaccctgctgggcctggccatcctggccatcctgctgaccagatgggccagaagaaagcagagcgagatgcacatcagcagatacagcagcgagcagagcgccagactgctggactacgaggacggcagaggcagcagacacgcctacagcacccagagcgagagaagcaagagagactacacccccagcaccaacagcctggccctgagcagaagcagcatcgccctgccccagggcagcatgagcagcatcaagtgcctgcagaccaccgaggagctgcccagcagaaccgccggcgccatgatgcagttcaccgcccccatccccggcgccaccggccccatcaagctgagccagaagaccatcgtgcagacccccggccccatcgtgcagtaccccggccccaacgccggcccccccagcgcccccagaggcccccccatggcccccatcatcatcagccagagaaccgccagccagctggccgcccccatcagaatcccccaggtgcacaccatggacagcagcggcaagatcaccctgacccccgtggtgatcctgaccggctacatggacgaggagctggccaagaagccctgcagcaagatccagatcctgaagtgcggcggcaccgccagaagccagaacagcagagaggagaacaaggaggccctgaagaacgacatcatcttcaccaacagcgtggagagcctgaagagcgcccacatcaaggagcccgagagagagggcaagggcaccgacctggagaaggacaagatcggcatggaggtgaaggtggacagcgacgccggcatccccaagagacaggagacccagctgaagatcagcgagatgagcatcccccagggccagggcgcccagatcaagaagagcgtgagcgacgtgcccagaggccaggagagccaggtgaagaagagcgagagcggcgtgcccaagggccaggaggcccaggtgaccaagagcggcctggtggtgctgaagggccaggaggcccaggtggagaagagcgagatgggcgtgcccagaagacaggagagccaggtgaagaagagccagagcggcgtgagcaagggccaggaggcccaggtgaagaagagagagagcgtggtgctgaagggccaggaggcccaggtggagaagagcgagctgaaggtgcccaagggccaggagggccaggtggagaagaccgaggccgacgtgcccaaggagcaggaggtgcaggagaagaagagcgaggccggcgtgctgaagggccccgagagccaggtgaagaacaccgaggtgagcgtgcccgagaccctggagagccaggtgaagaagagcgagagcggcgtgctgaagggccaggaggcccaggagaagaaggagagcttcgaggacaagggcaacaacgacaaggagaaggagagagacgccgagaaggaccccaacaagaaggagaagggcgacaagaacaccaagggcgacaagggcaaggacaaggtgaagggcaagagagagagcgagatcaacggcgagaagagcaagggcagcaagagagccaaggccaacaccggcagaaagtacaacaagaaggtggaggagtag

SEQ ID NO: 303424 - DNA, 1644 bp, Artificial Sequence
  derived and/or modified sequence
atgactgttctcgaaatcaccttggctgtcattcttaccctgcttgggctcgctatcctcgctatcctgctgaccaggtgggcccgcaggaaacagtcagagatgcatattagccgatatagctcagagcagagcgccagactgctggactatgaagacgggcgcggtagcaggcacgcttattcgactcagtccgagcggtctaaacgcgactacactccaagtaccaattcactggctctgtctagatcctcaattgctctcccccaaggttccatgtcttctatcaagtgtctacaaacaaccgaagaactgccaagcaggacggctggcgccatgatgcagtttacagcgcccatcccgggggccaccggaccaattaagctatcccagaaaaccatagtgcaaacgccaggccccatcgtacaatatcccggtccaaacgccggccctcccagcgctccccgggggcctcccatggcacccatcattatcagtcaacgcactgcctcacaattggcggctcccattcggatcccccaagttcacacaatggactcttccggaaagatcactttgactcccgtggttatcttaacaggctacatggacgaagagcttgccaaaaagccgtgcagtaagattcaaattctcaagtgcggagggacggcaaggtcccagaattctagagaggaaaacaaggaggcactcaagaacgacatcattttcacaaactccgtggagtcactaaagtccgcacacattaaagaacccgaacgggagggtaaaggaacggatttggagaaagacaaaatcggtatggaagtcaaagtggatagtgacgctgggatacccaagaggcaggaaacacagttgaagatatcagaaatgtctatcccccagggccaaggggcccaaattaaaaaaagcgtgtccgacgtgcctaggggccaagagagccaggtgaagaagagtgaaagcggcgtgcccaaaggccaggaagcacaagttactaaaagcgggttggtggtgctaaaaggccaggaggcacaggtcgagaagagtgaaatgggtgttccccggaggcaggaatcccaggtcaagaagagccagagcggggtgagcaaaggccaggaggcccaagtgaagaagagagagtccgtggtgctgaagggacaggaggcccaggtggaaaagtcagaattgaaggtccccaaaggacaagagggccaagttgaaaaaactgaagccgacgttcctaaggagcaagaagtacaagagaaaaaatctgaggcaggtgttctgaaaggaccggaatcacaggtcaagaataccgaggtttccgtgcccgaaacccttgagagccaagtcaaaaaaagtgagtcaggtgtcttgaaggggcaggaagcccaagagaagaaggaatcgtttgaagataaagggaacaacgacaaagagaaggagcgggacgccgagaaagatcctaacaaaaaagaaaagggcgacaagaatacaaagggggataaaggaaaagacaaggtaaaggggaaacgggagtctgagatcaatggcgagaaatctaagggatctaagcgtgctaaggccaataccggtaggaagtataataaaaaagttgaggagtag

SEQ ID NO: 303425 - DNA, 1644 bp, Artificial Sequence
  derived and/or modified sequence
atgacagtgctggagatcaccctggccgtcatcctgaccctgctgggcctggccatcctggccatcctgctgacccgctgggcccggaggaagcagagcgagatgcacatcagccgctacagcagcgagcagagcgcccggctgctggactatgaagatggccggggcagcagacatgcctacagcacccagagcgagaggagcaagagggactacacccccagcaccaacagcctggccctgagccgcagcagcatcgccctgccccagggctccatgagcagcatcaagtgcctgcagaccacagaggagctgcccagcaggacagctggggccatgatgcagttcaccgcccccatccctggggccaccggccccatcaagctgagccagaagaccatcgtgcagaccccaggccccatcgtgcagtacccaggccccaatgccggccccccatctgccccccggggcccccccatggcccccatcatcatcagccagaggacagccagccagctggccgcccccatccgcatcccccaggtgcacaccatggacagcagcggcaagatcaccctgacccctgtggtgatcctgaccggctacatggatgaggagctggccaagaagccctgcagcaagatccagatcctgaagtgtggcggcacagcccggagccagaacagccgggaggagaacaaggaggccctgaagaatgacatcatcttcaccaacagcgtggagagcctgaagagcgcccacatcaaggagcctgagcgggagggcaaaggaacagacctggagaaggacaagattggcatggaggtgaaggtggacagtgatgctggcatccccaagaggcaggagacccagctgaagatcagcgagatgagcatcccccagggccagggcgcccagatcaagaagtctgtgtctgatgtgccccggggccaggagagccaggtgaagaagtctgagagcggcgtgcccaagggccaggaggcccaggtgaccaagagcggcctggtggtgctgaagggccaggaggcccaggtggagaagtctgagatgggcgtgccccggcggcaggagagccaggtgaagaagagccagagcggcgtgtccaagggccaggaggcccaggtgaagaagcgggagagcgtggtgctgaagggccaggaggcccaggtggagaagtctgagctgaaggtgcccaagggccaggagggccaggtggagaagacagaagcagatgtgcccaaggagcaggaggtgcaggagaagaagtctgaggccggcgtgctgaagggccctgagagccaggtgaagaacacagaggtgtctgtgcctgagaccctggagagccaggtgaagaagtctgagagcggcgtgctgaagggccaggaggcccaggagaagaaggagagctttgaggacaagggcaacaatgacaaggagaaggagagagatgctgagaaggaccccaacaagaaggagaagggggacaagaacaccaagggggacaagggcaaggacaaggtgaagggcaagcgggagagcgagatcaatggagagaagagcaagggcagcaagagggccaaggccaacacaggcaggaagtacaacaagaaggtggaggagtag

SEQ ID NO: 303426 - DNA, 1644 bp, Artificial Sequence
  derived and/or modified sequence
atgaccgtgctggagatcaccctggccgtgatcctgaccctgctgggactcgcaattttggcaatcctcctgacgcgttgggctcgccgcaagcaatctgaaatgcacatttctagatacagtagcgaacagtcagctagactactagactacgaagatggccgtgggtcacgccacgcctattcgacacaaagcgaacgctctaagagagactacacaccatctactaatagtctggctctctcaaggtcgtcaattgcattaccccagggctcaatgagctcaattaagtgcctccagacaaccgaggaactaccctcccgcacggccggtgcaatgatgcagtttaccgctcccattcccggggccactggccccatcaagctcagccagaaaaccatcgtacagacacccggcccaattgttcagtatcctggtccaaacgcaggaccaccaagcgctcctcgtggccccccaatggcgcccattataatcagtcagagaacagccagccagttagctgcaccgatcaggattccgcaggtccacacaatggactccagcggcaagataacactcactccggtagtgattcttaccggctacatggacgaagaactcgcaaaaaagccttgttccaagatacagatcttaaaatgtggcggaactgctcggtcccagaactctcgtgaggagaacaaggaagccttaaaaaatgacatcatcttcacaaacagcgtcgagtctctgaagtctgcacatattaaggaacctgagcgggaaggcaagggtactgatctggagaaggataaaattggaatggaagtcaaagtcgacagcgacgccggcataccaaagcgtcaggaaacccagctcaagatatccgagatgagtattccgcagggccagggtgcacagattaaaaaatccgtaagcgatgtgcctagaggacaagaaagtcaagtcaagaaaagcgagtcgggtgtgcctaaagggcaggaggcgcaggtaaccaaatcagggctggttgttttgaaggggcaggaggcacaagtggagaaatctgagatgggagtaccaagacgtcaggagtcccaggtgaagaaatcacagagcggcgtttcaaaaggccaggaggcacaggtaaagaaacgggagagcgtcgttctcaaaggacaggaagcccaggtcgagaaaagcgagctgaaggttccaaagggtcaggagggccaggtagagaagacagaggccgatgtgcccaaggaacaggaagtgcaggaaaaaaagagcgaggcaggtgtgctaaaagggcctgagtcccaagttaagaacacagaagtttccgttcccgaaactctggagtcccaggtgaaaaagtccgaatcgggggtgttgaagggccaggaagctcaggagaaaaaagagagtttcgaggacaaaggaaacaacgacaaggagaaggagcgggacgcagagaaagatccaaataaaaaggaaaaaggagataaaaatacgaagggggataaagggaaggacaaagtgaaaggcaagcgtgagtctgaaattaacggtgaaaagtccaagggctccaaaagagcaaaggctaatacaggacgcaagtacaataagaaggtcgaggagtag

SEQ ID NO: 303427 - DNA, 1644 bp, Artificial Sequence
  derived and/or modified sequence
atgaccgttctcgagatcacactggccgtcatactgaccctcctcggtttggcgatcctggccattctcctcacacgctgggccaggcgcaaacagtctgaaatgcacatcagccggtacagcagtgagcagagcgcgaggctgttggattatgaggatggcagagggagtcgtcacgcatactctactcaaagcgaacgaagtaagagagactataccccgagtactaattctctcgcattgtcaaggagctctatagcccttccacagggatcaatgtctagtataaagtgtctgcagacgaccgaggaactcccttctcgcacagctggagctatgatgcagttcaccgcgccaatcccaggtgcaacagggccaattaaactgagtcaaaaaaccatcgtgcagactccaggaccaatcgtgcagtacccaggacctaacgctggcccaccaagcgcgccacgcggtcctcccatggcaccgattatcatcagccagcgaacagcaagccagttggcagcgcctattaggatcccgcaggtgcacactatggactctagcggcaagatcacactgacccccgtggtcatcttaacggggtatatggacgaggagctggccaagaaaccatgctctaaaatccaaattctcaaatgcggaggcactgccaggtcccagaactctcgggaagagaacaaagaggctttgaagaatgatatcatttttacaaattcagttgagagtctaaaaagtgctcatattaaagaaccagaaagggagggtaaaggcaccgatctggagaaggataagattgggatggaggttaaggtcgactctgacgctgggatcccaaagcgtcaagaaactcagctgaaaatttccgagatgtccatcccacagggtcagggcgcacagatcaagaagagtgttagtgacgtcccccgaggacaagaatcgcaggtgaaaaagtctgaaagcggggtgccgaaggggcaagaggctcaggtgaccaaatctggactcgtagtcctgaagggacaggaggcccaagtcgagaagtcagaaatgggtgtcccgcgtaggcaggaaagtcaagtcaaaaaatcgcagtccggcgtgagtaaaggccaggaagctcaggtcaaaaaacgtgagtccgtggttctcaaaggccaggaggcccaggttgaaaaatctgagctgaaggttcccaagggtcaggaagggcaggtggagaaaaccgaggcggatgtgcccaaagagcaagaagtgcaggagaagaaaagcgaggctggagtgttgaagggtcctgaaagtcaagttaagaacaccgaagtgagcgttccagaaaccttggaaagccaggttaaaaaatctgagagcggcgtgcttaaggggcaggaggcccaagagaaaaaggagtctttcgaagataaaggcaataatgacaaagagaaagaaagggatgctgaaaaagacccaaataagaaagagaaaggggataagaataccaagggagataaaggcaaagacaaagtgaaggggaaacgggagagtgagattaatggtgaaaagtctaaaggcagtaaaagggctaaggcaaacaccggcagaaagtacaataagaaagttgaagagtag

SEQ ID NO: 303428 - DNA, 369 bp, Artificial Sequence
  derived and/or modified sequence
atggtagtggtagaaaaaggcgcaagtctcatgagccgagccagtttaatgccagctcaagcgagagcaccatttcagcgcttgcgggactgtcgaggaccagctgattcttcccacgcatttaagctgcaatgctttccttctcattgcaggaggcctccctgggtcatctcacgaaaaggacgggctattaataagtactctatatgcatttcatgcgttgccctacatctggaaatcagttttatatggcagctactgcagaatgagccaaatttggagggtgggttgggacggttcatgctcgcctcattgtcccttcaacaagtaatttctatcctggcgttcacaagagtgaaacaactgtag

SEQ ID NO: 303429 - protein, 492 aa, Artificial Sequence
  derived and/or modified sequence
MGSCCSCLNRDSVPDNHPTKFKVTNVDDEGVELGSGVMELTQSELVLHLHRREAVRWPYLCLRRYGYDSNLFSFESGRRCQTGQGIFAFKCSRAEEIFNLLQDLMQCNSINVMEEPVIITRNSHPAELDLPRAPQPPNALGYTVSSFSNGCPGEGPRFSAPRRLSTSSLRHPSLGEESTHALIAPDEQSHTYVNTPASEDDHRRGRHCLQPLPEGQAPFLPQARGPDQRDPQVFLQPGQVKFVLGPTPARRHMVKCQGLCPSLHDPPHHNNNNEAPSECPAQPKCTYENVTGGLWRGAGWRLSPEEPGWNGLAHRRAALLHYENLPPLPPVWESQAQQLGGEAGDDGDSRDGLTPSSNGFPDGEEDETPLQKPTSTRAAIRSHGSFPVPLTRRRGSPRVFNFDFRRPGPEPPRQLNYIQVELKGWGGDRPKGPQNPSSPQAPMPTTHPARSSDSYAVIDLKKTVAMSNLQRALPRDDGTARKTRHNSTDLPL

SEQ ID NO: 303430 - protein, 36 aa, Artificial Sequence
  derived and/or modified sequence
MGSCCSCLNRDSVPDNHPTKFKVTNVDDEGVELGSG

SEQ ID NO: 303431 - protein, 147 aa, Artificial Sequence
  derived and/or modified sequence
METPRRARSPVSPQFPGQAGCSDTMGSCCSCLNRDSVPDNHPTKFKVTNVDDEGVELGSGVMELTQSELVLHLHRREAVRWPYLCLRRYGYDSNLFSFESGRRCQTGQGIFAFKCSRAEEIFNLLQDLMQCNSINVMEEPVIITRNS

SEQ ID NO: 303432 - DNA, 1479 bp, Artificial Sequence
  derived and/or modified sequence
atgggcagctgctgcagctgcctgaacagagacagcgtgcccgacaaccaccccaccaagttcaaggtgaccaacgtggacgacgagggcgtggagctgggcagcggcgtgatggagctgacccagagcgagctggtgctgcacctgcacagaagagaggccgtgagatggccctacctgtgcctgagaagatacggctacgacagcaacctgttcagcttcgagagcggcagaagatgccagaccggccagggcatcttcgccttcaagtgcagcagagccgaggagatcttcaacctgctgcaggacctgatgcagtgcaacagcatcaacgtgatggaggagcccgtgatcatcaccagaaacagccaccccgccgagctggacctgcccagagccccccagccccccaacgccctgggctacaccgtgagcagcttcagcaacggctgccccggcgagggccccagattcagcgcccccagaagactgagcaccagcagcctgagacaccccagcctgggcgaggagagcacccacgccctgatcgcccccgacgagcagagccacacctacgtgaacacccccgccagcgaggacgaccacagaagaggcagacactgcctgcagcccctgcccgagggccaggcccccttcctgccccaggccagaggccccgaccagagagacccccaggtgttcctgcagcccggccaggtgaagttcgtgctgggccccacccccgccagaagacacatggtgaagtgccagggcctgtgccccagcctgcacgaccccccccaccacaacaacaacaacgaggcccccagcgagtgccccgcccagcccaagtgcacctacgagaacgtgaccggcggcctgtggagaggcgccggctggagactgagccccgaggagcccggctggaacggcctggcccacagaagagccgccctgctgcactacgagaacctgccccccctgccccccgtgtgggagagccaggcccagcagctgggcggcgaggccggcgacgacggcgacagcagagacggcctgacccccagcagcaacggcttccccgacggcgaggaggacgagacccccctgcagaagcccaccagcaccagagccgccatcagaagccacggcagcttccccgtgcccctgaccagaagaagaggcagccccagagtgttcaacttcgacttcagaagacccggccccgagccccccagacagctgaactacatccaggtggagctgaagggctggggcggcgacagacccaagggcccccagaaccccagcagcccccaggcccccatgcccaccacccaccccgccagaagcagcgacagctacgccgtgatcgacctgaagaagaccgtggccatgagcaacctgcagagagccctgcccagagacgacggcaccgccagaaagaccagacacaacagcaccgacctgcccctgtag

SEQ ID NO: 303433 - DNA, 111 bp, Artificial Sequence
  derived and/or modified sequence
atgggcagctgctgcagctgcctgaacagagacagcgtgcccgacaaccaccccaccaagttcaaggtgaccaacgtggacgacgagggcgtggagctgggcagcggctag

SEQ ID NO: 303434 - DNA, 444 bp, Artificial Sequence
  derived and/or modified sequence
atggagacccccagaagagccagaagccccgtgagcccccagttccccggccaggccggctgcagcgacaccatgggcagctgctgcagctgcctgaacagagacagcgtgcccgacaaccaccccaccaagttcaaggtgaccaacgtggacgacgagggcgtggagctgggcagcggcgtgatggagctgacccagagcgagctggtgctgcacctgcacagaagagaggccgtgagatggccctacctgtgcctgagaagatacggctacgacagcaacctgttcagcttcgagagcggcagaagatgccagaccggccagggcatcttcgccttcaagtgcagcagagccgaggagatcttcaacctgctgcaggacctgatgcagtgcaacagcatcaacgtgatggaggagcccgtgatcatcaccagaaacagctag

SEQ ID NO: 303435 - DNA, 2094 bp, Artificial Sequence
  derived and/or modified sequence
gctaggtgagccccaggtgtatcccagagggatccgggtgacttctctgcagactgtttgccatgacagcccaccaaggacggggggaataaagtgggaacccttccccatgcccctcccacggtcagctccccgatggcctgggtgagggcaggctggctgctctgacaccatggggagctgctgcagctgcctgaacagagacagcgttccagacaaccaccccaccaagttcaaggtgacaaatgtggatgatgagggggtggagctgggctctggggtgatggagctgacgcagagtgagctggtgctgcacctgcatcggcgtgaggccgtccgctggccttatctctgcttgcggcgctatggctacgactccaacctcttctcctttgagagtggccgccgatgtcagacaggccagggaatatttgcatttaagtgttcccgggctgaggaaatcttcaacctccttcaggatctgatgcagtgcaacagcatcaatgtgatggaagagcctgtcatcatcacccgcaatagccaccccgctgagcttgacctccctcgagccccccagccacccaatgctctaggctacactgtctccagcttttccaatggctgccctggagagggcccacgattctcagctccccggcggctctcgacaagcagcctgcggcacccctcgcttggggaagagtccacccatgccctcattgctcctgatgagcagtcccacacctatgtcaacacaccggccagtgaagatgaccaccgcaggggccgccactgcctgcagcccctgcctgagggtcaggcacccttcctcccgcaggcccggggacctgaccaacgggacccacaggtgttcttgcagccaggccaggtgaagtttgtgttgggcccgacccctgctcggcggcacatggtgaagtgccagggcctctgtcccagcctgcatgaccccccacaccacaataataacaatgaggccccttctgagtgtccagcccagcccaagtgcacctacgagaacgtcaccggggggctgtggcgaggggctggctggagactgagcccagaggagccgggctggaatggccttgcccaccgccgggccgccctgctgcactatgagaacctgcccccactgccccctgtgtgggaaagccaagcccagcagctgggaggggaggctggggatgatggggactcgagggatgggctcacaccctcttccaatggcttccctgatggtgaggaggacgagaccccactgcagaagcccaccagcacccgggccgccatccgcagccacggcagctttcctgtgccactgacccgccgccgcggctccccaagggtcttcaactttgatttccgccggccggggcccgagcccccaaggcagcttaactacatccaggtggagctaaagggctggggtggagaccgccctaaggggccccagaacccctcgagcccccaagcccccatgcccaccacccaccctgcccgaagctcagactcctacgccgtgattgacctcaaaaagaccgtggccatgtccaacctgcagagagctctgccccgagacgatggcaccgccaggaaaacccggcacaacagcaccgacctgcctctgtagggacttcccggtcctcaccaccctctgccccaccatgatccagcctctgcctcacactcctgtcctctgaacccaccctccccagggttcagggttgctttgcagaaggcatggaggtgggaccagatgcttccctgtgctggctggagtccccagagatatcagccaccgagtctcctggtctgtctccaggctggggagagaagggtgaccaggcgaggagggagccgagacgtcaactgtgaagggttcctgtgattgcgtttagcgccctcccgttctgtccatttgtcttgtctgccgactgtccgtgtgtgttttttttggttggaattttgaaacattttgtacctgttgattttatttatcagtttatttttctatttattgttttaaatgtaatttaacatatttattattaatataattatttttaaattctg

SEQ ID NO: 303436 - DNA, 2174 bp, Artificial Sequence
  derived and/or modified sequence
ggggaggccttagctccgggcgggcggcggctgctgcagcgggacccgggagcggggcccggcgccgcccgggccgcggggcgatgtgagccccaggtgtatcccagagggatccgggtgacttctctgcagactgtttgccatgacagcccaccaaggacggggggaataaagtgggaacccttccccatgcccctcccacggtcagctccccgatggcctgggtgagggcaggctggctgctctgacaccatggggagctgctgcagctgcctgaacagagacagcgttccagacaaccaccccaccaagttcaaggtgacaaatgtggatgatgagggggtggagctgggctctggggtgatggagctgacgcagagtgagctggtgctgcacctgcatcggcgtgaggccgtccgctggccttatctctgcttgcggcgctatggctacgactccaacctcttctcctttgagagtggccgccgatgtcagacaggccagggaatatttgcatttaagtgttcccgggctgaggaaatcttcaacctccttcaggatctgatgcagtgcaacagcatcaatgtgatggaagagcctgtcatcatcacccgcaatagccaccccgctgagcttgacctccctcgagccccccagccacccaatgctctaggctacactgtctccagcttttccaatggctgccctggagagggcccacgattctcagctccccggcggctctcgacaagcagcctgcggcacccctcgcttggggaagagtccacccatgccctcattgctcctgatgagcagtcccacacctatgtcaacacaccggccagtgaagatgaccaccgcaggggccgccactgcctgcagcccctgcctgagggtcaggcacccttcctcccgcaggcccggggacctgaccaacgggacccacaggtgttcttgcagccaggccaggtgaagtttgtgttgggcccgacccctgctcggcggcacatggtgaagtgccagggcctctgtcccagcctgcatgaccccccacaccacaataataacaatgaggccccttctgagtgtccagcccagcccaagtgcacctacgagaacgtcaccggggggctgtggcgaggggctggctggagactgagcccagaggagccgggctggaatggccttgcccaccgccgggccgccctgctgcactatgagaacctgcccccactgccccctgtgtgggaaagccaagcccagcagctgggaggggaggctggggatgatggggactcgagggatgggctcacaccctcttccaatggcttccctgatggtgaggaggacgagaccccactgcagaagcccaccagcacccgggccgccatccgcagccacggcagctttcctgtgccactgacccgccgccgcggctccccaagggtcttcaactttgatttccgccggccggggcccgagcccccaaggcagcttaactacatccaggtggagctaaagggctggggtggagaccgccctaaggggccccagaacccctcgagcccccaagcccccatgcccaccacccaccctgcccgaagctcagactcctacgccgtgattgacctcaaaaagaccgtggccatgtccaacctgcagagagctctgccccgagacgatggcaccgccaggaaaacccggcacaacagcaccgacctgcctctgtagggacttcccggtcctcaccaccctctgccccaccatgatccagcctctgcctcacactcctgtcctctgaacccaccctccccagggttcagggttgctttgcagaaggcatggaggtgggaccagatgcttccctgtgctggctggagtccccagagatatcagccaccgagtctcctggtctgtctccaggctggggagagaagggtgaccaggcgaggagggagccgagacgtcaactgtgaagggttcctgtgattgcgtttagcgccctcccgttctgtccatttgtcttgtctgccgactgtccgtgtgtgttttttttggttggaattttgaaacattttgtacctgttgattttatttatcagtttatttttctatttattgttttaaatgtaatttaacatatttattattaatataattatttttaaattctg

SEQ ID NO: 303437 - DNA, 326 bp, Artificial Sequence
  derived and/or modified sequence
cgcggggtgggttcgggcggcccttggaacgctccggccagggatgcgcggtgagccccaggtgtatcccagagggatccgggtgacttctctgcagactgtttgccatgacagcccaccaaggacggggggaataaagtgggaacccttccccatgcccctcccacggtcagctccccgatggcctgggtgagggcaggctggctgctctgacaccatggggagctgctgcagctgcctgaacagagacagcgttccagacaaccaccccaccaagttcaaggtgacaaatgtggatgatgagggggtggagctgggctctgggg

SEQ ID NO: 303438 - DNA, 474 bp, Artificial Sequence
  derived and/or modified sequence
cgcgtttacgctgggttttcaaccattcgctgaatggaaacgcctcgccgggcccgcagccctgtctctccgcagttcccagggcaggctggctgctctgacaccatggggagctgctgcagctgcctgaacagagacagcgttccagacaaccaccccaccaagttcaaggtgacaaatgtggatgatgagggggtggagctgggctctggggtgatggagctgacgcagagtgagctggtgctgcacctgcatcggcgtgaggccgtccgctggccttatctctgcttgcggcgctatggctacgactccaacctcttctcctttgagagtggccgccgatgtcagacaggccagggaatatttgcatttaagtgttcccgggctgaggaaatcttcaacctccttcaggatctgatgcagtgcaacagcatcaatgtgatggaagagcctgtcatcatcacccgcaatagc

SEQ ID NO: 303439 - DNA, 1479 bp, Artificial Sequence
  derived and/or modified sequence
atgggttcctgttgctcttgtctgaaccgcgatagtgtgcctgacaaccaccccacaaagtttaaggttacgaacgtggacgacgagggagtagagctgggcagtggagtcatggagcttactcagagtgagctggtgcttcatctgcatagacgggaggcagtccgatggccttacctgtgtctgcggaggtatggctacgactctaacttatttagcttcgagagtggcagaaggtgccaaactggccaagggatctttgctttcaagtgtagcagggccgaagaaatttttaacctgctccaagatctcatgcagtgcaattctataaatgtgatggaagaacctgtcataatcactcgtaactcccacccagccgaattggacttaccccgcgcgcctcaaccccctaacgcgcttggatatacagtttctagcttctctaacgggtgccctggagagggacccagattcagtgctccaaggagactgtccacatcatcactgaggcatcccagcttaggcgaggagtccactcacgctctgatcgcacctgatgaacagtcgcatacttacgttaacacccccgcttctgaggacgatcacaggagaggtcggcactgcttacagccactccctgaagggcaagctcctttcctgccccaggctagagggcctgatcagagagatccacaagtcttcctgcagcctggtcaggtcaagttcgtgctcgggccgacaccggcgcggcgacatatggtaaaatgccaaggcctttgcccatcactgcacgatcccccccatcataataacaacaacgaagccccaagcgagtgtccagcacagcccaaatgcacctacgagaacgtgaccggcgggttatggaggggcgctggttggcggctcagccccgaggaacctggctggaatggcctggcgcaccggagggcagcgctcctgcactacgagaatctcccacccttaccacctgtgtgggagtcccaggcacagcagctgggcggcgaggcaggggacgatggggactcccgagacgggttaaccccttctagcaacgggttcccagacggtgaggaagatgaaactccactgcagaagccaacctctacccgggccgccattcgctcccacggcagtttccccgtcccactgacaaggcgacggggcagcccgcgggtgttcaacttcgactttcggaggcctggcccagagccgcccagacagttgaactatatccaagtggagttaaagggatggggcggcgaccggcccaaggggccccagaacccttcgagtccccaagcacctatgcccaccacacaccccgcccggagtagcgatagctacgcagtgatcgacctcaaaaaaacagtggccatgtcaaatttgcagcgggcactgcctagagatgatgggactgctagaaagactcgtcataattctacagatctgcctctctag

SEQ ID NO: 303440 - DNA, 1479 bp, Artificial Sequence
  derived and/or modified sequence
atggggagttgctgctcttgcttgaaccgcgattccgttccggataaccacccaactaaatttaaagtaaccaatgtggatgacgaaggagtcgaattgggatccggtgttatggaactgactcagtctgaactagtacttcacctccaccggagagaggctgtccgatggccctacttgtgcctccgtcggtatggctatgacagtaatctcttttctttcgaaagcggccggaggtgtcagaccgggcagggcatcttcgccttcaagtgttctagggccgaagaaattttcaacttactccaggatctgatgcagtgtaatagcatcaacgttatggaggagcctgtcatcataactaggaactctcaccccgcagaactggatctgccacgggctcctcagccgccaaatgcccttgggtacacagtttcttctttcagtaatgggtgtcccggtgagggacctcggttttcagccccgcggagactcagcacgtcaagtctgagacatccttccctcggggaggaaagcacccacgctctgatcgcgccagacgaacagagtcacacgtatgtcaacacccccgcctctgaggacgaccatagaagaggaagacattgccttcagcccctgccggagggacaggcaccctttctccctcaggcccgcggccccgatcaaagagacccccaggtgtttctgcagcctggacaggtgaagtttgtcctgggccccacccctgccaggaggcacatggtcaaatgtcaaggcttatgcccctcgctgcacgaccccccacatcacaataataataatgaggccccctcggaatgccccgcccagccgaaatgtacttacgaaaatgttaccgggggcctgtggcggggagctggctggcggctgagccccgaggaacccggctggaatggtctcgcacacaggagagctgctctcctacactacgaaaacctgcctccgctcccacctgtctgggagagccaggcccagcaattaggaggcgaggctggagatgacggtgacagcagagatggcttaacccccagcagtaacggtttccccgatggcgaagaggacgagaccccactgcagaaacctacctcaacgcgtgccgccatcagaagtcacgggagttttccggtaccccttaccaggcgtagaggtagccccagagtattcaatttcgatttcaggcgaccaggtcccgaaccgcccagacaacttaattacattcaggtggagctaaagggttggggtggagaccgacccaagggcccccaaaatccctcaagcccgcaagccccaatgccgacgacccatccagccagaagtagtgattcttatgctgtaattgatttaaagaaaactgttgccatgtctaatctacaacgtgcactgcctcgtgacgacggcaccgcaaggaagacaagacataactccaccgatcttccattatag

SEQ ID NO: 303441 - DNA, 111 bp, Artificial Sequence
  derived and/or modified sequence
atgggctcatgttgctcttgcttgaaccgagatagcgtgccagacaaccacccgactaagttcaaggtgaccaacgtggacgacgaaggagtggaactgggcagtggctag

SEQ ID NO: 303442 - DNA, 444 bp, Artificial Sequence
  derived and/or modified sequence
atggagacaccccgacgggcccgaagccccgtttctccacaatttccggggcaagctggttgcagtgacaccatgggctcttgctgtagctgtctgaacagggactctgtgcctgacaaccatcctaccaagttcaaggtgaccaatgtggatgatgagggagtcgagcttggatctggtgtcatggagctgacacagtccgagttagtactgcacctccacagacgggaagcagtgcgatggccctatctctgtctgagaagatatggttatgatagcaaccttttttcattcgagagcggtagacggtgccagactggacagggtatttttgcattcaaatgtagccgcgccgaggagatttttaatttgttgcaagaccttatgcagtgtaattctataaacgtcatggaagagcctgtaattatcacccgcaactcctag

SEQ ID NO: 303443 - DNA, 1479 bp, Artificial Sequence
  derived and/or modified sequence
atgggcagctgctgcagctgcctgaacagagacagcgtgcctgacaaccaccccaccaagttcaaggtgaccaacgtggatgatgagggcgtggagctgggcagcggcgtgatggagctgacccagagcgagctggtgctgcacctgcacagaagagaggccgtgcgctggccctacctgtgcctgcggcgctatggctatgacagcaacctcttctcctttgagagcggccgccgctgccagacaggccagggcatctttgccttcaagtgcagcagagctgaggagatcttcaacctgctgcaggacctgatgcagtgcaacagcatcaacgtgatggaggagcccgtcatcatcaccaggaacagccaccctgctgagctggacctgccccgggccccccagcccccaaatgccctgggctacacagtgagcagcttcagcaatggctgccctggagagggcccccgcttcagcgccccccggcggctgagcaccagcagcctgcggcaccccagcctgggggaggagagcacccacgccctgattgccccagatgagcagagccacacctacgtgaacaccccagcctctgaagatgaccacagaagaggccgccactgcctgcagcccctgcctgagggccaggcccccttcctgccccaggcccggggccctgaccagagggacccccaggtgttcctgcagcccggccaggtgaagtttgtgctgggccccaccccagcccggcggcacatggtgaagtgccagggcctgtgccccagcctgcatgaccccccccaccacaacaacaacaatgaggcccccagcgagtgcccagcccagcccaagtgcacctatgaaaatgtgactggaggcctgtggaggggggccggctggaggctgagccctgaggagcccggctggaatggcctggcccacagaagagctgccctgctgcactatgagaacctgccccccctgccccctgtgtgggagagccaggcccagcagctgggcggggaggccggagatgatggagacagcagagatggcctgacccccagcagcaatggcttcccagatggagaagaagatgagacccccctgcagaagcccaccagcacccgggccgccatccgcagccacggcagcttccctgtgcccctgaccaggagaagaggcagccccagggtcttcaactttgacttcagaagacctggccctgagcccccccggcagctgaactacatccaggtggagctgaagggctggggcggggaccggcccaagggcccccagaaccccagcagcccccaggcccccatgcccaccacccacccagcccggagcagtgacagctatgctgtgattgacctgaagaagacagtggccatgagcaacctgcagagggccctgcccagagatgatggaacagccaggaagaccaggcacaacagcacagacctgcccctgtag

SEQ ID NO: 303444 - DNA, 111 bp, Artificial Sequence
  derived and/or modified sequence
atgggcagctgctgcagctgcctgaacagagacagcgtgcctgacaaccaccccaccaagttcaaggtgaccaacgtggatgatgagggcgtggagctgggcagcggctag

SEQ ID NO: 303445 - DNA, 444 bp, Artificial Sequence
  derived and/or modified sequence
atggagaccccaagaagagcccggagccctgtgagcccccagtttcctggccaggccggctgcagcgacaccatgggcagctgctgcagctgcctgaacagagacagcgtgcctgacaaccaccccaccaagttcaaggtgaccaacgtggatgatgagggcgtggagctgggcagcggcgtgatggagctgacccagagcgagctggtgctgcacctgcacagaagagaggccgtgcgctggccctacctgtgcctgcggcgctatggctatgacagcaacctcttctcctttgagagcggccgccgctgccagacaggccagggcatctttgccttcaagtgcagcagagctgaggagatcttcaacctgctgcaggacctgatgcagtgcaacagcatcaacgtgatggaggagcccgtcatcatcaccaggaacagctag

SEQ ID NO: 303446 - DNA, 1479 bp, Artificial Sequence
  derived and/or modified sequence
atgggcagctgctgcagctgcctgaaccgggacagcgtgcccgacaatcacccaaccaagttcaaagtcacaaacgtggatgacgaaggcgtggaactgggcagcggagtgatggagcttacccagtccgaactcgtgctccacctgcatcggagagaggctgtgaggtggccgtatctatgtctgcgcaggtatggctacgacagtaacttattttctttcgagagtggcaggcggtgccagacagggcagggaatctttgcgtttaaatgcagcagggcagaagagatcttcaaccttctccaagaccttatgcagtgtaatagcattaatgtgatggaagaaccagtcatcattacccgcaactcacatccagccgagctggacttaccccgagctcctcagccccctaacgccttaggatatacagtctcgagcttcagtaatggctgtcctggtgagggacccagattttcggcccccagaagactcagcacatcaagtttacgacacccttctctgggagaggagtcaacccacgcgctgatcgcccccgacgaacagtcacatacttatgtaaatacccccgcctctgaggatgaccatcgtcgaggacgccattgcctccagcctttacccgaaggccaggcacctttcctgccgcaggcgcgcggccccgaccagagagacccgcaggtgttccttcagcctggccaggtcaagtttgtcttgggcccgacacctgctcggagacacatggtgaagtgccaaggcctttgtccgagcctgcatgatccgccacatcacaacaataacaatgaggcaccctctgaatgtcccgcccagcctaagtgcacctacgagaatgttactgggggtctttggcgcggtgcgggttggcgtctcagtccagaggaacccggttggaatggactggctcatcgtagggcggcgctccttcattatgaaaatctcccacctctcccaccagtttgggaatcacaggcacagcagctcggaggcgaggcgggcgatgatggcgattcccgcgacggattgacgccaagttcaaatggtttccccgatggagaagaggacgaaaccccacttcagaagcccacctcgacacgcgcagcgatcagatcccatgggtctttcccggttcctctcacgcgccggcgggggagcccccgcgtcttcaatttcgattttagacgccctggtcctgaacccccaaggcagttaaactatattcaggtcgagctcaaagggtggggaggtgacagacccaagggaccccaaaatcctagctccccacaagctcctatgcccacaacacatcccgccaggtcctcggattcatacgccgtaatcgatctgaaaaaaacagtcgcaatgtcaaatctgcaaagagctctgccccgggacgatggcacggctaggaaaacaagacataactcaaccgatctccctttatag

SEQ ID NO: 303447 - DNA, 1479 bp, Artificial Sequence
  derived and/or modified sequence
atgggcagctgctgcagctgcctgaaccgggacagcgtgcccgacaatcaccctaccaagttcaaggtgactaatgtcgacgatgaaggtgtagaactgggttcaggcgttatggagctcacccagagcgagttggtactgcacctccataggcgagaagccgtaaggtggccctacttgtgcctccgtcggtatggctacgactcaaatctattttctttcgagtcaggcaggagatgtcagaccggccagggtatattcgcattcaaatgctcacgggcagaagagatcttcaacctcctccaagacttgatgcagtgcaactcaatcaatgtgatggaggaacccgtgatcattactcgcaatagccaccccgccgagcttgaccttccacgggcaccccagcctcctaacgccctcggatatacggtgagcagcttctccaatggctgtcccggcgagggccctcggtttagtgcacctaggcgcctgtctaccagttccttgagacacccctcccttggggaggagtccactcacgccctcattgcgccggacgaacagagccacacatatgtgaatacacctgctagtgaggatgaccatcgaagaggccgacactgtctccaaccgctgccagagggtcaggcccctttcctgcctcaggcgcggggacccgaccagagggatccccaggtctttctccaacctggccaggtgaagtttgtgctgggtccgacaccggcgagaagacatatggtgaaatgccaaggcctttgcccttccttacacgacccaccacaccacaataacaataacgaagcacccagcgaatgccctgctcaacccaaatgcacctacgagaacgtgactggtggactgtggcgcggcgccggatggaggctgtcccccgaggaacccggttggaacggtctcgcccatcgtagggcagccctcctccactatgagaacctaccacccctacctcccgtctgggaatcacaggcccagcagttgggcggagaagccggtgatgacggtgacagccgggatggcttaacaccctctagcaatggctttccagatggagaggaggacgagactcctctgcagaagcccacgtctacacgcgctgccattagatcacatgggtcttttccagtcccccttacccgacgcagggggtcacctcgggtgtttaactttgatttccggagacccggaccagagccccctcgccagctgaattacattcaggtggagctcaagggctggggaggagaccggcctaaaggcccacagaacccatctagtccacaggccccaatgcctacaacgcatccagcaaggagtagcgattcctacgcggtgatcgacttgaagaaaacggtggccatgagcaacttgcaaagggccctgccacgggacgatgggactgccagaaagaccagacacaactcaactgaccttccactctag

SEQ ID NO: 303448 - DNA, 111 bp, Artificial Sequence
  derived and/or modified sequence
atgggcagctgctgcagctgcctgaaccgggacagcgtgcccgacaatcaccccacaaagttcaaggtgactaatgtggacgacgagggcgtcgaactggggagtggttag

SEQ ID NO: 303449 - DNA, 444 bp, Artificial Sequence
  derived and/or modified sequence
atggagaccccccggcgggcccggagccccgtgagcccccagttccccggacaagccggctgcagtgatactatgggatcctgctgttcatgcctgaatcgggactccgttcccgacaatcatccaaccaagttcaaggtcacaaatgttgatgatgagggagttgaattggggtctggggttatggagttaactcagagcgaactggtactccatcttcataggagggaagccgtccgctggccttatttgtgtctccgcaggtacgggtacgattcaaacctattttcctttgaatccggcagaaggtgccagacaggccaggggatctttgcctttaaatgctcacgcgcagaagaaatcttcaacctattacaggacctcatgcaatgtaatagtatcaatgtgatggaggaacctgtcatcatcacacgtaactcatag

SEQ ID NO: 303450 - DNA, 1479 bp, Artificial Sequence
  derived and/or modified sequence
atgggaagttgttgttcgtgtctgaaccgggatagtgtgcccgacaatcacccaaccaaatttaaggtcaccaacgtcgatgacgagggagtggagctgggttcaggggtgatggagctgactcagagtgagctggtgctccatttgcacaggagggaagcggtgcgctggccttatctttgccttagaaggtatgggtatgattctaacctgttttcattcgagagtggtcgcaggtgtcagacagggcagggaatctttgcgtttaagtgctctcgggctgaggagatcttcaacttactgcaggatctgatgcagtgcaatagtatcaacgtcatggaggaacccgtaattattacacgtaactctcacccggcagagttagatctgccacgggctccccagcctcctaatgcattgggctacaccgtatccagctttagtaatgggtgccccggtgaaggacctcggttcagtgccccacggcgactaagtaccagtagcctgagacacccaagcttgggggaggaatcgactcacgcactgatcgctcccgatgagcagagccatacctatgttaacaccccggcttcggaggatgatcatcgaagaggcagacattgcttacagcccctgcccgaggggcaagccccattcctcccccaagccagaggaccagatcaaagggatcctcaggtatttctgcagccgggtcaggtcaaatttgtgctgggtcctactccggcaaggaggcacatggttaagtgtcagggcctctgtccatcactgcacgatcctccacatcacaataacaataatgaggctcctagcgagtgccccgcacaacccaagtgcacctatgagaacgttaccggcggactgtggaggggggctgggtggaggctgagtccagaagagcctggctggaacggtttggcccacagaagggccgctctcttgcactatgagaacttgcctccccttccacccgtatgggaatcccaagctcaacagttgggcggagaagccggtgacgacggcgactctcgtgacggccttacaccgagctctaacgggtttcccgatggagaagaagacgaaaccccgctccaaaagccaactagcactagggccgcaatccgctcccatggctccttccccgtaccgctcacccggagacgtggcagtcctagggtatttaacttcgattttcggaggcctgggccagaacctcccagacagctgaattacattcaagtggaactgaaaggctggggcggagacaggccaaagggaccccagaatcccagcagcccccaggccccaatgccgaccacccatcccgcaaggtcctcagattcgtacgccgtgatagacctcaagaagacagttgctatgagcaatcttcagcgagccctccccagggacgacggaaccgcgagaaaaacccgccataacagtaccgaccttcctctgtag

SEQ ID NO: 303451 - DNA, 1479 bp, Artificial Sequence
  derived and/or modified sequence
atgggtagttgttgcagctgcctgaatagagacagtgttcccgataatcacccaactaagtttaaagtgaccaacgtcgatgatgagggagttgaactcggctccggcgtcatggagttgacccagagcgaattagttctacatctgcatcgcagggaggccgtgcggtggccctatctgtgcctcaggaggtatggctacgactctaacttattctcattcgagtcaggccgtcgatgccaaactggacaaggtatttttgccttcaagtgctccagagctgaggagattttcaacctcctgcaggacctgatgcaatgcaattctatcaacgttatggaggaacccgtaattatcactcgcaactctcacccagccgaattagatttacccagggcccctcagccacctaacgccctaggatacacggtgtcctccttttcaaatggatgtccaggggagggaccccgttttagcgccccaagacggctgtctacgtcctccctccgtcacccatcactaggagaagaatctacccacgccctgattgcaccggacgagcagtcccatacctatgtgaacacccctgccagtgaagatgatcatcgtcggggtcgccattgcttgcagcctctacccgaagggcaggcccctttcctcccccaggccagaggtccagaccagcgggacccgcaggtgttcttgcagcctgggcaggtaaaatttgtactgggacctacgcctgcaaggcgccatatggtgaaatgtcagggcctctgtccaagcctgcacgatcccccacatcacaacaataataacgaggccccttccgagtgtccagcccagccaaaatgcacctacgagaatgtgactgggggtctctggcggggtgcaggctggagactctctcccgaagagcctgggtggaatggacttgcacatcggcgagccgctctgctgcactacgagaacctcccgcctctgcccccagtctgggaaagccaggcccagcagctcgggggagaggctggtgatgacggagattcccgggacggactgactccaagctcaaacgggtttccagatggcgaggaggatgagacaccactgcagaaacctacatcaactagagccgctatcaggagtcacggcagttttcctgttccgctgactagaagacgaggtagtccaagagtgttcaatttcgatttccgcagaccagggccagagccccctagacagctcaattacatccaggttgaactaaagggatggggcggagaccgcccaaaaggtccgcagaatcctagctcaccccaggcacccatgccaaccacacatcccgcaaggtcaagcgactcttacgctgtgatagacctgaagaagaccgtggccatgtctaaccttcagcgggcactgcccagggacgatggaacagcccgtaagacgaggcacaacagtaccgacctgcccctgtag

SEQ ID NO: 303452 - DNA, 111 bp, Artificial Sequence
  derived and/or modified sequence
atgggctcatgctgcagttgcctgaatcgtgattccgtgccagataaccatcccacaaagttcaaggtcacaaatgtcgatgacgaaggagtggaactgggatctggatag

SEQ ID NO: 303453 - DNA, 444 bp, Artificial Sequence
  derived and/or modified sequence
atggagaccccacgtcgagccagaagtccagtaagtccccagttcccaggccaggctgggtgctcagatacaatggggtcttgttgttcatgcttgaaccgcgactccgttccagataaccacccaacaaagttcaaggtcaccaacgtggacgatgaaggtgtcgaactcgggagtggggtgatggagctgacccagtcagagctggtgcttcacctccatcgcagggaggccgtgaggtggccctacctttgtctgagacgctatggatatgactccaacctgtttagtttcgaatcagggaggcgatgccagaccggccagggaatcttcgcattcaaatgttccagagccgaggagatctttaacctcctccaggacctgatgcagtgtaacagcattaacgtcatggaagaacccgtcatcataacccgaaactcatag

SEQ ID NO: 303454 - protein, 278 aa, Artificial Sequence
  derived and/or modified sequence
MGFEELLEQVGGFGPFQLRNVALLALPRVLLPLHFLLPIFLAAVPAHRCALPGAPANFSHQDVWLEAHLPREPDGTLSSCLRFAYPQALPNTTLGEERQSRGELEDEPATVPCSQGWEYDHSEFSSTIATESQVGIYIIHLEVECRWRQSPWEAAGRGLPWEEAEAAGLGRDKVSYSPSWRESLGGLLSGMEWDLVCEQKGLNRAASTFFFAGVLVGAVAFGYLSDRFGRRRLLLVAYVSTLVLGLASAASVSYVMFAITRTLTGSALAGFTIIVMPL

SEQ ID NO: 303455 - protein, 211 aa, Artificial Sequence
  derived and/or modified sequence
MLQPHLLPYQAVSKVAAGERVVRRPSYLDLFRTPRLRHISLCCVVVWFGVNFSYYGLSLDVSGLGLNVYQTQLLFGAVELPSKLLVYLSVRYAGRRLTQAGTLLGTALAFGTRLLVSSDMKSWSTVLAVMGKAFSEAAFTTAYLFTSELYPTVLRQTGMGLTALVGRLGGSLAPLAALLDGVWLSLPKLTYGGIALLAAGTALLLPETRQA

SEQ ID NO: 303456 - protein, 147 aa, Artificial Sequence
  derived and/or modified sequence
MEWDLVCEQKGLNRAASTFFFAGVLVGAVAFGYLSDRFGRRRLLLVAYVSTLVLGLASAASVSYVMFAITRTLTGSALAGFTIIVMPLGEAELEWLDVEHRTVAGVLSSTFWTGGVMLLALVGYLIRDWRWLLLAVTLPCAPGILSL

SEQ ID NO: 303457 - DNA, 837 bp, Artificial Sequence
  derived and/or modified sequence
atgggctttgaggaattattagagcaggtggggggcttcggaccattccagctgcggaacgtcgccctgttggccttgccaagagtgctgctccctctccacttcttgttgcccatcttcctggccgcagttcccgcccatagatgcgccttacccggcgcacctgccaatttctcccatcaggatgtgtggctggaagcacatctgccccgggagcccgacggaaccctgtctagttgtcttaggttcgcatacccccaggctctgcctaacaccaccctgggagaggagaggcagtcacgaggcgaattagaggatgagcccgccacggtcccgtgttctcagggatgggagtacgatcatagcgaatttagcagtacaatcgccacagagtctcaggtcggcatctacataatccacttggaggtggaatgtcgatggagacagtctccctgggaagcggccggtaggggcctgccctgggaagaagcggaggccgccggactggggcgggacaaggtctcctatagcccaagctggagagaatctctagggggtctgctgagcggtatggaatgggacctggtgtgcgagcagaagggactcaatagagccgctagtacattcttcttcgcaggtgtcctcgttggggccgtcgctttcggttatctatcagatcgatttggacggcggcggctccttttagtcgcctatgtctcgactctggtcttggggctagcatcagctgcaagcgtgagctacgtgatgtttgctatcaccaggacgcttaccggctccgccctcgcgggcttcacaattatcgtcatgccactctag

SEQ ID NO: 303458 - DNA, 444 bp, Artificial Sequence
  derived and/or modified sequence
atggaatgggacctagtctgcgaacaaaaaggattgaatcgtgccgcaagcacgttcttttttgcaggtgtgctcgtaggagcagttgcctttggctacctgtcagaccgctttggccggcgaaggctcctgctcgtcgcctacgtctccacacttgtgttgggcctggcttctgctgccagcgtcagctacgttatgttcgccatcacaaggactctcactggatctgccctcgctggcttcactatcattgtgatgcctctgggcgaggcggagctggaatggctggacgtcgagcaccgtaccgttgctggcgtactgagtagcaccttttggactggaggcgtcatgttgctggccctcgtcggatacctgattagggattggcgctggttactacttgcggtgacactgccatgtgcccccggtatcctcagtctgtag

SEQ ID NO: 303459 - DNA, 837 bp, Artificial Sequence
  derived and/or modified sequence
atgggctttgaggagctgctggagcaggtgggcggcttcggccccttccagctgagaaatgtggccctgctggccctgccccgggtgctgctgcccctgcacttcctgctgcccatcttcctggccgctgtgcctgcccaccgctgtgccctgcccggggccccagccaacttcagccaccaggatgtgtggctggaggcccacctgccccgggagccagatggcaccctgagcagctgcctgcgctttgcctacccccaggccctgcccaacaccaccctgggggaggagcggcagagcagaggagagctggaggatgagcccgccaccgtgccctgcagccagggctgggagtatgaccacagcgagttcagcagcaccatcgccacagagagccaggtgggcatctacatcatccacctggaggtggagtgccgctggaggcagagcccctgggaggccgccggccggggcctgccctgggaggaggccgaggccgccggcctgggccgggacaaggtgtcctacagccccagctggagggagagcctgggcggcctgctgagcggcatggagtgggacctggtgtgtgagcagaagggcctgaacagagctgccagcaccttcttctttgctggggtgctggtgggcgctgtggccttcggctacctgagtgaccgcttcggcagaagaaggctgctgctggtggcctacgtgtccaccctggtgctgggcctggccagcgctgcctctgtgtcctatgtgatgtttgccatcaccaggaccctgaccggcagcgccctggccggcttcaccatcatcgtgatgcccctgtag

SEQ ID NO: 303460 - DNA, 444 bp, Artificial Sequence
  derived and/or modified sequence
atggagtgggacctggtgtgtgagcagaagggcctgaacagagctgccagcaccttcttctttgctggggtgctggtgggcgctgtggccttcggctacctgagtgaccgcttcggcagaagaaggctgctgctggtggcctacgtgtccaccctggtgctgggcctggccagcgctgcctctgtgtcctatgtgatgtttgccatcaccaggaccctgaccggcagcgccctggccggcttcaccatcatcgtgatgcccctgggggaggccgagctggagtggctggatgtggagcacaggacagtggccggcgtgctgagcagcaccttctggacaggaggagtgatgctgctggccctggtgggctacctgatccgggactggcgctggctgctgctggccgtgaccctgccctgtgcccctggcatcctgagcctgtag

SEQ ID NO: 303461 - DNA, 837 bp, Artificial Sequence
  derived and/or modified sequence
atgggcttcgaggagctgctggagcaggtgggcggcttcggccccttccaattacgcaacgtggccctgctcgcgctaccgagggttcttcttcccctccactttctgcttcccattttcctcgcggctgtcccggcacacagatgcgctctccctggggcgcctgcaaacttttcacatcaggacgtctggttagaggcacacctgcctagggaacccgacggcactctgagcagctgtctaaggttcgcctacccccaggctctccccaataccaccctgggagaggagcgccagtcccggggagagctggaggatgaacctgcaactgttccatgctcacaaggttgggaatatgaccatagcgagttcagctcaactatagcaacagaaagccaggtcgggatctatataatccacctggaggtagaatgtcgatggagacagagtccttgggaggctgccgggagaggcctgccttgggaagaggcagaggccgctggacttggtcgtgacaaagtctcctattctccttcatggagagaatcactgggcggtctgctgagcggaatggaatgggatctggtctgtgagcagaaaggactgaacagggccgccagcaccttcttttttgcaggagttctggtaggagcggtggcattcggctatcttagcgatcgatttggccgtcgccgcctacttctcgtggcctatgtgagcactctagtgctgggactcgcaagcgcagccagtgtgtcctacgtgatgttcgctattacccgcactcttacaggcagcgctctggccggattcaccatcatcgttatgcccctatag

SEQ ID NO: 303462 - DNA, 444 bp, Artificial Sequence
  derived and/or modified sequence
atggagtgggacctggtgtgcgagcagaagggcctgaaccgggccgctagtaccttcttttttgccggtgtcctggtcggcgctgtcgccttcggctacctgagtgatcggtttggaagaaggcgcctgctgctggtggcctacgtcagtactctggttttgggactagcatccgctgcctccgtgagctatgtgatgttcgccataactcgcaccctaaccggcagcgctttagcaggctttactatcatcgtaatgccgctaggggaggccgaacttgaatggctggatgtggagcatcggaccgtggccggcgtcctgtccagcacgttctggacagggggagtgatgctccttgccctggtgggatacttgatcagggattggaggtggcttctgctggctgtaaccctgccgtgcgcaccaggaattctttcactctag

SEQ ID NO: 303463 - DNA, 837 bp, Artificial Sequence
  derived and/or modified sequence
atgggcttcgaggagcttctcgagcaggtcggtggcttcggccctttccaattgagaaacgtagccctcttagcgctacctcgagtcctcctgccccttcactttctcctgccaatcttcctggccgctgtacccgctcacaggtgtgcgctgcccggtgcaccggctaatttctcacatcaggatgtgtggcttgaggctcacctgcctcgcgagcccgatggaacactgagttcatgccttaggtttgcataccctcaagctcttcctaataccacactgggagaggaaagacagagtaggggagagctggaagacgaacccgctacagttccttgttctcaggggtgggaatatgaccatagcgagttttcatctactatcgccactgaatcccaggtgggcatctacataatccatctggaggtggagtgtaggtggagacagagtccctgggaggccgctggacgaggtctcccctgggaggaggctgaggccgcaggactcggaagagataaagtaagctactcaccttcttggcgagagtcacttggcggtctgctgtccggaatggagtgggacctcgtatgcgagcagaagggtctaaaccgcgctgctagtaccttcttcttcgctggggtgcttgtgggcgctgtggccttcggctatttatctgatcggtttggcagaagacgcctactcctcgtggcttacgtgagtaccctcgtactgggcctcgccagcgccgcatcggtttcctatgtgatgttcgctattacccgaacacttactgggtctgctctggctgggttcaccattattgttatgccgctgtag

SEQ ID NO: 303464 - DNA, 444 bp, Artificial Sequence
  derived and/or modified sequence
atggaatgggaccttgtgtgtgagcagaaagggctcaaccgggctgctagtacttttttcttcgctggggttctggtcggggcagtcgcctttgggtacttgtcagatagattcgggcgaagacgcctcctgctggtggcgtatgtttccacattggttctgggcctggccagcgccgcaagtgtgagctacgtaatgtttgccataaccagaacattgaccggtagtgccttggcaggatttactatcattgtaatgcccctcggggaagctgaacttgaatggctggacgtggaacacagaactgttgcaggagttctctcgtctacgttttggactgggggtgtcatgctgctagctcttgtgggttatcttatacgggactggcgatggctgttgcttgccgtgacgttgccctgcgcaccgggaatcttgtcactgtag

SEQ ID NO: 303465 - DNA, 933 bp, Artificial Sequence
  derived and/or modified sequence
ctcccacctccagagtccaagggtctatgtggtgggcagtttgagctggctggatactagagggaggctgcacctgaagcatttggtgggtgagcagcatgggctttgaggagctgctggagcaggtgggcggctttgggcccttccaactgcggaatgtggcactgctggccctgccccgagtgctgctaccactgcacttcctcctgcccatcttcctggctgccgtgcctgcccaccgatgtgccctgccgggtgcccctgccaacttcagccatcaggatgtgtggctggaggcccatcttccccgggagcctgatggcacgctcagctcctgcctccgctttgcctatccccaggctctccccaacaccacgttgggggaagaaaggcagagccgtggggagctggaggatgaacctgccacagtgccctgctctcagggctgggagtacgaccactcagaattctcctctaccattgcaactgagtcccaggtcggtatttacataatccatctggaggtggaatgtcggtggaggcagtctccctgggaggcagcaggtcgaggccttccttgggaagaagctgaggctgcaggactggggagggacaaagtttcctattccccaagctggcgtgaatcgttgggaggtttattatctggcatggagtgggatctggtgtgtgagcagaaaggtctgaacagagctgcgtccactttcttcttcgccggtgtgctggtgggggctgtggcctttggatatctgtccgacaggtttgggcggcggcgtctgctgctggtagcctacgtgagtaccctggtgctgggcctggcatctgcagcctccgtcagctatgtaatgtttgccatcacccgcacccttactggctcagccctggctggttttaccatcatcgtgatgccactgg

SEQ ID NO: 303466 - DNA, 846 bp, Artificial Sequence
  derived and/or modified sequence
tgggagctctgctgaccaaggggctaggggctcacctcctatgccatcacccagctacctcatcatggtagccttggtccctgaacactaatgggctctccccaacaccacgttgggggaagaaaggcagagccgtggggagctggaggatgaacctgccacagtgccctgctctcagggctgggagtacgaccactcagaattctcctctaccattgcaactgagtcccaggtcggtatttacataatccatctggaggtggaatgtcggtggaggcagtctccctgggaggcagcaggtcgaggccttccttgggaagaagctgaggctgcaggactggggagggacaaagtttcctattccccaagctggcgtgaatcgttgggaggtttattatctggcatggagtgggatctggtgtgtgagcagaaaggtctgaacagagctgcgtccactttcttcttcgccggtgtgctggtgggggctgtggcctttggatatctgtccgacaggtttgggcggcggcgtctgctgctggtagcctacgtgagtaccctggtgctgggcctggcatctgcagcctccgtcagctatgtaatgtttgccatcacccgcacccttactggctcagccctggctggttttaccatcatcgtgatgccactgggtgaggcagagctggagtggctggatgtggagcaccgcaccgtggctggagtcctgagcagcaccttctggacagggggcgtgatgctgctggcactggttgggtacctgatacgggactggcgatggcttctgctagctgtcaccctgccttgtgccccaggcatcctcagcctctg

SEQ ID NO: 303467 - DNA, 837 bp, Artificial Sequence
  derived and/or modified sequence
atgggcttcgaggagctgctggagcaggtgggcggcttcggccccttccagctgagaaacgtggccctgctggccctgcccagagtgctgctgcccctgcacttcctgctgcccatcttcctggccgccgtgcccgcccacagatgcgccctgcccggcgcccccgccaacttcagccaccaggacgtgtggctggaggcccacctgcccagagagcccgacggcaccctgagcagctgcctgagattcgcctacccccaggccctgcccaacaccaccctgggcgaggagagacagagcagaggcgagctggaggacgagcccgccaccgtgccctgcagccagggctgggagtacgaccacagcgagttcagcagcaccatcgccaccgagagccaggtgggcatctacatcatccacctggaggtggagtgcagatggagacagagcccctgggaggccgccggcagaggcctgccctgggaggaggccgaggccgccggcctgggcagagacaaggtgagctacagccccagctggagagagagcctgggcggcctgctgagcggcatggagtgggacctggtgtgcgagcagaagggcctgaacagagccgccagcaccttcttcttcgccggcgtgctggtgggcgccgtggccttcggctacctgagcgacagattcggcagaagaagactgctgctggtggcctacgtgagcaccctggtgctgggcctggccagcgccgccagcgtgagctacgtgatgttcgccatcaccagaaccctgaccggcagcgccctggccggcttcaccatcatcgtgatgcccctgtag

SEQ ID NO: 303468 - DNA, 444 bp, Artificial Sequence
  derived and/or modified sequence
atggagtgggacctggtgtgcgagcagaagggcctgaacagagccgccagcaccttcttcttcgccggcgtgctggtgggcgccgtggccttcggctacctgagcgacagattcggcagaagaagactgctgctggtggcctacgtgagcaccctggtgctgggcctggccagcgccgccagcgtgagctacgtgatgttcgccatcaccagaaccctgaccggcagcgccctggccggcttcaccatcatcgtgatgcccctgggcgaggccgagctggagtggctggacgtggagcacagaaccgtggccggcgtgctgagcagcaccttctggaccggcggcgtgatgctgctggccctggtgggctacctgatcagagactggagatggctgctgctggccgtgaccctgccctgcgcccccggcatcctgagcctgtag

SEQ ID NO: 303469 - DNA, 636 bp, Artificial Sequence
  derived and/or modified sequence
atgctgcagccccatcttctgccttatcaagccgtgtctaaggttgcagccggtgaaagagtggttcggaggccaagctatcttgacttattcaggactcctcgattgcgccacatttctctctgctgtgtcgtggtgtggtttggagtcaatttcagctactatgggctgagcctagacgtgtctggcttaggcctcaacgtctaccagactcagctcctctttggggcagttgagctgcccagcaaacttctcgtgtacctgtccgtccgttacgctggacggaggctcacacaggccggcaccctgttgggaactgcactcgctttcgggactcgcttgctagtttcctctgacatgaaatcctggtcaaccgttctggctgtcatggggaaagcgtttagcgaagcagcatttaccactgcttatctgtttactagtgaactttaccccaccgtcttgaggcagaccggaatgggacttacagccctagtgggtcgcttaggcggcagtctggcccctcttgccgcactgctggacggagtgtggctgagcttgccgaagcttacatacggcgggattgctctactagcggctggaacagccctcttactcccagagaccaggcaggcctag

SEQ ID NO: 303470 - DNA, 636 bp, Artificial Sequence
  derived and/or modified sequence
atgctgcagccccacctgctgccctaccaggccgtgtccaaggtggccgccggggagcgggtggtgagaagacccagctacctggacctcttccgcaccccccggctgcggcacatcagcctgtgctgcgtggtggtgtggtttggagtgaacttctcctactacggcctgagcctggatgtgtctggcctgggcctgaatgtgtaccagacccagctgctgtttggagctgtggagctgcccagcaagctgctggtgtacctgtctgtgcgctatgccggccgccgcctgacccaggccggcaccctgctgggcacagccctggccttcggcacccggctgctggtgtccagtgacatgaagtcctggagcacagtgctggccgtgatgggcaaggccttcagcgaggccgccttcaccacagcctacctgttcaccagcgagctgtaccccaccgtgctgcggcagacaggcatgggcctgacagccctggtgggccgcctgggcggcagcctggcccccctggccgccctgctggatggagtgtggctgagcctgcccaagctgacctatggaggcatcgccctgctggccgccggcacagccctgctgctgcctgagacccggcaggcctag

SEQ ID NO: 303471 - DNA, 636 bp, Artificial Sequence
  derived and/or modified sequence
atgctgcagccccacctgctgccctaccaggccgtgagcaaggtggcagccggggagcgggtcgtgcgtaggccatcgtacctggatctgtttcggactccccgactccggcacatcagcttatgttgtgtcgttgtctggtttggtgtcaacttttcatattacggcttgagtctggatgtgagcggtttggggctgaacgtctatcagacacagctcctgttcggggccgtcgagttaccatctaaactcctggtctatctgagtgtcaggtacgcgggcaggcgacttacacaggccggcaccttgctgggcacagctctggcctttggtacccggctgttggtatcctctgatatgaagagttggtctacagtgctcgctgtcatgggcaaagcgttttcagaagctgcctttacaacggcttatctctttacaagtgagttatatccgacagtgctacgccaaacaggcatgggcttgacagcattagtggggagactgggaggcagtctcgccccactggcagccctgctggatggtgtttggttgagtctgcccaaactaacttacggaggcattgccctccttgccgcagggactgctctgttattacccgaaaccaggcaggcctag

SEQ ID NO: 303472 - DNA, 636 bp, Artificial Sequence
  derived and/or modified sequence
atgctgcagcctcacctcttaccataccaagccgtcagcaaagttgcagccggagaacgcgtggtccgtagacctagttaccttgatcttttccgtactccccgtctgcgccacatctctctgtgttgtgtggtcgtgtggttcggagtcaatttctcttactatggtctctctctggacgttagcggtctagggctgaatgtgtaccagacgcagctgttgttcggagctgtagagctgcctagcaaacttctcgtctacctgtccgtgagatatgcgggacggaggttgacccaggcgggaaccctgctgggaaccgctcttgccttcggcactaggttgctcgtcagttccgacatgaaatcttggagtacagtgttggccgtgatggggaaggccttcagcgaagccgcttttacaacagcgtacctcttcactagtgagctctacccaactgtgctccggcagacaggcatgggactgaccgctctcgttggaaggttaggaggctcccttgccccactcgcggctctcctcgatggagtgtggctgtccctgccgaagctgacctatgggggaattgctctgttggcagccggaaccgcattgctgctccccgagacccgtcaggcttag

SEQ ID NO: 303473 - DNA, 658 bp, Artificial Sequence
  derived and/or modified sequence
attgagatcacatagccaactctgatgttacaacctcacctccttccctaccaggctgtgagcaaagtggccgccggggaacgggtggtccgaagaccttcatacctagacctgttccgcacaccacggctccgacacatctcactgtgctgcgtggtggtgtggttcggagtgaacttctcctattacggcctgagtctggatgtgtcggggctggggctgaacgtgtaccagacacagctgttgttcggggctgtggaactgccctccaagctgctggtctacttgtcggtgcgctacgcaggacgccgcctcacgcaagctgggacactgctgggcacggccctggcgttcggcactagactgctagtgtcctccgatatgaagtcctggagcactgtcctggcagtgatggggaaagctttttctgaagctgccttcaccactgcctacctgttcacttcagagttgtaccctacggtgctcagacagacagggatggggctgactgcactggtgggccggctggggggctctttggccccactggcggccttgctggatggagtgtggctgtcactgcccaagcttacttatggggggatcgccctgctggctgccggcaccgccctcctgctgccagagacgaggcaggcac

SEQ ID NO: 303474 - DNA, 636 bp, Artificial Sequence
  derived and/or modified sequence
atgctgcagccccacctgctgccctaccaggccgtgagcaaggtggccgccggcgagagagtggtgagaagacccagctacctggacctgttcagaacccccagactgagacacatcagcctgtgctgcgtggtggtgtggttcggcgtgaacttcagctactacggcctgagcctggacgtgagcggcctgggcctgaacgtgtaccagacccagctgctgttcggcgccgtggagctgcccagcaagctgctggtgtacctgagcgtgagatacgccggcagaagactgacccaggccggcaccctgctgggcaccgccctggccttcggcaccagactgctggtgagcagcgacatgaagagctggagcaccgtgctggccgtgatgggcaaggccttcagcgaggccgccttcaccaccgcctacctgttcaccagcgagctgtaccccaccgtgctgagacagaccggcatgggcctgaccgccctggtgggcagactgggcggcagcctggcccccctggccgccctgctggacggcgtgtggctgagcctgcccaagctgacctacggcggcatcgccctgctggccgccggcaccgccctgctgctgcccgagaccagacaggcctag

SEQ ID NO: 303475 - protein, 248 aa, Artificial Sequence
  derived and/or modified sequence
MASGQFVNKLQEEVICPICLDILQKPVTIDCGHNFCLKCITQIGETSCGFFKCPLCKTSVRKNAIRFNSLLRNLVEKIQALQASEVQSKRKEATCPRHQEMFHYFCEDDGKFLCFVCRESKDHKSHNVSLIEEAAQNYQGQIQEQIQVLQQKEKETVQVKAQGVHRVDVFTDQVEHEKQRILTEFELLHQVLEEEKNFLLSRIYWLGHEGTEAGKHYVASTEPQLNDLKKLVDSLKTKQNMPPRQLLE

SEQ ID NO: 303476 - DNA, 747 bp, Artificial Sequence
  derived and/or modified sequence
atggccagcggccagttcgtgaacaagctgcaggaggaggtgatctgccccatctgcctggacatcctgcagaagcccgtgaccatcgactgcggccacaacttctgcctgaagtgcatcacccagatcggcgagaccagctgcggcttcttcaagtgccccctgtgcaagaccagcgtgagaaagaacgccatcagattcaacagcctgctgagaaacctggtggagaagatccaggccctgcaggccagcgaggtgcagagcaagagaaaggaggccacctgccccagacaccaggagatgttccactacttctgcgaggacgacggcaagttcctgtgcttcgtgtgcagagagagcaaggaccacaagagccacaacgtgagcctgatcgaggaggccgcccagaactaccagggccagatccaggagcagatccaggtgctgcagcagaaggagaaggagaccgtgcaggtgaaggcccagggcgtgcacagagtggacgtgttcaccgaccaggtggagcacgagaagcagagaatcctgaccgagttcgagctgctgcaccaggtgctggaggaggagaagaacttcctgctgagcagaatctactggctgggccacgagggcaccgaggccggcaagcactacgtggccagcaccgagccccagctgaacgacctgaagaagctggtggacagcctgaagaccaagcagaacatgccccccagacagctgctggagtag

SEQ ID NO: 303477 - DNA, 747 bp, Artificial Sequence
  derived and/or modified sequence
atggcctccgggcagttcgtgaacaagctgcaggaggaggttatttgccctatctgcctagacattctccagaaaccagtcactatcgattgcgggcataacttttgcttgaaatgtattacccagattggagagacatcatgtggctttttcaagtgccccctgtgtaagacctctgtccggaagaatgcgatccgctttaactctttactgcgcaacctggtggagaagatccaagccttacaggccagcgaggtccagtctaaaaggaaagaggccacctgtccacgtcaccaggagatgttccattacttttgtgaagacgacggcaagtttctctgtttcgtctgtcgggaatcaaaggatcacaagagtcacaatgtaagtctgattgaggaggccgcccagaattaccagggccagatccaggagcagatccaagtgctccagcaaaaggaaaaggaaaccgtccaggtgaaagcgcaaggtgtacaccgggtggatgtgtttactgaccaggtcgagcacgaaaagcagcggatccttacggagttcgaattattgcatcaggtgctggaggaagagaagaacttcctactgtcccgaatctattggctcggacacgaagggaccgaagctggaaaacattacgtagcatctacagagccacagttaaacgatctgaagaaattggtggattctttgaagaccaaacagaatatgcccccccgccagctccttgagtag

SEQ ID NO: 303478 - DNA, 747 bp, Artificial Sequence
  derived and/or modified sequence
atggccagcggccagtttgtgaacaagctgcaggaggaggtgatctgccccatctgcctggacatcctgcagaagcctgtgaccatcgactgtggccacaacttctgcctgaagtgcatcacccagattggagagaccagctgtggcttcttcaagtgccccctgtgcaagacctctgtgaggaagaatgccatccgcttcaacagcctgctgaggaacctggtggagaagatccaggccctgcaggccagcgaggtgcagagcaagaggaaggaggccacctgccccaggcaccaggagatgttccactacttctgtgaagatgatggcaagttcctgtgctttgtgtgccgggagagcaaggaccacaagagccacaacgtgtccctgattgaggaggccgcccagaactaccagggccagatccaggagcagatccaggtgctgcagcagaaggagaaggagaccgtgcaggtgaaggcccagggcgtgcaccgggtggatgtgttcacagaccaggtggagcacgagaagcagaggatcctgacagaatttgagctgctgcaccaggtgctggaggaggagaagaacttcctgctgagccgcatctactggctgggccacgagggcacagaagctgggaagcactacgtggccagcacagagccccagctgaatgacctgaagaagctggtggacagcctgaagaccaagcagaacatgccaccccggcagctgctggagtag

SEQ ID NO: 303479 - DNA, 747 bp, Artificial Sequence
  derived and/or modified sequence
atggccagcggccagttcgtgaacaagctgcaggaggaggtgatctgtcccatttgtctggatatcctccagaaaccggtgaccattgactgcggccataacttttgtctgaagtgcatcacccagatcggcgagacctcttgtggcttcttcaaatgtccactgtgtaagacttcagtgaggaagaacgccatcagattcaacagcctcttaagaaacttggttgagaagatccaagctctgcaagccagtgaggtccagtcaaagcgaaaagaggccacttgcccacggcaccaggagatgtttcactacttttgcgaggatgatgggaaattcttgtgtttcgtatgcagggaaagtaaagatcacaaatctcacaacgtgagcctgatcgaagaggccgcccagaactaccagggccagatccaggagcagatccaggtgctgcaacagaaagaaaaggaaacggtgcaggtgaaggcccagggggtacaccgggtggatgtcttcacggatcaggtggaacacgagaaacaaagaatcctgacagagttcgagctgctgcatcaagtcctcgaggaggagaagaacttcctcctctcccgtatatattggctcggccacgaagggacagaggccggaaaacactatgttgcatctactgagccacaactcaatgacctcaagaagctcgtcgacagcctgaaaaccaagcagaatatgcctcccaggcaacttctcgaatag

SEQ ID NO: 303480 - DNA, 747 bp, Artificial Sequence
  derived and/or modified sequence
atggcaagcgggcagttcgtcaacaaactgcaggaagaggtgatctgccccatctgcttggatatcctccaaaaaccggtcacaatcgattgtgggcataacttctgccttaagtgtatcacccagatcggagaaacctcttgcgggtttttcaagtgcccattgtgtaagacgagcgtacgtaagaatgctattaggtttaactcactgctccggaacctggtggagaaaatccaggcactgcaggcatccgaagtccagtccaaacgtaaggaagccacctgccctcgccaccaggagatgtttcattatttttgcgaagatgacggaaagttcttatgtttcgtgtgcagagaatctaaggaccacaagtcccacaacgtgtctcttattgaagaagcagctcagaactaccaaggtcagatacaggagcaaatccaggttcttcagcaaaaggagaaagagaccgtccaggtgaaagcccaaggcgttcatagagtggatgtttttactgaccaagtcgagcatgaaaaacagcgcattctgacggaattcgaactgctgcaccaggttctggaggaagaaaaaaactttctgctaagtcgtatctactggttaggacatgaagggacggaagccggaaagcattacgtcgccagcacagagccacaattgaacgacctgaagaagttggtcgattctctcaagactaaacagaacatgccacccaggcagctcttagaatag

SEQ ID NO: 303481 - DNA, 870 bp, Artificial Sequence
  derived and/or modified sequence
attacacattcaaagtatccatttgttctcaagaggtagcaagaaacagtatccacagtggactccggggctcctacagacttggcacagcttcctacagtcttgaaacagccctgttgttctgtcatggccagtgggcagtttgtgaacaaactgcaagaggaagtgatctgccccatctgcctggacattctgcagaaacctgtcaccatcgactgtgggcacaatttctgcctcaaatgcatcactcagattggggaaacatcatgtggatttttcaaatgtcccctctgcaaaacttccgtaaggaagaacgcaatcaggttcaactcgctgttgcggaatctggtggagaaaatccaagctctacaagcctctgaggtgcagtccaaaaggaaagaggctacatgcccgaggcaccaggagatgttccactatttctgcgaggatgatgggaagttcctctgttttgtgtgtcgtgaatccaaggaccacaaatcccataatgtcagcttgatcgaagaagctgcccagaattatcaggggcagattcaagagcagatccaagtcttgcagcaaaaggagaaggagacagtacaagtgaaggcacaaggtgtacacagggtcgatgtcttcacggaccaggtagaacatgagaagcaaaggatcctcacagaatttgaactcctgcatcaagtcctagaggaggagaagaatttcctgctatcacggatttactggctgggtcatgagggaacggaagcggggaaacactatgttgcctccactgagccacagttgaacgatctcaagaagctcgttgattccctgaagaccaagcagaacatgccacccaggcagctgctggag

SEQ ID NO: 303482 - DNA, 417 bp, Artificial Sequence
  derived and/or modified sequence
atgaaaatggccagcagcctcgcctttctgttactgaattttcatgtgagtctctttctggtccaactgcttaccccttgcagcgcgcagttcagtgtgcttgggccgtctggaccgatcctggctatggtcggcgaagatgctgacctgccttgccatctgtttcccacaatgagtgctgagacgatggaactgaggtgggtgtcttccagtctacggcaagttgtcaatgtctacgccgatggaaaagaggttgaggaccggcaaagcgccccctaccgcgggcgcaccagcatcctccgcgatggcatcacagccggaaaagctgcgctgcgcatccataacgtcacagcttccgattccgggaagtatctttgctatttccaggacggagacttttatgagaaggcactttag

SEQ ID NO: 303483 - DNA, 417 bp, Artificial Sequence
  derived and/or modified sequence
atgaagatggccagcagcctggccttcctgctgctgaacttccacgtgtccctcttcctggtgcagctgctgaccccctgcagcgcccagttctctgtgctgggccccagcggccccatcctggccatggtgggggaggatgctgacctgccctgccacctgttccccaccatgtctgctgagaccatggagctgcgctgggtgagcagcagcctgcggcaggtggtgaatgtgtatgcagatggcaaggaggtggaggaccggcagagcgccccctaccggggccgcaccagcatcctgagagatggcatcacagctgggaaggccgccctgcgcatccacaacgtgacagccagtgacagcggcaagtacctgtgctacttccaggatggagacttctatgagaaggccctgtag

SEQ ID NO: 303484 - DNA, 417 bp, Artificial Sequence
  derived and/or modified sequence
atgaagatggccagcagcctggccttcctgctgctgaacttccacgttagtctgttcctggtacagctgctcactccgtgtagcgcccagttctccgttctgggaccaagcggcccgatactagccatggtaggggaagacgcagacctgccttgtcacttattccctacaatgagtgccgaaacaatggagttacgatgggtttcctcatccttgcggcaggtggttaatgtctatgcagatgggaaggaggtagaggacagacagagcgctccttaccgaggcaggacaagcatactgcgggacggtatcactgcaggcaaagcggcactgagaatccataacgttactgcttctgatagcggaaagtacctctgctacttccaggacggtgatttttacgaaaaggctctgtag

SEQ ID NO: 303485 - DNA, 417 bp, Artificial Sequence
  derived and/or modified sequence
atgaagatggccagtagtcttgccttccttttgcttaactttcacgtttcactgtttctggtacagctattaacaccatgtagtgcacagttcagcgttttgggaccttctggcccaattctggccatggtcggggaagatgcagatctcccctgtcacctgtttcccactatgagcgccgaaacaatggaacttcgttgggtctctagtagtctgagacaggtagttaacgtttacgccgatggaaaggaagttgaagatcgacagagcgccccttatagggggcgaacctctatcctacgagatggcattaccgccggaaaagcagctctgaggattcacaatgtgacggcaagcgattctggcaagtacctatgctactttcaggatggcgacttctacgagaaggcactttag

SEQ ID NO: 303486 - DNA, 671 bp, Artificial Sequence
  derived and/or modified sequence
aatcaaaaaactaattcttccaaaaagagattgttattattcctcacaataaccagatagcctctgctttctttttcctttcttcggaatgagagactcaaccataatagaaagaatggagaactattaaccaccattcttcagtgggctgtgattttcagaggggaatactaagaaatattatttttacagatggttttccatactggaacccaaaggtaaagacactcaaggacagacatttttggcagagcatagatgaaaatggcaagttccctggctttccttctgctcaactttcatgtctccctcttcttggtccagctgctcactccttgctcagctcagttttctgtgcttggaccctctgggcccatcctggccatggtgggtgaagacgctgatctgccctgtcacctgttcccgaccatgagtgcagagaccatggagctgaggtgggtgagttccagcctaaggcaggtggtgaacgtgtatgcagatggaaaggaagtggaagacaggcagagtgcaccgtatcgagggagaacttcgattctgcgggatggcatcactgcagggaaggctgctctccgaatacacaacgtcacagcctctgacagtggaaagtacttgtgttatttccaagatggtgacttctacgaaaaagccct

SEQ ID NO: 303487 - DNA, 417 bp, Artificial Sequence
  derived and/or modified sequence
atgaagatggccagcagcctggccttcctgctgctgaacttccacgtgagcctgttcctggtgcagctgctgaccccctgcagcgcccagttcagcgtgctgggccccagcggccccatcctggccatggtgggcgaggacgccgacctgccctgccacctgttccccaccatgagcgccgagaccatggagctgagatgggtgagcagcagcctgagacaggtggtgaacgtgtacgccgacggcaaggaggtggaggacagacagagcgccccctacagaggcagaaccagcatcctgagagacggcatcaccgccggcaaggccgccctgagaatccacaacgtgaccgccagcgacagcggcaagtacctgtgctacttccaggacggcgacttctacgagaaggccctgtag

SEQ ID NO: 303488 - protein, 163 aa, Artificial Sequence
  derived and/or modified sequence
MTVKTLHGPAMVKYLLLSILGLAFLSEAAARKIPKVGHTFFQKPESCPPVPGGSMKLDIGIINENQRVSMSRNIESRSTSPWNYTVTWDPNRYPSEVVQAQCRNLGCINAQGKEDISMNSVPIQQETLVVRRKHQGCSVSFQLEKVLVTVGCTCVTPVIHHVQ

SEQ ID NO: 303489 - DNA, 492 bp, Artificial Sequence
  derived and/or modified sequence
atgaccgtgaagaccctgcacggccccgccatggtgaagtacctgctgctgagcatcctgggcctggccttcctgagcgaggccgccgccagaaagatccccaaggtgggccacaccttcttccagaagcccgagagctgcccccccgtgcccggcggcagcatgaagctggacatcggcatcatcaacgagaaccagagagtgagcatgagcagaaacatcgagagcagaagcaccagcccctggaactacaccgtgacctgggaccccaacagataccccagcgaggtggtgcaggcccagtgcagaaacctgggctgcatcaacgcccagggcaaggaggacatcagcatgaacagcgtgcccatccagcaggagaccctggtggtgagaagaaagcaccagggctgcagcgtgagcttccagctggagaaggtgctggtgaccgtgggctgcacctgcgtgacccccgtgatccaccacgtgcagtag

SEQ ID NO: 303490 - DNA, 492 bp, Artificial Sequence
  derived and/or modified sequence
atgacggtgaagacgttgcacggtcctgcgatggtgaaatacctgctgctgtctattttggggcttgcgtttctgtcagaggcagctgctagaaagattccaaaggtgggacacacgttcttccagaaacctgagtcttgtccccctgtacccggcggatctatgaagcttgacatcggaatcatcaatgaaaatcagcgcgtgtcgatgagccggaacatcgaatctagaagtacgtccccctggaactatactgtgacttgggatccaaatcggtaccctagcgaggtcgtccaggcacagtgcagaaatcttgggtgcatcaacgcccaaggaaaagaagacatttcaatgaattctgtccctatccagcaggagacactcgtagtgagaaggaagcaccagggctgcagtgtttcatttcaactggaaaaagttctcgtaactgtggggtgcacctgcgtgacgcccgtgatccaccacgtgcaatag
